United States Patent Application Publication US 2004/0214272 A1 - sequence listing, part 29

SEQ ID NO: 119134 - DNA, 305 bp, Zea mays
  Clone ID: MRT4577_40133C.1
gcatgagtaacaggattctcagggcgggagggggggtcgttgatccccgaaaattgagtactaccacaacttcagcattagccaggggctaggttacaatatgttccatactatggtatagacatataatttaggcacaaaagtttagtttcacgcttctttcgcgaattatttcagtggcaattcaaaacccagctctcattttgcacatccgcctcctggctaaatcggtaaaactttggatgaaggagaaacgctgcagagagggagaaaactttcgcagtgctcactacaacaaggcaggc

SEQ ID NO: 119135 - DNA, 284 bp, Zea mays
  Clone ID: MRT4577_40134C.1
acgcaggcggacgccccgagaaggaactagcgacagctcagaggcgccgagcacttatgccacagacagggcttgtaccaccatgaactaaagccctagaacctcctgagccacgagcacaggaacctgaaggtgtgcgacttccatctgagcgcgctcagggagtgccagaagcaggacggaatgctgcacaccagctgcgggagccccgcgtacgttgcgcctgagatcatcaacaggaagggctacgacagtgccaaggccgacatatggtcctgcggcgt

SEQ ID NO: 119136 - DNA, 939 bp, Zea mays
  Clone ID: MRT4577_40135C.1
cattgggacctcgagccggcgggacctctgtcaatccaacgagacggtcgccggaggccggataggcgaaactcacctgagtcacctcccctcgcctcttcttattacgatctcgcgaggcggcggcagccgtcgcgtagccgctttcacacattcggtctccttcgccgccgcctatactcctgcagaaatagccccagagcgaaggcggttgctgcttcttcgtgttccttcgcccgccgcacacgggatccatttgaccgatcgaccgacccacacacaccgagagccagccatggggcaaaaccacagcgcgcaggacgggagcggccacggccggcgctccttccagcagcagccgtcggcgcagtggggcgccggaggaggggggtactacgcccaggacccgaacgccggctactgcggcgcgccggtgccacaacagggaggagggtacgccgcgccttacctgcccccggcgtaccagtaccagcccaccgccgctgctccggcgccgcaagtcgcgaagccgcggcagctggaccggcggtactcgcggattgccgacgactatcactcggtggaccaggttactgatgctctagctcaagcaggacttgaatcatcaaatcttattgttggcgttgatttcacaaagagcaacgagtggacaggcaaattctctttccatggacgtagtctacatcacattagcaacacaccaaatccgtacgaacaagccatctcgattattgggcgaacactatcgaaatttgatgaagacaatttgattccatgtttcggatttggagatgcatcaacacatgatcaagacgtcttctgtttctctcctgacgagagacaatgcaatggatttgaagaagctcttgatcgatatagggaacttgtaccacatttgcgctagctggaccacatcat

SEQ ID NO: 119137 - DNA, 1911 bp, Zea mays
  Clone ID: MRT4577_40136C.1
atggcgacaattgcgcggagcagggagcagctagtaagcggggcctacacgtcatacacatggagcggaaaggggcgcagagagaacgcgcagcgcgcgatgcgaggggctaactgcccggtcccacatggcagtgacagagggaagcgcgagcgtgaggtggctaagaggctggaaagtggggcccaggctgttacacctaccttagcatcaggggaagataaatcagaaacccaagggaacctaaagcactttctaagaagggctcaaaacgaatttgagctcaaggtgaaaaagataagaagcgacaacgggtccgagttcaagaatttgcaagttgaggaatatcttgaggaggaaggcgtcaagcacgagttctccgctccctacacaccacagcaaaacggtgtagtagagaggaagaacatgacacttatcgacatggcgaggatgatgcttggagagttcaagatgcctgagcggttttggtcggaagctgtgaacacagcctgccacgccataaaccggctatatctgcatcgcctcctcaagaagacctcctatgaactccttaccggtaacaaacccaatgtctcttactttcgtgtatttgggagcaaatgctacattttgttgaagaaaggtagacattctaagtttgctcccaaagctgtagaagggtttttactagggtatgactcaaatacaaaggcgtatagggtcttcaacaaatcatcgggtttggttgaagtctctagcgacattgtatttgatgagactaatggctctccaagagagcaagttgatcttgatgacatagatgaagatgatgttccaacggccgcaatgcgcacgatggcgattggagatcctttcaggatagaagaggccttgcaggatccggactgggtgttggccatgcaggaagagctcaacaacttcaataggaatgaagtttggagcctggtgccacgtcccaagcaaaatcttgtgggaaccaagttgtttcaaatggatgtgaagagcgctttcctcaatgggccaatcaaggaggaggtatacgtggaacaaccccctggctttgaggatgacaggtaccccgaccatgtgttcaagctctctaaggcgctctatggacttaagcaagccctaagagcatggtatgaatgccttagagatttcttaattgctaatgctttcaaggttgggaaagtcgatcccactcttttcactaagacttgtgatggtgacctttttgtgtgccaaatttatgtcgatgacataatatttggttctactaaccaaaagtcttgtgaggagtttagcagggtgatgactcaaaaatttgagatgtcgatgatgggcgagttgaactacttcctagggttccaagtgaagcaactcaaggatggcaccttcatctcccaaacgaagtacacacaagatcttctcaaatggtttgggatgaaggacgccaagcccgcgaagacaccaatgggaaccgatggacatgtcgacctcaacaaaggaggtaagtccattgatcaaaaggtataccggtctatgataggttccttgttttatttatgtgctagtagaccggacattatgctaagtgtatgcttgtgtgctagatatcaatccgaccccaaggagtgtcaccttgtggccgttaagcaaattcttaggtatttagttgctacgccttgcttcgggatctggtattcaaaggggtctacctttgacttaattggatactcagactccgattatgctggatgcaaggttgataggaatagtaaatcagggacgtgccaattcctaggaaggtccctggtgtcttggagttctaagaaacaaacctctgttgccctatccaccactgaggttgagtatgttgccgcaggatag

SEQ ID NO: 119138 - DNA, 856 bp, Zea mays
  Clone ID: MRT4577_40137C.1
attctctcaccagagtacgaactacgaagacccgacaggccgacacccgctcgtctcccctggcacgtaggcgggggcggcgcaaccggaccccctccccctccagatcggtgctccgctgggagatctcctcgtgcaggcgccgaatctcttcgtcgtctcttccaagcacggttggcagcacaatagatctgtttgcaagcattctttggtactacttcaaggctttgatgattgctttacagcgacgatatggcctcccgcccaaagctgtctggtattcagaagcaggttttggcgctgtacaggggattccttcggacagcacgtcttaaggcccctgaagagcgccacaggatcgagtctgttgtcttggcagagttccgtgacaaggcaaggagggttgaccgtaggaactttatacatatcgagtacttgttgaggagtgggaagaagcagcttgagcagctcaagaatcctggtattactggacttgctacccttgtagtaaagaaatgaggtccattcattgccagaacaaagcatcatcatggtaccggtgtttctagtatgaacatttgggacctgccactgatggtgtccaaataaaacaaatatgaccatacattacagatttgatatccagggactttctggggttttctaattagcctattggaatcttaagataaatcttgtagcccctgtccagtgactcagagtaatattgttttactgtcttttggtgtaagcagaggttagcattaacaaaacaatgtgattggtctgaacttgtgcgatatgaagcaatggattcagttcaacttgaaaaaaaaaaaaaaaaaaaagcccctag

SEQ ID NO: 119139 - DNA, 928 bp, Zea mays
  Clone ID: MRT4577_40138C.1
ctcgaggccggccgggccgggaaaaactggaaaagctgcctccgccaaatcgccggaaaacgggacggtcgccggaggaagcatacccgaaactcccctcccctctccttacaataccgcgaggcggcggctgacgtcgcttagccgctttcccacaccttcgccgccgcctatactcctgcagaaatagccccagggagggcggttgctgctgcttcgtgttcggtgttccttcccccgccgcacgcgggatccatttgacggacggaccgaccgagcgacccacccgtccaccgagagccatggggcagaggcagagccacagcaagcgggacgggagcagccacgggcggcggtcgcgctcctttcagcagcagccgtcggcgcagtggggcgccggaggaggagggtactaccagcaggacccaagcaccggctactacggcgcgccggtgccacaacagggaggagggtaccaacaggacccaggcaccggctactacggcgcgccggtgccacagcagggaggagggtacgccgcgccgtaccgggacaagcccgccgccgtcgccgttgctgctccggcgccgcaggctgcgaagccgcggcagctggatcgccggtactcgcggatcgccgacgagtatcactcggtggaccaggttactgacgctctagctcaagcaggacttgaatcatcaaatcttattgttggcattgatttcacaaagagcaacgagtggacaggcaaattctctttccatggacgcagtctacatcacattagcaacacaccaaatccgtatgaacaagccatctcgattattgggcgaacactatcgaaattcgatgaagatatctgattccatgtttcggatttggagatgcatcacacatgatcaagatgtcttctgtttctctcctgacg

SEQ ID NO: 119140 - DNA, 1842 bp, Zea mays
  Clone ID: MRT4577_40139C.1
atggatcctaaggggaagggtatcgtgatcaacgataaagagaaggaatccttcgtcaacgagccgaaggacgacaagcctaccgactccggctcgggccatagacggaaagaagggaagaagaagaagatgaggcgcatcaaggagatcgtctactacgacgacagcgatgagtctacttcttcccaaaaggacgacgaccacaacgactacgagagaaggaaaccggtcaattcgaacttttcttttgactactctcgtattcctcaaagtacaaatgctcatttattatctattccacttggtaaacctcctcattttgatggagaggactacggattttggagccacaaaatgcgtagtcacttgttctctctccatcctagtatatgggagattgtagagagtggaatgcactttgatagttcggatagtcccatgttcattaatgagcaaattcataagaatgcacaagctactactgttcttctagcttcattgtgcagggatgagtaccacaaagtgagcggcttggataacgccaagcagatctgggacaccctcaagatttctcatgaggggaacgacgtcaccttgctcaccaagatggagttggtggagggcgagcttggacgattcgctatgataaggggcgaggagccgacacaaacatacaaccggctcaagacccttatcaacaaaataaggagctacggaagcacgcgatggacggaccacgacgtcgtccgactgatgctaaggtcctttaccgttcttgatcctcatttggtgaataatattcgtgagaatcccaggtacaccaaaatgtcgcccaaagaagtccttggaaaattcgtaagcgggcgaatgatgatcaaggaggcaaggtatatggacgatgcattgaatggtccaatcaacgagcctcaaccccttgctctcaaggcaacaagaagcaaggaggcgctacctagcaaggtggcacaaattgaggcggccggacttaatgatgaagagatggccctcatcatcaagagattcaagacgacgcttaagggtcgcaagggacagccaagcaagaccaaagccaaggggaagcgctcatgcttcaaatgcggactcgccgctaccgccttcaacaagtcatccctcttccccaacgagcgtcacacatgcctcatggcaagggagaagaagggcctagatagaaccaaggtagataaaattaatgaattgattgatgccttgaatgataagaataggcttttagaaaaacaagaggacttattgtatgaagaacatgacaaatttgtagaagcacaaaaatctcatgccttagaatttaagagaaatgaaatgctttcttgtgaattatcttcttgccatgagacgatttctagcttaagaagcattaatgataatttgaatgctaagttagaaatagctagtaaatcaacaacttgtgtagaaaatgttgttatttacaatagatgtaaagattttgatattgatgcttgtagtgaacacatagcttctattgcaaagttaaatgatgaaatggctagtcttaatgcccaacttaaggctagcaaaagtgattttgataaactaaaatttgctagggatgcctacacgattggtagacacccctcaattaaggatgggcttggcttcaagagggaagccaagaacttaacaagccataaggctcccatctccgccaaggagaaagggaaggcccctatggcaattcttcctatatgcatagtagagatatgcctaggaaaaatattcatcatgtgcctagaaagaatgttgctcatgttcctaggaaagttatga

SEQ ID NO: 119141 - DNA, 417 bp, Zea mays
  Clone ID: MRT4577_4013C.1
gaacctaatgcaaagttatttttaaagaagaaaacagcgaatgctcatataacccacaattcacggattagttacaggcattcatgctcacacatcggcactaaaaatggagacatggaacacacatcactgacacaggcggacgaacaaaaacagacctcgcttattgcatccagcgatcgaaagggcatccgttcaaagcacatggcttcatcagggcagccaccttttggggggacagactttgcattaaaccagacaaactagccttgacatgacaagtacaccccccaccacaaaagcctagggcttaccaaacaggctgaaagtgacagacacaccgctcaagtttaagacgctgactaaaactgcatgaacgtacttacaatcgggcaggcgagcctagcacacgtgtag

SEQ ID NO: 119142 - DNA, 420 bp, Zea mays
  Clone ID: MRT4577_40140C.1
gcgtggttctcccgtgtcctctctctagtggcgacgagtgggcgaacgccgccaccgggttacgccagtcgtcaggcgctctgcgctcaggctttcatcttcgggtgcccttcaccggcgaccagcacccaacagttacatgtgcatcaggctttgatgattgctgtacaaggatgatatggcctcccgcccaaagctgtctggtattcagaagcaggttttggcgctgtacaggggattccttcggacagcacgccttaaggcccctgaagaacgccgcaggatcgagtctgttgtctttgcagagttccgtgacaacgcaaggagtgttgaccgtagaaactttgtacatatagagtacttgttgaggagagggaagaagcagcttgagcagctcaagaatcctgatattactggact

SEQ ID NO: 119143 - DNA, 268 bp, Zea mays
  Clone ID: MRT4577_40141C.1
ctgacgcgtgggcggacgcgtgggcttgtattgacacacgtgaacactactatcgcctggcctggcgataacactattggcgtgggcccccttcttctcccactcggaggcggacggtcgcgcggaaaacaaaacgcacctcaaccaccgaacatttaaagcaactacaacgacagacgggtaaccgacagactcacgtggtaccgacaggctaactgacaccacgctcctgacaacgtgcgggtacacgggctaaataacgaaaaac

SEQ ID NO: 119144 - DNA, 576 bp, Zea mays
  Clone ID: MRT4577_40142C.1
atggctagtagtgtgcaaaagaaccatgcctttatgtaccatgataggagacaatttagaaatgcttataggagatgtaacgcatatgatgttgttgattctcatgacatgtttgcttctagttcttcttatgtgcatgatagaaatgtcggtaggagaaatgttgttcataatatgcctaggagaaatgttgttaatgttcctaggaaagtttatgcatccgggggttcaagctggattatcgacagcggatgcacaaaccatatgacgggggagaagaagatgttcacctcctacgtcaagaataaggattcccaagtttcaattatattcggtgatgggaatcaaggcaaggtaaaagggttagttgagtctcttggttacaatttgctatttgttagtcaactatgcaatatgggatataattgtctttttacaaatgtagatgtgtctgtctttagaagaagtgatggttcactagcctttaagggtgtattagacggcaagctttacttagttgattttgcaaaagaagaggataagtctgaaacccaagggaccctcaagcgcttctga

SEQ ID NO: 119145 - DNA, 846 bp, Zea mays
  Clone ID: MRT4577_40143C.1
tcgagccggccgggatggtcggactgcgtggttctcccgtgccctctctctagtggcgacgagtgggcgaacgccgccaccgccttacgccagtcgtcaggcgctctgcgctcaggttttcatcttcgggtgcccttcaccggcgaccagcacccaacaggctttgatgattgctgtacaaggatgatatggcctcccgcccaaagctgtctggtattcagaagcaggttttggcgctgtacaggggattccttcggacagcacgccttaaggcccctgaagaacgccgcaggatcgagtctgttgtctttgcagagttccgtgacaacgcaaggagtgttgaccgtaggaactttgtacacatagagtacttgttgaggagagggaagaagcagcttgagcagctcaagaatcctgatattactggactcgctacccttgtagtaaagaaatgaggtccattcattgccagaacaaagtatcatcatgataccggtgtttctaatgtgaagatttggaacctgccactgatggtgtccaaataaaataaatatgaccacagattacagatttgatatccagggactttctaatcagcctattagaatctgaagataaatcttgtagcacctgtccggtgacccatagtaatattattttactcttgctgtaagcagaggttaacactaaaaaaagtattgtgattggtctgaactttttgtgcggtataaagcatgtgattcagctcaacttgacttttccaactttaccgagcatatacaattgtgattaatatagaggctcttaaggtgtttaaataaccaatccaagcatgacaagcaaacc

SEQ ID NO: 119146 - DNA, 816 bp, Zea mays
  Clone ID: MRT4577_40144C.1
cattgggtacctcgaggccggccgggattctctcaccagagtacgaactacgaagacccgacaggccgacacccgctcgtctcccctcgcacgtaggcggcgcaaccggaccccctccccctccagatcggtgctccgctgggagatctcctcgtgcaggcgccgaatctcttcgtcgtctcttccaagcacggttggcagcacaatagatctgtttgcaagcattctttggtactacttcaagcgccgatatggcctcccgcccaaagctgtctggtattcagaagcaggttttggcgctgtacaggggattccttcgaacagcacgtcttaaggcccctgaagagcgccacaggatcgagtccgttgtcttggcagagttccgtgacaaggcaaagagtgttgaccgtaggaactttatacatatcgagtacttgttgaggagtgggaagaagcagcttgagcagctcaagaatcctgatattactggacttgctacccttgtagtaaagaaatgaggtccattcattgccagaacaaagcatcatcatggtaccggtgtttctagtatgaacatttgggacctgccactgatggtgtccaaataaaacaaatatgaccatacattacagattttgatatccagggactttctggggttttctaattagcctattggaatcttaagataaatcttgtagcccctgtccagtgactcagagtaatattgttttactgtcttttggtgtaagcagaggttagcattaacaaaacaatgtgattggtctgaacttgtgcgatatgaagcaatggatt

SEQ ID NO: 119147 - DNA, 580 bp, Zea mays
  Clone ID: MRT4577_40145C.1
ccacactagaccgcacttcccctcacctctcatcagctcaccctcaccagctctcccgtgtcggcgtgcaacagaacagcctcctcccagcctcggtcaaggagtttcatttcctcctcccaggctcccacagatatccggacatggacgacgactccaggtctcaggcggcggcggcggctgacctgtcgctgtccctggcgccgacgccagcgcctcccgcgccgcctccgccgggacccgggggcggaggcggcgtggcgacggcgtgcgtggacggcaaggacgtgcgcctgttcccctgcctcttctgcaacaagaagttcctcaagtcgcaggcgctggggggccaccagaacgcgcacaagaaggagcggagcatcggctggaacccctacttctacatgaccccgcacccgcagcagcccaatgcggcgccgccgagccccacagccccgcccgcctacgccgccgccgccgactacggcgtcgcgggcgcgggcgcgtccgcgggggtcttgggcggcctcctccccgcgtcgtcgtacgcggggttcgtgtacgcccccgccgtgccggt

SEQ ID NO: 119148 - DNA, 237 bp, Zea mays
  Clone ID: MRT4577_40146C.1
ggtccgactcccggtcgcccacgcgtccgtgagacaagaggttgctgtgaatgatttaccagcgagcgccgtttgaagccatcagcacttatggacctgttgctacatacatgtgagggcctgggaggtaggatttgtggctaggaaagggggaggatgttgacaaaaacgggagaccatttccgggggggagagtaccgtattatttttttggtcgtgttctggtagtatgaaccc

SEQ ID NO: 119149 - DNA, 821 bp, Zea mays
  unsure (1)..(821): unsure at all n locations
  Clone ID: MRT4577_40147C.1
gtgtcctctctctctagtgtcgacgagtgggcgaacgccgccaccgccttacgccagtcgccaggcgctcaggttttcatcttcgggcccttcaccgggcgaccagcacccaacaggctttgatgattgctgtacaaggatgatatggcctcccgcccaaagctgtctggtattcagaagcaggttttggcgctgtacaggggattccttcggacagcacgccttaaggcccctgaagaacgccgcaggatcgagtctgttgtctttgcagagttccgtgacaacgcaaggagtgttgaccgtaggaactttgtacacatagagtacttgttgaggagagggaagaagcagcttgagcagctcaagaatcctgatattactggactcgctacccttgtagtaaagaaatgagcaacagttgtcgaaatttacaggtccattcattgccagaacaaagtatcatcatgataccggtgtttctaatgtgaagatttggaacctgccactgatggtgtccaaataaaataaatatgaccacagattacagatttgatatccagggactttctaatcagcctattagaatctgaagataaatcttgtagcacctgtccggtgacccatagtaatattattttactcttgctgtaagcagaggttaacactaaaaaaagtattgtgattggtctgaactttttgtgcggtataaagcatgtgattcagctcaacttgacttttccaactttaccgagcatatacaattgtgattaatatagagngctcttaaggtgtttaacaaaaaaaaaaaaaaaaaagcggcc

SEQ ID NO: 119150 - DNA, 621 bp, Zea mays
  Clone ID: MRT4577_40148C.1
cctgccggggaaattgtcgctcaactcgcgtgtcgctcgcataattctattctcatgccgctctcttctccctcgtctcgttcagcaaccgctcccgtggacacgacaaggcagggccgggcctctgcgcacggcatccggccggctacagcccctagccgtggccatggcggcggccagccccgcccccagtcgacctcggctctccggtgagctgccctccatgtcctggccgctcagtcgttcgccgcgccgatcgcccaggaagatctgcgatgctctcgtcgttgccgagactgcgatccatttccgagcttcgaggaatcgacggtcaagcttcggtgaccaaatgacccagctctttgagttctacaaggctgaagattctgagcatctgtttggtgaaggttgcctttggtgcaatctatgctcaggtaaagaagaaggcgtcgaggtggatctccaggagtttcaggacttcgacgagttcgaggattaggctagcgacctcccccagtcagctgcctgtggtggggttgggttcgttggctacgtttcgattctgtgtactttgatttatgtaatcgttgtgtacgcaaaaaaaaaaaaaaaaaagcggcc

SEQ ID NO: 119151 - DNA, 359 bp, Zea mays
  Clone ID: MRT4577_40149C.1
cttctttgctgtcagtcactaccattttcagatgctttacgatcatgcaagtatattccatatccgagtatgatatatcgatatagcaattagcacatttgaatgttacaactataagaccttttagaattactccaattaggacacagagtatttgcatgaaattggaattcaagatttgagaaactcaaacatcacgcaatcagttcaggacaatgtgctgcagtagacttgcttggctgcaatggagtatgcatgaaatgttcataatttaagcatgggaagactattttagtgtgggatggcatgatcaaagctgtttttttaaggaatggaatgttctgtcctatgacactgca

SEQ ID NO: 119152 - DNA, 632 bp, Zea mays
  Clone ID: MRT4577_4014C.1
tcgacccactgcgtccgcttgtgagcctgctgccgtcttcttccgccgccggcggcgtcgtcttcgtccgtagatcagagagcggggaggaagaaaagcgatcgatggcgtccaactacgtggacacgacgggcgaggagggacggttccacggccctcacagccacagcaccatcacgacccccacgggcgggggggggggggcggcggtctcgccgggcgacttgcggtgcagataatactacaactgctgcgcctgccgcagccactgcgggtgcgaccgctgcagctgctggtcgcatccctcgacgaccatggatctgattgttatctatctagcttgtggtggtggctgaacagtagtcagctaggccgagctggctgtcatacataggtattgtgtggtgtgtgtgagagagagagaaacagagttcttcagtttgctatctctctctgcatgtttggcgtcagtctttgtgctcatgtacgtacgtgtgtctacctgcctgttggttgatccgcttgcatctgctgttaccatattttgattgggtcccgatgatctgatttgctgctctcttgtgctaaaaccggacttcttattataaaaaaaaaataaaaacagggcggcc

SEQ ID NO: 119153 - DNA, 986 bp, Zea mays
  Clone ID: MRT4577_40150C.1
aaaacttgtagataatctttttatcttacttgtgtaaaaatttcatgaccataggtgtagtagtttaggagttatgatttttccaagtccagtctcagaatctgtccaaattctgtacaggtttcgaaaattggattgcttggctaagctaaactgagaatcagcccttagtaattataggagaattttagtacttttcttaagctttccaacaaattttggagcaccctttttggtggtctagatatcaagttacagctgtttgaactatagagtctgaatttgtccaaatttggacagcgaagtctgtttgtagtaactgactttgatatgtattgaattaacctgagatgtttataaatgaattgtagacaattctattaactttctaaaaagtctaggatcacctgatttggatttcggaaactccagttctggacttttgaagtaagtagtcgaattctgtccaaatctggacataatttatgtttagcgctgtttgacctttgtaaaggtcgaattttgttgtgatggtaatacaaaagttatagaggactttataagctttccaaaaagttctagtttactattattggatacatattttatgaattgtgagctaaacagatagttgttgacttgctgttctgctgtccaaacacatgtctactgtctgaaaatagctcattttgtagttacatttgcatcaggctttgatgattgctgtacaaggatgatatggcctcccgcccaaagctgtctggtattcagaagcaggttttggcgctgtacaggggattcccttcggacagcacgccttaaggcccctgaagaacgccgcaggatcgagtctgttatcttggcagagttccgtgacaacgcaaggagtgttgaccgtaggaactttgtacacatagagtacttgttgaggagagggaagaagcagcttgagcagctcaagaatcctgatattactggactcgcta

SEQ ID NO: 119154 - DNA, 1369 bp, Zea mays
  Clone ID: MRT4577_40151C.1
tgctcatctccctctgctcggcacctagccccagctcgcccgagctccctgcgccgacctcatcttccccatggcgcgtcaccttctagtcctctccttcccacggcacagcagcgcccctgcagctccccttctccagatccatggcacccaacaccttgagcgcccctgccgctgctcctccaccgggatctcctcctccactaggcgtccaggcttgtcccaccgtggctgcccctcctccatctcctccctccccaccaggttacccagattccatggccgccgccgccccagccatctccctggtggccgacctcgcccctgccccagccacagctcccccttcggccctgctgctgcaagcactcagcctctcccatggcacacgccccatctgcaacaccgtcgacccccgacgaggtcctttctcgccttgtcgttttagtactcggcgtcgattaagtagatgctaaccgtgtgtatattcgtgtgttcttgtgaggagaaatcccatgatttgggggaagacgaagtccaagcacaacccccgccaatcgctcgatgaaaaatctaaaccaaaaccctcagcgttttcaagggttccggagggattttatgttggtaagttacatttgcattaggctttgatgattgctgtacaaggatgatatggcctcccgcccaaagctgtctggtattcagaagcaggttttggcgctgtataggggattccttcggacagcacgccttaaggcccctgaagaacgccgcaggatcgagtctgttatcttggcagagttccgtgacaacgcaaggagtgttgaccttaggaactttgtacacatagagtacttgttgaggagagggaagaagcatcttgagcagctcaagaatcctgatattactggactcgctacccttgtagtaaagaaatgagcaagagaagaaggaagactagtcagacaaaatagaagacgagaagaactgatgtagccatgttcatgcttccatgtaatagttcattattccatacatatttctgtctatccagaatctactattgaaatacatatctagcatagcttgctcagctcctatctgttgtttcaacgttgatttaaaagaagagctggtagttgtgggcttttgaacaatagctggagtgatatgaaatattagtgatgtagttgtgggcttttaaactgcttcaagctggagtgatgtcgctgtggtgcttttgtgactgatcatctctagagcttttgtaatgatctagctagctatctgtaaatgatctagttgtgaatgatattataattgtgatgcttttgtgaatatataatcgcggtgcctttgtgtttatgtg

SEQ ID NO: 119155 - DNA, 305 bp, Zea mays
  Clone ID: MRT4577_40152C.1
gctcgcacgcctgcacgtgccgggcctgaattatattgccggctcggcgagtttactaggcggcggccgccctttttcaaactgttcagtgctgttagaccttgctcaggcctctgatagggcacgaaaataaagccagccaaatgtcatgtgtgtctacagcccaagagggcgtttacacttatttttaaactgtggggtcccaatgctcataatgggggaactctttgagccctacacatcgagcactgaggaaagaggtgcccataccctgtctgaaactacactagcgcataacagttgga

SEQ ID NO: 119156 - DNA, 615 bp, Zea mays
  Clone ID: MRT4577_40153C.1
ccggccgggacacaagagcgccctacatgtgctccttcatgttgtcactcggaccacgtgctctaccccacacacatgagacagcacatgacgacaagattgctgctgacctgtgggagagggtgatcttggcagccatcccggatctgtacctccacgataagacaatgcttccacctcaacccgcactgccgatgtgatcgtcggcgggagctcacttgaacacctgcctcgctgtgcggaacagcatcatcaacctgtaccccgagtgctccagcccacggaaacccggccttcactacacccgaccctgccaacggataccccagtggcgcctatgatcatatgtctgttgccaatatgatcgccatggccatgctccacccgcgcgccatcacccaggcttcctacgcgatcggcgtggccgagcatacaatacacgcatgcgtaatccatcggtaccggatcgatactggatgaatggatactgatgatccttgacgacaactatctacatgcggtactgcatgatcgtgcatcaacttcttgctgattaatggatgagactgagcgctaccccaagacggcggcctacgggcactcctcgaggtacga

SEQ ID NO: 119157 - DNA, 302 bp, Zea mays
  Clone ID: MRT4577_40154C.1
tgtgagggcttaagagcagtcctcgacgagatgttcactttagctgactcatgtgctgatgaacattttgaaactaaatctgcaacgtctgtttgggatcgtcaatgagaattttcaaatagccacaatagcaattatggcttccgaacagcctgaagtcttttaatatgccactgagctagaccattacacctggcaattaaacttgctggtctaagagtctcaagcccaaagacaccacacgaccatcggatgcaagaccatggctttaacatatactattttatccaagctacatgcaa

SEQ ID NO: 119158 - DNA, 467 bp, Zea mays
  Clone ID: MRT4577_40155C.1
ctttttttttttttttttttttttttttttttttttttttttttttttttttttttttttttttttttttttttttttttgggagcaaaagcgggaaaaacaggccaaaaaatcaaaaaaccaccccattaggaacaaaaggggcccaatttaaccaaaacccccggccaaaattaagttctctaaagggacaaaccccccccccgaaacaaaaaaaaaaaaaacgccaacaaaaattggaccggcaggaccagtccaccacaacaataggaccccccggggcctaaaagattaccaaaccctagggggggaaggggggaacccagggggggggaccccactagggaaaacaggggggccaccaccagcgggacgggaaaacgagggggccaccccaagggcggaacaaataactcagggccaccgggacttaactaaaaccaggcgggcagtttatgaccccaggg

SEQ ID NO: 119159 - DNA, 195 bp, Zea mays
  Clone ID: MRT4577_40156C.1
tttggggaaaacccgggtttcccttaataaggataagagaggactttttttgtggccttgcttgtcacgattccaataaacaaatggagaggggaacccttgctgcaaatacgttggaagaggaaacaaaacataccctctgttcggtacaggagtccacttaggtgtggcctcagataacagagcacatgggga

SEQ ID NO: 119160 - DNA, 217 bp, Zea mays
  Clone ID: MRT4577_40157C.1
gtgctgaggttcgcggtggggtccacgctacaggaggagaggcacgtgcggaacgcgtgggatctcattaagatgaccacaaccgagatcataaacggagaggccggtggattaagcctgtttgttaaccttggtcttgttttctaggatttagagtgtctctagcaaaagactgtaaaagggttctagcctatatttagagaagattattttcttc

SEQ ID NO: 119161 - DNA, 198 bp, Zea mays
  Clone ID: MRT4577_40158C.1
cccgagcatatcacagtgacagacacgattgtgatctcctgaatcgttgtcctcctcgctaccctcctatgcgctgccgccgcagtcgcgtcgtcctgggatgacgacaaccaccaccaccacgggggccacaagtccgggcaatgcgtgcggctgtgcgaggacctgctctggcatcagcgccccctggtgccggag

SEQ ID NO: 119162 - DNA, 547 bp, Zea mays
  Clone ID: MRT4577_40159C.1
aaaaaaaaaaaaaaaacaaagaaaaaacaaagaacaaaaaaaaaaaaaaaaaaaaaaatgttttgatcttaaggccaactttgtgcctaagccccccttggggccaatttctgtggatttccttgacattggcgcctgtttggccttgttttctagggggccccatttcccccttttggggggttgttttccatttcgtgggccaacgttttccatggtggggcctgggaaacccctggcttaccccactttaagcgctttgccctatatccccttttcgccatttggcttattcccgaaggggccgcccccgttttcctttccaaacgttggcccgccctgggtggcaactggcccccccttgtaaagggcctttaaccccgggggttttggcggttccccccagcgggacctttaaatttgtcggccccttagttcccgttctttccgtttttttcctttcctttttgcccactttccccggttttccctaaaaggctttaattcgggggcccccttaagggttgcttttaagggctttacggcc

SEQ ID NO: 119163 - DNA, 747 bp, Zea mays
  unsure (1)..(747): unsure at all n locations
  Clone ID: MRT4577_4015C.1
gtcatcagttccccatcgaaacaaatcagtccccccaccaaaagctagggttagggttagcgaggcggcggcggcggctgctttattcccgatgccgatcgccatggacaccggaggcgcgccggagccggatgaggagtccgtcgtcttccccagatgggcgatgctggatcgcagaggccgcacccgctgccacaacggcctaaacgctgcccgtgtggctgccaacaagaacaagaccgccgctccagtcgacatggacggcggcccctcctgctacgtgtccttcaccctcgcggctcctcaaaaaaggatctcctgcctcaacctccacttgccggaggaacctccacttaccccagccaccccgcccgcctatgccttcgtccgggcaacggacaagaacctcgtccttttcgacatcaccaacccgagccggtcttgctactgggaccccccgtcagatctgttcgtctacacggccggcggtccttccccctcggtgcagccgctccctatgtacaccaaggagagggagaggccgttcctgatggacaacctcaccacaggcatcctgcggctcgcggaggaccgctacatcgttgctgacctcaatgtctacccaaaagaaagggcaatggcatgcgtgccgaactctgcgtcttcaactccgagactgggaagtgggaaatcatccgcaaattggaccaggcaatggcggacagntccccgaactctggtcaaccg

SEQ ID NO: 119164 - DNA, 637 bp, Zea mays
  Clone ID: MRT4577_40160C.1
catcactgtagtgtagacgtgtagtactgtagttcagcggcagcaaagctcgctccaatttcgagctcgccaatggccgctgggccagtgaccgcgacctcctccatggcggtcccctccgcgcgccgtaaccgggcgctcctaccgacagtctccgtggctcgcgagccggcgcgcgcgtgggcagcggctggcgcggagggaagggcgcggagagggaaggaggctgaggtggaggacgagaaggaagcggagaggcggcggaaggaggaggtgaaccggaagatcgcgtcccggaaagcgctgtccgtcatcctccggcgcgaggccaccaaagcggttctcgacaagcgtaagcccggcaagggcacgcgccgcctcctccccggcaccgtcctcgaggccctgcacgaccgcatcgcggccctcagatgggactccgccctcaaggtgttcgagctaatgcgggaccaggtgtggtacaagcctcacataggcatatacatcaagctcataaccatgctcggcaagtgcaagcagccggagaaggcgcaccagctcttccaggcgatgattgacgagggttgcgcgcccaacctccagtcctacaccgctctagtctccacgtatagcagga

SEQ ID NO: 119165 - DNA, 364 bp, Zea mays
  unsure (1)..(364): unsure at all n locations
  Clone ID: MRT4577_40161C.1
ctatcgctctctcaacggccaacgacttcatgtgtgagtcgtaaattgccacaacttctcctattcattttntggagaagccaacaaaaggccatttgcgttattcgtctaggccttcataacaccggcgatttcgtgcgcgaaatcacagggttttgccttgctttgtgtctcgcggagcgaggcacgaggaggccagcggccgccgcactgccggcaggcagcgcacggaatttcgagaatcgaaaattccatcagtgcgctattgccgtcccccgttcagaacgcagttggcgcttaggatttggcgctagaacatttcgacaaaaacctaggggatgcgaaaaaataaaattaaccaaag

SEQ ID NO: 119166 - DNA, 291 bp, Zea mays
  Clone ID: MRT4577_40162C.1
ggggcacgggcataataagcgcgcacttgcataatactccacacacatttacaaagacaccacctgctacttatctacatggctgaacaggttaccactgaattgatcgtcttaataattaattgtaggaggacattaactgatcgccggtagttggtctgacagactatactagctgaccttgattgctacttcttgctactgggagcccttgcgaaatcggtccatccaaccttttacaacaaaatactcctctagctggtgggccagtcaatcacttacttccttttt

SEQ ID NO: 119167 - DNA, 2007 bp, Zea mays
  Clone ID: MRT4577_40163C.1
atggatcctaaggggaagggaatcgtgatcaacgataaggagaaggagtccttcgtcaacgagcccaaagatgacaagcctaccgactccggctcgggccatagacggaaggaagggaagaagaagaagacaaggcgcatcaaggagatcgtctactacgacgacagcgacggatcttcctcttcccaaaaggacgacgacaacgactacaggaagacgattcataaaaatgcacaagctactactgtgttgctagcctctttgtgcagggacgagtacaataagttggtggagggcgagcttggaagatttgcgatgataaggggcgaggagccaacccaaacatacaaccggctcaagacccttatcaacaaaataaggagctatggaagcacacgatggacggaccatgacgtcgtccgactattactaaggtcctttaccattcttgatcctcatttggtgaataatattcgtgagaatcccaggtacaccaaaatgtcgcccgaagaagttcttgggaagttcgtaagcgggcgaatgatgatcaaggaggcaagatacgtggacgacgcgttgaacggtcctattcatgagcctcaacccattgctctcaaggcaacgaggagcaaggaggcgctaccaagcaaggtggcgcaagttgaggcggccgggctaaataatgaggagatggccctcatcattaagcgcttcaagacggcgcttaaaggtcgcaagggacagccaagcaagaccaaaacaaaggagaagcgctcgtgcttcaaatgtggtaagattggtcatttcattgctaactgtcccgataatgaaagtgaccaggaaaaaggggacaaaagggagaagaagaagcattacaagaaggccaagggcgaagcacatatcggaaaggagtgggattcggattgctcctcctccgactccgacaatgaaggacttgccgccaccgccttcaacaaatcaaccctcttccccaacgagcgtcacacatgccttatggcaagagagaagaaggtgagtactcgagacaccacttatgtctcttctagtgatgatgaatctagcgatgaggaaatagattactctagcttgttcaagggattggatagaaataagattgataaaatcaatgaattgattgatgccttgaatgagaaggatagactcttagagaaacaagaggatttattgtatgaagaacatgataaatttatagaagcacaaaaatcctatgctttagaagttaaaagaaatgaaatgctttcttttgaactatctacttgtcatgaaaccatttctactttaaaaggtgtcaacaatgatttaaatgctaaattagaagtagcaaataaatccaattcttgtgtagaacatgttgtaatttgtactaggtgtaaagattttgacattgatgcttgtagtgaacacctagtttcaatttccaagcttaatgatgaattggctagtcttaatgctcaacttaagactagcaagaatgatttggataaactaaaatttgcaagggatgcctacacgatcggtagacacccctcaattaaggatggacttggcttcaagagagaagccaagaacttaacaagccataaggctcccattcccgccaaggagaaagggaaggcccctatggctagtagtgtgcaaaagaaccatgcgtttatgtaccatgataagagacaaactagaaatgcttataggagttacaatgcttatgatgattttgattctcatgacatgtttgtttctagttcttcccatatgcatggtagaaatatgtctaggagaaatgctattcatcattgtgacaccccagtgtcacctagggtttctcttaaacagccaaaccaaaaaccatcattttatgtgaaccaaagtaagcatgagcatcaaaacaatttaagtgagaaagaattcaccaagtatatacttaaaagtgtcatgatcaaaacaattgagacttttgaaagataa

SEQ ID NO: 119168 - DNA, 2433 bp, Zea mays
  Clone ID: MRT4577_40164C.1
atggcgcttcctgttgacgtggctggcctgcgccctaggtcgggcgacgtggaggctcctctgaagccgaggtcgagtctgtcttccatggccgagcccgagcccgagcccctgggtcgggcgaggcggaggcgcaaagattttaatgttgatgcttgtagtgaacacctagcttgcatttctaaactaaatgatgaagtggctagtcttaatgctcaacttaagactagcaaaaatgattttgataaactaaaatttgcaagggatgcctacacggttggtagacacccctcaattaaggatgggcttggcttcaaaagggaagccaagaacatgacaagtcataagacttccatctccgccaaggagaaagggaaggcccctatggctagtagtgcccaaaagaaccatgctttcatgtatcatgataggagacattctaggaatgtttatagaagttatgatgcttttgattctcatgccatgattgcttctagttcctctattatgcatgatagaaatatggctaggaaaaatgatatgcctagaagaaatgttgttcatgttcctaaaaaaataatgaatgaaccttctacaatttatcatgctttaaatgcttcctttgctatttgtagaaaggataagaaggtttatgcatccgggggctcaagctggattatcgacagcggatgcacaaaccacatgacgggggagaagaggatgttctcttcctacgtcaagaacaaggatccccaagattcaatcatattcggtgatgggaaccaaggcaaggtgaaagggttagaaaaaattgctatttcatccaagcactctatttctaatgtgttcttagttgagtcgcttggatataacttgttgtctatagaccttgtgcagcttgtcaagcaggataaatctgaaacccaagggaccctcaagcgcttcctaaggagagctcaaaatgagtttgagctcaagttctctgctccctacacaccacagcaaaatggtgtggtagagaggaagaacaggacactactagacatggcgaggacgatgcttggtgaattcaagacgcccgaacggttttggacggaagccgtgagcacggcttgccacgccataaaccgggtctatcttcatcgcctcctcaagaagacttcatatgagcttctaaccggtaacaaacccaatgtgtcttactttcgtgtatttgggagcaaatgttacattctagtgaagaaaggttatgactcaaatacaaaggagtatagggtcttcaacaaatcatcgggtttggttgaagtctctagcgacgttgtatttgatgagactaatggctctccaagagagcaagttgttgatcttgatgatgtagatgaagaagacattccaacggccgcaatgcgcaccatggcgattggagatgtgaggccactggaacaaaaggagcaagatcaaccttcttccaaaacaatggtgcatcccccaactcaagacgatgaacaggttcatcaagaagtggcgtgtgatcaaggaggagcacaagatgttcatgtgatagaggaagaagcgcaaccggcacctccaactcaagttcgagcgacgattcaaaggaatcatcccgtcgaccaaatattgggtgacataagcaagggagtaactactcgttctagattagttaatttttgtgagcattactcctttgtctcttctattgagcctttcagggtagaagatgccttgctagatccggactgggtgttggccatgcaagaggagctcaacaacttcaagagaaatgaagtttggacactggtgcctcgtcccaagcaaaatgttgtgggaaccaagtgggtgttccgcaacaaacaagacgagcacggggtggtgacaaggaacaaggcacgacttgtggcaaaaggttatgcccaagtcacaggtttggactttgaggagacttttgctcctgtggctaggctagagtcaattcgcatattgttagcctatgctactcaccattctttcaggttgttccaaatggatgtgaagagcgctttcctcaacgggccaatcaaggaagaggttgggaaagccgatccaactctttttactaagacttgtgatggtgatctttttgtgtgtcaaatttatgtcgatgacataatatttggttctactaaccaaaagtcttgtgaagagtttagcagggtgatgactcaaaagtttgagatgtcaatgatgggcgagttaagctatttccttgcgttccaagtgaagcaactcaaggatggaaccttcatctcccaaacaaagtacacgcaagacttgatcaagcggtttgggatgaaggacgccaagcccgcaaagactccaatgggaaccgacggacacaccgacctcaacaaaggaggcttattacattcgatctaa

SEQ ID NO: 119169 - DNA, 2121 bp, Zea mays
  Clone ID: MRT4577_40165C.1
atggatcctaaagggaagggaatcgtgatcaacgacaaggaaaaggagtccttcgtcaacgagccaaaagatgacaaatccaacgactctggctcgggccacagacgtaaagatgggaagaagaagaagacaagacgtatcaaggagatcgtctactacgacagcgacgagtctacttcttcccacaaggacgacgactacgacaaacataagacagttaactcatacttttcttttgattattcgcgcattccgcacagctcaaatgctcatttgctccccattccacttggcaagcctcctcactttgatggagaggactacggattttggagtcacaaaatgcgtacacacctattttctctccatccaagaatttgggagattgtggaaagtggaatgaaatttgatagctcggatagtccttcgtttattaatgaacagatccataaaaatgcacaagctactactgtgttgctagcctctttgtgcagggacgagtatcacaaggtgagcggcttggacaatgccaagcaaatttgggacaccctcaagatctctcatgaggggaatgatgtcaccttactcaccaagatggagttggtggagggcgagctcggacgattcgcgatgataaggggcgaggagccgacgcaaacatacaaccggctcaagatccttatcaacaaaataaggagctacggaagcacgcgatggacggatcacgacgtcgtccgcctaatgctaaggtcatttaccgttcttgatcctcatctcatgaacaatattcgtgggaatcccaggtacacgaagatgacgcccgaggaggtactcggaaaattcgtaagcgggcgaatgatgatcaaggaggcaagatacgtggacgacgccttgaatggaccgatcaacgagcctcaaccccttgctctcaaggcaacaaaaagcaaggaggcgctacctagcagggtggcacaaattgaggcggccgaacttaatgatgaagagatggccctcatcatcaaaagattcaagacggcgcttaaaggtcgcaagggacagccaagcaagaccaaagccaaggggaagcgttcgtgcttcaaatgcggtaagcttggtcattttattgctaactgtcccgacaatgatagtgatcaggaccaagggaacaagagggagaagaagaagaattataagaaggcaaagggcgaggctcatcttggcaaggagtgggattcggactgctcctcgtctgactccgacaatgagggactcgccgccactgcattcaacaagtcatccctcttccccaacgagcgtcacacttgcctcatggcaagagagaaggtaatcactcgtaatgatatcacttatgattcttctagtgacgatgagtctagtgatgatgaaatagattactctagtttgttcaagggattggataaaaataaaattgataaaatcaatgaattgattgatgccttgaatgaaaaggataggcttttagaaaagcaagaggatttgttgtatgatgaacatgataagtttatagaggcacaaaaatcctatgctttagaagttaaaagaaatgaagtgctttctagtgaattatcttcttgtcatgaaaacattgctactttaaagagtgttaatgatgacttaaatgctaaactagaagtagctagtaaatcaacatcttgtgtagaaattgttgaaacgtgcactaggtgtaaagatcttaatgttgatgcttgtagtaaacatctagtttcaatttctaaattgaatgatgaagtggctagtcttaatgctcaacttaaggctagcaaaagcgaatttgataaactaaaatttgcaagggatgcctacacgatcggtagacacccctcaattaaggatggacttggcttcaagagggaagccaagaacttaacaagccataaggctcccattcccgctaaggagaaagggaaggcccctatagctactagtgctaaaaagaaccatgcctttttgtatcatgataggagacaaactagaaatgcttataggagttataatgcttacgatgatttttctcatgctatgtttgcttctagttcttcatatgtgcatgatagaaat

SEQ ID NO: 119170 - DNA, 559 bp, Zea mays
  unsure (1)..(559): unsure at all n locations
  Clone ID: MRT4577_40166C.1
ggtaccctngttgtccggccgggnaaaaaaaaaaaaaaaaaaaaaaaaaaaaaaaatataaaaaaaaaaaaaaaaaaaaaaaaaaaaaaaaaaaaaaaaaaaaaaaaaaaaaaaaaaaaaaaaggatcgggtcctgccaaggaatgaccgatcttttgtcaccaatagttgcagccttgggggaaaatcatgaaccatttgggggctttgggggtttcatgaggaaagccaaacccaacttcaaacttgatgaggttgaaataaaaaaacagttgaaaaccgtttcgcaaatcataaagcttaaagattcacagttttacaggcacctgcagaaacttaaggccgaaaactgtttttttttgtaccgaagggggggggtttttttcaggagggagctcacttttgagcaaactatgtgtttgggggaggttatgggggccgaccaggccgcaattcgagctgggattggaaggcccacttgggcaaggataaggtttaacccccctccaacaaacaacttgttgttttacgctatcgaagcctgtgtcctgcaaaggag

SEQ ID NO: 119171 - DNA, 312 bp, Zea mays
  Clone ID: MRT4577_40167C.1
atgtcgatgatgggcgagttaacatacttccttgggttccaagtgaagcaactcaaggacagtaccttcatctcccaaacgaagtacactcaagatcttctcaagaggtttgggatgaagtatgccaagcccgtgaagacaccgatgggaaccgacgggcatgtcgacctcaacaaaggagttgctacaccgtgcttcacgatctggtatccaaaggggtctacctttgacttaattgaatacgcagactccgattatgctgggtgcaaggttgataggaagagtacatcagggacgtgccaatttttatag

SEQ ID NO: 119172 - DNA, 326 bp, Zea mays
  Clone ID: MRT4577_40168C.1
agacagtgaacttcatttacatcaatacaccaacaatcgcgaccaacacctttaccctccggatggtccttgctctttgtgggtgtgttgctaacaccacaatctccactcaatgctcacaagcttgtatagcgttacctccttcccccataccatccatcaatcatcgctgcatgtgtgcgaaaaccgatcatcttcaaccttataggcatcaacaagcagacgtaccaatcaacatacctgtataacccttgttacaacaatctgcaggcctatctttggagcagtcattggtacaaaccatcatcgctcatcaactgcaccaa

SEQ ID NO: 119173 - DNA, 747 bp, Zea mays
  Clone ID: MRT4577_40169C.1
ctgtgcggggccggccgggtcgccgggcgccaaaaacgtgtcgcggggtacagtgtcctggggtacacagctatagcttcctcgctccgatcccttgcaacaaatcgaacgccatggctcctcgcgctaagaactctctagtggcggagggtgacgtgagcgtgcagaaggtgaagaagatcgagcctgtctacgactacgacctagtcaccagaccctgggtgttcggcaacccgagagtggtgacggtgctggcaaggccgccgccgggtgccggggtttctgtcgcctcaggccagaagaagctgttccagagggcgctgtcagagcaagagatcatcaacgactacatcgccagaaagaagaagcagtttgccggggagatcccatatagtacctactagggtgtttacatatatagtttgagaagagataaaaaaacctacaattaagccctctatatatctatatgactatatatgtactcagagagtacagcgttaattatatgtgttgtgttatggaattaataccttatttcctatttccgagggtttaagccgtcgaaaattcatcgttttagtgttgtgatatatgtccttagttatgaatgctgctgcaaaatatatatgtacctgtgtgaggtgtttgctttatgatatgtgtattagttgttcctgatataaaaaatctttatctataaaaaaaaaaaaaaagagaccaaaaaaaaaaaaaaaaaggccccta

SEQ ID NO: 119174 - DNA, 120 bp, Zea mays
  Clone ID: MRT4577_4016C.1
cccacgcgtccgaaatatttatattgtcaaataaaagcaccagcaatggtacctccatgttcaaggttaaaattaaccgggaatcctacaaaattccattactatgcgtaattggtaagg

SEQ ID NO: 119175 - DNA, 2844 bp, Zea mays
  Clone ID: MRT4577_40170C.1
atggccctcatcatcaagcggttcaagacgacgctaaagggtcgcaagaggcatcccaacaagaacaagacaaaggggaagcgctcatgcttcaaatgtggtaagattggtcattttatcgctaattgtcccgataatgatagtgaccaggaacaagggaacaagagggaaaagaagaagacttacaagaaggctaatggcgaggcacaccttggcaaggagtgggactcggattgttcgtcgtccgactccgacaatgaaggactcgccgccatcgccttcaacaaatcgttcctcttccccaacgagcatcacacctgcctcatggcaagggaaaagaagggcctagatagaactaaggttgataagattaatgaattaattgatgccttgaatgacaagaataggttattagaaaagcaagaggatcttttgtatgaagaacatgataagtttgtagaggcacaaaaatctcttgctttagaaattaaaaggaatgaaatgctctcttgtgaattgtctacatgccatgactctatttctagcttaaagagcataaatgatgatttgaatgctaagttagaaatagctaataaatcaacatcttgtgtagaacatgttgcaatttgcaataggtgtaaagattttaatgttgatgcttgtagtgaacacctagtttcaatttctaaattgaatgatgaagtggctagtcttaatgcccaacttaagactagcaagagtgaatttgacaaaataaaatttgcaagggatgcctacacgattggtagacacccctcaattaaggatggtcttggcttcaagagggaagccaagaacttaacaagccataaggcttccatctctgccaaggagaaagggaaggcccctatggctagtagtactcaaaagaaccatgctttcatgtatcatgataggagacattctaggaatgcttatagaagttatgacgcttttgattctcatgccatgtttgcttctagttcttctattatgcatgatagaaatttggctaggaaaaatgctatgcctagaagaaatgttgttcatgttcctagaaaagtaaacaatgaaccttctacaatttttcatacttgcaatgcttactttgctatttgtagaaaggataagaaggtttatgcatccgggggatcaagctggattatcaacaacggatgcacaaaccacatgacgggggagaagaagatgttctcttcctatgtcaagaacaaagattcccaagactcaatcatattcggtgacgggaatcaaggcaaggtgaaagggttaggaaagattgctatttcatccgagcactccatttctaatgtacttttagttgagtcgcttagatataatttgttatccgttagtcaattatgcaatatgggatataattgtttattcacaaatgtagatgtgtttgtctttagaagaagtgatggttcattagcttttaagggtgtattagacggcaaactctatttagttgattttgcaaaagaggaggccggtctagatgcatgcttaattgctaagactagcatgggctggctgtggcatcgccgtttagctcatgtggggatgaagaaccttcacaagcttctaaagggagaacacgtgataggtctaactaatgtaactttcgaaaaagatagaccttgcgcagcttgtcaagcaggtaaacaggtgggaagctctcatcataccaaaaatgtgatgaccacatcaagacctttggagttgcttcatatggacctcttcggacccatcgcctatctaagcataggaggaagtaagtatggtcttgttatagttgatgatttttctcgcttcacttgggtattctttttgcaggataaatctgaaacccaagggaccctcaagcgcttcctaagaagagctcaaaatgagtttgagctcaaggtgaagaagataaggagcgacaacaggtccgagttcaagaaccttcaagtggaggagtaccttgaggaggaagggatcaagcacgagttctctgctccctacacaccacagcaaaatggtgtggtagagaggaagaacaggacgctcatagacatggcgaggacgatgcttgtagagttcaagacccccgagtggttttggtcggaagccgtgaacacagcttgccacgccatcaaccgggtctaccttcaccgcctcctcaagaagacttcgtatgagcttctaaccggtaacaaacccaatgtgtcttactttcgtgtatttgggagcaaatgctatattctagtgaagaaaggtagaaattctaagtttgctcccaaagttgtagaaggatttttgttaggttatgactcaaatacaaaggcgtatagagtcttcaacaaatcatcaggtttggttgaagtctctagcgacgttgtatttgatgagactaatggctctccaagcgagcaagttgttgatcttgacgatgtagatgaagaagacgttccaacggccgcaatacgcaccatggtgattggagatgtgcggccacaggaacaaaaggagcaagatcaaccttcttcctcaacaatggtgcatcccccaactcaagacgatgaacaggttcatcaagaagaggcgtgtgatcaagagggagcacaagatgatcatgtgatggaggaagaagcacaaccgacacctccaacccaagttcgagcgacgattcaaaggaatcatcccgtcgaccaaattttgggtgatattagcaagggagtaactactcgctctagattagttaatttttgtgagcattactcctttgtctcttctattgagcctttcagggtagaagagtga

SEQ ID NO: 119176 - DNA, 2337 bp, Zea mays
  Clone ID: MRT4577_40171C.1
atggatcctaaaggcaaggggatggtgatcaacgacaaggaaaaggagtccttcgtcaacgagcccaatgatgacaagcccaccgactcaggctcgggccacaaaagaaaagacgggagaaagaagaaggcaaggcgcatcaaggaaattgtctactacgacagcgacgaatcttcctcctcccaaaaggacgacgacgactacgatagacgaaagacggttaactcaaacttttctttcgattatttgcgcatcccgcatagttcaaatgctcaattgcttcccattccacttggcaagccccctcactttgatggagaggattacggattttggagccacaaaatgcgtactcacctgttttctctccatccaagcatttgggagattgtggaaagtggaatgaaatttgatagctcggatagccctatgtttattaatgaacagattcatagaaatgcacaagccactactgtattgctagcctctttgtgcagggacgagtatcacaaggtgagcggcttggacaatgccaagcagatctgggacaccctcaagatctctcatgagggaaacgacgtcaccttgctcaccaaaatggagttggtggaaggcgaacttggacggtacaccaagatgtcgcccgaagaagttcttgggaaattcgttagcgggcgaatgatgatcaaggaggcaaggtacgtggacgacgccttgaatggcccgatcaatgagccgcaaccccttgctctcaaggcaacacgaagcaaggaggcgctacctagcaaggtggcacagtttgaggcggcaggacttaatgatgaagagatggctctcatcatcaaaagattcaagacggtgcttaaaggtcgcaagggacagccaagcaagaccaaagccaaggggaagcgctcatgcttcaaatgcggtaagcttggtcattttattgctaactgtcccgacaatgatagtgatcaggatcaagggaacaagagggagaaaaagaagaactataagaaggcaaagggcgaggctcatcttggcaaggagtgggattcggactgctcttcgtccgactccgacaatgaaggactcgccgccaccaccttcaacaagtcatccctcttccccaacgagcgacacacttgcctcatggcaagggagaagaaagtaagcactcataatactagtacttatgcttcttcaagtgaggatgagtctagtgatgatgatgagatagattactcatgcttattcaagggattagatagaaccaaggtagacaaaattaatgaattgattgatgccttgaatgataggaatatacttttagaaaagcaagaggatttgttgtatgaagaacatgataaatttgtagaagctcataaatctcttgctctagaaattaagaggaatgaaatgctctctagtgaattatcttcttgtcatgaaactattgccaagttaaagagttttaatgatgatttaaatgctaaactagaagtagcgagtaaatctaattcttgtgtagaaattgttgaaacttgtaataggtgtaaagatattgacattgatgcttgtagtgaacacctagtttcaatttccaaacttaatgatgaattggctagtcttaatgctcaacttaagactagcaagagtaattttgataagctaaaatttgcaagggatgcctacacaattggtagacacccctcaattaaggatggacttggctacaagagggaagccaaggacttgacaagccataaggctcctatctccgccaaggagaaagggaaggctcctatggctagtagtgctacaaagaaccatgcttttatgtatcatgataggagacatactagaaatgcaaatagaagttataatgtttttgattcatatgtttatgattctcatgacatgtttgcttctagttctttctatgtgcatgataggaatgttggtaggagaaatgttgttcataacatgcctaggagaaatgttgttaatgttcctaggaaagtcaatgaaccttctacaatatatcatgctttgaatgcttcctttgcaatttgtagaaaggatagaaaggtgattgctaggaagtttggggcaaaatgcaagggtgataaaacttgcatttggatccctaaggaaattgtgactaaccttgtaggacccaacaagagttgggtttatgcatccgggggttcaagctggattatagacagcggatgcacaaaccatatgacgggggaaaagaagatgttcacctcctacgtcaagaataaggattcccaagactcaataatattcggtgatgggaatcaaggcaag

SEQ ID NO: 119177 - DNA, 842 bp, Zea mays
  Clone ID: MRT4577_40172C.1
aagtcgggaaaggatttagcaggttatggcagacatgtaaacatgacaactggtacaggcattcaatttttaacgatccataactgttaatgagtcagcataaccttcaaaacaagaattttagatccgcatctactctcctgcttgtttacagccaactatgccactatcctaaacaagacataacatctatacttgtatgatggtcaaaagaatgcataaagcaccatgtccgctctctatgttaccaccttcaaagccaggatttccagaacaagacatgtgtttggcacacatcatgtgctcgaggtgagatgtcaaccatactcacagaaagggtgatgcacttctgctaaatcaatgacatctgtaacggtgaaatgagctaaagctcatttggttgcggagctcagaacgtggaagggaatcagccattgcatcttacaggtctcagatacttcttaatttgtgggtcagtggttgatttcaaggtcttcagtgcctcttctgcagccagaagcttcgcggcctctctgtccgaaccaacgcccctcccgagaatcaatcctgctagttcaacctggaaatgatattcttcattcctggctgggctagaattctggacttcatctcgaaatactacatgttggtcctccaagcaatgttctctaataagactcataatagacgacaatgtatccacattatttgaatgatccaatttcaatgcacttccagaaggttctcgcatagagatatcgttatctgaacaagtagcatcctccagaaagacattaccactcctcccaggggacttccttgaatctttcccggccggtcca

SEQ ID NO: 119178 - DNA, 2303 bp, Zea mays
  Clone ID: MRT4577_40173C.1
ttccacctttgttcatggtagaagtaggcctaggagaaatcatgtcgtgtctcatgcgtctaggagaatgtgcaatggaccttctaccatttataatgcttgcaatacttcttttgtactttcatgtttattcatctgggggctcaagctggataatcgatagcagatgcacgaaccacatgacgggggagaagaaaatgttcacctcctacgtcaagaacaaggattcccaggattcgatcatctttggagatgggaaccaaggcaaggttaaaggattgggaaagatagccatcacatccgagcattctatatccaatgtgtttttagttgaatcgctcgggtacaacttattgtctgtgagtcaattatgtaacatgggttataattgtttattcacaaatatagatgtatctgtctttagaaggagttatggttcattagcttttaagggtgtattagacggcaagctctatttagttgactttttgaaagagaatgccgatctagatgcatgcttaatggctaagactaatgataagtcagaaaaccaaggtaccataaagtgcttcttgaggagagctcaaaacgaatttgagctaaaggtgaagaagataaggagcgacaatgggtccgagtttaagaatctacaagtcgaagagtttcttgaggaggaaggcgtcaagcacgagttctccgctccctacacaccacaacaaaatggtgtggtagagaggaagaacaagacgctaatcgacatggcaagaacgatgcttggagagttcaagacacccgagcggttttggttggaagctatgaacacagcctgccacgccataaaccagctctatctgcatcgccttctcaagaaaatctcctacgaactccttaccggtaacaaacctaatgtctcttactttcgtgtatttgggagcaaatgctacattctggtaaagaaaggtagacattctaaatttgctcccaaggcagtagaagggtttttactagggtatgattcaaatacaaaggcatatagggtcttcaacaaatcattaggattagttgaagtctctagcgatgttgtatttgatgagactaatggctctccaagagagcaagttgatcttgatgacatagacgaggatgaagttctgacggccgcaatgcgcacgatggcgataggcgatgtacgaccacaggaaccacatgaagaagatctaccatcttcctcaacaatggtacatcccccaactcaagacgatgtacagagcgctttcctcaacgggccaatcaaggaggaggtatacatggaacaaccccctggctttgaggatggcaggtatcccgaccatgtgtataagctctctaaggcgctctatggacttaagcaagccccaagagcatggtatgaatgccttagagatttccttatttctaatactttcaaggttgggaaagccgatcccactcttttcacaaagacatgcaatggtgatctttttgtgtgccaaatttatgtcgatgacataatatttggttccactaaccaaaagtcttgtgaggagtttagcagggtgatgatgcagaaattcgagatgtcgatgatgggcgagttgacttacttccttggattccaagtgaagcaactcaaggacggcaccttcatctcccaaacgaagtacactcaggatcttctcaagaggtttgggatgaaggacaccaagcccgcaaagacaccgatgggaactgacgggcatattgacctcaacaaaggagtttctacgccttgcttcgggatctggtatccaaaggggtctacctttgacttgattggatactcagactctgattatgccgggtgcaaagtcgataggaagagtacatcagggacgtgcctatttctaggaaggtccctagtgtcctggagttcgaagaaacaaacatccgttgccttatccaccgctgaggccgagtacattgccacaggaaattgttgcacacaactactttggatgaggctaaccctccgggactttggctacaatttgagcgaagtcccactcctatgtgacaatgagagtgcaatatgcttggtggataatcctgttgaacacagccacactaagcccatagatatccggcatcacttcctgagagaccaccaacaaaagggagatatcgaggtgtaccatattagcaccgagaaccagctagccgatatcttcactaagcttttagatgagaaaatgttttgcaggttgcgtagtgagctaaatgtcttagattcgcgtaacttggattga

SEQ ID NO: 119179 - DNA, 159 bp, Zea mays
  Clone ID: MRT4577_40174C.1
gattcagcacgccgcccgttgggaagggagcttcgaggctggcccgcctcgtcgcgtcggtcgaacggttcttgagccaatggtcacgggctccttggggtcgcgaacgccctaacgtgggtcggagcggtcggtaagcttaggcgccggttgctaact

SEQ ID NO: 119180 - DNA, 930 bp, Zea mays
  Clone ID: MRT4577_40175C.1
actcccctgcgccgccataaatccgcgcccccgtcccctttctaaacccctctcctccccaccctcgctcggccgctgaggtttccgccgcgatctcgtctcgatccgcactctctatctgagatttggaatcgggcgaggcctgcagctcctgccgacatggcgctcgttttgcattcgggcagtggcaacaagaatgccttcaaggcacttattgctgcagagtactgtggggtcaaggttgagctgaccaagaactttgagatgggtgtctcaaacaaaacccctgaattcatcaagatgaacccccttggcaaggttcctgttcttgagactcctgatggtgctgtttttgagagcaatgctattgcacgctatgttgctcgctcaaagggtgacaacctgctttggggtggttctcttattgaatatgcgcgtgttgagcaatggatggactttggtgccacagaggttgatcccaatatcgcaaggtggctgtacccaaggcttggttatatgccttacaatgcccagtctgaggaattcggcattgctggattaaagagggcccttgaagcattgaacacacacctggcatcaaacacattccttgttgggcattctgtcactctggctgatattgtcatgacatgcaacctctaccatggttttgctcggatcttgaccaagactttcacatctgagttccctcatgttgagaggtacttctggaccatggttaaccagcctaacttcaagaaggtcattggcgatttcaagcaggcagaggttgtacctcctgttcagaagaaggctgctcctgctaaaccaaaggaggccaagaaagaggctcccaagggcggccccaaagccagcagaggttgaggcacccagagaaagagcaccaagccaaagccaaaaatcccttga

SEQ ID NO: 119181 - DNA, 1434 bp, Zea mays
  Clone ID: MRT4577_40176C.1
atggcgaggacgatgcttggagagttcaagacgcccgagcggttttggtcggaagctgtgaacacagcttgccatgccataaaccggctctatctccatcgcctccgcaagaagacctcgtatgaactactgactggtaacaaacccaacgtttcatactttcgtgtatttgggagtaaatgttacattctagtgaagaaaggtagaaattctaaatttgctcccaaagctatagaaggttttttactaggttatgactcaaatacaaaggcgtatagagtcttcaacaaatcatcgggtttggttgaagtctctagcgacgttgtatttgatgagactaatggctctccaagagagcaagttgatcttgatgatgtagatgaagatgatgttccaacgaccgcaatatgcaccatggcgattggagatgaagagctcaacaatttcaagcgaaatgaactttggagcctggtgccatgtcccaagaaaaacgttgtgggaaccaagtgggtgttccgcaacaagcaagacgagcatggggtggtgacacgaaacaaggctagacttgtggcaaaaggttatgcccaagtcgcaggtttggatttcgaggagacttttgctcctgtggctaggctagagtctattcacattctattagcctatgccgctcaccactcttttaggttgttccaaatggatgtgaagagcgctttcctcaatgggccaatcaaggaggaagtgtacgtggagcaaccccctggctttgaggatgaacggtatcccgaccatgtgtgtaagctctctaaggcgctctatggacttaagcaagccccaagagtatggtatgaatgtcttagagatttcctaattgctaatgctttcaaggttgggaaagccgatccaactcttttcactaagacttgtgatggtgacctatttgtgtgtcaaatttatgtcgatgacataatatttggttttactaaccaaaagtcttgtgaggagtttagcagggtaatgacgcagaaatttgagatgtcgatgatgggcgagttgaactatttccttgggttccaagtgaagcaactcaaggatggcaccttcatctctcaaatgaagtacacacaagacttgctcaagcggtttgggatgaaggactccaagcccgcaaagacaccaatgggaaccgacggatatgtcgacctcaacaaaggaggatctggtatccaaaggggtctacctttgacttcattggatattcagactccgattaggctggatgcaaggttgatagaaagagtacatcagggacgtgccaattcctgggaaggtccctggtgtcttggagttctaagaaacaaacctgcgttgccctatccaccgctgaggccgagtatgttgccgcaggacaatgttgcgcgcaactactttggatga

SEQ ID NO: 119182 - DNA, 394 bp, Zea mays
  unsure (1)..(394): unsure at all n locations
  Clone ID: MRT4577_40177C.1
gtcgaggcggcgcttgtcaagatctaagcatatcgacttaagttcggcgacgaccgaggcattcgtcgagctcaaggtcaaggagatcaagtacggccgtacgcggcatgatctgcatgtgcggaatctgcgaaaaggttatcggcaccgggaagggacaggtcgagaacggcgatgattatcattgacgaccccgtgaatacaaacgattgagagtacgttaccaaattcggcaccggaaagcgagagaggcgtcgnaggagactattattgtgatcggatgcatgtgagggcaaattgtccctccntttgaaaattgttgtaaactattgtncaaacgacaaggcatagggtgtggtccaatataaaaataataaaggcccccaaggtgcgc

SEQ ID NO: 119183 - DNA, 1104 bp, Zea mays
  Clone ID: MRT4577_40178C.1
gataaatcagaaacccaagggaccctaaagcactttctaaggagagctcaaaatgaatttgagctcaagatgagaaagataagaagcgacaacaggtccgagttcaagaacttacaagtggaggagtaccttgaggaggaaggaatcaagcacgagttctccgctccctacacaccacagcaaaatggtgtggtagaaaggaagaacaggacacttatagacatggcaaggacaatgtttggagaattcaagatgcctgagcggttttggtcggaagttgtgaacacagcttgccacgccataaaccgggtataccttcatcgcctcctcaaaaagtcctcatatgaacttctaaccggtaacaaacccaacgtttcatactttcatatgaagatgacgttccaacggccgcaattcacaccatggcgattggagatgtgcgaccataggaacaacaagagcaagatcaaccctcttcctcaacgatggtgcattccccaactcaagatgatggataggttcctcaagaggaggcatgtgatcaagggggagcacaagaagacccaacaatggaggaagaaggtagaagaggccctgctagatccggactgggtgttggccatgcaggaagagctcaacaacttcaagcgaaatgaagtttggaccctggtgccatgtcccaagcaaaacgttgtgggaaccaagtgggtgttccgcaacaagcaagacgagcacggggtggtgacacgaaacaaggctcgacttgtggccaaaggttatgcccaagtcgcaggtttggatttcgaggagacttttgctcctatgtctaggctagagtctattcgcattttgttagcctatgccgctcaccactctttcaggttgttccaaatggatgtgaagagtgctttcctcaacgagccaatcaaggaggaggtatacgtggagcaaccccctggctttgaggatgaacggtaccccgaccatgtgtgtaagctctctacggcgctctatggacttaagcaagccccaagagcatggtatgatagccttagatcaaaagttctagctctactattttcaaaattctcaagtggtagctga

SEQ ID NO: 119184 - DNA, 618 bp, Zea mays
  Clone ID: MRT4577_40179C.1
ccctctctcgagttttttttttttttttttttttttttttttttttttttttttttttttttttttttttttttttttttttttttttttttttttttttgggaaaccttttttttaaaaggcctaacattggaaggggtcaaatcccaatttaatggccctcccccaaacttggggtaaccccaaatttgggaaaaaaaatccccccccctcaatttttttttttcccaccagaaagggggcggtttattttttaaacccaaacaggaaaaaatttttgggggctaaaagctaaaaaggggggccaaaaagggccaaaggacccaataaaatttttttttttaccgggaaccctggggggggcgggtacccaaaacaaacatttggaaaaaaaacaaaaccatttggggggggggggatgggtttaaacggagttaaattttttttccaagcgttttgccaaaaaaagggcccccagggcctttgtttgtttcccttcccctttaaaaaaaaaccctttaaatttcccccccttaatcggtttttaaagggaacttttttccctctgagggttgcggggcggggaaaaaaataatttggtttccactttttgggggg

SEQ ID NO: 119185 - DNA, 614 bp, Zea mays
  Clone ID: MRT4577_4017C.1
attttgtctagtgtctaccagtacatctccgctcgtctgttcgtcgaacagataagcacagaatccgaagagagcggcgggtggttggcagatggctgcggcggagccgtcggggtcgagccagccgggtgctccaggaaggtggtctcttcacgggaagacggctctcgtcaccggcggcacccgcgggatcgggcgtgcggtggtggaggaacttgcggcgctgggggtggccgtgcacacctgctcccggaaggaggcggagctgggcgagcgcctcaaggagtgggaggccaggggcttccgcgtcacaacctccgtctgcgacctctccgtccgggagcagcgggagcgcctgattgccgacgtcgccgaacgcttcggcggcaagctcaacatcctcgtaaacaatgtggggacaaacataaggaagccaactactgaattttccgctgaagattactcttttttgatggccactaatcttgaatctgcatatcatctttgccaacttgcacatcctcttctaaaagcatctggtttgggcagcattgttttcatatcatctgtctgtggattagtagccgtatttagtggtactctatatgccatga

SEQ ID NO: 119186 - DNA, 4398 bp, Zea mays
  Clone ID: MRT4577_40180C.1
atgacgcccgaggagatacttggaaagttcgtaagcgggcgaatgatgatcaaggaggcgagatatgttgatgaggcgttaaatggcccaatccatgagcctcaaaccattgctctaaaagcaacaagtagcagggaggcactacctagcaaggtggcgcaagttgaggcagccgggctaaatgaagatgaaatgaccctcatcatcaagcgcttcaagacggcgctcaaaggtcgcaaggagcatcccaacaggagcaagacaaaggggaagcgctcctgcttcaagtgtggtaaggttggtcactttattgctaactgtcctgataatgatagtgaccaggatcaagaaaagaagagggaaaataagaagacttacaagaaagcgaagggcgaggcacaccttggcaaagagtgggactcggattgctcttcatccgacgacgaaggacttgccgcctcggccttcaacaaatcatccctcttccccaacgagcatcacacctgcctcatagcaacggaaaagaagaatagattattagaaaagcaagaggatcttttgtacgaagagcatgataaatttgtagatgtccaaaaatctcttgctttagaagttaaaatgaatgaaatgctttcttgtgaattatctacttgccatgagactatttctagtttaaaaagtgttaatgatgatttaaatgctaagctagaagtagcaaataaatctagttcttgtgtagaacatgtagtgatttgcaataagtgtaaggactttaatgttgatgcctgtgttgagcaccttacttctattgcaaaactaaatggtgaagtggctagtcttaatgcccaacttaagactagcaaaaatgaatttgataaactaaaatttgcaagggatgcctacactgttggcagacacccctcaattaaggatgggcttggctttaagagggaagccaagaacttaacaagtcataaggctcccatctccgccaaggagaaagggaaggcccctatggctaatagtgttcaaaagaatcatgctttcatttatagtgatagaaaattctctagaaatgcttatagaaattattcttatgattcatatgctatgcctgcttctagtttctctattgtgcatgatatgcctaggaaaaatgttattcatcatatgcctagaaaaaatgttgttcatgtacctaggaaagcaagtaatgaaccttctacaatttatcatgcttgcaatgcttcctttgcaatttgtagaaaggataagaaagtgattgctaggaaattaggggcaaaatgcaagggagataaaacttgcatttgggtccctaaggctattgtcactaaccttgcaggacccaacaagagttgggtttatgcatccgggggctcaagctggattatcgacagcggatgcacaaaccacatgacaggggagaagaagatgttcacctcctacgtcaagaacaaggattcccaagattcaatcatattcggtgatgggaaccaaggcaaggttaaaggactaggaaaaatagcaatttcatccgagcattccatttctaatgtgtttttagtggaatcgctcggatataacttgttgtttgttagtcaattatgtaatatggggtataattgcttatttacaaatgtagatgtgtctgtctttagaaggagtgatggttcattagcttttaagggtgtactagacgataaactctatttagttgattttgcaaaggaggaggccggtctagatgcatgtttgattgctaagactagcatgggctggttgtggcatcgccgtctagcacatgtggggatgaagaaccttcacaaacttctaaagggagaacatgtgttaggactaacaaatgtgactttcgaaaaagatagaccttgtgcagcttgtcaagcaggtaagcaggtgggaagtgctcatcacagcaagaatgtaatgaccacatcaagacctctggagttacttcatatggacctcttcggacccgtcgcctacctaagcataggaggaaaaacccaagggaccctcaagcgcttcctaaggagagctcaaaatgagtttgagctcaagcaaaacggtgtggtagagaggaagaacaggacactcatcgacatggcgaggacgatgcttggagagttcaagacggccgagtggttttggtcggaagccgtgaacatggcttgccacgccataaaccgggtctaccttcatcgcctcctcaagaagacttcgtacaaactcctaaccagtaaaaaacccaatgtatcatactttcgtgtttttgggagcaactgttatattctagtgaagaaaggtagaaattctaagttcgctcccaaagctgtagaagggtttttgttaggttatgactcaaatacaaaggcatatagggtcttcaacaaatcatcgggtttggttgaagtctctagcgacgtcgtatttgatgagactaatggctctccaagagagcaagttgttgatcttgatgatgtagatgaagaagacgctccaacgaccgcaatacgcaccatggcaattggtgatgtgcggccacaggaacaaaaggagcaagatcaaccttcttcctcaacaatggtgcaacccccaactcaagacgatgaacaggttcatcaagaagaggcgtgtgatcaagggggagcacaagatgatcatgttatggaggaagaagcacaacatgcccctccaactcaagttcgagcgacgattcaaaggaatcatcccgtcgatcagatattgggtgatattagcaagggagtaactactcgctctagattagttaatttttgtgagcattactcttttgtctcttctattgagcctttcagggtagaagaggccttgctagatccggactgggtgttggccatgcaggaggagctcaacaatttcaagagaaatgaagtttggacattggtgccacgtcccaagcaaaacgttgtgggaaccaagtgggtgtttcgcaacaaacaagacgagcacggggtggtgacaaggaacaaggcacgacttgtggcaaaaggttatgcccaagtcgcaggtttggactttgaggagacttttgctcctgtggctaggctagagtcaattcgcatattgttagcctatgccgctcaccattctttcaggttgttccaaatggatgtgaagagtgctgtcctcaacgggccaatcaaggaggaggtatacgtagagcaaccccctggctttgaggatgaacggtaccccgaccacgtgtgtaagctctctaaggcgctctatggacttaagcaagccccaagagcatggtatgaatgccttagagactttttaattgataatgctttcaaggttgggaaagccgatccaactttattcactaagacgtgtaatggtgatttatttgtgtgccaaatttatgtcgatgacataatatttggttctaccaaccaaaagtcttgtaaagagtttagcagggtgatgactcaaaagtttgaaatgtcgatgatgggcgagttgaactacttccttggtttccaagtgaagcaactcaaggacatcactttcatctcccaaacgaagtacacgcaagacttgatcaagcggtttgggatgaaggacgccaagcccgcaaagactccaatgggaactgacggacacatcgacctcaacaaaggaggtaagtccgttgatcaaaaagcataccggtctatgataggttccttgctttacttatgtgctagtagaccggatattatgcttagtgtatacatgtgtgctagatttcaatccgatccaagggagtgtcacttagtggccgtgaagcgaagtcttagatatttagtcgctacgccttgcttcaggatctggtatccaaaggggtctacctttgacttaattggatattcagactccgattatgctggatgtaaggttgataggaagagtacatcagggacgtgccaattcttaggaaggtccctagtgtcttggagttctaagaaacaaactttcgttgccctatccaccgttgaggccgagtatgttgccgcaggtcagtgttgcacgcaactactttggatgaggcaaatcctccgggactttggctacaatctgagcaaagtctcactcctatgtgataatgagagtgcaatccgcatggcggataatcctattgaacccagccgcacaaagcacatagacatccgacatcactttttgagagaccaccagcaaaagggagatatcgaagtgttttatgttagcaccgagaaccagctagccgatatctttaccaagcctttagatgagaagaccttttgcaagctgcgtagtgagctaaatgtcttagattcgcggaacttggattga

SEQ ID NO: 119187 - DNA, 780 bp, Zea mays
  unsure (1)..(780): unsure at all n locations
  Clone ID: MRT4577_40181C.1
gncggngnagccagctcctgggcgccaccgtcgcggtgggcgtggtgaagacggtgttcatcgtgatcgccatcgtcctcgtcgaccgcgtcggccggaagccgctgctgtacgtcagcacggccggaatcacggtgtgcctcgccgtgctggccgcgtcgctgtccgcactcgcgcgcggcgcgctgccgggcggcgtcgccgtcgggctcgccatcctcacggtgtgcggcttcgtggccttcttctcggtggggatcggtcccatcaacatggtgctgagctcggagatctacccgctgcggctgcgcgcgcaggccgtggccgccggcttcgcgctcaaccgcatggccagcggcgccgtggccatgtcgttcctctccatctgccgcgccgtgaccgtcgcgggcgcgttcgccgcgttcgcggccgtctcggcgctgtcggtggcgttcgtgcacctctgcgtgcccgagacgagcggcaagacgctggaggagatcgagtcgctgttcggtggcggcggtgtgagcgtgacgcacggtggctccggcgaagtggagctcggcgacgcgagcggcttgagcacatgaggctagtgtcgcacgggcacgcgtcgagctgagtgctgcagtgtgaacacgaattattggcacgcaaagtagaaaacagtgtcgtatgctcttcttttgcacgaaactttattctctcttctttagggctctaaaaaaagctgaagagtaaagctacaaaaaaaggcctgttaagaaccttatacag

SEQ ID NO: 119188 - DNA, 326 bp, Zea mays
  unsure (1)..(326): unsure at all n locations
  Clone ID: MRT4577_40182C.1
ancggncntttttttttttttttttaatttcaaacaactaacttattcatgattggtcatagttctgggtagtacgcacacacaacacaaccggtccatttttaacccaccactgccccaaacagaaaatccttcaacaccctccttttggaaaggcccccaaacaacccaggcccttgggcagttaaaacaacccatgacttattgcccaccccggaaacggaccacaggggggggggggctctcctttggaatgtggaanccggctagggggcggccttcctccacttgttgcgccggaaaataaaaaccttgttgtcccgggg

SEQ ID NO: 119189 - DNA, 372 bp, Zea mays
  Clone ID: MRT4577_40183C.1
atcctgcctcttatttcaagtcaatgcatgttactcatgcgcccagtatgtgtatgaagatatgggggagacaaatgaggagatggttcgaattatatgatttttgccacgttaccttgatgcaaatttgccaaatatgatactgcgaaaagatttgataacatttctaatgcctgactagaaagtcttaaaacatcattctttaaaaaaataatttaatatttttggttattccaatcttcactgttaacccaaacgattctgagataaaaattatgtgttatatgcacttcagtttacagacaaattagaactttgttttattttgagaagggggatgcattcatttggttttgatttttatttttgttt

SEQ ID NO: 119190 - DNA, 270 bp, Zea mays
  Clone ID: MRT4577_40184C.1
caccaactatcagggcaaagcaggtccatcatctagagctacccgagatcaaccaagtaggctaggcagagctttatccttaccctcagcaacaacatttccttccatgcaaccaactgtctacattaaaccctgctgctcatttgcagcaacatctattaccattcaacctgctagactctgcctactctcagcgactacaacttcttcgagatagccaatcggacgaactgaatcccgctgctgatttgcaggagcaaatactactac

SEQ ID NO: 119191 - DNA, 184 bp, Zea mays
  Clone ID: MRT4577_40185C.1
gagaccaatagctttatctacttcttagcgcaaaagaacccgatcgacatcatgagggtgatgctcgttgtcttttctgtacgggcgtctgctgcaagcagtaccgacaatgtacaaaggtgtattggttatttttccgcatacattatcagggtgcttcagaatggaaactcaattttaattc

SEQ ID NO: 119192 - DNA, 204 bp, Zea mays
  Clone ID: MRT4577_40186C.1
ttggcgctcaacaacagacgctcgcgcaagggactgtatttagactgtctcacgcacgaccatcagctgcagaccaacaacaatgagaggccacatgatgcaggatgggtagtaccccaggtgctcaccaagcgagcagcaactgggcaaagaacggtagaggccttgctttgctggtggaaggaccacgcggggggtatggcg

SEQ ID NO: 119193 - DNA, 301 bp, Zea mays
  Clone ID: MRT4577_40187C.1
tcaggaattagccctctcctagagagcgggcgcgaggacaagcactttcttatttctaggcaagccacaaacattacacataatatctttatcataagaactataactcataagaaatctaaaagagggcaccaccaatgataggtagcaggtagaacgctaatgggttctccaaagcaagtagggagaatggcagcaatagtagcagttgtaagatggagccaactttaggcgcatctgagctggtagatcagaacaatagagactgagtcaagaaagcagtaagtctaacactagccag

SEQ ID NO: 119194 - DNA, 376 bp, Zea mays
  Clone ID: MRT4577_40188C.1
ctgaaaataagagccgtaacgttggtgctgttccaaagagacgtaacgtttaagatgagcaatgcttcgcctcatgtacagcacactggtagacatttttactatttttcttctcaaaagagacattatcatacagtccggactccggtgggatttctaatgggagtccggacggtttgatagagtctctattgcggagacgagtagactggtgatcaccagagtgcagatcgtggggcgaggcgctgccctacagagccgaggcgtcttcgaagggatccgcgccttcggtcagccgattaatggatcgtggacgacgtggatcgctgctgtaaataaggaccggaaccagcaggcgtaccagctgtacctgagg

SEQ ID NO: 119195 - DNA, 275 bp, Zea mays
  Clone ID: MRT4577_40189C.1
cgtccggaagagtatgagtactgcatgcttcgccatgtggaccctcaagttccttatgccagagatcttatcactatcctgtacgatgctattaacattggatatccacatctaatagtggcacacgacattgagcacgaaactcttgcaatccttgtggatatcatgcttagacgttcattgttcattgtcgctactaccgtccctgtctcttggagagcacaacttcaagtgcctcattacattcctactctcattggaggcattgtcatcat

SEQ ID NO: 119196 - DNA, 156 bp, Zea mays
  Clone ID: MRT4577_4018C.1
cattgggtacctcgaggccggccgggagcggccgtgcacttgctttccccttactgctctcactctcaccgcgtgggcgtctgaggcaatttccgccctcaaaacaagcccgactcgttctaccgccaccgtgattccctcctccgagcgcgaata

SEQ ID NO: 119197 - DNA, 1800 bp, Zea mays
  Clone ID: MRT4577_40190C.1
tctctccttcaaaagccagatgttgcaaaagatctgtaaacccagagcaggaccatgcctccgctagccctgccacagtttctgctacagaggataacatttttttggtggcttttaagctcttgatgccgtttttggcaaccgaaaagtccatgaatcatctgggctcgatgatgattctgctgcaggactacagccatcagctcaaactttcatccaagaaacaagcactgctggaccagtagataaccaatcagctaccagcaacaatttctctatgcaggctttcttgcaaggaaaacctagaagagaaaaccaatctgctgaaatattgccatctgaagtagatgaaaagatgactgctactgataataaaaattatgttgatgatgggggaaatgtgttaccatcaaaattagaggacatcacagagagtgactggacaaggttagagaattacgcaagtaccggagaaaaggttgaggtggagctgataaattgcagtgcgaaggggtttgttgtgtcacttgactcactgataggtttcttaccgtaccgtaatcttgctacaaagtggaaattcttagcctttgagacttggttaagaaggaagggtggcgatccttccttgtacaagcagagtttgggattagaggatagttttgaggttaatgacacaaacctagaaccagaatctagctcagtttccaaaatagctggtgaggaccaagaatctctgtcatctaagccgaagtttgaagatcttattcgagcatacaaccaagaaaaatccaagtttttatcttcatttattggtcaaagactccgagtatcagttgtcctggccgacagaaattccaagcggatatttttctctatgaagccaaaagagagcgaagaaatgatccagaaaaagaaaaacctgatggctaggctcaacgttggagatattattcagtgcactatcaagagatttgtttactttgggatatttgttgaggttgaaggtgttcctgcgttgattcagcagtgggaagtgtcgtgggatgacaccttagatccagcagtttcttacaaaattggtcaggttgtggatgctaaagttatccaacttgactataataatatccgcatatttttgtcacttaaagatgtaaagccaaatccatccgtaggtgctttggaatcagtcgttggtgaggatttatcgtttggtggagctcttgaacccgtgcaagcagatttcgagtggcccgaggtagacgccctcatggaagagatgcggagaacagagggtgtaagagatgtctataaaggacggttcttccaaagcccagggttagctccgacgtttcaggtctacatggcacctgtggtcggtccgaaatacaagctcctggcgcggtatgggaacagcgtccaggaggtgatggtggagacggcacttggcaaagaagagttgaaggaggcagtcctgatgtgcactaatagggttagctaggatctccatgacgcgcatttgctgggaccggtttctcgggttgctagctggattggaacagcatacggattatatatccggttaaaagttactgaaatgcagaaaaagaagaacgactctattaatcgagtttaggattgccaatttgattgaaaattctctgttgtggattggttgaggaaagaaacgaaggtggtctgcccccttctcttgtcatatcacgactctgcatgtggctcatactgcggaggactaggagttctttccacttattgaggattatatgattatatcttaag

SEQ ID NO: 119198 - DNA, 649 bp, Zea mays
  unsure (1)..(649): unsure at all n locations
  Clone ID: MRT4577_40191C.1
tttgttgcaggactacagccatcagctcaaactttgcatccaagnaaacaagcactgctggaccagtagataaccaatcagctaccagcaacaatttctctatgcaggctttcttgcaaggaaaacctagaaggtttcttcaggaactatgcagttatatttttagacataacttttaccacttgatatctggttccttatttgaagatcacattgaaaatattgctgaaacggttgaaaagcatggatttgtacagtggttatgaagttctacatcatgcctgtattttcttatcatgataacggtgtaaagttatctagtacacatgtgtcttgctattgtttcgtgcacatttaattgcttactccacactcatgtacttgtgattgcatgtaggtgattatgacatgtacgcatctaccattttggtaacatattaagaacatcatgtggctggaataattgagcattcctttgtcccctgctttggtgctgtgcaggtttcatgcatgctattatcttacaaagttacaattaacatgtcatttgttactttgtagaagaaaccaatctgctgaaatattgccatctgaagtagatgaaaagacgactgctactgataataaaaattatgttgatgatggggga

SEQ ID NO: 119199 - DNA, 320 bp, Zea mays
  Clone ID: MRT4577_40192C.1
attcccgctcgacccactcgtcctctaccctctctaccccggctgcttcttctacccgctcggcctctcctactaccgttatgccttcatttatcatatggttaaccatcttattatctttcttctttccatgttcttctttttcttttttttatatcttttctttcttttttttatcttttattttttttttttttctttttctttttttttttttttttttttttattcttttttttttttttttttttatttatttttttttttttttttttttttttttttattattttttattttatattttttattttttttat

SEQ ID NO: 119200 - DNA, 710 bp, Zea mays
  Clone ID: MRT4577_40193C.1
gccgcgccaaggccaagctcctcgaggaggacctgcccaagctgcagagcctcgcgctcaagaaggacgaggtggtgaacccgctgttcgagaagaggccgaagcagttcggcatcagtggcgccctgccgcccaagaaggacctccaccggtttgtcaattggcccaaggtcatgcgcatccagcgccagtgccgcatcctcaagcagcgcctcaaggtgccccaggcactccaccagttcacccgcaccctcgacaagaacatcggtcattttgtgaaggccgccaagggaaggagtgggggatttggcacaaggccggtgatcgagtctatgctctctcctccatggaaagacctaaattcagcttgacagagagcacatgaatggtttcagcttgacaacaaatgtatgaaacttcttagctgtggacgacaactacttccttaagaaggaccagcatcacgcatcaagtatgccattgagggtgacggccgaaggcatgatgatagttctattgctgttctagtgtagcgaaggtggcctagtcgactatggtcgcctagtgagtcgtgcatacggtttcatctgactgtaaacttgatgtaaactgctctaattgtggagcttgttatctgtttgtaaacttgatgctgatcacatttgtatgtgtgttatatgatgtagcactttgatggttgataatatttg

SEQ ID NO: 119201 - DNA, 845 bp, Zea mays
  Clone ID: MRT4577_40194C.1
catgcagacgcgccacgccaaccgtctctgccgagccgccgtcgacttcctgcctcagatagaaggttgatccttgcgtgcgtgccgctgatacgactcccgaccgggtccatttcggcggcacgccccgccgcgttccccaccgcgctatattgcgtgccgctgatacgagtccacatcgctatcgcgtcccacacgttcacagtcacagcatggcacgccaccctctcgcggctgctgtcctcttcctctgcctgctgtcggtctgccgcgcggccggcgccggcgccgctggcaaaggtaaaccgagcgccgtgttgctgccggtgagcaaggacggcgccacgcagcagtacgtgacggggttccggcagcgcacgccactggtgccggtgaaggccgtgctggacctggcgggagccacgctctgggtggactgcgaggccgggtacgcgtccgccacctacagccgcgtgccgtgcgggtccagcctctgccgcctctcgcggtcggcggcctgcgccaccagctgctccggcgccccgagcccgtcctgcctcaacgacacctgcggggggttccccgagaacacggtcacgcaggtcagcaccagcggcaacgtcatcaccgacgtgctggcgctgcccaccacgttccgcccggccccgggcccgctcgccacggcgccggcgttcctcttcacctgcggggccacgttcctgacgcagggcctggcggcgggcgccgcggggatggcgtcgctcagccgctcccacttcgcgctgcccacgcagctcgcctccacgttccgcttctcccggaagttcgcgctctgcctgccgccc

SEQ ID NO: 119202 - DNA, 388 bp, Zea mays
  Clone ID: MRT4577_40195C.1
aacaggcacagcacattgggtcctggtcatcaccagggcaacccacattacattggtcatcatcttcacaggccaaataaacaaaaaagaaaagaaacaaaagaatgtcgcttttgatccatgggggggatgttattggccattataagcccctggacatttcctggcttcttttctgggccaccttgccgggggtaaaggaaaaggctttgggcgtgttggtcaccgagtaaaacatgacgttgctgacgcttctccgcgccggcgccgagggcaccattccgggctgaaaaaactgggaacccttgcagtgcgcgatggccccctggatggggcccttcttggacaacccggggctggtgtttcgctttagcgccggggttgcccc

SEQ ID NO: 119203 - DNA, 298 bp, Zea mays
  Clone ID: MRT4577_40196C.1
ttatttttttttatttagtaaatttttattggaggggcaggcaaaaaaggggaggggaaaaacaaaatttttttgaccggaaactgaaacataacaaacattaattataaggcacctacaatcagtgctgaaattgaaagggattactataacaagggcaacaatttagaaagaaaacaacagatggacaagggaaatccatagagtttgaaggaaacaaaaaataaaccttaggaaggtggggccactgaataaacaaacgaagtaacaaaacagaagagggggcacataataattg

SEQ ID NO: 119204 - DNA, 575 bp, Zea mays
  Clone ID: MRT4577_40197C.1
caggggtatatcatccatcagcaatacattggttaaacaaatatatcaacgagtacaacaacgcccagccttggctgtccctaaagagcaaataaacgatgtaaagatagacattccagcagtccctaaaggcagacaactcaagaccaaaatctcgtccttaatcagaaagctgcgtaatcaaaatccacaagctacgtttcgggcttccttgactattatcttatctacactacagggcagactaatgccatgtacaggaaaaaaaaatgtgaaacgcagctgtcacctgggagctctgggtatcacgggacgcactcgatcagccactcgaggctcattaggcattctggtagatcatcgtcctgcgtcctcatgtgagtctccatcaccaaatggcatgagggctccttgcctgtggcaaggcaagcaagagctaccactgcagctgccacagtcgagggccagaaggagagctgcttagggttctcaagtgagaggaaggccaggtggtttgccaggtccgctacactgtcatcagcatttgcagccttcagatagaaaccataggaaat

SEQ ID NO: 119205 - DNA, 283 bp, Zea mays
  unsure (1)..(283): unsure at all n locations
  Clone ID: MRT4577_40198C.1
cccangggataataaagatgtttacccgcgttttttttttttgggggttttttttattattttttaggtgattcaactattggtaaagaatggtttacagattagtagtggtctattaggcacaaaaatattgctgagcatatcaacattgttatcataattcttggtagatacgaatttccctgggggtttgcttgtttgggggaataaaattttttatcaaatgatgccttcttggggaaattggttttccccctgggggtctctttgaaaaaaatacttt

SEQ ID NO: 119206 - DNA, 1354 bp, Zea mays
  Clone ID: MRT4577_40199C.1
cattgattggctcgctcgaggccgggacatgcaaattcctcatcccaaccccaagtcacactccacctccgcaaccaaacgcgctagggtttccgcaccgcacctctagtcctcacccaccccaccccactaccggcgatggccaccgcggcggcacagggcggtagcgacaagccggcgctccggaagcccgtcttcaccaaggtcgaccagctcaagccgggcactaacgggcacaccctcaccgtcaaggtcgtcagcgccacccccgtgccgggccgcgcgcgcccgggcgcacccgccgccgcctcgtcccgcgcgccgcgcatcgccgagtgcctcgtcggagacgagaccggcgtcatcgtattcaccgcccgcaacgaccaagtccgtgtgatgtgctatcctcctttgcagttgatttgctgaagcccgatgccacggtgatcttgcgcaatgccaaaatcgacatgttcaaaggatcaatgaggcttgcagtggacaaatgggggcggattgaggctacagagccagccagcttcacagtgaaggaagacaacaacttgtcccttgtagagtatgaattggttaacgtggctgaataaccgtcgaagcgtttctgccccccctttcttctttttcacgcacgccataagatgataagaaaacgaacagcatctcgaagctgagtttatttgttacggtggcggtggacagggtcagcgtgaggctcggccgggtcgcgccgggggacatcgtgctgatgatctcccccgaggacccgcgcaagtcggtcgtcaagcgcgtcgtcgggatgcagggggactccgtcacctaccttgtcgaccccggcaaaagcgactcctcctccagaaccgtcgtggtaccgcaagatcatgtctgggtgcagggtgataatatctttgcttctcatgattcgaggcaatttggagccgtgccttatgggctgattacagggaagatcttttgccgggtttggccgccagagagttttggcgcaattgatgacgcaacgaagcagtcttaacgctgaggaggagccgaggaggtactgagagcacatggacccatattcgtttgctcgcgcccagagattctatactgcagggctgccctggggtgagctcgagagctttcgacgacctaccgcagcacatttctacagcgaagcaaagagcgttgtgtgtcttgattgatgtcccgtgtttttatagttttggtgtgtgacaagttctgaaacccaaatcggcacaggttccgagatagttttttttttgttttttggtgatagtgcaagcctgggtttgcaactacactacaacttcacatg

SEQ ID NO: 119207 - DNA, 681 bp, Zea mays
  Clone ID: MRT4577_4019C.1
aattcggcacgaggccctctcctaccatctcgtcggctcctcccccgtcggccgacccgcttctttaatggttttaaggtagcgcgctagttcatggaatctccggggctgttcgctgtagtggcactcttcgtcgtcgtcgtggcggcggcggccgccgacgatgcccagctgctggagcagttcaaggaggccgtgccgagccaggccgcggacctccgcgggtggagcgccagcgatggcgcctgcaggtttccaggcgctggctgcaggggcgggcggctcacgtcgctgtcgctcgccgccgtcccgctcaatgccgacttccgggccgtcgcggccaccctgctgcagctgagcagcctcgagacgctcagcctgcgcggcgccaacgtcagcggcacgctggccgccgtgccgaggtgcggggccaagctgcagtcgctcgacctgtcagcgaatgccggcctgcggggctccgtctccgacgtcgaggcgcttgtcgctgcctgcgccgggcttagcgcgctgaacctctccggcggttcgattggtgggccgaggtctgccggcgttgtcgcctccggatttgcccggctagacgctctcgacttgtccggcaacaagatctccggcgatggcgacctccggtggatggtgggcgcccggcgcggagcagtc

SEQ ID NO: 119208 - DNA, 405 bp, Zea mays
  Clone ID: MRT4577_401C.1
cggacgcgtgggcgagagacatgtgaaattggaactgatcagaggtgcctcctatgcatggacaagggatttctgatcagttccattttcccgttgaatcacgagagacatgtgaaattgctgattctttccaaaatccacctgaaagcaacatgtatgggtccatttcacaagtttgtgatacatttatgtcacaggacgtgtcatgtgtacccgagtcatccttaattttggacggcacatctgcatccataagtggtgatgaatttttgtcaagggcagtgtccaatggtttttctgccttttgtgagggtacacacactacctccagaatggtattagaagacactggctgtgtgaagaatctaatggctgaacgacaaaaagatgttgaagatgtaattg

SEQ ID NO: 119209 - DNA, 266 bp, Zea mays
  Clone ID: MRT4577_40200C.1
ggggcgcgcccgccctttttttttttttattttaacacactttggggccttttcaaccaagaacccgcgcgtttaaaaggagaagtgccggatttggattttccagccaaaaaacacccattcccgcggttttcggtttcccccaaccggaatctgtttttcggtttaaaccaggcgccaggttaaatggcttgtgcacatgcacccctaaagagcaagatttcccatcaaaggggggggaggtgggaatctcggagggttccttt

SEQ ID NO: 119210 - DNA, 298 bp, Zea mays
  Clone ID: MRT4577_40201C.1
caggccaagtatctgcatacaatcaactgttactattgtaggaggggagatggggacaacaatatcatcatgtgcaggatccatataatctatttgaataacaaatagacggtgggcgaacgaactatacttcttctctatgaaggggtacagagttgatcacaaacacttctgagccggtgcagtccaggctgggcaatattgatatagattatgaggttatgcataacccgatctttaaatataaaataaaatcccaactggctagtcatggtggtttgtttaatgaaggcaacta

SEQ ID NO: 119211 - DNA, 432 bp, Zea mays
  Clone ID: MRT4577_40202C.1
gggcccaaacaaaaatggggttgagggaccttagtacagcagtattcgaacacaaaatttcaccacgggtattcttaaacctttgtaacaaatatttttattttaaaacttgtttaaagacaaaattttagggttagacaaaaacacttagccaaaacatttttataatttcaggtaataaccaacctaatgtccagactcgcttagttttaaaattagcaaacaaattattgggaagaagaaacttcttgccaagcttaatttccttggaggggcttttaaagtttaaaaccaactttctttttgtagtccccgagaacctccatgagcttcccaaaatcaaacttgggggccttgagtattttccccttggggatgaaaactttttaaaggggaaaaattctggaggtaaatttttaaatttctttacaa

SEQ ID NO: 119212 - DNA, 1341 bp, Zea mays
  Clone ID: MRT4577_40203C.1
atggcgagaacgatgcttggagaattcaagacgcccgagcggttttggtcggaagctgtgaacacagcttgccatgccataaaccggctctacctacatcgccttctcaagaagacctcgtacgaacttcttaccggtaacaaacccaacatctcttactttcatgtatttgggagcaaatgttacattctagtgaagaaaggtagaaattctaaatttgcttccaaggcagtagaagggtttttactagggtatgactcagatacaaaggcgtatagagttttcaataaatcatcgggtttggttgaagtctctagcgacgttgtatttaatgagactaatggctctccaagagagcaagttgatcttgatgacatagatgaagatgatgttccaacggccgcaatgcgcacgatggcgataggtgatgtgcgaccacaggaacaacaagagcaagatcagccatcttcctccacaatggtgcatcctccaactcaagacggtgaacaggaagagctcaacaacttcaagagaaatgaagtttggagcctggtgccacgtcccaagcaaaatgttgtgggaaccaagtgggtgttccgcaacaagcaagacgagcacggggtggtgacaagaatcaaggctcgacttgtgacaaaaggttatgcccaagtcacaggtttggattttgaggagacttttgctcctgtggctaggctagagtctattcgaatattgttagcctatgccgctcaccactctttcaggttgtttcaaatggatgtcaagagcactttcctcaacgggccaatcaaggaggaggttgggaaagccgatcccactcttttcactaagacttgtgatggtgatctttttgtgtgccaaatttatgtcgatgacataatatttggttctactaaccaaaagtcttgtgaggagtttagcagggtgatgactcaaaagtttgagatgtcgatgatggtgaagcaactcaaggacgacaccttcatctcccaaacgaagtacactcaagatcttctcaagcggtttgggatgaaggacgccaagcccgcaaagacaccgatgggaaccgacgggcatgttgacctcaacaaaggaggacagtgttgcgtgcaactactttggatgaggcaaaccctttgggactttggctacaatctgagcaaagtcccactcctatgtgacaatgagagtgcaatccgcatgtcggataatcctgttgaacacagctgcactaagcacatagacatccggcatcacttcctgagagaccaccagcaaaagggagatatcgaggtgtaccatattagcaccgagaactag

SEQ ID NO: 119213 - DNA, 3216 bp, Zea mays
  Clone ID: MRT4577_40204C.1
atggatcctaagggaaaggggatggtggtcaacgacaaggaaaaggactccatcttcaatgagccaagagacgacaagcccactgactcaggctcgagtcacaagaagagggacgggaaaaggaagaggcgcatcaagaagatcatttactacgacagtgatgcctcatcatcttcactaagggatgacgacaacgacgacgactcttcgtcaaagagaaagacgatggaactagtggaaggcgagctggggaggttcatgatgatcaggggagaggagccaactcagacctacaataggctcaagaccctggtcaacaagatccgaagctatggaagcacaagatggacggatcatgatgtcgtccaactcatgctaaggtcatttactgtaattgacccccatcttgttaatcttatttgtgaaaaccctaggtacaccaagatgacgcccgaggaggtccttggaaaattcgtgagcaggcgcatgatggtgaaggaggcgcgatacatggacgacgcgctaaatggtccactgtccatctacgagtcgcagcccgttgctctcaaagcaacaagcagcaaggaggcgctaccaagcaaagtagcacaagtggaggctgccgtgctcaacaaggacgaaatggcacttatcatcaagcgcttcaagaccgcgctaaaaggacgtaaggagtactccaacaagaacaagacaaggggaaatcgctcctgcttcaaatgcggtaagactgatcatttcattgcacaatgtcccgataatgataatgaccagggacaagaaaagagcgggaagagggaaaagaagaactacaggaatgcgaagggcgaggcgcacctaggaaaggagtgggattctgactgctcttcatccgactccaacgatgaaggattggctgcctcggccttcgacaagtcttcactcttccccaacgaacgtcatacatgtcttatggccaaggaaaagaaggtacatattcgagatacccctaagtacacttcttctagcgatgaggaatcttctgatgatgaagtagattactcggatttatttaaggggttagatcgtgctaaagtagagaaaattaatgaattaattgatgctctaaatgaaaaagatagactactagaaaagcaagaggacattttgtatgaggaacatgacaagtttgttagtgttcaaaaatctcttgctttagaaattaagagaaatgaaatgctatcttctgagttatgtgcttgccatgaatctgtctctagtttaaagaattcaaatgatgaattaaaagctaagctagaggaagttaataaaactagttcatgtgtagagcatgtttttatttgtaatagatgtaaggattttgatgttgatgcatgtgatgaacatcttgcttctattgccaaattaaacgatgaggtggcaagtcttaatgctcaatttatgacttgcaaagttgaatttgataaattaaaatttgctagggatgcctacactgttggtagacacccctcgattaaggatggacttagttttcgaaaggaaaccaagaacttaacaagccaaagggctcccgttctcaacaaggagaaagggaaggcccctatggctagtagttcccaaaagaatcatgcctatatttatgataggaaatatcctaggaatgcttataatgataaatgttataatcatgctgcttataatgattcacatgctatgtttgcatctagctccacctttgctcatggtagaagtaggcctaggagaaattatgctacttctcatgcttctagaaaagtttgcaatggacctactactgtttatcatgcttgcgatacttcctttgtgctgtcatgcaaaaatacaaaagtagttgctagaaagttgggatccaaatgcaagggagacaaaacatgcatttgggttccaaaagctattgtgactaaccttgtaggacccaacacgagttgggtttatgcatccaggggctcaagctggattatcgatagcggatgcacgaaccacatgacgggggagaagaagatgttcacctcctacgtcaagaacaaggattcccaggatacgttcatctttggagatgggaaccaaggcaaggtgaaaggcttgggcaggatagccatcactaacgagcactcaatatcaaatgtatttttagtagagtcgctcagaagaagtgatggttcattagcatttaagggtgtattagacatcaagctctatttagttgacttttcgagagagaatgccggtctagatgcatgcttaatagctaagactaatatgggctggttgtggcatcgccgtctagcacatgttgggatgaagaaccttcataagcttctaaagggagatcatgtgttaggactaaccgatgtctgttttgagaaagacagaccctgtgtagcatgtcaggaaggaaaacaggacaaatcagaaacccaagggaccctaaagcgctttctaagaagggctcaaaacgaatttgagctaaagacaccacagcaaaatggcatggtagagaggaagaataggacactaatcgacatggcgagaacgatgcttagagagttcaagacgcccgagcggttttggtcggaagctgtgaacacagcctgccgcgccataaaccggctctatctgcatcgtctcctcaagaagacctcctacaaactccttaccggtaacaaacccaatctctcttactttcatgtatttgggagcaaatgctacattatggtgaagaaaggtagacactctaaatttgctcccaagacagtagaagggtttttattagggtatgactcaaatacaaaggcgtatagagtcttcaacaaatcatcaagattagttgaagtctctagcgatgttgtatttgatgagactaatggctctccaagagagcaagttgatcttgatgatatagatgaagatgaagttccgacagccacaatgcgaacaatggcgattggagatgtgcgaccacaggaactgcaggaacaagatcaaccttcttcctcgacactggtgtatcccccaactcaagacgatgtacaggtacctcaagaagaagggcagaatcaagggggagcacaaaaagaacaggttatggaggaagaagcaccacgagtccctccaactcaagtccaagcaacgatccaaagacatcaccccgtcgactag

SEQ ID NO: 119214 - DNA, 2976 bp, Zea mays
  Clone ID: MRT4577_40205C.1
atgcatcctaagggaaaggggatggtgatcaacgacaaggagaaggagtccttcatcaatgaaccaaaagacgacaagcccactgactcgggctcaagtcataagaagaaggatgggaagaagaagaggcgcatcatgaagatagtctactacaatagcgacgagtcctcttcttcccaaagagacgacgacgacgagaaaaagaaaatggtcaactcaaacttttctttttattattctcgcattccgcaaaattcgaatgctcatttgctttccattcctcttggtaaacccccacactttgatggagaggactacggattttggagtcacaaaatgtgtagccacttgttctctcttcatccaagtatatgggagatagtagagaatggaatgcaatttgatagtacggataatcccatgtttatcaatgaacacaaaaatgcacaagctaccactgttctattagcatccttgtgcagggaagagtaccataaggtgagcggcttggataacgccaagaaaatttgggacaccctcaagagctcacatgaggggaatgacgtcaccatgatcaccaagatggagtttgtggaaggcgaactaggaaggttcgcaatgatcaggggggaggagccaactcaaacgtacaataggctcaagaccctggtcaacaaaatcaggagctatggaagcacgagatggacggaccacgatgtcgtccggcttatgctaaggtccttcactgtccttgatcctcatcttgttaactctatccatgaaaatcctaggtacaccaagatgacgcccaaggaaatactcagaaagtttgtaagcgggcgaatgatgatcaaggaggcaagatatgttgatgaggcgtttaatggcccaatgccgatccacgagcctcaaaccattgctctcaaagcaacaagtagcagggaggcgctacctagcaaggtggcgcaagttgaggcggtcaggctaaatgaggaagaaatggccctcatcatcaagcgcttcaagacagcgctcaaaggtcgcaaggagcatcccaacaagagcaagacgaagggaaagcgctcctgcttcaagtgtggtaagattggtcactttattgctaactgtcctgataatgatagtgaccaggaacaaggaaagactggaaagagagagaacaagaaggtttacaagaaggctaagggcgaggcacaccttggaaaagaatgggactcggattgttcttcgtccgactccgacgacgaaggactcgccgccacggcctttaacaaatcgtctctcttccccaacgagcatcacacttgcctcatggcaaaggagaagaaggtaagcactcgaaatactattgcatatgcttcttcaagtgatggtgaatctagtgatgatgaagtagactacgcaagtttattcaaaggcttagatagaactaaaattgataagatcaatgaattaattgatgcgttgaatgagaagaatagattgctagaaaaacaagaggatcttttatatgaagagcatgataaatttgtaaatgtgcaaaagtctcttgctttagaagtcaaaagaaatgaaatgctttcaagtgaattatctacttgtcatgagtcaatttctagtctaaagagtgtcaatgatgacttaaatgctaagctagaagtagcaaataaatctagctcatgtattgaacatgtagtaatttgtaacaggtgtaaggattttaatgttgatgcatgtgttgagcaccttacttctattgcaaaattaaatggtgaagtggctagtcttaatgcccaacttaagactagcaaaaatgactttgataaactaaaatttgcaagggatgcctacactattggtagacacccctcaattaaggatgggcttggctttaaaagggaagccaagaacttaacaagccaaagagctcccattttcaacaaggaaaagggaaaggctcctatggctaatagtagtcaaaagaatcatgcatttatttatgatagaaaattttctagaaatgcttatcataataggagttgtaatgcttatgattcacatgccatgattgcttcaagttcttcctttgtgcatggtagagatatgcctaggagaaatgttgttaatgtgcctaggaaaatgcataatgaaaatgctactgatattcatgcctacaactctgattttgtactcacatgtaaaaatgagaaagtggttgctaggaaattaggggccaaatgtaagggagacaaggcatgcatttgggtccctaaggctattgttactaaccttgtttatgcatccgggggctcaagctggattatcgacatcggatgcacaaaccacatgacgggggagaagaagatgttcacctcctacgtcaagaacaaagattcccaagattcaatcatattcggtgacgggaatcaaggcaaggttaaaggactaggaaaaattgctatttcatccgagcattccatctctaatgtgtttttagttgaatcggtcgggtataacttgttgtccgttagtcaactctgtagtatgggttacatttgtttatttaacaatgtagatgtgtccgtctttagaaggtgtgatggttcattagcttttaagggtgtactagacggcaaactttatttagttgatttttcgaaagaagaggccggtctagatgcatgcttaattgctaagactagcatgggctggctgtggcatcgtcgtctagcacatgttgggatgaagaaccttcataagcttctaaagggggagcatgtgttaggtctaaaaaatgtatctttcgaaaaagatagaccttgtgcagcttgtcaagcaggtaaacaggtggggagtactcatcatagcaaaaatgtgatgaccacatcaagacccctggagatgctgcatatggacctcttcggacctgtcgcctacctcagcatcgggggaagataa

SEQ ID NO: 119215 - DNA, 4800 bp, Zea mays
  Clone ID: MRT4577_40206C.1
atggatcctaagggtaaggggatgatgattaatgacaaggagaaggagtccctcctaaatgagccaagagacgacaagcctaccgactcaggctcaagtcacaagaagagggatgggaagaagaagaagaggcgcatcgagaaaatcatctactacgataatgatgcctcttcattttcaccaagagacgacgatgacgacgactctttattgaaaaagaaaacggttaatcaaaattattcatttgattattctcgtattccattcaattctaatgctcatttgctatcaattccacttgggaaacctccacactttgatggagaagactactctttttggagtcacaaaatgcgtagtcacttattttctctccatcctagtatttgggaggttgttgaaaacgggatgcattttgatagtactgacaatcctgttttcataaatgagcaaattcataaaaatgcacaagttaccactgttttgctagcatctttgtgctgggatgaatacaacaatgtgagcggcttggacaacgccaagcaaatttgggacaccctcaagatctcacatgagggaaacgatgctacaatgatcaccaaaatggagttggtggaaggcgagttgggaagatttgccatgatcaggggagaagagccaacacaaacctacaacaggctcaagaccctggtcaacaagattaggagctatggaagcacaagatggacggaccacgacgtcgtccgactcatgctcaggtcctttactgtaattgacccccatcttgtagaccttattcgtgaaaatcctaggtacaccaaaatgacgcctgaggagatactcggaaaattcatgagcgggcgtatgatggtaaaggaggcgcgatacgtggatgatgctcttaatgcccctctacccgtctacgagcctcaacccgttgctctcaaagcaacaagcagcagggaggcgctaccaagcaaggtggcacaagttgaggctgccgggctaaacgaagatgagatggccctaatcatcaagcgcttcaagaccacactgaaaggacaagcaaggggaaagcgctcctgtttcaaatgcggtaagactggtcatttcatagcacaatgccccgataatgataatgatcaggaacaagaaaagtatggaaagaaagagaagaagaagaattacaagaaggcgaaggacgaggcacatcttggaaaggaatggaattctgactgctcttcatctgactccgatgatgaaggattggctgcctcggccttcgacaaatcttcgctcttccccaatgaacgccatacgtgccttatggctaaggaaaagaaggtatgtattcagaacactcacaagtatacttcttctagtgatgaagagtcatctgatgatgaagtagagtataccgatttatttaagggtttagatagagctaaagtagataaaatcaatgagttaattgatgctctaaatgaaaaaaatagattgctagaaaggcaagaggacattttgtatgaggaacatgaaaaatttgttagtgttcaaaagtcgcttgccttagaacttaaaagaaatgaaattctgtcttttgaattgtctgcctgtcaggaatatgtctctagtttaaagaatttaaatgatgaattaaatgttaagctagaggaggcaaatgcaactagatcttgtgtagaacatgtagctatttgcaacagatgcaaggacgttgatgttaatgcttgtgatgaacatcttattgctattacaaaattaaatgatgaggtggcaagtcttaatgctcaacttaagacttgcaaaattgattttgataagttaaaatttgctagggatgcttacacaattggtagacacccctctattaaggatggacttggttttcgaaagaaaaccaataacttaacaagccaaaagactctcgttctcaacaaggagaaagggaaggctcctatggctagtagttctcaaaagtgtcatgcctacacttatgttagaaaattttctaggactgctcataggagttatgatcatgatgtttttaatccacatgctatgtttgcctctagatctacttttgttcatggtagaagtaggcctaggagaaatcatgttgtgcatcatgtgcctaggaaagtttatgcatccgggggctcaagctggattatcgacaacggatgcacaaaccacatgacgggggagaagaagatgttcacctcctacgtcaagaacaaggattcccaggatacgattatttttggagatgggaaccaaggcaaggtcaaaggtttgggaaagatagccatcacaagcgagcactctatttcaaatgtatttttagtagagtcattagggtacaacctcctgtctgtaagtcaattgtgccacatgggctacaattgtttgtttacaaatgttgatgtatctgtctttagaaggagtgatggttcattagcatttaagggtgcattagacgacaaactctacttagttgatttttcgaaagaggaggccgatctagatgcatgcttaatagctaagactagtatgggctggctgtggcatcgccgtctagcacatgttgggatgaagaaccttcataaacttctaaagggagaacatgtgttaggactaaccaatgataaatcagaaacccaagggaccctcaagcgctttctaaagagggctcaaaacgaatgtgagctcaaggtgaaaaagataagaagcgacaacgggtccgagttcaagaatctacaagtggaggagtatcttaaggaggaaggtgtcaagcacgagttctccgctccctacacaccacaacaaaacagtgtgatagagaggaagaacaggacgtttatcgacatggcgaggacgatgcttggagaattcaagacgcccgagcggttttggtcggaagctgtgaacatagcttgccatgccataaaccggctctatctgcatcgccttctcaagaagacctcctacgaagtccttaccggtaacaaacccaacgtttcttactttcgtgtatttgggagcaaatgttacattctggtgaagaaaggtagacattctaaatttactcccaaggcagtagaagggtttttactagggtatgactcaaatacaaaggcgtatagagtcttcaacaaatcatcgggtttggttgaagtctctagcgacgttgtatttgatgagactaatgactctccaagagagcaagttgatcttgatgacatagatgaagatgatgttccgacgaccgcaatgcgcatgatggcgatagatggtgaacaggtacctcaaaaagagggacaggatcaagggggagcacatgaagaacaagtgatggaggaagaagcaccaagtgtccctccaactcaaatccgagcaacgatccaacgacatcaccccgttgaccagattctgggtgacataagcaagggagtaacgactcgctcaagattagctaatttttgtgagcattactcgtttgtctcttctattgagccttttagggtagaagaggccttgcaggatccggattgggtgttggccatgcaggaagagctcaacaccttcaagagaaatgaagtatggagcctggtgccacgtccaaagcaaaacattgtgggaaccaagtgggtgttccgtgacaagcaagacgagcacggggtggtgacaagaaacaaggctcgacttgtggcaaaaggttatgcccaagtcgcaggtttggattttgaggagacttttgctcctgtggctaggctagagtctattcgaatattattagcctatgccgctcaccactctttcaggttgtttcaaatggatgtgaagagcgctttcctcaacgggccaatcaaggaggaggtatacgtggaacaaccccctagctttgagggtgacaggtaccccgaccatgtgtttaaactctctaaggcgctctatggacttaagcaagccccgagagcatggtatgaatgccttagagatttcttaattgctaatgctttcaaggttgggaaagtcgatcccactcttttcactaagacttgtgatggtgatctttttgtgtgccaaatttatgtcaatgacataatatttggttctactaaccaaaagtcttgtgaggagtttagcagggtgatgactcaaaagtttgagatgtcgatgatggtgaagcaactcaaggacaacaccttcatctcccaaacgaagtacactcaagatcttctcaagcggtttgggatgaaggacgccaagcccgcaaagacaccgatgggaaccgacgggcatgtcgacctcaacaaaggagactcttatgctggatgcaaggttgataggaagagtacatcagggacgtgtcaattcctaggaaggtccctgatttcttggagttcaaagaaacaaacatctgttgccctatccaccgttgtgcccgagtatgttgccgcaggacagtgttgcacgcaactactttggatgagtcaaaccctccgggactttggctacaatctgagcaaagtcccactcctatgtgacaatgggagtgcaatccgcatggcggataatcctgctgaacacgaccgcactaagcacatagacattcgacatcactttctgagggaccaccagcaaaagggagatattgaggtgttccaaattagcaccgagaaccaactagccgatatctttaccaaaccgttggatgagaaaaccttttgtaggttgcgtagtgagctaaatgtcttagattcatgtaacttggattga

SEQ ID NO: 119216 - DNA, 741 bp, Zea mays
  unsure (1)..(741): unsure at all n locations
  Clone ID: MRT4577_40207C.1
gttttccctcgaggcgcggcnncgggtttgaattangctacagaaagttttncgcggaaccatcattcttagaacaacacttgccaactgagaagcggcacgtggatatcaagattcccaagttcacagtgtcattccaggtcaatatgaagcagtttctgaaagaaatgggcctcgaattacccttcctccgtgatgcagatttcactgatatggtcaaggaagatggatccagaaatccgttgtatctatccgacatacttcataaagcagttttggaggttaatgatgaaggcgttgaagaaacttctgtgagaattggcatagggaagccctcaccaggagagcactttgttgccgaccatcctttcttctttgtcattagggaggaggtgtctggctcagtaatgttcatggggcacatactggacccatcatcacaatcttaatttcgggctctgcacttttgtcacctatatattacacatatatcttgtatgatctgactttgtcagtctggttcaatgagatttttagtacttgagtaattcatgtagtggttcgtagttgtttgctttgtttttagtaacatatgagcatatagctactgtactaaactttacatcgtctcctgtgggaaaccatatgaagacaatgcatgcatgtgctcatgtatatcagttttgctttgcagaaatctgtagtcttgtccaatttataaaatagattttttttaatccg

SEQ ID NO: 119217 - DNA, 1812 bp, Zea mays
  Clone ID: MRT4577_40208C.1
atggcgcgcgctgctcgcctccttgccggcgtgcgtgccctgctccctagccgtggccagccgagtctgcgagcctgcactgtcaagctgatgatgatgaggaggatgattatgattatgcttatagtaatggttgcctttggtgcaatctatgctcagcaaaacggtgtggtagagaggaagaacaggacgcttatcgacatggcgaggacaatgcttagagagttcaagacaccagagcggttttggtcggaagctgtgaacacagcttgccacgccataaaccggctctacctacatcgcctcctcaagaagacctcgtacgaacttcttaccagtaacaaacccaacgtctcatactttcgtgtatttgggagcaaatgttacattctagtgaagaaaggtagaaattctaaatttgctcccaaggcagtagaagggtttttactaggatatgactcaaatacaagggcatatagagtcttcaacaaatcatcgggtttggttgaagtctctagcgacattgtttttgatgagactaatggctctccaagaaagcaagttgatcttgatgatgtagatgaagatgatgttccaacggccgcaatacgcatgatggcgatagcaaaatgttgtgggaaccaagtgggtgttccgcaacaagcaagacgagcacggagtggtgacaagaaacaaggctcgacttgtggcaaaaggttatgcccaagtcacaggtttggatttcgaggagactttgcccctatggctaggctagagtctattcgaatattattagcctatgccgctcaccactctttcaggttgtttcaaatggatgtgaagagcactttcctcaacaggccaatcaaggaggaggtgtatgtggaacaaccccatggttttgaggatgacaggtatcccgaccacgtttttaagctctctaaggtgctctatggacttaagcaagccccaagagcatggtatgaatgccttagagatttcttaattgctaatgctttcaaggttgggaaagccgatcccactcttttcactaagacttgtgacggtgatctttttgtgtgccaaatttatgtcgatgacataatatttgattctactaatcaaaagtcttgtgaggagtttagcagggtgatgactcaaaagtttgagatgtcgatgatgggcgagttgacctacttccttgggttccaagtgaagcaactcaaggatggcaccttcctctcccaaacgaagtacactgaagaccttctcaagaggtttgggatgaaggacgccaagcccacaaagacacctacgggaaccaacgagcacgtcgacctcaacaaaggagactccgattatggcgggtgcaaggttgataggaagagcacatcggggacatgccaatttctaggaaggtccctggtgtcgtggagctcaaagaaacaaacattcgttgccctatccaccgctgaggccgagtatgttgccgtaggacagtgttgcgcacaactactttggatgaggcaaacccttagggactttggctacaatctgagcaaagtcccactcctatgtgacaatgagagtgcaatccgcatggccgataatcctgttgaacacagccacactaagcacatagacatccgacatcactttcagaggaagcaccagcaaaagggagatatcgaagtgtaccatgttagcaccgagaaccagctagccgatatctgcaccaatcctttagatgagaaaaggttttgcaggttgcgtagtgagctaaatgtcttagattcgcgtaacttggattga

SEQ ID NO: 119218 - DNA, 507 bp, Zea mays
  Clone ID: MRT4577_40209C.1
ccttcaaaaaaaaaaaaatattttttttggcaaaagggaggaaagaaccccggggcttcaaagacacccagacccccagccatgcagggggccgggatccaatccggataaacaggaccctgacagggggagccacacatcacaccgttctcactttttatggaacccaattttagccccccgcagagaaaacgaagcgggtccaggattccaggaacccccctttttcgacgaacccccccccccaccaccttttctccctaagtcccaccctctcactccccacaggcaagcagctcccaagggccggggggggccccatttttgggaaccatcaaattacccccccttgcggaccagaattaaacaggggggtggttgggtgccccggagctagctagcttggtcgccccccggccggtactacggtcagccaaagaggggggggggctttttctcgccggtggcctcccgggggcccttgggggccttttttttctcgggggg

SEQ ID NO: 119219 - DNA, 248 bp, Zea mays
  Clone ID: MRT4577_4020C.1
cccaaacagtgtccccagcccttggagtttgacaccaaccaagtgagtgggattctgtagggagctccaagatagagatgtggcccctcagagcagaggtaggcatttctgcattctgcagagatgcacagatgcccagagagagccatgcttgtgcatatatgggtgtctacatgtgaggcaaaggcaggcactcaaacagatccacaaatggacagtgacccccaccccatgcacccatgcctctg

SEQ ID NO: 119220 - DNA, 1932 bp, Zea mays
  Clone ID: MRT4577_40210C.1
atggatcctaaggggaagggaatcgtgatcaacgataaggagaaggagtccttcgtcaacgagcccaaagatgacaagcctaccgactccggctcgggccatagacggaaggaagggaagaagaagaagacaaggcgcatcaaggagatcgtctactacgacgacagcgacgaatcttcctcttcccaaaaggacaacgacgacaacgactacaggaagacggtcaattcgaacttttcatttgattattctcgtattccacatagttcgaattcgcatttgctttccattcctcttggcaaacctccacactttgatggggaggactacggattttggagtcacaaaatgcgtagtcatttattctctctccatccaagcatatgggagattgtagagaatggaatgaaatttgatagctcggatagccctatgtttattaatgaacagattcataaaaatgcacaagctactactgtgttgctagcctctttgtgcagggacgagtacaacaaggtgagcggcttggacaacgccaagcagatctgggacaccctcaagatttctcatgagggaaatgacgttaccttgcttaccaaaacggagttggtggagggcgagcttggacggttcgcgatgataaggggcgaggagccaactcaaacatacaaccggctcaagacccttattaacaaaataaggagctacggaagcacgcgatggacggaccacgacgtcgtccgactaatgctaaggtcctttaccgttcttgatcctcatttggtgaataatattcgtgagaatcccaggtacaccaaaatgtcgcccgaagaagtcctaggaaaattcgtcagcgggcgaatgatgattaaggaagcaaggtacgtggacgatgccttgaatggaccgatcaacgagccgcaacctcttgctctcaaagcaacaagaagcaaggaggcgctacctagcaaggtggcacaaattgaggcggccggacttaatgatgaagagatggctctcatcatcaaacgcttcaagacggtgctgaagggtcacaaggggcagccaagcaagaccaagacaaaggggaagcgctcatgcttcaagtgcggtaagattggtcattttatcgctaactgccccgataatgatagtgaccaggaacagggaaacaagagggaaaaaaagaagaattacaagaaggcaaagggcgaggcacatattggaaaggagtgggattcagattgctcctcgtccgactccgacaacgaaggactcgccgccaccgccttcaacaagtcatccctcttcccaaacgagcatcacacttgccttatggcaagggaaaagaaggtaatcactcgtaacgctagtacttatgattcttctagtgatgagtctagtgatgatgatgacatagactactctagcttgttcaagggtttggatagaactaaaatagataaaattaatgagttgattgatgccttgaatgagaaggatagactcttagagaaacaagaggatttgttgtatgaagaacatgataaatttgtagaggcacaaaaatcctatgctttagaagttaaaagaaatgaaatgctttcttttgaactatctacttgtcatgaaaccatttctactttgaaaggtgtcaacaatgatttaaatgctaaattagaagtagcaaataaatccaattcttgtgtagaacatgttgaaatttgtactaggtgtaaagattttgacattgatgcttgtagtgaacacctagtttcaatttccaagcttaatgatgaattggctagtcttaatgctcaacttaagactagcaagaatgatttcgataaactaaaatttgcaagggatgcctacacaattggtagacacccctcaattaaggatggacttggcttcaagagaggaagctaa

SEQ ID NO: 119221 - DNA, 2181 bp, Zea mays
  Clone ID: MRT4577_40211C.1
atggatcctaaggggaagggaatcgtgatcaacgacaaggagaaggagtccttcgtcaacgagccaagggatgacaagtccaacgactcgggctcgggccacagacgcaaagatggaaagaagaagaagacaagacgcatcaaggagatcgtctactacgacagcgatgagtctacttcctcccaaaaggacgacgaccacaacgactacgagagaaagaaaccggtcaattcaaacttttcttttgattactctcgtattcctcaaacctctttgtgcagggacgagtaccataaggtgagcggcttggacaatgccaagcagatctgggacaccctcaagatctctcatgaggggaatgatgtcaccctgctcaccaagatggagttggtggagggcgagcttggacgattcgcaatgataaggggcgaggagccaacacaaacatacaaccggctcaagacccttatcaacaaaataaggagctacggaagcacgcgatggatggaccacgacgtcgtccgcctaatgctaaggtcctttaccgttcttgatcctcatttggtgaacaacattcgtgaaaatcctaggtacaccaagatgtcgcccgaagaagttcttgggaagttcgtaagcgggcgaatgatgatcaaggaggcgagatacgtggacgacgcgttgaacggtcctattcatgagcctcaacccattgctctcaaggcaacgaggagcaaggaggcgctaccaagcaaggtggcgcaagttgaggcggccaggctaaataatgaggagatggccctcatcattaagcgcttcaagatggcgcttaaaggtcgcaagggacagccaagcaagaccaagacaaaggagaaacgctcgtgcttcaaatgtggtaagattggtcatttcattgctaactgtcccgataatgaaagtgaccaggaaaaggggaacaaaagggagaagaagaagcattacaagaaggccaagggcgaggcacatatcggaaaggagtgggattcggattgctcctcctccgactccgacaatgaaggactcgccgccaccgccttcaacaagtcatctctcttccccaacgagcatcacacttgcctcatggcaagggaaaagaaagtttatgcatccgggggttcaagctggattattgacagcggatgcacaaaccatatgacgagggagaagaagatgttcacctcctacgtcaagaataaggattcccaagattcaattatattcggtgatgggaatcaaggcaaggataagtctgaaacccaagggaccctcaagcgcttcctcaggagagctcaaaatgagtttgagctcaaggtgaagaagataaggagcgacaatgggtccgagttcaagaaccttcaagtggaggagttccttgaggaggaagggatcaagcacgagttctccgctccctacacaccacagcaaaatggtgtgatgaagaagatgttccgacggccgctatacgaaccatggcgactggagaagtgcgaccacaggaacaagatgaacgagatcaaccttcttcctcaacaacggtgcatcccccacctcaagatgatgaacagggtagaggaggccttgctagatccggattgggtattggccatgcaggaggaactcaacaacttcaagcgcaatgaagtgtggacactggtgcctcgtcccaagcaaaatgttgtgggaaccaagtgggtgttccgcaacaaacaggatgagcacggggtggtgacgaggaacaaggctcgacttgtggcaaaaggttatgcccaagtcgcaggattgtaccaaatggatgtgaagagcgctttcctcaacgggccaatcaaggaggaggtgtacgtggagcaaccccctggcttcgaggatgaacggtaccccgaccactcttgtgaagagtttagcagggtgatgacgcagaaattcgagatgtcaatgatgggcgagttgaactacttccttgggttccaagtgaagcaactcaaagatggcaccttcatctcccaaacgaagtacacgcaagatctgctaaagcggtttgggatgaaggacgccaagcccgcaaagactccgatggggaccgacggacacaccgacctcaacaaaggagattttggtgaggcaatggggttaaagggccaagattga

SEQ ID NO: 119222 - DNA, 1152 bp, Zea mays
  Clone ID: MRT4577_40212C.1
gtttatgcatccgtgggctcaagctggattatcgacagtggatgcacaaaccacatgacggggaagaagaagatgttcacctcctacgtcaagaacaaggattcccaggattcgatcatctttggagatgggaaccaagcttgtcaggcaggaaaacaagtgggaagcactcatcacagcaagaatgtgatgacaacatcaagaccactggagcttctccacatggacctcttcagacccgttgcctaccttagcatcgggggaagtaagtatggtcttgtcattgttgatgatttttcccgcttcacttgggtgttctttttgcaggataaatcagaaacccaagtgaccctaaagcgctttctaaagagggctcaaaacgaatttgagctcaagaatatgcaagtggaggagtatcttgatgaagaaggaatcaagcacgagttctctgctccctacacaccacagcaaaatggtgtggtagagaggaagaataggatgctaatcgacatggcgaggacgatgcttggagaattcaagactcccgagcggttttggtcggaagctgtgaacacaacctgccacgccataaatcggctatatctgcatcgtctcctcaagaagacctcctacgaactccttactggcaatgtctcttactttcgtgtatttgggagcaaatgctacattttggtgaagaaaggtagacattccaaatttgctcccaaagcagtagaagggtttttactagggtatgactcaaatacaaaggcgtatagggtcttcaacaaatcatcgggtttggttgaagtctctagcgacgttgtatttgatgagactaatggctctccaagagagcaagttgatcttgatgacatagatgaagatgatgttccgacggccgcaatgcgcacgatggcgataggtgaggtacgaccacaagaacaacaggagcaagatcaaccatcttcctctacaatggtgcatcgcccaactcaagatgatggacaggatcatcaagaagaggcgtgtgatcaaggggagcacaagaagaacaagctatggaggaagaagcaccactggcccctccaactcaagtccgagcgacgattcaaagaaatcaccccgtcgatcaaattctgggtgacataa

SEQ ID NO: 119223 - DNA, 291 bp, Zea mays
  Clone ID: MRT4577_40213C.1
gcggccggggatacccactcgcctcgccctcgccgggtgctctccaggtctcccccaccaaccgcagcagcgagagcgagactgagaatggccgaggagccgtcgtccctcgtgtcctcccatctctcccgcctcgccgacctccgtcgcgcggcggtgccggccactcccaccgtgccacagcagcttcgcgtggggtgttcgcgccgccgtgcccagcgcgtcggtgccatggctggatccggcaagttcttcgtgggagggaactggaagtgcaacggaacaaaggac

SEQ ID NO: 119224 - DNA, 3634 bp, Zea mays
  Clone ID: MRT4577_40214C.1
gcttagaagactggttcaagagcctgacttaattggggtgagtcatttactagttgacgaaattcatgaacgcggcatgaatgaagattttctcattataatactacgtgaccttctaccaagacgtccagatcttcgccttgtactgatgagtgcaactataaatgctgaactattttccaagtactttggagatgctccagtgatgcacatcctggggttcacttttcctgttgctgagttatttctggaagatgttctagaaaagacatgttacaggatcaattccgaacgtgataattttgcaggtagttcaaggagaaagaggttttcatcagttaagagcgatccactgtctgatgtttttgaggacattgacattactaaggagtatggaaattacagcagttcaacaaggcagtcccttgaagcttggtctgctgctgaactagatttgagccttgtggaaagtacaattgagtatatttgtcactatgaagcagaaggtgcaatccttgcgttccttattggctgggatgaaattttgaagcttctggacaagattaaagggaataatttccttggtagtcctaatagatttcttgttcttcctttgcatggttctatgccaactgtgaatcaacgcgaaatttttgacagaccaccagctaatatgagtatgttcgagcagagccaaatttcagcgaaggagcaggtgaaactactagtttacaccttggagagctgtaccgcaggctcagaaaacgggcaagaaagtgttgtttggataactgacttccgtggatggacactgtcaagtactccgttggcacagtcacgtcaatcgatgaacatcattcagaaacactacccagggctgatagcagccgcgattcttttcgaccctccaaagatctttgaatccttttggaaggtttatgtatccgggggctcaagttggattatcgacagcggatgcacaaaccacatgacgggggagaagaagatgttcacctcctacgtcaagaacaaggattcccatgatacaatcatatttggagatgggaatcaaggcaaggtcaaagatgtgtctgtctttagaaggagtgatggttcactagcgtttaagggtgtattagacggtaaactctacttatttgatttttcaaaagaggaggccgatctagatgcatgcttaatagctaagactagtatgggttggttgtggcaataccgtctagcacatgttgggatgaagaaccttcacaaacttctaaagggagaacatgtgttaggactaacaaatgtttgttttgagaaagatagaccttgtgcagcttgccagggagggaaacaggataaatcagaaacccaagggaccctaaagcgctttctaaggagggctcaaaacgaatttgagctcaaggtgaaaaagataagaagcgacaacgggtctgagttcaagaatctacaagtggaggactatcttgaggaggaaggcatcaagcacgaattctccgctccctacacaccacagcaaaatggtgtggtagagaggaagaacaggacgcttatcgacatggcgaggacgatgcttggtgaattcaagacgcctgagcggttttggtcggaagctgtgaacacagcttgccacgccataaatcggctctaccttcatcgcctcctcaagaagacctcgtatgaagttcttaccggtaacaaacccaacgtctcatactttcgtgtatttgggagcaaatgttacattctagtgaagaaaggtagaaattctaaatttgctcccaaggcagtagaagggtttttactagggtatgactcaaatacaagggcgtatagagtcttcaacaaatcaacgggtttggttgaagtctctagcgacgttgtatttgatgagactaatggctctccaagagagcaagttgatctttatgatgtagatgaagatgacgttccaacggccgcaatacgcaccatggcgattggagatgtgcgaccacaggaacaacaagagcaagatcaaccttcttcctcaacgatggtgcatcccaaaactcaagatgatgaacaggttcctcaagaagagcctttcagagtagaggaggccttgcaagatccggactgggtgttggccatgcaggaagagctcaacaacttcaagaggaatgaagtttggagcttggtgcctcgtcccaagcaaaatgttgtgggaaccaagtgggtgttccgcaacaagcaagacgagcacggggtggtgacaagaaacaaggctcgacttgtggcaaaaggttatgcccaagtcgcaggtttggatttcgaggagacttttgctcctatggctaggctagagtctattcgaatattgttagcctatgccgctcaccattcttttaggttatttcaaatggacgtgaagagcgctttcctcaacgggccgatcaaggaggaggtatacgtggaacaaccccctggatttgaggacgaaaggtatcccgaccacgtctttaagctctctaaggcgctctatggacttaagcaagccccaagagcatggtatgaatgccttagagatttcttaattgctaatgctttcaaggttgggaaagccgatcccactcttttcactaatacttgtgatggtgacctttttgtgtgccaaatttatgtcgatgacataatatttggttctactaatcaaaagtcttgtgaggagtttagcagggtgatgactcaaaagtttgagatgtcgacgataggcgagttgaactacttccttgggttccaagtgaagcaactcaaggacggcaccttcatctcccaaacgaagtacactcaagaccttctcaagcggtttgggatgaaggacaccaagcccatgaagacaccaatgggaaccgacggacatgtcgacctcaacaaaggaggtaagtccgttgatcaaaagacataccggtctatgataggttccttgctttatttatgtgctagtagaccgaatattatgcttagcgtatgcatgtgtgctagatttcaatccgacccaagggagtgtcaccttgtggctgttaagcggattcttagatatttagttgctacgccttgcttcgggatctggtatccaaaggggtctacctttgacttaattggatattcagactccgattatgctggatgcaaggttgataggaagagtacatcagagacgtgccaattcctaggaaggtccctggtgtcttggagttcaaagaaacagacatccattgccctatccaccgctgaggccgagtatgttgccgcgggacagtgttgtgtgcaactactttggatgaggcaaaccctccgggactttggctacaatctgagcaaagtcccactcctatgtgataatgagagtgcaatccgcatggcggataatcctgttgaacacagccgcactaagcacatagacatccggcatcactttctgagagaccaccagcaaaagggggatatcgaggtgtaccacattaacaccgagaaccagctagccaatatcttcaccaagcctttagatgagaaaaggttttgcaggttgcgtagtgagctaaatgtcttagattcgcgtaacttggattga

SEQ ID NO: 119225 - DNA, 1747 bp, Zea mays
  unsure (1)..(1747): unsure at all n locations
  Clone ID: MRT4577_40215C.1
agcagtggtaacaacgcagagtacgggggagaagaagatgttcacctcctacgtcaagaacaaggattcccaggatacaatcatatttgtagatgggaatcaaggcaaggtcaaaggtttgggaaagatagccatcacaagcgagcactctatttcaaatgtatttttagtagagtcattaggatacaacctcctgtctgtaagtcaattgtgccacatggtctacaattttttgtttacaaatattgatgtatctgtctttagaaggagtgatggttcattagcttttaagggtgtattagacggcaaactctacttagttgattttttcgaaagaggaggccgatctagatgcatgctttggcatcaccgtctagcacatgttgggatgaagaaccttcataaacttctaaagggagaacatgtgttaggactaaccaatgtttgtttcaagaaagacaaaccttgcgcagcatgtcaggcagggaaacaggtgggaagcactcatcacagcaagaatgtgatgacaacatcaagaccactggagcttcttcacatggacctatttggacccattgcctaccttagcatcggnggaagtaagtatggtcttgtgattgttgatgatttttcccgcttactntgggtgttctttttgcaggacanatcagaaacccaagggacccttaaacacttcctaaggagagctcaaaatgaatttgagctcaaggtgaagaagataaggagcaacaacgggtccgagttcaagaaccttcaagtggaggagtaccttgaagaggaaggaatcaagcacgagttctccgctccctacacaccacagcaaaacgatgtggtagagaggaagaataggacgctcatagacatggcgaggacgattcttggagagttcaagatgcccgagcggttttggtcggaagccgtgaacatggcttgccacgccataaaccgggtctaccttcatcgcctcctcaagaagacgtcgtacgaacttctaaccggtaacaaacccaacgtgtcatactttcgtgtatttgggagtaaatgctacattctagtgaagaaaggttatgactcaaatacaaaggcgtatagggtcttcaacaaatcatcgggtttggttgaagtctctagcgacattgtatttgatgagactaatgactctccaagagagcaagtttatcttgatgatgtagatgaagatgatgttccaacggccgcaatacgcaccatggcgattggagatgtgcgaccacaggaacaaaaggagcaagatcaaccctcttcctcaacaatggtgcatcccctaacccaagacgatgaacaggacgagcacgaagtggtgacaaggaacaaggctagacttgtggcaaaaggttatgcccaagtcgcaggtttggactttgaagagagttttgctcctgtggctaggctagagtctattcgcattttgttagcctatgccgctcaccattctttcaggttgttccaaatggatgtgaagagcgctttcctcaacgggccaatcaaggaggaggtgtacgtagagcaaccccctggctttgaggatgaacggtaccccaaccacgtgtgtaagctctctaaggcgctctatggacttaagcaagccccaagagcatggtatgaatgccttagagattttctaattgctaatgctttcaaggttgggaaagccgatccaactgatagtcgcctagagggggggtga

SEQ ID NO: 119226 - DNA, 277 bp, Zea mays
  Clone ID: MRT4577_40216C.1
agaaatgtactttccacactgcaaggacgccgcaaatcttatccgaaaccaatcatcgtcggaactctgactacaaatgaaacaagaaaagggctctcacaatgaaggaaaacttttttttttttttttggaaacgtaattgtttgttggtacactggcggcacatgcagtgattgtgagcgggcgacaaagcaaggcctatcatgcatgtagtacggtatagaactgttggggtagaaggaggcagttgtgctcacattagttagctggctgggtg

SEQ ID NO: 119227 - DNA, 705 bp, Zea mays
  Clone ID: MRT4577_40217C.1
gcgtaaacagtatgggagtcctgttcacctatttataggcacgggacgcagcccgagtaaaaatacgtttatgaccttaacgattacatacaaagtttacgaaatgtcacaaagataacatcgtcatttgtatttaataatactagaacatgaggcgcccttacgggcgccctatcagaactatcgtatacaaagctgaacaatagtttataaggaaactaaagaaaggttcatatatgtgaatcacatggtaacatgagtagtgatgattgttctttattttaccaagatggtcatccgtagccttggacatctctagaggcaacctaagccacaacttgaaagaggcagacgaaaaaaatatcattcagataagatataagcatatctagaacaggataaactgaggaaacaaggagtgagacatggaaggcaatacattcatatttgtcaggccttgcaaaatttgtttcacaactctagcaagatgctcgatagggagggactacctctatgcaaaatgaggttgtttgcataagttgcagaccatcttatggtaattcccattaaaaagagcgtgaaaacataagtagaccagtaatcaacaaagtgaggaatgactgtaaggaggatccatgagaaagggatgcccatgaaagtactaaactaatcacatatgatgcgaacagaatctggatagtacct

SEQ ID NO: 119228 - DNA, 863 bp, Zea mays
  Clone ID: MRT4577_40218C.1
cataaatatatttttttagatgatccacgcccacgactgactttatttgaaaggtctgacctatcaatgaacttttgcatcagacaaatcgcagtctctctctcatgcccaatcgcacatttgaccatccatagtttaggatccttcaccgagggcagcagagcttgctgttctacttctgcagcttcctcaccgtattcaatatgagtagatcttgcgtatctctcccgcacttgtctctccatttcatcaatgtcctcttcttcatccctcataggaatagaatgacgtcttgaacccctaacaacatcctcatcagggaggtccgccccagcatcattaataaaatcgtcctcgccctctccttcgtcctcttcttcctcatcctcgtcgacctgggcctcctcgtcgaagaatcctcgcaccccgccgccacccttcttcctcggtcggccaccgccgtcgtcatcctcatcgtcctcgtcctcgatggccgagtcgtcgataaagttgtcttcccgcgaccgcttccgcccgccgccgctcttggcgccgccgccgccgcgggaggccttcccgcgcctcgtctcctcctcgtagtcgtcctcctcatcctcatcctcgtcgtcgtccaggtcataggcatcctcctcttcctcctcatcgacctcgtcgtcgtcgtcgttgtggtcgcgccgagccatcgatttggcggctaggttttcgagctctcgcgggatgcacgcagcggaaggggaaactcctcgcggcgaatcgtgtgactgtgtgagcgaagaagaggcgagaccgcgagcggcgagcgcgagggttagagccgacccggccggcctcgaggtacccaa

SEQ ID NO: 119229 - DNA, 229 bp, Zea mays
  Clone ID: MRT4577_40219C.1
agaatggaacccatttgtaggacttaaaccatggggcgaactcttggtttttacccctgctataaatgggggattttacccccccttttccatatccttgggggggacgagccccccccattgggccagaccaccaaaaaaagattagggggtcctttcccagggggggggggattttttattctcccctggatagacaccctcacttggaaagggttcctcttttttt

SEQ ID NO: 119230 - DNA, 604 bp, Zea mays
  unsure (1)..(604): unsure at all n locations
  Clone ID: MRT4577_4021C.1
cgctgctcaggtcgatgttcctcttcctcttccatggccagcgcccccttaggtcctctgctcgggtctccctcccatggcgcctccctctgccggccgccaatcttcctgcttggatctcgcccagctcgacctctgcttctcctgctagccgcgagcccctgctccctgatttttccttgctcgctcctgagtcatggagttcctgcgcgccccctcagctcgctccctgtgcaccgcggcatcgcctctccctggccgcggtctcctccagctcgccggagctctctgccgcgcctgctacttccccggccgtggtagtcgctgctccagcctatggtcgagctcgccccagcgccgtggcttcccaattccttctagtcgcgcgcgtgaattctcttcgtctggtcttaattcccgtcgcgtcgtcgacctcgccaaatgcgttcgtcatttggtcctgtgtcgttaagctcgttgaccgtgttcgctaccgcgtgcgcttgttcctaatgcgcatcgcgcagtagttaggtctcgcgcgccgtggttttgaagctatgcgcgntncgtcgtgcccacgtcatgtgccaatattctctcc

SEQ ID NO: 119231 - DNA, 860 bp, Zea mays
  unsure (1)..(860): unsure at all n locations
  Clone ID: MRT4577_40220C.1
gccggccggttcgggctaactctttttcttctcttccagccgcaatacacatccggccgccagggaatggagctgcgcgctgcatgcatgtctcctttttttttttttctgtttgcctacgcgcagcatagttctgttcttttcgcatgcgtgttcttttcgcatgcctgttgcatgcatgttacttctctctgtttctgttttttttttctttctgcgcagcctcatcggaccgcagagagcaccggcggctggctctggccgactgcgccctgcacagaggcacacagccgcccactctctgtttgctttctgtttttttttctttgccgcaccgttactcggccgccaaggagaactagacatttgcactgtgcaattgaactcgaatctagtcctcgtttactcgaatcccttactgtgtgtttaaatatatgagatgaatatcttgtaatgggatcgagttttggagataaaaaaaatcgtagatccgggccccgcgatatttctgttattttctgtgatgattttagtgcatctatgcacattcacgcggtttaaaaaattagggttctaaccctaattttattctgtgactttttcttatctgttcttgaccgtggttcaaaatcacgagtctcttttgtctctgttgacatatgtagcgattaaggttaggtcataaaaccctaactctaaacagttgtgagagctctctggtttgaggccgagacataatatgtcccttacagtggccgaacctaaatcttatggttaggaaaaccctaacccagagcatcaactatttcnttctattctaatctctgntctcngggtgatgaatgatgataaaaaaatga

SEQ ID NO: 119232 - DNA, 836 bp, Zea mays
  Clone ID: MRT4577_40221C.1
ggccgggccgggactcgcctataattctcccgtccccttcctcctcccattccctgcctcggcacgcccgtcgacctcgaatcaaccagcagcagctcgaaacgaaacgaaacgaaccaatccaaccaactcgccagttgccaccctccaaagccgcagcccccatcccaccaccggccaggcaggcagagcgtgccacgcgccatgtcaggcacgtcttcgttcacaaccggggagtcgtctcgagccggcgagcaaccggagcgcgacgaggtggttgagttcaaggcccgcacgtgggtggcactctcctccatcatcgtcgtccacagcgccaacgacgaggggagacggatgctcgcgctccgtgcctccgacatctttctcgacctccagcccccgcaggtcggcgcctcctacctagtcctgcccgatcgcatcgtcaagcaccccaggtatgcagaccaccccgtcgtcttgtccgcctgctccgaccacttcctcttccgggctaccccggccgagggcccctcgaacctcatctgcttcttcgttggcgacgtcaacgcccgcaccgtcgtccgcctccccgaggtccccttccacatggccgtcaacaccatcccgcatccgcaatacagcattggcctcatcgccgacccgcgatcgcgacacggtggtcattacatggtggcccagctccacccgacctttacgacccaccacacgaccctgctatgctactccagcgtcaccgaccagtggaccgccaggccgctggcctcaccgagagcgaggagcacatcgctggggcgccacggcgtccttgccatggc

SEQ ID NO: 119233 - DNA, 375 bp, Zea mays
  Clone ID: MRT4577_40222C.1
ggccgcttttttttttttttttttcttttttttttttttttttttttttttttttttttttttggtttatttatacaagcatccattaattccttaagtccaagcgctggattggctggtccacctagaccacaaaggcaagagccgcgattgcccggggcttacgaggcaaaaaaagaaactggggggggggggggcctgaacagaaggaaaaaaaccttgttcacctttccaattattccaggttaacatttgccacattacggactacaggactttcgataatctggtgaaaaaattacgaaatttccacaatctaccaaatgaagatcaactacttaagcttttcatgatttacaagccatacaagcccat

SEQ ID NO: 119234 - DNA, 485 bp, Zea mays
  Clone ID: MRT4577_40223C.1
ccctactacacgccctccgctgcggcgggcaaagctttttcccacaggacggaatccatgaccgagaggcccaaggcttcatatgcagccaagactaacaaactcaagctcgactacaactacgccatcaatccctacatcaggggcgagcgcacttcacttaaaaagctccctcccaaggagaacaggtggaagatgaagaggactatcacatgtccaagtcgccgttaatgacgaggatgatcaagatgttcctgaggaggatgaagatcatgaccagtgatggagctcctccagacaatggaccgtgcttcatccaacaatgagatcaatacccaacgccccgtggtgatcacaataaaagagcctatatccatgtactagaattattcagaatgactccacatagagcagttctatccatactttcgacccgctataaccgatagcgctcctctttggcaccactggcgggtggttctgcc

SEQ ID NO: 119235 - DNA, 603 bp, Zea mays
  unsure (1)..(603): unsure at all n locations
  Clone ID: MRT4577_40224C.1
gacgaagctccgacccctttcaccttgacctggtttcgttttcgttagccgctcagggctccacttccacttggtcctgcccgacttcgaggtgcacacgagcaagatgcgcacgcggctggcgatgcacgatccacgtccaggagcacgtgcgcgagtgcagccacacacaggcgctggtggtggcggcgctggaggtggacgcggaccctatcctcttcgggttgtcgatcgacggcatcggggagccgaacacgacaacggtaatacttgtactgggggtcgtgaaggcggaggccctgcacgctgaagcgctggcgtggacaattagaggtgcgggccccacaccgacggccgtgatccaaatccaagaaggggaagaggaggtatgaccttaacatgaagaacgcggtctggagctgaagcacactcaaggtgacagcaaccgcagcgcaggtgcatatccttgccgccagggtcatggtcacggcatccttgtactagcaatagattaggaatgtgatagtgctatctgatcagcatacacggacaagggaaggggaacgccatcgacatggatgngtacgcttccttctcgcatct

SEQ ID NO: 119236 - DNA, 764 bp, Zea mays
  Clone ID: MRT4577_40225C.1
cctcgaggccggccgggatccaaatcacccttccccttccccttctcttccaccaccaccaccaccaggccgccgcctcgtcgtcctcaattctcctttcgaatttagaatccccgtgctgagagttgagtgccgccttggttgctccgtactggactcgattcctcatcgcagcagaagcatcccgtcccctccgcttctccttgctctgctctgctaacaaacagacaaaaaaatagcatcatgtcggaggtgaaggactccaatgtgcctgctgcacttgatggaaatcctcaacctatggaccaaactgaagacaattctatgccctcagcacagcaacaggaagaagcaatcaagaagaagtttggaggactaatgcccaaaaagcccccactcatctcaaaggatcatgagcgggcctactttgattctgctgactgggctctagggaagccaacacgccaacaacagcaacaacgtgcaaggcgccctatttacacttcgtcagaaaacgaggacggagacggggctggtgctgaggatatgaacatcaattgaagtggactagtggagtggaatgcctgctcagattggttgatgagcaagtcgtcactatatgtcaagtgttgtagtttgctttgcaattattggaggaattaaatgatcgtctgctgggttcatgagtcgaacatttgatatatatggcctattatttactaatatatattttaaaaaagaaaaaaaaaaaaaaaaaagcggcc

SEQ ID NO: 119237 - DNA, 688 bp, Zea mays
  unsure (1)..(688): unsure at all n locations
  Clone ID: MRT4577_40226C.1
ccggaaccggaaactccccggngtctgacccacgccgtccggggaaatcctcaacctatggaccaaactgaagacaattctatgccctcagctcagcaacaggaagaagcaatcaagaagaagtttggaggactaatgcccaaaaagccaccactcatctcaaaggatcatgagcgggcctactttgattctgctgactgggctctaggaaagcaaggtgtggccaaacccaaaggaccgctggaggcacttaggccaaagcttcagccaacacgccaacagcagcaacaacgcgcaaggcgctccatttacacttcgtcagaaaacgaggacggagatggtgctggtgctgaggagatgagcatcaactgaagtggagtggaatctgtaggacgtgggtacggttgttgcagaatcgcagcttgctttggccattgccagaattgattgctgagtaagtcgtcagtatatgtcaagtgttgtattttgctttgcaattgaagggcagagagtgattcatgtctatacagtttcatgtatgactgctgggttattgagttcaacattggatatgcatgatgggatggcctattatgtagtgtatatatataaattactgcatagtacgtgttcgcgtgaacttatgagcactacttttcagtttcagaatagtgtttttttttctctc

SEQ ID NO: 119238 - DNA, 1138 bp, Zea mays
  Clone ID: MRT4577_40227C.1
ggccgggccgggggtactgatgaccctgccagccatgtgcagtgctgcgagtggagacgagagagaaaacagaagagagcagagctcgggccggccgcggcctggccgaacggaaccggaggtagggtaggcgggccccacccccacaagctctacgctctacgctctgctctgctcctgcgtgcgtggtctctttcctcccctcttcatccagatccggacccgaccgccgatccatccaaatcacccttccccttccaccaccaccaggccgccgcctcgtgtcctcaattctcctttcgaatttagaatccccgtgctgagagctgagtgccgccttggttgctccgtactggactcgattcctcatcgcagcagaagcatcccgtcccctccgcttctccttgctctgctctggtaacacacagacaaaaaaaaatatcatcatgtcggaggtgaaggactccaatgtgcctgctgcacttgatggaaatcctcaacctatggaccaaactgaagacaattctatgccctcagcacagcaacaggaagaagcaatcaagaagaagtttggaggactaatgcccaaaaagcccccactcatctcaaaggatcatgagcgggcctactttgattctgctgactgggctctagggaagcaaggtgttgccaaacccaaaggaccgctggaggcacttaggcccaagcttcagccaacacgccaacaacagcaacaacgtgcaaggcgccctatttacacttcgtcagaaaacgaggacggccggcaggctgctggagaggatatgaacatcaattgaagtggactagtggagtggaatgcctgctcagattggttgatgagcaagtcgtcactatatgtcaagtgttgtagtttgctttgcaattattggaggaattaaatgatcgtctgctgggttcatgagtcgaacatttgatatatatggcctattatttactaatatatatttttattatctggggaaaaaaaaaaaaaaaaaaaaaaaaaaaagagaaaagagtgccttgaccgcttggtcaggttgccgtgctcagtggattttcaatccagaacacgaacaagatggcttacatcaaaaaaaaaaaaaaaaaagcggcc

SEQ ID NO: 119239 - DNA, 1064 bp, Zea mays
  Clone ID: MRT4577_40228C.1
ccggccgggacggaaccggaggtagggtaggcgggccccaggagcacccccacacgctctacgctctgctctgctcctgcgtgcgtggtctctttcctcccctcttcatccagatccggacccgaccgccgatccatccaaatcacccttccccttccccttctcttccaccaccaccaccaccaggccgccgcctcgtcgtcctcaattctcctttcgaatttagaatccccgtgctgagagttgagtgccgccttggttgctccgtactggactcgattcctcatcgcagcagaagcatcccgtcccctccgcttctccttgctctgctctgctaacaaacagacaaaaaaatagcatcatgtcggaggtgaaggactccaatgtgcctgctgcacttgatggaaatcctcaacctatggaccaaactgaagacaattctatgccctcagcacagcaacaggaagaagcaatcaagaagaagtttggaggactaatgcccaaaaagcccccactcatctcaaaggatcatgagcgggcctactttgattctgctgactgggctctagggaagcaaggtgttgccaaaccaaaaggaccgctggaggcacttaggcccaagcttcagccaacacgccaacaacagcaacaacgtgcaaggcgccctatttacacttcgtcagaaaacgaggacggagacggggctggtgctgaggatatgaacatcaattgaagtggactagtggagtggaatgcctgctcagatgggttgatgagcaagtcgtcactatatgtcaagtgttgtagtttgctttgcaattattggaggaattaaatgatcgtctgctgggttcatgagtcgaacatttgatatatatggcctattatttactactatatatttttattatctgtggataaacatttgatatgcatgaggtggccgagctgtgactgtgagtagggctggacgagatactcgtagcttgattgctcgctcgattcggcgccgatatctaagagaatccttggatgaagctgggcggtcatcaccgaattctgga

SEQ ID NO: 119240 - DNA, 1153 bp, Zea mays
  Clone ID: MRT4577_40229C.1
ccggccgggggggcacgagcagccatgtgcagtgctgcgagtggagactagagagaaaacagaagagaggagagggccggccgcggcctggccgaacggaaccggaggtagggtaggcgggccccacccccacaagctctacgctctacgctctgctctgctcttctctactcctgcgggcggggtccctcgaggccggccgggatccagatccggacccgaccgccgatccatccaaatcacccttccccttccccttctcttccaccaccaccaccaccaggccgccgcctcgtcgtcctcaattctcctttcgaatttagaatccccgtgctgagagttgagtgccgccttggttgctccgtactggactcgattcctcatcgcagcagaagcatcccgtcccctccgcttctccttgctctgctctggtaacacacagacaaaaaaaatagcagcatgtcggaggtgaaggactccaatgtgcctgctgcacttgatggaaatcctcaacctatggaccaaactgaagacaattctatgccctcagcacagcaacaggaagaagcaatcaagaagaagtttggaggactaatgcccaaaaagcccccactcatctcaaaggatcatgagcgggcctactttgattctgctgactgggctctagggaagcaaggtgttgccaaaccaaaaggaccgctggaggcacttaggcccaagcttcagccaacacgccaacaacagcaacaacgtgcaaggcgccctatttacacttcgtcagaaaacgaggacggagacggggctggtgctgaggatatgaacatcaattgaagtggactagtggagtggaatgcctgctcagattggttgatgagcaagtcgtcactatatgtcaagtgttgtagtttgctttgcaattattggaggaattaaatgatcgtctgctgggttcatgagtcgaacatttgatatatatggcctattatttactaatatatatttttattatctgtggataaacatttgatatgcatgaggtggccgagctgtgagtgaccgcttggtcaggttgccgtgctcagtggattttacaatccagaacacgaacaagatgcaaaaaaaaaaaaaaaaaacccgcggccctataggagtc

SEQ ID NO: 119241 - DNA, 222 bp, Zea mays
  Clone ID: MRT4577_4022C.1
aacagtaggacaccgattactgacgttggcaggtcacaacacttcagcgtgattggtacccatgatattgggcatgagtaagccaaaccggaatatctctaacagggttatgacataaggacccgttatatgcactgtacttgctccacctctctgaacagaacccttacattggctgacttgagactgataagaccgactccagtcgcaagtagcatacca

SEQ ID NO: 119242 - DNA, 307 bp, Zea mays
  Clone ID: MRT4577_40230C.1
aatgcggcacgagggtgaagtccagcgtgtgtgacatcccgttgttggggatgctcttgacgaagacctaacagcatgctcgagagctatcctacaggacctggaaaatgccgagcaatagcatcgccctggggagctcccaagaagtgttccacccgggcgccctcaaggcggcgggcggtgagttcatgtgcaccctcatcttcatcttcatcggcctgacctccggcatggccttcatcagtctgaccggtcgcggcccgacgaccccgaggggcctgatcgctggtcgtgttggacacgcagt

SEQ ID NO: 119243 - DNA, 404 bp, Zea mays
  Clone ID: MRT4577_40231C.1
acgtgcaaacaactctgaaaagtatattagacacatggcagtcctacatgacgaaattaagcacatcatatatagctagatagagggacgaatcacaccaacactgatcctgctgttgagtagatcaatgaattataactctctaacctaggcagacatatatcatgcatgcataccatggcagatagatcaactacagctggtgaaaggggggcccttctcgttgccatcaaggcacaagcgcctcgctgctggagaagaagtgagcccgagcttgcacctgtcaccaggccttcttctgctacgacgacctggtgacccgaccagggaaggatgccgtcctgaaacacggcctccagggggatggaggcttcaaccacgaaatcgatgttggtgaggctgct

SEQ ID NO: 119244 - DNA, 389 bp, Zea mays
  Clone ID: MRT4577_40232C.1
cccacgcgtccgcacatgtccgcactgattcacaggcggatcctcacgatctggctctgcttggcatattgtggcgtatgaaagctactactagagctgaatccactcgcgaggcgtctattgaagggctgcagtcaaatcagagcgcgataaatgtgagactgctgactcgcaagatcacttccttgcgcgctgagcttactgatcatcagaaggaccacgtaatctacaactccacatttgcctgggcaaagcagcaggtccagaaatctattgcattgcagactgctataggcatgtgtgacaccctcttggctctaaggagctgctctgtgattgactcctgatgctaatttctacacggacggtataatacactagacatgaag

SEQ ID NO: 119245 - DNA, 2530 bp, Zea mays
  Clone ID: MRT4577_40233C.1
gtttatgcatccgggggctcaagctggattatcgacagcggatgcacaaaccacatgacgagggagaagaagatgttcacctcctatgtcaagaacaaggattcccaggatacgattatctttggagatgggaaccaaggcaaggtcaaaggcttgggaaagatagccatcaccaacgagcactccatttcaaacgtttttctagtagagtcgctggttacaacctcctgtctaaggagtgatggttcattagcatttaagggtgtgttagacgacaaactctatttagttgatttttcgaaagaggaggctgatctagatgcgtgcttaatagctaagactagcatgggctggttgtggcattgccgtctagcacatgttgggatgaagaaccttcataaacttctaaagggagaacatgtgttagtactaaccaatgtctgcttcgaaaaagatagaccttgtgcagcttgtcaggcagggaaacaggtgggaagcactcatcacagcaagaatgtgatgacaatgtcaagaccactggagcttctccacatggacctcttcgaacccatcgcctaccttaacatcgggggaagtaagtatggtcttgtaattgtagatgacttttcccgcttcacttgggtgttctttttgcaggataaatcagaaacccaagggaccctaaagcgctttctaaggagggctcaaaatgaatttgagctcaaggtaaaaaagataaggagcgacaacgggtccgagttcaagaacttacaagttgaggagtatcttgaggaggaaggtgttaagcatgagttctccgctccctacacaccacagcaaaacggtgtggtagagaggaagaacaggacgcttatcgacatggcgaggacgatgcttggagaattcaagatacccaagcggttttggtcggaagctgtgaacacagcttgccacgccataaaccggctctatctacatcgtctcctcaagaagacctcctacgaactccttaccagtaacaaacccaatgtatcttactttcgtgtattcgggagaaaatgctacattttggtgaagaaaggtttggttgaagcctctagtgacgttgtatttgatgagactaatggctctccaatagagcaagttgatcttgatgatatagatgaagatgatgttccgacggccgcaatacgcaccatggcgattggagatgtgcgaccacaggaacaacaagagcaagatcaaccttcttcctcaacgatggtgcatcccccaactcaagatgatgaacaggttcatcaagaagaggcgtgtgatcaagggggagcacaagaagaacaagttatggaggaagaagcatcactggcccctccaactcaagtccgagcgacaactcaaaggaatcaccccgtcgatcagattctagatgacataagcaagggagtaactactcgctcaagattagctaatttttgtgagcattactcgtttgtctcttctattgagccttttagggtagaagaggtcttgcaagatccggactgggtgttggccatgcaggaagagctcaacaacttcaagaggaatgaagtttggagactggtgccatgtccaaagcaaaatgttgtgggaaccaagttgtttcaaatggatgtgaagagcgctttcctcaacaggccaataaaggaggaggtgtatgtggaacaaccccatggctttgaggatgacaggtaccccgaccatgtgtgtaagctctctaaggcgctctatggacttaagcaagccccaagagcatggtatgaatgccttagagatttcttaattgctaattctttcaagtcttgtgaggagtttagcagggtgatgactcaaaattttgagatgtcaatgatgggcgagttgaactacttccttgggttccaagtgaagcaactcaaggacggcactttcatctctcaaacgaagtacactcaagatcttctcaagaggtttgggatgaaggacgccaagcccgcgaagacacctatgggaaccgacggacatgtcgacctctacaaaggagacttcgattatgctggatgcaaggttgatagaaagagtacatcagggacatgccaattcctaggaaggtccctagtgtcttggagttcaaagaaacaaacctccgttgccctatccaccgctgaggtcgagtatgttgccgcaggacaatgttgcgcgcaactactttggatgaggcaaaccctccgggactttggctacaatctgagcaaagtcccactcctatgtgacaatgagagtgcaatccgcatggcgaataatcctgttgaacacagccgcactaagcacatagacatccaacatcactttctgagagaccaccagcaaaagggagatatcgaggttttccatattagcaccgagaaccagctagccaatatatttaccaagccattagatgagaaaaccttttgcaagcttgaaagggaaatgtgcccttgggccatttctaagtattttggtgatttag

SEQ ID NO: 119246 - DNA, 1344 bp, Zea mays
  Clone ID: MRT4577_40234C.1
atggatcctaagggaaaggggatggtggtcaacgacaaggaaaaagagtccatcttcaatgagccaagagacgacaagcctaccgactcaggctcgagtcacaagaagagggacgggaagaagaaaaggcgcatcaagaagattatctactacgacagcgatgcctcatcttattcaccaagggacgacgacgacgactcctcgtcaaagaaaaagacggtcaatcaaaattattcgtttgattactctcgcattccctacaattcaaatgcgcatttactatcaattcccctcagaaaacctccacactttgatggagaggactattcattttggagtcataaaatgcgtagtcatttattttctctccatcccagcatatgggaaattgtagaaaatgggatgcatttcgatagcactgataatcctatgatcattaatgaacaaattcataagaatgcccaagccactactgtcttgctagcttcactttacaggaatgaatataataaagtgagtggcttggacaacgctaagcaaatctgggacaccctcaagatatctcatgagggaaacgacgccactatgatcacaaagatggaactagtggaaggcaagctggggaggttcacgatgatcaggggagaggagccaactcagacctacaacagactcaagaccctggtcaacaagatccgaagctatggaagcacaagatggacggatcatgatgtcgtccgactcatgctaaggtcatttactgtaattgacccccatcttttcaatcttattcgtgaaaaccctaggtacaccaagatgacgcccgaggagatcctcgaaaaatttgtgagcgggcgcatgatggtgaaggaggcgcgatacgtggatgatgcgctaaatggtccactgcccatctacgagccgcagcccgttgccctcaaagcaatgagcggcagggagacactaccaagcaaggtagcacaagtggaggctaccgggctcaatgagaatgaaatggcactcatcatcaagcgtttcaaaaccgccttaaaaggacgcaaggaataccccaacaagaataaaacaaggggaaagcgctcctgcttcaaatgcggtaagactggtcatttcatagcacagtgccccgttaatgataatgaccagggacaagaaaagcacggtaagagggagaagaagaaggtctacaagaaggtgaagggcgaggcacaccttggaaaggaatgggattctgactgctcttcatccgactccgacgatgaaggattgtctgccttggctttcgacaagtcttcgctcttattaggcttttctttgcccttctga

SEQ ID NO: 119247 - DNA, 4683 bp, Zea mays
  Clone ID: MRT4577_40236C.1
atggatcctaagggaaaggggatggtggtcaacgataaggagaaggaatccgtcttcaacgagccaagagacgataagcccactgactctggctcaagtcacatgaaaaaggacgagaagaagaagagggacgagtaccacaaggtgagcggcttgtataatgccaagcaaatttgggacaccctcaagatctctcatgaggggaatgacgccaccatgatcaccaaaatggagttggtggaaggcgaactaggaaggtccttcactatacttgatcctcatcttgtgaattctatccgtgaaaatcctaggtacaccaagatgacgcccgaggaaatactcggaaagtttgtaagcgggcgtataatgatcaaggaagcaagatacattgatgaggcattgaatgcaacaagtagcagggaggcactacctagcaaggtggcgcaagttgaggcggccgggctaaataaggatgaaatggccctcattatcaagcgcttcaagaccgcattgaagggttgcaaggagtactcaaacaagaacaaggcaaagggaaagtgttcctgcttcaagtgcggtaagacaggtcattttattgctcaatgtcccgataatgaaaatgaccagggagacgaaagacatgggaagagagagaacaagaaggtttacaagaaggcgaagggcgaggcacaccttggcaaagagtgggactcggattgttcttcgtccgactccgacgacgaaggactcgccgcctcggccttcaacaaatcgtcgctcttccccaacgagcgccatacttgcctaatggcaaaggagaagaaggtaaatgctcaagaaactcctaagtactctacttctagtgatgatgactctagtgatgatgaagtagattacactagcttgttcaaaggattagatagagctaaagtagaaaagattaatgagttgattgatgcattgaatgaaaaagatagactgctagagaggcaagaggacatcttgtatgaggaacatgacaaatttgttagtgttcaaaagtctcttgccttagagattaaaaggaatgaattactatcttctgaattatctatttgcaatgaatctatttctagcttgaagattttgaatgatgatttaaatgctaagctagaggtagttaataaatctagtccttgtgtagagcatgttgtaatttgcaatagatgcaaagattttaatgttgatgtttgtgatgaacatttaatttctatttctaaattaaatgatgaagtagcaagtcttaatgctcaacttaagacttgcaaaagtgattttgataaattaaaatttgctagggatgcctacactgttggtagacacccctcaattaaggatgggcttggctttaagagggaagccaagaacttaacaagccaaagggctcccattttcaacaaggaaaaagggaaggctcctatggctagtaatagtcaaaagaatcatgcatttatttatgatagaaaattttctaggaatgctcatcataataggagttataatgcttatgattcacatgccatgattgtttcaagttcttcctttgtgcatagtagaaatatgactagaaacaatgttgttcatcatgtgcctaagaaaatgcaaaataaatctgctactgtttttcatgcctgcaacactgattttgtactttcatgtaaaaataagaaagtggtcgctaggaaattgggggcaaaatgcaagggagataaaacttgcatttgggtccctaagactattgttactaaccttgtaggacccaacaagagttgggtttatgcatccgggggctcaagctggattatcgacagcggatgcacaaatcacatgacgggggagaagaagatgttcacctcctacgtcaagaacaaagattcccaagattcgatcatctttggagacgggaatcaaggcaaggttaaaggactaggaaaaatagctatttcatccgagcattccatatctaatgtgttcttagttgaatcgctcgggtataacttgttgtccgttagtcaactatgtaatacgggttacaattgcttatttaccaatgtagatgtgtctgtctttagaaggagtgatggttcattagcttttaagggtgtactagacgacaaactctatttagttgatttttcgaaggaggaggccggtctagatgcatgcttaatcgctaagactagcattggctggctgtggcatcgccgtctagcacatattgggatgaagaaccttcataaacttctaaagggagaacatgtgttaggtctaaccaatgtaactttcaaaaaagatagaccttgtgcagcttgtcaagcaggtaaacaagtgggaagttctcatcatagcaaaaatgtgatgaccgcatcaagacctttggagctacttcacatggacctcttcggacccgtcgcctacctcagcatcgggggaagtaagtatggtcttgttattgttgatgatttttcccgcttcacttgggtattctttttgcaggataaaacagaaacccaagggaccctaaagcgcttcctaaggagagatcaaaacgaatttgagctcaaggtgaaaaagataaggagcgacaacgggtccgagttcaagaatctgcaagtggaggagtaccttgaggaggaaggaatcaagcacgagttctttgctccctacacaccacagcaaaacggtgtggtagagaggaagaacaggacgcttatagacatggcgaggacgatgcttggtgaattcaagactcccgagcggttttggtcggaagctgtgaacacagcctgccacgccataaaccgggtctaccttcatcgcctcctcaagaagacgtcgtacgaacttctaaccggtaacaaacccaacgtatcatactttcgtgtatttgggagtaaatgttatattctagtgaagaaagttaggaattccaaatttgctcccaaggctgtagaagggtttttgttaggatatgactcaaatacaaaggcgtatagggtcttcaacaaatcatcgggtttggttgaagtctctagcgatgttgtatttgatgagactaatggctctccaagagagcaagttgatcttgatgatgtagaggaagatgacgttccaacggctgcaatacgcaccatggcaattggagatgtgcgaccacaggaacaaaaagagcaagatcaaccttcttcctcaacaatggtgcatcccccaactcaagacgatgaacagatacaagcaaagcaagatttaaggatacgtaccttcgcgactggccgcctgggactggctagcccgcctggctggctagtggctgcgcgcctgccacttgctgtctgggactggctgtcctactcgtttgtctcttttattgagcctttcagggtagaagaggctttgctagatccagactgggtgttagccatgcaggaagaactcaataacttcaagcgaaatgaagtttggaccctggtgccacatccaaagcaaaatattgtgggaaccaagtgggtgttccgcaacaagcaagacgagcacagagtggtgacaaggaacaaggctcgacttgtggcaaaaggttatgcccaagtcgcaggtttggactttgaggagacttttgctcctgtggctaggctagagtctattcgcattttgttagcctatgtcgctcaccattccttcaggttgttccaaatggatgtaaagagcgccttcctcaatgggccaatcaaggaggaggtgcacgtggagcaaccccctagctttgaggatgaacggtaccccgaccatgtgtgtaagctctctaaggcgctctatggacttaagcaagccccaagagcatggtatgaatgccttagagattttctaattgctaatgctttcaaggttgggaaagccgatccaactcttttcactaagacttgtgatggtgatctatttgtatgccaaatttatgtcgatgacataatatttggttctactaaccaaaagtcttgtgaagagtttagcagggtgatgacacagaaattcgagatgtctatgatgggcgagttgaactacttccttgggtttcaagtgaagcaactcaaggacgacaccttcatctctcaaacgaagtacacgcaagacttgctcaagcggttcgggatgaaggacgccaagcccgcaaagactccaatgggaaccgacggacatgtcgacctcaacaaaggaggtaagtccgttgatcaaaagacatatcggtctatgataggttctttgctttatttatgtgctagtagaccggatattatgctaagcgtatgcatgtgtgctagatttcaatccgacccaagggagtgtcaccttgtggccgttaagcgaatacttagatatttagttgctacgccttgcttcgggatctggtatccaaaggggtcaacctttgacttgattggatattcagattccgattatgctagatgcaaggtagataggaagagtacatcagggacgtgccaattcctaggaaggtccctggtgtcttggagttctaagaaacaaacttccgttgccctatccaccgctgaggccgagtatgttgccgcaggacagtgttgtgcgcaactactttggatgaggcaaaccctccgggactttggctactga

SEQ ID NO: 119248 - DNA, 419 bp, Zea mays
  Clone ID: MRT4577_40237C.1
aaaaagcacaagatcgcttgccccgccctctaattggaaagggctaggaaaacaaaatactgggcgggactgctcgctgttttttatcccccagcccactataaatctttaaaaaaactacccggggcagtacagtacagtacatgtacataataccccggccacataaaaacacaagtaagctactacgagctttgactattcaaagaaaacagttttgcaggggagctgcagctaaaggcaaggggcccccccctccacatagggaggggagggagggccttttccagcttttgtttgagcatcgggttgtactcgacggggtaaacgaccgaacttaaaacggaccccggccccggggggcccaagggtttgttttccgccgcctaaactccaggttggccggtgtttttacccac

SEQ ID NO: 119249 - DNA, 1131 bp, Zea mays
  Clone ID: MRT4577_40238C.1
atggatcctaaggggaagggaattgtgatcaacgacaaagagaaggagtctttcgtcaacgagccgaaggacgacaagcctaccgactccggctcgggccatagacggaaagatgggaagaagaagaagacgaggcgcatcaaggagatcgtctactacgacgacagcgatgagtctacctcttcccaaaaggatgatgaccacaacgactacgagagaaggaaaccggatcaagggaacaagagggagaaaaagaagaactataagaaggcaaagggcgaggcacatcttggcaaggagtgggattcggattgcccctcgtccgactccgacaatgaaggactcgccgccaccgccttcaacaagtcatccctcttccccaacgagcgtcacacatgccttatggcaagggagaagaaggtttatgcatccgggggctcaagctggattatcgacagcggatgcacaaaccatatgacgggggagaagaagatgttcacctcctacgtcaagaataaggattcccaagattcaatcatattcggtgatgggaaccaaggcaaggataagtctgaaacccaagggaccctcaagcgcttcctcaggagagctcaaaatgagtttgagctcaaagtgaagaagataaggagcgacaatggatccgaattcaagaatcttcaagtggaggagttccttgaggaggaggggatcaagcacgagttctccgctccctacacacctcagcaaaatggtgtggtagagaggaagaacatgacgctcatagatatggcgagggctatgcttggagagttcaagacccctgagtgcttttggtcagaagccgtgaacacggcttgccacgccatcaacagggtctaccttcaccgcctcctcaagaagacttcatatgagctgctgactggtaacaaacccaatatgaagaagacgttccaacggccgcgatatgcaccatggcgattggagatgtacggcctcaggaacaattggagcaagataaaccgtcttcctcaactatggtgcatcccccaacccaagatgatgaacaggttgtaccaaatggatgtgaagagcgctttcctcaacgggccgatcaaggaggaggtgtactga

SEQ ID NO: 119250 - DNA, 4170 bp, Zea mays
  Clone ID: MRT4577_40239C.1
atggatcctaagggaaaggggatggtggtcaacgacaaggagaaggagtccatcttcaacgagccaagagatgacaagcccactaactcaggctcgagtcacaagaagaaggacgggaaaagaagaggcgcatcaagaagatcatctactacgacagtgatgcatcttcttcttcaccaagagacgacgatgatgacgattcttcgtcaaagaaaaaaacgggatgaatacaataaaataagtggcttggacaacgccaagcaaatttgggacaccctcaagatctcacatgagggaaacgatgctacaatgatcaccaaaatggagttggtggaaggcgagttgggaaaatttgccatgatcaggggagaagagccaacacaaacctacaacaggttcaagaccctggtcaacaagattagaagctatggaagcacaagatggacggaccacgacgtcgtccgactcatgctcaggtcctttacagttattgaaccccatcttgtgaatcttatccgtgaaaatcccaggtacacaaagatgacgcctgaggagatactcggaaaattcgtgagcgggcgcatgatggtaaaggaggcacgatatgtggatgacaccttgaacggtccactacccgtctacgagccgcagcccgttgcgctcaaggcaacaagcagcaaggagacgctaccaagcaaggtagcacaagtggaggctatcggcctcaacgaagatgagatggcgcttatcatcaagcacttcaagaccgcacttaaaggacgcaaggagtaccccaacaagaataaaacaagaggaaagcgctcctgcttcaaatgcggtaagactggttattttattgctcaatgtcccaataatgaaaatgaccagggacaagaaagacatgggaagaaggagaagaagaaaagctacaggaaggcgaaaggcgaggctcatcttggaaaagaatgggattccgactgcttctcatccgactccgacgatgagggactggcggcatcggccttcgacaagtcatcgctcttccccaacgaacgccacacctgcctcatggccaaggagaaaaaggatagattattagaaaaacaagaggatattttatatgaggaacatgacaaatttgttagtgtacaaaaatccattgccttagaaattaagagaaatgaaatgttatcctctgaactgtctgtttgccatgaattggtctctagtttaaagagtttaaatgatgaactaaatgctaagctagaggaagttaataaatctagttcctgcgtaaaacatgttgtcatttgcaatagatgcaaggactttgatgttaattcttgcgatgaacaccttatttctattgctaaactaaatgatgaggtgggaagtcttaatgctcaacttaagacttgcaaaattgattttgataagttaaaatttgctagggatgcctacaccattggtagacacccctcaattaaggatgggcttggttttcaaaaggaagccaagaacttaacaagccaaagggctcccattcccaacaaggagaaagggaaggtctctatggctagtagtactcaaaggaatcatgctttcatttataataggaaaattgctagtcattccaattataataggagttatgatcatgatgcttttgattcacatgttatgtttgcctctagttctacttttgtccacggtagaagtaggcctaggagaaaccatgttgtgcatcatgtgcctaggaaagcgtgtaatgaatctactactgttttccatgcttgcaacacttcttttatactttcatgtaagaatgaaaaagtagttgctagaaagttgggatccaaatgcaagggagacaaaacttgtatttgggttccaaaggctattgtgactaaccttgtaggacccaacaagagtttgataattgacatcggatgcacaaaccacataacgggggagaagaagatgttcacctcctacgtcaagaacaaggattcccaggatacaattatttttggagatgggaaccaaggcaaggtcaaaggtttgggaaagatagccatctcaagcgagcactctatttcaaatgtatttttagtagagtcattagggtacaacctcctgtctgtaagtcaattgtgccacatgggctacaattgtttgtttacaaatgttgatgtatctgtctttagaaggagtgatggttcattagtgtttaagggtgtattagacggcaaactctacttagttgacttttcgaaagaggaggctgatctagatgcatgcttaatagctaagactagtatgggctggctgtggcatcgccgtctagcacatgttgggatgaagaaccttcataaacttctaaagggagaacatgtgttaggactaaccaatgtttgttttgagaaagatagaccttgtgcagcttgtcaggcagggaaacaggtgggaagcactcatcacagcaagaatgtgatgacaacatcaagaccactggagcttcttcacatggacctcttcggacccgttgcctaccttagcatcgggggaagtaagtatggtcttgtaattattgatgatttttcccgcttcacttgggtgttctttttgcaggacaaatcagaaacccaagggaccctaaagcactttctaaggagggctcaaaacgaatttgagctcaaggtgaaaaagataagaagcaacaacaggtccgagttcaagaatctgcaagttgaggagtatcttgaggaagaaggcgtcaagcacgagttctccgctccctacacaccacagcaaagcggtgtggtagagaggaagaacaagacgcttattgacatggcgagaatgatgcttggagaatttaagacgcccgagcggttttggtcgaaagctgtgaacacagcttgccacgccataaaccggctctacctacattgccttctcaagaagatctcgtatgaactccttaccggtaacaaacccaacgtttcttactttcgtgtatttggaagcaaatgttacattctagtgaagaaaggtagacattcaaaattttctcccaaggcagtagaagggtttttactagggtatgactcaaatacaaaggcgtatagagtcttcaacaaatcatcgggtttggttgaagtctctagcgacgttgtatttgatgagactaatggctctccaagagagcaagttgatcttgatgacatagatgaagatgatgttccgacaacctcaatgcgcacgatggcgataggtgatgtgcgaccacaggaacaacaagagcaagatcagccatctttctccacaatgattctgggtgacataagcaagggagtaactactcactcaagattagctaacttctgtgagcattactcgtttgtctcttctattgagcctttcagggtagaagaggccttgcaagatccggattgggtgttggccatgcaggaagagctcaacaacttcaagaggaatgaagtttggagcctggtgccacgtccaaagcaaaatgttgtgggaaccaagtgggtgttccgcaacaagcaagacgagcacggggtgatgacaagaaacaaggctcgacttgtggcaaaaggttatgcccaagtcgcaggtttggatttcgaggagacttttgctcctgtggctaggctagagtctattcgaatattattagcctatgccactcaccactctttcaggttatttcaaatggatgtgaagagcgctttcctcaatgggccaatcaaggaggaggttgggaaagccgatcccactcttttcactaagacttgtgatggtgatctttttgtgtgccaaatttatgtcgatgacataatatttggttctactaatcaaaagtcttgtgaggagtttagcagggtaatgacacaaaagttcgagatgtcgatgatgggcgagttgacctacttccttgggttccaagtgaagcaactcaaggacagcaccttcctctcccaaacgaagtacactcaagatcttctccagaggtttgggatgaaggacgccaagcccgcgaagacaccgatgggaaccgacgggcatgaagacctcaacaaaggagggggagatgtgctacaacttgaccctttgagactaacctgtgtgtttgaatactcttga

SEQ ID NO: 119251 - DNA, 2645 bp, Zea mays
  unsure (1)..(2645): unsure at all n locations
  Clone ID: MRT4577_4023C.1
ccccgcgtccgccccgcgtccgatcttcctgttcgcaggnattctcctacccagacaggacattaaacattggtggatttgggcctactggtcatctcccatgacatacagtaataatgctatatcagtcaatgaattccttgccactagatgggccatgccgaacaatgaagcaaacattgttgcaccaacaatagggaaggctattctaaaatataaaggctactttggtggtcaatggggctactggctttccatcggtgccatgataggatatactattcttttcaacattctctttctttgtgctcttacattcttgagccctggtggcagttcaaatactgtagtttctgtttctgatgatggcgacaaagagaagtctacagatcaagaaatgtttgatgttgccaatggcacaaatgaagcagcaaacaggagaacccagacaggaatggtcttgcccttccagccactttcactctctttcaaccacatgaactactatgttgacatgcctgctgcaatgagccggtaaggtttcactgaaagtcgcctccagctgctatctgatattagtggtgcattcagaccaggcgttctgactgccctagttggtgtcagtggagctggaaagaccactctaatggatgtactagcaggaagaaagacaagtggaaccattgagggagatatcaaactttctggttatcctaagaaacaggaaacttttgctcgtgtcagtggctattgtgaacaaactgatatccattcaccaaatgttactgtgtatgaatcactcgtttattctgcttggttgcgcctttcttcagaagttgatgacaatactagaaagatgtttgtggaagaagtgatgtcactagttgagcttgatgtattacgtgatgctctggttggtctccctggtgttagtgggttatcgactgaacaaaggaagaggctgacgattgctgtagaacttgtagcaaacccttcaattatattcatggatgaaccaacttctggccttgatgctagagctgcagcaattgtcatgcgcacagtgagaaatacagttaacactgggcgaaccgtggtttgtacgatccatcagcccagcattgatatctttgaggctttcgatgagcttctgttgctgaagagaggaggtcgtgtcatatatgctggccagcttggtgttcagtctcgcgtactagttgaatatttcgaggcaattccaggtgttccaaaaatcacagaaggatacaatcccgcaacatggatgctggaagttagctctcctctagctgaggctcgcttggatgttgattttgctgaaatttatgcaaattctgccctgtaccggcacaatcaagaacttatcaaggagttgagcattccaccaccaggctaccaggatctctcgtttcctactaaatatgcccagaatttcctaaatcaatgtatggccaatacatggaagcaatttcgatcttattggaagaatccaccctacaatgccatgcgctatcttatgacaatcctctacggtctcgtgttcggttcagtcttttggcgcatgggaaagaacgtgaaatcagagcaggaactgcaaaacctacttggagccacctatgctgctgttttcttccttggatctgcaaacttgctctcatctgtacctgttttttctatcgaaaggacagtcttctaccgtgaaaaggctgctgggatgttctctccgctgtcctattcgtttgcggtgacagttgtggagcttgtctacagcatagctcagggcatcctttataccatccctctgtattcaatgattggttatgagtggaaggcagacaagttcttctacttcatgttcttcctaacctgctccttcctctacttttcactttttggtgcgatgctggttacctgcactccttccgcaatgcttgcgagtattgttgtctcattcagtctaaccggctggaacatcttcgccggattcctcgtaccccgaccggcgttgcctatctggtggcgatggttctactggtgcaacccggtgtcctggaccatctacggcgtcacggcgtcgcagttcggcgacgtaggccgcaacgtgacggctactggcaacgccggcacagtcgtggtgaaggaatttctggaacaaaacctgggcatgaagcacgacttcctcggctacgtcgtgctggcgcatttcggctacatccttctgttcgtcttcctcttcgcgtacggcaccaaggctttgaacttccagaaacggtagaaggtgatcgatcagccgaagatatataacacctgttctggctccttgctcttttgattaaaaacgtgtaaagttttgtgctacgtagcggatacatgtaattattcagtgcaactcaatgcagagttaacagttacgcagatgctgctttaggttttatttttccaacacagctacgaatctaggtctcctagcagcaatatctggcagaagtagaatttggttgcaggttcaacttctgccaagttggcttcttcattttgaagtaactcattccaaagttattgtagctaccatctgaagcatctgccattttttttttgggaagttaagaatcttggtttggtgcgat

SEQ ID NO: 119252 - DNA, 1876 bp, Zea mays
  Clone ID: MRT4577_40240C.1
gtgatctgaatgttgtttacactgataatactgctacagattgttccatggagctccccagactgaactggagtgttgaggatgttccaggtgatagtcaacctgttgagaattctagcaagaaaactttgagatgtcccactgccgtttttgaggatgatcttcctgttaccaagatggatgatactcctgttactaatgtggacgatgtagaattcacctttcatgagaagccacagacagatactgtagaagaaaatctttccatacagaagactaacgggttcactaaagaggaagtctgcaacaagcagattaaccctgagatccctacagaagatcaattttctaggggtcagaaacatgacactttactaatggatcgagtaccttctgtcaagaatccatttaatctagacgatgacaggaatgacgacttatttgaacttcccactgagagctgctttttggaggtaccaaatgttgttgaatcgagaaaacaagttgactctacatcccgaatggtggttccaccaatagtctctaaccaaattaggatggctgaagttcaacaatgccataactcaattgaacgcatattatcttcatcaagtgccagtgaaaatggtgaagtggttggtccggaagacattactgtcaggagtagttctgaactggtgaacaagacttgcttgactgaccatgccctgcaggaaaatggacatacaagtggtgatatttttgtgccatctcaggcagcctccacagagcttagcacaatatctatgcaggatatcagtgcactcagtgaagttgaaattatgcaaaccgaagatgctagtgcaaaggacatgactgcagtatgtagcattgattgtattgaaatgaaacaggctatcaacactacagcaaatgatacatatgcagctattgttgaagaaaagaagttgattgaaggcaccactgcaaggatgaatggggtgcgagagacatattatgttgaagaacagacacaagctagtgacacaaaggagttgagtgcagtacagaacatagggaattctgaagaaaataagcagactgaaaatactgatgcaaaggagactaatgcacggtttaatgcaaacgatgttgagcacaaaacacagactgcaaaggagattgctgcagccgaaagcacaagcagcgttgaagagaagcagcagctaaacatcgtggttggccaagatggaagcaacaagaagatgaatgaagagattgcatcgacaggtgcccaactgaattcaggaagagttcgtgtcccgctgaaggtcctcctcgccgaggcaagcatggagaaccaagtgaagaaacccagcactaaggaacgaatgctgtcgttccggcgccaggtgaccaaggacaacaacttgtcagtgaaatcggggtcacgcaaatctggccctgatgaccaccattggagctccccagccaaactgccacataaggacgttgacaagatttccagagaaaagaagcagccgtggatgccgttcatctgctgccactccgtgcgctgataatatattttgcatcagttgacaactctacatacatgtgctgctgtaactaatgctatccgtctttgtgtagatagtctgcaatctagtatctgatattttgaatcagtgcaattttgatgtatccgctacctgacttgttagacatttgcgcgtgaatctgtcctgatgttcagattcagctagtgtttctgtggactgaacaggcctggaatcttgtaccggattaagctcggtgtggcctgctggtaattttgcggcaacgaaaagaagcaaagtgaaattaacgaaagatttcatgttaaaaaaaaaaaaaa

SEQ ID NO: 119253 - DNA, 273 bp, Zea mays
  unsure (1)..(273): unsure at all n locations
  Clone ID: MRT4577_40241C.1
ncgtcgcagcatgtgacaccttcagatctggtgctgttgagcagctgagaactcatgcaaggaggcttcaggtatcgatcaaactatctaagtgctgtccaataatccaatgaccacactaccatgttctctttgtcaccagttatgaaatcgaattctgtttgacagtttattctttatttgttttgtgaaagagtagttttaaaattgtaaatttgccatactggagtttatatttctttctgaattagcacttgtttttatcacgaagtc

SEQ ID NO: 119254 - DNA, 3574 bp, Zea mays
  Clone ID: MRT4577_40242C.1
atggatcctaagggcaaggggattgtgatcaatgacaaggagaaggagtcattcgtcaacgagcccaaggatgacaagcctaccgactcgggctcgggtcacaaacgcaaagatgggaagaagaagaagacaagacgcatcaaggagatcgtctactacgacgacaacgatgagtccacttcttcccaaaaggacaacgacgacaacgactacgagagaaggaaaccggttaattcgaacttttcttttgactactctcgtattccgcaaagtacaaatgctcatttgctctccattccacttggcaaacctcctcactttgatggagaggactacggattttggagccacaaaatgcgtagtcacctattctctctccatccgaccatatgggagattgtggaaagtggaatgaaatttgatagctcggatagtcctatgtttatcaatgaacagactcatagaaatgcacaagctactactatgttgttagcctccttgtgcagggacgagtatcataaggtgagcggcttggacaatgccaagcagatctgggacaccctcaggatctcacatgaggggaacgacgtcaccttactcaccaaaatggagttggtggagggcgagcttggaagattcgcaatgatcaggggagaggagccaacccaaaattgcaacttccccaagtttttaacgaatttgaccctgaggcaggtgaagataacctcccttcaggtggtccaagcataccttgctggtcttacatttgcattgccagaatcaccttgcagcacaactgttcttgctaacccttctgggatatgtcgccacttcaagagacccaattattggaggaagtttattgttgacatacacaacgggctatgttgcgcctcttcttattgcagcttcatttgctggagcactgcacagtttgttgtcattcagaagatattcggcatggataaacccaatcagtggtgcatttttactcggtggaggtgtttatacccatactggacagggtgtttccagcaacatcaatggtcatgtaggtcgcaaggggcagccaagcaagaccaagataaaggggaagcactcatgcttcaaatgtggtaaggttggtcattttattgctaactgtcccgacaatgatagtgaccaagaagaagggaataagagggagaagaagaagaattataagaaggcaaaaggtgaggcacatcttggcaaggagtgggactcggattgttcgtcgtccgactccgacaacgaaggactcgccgccactgccttcaacaagtcatccctcttccccaacgagcatcacacttgcctcatggcaagggaaaagaagggtctagatagaaccaaggtggataaaataaatgaattgattgatgctttgaatgataagaatagattgctagaaaagcaagaggatctcttatatgatgaacatgacaagtttgtagaagctcaaaaatcccttgctttagaaataaagaggaatgaaatgctttcttgtgaattgtctacatgccatgactctatttctagtttaaaaagcataaaagatgacttgactgctaagtgtaaagattttaatattgatgcttgtagtgaacacctagtttcaatttctaaattgaatgatgaagtagctagtcttaatgcccaacttaagactagcaaaagcgaatttgataagttaaaatttgcaagggatgcctacacgattggtagacacccctcaattaaggatggacttggtttcaagagggaagccaagaacttaacaagccataaggctcccatccctgccaaggagaaagggaaggcccctatggctagtagtgctaaaaagaaccatgcttttatgtatcatgataggagacatgctagaaatgcaaatagaagtcatgatgcttttgattcacatgtttatgattcatatgatatgtttgcttctagttcttcctatatgcatggtagaaatgtagctaggagaaatgctattaatcacatgcctaggagaaatggtgttagtgttcctaggaaagttaatgaaccgtctacaatatatcatgcttgcaatgcttcatttgccatttgtagaaaggataggaaggtttatgcatccgggggttcaagctggattatcgacaacggatgcacaaaccatatgacgggggagaagaagatgttcacctcctacgtcaaaaacaaggattcccaagattcaataatattcggtgatgggaatcaaggcaaggataaatctgaaacccaagggaccctcaagcgcttcctaaggagagctcaaaacgagtttgagctcaaggtgaaaaagataaggagcgacaatgggtccgagttcaagaaccttcaagtggaggagtaccttgaggaggaagggatcaagcacgagatctctgctccctacacaccacagcaaaatggtgtggtagagaggaagaacaggacgcttatagacatggtgaggacgatgcttggagagttcaagaccctcgagcgcttttggtcggaagctgtgaacacggcttgccacgccatcaaccgggtctaccttcaccgcctcctcaagaagacgtcgtatgagctactaaccggtaacaaacccaatgtttcgtattttcgagtttttgggagtaaatgctacattctagtgaagaagggtaggaactctaaatttgctcccaaagctgtagaagggtttttattaggttatgactcaaatacaaaggcgtatagagtcttcaacaaatcatcgggtttggttgaagtctctagcgacgttgtatttgatgagactaatggctctccacgagagcaagttgttgattttgataatgtagatgaagaagaagttccaataaccgcaatacgcaccatggcgattggagatgtgcggccacaggaacaagatgagcaagatcaaccttcttcctcaacaatggtgcaacccccaactcaagatgatgaacaggaggcgtgtgatcaagggggagcacaagatgatcatgtaatggaggaagaagcacaaccggcacctccaacccaagttcgagcaatgattcaaagggatcatcccgtcgatcaaattttggctgatattagcaagggagtaactactcgatctcgattagttaatttttgtgagcattactcctttgtctcttctattgagccttttagggtagaagaggccttgctagatctggactgggtgttggccatgcaagaagagctcaacaacttcaagaggaatgaagtttggatactggtgcctcgtcctaagcaaaatgttgtgggaaccaagtgggtgttccgcaacaaacaagacgagcacggagtggtgacgaggaacaaggctcgacttgtggcaaaaggctatgcccaagttgcaggtttggactttgatgagacttttgctcctgtggctaggctagagtccattcgtattttgctagcatatgccgctcaccattctttcaggttgttccaaatggatgtgaagagcgctttcctcaacgggccaattaaggaggag

SEQ ID NO: 119255 - DNA, 767 bp, Zea mays
  Clone ID: MRT4577_40243C.1
caggccggccgggccggggttggcagccttctgccccgcaccctccgcgtcgaacaccagatccggccaccgctccacctctgtccatctcacgccaacgcccactggcgtcctcgttcctccgtgccggggagcggcggagagctttccacctcgtcttagggacctctggcttccttccccctgccggcgatcggcggagatccgctgttctgacatcgtctcccgctgctgacttgtgaacaaggcagcagcatggttcagtttggaaacatgtcatcaaagaagatagagttggatcacaaggacatggtccatgattctgctatcgactactacggcaagcgccttgccactgcctcctcagactctaccgtgaagatcatcaacattggcgcggcaaatgccccatcccttgcaacgcttagtggccactatggtcctgtgtggcgtgttgcttgggcccatccaaagtatggcgctatccttgcttcgtgcagttatgatggccgtgtcattatttggaaagaggatgcacgaggcaattggtctcaagtccatgtgttcagtgacaacaagtcatctgtcaactccattgcatgggctccgtatgaggttgggctttgccttgcctgtgcatcttcaggtggaagaatatccatcttgacgatgcgagctgatggggggttgggatactgcaaccattgagcgagcacatcctgttggtgcgactgccatatcctgggctcctgcaacagattcaatag

SEQ ID NO: 119256 - DNA, 4767 bp, Zea mays
  Clone ID: MRT4577_40244C.1
atggatcctaatggaaaggggatgatggtcaacgacaaggagaaggagtccatcttcaacgagccaagggacgacaacccactgactcaggatcaagtcacaagaagagggacgggaagaagaagaggcagatcaagaagatcatttactacgacaacgacgcctcctcttcttcaccaagagacgacaacgacgatgactcgtctaaaaagaaaccgtatttgggagatagttgaaaatggaatgcattttgatagtacggataaccccgtgtttattaatgaacaaattcataagaatgcacaagctaccactgtgttgctagcatttttgtgcagggatgaatacaacaaggtgagcgacttagacaacgccaagcaaatttgggataccctcaagatatcacacgagggaaacgacaccaccatgatcaccaagatggagttggtggaaggcgaactgggaagattcgcgatgatcaggggagaggagccaacacaaacatacaacaggctcaagaccctggtcaacaagattaggagctatggaagcacaagatggacggaccacgacgtcgttcgactaatgctaaggtcatttatggtaattgaccctcatcttgtcaaccttattcgtgagaatcccaggtacaccaagatgacgcccgaggagattcttgggaagtttgtgagcgggcgcatgatggtaaaagaggctcgatatgtggacgatgctctaaacggaccactacccgtccacgagcctcaaaccattgccctcaaagcaaccagcaatagggagaagctaccaagcaaggtggcacaagtggaggccgcgggcctcaatgaagatgagatggcgcttatcatcaagcgcttcaagaccgcattgaaaggacgcaaggagtaccccaacaagaacaaagcaaggggaaagcgctcctgcttcaaatgcggtaacactggtcattccatagcacaatgccccgataatgatgatgaccatgaacaagaaaagcacgggaagagggagaagaagaaggtctataagaaggcgaagggcaaggcgcaccttggtaaagaatgggattctgactactcttcatccgactccgacgatgaaggactggcagcctcggccttcaacaaatcttcgctcttccccaacgaatgccacacctgccttatggccaaggaaaagaaggtgagtgttcgagattcccccaagtactctacttctagtgatgaggattctagtgatgatgaagtagattactctaccttgttcaaaggattagatagagctaaagtagaaaagattaatgaactaattgatgctttaaatgaaaaggatagacttttagaaaagcaagaggatattttgtatgaagagcatgataaatttgttagtgcgcaaaaatctcttgctttagaaactaagagaaatgagatgctatcttctaaattatctgcttgccatgaatctatctctaggttaaagattttaaatgatgatttaaatgctaagttagaggtagctaatcaatctagttcatgtgtagaacatgttgtaatttgcaatagatgcaaggattttgatattgatgcttgtgatgaacatcttacgtccattactaaattaagtgatgaggtggcaagtcttaatgctcaacttaagacttgcaaggttgattttgataagcaaaaatttgctagggatgcctatgctattggtagacacccctctattaaggatggacttggttttcgaaaggaaaccaggaacttaacaagccaaaagactcccgttctcaacaaggagaaagagaaggctcctatggctagtagttctaaaaaatgtcatgcttacatttatgatagaaaattttctagaaacgctcattataataggagttataatgcgtttaattcacatgctatgtttgcttctagctctacttttgtgcatggtagaagtaagcctaggagaaatcatgttgtgcatcatgtgcctaggaaagtttatgcatccgggggctcaagctggattatcgacagcggatgcacaaaccacatgacgggggagaagaagatgtttacctcctacgtcaagaacaaggattcccaagattcgatcatctttggagatgggaaccaaggcaaggttaaaggattgggaaagatagccattacatccgagcattcaatctccaatgtgttcttagttgaatcgctcgggtacaacctattgtccatgtttctgtctttagaaaggagtgatggttcattagcgtttaagggtgtattagacaacaaactctacttagttgatttttcgagagaagaggtcgatctagatgcatgcttaatagctaagactagcatgagctggttgtggcatcatcgtctagcacatgtcgggatgaagaaccttcataaacttctaaagggagaacatgtgttaggactaaccaatgtctgcttcgagaaagacagaccttgtgcaacttgtcaggcagggaaactggtgggaagcactcatcacagtaagaatgtgatgacaacatcaagaccactggagcttcttcacatggacctcttcggacccgtcgcctaccttagcatcggaggaagtaagtatggtcttgtaattgtagatgacttttcccgcttcacttgggtgttctttttgcaggataaatcagaaacccaagggaccctaaagcgctttctaaggagggctcaaaacgaatttgagctcaaggtgaaaaagataagaagcaacaacgggtccgagttcaagaacttacaagttgaggagtatcttgaggaggaaggtgtcaagaatgagttctccgctccctacacaccacagcaaaatggtgtagtagagaggaagaacaggacacttatcgacatggtgaggacgatgcttggagagtttaagatgctcgagcggttttggtcggaagctgtgaacacagcttgccacgccataaaccggctctatctgcatcatctcctcaagaagacctcctacgaactccttaccgataacaaacccaatgtctcttactttcgtgtatttgggagaaaatgctatattttggcgaagaaaggtagacattcaaaatttgctcccaaagctgtagaagggtttttactagggtatgactcaaatacaaaggcatatagagtcttcaacaaatcatcggctttggttgaagtctctagcgatgttgtattttatgagactaatggctctccaagagagcaagttgatcttgatgacataaatgaagatgatgttccgacggcagcaatacgcaccatggcaattggagatgtgcgaccacaggaacaacaagagcaagatcaaccttcttcctcaataatggtgcatccccctactcaagatgatggacaggttcctcaagaagaggcgtgtgatcaagggggagcacaagaagaacaagctatggaggaagaagcaccaccggcccctccaactcaagtccgagcgacgattcaaagaaatcaccccgtcgatcagattctgggtgacataagcaagggagtaactactcgctcaagattagctaatttttgtgagcattactcgtttgtctcttctattgagcctttcagggtagaagaggccttgcaagacccggactgggtgttggccatgcaggaacagctcaacaacttcaagagaaatgaagtttggagcctggtgccacgtccaaagcaaaacgttgtgggaaccaagtgggtgttccgcaacaagcaagacgagcatagagtggtgacaagaaacaaggctcgacttgtagcaaaaaggttatgcccaagtcgcaggttgtttcaaatggatgtgaagagcgcttttctcaacgggccaataaaggaggaggtgtacgtggaacaaccccctgactttgaggatgacaggtacccccaccatgtgtgtaagctctctaaggcgctctatggacttaagcaagccccaagagcatggtatgaatgccttagagatttcttaattgctaattctttcaaggttgggaaagctgatcccactcttttcactaagacttgtaatggtgacctttttgtgtgccaaatttatgtcgatgacataatatttggttctactaatcaaaagtcttgtgaggagtttagcagggtgatgactcagaaatttgagatgtcaatgatgggcgagttgaactacttccttgggttccaagtgaagcaactcaaggatggcaccttcatctcccaaacgaagtacactcaagatcttcccatgcggtttgggatgaaggacactaagcccgcaaagacacctatgggaaccgacggacatgtcgacctcaacaaaggaggtaagtccattgatcaaaaggcatactggtctatgataaggtcattgctttatttatgtgctagtagaccgtatattatgcttagcgtatgcatgtgtgctagatatcaatccgacccaagggaatgccaccttgtggctgttaagcggattcttagatatttagtctctacgccttgcttcgggatctggtatccaaaggggtctacctttgacttgattggatattcagactcggattatgctggatgcaaggttgataggaagagtacatcagggacgtgccaattcctaggaaggtccctggtgtcttggagttcaaagaaacaaacctccattgccctatccaccgctgaggccgagtatgttgccacatga

SEQ ID NO: 119257 - DNA, 2013 bp, Zea mays
  Clone ID: MRT4577_40245C.1
cattgggtacctcgaggccggccggggagtggtctgagcatgctttaagaaagggggaagaccgccaccgttaccgggagccgttggcagccttctgccccgcaccctccgcgtcgaacaccagatccggccaccgctccacctctgtccatctcacgccaacgcccactggcgtcctcgttcctccgtgccggggagcggcggagagctttccacctcgtcttagggacctctggcttccttccccctgccggcgatcggcggagatccgctgttctgacatcgtctcccgctgctgacttgtgaacaaggcagcagcatggttcagtttggaaacatgtcatcaaagaagatagagttggatcacaaggacatggtccatgattctgctatcgactactatggcaagcgccttgccactgcctcctcagactctaccgtgaagatcatcaacattggcgcggcaaatgccccatcccaggtccttgcaacgcttagtggccactatggtcctgtgtggcgtgttgcttgggcccatccaaagtatggcgctatccttgcttcgtgcagttatgatggccgtgtcattatttggaaggaggatgcacgaggcaattggtctcaagtccatgtgttcagtgacaacaagtcatctgtcaactccattgcatgggctccgtatgaggttgggctttgccttgcctgtgcatcttcaggtggaagaatatccatcttgacgatgcgagctgatgggggttgggatactgcaaccattgagcgagcacatcctgttggtgcgactgccatatcctgggctcctgcaacagattcaatagctggcacaggggagtttgtttacaagcttgtctcaggagggtttgactcggttgttaaggtctggggattcaacaatggtagctggaagctggagagtgctcttatctctgacatgcacacagattgtgtgagggatgtcgcgtgggcaccagttttgggattggccaaatcgaccattgccagcgcttcacaagacgggaaggttgtcatctggaccaggggaaaggatggagacaagtgggagcggaagctcatgcgtgactttggttcccctgtctggagggtgtcctggtccttgactgggaacatattatccatagctgctggtgggaacaatataaccctctggaaggaagggtcagatgggcaatgggaggaggtgatgaaggttgaaacataggatgtccgtcaagttttctgaagataaagtgtgttttactagtgtttcctgcagatccatgtttcgacgtggacaaagtttgccgttgtgcttcgacagaacatccaattcacttattttggtactttctgacgaggcaattatactcttggatggatcccgtgcgctttagagtggtaatttcagatcggtgagcctgtttagttctgtatatcctcaacttcttttttggtggaacatcagagctgctgcaagtaatgttatctaataagcactgtagcaatttctaatgctgtttgtgctgcggctcctgtagcgctgctcctgattctggtgcgcaccatcgtttgagttttattcatgtgttgtgcaaggcgtggcccttgccgggcaccatattatgcaaagctgcgggcgagaacaacataaccctctggaaggaagggtcaaatgggcagtgggaggaggcgatgaaggttgacccataggatgcccggcaaggtttttgaatttcttgtagacccatgtttcgacaaagacaaagcttgctactgttttactagtgtttcgacaaagtttaagtttgccattgtgttttacaagtgtttcctgcggatccatgtttcgataaagacaaagcttgacattgtgtttccatagacactcccccccccccattttagtaattcctgatgagcaattatgctcttggatggatctggtgcgctttagactgccaattttttattcaggaaaccctagtaatgttccctatt

SEQ ID NO: 119258 - DNA, 2595 bp, Zea mays
  Clone ID: MRT4577_40246C.1
atggatcctaaggggaagggtatcgtgatcaacgaaaaagagaaggaatccttcgtcaacgagccgaaggacgacaagcctaccgactccggctcgggccatagacggaaggaagggaagaagaagaagacaaggcgtattaaggagatgtctactacgacgacagtgatgagtccacttcttcccacaaggacaacgacgacaacgactacgacaaacaaaagacgggatgaatatcacaaagtgagcggcttggataacgccaagcagatctgggacaccctcaagatttcacatgaggggaacgatgtcaccttgctcaccaagatggagttggtggagggcgagcttggacgattcgcgatgataaggggcgaggagccgacacaaacatacaaccggctcaagacccttatcaacaaaataaggagctacggaagcacgcggtggacggaccacgacgttgtccgactgatgctaaggtcctttaccgttcttgatcctcatttggtgaataatattcgtgagaatcccaggtacaccaaaatgtcgcctgaagaagtccttgggaaattcgtaagcgggcgaatgatgatcaaggaggcgaggtacgtggacgacgccttgaatggtccgatcaacgagccgcaaccccttgctctcaaggcaacaagaagcaaggaggcgctacctagcaaggtggcacaaattgaggcggccggacttaatgatgaagagatggccctcatcatcaagagattcaagacggcgctaaagggtcgcaaggggcggccaagcaagaccaagacaaaggggaagcgctcatgcttcaaatgtggtaagcttggtcattttattgctaattgtcccgataatgatagtgatcaggaccaagggaacaagagggagaagaagaagaactataagaaggcaaagggcgaggcacatctaggaaaggagtgggattctgattgctcctcctccgactccgacaatgaaggactcgccgccaccgccttcaacaagtcatccctcttccccaacgagcgtctcacatgccttatggcaagggagaagaaggtatgtagtcgaaactctacttatgcttcttcaagtgaggacgaatctagtgatgaggatgaaatagattattcatgtttgtttaagggcctagatagaacaaaggtagataaaattaatgaattgattgatgccttgaatgataagaataggcttctagaaaaacaagaggacttgttgtatgaagaacatgataaatttttagaagcacaaaaatctcatgccttagaagttaagagaaacgaaatgctttcgtgtgaattatcttcttgccatgagacaatttctagcttaaggagcattaatgatgatttgaatgctaagttagaaatggctaggaaatcaacaacttgtgtagaaaatgttgctatttgcaatagatgtaaagattttgatattgatgcttgtagtgaacacatagcttctattgcaaaattaaatgatgaaatggctagtcttaatgcccaacttaaggctagcaaaagtgattttgataaactaaaatttgctagggatgcctactcgattggtagacacccctccattaaggatgagcttggcttcaagagggaagccaagaacttaacaagccataaggctcccatctccaccaacgagaaagggaaggcccctatggcaagtagtactaaaaggaaccatgcttttatgtacaatgatagaagacagtctcataggagttgtaatgcttttgattcacatgcctatgattcttatgctatgtatgcttccagttcttcctatatgcattgtagagatatgcctaggaaaaatattcatcatgtgcctagaaagaattttgttcatgctcctaggaaagtttatgcatccgggggctcaagctggattatcgacagcggatgcacaaaccatatgacgggggagaagaagatgttcacctcctacgtcaagaataaggatttccaagattcaatcatattcggtgatgggaaccaaggcaaggtgaaagggttaggcaagattgcaatatccaatgagcactctatctctaatgtgtttttagttgagtctcttggatataatttattatctgtcagtcaattatgtaatatgggatataattgtctatttacaaatgtagatgtgtctgtgtttagaagatgtgacggttcactagcttttaagggtgtactagacggcaaactttatttggttgattttgcaaaagaagaggccggtctagatgcatgcttaatggctaagacttgcatgggctggttgtggcatcgccgcttagcacatgtggggatgaagaacctccacaagcttctaaagggagaacacatgataggtctaaccaatgttcatttcgaaaaagatagaccttgtgcagcttgtcaagcaggtaaacaagtgggaggagcacatcacagcaagaatgtgatgaccacgtcaagacctctggagctgctgcatatggacctcttcggacccgtcgcctatctgagcatagggggaaggttgaaagttgcctag

SEQ ID NO: 119259 - DNA, 5052 bp, Zea mays
  Clone ID: MRT4577_40247C.1
atggatcctaagggaaaggggatggtggtcaacgacaatgagaaggagtccatcttcaacgagccaagggatgacaaagccaatgactctggctcgagtcaaaataagaaggatggaaagaagaagaggcgtatcaagaagattgtctactacgacagcgacgaatcttcctcttctcaaaaggatgacgaatacgaggagaaaaagaaaatggttaactcgaacttttctttcgattattctcgtattccgcataattccaatgctcatttgctttccattccacttggtaaacctccccactttgatggagaggactacggattttggagtcacaaaatgcgtagccacttgttctctcttcatccaagtatatgggagatagtagaaaatggaatgcgatttgatagttcggataactccatgtttatcaatgaacaaatccataaaaatgcacaagctactactgttcttttagcatccttgtgcagggaagagtacaataaagtgagcggcttggacaacgccaagcagatttgggacaccctcaagatctcgcatgaggggaacgacgccaccatgctcactaagatggagttggtggaaggcgaactaggaaggttcgcgatgatgaagggagaggagccaactcaaacgtacaataggctcaagaccctggtcaacaagataagaagctatggaagcatgagatggacggaccacgacgtcgtccgacttatgctaaggtccttcactgtccttgatcctcatcttgtaaactatattcgtgagaatcctaggtacatcaagatgacgcccgagaaaatactcagaaagttcgtaagcgggcgaatgatgatcaaggaggcaagatatgttgatgatgcattgaatggcccaatgccgatctacgagcctcaaactgttgctctcaaagcaacaagtagcagggagacgctacctagcaaggtggcgcaagttgaggcggccgggctgaatgaggacgaaatggccctcatcatcaagcgcttcaagacggcgctcaaaggtcatagggagcatccaaacaagagcaagacaaagggaaagcgctcctgcttcaagtgtggtaagattggtcactttattgctaactgtcccgataatgatagtgaccaggaacaaggaaagaccggaaagtgggaaaagaagaagacctacaaaaaggcgaagggcgaggcacaccttggaaaggagtgggatctggattgctcctcatccgactccgacaacgaaggactcaccgccacagccttcaacaagtcatctctcttccccaacgagcatcacacctacctcatggcaaaggagaagaaggtaagtactcgaagtacccatacatatgcttcttcaagtgatgatgaagtagactacgcaagcttattcaaaggtttagatagaactaaaattgataagatcaatgaattaattgatgcttcgaatgagaagaatagattgttagaaaagcaagaggatcttttatatgaagagcatgataaatttgttagtgcgcaaaattctcttgctctagaagttaaaagaaatgaaatgctttcatgtgaactatctacatgccatgaatctatttctagcttaaagagtattaatgatgatttaaatactaagttagaaatagctaataaatcaagctctcttgtagaacatgttgtgatttgcaataggtgtaaggattttaatgttgatgcttgtagtgaacacttaatttccatttttaaattaaatgatgaagtggctagtcttaatgcccaacttaagactagcaagaatgattttgataaactaaaatttgcaagggatgcctacactattggtagacacccctcgattaaggatggtcttggctttcaaagggaaaccaagaacttaacaggccaaagagctcctattttcaacaaggaaaaagggaaggctcctatggctagtagtaatcaaaagaatcatgcatttatttatgataggaaattttctagaaatgttcatcatgataggagttgtaatgcttataattcaaatgtcatgattgcttcaagttcttcctttatgcatagtagagatatgcctaggaaaaatgtcattcatcatatgcctaggagaaaagttgttaatcatatgcctaggaaagtgtataatggagttaccactgtctttcatgcttgcaatactaagtttattctttcatgtaaaaatgaaaaagtaattgctaaaaaggtgggggccaaatgcaagggagacaagacttgcatttgggtccctaaggctatagtaactaaccttgtaggacccaacaagagttggattatcgacagcggatgcacaaaccacatgacgggggagaaaaagatgttcacctcctacgtcaagaacaaagattcccaagattcaatcatattcggtgacgggaaacaaggcaaggttaaaggactaggaaagattgctatttcatccgagcactccatttctaatgtgtttttagttgagtcgctcgggtataacttgttgtccattagtcaactatgtaatatgggttataattgcttatttacaaatgtagatgtgtctgtctttagaaggagcgatggttcattagcttttaagggtgtactagacgacaaactctatttagttgattttgcaaaggaagaggccggtctagatgcatgcttaattgctaatactagcatgggctggctgtggcatcgcagtcttgctcatgtggggatgaagaaccttcacaaacttctaaagggagaacatgtgttaggtctaacaaatgtgactttcgaaaaagatagaccttgtgcagcttgtcaagcaggtaaacaagtgggaaatgcacatcacaacaagaacgtgatgaccacatcaagacccctggagttgctgcatatggacctcttcggacccgtcgcctacctcagcatcgggggaagtaagtatggtcttgttatagttgatgatttttcccgcttcacttgggtattctttttgcaggataagtctgaaacccaagggacccttaagcgcttcctaaggagagctcaaaacgagtttgagctcaaggtgaaaaagataagaagcgacaatgggtccgagttcaagaaccttcaagtggaggagtaccttgaggaggaaggaatcaagcacgagttctccgctccctacacaccacagcaaaatggtgtggtagagaggaagaataggacactcatagacatggcgaggacgatgcttggagagttcaagacggtcgagcggttttggtcggaagctgtgaacacggcttgccatgccataaaccgggtctaccttcatctactcctcaagaagacttcgtatgagcttctaaccagtaacaaacccaacgtttcatactttcgtgtatttgggagtaaatgttatattctagtgaagaaaggtaggaattccaaatttgctcccaaagctgtagaagggtttttgttaggttatgactcaaatacaaaggcgtatagagtcttcaacaaatcatcgagtttggttgaagtctctagcaacattgtatttgatgagattaatggctctccaagagagcaagttgatattgatgatgtagatgaagaagatgttccaacggccgcaatacgcaccatggcgattggagatgtgcgaccacaggaacaaaaggagcaagatcaaccttcttcctcaacaatggtgcatcccccaactcaagatgatgaacaggttcatcacgaagagacggtagaagaggccttgctagatccggactgggtgttggccatgcaggaagagctcaacaacttcaagcgaaatgaagtttggacactggtgcctcgtcccaagcaaaatgttgtgggaaccaagtgggtgttccgcaacaaacaagacgagcacggggtggtgacaaggaacaaggcacgacttgtggcaaaaggttatgcccaagtcgcaggtttggactttcaggagacttttgctcctgtggctaggctagagtctatttgcatattgttagcctatgccactcaccattctttcaggttgttccaaatggatgtgaagagcgctttcctcaacgggccaatcaaggaggaggtgtacgtagagcaaccccctggctttgaggatgaacggtaccccgaccatgtgtgtaagctctctaaggcgctctatggacttaagcaagccccaagagcatggtatgaatgccttagagactttttaattgctaatgctttcaaggttgggaaagccgatccaactttattcactaagacatgtgatggcgatttatttgtgtgccaaatttatgtcgatgacataatatttggttctactaaccaaaagtcttgtgaagagtttagcagggtgatgactcaaaaatttgagatgtcgatgatgggcgagttgaactacttcctcgggttccaagtgaagcaactcaaggacgacaccttcatttcccaaacgaagtacacgcaagacttgatcaagcgttttgggatgaaggatgccaagcccgcaaagactccaatgggaaccgatggacatgtcgacctcaacaaaggagggtcaacctttgacttaattggatactcagactccgattatgctggatgcaaggttgataggaagagtacatcagggacgtgccaattcttaggaaggtccctggacagtgttgcgcggcaactactttggatgaggcaaaccctccgggactttggctacaatctgagcaaagtcccactcctatgtgataatgagagtgctatccgcatggcggacaatcctgttgaacacagccgcactaagcacatagacatccgacatcactttttgagagaccaccagcaaaagggagatatcgaagtgttttatgttagcaccgagaaccagctagccgatatctttaccaagcctttagatgagaagaccttttgtaggctgcgtagtgagctaaatgtcttagattcgcagaacttggattga

SEQ ID NO: 119260 - DNA, 284 bp, Zea mays
  Clone ID: MRT4577_40248C.1
attcggctcgaggggctaagtaaagtttcatatgtcagtggtcggtcagctacctggagattggtcgtacagtatgtcatgtgtaatttttgtcgtctcgttttggttgagccatgggtggtgcttgtaacaaaaggatggcttggtgtcagtactacctaccctaccaaaaaaaaaaaaaaaaaaaaaaaaaaaaaaaaaaaaaaaaaaaaaaaaaaaaaaaaaaataataaataaataataaaaaaaaaaaaaaaaataataaaactttaaatcaaaaataa

SEQ ID NO: 119261 - DNA, 1086 bp, Zea mays
  Clone ID: MRT4577_40249C.1
actcctataggggattgggttcctcgaggccggcggcggcctcctgcgcgcaaccccgatgcgccagcacaaaaaggaggtcgaggttagggttgtccgcccagatccgcaccgtcgcggtcggtgctgctgccccgccctcctcctcctcgacccgtcgacctgtgctcgcgcgggcattcagaaacgccactccgacgagcaggtgccccgctggagccaaccacacgcaggctagccgtcgccacagcctcggctcatgtccagcggtggtgcctccccgtcggccaccccctcgctgcccgctcttgcgcctaacaactccctgcgcctctccttggttgcgcttctcccgttgccggcgtctcaccatcctaccaggcccaacacaggacccctgttcccaccccttcatcatcttcgttggattcgtcgatgtcgcagccttcctgagcggatcacgtcttcccggctggatccgtcgctgtcgcggccttcccggtcggatcacgtcttcccgacgggatccatcgttgtcgtggccttcccggccggatccgccgttaccccttctattctgtcgtcggcctccctggcggggctccttgacgttcggacaatcaaataagcaagaaggtcgacctgctggtgctattttgttgtgtcgccctaccaacccttgacactcgaacgtcgtcccctctcgaagaacgggctattgttgcatgtctcccaaccgcgggcacctcgacttcggctaactcaacatctaggggctatcgtcttctcggagtccacaccggtcttttatccagcctcaaaattcacaccctcgcgacgctgtgattgtaggagatatcaacccatcggctcacatgggcttctactcaaggcttatcgtgtgttgtgcctccgttgcgactacggggatattaggttgtgtgtgtatgtggaccgacaccactgttgagctgtcgacccattagggctatggtcatttgagtctatatattgtaccccatctcctatgcaatacaatcaactactacagattcctgcaaaaaaaaaaaaaaaaaatttgcggcc

SEQ ID NO: 119262 - DNA, 280 bp, Zea mays
  Clone ID: MRT4577_4024C.1
aaaaaaaatacaaacataaatagaatctaattttattttaaaatatactaaaaaatgctcagtggatgtttaatttccctacttactttactcaagcattcgacatgaatagcacactattagggaacctaaattcaacactcttgccgaagcttaacaaccatgtgactggaaaaaccctaacattatcaaagttaatcgtctagaagcacatcaccctttttctaactctcgcaataacgattaaaccctcactgatcgcctttcccaacattatgct

SEQ ID NO: 119263 - DNA, 742 bp, Zea mays
  Clone ID: MRT4577_40250C.1
cggggcctgcctaatctcgcctcccacaccacctggactgggagctccgtacgcctcgctgtgcggcgcatggaccatggcgcactactgcgcgagaggacaagggatgagccacatctagcaatgctgcctacattggtacccctggcagaggcaatccttgctgtgtagagatcactggacaccattgcggaagcgctcttcaccaggcatcatattggcgagaaacgtatgaagaggaacacgtcgcgccctgcgcgagctgctatactagctgccctggcgctctccagtacagcaagggggggatcctcttccaagagaccctgtaccacgaataccagggatggctagccttgagatgagggcctcaaggagggagagcgactccctggcatcaagggtgacaagggcaccattgaagacggcggcagtgatcatgagaccaccacccaaggccatgacgaccctggaaggcgctgcgccaagtactacgatgccggagcccgatttgccaagtggcgcgcggttctcaagatcgtccccagaggaccatcacagtttgtcgtggacctgaacgcttagggacgggctcgctatgccatcttctgacacgagaaaggtctggtgccaagtcgagagcctgagatccttgacgatggccctgatgacattgatcgctgcgcttacgtcactgagaccgtgcttgctgcctgctacaaggcgctcaacgagcaccatg

SEQ ID NO: 119264 - DNA, 4269 bp, Zea mays
  Clone ID: MRT4577_40251C.1
atggatcctaagggcaaggggatgatggtcaatgataaggagaaggagtcctttgtcaatgatccaaaggatgacaagcctactgactcaggctcgggccacaaaagaaaagacgggaggaagaagaaaacaaggcgcatcaaggagatagtctactacgacaacgacgagtcttcctcctcccaaaaggacgactacaacgactacgagaaaaagaagacgatttgggacaccctcaaaatctcacatgaggggaacgacgtcaccatgctcaccaagatggagttggtggagggtgaacttgggagattcacaatgatcaggggcgatgagccaacccaaacgtacaactggctcaagaccctcgtcaacaaaataaggagctatggaagcacgcgatggacggaccacgacgtcgtccgcctaatgctaaggtcttttactgtccttgatccacatcttgtgaacaatattcgtgagaatcctatgtacaccaagatgacgcccgaggagatacttggaaagttcgtaagcgggcggatgatgatcaaggaggctagatacgttgatgattcgttgaatggcccaatccaagagcctaaaaccattgctctcaaagcaacgaggagcaaggaggcgctacctagcaaggtggcacaagttgaggcggccgggcttaatgaggaagagatggccctcatcattaagcgtttcaagacgacgctaagggttcgcaaggagcatcccaacaagaccaagacgaaggggaagcgctcatgcttcaaatgtggtaagattggtcattttatcgctaattgtcccgataatgatagtgaccaggaacaagggaacaagagggaaaagaagaaggcttacaagaatactaagggcgaggcacaccttggaaaggagtgggactcggattgttcgtcgtccgactccgacaatgaaggactcgccgccaccgccttcaacaagtcggccctcttccccaacgagcatcacacctgcctcatggcaagggaaaagaagggcctagatagaactaaggtagataagattaatgaattaattgatgccttgaatgataaaaatagcttaaagagcataaatgatgatttgagtgctaagttagaaatagctaataaatcaacatcttgtgtaaaacatgttgtagtttgcactaggtgtaaagattttaatgttgatgcttgtagtgaacacctagtttcaatttctaaattgaatgatgaagtggctagtcttaatgcccaacttaagactagcaagagtgaatttgacaaactaaaatttgcaagggatgcctacacgattggtagacatccctcaattaaggatggtcttggcttcaagagggaagtcaagaacttaacaagtcataaggcttccatctccgccaaggagaaagggaaggcccctatggctagtagtgctcaaaagaaccatgctttcatgtatcatgataggagacattctaggaatgtttgtagaggttatgatgcttttgattctcatgccatgattgtgtctagttcttctattatgcatgatagaaatctggctaggaaaaatgttgttcatcatatgcctagaagaaatagtgttcatgttcctaggaaagtaatgaatgaaccttctacagtttattatgcttgcaatgcttcctttgctatttgtagaaaggataagaaggtttatgcatccaggggctcaagctggattatcgacagcggatgcacaaaccacatgacgggggaaaagaggatgttctcttcctacgtcaagaacaaggttccccaagattcaatcatattcggtgatgggaaccaagggaaggtgaaagggttaggaaaaattgctattttatccgagcactctatttctaatgtgttcttagttgagtcgcttggatataacctgttatctgtgagtcaactttgtaatatgggatataactgtttattcacaaatgtagatgtgtctgtctttagaagaagtgatggttcattagcttttaagggtgtactagacggcaaactttatttagttgattttgcaaaagaggaggctggtctagatgcatgcttaattgctaagactagcatgggctggctgtggcatcgccgtttagcacatgtggggatgaagaaccttcacaagcttctaaagggagaacacgtgataggtctaactaatcttgtcaagcaggataaatctgaaacccaagggaccctcaagcgcttcctaaggagagctcaaaatgagttcgagctcaaggtgaagaagataaggagcgacaacgagtccgagttcaagaaccttcaagtggaggagtatcttgaggaggaaggaatcaagcacgagttctccgctccctacacaccacagcaaaatggtgtggtagagaggaagaacaggacgctactagacatggcgaggacgatgcttggtgaattcaagacgcccgaacagttttggacggaagccatgagcacggcttgccacgccataaactgggtctaccttcatcgcctcctcaagaagacttcatatgagcttctaaccggtaacaaacccaatgtgtcttactttcgtgtatttgggagcaaatgttacattctagtgaagaaaggtaggaattctaagtttgctcccaaagctgtagaaaggtttttgttaggttatgactcaaatacaaaggcgtatagggtcttcaacaaatcatcgggtttggttgaagtctctagcgacgttgtatttgatgagactaatggctctccaagagagcaagttgttgatcttgatgatgtagatgaagaagacgttccaacgaccgcaatgcgcaccatggcgattggagatgtgcggtcacaggaacaaaaggagcaagatcaaccttcttcctcaacaatggtgcatcccccaactcaagacgatgaacaggtccatcaagaggaggcgtgtgatcaagggggagcacaagatgatcttgtaatggaggaagaagcacaaccggcacctccaacccaagttcgagcgacgattcaaagggatcatcccgtcgaccagattttgggtgatattagcaagggagtaactactcgctctagattagttgatttttgtgagcattactcttttatctcttctattgagcctttcaggcaaaatgttgtgggaaccaagtgggtgtttcgcaacaaacaagacgagcacggggtggtgacaaggaacaagacacgacttgtggcaaaaggttatgcccaagtcgcaggtttggactttgaggagacttttgctcatgtggctaggctagagtcaattcgcatattgttagcctatgctactcaccattctttcaggttgttccaaatggatgtgaagagcgctttcctcaacgggccaatcaaggaggaggtgtacgtggagcaaccccctggctttgaggatgaacggtaccccgaccacgtgtgtaagctctctaaggcgctctatggacttaagcaagccccaagagcatgtgaagcaactcaaggatgggaccttcatctcccaaacgaagtacacgtaagacttgatcaagcggtttgggatgaaggacgccaagcccgcaaagactccaatgggaaccgacggacacaccgacctcaacaaaggagatttcaatctgatccaagggattgtcacttagtggccgtgaagcgaattcttagatatttagtcgctacgccttgcttcgggatctggtatccaaaggggtctacctttgacttgattggatattcagactccgactatgctggatgtaaggtcgataggaagagtacatcggggatgtgccaattcttaggaaggtccctggtgtcgtggagctctaagaaacaaacctccgttgccctatccaccgctaaggccgagtatgttgccacaggacagtgttgcgcgcaactactttggatgaggcaaaccctcagggactttggctataatctgagcaaagttctactcctgtgtgataatgagagtgctatctgcatggcggataatcctgttgaacacagccgcacaaagcacattgacatccggcatcactttttgagagaccaccagcaaaagggagatatcgaagtgtttcatgttagcaccgagaaccagctagccgatatctttaccaagcctctagatgagtcgaccttttacaagctgcgtagcgagctaaatgtcttagattcgcgaaacctggattga

SEQ ID NO: 119265 - DNA, 812 bp, Zea mays
  Clone ID: MRT4577_40252C.1
gctcatccactcccactgaccccagcctatgtggagcaaggtgaaggggggaataatggagcagcaaatgcgaatagcagtcaagggcctcctgcttccgctggcgatgggcttctagacttcgatatgtacctttctgagatccagagtagccagccctcgaaacctgagctggaacagtacctggatgagtccctcaccccacgtacccaggagtttgatatcctgaactggtggaagctaaacagagtgaagtttccaaccctctctagaatggcctgtgatatcttggccattccgatgtccatggtaagcagtggcagctccatattcactgctggaacaggaagccgcatgctcgatgactacagaagctctctccgacctgagacggtggaagcacttgtctgtgcaaaagactggctgcagtactctacgaaggctgaaggatcgtaggtttatcgtcgtcgctggtcactgctcctgccttgtggaagcaagaatctatgtatccatctgttgtacctataagtgtagtttaactgtaggctgagattgtgatctgttctggtgtttgtctcgtaaaggtgtgtagactctgatgtactcgttgttgtcatgtaatagcttatgtatcatgttctagtatcgtctgatgttggagtttgcatgcttgggctatgtgcatgtacaggccgtgggatgcatcagctggttgctgtttgaactccggttttgtattcagtttggtttgtaccgtggattggtgtccatgttcgtgtatagctgcacaaaaaaaaaaaaaaaaaaaa

SEQ ID NO: 119266 - DNA, 141 bp, Zea mays
  Clone ID: MRT4577_40253C.1
tactactctgtccctcgtctccccaaactccatctacagcacaatggactccatcctctcgtagggctccattaaccaaggtcccacacccgatctcgatcacacaccccgcatcccaacacctacactgcacactcacac

SEQ ID NO: 119267 - DNA, 653 bp, Zea mays
  Clone ID: MRT4577_40254C.1
aattcggcacgagggtcaagctccgtgaggcgcacaaggctggctcgccagccctctgttccgcctcctggggccccagcggacaacacgtcgtcaccgcttccgccgcggacactgccgtcctgatccacgacgccgccacggtgctcgccggcggtcggggctcgggttcgtcggcgctggctactatccgtctccacaaagacggcgtcacggcacttgcagtcgcgccgggccccagcggctcgctggcatcgggatccatcgaccactccgtcaagttttacaccttcccagaggggcagttccagagcaatgtcgcccgattcaccctgcctatccgatcactcgcttttaacaagaaaggcaccctactggcggccgcaggtgaagatgatggcatcaagctgatttcaaccattgacaacacgatatcgaaggtgctcaaaggacacaagggctccgtcactgggctggatttcgacccgagaaacgattacctagcatctgtggacagcttcggtaccgtcatctattgggatctttgcattggtgctgaggcccgtaccttgacacgtattgctcccacgtttcggtcggataactctgtcaggaatgttctgtgctggagccctgatgggcagacccttgct

SEQ ID NO: 119268 - DNA, 188 bp, Zea mays
  Clone ID: MRT4577_40255C.1
ataatgctacagacactttttatcatttaccttgccaccaacgaatgcgggaactggcgataccagcacggttattcatacccataccacaaccaccacatcccatactgagaactggatggcatcagagctgtgtcttcctcacactatgaactcgagtgcggtcaggatcaagaatgcactgtcgc

SEQ ID NO: 119269 - DNA, 170 bp, Zea mays
  Clone ID: MRT4577_40256C.1
aaaaaaaaaaacctaacaaacctaaaaacttttattattaaaaaaaactaaaactaaacaaattgaggactttacaatataggcactactatctcaacttactaccttatctacactaacatcatactttatatcactttcctactttttaacaccttcaacatactaaa

SEQ ID NO: 119270 - DNA, 573 bp, Zea mays
  Clone ID: MRT4577_40257C.1
ataagtcgagtacccattgcccattggcattgcttccttcctccaagagaatcggatcctaggagagtagagccagccagatcatatcacacctcgaaaacacataccattccgtccgcgacaacggcctcatcggcgactatgaataatatgataactgcattttcctctccagagctgtgattcaaattcgtttacacgtcatgggacttcttccgacctgtgctggtggtgtcgccgacatcatacacacaacaccacctgaggtacgctgaccatacgcgactcacatctgtgcgcatcactggtggatgggcatcgataaaaccatgcatcttcgcgcgatcgtgagacgactagatctcgcttctaggacatcaattactatgagctccgcagagatatgctggacctgtcctgcgcaccgaggttcctgacatgcacgacattccagtccagaaccgacgtgaccactgccacggcatccttgctgatcatcgtgacaaccagttgcagcagctgatactatgaagatacctatgtccacctgctccagaagaacgaggcgctgtt

SEQ ID NO: 119271 - DNA, 2267 bp, Zea mays
  Clone ID: MRT4577_40258C.1
ttgaaacaaaaattcttgatgtagttcagatgaactcgatcatgtcggattcaaagcccaagtgtctggtaattgatgaaattgatggagcactcggtgatggaaaaggtgcagtggaggtcatcttgaagatgatcaatgctgaaaagagtaataattccgacaagagcactaatggtgaggaaactcaagcccgaaagacatctaggaaaagtcatagaacagcaaaactactgaggcctgtaatttgtatatgcaatgacatttatgctccagccctgagacaactgcgccaagtagccaaggttcatgtgtttgtgcagccgacaattagccgtgtggtgaacaggctcaagtatatatgcaaaaatgaaggtttcaaggctagttcaatcgcgctttctgcattagcggagtacactgaatgtgacatccgttcatgcctaaacacacttcagtttttgaacaagaaaagagtggccctaaacattacagcgattgattcacaagtaattggacagaaagataagtcaaaaagcatcctcgatgtttggaagcaggttttgcaaaagaaaagactcaagcgggctggaaaggctgaaagccttttcaatgaagacaaggacatagactttcttttcacgctcatatctaaccgtggcgattatgaagttactatggacgggatccatgaaaatttcttgagattatcgtatcatgacccgatgttgcaaaaaactgtaaaatgtctcgatatacttggagtttcagattccttgacccaatatgtttaccggactcagcagatgccacttcatgcatatcaacctccaattgctatcactataagccgcatggttgctcaagttgagaagcctaatattaattggccaaaagctttgcagaggtctcgagcattgcttttagaaaagaaagacatgttgaaaacctggcaaaaccaaatgtcaccatttgtttcaaggcacctctcagtagaatcattcgttgaagacactgcttctccccttttacatattctctctccactgagtttgagacctgtagcactgaatttgctgtcagagagagaaaaggatgaacttgtgcaattagttgatactatggtctcctattcagttacatacagaaacacaaagtttgtccctcaagaaaaggcaaacctatctgtagtgccgcatgaagtttcatcactctctctttatcctccaattaatgatgtcataaattttgagggctatcaatcagagcacattggactgtctttagccatgaaacaggttttggtgcatgaggtggagaagcaaaagatcattaaagatagcgctggcaaattgttgaaccaatctaatgatggaaatatgaagagcgaagctttatcaactataaggaagaaaacagtagctaattccatccgtccagctttacattcttccaaggatagttccaagtgcaattcatctacacttgaaatgcagtcaaactcagcctctattgtgaatgataacgattctatatctgccaaaaaaacactccagccgtgcagcaaatttctttgacagatttaggaaggaaagaccagtagacgcaaaaactcatagtgatgtggggctgcaaagagcaacacttcagagggattcacgccctctgatcttcaaatataatgagggtttcacaaatgctgtgaaaagaccagtgagagttagggatcttctgctcagctaggcccgcttggtacctgcacttctgtaaagttatctttgtgtttatgaattttcatttactgtatattgattgtatcatgaatattgtatcatgtggttgtgattggttgcctggccggatccctggctaggtcgaactcagcaacccgccctgctgtttgattgtctgtatcttccgttgccgttgagctaggacgacctcatgcaaatagtggtctggagccaggctcaggagggaagactattttggccgtatgaactcagcctggctggacacagaaaccaagatatagttttaattagttttcttgttacatctcttgattaatgcatcaaattaagaaactgattttacttttgtgtttctgatatttgtatgaacaaaactagatctcacttctctacagcaacaacagctgctctggatcaagaaaaaaaaaaaaaaaaaaaaaaaaaaaaaaaaaaggccccaagggccctcaaaatcaaaattgatgatccttttcgaaaggggcccctagggcc

SEQ ID NO: 119272 - DNA, 469 bp, Zea mays
  Clone ID: MRT4577_40259C.1
cgagttttttttttttttttttttttttttttttttttttttttttttttttttttttttttttttttttttttttaaaagggggcccaaaatccctttttgggaagggtccttttttaaggggctgggggggcccaataaaaaccccccccaataggggccggaaaccccggggtttttaaaaaaatttgggccgcccagaaaacccggcccttttggggtcccatccggggggccggggcccgcccgccatttttgggcaaaaaccttaaaatttttccccaatttttttccggggggagtttgcccccggggcacccttggggccccccaacattccaaaacaaagggtgggaatacccgggccccaagttgttttgtttggccgcttcttaagaaaacccggggggggctttttcccggccccaggtttcctaaaaaaaacccccgggagagccctcccaggccc

SEQ ID NO: 119273 - DNA, 289 bp, Zea mays
  Clone ID: MRT4577_4025C.1
cttctggaccaaaaaaaactggggggtataaataaaccacagggggtcacacacatatccccatacatgcaaaaaaaatgagacaatccaaaatgaacgcctaaaactgtcaccttacaaacagagaatgatcccacctatgacgtcaccgggattacacaccaatgcagcccacaatacctaataacagaaacggggcttagttgaaccagaaatgctcccaacgacagcatccacaactgacaccattataatcacccccctctgaaacgcaacggccccacaagcc

SEQ ID NO: 119274 - DNA, 387 bp, Zea mays
  Clone ID: MRT4577_40260C.1
tcgttgacacgtgtgtacaagtggcaagggctctaagtctggagcctcaataaggtgcgccggttgccaggactcaagcatgatattcactattcgttagcctttcccttacatgatacaccttatgcagcatccttgcaatgagtgcaaggggactgaatagtgcatcaatgagaatgaccgctacccagcgtgctaggctgagaaagtcattcacgagaagaaggttcttgatgttcatgtctagaatgtgatgctacacaacctataaatcacccttcctgctttagcaaatttatcgcctgatactacactggagacattgtattcactctccagcagagagatcactcctaatttaatagaatgtgtgaagatcttttctat

SEQ ID NO: 119275 - DNA, 652 bp, Zea mays
  Clone ID: MRT4577_40261C.1
aagagaacagcacttacatacttagacgctaggggtaaaatgcacagggttagcaaaggcgctcctgaacagatcctgaacctagcatcgaacaagtctgagattgaaaggaaggtccatcattctattggcaattatgcagagagagggctacgatcgcttgctgttgcctatcaggaagtacctgaagggactaaggaaagttctggtgggccttggcaatttattggtcttctcccactctttgatcctcctcgccatgacagtgctgaaactatacgcagagctcttgaccttggagtcagtgtaaaaatgattacaggtgatcagttggctatagctaaggagactggccggagactaggaatgggcacaaacatgtatccttcttcatcattgctgggtgacaaaaaaggtgacatcgcagttctaccagtggacgaattgattgagcaagcggatggatttgctggagttttcccagagcacaaatacgagattgtgcagaggttgcaagccagaaagcacatatgtgggatgactggagatggagttaatgatgcacctgctttgaagatagcagatattggtattgctgtggctgatgctactgatgctgttcgaggtgcttctgacatagttctgacggacc

SEQ ID NO: 119276 - DNA, 601 bp, Zea mays
  Clone ID: MRT4577_40262C.1
cctcgaggccggccgggacagcaacccccacagcgccactgtccagcgcgcgcgacagcttgattattagccgcatggtggccctcatcgcgactcctgaagcccgcggccatcaagggtcctcccggcagctccatctccggaaggaagctcgccgtagccagggcggcgcgccgctccatccgcaggccccgggcagacgccgcggaggacacgtacggcgacgatagcgtctactttgacctcgaccacatccgcaagacacaccggagagggggacactctaccgctctgacgcggcggctgcctacaacccgctacagagaacgttcttctagacgtacgcggtatccgtgtcaccaagagagagctggtgcgcaagttcctggtgttggaaggcggatcacttctggcctacgacagcgcggaggcggcaccggacctcctgtcgatacagaagggacctcacgaggcgtcgcagccggttccactcggaaagatcgaagctcagcgtctccatttggatggtctagaaatttggttagcactgcgtagcgtcggacgatccgtcacagacgtcatggatgatctctctatcttg

SEQ ID NO: 119277 - DNA, 612 bp, Zea mays
  unsure (1)..(612): unsure at all n locations
  Clone ID: MRT4577_40263C.1
cagnacacaaatacgagattgtgcagaggttgcaagccagtaaacacatatgtgggatgactggagatggagttaatgatgcacctgctttgaagatagcagatattggtattgctgtggctgatgctactgatgctgctcgaggtgcttctgacatagttctgacggaacctggattgagtgtgatcatcagtgctgtactaaccagtcgggcaattttccaaagaatgaagaattatactatatatgctgtatctataaccatacgtattgtgcttgggtttttgctcttggcatgcttttggaagtttgacttccctccgatgcttgttcttgtgatagctattcttaatgatggaactattatgactatatccaaagacaaggtgaggccatctccccatccggacagttggaagctagcagagatatttgcaactggagtgatcattggggcgtatttggctgtaaccacggtgctgttcttttgggtaatttacaagacggagttttttgtgagggttttccacgttagaacaatgaatagaaaaaagatcgaagaaacaggagaccagaatctacttgccgacaacatggagatgctggcctctg

SEQ ID NO: 119278 - DNA, 402 bp, Zea mays
  Clone ID: MRT4577_40264C.1
gccattaagcagatattaaatagtgcgtaaaaagagacacctgtaatcatttttacactgactccaaggtcaagagctctgcgtatagtttcagcactgtcatggcgaggaggatcaaagagtgggagaagaccaataaattgccaaggcccaccagaactttccttagtcccttcaggtacttcctttacgatgaataaatttagtaagggtttgcttgtatatagacaagcatgccatagtatactagttggttaccacctgataggcaacaacaagcgatcgtagccctctctctgcataattgccaatagaatgatggaccttcctttcaatctcaaacttgttcgatgctaggttcaggatctgttcaggagcgcctttgcttaccctgtgcatttt

SEQ ID NO: 119279 - DNA, 161 bp, Zea mays
  Clone ID: MRT4577_40265C.1
ctgaagtctcttgatctagagaagtatttgataaatttccaggctgaagaggcacgttcgatatatgttgcaatttcatattgggggtgtgactggtgagtggtgaccttaaatattggtaatggatattcatctttcaggttgatatgaaagcattggtg

SEQ ID NO: 119280 - DNA, 733 bp, Zea mays
  Clone ID: MRT4577_40266C.1
gggaccctcgaggccggccgggtatggatttttgaagtaagcagtctaattctgtccaaatctggacaaagttgtcgtttagcactgtttgaccttgctaagtgtcgaatcactttgagataataataccatagttgtagagcagttcttaagctttccggaaagtccttgttcactacttttggatgaatatcttgtgagttatgattaaaacaagtgactgctatgctgctgtccaaaaatctgcaagtgctaaaaatgattgcttggatttgcttttgtgtggttaagtaggtttggttagttcttgatgcttgattgatgaagtcttgtagttgcatatggttatttcaattctttcttaatgtttactctagactttagtgatttaggaaggacgttgatgctttgatgaatgctagtgaactagtaattatttaggctttgtgtttatagtgaactcaataatacgaagaaggtttagtagacatatatatatagtattatcaaattgattcggtagtcttgtggttataagtatgatgtaagtgccttgtgcttgagtaataaagtttagagttgaagtgcttgctatacatagcagtgttttagacctttaagttgagatatgttctattccatagaattctaagttagttgataatgagttattcattgaatctaagaatggtgtaatggtttgtttaactgacatgatatgtatgatggtttg

SEQ ID NO: 119281 - DNA, 564 bp, Zea mays
  Clone ID: MRT4577_40267C.1
cctttcactatatagagttcatcgctgcaacattgcatctgaataaactggagcgtgaggaacatctagtggcagccttttcatatttcgacaaagatggaagtggttacatcacagtggatgaactgcagcaagcttgccaagagcataacatgccagatgcttttcttgatgatgtcattaaagaagctgaccaggacaatgatgggcgcatcgactatggagaatttgttgccatgatgaccaagggcaatatgggggtggggcgaagaacaatgagaaacagcctgaatatcagcatgagagacgcacctggtgcaatctagacttccacgatgtacatacagcttgtggctttagcttcttcctgtcttcctgctctaccaagacttcctgcgattttcgaatcttgtaaaatgcctgtgtggatgtgtgtttctggggattctgatttagctcgtcaattgattcgacggaacgcatgctaagctgggttgaaatgatctcacacgttgctgctgcttaatccctgcaaaatgttcagtgaattacctcctactatat

SEQ ID NO: 119282 - DNA, 576 bp, Zea mays
  Clone ID: MRT4577_40268C.1
tcgagcaggcaggcacatctcttagctctgccctgcagtgcgcgcgagcgcgacgggggtgctgtgctgccgcagcggcgggagaccatggcaacggtgccgttgccgtggccgagcgtgaggaggtcgctgcaggagggggccgccagcgcggcgtcgtacgcgcggcgagctccgcggcccgcggccacggtgaggtcggtggagacgctggtggtgatcgtggccgcgatcgtgctcgccgccgtgctggcgggcgtcctcgcgcgggtctgtggcgggcggcacgtcgtgccgagcgcccagtaccacgacgaggaaggctgggtggagaggcgctgccggagctgcctcgacagcgggctgccgccgccggagcagggggcgtccaagacgagcgaggccaaatagcgtcattgtgcattgtggtagtactacttgtagtgctagcctagtagcctgctgcgtactagtactgtgctgtgctgctgtagtattatagtaatactactagcgtttgtctaggcaattaattactgcaggcttcttatcagcgtattgtacacaggagtggta

SEQ ID NO: 119283 - DNA, 341 bp, Zea mays
  Clone ID: MRT4577_40269C.1
ggggagaacacaatacgtttttatcacaaatatactgttttagtgggtaggcagggctgaactttcctaataactgaactgaattggacactgaacacaaacaaagaagctaaaagagcgcaggacgacagttcccacctcatcattgcaaaaagccgagcggggagggatgcatcaactgtgtctacaactatacgtactgaaaattcaaaagtcctggtgggtttattacttcattggggccaaaaaagtgggaactcccattgttgcatcaaattgcatgactgaagactgaagtccctgttcctccctttttcgggacacatttggtcactcacatg

SEQ ID NO: 119284 - DNA, 262 bp, Zea mays
  Clone ID: MRT4577_4026C.1
ccccactccaccaaaccctcgcgtcgctgggactgggagcagagtagagcacagcggagcagattagcagaaggtgtcgagtggaagcaaatggccaatgagtggccgcggtggtggtagcatcctcctcgccttttctccccgtctcccgcgttctggttgttgcagcgagcgggagcgggaggacacgtgctacccccgtcgcttctcgggcacgcctccctcactcggatctgggccgcgcgcgcgagatcctgagctc

SEQ ID NO: 119285 - DNA, 481 bp, Zea mays
  Clone ID: MRT4577_40270C.1
ccaatgaacatacatagattcaaaacttgtggtttttacactaacaaaacacccacctttctttggggggtaacactaacatggttgggcactactttcttgaaggagctgggtacatacaaattacagcatatgacaatagcaccttttttttttatactgtgcctttcgagcaaaacttcttgccggctaaggttttcaccgcgtatcaaaatgtgactgcctttgttggtcccggtacaaactcattatttacgtccaagctagctttaacttcatctccaagtgagccacttttgtatcaaattactgccttattgcaggatcaagtccatcatcaaagtcagcattgctcaaaggggacccgggatcttgcaaactttgactttggcaacggtgcctagaaaatgtaccattatctgattttgacggaaccacaccagaaggtccctccttatttacaggctcggagttttctttt

SEQ ID NO: 119286 - DNA, 380 bp, Zea mays
  unsure (1)..(380): unsure at all n locations
  Clone ID: MRT4577_40271C.1
ctcggggttngggttttttttttttttttttttttggaaaaaaccccccccccccatgcattaaacaagggcgcaacaaaatattgtccaaagggcttttggggtttcaccaggaaaaaccccccaaggaatgcaaatggggaagggacaaagggccccccccctgttttccgacccctttggttgcaaggttcaatcattggccaaccccacaaacatgggtgccccccccccccaacctgggggcccccccactatatataaagggaggggtgccctgccatgccgcctttaaaacttgaaaccaatttttggcggggccccgggtttctttaaccaaaagggcccttaaaaaaaccgccccgggggaaaaggtttgg

SEQ ID NO: 119287 - DNA, 552 bp, Zea mays
  Clone ID: MRT4577_40272C.1
agcagtggtaacaacgcagagtacgcgggtatgaatccttttatattctcatttttaagtacttctctgtttctgctacttttgtactgtatatttccagcttctccatcagactgatgatcccatattcagtgtgctgcaagtgatttgacatatgtggcttatccttcaggacaagatatttttgtatgctacacttcccaaattgcaattaatccagaagtctaccttgttttattctattagttctcagcaacagtgaatgaatatgaatcagtcatgctgatagatgttcatctggttattccaaacaatctgacatcgcatctctttctgcaagtgagatgaagaaaacctgaaatgctatcaccatttaaaacattggcttctggaagttcaggtgattagcaggagacgttctgacattgccattggcatgtacggtagtgatggcaggagacgttcttaaacagcagctgctccttcagcttgaaatggctgattggattgaccgagagcatccaccttgcctttatgggactaactgaatga

SEQ ID NO: 119288 - DNA, 385 bp, Zea mays
  Clone ID: MRT4577_40274C.1
attcgcacctaaataagaatccacggacctatttcaactacatctacagtgctcaagggggaagattttattatcttctacgatcccacaaaatcaccctattttaatcaccaaagactcacttaactaacttatacacagatactatgtgtcggtctcatgatcccgaagtaaatagccccctatggatgacaatcctaatttctcctaccctaacctgttctattttgccaaaacccttgataacaaccaatattggcctgttactgctatttatatagcatattatgtcttgcaattcactgctacctaacattattaaccccacagtttctgtcctacataacccacctaaccgttaacaatttcattacctctttgatac

SEQ ID NO: 119289 - DNA, 1594 bp, Zea mays
  Clone ID: MRT4577_40275C.1
acatacacacaaccacagccagcaagatctagtcaaagaaacacatcaatccagagcgtccaccagagtcactaacttgtccagccgcagcaatggcggtgcggtggccatcgcccgccgtggccgcgttgtggatcggcgcgagcctcctagtcctgtgcacgctcatggcgtcgtcggcgtcagcccaggcgccgccgccacaggtgcgcccggtgccccagggacgcaacctggtggtgctcaagccgcgggttggcggcctcgggcctggccggggatcaagacaccaattaagccagagcagtctacaatggctcacagtcacagaagcagtatgagcttctgcttggtgtgcatcgtcgtcatggcggcggcggcggcgttgttgcaacccgcatcttctcagcaggcggtgccggacatcccgaacctgaaggtgggctccaacgatcgcagcacgactctcaagtgcaccaacatcaagagcaacaagaccacctgcagcgccacctgcaacgcacgctgccctcacaagtgcctcatccagtgcccaagctgcaagacattctgcttgtgcgacttctatcccggcgtgtcctgcggcgacccacgcttcacgggcgccgacggcaacaacttctacttccacggcaagaaggaccgggacttctgcatcgtctccgacgccgccctccacatcaacgcgcacttcatcggcaagcgcaacccggccatgagccgcgacttcacctggatccaggcgctgggcatccgcttcgcgcaccaccacctctacgtcgccgcccagaggacgcccaggtgggacgccgccgccgaccacctggcgctggccctcgacgacgaggacgtcgacgtcgcgtccctgctgccgcgcttcgtcggcgcgcgctggtccccgcccacggcgccggcgctgtccgtcacccgcaccgcgcgcgtcaacaccgtcgtcgtcgagctcaggggcgccttccgcatcgtcgccagcgtagtgcccatcaccgccgaggactcgcggatccacaactacggcgtcagggaggacgacggcgacaccctcgcgcacctcgacctcggcttcaagttctacgacctcaccgacgacgtgcacggcgtgctgggccagacctaccgcccggactacgtcaacagcctcaacgtcacatccaacatgcccgtcatgggaggcgcgccggactacctctcctccgacctcttctccaccgactgcgccgtcgcacgcttcggcggacgccgacaccagcaagccaccgccgctaatattgccatgctcaccgacgacgacgacatggaatgaataacaaaggacacgtcgtacgcgcgatcgacgactttaccgtaccatttcattaccatctccgaggatatcgatccatcgttgtgtgtcttctacactagctagtgaatgaagaagcagcaataaacccattgaaattatatattatatattcaacaaataaggcttataaatacatatgcatgcatgtatactcctaattatttaattaaatactcctggttttatttttcaatgcatggatgtttaagt

SEQ ID NO: 119290 - DNA, 1016 bp, Zea mays
  Clone ID: MRT4577_40276C.1
ccacgcgtccgagctcctagaggaatcaggaaactgaaggccctgcacacactaggagttgtcgatgttgcacggagcaagaccactctgaaagaacttgaagagcttactcagctacgtaagcttgctgtggctggggtgcacagcaaatacagcaacaagttctggtctgtcatttccgctaacaagcaactccgatctctgtcagtgaagggtttagggttagatagttgtttcggtggggatttgttgccaccaatacaccttgagagcctcaagctggaaggccagcttgtcagaataaatgagtggatccataagcttcagaatctatccaagttgcagctgtataataccgaaattgactcagctgatcccatgcaagctattggacagctaccaaatcttacaatgctgactctgtgttatggttcttttatggacaacagcgagctccttttccatggtccatcgtctttcccggagctcatggtgctgaagctcaaaggagtagattgcgagatagtatctttaaagacaggcaatgccgaagctcgagctgatacacgctgattttccggggggaaattgtgggctagcatttctcgcgagcctcaaggaaattcggctgggtagtagcaccagagacacattgaagaaagatctgcagaagcagctcacaggagatctagaacgtgtcagtctgaagctgttgtaactgatccagccggcaggacaaacaccttgctgtttgtgacacgatgcaccacatttacttgttgtgacacggttctgattttggaccgttggaaaagctccagactgatcccgttctgccatttctacattcaacctgctcaaattcgtatttgcagttatcccaatcgttttcgcatttttttaatgtatttggcaaatttgagaacaagatataaatgtaatacctaatttgtaatttgtaagagctaatatcaaagggagaaacaagtttactttatctacatgggagtttgaac

SEQ ID NO: 119291 - DNA, 694 bp, Zea mays
  Clone ID: MRT4577_40277C.1
gcgacagcaggctgtcgggctgggcgcagccgccggtgccctggatggcgccgcagtcgctctcggagcaggcgaactccaggttgccccgcagcgccgcctcctgcgtcgacggcttggccacgcaccatgtgtcgctcctatggcgcaaggtttctgccgccgccgctgctgctgaagaagatgggatttgatttcagtgccagattgttagtggataaagcagccagaaacgagtgatcctttaccgtcggtgtgaagcgccgatagtgcgagggccacgaagaaggcaaggaatgtgacgttgggtgacgccatttcttcaggcttctggaccagagactgcaagaaagaagcagcctgtcttcccgtgtagagctttgttgcaacagcaaacgatgtgtgtgtgtgtgtgtgtttgccagagaacatgaccaaggattggttgcattctagtcaaatttatagggaggaggaggaaggtgaacaggaagaacaagcagcagcaggccagcagcacaaaggccgtgtctagaaacggttggttttaacgcgttttatggccacattacaccggggccgccacattcagtatccggtcatgaaaaggataataatcagttgacgtgaagctgaacggcagcagtctgtacggaattgccgcacatgcaacggaatgcacttttgtcagtcc

SEQ ID NO: 119292 - DNA, 424 bp, Zea mays
  unsure (1)..(424): unsure at all n locations
  Clone ID: MRT4577_40278C.1
tttctcacgcgtccggctcgcctcgcaatccagctccagccgcgaccctccctacctacatacgctaggtcgtcgctagctacctagcttgaagtttgcgacttattagtctcgaagcgagaatgggagctgcctcgtcgcgggaaggggacgctgcccgcgcggcggcgcgcgagcacacgaagcggtgccgggagcggcggcggctcgcgcgggaggccgtgcgcctgcggcggcacctcgcggcctcgcacgccgcgtacctccggtcgctcggcgtcgtcgcgtacgcgctcacgcgcttngcggacggcgagccgttcccggagtccgaccacaccccagccgacgtgatcgcgcaccgaccggtcgtcgtcccgtcctcgccttcgacgttgctccgcgccatcgcacaccgagcgag

SEQ ID NO: 119293 - DNA, 383 bp, Zea mays
  Clone ID: MRT4577_40279C.1
gcgtgccccggcccggtatttatccgggggtcgacgcgctctcttgtcgggggccgcccttttttttttttttttttgtgtttccctcaaaaagaatcaatgtctacaacaactatggccatgagtagaagcactgaagccggggggtgtttcaaacacccagagggcctattgccaccacacacttgtacatccacacgagcatagagcggaatgtaggcgctaggcttgctctgcagggaaaatgcatgctgccacaccatttaacaaggctcctccgctactctgccactcaagaataggacaattgacctgaacctggtccacattttgcgctgtataggcgcacgggctactttgctcaaatgtccagggccttgaac

SEQ ID NO: 119294 - DNA, 329 bp, Zea mays
  unsure (1)..(329): unsure at all n locations
  Clone ID: MRT4577_4027C.1
cagcanncagaaacacaccaagcgaagcgcactagcaacaaccgaacaacaagggcnaccaagagaggagcccccccggcgcccacagccacgacagagagcgcaacaaaggcgagcaacangccacagagcacactagcncccagagccaagaaaccacagaagcacccaccagacacancaaggggcagggaacaaccagccgggcaagccnacaggccacaacaagcgcaggcggcgagcgacaaacaacaaccaanggcccaagggcaacaacaanccggggcacaagaaaaccgacaaaccancggaacgcaacagcaacaaca

SEQ ID NO: 119295 - DNA, 178 bp, Zea mays
  Clone ID: MRT4577_40280C.1
gacaattgaaccggtgctgacaacacaaatagcatgacatgaagtgcaggtgccatgaaaaatataaaaaagctggggcaggaacctattgtcaagatgccataggagaaagatccatgatcttgtgacagacttcttttacgataatttgaaccattgttgctccattcacgacatt

SEQ ID NO: 119296 - DNA, 1163 bp, Zea mays
  Clone ID: MRT4577_40281C.1
acattggcttgcgtgtgcactcgttgtgtcctcttcttctttctgttctccccgcgtgctctgtctctctcttcctctctgcctctctctctcagcggcgactagggacagccgctgcctccctacgcctggtgcccaggtatcctttgccggcgacgagcacccggggtatgggaatggaggtcgttggtgctgaagcagcaccagcagaggtcaaaatatccgatggagaagtgaatctattccaagagaaggaaagcaaagcaactgcaaaagaacgtgaggaggcagctgtttttggttcagagacaactgcgaatgtcactgatctggcacctccaaaggatgcgaaggatgagtggcctgaacctaagcaaacttatgtcttctacttcatcaagatccgctcatttgaggatcctaaactgagggtaaaactcgagcaggctgacaaagaattccagaagaagatccaagctcgttctaaacttattgaggcagtaagagccaagaaggcagagcgttccagtattatcgcagagttgaagccattgagtgctgagaacaaacaatataatgaagttgtgaatgagaagataaaagagatggagcctcttcgaaacagcttgggaaagtttcgtgaggaaaacaatgccatgagggcacagagtgcaggcttatgctcttccatcgaagagcttgacctaacgatcaagatgctgaatgatcgcatggtacatgaaagcatacctttatcctgagagtcatgtataggcccagcaattaaggaccttcccaaaatccagatcgaaagtcatctctaatgctgctaccagtgctaaggtcctcctcccagcgaatgccaccaactgagtgggcgaggtcggtgcactcgcggccaggcattcatttatgacgtggagaccaattttgcaggtgagaaaaaaaagtgcaaggtctgctttaaacctgaaggacccggaggatgttcgctttcgatgttgttagttggagccgaaaatacagttgtttttggttgcgactttgctagatgtctctctatatactgcgactgatatcccgtgtacttttgaagtgatgggtatattgacatctggaataacaatgcctttcaatttcattatttcaaaaatggcccttcc

SEQ ID NO: 119297 - DNA, 389 bp, Zea mays
  Clone ID: MRT4577_40282C.1
atacccgtgccgaccgcactcgtccgataagctctcgacatgcctcttaccaagcttactactctcaactccacagtaataaaacctgccacttttcaacttgccaccgacccttcccttaactctcaccccaccacttctagactgaataaacctaacctctaccgtcctcaaactcatcccctccatgacatccgcaagtatcataacatcacttacctactcatcattaacctgccctttcacattctcgtaactcaaattgctcacgacttcaaaactgattctcgtttacaaaaccattctatacttcccctccatcaagcatctaatgcatactcttcttcaactgtttcaacacactaactctttctctattcattctaaac

SEQ ID NO: 119298 - DNA, 721 bp, Zea mays
  Clone ID: MRT4577_40283C.1
acttccttgtcagactcaccccttgcgttctacctcttgcattctcttttgttcactccgcgtgttctctctctcacggcctcaccctcctccctgtatcccactcgacggcgactgggcgacaaccgatgtctccctaaacctggtgcctaggtatctctgccggcgacgagcacctgccagctgcaggggtatgggaatggaggtcgttggtgctgaagcagcaccagcagagatcaaagtatctgatgatgtgaatctattccaatagaaggaaagcgaagcaactgcaaaagaacgtgaggaggcagctgttttcggttcagagataactaccaatgtcaccgatctggcacctccaaaggatgtgaaggatgagtggcctgaatctaagcagacttatgccttctacttcatcaaggtccgctcatttgaggatcttaaactgagggcaaaaatcgagcagtctaacaaagaattccaaaagaagatccaagctcgttctaaacttatcgaggcagtaacaaccaatgatgtatttttcttacaggtcctcattgaagtaatattcctaactgacgcaccacttttcatcaacgttgaatgctttgtaactcatttgtgtacatatgaacctgttgttgaagccttctcaaaactgtgtctgtctatgagagaggttgcatcacttttagtcaaaaaaaaaaaaaaaaaagcggcc

SEQ ID NO: 119299 - DNA, 254 bp, Zea mays
  Clone ID: MRT4577_40284C.1
atagtgagcattcagaaacacacaaagctaaacgccctagaaacgacctaacgtcaatgggtaccactatatttgctctacttgagctaattaccctttattagagcgaatcatatacgttcattattccacaatgctcacttgatcctaatgccattattccacaaatgcatgaaccagctacttcaatggactatgaacacctaactatgcaagcacatcatgagacaacaagcgcttgctgcaagcaactt

SEQ ID NO: 119300 - DNA, 1127 bp, Zea mays
  Clone ID: MRT4577_40285C.1
attgggtacctcgaggccggccgggagagacccacgcgtccggttctcaccccttgcgttctcttctgttctctctctctcacacaaggtctcaccctccctgtatccctctgaccctctcggcggcgactgggcgacagccgctgtctcactacgcctggtgcccaggtatctctgccggcgacgagcacctgccagctgcaggggtatgggaatggaggtcgttggtgctgaagcagcaccagcagagatcaaagtatctgatgatgtgaatctattccaagagaaggaaagcaaagcaactgctaaagaacgtgaggaggcagctgtttttggttcagagacaactaccaatgtcactgatctggcacctccaacggatgtgaaggatgagtggcctgaacctaagcaaacttatgccttctacttcatcaaggtccgctcatttgaggatcctaaactgagggcaaaactcgagcaagctgacaaagaattccagaagaagatccaagctcgttctaaacttatcgaggcagtaagagccaagaaggcagagcgctccagtattatcgcggagctgaagccattgagcgctgagaacaagcaatataatggagttgtgaatgagaagataaaggagatggagcctcttcggaacagcttgggcaagtttcgtgaggaaaacaatgccatgagagcacagagtgcaggtttatgctcttctatcgaagaccttgacctaacgatcaagatgctgaatgatcgcatcgtacatgagagcatacctttatctgaggagaagcgtctggtgaaagaaattaaggaccttgaaaaaaccagatcgaaagtcatctctaatgctgctaacagggctaaactgcaaggtacagtggttgaaaaagaggctatacaggaccaggtcaaaatcatcggggagggcattgatggaataaagaaggaaagacaggcagtaagatctaagattaaggtcctggaggatgagctaaaacttgttgatgctgagattgcattgcttcaagaagatttagatgcagcaactgccagaaaggataaggcatatgaatcgttgcaagaattgagagcagggcgggatgcaaaaaacgcat

SEQ ID NO: 119301 - DNA, 2459 bp, Zea mays
  Clone ID: MRT4577_40286C.1
ctcaccccttgcgttctacctcttgcctcttgcgttctcttctgttctctctctctcacacaaggtctcaccctccctgtatccctctgaccctctcggcggcgactgggcgacagccgctgtctcactacgcctggtgcccaggtatctctgccggcgacgagcacctgccagctgcaggggtatgggaatggaggtcgttggtgctgaagcagcaccagcagagatcaaagtatctgatgatgtgaatctattccaagagaaggaaagcaaagcaactgctaaagaacgtgaggaggcaggcagctgttgttcagagacaactaccaatgaaggtcactgatctggcacctccaaaggatgtgaaggatgagtggcctgaacctaagcaaacttatgccttctacttcatcaaggtccgctcatttgaggatcctaaactgagggcaaaactcgagcaggctgacaaagaattccagcaaaagacgcggcccgggcccaaaaggaagctgagaagaagctgaagaaagaggaggagaaagccaagaagaaatctggtgcagctgacactgatgagcaataagaatcggaagccgagtctgaggaagcgcagggcgaccagagcacagagtgcaggtttatgctcttctatcgaagaccttgacctaacgatcaagatgctgaatgatcgcatggtacatgaaagcatacctttatctgaggagaagcgtctggtgaaagaaattaaggaccttgaaaaaaccagatcgaaagtcatctctaatgctgctaacagggctaaactgcaaggtacagtggttgaaaaagaggctatacaggaccaggtcaaaatcatcggggagggcattgatgaaataaagaaagaaagacaggctgtaagatctaagattaaggtcctggaggatgagctaaaacttgttgatgctgagattgcatcgcttcaagaagatttagatgcagcaactgccagaaaggacaaggcatatgaattgttgcaagaattgagagcaggtcgcgatgcgaaaaacgcacccttcatgcaaaatcgtacagttttagccaaagctagggattattctttaaggaatatgctatcagaattgcaagagctccacaaaactgaggtcgacaagttcatgacccaatggtgtgaaagtaaggccttcagagaggactacgagaagagaatcctcacatccctaaatagccgacagctgactcgagatggtcggatgaggaatcctgatgagaagcccatatttatcgagtcacaggcgccagctccagctccagagcccatccctgtaaaattgcctgcaaaacaagccaaggaagtgcctgctccccaggcagatgatgctcccaagactgaagctccttcgaaaggacctgtcaagtcgcacaaggcaaaagctgctcttgatgctgatgatgattatgaggccgagcccctgaaggagaaggcaaagcctacggaggctgatgtggctaagttgaaagagatcaagaggcaggaggagattgagaagaacaagcttgcattggagaggaagaagaagcaggctgagaagcaagcagcaaaagccgcggcccgggcacagaaggaagctgagaagaagctgaagaaagaggagaagaaagccaagaagaaatctggtgcagctgacactgatgagccctcagaatcggacgccaagtctgatgaagccatggaagccccagtggagcaagaagtggccccagcttccaccatggtaaagaaagaacagaaggagagtgcccggcacaggaacgtggtcagcaaggccccgccacccaaggcgatcctgaagaggaagaaggcgcagtcctactggtcatgggctggcccagctgccatggtggctgccgtgctggttgccctcctcgcggtgctgggatactaccagtactacctcccagcgaatgccagcaactgagtgggcgaggtcggtgcactcgcggccaggccattcatttatgacgtggagaccaattttgcaggtgagaagaaagagtgcaaggtctgcttgagacgtgaaggaccagaggagagtcttgttcgctttcgatgttgttagttggagccgaagatacagttgtttttggttgcgactttgctagatctctctctatatactgcgactgatatatcccgtgtacttttgaagtgatgcgtatattgacatctggaataacaatgcctttcagtttcattatctcaaatctcgctctctctatatatactgcgactgatatatcccatgtaattttgacgtgaagcatatattgacatctggaataatgcctttcgctttaggtatctcaaaaaaaaaaaaaaaaaaaaaaaaaaaaaaaaaaaaaaaaaaaaaaaaaaaaaaaaaaaaaaaaaaaaaaaaaaaaaaaaaaaaaaagggggc

SEQ ID NO: 119302 - DNA, 619 bp, Zea mays
  unsure (1)..(619): unsure at all n locations
  Clone ID: MRT4577_40287C.1
ccgtgctgcggctcctccccgccgccctccttcgccgcttcctcgtccccaccgtcggctcgtgaaccagcaggcgggcgtcatcaaggagcacacggacctccgcgtcgcccagttctacggcgacatgggcgtcgacttctggaacgcggacacctggcgcggcaggatcgacggggccgaggtgctcgtcatgacgccacaaatccttcttgataacctccgccacagcatcttcaggctgcgggacatcccgctcctcatcttcgacgagtgccaccgcgccaccgggaattccccgtacgcctgcattcttaaggagttttatcatccgcaactgaattctaggccatcagattccattccaactatatttgggatgaccgcttctttaattgcaagaaatttggcgcttgacaaatattcagaagaaatatctgagtttgagaatctcatgaatgcgaaggtgtacactgttgccagtgaatcagcactattgcaatacattccaattgcgactacaaagatagttgagtacgatgattatatcgtaacgtctgagttaatagtcatactatnccgttgcttgaacaaattggaaacaaaggtactattatat

SEQ ID NO: 119303 - DNA, 178 bp, Zea mays
  Clone ID: MRT4577_40288C.1
aacaatatattatttgagttgtcattgaggcatcctttgttgtcttctcatttttgagtgagaacaattatatgtaaagatgttcaatcaatttcttcgatggggtatttaagcattgttcttgatgttctactgcatatttttagaccatattgcctaacatacaaatgtttattat

SEQ ID NO: 119304 - DNA, 295 bp, Zea mays
  Clone ID: MRT4577_40289C.1
gacgcgaccgtttcctatcttgctaaaaacaagccgcgtgctttcgagacctgcgagagagtagtaaaatgctcgcgcggagttccctacaacctgcttagcttctaaaatggcgggagcgtgtgccactttcgtttctcacccgtagaatttaaatgccacggatgaatcagcccaccgctcctatccagcctgctagctagctagcggctgtccgtatctgcgggcgctcgctgatcccccgtgtctgtcggacctggtgccccgtctaggggcacctgcccgggcgggcggt

SEQ ID NO: 119305 - DNA, 338 bp, Zea mays
  Clone ID: MRT4577_4028C.1
acggaccaactagcaacatagaaagcacactattgtaccaatactggcacgcaacgtgttggggacgactatgctgctcggtctttctgcaagtgctgctacagcgagcattttcccgcaatgctcacaagctgctatagcttgcatctttcccgcatacctatcaccagcgatgtcttcagtatgtgacaatccaactcttctacactacacgatccaacaggcactcacagcaggcatcttacctttatcaccctggatcctacaacaatcatcatccctattacagcagttacctttggtgcatttatcgccacaaaacatcatggcgcaacaac

SEQ ID NO: 119306 - DNA, 1032 bp, Zea mays
  Clone ID: MRT4577_40290C.1
atggtcttttcttctgttcctgtctaccttgatccatccaattggagccagcaccaccaggcacaggagcagcaacaacacgctcaacatggtcagcttccaagcgacggcggcatggacgcgcatgcacatcatcatcatgatcagccgccgccggtgcgaccacctcatggcggggctctcatggcacctcgccctgacatggcagttgtggtctcggcgagcggcaatgggccaactggcggtggctctgctatccgggcaggctccatgtctgagcgggccaggctcgccaagatcccgcagtcggagccggggctcaagtgcccgcgatgcgagtccaccaacaccaagttctgctacttcaacaactactcgctctcccagccaccaagtcgtctaagtccaactcccttgatgcagcaccccctcgtcggcggggatcactacaacatcagcgcgtcaaggttagggttcctaggactaagctcactagaccccatggattaccaccagttcggcacgggcgccggcgccagcagcgctacaattgggctagagcagtggcgcttgccacagatacaacggttccccttcctaagcggccaacctgacgtcgtgcaaccgacaatgtctggtatttacccattcgacatggaaggacagagtggggacactcccgtcttacctggcgggcacatgctgggtggctcgaagatgcccggctcagccggcctgatcacgcagctcgcatcggttaagatggaggacaacccagcgtccgtggcgatggcgagcagctcatctagggatttccttagtgtcactgggaacctccaattctgggtcgacgacagcgacaacgacggtgcaagtggcaacaatgaaggaggcgttggcaacgccggaggtggcagtggcggtggcgcggtcgctccaggcaccagctgggtggacctgtcaggatcaactcgtcttcatccgggaaattgctgtgacgaacccttcggtctgcatgctagctgcagttga

SEQ ID NO: 119307 - DNA, 1314 bp, Zea mays
  Clone ID: MRT4577_40291C.1
attgtgatccccctccagctcagaagccagccacagcccacaggcacagctattcatcagcttgacctccccgtccgcccgcccgcccgcttctcgcgtcgaggtcggccgcgcgccactctgaatccccagggcaccacaccgccggacaacctcgagaagaagcaccggcaacgacgacgagctagcactagcagtcagtcacagccgggcaagattgattcggacgagcagccgatgatgatgcacgggaacgggcacgggcacggccgtgtccacccggcgtcctccagctccgacttctccggcgagatgaaccagtcggccgtgtccgacccctcctccagcccgctctacagcttccacttcgagaagcccgtcccgccgccgccgcccgcaggcacgtacgtggtgcaggtgcccaaggacaaggtcttccgcgtcccgccgcccgagaacgcgcgcctcttcgaccactacacgcgccgcgccaggcgccgccgccgcggcagctgctcctgcgcgtgcctgctcgtcggagccgcagtcgcgctcgccgccgccctcgccggcgtcctcgcgtgcctggtcctcgggccgaagccgccggcgtacgcggtccaggcgctggccgtctccggtctcgtcaacgcctcctcctccccggccgcgctctcgccggggttcgacgcgaccgtgcgcgccgacaaccgcaacggcaggctcggcgtgcggtacgaggggggccggggccgcgtctccgtgtcgtacggcggcgcgctcctggccgacggcgcgtggccggcgctctaccaggctccccggaacgtgacggtggtcgtggcgagggcgagggggtccggggtacggctgtcgcggagcgtgcgagggcagttggccgcggcggaacggctccggtcggtgccgttcgacatggacgtcgacgtgcccgtgcgcctccagctcggcgtggtcaggacgtgggccgtgccgctgcgggcgcgctgcaccgtggcggtcgacaggctcgcggccgacgccagggtggtgtccaactcgtgcgacgtcaaggtgcgcctcctgtcgtggtggaggaactgacgatggcgccatggtggcggattacatacttgagcacttcttgtttggttttaggatgcgttttcccctcatttgtaagctggtttggttccccaatgtggatcttgtcatcgtagtatcatatcaggaacgctgtcaaatcgtcttgcgactaatgtcatgttggtgagttgctcaagagtcgagactgaagaattgactaatgttttgttc

SEQ ID NO: 119308 - DNA, 302 bp, Zea mays
  Clone ID: MRT4577_40292C.1
ggatagttcatatgatttttctggcaaaggggttatccacttgcgggatcgaatctttaaaaaaatacagtttgtaacaaaacaaacctattgggcttaatgtcttataaatgcagcggggccttgccatcaaattcaggaaattgtttaaaatatgcctggaaaggcgcatattaagaggtattatcgtcagggggtcacaatttcttagaggctggggcattgaaaattaggggtgttagaaaataaaacaggggggatatccaacacccctatgcaaggatttgggccaactatggtgg

SEQ ID NO: 119309 - DNA, 449 bp, Zea mays
  Clone ID: MRT4577_40293C.1
cccacacgcgctgcctcgtgggccgtgacggacggcatggcacattcgacgggcgcctctacatccccgccgcctctcctctactgccggagatcgtaccgctgccacgcagacggcacgagggcgtcacccgcacactccaccggctgcgccgcgactttcacttccccaacatgaggcgcatggtgcaggactttgtgcgggcgtgcgcaacttgccagcagtacaagtaggagcaccttcatctcgccggcctgctgcacccccttccgatcccctccgtcgtctgggcggacattggcctcgacttcgtggaggcgctgccccgcgtgcacggcaagacggtgatcctgtccgttgttgatcgcttcagcaagtattgccacttcatcctgctggcgcacccgtacaccgctgagtccgtggcacatgcattcttcaccgacatc

SEQ ID NO: 119310 - DNA, 791 bp, Zea mays
  unsure (1)..(791): unsure at all n locations
  Clone ID: MRT4577_40294C.1
ttgggtacctcgaagccggccggggccgcctccgtctcctcctccgccccatctcgcggcctcatctccatccccttccgcctcccatgtgccgcctccgtctcctccttcccttcttcctcctcctccgccccatcccacacgcgtcccaaccggccgccccctctccggcgctgcaatgcgctctcaacttcacggcgctgctccccttcctcgcgccgccgctgccgtcggacgacgcctcccgctgcgcggtcgccacgcagtccgtcgcctttctcctctcgctccacctcgcggccacatcgtccttcgtgctcccacccgacgcctcctcctgcctgtccccgctccgcgccgcgctcccctacccgctccccgcgtcggcctgcggcctctcgggcctcgacgccgccctcgcctccccgggctgcggcaacgtctccacggtcgccgacttcgacgcgctcgtcccgcccagctcgcgcggggacatcgacgccagctgcgaccgcgacctctccgccgtccctgactgcaccgcctgctccaccgcgctcagcaaggccgccgcggcctatctcctggctggatccccgagcgccaggagtaacaacgtcaccgggtgcgtgcagtacccctccatctacgctggcgccgaggctagcccgcacgggcccgccgacccggncactgcctactgcctctttctactcaaggcgaacccgcctcagtcccacagctccggtgccgccccctggggtctacggcgtcgcattcggctccctcgc

SEQ ID NO: 119311 - DNA, 842 bp, Zea mays
  unsure (1)..(842): unsure at all n locations
  Clone ID: MRT4577_40295C.1
aattaaagaccacccagaggcagagtcccgcctcaaatgcgccgccggccgcgcgccgccgcacgatgagccccgccgcgacggacgccggcggcgacctcttcgccgccaacctcaagggcgcgctcctcgccgtcgcctcctccgccttcgtcggggtcagcttcatcgtcaagaagaagggcctccgccgcgccggcgccgtcggctcccgggcaggtgtcggagggtatgggtacctctgggagccgctctggtgggtcgggatggtcaccatgcttgttggggagaccgccaatttcgtggcttacatgtttgcgccagccgtcctcgtcgctccgctgggagcactcagcatcattgtcagtgctgttctggcccatttcatgctgaatgagaagttgcagcgggtgggcgtcctgggctgtattctctgcattgttgggtcgacggtgatcatcctccacgctcccgaggagaggtccccggactcggtggagcagatttggcgcctggcaacgcagcctaccttcctttgctatgctgctctagcagtggctgtttcattgcttcttatgctatattgtgctccacggtatgggcagacgaacataatgatctatgttggtatttgctctgttatcggatccctcacggtaatgagcatcaaggccgtgggcattgcgattaacttaccattcagggcgtaaaccaggctgggtattcccagacgtggatgggtttgtgacggtttcagctatatgcttaatcatccagttagtttacctgaaacaggcattggatacntttcatacagcgctggtttctccccatctatatgc

SEQ ID NO: 119312 - DNA, 689 bp, Zea mays
  Clone ID: MRT4577_40296C.1
aagaacagaccacccagaggcagagtcccgcctcaaatgcgccgccggccgcgcgccgccgcacgatgagccccgccgcgacggacgccggcggcgacctcttcgccgccaacctcaagggcgcgctcctcgccgtcgcctcctccgccttcgtcggggtcagcttcatcgtcaagaagaagggcctccgccgcgccggcgccgtcggctcccgggcaggtgtcggagggtatgggtacctctgggagccgctctggtgggtcgggatggtcaccatgcttgttggggagaccgccaatttcgtggcttacatgtttgcgccagccgtcctcgtcgctccgctgggagcactcagcatcattgtcagtgctgttctggcccatttcatgctgaatgagaagttgcagcgggtgggcgtcctgggctgtattctctgcgttgttgggtcgacggtgatcatcctccacgctcccgaggagaggtccccggactcggtggagcagatttggcgcctggcaacgcagcctagtaagctcccatggtgtctccatctagctacttgccattaaaatggacctgtcttttgacatgtcatctgcaatgctatttcagccttcctttgctatgctgctctagcagtggctgtttcattgcttcttatgctatattgagctccacggtatgggcag

SEQ ID NO: 119313 - DNA, 661 bp, Zea mays
  Clone ID: MRT4577_40297C.1
tgcgccgccgcagctggatcctctatgcgggcgcctcctttttttttttttagcacacacaaagatcacaatgaaagtatgtaattcaccaacttgtcagtggcaacctgagaagtcccacgagcttccaaacaatccgctacaatcttcttgagctccttggctcttcccctcatctcctccccatcccttcccttcatgagcttcctaatggccatctctactccgcctctttgaagctcaccttccagctccaaccctacaccccacgtgtccaccacgtacctcgcgttcatcatctgatccgcgaactgcggcctgcacatcatcggaacaccctcgctgacgctctccagcgtggagttccacccactgtgggtccagaacccaccgaccgcagggtgcgccagcacctcctgctgcggcgcccaccgtatcaccttgcccctgccatgaactgcagcctcgaagccgtctgggagagccgccggaccgtccgagccccgtaccgagtcggaccggtggacccatagaaacgggtggccactgttggccagaccccaagccacctccgagaactcgtcggagtccagggaagccaggctcccgaagctcacgtacagcacggattctgaaggctgcttgtccagccacctgatgc

SEQ ID NO: 119314 - DNA, 591 bp, Zea mays
  Clone ID: MRT4577_40298C.1
ggccgcttttttttttttttttttgttttttttttttttttttttttttttatcaaaacaaaagcattagtaaaaggttctttaaaatagttcaaggacataagcaaatatttcgatgccagctgagccagtaacacttgatgccttcttaagcatgcaacctctgcaatggtttacaacagcacacagcaaggttaagatgtgagtcccaaacttccaacaagaaataaatcaggttggtataagctccaagaaagatcaagccttttgcccttcattggaagaatcacccaacttcgcttatatcacttcatatctgccataaacttggcatattctgcatcggcaccataaggagcaataggctggtcggttgtggaggacaaaggtggtggtggtggaagcactgcactgtgggtagcccaaggtgcagttgcaatactctgagagggatcaacactaaccactggtggtggaggtggtggctgaaatggtggaggaggatagtatggggaataactataaggtggtggaggggacatcaatggggcatttggtgcgccagatgatgcctatactgatgttggaaca

SEQ ID NO: 119315 - DNA, 2358 bp, Zea mays
  Clone ID: MRT4577_40299C.1
ggctcagcccatctatgaatgtggaaaacgacaagctattgcttgcagctcgtaaggtcaggcgtgccactcggacttctttcgtgatctcactggtctctgatgatttctctcgctccagtagcacctacgtcggcaagctgaagccgaacttcctcggcacaaagttcacgatattcgacagccagccgcctcccgacgctgttgcgctaccaaacaacagaccgagcaaaaggcagtcgaagcaagtgtcaccgagactgccactaggcaactacaacgtcgccacggtcacgtatgagctcaccgtcctgcgcaacagggggccaaggagaatgcagtgcaccatgcactcgataccagccgagtgcatccaggagggcgggaagctcgaggccggccgggccgggaccggccgggcagggagttgccaagagctgaggggggccgggagagggaggagcggcaccgccgtccgccgcaccggcactggaggggaaatttcgttatttggcgcactagggagtggggagagagagatagagctggaaggtggaagcaaaaatccacggcgaatacagggaggaggggggattggagctcctggggagcatcgagtagaagctggaagatgcaatggtaacggttgccacagggggtcctctacctcttcttcatggggaggactccacccttcgtgccgcgcaccggggggaacaggcttctgcagtgcaccctgcacacggtaaccgcctatcgcacccaggcccgcgggaagtcccctatccccactgacaccctccagtccattgaggagccagtgctcaccttacctagtaccaccaaggggaaggaagtggctgtacaattttcttcgacgagcctcagcgccgatctgtctggaccggtgtctgggaacgaagcgcctctagttctgaagaatgcgggagtgatgtcgaccactttatgagctttcccccctgctattttggggtttatccctttagattcgctctagttatggcggatcttgacatggagcattaggaatttctttcgtcgaaggcggcgcggcgccaggtcgtggcatgcgcagccatttgccggtcgtggcgcgaggtcaccaaggaggtggtgaagacgctcgaggagtgtggcaggattaccttccccatatcccttaagcagccggggcctcgtgaaatgccggtccagtgttttgtgaggagagagagggcaacatccacatatctactctacctagggctcagcccatctatgaatgtggagaaagacaagttattgcttgctgcccggaaggtcaggcgtgccacgaggacttattttgtgatatcactggtctctgatgatttctctcactctagtagcacctacgttggcaaactgaagccaaacttcctcggcacaaagttcacaatcttcgacagccagcctcctcctgacgctgtagtgctaccaaacaataagacaagcaaaaggcagtccaagcaagtatcaccgagactgccgctaggcaattacaatgttgctacagtcacgtacgagctcaccgtcctacgcaacaggggtccaaggagaatgcaatgcaccatgcactcaataccagctgagtgcatccaggagggcgggaaggcccctacccctacaggcgccatccagtcgcttgacgagccagtgtcgtccaccttacctagtgccaaagggaaggaagtggctgtagaattctcttcgacaagcctcagcgccgatctgtctggaccggcctgcgtgaacggaacacctctagtgctgaagaacaaagctcctcgttggcatgagcagctgcagtgttggtgcctcaacttccgggggcgtgtcaccgtcgcgtcagtgaagaacttccagctcgtcgcctctgttgatccttccctaaacatccccgcagcggagcaggagaaggtgatcctccagtttgggaagataggcaaggatatattcaccatggactaccggtacccactctcggcgttccaggcctttgcgatctgcctgaccagcttcgacaccaaaccggcctgcgaatgattgacggtagtttaaaatcgcgggtggagtcttgtgtacgtccgtgttcttccagggcgatgtaaattctttatcttgccatgctgggcctctgctgcccaggcgaaatggtagcttgtgaggtggagatgagcgatagcatctgtaccataggaagagatttgagcgaccttgtttacccaactgttatatgtattattgctgggatgtttggctgtgaaatatcactgccgtatcgataatggacgttgaccattttgctcgctcgctctc

SEQ ID NO: 119316 - DNA, 503 bp, Zea mays
  Clone ID: MRT4577_4029C.1
gtatggccggggcagcgaacgaggaggacgccaagaggacaggactggaaggcactggcctgccgctgcaaggcggctcccacggcaaccttcgtagcgctggcagcgaccagcagttgaggcacatgctcgattcgctcaaatcctcaaagtccccggctgtgatcaactatggtgcctcatggtgccgtgtctgcagtcagattcttccatccttctgcaagtgcagtgataagttcaagaaacttactttcatctatgtggacattgacgagtgccctgaaacaacccaaaacatacgctacaccccgaccttccatttttacagagacggcgaaagggtcgatgagatgctcggcgcaggagaagagagactacatgatcggctatggttgcattcttgattgattggcctccacttccgttgtttcatgaaccatttatgctgaatgcaactatgttttttgtctgtccaaaaaaaaaaaaaaaaaaagcggcctttc

SEQ ID NO: 119317 - DNA, 303 bp, Zea mays
  unsure (1)..(303): unsure at all n locations
  Clone ID: MRT4577_402C.1
accacccggcggcccaggaggaccacaggaggaacacaaaagcagcgacgggcgaggacacgaagcaccaaaaagaggaaggcgggggcatgacggacgacggcctcgacaagggaggaactgggcccngagagagagggaaacgcaaaggcttctgtgcggaattaatactatcgactaaatgtatgaggatgaagtagaagtgttattttacggagtgctgagaatgatatacgataactggacaatggcatgggtggtgataatgtagggccctcgctgcgaaaaatgcggtagcactag

SEQ ID NO: 119318 - DNA, 439 bp, Zea mays
  Clone ID: MRT4577_40300C.1
cggacgcgtgggcggacgcgtggggctctgcgcttgcaagcccatcagcgaggaggacctcgccgccttcatcgccgactgcatatacgaccaggacaaggccaacaaggtgctgcccattggcgggccggggaaggcgctcacgccgctggagcagggggagatgctgtttcggctgctcgggcgcgagcccaagttcatcaaggtgcccatacagatcatggacgccgttatctgggtgctcgatggattggccaagctgttcccggggttggaggacgccgccgagttcggcaagattggcaggtactatgcctcggagagcatgctgttgctggacccggagaccggggagtacagcgacgagaagacgcccagctacggcaaggacacgctcgaggagttcttccagtgtgtgataacgggagggatggcgggg

SEQ ID NO: 119319 - DNA, 139 bp, Zea mays
  Clone ID: MRT4577_40301C.1
cgccgtacgagagaagctcggaatccgccgacgccgctcgtctgtctgaaacgaaggaggaggcacgcacgccgctaccgcaagccagctagcaagaagactgcgctagcagggcgttggcttggttttcggcggacga

SEQ ID NO: 119320 - DNA, 1989 bp, Zea mays
  Clone ID: MRT4577_40302C.1
actataattgcaattgcgactgctacgaccggattattatttttatgagacacagtcctgtagatactaccgatccaaaaaaaaaaaaaaaactcgctctagattctctgtccatgccgtcaggttgggaactgtgttctacggattccagaatcctacaaattcgcgccttgtcatgcctgcgtgcgtgctcggtgtccgtggcatcgcgggtgctttctgaacagcgtcagattgctgttctcctgtacttccgccatagcgaccatgccggtactttctaattctaatttctacctcgatcccctctgtatgtatttaaataaacttaccaactttgatgtgcaacatttgaggcgcactatgagatgctgctgcgcgagcagttttttattctgataatatgcttccgggctcctttctatgtgatcttgtaagataacctacactatcatgtagattcaaatcattttgtatagcagctgtaagcagaaactgcattttgccaattctactgaggtttacagaaacgaaggatgacgaacttgtcagctgttcattcctggcctagcctgtggccggagcagcaacagccgcagcggcagggccagggccagggcctgggtcaggaggggcgccggtatcggcaccaggggccatgggccgacctgcctccggagctgctgctgtggagtccagcgcggcgacgtggccggcgcggcgcaggtcgtggcgtgcgccgctgtttgccggtcgtggcgcgagcaccaaggcggtggttaagactctcgggtagtgcggcagaatccttccccatattccttaagcagcccgggcctcgcgaaatggtgttttgtgaggtggagagggcgacatcatatctaccatacgaagggctcagcccatctatgaatgtgttattgctggaaggtcaggcacgatattttgtgatatcactggtctctgatgatttctctcactctagtagcacgttggcaagctgaagccaaacttcctcggcacaaagttcacaatattcgacagccagcctcctcctgacgctgtagtgctaccaaacaataagacaagcaaaaggcagtccaagcaagtatcaccgagactgccactaggcaattacaatgttgctacagtcacgtacgagctcaccgtcctacgcaacaggggtccaaggagaatgcaatgcaccatgcactcaataccagctgagtgcatccaggagggcgggaaggcccctacccctacaggcgccatccagtcgcttgacgagccagtgccgtccaccttacctagtaccaaggggaaggaagtggctgtacaattctcttcgacaagcctcagcgccgatctgtctggaccggcctgcgggaacggaacgcctctagtgctgaagaacaaagccccgcgctggcacgagcagctgcagtgctggtgcctcaacttccgggggcgtgtcaccgtcgcgtcggtgaagaacttccagctcgtcgcgtcggttgacccttccctaaacgtccccgcagcggagcaggagaaggtgatcctccagttcgggaagatcgggaaggatatattcaccatggactaccggtacccactctcggcgttccaggccttcgcgatctgcctgaccagcttcgacaccaagccagcgtgcgaataactgaaggtagcataaaagctggggtgggtatgttcgtcctgggcgacgtgaatttcttgatcttgccatgggggcctgtgcccaggcgaaatggtcgcttgtgatgggggtgtgaagatgagctatggcatttgtaccataggaacagatttgaacgacctggactgttatatgtatcgttgttgggatgcctggctgtgaaatatcactgccgcatcgtatcgataatggtcgttgtggcttggcttaaaaaaaaaaaaaaaaaaaaaaaaaaaaaacctagtgccaaagggaaggaagtggctgta

SEQ ID NO: 119321 - DNA, 775 bp, Zea mays
  Clone ID: MRT4577_40304C.1
atatataaacagatcgaaaagaaacaaaatagcaaattataaaacaagattacaattaggccatatattaattaacaacaactcaacacgtacggcaaatataataagcatacacgcacaaggtatgtaatagggcctctcgctctctccacggatcgatcggttgaaaactccacgcttacatgagttgcatgcaaaaccaacaaacaacagcagtactacgcgcgcgcttaatcaatcatgcatgcatatgtaacacatgatgattagccggtgagctcgtcctccaagtgcgtggcgatgacgacgtcggaggtggggtaggcgtggcaggtgagcacccatccggcggcgatctggtcgtcgtcgaggaagctctggtctgactggtcgacgctgccggcgacgaccttgccggcgcaggaggagcaggaccccgcgcggcaggagtagggcaggtcgatgccttcctcctgggcctggtccaggatgtacacgtcgtcgggacactgcagctccacctccccctccggcgtcacgagcttcacgttgtaggtggcctgcgcgcgcagcctggcgccacgggcggccatgcccggtaccttgttgcccgccgcaggcagcagcgccacggtggccggcgccgccggtgctgccgcgacgcggagagaggaggggaaggtcgaggccggcgcgcggaggctgctcaggacggtggccattgttgtggtgccggccggccggtgctggagctgctaagctaagagaggctgta

SEQ ID NO: 119322 - DNA, 204 bp, Zea mays
  Clone ID: MRT4577_40305C.1
gcaaagggaataaaaaaagtttccaggaaccattactaaaaacataaaataaataagccttttttggccataaataaaattgtacccaaacacaaaaaatttgctggtttttacttttttaaaaacctgccaggtttaggttacataacattgcccaatgaaaaatagggtttaatttaaaaattacccaactttttttttaaa

SEQ ID NO: 119323 - DNA, 425 bp, Zea mays
  Clone ID: MRT4577_40306C.1
ccacgcgtgcgaaaccagtcccaggcatgcccgacctcctgcctatgtattattcacgcacggcccccgtcccaggggggggagtctgtccaccacctcggagctggccaccctgaaacgcccgtacggcaacaacgggttctgcgatggcagcaacaacagcagcgcgacctgttacaaacccaaggcgcagaggagggaggcggaccctgctgctgcgaaggccgcggtgcggcacaagtactgccagcacggcggtgtgaacatgtacatcgaggcgtccgcgacatacacagcgatggaaccggacacgatgcggaagctgatcgctggcgaactgtgccccgaccgcggagacatgtacatctacatccggcacttcaacccgacggagctggcgctggggcggcaaatagtggcgctgg

SEQ ID NO: 119324 - DNA, 142 bp, Zea mays
  Clone ID: MRT4577_40307C.1
acgccacctgctgcgccgatcacctgcactgctgaccgcaagacactgtgtgtgacgtgatccagagtacgtgcctctccaaggagaacgctaccacggacctcgtcactaagctgcgtgagcacacagtgggggatgggag

SEQ ID NO: 119325 - DNA, 498 bp, Zea mays
  Clone ID: MRT4577_40308C.1
cgcgccaaaccccccaaagggaacagaagcgagctcggggccgccaaaaaaaaaaaaatggcagacgctgaccagaagcaaaaagaggaggccgaacaagggaagagagagaaaggacacagcagacggaaaggggggggcgaaccagggccacacaaaggccagcaggacagcaaaacagatagaacaaaaaagcggagcgcgagggacaaaatacaggacagcaagggccagggaaagaaccaacagacagaaggagtaaatatacgagggggagagaaccaacaggcggagaggaagcaggacacccaacaaggctcggaagataagaagaccccaacagagcagaagagagaggggacgcaccccggacccgcaggccaggagggatcaaaacaaccgggatcgcaaagagaagcaactcaagacacagaagacccccgacgcgaaggcccaccggggggcggcgacagaaacaccctgggtaggggccccagg

SEQ ID NO: 119326 - DNA, 450 bp, Zea mays
  unsure (1)..(450): unsure at all n locations
  Clone ID: MRT4577_40309C.1
ccatccnntcatgtctatcttctggtcgattccctatatacctcattgaacatcctttggggtggtgaacatgaaatcaggatagggctctccaatcattctacataanagccctcaacataatgagttaacattcaacattaattcgtatctgaaaaagacttttctcttntgcctcttcatcaagatgatttaaccatctaacttatcatcattgtanaagtatctataacctcttctcttcaacaaaatcaaacccccgtgcattttccccttccttttgttttaaaatctttatcaccttaaatgatgcattaacttatatgaatctttttttttacatattttattttttctctttttatttttaattttatttctttatatttaataaaatttttttttcctttttatattattttatttttttttttttttctttttattttt

SEQ ID NO: 119327 - DNA, 442 bp, Zea mays
  unsure (1)..(442): unsure at all n locations
  Clone ID: MRT4577_4030C.1
attnattaatttttcaatataacgaacgccaaanntacaaacacaactggccaccttggttgaggtttaagcacacatcacatactagacgagaaaatacaaacagagtttttctgactgatggattattnaacagtcatacaatgttgtagtgtaattttatttttttaaagttgtaaatttatggaatctttatttttatattgttattatactttttcaaaaaataagtgtattaataattttattttcttttttttaacaaatatatttttatgtttttttaaatattcttgtttatagttctcatatttttttgttattatatatatattttattttaattttattgtaattttatgtgctatttattatagatttatatttttttatttattaaatcatttttctctgattatatatatatttatataaaattttt

SEQ ID NO: 119328 - DNA, 336 bp, Zea mays
  Clone ID: MRT4577_40310C.1
acacggcgccgcacaccgcacaaaataccacctgctagcacctgccgggcgggggggcggacgagctggtggcctgaacctaacacaacacgaaaggatctacccgatgatctggccggggcaccggggttcttgagcccgacacaaacccacgccgaggatgaggcccacggggccccatgccaacccgtcggggagggtgaacccgggggagacacccgcttgcaagccggagtcgtgcgcctacaactttagccccgccaacaacttgaagttcgccaacggggccagacggaaccgcccggccaacagtaagaacgaattcgagcgcaccaa

SEQ ID NO: 119329 - DNA, 298 bp, Zea mays
  Clone ID: MRT4577_40311C.1
ataacattactattaatataaaaccgataggtgtccttcaatctcttaataaacaagcctagccaaataactgatacatattggggacctcttaatccaaacccaaattttaatacgaacatcttgggcatggattttttccaccggctgggttcccacttgctcgaacccttaaatttgaaatgccttgcatcttttccttttcttggcccttttggtggatgcccccgttcttaccttggatgaaaccaatgtttttttccccatttgagcaaaacttgtattttggtcaagcaaa

SEQ ID NO: 119330 - DNA, 1363 bp, Zea mays
  unsure (1)..(1363): unsure at all n locations
  Clone ID: MRT4577_40312C.1
cctataacagtccctctcatngacgtgcctcagtttttgcacttctgtgatcgaagaaaatggatcggtttctgaactatgcctctggctgttggatgctctccatgatattgactacaagtatagaataatgtaaagaaagaagtatttgattttttttctatcctttgaatgacacttgagtttccagcctataatgatttaccactggagggttttactaaattttatcaaccaactcttatggtaaattattgcatttaagattgtagatcaagttgtttactacattaaatttggaagactaagcatccctgtttttcacttcgtagacatgctagatgagagcagagtagagaaacaacaccggatatatgtacctcaggatgaggcgtttgaggagctgaagcaaggcgccttctcatcacggaggctgcgagcagtacttcacacgcttatcccatcgatgattgcaaccatgtcagttgagacccacggcttccaaagcttccaccatgttgataatctttacaaggaaggcctcaggctgaagttgggtctccaggagcacttcgattatgcagaggacaagtttgcatggctccatgacgatgagtttgctcgacagacttactccatggcgctgccgccatcgccaagatccgcccattcctccaagcttcagtgtagaccctcttatggtcccaaatccgcccctgacagtaagcaacctaactcgacgcgtggcaaacatgtcacggagccacacaacatcgatagatcgactaatcccaccactcagatccctcgacgcgccagtggatgcgccgctgggtatggcccccctcgcgtagctgccgtcgctgaggcccacgtccacctgaggggaagggagggtggcgggcatcgcgggggcatcggaggggcggctcagattcctcctggcgcgggaatggcggattcggctcgggcggaagcaagcgaaagcgcgtggcggggtcacggtcatggggaggacgccttccatcgacgtcgcggcagcgggggcgaggacggaggcggggctgcgggcgggggcatggtgtagcgacggtggggagggtggggcggatcggcgttggaggagggcccacgccgtcgatggcgcgcgcaggcaaccttccatgacggcggtgctgatatcgcgtacgagtcggcgtggatcctcggccaccttccgctatcgaagacgggcgttgatggcgcggatcctcgccaaccttccgctattggagacgggcgttgatggcggagcagaggagggcattgatggaaggttccatcgacggtggggaggagggtggggcggatcggcgtgggaggc

SEQ ID NO: 119331 - DNA, 267 bp, Zea mays
  Clone ID: MRT4577_40313C.1
gtcaagctggccgagcagtatccatagggctccactaaaaaaaaagtgcgactggggtaacagcagactacgatgcgacattcatgtcctttgatgcaaggggctcatggaacctagggtgagcgccagatgaacaacagcctccgagagaccttgacacaaaaacaccgatggtgaacatcaagacacgaggcgaacgaaggtggccactctgggcgaggggaccgcctcggcggctaacaggtatactggcccgcccgggcccta

SEQ ID NO: 119332 - DNA, 1271 bp, Zea mays
  Clone ID: MRT4577_40314C.1
cctcgagtttcgccgggcctgcttcagctccctccctggcctctccctctcgttgccataaaagattccaagcttgcccggcccgccgatcctactgccattaaagtcggcaagcggcgtcggcggcagcagcctgaaaccaggggaaaccgaaccaccacggtcaactatctatctatctgcaatctccatccatctcctcccacacccactgaccaaccacagcacagcagcctcaagatgctttacatggtgtagccggcaagaaccttccctcccgggcgcaaaggggctctctctcctttaatttccttcaagaggggatagatagcccctctttcccccacctgcatcttccctccggttgcgcgcggggctcacttttaatttctggcatcgatgactgcctcctttctccggcggcaagccttctcctgccttgttgcctgccactcgggctgtcctccttcttgattcttggcaccgtcggtttaatttcgcgaaatggcggcaggggtgtcgctcaagatggccggcttctgcgtcgtctgggcgctattctggctcgccggctccgtcaccgacaacgacttcgtttgcgccacattggactggtggctgccggagaagtaggactacgacacctgcagctgggggctggcctccctgctcaacctgcgttctcccccttgaagctccgcctgggcggctctctgcaagacatgtacgacaccggcgacgctcgccagccctcctgcgccccgttcgcgaagaacgcgtcggccatgttcggtttctcgcaaggctgcctgccgctgcgtagatgggacgagctcaacgccttcttccagagaaccggggcaaagattgttttcgggctgaatgctctgaatggccgggtccccatgcctgatggctctctaggggggccatgggaactgaactaccacgaacgcggcttctttcattggctacaccgtgagcagaggatacgatgtacatggatgggagctcggaaacgaactgagcggcagcggagtcggagctcgggtcgacgcagaccagtacgcagcagacgtgatcgcgctgaaacgcatcatcgacagcacctaccaccagagcagcagcccggcaaagcctctggtgctcgcgccaggaggcttcttcgacgcggcctggttcacggagctcgtcggcaagacgaagccggagcagatggacggatcactcaccacatctacatatctaggccccgggtcgacgatcatctg

SEQ ID NO: 119333 - DNA, 241 bp, Zea mays
  Clone ID: MRT4577_40315C.1
agctacatcgtcactatcgtatagcgtgacctaaattcaaataaatggccgaccattacaacagtccgactgggaaaacactcactttacccacatgaataccctggcaaaacatctgcatttgcccaacatgcctaataaataaaaggcccacaccgattgccatctctaaaaactgttcagcctgaatggaaaatggtacgcgccctgtaccccaaccttaaccacgcattctgtgagg

SEQ ID NO: 119334 - DNA, 936 bp, Zea mays
  Clone ID: MRT4577_40316C.1
cccgatgtgctaatccggggcgggcgcatagtgggggagacgctcggcggggctgcggccttcgtgtccaacgtgctcgacgccgcttcgccccagggcgccgcgctcaacgagacatccccctttgtcgttgtggccaaggtgggtcacgacttcatctacgcccgcgcgccggcgtgcgcgcggcatccgcctctgccgcacggtgctcgtggacgcgcaggcgctgatccgggcgttcgacggtgacggcgccgtcggtcacgtggcgcttggcgataccccgtacgcgcggcttctgccccgagtggcgttcgttaaggcgtcgtcggaggaggcgccatacgttggggtggaaacgacgaggcggcagtgctgtgtgatcgtcacggaggggagggacggctgccggctgtactgggacggtggggaggcgcacgttgcgccgttccccgccgtacaggtggaccctactggcgccggagacagttttctcgcgggctttgcagccggattgctgtgggggttgtcggcgacggaccccgcgctgctggggaacttctttggcgccgctgctgtatcgcaggtcggcgtgccccccttccatcccaagatgttgcaggtttgccccatttgacttgttcagctccttgtacactcggattgggggagaatcattctgttcatgttgatcaattaagtccttggacatttttttaaatgtgtcacttatcagaggcaaaatcatagctctaacggactgcagtgcaggcaatttccaaatgattgacctatgctggagtagtattcccctgttgggaatttgaggacatatttgtactagttggactaaaaattatctcaaattagccaaggttagctagctagtggtgagaacatgtactatactcctatgcaatcacactcatttggtgt

SEQ ID NO: 119335 - DNA, 1772 bp, Zea mays
  Clone ID: MRT4577_40317C.1
attgggacctcgagccggccgggaacgtacgtcgccgcagcagctcagacgtgcgccgctaccacgtgtcctgccgcacgccccgcgtcagcggcatctgtaaagccgcttgtcgccgccccggcgcccaccccgcccccgcgcttttattccccacttcaccgcatctccccctcgtctacgatgccgttgcgcacctcttctctctcgccgccccgagacccccacgcttccctctccgcccccgaactgtggcgcctccccccgccgccgcagcgatgccactcgcggcagagcccgacgacgctcatgaggaaagggagaatcagcagctgctaattacgacgaagggagggcccgggcttgagggactggtggtggggagctactgccacgatgtgctaatccggggcgggcgcatagtgggggagacgctcggcggggctgcggccttcgtgtccaacgtgctcgacgccgcttcgccccagggcgccgcgctcaacgagacatccccctttgtcgttgtggccaaggtgggtcacgacttcatctacgcccgcgcgccggcgtccgcgcggcatccgcctctgctctgctcgtccccaaccacctccttccacgcccagttctcggagaccgccgcctcggcgcacgcccccgaccgggagctccggcgcgtgcgcgcctgcgacccgatctaccccgccgaccttcccgaccgccgcttcgcctacggcctcgctgtcggcgtcgccggggaggtgctaccggagacgctcgagcagatgatcaggctctgccgcacggtgctcgtggacgcgcaggcgctgatccgggcgttcgacggtgacggcgccgtcggtcacgtggcgcttggcgataccccgtacgcgcggcttctgccccgagtggcgttcgttaaggcgtcgtcggaggaggcgccatacgttggggtggaaacgacgaggcggcagtgctgtgtgatcgtcacggaggggagggacggctgccggctgtactgggacggtggggaggcgcacgttgcgccgttccccgccgtacaggtggaccctactggcgccggagacagttttctcgcgggctttgcagccggattgctgtgggggttgtcggcgacggacgccgcgctgctggggaacttctttggcgccgctgctgtatcgcaggtcggcgtgcccaccttccatcccaagatgttgcaggcagttaaagaaatacttgaagagaagacaaggaaacgatctagtccatgtatgaacggcgctagttttaccttggagaagtcaaatatgcacaacgagttacacgcagctctccaagaagctgcggtgctgatgtctgaacagcagcaggctgatccggcgaacggcagtggcggtgatatttgctcggcataggtacctcacagtgaagctgaagcagtcgaacgccaaactgaagtttgtggcaaaataaccagcactgcagtcctgaactcctgatctcacattgagatctgtaaacatggtgccaacaagtggaggaagtttgtacatacgctctctccggcctttacactactattctgctggcaaggccgtcagggatcgtttctaccttgctatcgctgacgaggaaatgaagacaactgaacagttgagctgtggcgcttgcacgcaccatgttttctccgctgaacaagtgcgcatttttgagctttcgggcattcgtgctgttaactttttaccattctatatgtcgacttctaccaa

SEQ ID NO: 119336 - DNA, 260 bp, Zea mays
  Clone ID: MRT4577_40318C.1
taagctcggaattcggctcgagggtatggactgtggtagtatggaaaaccaactgtgcctgcctacggcggtatataaaaaaaatctgcgggggttaacatgcttaacctgttgccgcatgttttgttaactcataaaactaaacaaacaaaaaaaaaaaaaaaaaaaaaaaaaaaaaaaaaaaaaaaaaaaaaaaaaaaacaaaaaagggcagctacaaactaagggcttgtatccaacgggggaaaccatacagacag

SEQ ID NO: 119337 - DNA, 305 bp, Zea mays
  Clone ID: MRT4577_40319C.1
gatgaaacctatcctggcatgttccaaaatcatacaagtagagaagctgctgtagattactctaagaggagtggctatgtaaatgttccttcttcacatgccagttcatccaaaggcaaaactctggattcgagtccatgggatgaaatgactgcacatacaacaagaccaccaagagaaaaatggggaaaaagactctgcctttgcagcacctgccacgaccacacatgtcaagactgggtggcagatgggaaataccactgagcatctctcgaccgaagttaatgatggccccagaaatggac

SEQ ID NO: 119338 - DNA, 324 bp, Zea mays
  Clone ID: MRT4577_4031C.1
agagcatgaggagatcaacatcaccttcactctgactactgcctggaatgccgatgactgtgctctccatggctactgtgagcaggttgtgttcacagcatgcataacgctcacagctgcccctggagtcttccctgtcaccgttcagccatctcactgtgtacccgacacatagagcaacgccacactctggtacaagatcttcacaactgccaagatgccaacacgcaatacgctcaagactacaacatcgtctggtgttacaagggcgccattgggaaagtctaccacgctttaaatcccaagctcaccgtcattgtccca

SEQ ID NO: 119339 - DNA, 159 bp, Zea mays
  unsure (1)..(159): unsure at all n locations
  Clone ID: MRT4577_40320C.1
gggatcttacttatttccgtncccctncctgcagnnccgccgcccgtccgagaacgccaagcgcgaagcgggaggagaccatgtcacggtggncgcgccgccgcctacagcatctccgcagctgccgcgtcccgcaactctgcggcggaggccggcgcc

SEQ ID NO: 119340 - DNA, 244 bp, Zea mays
  Clone ID: MRT4577_40321C.1
ggttaacgatgactgtgtgttatgcaaagaaaaaacagcgtaaacaggaaagagtgacccaatacaaatgccacggggcgccccctatagaccccacaattttacgaaaccagagtacgaactgaaagggggacgacacccaaacaccaaccccagtagggggttccaggcgcatacacaaaattgcgaacctagccgacaagaaacaacaatgtacgacccacctactgagcttacccacgca

SEQ ID NO: 119341 - DNA, 280 bp, Zea mays
  Clone ID: MRT4577_40322C.1
gtcttatgtcatttactctttaggacaacctcttgaaaaactaaatcatttctttgaaggtgttgaagctcgcgtggcacagggcataagggaggaggaagtaagttaccaacttgcatttaacaaacaagaacttcgtaaagtcattaaggagtaccctggaaaggaagtaaaaaaaggtctagataacctctacaagaaagttgataaacatttatgtgaagaagagaacttacttcaggtggtgtggcactccatgcaagatgaatttatacgccag

SEQ ID NO: 119342 - DNA, 610 bp, Zea mays
  Clone ID: MRT4577_40323C.1
attgggaccctcgagggcgggcgggatatccaaacctagtgcatggttacttctcccggagccttgaatatactccggtatccgacatcggaatcccctgacggcctccgccacctctgctgagagccagaagagatggcctgcgccatgggagatgggccggctatcagcatccatttccgcacaacctaatcttggcaaggggagtggcaggacgaccgtgccgagatcatcggcaacgaccatggtaacacgcacgcacaccctcataaggcgccttcaccgaatccgatacccgcagctgagaagcgaacaagaaccacctcgtcatgaaccccatcatacaccggcattgacggcaagcggcccattcacacgagggaatgtgatgcctctggccagagagatattaagctgtggaccttccagggcattcctgggacccgtgggaggtcaatgatagatcatcagcactggggcgaagacaaacagtctgcagcccaatagctctcctccacggacctcctcgagaagcgtgagatcactggaacttaccttgcctgcccgatccagaatgctgttgtcactcccccaggctactacaacgact

SEQ ID NO: 119343 - DNA, 666 bp, Zea mays
  Clone ID: MRT4577_40324C.1
gtccggaattcccgggtcgacccacgcgtccggcatagttctggcccagagtcagtcctccgtccgtccctttatcagttccagatctgcagttctcaagaacgtccttgggctctgctgatgactgtgacttggctgaactgggctggtgtctggtcttcagtggttctggtttcttgcctcatgcacattctggggttgtttttgctgcatcagaagacaaacactggcactcgtggctgtttttttttttgttttgttttgttttttctcctccttacaagtccatatgtggtgcagtgctcaaacacaaattaccattgtctcttctgatacatctaaggaagaatggtcatgcttcgtatactacaggtgaaatctagagggaggcttaaaggagtcaacatggatctcaaagagtaagtcgtgtcttggcctagaatatcttgacaagaagagaagcgggaagaaggccacacccacaaggctgggcactgctgctcttccctttactttctctgcagtgtcctgtgttggctgcttccgatgatcagctttgaaatactggggggctctatcttgccatcctcccctgcaggttctctgcatccacctgtcccacttcgccgcctctgttctgtgactctatgagaaggggcttctcag

SEQ ID NO: 119344 - DNA, 580 bp, Zea mays
  Clone ID: MRT4577_40325C.1
cacgcctgcgtgtaccgggcccctaatacacggccatccttagctgccggttttttcatacgcgcacgtcgcatcacggtatacaggtgctcgaccgtctgagaccaaccaaaccatgcgacagaggaacgagccgtctcttacgctacgctcgcacctggaggacacatcaagcttgacatttttagattagatccgaaagcaataccaactcacggagctggcgaactcatggcacatccctaacgggtgcctatcttattcctgctactgaaagcatcaacgatataactctatacactagactgaaaatatcacacacactgagcatcactgtaacaccgagccaccaacatcagctaaaacaacgccacggccattcccctgtttgcgacagaggaaggaaacaaagatatggcaactatcatgaacaagggaactatgctggacagaggccaaggagattctggcaagaaaaccttatcttctccccagcacctgcgatggagcgaatggctggtgaacaagctgaacggcaagatgcacaagccgttggaggacctgctgaaggagcacaacc

SEQ ID NO: 119345 - DNA, 453 bp, Zea mays
  Clone ID: MRT4577_40326C.1
ccggccgggatcacatgtacacagcactcctggtgctgcgctagttgatgacagcacatgcgttacagagcgacgactacgactacacaggcgccacacatgggatcccagctctccggcgccgcgctccgattccacggactccggagtaacgccgctcccaggtccgcgtcggtggagctgccgtccgtgagggagggaaggaataggccctcctcgcaaggcatccgctgtaactacatcttgctccgacagcgacctgatcatggcgaccacgaccacgctgatgctagttcgcggggcggcttctgctggagccatcacagagaccgcaaggtgacagatctgatgaagatggtaggcgagcgactccgagctgcagaacgaagagcccgacgatgacacactcgacgacacggtggcctgcggagacgccgtgcacatctgtctgag

SEQ ID NO: 119346 - DNA, 176 bp, Zea mays
  Clone ID: MRT4577_40327C.1
aattcggcacgaggctgaggaggaggagcgcaacgcaccacgccgacagcagtgggtgcgatgtgtagcgtcaaataggtcggcttggttgtgtatgccagggagccggggctacgagacacgcgagtgttagaagaacatgtgtacgcgaggtgaggtagagtaggaagtgcaaa

SEQ ID NO: 119347 - DNA, 134 bp, Zea mays
  Clone ID: MRT4577_40328C.1
cgatgtagacaggacagaacggccttagattttgtatcatggctgatcaacatgttatattaccatgaggcgaggtaagcttgaccgattgtcgcttcaacagccaggaagagcaagagcaagatgctgcgcaa

SEQ ID NO: 119348 - DNA, 215 bp, Zea mays
  Clone ID: MRT4577_40329C.1
aagccgccactactaccagaggtgctacctccacggcaagatcgacttcatcttcggtagctgccagtcaaccttccactggacctacattatcgcaaggcctgatcggacgactgcgatacgccgctccatcaccgctcaagtacctcaggatgaggaaagcagcggattcgtcttctctcaagggcatcgtgtacggcagtccgggatgtgta

SEQ ID NO: 119349 - DNA, 329 bp, Zea mays
  Clone ID: MRT4577_4032C.1
aaaaaaaaaaaaaaaaaaaaaaaaaaaaaaaaaaaaaaaaaaaaaaaaaaggaaaaagtaatcctaaaaaaaaaaataaattaaaaaaataaaaaaaaaaataaaaataaaaagggggggccgttttaggggtcccaggtttgctttccggtttatccaacttaatactttttttttggggccacttaatttaatttcattggccgttgtttaacatctttgtgcttgggaaaccctttggttttacccaatttatttgcttggtagaaattccctttttatccggttttctttttattaaaagggcccttcctttttccttttccaaa

SEQ ID NO: 119350 - DNA, 522 bp, Zea mays
  unsure (1)..(522): unsure at all n locations
  Clone ID: MRT4577_40330C.1
ggtggtnatgacattntgccccatttcgccgccccctccgacctcgccgtactcctctcgctccggtgaagtagcctcttaatgtgctcgccggagttcgagcgttgtgcatggcggatgaggaggcctgtgatccagaggcgtctctagaggaacgtctaagggttaaatgtgtgcacacatggtaggagtgtcgaaagggggttaggtggcgtgagactgacgggactgggggcaatacattagtgggggcgacactttgattgctggtgctgtggcagtcagagtggctatggaaggctctttgagatgtattgatgacctggacggtgtcgatacgtgcgctgtccacccagaggtgtgggtttggcgtatgtcgtgaaagctatactctattcatgggtttaatgcgctgggaagactgtatgacattcattgtagacagtgttgacgccgtgggcgggattgttattcttgttagcaacgacggctcccggatggtggttacagatttgcgggagc

SEQ ID NO: 119351 - DNA, 567 bp, Zea mays
  Clone ID: MRT4577_40331C.1
aacccttgaaaggggcccaggttaattggaccccaaaccagaaaaaggacaaaaccggggctaattcaaaagaggataaaaaacaaaccaacagccaagctctttaaagaaagaaaacacatggacaggggggttttaggggggtttcgagcccacaaaaacccaaaaaagctttaacaaaaaaaacggacaacttaaattttcccccaaacacttttgccaaaacccgtttgagtggaagctgggttttattccaccaccccaaaggaatcccctgccctgaaaaaacccaaaaacaagcctcccttattagctttaaaaaaatttaggacccccctcccccccaatgggggccaaaaataaaaaaacctaaccccgggaaccggaaaagtttcactttttgcttttcggaaaaaacccacggaacccccggttttgtttgcccggcaactggggggtgggaaatgaggaaaacaaaaaggtttttaaacgaagctttgggcccttggaggggtttgaaaaaaggaaagggctaacccccccataaaaagggatcatgggggtttt

SEQ ID NO: 119352 - DNA, 1129 bp, Zea mays
  Clone ID: MRT4577_40332C.1
ccggaccgccattcccgggctcagctactcgcctggtgatgggggtcgactggcgcaaccgagcgccggcgcggctgcggtgaccaccgctgagcaggctcaggatctcatcgacgccgctaggtacgacgacttggaggacgtcgtcgccctgttctccgctggtgtctcgctggactccacagattcgcaaggccgcacagctcttgagagtgggttctgccaatggtcaccttgctgtggtggaatacttgattcaaaatggagcggtataaagctaccttttcttgtacaataatttaacatgtcggacaagattagatgtcatcgtttcataatttcaactacttctaggccctgtcgcaatatgttttttttccttatcagagaaaggacaatccgatttctattggaagtcaattgaggtccttttcattttgattggactaccagctatgaaaaagatccactaatcaatctaacctgaatagaaatatctctactacagacagtcagacaccatgcaagttaaccacaagcaaagcctgaaccctttgaagtttcattttgttttttttggactagtctcataagttcggtttgtgactgcataacttcaaattcagaatgttaatgccaccaacatggagaagaacacaccactccagtgggcatgccttaatggacgtatagaggtaatcagggctttgatctcagcgggggctagcgtgagtgctctgaacagccacgagaaaacgccaatggacgaagcggtgaccacaggcaagatggacgtgatcgacgcgatcggtgcggcagtagctcaagccgagctcaacgccgttactgtctcctaaaaggacctgatgagtacctggagctttgaatgacttgcagccttgttcttatctcccagcggttctgtctgtatcactcgcgaacctgaatcccccgacggcccagtatccgggcaatatctatactgacggcaatcgcctgttagtgtcattggcttgaggacatcacccgacctgtcgttgtaaaccagatgtgcagatgtcaaagatcaggattttctcctacaaatgttgtagggccaaaaaaaaaaaaaaaaaaggcccctagggcc

SEQ ID NO: 119353 - DNA, 1067 bp, Zea mays
  Clone ID: MRT4577_40333C.1
cattgggtacctcgaggccggccggggggccggttcaaagtccgttgctgtcgcagctacgtaccggaagcgctagaacaacgcgaccgccgccgccgccgccgccgcctcagctactcgcctggtgatgggcgtcgaactggcgcaaccgaccgccgccgcggctgcggtgaccaccgctgagcaggctcaggatctcatcgacgccgctaggtacgacgacttggaggacgtcgtcgccctgttctccgctggtgtctcgctggactccacagattcgcaaggccgcacagctcttcacatggcttctgccaatggtcaccttgctgtggtggaatacttgattcaaaatggagcgaatgttaatgccaccaacatggagaagaacacaccactccactgggcatgccttaatggacgtatagaggtaatcagggctttgatctcagcgggggctagcgtgagtgctctgaacagccacgagaaaacgccaatggacgaagcggtgaccacaggcaagatgcacgtgatcgacgcgatcggtgcggcagtagctcaagccgagctcgacggcgttactgtctcctaaaaggacctgatgagtacctggagctttgaatgacttgcagccttgttcttatctcacagcggttctgtctgtatcactcgcgaacctgaatcccccgacgggccagtatccgggcaatatctatactgacggcaatcgcctgttagtgtcattggcacgaggacccgacctgtcgttgtaaaccagatgtgcagatgtcaaagatcaggattttctcctacaaatgttgtagggccgttgcttgttctccctggcaaccttcgttttagctttgggttcccttggctccctttgaatgacttgcagccttgttctcatctcccagcgtttctttctttatcactcgcaaacctggatcccccgactggccagtatccgggcaattacggcaaacgaagtagcagcgaaacgggatccgcacctccaccctctgtgtttttttttcttgttaaaaaaaaaaaaaggcaaccttcgtttc

SEQ ID NO: 119354 - DNA, 1297 bp, Zea mays
  Clone ID: MRT4577_40334C.1
ttgagtaccctgaggtctgagcctcttgaggagggggagggagagggacagagctacagaggatgctacgcctgcggttccggccagctcccctgtcactgaagctggccttcaccgtctccctcgccgtctccttctccgtctcctgctgcgcctcctcctcatactcgtcccgcacatcatccagatcgccgcaggccgtagccgcggacctcctctccgtgctcgccggcccgcgcgccgcggcgcgggtaccggcggcggaggcctcgcggctccacgcctgcctccggttcctcgccccggccaaccccacggccccaaagatctcgtcttggagccgcggaggcccccggaagttcctcctcgatggttgcgatgcgggggcggctgaggcggacgagatggtgatgtggccgccggccccggtcttggacctggcgcggctggccgttgactccggaggcgatcccggtgccatccaccgcgcgctcgacccaacaatgctgccggtgccagatgttgagggttcccagaagaataaatgccatctcacaagaacaccgtatgggaggcgctttgccaatgaggagatcaattcatattttgcattcttgttcgaattgattgtggcacgggcaccttcggttggattaaatgtatcactgaatcgctatgatttgttccatgggcatcttttccttgcatcggagacaggacggcttggaattctgttccatgctaaagaatacccagcatttaacaaggaattgtttccttataatttgggatattgccaggcaggatctaatgtaccatatgatgattcgatgaatttgcgcaatgtactttggttagcacctttgccatcaaaggagacaaaagcttggttagcaccaggagtactagttgtcttggacgcacatcctgatggaattatctatcaagagatgatacgtgactatgttcagattgttagaacagtatacgaagatgatcttggggagaacacagttgatgtcaattatctgaatgtggcaaatgcagctcccgtagatagaatttacatttgctgaagtcatatgtaccgctatttgtcttcccatggtgtgatttgatttgatttctgagaaccggacgtcaatgcatcatcctcatgtccaccaaagcaattgttcccatgacggctgctgtgtatttcacatgtttatttgtttaattaaaaatgctcaatgaagcaacgatttgttgttaaaaaaaaaaaaatacaaaaaaaaaaaaaccgtacacttttaag

SEQ ID NO: 119355 - DNA, 316 bp, Zea mays
  unsure (1)..(316): unsure at all n locations
  Clone ID: MRT4577_40335C.1
aactgatactccagctggaacgggctcaattccgccgggacgcccatgcnaagggccaggcggaaggccggcacatggctgctcatcatgcccctccggtcgaggacgagcgagatcaacgagatgcccgaccgggtgcacaccgtgggactacgacaacgcttcatacacaccatcacctcgttcatcaaggcggacaccggcatgccgctggagaaattatgcaagacgtcgcactgcaggacacggaagagctcagtgcactcctgaaagagaccatagatcccactgaatgtctaggcgtaccggtcgcacc

SEQ ID NO: 119356 - DNA, 414 bp, Zea mays
  Clone ID: MRT4577_40336C.1
gacctttgggctgatttagtgcttggtctaatagggttctcgtacacgtcgtacgcgagtcatccgtaggttagttacggtgtgcaggatatcctcgccgttcgtaagtcgaaagtgtgtaatgttagcacctcgccctcgctgtcatagaaaaccgcataagccccgccaccctccggctaaattcggcacatgtatctaggagaacccctggccagtgcattgcataggtagtcaaaattgagcaatcgccccgatcctagcccgtgaacgagacgtcccgccccagctggaaggacctattacgtcacggcagtggtggttggtacttggcgagagacggaggactttcgaattgcattgtgttgttgttacgcgttacgtttacgtacgtcgcgatcaattcgtatgccc

SEQ ID NO: 119357 - DNA, 639 bp, Zea mays
  Clone ID: MRT4577_40337C.1
gccgccatgggcaggttcgggaggttcggcggcaagtacgtccccgagacgctcatgcacgcgctcaccgagctcgagagcgccttccacgcgctcgccaccgacgacgagttccagaaagaactggacggtattctcaaggactacgttggacgtgagaggggctggtcagcacggcgtcgccaccgccaccgtgtgcgcccgtttcgggctgcagtgcatcatctacatgggcgcacaggatatggagaggcaggcgctcaatgttttccggatgaggcttcttggtgcagaggtcagggcggtacattctgggacagcaaccctgaaggatgcaacttcagaggctatccgtgactgggtcacaaatgtggagaccacacactatatcttgggctctgttgccggtccgcacccgtacccgatgatggtgagggagttccataaggttattggcaaggaaacccggaggcaggccatggacaagtggggtggcaagccggacgtattggttgcctgcgtcggcggcggatcaaacgccatgggcttattccatgagtttgttgaggatcaagatgtgaggctggttggagtggaggcagctggccatggcgtagacaccgacaagcatgcggcgac

SEQ ID NO: 119358 - DNA, 313 bp, Zea mays
  Clone ID: MRT4577_40338C.1
acccaaaggggactctgaagggggggtttttttcaaaacgcggtttgttccccacgaggaggcgcggattgcactgatgttgttaaggccgccatggatatccaaggtggaggtgtgccttgcgaagacttcacgatgaattctgtttgtaatgactaaagtggtttattatctaaaatcctatagtgttgacgagtttcttcattcaaggggctatctgacgatgattaagacatcatgatcatagctcggtatgccctctgcaaagatcactgtataccaatcgctttatggctcaccgacgcagcacgcc

SEQ ID NO: 119359 - DNA, 1755 bp, Zea mays
  Clone ID: MRT4577_40339C.1
gaattcggcacgaggcgcacggccgcacgcagagcccctgcccccacagcctatctatccccttcccctcgtcgatttattattctcatggccaccaccgccgccgccgccattcgcagccctacccgcgccgccgcaccaggacccgccgcgccggcccagcagcgcgcggtgctgcgggtggcgtcgtccaggacctcctccgcccgcccccgaaggccgccgccgccgtggccgcggccgcaatgcagccggccaagcggtcgccgcggaggcctcccccgccgcggtggagatggggaacggcgccgcggcgccggggctgcagaggcccgacgccatgggcaggttcgggaggttcggcggcaagtacgtccccgagacgctcatgcacgcgctcaccgagctcgagagcgccttccacgcgctcgccaccgacgacgagttccagaaagaactggacggtattctcaaggactacgttggacgtgagagccccctatacttcgcggagcgcctaacggagcactacaagcgcgccgatggcacaggcccgctcatctacctcaagagggaggaccttaaccacacgggtgcccacaagatcaacaatgccgtggcgcaggccttgcttgccaagcgacttgggaagcagcgcatcattgccgagacaggggctggtcagcacggcgtcgccaccgccaccgtgtgccgccgtttcgggctgcagtgcatcatctacatgggcgcacaggatatggagaggcaggcgctcaatgttttccggatgaggcttcttggtgcagaggtcagggcggtacattctgggacagcaaccctgaaggatgcaacttcagaggctatccgtgactgggtcacaaatgtggagaccacacactatatcttgggctctgttgccggtccgcacccgtacccgatgatggtgagggagttccataaggttattggcaaggaaacccggaggcaggccatggacaagtggggtggcaagccggacgtattggttgcctgcgtcggcggcggatcgaacgccatgggcttattccatgagtttgttgaggaccaagatgtgaggctggttggactggaggcagctggccatggcgtagacaccgacaagcatgcggcgactttgacaaagggccaagtcggagttctccatggatccatgagctatttgctgcaggatgatgacggacaagttatcgaaccccactccatcagtgctgggctggattaccctggcgttggacccgagcacagtttcttgaaggacattggacgtgccgaatacgatagtgtgactgaccaggaggcactggatgctttcaagcgcgtgtctcggttggagggcatcatccctgccctggagacctcccacgcgctggcctaccttgagaagctctgcccgacactggcggacggcgtgagggtggtggtgaactgcagcgggcgaggagacaaggacgtgcacaccgccagcaagtacctggacgtctaaaacaccagcgaggaggctggtttccatgtcaagttttggagggttcagcagtaattaatttagcgctgttctttttggataaaagcacaaataacctggaagctggtattgttgttgtagccggtagtgcccccctgtttttttattttacaagtaatctgaatggctttggagtgcataatcaataatcaaataaatacaaagcttttggccttattaaaaccacgcgtccg

SEQ ID NO: 119360 - DNA, 2254 bp, Zea mays
  Clone ID: MRT4577_4033C.1
ccgactccgagtcgtccgtcgcctgcccgctgcccgttccgggcgcctccgccccgtttcgtcgaccacctctccggcgccgccgtcctgagccgtcgcacgcgccaccggggcgcctccggcgcgcgctccctacgccggctccgccccgccgccatgggctccagagtccttcacttagacgttcctgcagattctgaggcctatcttatgagaaatgtaccagggagtgtaagtagccctcgcacgaatggtgaaaagggtctctttcgaaatcagaatgcggggttcactgcacttgcaagtcctgtgaggagagaaatcggaaacagatcgtcgacaaggtccttctgtgttgaagacaatgacttggaagatggtaagacctcaaaagaaagggagggttctgcacagtcactcaggctcccaaagattcagaatcaggctctcttatctggtctggcttactgcatatcatcatgcagcatgatcttagtcaacaaatttgttctatctagctatggtttcagtgctccagtatttttgatgctttaccagaacattgtatcagtgaccatagtttctacactgctcctgtatttttgatgctttaccagaacattgtatcagtgaccatagtttctacactatccctgtccggtgctgttccaactgaaccattgacatggaatttaatcaaagtttggttgcctgtaaatatcatctttgttggaatgctgatcacaagcatgtttagtttgaagtacattaatgttgccatgctgactatattgaagaatgtcgccaatgtcctgactgcttctggggaaacttattttttcaagaagcagcatggtactcaagtttggggcgctcgtatatatctggcagaccttaaactgtgttctgacggcggcatattcgcttacattgcgacatgtaatggacagtgctaagcaagtcaccaagtctgggaatttgaatgagctttcgatggtgttgctgaataatgttctttcactgccattgggaattatcctcgtgcttggtttgaatgaagtggagtaccttttgcagacgtaggctattgattcaatcttcactatttctatataccataaacctaatagactacacgcaaactgctgagatatccatttatgcatcaataatcatttttcaatgacttgtcaagtagttaggcttcttctgaatatttacacgttgaatcctccattttatggttatgtatttgtgactgaatctgcagatcactcttaaggatgcccgagttttggctggtcatcactgccagtggagttttggggcttggaatcagctttacatcgatgtggtttctccatcagacgagtgcaacaacatatagccttgtgggctccttgaacaagatccctctttccattgctgggatcgtcctcttcaacgttcgtacaagcgtgcagaactctttgagcattctgtttggtctattagcaggagtattcttcgccagggccaaattgcgagataactcaccgacctagtgatcaccgtgcaggcattatagtttgtagatcatcaatcagctcagaaacactctctggaaattacctctgcgggaaatttgtgcagatgcaatggttgtttcccacctgactatgcagagagacaacatatgcacccggattgggctgggactctccagttctcctcttccccacaagctgacttgacccacagtggttagtcttctggtggtatacgtcttcgttcttgctgtaaaatagtacccaaaaagaaaattgatggacgcaactgattctcaggcagtttgtgatggaaaggcgggttgattgtagtttgtaaagacacggttgctggatggaaggggatgtaatggtaataggttccgtgcatgggaaatattaatacgaagtatctagatcaggattcaggcgacggaaaaagtaaaaaaatgaattggtttgtttatttcaaacaagatgggcctgaagaagcagagaagtgcaagctaagattcaaatggcaacgggcaatgccggtaggtacacagctatttgtataaaaaagacaatgaaatcgaagttttaaacgggtaaagtataaaaaattcaaagaagaccaaggtatttatgtcgttttgacgaagcctgtgttatttgcttgaagcccagttgtgtcattttgttgaatcccactttttgaagttataaataaaaccttccgctgtttt

SEQ ID NO: 119361 - DNA, 388 bp, Zea mays
  Clone ID: MRT4577_40340C.1
aggagaaacccctaggttccgacggtgaagaaccgaagcctgtgtgacgattattaagtgttcggcagaaggaccgaacccaaaaccttcgctgtgttcgtagacgtcgcttcgagtttagtcatggttcgttaattgatcatgtgatgcggacgacaagagccgagttgatcccaaaatgatgctggtgaacgaacctgaagcttggatgatctggtcaagtaccaggatgagagatgctccccaagaggacgtcatctaacaacactgacttatgttatcccaggttataattttgttctgttgtggatggtgctaagtgccggtgggctcggccttcttataaaagtatatcccatctttagcttctttattgaggactgtcact

SEQ ID NO: 119362 - DNA, 706 bp, Zea mays
  Clone ID: MRT4577_40341C.1
attgatcattatgcactccaaaacatttcagatacagaacaacaactcaaaaaaagaacaaagggcggctacaacaatactagctttagcttccaggttatttgtactcttatcacaaaaaaaacagcgctacataactgctgaacccttcaaaaattggcatgcaaaactctcattcagccctcctctccggtattctagacgtccaggtacttgctggcggggtgcacgtccttgtcgcctcgcccactgcagttcagcaccaccctcacgccgtccggcagggtcgggcacagcttctccaggtaggcgagcgcgtgggaggtctccagggccgggatgatgccctccaaacgggagacgcgcttgaaagctgcatgcgagagtagccatgcgattagatgttccacatagcattcagggtataaacagagtgaatactaaatcagctgttgagacagttcctcaattgttcagggagaaagaaaaaaaactacaggccttatgtatgctgaacagtccgcaatgtattttgggcctgtttggtttactacctaacttgacacattttgcctaacttttctgcctaaggttagttcttcgattcgggcgactaaccttaggcaaagtgtggcacagttagccgtgaaccaaacaggcccttagtgtcacatctgaggactattgatttgtaagctaattctaa

SEQ ID NO: 119363 - DNA, 788 bp, Zea mays
  unsure (1)..(788): unsure at all n locations
  Clone ID: MRT4577_40342C.1
gaatttgatagatttaagttcggatcatagaaaaattctggatccgccctgctttggattgaccagcagaccttgaaagcactagatagtggatgcacttttggcttgtaggttcaacatgagcatgttggcaaaagctaataaagtatacgaacaacgacctgaagtgttttttaaaaacttttttttatggaaccaaattgttactgattcttgcaggacggattcagatgtctttgccacatgcccacattctataaacctactcaccctgcccacgactatattcgccacgctctgttttgtgtgtgcgttttctagaggtcgtgtgcttagagggtgaaaatggcatctaaacttgaccctataaaatttaaggatcgaatcagaataggatcagatactatatctatttattttttaactaaaaattatttaaaattttaaaaaattgtgaagaaatatttggatcacgatcctttacatcatgcatgtagtagatacatagcttttcacatcaaatacgacttatttggctttgtcggtattgcgcatggaaattgacgagacccgcggacatctaaaaaattctgacgggttgtctcaaatacagacactttacgaagtatacactttttgcttgtatgaaccggtgaaatggaagaggtaagtggaaactgtttcgtagaatcagctccctcgctgggtgtaacgagtaaactttgtgagacacttgtccatagaggagaaaagcccattctacgcttgccataanaaaaaaaaattca

SEQ ID NO: 119364 - DNA, 223 bp, Zea mays
  Clone ID: MRT4577_40343C.1
ggagagtggagagtggaggcggaaggggactcgacggtggccatggaggtgggttccgtagcggatgtggagttggaagtggcgtctacggcaatggtggaaggtttgaaagccgcggctgaagaagcctcagcagtgcgcatggtggaggctttggctctggactgcgtgtaggaagcggttgtacgcatgaacgtcttgatggtgtaaacatcaacggtgg

SEQ ID NO: 119365 - DNA, 1048 bp, Zea mays
  Clone ID: MRT4577_40344C.1
gcaggatgatgacggacaagttatcgaaccccactccatcagtgctgggctggattaccctggcgttggacccgagcacagtttcttgaaggacattggacgtgccgaatacgatagtgtgactgaccaggaggcactggatggtatgtctcgctctctttccattgtctgttattggttgaactatttttctttttgacgaagttgatttccaatgaacctacaaaatgctgttagtgttggtatcagctttcaacatcttgacttatctttaaatgactgggtgttatatatattcagttgatgtagctgttcaggatattgtgatgccaataatgtagtcctagcctcctagattttcctcggtagataagccaaatgtttaagatatgccttattcctgagctaatgctggcatgcgaatttttttttaataaccaaacacaatgttgaagtcttgaaacagtattatgcttagatgtgacagtagatacattgttgactgttcagcatccataaggcccatatgattttttttgtttctgaacatttgagaaactgtctcaacagctgctgatccagtagttttattcactctgtttatgtcctgaatgctactatgttgaacatgtatatcatgacatgcagctttcaagcgcgtgtctcggttggagggcatcatccctgccctggagacctcccacgcgctggcctaccttgagaagctctgcccgacactggcggacggcgtgagggtggtggtgaactgcagcgggcgaggagacaaggacgtgcacaccgccagcaagtacctggacgtctaaaacaccagcgaggaggctggtttccatgtcaagttttggagggttcagcagtaattaatttagcgctgttctttttggataaaagcacaaataacctggaagctggtattgttgttgtagccggtagtgcccccctgtttttttattttacaagtaatctgaatagctttggagtgcataatcaataatcaaataaatacaaagcttttggccttattaaaccc

SEQ ID NO: 119366 - DNA, 2364 bp, Zea mays
  unsure (1)..(2364): unsure at all n locations
  Clone ID: MRT4577_40345C.1
aattcggcacgaggctcgattaccctggcgttggacccgagcacagtttcttgaaggacattggacgtgccgaatacgatagtgtgactgaccaggaggcactggatggtatgtctcgctctctttccattgtctgttattggttgaactatttttctttttgacgaagttgatttccaatgaacctacaaaatgctgttagtgttggtatcagctttcaacatcttgacttatctttaaatgactgggtgttatatatattcagttgatgtagctgttcaggatattgtgatgccaataatgtagtcctagcctcctagattttcctcggtagataagccaaatgtttaagatatgccttattcctgagctaatgctggcatgcgaattttttttaataaccaaacacaatgttgaagtcttgaaacagtattatgcttagatgtgacagtagatacattgttgactgttcagcatccataaggcccatatgattttttttgtttctgaacatttgagaaactgtctcaacagctgctgatccagtagttntattcactctgtttatgtcctgaatgctactatgttgaacatgtatatcatgacacacatgcattcggcacgaggcggaagccctacccgcgccgccgcgccgatccagccgcgcgtggtgctgcgggtggcgtcgtccgccgcgccagcctcctcctcctccgcccgcccgcgcaggggcgccgtggcagaggccgcaatgcagccggccaaggcggtcgccgcggaggcggcctcccccgctgccgcgctggagatggggaacggcgccgcggtcgcggggctgcagcggcccgacgccatggggaggtttgggaggttcggcggcaagtacgtccccgagacgctcatgcacgcgctcaccgagctcgagaacgccttccacgcactcgccaccgacgacgagttccagaaagaacttgacggtattctcaaggactacgttggacgtgagagccccctttacttcgcggagcgcctgacggagcactacaagcgcgctgatggcacaggcccgctcatctacctcaagagggaggacctcaaccacacgggcgcccacaagatcaacaatgctgtggcgcaggccctgctcgccaagcgacttgggaagcagcgcatcattgccgagacaggggctggccagcacggtgtcgccaccgccaccgtgtgcgcccgtttcgggctgcagtgcatcatctacatgggcgcgcaagacatggagaggcaggcactcaatgttttccggatgaagcttcttggtgcagaggtgagggctgtacattctgggacagcaaccctgaaggatgctacttcagaggctatccgtgactgggtcactaacgtggagaccacacactatatattgggctctgttgctggcccgcacccgtacccgatgatggtgagggagttccacaaggttatcggcaaggagacccggaggcaggccatgcacaagtggggtggcaagccggacgtcttggtcgcttgcgtcgggggtggatcaaacgccatgggcctgttccacgagttcgttgaggatcaggatgtgaggctgatcggagtggaggcagctggccatggcgtagacaccgacaagcatgcggcgactttgacaaagggccaagttggagttctccatggatctatgagctatttgctgcaggacgacgatgggcaagttatcgagccccactccatcagtgctggactggattaccctggcgttggacctgagcacagtttcttgaaggacatcggacgcgctgaatatgacagcgtgactgatcaggaggcactggatgctttcaagcgcgtctcccgtctggagggcatcatcccggccctggagacctcccacgcgctcgcctacctggagaagctgtgcccgaccctgccggacggcgtgagggtggtgctgaactgcagtgggcgaggcgacaaggacgtgcacaccgccagcaagtacctggacgtctagaacaccggagaggagggctgaatgagagttttgcatgccaatttttgaagggttcagcagttatgtagcgctgtttttttttgtgataagagtacaaataacctggaagctaaagctagtattgttgtagccgccctttgttctttttttgagttgttgttctgtatctgaaatgttttggagtgcataatgatcaataaacaagtaaataccaaaatctttgtcgatgatggagtgcataaagaagtggagaagaataaagaggcttttggcattatttagaaaaaaggttttcaataaaataagagtggagtggttactggattttc

SEQ ID NO: 119367 - DNA, 145 bp, Zea mays
  Clone ID: MRT4577_40346C.1
cccactcgtactaccactcgtccgctctgccttcgccgctccctattccttcagacgctctttccactcggtacaattcgtcaccagcccgcgaggcgccatcaccgacagggcgctagtagacacggactccactaataaggca

SEQ ID NO: 119368 - DNA, 786 bp, Zea mays
  Clone ID: MRT4577_40347C.1
acgatacagtgtaccaccaccgcctgccctgccgtgcctcacacctctatccccccctcccccaacccctctctccctccaccccatccgcctctcacgcgggacgccgccattgccgttccctttcgtcctcgtcgccacatcgcgtccctcccgcctccaccccgtccgcagtctttggccattgagtttgaggttgatgatccgtcggaaaggatgaacgggagtcgacagatggaactccactacataaacactggatatccatacaccatcaccgagagcttcatggatttttttgaaggcctcacatatgctcaagctgattttgctcttgccgatgccttccaggatcaggctaatccatactggacgatgatgcagacaaactcgtataaatacggatattctggcgcaggaaattactatagctatggacatgtgtatgacatgaatgactacatgcatagagcagatagtggacgcagaatttgggataaccccatgcctgtaaacaataccgactcccccaacatagtcctgcagggtgctgaagctcctcatgcaagtgcaagttctactaccgaggaacgcatccaacaacctgtgcaccaaaattcaagcagtcctcaggttgtttggcaagacagcattgatcctgacaacatgacatatgaggaattgttggatttgggcgaggcagttggaacccaaagtcggggtctctcccaagaaagcatttcagcacttccaatcaccaaattcaagtgtggtttattttcaagg

SEQ ID NO: 119369 - DNA, 328 bp, Zea mays
  Clone ID: MRT4577_40348C.1
gtcagacagtgacctccacccccgcatccctcttaaaaggccagtacctcttgggggtaggggggagggttcagaaagcatctgctcatctgcctttctatcacccatcctccacaactcttttaatatatatacccttggcctctattacttcttcattgacctcaactacatagtttacatcatccaatatacatccacctataatacattacattccaccttcaagtcttaaaaccgtaacctagctattaatgtaaatcccatcaccatcctccaacatcgatatccctacataatcaagctttttccattctaactctcaata

SEQ ID NO: 119370 - DNA, 183 bp, Zea mays
  Clone ID: MRT4577_40349C.1
cctccgacaattcgtcatgctcgtcgtcgtccatgccgccctcccctccggccacctatcttcgctccgcccatggccgtgtcgcccatgcgccctcccatggcccgccttttctcccttctcccttcacggaagccccatctgttcgtcatgcccgtcattggcttgccttcggtgctgcag

SEQ ID NO: 119371 - DNA, 1178 bp, Zea mays
  Clone ID: MRT4577_4034C.1
ggcacataactagtaaattttgaaaattgtggggggtgtttcatgaatctgctctatttagggtcattttgtgccttgtacaaagatgaacctgaacttttttggtcgttttgttgaacattttctattaatattttccatattagttgtgaacgattctcagtttctcactcaaccttgtacttgtagcaaggatgtttggactgaaattggaagccttttataaacttatttactttattcctaaatattttctttactttttagtttgaagtacattaatgttgccatgctgactatattgaagaatgttgctaatgtcctaactgcttctggggaaacttattttttcaagaagcagcatggtactcaagtttgggttgctcttatgttgatgataatctctgcagttgcgggaggaataacggatctgtcattccatgctgttggatatatctggcagaccttaaactgtgttctgacggcggcatattcgcttacattgcgacatgtaatggacagtgctaagcaagtcaccaagtctgggaatttgaatgagctttcgatggtgttgctgaataatgttctttcactgccattgggaattattcttgtgcttggtttgaatgaaattgagtaccttttgcagacgtctctcttaaggatgcctgagttttggctggtcatcactgccagtggagttttggggcttggaatcagctttacttcgatgtggtttcttcatcagacaagcgcaacaacatatagccttgtgggctccttaaacaagatccctctttcgatcgctggaatagttctcttcaatgttcgtacaagcgtgcagaattctttgagcattctgtttggtctattagcaggggtgtttttcgccagggctaaattgcgagataactctccgacatagtgaccatggggcaggcttttatagtttgtagccggcaagagatagataccggtgatggccatgagctcagaagcacacccaacccaagaattactattgcgggaaatttgtgcaggtgcaatggttgtttgccacctgactaggcaaagagacaacacaagcacacggattggcctggaactcactggttcttttatcgccacaagctgacctgtaccccagttgttattagtcttctggtggtggtatactg

SEQ ID NO: 119372 - DNA, 479 bp, Zea mays
  unsure (1)..(479): unsure at all n locations
  Clone ID: MRT4577_40350C.1
ttattcggcacgaggggacggagttgagggacaaccctcttctgtttcaacagaacaatttgcaatgacttgtaagttgacatgtcttgtgctgtgaacttgcagccttgttgataacaataattgatctgggcctcttccaccagaattagtagatacacgtagtcttcttgctatcttgacttcaggctgataataacaacttcagtggaagctccatcctgctgaatacaacaacatacaaacacttctaaagctgtgagtgtaacaaccttttcgctcatgttctctcttttcagaatttgaggtagatgagggcaaaagaatttaacagctattacaacttctgttattgagaacaatcattaaaagcatgcttattaaaacgacgttaaaacgacgtttanaacgtcgtttaaactataaaacgctgacaggaagtgaaacgacaaaacgttttacgattncgtcgtaaaacg

SEQ ID NO: 119373 - DNA, 763 bp, Zea mays
  Clone ID: MRT4577_40352C.1
acacatcgatcagcagcagcctcaagcaaacgcaaactcgtactgctagcccgtgtagtttgttaagcagcaagcttgcatccacacatcgatcggcagatcaccgtggtcaccggacaccaatccaccatgccgtccattgacaaggccaccgacaacggcgagatgaagcagcggcagccggagcaggagctggtctgcgtcacgggggccggaggcttcatcggctcctgggtcgtgaaggagctcctcctccgcggctaccgcgtcaggggaaccgccagggaccccgctgaccaaaagaacgcacacctgctggcgatggagggcgccgaggagaggctcaccctgtgccgggccgacgttcttgactacgacggcctccgcaccgccttccgcggctgccacggcgtcttccacgtcgcctcgccagtctccaacgacccggacctcgtgccggtcgccgtggaggggacgaggaacgtgatcagagcggcggcggacgcgggcgtgcggcgcgtggtgttcacttcgtcctatggcgccgtgcacatggaccccaaccgcaggcccgacgcagtgctcgacgagtcgtgctggagcgactatgagtactgcaaaaacacagggaacatgtactgctgcgccaagatgatggcggagatcacggcgacggaggaggcggccaagaggggcctggagcttgcggtggcggtgccgtccatgaccatggggccactgcctgcaacagtcgcatcaactt

SEQ ID NO: 119374 - DNA, 496 bp, Zea mays
  Clone ID: MRT4577_40353C.1
aactccctctcgatccactgagcatcatcatcagcaagcatcaagcaaaggcagtttggtagtactagctagcccgtgttagttagccaactagcaatctcgcatcaacatccacatattgatcgaccatgccgtcgattgacaaggccaccgacaacggcgagctgaagcagaggcggccggagctggagctggtctgcgtcacgggcgcgggaggcttcatcggctcgtgggtggtgaaggagctcctcctccgcggctaccgcgtcaggggaaccgccagggaccccgctgaccaaaagaacgcgcacctgttggcgctggagggcgccgaggagaggctcaccctgtgccgcgccgacgtcctcgactacgacggcctccgcgccgccttccgcggctgccgcggggtcttccacgttgcctcccccgtctccaacatccccgacctcgtgccggtcgccgtggaggggacgaggaacgtgatcagagcggc

SEQ ID NO: 119375 - DNA, 389 bp, Zea mays
  Clone ID: MRT4577_40354C.1
ctctcttctttttttctttttttttttaccaagcttggccctttttaatggcccacaaaagtccatccaaaggaaccaaattaaaaaatcaaccaacaacgacgacacacacatacccacaacatgatctgagtacatattaacaagaacacatgaaccccaacggacaacaaacccacccacccataaatttcagcatccacgttccaatccacacacacaccccttaccggccaatcgtgtgaacaaacttctaaaacaccaccctgttagtgatatcctcctcgtccatttccctgctgatcagctcaagcgccccaaccaaggcaaccatgctgtctgccataaacaccgggccactttcattaaaacatccttttccacccttc

SEQ ID NO: 119376 - DNA, 383 bp, Zea mays
  Clone ID: MRT4577_40355C.1
cgggagccgcagcatctctccagctcgctcggttctcccatggcgctcttctttccctgcgccctggaccttcccagcttggatttccctctcccatggcgttcggctgctcggcgcccaactcctgtgctcgcgccttcgtgctgctgctcgcccataccgcgacctcgccgatccgtgtcctctgctcccttgtttaagcattctcgtgcatccacgatgcttgccgagccattgaattgaactaagagctctctggtcgccgggaacacgaccatatagccgccatgcttacggccaccgtggccagagctccatagttgaccaatagcgcaattaagttaggggaaatagtcaggttgaccccaattttatgttcgccg

SEQ ID NO: 119377 - DNA, 273 bp, Zea mays
  Clone ID: MRT4577_40356C.1
gcagcgtgaaggcatcaacataaagtcctatctacacctacatctacctagtgccggttctgcctgcctacaagtcctatttaatacccctgcatatcccacctcttttcaaaaactctgccttttccccaggcaaagtggtttttattccagcaatgcccatggaatccgtcttctcctctcgccgagaatcctggccaccaacccagatccgcttgactcccacaaacatgtccatcaagaagcgatccagcattgagcctcgaccgctgc

SEQ ID NO: 119378 - DNA, 243 bp, Zea mays
  Clone ID: MRT4577_40357C.1
cccacgcctctgtgtctacagatcacagcggatcaaaagccagggtgggttttttatgaagagagttggggtgataacatcatcttgcccccaacctgttcttactggcataagtggcctatgctgcgggggaaaaaaatattcgccatatgaggtagcacgcggcggatagcattatcctgaaaatgcatttgcctcttgaaactgctatacagatcaacttaagatgactcagggtgttag

SEQ ID NO: 119379 - DNA, 498 bp, Zea mays
  Clone ID: MRT4577_40358C.1
ggggggggggggtgtttttttttttttttttttttttttttttttttttttttttttttttttttttttttttttttttttttttttttttttttcaaaacaaagaaaaatcctctacccaggtttcaacaaaagggctcccacccaacaagggggggggggggcctccatccccaaaagggcaaaaaaaaaacccaataaaaaagggggccccccggccccccacaaggggacccaaaagggggggggggggtggggctaatcccccacggccaggggtgaaaaccccaccccctgtgggcctccaaaaggggcagggttcccgggccttcctccaactggggggggggcatcggccaaccaaaaaccctcaccctaagtcgggtgaaggtctcgggggaggaaaaatccaaaaggccctggttaaacaggaacaaatgggttgtttaaaaggagctgaagaaacttctcctgggcagggatcacccgagctggatt

SEQ ID NO: 119380 - DNA, 254 bp, Zea mays
  unsure (1)..(254): unsure at all n locations
  Clone ID: MRT4577_40359C.1
ccggccgggaaaaaagatcaccccattcctctcattctctcatatcaccacattcaaaatggctgagcatccttctttcactcttgccgcccttttggctgctggcggcactgccggctacatgcgcacgcgctctactccttctctcgtggctggtgtcggactgggagtttcatatgcctatgctggataccttctcaagaaacacaagactacggntctgagcttgccctgggcaacagtgtcctcttaac

SEQ ID NO: 119381 - DNA, 1727 bp, Zea mays
  Clone ID: MRT4577_4035C.1
gcaccgttgccggcaccggcaggagcaatgcgcagtggaggatggttcaggaccatccgcaccgcatcttgcctcgaggccggccgggaacccgccgccgcgccgttgacttgaacggcgctgctgcttccctccaccaagaagctcagctcccgaccgcggcgatcggccgcgcgcgccgcgacggctcgaagctcggttcttccgttcgcccatcgcaggctcctcgtgccggccgatctaccatcgctaccgaggaaagcgcgaggccgtccggcgccggccggaatccaccacgatcccatgatctatacctcggcaccagcgatggcgtcgtcggcttccgccgggcaggggcaaggcaggcgcgtcgagcccgtccgcgccgccaccggcatgggtgctctgcccctggacgccctgtacgacatcctgctccgcctcccggccaaggaactctgccgcctccgctcggtgtgccggccgtggcgctccctgctctccgaccctgcgttcgccgccgcccacgcagcacgctaccccgagccactcatcatcgtcggctacaactacaacgacagtcctccccctccagagagcgacgagcgtgactggacgaaaccaaggaggtaccaatgcgtcatcagcgtgatggatctgacgggacacgtggtgaagaacctgcgcgtggacggccacatcgcgagcatgtcgctcagcctcgcctgcgtgaagaggaccggagacggcagctgccggctggtgaacccggccacgggagccgtgcaccacgtgcccgaagaggacccgccgtacggctacagcgacaggctgtgcccgtttgggcaggttgccagcacaagggagttcaaggtgctccggaaggtttcctactcgctcaacggcaaccctcgtgtcctctacgagatctgcaccgttgccggcaccggcaggagcaatgcgcagtggaggatggttcaggaccatccgcaccgcatcgacatcgattggcgcgacaaggccagcgtggtcatcgacggggttgtctacttcctcagcaagaactacgcgtcttcttcttcttctgctggatctgaggagcaagactggatagcgtcgttcgaccttgacgcagagaggtggaggccgaatatcaggggaccccaaagccttaccgtcgtcaacaatggaaacgacaacgggctggctgttgacgaggagctttcgttaaccaacctgaatggctcactggttatcgtccatctccaatctcctccctgcatgaacctctggtatctgctggactcagagaagggcctctgggtcaggcagtacagcattcaggttgaagaatgggactgcagcctctcgtccttcactcccttgatcgtgctagacgatgggaggatcgtcatacatgtcgaagggtcggagatgttggagatctatgaccccaaaaccaacaagttgtccagcgtcgccgacacgggtctcagcagcgcagttagtgtgtacacaggaaccttgctcagcttagagtggtgaggctagtatctatctagctagctagcttgtgggaactgtcatttaatttacctgttccgtctggtttatgtgacagcctgacaggcattggcttttacagttcctatatcgtccttgtcactacgactgtacgtgttcttgtttctgttggcaagaagcttttgatcgagccgaacgatgcg

SEQ ID NO: 119382 - DNA, 267 bp, Zea mays
  Clone ID: MRT4577_40360C.1
ctattctgtcttggaagaaggctttgcggatccccggaggccttcgggcagcgcctgttagcctgctgctggcgatactgagcaccccagtggctgagggcagcgacgctcccgaggatttcgtgtaccagtttaaggccatgtgctacttcaccaacgtgacggagcgcgtgcgttatgtgaccagatacatctataaccgcgaggagtacgcacgcttcgacagcgacgtggaggtgtaccgggcggtgacgcgattgtggacgg

SEQ ID NO: 119383 - DNA, 3144 bp, Zea mays
  Clone ID: MRT4577_40361C.1
gccggcgctcccgccgtttctaccccccctctctccggcacgagcctccggtcctccctcaaccccagcagcttcgtctcccctcccctctccccagaaatcggaactagatagatagatcagccctatctttgcctcctcccggacgactcggcgcaaggtcgcagcttttctctcgatctttcgcgcttcctctttttgacgcttgctccgcatggggttcctggagatctttggggcggttcgctgctgagatggttcgccgcatcacgcgctgctgtgactctcaacagttcttccgatccgacgagccccggtgatggacggcacgccgatctctgcgtcctctacggcaggcgtcgacgttggcgcggtggcgaccggcacgcccatgaagaatgcgatggcggcggccgctgtcacctgagatggcgaggcatctcacagtcgacacggaagtagccatcgcgggcctgcaggagctcgccgcgtgtgaggatactaaattagttggtactgaattgcgagtgcttttccccctgtctattacggtattcaaggaaggtggatagctgaaggtggtggctcagagattggtttgtctttaattttggaggtaaatcatacgcattattgaggtccgagcagcgcgtgaaaagaatgaagtcccccgtctggggttgttccaaggccaacccaggtagaactgcaccccggcagcatcggtctcatggtgtgaagttctctgttttgttaattaacccctgttaagaaaaaagaaggcgtgttcgccgtgtcgggattctttccttcgtccccttgtgtttatttcaatatgatatcaattcctgatgtactactggtggtgtaagaggtttcttgggttcctatagtcgttgtgtcgagttctaaaagttgttattttttttgctttctccctttaaccacccgtcttggattatcttgcagacgattctttttctccgtctgcacctgtgttgatgatgtaatcctttgctgacttgcctagggttgcgacatcagagaagaaggaatacccagtggatccatcccttccggacatcaagaacagcatctatgcttctgatgagttccgcatgtactcgttcaaggttcgcccttgctcacgggcatactctcatgactggactgagtgcccctttgtccacccaggagagaatgctcggcgccgagacccccgcaagtaccactacagttgtgtgccatgcccagatttcaggaagggtgtgtgccgtcgcggagacatgtgtgaatatgctcatggagtgtttgagtgctggctccatccagcacaataccggacacgcctatgcaaggatggcactagttgtaaccgccgcgtctgtttctttgcccacacaactgatgaactccgcccattgtatgtctccactggatcagcggtgccatccccaagggcttcagcaacagctgctatggagatggctgcagcaatgggcttaatgcccggttccccatcatcggtttcagcggtgatgtccccatttacccctccaatgtccccttcgggcaatgggatgcccccttcattgggctggcagcagccaaatgttccaacattacaccttcctggcagcagccttcagtcaagcaggctccgaacgtcactcagtgcaagggatatgcctgctgatgactactccctgatgccggacttcgattcccaacttatgaatgatctatgctattcccgtctcggttcatccacagggaaccactctgcacggaccaagtccctgaatccatcaaacctggatgatctcttctctgccgaaatggtatcatccccgaggtatagtaatgctgatcagggtgctatgttttcaccttctcacaaggctgctatcctgaatcagttccagcagcagcagcaagcactgctttctccaatcaacacaggagtttactctccaaaggctgtggacaacaagcagttaccttcacacccatctctgctgcatgcatcgcttgggatgccctcccctggccggatgtctccacgatgtgtcgaatcaggctccccgatgaactcccacctagctgctgctcttgcccagcgtgagaagcaacagcagacgatgagaagcctcagttctcgtgaccttgggcccagtgcggcacgagcttcagctctcggctcccctctaagcacatcatggtctaagtggggatctccttcaggggtaccagattggggcgtagatggtgaagaattgggtaagctccgccgctcatcgtcgttcgagctcaggtctggcggcgatgaccctgatctctcctgggtgcatacactggtcaaggaatctccgccagagaagcaagttactacgtccgaatcaattaattccgttggaccctcaccactaatgcctcccagcatgaacaacggcggcgaaggttctggcctgaacacccagctggatgggcgtgaccaagccgcggttttaggggcactgcttgaacagatgcagcttgatcagcagattggtagtctagcaacataggcgtgcaacgagcctggaaggtgtgagggtactatattcttatctactgaattccaagttcttttccccctgtcaattatggtattcaacaaagatggatagctgaaggtggtggctcagagattggtttttctttaattttggaggtaaatcatacgcattattgaggtcccagtaggttaaaagaatgaagttcctcgtctggggttgttccaaggccaacccaggtagaactgcaccccggcagcatcggtctcattgattgaagttctctgttttgttaattaacccctgttaagaaaaaaagaaggcgtgttcgccgtgtcggaattctttccttcctcccctagtgtttatttcaatatgatatcgatacctgatgtactactggtggtgtaagaggttacttgggatcctatagtagttctgtcgagttccaaaagttaattttttttttggtttcacccttccattcgtcgtggattatcttgtggccttgttttttttggggaagaccttgaggcctgcgtaatcctcctggatgatatttgcaataatgtaatattgttttcgaggc

SEQ ID NO: 119384 - DNA, 510 bp, Zea mays
  Clone ID: MRT4577_40362C.1
tccggcacccaccaactcacattacctccactacaactacaatcgcattcctcaacatagcgcgagagctgcatctagggcccagggacagccgaccaataggatcggcctggctagccacccagacgtgcaccacgcctgcgcctgcaagagagagaggactcgctacacttcatgctgcacacgctaatcttcactctttgccaggacagcgctcaccgcttgctcttaaacacgctaaccgaggcgtgttcacactacccaccacggccctatcattactgggggcgagcacgcaatgcacctcatataggcggacctagtgcgagccaacatctgaatacacctcgtagacaataggccgagcttggggaaccacttagtgagcatcatcggcctacgtctgaggcgtatcccgcactgggcggaggagttccagaggtacacgctgcgcctgctgcccgacttcctttaccgacaagggggcaggcctcgaccagcatgcccctt

SEQ ID NO: 119385 - DNA, 462 bp, Zea mays
  Clone ID: MRT4577_40363C.1
aaaaaaaaaggggggatgaaaaaaccaaattcgggggggcaataaaccaacccaaaaatgaacacatcgggtaacaggccccaaaaaatccgctactaaccgaccaaaccgggccaactcacaaaaaaacaaagaccatccaggccaaaggcgggcaaacaagcaaaacccggaggcgggagccgttttaaaaaccggggacctgggcaccagaaggaagacacaacaccacggggagggagccctcagaaaaagaaggggaaaccccggggaatcggccatgctagacacgggaaaaggaaaagaaaacacccctcttaacacggggaaaaaaccccaagggctgccactaagcccaaagaaagcccccggaaacagggaaaaaaagctggggcaccaaggcaaaaggcatgcaagggttgaaagagaactgcgccccggccctgacgggaaaaaacagat

SEQ ID NO: 119386 - DNA, 377 bp, Zea mays
  unsure (1)..(377): unsure at all n locations
  Clone ID: MRT4577_40364C.1
ccttgtttttcctccttcaaagtccacgggtagttcgtgaaggaaaattaaggggggagcggagccttgaagaattgcactggtgctccatcagagttctttatgcagttcgacacaaataatgatggcctcatctcctttgctgagtaagtggaaagaaaaatgatggcccaattcaggatcttgaactagggattcatactcctgcataactactcatcatttgctgtaagaatgctatgaaatctgtaggtgtttgtctagcacctgttcaggataactgatgtagcgtatatattaataaatcatgatgttccnccncaggaaataaaaaaaaggaggagaagaaaaaggccatcccaaccaaccgagaaggg

SEQ ID NO: 119387 - DNA, 487 bp, Zea mays
  Clone ID: MRT4577_40365C.1
acgggtgccctctggtgaagctagttccacctcctgttgtcttgtaggcttctaaatcgagtatttgcataatatgcatcaaacaagttccctctgttttggaggatcaggcaatagcctacccatttcaggaacaaggtgtgacagtccaaaccgctcgacataccaaagatactccaaagtgcctatgatacctagccggtattcaccaggcaattctttgaatgcagagtaccagtgctagtccattccaagagcaaaacgcattctttcaaccagattttagttagaaccacggaagtcctatgaaacaggcaaagtcatggtaaccgtgaggaggatactgacttttgttgataccataaactcggctcagcggaccttgaacagagtatccaccagacacatgataggcgtataaacagaggggcccatggggggtggatcaacaggataccacactgggaaactggagatagccctaaag

SEQ ID NO: 119388 - DNA, 410 bp, Zea mays
  Clone ID: MRT4577_40366C.1
attcggctcgaggtctaaccccccatcgtgctccgaagcctagcatgaccggtcgaccggaccactggcactgccgctagctagcgacgacccccacggcttgagctgctcgccaggaacaatatggttcacgactacaggtcaagcggaggtccacagacgaagagcgagccaagcagctacgctagctgcagccgccatccgctgggcaagaccgtaaggagccgaaaataggtgaaggagtgctgacgacggataggcgaggtggcgtcctcggacagccaaggtcccgcgccatcgacacgactacgacctcgcttggagctgctgccgaaacaaggcaagccacggaggccagcaaggacaccagctctgctataccctaggcctccggcgacaacggactacat

SEQ ID NO: 119389 - DNA, 382 bp, Zea mays
  unsure (1)..(382): unsure at all n locations
  Clone ID: MRT4577_40367C.1
aaaaaagaagagggaaagactgattatacatttagatcgacaacacacgcttttttgatacattaggccgacaggaaccagcccagactcacagcacactgaagaagacagttcacggccactgcatgtactactaacacgagtaaatgctgaaagaccaacccgggcgtggataatggatactggggaccgcacaccacggagcgcgnagcctttgattgcgtctatagcgtcaaccagggacctgaaccgttgtacctttacacacaccgcacgatgtggaactctcggcagagggacgagcaaagccagagtgtaagaaaagcagaggccacgagagtcactaaactgacatccaatgaacgggcatcccaaagagggg

SEQ ID NO: 119390 - DNA, 522 bp, Zea mays
  unsure (1)..(522): unsure at all n locations
  Clone ID: MRT4577_40368C.1
cattgggtacctcgaggccggccgggnaaaaaaatttccccaaaaaaaaaaaaaaaaaaaaaaaaaaaaaaaaaaaaaaaaaaaaaaaacctcgccgcacgtacgagggccgacggggggggggggagaaggacaaggggagctagttcgtcggttctttggtcggggctcacagttcactccactccctctaccccctcctgctccgcctctgctgccgcatcgcaatgtcccagtcccaaatcgaggcgttcacaccccgggcgggggcggccggggcgctcgccgcggcgtccgcgctcacgacgggtttccccgcgctcgaaccgtgcgcgcatgtcgtgctggccctgcacgccatcctgctgctcggttgcgctgcggggctgctctccccggcgcacggagacggaggcccaaaggctgcccgggggacaatggtgctgggatcgctgcgggggctcggcttanccgggatggcgctcagcgcgctccacgtggacgcggaggaggcgccgcggg

SEQ ID NO: 119391 - DNA, 265 bp, Zea mays
  unsure (1)..(265): unsure at all n locations
  Clone ID: MRT4577_40369C.1
gaaatccccannccaagcgagggnnnggcngcggcnccagccggacccaggacgagaagaagcggcgcganggcggngggcgacccggcgnncaaggcgcngacggcngggcngggcgncgccacgcccaaccncgccgccaccnncncgggcaacgncnaccgcggccccncgnggcaccccgagcagnccaagcnagaaaaggcgaaaaccgaaganggaaaaagaccagcaagcagnnnnagagagcagangaaaggcgggc

SEQ ID NO: 119392 - DNA, 357 bp, Zea mays
  Clone ID: MRT4577_4036C.1
aaaaacccaattcccctggggccccagttaaattttgggtttgcccttacaaaagggcaacttgttcaggggtaactcaaatagtaggttttgggggggggggccattttttgaaaaaaaaaaaagccttttcccagaaacaaaaactttggggggctttgccgtttttataacccccccttttatttttttttgaaaggggggcccccccccctggatcgggtaaaaaaccaaaggcggttatttttaggctagtaaattttttgggcaatgggaaaaagaaatccatcctggttttttttgggggggggggtaaacataaggggggcgggattttacactcctgggcaccttggg

SEQ ID NO: 119393 - DNA, 548 bp, Zea mays
  Clone ID: MRT4577_40370C.1
ctcgaggccggccgggccgggaattgagcatcgcagagataggcgtcttcgtactcgcctacctccgcggctcaaacctttcccccttctcccaattccttccgtcggccgccgctccacccgtactacgacaccatgacgcagagcatttcccaccacatcgaccagctcgcggatccacctcgcaaacgtctgctgcacagatgaactgccttgagcatggcattcaggctgacacacaaacgcccggagacaagaccattgatggaggcgatgatgctatccacaccttcttcacagagactgacgctgtcaactacgagtcccgcgttgttttcgccgatcctgaacccactgtcatcgatgatgggaaaactgatacctaccgccagatcttccaccctgactacttcatcaatgataaggaggatgcactcaacaactttgaccgagaccactacaccaatgccaaccatattgacgacctgtgccttgatcgcatcaggaagattgccaacaactgctactggtctccatatctctcctcc

SEQ ID NO: 119394 - DNA, 993 bp, Zea mays
  Clone ID: MRT4577_40371C.1
atggcggagaatgaagaatgcaaggtcctcattgaccaacaagggagcaacgatgtcgccgacccacacccaccgtgcgaggaagaagaagacgacgacggcgacgaagacgatagctggagcttcatcgtggtcctcaacctcgtcctcggcggcacggcgcgcctgaacgtgctcctcccgaccgccaccatcctggccttcgccatcttcgcccctctcctgaccgacgacggcaagtgcagcacccggttgaaccgcatcctgacggcggccttcgtggccctctgcgccgcgtcctgcgtcttcttcacgctcaccgacagcttccgctccgcctcgggccggctccggtacggcgtggcgacgccggcgggcatccgcacgttctgcggcggccaccggaggaggaggaaggggccgagggagccggagctgtacaggctgcggtggtcggacctgttccacagcgcgctggcgctggtggcgttcgtgacgttcgccgcctcgcaccacgacatggtcctgtgctactaccccggcgtgccccgcaaggtggtcaacaccgtgccgctcgtggtcggcttcgtggtgagcctcctcttcgtgctgttcccgtccaggaggaggggcatcgggtaccctttcctgctccgcaccgacctcgtgtacctgcgccggtgaaacttgacgggccgcgcggcggctgtgcgcctgcacgatccggagaagtctgaacgcgtcgtggccgtgatttgtactccagttcacatacacgggaaaactctacatggtttgcattgtttctcttctgaatttgttcctcattcagtgcctatatccaaagaatggcagggagagacatgtgtctccgatatagtggctggagcgtagctgtagttgctcctagacatgttgcttgatcattcttccgcgtccggatcaggctcaaggcctgcaatttgcttcaaaaaaaaaaaaaaaaaactcttc

SEQ ID NO: 119395 - DNA, 2799 bp, Zea mays
  Clone ID: MRT4577_40372C.1
cggccggggcgtgtgcttccgttccagctttccttccccaacagctcgacttcctccgcaagccgccgtgccagtcgccgccggccgcgatgggtagcagggtggcagcggcgctgatccggcggggcaggtacctggcatcctccctgctgacgcctcgtctgccgagaagcgccctcgctccggctccaccgcatagggttggatctgcctcctcttgcggcggcggcggcggcggcggcggaagctgcctcctcccgccaaggtcggggccatcgggagccttctcttacgcctcccggttcggcaacttccacgccttccgatccctcgctcccaaggccatgtttggccaatgcacaaggagaatgtcaactacggcgacagcactgaactcaactgtggccagtggagcagcaaattcaggattgaagctgcttgttacgaaaggggctcatgcgcagaaggcggtcgggatatggctctttggttgtgctgcctgggtgttcagcttggtcatactgggaggtattactcggctcacacgttctgggctgtcaatgactgactggaagttcacaggggaaatacctccaatgacagacgaagcatggcagctggaatttgagaaatacaagcagtcacctgagtacaaaagggtgaacaaaggaatgagccttgaagatttcaaatttatatactggatggagtatgcacacagaatgtggggaggagctttgggctttgtatttgcgggtccttttgcatacttcattgcaagaggttatgttactcgccaactggggatcaggctgtcggctattttttatggtcaccagtgtaactaggtaatggccttatgttaactttagctcccatgtgcaccaaaccagaaatccccatagttctcacatgtgtaaccttgacacacattatcagtacttgtttttgaaagtttacatcctcgctgctgacgccagttcggccgatgaagcgccctcgatccgggaccactgcattgggttggattttgcgaacacatctacagtacagctcaatcatcgaattcttgccgcaacaacattactctctgtgggtggattatggttggctgcaaggaaaatagacatgcacccagcagtcaagtcactgatcggaagcacgcttgggatggctgctctccaggttacattgggcatatctacgctattgacgtacgttccaacctcgttgggctcagcgcaccaagctggagcgttgactctactgtcacttacgatccttctggttcacactctgagaaggccgtcgccagctcgtcttaagtcgatcgcaactgctgtgaaatcaacctgataccatttcttggattctaccatcctatagttacgagttgttgctttttttttccttttcccaccctaaggctttgtttggttactccagtattcactacaatctacatgtattaaggtggattggggtgtaaattagtttaacttacacactagtccatcttaatacatgtgaaggtgaatactagagtaacatgtaatggtgccgtgtttctttgcaccaccttaacactgctgtagcgtttcggaattgctggaaaggcatgcaagctcttgccctcggtgcgcaaggactcattggctggtggatggtgaagagcggtcttgaggaaccaacatctgagtatgttcaaccaagggttagcccttacaggctggcaactcacctgacatctgcatttattatatactgtggcatattgtggactgctttgtcagtagtgatgcctgatcctccaaccggatcaatgagttgggtaaacggtgcagcaaaaatcaggaagttggcaattcctgtcagtgctgttgtaggcattactgcaatatctggagcatttgttgcgggcaatgatgcgggacatgcatacaattcattcccgaagatgggtgacagttggattcctgaagatgtatttagtatggagcctttcgttcgcaacttttttgagaacacatctacagtacagctcaatcatcgaattctcgccgcaacaacattactctctgtgggtggattatggttggctgcaaggaaaatagacatgcacccagcagtcaagtcactgatcgggagcacgcttgggatggctgctctccaggttacattgggcatatctacgctattgacgtacgttccaacctcgttgggctcagcgcaccaagctggagcgttgactctactgtcacttacgatccttctggttcacactctgagaaggccgtcgccagctcgtcttaagtcgatcgcaactgctgtgaaatcaacctgataccatttcttggattctaccatcctatagttacgagttgtttttttccttttcccaccctaaggctttgtttggttactccagtattcactacaatctacatgtattaaggtggattggggtgtaaattagtttaacttacacactagtccatcttaatacatgtgaaggtgaatactagagtaacatgtaatggtgccgtgtttctttgcaccaccttaacactgctgtagcgtttcggaattgctggaaaggcatgcaagctcttgccctcaatgtgtttctagtgccaagtgttagaaataccccctagccctttcttttagtaattgctacattgcattgttgacactgagttagtgagttgcatgttgagcctccctggacaagatgctaataaaattcactgcctggagccaggtttgatttcgaaaaaaaaaaaaaaaaggccccta

SEQ ID NO: 119396 - DNA, 590 bp, Zea mays
  Clone ID: MRT4577_40373C.1
cctgtaaaattagattaacaagaccaacatttaaggttggctctacaacagtaagatcatcagcagaatgcagaaacttctccatctctttggccgtcactgtgtctgacgagggagtggaagaggatcacgagcacaacgacccacgaggcgacaacgagagaggcggctgcgcgtgctgaccgaccgctcgtgcacaggtcgaagacgcagcctcgcctgcttcgctggttcaccctcgtacgtagcgtcacccccactcgtgtagtcgcgcgtcacctcgcttctgggcacgtggtgtgtacactgcacaccccgtgacgccatggccagaaactggatatggtggggaagagtcgattggaagccgtagaacggacatgatgtcgtggagaagaaagattgtagagttgcgcaacaggaaggctaccctaatgtgaggcccatgcagattccatttgggcaacatccgcccctgctcgagatcatcgccttccccacacaggcttcatccacgcctagccgcatccaccgaccaagccccagtcggtgcccctttacggtgccgagcacgaagcggacgcgtgggt

SEQ ID NO: 119397 - DNA, 284 bp, Zea mays
  Clone ID: MRT4577_40374C.1
tgtttcccaacagggccagcctataaagggaggtattagagtgaggtgggggtgttaccaccccggcaaaggtaaggcaggggcaacctagtgcttgctggacgactgatgggaagttgcttgtcatttcggagaaggaagccacgaccaagcctcatgggcattgcagcaagaaataccagctaaccaacggtcgcaacaagggcccagaagtgaactcacagctgaatggacacaagtgcagccactgccaatctgtcaacatcagaacaagatcatgatcc

SEQ ID NO: 119398 - DNA, 508 bp, Zea mays
  unsure (1)..(508): unsure at all n locations
  Clone ID: MRT4577_40375C.1
tccgctngnacggttgcgtctagaatccgttcatgtctggggggggggtgaggtcgaaagcggcgagcgaattagaagagctggacaagctgtgggacgacgtggtggccgggcctcgcccggagacgggcctggagaagctccggaaggccaccaccgcccgtccggtcctcatcaacaagagaggggggggggggtatttacaagcgggcgcagtcgatgccgtcgacccccacgacgccggtgacgccgtggtcgtcgtcgtcggcgaccacggcgcgcggagcctgcaacgtgtggcgcagcgtcttccacccggggagcagcctgtgcaccaagggcatgggcgccaacctgttcgaccggccggagagcaagtcgctgaccgggtacgactggctgtacagggacgagaccaggagcaaccaccgctagatcggtcgagatggatggacagtgaagaggccatgctcgttggggcttggggatatctaaaacgcacgggtgc

SEQ ID NO: 119399 - DNA, 179 bp, Zea mays
  unsure (1)..(179): unsure at all n locations
  Clone ID: MRT4577_40376C.1
ttttgtacaacggtggcaacgccaccnacgngaaagccgcgcgcgaaatttttntgcaagngggcgaccgcgcgaacgacgcggngcgcgngaacggcgcggagctgcgctgcaagggcgncggcgaaggcggcaaccncggctgcacgcagntcggccgcatcgagttcgcgcagcgc

SEQ ID NO: 119400 - DNA, 537 bp, Zea mays
  Clone ID: MRT4577_40377C.1
ccggccgggaacttgatatctccctccctgatgatcatgatcaccacctgatgtcgctcagcgccgccttgaccgcgatcctatcttggccgccggtctgggctcaccaagagaaagtcagatcccctgcacacgacggcctaaaatgagatgtggaatgcatagaattgctctccaatgatcaccatggccgcgctgccgcactccctcctggccagtaatatctcgtactgcgaattatacgatagccgaggactgcgatgcccctacattctaccttggaccaaggacctagaagctgccccatgataccgctcacggacagcctagccagcgcagatagtgtgctagcatgacactgcatgtccgcgtagtcgagaagcatgacgaggtctcacgccgacggtctccaagtcaactatgccctggagagtatcggtgcccttcgtatgaggcaattatgtacctattttgcacgaaactcctattatatagaatggatgcatacatctactgaaagaaaacaacaatttgcga

SEQ ID NO: 119401 - DNA, 403 bp, Zea mays
  unsure (1)..(403): unsure at all n locations
  Clone ID: MRT4577_40378C.1
gccgccgtctcacactcgccgctcctcccctaggcgcagtctccacagagagatcagttcnctcnatttcctctccagcagcaacaccctcacccctcatcaacccaagccgcaagcaaaacccgcagcacagaatatgagaggagtcgccgccaccaatatctccagagcacgcccccggtacatcctccgacgatggatccgaatatgacagaagtgacccatatgttctcccgcttcaaagcagcctacgcccgcaactacctcaacacctacgtcaccctcctctcgcaactcaatgtccatctcacccaattccccatcctttcccccttgtttcatcagacacccaacattgtggaggagctcaaacttgcaaaggacatttattagcattcctttt

SEQ ID NO: 119402 - DNA, 189 bp, Zea mays
  Clone ID: MRT4577_40379C.1
cgccatcagcagctagcgcgctcccctagcccagcagagaaagtccagcatggggtggggtaatagccatgggctccaccgggggcgacgtggccgcggtggtggacgaggaggcgtgcatgtacgcgatgcagctggcgtcgtggtgcatcctgcccatgacgctgaataacgccatctatctgcgcc

SEQ ID NO: 119403 - DNA, 305 bp, Zea mays
  Clone ID: MRT4577_4037C.1
ctaatacttttatttttttaaacaatacatctaaaaaaaatctatcttacatacacatacaaagataaaagaaaacttcttctagagagaaaacttcatccctttttctgtccactaattttccaacttcttttctaaaaaaacccttacattacccaaattcatcaccttacctcacctacctctttcgctcactatcttaatacccaatattcctcaccaatcgcccttccccactttttcactaactcaatatctaatataacactccctttatcgtctcattaaacgcggcgcatatttaa

SEQ ID NO: 119404 - DNA, 1206 bp, Zea mays
  Clone ID: MRT4577_40380C.1
tgtaccagcagggcacagaatagggaagcctgcacctatgttcaagcggcgtggctttcggtaatgatgccaataccaatattcctcctgaagatggcgatactacctgcttatgaatcgacctgaggcatcagatacactctctacctgggctgggttgcaagccaaattgaacagcgaattgttaaacaacttggggaaatttcatcaatcgtgtgctaagctttattgcaaaaccagctggggctggatatgattcaattatacccgatgctcctggtgctgagtcacatccatcgacaagtgtcattgcagaaaaagttagtaaatcggttgaacaatatcttgatgcaatggaaaaggtaaagctgaaacaaggactgaagagtgcaatgggcatctctactgatggaaatcgttatttgcaggacagcgaattttggaaactttataaggacaatccagcaagctgtgcgattgtgatgaaaacttcagttggtcttgtatatctccttgcctgtctcctggaacctttcatgccttccttttcaaaagaagtgctacgtcaattaaacctgtccccagaagaaaatatttctttcagtgaagaaaatggcgaaagtgtgaaggcaaaacccctggatcttgtaccagcagggcacaaaatagggaggcctgtacctctgtttgaggaattgaaagatgaaaaggtgagtgagtatagggaaaaatatgcgggcagtcaagctgagaggaactcaaaagcagcagctgacgctgaagccaacaaagtcgctaagcaaaccaagggcataaaattatctgatggaggaacaaaaaaggaaccaaagaaacagtctggtggttcaaaagcgaagacagctgaggctattacggttgcaaaattggatattagagtgggacttatcagaaaagcagagaagcatccagatgctgattccctttacgtggaggagattgatgttggagaggacacaccaagaacagtggtcagtggcctcgtcaagttcatacctctcgaagaaatgcagaaccggaaagtttgcgtactctgcaatctgaaacctgtggcaatgcggataaagaataactaaataaataaataaataaattgcaagcaattgcgttgctgctatgtactgtaaaagtttcttataatatcagttctgaatgctaaggacaatt

SEQ ID NO: 119405 - DNA, 664 bp, Zea mays
  unsure (1)..(664): unsure at all n locations
  Clone ID: MRT4577_40381C.1
actaccgatctctactcctatagtttctatatcccccacaaaagcgtccaggtcccgcagtcacctccgattgcattgtgttgccgcaagctagacaagcatggcaagaaggactcgtttcgtggccgtcgccgccctcctcacaagcttcctctccgtcgctgccgggcagcctcggccactgcccgccgccggcctcccgggtgatcttttcgggctgggcatcgcgtcgaggatccgcacggaccgcaactcgacggcgaaggcggcgacggacttcggccagatggcgagggccacgccggaggccgtgttccatcccgccacgccggccgacatcgccgcgctcgtccggttctccgcctcgtcggccgctccattccccgtggcgccgcgcgggcagggccactcctggcgcggccaggcgctcgccccgggcggcgtcgtcgtggacatgggctcgctggggcgcggcccccgcatcaacgtgtccgcagcggccggcgcggagccgntcgtcgacgccggnggggagcagatgtgggtcgaagtcctccgcgccacgctgggaccaccgtcttgatgccccgcgagcggaccgaatacctccggctcaccgtctcctgttacgctctccaacgccataatctatgaaaaagaattt

SEQ ID NO: 119406 - DNA, 295 bp, Zea mays
  Clone ID: MRT4577_40382C.1
aaaccccaattaagacagtttttttgacaaggaaaccaccagcaggggttttttgggttgcccaaacgaaaaagcaaccaaacttaaccctttcaattttttacatacccagatggggttttggatttcaaatacattgagccaccaaacatacttgtgtttgaataaacatcctaagtccttggaaaactactccagtcctgcccgatgttttgttttgagccgttttttaaagcgacacatttttttttttgggtccaggacccccttttgtttcgcgcggacccttgtgttt

SEQ ID NO: 119407 - DNA, 333 bp, Zea mays
  Clone ID: MRT4577_40383C.1
atgaagggcaaaaagctagatgaaagctcaagctcctcaaatgaagaagaatatgatgaggatgaaaaagacgatcaagcatcaaccacatcctctgaagctgacgaagaaacgatccaaagagtcagaaaagttatgagaatgattcacaagataaatctaatagatgtgctcattcaaattgaagatatcctattcaacgttcctttcggtgacgtgcaaggcaacggtcgccctgccacttttaaggggctactaaagaggcggaggacgaagggagtgcgaagcactggacccacgaacgatgttaccttttttatctatgcaaattga

SEQ ID NO: 119408 - DNA, 139 bp, Zea mays
  unsure (1)..(139): unsure at all n locations
  Clone ID: MRT4577_40384C.1
cccacgcgtncgggctgcaacaaaagtaatgatgaaaaagagaaagggaaaaattatcaacattgcatctgtagttggtcttactggcaatggtggccaaactaattatagcccaacccaaggtggagtggttggtttc

SEQ ID NO: 119409 - DNA, 206 bp, Zea mays
  Clone ID: MRT4577_40385C.1
agactgaagcaggcgctcttggctcggcgcggctcgctgcaatccgtggaggaacgcgccgccgagccaccatcatgcctgggcacttacaggaaggcttcggctgcgtggtcaccaaccgattcgaccagttatttgattatgaatcggaccccttcgaggtgctgaaggcagcagagaacaagacaaaagaagccggcgggggc

SEQ ID NO: 119410 - DNA, 273 bp, Zea mays
  Clone ID: MRT4577_40386C.1
gtgtggggcgacctgtacatttatggggaaaacgatatatttacacaaacgatttaccatgctagtcaataactgtaatgcacttgagaaaaactaaggtatggttaaaatgattaatcgtgcctgcggcatgttcctaaatcctgatttgcagctctaggaactcttccattttaattcactgatttgaaggccttagctgttggtctaggaactcttacatttgcgcccacctgcttgaacatccatcgtattgtcttgctcgtgcccggg

SEQ ID NO: 119411 - DNA, 415 bp, Zea mays
  Clone ID: MRT4577_40387C.1
ccacacccgtccgccaacccgtcctcccgtttttaacgccaagcccccttccggggaaatggcccccaaccaagggggcagggggccgttcccgcccaaaaaaaaaacggttaaagggacaaacctttttttcaaaaaaaggccgaagcagttcggattcggggggggtgttcctcccaaaaaggacctgaaccggttcttcaaggggccaaaggtcttgcgtttccaggagacaggtccgaatcttaaaacagggctttaaggtaccaccggggttaaaccagttaacccgaaccttctacaagaaccttgttccaaacctgtttaaaatgcttttatagtaccggcctgaaaacaaggctgccaaaaaggaaaggctttttaaaaggtcccatgctgaaattgaaggaaaaat

SEQ ID NO: 119412 - DNA, 626 bp, Zea mays
  Clone ID: MRT4577_40388C.1
acaaggcaaaaggagctaaaacctttcgtgaacaaagcagagacagagaatggctggaggaggaggacaggagctgaagctgctcggtacgtggacgagcccgtttgtgaccagggtgaagctcgcgctcagcttcaagggcctgagctacgagaacctggaggaggaggacctctaccacaacaagagcgagctgctcctcaggtccaacccggtgcacaggcaggtccccgttctcatccacaacggcaagcccatctgcgagtcccagctcatcgtgcagtacatcgacgaggccttcagcagcgcaaacggcccctccctcctcgccgccgagccctacgaacgtgccgtggctcgcttctggggcgcctacattgacgacaagctgttcgcgtcggcgtttcaggccggcagggccaacatggaggaggaaaaggccgaggcgttgaagcggacgttcgcggcggtggagacgctggaggcggccttcgagggcatctccgacgggaagcctttcttcggcggcgacagcgtggggtacctggacatcgtgctggggggcctcgtaccgatggtttactacggcgaggcgcgtcatggcatcaagctgtttgacggcacca

SEQ ID NO: 119413 - DNA, 174 bp, Zea mays
  Clone ID: MRT4577_40389C.1
ttagtgcatattgggtagacactctgctgccatctattctggtggaatataaaagaacaatattttagtcaatgggacaaaacaatccctggaccatcgagacagtttattgttgctaatctataaacatgcgtatgcttatttcctatctatggtcaactgttttagtggggg

SEQ ID NO: 119414 - DNA, 1028 bp, Zea mays
  unsure (1)..(1028): unsure at all n locations
  Clone ID: MRT4577_4038C.1
gccggccgggctcggattccgaagagagcggggggaggcgaaggcaacaggttcgccgttccgagtcgtccgtcgcctgcccgctgcccgttccgggcgcctccgccccgtttcgtcgaccacctctccggcgccgccgtcctgagccgtcgcacgcgccacgggggcgcctcccgcgcgcgctccctacgccggctccgccccgccccgccgccatgggctccagagtccttcacttagacgttcctgcaaattctgaggcctatcttatgagaaatgtaccagggagtgtaagtagccctcccatgaatggtgaaaagggtctctttcgaaatcagaatgcggggttcactgcacttgcaagtcctgtgaggagagaaatcggaaacagatcgtcgacaaggtccttctgtgttgatgacaatgacttggaagatggtaaggcctcaaaagaaagggagagttctgcacagtcactcaggctcccaaagattcagaatcaggctctcttatctggtctggcttactgcatatcatcatgcagcatgatcttagtcaacaaatttgttctatctagctatggtttcagtgctccagtatttttgatgctttaccagaacattgtatcagtgaccatagtttctacactatccctgtccggtgctgttccaactgaaccattgacgtggaatttaatcaaagtttggttgcctgtaaatatcatctttgttggaatgctgatcacaagcatgtttagtttgaagtacattaatgttgccatgctgactatattgaagaatgtcgccaatgtcctgactgcttctggggaaacttattttttcaagaagcagcatggtactcaagtttgggttgctcttatgttgatgataatctctgcagttgcgggaggaataacggatctgtcattccatgcttgtggatatatctggcagaccttaaactgtngtctgacggcggcatattcgatcactcttaaggatgcccgagtttttggctggtcatcactg

SEQ ID NO: 119415 - DNA, 287 bp, Zea mays
  Clone ID: MRT4577_40390C.1
gggtcatgtgcaaacaagttgtattttctagtgcatcttaacccagtgcttgcatagttgcgtgaaacagaataatgtcgacacataacatgtatatctgtgaagtcatttccatttcccagtggcttgtaacatgaagcagtcaatgtttaataagtgatggaacatacgcatgcaggttgccaaatctcagagcaagcaaaacttcattgaaggtacaggtttctctgaaaacagaaaaaatacttagcgtctttccatgccatttcatgcctgtgttgtattca

SEQ ID NO: 119416 - DNA, 884 bp, Zea mays
  Clone ID: MRT4577_40391C.1
aattcggcacgaggccggccgggccgacgcgctcctggcgctgctctgagaactggatatgctgggcctagcacccctccgctctgcgcctcttcctatccgcgcctccgccaccgcctgcggccgaaataactcgcagcggctcgccaatggctgccaactctctcttctcgcgccagaggcggccgaaggtgacacggcgctgccggagaacatgcacaagtggaggatggtcatcgcctacgatggaacaaagttcaaaggttggcagtatcaaccatcaattccaacaatacaatattttctagaggatgcgctgatatgcatcactaagctggatcggaagaaactatgcttagtcggtgcaggcaggactgatacaggtgttcatgcatggggtcaggtggcacattttactacacccttcagttacagttgcctcagtagtattcattctgcaatgaatggactccttcctcctgagattcgagtcagggaaattagtgcagcacgtcctgaattccatgctcgctcatccacaaagagcaaagtctatcgctacaagatctataatgaagcaatcatggatccctttcataatcactatgcttatcatagtgcttataaacttaatccccatgccatgcaggaggctgcccccccctttgttggaatccatgacttcacgtcttttgctaatgctgcacataatgacggtgagcgcaggcccacaaagaagataacacgttttgatgttactgaaatgggtgctgtcttacagctcgaggttgaaggcaccggttttctgtacagacaagtgaggaacatggttgctttgctgcttcagtcggaaagaagcacttccttctgatatcgtcagcgat

SEQ ID NO: 119417 - DNA, 262 bp, Zea mays
  Clone ID: MRT4577_40392C.1
gtctcggtgtgctaaatgcgaagcctcaatcgccgaagcatcaccatatattactgctaccgccgtattcctccgcctacttaaatcctcataacatcagggttccacctactactcatcatcacctcctcatcgctcgcactacgcaagctcaccctactattgcggatgctgctttaatcagctttatgactttggctggtggccagtgccagctggctggcacacgtgcttagccgtcgtcgtcgtcgtcgtccttact

SEQ ID NO: 119418 - DNA, 464 bp, Zea mays
  Clone ID: MRT4577_40393C.1
ctaacatgattctcaccattatatctcaggttggcagtatcaaccatcaattccaacaatacaatattttctagaggatgcgctgatatgcatcactaagctggatcggaagaaactatgcttagtcggtgcaggcaggactgatacaggtgttcatgcatggggtcaggtttaataaacatactgcataactgtatactgaagcttaaattgatatctatcatctggtttgcgtatcctgcactgttaaatgtcaatattatgttttatatgaaatactgggggattacatacaatatttgttggtttcaggtggcacattttactacacccttcagttacagttgcctcagtagtattcattctgcaatgaatggactccttcctcctgagattcgagtcagggaaattagtgcagcacgtcctgaattccatgctcgctcatccacaaagagcaaagtcta

SEQ ID NO: 119419 - DNA, 642 bp, Zea mays
  Clone ID: MRT4577_40394C.1
ggccgcttttttttttttttttttgcacaacaggctcgcatgatgcattattaaaattttgcagaatatacacactacaggcagtacacgttcacaggtaaaatagaggcacatggcctaaagacacatgatattaagcagacaaacttgttcacagtggacaaacaccgactttttgccattcatgctctgagcatgatttaaaggcaacatacttgagaggacttattagctaccgcagttaacacgatggatgctccaggcttaccgagctggaacttaaaattccctgacttgaaagaggacaggggccccagggaaccatatgaacagacctgcctgcctacactgggttgcgatcctgacccaaacagacggtcacccaacatgcacaagctttccgctttcaacaaccggagctggccaagcatggaagaacattggcccaaacatgctggccagggcttatatgaggggagcgagagaggcagatgcatgtaccggtctacgcacatacttcttatcttcttgcacagtctgacttgctgaatggaaccaattggttgatgagcccacatggcgagtctggggtggacagcacaacagccgaggatcctgaggggaccgtcaaataggccacag

SEQ ID NO: 119420 - DNA, 819 bp, Zea mays
  unsure (1)..(819): unsure at all n locations
  Clone ID: MRT4577_40395C.1
cttgccgggctcancaatcacgccatagcagctagaaatgaaacaatatatatggattaacatatagcacttgctatagatattgaggatagaaaccattaggatatttatacataggtggggggcctcggccacatggttaggagcggatcctgatatgttgacttttacaaatatcctatgggagtatgggtaatttttttggaggttctagatgttccatgtattagggagtaggctcccatattccggtcgaactaggcctttcttgttattcatctcaaatgtattgacagggaacaactatttatcaatttgcacatcttcaaatatcaactgaccttcatttattgtctattgtatccaccgatagaaaacattgcaatcgatggtggcatgaaaaaaaggagttatgcaatttacactaagcacgccttttcaattcatctgttggaggaattgtgtgggacaatttaatgtttccgctcttaataatttatcaaatatcttgtcacacttagcaacattgaatgtgaacttaacttctctttgtcgattcttttgaaccgactgcagggaagagcaagtgggaagttttgtccttagctgaccaaacaagttcgtcaacatatacctcttttggctcatcatttgagctactactgtcatgacacgtattatgatgagatggctcttgaatttctatgcttcggctttcataagccaaagcttgatgatgtaactaagctagcgaaaagaactgtgtgctaccttaattttcttttaagtatggacgcaacccattgaaagccactttgc

SEQ ID NO: 119421 - DNA, 690 bp, Zea mays
  unsure (1)..(690): unsure at all n locations
  Clone ID: MRT4577_40396C.1
aattcggcacgaggctacattgcctgggcacgcaccttgggggcaacgacggtggcggccctggcgacgaggctggacctcgccgacggtcaccgtcgagagaagcaagtgcgcaccgatggaggccttccccttcgcagcgaaggctgcggcaccgacccccgcgccagagacctgcagcgaaccagcgatgccattcctcgagcagatgaaccctagtggatagcacagaggacagcacagcggaagcgagctgcggaagccgtaggctcgtagcgcagccggacgcggaagcgggcccgcggtgtagtagccctctttatcctggatgggcttcgtaccagcccatgaaactctgggctgaggaggcagtcgtctcactgggactggacctctgcctgttagtttagtttcctcgtcgcgctgggccgccggcttccgccgttccgcggcggagggaagccatgggcgccgccgtcgcanggtggaccgtggcggcagtgctgcttcaggtcgccggcctctccctcttcctctacggattcttccccgtgaagcccacactgcgtggcttcagtggagcggagagctaccgggtgccttcctgcggttccgntagtgctggggagcaggagcccgcgcttcccccgnatcagctcagatctctgtacaaggaactctctgggatcc

SEQ ID NO: 119422 - DNA, 495 bp, Zea mays
  Clone ID: MRT4577_40397C.1
cgtgccgcgaatccgtgcctattttggtgtgatcatgagtcatgaggctgtggcagctgtgttacttttcggtgcagtaggatgcacgtgcggaaggagattggtttggcgattggggctgcgaagtgttgatgcacctgcacagcacatggttgttgatactcaattttgggtggcctttgctgagatttttgttcagatttttgtccttaacatacgggaatggaacttgtagcttgctgacactgtattgatccggaatgagtttcaagtgcgtttgcgtgcttttcgagggctctttactggtggccgtgataagtctcagaggcttggtttgtatcagcccagatgtttttctgtttacgatgcagtgtttgtttagagtgatactgatgtaatggaaataaggaactgtgtgtaatactagaatatgcttttgaagttgacatatggtgtcatgtgatgtagaatattctacatcattcctgttattac

SEQ ID NO: 119423 - DNA, 307 bp, Zea mays
  Clone ID: MRT4577_40398C.1
ctagatatggatttttttatttttggggcttttttgacgttgttcaaaacagaaagggacccacttttcacgatttggtataacatcaaagggaatccaagggcaccgcaatacaggcacacactggggacatggtcaacaaatttaagaggggttgcggacaacaaggcccttatacaagggctccggattggaacattgcgacaaaaaaaatctagaataacttgaattcgaggccacatgggatgggtgttccacatgagatagctcgctcaatgggaggaatggttgcagctgtaaataaaca

SEQ ID NO: 119424 - DNA, 294 bp, Zea mays
  Clone ID: MRT4577_40399C.1
gcattccaaacctggaagttatggactggtctcttaatctgcgttggttatggctgaaaaagactcaacctgattgcctgtggaactcctttgaagtccaagttcatcctaacgccgctgcaatttttgctgtttcaattcagtcaatagtgggcaatggaacaagcaccaaattttggacagatcgctggttagatggtaggagaattgtagagttggctcctaacttgtttgctgctgttaatagaaaagcagtgaggacgctggctgtccatgaagctgttatgggtgata

SEQ ID NO: 119425 - DNA, 521 bp, Zea mays
  Clone ID: MRT4577_4039C.1
accacctcctccgcaaacaacacacgaacaccgcaccgcaacgtagccggctaggggaagagctctttccttcagctgtgccgtgcacaacgcacggcacgctggtttggtttgcatcgcccccgccaagacgctgccgtgagcaggcagagcgggtgggaagactggtgggcgagccggccgcgccgagggatagcagcagcagcagcaggcgggcgacatgccgagcggcggcgtgttctccgggtcggtgaacctcaagcacgccaagctggggtaccagtacctggtgaaccacttcctgacgctgctgctggtgccggtgatggccgccacggcgctggagctggtgcgcctcggccccggcgagctgctctctctgtggcgctcgctggagctggacctggtccacatcctttgctcggtgtttctggttgttttcgtccgaccgcgtccctgatgtctcggcctatgccggtgtccctggtggactacgcctgctacaagccccccgccagctg

SEQ ID NO: 119426 - DNA, 365 bp, Zea mays
  unsure (1)..(365): unsure at all n locations
  Clone ID: MRT4577_403C.1
cagacacatgggccgacacaaaaggaaacttgaagacaaggtcttcggccccgatgccttcgctgctcacctcacccgcctgcctacccttcgccgtacactctgctcgactnctgcatcggagctctccaccgtcgcggacccttcctgcaccaccgcgacgccgactcggtgcacttcctcgcgccgcgcaagaagacccgaccgcccctcgcgatgagctggcttgagaagctgggtctgagcgggcttggaggtagcccgcgcgcgtccgacgcgtcggcagcgctggcgcacgggcccgacgaggaccaggccgcgccggggaacgagatcacgcaattacgcgccggctgcttctgggg

SEQ ID NO: 119427 - DNA, 534 bp, Zea mays
  Clone ID: MRT4577_40400C.1
cggacgcgtgtgtcggggatattgataaagatgttagccatagaatcaaatcaggtgcatgaagtggcgttaagcatatgttctatgtgacaagagggtaccatagaaactaaaaggggagttttataggacggtgattaggcatattatgttatatgcagaatgttagcctacaaaaagacgacatattcatcagataattgttgtgaaaatacatatgtccaaaggagacctgtagaagaaccaatgtattatggaatcctaaggtgtgttagtaatatgaagagaggtaggggaagactgaaatcaacatgagagatgcagtaaaaggggacttggaaggatgaaatatacgtaaaaatttggccttgaaaggagtgcatggaaaacaactatctatgtctgaaccttgactttggtttatattgggtttcatctatagcttaccttgcttgtgactaaaaggttttgttggtggtgtcataaacatgttcatgtcgctattttttgtgacatgcaatgatgctatttgaa

SEQ ID NO: 119428 - DNA, 352 bp, Zea mays
  unsure (1)..(352): unsure at all n locations
  Clone ID: MRT4577_40401C.1
ctccatttcgatcccatttgaaatcaacccatcctcaggtcctgagaatatcaggctctaccctatggcaagatctatatcagagatcagtgggctcatctggatcggaaagctggtggccaaggtggccctgcatagcgacgacgtggagctgcgcggcgcgaacgatcccttcatcagctacgattacatgagctacatgttcaagtatgacactgtgcacggacagtgtaagcaccatgaggttatggtgatggactccaagacccttatttttggagagaacgatgtagcagtgntagcctgcatgaaccctgaggagatcccatggcgttcccttgacgctgaatat

SEQ ID NO: 119429 - DNA, 561 bp, Zea mays
  Clone ID: MRT4577_40402C.1
cttttctttgagtgattttgttgcaaattttagcacagttaaatgaaattatttggaattaaactaatgcttctgttgtgggaccttgcaatctgcaggcttcacctccatactttatgggatctccatcacttcgtgcaaccaatcctcttgctcatgatgcacaattctgtgcgtggaaggtgcacagcgtagatcagtcactaggaattcctataccagccaagagttacaatgctcgctactatgcaaggaaagaatcttttaggaaggcttgaagctactttttgtcaagttcatgatcgtcagtgatgtcatagtcgtatctccgcttctctcagcaaggctaacttgtttacttgtatatgagtggctgtcccttttgaaggtgtgagttgtcttatttgagtgtttagagtatctcatccctagtgttgtaaatatatttctttgctcattttttgttagtggagctagttttggtgaataagtactggtataaagtataaacagtgttgctgagtaatgaggtaatctgaatgaaaatgtttgccattcttc

SEQ ID NO: 119430 - DNA, 211 bp, Zea mays
  unsure (1)..(211): unsure at all n locations
  Clone ID: MRT4577_40403C.1
gctgggggtgttttttttttttcctttctctttctggggttgtttctttctgtcttcgggctctttttcaggccgatccctttgtggttgtgcctttgctgggcgctgcccccttgtccttgttgggcgttgcccctgtctgcnggcggtgggtgggggggggtcctgctttcttccgtggtcgttgtctgccgcttcccccctcgcggtg

SEQ ID NO: 119431 - DNA, 200 bp, Zea mays
  Clone ID: MRT4577_40404C.1
ttcttcccataatgtgcgtccacctgtcgtgctccttcaaaggatgtgtaaaagggggagcgatacatgttggggacggtctacctactaccgccgccgagctcgttttgccttgtgtctttggttggtatatggccctggctccaatccaggcttaatattttattgacaggcctttcaaaaaaaaaaaattttttaaa

SEQ ID NO: 119432 - DNA, 1129 bp, Zea mays
  Clone ID: MRT4577_40405C.1
cttttcttgaggtgattttgttgcaaatttttagcacagttaaattgaaatttatttggaattaaactaatgcttctgttgtggtaccctgcaatccgggaagtgcttcttatcctctcgcagtctcgctctcctcgcgtcgcagccctcgtcgcataggcgtgcatcctctcccggataaatacctgggggccagcccggctctcctcgcttttccttgcacgcacgcacgcacgcacgctcgccaagagcaaaggcggccggacggggggcggcgggggcggggcagagcggagcggagcggtttgtctccacgcctgacgtctccctcttccccgctgtccgcagcttcggtgcttccttctcccgttcaggaccattgtgtttactgaagcagcttagttcatgttcctgtcatgggtatggaacatttcatcagttctgcaaacctttcagcagaaggtttcacatcgtatggaaatgaagcagcagaggaaatgaaaaaactacgaggtctaagattggaaacactgatggaaacctgccaaaacacagaaagcagagatgtagcgatcaggtgtccaataccatgcaaaagcagcaggcggtatagggaacatgacttgagagctgcacaagatctttctgaattcattgtgagtaaggcttcacctccatactttatgggatctccaccacttcgtgcaaccaatcctcttgctcatgatgcacaattctgtgcgtggaaggtgcacagcgtagatcagtcactaggaattcctataccagccaagagttacaatgctcgctactatgcaaggaaagaatcttttaggaaggcttgaagctactttttgtcaagttcatgatcgtcagtgatgtcatagtcgtatctccgcttatctctcagcaaggctaacttgtttacttgtatatgagtggctgtcccttttgaaggtgtgagttgtcttatttgagtgtttagagtatctcatccctagtgttgtaaatatatttctttgctcattttttgttagtggagctagttttggtgaataagtactggtataaagtataaacagtgttgctgagtaatgaggtaatctgaatgaaaatgtttgccttcttc

SEQ ID NO: 119433 - DNA, 548 bp, Zea mays
  Clone ID: MRT4577_40406C.1
ttttttttttttttttttttttttttttttttttttttttttttttttttttttttttttttttttttttttttggtttttttttttttttttagaggcagaactggaaccttttaaggacgacaaaacttttttaaaacaacttatcaaaaatttttttttttagggcattggggatacatgtttttttacaggtttgcccccagattctgattaaaagctcccaagcagctttttgatatccttttcaatgctcaggggggaagggggtggagcatagcgatccaaaaaacgtcccttcttggcaaccaagaacttggaaaagttccacttgatgctggcgccgaaaaggccccctttgcttgatttcaaaaacttggggatgggcgccgcattgtttccggtgacatcaaccttggggaagatgggggccccagccttgaagcgggggccggcgaactgggcaatcttctcattggttccaggcttctgcccaccaaactgggtgcgggggaaagcccggatttcaaagccttgggccttgaact

SEQ ID NO: 119434 - DNA, 506 bp, Zea mays
  Clone ID: MRT4577_40407C.1
atgggaccaattttgggggtacaacaaaccaatgttccaaagtttaaacttgcccccccaaccgggaattggggggggggggcgtaccccaaaaaaattgttatttgtgaaaaaaaaaaccggtttaaaatattttaaaaagatacattacgcccacattaactttggaccttaataaaggggttttggacccccccccttgttttttgggacctcccccctttcagggaaaataacttaagctcgctttggttcggaatcaatcccccaataaaataaaaagcaacaggttcttcaaaaacgtggtttttacccgggcttgtttccggttaaactccttttttttatttgggagggacgagtcgatacttaattttcgggcctgagggggccctttttttaccggggttggttttttaggaatggaaacaggccacttggatgcttgctccccgtttgagggggggaagcccagggccaacgaccaccgaagaggatccccccaa

SEQ ID NO: 119435 - DNA, 201 bp, Zea mays
  Clone ID: MRT4577_40408C.1
tctgttgcgtgggcggacgcgtggggggactcgtgggctctccggcacacttctgatggaagagggcgactagatcctttgcaactctaatgaaacacgtcgatcgcaacacttacgactgtgtgctgctgatcgtaccactcgggactgtcttcacaggcaagcgccattgccgtgacggcatatttgagaacgcggaag

SEQ ID NO: 119436 - DNA, 312 bp, Zea mays
  Clone ID: MRT4577_40409C.1
ttgtctgttggatctctagcactgatgaagacatggaccttttttgaaacagctgctcttcctcgaggcgggattttggtagcagttatttactaagtaagacaccttgcggtgaccattgatgagggaccaatcaccctgggtagggcaactgttatctgcacgaactgatgaggccgctcggcaggaggaaagagcttttgctgggaacgattgttgtttagcgccgatgctgcatgattatcgagatacctcaacgattgagctttgggctgtcatgcggccacatgaatttgaatgtggaggcataag

SEQ ID NO: 119437 - DNA, 787 bp, Zea mays
  unsure (1)..(787): unsure at all n locations
  Clone ID: MRT4577_4040C.1
cattgggtacctcgagccggccgggaacccgccgccgcgccgttgacttgaacggcgctgctgcttccctccaccaagaagctcagctcccgaccgcggcgatcggccgcgcgggccgcgacggctagaagctcggttcttccgttcgcccatcgcaggctcctcgtgccggccgatctaccaccgctaccgaggaaagcgcgaggccgtccggcgccggccggaatccatcacgatcccctggtaagcagagtcgcagagaacacctcacccccttcatctgtcgatcagccacacatctccgtttctcaagtgttgcaaacagaccgacgctttcctgttcctcctcatcgacgaagatctataccttggcaccagcgatggcgtcgtcggcttccggcgggcaggggcaaggcaggcgcgtcgagcccgtccgcgccgccaccagcatgggcgctctgcccctgcacgccctgccacgacatcctgctcccgcctccggccaaagaactctgccgcctccgctcggtgtgccggccgtggcgctccctgctctccgaccccgcgttcgccgccgcccacgcagcacgctaccccgagccactcatcatcgtcggctacaactacaacgacagtcctccccctccagagagcgacgagcgtgactggacgaaaccaaggaggtaccaatgcgtcatcagcgtgatggatctgacgggacacgtggtgaagaacctgcgcgtggacggncacatcgcgagcatgtcgctcagcctcgcctgcgtga

SEQ ID NO: 119438 - DNA, 308 bp, Zea mays
  Clone ID: MRT4577_40410C.1
cgccattcccgcctagcttttcttccgattgcttccagaaaatcgttgagccctcgctgacgtacggctgcgaccgtggggacgacgggctttgatccattaagcaacttaccaccaaatcaaaaggaggggagatgtgagacaaaggacaggagcgcctagcaaatcaaaaggagctggaaaacgaaccacgggaaggcaggatgatggaaagggacaatcgtcttcctaagcggttcgtaaccgagaaacgaattattgaggtgacctaaaaataaaattggggccggccccttgggtctgaatcg

SEQ ID NO: 119439 - DNA, 333 bp, Zea mays
  Clone ID: MRT4577_40411C.1
ccggcccgacgcacgcgtccgattagctttatctactctttagcgcattttaacccgatcgacaccatgggggtgttgcgcgatgctcctactctcctggctctctctgcaaccgccacctacacgcatacaagcggctgctgcggctgccagccaccgccgccggttcatctaccgccgacggtgcatctgccacctacgtttcacctgccacctccagtgcatctcccaccgccagtccacatgccaactcctgtccacctgccaccgacgatacatgtgccaacaacggttcatctgacgccgtcaccatgccactaccctactcaaccg

SEQ ID NO: 119440 - DNA, 724 bp, Zea mays
  Clone ID: MRT4577_40412C.1
gatcatttttctttccaggagttccaactgaagattataatacccctggagaatctgctgagtatcgagctcctacacctgctgttggaacaccaaaaccaagaaatgatgctggagatgataatgatgatgacgatgatgatgaagaacctcctcttaatgaagacgacgacgacgacgatgatttagatgaccttgaggaaggggaggatgaacctaacacacaacatcttgtacttgcacaatttgacaaagtgacgaggaccaagaatcgttggaagtgcactttgaaggatggaatcatgcatttgaatggtagggatgttctatttaacaaggcgacaggtgagtttgatttttgactttttggatgaagatgagctattttagaagcagctgtatggacatatcttgtcttagacataaggacggggaggtgacgaagtgttcttggtggggtgctggcagtatgactgcgtcgtgttttcctattgagactttgtttcaccctcttgtttgtcaccgcaattgttcttgtttgcttcagtgcggtaaagaagttaccgcttgcgctgtggacattttctgagatgggtgtctcacatccgcagcgtaactaatgctagttatacatttttgtctctaaagtcagttttggtgctgtatcatgttcttccggcgctcttgatggccgtagtggtgcgtatgcggaattctttctttt

SEQ ID NO: 119441 - DNA, 1786 bp, Zea mays
  Clone ID: MRT4577_40413C.1
ccgcgccccctctccctgacgccgcgatggccgcgcccctctccctccccgcggcgtgatgcccgcagctccccctaacctggtgcccttgctcgagcgggtccgctcctccgcaaccccttcccctcccggccggggtgcaaacctatttatattctgtccttaattccccatctttctcctccgccttcgcctcctccgcatcccctcgccttcctccgcccaagcctctgttctcctccggctgccgaaaccctagccgcctccgccgtcatggcgagcagcaacgtctccaccgtctacatctccgtcatcgatgacgtcatctccaaggtccgcgaggatttcatcacctacggagtcggcgacgccgtcctaaacgagctccaggctctctgggagatgaaaatgctgcactgtggcgcgatctcggggaacatagagcgaaccaaggctgccgcggcttctgccggaggcacctccggcacgacaccgccagtgcacgacctcaacgtgccgtacgaggccacatccgaggagtacgccaccccgaccgctgacatgctgttcccgccgacaccattgcagaccccaatccagactcctttgccagggacagacacagggatgtacaacatacctactggcccttccgattatgccccatcaccgatcagcgatatcaggaacgggatgacgataaatggggcagacccaaaagctggccgtccaagtccttacatgccaccaccttccccttggatgaatcagaggccgctgggtgttgatgtgaatgtcgcttatgtggaaggtcgtgaagatcctgacaggggcgtgcagcctcagccactgactcaggattttttgatgatgtcttctgggaaacgcaagagggatgagtatcctggtcagctcccttctggttcttttgtaccacaacaagatggaagtgctgatcagatagtagaatttgttgtgtcaaaggaaaatgcgaatcaactttggagttccatcggcaataagcttgaaacaccaaccaagacaatcactccagttattccgcagcgtgatgggattcaagataactacaatgatcaatttttctttccaggagttccaaccgaagattataatacccctggagaatctgcggagtatcgagctcctacacctgctgttggaacaccaaaacaaagaaatgatgctggagatgatgataatgatgatgatgatgatgaacctcctcttaatgaagacgacgacgaggagttagatgaccttgagcaaggggaggatgaacctaacacacaacatcttgtacttgcacaatttgataaagtgtcaaggaccaagaatcgttggaagtgcaccttgaaggatggaatcatgcatttgaatggcagggatgtcctttttaacaaggcgacaggtgagtttgatttttgattttttggatgaagatgagctattttagaagcagctgtatggacatatctttgtcttgacataaggacagggaggtgacagtgttcttggtggggtcctggcagtatgactgcgtcgtgttttctttcctattgaatcttcgttccaccctcttgtttgtcaccgcaactgttatcgctgtaaagaagttactgcttgtgctgtgtagacattttctgagatgggtgtctcacatccgcagcgtaactaatgctagttatacatttttgtctctaaaaaaaaaaaaaaaaaaaaaaaaaaaaaaaaaaaaaaaaaaaaaaaaaaaaaaaaagcggccggg

SEQ ID NO: 119442 - DNA, 688 bp, Zea mays
  Clone ID: MRT4577_40414C.1
atccgcaatcttcaatctccccagtaatccctaccagaagccttccatcctcgctcgctcgatggaccgcacgaaggagacgaggagcgaagtccaccgcgcggcaaggcgccgagagaagcaataggcgactaaggcggaccgcgagtctgcccctgcgaccgacggaggtaagaaggcccaccgcttccgccccggtaccgtctcgctcagggagatccgcaagtaccagaatagtacagagctgctgatccgccagctggcgttccagcgcctggtgcgggagatacgcgctggacttgcgaagaccgacactacgcttccagagctccgctggtctctgctctgcaggactgcggcctcgtagggctaccttgacggtctctgctaggacaccatacctacttgcgccatccacgcctggcgggtcaccatcatgcccaaggacatccagcttagtcacgtccgcatccgtgggagagagggcctaagcatctcatattctgacatcagaggccgatcagaagatgaagagatgtgcctggaatctgtgatattgagtgactgtggaatacatgccaatagatgactgtgcactgctgtgacttattatcatgatgcatattgaaaagacaatgaacgtatgttatcaaatcgcgaaagaagagctgaagaaggacactgcgtg

SEQ ID NO: 119443 - DNA, 423 bp, Zea mays
  Clone ID: MRT4577_40415C.1
tgtcaaccccaatcccaggtccaggttatcacaatccaccccccttagaagactgacgtcctcgtcggtcaaccccaatccaggaacctccccacttagccacgtctgtgtctagtgtcgtcatatgtcatgccatgtgatcactccggacccacatgcgccatacgccatatacccgaaccctgtagcccacacacgccgtgaaacctcgagggtcggccacccatcccaaattgctccaaggcaagcacgcttaactgggagggttctttcgagataggtctttcgaaaaagaagatgcaccttggttggtatggatactctattaattctattaagccttaggccaggacatcaccatcccagggctaggatatcacagtttaaacggttagtaatggctatagagcacatcatttgtat

SEQ ID NO: 119444 - DNA, 292 bp, Zea mays
  Clone ID: MRT4577_40416C.1
ggcaggccagccaggcacctctggttggtctccatggccgccgagctcaggtgcccgggctaggacaaggtctagagccccgccgccgactacaaagcgcgccaggcgtccagagtcgcggtgagcgggttccagcagtattcccggagccgtgtcgttcccgtggccaggcgggcgtttgtgttgtcgaccaagcccgcggacatcaatgactcgcgggcgaccaaggggcatgagctgtgcctgtaccagatgaacgagcgggaccatgagagcaacgcgtacctgcacc

SEQ ID NO: 119445 - DNA, 198 bp, Zea mays
  Clone ID: MRT4577_40417C.1
acgatcgcaaccaaatcaagttacaaataaagtggataaaagtcgaccatgggcgaaggcagggaggaaattatgataactacactaactagcacatactggagtacatgggtatgactgcgaatatggctaagaagcaccttcttaaagtaatgatgaacaatgtatgcataatacaggatcgttgcaacagtactc

SEQ ID NO: 119446 - DNA, 588 bp, Zea mays
  Clone ID: MRT4577_40418C.1
cgcggctgggatctagcacgctagcgagcgagagagacgcacatctatctgtcaagcgacgccgcggcctcgatcagagtcggaggcgaacacccccatggcggcggctggcggcggcgcaggagggaaggttcagcgtgcccgaggcggcgccctttaccgcggtgctcaagtacgccgcggaggagttcaaggtcccgccccagaccagcgccatcatcaccaacgatggaattggcatcaacccccagcaaagtgcaggcaacgtgtttctgaaacatggttcggagctgcgtctcatccctcgcgatagagttggagctgtagtcatgtcttccggttagaggatatatacagtccaatgcataatgagcaaaacttgagagaaataaagctttgatgttggccttgcttggctgtaggatgttgttacaaggataataagcgaaccttaccgtacatgtctcaagttgtatgctctctgtttgtatgtggagagatttctgaaagtgaatccagtatctgaatcgactcaattagccgctttctgtctccacagagcgatatgatcctgctttgctcgcgccc

SEQ ID NO: 119447 - DNA, 753 bp, Zea mays
  Clone ID: MRT4577_40419C.1
gcgtgagttgtgaaagttgagacgcctcagaaaaacgcaacccttttttgggctttggcttttgctgcaaacaaaaggcgacgcggctgggatctagcacgctagcgagcgagagagacgcacatctatctgtcaagcgacgccgcggcctcgatcagagtcggaggcgaacacccccatggcggcggctggcggcggcgcaggagggaaggtatccttcaagatcatcctcacctccgaccccaagctccctttcaaagtgttcagcgtgcccgaggcggcgccctttaccgcggtgctcaagtacgccgcggaggagttcaaggtcccgccccagaccagcgccatcatcaccaacgatggaattggcatcaacccccagcaaagtgcaggcaacgtgtttctgaaacatggttcggagctgcgtctcatccctcgcgatagggttggagctgtagtcatgtcttccggttagaggatatatacagtccaatgcataatgagcaaaacttgagagaaataaagctttgatgttggccttgcttggctgtaggatgttgttacaaggataataagcgaaccttaccgtacatgtctcaagttgtatgctctctgtttgtatgtggagagatttctgaaagtgaatccagtatctgaatcgactcaattagccgctttctgtctgcacagagcgatatgatcctgcttcgcgctctgtcagttcaaaagtatagaaatgaggtgttcttccct

SEQ ID NO: 119448 - DNA, 298 bp, Zea mays
  Clone ID: MRT4577_4041C.1
acatcttaccaactaacccttccttgaagttccctgcctttcaaaaaaaagcgcggcgcatctatctttttttttctattatacagcacatacacacacttgctgtgcatcaaaggggggaaatacaccctttgaacaacactgaccaccaatacaagcacaaagaaggtgctgggaaccctcacattttaaacttcacgcaccccccacccaaataccgagcgttttcctccaaaccaataaagcgggagctttttacttccacagttcaagcatatcatttatccaccatgtttca

SEQ ID NO: 119449 - DNA, 744 bp, Zea mays
  Clone ID: MRT4577_40420C.1
ccggggtgagttgtgaaagttgagacgcctgagaaaaacgcaacccttttttgggctttggctttttgctgcaaacaaaaggcgacgccgctgggatctagcacgcgagcgagcgagagagccgcgcacctatctggcaagcgacgccgcggcctcgatcggagtcggaggcgaacacccccatggcggcggctggcggcggcgcaggagggaaggtatccttcaagatcatcctcacctccgaccccaagctccctttcaaagtgttcagcgtgcccgaggcggcgcccttcaccgcggtgctcaagtacgccgcggaggagttcaaggtcccgccccagaccagtgccatcatcaccaacgatggaattggcatcaacccccagcaaagtgcaggcaacgtgtttctgaaacatggttcggagctgcgtctcatccctcgcgatagagttggagctgtagtcatgtcttccggttagaggatatatacagtccaatgcataatgagcaaaacttgagagaaataaagctttgatgttggccttgcttggctgtaggatgttgttacaaggataataagcgaaccttaccgtacatgtctcaagttgtatgctctctgtttgtatgtggagagatttctgaaagtgaatccagtatctgaatcgactgtaaatgatgattttactcggattccccttcagaacatcaaaatggatgatgcaaattcgagtttctgatgtgagg

SEQ ID NO: 119450 - DNA, 388 bp, Zea mays
  Clone ID: MRT4577_40421C.1
attcaacaacggcaagagtaatactgatgaagcttgttgctgatcattacatccaattattgcatgcaaagatacacatgcatggaaacgaacatgcaatccaaaagctacgccaaggcgacgctgtctaggcggacggcgttgacataatgcctggggctgtgcgactcgatgccgggcacagagcaggccggtagcgcggtagagcagcttagacggcgccctcgaggtatgtccttgccctccttggcccatacgaaggcgctcttgaagaggtcccccaacgcgttgccgaacatggacagtaggtacctggggtcagaagtacttcctgttgggcgcgatgttccgcttggctatctggcggcccttgcaccagccgtcgaag

SEQ ID NO: 119451 - DNA, 325 bp, Zea mays
  Clone ID: MRT4577_40422C.1
tccgagccacgcgtactatcaagcatacatagcggcgaccgtgttaactttagacgaccaccatctgggggaactctaggtatatctatgatcacaacatccatattcttactctgaagacagatcaaaagtctttgaataaggtgcaaaatgctgtctcacatgacactggtctagatgatctattcggaagtgaagaggaaaacgaagtgtaggctacatgaacctgggcacagcgactagaataggaatgtgcaaagcatgccgaatccgacaatgaagaccaaaacagacaacaagtatacagtctagaagacgctgaaaa

SEQ ID NO: 119452 - DNA, 161 bp, Zea mays
  Clone ID: MRT4577_40423C.1
gtggggggggttctttttttgggagaatcttccactcattttttttttgaattgcccattaatatgctcaggtgtgcaagagttcctaattttggctgtttgtgcctacgaaatttgaaactttgaaacatccagggcagggggtttcgttgcaaatagat

SEQ ID NO: 119453 - DNA, 580 bp, Zea mays
  Clone ID: MRT4577_40424C.1
gggccaaaaaaacccaaggttgggggggccttttttccgggagggaaaaaaccccctcccggggaaaagggggtggggctttggggggggttttttaaaaaccccaaaaggccccggggcccggggaaaaaagaaaacccccaggggggggggctcaattttttttttttgggggggggccccctttttcgggggcaggccccccccctttttggggaacccccggggggggcccccccataccccccctaaaaaatccttttggaccaagcgggttcccccctaatttttaccggaaaaacgggggggcccccggcccccaagggcccctgggccgtttgccccccaaaggaaggggggcccccccccccccccccgggggggaccccccccgggggggggcgatttttttttgccccccttggggggggaaaaattacccccttaaaatttttccttaatttaacccctataggccccgggcccccaaaaaagcccccggaggttttccccgggggaaatgcccttttgccaggggctttttacccttttttgggacaaaccagggggcccggggacc

SEQ ID NO: 119454 - DNA, 335 bp, Zea mays
  Clone ID: MRT4577_40425C.1
cgcggcgggtctgctgtttctgttgcaagagctgcaggctgcgggggatgaactacctggggggggacctcaagcgcgggaacttcaccgacgacgaggacgagctcatcatccgcctgcacgccctcctcggcaacaagttcgtgagccgtctgccgtctgtcgacgagacagcgtccttcttctctgtgtctacctttattttctcgacggcgctgcctgacgtcacgcgccgcgctcgcaggtggtctctgatcgccgggcagctgccgggccggacggacaacgagatcaagaactactggaacacgcacatcaaacgcaagcttctggcc

SEQ ID NO: 119455 - DNA, 974 bp, Zea mays
  Clone ID: MRT4577_40426C.1
acaaaacatcttattatttctaaaaattgaaggttattacttaggaagagttacatttattacaagtcctgatatactcaaagtaggaggggggaacacttacatacaaaaccaggaaggtagaaccttccaaagctcacacctaaacctaactaatcctccttcaagactagaagcattttccagccacagagacacctagaacactcctgattacctttgttgcagagaagaggcttcagatccctctatccaatacccagatagatggctcctccacttgatcagcaaccactggagtagactcctccttcaaacaccacttcaagactttggcgctcgtgtgaagacggctggagaaagcgcgagttgctcggccagcgtggaggctgtccgcagtgctagatcacgacggcacgacccttcttgaatcgctccggccacggcaaggcggcaaactgaccggagtggtcaccacaacaacagttgatggtgtgcccagcctctgtacagaccaaattttggtggctagggagggagctgtgtagacttaagaacatcaggaacacctcgcatatgcaaagagtcttggctggaatttaagggcagtgaggagctccaaaataactagccccaaattacagaatatgtaagcaagggaaaggggtgtgtcagtgagcgtatctagtccatggggaagtgagcgtatctagtccatggggagaagggttctgggacagggcaaacctaggctgcagagagggttataccagcagtacacaaggactgcacactcaaacagtgaactttgactagaatttgagggcaaggaagaaatcttcactgaatacggcagcccaaggtactgattatagggggcagatgcagtggttcttgagctggccagaacacagcaaaggagagctccaagcggacgcgttgtcgacccggagcttcggaccgtactgcagcgt

SEQ ID NO: 119456 - DNA, 341 bp, Zea mays
  Clone ID: MRT4577_40427C.1
cggacgcgtggggttgccaaagaattcccttccctagccgtcgtccgcgctcgtctggctgggaagttcccggacccgagattttgcccaattcttaggttaaaaatcggtttacctggcttaaccccgggtcttcttcctttggttgttgttaaagggaaaaaattcttagatctgttccggatcaagcgttccaactcgggaatcaagggtttcacacatatatttgtccatttgaaaattatgtactcaaggggtctaaaggtggcaaaaagtctagcaattgtcgttctatgatgtatgaagcttccctttgctacaacatttaggacgttcgacct

SEQ ID NO: 119457 - DNA, 440 bp, Zea mays
  Clone ID: MRT4577_40428C.1
tttcttttttttttttttttttggttgttttttttggggttttcttcgttttttccccatttttttttttttttttaaacaacaacccttgaacaagggccgggctttttttccctggaaaaaacccccggcttggagcccgaaaacccgcatcccgcccttatttatcaacttgggaatcgaaacatagcatgcgggcctaacatctaaagggggggcttaattaaaaacagcggcaaaggcaatggcaatggcaggcaattttagggcaccccccccggggccgtgaccaaaagaacccccccggggggcccaaaaaataagctttcaaaaatcaaaaacgggccaaccctgggaaactccccgacattaggagaccccccttaggtcgggagaacggaatcccttttactggcccctgggggcggattctttggggg

SEQ ID NO: 119458 - DNA, 409 bp, Zea mays
  unsure (1)..(409): unsure at all n locations
  Clone ID: MRT4577_40429C.1
agtctcctcctttccacttcctctcccgttgccaggcatggggttggcctagttgtgcccgttgagcactagcagcctccttgaaacctccagatctgtgcctccaaggcccccgttcctcggcaacaagggtcctatctgtggtgtgccagacttcaagatgaggggaaagaagagtgatgagctcgaacctgtcgatgctggcgatgaagatgatgatggtggtgacgatggggacgaggatggtgactttggggaggagggtgaagaggacgtctcagaaggggagggatatgacaacccaaagggcaatgagaccaagaagcaaagaggtgatcctgaggaaaatggtgaggaagatgaggaagaaccagaagatcagganggtggcggcgacgacgatgatgac

SEQ ID NO: 119459 - DNA, 491 bp, Zea mays
  Clone ID: MRT4577_4042C.1
atatgagcgaatatgtttgaaagggacggaaaacagttagtttgggacgggagctgggcattctcagactcctcatgtgcagtcactttggtgttattatacatgcaggcggggttactaccctagacacactctgtaaaaaagattacacctacgggcacaaggttcataccgcgtggatatatatacaaatggatggcgtaaaacataattatggatggcgagaacactctgtcgtgtcagaagagctaactatggcgctgttggaaccacagaaaccacacttggggctcagtcaattaaaccgggacctgccttttctctcctggtacctacacaggatttcctgacaaaggtgccggtattcctgaagaagctgttgcatgcccaaaaaaccatcaattatgccaaaatacacggagatatttgccaaggatttgcggctaattggacatgcgtggaggctacaagtatgtgtctgaaacaagccg

SEQ ID NO: 119460 - DNA, 1366 bp, Zea mays
  Clone ID: MRT4577_40430C.1
ctgcccggcgcctctgccctcctccgggctcacagagtgaaaaagtctcctcttttcctcttcctctcccgttgccaggcatggggttggcctagttgtgcccgttgagcactagcagcctccttgaaacctccagatctgtgcctccaaggcccccgttcctcggcaacaagttgtacttgcgcccctgcggagcaaatctaagattgggtttttgctaaaattagccgtccagatggacaccgccgcgcccctgcaactgaaagcctgcgccggcgacgccgcggagaagctgctgctcgccgtcgcagccgagggtcctatctgtggtgtgccagacttcaagatgaggggaaagaagagtgatgagctcgaacctgtcgatgctggcgatgaagatgatgatggtggtgacgatggggacgaggatggtgactttggggaggagggtgaagaggacgtctcagaaggggagggatatgacaacccaaagggcaatgagaccaagaagcaaagaggtgatcctgaggaaaatggtgaggaagatgaggaagaaccagaagatcaggagggcggcggcgacgacgatgatgacgacgatgacgatgatgagaacggggatgacgaggacgacgacaatggggatgatgatgaggagggtgtagatgaagaagacgatgaccaggacgaggatgaggaggatgatgatgatgaagactcgctccagcccccaaagaagaggaagaagtgaagatcttctgcggctttagttaccgtgcgctgagttctgcctggcttttcgtcatatcctcgcatttcaactttcccatagagagttaagaaggagggctttatgatttgaggcaattagggacggtcttatgtcattaaagcttgcttcccagacccgaacagatgggaggaaacataattcgaagtctcgcttcagcccccaaagaagaggaagaagtgaagttcttttcccgctttagttcccgtgcgttgagttctgcctggcttttggtcatatcctcgcatttcaactttcccataaagagttaagaaggatccacacgttcaccagcacgtgtgggcttgtaggacctttatgatttgaggcacttcagggccaactcttatgtcattgttgcttgcttttgtggagccccccccccaatatagataacataattcgacttgagtaataaaagcccccagattgaataggccttctcttttatctggtatggaatcattgatgcagcccaaaaaaaaaaaaaaaaaaaaaaaaaaaaaaaaaaaaaaattttaaaaaaaaacccccccccccccggccgtctagaggtccaaaatacgtacggcgtgc

SEQ ID NO: 119461 - DNA, 1824 bp, Zea mays
  Clone ID: MRT4577_40431C.1
ctttctccggccagattccggcgaccttggggaatctggcgtggctagaggcacggtccctgactaggaagggactccctcgtcgactgtctgctgagtgcttcgagctcggcagaggcacgtgactggacatctccgagcactacctatccggatggaggccgccgcgccgcggcaatttgtgcggtctccgctgtttaaacgtgagcggcaaggcccgatttggccgcaagcaaacttccgtgcgcaacctctgtaacgtgggcgttaatcagctctctgggcagaagtaactcttgagccacgacccggcggagcgttttggccgaactgatcggcaccaggtttggttctgggacaacttatgcttcaacgctagatttgtgcgggccgccattggagagtgagtgcggagagtaccggcggcggcagagacggcagaaggtgcagcgcctggctctgctaattgcttgccgtcacttcaagtgttgtcagccgcacacaaccatatttctggcgagctaccagccgagctcgccaattgttccaacctcagagagccgtgatggtgtgaagaagaggagacgcagcccgggacgcggcagagggtcgagtggcacaagcacggagaacggtgtcagccagccgaagctgattatgttcaactcaaggatcacttatgccgacactgttgaggcaacccgccagagcttcgagacaatcattttggcgcgagcctaccagcctctgttgccagcctcttgtaactacagacgcttgacctgtcgtccaacaatcttaccggcagcatccctgcttcattggctcgtgattctggccttgtcgttttcaacgtgtcacacaacaagctttccggcgaagcaccggcgatgctcggctcccgctttggctcttcgtcagcatatgcttcgaactcagacttgtgcggtccgccgtcggagagcgagtgcggcgtgtaccggcgacggcggaggcggcagagggtgcagcgcctggctctgcttatcggtgtggtggctgctgcggcgctgctcgttgcgctgttctgctgttgctgcgtggtcagcttgatgggatggaggcgtcggttcgttgagagccgtgacggtgtcaagaagagaagacgcagcccaggacgcggcagcgggtcgagcggcacgagcacggagaacggcgtcagccagccgaagctgatcatgttcaattcgaggatcacttacgctgacacggttgaggcgacccaccagttcgacgaggagaacgtgctcagccgaggccgccacggcctcgtgttcaaggcttgttacagtgacggcaccgtgctggcgattctgcggctcccgtccaggtctgccgatggcgccgtggtgatcgacgagggatcgttcaggaaggaggccgagtctctcgggaaggtgaagcacaggaacctcacggtgctccgtggctactatgccgggcctccgccggacgtccggctgctggtctatgactacatgcccaacggcaacctcgccacgctgctgcaggaagcgtcacaccgggacggccacatcctcaactggccgatgaggcacctcatcgcgctcggcgtctcgcgcggtcttgcgttcctgcaccagtccggggtggtgcacggcgacgtcaagccgcagaacattctcttcgacgccgacttcgagccgcacctgtctgatttcggcctcgagccgatggtggtgaccgcgggcgcggcggcggcggcggccgccgactagtgagctcgtcgacccgggaattaattccggaccggtacctgcaggc

SEQ ID NO: 119462 - DNA, 2435 bp, Zea mays
  Clone ID: MRT4577_40432C.1
tgggcggactcgaacgaggcgggccgggactccactccatcatcccgtgcctcacgagtcacgagtcactccaggtccaggctgagcagcaatggcgccgcgaacgctcggcctcaacgcggccccgctcctccagattctgcggtccctgtgcctcctggccctcgccgcggcggcggcggtgtccgggcggcgccacggggcctccccggcgcgcggcagcgggcagagcatgtacctggcgcccgcctgccgggcgcacacggcgtcggtggcggacttcggcggcgtgggcgacggcaccacttccaacaccgcggcgttccggtccgcggtggaccacctgtcgcagtactcgggcgagggcggcggcggcggcatgctgtacgtgcccgcgggcaagtggctgacgggccccttcaacctgaccagccacttcaccctctacctccaccaagacgccgtcatcctcggctcccaggacgtaggcgagtggccaatcgtggatcccctgccttcttacggaagagggagggacaaggtcggagggaggttcgctagcctcatcggcggatcgaacctgaccgacgtagtcatcactggcagcaacgggacgatcgatgggcagggcgccatgtggtggtccaagttccacaagaaccagctcaagtacacgcgcggctacctcatcgagctgatgcactcggacaccatctacatctccaacctgacgctgctcaactcgccggcgtggaacatccacccagtctacagcagcaacatcgtggtgcaaggcatcaccatcctggcgccgaccaactcgcccaacaccgacggcatcaacccagactcctgctctcacgtccgcatcgaggactgctacatcgtgtcgggcgacgactgcgtggccatcaagagcggctgggacgagtacggcatctcgtacgggatgcccagccagcacatcgtcatccgccgcctcacgtgcgtgtccccgaccagcgccgtcatcgcgctgggcagcgagatgtcgggcggcatccaggacgtgcgcgccgaggacatcacggcgatcaacaccgagtctgccgtgcgcatcaagaccgccgtcggccgcggcgcctacgtcagggacgtgttcgcgcgccggatgacgctcaccaccatgaagcgggtgttctggatgacgggcgactacaagtcccacccggacgacaagtacgaccccaacgccgtccccgttgtcgccaacatcagctaccaggacgtggtggccacgggggtctacaaggaggcggcgcgcctccagggcatccagggcgcaccgttccggggcatctgcgtcgccaacgtcaccgccgacctgtccaagtccaggaagtacccatggaactgcgccgacatcgagggagtgtcggccaacgtcagccccgcgccgtgcgacccgctacagggcgcgcacgacggcgcatgcccgttcccgaccgacacgctgcccatcgaccaggtcacagtgcagcagtgcgcatacgacatcccggccaccaactagcagctcaatcaaggagtgtattcggatgtggatcagccgcctagtacaacttgtagttcaggtccaatgcaagcgactagtagtatcaagtctcatcaacacaataacgacagaatgaatcgggcactagcctagaaagcattcataaactccgagcctgtacaccatctacagcctaaagactgacttgactcatcacctgccgccgaagaacgagaagaagccgcctccgcctcctttcttctcgggcctctcctgctcttcgaccatgaccgccgtcatcgcatctctttccaccaatctccaagtagcctgctccagagcaaggccagcaggcgtgggcgggtcattcagcaccagcggcacgcccctattcgtactccggatcacctccgtgtcctctggcaccacgcctagtaaaggcaacccgagcatttcctgcacgtccagcgctgacatcatgtcctcccccttcaccaggtctggccgcactcggttgacaacgatcttgatgtctttgatgccatcgcactccagcagtcccgcgacacggtcagcatcgcggagagccgtaatgtcgggagtggtaacgagcaccgcctcttctgcgggtgcaatggcagtgacaaacccagcatcaacacctgcggggcagtcgatgaggatgaatgcgggtgggctggtcgagcgtcgtagcgcgtccgcgacccaggtgagggtcttggatccgaacgcgaggggcagcttggagcggggcttggagaggcagaggaggtggaggtcgtggagcgcgcggtggcggacgagcgcctggtcgagtcggcagtctcccgcgaggacgtcggcggcgaccccggcgcccacgcgtccgcggacgcgtggg

SEQ ID NO: 119463 - DNA, 1148 bp, Zea mays
  Clone ID: MRT4577_40433C.1
ccggccgggaaacccggggcaagaagcgatttacgcatatgccccctccagccatcagtagcgacgggctatcctgcgcccaccacctgccctcctgccttcgtcctgcccggcgcctctgccctcctccgggctccacagagtgaaaaagtctcctcttttcctcttcctctcccgttgccaggcatggggttggcctagttgtgcccgttgagcactagcagcctccttgaaacctccagatctgtgcctccaaggcccccgttcctcggcaacaagccgtccagatggacaccgccgcgcccctgcaactgaaagcctgcgccggcgacgccgcggagaagctgctgctcgccgtcgcagccgagggtcctatctgtggtgtgccagacttcaagatgaggggaaagaagagtgatgagctcgaacctgtcgatgctggcgatgaagatgatgatggtggtgacgatggggacgaggatggtgactttggggaggagggtgaagaggacgtctcagaaggggagggatatgacaacccaaagggcaatgagaccaagaagcaaagaggtgatcctgaggaaaatggtgaggaagatgaggaagaaccagaagatcaggagggtggcggcgacgacgatgatgacgacgatgacgatgatgagaacggggatgacgaggacgacgacaatggggatgacgatgaggagggtgtagatgaagaagacgatgaccaggacgaggatgaggaggaagatgatgatgaagactcgctccagcccccaaagaagaggaagaagtgaagatcttctgcggctttagttaccgtgcgctgagttctgcctggcttttcgtcatatcctcgcatttcaactttcccatagagagttaagaaggatccacacgttcagcagcacgtgtgggcttgtaggagctttatgatttgaggcaattagggacaactcttatgtcattggtgcttgcttctgtggagtcgaacagatgtttcgctaacataattcgacttgagtgatgaaagcctccagattgaatatgccttctctttaaaatcgtatggaatcattgatgcagccctggttgatagcgttccttcaataaatgaattatattggcatcatgacagcttc

SEQ ID NO: 119464 - DNA, 497 bp, Zea mays
  Clone ID: MRT4577_40434C.1
gggaccctcgaggccggccgggatattgtattggaccctaactatctaggaatgaatgaacagacgaaaaaataagatacccccatgcatcatccagctttttctcgtcagtggggcggcacctgcgacctgccctgcctgccgagccgaagcattccggggctggctggcatgatgagcccctcgccgtgcgccgcctctcttcgtctttccacggctgcggacgagctctggcactgacggcgcctcgccgccagcgccagcggcagcggccggtagtagaatccatttgctcgacggaagtttcggcaccagccgcacgcatctcggctccatcgatcgatatcttttttttttctctcctatatggagcaagtgacgcatatcatgacatgtctggcgcactctcgacaagccctatccagtagctgggcaaaaaaaggctagaccctaataataaaaagtattccgggaaaaaaaaaaaaaaaaaagcggcc

SEQ ID NO: 119465 - DNA, 163 bp, Zea mays
  Clone ID: MRT4577_40435C.1
ttttttttttttttttacccaaactcaattttaagggcttttttccaaaaaggggggggaattccaacacctaaaacctctcttctcacaattttattcttaactttaaccccaggcacacctttttggatctttgcctattaaaactttttattaacctcct

SEQ ID NO: 119466 - DNA, 374 bp, Zea mays
  Clone ID: MRT4577_40436C.1
gggaaaacaaaagcaattaaggcaaaagaggggaagcaacagcccgcaaaacagggggggtaaacagggcacgggggaagaacagattttaaggcccgccagtctaacaggagggggggcttccctttaattaaagaaattttccaagcagcaacaggttccttaaaaaggggttttttggggggggggcaacaaccggaggggcagcgggcggggtatgcaaggcaataagggcgactggacaatgtccccccggggggggacggggaagcccaaaagcccgccgaacttctgggggaagccccaaatgcccagggggttgaagccggggaaaagcttggcgggggccgacccctccataaggaaaacccccg

SEQ ID NO: 119467 - DNA, 799 bp, Zea mays
  Clone ID: MRT4577_40437C.1
ccggccgggagtcttttgggtattattatatatcactcgttgctcaaaaaagtttttccaaaatacacacacatacatatacctacacacgctgctggcttgcttaaccattatggtacaactcgtcacagtagctctgcaccatcgagaccacttttccgtcgggaatgctcgacgagtcttcgacaagcaggcctatcactggagcatcatgatcatacccgagggaggccagtcggaaaactgccactccttcgatgccaccgacgcctcccacatcaaccccgtcaccttccgcatgaacaaccctaccatggactggtggttccggtccgagctggacatcaaaccgcagcgccatgagaagctgctgggacgcatcgtcatcggtgagatgcccgacgaggtgtcgggcgaggagctgggcgacttcttccaagggatccccctgcccatgaagaacacgaatccccagcagagctccgtgacgtggatcatggacgccatccaggccctgcaggagaagggctggacccacgattttgatttggaccgctttaagaactttgctgtcacttatgctgatgagaagatgaagggcgccgaggccgaggaaccagatttgaagttttatgagagttggaaggcttctgttctttagatctatgtcacgtcatgttctgttctgttaaagaagggaagggaagcgagatagattacctctgccgggggagcacgactataaatgatatccacagcatgccgagctacgaaatcatactgctggttttgattttgg

SEQ ID NO: 119468 - DNA, 574 bp, Zea mays
  Clone ID: MRT4577_40438C.1
ccggccgggagtataccgagttaattatctattcacaaagccacataaaaccgcccaacatggttaactttgtcacttctatcactctcctcctcactgctgtctctacagttgttgctcttcccaacactcttgagaagcgtgctgtgacatgcagagatgaccgtcctaacagtgaactggccaatgccaacgaagctgctgcatgcatcgactacctcgccagcctaggcaaccaggcttgtgttgctactatctctggccagtctttctgccgacgtggagatactcagatcactggcctcgctagaggtgctcctacaagaacatctacctgccaaggtcgctcgcggtgctggtttgattctggatagatgcactcgtggtgatggcaaggtcagaggcgccaatgaggcctggggcaatggcaacctcctcgtcgatatccgccgagttgttcaataagctcccatcggtcataagtttgaaagatcggtcaatatttaattaaacttcataataccaatgatttactattgcctaccccaaaaaaaaaaaaaaaaaacccgcggcc

SEQ ID NO: 119469 - DNA, 465 bp, Zea mays
  Clone ID: MRT4577_40439C.1
ggaaaaaaaagaaggggtaccttttaattttaacgggggggaatgggaacaccgggcccccccccccccccccccttttttttccttttttttccccttttgggccgggcccccaagggggggggggccgggggggggcggggccccttttgtcccgaacaggggggaggggggggccctttttttttccccccccccggtttggggaaaaaatccaggggccccccccgggtaaaccctggggcggaaaacaaaaaaccccccgccccgggcaaaaaaaaacggggctttgtttttacggggtccgtttccgccccccgaaaaagggggccccccccgagctgccaaattttgggaagccaaacccccccaggggtttccccggggtgttttggggccccggcaaaacctccttgggggagccggaaagggggccccgggggttaaccgccgggggggctgggg

SEQ ID NO: 119470 - DNA, 696 bp, Zea mays
  unsure (1)..(696): unsure at all n locations
  Clone ID: MRT4577_40440C.1
aattcggcacgaggttccacctccctccccagtgcccccctccgctttctccatcccgcctccgatccggccacccgccaccgccgacaccgggcgacccgtcccaccgccgcgccgctccaggggaaccgtccgggcaggcgggggaggatggagtccatcatagcgcgggcgctggagtacacgctcaagtactggctcaagtccttctcccgcgaccagttcaagctccagggccgcaccgcgcagctctccaacctcgatatcaatggcgatgcgctgcacgcgagcctggggctgcctcccgcgctcgccgtcgacacagcgcgtgtcgggaagctccagatcacgttaccatctctatcaaatgtgcaagtagagccaattgaggtgaacattgacaagctcgatctcgtgcttgtagagaaggacgattctgaaaatctttccagccctagcagcactgcatcatctccatcagcaactaagagcagtggatatggttacgctgacaagattgcagacggaatgacagtgcaagtagggattgttaacctgctactggaaacacatggaggggctcaccgtcaaggggatgcaacatggtcaccgccactagcagcaatcacatttccgtgatctttgtattgtacacaacanatgaaaatggcaggtagtaaactttgaaagaagcag

SEQ ID NO: 119471 - DNA, 309 bp, Zea mays
  Clone ID: MRT4577_40441C.1
ctctgatgcagtggcatcttgccttgcctttttaggcttcaagccaggcggagccgatgccacattacttaaggctcggaccaagagagtcatccagagaacggtgactccaggttgagtttagtggatttcgatagcaatgctggtacaattttgcttctggtccactatgacatagggcggtgtacgcacattatgtggaatgtgaaaaaggtatcaagtcagccagcacgtggtctgtcgtcgtagggctcaaagggtttggtacttggaaggcatagacaaaaggtgccaattactattttataa

SEQ ID NO: 119472 - DNA, 624 bp, Zea mays
  unsure (1)..(624): unsure at all n locations
  Clone ID: MRT4577_40442C.1
acgttgtcttcctatccattctgcttcctctgctataattgctactagttcttagttgaatcaatacctatcgtcagtaggttgctgacaattggtatcaaagccgttgatctctaggcatggagggtgctgccgtttctagtctgacgattgcactcgagaagcagtccaggctcctgcgcgcgatctgtgaccggttgtcggcacaggatgcgccttgggcttcgctcgagtccgccaccaccgagcacctcgatgccgtggaggctgctgcggcaactcgcgtcggcgcgccggaatcgtggcgaccgcacgtcgagctgcgctacgaggagcccgtcaccgctgacaactggggtggcctgttcgagcactcgggtgtcattaccgcggaggttgggagctcaccggaggaggtgatcaccgacgactggggcgacctcttctgcagaggcgtcgactccgacgagcagctctgcgattcgctccattccgcgtcgattcgctctttggaggaggcgtttgcccgtgaggatcccattccctcgcgggcggatctcgggatccaactctcggncaccaccgagcgcctcgatgcccgggaggcgggtgtggcaactcacg

SEQ ID NO: 119473 - DNA, 594 bp, Zea mays
  Clone ID: MRT4577_40443C.1
tgggtacctcgaggccggccgggaactgttgtcccgtgtgtgagccgtcgggtgtgccggccaaattctcgtgtgcgagtgggtgaattagtgggcctgaccttgtaaacgctcctaaggaatacttaagggaagtgtggatagcagggaaaggggatgacgagaaaacagttgctgacaattggtatcaaaaccgttgatctctgttcatggagggtgctgccgtttctagtctgacgattgcgctcgaggagcagtccaggctcctgcgcgcgatctgtgaccggttgtcggcacaggatgcgcgctgggcttcgctcgagtccgccaccaccgagcacctcgatgtcgtggaggctgctgcgtcaactcgcgtcggcgcgctggaatcgtggcgaccgcacgtcgagctgcgctacgaggagcctgtcaccgccgacaactggggtggcctgttcgagcactcgggtgtccttaccgcggaggttgtgagctcaccggaggaggtgatccccgacgactggggccggcctcttctgccgaggcatcaactccgacgagcagctctgcgattccctccattccgcgacgatt

SEQ ID NO: 119474 - DNA, 769 bp, Zea mays
  Clone ID: MRT4577_40444C.1
ggaccctcgaggccggccgggccggggattatccatgttactgtcaggtacccagcccatatggtatttgccggcacagttagctgacaatacataaggagcagcaacaattgaagagggaagggggaaaaacaatagaatcgttcttattcttcttcctcaagtatcgtagttctctactgatgtcttcgtcttagttccatactgttgtcttcctcatccattatgtttcctctattgtaattgctactagttcttagttgaatcaatacatatcgtcagtaggtcgctgataattggtatcaaagccgttgatctctgagcatggagggtgctgccgtttctattctgacgattgcgctcgaggagcagtccaggctcctgcgcgcgatctgtgaccggttgtcggcacaggatgcgcgctgggcttcgctcgagtccgccaccaccgagcacctcgatgtcgtggaggctgctgcggcaactcgcgtcggcgcgccggaatcgtggcgaccggagcccgtcaccgccgacaactggggtggcctgttcgagcactcgggtgtcattaccgcggaggttgggagctcaccgaaggaggtgatcaccgacgactggggcggcctcttctgtcgaggcgtcgactccgacgagcagctctgcgattcgctccattccgcgtcggttcgctctttggaggaggcgtttgcccgtgaggatcccattccctcacgggcggatctcgggatccaactctcggccaccaccg

SEQ ID NO: 119475 - DNA, 377 bp, Zea mays
  Clone ID: MRT4577_40445C.1
atcccagcctcggtcgtatcatcaactgcaagctccggcatccccaggatttgatcctatctcttctaaatagccgtgttcctccattttacgctcaccgatcatcaaattatctccaagccatcatgtcgaccttcggaacactctttcgcgttactacctacggtgaatctcactgtgcctcggtcggctgcattgtcgacggcgttcctccaggcctcaaactcactgctcctgacattcaagtgcagcttagccgtcgacgacctggtcagagcaatttgaccactccccgaaacgagaaggaccttgtcaacatccagtccggagtcgagcatgacaccactctcggcactccaatcggcctactcgtcaag

SEQ ID NO: 119476 - DNA, 297 bp, Zea mays
  Clone ID: MRT4577_40446C.1
ggagccacaacaatacagactaaaaaccaacgaagtacaacacaacgacaggaaccaacaggccacaaaccagtgagacggggagggccacacagggataacggatagggaaaaaaccaacccgacaaagccaagccaaggcatcgggcgccaaccgaaaacgggcgagggaccggcacaaagcctcaacacccggcgagcctaccagcacccacaagcagccgggagcccaggcgccacccaaaacggggacggaatcggacaaaaacaatccgggcgagggctcatccttcacac

SEQ ID NO: 119477 - DNA, 457 bp, Zea mays
  unsure (1)..(457): unsure at all n locations
  Clone ID: MRT4577_40447C.1
gcccgacgacggcagggccaccgccgccgccccacgccaggcaaaccgcgccacaaggcggcaggccgcccgccggccaagagcacccaccaggacgcccgagcaggggcaccccagaaacccagcacccgagggccccgcagcagcggacaggcgggaggaccagcccgaccggngggaacagangnccgnccaaacgaggaagaggcccacccaagaacgcaagggcaggacggcccagcaggagcgaccaagccggcgcgggcaggcccgacgggaccaccngcgggagngacggcacgggggcccagagcgccggaagacccgnccccggccggccngaggggancagcgccaggccgggcaacaggcggagccgcggcacgagagccgggcgcnnnggaagacccggccgnggcaggncggagcggaccagcnccagccagggcacggggac

SEQ ID NO: 119478 - DNA, 213 bp, Zea mays
  Clone ID: MRT4577_40448C.1
aacacgcatagacagagacctctaccgagacaagagggagtgagagaggagggaagctaagccgtacgcatcttatcctgctgattctccccatcactttgttggctctgcgtgcatcattcatgcttacttacaactctgacctcaatgtcaaagggatgtgctaataattttttttgtacgagtagaatgttcgtatttggcaaatcagtt

SEQ ID NO: 119479 - DNA, 570 bp, Zea mays
  Clone ID: MRT4577_40449C.1
acagcatatttcattgatcagctccacagcgtgcatacaaaaatacactagcggtacaatctctggctcccacgcacagctcccttcacaaatactggtgcaacctgcagtacgtaggaatacggtacgtctacggtacacgcatgcaagcatcatgccctcgctcacttgccggggacgaagttggtggcgtaagcccagacgttgttgttgacggggtcgaccacctccccgagcgggccgagcagctccgggaacacgcacccgagcgcgccgagcatggcccagcggcagtggatcacctccagctcgcggttcttggcgaaggtctccgggtccgccgacagccccgcggtgtcccacccgtagtcgccggggaactcgccggtcaggtagctcgggggcgagccggacagcgggcccaggtacaggacgcggtcggcaccgtaccatgggctgccggacgccgccggcttgggcttggcggcggtcttgcgcatggtgatgcggccctcgccgaagacgtccctcgtgccagccgccggcttgccgacgagcgcgcgggaggtg

SEQ ID NO: 119480 - DNA, 141 bp, Zea mays
  unsure (1)..(141): unsure at all n locations
  Clone ID: MRT4577_4044C.1
gggaaaatcnatggggccgcggccgctctaaaagnacnctcaaataactttnccaaccctncgcatccactaaggacgactttaattcacactaactccagctccccccccctttagtaatgcttaatttctatctttaac

SEQ ID NO: 119481 - DNA, 303 bp, Zea mays
  Clone ID: MRT4577_40450C.1
gaacaaaaaatgttacttcccataaataaaactctggaccctttacaagtcctaacaaacaaacaaatttgaccaggctgctttatttaaattccaactttttggcacaatttgttacaactcacggggaggcggaaccaaatctgacttaaattttccttgctaacttttactttaattgagacgaaggaagattttgtacaataaagatgcttacccttccaaaaaagtcttttttagccggagcataacctattagccctagagggttgttttgtttgccccccgccccgtttaatgtcg

SEQ ID NO: 119482 - DNA, 447 bp, Zea mays
  Clone ID: MRT4577_40451C.1
gccggccggtcagaaacaggatctcaagccaccatcgatcttcaagtctcgctacgtagcagtgcaataaaaaaagcagccgcaatggcgagcagcaccatggccctctcctccacggccttcgccggcaaggccgtgaacgtgccgtcgtcgtccgccatgttctccatgttcggattcttcgtccaggccatcgtcaccgggaagggcccgctcgagaacctcgctgaccacattgccgaccccgtcaacaacaacgcttgggcctacgccaccaacttcgtccccggcaagtgagggaggcgccgccggtgacctttaggtgtccggatgcatgtgagcgcacgctggttttcggtttgtaccatgatgtaaactattgttcaatcgacaaggaataattgtgttcattgtcattaagaaaaaaaaaaaaaaaaaaggccccta

SEQ ID NO: 119483 - DNA, 599 bp, Zea mays
  Clone ID: MRT4577_40452C.1
aagacataatatatttacagcatatttcattgatcagctccacggcgtgcatacaaaaatcactagcggtacaatctctggctcccacgcacagctcccttcacaaatactggtgcaacctgcagtacgtaggaatacggtacgtctacggtacacgcatgcaagcatcatgccctcgctcacttgccggggacgaagttggtggcgtaagcccaggcgttgttgttgacggggtcggcgatgtggtcggcgaggttctcgagggggcccttgccggtgacgatagcctgcacgaagaagccgaacatggagaacatggcgaggcggccgttcttgatctccttcaccttgagctcggcgaacgcctccgggtcgtcggcgagcccgagcggcagtggatcacctccagctcgcggttcttggcgaaggtctccgggtccgccgacagccccgcggtgtcccacccgtagtcgccggggaactcgccggtcaggtagctcgggggcgagcgcgcgggaggtgatagccatggtggcggcagccatgtcgatcagatcgcagctgcttctgatgctctgcgttgtgtatgcagtatgcgt

SEQ ID NO: 119484 - DNA, 476 bp, Zea mays
  Clone ID: MRT4577_40453C.1
cgcaaggaacacaccacagccactcttttcttctcggcggaggcggaggcgaacgaggaaccctagatccgcaaggccggcgacgatggcggcgcttcggtattcggcgaggaggctgggtggctccctgctccatcgaacgcaggccgcggtcgaggaggagggacgccggctcatgcgcccccgccagatctcaaccgagttcttcggcgagccaacgcaggcggcgccggtagcggatgagcgatgacgcctgccaagcaggctcgtgcgctcgcacaatctctccactgagcatgctcgtgcaccctctgcacgccaggtacagcagaagaaggaggagctgtatgaggcggtgtctaaggcggaacagaagaagcaggagctgctcaatttgatggctaatgagcagcatttttctgcacaatccactcaaggacaagctgcccctctgccctggaaggtgtactcgaaaa

SEQ ID NO: 119485 - DNA, 374 bp, Zea mays
  Clone ID: MRT4577_40454C.1
ggttccaccatcatacacaagaaccaacatgcacggacttaaacatacgggggattacgactacacaacgagtctaccgtcacacgagcccatagtacccaacaagggcaccataccaagggagcgagattttacgctcacaaacgcacacacttaatacctgaaagggactgccaaggggtaggatcaaacaggctaataccaactgtgatttttcgtcgtagggctgctccagggcctggcggccccgccacaacctatgtgctggcggaaggtccaaacctctggaggcgaccgtcgcagaaaacattaccttcatcaaaaggaccaggaggctcgcgtgccaaaggggggatattggcaccaaatggtct

SEQ ID NO: 119486 - DNA, 534 bp, Zea mays
  Clone ID: MRT4577_40455C.1
acagcatattttattgttcagctccacagcatgcatacaaatacactagcggtacaatctctggctcccaaagctcccttcacaaatactggtgcaacctgcagtacgtaggaatacgtacgtctacggtacacgcatgcaagcatcatgccctcgctcacttgccggggacgaagttggtggcgtaagcccaggcgttgttgttgacggggtcggcgatgtggtcggcgaggttctcgagggggcccttgccggtgacgatagcctgcacgaagaagccgaacatggagaacatggcgaggcggccgttcttgatctccttcaccttgagctcggcgaacgcctccgggtcgtcggcgagcccgaagatctgggagcccgccttgaaccacaccgcctcgccgaacttgacgccgttgcgggcgagcagctccgggaacacgcacccgagcgcgccgagcatggcccagcggcagtggatcacctccagctcgcggttcttggcgaaggtctccgggtccgccgacaccccgc

SEQ ID NO: 119487 - DNA, 377 bp, Zea mays
  Clone ID: MRT4577_40456C.1
aaaataataagaaatttgctcttttcaaagggtaattggtacttcctacacttccttagggaactgatgtatcattttctaggcgagcaatacatattgtacttttttttgtgaagagtccaagggatcaacatggatcacgttaattgtatttagtaataccacatttaaagaaatcttttatcaacataataagaactagaatttatgttgcacagggttgtcaaagcaggcccggagtttccattaggaacctcatccttttttgcatacacagatttggctacaggagcaagagcagcatcaaggtcccaaatgaaaacctcaccaccaagaccaccagaggctacaatattgctctacaacggacgcggtgg

SEQ ID NO: 119488 - DNA, 657 bp, Zea mays
  unsure (1)..(657): unsure at all n locations
  Clone ID: MRT4577_40457C.1
gccggccgggttgggacacaccaagaagcaagaaaactagaaaaggctcctcccgaccgcaacgcccctcatctccctcgaccccgacatccccgacccgatggcgcccaaggcggagaagaagccagcggagaagaagccggcggccgaggagaaggcggagaagacgaccgcagggaagaagcccaaggccgagaagcggctgcccgcgtccaagtcctccggcaaggagggcggcgagaagaaggggaagaagaaggccaagaagagcgtggagacctacaagaagcccaccatcacgtcccgcgagatccagacctccgtgcgcctagtcctccccggagagctcgccaagcacgccgtctccgagggaaccaaggccgtcaccaagttcaccagcaactgagcgcgctgcgggatccgcggatctgttagaagggttctttgctggtgtcctttccccagtcccccaccctacccgcctagtagctagcttgcctgctctataaatccggcgcgccggattgtaatggtcctcttagatttgatgtccctgttgtggaatatagttgtatctctccgcttgctattttgannnnnnnnnnnnnnnnnnnnnnnnnnnnnnnnnnngaaaaaaaaaaaaaaaaaaggccccta

SEQ ID NO: 119489 - DNA, 570 bp, Zea mays
  Clone ID: MRT4577_40458C.1
gccggccgggccgggaccagcggcatctatagcaaccggtccagcactttcacgctcagctccagcaatggctgcctccaccatggcgatctcctccacggcgatggccggcacccccatcaaggtgggctccttcggcgagggccgcatcaccatgcgcattgccggcgggccgctcggcgaggtcgtcgacccgctgtaccctggcggcagcttcgaccccctcggcctggccgacgaccccgaggccttcgccgagctcaaggtgaaggagctcaagaacggccgcctcgccatgttttccatgttcggcttcttcgtccaggccatcgtcaccggcaagggcccgctcgagaacctcgctgaccacatcgctgacccagtcaacaacaacgcatgggcctacgccaccaacttcgtccccggcaactaagctcaacggctatgctatgcaacttcattgtctttcggatcggagagggtgtacgtacgtggattgattgatgctgcgagatgcatgtgtgtcttttggttcacgttgcattgcataggcaagtcgagatgatgagt

SEQ ID NO: 119490 - DNA, 388 bp, Zea mays
  Clone ID: MRT4577_40459C.1
acaacaccaagtagcaagaaaagcctcctcccgtccgcatcgcccctcagctgcctcgaccccgacatccccgacccgatggcgcccaaggccgtcaccaagttcaccagcagctgagcgcgctgcgggatccgcggatctgttagaagggttctttgctgtgtcctttccccagtaccctaccctacccgcctagtagctagctagcttgctctataaatccggcgcgccggattgtaatggtcctcttagatttgatgcccctgttgtggaatatagttgtatctctccgcttgctattttctcattctttaggaacttggaaatttagtatttttgccgggagataactgggatcatcacaaattcgcgttgacaacgcgacctc

SEQ ID NO: 119491 - DNA, 261 bp, Zea mays
  Clone ID: MRT4577_4045C.1
tcctatcttaaccaacgttttattagttacctagatggccaagtacagtgcctggtatgtagtaagactcagtaaaaaagtggatttttaaaaataactcccaaagtgaatagtcaaaaatcctgttagcaaactgtcatatattgctaagtttgttcttttaacagctggaatttattaagatgcattattttgattttattcactgcctaaaacactttgggtggtattgatggagttggtggattttcctccaagtga

SEQ ID NO: 119492 - DNA, 759 bp, Zea mays
  unsure (1)..(759): unsure at all n locations
  Clone ID: MRT4577_40460C.1
gccggccggtttctgacagcatctcaagtcttcacactcctctccatcacataaaaccagtgcaagcagaagcagcgcaatggcgagcagcaccatggccctctcctccacagccttcgccggcaaggcagtgaacggcgtcaagttcggcgaggccgtgtggttcaaggccgggtcgcagatcttcagcgagggtgggctggactacctcggcaacccgagcctgatccacgcgcagagcatcctcgccatctgggcctgccaggtcgtgctcatgggcgccatcgaggggtaccgcgtcgccggcggcccgctcggagaggtcgtcgacccgctctaccccggcggcagcttcgacccgctcggcctcgccgacgaccctgaggccttcgcggagctcaaggtgaaggagctcaagaacggccgcctcgccatgttctccatgttcgggttcttcgtccaggccatcgtcaccggcaagggcccgctcgagaacctcgccgaccacctcgccgaccccgtcaacaacaacgcatgggcctatgccaccaactttgtgcccggcaagtgagggnggtggaggcgccaccgcccaccggccaccgctgcggatatctaggtgttcggatgcacgtgagcgcgcactggttccagtttgtaccatgatgtanattacttaccgtaccagggttcatcggcaaggaagaattggtgtgntcactgtcttgggcagtctcttggtccatatgaaatcactta

SEQ ID NO: 119493 - DNA, 254 bp, Zea mays
  Clone ID: MRT4577_40461C.1
caataaactgtcactttgagagcataagagattagtcttcataatccttgtgatggtgatgtaactcgtaggcggttgtatgtatcattaccggagctgaaatgtatcgtggatctaatgatttatttgcgattgattatgcacttgtattattaggccccgtttatccactaggctaatgggttagttgcaaaaaaaacctgggtgtcgattatttgctgaacacctagttaacagctatcgtgtctgtttcc

SEQ ID NO: 119494 - DNA, 813 bp, Zea mays
  Clone ID: MRT4577_40462C.1
cctcgagccggccgggaacccaagaagcaagaaaactagaaaagcctcctcccgtccgcatcgcccctcatctccctcgaccccgacatccccgacccgatggcgcccaaggccgagaagaagccagcggagaagaagccggcggccgaggagaaggcggagaagacgaccgcagggaagaagcccaaggccgagaagcggctgcccgcgtccaagtcctccggcaaggagggcggcgagaagaaggggaagaagaaggccaagaagagcgtggagacctacaagatctacatcttcaaggtgctgaagcaggtgcaccccgacatcggcatatcctccaaggccatgtccatcatgaactccttcatcaacgacatcttcgagaagctggccggcgaggccgccaagctggcgcggtacaacaagaagcccaccatcacgtcccgcgagatccagacctccgtgcgcctagtcctccccggagagctcgccaagcacgccgtctccgagggaaccaaggccgtcaccaagttcaccagcaactgagcgcgctgcgggatccgcggatctgttagaagggttctttgctgtgtcctttccccagtcccctaccctacccgcctagtagctagcttgcttgctctataaatccggcccgccggattgtaatggtcctcttagatttgatgcccctgttgtggaatatagttgtatctctccgcttgctatttttctcattctttaggaacttggaaatctggtaattttgccgggagataactaggatcatcacaaattcgcgttgacaacgcg

SEQ ID NO: 119495 - DNA, 809 bp, Zea mays
  unsure (1)..(809): unsure at all n locations
  Clone ID: MRT4577_40463C.1
cctcgaggccggccgggacagctacatctatagtaaccggttcaacactttcacgctcagcttcagcaatggctgcctccaccttgtcgatctcctccacggagatggccggcacccccatcaaggtggtttccttctggcgagggccgcatcaccatgcgcaagatcgtgtgcaagcccaaggtggcggcgtccggcagcccctgatacggccccgaccgcgtcaagtacctcggccccttctccggcgagcccccgagctacctcaccggcgagttccccggcgactacggctgggacaccgccggactgtccgccgaccccgagacattcgccaagaaccgcgagctggaggtgatccactcccgctgggccatgctcggcgcgctcggctgcgtcttccccgagctgctctcccgcaacggcgtcaagttcggtgagggcgtctggttcaaggccggctcccagatcttcagcgagggcggactggactacctcgacaaccccagcctgatccacgcgcagagcatcctcgccatctgtgcctgccaggtcgtgctcatggatgccgtcgagggctaccgcattgccggagggcgcctcggacgaggtcgtcgatccgctgtaccctggcggtagcttcgaccccctcggtctggncgacgactgcgaggccttcgacgagctcaatgatgaaggagctcaagaacgggcgcctcgtcatgtatttcatgttctgcttctacgccaccaacttcgtccccggcaactaagctcaacggctatgctatgcaacttcattgtctttc

SEQ ID NO: 119496 - DNA, 490 bp, Zea mays
  unsure (1)..(490): unsure at all n locations
  Clone ID: MRT4577_40464C.1
cgttacccgnggggctggggtgacccccggcgtccggccgcgtggggtcccctggttcaagtcgccgccgctgtgctgctggcttgcccttgtgngttcgtgtccgtccccctggcgtnntcttggcccttcggggcccttgtttctctgtggnggggggggggcgnnnggtgtnctggttgcccgcctccgctcgctgggtggccccctgnnccgtgntgtcngcctggcggggccggngggggncctggcgctccgtgtggcngngctgnngggggggcttggtgncccggggcctttgcttggcnctggccgtcgttttcccccgtcgtggctgggnnnnccctggcgttcccccnctttttcgccttgccgcncctccccctttcgcccgctggcgtnntngcgnnggggcccgccccgntcgcccttcccnccngttgcgccgcctgggtggcgnntggcgcctggtgcgggtttttctcctttc

SEQ ID NO: 119497 - DNA, 1296 bp, Zea mays
  Clone ID: MRT4577_40465C.1
ccggccgggctttaaggtattagagatagaactatttggtattgatctatcgaggctgcagcttgtctgtaaacacaactttccagcttgtataatggatcaacggatcacctgataaaaaaaaaaaaaaaaaaaaaaaaaaaaaaaaaaacaacaccaagaagcaagaaaactagaaaaggctcctcccgaccgcaacgcccctcatctccctcgaccccgacatccccgacccgatggcgcccaaggcggagaagaagccagcggagaagaagccggcggccgaggagaaggcggagaagacgaccgcagggaagaagcccaaggccgagaagcggctgcccgcgtccaagtcctccggcaaggagggcggcgagaagaaggggaagaagaaggccaagaagagcgtggagacctacaagatctacatcttcaaggtgctgaagcaggtgcaccccgacatcggcatatcctccaaggccatgtccatcatgaactccttcatcaacgacatctttgagaagctggccggcgaggccgccaagctggcgcggtacaacaagaagcccaccatcacgtcccgcgagatccagacctccgtgcgcctagtcctccccggagagctcgccaagcacgccgtctccgagggaaccaagcacgccgtcaccaagttcaccagcaactgagcgcgctgcgggatccgcggatctgttagaagggttctttgctgtgtcctttccccagtcccccaccctacccgcctagtagctagcttgcctgctctataaatccggcgcgccggattgtaatggtcctcttagatttgatgtccctgttgtggaatatagttgtatctctccgcttgctatttttctcattctttaggaacttggaaatctggtaattttgccgggagataactaggatcatcacaaattcgcgttgacaacgcgacctcacaaggtcgaaggctcgtgcgtttgttgtttcagtctcagattcttcagcacaagggtatttgtgagcggcaacgatgtctgtcttgcagccatacgatgattacaattttttttgtctgccagaacctgccaatgtgtgatgacataagagcgtctcaagcatgtgggtacattttgctctcgtcaatgtgtgatggtacaagttgctctaaagatttcgatttgtgttaacctgattgattagctggtcataacaaatgctttcagagtttgcaaatagtatctggtgcattctttcagaatgcattcttttttatggtaaagctattcacaatgg

SEQ ID NO: 119498 - DNA, 767 bp, Zea mays
  Clone ID: MRT4577_40466C.1
cttcgacagcatctcaagtcttcacactcctctccatcacataaaaccagtgcaagcagaagcagcgcaatggcgagcagcaccatggccctctcctccacagccttcgccggcaaggcagtgaacgtgccgtcgtctctcttcggcgaggcccgcaacggcgtcaagttcggcgaggccgtgtggttcaaggccgggtcgcagatcttcagcgagggtgggctggactacctcggcaacccgagcctgatccacgcgcagagcatcctcgccatctgggcctgccaggtcgtgctcatgggcgccatcgaggggtaccgcgtcgccggcggcccgctcggagaggtcgtcgacccgctctaccccggcggcagcttcgacccgctcggcctcgccgacgaccctgaggccttcgcggagctcaaggtgaaggagctcaagaacggccgcctcgccatgttctccatgttcgggttcttcgtccaggccatcgtcaccggcaagggcccgctcgagaacctcgccgaccacctcgccgaccccgtcaacaacaacgcatgggcctatgccaccaactttgtgcccggcaagtgagggggtggaggcgccaccgcccaccggccaccgctgcggatatctaggtgttcggatgcacgtgagcgcgcactggttccagtttgtaccatgatgtaaattacttaccgtaccagggttcaatcggcaaggaagaattgttgtgttcaaaaaaaaaaaaaaaaaaagcggcc

SEQ ID NO: 119499 - DNA, 583 bp, Zea mays
  Clone ID: MRT4577_40467C.1
ccatgctgggcgcgttgggctgcgtgttcccggagctgctcgcccgcaacggcgtcaagttcggcgaggccgtgtggttcaaggccgggtcgcagatcttcagcgagggtgagctggactacctcggcaacccgagcctgatccacgcgcagagcatcctcgccgacgaccctgaggccttcgcggagctcaaggtgaaggagctcaagaacggccgcctcgccatgttctccatgttcgggttcttcgtccaggccatcgtcaccggcaagggcccgctcgagaacctcgccgaccacctcgccgaccccgtcaacaacaacgcatgggcctatgccaccaactttgtgcccggcaagtgagggggtggaggcgccaccgcccaccggccaccgctgcggatatctaggtgttcggatgcacgtgagcgcgcactggttccagtttgtaccatgatgtaaattacttaccgtaccagggttcaatcggcaaggaagaattgttgtgttcactgtcttgggcagtctcttggtccaatatgaatcaacttacacagcaaaaaaaaaaaaaaaaaaggccccta

SEQ ID NO: 119500 - DNA, 215 bp, Zea mays
  Clone ID: MRT4577_40468C.1
gacctcatatgtaactggcttggttagtatcttgcgacttattaatgataaatacctctagctcgctatttcatacagcactaggtcttactcgacagataatcatgaattcaccgtaacattttccatccaaggcttattatttgctccttcatgattaggttttgtgtgacttctttactaagaagttggtagcatgagtatgtgtacacaaa

SEQ ID NO: 119501 - DNA, 581 bp, Zea mays
  Clone ID: MRT4577_40469C.1
cccgtccgcggacgcgtgggctgcaacttggagggccccgtctgtttttgtttgttgctattctagcaaagggaaggggttggttcggaccttcggcttaaggccttcgttcacgtcgtagtctgaatttgttattataacaattaatattgcgaggggctactgttggaggccttcgtcttccgaaggtcctcaaaaacatgactaacaatgtttcccaaagcataatatatgtgcaggaaccttcggacatgggatgaagctgtacacaatatggaaacaaggatcaaaacgaaggttgaagcagtgccgaagctgtgcgcaaggaagcttcagctcaatagcagaaaaagaaaccgacttaaggaggaaaacaccatttagtcctcgacagattgttcttaagttagtactaaatatgaagggcatgagtgtaattttacacaggctgcgtcctgtgcctataaatagatgaacaataccctcgtactgtctatgctgacttgtactcactcgtgcgtcacgcttgtactttcacctttgtcaagccgaagtacaatataatcaatattgtcttattc

SEQ ID NO: 119502 - DNA, 865 bp, Zea mays
  Clone ID: MRT4577_4046C.1
attctccctcgctaggcgccacacaaacgcacaccacaaccatcgaaagccggctacaacacacacttgatcgaacatcgaagaaggtagctcttcaccagctccatcgccgtcgcaatggcgcggcgcggcggcatggtggtggtaggctgctgcctcctggtggcactcgcgctggcgtgcggcgtggcgtcggcgcaaccctcggagaatggtccgcccacgaagctcccgcccaaggccacgttccagaccatcaccatccccaaaaacagcaccaagaggctgtacgcggtcacctgccgcgagaggcgcggaaagccttgcgtcgtgtcctgcccaagccgctgccccaacaagtgcctcgcctactgcaaatactgcatggcattctgcgtgtgtgatctcgtcccggggagctcgtgcggagacccccgcttcaccggcggggacggcaacaccttctacttccacggcaagaaggaccaggatttttgcatcctctccgacgaggccctccacatcaacgcccacttcatcggcaaccacaaccccgccataaggcgcaacttcacgtggatccaggccatcggcgtcagcttcggccagcaccgcctctacgtcggcgctcgcaaggccgccatctgggacgacgaggaggaccacatccacatcatgctggacggcgaggccgtcgatgtggagaccgtcaagaacacccggtgggtctccaaggccctgccctccttgtccgtcacgcgcatcgacacggtgaatgccgtcatggtggagctcgacggcgtgttcggcatctccgtcaacgcggtgccgatcaccgaggagactccaggatccacaaactacg

SEQ ID NO: 119503 - DNA, 303 bp, Zea mays
  Clone ID: MRT4577_40470C.1
agcgaccggagcacgaccgacggtccgttcgacgtgacggtatcgggcacgctcgatcacttcgtgtggcccgacggcacgaccgcgttgcccgcgctgtcgagcctcacgggcgggatcgcgacgcaggtcgaaagctggctggccgaacccgtgcgcacgcagccgtggggctgtatcggcggcacgttcgacgagaccggccagatcgcgctgccggccgacgtcgtcgtgaccgacctgccggccgatgcggccgtgcacgaccgcttcgtcgatttcacgtcgcattacgtgttcgac

SEQ ID NO: 119504 - DNA, 268 bp, Zea mays
  Clone ID: MRT4577_40471C.1
cacgcatacggactactacttcctccggtttctctctgcttgcgcactgtcacctgcccgcgccatcttcaaccgggaccgagatgaacattgatagcctcatgaagatacacccttgactctgcacacggagcatggtcaccatgctcacgagaaaaaaaggtgtactcataacaatcaccacgctcgacaataccactaacttcactctcaaaagattaagggtcaacaccatccctgcaatcaaagacttgaacatattcaagga

SEQ ID NO: 119505 - DNA, 690 bp, Zea mays
  Clone ID: MRT4577_40472C.1
ctcaggcggcggccggattcacgaggtccttctgtataggacggagctgagtttctaccaacgtacagtgtatccgccatgaatactttccgggcagatgatcacacaaaaaaccctcgagaacatgtccaagagaccagggaaccagagatcacacaagtggactgctcacgagaggtacaagaagcatgattcacgcgcaaagacaagaaacacaacctccagtactcaatgcgatgagctgaagaatagacccggaaaagatggtgataccatgcacctcgtctacaacccctatgcggacaggctgtagcctgtcaggattgactaagaaatgactgagatagatctcctgtctacagcgtcgccatatcccgttacactcttccacaacggaggaagatatcgacttcctccacgctagaccggctcgcatggcgcacggctagtcagacatgatctactggtgccgcggtcaaggacgtcgatggtcgcactcggtacttcctcgtcctctgctacatcccgagagacaacataccgacacaaatacgtactgctacacctgatgcatttgatattgtaatactaacagtatacacttagatgattcgcacatacatgcgtctcaactaatttggcatgcttgcaggcttacgctgaaataggcagtgaaaactacttcaagac

SEQ ID NO: 119506 - DNA, 295 bp, Zea mays
  Clone ID: MRT4577_40473C.1
tgccattcaagctgtgctctcgctctatgcatctggccgcaccacaggcatcgtcctggattcaggggatggcgtcacccacaatgtccccatctacgagggctatgcactgccccatgccatcatgcgtcttgacctggctggacgggatctcacagactacctcatgaaaattctcacagaaagaggctattcctttgtgaccacagctgagagagaaattgtgcgagacatcaaggagaagctgtgctacgtagccctggattttgagaatgagatggccacggcggcttcg

SEQ ID NO: 119507 - DNA, 150 bp, Zea mays
  Clone ID: MRT4577_40474C.1
tacaaaacgcggtatttttagcttctcagtctcctattacgagcagcctactccaactaccatcaatgtgagaatcatgaatgatcggttcattgttaacctggttgttctagccgacatagttagcgcaatgtcgactaaattgcaacc

SEQ ID NO: 119508 - DNA, 359 bp, Zea mays
  Clone ID: MRT4577_40475C.1
cccacgcattcgtaatgtttttaacgttagtaaaccctctcctccttatgctgaataggcaaagaaagggggggaggtacaaaaacagtctttgattgtcctcctttcaaggcttgctgaggcatcagatggtgaaagtgactggcacatatcctggtctaatgaactttgatgctattaatcatcttttagctaacctattatggagccatgccccttggtgacagaactgtttccattatatatacttcattaacgcatgcacaacatataataactgtctgttttacaatttatcgctaatatttattctggatttaagtctctaggctcttttgctttgggatgcttttttttta

SEQ ID NO: 119509 - DNA, 315 bp, Zea mays
  Clone ID: MRT4577_40476C.1
atcccttgtttaagaattctctaacagaactcggggaaacacgaaacaagcagcggccccatgggggggaaaaagccacaccttgacccccaaataaaaccgcgggcggaacaggataacctaagaccaccggtcaggggaccaccacaaaaaacacagccgggggaacggccaccgggggaggccccccacgaccgccccagggtcctcgaacaaaccaaaacagggggttccccgccccctgggcgcagggggcaccccaaaacaccccggatgcgcaaccggtaaggaaaaaacagccttgcgatggaaaaa

SEQ ID NO: 119510 - DNA, 660 bp, Zea mays
  Clone ID: MRT4577_40477C.1
atggtgattctaaagctggattttgaaaaagcttttgataaattagagcatgcggctgtcactgacatattgaggcataaaggttttggggacaaatggatccattggatttcaatgattttaggatatggtacatcacaagtacttttaaatggtgtccctggaagacgttttcactgcaggcgcggagtcaggcagggggaccccctgtcccctcttctctttgtcctggcagcagatctccttcagtcaattattaataaggctaaagactgtggcatcctcaatctcccaatcctgcattcatgtggggctgacttcccgattattcaatatgcaaatgacactattctgatcttggaggcttgccttagacaacttttcttcctcaaagcaatgcttaattcatttgcagaatccataggcctccatgtgaactatcacaaatctaatatttatcccatcaatgtctcagatcagaaattggcaatcttagcaaatacgtttcactgcaaggtcgggactatgcctttcacgtatctcggacttcctttgggacctaaaaaccccaacttaggagtgctcctcctcctcattcagaagattgaaagaagactcacatcaacttctatctttttatctcaggctggcagattataa

SEQ ID NO: 119511 - DNA, 333 bp, Zea mays
  Clone ID: MRT4577_40478C.1
acacacacacacaatcgctgtctgtgttcaacacggccgacgccccgctcctgacaagccacggtcaggccaagcacctggacaacgcgccgtccatcgacaacaccatcgagacgtacatcgacgcgaccggttccatgcagctgctcaaggccttcctgctggcattcgcgtgggccttcgacgcgcagcacatgttcatctgcgtgttcacggacacggagccgcagtgtcactgcacgggcgcctcgtcgtccttcaagccggccgtacccccggcctcgccgtgcgcgctctcctacggcgcctggacgtcggacctgtcggtccaca

SEQ ID NO: 119512 - DNA, 179 bp, Zea mays
  Clone ID: MRT4577_40479C.1
ggacgacccgtaataacgtagtttttaacaattacaaacacttgggcaaaccgaaaaaaaaattgaaacacttggcaaatccatattgctggtgagactaacaccacaccacattttggggttctccgagtaatattacaggactttacttagttattcagtgtgacattaaaaactga

SEQ ID NO: 119513 - DNA, 502 bp, Zea mays
  Clone ID: MRT4577_4047C.1
cggtccgaattcccggtcgcccagcgtccggaaatcataaaaaagacagcaggggtggtgtagaaaaaaagcacctggagcatgaccggaacctgactgattacaacatcaatgaggagagcactcttgacgtggtgtttctaatcaaaggtggcatgcagattcttgcgatgacattgactgacaaccacatccccttgggggtggacagctctgacaccattggcaatgtcaaggccaatatccaggacaaggagggcattcccccacagcaccaggatatgggctttccctgcaagcacctctaggatggccgcactctcgcgcgctacaacatgcagaaggagagcacccttcaccttgttcttcggctcataggtggtatgcagagctttgtcaagaccctgacttggaaaacaataaccctcgaggatgagagctagcacactattcacaatgagaaggcggatatccatgactaggggtggctccccccggacca

SEQ ID NO: 119514 - DNA, 1104 bp, Zea mays
  Clone ID: MRT4577_40480C.1
attgggaccctcgaggcgggcggggaagcattcaagcatcgacagtcgacgctgcagcaggaagccaaagaggagagaatccatcgagtcgaccaccgagcacggttagggcggcggggctcgccgtggccacagctcaggaatccaatcccccactcctcaccggcgcccgcgctctggctacttcctacgccaccaccgcccgctccggcctcggctcctcgagcaagctgccatggctgccgccgcgctgagggagcaactcaacgctctcctctcctccatgttcgcctcgggtctggtggacgagcagttccagcagctgcagatgctgcaggaagacgggggcacgccgggcttcgtcgccgaggtcgtcaccctcttctgcgacgacgccgacaggatcatctccgagctcgccgctctgcttgaccagcccatcgtggactttgataaggtggacgcctacgtgcatcagctcaaagggagcagcgccagtgttggcgctcagaaagtgaagtttacttgcatgcagttccgtcagttatgtcaggataagaacagagacgggtgcatcatggcattggctgttgtgagaaatgagttctatgatctgcgcaataaattccagactatgcttcagcttgagcagcaaatccaggctcaacaataaatcgaagcagaaagcgtagctgcatgtggcctcacatgataagtgtatctttaaagatgtagaccatgttctctgtgttcctacaattgtgacaaaatcatcgtcgttgaggtcggctcacatgcatgtaactgttagctataacaattattgtctaacgttgtccttgttactccacccgtttgtgttggattgccatcgaccatcatatgaaaactttttttttccaaaaaaaaaaaaaaaaaaaaaaaaaaaaaaaaaaaaaaaaaaaaaaaataaaaaaaaaaaagggtgaatgatactagagtataaaagttatagttcgtgtatatggaaagtttaaaattattttattgggcgacctaaaaaaaattaattactgggagaactacaacgtgacgaatggtaaaaaccctggtataacataactt

SEQ ID NO: 119515 - DNA, 1052 bp, Zea mays
  Clone ID: MRT4577_40481C.1
ggaaggtagccggctcgggcgtggcgggatgcaagcatcgacagtcgacgctgcagcaggaagccaaagaggagagaatccatcgagtcgaccaccgagcacggttagggcggcggggctcgccgtggccacagctcaggaatccaatcccccactcctcaccggcgcccgcggttttataaatagattccctcgtcactgtcgcggtcgcggcttgatcggattcaactcacctaccccaccccctcgattccttcccagctctggctacttcctacgccaccaccgcccgctccggcctcggctcctcgagcaagctgccatggctgccgccgcgctgagggagcaactcaacgctctcctctcctccatgttcgcctcgggtctggtggacgagcagttccagcagctgcagatgctgcaggaagacgggggcacgccgggcttcgtcgccgaggtcgtcaccctcttctgcgacgacgccgacaggatcatctccgagctcgccgctctgcttgaccagcccatcgtggactttgataaggtggacgcctacgtgcatcagctcaaagggagcagcgccagtgttggcgctcagaaagtgaagtttacttgcatgcagttccgtcagttatgtcaggataagaacagagacgggtgcatcatggcattggctgttgtgagaaatgagttctatgatctgcgcaataaattccagactatgcttcagcttgagcagcaaatccaggctcaacaataaatcgaagcagaaagcgtagctgcatgtggcctcacatgataagtgtatctttaaagatgtagaccatgttctctgtgttcctacaattgtgacaaaatcatcgtcgttgaggtcggctcacatgcatgtaactgttagctataacaattattgtctaacgttgtccttgttactccacccgtttgtgttggattgccatcgaccatcatatgaaaactttttttttccaatccccaacaaaaaaagtggaatgagaataaccggtttcctggtaaaaaaaaaaaaaaaaaaa

SEQ ID NO: 119516 - DNA, 471 bp, Zea mays
  Clone ID: MRT4577_40482C.1
aagaatagtgcaaataaagagccaagtacccaacgttttacctagttctattgtcgagcaccccagatcttctgcagggactcatgctctgagtatctacactggacgtaatgtccaccacggggatcgtgtgtccccgttccatgagcaggaggtcaacgtcatcgtcgagaacattgagcagcactccgaggtcagcgccaagagagcctgttcaagagccaggtccgctaccaggacatcctggtatacgagtctgtaccctctccaccctgttggcatgaaggatctccgtgagatcaccgccaggtaccgatgttgtctgcttgcgacctccggctatgaagggctggtcctgtaaatgctatacatgcttcttgggtccaaaaatactctgctgatcattgtggacaactactactccctcctcgccacggcgatcgctctcccgcatgaggaacgatcttggtc

SEQ ID NO: 119517 - DNA, 261 bp, Zea mays
  Clone ID: MRT4577_40483C.1
cacgcgtccgctcgagcggggtcgtccacgtggaggcgccggactccaacgtcaccctgcgcctcaccaagctgcagtggcagcacagccagatggacgccgggagcgtggtttgcgaagaagcgtggtacgattctgtcagcatcctggagtcgccggactccgacgacgatctcgacaacgatttcgctagcgtcagcggagaccctctccctgatgtcaccggcggctcggacgcaccgcagtgcaaggaggcagcgt

SEQ ID NO: 119518 - DNA, 256 bp, Zea mays
  Clone ID: MRT4577_40484C.1
tcttagcacagtatcacccggctagtgagcctggtcgttgtcccgcaggacacacacacatttcctccgctgcctgagctatggcagagccgagctggatccggctccggcagtcgcgtgcaacccttctcatcctgctgcttattggccttaacatgttcctttcctccggcggcaacttcgagggctttgactctgacgaccttcccttcgtgggcggtggtctcgatgctgacaatgacgaggaaggtcttga

SEQ ID NO: 119519 - DNA, 1997 bp, Zea mays
  Clone ID: MRT4577_40485C.1
catggaccctctcgccggccggagccgataaaaccgcacctcggctcctcccctccccaccaggcaccaaggtcgccaccgccaccgctgccccaaagtatcgcacccccaaagccccgctccctcaccttctggaaccttcctcgcatggccccgcccccctccatgcctgccgcctccgatcgcgccggccctggccgcgacgcgggcgactcgtcctcccttcgcctccgccgcgccccctcagccgacgccggcgaccttgccggcgattcctcggtaggcttgcgggagaacggcgagccgcaaccgccgacgaatccgccgccgcaggagcagcagcagcagcacgagatgctatactaccgcgcgtcggcgcccgcccaccgccgcgtcaaggagagccccctcagctctgacgccatcttccggcagagccatgctggtcttctgaatctatgcattgttgttctgatcgcagtgaacagcagactcattattgagaatttaatgaagtatggcctgttgataagagctggattttggtttagtgcaagatcgctgggtgactggccccttctaatgtgctgcctcactctaccagttttcccactagttgcactcatggctgagaagctgatcacaagaaagctcattggtgaacatgtggttattctactccatatcattattacaacatctgccattgtctatccagttgttgtgactcttaagtgtgactcagcagtactatctggatttgtgctaatgtttcttgcgagcatcatgtggatgcagcttgtctcttatgcacatacaaattatgatataagggtattgtccaaaagtactgagaagggtgctgcatatggaaattatgtcgatcctgagaatatgaaagatccaacctttaaaagtctagtgtacttcatgttggccccaacactttgttaccagccaacttatcctcaaactacatgtattagaaagggttgggtgacccagcaactcataaagtgcgtggtttttacaggcttgatgggcttcataattgagcaatatataaacccaattgtgaagaattccaaacatccactgaaagggaattttttgaatgctatagaaagagtcttaaaactctcagtgccaacattatatgtatggctttgcatgttctattgcttttttcatttatggctgaacattgtagctgaactcctctgtttcggtgaccgtgaattctataaggactggtggaatgccaaaactgttgaagagtactggaggatgtggaacatgcctgttcataagtggatcatcagacacatatattttccatgtataaggaaaggcttttccaggggtgtagctattctaatctcgtttctggtttcagctgtattccatgagatatgtattgcggtgccgtgccacattttcaaattctgggcattttctgggatcatgtttcagataccgttggtattcttgacaagatatctccatgctacgttcaagcatgtaatggtgggcaacatgatattttggttcttcagtatagtcggacagccgatgtgtgtccttctatactaccatgacgtcatgaacaggcaggcccaggcaagtagatagttcggcagagacatgtacttcaacatcgaccatcagaagcagactggagcgacgcggcaggaagcagcagtagcccctcacttgccattgtttaccatcagctagcagctggtcagcctgaaaatgcttctattccaggcggccgtgctgggatgcagcgtgtacattaccagcgatgcaacgtcaacggttaccaagcgcggataagcagtgctcgtggcatgtgaactctgtacacattgaagtctatatgtccgcggtgctgtgtgcataatgtcgtggtagatgtaatatgtacaatgtatgccacgacttaagaggtcaaaatgaggctcacgtcttggagtgaaaaaaaaaaaaaaaaa

SEQ ID NO: 119520 - DNA, 686 bp, Zea mays
  Clone ID: MRT4577_40486C.1
cccagcgtccgcccacgcgtccgggcagtgattggtttatataacaggttaattgggttttgacctgcatgggactttgatttccattttccatggcattcttgtttgctcttttggttggtttcaggctgaacattgtagctgaactcctctgtttcggtgaccgtgaattctataaggactggtggaatgccaaaactgttgaagagtactggaggatgtggaacatgcctgttcataagtggatcatcagacacatatattttccatgtataaggaaaggcttttccaggggtgtagctattctaatctcgtttctggtttcagctgtattccatgagatatgtattgcggtgccgtgccacattttcaaattctgggcattttctgggatcatgtttcagataccgttggtattcttgacaagatatctccatgctacgttcaagcatgtaatggtgggcaacatgatattttggttcttcagtatagtcggacagccgatgtgtgtccttctatactaccatgacgtcatgaacaggcaggcccaggcaagtagatagttcggcagagacatgtacttcaacatcgaccatcagaagcagactggagcgacgcggcaggaagcagcagtagcccctcacttgccatttgttaccatcagctagcagctggtcagcctgaaa

SEQ ID NO: 119521 - DNA, 445 bp, Zea mays
  Clone ID: MRT4577_40487C.1
tctgcatatggaaattatgtcgatcctgagaatatgaaagatccaacctttaaaagtctagtgtacttcatgttggccccaacactttgttaccagccaacttatcctcaaactacatgtattagaaagggttgggtgacccagcaactcataaagtgcgtggtttttacaggcttgatgggcttcataattgagcaagtgagcctcctatattccttaagtaacttgtatttatacataactttggattaaattaccaatttttcttctattttgcagtatataaacccaattgtgaagaattcaaacatccactgaaagggaattttttgaatgctatagaaagagtcttaaaactctcagtgccaacattatatgtatggctttgcatgttctattgcttttttcatttatggttagtatcttgcttcagttcaacagtacc

SEQ ID NO: 119522 - DNA, 478 bp, Zea mays
  Clone ID: MRT4577_40488C.1
ggaagcaaataaagcccggccgtaccaaagcctacacaaggagaaacacttactgccactgccggggggtttttaaaggacacggaccttgaccacccgatccaccttgaaacaaacattgggaaaattaaaggagggcagaaccacacacacgccaacgcaacgtttttgatcgccggacacccacacgctgggaccttaggagctggttttgggctcgccgggggggtgcttgggggttttttcacccgagcttttgggggagccgggtattttggccatgatcttgcccaagaagccctttttgccatccgggctgttgacgtcaacctttgcttgcggagccgggggtggcccgtggacggccggggcgggggggggggaaccaactttttccggcttcttggggccaccggggagctttttcttgatcttggccaagagggcctttttttcatcctccggggcctgggggggg

SEQ ID NO: 119523 - DNA, 710 bp, Zea mays
  unsure (1)..(710): unsure at all n locations
  Clone ID: MRT4577_40489C.1
cctcgaggccggccgggccgggctcatctctctcttctcctcgcctcgccttgctgtcacgccgacgctagcgcctgcgtcctgccgtgtcgaagatgctgccctccccggagacgggctcgaatcgtcgtcgggcagaaagatggctgaaggattcaggctactgcatctggtcagggcttttctggctctcttgccagaggtgcaaagcgcgcataggaagatcaccgttaccgagaaaaagctatctacactgttatttccctcttacattttcctgtgctgcagccagatcccactctatggcattcattcaacaactgcagctgatactttctactggatgcgtgttatcctcgcatcaaagcgtgcgcacttgggatggagctgcgtattactccaagtgggacatctgtgatgacaatgcaacttcttgatgcatcgaanatcattgaagatgacgacagagtgacgagaggatcgcgctctgctgaatggtgcacaaaagctgcttgctagcctgactgctatggtcgaagctgtgtgatatgtcctgtgtgcaatgtatgttagtgtacggcaacctggaacagatgatgctatcctcattatacttcagctattcttggctggcatcattgtcatctggctgcatgaacttctccagaaaggttatggcttgcgatctggcatgtctctgttcattgcta

SEQ ID NO: 119524 - DNA, 765 bp, Zea mays
  unsure (1)..(765): unsure at all n locations
  Clone ID: MRT4577_4048C.1
cctcgaggccggccgggttgaatgcaacaaacatgagaatctatatatgtaacacattttttcttctacttatttggttcagttgtgcttaacgtttcaaagcagggttgtgatgattggttgttaaatgatgtaggttgagaccatataaacagttgtaaataaattctttgctatatagaaatcatagcaacgcacgggcacttaagaaacggagagggggaggccgttgtggctttgtgaagcgcttcgtcccaagcgggcgtgggcgggtagggcaccacacatatcgggcggctctactgtggtattttaaaaaatattttaatttaatcaataacattcttaatttcttacgtacccattttaatctatatctattatatactatattaaagcaccagttttaacggtcgttctgcatcatatttttacagatgacccctcacgtccatttcaaattaatccgctgcacgctcgtccgctccgcgcaaccaacctccacgtcacaaaacacaccttcacatatagatggccaaacagcggtccggcacgggcctgacgcccacgggccacaactctagcctaggcatggcgtgccggcctgctgactgtgtcgggttatttggttaaatcagtgtaaaatgttaaaaagtggtgcagaaggtggggttcgnacccacacattgatggaagaaagggcgtagacactgagtgaagctatctaaagagtagaacatcatgctcatatatttttaatattaa

SEQ ID NO: 119525 - DNA, 366 bp, Zea mays
  Clone ID: MRT4577_40490C.1
ccccaaaaaaaggggaattcccttaattaaaaggcaaagctcccgcaattcccttaaaaaatttcccaccaattttttccctaaaaattaagccgttgcctttttattttctccccaactaaggggtcccattttaaaaaaccaccgggaaaatgaaatgataacccccaaaagctttctttaaaaaaaaaaggccgctggcatcccctgaattggaccataaccctttttttccccctttccctttggcaagaaacaaggaccccccactttttaattacttggggggccgacaatcacaatgctaacaaaattgacttctccccttccccaaaacttaaggccccgttgactgcaccccaaccc

SEQ ID NO: 119526 - DNA, 577 bp, Zea mays
  Clone ID: MRT4577_40491C.1
cattgggtacctcgaggccggccgggctcctgttatcttgttccttctccagtgaaaactctctgtgtcctcaagctcaagcataccagcaccgccagtctcagcccaacgctctgcctcaacaactcacctcgtcgtttaccttttcgttctttggccgtcgtccatagaaaagaatccccatcgtcaggtcgtttctccacaccaagtcggcgtccgtgatagggtgaggcagaacacctagaagaagtggtgttcgaagaagaagcttgctccaagtactgttgatccagtggtggagtcccatctaactatagaaaagttttgtatcttctctgcaacaaggaaagatttttgatgccttggctttattagttgcttcttatggaggtcttgaagcttagattacttatgtgatttttttatgggaaaggcttcgcctttccaagtattgtagttaagttatgcactctaaagactatcaggacttgtaataatttcattcccttttatgttgtaagacttgagttctagaatgtaaagtgtattttacaaaaaaaaaaaaaaaaaagcggcc

SEQ ID NO: 119527 - DNA, 1715 bp, Zea mays
  Clone ID: MRT4577_40492C.1
gaccctccggcctgcgccgggtctggagttgacgtaatgtgctcgggttgccgtcagccactcaacttgagagaaaacgccataattgttacaactgtgctctagtattttgtcattcctgcagcagtaaaaaatccctgaaggcttcattagcacctaatacaaacaagccctaccgtgtctgcgatacctgctacagcaaactgacaaagggacttgagacggatatgcattcttcagcgaagcgagctgctactgtaccgggagtcagtgatgcaaatgaggaggatctggaaacaaggtcaaatgctcaactatcaaggttgtcttcaatggaatcttttaagcatttggatagcagatattccaagaaaaataagaagtttgaatttaatagcacccgtgtttcccctgtgcctaatgggagttcacattggagtggactaaacatttcaagatctttcaatcctgtatttggatcttcaaagaagtttttctcagcatcagttcctggatcaagaattgtttctagggcaacatcacctatttcaagaagaacaagccctccacgatctacaacaccaacacctactctgggtggcctaacgtctcccagagttcccactgacggcaagccaacaaatgatgcattaagccaagaggttctgaatttgagatctcaggtggagagtcttaccaggaagtctcaactcctggagttggagctggaaagaactaccaaacaattgaaggaagctatttccattgccggcgaggaaactgcaaagtgcaaggcggcaaaggaagtaatcaagtcactcactgcacagttgaaggggatggcagagagattacctggaggagcagccaaaaacactaagttgccacctcttcctggaatttccattccaagtgacatttcgtctttgcctatggagagtgtgggcagcccaagcagctccggagaacaaatcataaatggtcataatggattgcttacttctaatggacaaagttctattaggaataaaacgagccatccagaagttggcaagaatggaagtaggctgcctgatgctgaatcttgccatgatgctgaatgggtagagcaagatgaaccaggtgtttacattactctcactgcgttgcctggaggcgccagagatctcaagcgggttcggttcagccggaagagattcagtgagacacaagcagaacagtggtggcaacagaaccgggcgagggtataccagcagtacaatgtccgcgtgattgacaaatcgaccgccagtgtcaacagtgacattgcggctaactgacactagattgacctggagaaacatacctgattacaagcggagctgaggccatgtaacctgaagggctctctcgtcagtcaagctgggttgctaacgtggctaccattttacctacccccctgagaagaggtggtttctgctcccaggaaaacaggaagttttttttatcttcagttttacataattctttactcttaccccgacccccccccctttttttttctcattgtgtgaaaagtagagtgcttgagcagaggtaatgtaaatgcttagtagaagcaggctaatctatcttgtaaatgcataagcaagcatcggttttagaatgccttgggaatcttccaatatgattgcaaatgcaaatggcaaatctgggccaagtattgatggtttctg

SEQ ID NO: 119528 - DNA, 1516 bp, Zea mays
  Clone ID: MRT4577_40493C.1
atggcttggcaaacggatctaggctggcttcctctctttctgttcttctcctgctctgttctttgcgtcttattgcccctggcaccaggcgagtactacgccccgcggcttccgatgacgccgccgccgaacctttcgccggcgccggccatcacgggcggcacgttcgcgtacgacgacctagcggcggcgacgggcaggttctcggacgcgaacctactcgggcagggcgggttcgggcacgtgtaccgcggcacggtgggcgggcgggaggtggccatcaagaagctgcaggccggcggcgggcagggcgaccgcgagttccgcgccgaggtggagatcatcagccgcgtgcaccacaagaacctcgtctccctcgtcggctactgcctctacggcgagcagcggctgctcgtgtacgagtacgtgcccaacaagaccctcgagttccatctccacgggacagggagtggcaggccgacgctggactggccgaggcggtggaggatcgcggttggctccgcgaagggcctcgcgtacctgcacgaagactgttatccaaagatcatccatcgtgacatcaaagcggcgaacatccttctggattaccattacgagccaaaggttgcagatttcgggttggccaaataccaagcagctgaagtcacccctgtttctacgcgtgtgataggaaccttcggatatctggctccagagtacgctgccacaggcaaaattagcgaccggtccgacgtcttctccttcggtgtgatgctgctggagctcatcaccgggaggaaaccaatcatggcatcttcagagtttcagtctgtggcattggtttcttgggctaggccattgctgacaagagctgtggaggaggaaaactacgacgacctcatcgatccgaggctggagaccgactacgacgcgcacgacatggcgcggctggtcgcgtgcgccgcggccgccgtgcgccagaccgcgcggtgtcgcccgcggatgagccagatcgtccggtacctggagggcgagctgtcggtggaggacctgaacgccggcgtggtgccggggcagagcgcggtgcagcggtcgggcggcggcaccacggaccggatcagccggctcgggcgcgtgagggagcaccgtgaccgggacgaccatcacggagtgcacgagcagcgatcccaccagcgaggacgcgggcgacacgggcgaggtggcgggcgcgcaggggcagcagtgctccggcaggcgcgcggccgtctacaccgagaggatgagccggcgcaccaccgccagacgcaccctgaattcgttgttcgttcgcgtacatcagcatactgaactttgcttcaacttttctaaattatataagttactctattctttttaacaacttagatctcaaagtttttggttgtgcgacatagggatgaaaaacgaacggatatatacagaaaacctctctggttttgtttcccgtatccgaattttatcatcggaaactacattt

SEQ ID NO: 119529 - DNA, 349 bp, Zea mays
  Clone ID: MRT4577_40494C.1
gggggggaaaccggcccaaccttaaaaaaatttgacctccccatagttaaaaacattccccccaacttaaaaaggtaaaaaaacccaacttacccccaaaaataaaaccccaccccttttaaaaacttttaggaaaaggccccaaattcccccccccccgaaaaaattttcctgctgaaaaaaattggaaggggccccaaccttgggggccaaatcgcctaactcttggaggccccatacctgggcttttggaactcaaaacaccttttaaatatttttgggcccccgacccaaaagggccggatgaacccctccctaactgggggccccaaaagaacacccccctttg

SEQ ID NO: 119530 - DNA, 508 bp, Zea mays
  Clone ID: MRT4577_40495C.1
agttcatacagaagctcaagtttgtatttgtatgtcacagtttcgatatggttccttgttttctgttggctgtttgcaccttttgtcttcaacccatcctgctttgagtggcacaagactgttgatgactggaatgactggtggaagtggatgggcaatagaggtggtattggattagcgcctgaacaaagttgggaggcttggtgggtgagtgaacatgaccacctgaggaatgcaacaattcgaagcttgctcttggagttcatcctttccctgcggttcttgatctatcagtatggtattgtttaccacttgcacatagtgcatggcaacaaaagcttcttggtatatgcactgtcatggctggttatagcagttgctcttgtgtcactaaaggttgtttcaatggggagagagaagtttgttacaaggattcaactagtgttccgcatcctcaagggcattgtgttccttgtgctcattggtttgcttgtccttttatttgttg

SEQ ID NO: 119531 - DNA, 723 bp, Zea mays
  unsure (1)..(723): unsure at all n locations
  Clone ID: MRT4577_40496C.1
aattcggcacgagggaagcagcaggcatcgggatccgagccgctgtaggttgtcgcgtttctaaacacctccgacgtctaggcgatggggcctctgaggactagggttttggggcgaggtactagcgttagtttttcctgcgaccccttagtcctatatatagcgtcgtgtgtctgggggctccaaccgaggttagtgtgggccctcccgatcaagggcccgattaaaggaacgatagttgggttaagcccaatccagtctctattgaccggctgtagaggacacacccaacactcggctctttcttgtcttattgcccctggcaccaggcgagtactacgccccgcggcttccgatgacgccgccgccgaacctttcgccggcgccggccatcacgggcggcacgttcgcgtacgacgacctagcggcggcgacgggcaggttctcggacgcgaacctactcgggcagggcgggttcgggcacgtgtaccgcggcacggtgggcgggcgggaggtggccatcaagaagctgcaggccggcggcgggcagggcgaccgcgagttccgcgccgaggtgggagatcattcagccgcgtgcaccacaagaacctcgtctncctcgtcggctactgcctctacggcgagcagcggctgctcgtgtacgaagtacgtgcccaacaagaccctcgagttccatctccacgggacaagggagtggcaggc

SEQ ID NO: 119532 - DNA, 357 bp, Zea mays
  Clone ID: MRT4577_40497C.1
aaatgtagtttccgatgataaaattcggatacggaaacaaaaccagagaggttttctgtatatatccgttcgtttttcatccctatgtcgcacaaccaaaaactttgagatctaagttgttaaaaagaatagagggggggatataatttagaaaagttgaagcaaagttcagtatgctgatgtacgcgaacgaacaacgaattcagggtgcgtctggcggtggtgcgccggctcatcctctcggtgtagacggccgcgcgcctgtttgagcactgctgcccctgcgcgcccgccacctcgcccgtgtcgcccgcgtcctcgctggtgggatcgctgctcgcccagtcgtccgcccac

SEQ ID NO: 119533 - DNA, 2106 bp, Zea mays
  Clone ID: MRT4577_40498C.1
atggcaaaagaatcgaaggcagacgcatacagcgctcgggttcacacagcagcagacaatgcattgcgtgcaactgctaatccaaactcttatttcggcaaaggctgccggagaagaaagctcgccgttctgattgagaggtccaccggtaaacggggcggccgactaatcgttgcacaagctcgcggcgcggcgcggcgccgccatgtcgtctccagcgccaacgtcgccggctacgccgtctccaccaccaccggctccggtaccgcccacgccgtccccgcagccgccgactccggcgccggtaccgcccacgccagcgccggtaccaccaactcccgcgccggtgccgcccacgccagcgccgattccgcctacccccgcgccggtgccgcccacgcctacgccgtcccctcctcctccgtctccgtcgccaccaccgccggtgacgccgtccccaccgccgccagcgaccgtaccgacgccatccccacctccaccggcatctcctccaccaccgaccgtgccaacgccatcaccaacgccaccagcatctcctccaccaccggcgaccgcgccaacgccaacacctcctcgctcttccttgtccccggcgccaccaggcgagttctacgacccgcggcggggtccaatgaccccgctgcacatgtcgcacgtgcaatcgacgacgccatcctcgacgccgccactgatgcactcgtggcagcagagcagccacggtctgtccgagtccccgctgccgccactgaacccttcgccggccatcacgggcggcacattcgcgtacgacgacctggcggcggcgacggacgggttctcggacgccaacctgctcgggcagggcgggttcgggcatgtgtaccgcggcacggtggccgggcaagaggtggccatcaagaagctgcgggcgggccagcgggcagggcgaccgcgagttccgcgccgaggtggagatcatcagcccgtgtgcaccacaagaacctcgtctccctcgtcggctactgcctccatggtgaacaacggctgctcgtctacgagtatgtgcccaacaagaccctcgagttccagcttcacgggagtggcaggccaacattggactggccgaggcggtggaagatcgcggtcggctcggccaagggcctcgcctatctgcacgaagactgtcatcctaagatcatccatcgtgacattaaggcggcgaacatccttctggattataactacgagccaaaggttgcagattttgggttggccaaataccaagcagctgaagtaacccctgtttctacgcgtgtgatgggaactttcggatacttggcgccagagtacgctgccacaggcaaaattagcgaccggtccgacgtcttctccttcggtgtgatgctgctggagctcatcaccgggaggaaaccaatcatggcatcttcagagtttcagcctgtggcattggtttcttgggctaggccattgctgacaagagctgtcgaggaggaaaactacgacgaactgatcgatcccaggctggagaccaactacgacgcgcacgacatggcgcggctggttgcgtgcgccgcggccgccgtgcgccagactgcgcggtcccgcccgcggatgagccaggtaagactcctgctccagaacgtctcacacacactgggtgcagccgtggctgcaagcgtgacactcgtctccccgttcccaaatggtcaggtcgtccggtacctggagggcgagctgtcggtggaggacctaaacgccggcgtgatgccggggcagagtgcgatgcagcggtcgagcggcggcacgacggaccagatcaaccggctcaggcggatggcgttcgggccgggcgcaggagggagcaccgggaccggggcaatcacggagtacaccagcagcgagttcagcgatcccaccaccgagtacgggctgaacccatccagtgagtacacggccagcagcgcgggcgacacgggggaggtggccgcgggcgcgcaggggcagcagcagtggcacggcaggcgcgcgcccggcgacaccgagaggatgagccggcgcaccaccggcaggcgcacccagtcgtaa

SEQ ID NO: 119534 - DNA, 397 bp, Zea mays
  unsure (1)..(397): unsure at all n locations
  Clone ID: MRT4577_40499C.1
aaggggatgggccctggggggaaaatccattcactccaccaaaaagggggggggggggccaaaaaactggttattttaaaaaaagggatggattttaaaattgaaactaaatttctaggttccctttcgcctggggtaccaaaggaaagggaaaattttttttccaaaaacaaaaagggcctggaaagggcaaataaaaaggttggtcctggggacaaaaaaggaaaaaaaagggggggggggggaaaagggaaaccctttgttcaatcctagaaagaaacacccccagggggctttaatttcccaaagaaaggttttggttcgccctttgggagggaatggttaaaaaagaacgggggctttttcaataggncctttggcctctttaagcccaaaa

SEQ ID NO: 119535 - DNA, 399 bp, Zea mays
  Clone ID: MRT4577_4049C.1
gggagccaaagaaaaagattgtttttgccgctgttatagaaaaaaagcccccggcccgggcgagaaaaaaaaaattttttttgacttagggggtttccccgggggttagaccctggaccatcccggggggcggttgttttacccaccaacccttggggggccccattctcttaccgataaaaagatccggacccggtcccagggggttggccgtacctttgtcctggctaagggcccggaaaaaagccggcggcgcccccaagggaaccgggggggaatcgggctttttaccgggggggggggctggcccctccacgggttttgagcccaaacctaagcctgggggtgtgtcccaccaggggggctctcccgaagcctgtggcggacccaaacgccgcc

SEQ ID NO: 119536 - DNA, 181 bp, Zea mays
  Clone ID: MRT4577_404C.1
ggggatttatggtggagggcaattcttttgctggattgtgcatacactcaccgagcttgtaaatattgttccagtatctcatagggcattctctgccaatacatttctccctgtaacttgtgtcatttgccagcgaaccagcaatttctactctgggttgaacgcaaaaatgatcttggac

SEQ ID NO: 119537 - DNA, 330 bp, Zea mays
  unsure (1)..(330): unsure at all n locations
  Clone ID: MRT4577_40500C.1
ggggggacctatatatgtaaattacgaatgttgttttgtaaaacaatgaaatgggagctacacgaccgaatgctggtaagggtttttcggttcctttgttcacatttaaactttgcctgcatcagggggtgtctcaccagggactttgctggaaccaacaatcaagtttttgagcagtatttgggcacgatccttcagggttaaacttttcgttttgcaaccttgacaaagatcactttgccattcaggaacttcccgtgcattcctttcatggggcccctntgtttctctccccggtgtaagaaaggaaagcgaaacctttcgggcggt

SEQ ID NO: 119538 - DNA, 481 bp, Zea mays
  Clone ID: MRT4577_40501C.1
actcctataggggattgggaccctcgaggccggccgggaaatcgcaaattcgtcttccctgcccatctatcgcttggacacctctgcaagggagcacatggctctcgagaaggccaaggagatcatcgcgtcctccccggtcgacctagctctccgaaaggccaaggagaccgtcgcctcccaccccgtcgtcgtcttcaggttctgctcgtcaaatctatttgtttccaagtaccgcacttgcaaaagcaggtcaagcttcgaattgggccatctgctacatagtagacgatgatacatgagctatccggtagcaggttccttttctcccttccaaattcgcagctggctggacagaaggaactttgttttgggcggataaggaaatcggttgcctcaactttgtgccggagactgaatatagtacttttgcagtaattatatatttggtactgccaaaaaaaaaaaaaaaaaagcggcc

SEQ ID NO: 119539 - DNA, 467 bp, Zea mays
  Clone ID: MRT4577_40502C.1
tctacgagttcagaaaaaatgatgaagctgtctatgtatgatacgatggctgataccacagatgtgcagacactatgactcaggaagctggatgcttgctgggacgggtcaatccaaactgtgacatggaagtacgtctacacagcgcactggcgacagcgaaacttatagtcatggctcccatgatatgctttagttcggcgtttaaacttcaaccgattgttctatggcagtggcgaaaaatcagtatcttgtgatatatctcggaggctcatcaggggtctttgcagcaggatgcaatcatcatatcagggatagtggattgcgaatatccgtcgtcacaattcgtgcctccatatggagcaccagtatcctctgaaacagtgctctctctgaacagatgaatatggtcatggatatggcggtgcagtgacttgcgcattcggtacgctaatgaatagagacta

SEQ ID NO: 119540 - DNA, 661 bp, Zea mays
  Clone ID: MRT4577_40503C.1
gtcgacccagcgtccgcagtactcacttcaagctacttagccatactaacacttataactaagttttgtggctattagtgtttgattttttacaggatcacctattcaccacccttcaggtgctctcacctttgaatgaggatgggagtcctttactcactgataatcattgggcaattgttgaaaaagtgttatctttcttagaattgttttatgaatcaattgttgcattgtctagtgtctactatcctactagtactttaatgttgcatcacattcttaggatagctagacatctaaatgcatttgagaatgatatattgctaagatgtgctgttgttcctatgaaagataaattcttgaaatactagagagacattccaattttgtatgcagttgcatttattttggatcctagagctaaaatgaggggttttaacaaagtccttatcaagttatctagtttaactggtactgattactctaggcttccatttgatgttcgtactaagctaaccaaggtatttcagttgtatgagaccaaatttggtgacacacgcatgcgtggcgcccaccaaccatcatctcacctatctggtaagaaagaattggcatgggatgacatttattgtgatgatgaccttgatggtgagttctctac

SEQ ID NO: 119541 - DNA, 117 bp, Zea mays
  unsure (1)..(117): unsure at all n locations
  Clone ID: MRT4577_40504C.1
gnccacagcccccgtagaccatggaagangcatggcttgagcatcngcatggttcttgagagtcaaagcngcacgacgatggatanngaaacagagcttctcaagaagcattcgttt

SEQ ID NO: 119542 - DNA, 367 bp, Zea mays
  unsure (1)..(367): unsure at all n locations
  Clone ID: MRT4577_40505C.1
ggcggggggggggggggggaacaagaaaaagaggggggggtgaggcgnttttttttgtggaacccccccctccgcccagcgnnaatcccgcgcccgcccacagccggngccgncccacgcgttttgggcgtaaaaacacacnttaggtggggggggggggggctccccatccccaaggggntcggcntccaaaaatatttttttttggnttccaacccctcttttctctcggtaattgcccacaccccagcccacaccgacaagaagggngagnaagggaatgacaanngngaaggngacattcccggggggtgggggggaccggaaacttggntnnnggggggggggggttacctcggcaaatttt

SEQ ID NO: 119543 - DNA, 377 bp, Zea mays
  Clone ID: MRT4577_40506C.1
attggttcttttttggatattttggaaaaaaaagggaaaaacggccaaaaggggaccaaaaaaaatgggaaggggaagggggggaaggggggggaaagaaaaaggggagagggggaaaaggcgggcagaaaggtccaggaaagatcaaacccaaagaaacccccgagattgcaagggtttttttagctgggcccgcaaaggggggggaagggaaaagagaaatgaaagagggaaccccgcaaaaaaccggcaaacaccctctctaaccagggcaaggtgaaaggaaaattctttgaagtttccccaagagaacaaacaagaggagaaaaacaaaaaccccagaacttcccgggaaaatttgggtggaaaacgggggg

SEQ ID NO: 119544 - DNA, 267 bp, Zea mays
  Clone ID: MRT4577_40507C.1
aagcggaacgagagcgatagataaataataaattgtagtgggtgtgcctgtaccgctccaagcatacaagatatgatttgagggtacacggtaaatattcagggggctgaatgcgaggcattttggctcgcgtaaagcacataacaggagtgaagcatgagagctagttctcagtaaacgcaaactgtaaagttgatgttggcccgaaaagttctagtatttacaatggaccataaggcgctatttgagtggatcgaggaggctgag

SEQ ID NO: 119545 - DNA, 211 bp, Zea mays
  Clone ID: MRT4577_40508C.1
ggacagaaaatttaattggataactggggaaacagcctaaagatcatagttttgggctggaaaggggcaggggtcaaattgggtaacacagactaagattcaaacctcgccaaaatgcccttgtttcccccgcagtcgcacattccagtttcaaaggaagggtccccaggttcccctttatttgccgtcctagggtacatggaaggggggg

SEQ ID NO: 119546 - DNA, 253 bp, Zea mays
  Clone ID: MRT4577_40509C.1
ttttatcataaaccgcgctcattcttctctcgcatcgggtcgtatcggaagcctaccaagggagcaacaggggtcccatctcctaatacaaaggtcgaacggacactaacacggtgacagatgcgaccggcaacacgatactatacatagataagatgactcggccggagccagtatgggcccacacatcagttcgtacaaacgtcgacgacgccgacgttagcgtcaccagcaccctcgtgccgtgcgccgt

SEQ ID NO: 119547 - DNA, 382 bp, Zea mays
  Clone ID: MRT4577_4050C.1
gtaataataatgatctttatgacagagacaggtatcgtcgaagacacacacaacaacaacaacttgtgatggacgacgggatgcattgcctgcgtggacatgtatgatcctacaccatatttctcacacgcactggaagcccgctggggcgcgcctggcgcactagttgacgaggagggtgaggttgatgggctggttgagcggtgcgcccctgacgttggccctcccgacggagcagacgtgcaccgccgcctccaggtccggggggccctgcatcagagtgcagcacgggcgttctgggccgcctccccagggtcgtgttgatcaacccgatgaccaggatgtcggacacgcacactttgagggctctcactggggaaca

SEQ ID NO: 119548 - DNA, 299 bp, Zea mays
  Clone ID: MRT4577_40510C.1
taccccgcagttcccggacatgatcctctccgcctctcgagataagaccatcatcatgtggaaactgaccatggatgagaccaactatggaattccacagcgtgctctgcgtggtcactcccactttgttagtgatgtggttatctcctcagatggccagtttgccctctcaggctcctgggatggttccctgcgccttcgggatctcacaacgggcaccaccacgaggcgatttgtgggccataccaaggatgtgctgagtgtggccttctcctctgacaaccggcagattgtctctg

SEQ ID NO: 119549 - DNA, 420 bp, Zea mays
  Clone ID: MRT4577_40511C.1
gaaaaaaaccacctcgggggtgtttctaaattataaaaaaaacatttgtttttttttttttgcacaatctcttttttttgaaatcacaaacagttgtagaaaatgcaaaatgtaggaatggtttaccgggaaaacaaaatttttaaaccgtaatggttacatgaaactgttgacaatcagccgatgtccaattaattccggaaccccccaaacgggaaaaatcgttttaaaaaaaaaaaagggctgaaccaattggacaggctgctgcctttgtgcataaatatagcatccttcataaatataaagaaacccactctccttcacttgtttttttattaaggggactaaaaaacccatcacggggcatttttacacaaatttcccaaatggccccctggcaataaaattcccacgggcggc

SEQ ID NO: 119550 - DNA, 341 bp, Zea mays
  unsure (1)..(341): unsure at all n locations
  Clone ID: MRT4577_40512C.1
gagatgcatcaaaaccaacctttgttgtgaccatgcttatattatgggctattcctgacatgagaatgtggggaagtttactgtattcatccctctctatctatgtgtgtggtgggtgggggagattacccacattattgtgtgtggtgtggggcgtgatgtgtgcgtggtcgccataggggttggggtggaatgacgtgtngctggtncctcggacgagaaaaggctgtgggtgggttgtgacgacgctntgggcgctgtcgggcgctctggcgggcgcttctaggggctccgtgctcggttcgcggcttggcgtcctcttggtggtcgctgttttttgt

SEQ ID NO: 119551 - DNA, 1206 bp, Zea mays
  Clone ID: MRT4577_40514C.1
cggccgctcgaggcggcgggctggacaaccgatcccgaccggcgacctcgcttccaccggatcaaccagctagggtttcgtcttcgtcgtcttctccgcggagcttggaattttcggcgagatgttcgggcgcgggccgccgaagaagagcgacagcacgcgctactacgagatcctgggcgtgcccaaggacgcgtcccaggacgacctcaagaaggcctaccgcaaggccgccatcaagaaccaccccgacaagggcggcgacccagagaagttcaaggagctagctcaggcttatgaggtcctgagtgatcctgagaagcgggagatctatgaccagtatggtgaggatgccctcaaggagggaatgggaggtggaggaatgcatgatcctttcgacatcttccagtcattctttggtggtggcggcaacccctttggaggtggcgggagcagtaggggcaggcggcagcgcaggggtgaggatgtggttcatcctctgaaggttagccttgaggagttgtacaatggaacatcaaagaagctctctcttgcccgcaatgtgctctgctcgaagtgcaatggcaagggttcaaagtctggggcttccatgaagtgtgccggctgccaaggtgctggttacaaggtgcagataaggcagctgggaccaggaatgattcagcaaatgcagcagccttgcaacgagtgcaggggaagtggggagaccatcagcgataaggatcgctgtgggcagtgcaaagggtgagaaggtggtgcacgagaagaaagtcctggaggtggtggtcgagaagggaatgcagcatgggcagaagatcaccttccccgggcgaggcggatgaagcgcctgatactgttactggagacataatcttcgtcctccagcagaaggagcaccccaaattcaagcggaagggcgatgacctcttctacgagcacaccctgaccctgaccgaggcactgtgtggcttccagtatgtcctggctcatttggacggcaggcagctgctcatcaagtccaaccctggcgaagtcgtcaagcctgattcgttcaaggcgatcaacgacgagggcatgcccatgtaccagaggccgttcatgaagggcaagctgtacatccacttcacggttgattttcccgactcgctgagcctggaccagtgcaaggcgctcgagactgtcctgccg

SEQ ID NO: 119552 - DNA, 339 bp, Zea mays
  Clone ID: MRT4577_40515C.1
tgcatcgtcttcggcgatggagaggggacaggggaggacccgaggaggacgacgacggatcgtggttggaagttccctctctcgcattgatggcgccagactcccttggttggttgggccggcaatcaatgccctggctgctgctactgctgctgagtgatgatcatctagcgagatagctagtgcaactgccacggcgcattcatacgcgcttccccttaaaatttctgcatcatggcggcgactgttcggaagctcattagctgcctgcctcacaaaaccgccaaccgctccctaactactgacgctgacgtcgatcggtaacattcgattcggttc

SEQ ID NO: 119553 - DNA, 455 bp, Zea mays
  Clone ID: MRT4577_40516C.1
cggacgcgtgggcggacgcgtgggcggacgcgtgggcttttatatcttcacctttttacatgttggtttgtctgtcttccttgctatctgcaccaattatgtatatatcaaacaacaaactaaaagataggttaagtaaaagtttgatgcaatgccacttgcatagtaagtaaatcacttacctgtttaaatctttcaggtggttaacaaggttcaaatatgtttaaatctaatccctggtggattatccttattccttacatgtttcacattgaaatattgtgcagatgtttctttttggctaagtcatatagttcagcaggcaaaagagctgaagcatatgcattattctgccatgcccatactctcactggttctgcactgcaacagcattcaaacagtcatgacaaggctttaatacaagatctggagtttctatctaacaactgtagatc

SEQ ID NO: 119554 - DNA, 206 bp, Zea mays
  Clone ID: MRT4577_40517C.1
gcgaccgttcagtggccagcgttttaacagacatctatgtgtctgcgacaacaactaggtgcctgagcgacggcgtacagcacaacgcgcccgcatactactgaaggtgcgaggcctacatctgtatcataacaggcgacgagcatccagtctgcactgtacgatggacgcccctacgtgcacggcttccacggcctggaggagtc

SEQ ID NO: 119555 - DNA, 331 bp, Zea mays
  Clone ID: MRT4577_40518C.1
acgctctcctcgagagatctcgcgctccggggatcgggcgcggcggacggaagatcgggaagtgccctgcccaccccggatgctcttcccgaaccgcatcaactacctggccccgatcctcgcctccgccgccatcctgctcctcctactctcgggctacttctagctccccttcatctccaccccgacaccactcctcgcggacgcaacgcgcttacccaccgcgctcgactccgtcagatcgcgcgaccgcaaccccttcacctcgctcctacaggccttcgcgtgctgggacaccgacgtaggctgcccccgcatccgcaccaagctc

SEQ ID NO: 119556 - DNA, 268 bp, Zea mays
  Clone ID: MRT4577_40519C.1
gaacatggaggcctgtatttctgtgtgccataaaaaaaaatgtgtgttatgagcatacggtttcatcgaatgtaataatgctgcatgaccgggcaatgcattgcctgcctagattacttgatcatgcgacaattgcaaggatgtctacaggacgagatattttaagcttccaggagggtcccaagaggtaagttcattaccaggcagatagatcatttttttttgggataagtcttcgttaccagccaggcagagcatttgttattgg

SEQ ID NO: 119557 - DNA, 236 bp, Zea mays
  Clone ID: MRT4577_4051C.1
gagctcatcagtcggcggccgccctctattttttttggggctttttatcgaggtcacccattcttccaccccgacaggcagaacaccaacatggacccgtgacacaacaacagagaccgccagccgtgcggcccagggggacccccggtaggcagctaccatgcgcacacaaggaagaggaacacaaaaacgcggccgcacgacaaaccccttgggcggagtgacaagacgggacc

SEQ ID NO: 119558 - DNA, 243 bp, Zea mays
  Clone ID: MRT4577_40520C.1
tcaagtcgcagctagctacctcccaaccgaaccaggaaaacggacgccgtgcagctcgctcgcgcgcgccccacggaaaagagagggcagggaggaataatgtaccaggccatcccgtacagcgccggccagccgtggccgcggcccgccccgacgatcggccctgacgttgcggatgatgttgggttgctggcggctgcgcacactacggcgtcgacgccagcggatgcggaggcagctgcg

SEQ ID NO: 119559 - DNA, 634 bp, Zea mays
  Clone ID: MRT4577_40521C.1
ccgcccgcgcacacgcccacggggcgtaccaaccaccatccccgatttcctcctaatcaatacaccccacaaaccaaaacccaaacagcacttgtcctgcaatcgccgacgtcgccggaggcttcgccggtcgtagcagcgccgacggttgttttgcccctacctcgtccggcccagcagcccaggcgagcatgccttcgattgcgccaccgtcttcctccgtcgctgccctcacccgtcaaccgtaagaagctgctcttgcccgcgccacgccctcaccggtccccacgccgcgcgtgctctttcttgttcgcatgtttgcgccggctcggtttgtttgtttaggaaacaccgaaacaggatggaggggttgccccttttgtggctcggtttgttgttcgtcttagatttggtctgctttgcagcacaaaaagcggcacgaaatcgaaagggcacgttttttatgcttgatataaaatgtctcactttgtgactgtgaggactagttagtaaacagaataactaatgaaacgcaggagaagatagttgcaattggatcacaaagtgtacttatatatttttttcacttgatagtgatatgaaagagaatccttggaagttggaatcgaactag

SEQ ID NO: 119560 - DNA, 663 bp, Zea mays
  Clone ID: MRT4577_40522C.1
cacccccgtccccatcccctcctcctccttctcccccaccgccgtctcctccacctccatccccatcacctcctcctccttctcccccaccgccgtcgccacctccaccatctccatcgccgccacctccctactacgaggtgtcaccagaggaacggtacctctccccgccgcctccggcctacaccgaggtcccgccgccgccctactacgaggtgtcaccggaggagcgttacctctcgccgcctccaccagcgcaccaggagtcgccacctcccatccaccacgacccgccacctccaccctactacgaagtgtctccggaggaccggtacctctcgccgccgccaccaccatccccggctagcttgcccaaatacgactactcgtcgcctccaccgccttcttccccgccgtactcggaggtgtcacctgaggagcggtacccgtcacctccgccgccgccacgggcattgcccaagctgcctgtgtatgactactcgtcgccgccaccgccagcggccgcctggacaccgtagtgaaaaaaaaaattgattcgttcgaggagattttccgtcccttgtgatcatacattgttttaatttgttgtggtaaaaagaagatgatactgaattgatcctttgtttcatttcctcctcttac

SEQ ID NO: 119561 - DNA, 1033 bp, Zea mays
  unsure (1)..(1033): unsure at all n locations
  Clone ID: MRT4577_40523C.1
cattgggaccctcgaggccggccgaggtccagatttccctcccctctaataattcacctgaagtggagttcctgatgcttattctggcgtccgcctagcggcgccgcgctgctactagctcgctcgttaggtggcttctggtgtgggtgttctgaaacaatacgacttctgcccacgcgccgcccccccacactccgcccgtgctgtccatttgcttgaatatattctttttcgttgtcatgtgtgccgtgggaattgctccattcgattggtaagtgctcgtctctgaccatgcagcctctcatccggattggattggttccggctgttgcttgctccaggaaggccctcctcatttgagacacatctgttaccgagcgagttctagattcgaacactggacatggacttcttcacggaatatggggaggcgagtcagtatcaaatccaagaggtcattggtaagggaagttatggagtagttgctgctgcaattgatagtcacactggggagcgggttgcgatcaagaagataaatgatatttttggtaatgtctcggatgctgctcgcattttgcgggaaatcaagcttcttcgtctgcttcgtcacccaaacatagtccagattaagcacattatgttgccccctacccgaagggagttcaaagatatctatgttgtttttgagctcatggagtctgacctgcatcaagtgatcaaagcaaatgataacctgactccagagcatcaccgctttttcctgtatcaacttattcgtgctctcaagtacatgcattcagcccatgtatttcatcgtgatttaaagcccaggaacatactggccaattcagacagcaaactanagatctgcgactttggacttgcacgtgcatcatttaacgactctctttcagctatctattggacagattatgtcgcaacaaggtggtaccgggctcctgaaatatgtggctcctttttctccagttacacccctgcaattgatatttggagtatagggtgcatttttgct

SEQ ID NO: 119562 - DNA, 167 bp, Zea mays
  Clone ID: MRT4577_40524C.1
tcccagcgtgtatagtgactacaaaatatcaaacgtggttcagggacgtggggagcccaatttcaagtggccacctatgcacattagcagtgtgcctgtggccgtggcactttatcaggctacaagtgggaaactccattgtgcagcagtacgagggggggctcata

SEQ ID NO: 119563 - DNA, 503 bp, Zea mays
  Clone ID: MRT4577_40525C.1
aataattacctgaagtggagttcctgatgcttattctggcgtccgcctagcggcgccgcgctgctactagctcgctcgttaggtggcttctggtgtgggtgttctgaaacaatacgacttctgcccacgcgccgcccccccacactccgccccctctcatccggattggattggttccggctgttgcttgctccaggaagaacactggacatggacttcttcacggaatatggggaggcgagtcagtatcaaatccaagaggtcattggtaagggaagttatggagtagttgctgctgcaattgatagtcacactggggagcgggttgcgatcaagaagataaatgatatttttggtaatgtctcggatgctgctcgcattttgcgggagaataagctttttcggtctggttcgtcacccaaacctagtcccaaattaagcacaattatgttgcccccctaccccgaaagggagttcaaagatattctatgtttggtttttga

SEQ ID NO: 119564 - DNA, 733 bp, Zea mays
  Clone ID: MRT4577_40526C.1
accttcatacaggggcgtctcgctggctcgtcgctcgccgcttgccgtccccgcctgcgtagccgcccgccggacgcccaggacgcgctcggccgacaggcagaagcaagccagcaacaatccttgtcgatttgagacagatcgagaccagaagattcttcaggaatagaggtgtcgcaaaggcccctacaactataggtatatgtgacagctccacctctttggccgaaagcgtccaccagatctttccagcctcctcgtcgctcgtcgcctccaccgccatgtggagaggcaccgccactgcagcctctgccgcgagggctctccgctcgcgtttgctcgctgatcccatccatcacccctctacggctgttcttcccattgcctcggtgcgcaccgcctgctcagtaccctctgccgcctcccctgcgcccatcgtcgctgaaacggcggccgcctcagtagctgtttcatcgggagccagatccgcctccgacgtgctgcggcactacgggtggtgctactgggagctctccaaagcccgcctcagtgcacttgttgtggcaacatcgggggctggatacgtgctcgggagtggcagcattgtaggcattgctggactatgctatacatgcactggtaccatgatggttgcagcatctgccaacactctcaaccaggtattcgagataaagaatgatgctaaaatgaaagggacatgcgacggccccta

SEQ ID NO: 119565 - DNA, 920 bp, Zea mays
  unsure (1)..(920): unsure at all n locations
  Clone ID: MRT4577_40528C.1
actagctcgctcgttaggtggcttctggtgtgggtgttctgaaacaatacgacttctgcccacgcgccgcccccccacactccgccccctctcatccggattggattggttcgggctgttgcttgctccaggaaggccctcctcatttgagacacatctgttaccgagcgagttctagattcgacaatacctttgtgggcttggtgcgtggacttccactggatcccaatcagcttatcacctcacctttggtgcggactaaatcgtttccacttaagcatgcgacggaagtaatcttatcaatttatcataacactggagatggacttcttcacggaatatggggaggcgagtcagtatcaaatccaagaggtcattggtaagggaagttatggagtagttgctgctgcaattgatagtcacactggggagcgggttgcgatcaagaagataaatgatatttttggtaatgtctcggatgctgctcgcattttgcgggaaatcaagcttcttcgtctgcttcgtcacccaaacatagtccagattaagcacattatgttgccccctacccgaagggagttcaaagatatctatgttgtttttgagctcatggagtctgacctgcatcaagtgatcaaagcaaatgataacctgactccagagcatcaccgctttttcctgtatcaacttatttgtgctctcaagtacatgcattcagcccaggtatttcatcgtgatttaaagcccaggaacatactggccaattcagacagcaaactanagatctgcgactttggacttgcacgtgcatcatttaacgactctctttcagctatctattggacagattatgtcgcaacaaggtggtaccgngctccctgattatgtggctccttttttctcagtacaccctgcaatga

SEQ ID NO: 119566 - DNA, 178 bp, Zea mays
  Clone ID: MRT4577_40529C.1
ctctgtctcaaaagagtccgcgactctctggagcgcgcgcataccctctagaggagctccgccgagctgtgcgcctattgtgtgtgccactctcgagggacaccggactggggtgttcctgtagctccacgggcttggatatggacctcggtcagaccccgggcttcatgatcgtgct

SEQ ID NO: 119567 - DNA, 301 bp, Zea mays
  Clone ID: MRT4577_4052C.1
tccacgcgtccgggttgacaatttcttttatttctattacttctacaacaatgaggcttttggagtttattgttggggaacccgcaacttttaatactcttagcttttagattctttggttgacaagtacattattataattctttaaacttacttaccgtacctattcccactgtctgtaaaacataaagtatgcgagacgctatctttctttttaccttacctactttttacttttctcttctcttgtaccaatttttaatatttactaccgtttaatttattttatttatacaattca

SEQ ID NO: 119568 - DNA, 323 bp, Zea mays
  Clone ID: MRT4577_40530C.1
tctcttttgctcggacgcattaccgcccggtctccgatctgggatccccgatcccctcgtcgatccaagatgcagatcttcgtcaagactctcactggaaagactatcaccctcgaggtggaggcctcggtcgccatggtcagcgctgaggccgcgacccgggcctgggcgggcagtcgcgccttaccattaggggggggggggcactgggccgcctctcgcggacggttgcgctctccccgctggtgccttgtggttgctcggtgctgtccgaggttgccagcggctcggctccggctgccgcctgtgtgggcgcgggtgtt

SEQ ID NO: 119569 - DNA, 405 bp, Zea mays
  Clone ID: MRT4577_40531C.1
accaaaaaaacccatttttaaaaaaaaaaaataaaggggggaataaccaaattggcccaacccaggggaatcccaaaccaggggtgggggccaaggggcattccttatatacaaaaaaaactttaaccgggggaaaaaaaaccagggggaaaaccattttttttaaaagtttaaaaaaacgaaaatttgaaaccccttgggggatattttttagcaacccccaaaatgacttggggaaggaaaaaaaaagctgggggggggggaaaaaaaaaggacccccaagaggggaaaaaacggggggggctcccctaagggggaatttttttccaaatttcttaaaggctaaggaaacacttgggggggctccccttccaacggtttcggggggcctttcaatttgggaaa

SEQ ID NO: 119570 - DNA, 290 bp, Zea mays
  Clone ID: MRT4577_40532C.1
cgagcgagacccactcgagcgctgcttttccaatttccacggcgtgcggtggcgttgcgttgcgacttgcgacctgctgctgtacggcgcccccggtgaatccggcgggaaaaggttgtgcgtcgtcgaaaggtcgatgacatgacagtgacatcgatgccttgtaggagtattaacttcgcaccactctaaaaaaacacttctctgaaaaaaaaaaaacactaaatacgtgcatagcgcctacatccctgctgcacttggacccggaagattttgagggttgcacgggt

SEQ ID NO: 119571 - DNA, 367 bp, Zea mays
  Clone ID: MRT4577_40533C.1
ctgctcgcccagatcaactgtttctactcctgccatctacttctacacgtccaccaactcgctgcgtctcacaatgccacccctagggcaaagcgccgctcttatgggagatcaccggcgacagctgccatgtcatctaccaccacatagacatcctcaaaggcttatgcccgaagtcgttttcgccggtctggctggggtgcttctactccaacgtcattgcacggcttacgagatacaagaaccgaacatacactgtcaccgttgtaccggcagacaatgaacagatctggccagtcacactgaaggtggtgcaaggagctactgcgctgacagcactgcactgatcgatcattatgacgccgat

SEQ ID NO: 119572 - DNA, 422 bp, Zea mays
  Clone ID: MRT4577_40534C.1
aacccatatggacgtccatttaaagcacaaaagccaaaggcccagctcaaaggatcggcaagcacagaaacagggagcccgcaagccgagcagagacccccccgatggataaagcagcaacatcctcgggagggcactgggcagggggggcatcaaaagacgggggtgggggggacatcagctgggatctgaagttgtccgccccatcgcccggcttcccgttccctgcgctggagatcggcgaagacccccccgcccgcggagaaggtgtccccggaggggactcggaaaccccgagcagagactgacgagctgcctccgggaaaaaccctgcggccgccgaaggggaggccatgaatcgtgggcggggggccaaaaagccgaactatgaagggaaggatctcccctccgccggagccccc

SEQ ID NO: 119573 - DNA, 626 bp, Zea mays
  Clone ID: MRT4577_40535C.1
atcgcccccgaatcctaaaccctagaacacacacagcacacgaacgttgcaaaggctctctcttcccgtcctctctcaaaactgcctacagaagagggcagggcgagatccaggagttcctctgtccccgtcggcaagaccggtggtctccttcacctccggtggccattatggctgccggaggggtgggagatcccggatctgatgcctggcggtgtatatagtcctagattttctaggtttggtgtcctttgcaccggcgtcatggcggaggaggcgtcggtgtgcggaataaagtggccctgtctccttcttcgctcgcccggcgtcgttcttggcactagcgaggagctggggtccttttggtctcgcggatctgagtgtttacgatcctgcgagttggtcgtcgtcgtcatcggtcaccgctgggctctttggtgtggcgagacggcgaggggggtcgaggattctgacccatggcgttcgcggctttggccctgtggagcggtggttggggcttgtccgcttcttcggctccatgggaagatgcttctggcgcttcttttgttgtggatgcgggaggtggctacgacaaggatgaaggactggaggttgttcatcggcga

SEQ ID NO: 119574 - DNA, 599 bp, Zea mays
  unsure (1)..(599): unsure at all n locations
  Clone ID: MRT4577_40536C.1
ccggccggggacggccgacgatggccccgtcaacggtaccgttgacccaccgcatgtgccgaagcaatcccctggcggggcgacggtgaactcgtcgtcggcgacgaccgacgacggccccgtcgacggtgtcgtcgacccaccacaggtgccgaaccaactccacggcgaggcgacggtgaacctgtcgtcggtgacgggcgacgacgatggtgccgccgacacaccgtagtaggtgccgagcctatcctccggtggggcaacagggaacatgttgacgatccccacctcgctcgtcctcctcctcttcgccggcttcacgaactcttctgtaaacgcatcggtttggtttcctaatgcatgcaacaacatatactgtgagacgagaatacgatcaccgcgttcgcattggcgctgtccgtcctagtctacacccggaataccgtacgatcggcgtgctatctatagtttctaggagcgggaacagaaatctgagcgaaaactgaccgaaggtgaagtcccatgtcgcgccatggtggatgtcctctcccagagggcagtgcggggtattcaaaaaaaaaaaaaaaaaaggggcggnc

SEQ ID NO: 119575 - DNA, 263 bp, Zea mays
  Clone ID: MRT4577_40537C.1
gtggctatcacacccatttttacttatttgtcattggtaggacgatgaggtcataaggtatgtttggttcatgaccccagctggtttcatttccatttgagtggctagtttttacattggtttgccaagcttatcacaaccctcctttaccagtcttgggacctgctatgttgagacaacataggcggaattttcatgaccccagccggccaggccaaatgtagtaatgcactaatgcctagaaattttggctgctgtttgtt

SEQ ID NO: 119576 - DNA, 356 bp, Zea mays
  Clone ID: MRT4577_40538C.1
tggaccccttgtggacccgtcccgaatattcccggttccaaccacacccttcgcacttgggggatttggctttaatttgggttcacagaacaccccttaccagaacatggggaccctgtgattcctcccccaatgggggcaaagttaagggaattggtttccggaggcacaacaaggttaaaagcccttgcccaaatgggggccttggggacaaaatgggcacccccgaagagaaggcgggaattggacccggcggaaccaaacctcggttcaaccttccaaaaaaaagtaccccttcaaattgtggggccaaaacctgattggggcttgtgaaaccaagttttggggggaatttt

SEQ ID NO: 119577 - DNA, 305 bp, Zea mays
  unsure (1)..(305): unsure at all n locations
  Clone ID: MRT4577_40539C.1
gactcctataggggattggttccctacccgcnagcgggctccgccgtccctgaaactttcccgtgcttctccgccgtcgaggcgcgtcccagtgcgattagcccacgactcagatggccagccgctgggtccggcccgaggtgtacccgctgttcgcggcaacgggcgtggccgtcggcatctgcggatttcagctcttccggaacatcaccggctacccggaagccagggcaaacaaggcacgtaaaggtgctggcgtgcttgaaaaccatgaggaggggagacgttaccccatgcatgaacta

SEQ ID NO: 119578 - DNA, 250 bp, Zea mays
  Clone ID: MRT4577_4053C.1
ctgacatataagaatgcattttatcaagggagggggcggaaacctcgggtacgaaagacattttccacgacatgtatcgtaatatatgacaacgcgttttctactttttgtacatgtgcattggcccccaatgtctattgactgaaagagcacctaagaccgccagacttgtgaggaatgcttatactattaatcaaaaaaccaccgcgctgttgtcgcctgcggcacagctttctgtctatggcccaag

SEQ ID NO: 119579 - DNA, 294 bp, Zea mays
  Clone ID: MRT4577_40540C.1
cacacacctcgctttttgtactcttccgtctttgccctcgcgttatcgcgctcgtctcgcctggcctagctagctgcctgtgccttggcttgcttgctacgtcgttcgtgtacacagcgagaggaaggacaggaacaagaaaagaaagaaaagagagagagagagagtcgtttccttttttcgagcttattccatggagacctcttctcacaagcgggcgcgggaggcggtcgacctcgccgccgccgccgccgccggagaggccgtgtggccggagtccgacgccaagaggct

SEQ ID NO: 119580 - DNA, 137 bp, Zea mays
  Clone ID: MRT4577_40541C.1
gcggactgaaagaaaacaaaaaaaagatgcgccttatatgaatttaccgcaatccataacgaagcttgtatgtgaaagaggtgggcttgcataccgaacgtttcaaccccaaataactcaaagtttgtaagaacaaa

SEQ ID NO: 119581 - DNA, 485 bp, Zea mays
  Clone ID: MRT4577_40542C.1
gggggtggggtttttttttttttttttttttttttttttttttttttttttttttttttttttttttttttttttttttttttttttttttttttaaaacgggagctccccaatgttttttatttgccaacccttcagtccagctttggggggggggctcgtcttggttcttggagccttaagttaacaattgggaaacaaaagataacccccggggggaaatcccccaaagcaaaaaacatcccttttttttgcccaccaattcctcaaatgggtgggcccttggtccccctcgcccgcttggtcccttcggggggggatgaacccgggcaggcaatgcgctcataggggggggccccaaaaagatccctttgggcttgggtcagttttgcggggcaccgccttggtctggggggtttcgagtcccaaagggttgcatttttttctggggggcttatgccgtgctcccccgggggtggcccagc

SEQ ID NO: 119582 - DNA, 261 bp, Zea mays
  Clone ID: MRT4577_40543C.1
ccagcaacgatgtccaatggcgaactgacagctccgtcatgcggcgatcgataaaaatgccgcgaggccatgacacgagacgaacgcacacgaatgcaggaaactcggcctattttttcttcgtcctcgtagagatatttcggaagagggagtgcgtgccttcctctcagctgattcgccgaggacacgagatcctctagagggttgtgctatttggcgtgacgcataggggcgatttgctttggctcgcataggggatca

SEQ ID NO: 119583 - DNA, 632 bp, Zea mays
  Clone ID: MRT4577_40544C.1
tatgcttctaacccttgtactgtttgtaaatcatacacaatattaatcatttcttaaggctaaaaatgagttcctatgaattattgtatttactgattctataacatatatactattgcaaatgtacaattcagacaagaatgtgttttccagaaacaaggcataagggtaccttttaagatgctgcccataattatcatcactgtgaacttggtgaatgaatagcataaagcacaggcatatcatgggatggctaaaattttcgtgatcgtcttgcttttctctagtaaaacactttgtaggacatcattgtttctcttcagtcttcctttggtgcactttctttaaaatatttggtatccctcccataaaagaatgcaatgttagtatcacttcatggcttattgaaagctgaaaattctgcacatacagattgacttagaaatcttcattggagtgcaataaggttgtcttatgctctaaaaattattgtgatattgtaaattttatttgcaacagtacatctagtgtaacaatagccatgtatttcactcatacgctgttgggttgtgttatgttagtcagcacatggaacacagaacaacggagttggctgaacgcaatgtgtgttg

SEQ ID NO: 119584 - DNA, 406 bp, Zea mays
  Clone ID: MRT4577_40545C.1
gattttggggttggtggtatcaagcataaaccctcgtcctccacgagaaccaggatgctaatgcatgctggaacaccttacaagaaaatcggcatccttattttatggttgatttacaaaggttatactccctctgcttgctgcacctgttgttggacacacagagcgtgtggttaagagcttgctggccatgcaccaccacaaggcccggacggcgaatccactgagtttgaaggatgtctgcacatcatcttcattatgcaggacaagataaaacagatgcttatggtgatgcatactcccttggccagatggctgtggggaaagaagatagtctgccgaaaaagctttctgtctgactgtaactacgggtcaggggagaacgacaagatttgacaggccctgg

SEQ ID NO: 119585 - DNA, 987 bp, Zea mays
  unsure (1)..(987): unsure at all n locations
  Clone ID: MRT4577_40546C.1
cattggtacctcgagccggcggaggagtatctattattataagctaaataaagatagcggcgtcgctgtgtgtgtttcgagtcagtcagtcagttagttgcgtgccatggctggcatgctctgagtctgagatgatgatgatgcctgatggcggcgtcgtgtcctgtagtcctcccctgccccctcgggcgcttctggcggcgagcagtgtgttgtgttgtgttgtgtgggtgcagcacggtagcaggctagccatgtgccctgctgtgttgtgtcaccatccatctataataatcttatatctataccccaccaaaaaaaaaaaaaaaaaaaaaaaaaaaaaaaagtattctgctcgagcaccgcagaaaaagaaaaagaaaagccaaaggcaaaggggaatcccaatcaggcaagcaaaaaggaagaaccagctgctgcggccggagatgtcgtcgcagctgatcgaggagcaccggtcgggcgcggaggtgcacgtcgggcacgagctgtgcgagcgcaagtcgcgcgagttcatggtggagctgggcctccccgacgggctcctcccgctgcccagcctggacgaggtgggctacaaccggtcgacggggttcgtgtggctgcggcaggccgccggcctgacccacaccttcggctccatcggcaagcaggtgtggtacgacagggaggtgacggcgttcgtggagcccgggcggatgcacggcctcgccggggtgaagagcaaggagctcctcatctgggtcaccatctccgagatcgtcctcagcccctccggcggccgtgcgtgggctgctcgatccggtagtggcagtggctttgtgagacagtcgagtcgattgtggtttcccctcctccgccatgtgcgtgtagtggatgatgatgcaggaataaacggtgtccctggatccagaactcacggttcgatccatccagtttatctaaaaaaaaaaaaaaaaagcggnc

SEQ ID NO: 119586 - DNA, 180 bp, Zea mays
  Clone ID: MRT4577_40547C.1
ggggggagttctacatgaaaaagcctgtcctggaaggatttgggttattctcgggcgagtatttttcaagttatttatttgcgcgaatttcatttacaggggtacagtaaataggataaagtggaccgtaattgtgggcgtcaatgatcgtggggttcattgggggggtttttgaatggc

SEQ ID NO: 119587 - DNA, 350 bp, Zea mays
  Clone ID: MRT4577_40548C.1
cgtctttctatccaatcccatctccttccctcccacggcggtctgcctcgcccgcgaccacctcgccgccgcatccctctcaaccaccgccggcgtcggagatgcaggcgacggccgcatccttcctcgcccgccctctcccgtggccccgtcgcattggcaggagcgcgtatggggcggtggcggtgcacggaggcgtctcgccgttgccaccacggctgcggggggtacggtgctccatgagcctctctatcggcgccggttcgagcgacatcggagacagcggattcagctaccagtatgctcctgtcttccgaagataccgtgagcgggatccctacaagcttctt

SEQ ID NO: 119588 - DNA, 1497 bp, Zea mays
  Clone ID: MRT4577_40549C.1
ccggccgggtggtttcttgtgaatcaaatcaccaagcctgctagtcaaaaaaaaaaaaaaaaaaaaaaaaaaaaaaaaaaaaaaaaaaaaaaaaaaaaaaaaaaaaaaattcggcacgaggttctgctcgagcacaccgcagaaaaagaaaaagaaaagccaaaggcaaaggcaaaggaatcccaatcaggcaagcaaaaaggaagaaccagctgctgcggagtgcggagatgtcgtcgcagctgatcgaggagcaccggtcgggcgccggaggtgcacgtcgggccacgagcctgtgcgatgcgcaagtcgcgcgagttcatggtggagctgggcctccgacaccgccccgacgggctcctcccgctgcccagcctggacgaggtgggctacaaccggtcgacggggttcgtgtggctgcggcaggccgccggcctgacccacaccttcggctccattcggcaagcaggtgtggtaccgacgggaggtgaacggcgttcgtggagccggggcggatgcacggcctcgccggggtgaaaagcaaggagctcctcatcccgccggcctgacccacaccttcggcttccatcggcaagcaggtgtggtacgacagggaggtgacggcgttcgtggagccggggcggatgcacggcctcgccggggtgaagagcaaggagctcctcatctgggtcaccatctccgagatcgtcctcagcccctccggcaccaagatcgtgttccgcacccccgcggggctcggccgcgccttccctgtcaccgccttccagctcgagcccgcggcggccgagggggaccacaaggaggaggccgaggacgccgccgctgccaactgatctgctctagcttccggcgccggcggccgtgcgtgggctgctcgatccggtagtggcagtggctttgtgagacagtcgagtcgattgtggtttcccctcctccgccccgcagtgtgcgtgtgcgtgtagtggatgatgatgcatgaataaacggtgtccctggatccagaactcacggtttgattttggggtgatttggtaactctggtctctctgatctgatccatccagttaatctcatgcttgtgtatctctatgtacgcatgtatcggtaagccgattgcattgcctgtttgttcgttcatgatcatcaatttggttttagttctatgaagccggccgtccgtggggtgctcgatccggtagtggcagtggctttgtgagacagtcgagtcgattgtggtttcccctcctccgccatgtgcgtgtagtggatgatgatgcaggaataaacggtgtccctggatccagaactcacggttcgatccatccagtttatctcatgcttgtgtatctctatgtatgcattgcctgtttgttcgctggaatctactacttgcagcggcctcgtctcttcagatcttgggtcttcacaatgcatgggtttgtctgctaaaaaaaaaaaaaaaaaaaaatgcgagac

SEQ ID NO: 119589 - DNA, 365 bp, Zea mays
  Clone ID: MRT4577_4054C.1
aatcgatgtgcattttgatattcagtattcttgtcaggaatgtagtgaaataatcgcaaactttttagtctttaaactaggtgagtattgccttatattataattctgttcaacttgtgtggctaaaattctagctgccattttattgatgtttggctggtttattctgaaaaaagaatgatgtcaaggaagcatattacgtcctagtttcatcttgttataaaagggcagacctggtgcagttgtgagagctatctcatggagccggtcacggacttgaagtagcctccgtgcatttgcgagaagaaggctttcctcaggtcatgaattcgaagcagctttacttgtagaggaaggtttggctc

SEQ ID NO: 119590 - DNA, 2292 bp, Zea mays
  Clone ID: MRT4577_40550C.1
aacgactcctcgccccgtgccagagttggactctaccgcatccttccacaaaaccctttcttccttccgccgtcgccgccgccgccgcgaccggctaaacccttcatttcgccgcagcgacgaccacccgccgcgggccaactatggcgcccgttgcggctcccatacgcgacctgcttacctctttcagccccggcgcggacttcctcgcgctctcttctggggacggccgcatcaaggtatgggacgccgtgcggggccggctgcagaccgagtttgctgacatccctgcagtggaggcggtcgcggtcgctgagtcgaagcgcggccacctcgccctcgattacacctgcatgaagtgggtacaactttccagtaagaagaagaggaaggctgggagctcattgattgtgcttggtacaggcagtggagatgtgcttgcacttgatgttgccgcgggacattggaagtggaaggtcagcgattgccaccctgggggtgtgacagctgtagaatactcgaaacatgggcggaatgtgtacacggcaggtgctgatggcatggtctgtaggattgatgcctctaatggggctgttgttggaaaatttaaatcttcttcaaaggcaatatctgcattagctgtgtcatcagatggaaatatgttggcaacagcagctggccagttgaggacctttgacacttccagcaacaaaaaaattaaaaaattctctggacatccagttgctgtgaggagcatggtctttagcaatgatagccaatatgtattgtcatctggagttggtgaacgctatattgccatttggaagctgggcagtggtaaaacccagagctcaaactgtattctgtcgatggagcacccagcaatgtctgtggactgtaaatgttcggacaaaggagaaatatacattctggctatttctgagattggtgtctgctatttctggtctgcaaatgttgtggatgacctgcgtaataagaagcccaccaagatcatattatctgagtcatctgtgtcaacagctcatcaagcattatcgatatttgctgcaaaacttcaaggagtggatgggcctaattctgcccatgtcctactggcttatgggtctgtagtgaaaccatcttttgataaacttttggtttgttatggtacagatattagtttgggcatttctcaagatggagttctcttgccaaatactcaaaccaccatggcaaagaaaggccaatctgtgaaaaagcatgaaactgtctttgctctagaccgagccaatgctgaagatgccatccttcctcttccaaaactccatacacaggaaaagaaaaggaaacatggtgtaacaaaacccagtggcgatgttgagcctgagattcatagtgacctcaccactacaagatctattcataaaagagttcctgtgcaaagaattgaagatgacagcacatgcatcgaggatatgatgagggagtgtggcatcattgaaactagagtagatgagagcatgaagggccatgctggtataccctttaacattttgtcttgtctctttggtgatggcagcataaaagtcgatgccaatttacccagtaagaagattcgaggtcatctaagatcattaaaacctggagatgcttgcaaacttcttgataaattagtatctgcatggaaaacgagatctggtagcacggaacttgtattgcgttggatatactgcctgttagtcattcatggccgttttatctgctccgaggaatcgattaacaacctggagaagatgtgtgcagaaagatacacagttactgaagatttgctgaagctttctgggcggcttcggttaataacagcacaggtcgacaaggctgctagtaacatgtctgagccgacatcaggggagatgcaggatgctgctttccagtctgacgaagaggaggaagatgaagatgttgatgaaacagtattcggtcaagattcagattcgtcacagaatagcggcaccgacgacgatgcaaagtagactcactgctggtattcatcattatggtgattgtattgtttttaattaaattgccaagcttgatttttgtcaaggcgacgttggaaggttgcacagaattttgacagtgtctctggtttcattttgaaagcactcgaagttgtctcctcctttacccctttttttccttatatacgacggcaattggttaaagttacatacccgaaggttgtccttgcacaaaaaaaaaactcgcggctcgagggggggcccggtaccg

SEQ ID NO: 119591 - DNA, 755 bp, Zea mays
  unsure (1)..(755): unsure at all n locations
  Clone ID: MRT4577_40551C.1
ccggccgggccgggaaaaaaagcctctacgctctaccgcatccttccacaaaaccctttcttccttccgccgtcgccgccgccgccgcgaccggctaaacccttcatttcgccgcagcgacgaccacccgccgcgggccaactatggcgcccgttgcggctcccatacgcgacctgcttacctctttcagcccgggcgcggacttcctcgcgctctcttctggggacggccgcatcaaggtatgggacgccgtgcggagccggctgcagaccgagtttgctgacatccctgcagtggaggcggtcgcggtcgctgagtcgaagcgcggccacctcgccctcgattacacctgcatgaagtgggtacagctttccagtaagaagaagaggaaggctgggagctcattgattgtgcttggtacaggcagtggagatgtgcttgcacttgatgttgccgcgggacattgggaagtggaaggtcagcgattgccaccctgggaacactatgccaagctgctgctgccgctgccactaagaagactgctgttgctacacaaataactaagttcttgcagccggatggcggttcatcattgtctaaacctctggcccaacccaaatcaacccataatggnggtgtgacagctgtagaatactcgaaacatggggcggaatgtgtacacggcaggtgctgatggcatggcctgtaggatgatgcctctaagggggctggtggtggaaaattaaaatctcttc

SEQ ID NO: 119592 - DNA, 130 bp, Zea mays
  Clone ID: MRT4577_40552C.1
gcttgctaaagtattttaaggacatattgtgaaagccgtttttatccttgtcggtgcacgtagcttccagagcgaatctttgtatggacagctgctcttcaaatatgtgtatgacctaataaacatcttt

SEQ ID NO: 119593 - DNA, 260 bp, Zea mays
  Clone ID: MRT4577_40553C.1
ggcattagctgatctgaaaccgaagttctggcgggggatggctaatgtcctttcttgactgttacctgatgctgctgccgctctggatcgacagacttcagcttgagagtagtttagccagctgcttagcgccgtggacgtggggatggacacgtcgcattgcgcgcttagtggctggttttgtgcgttgtttggctaagttttttttttttttggttagaataaaagggagaagagaaaacactccagttgcgcagcag

SEQ ID NO: 119594 - DNA, 360 bp, Zea mays
  unsure (1)..(360): unsure at all n locations
  Clone ID: MRT4577_40554C.1
gcgtggtaacacgcaaacgcggtgtcggaggaggacagtaggctgacaagatccggatgaagctactctggccttgcaatcgttagttaggcttctggttaatggaggcaaaaaaagaaaggcaacatgccccccccccctcccccaacaggagcgagattgatgcaccagctggattgtcattcaggaagctccaactgttgtacggcgccatgtgngcggagccattgtgagctgatggactgcgcatagactcacgggcaaaaaagtaccagattaagatggctctttttaatttgataaaccctgctagctgcaccatgttgatggtattgttttatcttttgctgattcccctcg

SEQ ID NO: 119595 - DNA, 707 bp, Zea mays
  unsure (1)..(707): unsure at all n locations
  Clone ID: MRT4577_40555C.1
accaccttcgcccgcccgtccaccagtcccaccagccagtggtgnnctcgagtgcgaccatgnatnnctgcgtggnacatactcggnagtggnatgagggaatgggggactactcccccatcgcggtttcgctggcgcatggcccactgtccttcgcccgtccttctccggctgccaagtacggtagggcgatacctggnagtagcatcgggtggggnnctggtggccatgnngcgggcaaggggcgtcagncgtgtctctgtcccgcccaaccatacgacnnttcggcaagggtccctgtcaggtcattgaacccgggctggaaattggntggtgaaagcataaacttgacnntgctgcgatccagngtcgctcatatttgcacctcaatgatatcggcatgaacatatgcagctgnncggcagaagaatatattnngtttttggttggcatgcccatgtaattagatgatgatagatactggctagnatagtgatnatgggaaaaaactctgaagaaagaacaacnngttgctcnnttgatgttgttaaccttcggtgaaattctgataacccgaaaagcctgagaaactatgaatnnctcttgttgnnctgcagtcatatatgtggtggcaacatgtcatatttaattcatttatccctgcaggaacgtgaacnctnnttcttgatgccctttattcatgttca

SEQ ID NO: 119596 - DNA, 462 bp, Zea mays
  Clone ID: MRT4577_40556C.1
acacacgcacgtacccattatatgcgacctgaaatttacattcgatgtgcagattattcagtacatatccgatcgagacgggtagatacccagcttattcctagcacacaaacgacgtaggtacatatggtacacacagcagagcgaagaaatatgatcgaatgaacggtcagatggctattagctatacactccgtgcattacatactacgttcacgttctgttagctaggcggacgatatcgataccgaacgacgactactaggtacggggcatatacagttataagctttacttgcacttggcttattgatattgaacgggaagtcggcctctttttcgagatgatacatcgatattattgagggagtctgttcttcacactatgcggtggaataatggaagcgcgatatttatgccagtggcatactcctccagactgatcaaggcttgatagggaga

SEQ ID NO: 119597 - DNA, 722 bp, Zea mays
  Clone ID: MRT4577_40557C.1
ggccgcttttttttttttttttttgtatggtattgcattattgcaagaagcacgaactcagccatttacagtaacaattgttcaggagtactcaaaactgcaacagaaatagtttcagaacatcgaactaatgagagatgggagtcagtttgcacaatgccgcatggcccgcatcccatcaaggagacaaacatagtgacattattgatggaatgatgggtataaaagagagacaaaagaaaaatgtagcttactctcagttcatctaccgaggctgtaataccgatctgaagcatgaaccgctgatcaactccaaccaagggttcccatgagatccatcaccaccgggtccgggtctacagccccaggaagaaaggtggtggttctggttcatcttcatctccatgaccatcggcattgaaatccggtgtctcaaagaatgcatgccgaacgaggctctccttgaaggtgtacggagtaatcttgagatggctgccattattgcaagggaagctttccagcagagtcccattcaggtcatagcgcaacagcttctgctccggggtggctatcagaactcccttttctgacacgaaaatcattcgcgagaagtcatcgaacgcgaaggtgctcatcttcaactccggcagccgaatccagtgcgtgcagacccagctcttgttctcgtaatcttcagaatcagagctcgagcatcggggact

SEQ ID NO: 119598 - DNA, 598 bp, Zea mays
  Clone ID: MRT4577_40558C.1
tgggtacctcgaggccggccgggactgctctctctcgctctccccttccgcctcttttattgctgcgctgccgatgcgggtgcccagcaagccaggcacggaggaggcgcgtgctctgctctgctctgctccactccacctcccccccccccccctgcgccactgacgccgctcgttcgcgcagttttggtcttctggccagcagggcagggggggaacccgcgggagcgaggcgcgcgagcgagcgagcggagggaggaggaggatgatgcacgccaagtcggagtcggacgtgacgagcctggcggcgtcgtcgccgccgcggtcgccgaagcggggcgttgccgcggccggcaccggcggcggcggcgggtactacgtgcagagcccgtcgcgggagtcgcacgacggcggcggcggcgtcggcggcgggtacaagtcgtcgtcgatgcaggccacgccggtgtacaacaacagccccagcgagtcgccgtcgcacccctcctacggccgccactcccgctcctcctccgtcagccgcttctccggcggactccgcggcggcggtgtcgtgggccgcaaggtgctccacgacaag

SEQ ID NO: 119599 - DNA, 578 bp, Zea mays
  Clone ID: MRT4577_40559C.1
aacagtttcctcttttatctttttataaaaaaaaaaaaaaaaaaaaaaaaaaaaaaaaaaaaaaaaaaaaaaaaaaaaaaaaaaaaaaaaaaaaaaaaaaaaaaaaaagggcgaccaatttaaaggatccaaatttaacaaaacccaagcttagaaaaaaaaataaacttttttttaaagagggggggggcctttttaggggccccattttttccccccgggggtcgggaaaaaccttttttttttcgggcttcctaattttgcttcccggccccctttttccaactgggggattggggaaaaccccggggcccccccccttttccccctttggcccacccccctttttcgccggggggggcgccttgtaaagggggccttacccgcggccctttttcaaggtttccccccccgtgacgggtacggtggccccccccttacccccccttttttccggggggtggggtggtttcccccccgttggccgttttttccgggaggccttaacccggggcttttttttttgttcccttttttttgccccccgggcccgggtttccccccaattgttttttggg

SEQ ID NO: 119600 - DNA, 3134 bp, Zea mays
  Clone ID: MRT4577_4055C.1
cggacgcgtgggctgccgccccgctccacgttccagaacatctgggggggtatcccagctccatggtcaccgccatagccccccgagaaaccaccacaccgacgcacatgctgcaatggcagtgggcaacggcctggacctgtaccacgtcctaagaatggccacctgcgtggcgctgctgtacttcaccttcagcgaggtggacctccgccacatctggctcccgtccttgcccgtctcccgcccgtgcccctttcgagcggcttctaacccgcgggactcgtctatctctccgtctctcacatgctctcatcccttccacgccgccgccgccaaacacagactcgtaagccacgccgccggacccgcgctgccagaccgcgtcgacgctccctcgccgctggggttaaggtgacggcccatcttcaccttcggcgaggtggacctccgccacgtctcgctcccgtccttgcccgtctccggcccgtcccccttccgcgcggctgccgtggcggcgccctttgtggagcggcgcggaacatgcagctgttcctggctgactggcccttctacatgaacgggtggaactcctactggctcatggaccaggccgtggagccgaggtcccgggaccgcgtctcccgcatgttccgcaccgacaccgagatgggcctcaccgtgtgccgctcctgggcgttcaacgacggcacctacaacgccctccaggtctcccctggccacttcgacgagcgcgtcttcaaggtaaaaaaaggaaactgcccccccgttaattttagccgaaaatgccgcgccttgtggggtggtgctaactgcttaacaatggagtgtctctactaggactattccaccatgggtttagataatttcttagtctatgtttttaattagggaaccaatgaacacatgtagtgcgttgctaattttagactggaaatgctttgggtgattcagatactgaggtatgtacatttgaggtgtttagataatttcttagactgtgctgttcgacaattgggctaccatttgaggtgtgcattaagaaattaaactgaggtatgtacattgactcgatgaggcatgctgagttgaaagcatggattcgctccatgatgttcggctttactctcgcattccatcatgcgtggtccttgaactttcaatacaattatatatgacatccattgtttaggcttatcatgtatcaaagcctagtctattgaatatttgcacctcattagtctacatgtcttgataaattgtaaattcattcttctttaggaatggacttgatgtaacttttgaaatttgtatggagcctccttttattataacatgaatacatattatttagttctcagaactaaaaatgtcttctatgcttcttgtgaaattcacgcctagttatttcctggaccagtaaggttagaggatgtgcttgtgtgatctattttttcttggcgaggaactgccattcttttctcaaacacacaagtgaattgtgtgcctttaggcatcaaactctggcatgaaagatgaatggtatcaatgtgttcatgtgttaaagctatctgagcgaacccttgctccatactaatgtaaatagtgtgattgaaatagtatcagtaattattctaaagtctaaacacagagttttcgttttggtttcctctgtttatttctctccatggttcaataacaatgatttttatgaagtacaccagtgcttgtacattttttaggatatgctttccagtaaactttgatacatttttttgtatgctcactcctgctctatctgcaggaatggctagttgcagtgaaagtaatttctagctggagcagatcagtcatcatgctgatgtttggtagtttcctgcattctagcgcattgtcatttgttgtggtgaaaatagatagattttcaaatcactagtcaaatgaacacatgccttgcacaatactgcatatgtaaatcgagcaaaaagtaagcacatgccaatagttttgggccaatcggaaagcacaaaagaaggaaaaaagaagggattaacctaaagcaaaagactcttttgcaccatctttaggcctaggaccatctccaagatggcctaattgccaatctattgagctctaatgttaaactgtttggagggagcaaagctttgctcgacattggtcttactactttggttttcctatttttgtagatctatacttgaacatagatgcaagtacaatgtccccctttgagcatgatgaggtgtctattcttgataatggtggtacaactccctaatacttccatttaatacacattttaaattttgcagcctcgatggtatctacctagcatgtggtatttgtaggttgacttggatttagagaattatgagtgtttcatagatgttactctgacgagggataacaatattaccactagaaatatatattagtctgccattgagaaggagagaaggggtgattatattggaaagactttatatgtaatttttctgtggcatttatcactcgagttgcattgtatggactatccatatcccataatctaaaatatctatggtttcaaatatctagtgttgggggccttcgtcttccgaaggtcctcaaaaatatgatttaacaatattttccaagtgtgatatgtaagcaggtaccttcagactcgggtcaaaagcatatataatatggaaagcatgatcgggacgaaggtcgatcctgacgaaggtcgagtcaatcccgaagctatgcgcaagaaagcttcggctagatggcggaaaaaggaaccgacttaaaggggaaaaggctatctagtcctaatagaattgtatataagttaataataaatgtaaagggcatgaatgtaatttctcacaggctgtgtcctgtgcctacatataggtgaacagtacccccgtactattcacgctgatttgacatttgcttttgcgtcacgctcgtacctttgttctctgtcaagccaaaggtaccaaatgttattcaatattgtctttatattaacttacaattatatactgagaaatatatatgataatgttattgttcaaaaaaaaaaaaaaaaaactcgagcccgg

SEQ ID NO: 119601 - DNA, 848 bp, Zea mays
  Clone ID: MRT4577_40560C.1
taccctcgggctcgccggggctgccgatgcggtgcccagcaagccaggcacggaggaggcgcgtgctctgctccccctcgccctcccccctgcgcggcgccaccaccaccactcacaccgctcgccagctcctacgcccgcttcgttcgcgcaggggaaggcaaccgcgggagcgaggcgagcggagggaggaggatgatgatgcacgccaagtcggagtcggacgtgacgagcctggcagcgtcgtcgccgccgcggtcgccgaagcggggcgttgccgcggccggcaccggcggcggcggcgggtactacgtgcagagcccgtcgcgggagtcgcacgacggcggcggcggcgggtacaagtcgtcgtcgatgcaggccacgccggtgtacaacaacagccccagcgagtcgccgtcgcacccctcctacggccgccactcccgctcctcctccgtcagccgcttctccggcggcctccgcgggggcggcggcgggcgcaaggtgctcaacgacaagggctggcccgagtgcagcgtcatcgaggaggaagggccctacgagggcctcggcgccggggacagcggcctctcccgccgctgccagatcgtgctcggcttcctcaccttcgtcctcctcttcaccgtcttctgcctcgtcatctggggcgccgcccggccgtacgagcccgaggtcgtcgtcaagagcttggtgatggacgacttctacgctggtgaaggcacagaccacagcggcgttccgaccaaattggtcacgacgaactgttcgctgcacgtatcggtgtacaccctgccacaatgtttgggatcatgtcactccggccccat

SEQ ID NO: 119602 - DNA, 193 bp, Zea mays
  Clone ID: MRT4577_40561C.1
tttaactgactagggccaacccaaggcgaattagattattggccaacattaccccctacccattccagaaggccttccaatctaattctcacgatcatggtttaaccaaaaaaatcagtagcacaaagggctccattcagggggcaaaacttaaacgaccaagacaaattctagaaacaatggcttggggggg

SEQ ID NO: 119603 - DNA, 301 bp, Zea mays
  Clone ID: MRT4577_40562C.1
tggatcctctagagtggccgcccgtttaaaatttttttttttttttttttttttttttttttttttttttttttttttttttttttttttttttttttttttttttaaaacaaaaaaactttacaagcctttcacaacatttcaactgaaatttcccaccttaaaggggaaaattgtacatcacgagcgctcgaaccttaaattctggaactcacattttttttagggtctttcaaggatctttccttcacccaaacctcgggaaaaaaaaaaggggaacaaattcacgccccgggaaaaa

SEQ ID NO: 119604 - DNA, 1467 bp, Zea mays
  Clone ID: MRT4577_40563C.1
aattcgctgcgctgccgatgcggtgcccagcgagccaggcacggaggaggcgcgtgctctgctccactccacctccccccccccccccccctgcgccactgacgccgctcgttcgcgcagttttggtcttctggccagcagggcagggggggaacccgcgggagcgaggcgcgcgagcgagcgagcggagggaggaggaggatgatgcacgccaagtcggagtcggacgtgacgagcctggcggcgtcgtcgccgccgcggtcgccgaagcggggcgttgccgcggccggcaccggcggcggcggcggcggctactacgtgcagagcccgtcgcgggagtcgcacgacggcggcggcggcgtcggcggcgggtacaagtcgtcgtcgatgcaggccacgccggtgtacaacaacagccccagcgagtcgccgtcgcacccctcctacggccgccactcccgctcctcctccgtcagccgcttctccggcggcctccgcgggggcggcggcggcgggcgcaaggtgctcaacgacaagggctggcccgagtgcagcgtcatcgaggaggaagggccctacgagggcctcggcgccggggacagcggcctctcccgccgctgccagatcgtgctcggcttcctcaccttcgtcctcctcttcaccgtcttctgcctcgtcatctggggcgccgcccgcccgtacgagcccgaggtcgtcgtcaagagcttggtgatggacgacttctacgctggtgaaggcacagaccacagcggcgttccgaccaaattggtcacgacgaactgttcgctgcacgtatcggtgtacaaccctgccacaatgtttgggatccatgtcacctccggccccatccgtctgatctattcagagatctcaatagcagtcggccaggtccgcaggtactaccagccgaggaagagccaccggacggtgacggcggtgatccacggcgagaaggtgccgctgtacggcgccgggggcggcctgacgctgtccacgagcgcgggcgggggggcggtgcccctgacgctggacttcgacctcacctcccggggctacgtgatcggcaggctcgtgcgggtgacgcacagggcgcacgtgacgtgccccgtcgtcgtggacgccaggaggaccaagcctgtcaggttctccaagaaggcgtgcgccgtgtacaaggcctgagcttgagagctcgtgaaacctgtgatcgaccgagcgttagcaatgcgtgttcttgcaaagatgtagctattgtgttgatggtgaagaacaataagcgcacacgtatggtcttgtcgatatatcgcgctgtaaaggcctgttgttcttgtgtgtgtatccctttttcagggcatgatcgtagagatggaagatgacttaccatgacaattttcctatacctttataacttcattttaaaaaaaaaaaaaaaaaaaaaaagcggcggca

SEQ ID NO: 119605 - DNA, 249 bp, Zea mays
  Clone ID: MRT4577_40564C.1
aaaaaaaaaaaaaaccataaaaagaaccgaagaatccagaataaaagaacaaaaaaagattaaattagacaggaagaatgaataccacacaagcatacttagaataaagcgatgagagcaggagctaagcaaaaagtacggagaacagtagaaaaggagagataactgtattacctcccgttaaagaatccactgatcaatcttagaacttcgctactagatgatttaactgaatgggatacttaaaag

SEQ ID NO: 119606 - DNA, 297 bp, Zea mays
  Clone ID: MRT4577_40565C.1
tctggagacgacgttcagacatggcacctcgcaaggggaaggaaaacataggtagaacaggtcatcagccttggacctcaggtggctgaaggcgtgcatgtatttggtgtctgccacatctttgcatccttcaatgcatacctttgtccatgttactgatctgtctggcaaggaaaccatctgccgagtaactggtcgaatgaaggtcaaggctgaccgagatgagtcctctccgtatgcagccatgttggctgcccaggatgtggcccagaggtgcaaggaactgggcatcactgc

SEQ ID NO: 119607 - DNA, 215 bp, Zea mays
  Clone ID: MRT4577_40566C.1
cggactcttgtgctgactcgtgggaaaaatttaaaaaaaaaaaaaaaacaaccaatctaagaaaattttaaaaaacatacgcgtccattcaacatcatacctcctctataacgtcacctaactacaattcacttcccatcatataacaacttacttacttcaaaaaccctttctttacaaaacttaatctcctaacaccacatccattacttatc

SEQ ID NO: 119608 - DNA, 340 bp, Zea mays
  Clone ID: MRT4577_40567C.1
aacaggcaccggcggtcaccaaatttttctacaacccccggccaattttattttgttccggcccaagaaaaacaaactggcacacctaagctttttttacttacaggggggcccaaatcccatgatagacatatttttttttttatttcaacttcagggggcttggttttttcggttttttcattcaagcgttacaaattatagacgagaatgaacctgggaattttaactgggtggaccaaaaataagggtcattttgggcaactccaatagcaataaatattggggggcagcttataagcccaacaccattaaccaccttagggttactatgttttgg

SEQ ID NO: 119609 - DNA, 513 bp, Zea mays
  Clone ID: MRT4577_40568C.1
ccggccgggggtcggccgctccagacagcaaggatctggaccgctgcgacggcgtgtggtcgctttcgtctagagcgggcagcgggagcggggcgccgccgcagattttgaggccgcccgccgccgaagatcgtcgtaatccttgagctgttgtgctaggcggcgtcgtgcctgcctcgtgcggtcccgtgtggtgcggcatgggatgtgctcacgtgcgcacgtacggctcgggcgtgtcggcatgagcggtgccggttcgccttcaatccttcctccatcctcgtcgcccttccgggccctcgaaaggcgtacggcgtacgactggcgatggctcttgggcaaaccattggtcaccgcttttggcacaggggccatgtgatgtgcgaccgattcgccgcggcctgcgctggctgcctctgcagtctgcgcttgtctgcccttgtatctctgtcttgacatactttattactacctctattccaaaccaaaaaaaaaaaaaaaaaagcggcc

SEQ ID NO: 119610 - DNA, 323 bp, Zea mays
  Clone ID: MRT4577_40569C.1
ctcattttttttttttgtttcttgttttttttttttttttttttttttttttttttttttttttttttttttaacaacattctgggggcggggttgggggcaaaaacacaaatggggaacaacaacaacgaacccggaacgaaacattcgggccccagacgaccacagacgaagataaacccccttttaacttgggggaacacggtggcaaaagccaacaaaataactaggccttaggggaccccaccgctaagtttctccagttcccgtagttgttgccctatccccccccccggtttgcaccaccttttcccccaccggcg

SEQ ID NO: 119611 - DNA, 440 bp, Zea mays
  Clone ID: MRT4577_4056C.1
ggccacgcgtcctatgaaagcgctgcacacccttgtttcatcgtttacagaacaaggcactggctgggggacaaggtcagcttgtggagagtaaacctcagctacttctacctgaaccggatgtcgcagctcctcgagtcacacacataggagacaagattcttgacgctgcatgcatgaccgacgcactctctctcttggtgattacaagatcaaatagagagcgcattcacacatacatagcttaaaatttacctgtgtgctttgctccagagatggacaacccctaaagcgatcgaaacatactacaagcggacctttcctctgcccaggcaccgtatgggtccgaactacaccttctccttcgacatgtgctcgagcctcgatcgcgatgctgacctaaggcttctaccacaggactcaacaatgcagaatctttc

SEQ ID NO: 119612 - DNA, 322 bp, Zea mays
  Clone ID: MRT4577_40570C.1
tcggccaagccttcggaatggttgggtggtgggggggcccttttttaaattggttattaggtggaattcaattattaaggtttttgggtggtggtttgtggccacccagaattagaaggtacctttcccggtttttatggggaaaaaaaaaaaaaaagggccggccgttttaaagatcccaggcttccttccccttgcttgcaactgattagttttcttttggggcaacctaattcaattcaactggcggcggtttaccaccgtcgggcctgggaaacccttgccgttcccaaccttattggctttgcagaaattccccttt

SEQ ID NO: 119613 - DNA, 393 bp, Zea mays
  Clone ID: MRT4577_40571C.1
gaaacgaatgtcacatctttaatatataacagagttctgtacaaaatagttaaataattacatcatatgaagacaacgatctagcaaccatagttgactgggagacgaaggcctagacctctcacgaactcatcgcgacatccttcatgctcctcatcttgtcggtacctattcttgaccttaaacttgagatcccacatacttcaccaaactggtcttcgggtgagtcgtaacctcgctgctactcgtatcaatacatacagatagacaaggagtacataaacataacagtacaccaaacataagaacaaatagagtaagaatattctacgcgatgctacgagagcgaaggttcgagaatgactaaattctgagttacagtgaaagagatgt

SEQ ID NO: 119614 - DNA, 365 bp, Zea mays
  Clone ID: MRT4577_40572C.1
aagggttgaattcttttttttttagaggggaggggcaaaaaatcttcttttcaaaacctatttggggaccttttcccccaaaaaaacctttggggaaaaaaaaccccctcgctacgaaaatgggaacccccccgacccccccccggggaagggaaaattaccaaaggctgccccgcccccttttgcaaaactggccgggaccattattgggcctaaaaaagggcccaaggggaccccaaaccaaaaaaaactgccccgggtaagggaggcgttaacccccccccgggggggccaaaaacaaaacaccccccccccccgggtcgggaccctggtccttttcacaaaggggccccccggaatttttt

SEQ ID NO: 119615 - DNA, 297 bp, Zea mays
  Clone ID: MRT4577_40573C.1
agataagagattttttttattataagtttcttctttccttctttttttatttctttattcttctaataatataattttaaatcatcatttaataatacaaaaatccctttttcatacacccatcctcctcaattattccccaatttccaaaaaaaaaaacccaattcccccccccccaaaaagttataaccatacacctccttaaataaaacccaatactcttatacaaaaaatcctaacatctcccccatttacattgctattcttcccctcatcccaacaaatctcaaaatttct

SEQ ID NO: 119616 - DNA, 433 bp, Zea mays
  Clone ID: MRT4577_40574C.1
tcggtgattcgtaaggtttaggatgtaaaaggcgatggtttcctactatcgcaacgactcggcggccgattctatgttcacgttgattttggacggttttgactaaagtgattcttatagaaatgggctgaaaagctggacgtttggcagtctgcagcagaagctgaaaaaaaactgaaacagatagggcttatgtgtacgtgtggagaacctgagatggtgattgctgggactgaacgttaatgtcttgtagttgtttggcttgtttactggattgctgatgtctgaaattgtcatcaaatgaaacgtgaacttttctctggttcatttaactcacttatggcaaatgatttaacgcgacgtgtgtatgcatctgtgtgttcatcatttcctgctctttcctttatcagcaatgaaattatgtgttctcttt

SEQ ID NO: 119617 - DNA, 269 bp, Zea mays
  Clone ID: MRT4577_40575C.1
atacgtccgaacttgcgactcgctcgctcgatgctagctttccttcgagtaaacgcagcgcctatggccatagcaacgcatgcctctgcagccacgcgcgaactgctggccgtggcatgtgcgccagaggggaacctccgggacttaacctcggagctcgtgctgctgtcgtcatcctacttcgggccggcaccactctgcccgtccacccaggaagctgtggaggatccaaaggggtttttggcccagcaactggacccaagaatgcc

SEQ ID NO: 119618 - DNA, 284 bp, Zea mays
  Clone ID: MRT4577_40576C.1
atctcaaatggccagtgtctcgaagatcctgaaggagctggtacctcagaacctcacacgcctgatggtcctcagatgcattgacaaagagcctccttctggaatgtgacaaacacaagaataagtcagtggccgaggccaaggtggaattcctgaagcggatctaccgatggcctacctttggatctgccttctttgaggtgaagcaaacctctgagcctgactacccagacatcctcctcattgccatcaaccgacatgggttagtgctcatccacgccaag

SEQ ID NO: 119619 - DNA, 291 bp, Zea mays
  Clone ID: MRT4577_40577C.1
gagatttaggatttgttcggtttgaattggattgacgcggatcttaggggagttaatccccttctatacaaatttggctaggaggggatttacatcctccccaatcccaaatcccctcctaaccgaataagacctgagagggaaatgaactcaatctccctcaatccacccctaaccgaataggcctgagaggaaaatgaactaagttctccttcaattctctccaatccccggagaggggatttgagtttccaaactagccattgaagtttcgaattgccaagcaggagt

SEQ ID NO: 119620 - DNA, 337 bp, Zea mays
  Clone ID: MRT4577_40578C.1
gggggaaaaacaattttttttttatccctgcccaaaccataatttttgtttcttgaaagggattgaacaaaccgctccaagttaaaattattaaccctcaccccccgctggggccctggccaccaaatgcaaaacctgttccacgttctggggggcaaaaacggccccagattttaaaaagacccaaactggacgggcgaaagccgacacccttgggttgggtaaaaacccaaaccaactgggcacattaggaacattctaatttggccctgttgttgaaaaaaaaaactaaactggcctgacgattttttctggtgaagaactgcacatgtttttt

SEQ ID NO: 119621 - DNA, 245 bp, Zea mays
  Clone ID: MRT4577_40579C.1
gccagtaccgagtcctacgagcagtcgcacgcaagtgtcaagagacgaaacggtcgacatggctcgcacgcaaatcttgccgtagcggtcggcctgggtggccgcgtgctgcttctggcaacggccgggacgaccttcgaaggccgccataacttgcggccaggtgagctccgccatcgcgccctgcctttcctacgcccgcggcacggggtccggcccctccgcgtcctgctgtaacggcgtca

SEQ ID NO: 119622 - DNA, 179 bp, Zea mays
  Clone ID: MRT4577_4057C.1
aagaccaccccctttttctgcttaatatataatggggcgtagttttcatgcgttttcgagaaaaaaaataaactaaagcattggcccaccacctcgacgctcatgcgagctctctctgtccctcagtattctcttctccacgtccattggtacgggttcaaagtctgcatcttcatcga

SEQ ID NO: 119623 - DNA, 731 bp, Zea mays
  Clone ID: MRT4577_40580C.1
gctatcacttctctctaccagcttactcatcgctccagatcaatcattgggctggctccattaactagttacactacttgctgagggatggatgatgtgtggtgcagcctcgacatggccgccgacatcgccggcctccacagcgccctcgccgacccattctggcccgccgaccttgacctcatggtttcgacccacgaggtggagggtatggcggacatggacgcgagcggcttcttcgtaggaggaggggatgaccgcttcatgctgccgtcgtcgacgacgtcgtcactctcgtcgaagcgatcactctccctcgacagcggcggctcctcaggctcggggtctttctcgctcgacctcgcggacgcctcgcggtaccaggcgccggcgctgccggtgccgcacaaccccttggcgggcgccgtcgaccacgacgacgaggcgatcatgcgggctatgatggcggtcatgtcttcgtcctctgcctccccgtcctcctcggcatcctcccatccgcagcccttccgccgggaacgggacagcaacatgcaacaacagtcagcagccatggcgccgcagctgcgtggaggacgaagtggccacgtgatggtgaagagcagcctctccatgtcgccggagagaagcagcagcggcggccggggacagcagcaggaggatccgacgagggccgcgagcggcaacaccggtcagctctaccacatgatgtc

SEQ ID NO: 119624 - DNA, 377 bp, Zea mays
  Clone ID: MRT4577_40581C.1
atcagcgcggtgtttccgtacaagcgtctactcttggttctcttgaagccttgcttgagttccttagggtttccaagattcccgtgtctaacatttctatcggacccgtgttcaagcgtgatgtcatgctggcgggtaccatgttagagaagggtctcaaggagtacgcggtcatgctctgttttgacgtcaaggttgataaagaagcacaagcatacgcagatgatgtgggcgtcaagattttcacagctgatatcatctatcatctgttcgatgatttcaccaagcatatggccgagttgaccgagcagagaaaggaagaatctaagatgcatgcggtattcccttgtgttctcaaaacagttgcggtcttcaac

SEQ ID NO: 119625 - DNA, 444 bp, Zea mays
  Clone ID: MRT4577_40582C.1
tttgggctgatttatgtgcttggtaggcgtctacccgccacgtcacttcgccgtccctaacacgatcatcggattatcgtaccgggagccgtcgtaaagggtaagggtcatagataattaggcgcgtcgcgtcctcccgcgcgtcggcgccttaccccttccaatccctacccggtactaccccgttagccccacgtcccaaaacgccaactgatcgcccggcgttagtcgcccgccgtaatacgtggtttagtctgagacattagcgtaggccacgccgtccggggatatcttatctccgccggattcgcaagccgattcgagacccttacccatcccttcccagcctcgctagcgattaccgtccactcagtccctagatcgacatcacgtattattatataatcaacctcgcattcgccgcgggccccgttaataactcgc

SEQ ID NO: 119626 - DNA, 482 bp, Zea mays
  Clone ID: MRT4577_40583C.1
ttttcctctcgtccgcccacgcgtccgcccacgcgtccggcggcggccttccccggacagccccgtgagttcctggacgccccaccggcggaccaggaactcgaggatgtcgacgtagtccctggccgtgtagacaccgatgcgctgcgcgacagcgctgaagcgcgcgaacagcccgtcgtcctggccgtcgtacatgaggtgggcgggcatggccaccttcttcctcatggtgtccgcgaaggcgcgcaccgtgtagtccgggtccacctcgaacagcttctcgacgatccgctcgtacgccgactcgtggcgcttctcgtcggcggcgattgtgccgcagatctgcgccagcttggtgttgccgtaccgactggcgtggcgcgccgtgttgccgtgggagatgaaggtggcgcgctcctgaacgacgtgtagacgaagcccatgttcgggttcggctacgtcttgggatcctgcatttg

SEQ ID NO: 119627 - DNA, 451 bp, Zea mays
  Clone ID: MRT4577_40584C.1
ggccgccagctgagctgcaatacgcccttagaaacgtccagactgacgcctaaccatcgttaattccatattacaagctattatattttgtccttttattttgataccattttataataacttttttttttaaatatttttttacttttacattcttacaatttatatttaccactcttcacacctgtggcttaacaggttaagggcaaacaaaataaatactcattacactggaagccgctatacaattcatttatagctccagttccctaatggggccaatacaataactggccgtctttttaaacgtgtggcttggaaaaaccctgcccctacccaacttaaccggcttgcaggaatccactttttaacacctggggttttatcaaagaggcccccaccaaacgcccttcccaatgttgcccgccccttatggcgaaggaacccccct

SEQ ID NO: 119628 - DNA, 1410 bp, Zea mays
  Clone ID: MRT4577_40585C.1
ttttttttttgcgtagcagagctgaagctcaaaaaggatgacgtccatggattcgacaagcaacaagcatcacggtgcattcttcacacatcttccctgagggagagaattcctacctcgtctttctttcagattaaagactgctggaggctgaaccgaaaagttcatacacagatggcacacaacaaggcacagcagctttgtcttatttgatctcagttcaatcaagaagaagaaaaacaatatacgaagctagaatctcataaataccctgatgagatgagctctctccgcagcgcataactaggaacagaatcatgctggaggcagatttaatctgcaataaatctaatcaatggctcatcgtcatatcagatcattcgctggccttcttcagcttagcttcctctccgtcgatctcctcaagcgctgcccagagcttaggatcttcgtagtccttgacgagcaacgcggctcctgcttccaccaaggacttctccgggttcctcgtcgccacaccgacgacaggcatccccgccgcgacgccagcccggataccagcaggagaatcctcgaagacgaagctgtgctctgcggacacctggagctccttgagggccctgaggtaagggtacggcgcgggctttggctgctcgcactcgcctccgacgatgacggcctggaagaagtccgagaggcccaggagcgagatcatcagctccgcgttgatcctgggggcgttggtcaccgccgcgcgcttgtacccgtggtctttcacccactggaccaccttcgcgaggcctttcacaggcaccaagcgctcttttgccagactcctgtattttgcttccttgtcctctaggaatttgagccccttctcaagctcccagtccgggaacaggttctgggcagcttcgacgtcactcctcccagcgatgttcttgatgaagaactcctcgtctatcggcacgccattgttgtacccgatctcgagaagcatctcttggaaagcgacgtggtggaggggatccgagtcgcacagggtcccgtcgatgtcgaacagaaccgcctggaccggaacggttgccgcgagggagctgacagtgggattgccgttgggggcggtagccgccatggtcgatcggaacggagtgggccgggaagaggaccggccggcctcgaggggcggaagggacgagcaggcgagagaaagtcctctccggatcgacggacaagaggaggaggagggcagccgcgccggtggccgaggccgatgcgatgcgtttggcgaatatgccggcgtccccgtgcgtggttcccgtggcgcgagctttattaccagccacagcccaccgccagggaattttggatctcgtctcgtctccctcccctgtgctgtgtgtgtgtgtg

SEQ ID NO: 119629 - DNA, 257 bp, Zea mays
  Clone ID: MRT4577_40586C.1
gaaggggaacacccccagaaaggccgccgggaaccataaggaaggaaccttgaaaaaattcagggccagattaaccggcaaccacgggaacaattccggcaacaacaaggaaaggaaggccaggaaaaggaagaaggagaagaagaagcacggcgagggccacgaccacgacggcggccacagtagcagcagcagcgacagcgactgagatctggtgtcgcagcacaggtgcaacacatgtatgcttgctggatgga

SEQ ID NO: 119630 - DNA, 118 bp, Zea mays
  Clone ID: MRT4577_40587C.1
gaagctcgtaatgcggttcgaggccaaacaaagggcttttttttcagtcaccatagttagttccgtgtggggggttcacccgaagcccaggcggctccttcttttctgtttacgataa

SEQ ID NO: 119631 - DNA, 321 bp, Zea mays
  Clone ID: MRT4577_40588C.1
gacccacgcatccgctctactcttgcgagtcgatagctcgatgctagctacgatttcgagactcgcagcgcccatggcgatggacacgcaagccttggccgacacgcgctacctgatggacgacaactgagctccgtatgccaagctcgagaacctgaactcgcagctggagctgatgacggcgtactacagcagtccggacctgatcctcgcgttcaccgacgaagcggtggacgcgcactaggagttcgtgtccccctagctggaccacatcgcgccggacgacatcttcggcggtaacacacgacggactgttccaca

SEQ ID NO: 119632 - DNA, 215 bp, Zea mays
  Clone ID: MRT4577_4058C.1
cttattccttgttggggcgggggtttatatcaacatacattttcactcataataagcagttttaggggctactttctcagggcagaaagggtgctgcttcacacatatcaccaacctttctctgcagacagcacagttacaaaataaaacgctcattcaagggggattacacaactggcatctagaaccagaccctaatacatctatgttcgccc

SEQ ID NO: 119633 - DNA, 657 bp, Zea mays
  Clone ID: MRT4577_40590C.1
cgtattcctcctcacgagctcagagctctacttctactcacctagcaaccggactaaaacgatccccttctccatgatgatatgaaccaagatgcacaccgacatgtgctagaaactcaactaggaggacccgatgaaggcagatactcactacaacacgtgccgtcttcctctcaacaaagcacccagccaacgggtgaccttactcatactaagctatctgccagaggaggaagccaagaagaacttctcatggtgagaccaccacagatatcacaccggcaatggcacccctctgacatcaccttacctgacgccaccgtctgatatcatgtttgacgcgctcgaaaagaatatggagacgcctaaacgaactgttatctctgctgccaccagcagaccgcacaggatactgcacggcgagcaagacagacattggcaccgaattcgtaccatatgaacaaaacggacgtcagactgctcgaagaaatgcgcatggacgcatataggatctctatctcttggcccagaatactgccgaaggcaaccagacaaggaggtattaacccggatggcatcaagtactacacaaacctcatcaactcgttgctagacaacggcatacagtcatatgtaacaattttccactgggatgta

SEQ ID NO: 119634 - DNA, 376 bp, Zea mays
  Clone ID: MRT4577_40591C.1
ccttcgaaaaaaagacagtcggcggaaaaatcttttttcaaatcattcgaaaaatatcataataatgaacagaaataaacgtctgctttacaagccatgtgtggaaacattactagaaataattatcattttataaacttaaaaatgttagtcatttttttaagaattccaaattcattatattgtttcacaaaattaattattgatttatataatgagatgtaatcactcttgttaaatcctcaatcctgagcggtttcctcaaaaaggcgtccgctctaatcttgcctcgtttatcaagacattcagcaatctccgattctatgcagtttccacttattatcagaaaagatggactcaatccttttgcagtttc

SEQ ID NO: 119635 - DNA, 640 bp, Zea mays
  Clone ID: MRT4577_40592C.1
gtctccttctctctctctcccgttccatttccccatctcccagatccgattcatcgcagctctccctcgtctgacgccatgtctgtctctgtgaagaatacctcctctgaaagtgatgacaatgccaaggatatctctaagaagtactctgacactgtcgaaattgagatggctctagaacaattatgcccccacctcaatgacgagccgtgccgagtttctgccaaccagccccttatccctcgctacgatatcaaggtgtctctgcttgacgatgcacaccatggtcatcatcgacgacatcatgcgacttcactacctagatgctgtggttctcctgaaacatcttctcaacacaaaacttgttcacaggcttgcatcagaagacaatgcttcgcttgtgatcacatggcatgatcaaacccattccccgtattgttggtgctgcgatcgactactcgactgagttccaggaccctgggtactcacctcatatccctcgacggcaaggacaacacgattatcgtccacgacgatgtccaggtcaagaaggactattacaagactgtcgacatccccgatctcggagccaccgacaagctgatgctcgagatcgtgctcatcatcgtcaactaccttg

SEQ ID NO: 119636 - DNA, 203 bp, Zea mays
  unsure (1)..(203): unsure at all n locations
  Clone ID: MRT4577_40593C.1
atagtgagtcgtattaaacgntgtgactcagtatgcggagtcgcaaccccgggtgtgaggcgatacagcgccgcgagcctgccaccagcaggacgcctgcacgagtttcgggcactggcgcaaccacgccggcggggcgagccggggctcagtcggagggcctggtgggatagggcggagacgctgaggcctgagggggagac

SEQ ID NO: 119637 - DNA, 275 bp, Zea mays
  Clone ID: MRT4577_40594C.1
ccctggaaacaaacagagagctcccctctctagctgtcatcttttccaccatgccacctccgcccgtcctgtagctcgccctcagccacggtggatgccaccgccacctcactctcctgccggccgtcctgctctccatcgtcgccctggccatggacgccggtgaacttgcccctgttccatggccggcgtgccccatctctctggtgctcggcgccctcctatttcctagtccatggtcgtggtttcctctctccctcctccatctctgctcc

SEQ ID NO: 119638 - DNA, 451 bp, Zea mays
  Clone ID: MRT4577_40595C.1
aaaacacaaacataaaagggggttggtgggtttttcccaaaacacatgggtggggggggatgggaaaaaattggaaaaaaatttgagctgttggggattaaaacccatccaatcccgctaaatccaaaggggtggggagctaacccaacaagcccttaaggggaaaaaacaaaaactagctccataagttaaaaaacccccaaaaattcctccatccacggggaacacccacaaacccccccttgggccccttttccgcccccccaattttttttaaaccggaaatttcagttttgggcatgccggccccctttggaaggcccttcccacggggggcaaccccccccccacaaatttttttaggcccatgtccccccaggggacttattttcctacagaaagggatgcattcgacctacatttggggcttcctgttaaagaagtttttttt

SEQ ID NO: 119639 - DNA, 371 bp, Zea mays
  Clone ID: MRT4577_40596C.1
aaagaaaccagggggggttttttaaaaattaagggcgggggcccgtttttttggggccccattaccggggagggccaaaggggtttttttcccccgccttacatccaagcttccacccccccccaaaaaaaacccccccgggggcaaaaccaaaaaaagggccctttaaaaaaagcccgggcccccttttaaaaaaagcccaaaccccatttcccccggggggggaggggggggccccccattgggcccccaacccccaaaaaaaggccccaccggttttcccaaatcgaaaaaggcccaaggttaaaacccatgctgcccccccagggcccaaaggggaaacaaagggctgaccaagggaatttcctttt

SEQ ID NO: 119640 - DNA, 664 bp, Zea mays
  Clone ID: MRT4577_40597C.1
aatctggaattttggcgagaaacgcattcatgttctggaaatttagcagacataattaggtccctgaaactattccaaggaggagcatgattacacaccagtggggaaaaaaacacacacacacacacacatagaaaatggatcaaatttgcgcgcgacaccaacaagcctgagatcactgcttctctatcctaccacagagatctaaagaacagcatgacattatacagataggttcatgacaaagtaacaagacaggcatttggtagttttttggacagggtaagtagtaatacactgattaatactccagttacgacagtccacaggcaaacccccttacactctgttaagcatggcatgagccatgaccatcacacaagcctccctcttgattacgaaaccagaaacgagatgcggcgatggaacgccatcttaagagttattggttggcaagggcaacaacaacaagaacgtgggtaccaataccaacagggcagatcggttactgcggctggacgtagtagtagcccatggtggtggggtcggcggcggcggggtgctgcgggatcccgggcgctgctgcccccatggcggcggcggcggggtcggcgtccctgggctcgtcccgcggcacgatgtccacgaggaagtcgaagacctc

SEQ ID NO: 119641 - DNA, 415 bp, Zea mays
  Clone ID: MRT4577_40598C.1
agacaaaatcctggtttatattccacctggccgacaagaacaggaaagggaacacaatggtacaccaaaaacacaagtctttctgttttattctaaaacagggccaaaaacatggaacggatcgcacaatgatccactagaacacaacaccgtcaggaacgtggaagtgggcacagacaagggggccatcacgatggacagagggggcatcacccaacaaatcgagcgctatgagctcataagggttttaggaaaacaaccaagccggttaaacccgtgcggggcgacccagtttcgtggaggccaacgccaatgccgatgcctttggccgaagcgagcttgaattccttgaaccttgccttgaccacctccccttcctggggcccaaagaggctgcctatggcggcctgaacct

SEQ ID NO: 119642 - DNA, 1139 bp, Zea mays
  unsure (1)..(1139): unsure at all n locations
  Clone ID: MRT4577_40599C.1
cctcgaggccggccggggtcttcacttcccgcccggcgaaagagcacaagcagccgccaccaatggctgcctgagaccttgcgggcgagagcggcggagaaagcagttccagccttccaaagctgccgccgatgcaagctccgcgtgagggctacgggctggccacgatggacttcgattacgtccccgcgtcccccggcagcagcaggtgggcgggcgagtcagcggcgcggcggcggcagcgccgactctcttcgccgtcattgaggacctacctcacgccggccttcgacgccgtggccggcggggagggcggcgtgtctgggtactcttcatcgtcgtcctccggcggtctggaactcgggttcgacgcctcgctcctccgctaccgccgctcctgcttggcggcctccgcggacctggatagccgtgtcctcctctactccccgcagtcgttgccaccgccgccgccgcagatgagggcggcgtatgtggcagcggatgacgaggtttgggcacctggcgtcagccactacggctccaagcatgaggctggccggcttactggcgcaccaggttttcaggattcagaaaaccgcattgctttcgtctccccgtcacggacaagtagcaatcttcatactacagttctcggcgcctccacacccgtcaagctccctgctgaactccagttgcccgagggcagtgcagagctcccaacgccaaagccagaagctacgccttcagctctcaagttatctgctgatccagaaccagacgtggatgccgatgaaatcactgaagccctgtacggtggcagtggtcatcgcaggctccccattttcagggagatctgtccagaatgagtgtcagcctcagcattctcctcaacgtcgctgatggatgcatttcggctttagatgtatattctgtttatctatctcgtacccatagtcttggtagcagttactctggagggtcatttctagcttcctaaaggagaatctcttctattgatgtcttcattaagcgagaaagctatgatatacatgacttgattaagcaggcaattgacccgttttgcttggcgttggttggaggtgcacgtgcaccttcgaantatatatgaatttagcccc

SEQ ID NO: 119643 - DNA, 357 bp, Zea mays
  Clone ID: MRT4577_4059C.1
gatgtatgacgtcgttgtccactttgtttctgggtggcgtcaagatgggaccggccgtggtatgtgactgtggtaagtatgcgactaaggagctgtagtgtgttcttccaaccacatgcactagcactgtgggtttgctttgggcagctgcaagatttggaaatttatgaatgcgatgatcttgtctactggccggagaaagtattccaaagcttgatttccttgcggaggctagagatttacagttgcaagaacctaattggatacgcagcggcggtggcgaatggtcctgaccaggaagcaatgagccagttgcttttgccccatctagagtctctaaagatattggggtgtgaa

SEQ ID NO: 119644 - DNA, 388 bp, Zea mays
  Clone ID: MRT4577_405C.1
ctataacttcgggaagagggcgagcacgcgcggcacgaaatggaagcggtaccatgcgaccgcgccttcttcgcgtactagatacactccgcgggggcatcaaccctagcttcctctcgtggacctgggctagcgctcggggcgggcccgggggctcacgttgcaacccactttcgagacttgtaaattgctgccgccagctgttggtggtgcatagcatgactacgtggtgagactggggacataagcagacccgcgcgctctggagtatccctgcacagccaatatggcagtctctaagccgcacagtgtatgttactgggtatgagcttactgacattgttagtgagatgcctgtgtctcaggttgcttggaatgtaaacgacag

SEQ ID NO: 119645 - DNA, 326 bp, Zea mays
  Clone ID: MRT4577_40600C.1
aaaaaaaaaaaaaaaaaaaaaaaaaaaagggctgaaaatataaaaagaaaacaaaataaaaaacgcgtacatgcaaaaataataaatcttatatagtgtaaaaaaaaaaaaaatgggcggcccttttatggaacaaaagtttaactgcgaaaacttgcgacgaacaacatttttttttgggttgccctaaattcaatttatggccggtggtttaacaacgaagagactggaaaaaccctggctttacaaaatttattcactttgaataaaaaacccttttcgccatgtggcgtaatatcaaaaaggcccgctccggtggcttttcc

SEQ ID NO: 119646 - DNA, 156 bp, Zea mays
  Clone ID: MRT4577_40601C.1
ttactacaccctatagtaagtcgtattaaaagagcccagctttgctcgggtggcctttcgggctcactgatggtcgagttcctgtccgatggagagttccacgagggcaaggtggcagggaggccggtggcggtccgtgcccaggtcgaggagagc

SEQ ID NO: 119647 - DNA, 323 bp, Zea mays
  unsure (1)..(323): unsure at all n locations
  Clone ID: MRT4577_40602C.1
ctctnnnttttttttttttttttttttttttttttttttttttttttttttttttatttgggaacccataaatttccaggggggaacccaaaaattccctggcaccggtttttttttcaaaaaaaaagggggagaaacccgaaaattggggggcaaaagggcaatgtttctggggccaaaggaaacggccaattttgaaagacaaaaggcccgacccacaggcccttggggggggtccaataggtaattcggggccacccaaaacattattttcccccaggggaaaaataccaaagtcccacgggctataccaacaaaaattt

SEQ ID NO: 119648 - DNA, 721 bp, Zea mays
  Clone ID: MRT4577_40603C.1
actcacgagaccgtccaccgcgacgcgctctcttgcccgtgcccccgtcctccccttccccctccacctccgcggcgcccgcggtaacctcgccacgccacatcgcgtgcgagcaccaaccgtcgccggccctctaattaagctgcccgcgcggcgcgatccggcggcacacatccacgctcaccggcggtgggcggcgccgctgctggcctcggtcctgctctcgtcgctcctcatctccgcgtcgctcttcttctcctcctcccgcgcgctgctcctctccttctcgccgctcccctccgcggcctccgccgagcccctcttcgtcgaggccaagctccgccagcagatgcgggccgaggagcgccccgcgcgcggcgccgtgcccaggatcgcctacctcgtctccggctccgcgggggacggagccgcgctgcgccggacgctcagggcgctctaccacccggcaaacacgtacgtcgtgcacctcgacctcgaggctcccgccgccgagcgcgccgagctcgccgctgccgtccgcgccgaccccggctacgccaggttccgcaacgtcaaggtcgtcacacgggcgaacctggtcacctaccgtggcccgaccatggtggccaatacgctgcacgcggctgccatcctgctgcgcgagggcggtgattgggactggttcatcaacctctccgcctccgactatccactcgtcacc

SEQ ID NO: 119649 - DNA, 161 bp, Zea mays
  Clone ID: MRT4577_40604C.1
agcccaagtcagactggaccaagccctgcacgtgcacgagcatgcccaccgcgtgatgcttgactgggctgggcgctaccgggagggccctgggcagttgctcgcgggctcgcctacaggcactgacgagaggatcggagcacgagatccatcggggagat

SEQ ID NO: 119650 - DNA, 2122 bp, Zea mays
  unsure (1)..(2122): unsure at all n locations
  Clone ID: MRT4577_40605C.1
ccaccgggtacctcgaggccggccgggactcacgagaccgtccaccgcgacgcgctctcttgcccgtgcccccgtcctccccttccccctccacctccgcggcgcccgcggtaacctcgccacgccacatcgcgtgcgagcaccaaccgtcgccggccctctaattaagctgcccgcgcggcgcgatccggtgtccaccgctgccccgccggaggaggaggaggaaggggggcggggggtggagcacagggggatgctagaggcgaagccgccgtcgccgggctcctccggcgcggccggggcggcggcacacatccacgctcaccggcggtgggcggcgccgctgctggcctcggtcctgctctcgtcgctcctcatctccgcgtcgctcttcttctcctcctcccgcgcgctgctcctctccttctcgccgctcccctccgcggcctccgccgagcccctcttcgtcgaggccaagctccgccagcagatgcgggccgaggagcgccccgcgcgcggcgccgtgcccaggatcgcctacctcgtctccggctccgcgggggacggagccgcgctgcgccggacgctcagggcgctctaccacccggcaaacacatacgtcgtgcacctcgacctcgaggcccccgccgccgagcgcgccgagctcgcctctgccatccacgccgaccccgtctacgccaggttccgcaacgtcaaggtcgtcacacgggccaacctggtcacctaccgtggcccgaccatggtggccaacacgctgcacgcggctgccatcctgctgcgcgagggcggtaattgggactggttcatcaacctctccgcctccgactatccgctcgtcacccaggacgatctgttgcatgtgctctctgagttgcccaggcagcttaacttcattgagcataccagtgacatcggatggaaggagtaccagagggcgaagccagtgatcatcgaccctgggctatacagcctgcagaagtctgacgttttctggataacagagaaacggagtgtcccaactgcgttcaagctcttcactggctcggcatggatggtgctcacccaccagtttatcgaatactgcatatggggatgggacaatctcccaaggacagtcctgatgtactacgccaatttcctttcctcgccagagggctacttccacacggtcatctgcaacgtgccggagttccgcaacaccacagtcaaccatgacctgcatttcatttcctgggacaacccaccgaagcagcaccctcactacctcacgctcgctgacttcgacggcatggttaacagcaacgcgccctttgcaaggaagttcgggagagaagaccccgtgctggacaagatcgaccaggagctactgggccgccggcctgatgggtttgtgcccggtggatggacgtatctactgaatgcgacgactgaggaagggagacccttcgccgttgagcgcgtgcaggatctccgcccagggcctggtgtggacagattgaagaaactcgtcacgggcttgctcacacaagaaggctttgatgacaagcactgcctgtgagactgccccccagtaagatgattctggctgggggcggtagattacacggtcaaatcttgagggcattggagccattttctgggaatatgcctactggctgaagaagcagcacatagtatcatgtgatgtacgcgtggatgcaagcaacggtaagataggtgctcttacagacacagccggctgagttgagctactaccgtacagcaggaggccacggacgtagccggcggagattatacaggaatagtagctcattaggttatgttagatgactatatcagccccttcccaaccgtcaataatgttgggagttttgacatctccgcggcgctgcgggttgtgcaaggcaggcaggcaggcagtccattcttcgcttggatgccatggcgcctggtgtaaccaactggtagcgtgtgaggaggcttcgttgtattgactagtgcatatttctgggcaaaacagatgcgtttggttgcacacatgtaaaaaaaaaaaaaaaaaaatcgctgatgatgagtatagcagaaaaaaaaacagttnaat

SEQ ID NO: 119651 - DNA, 288 bp, Zea mays
  unsure (1)..(288): unsure at all n locations
  Clone ID: MRT4577_40606C.1
ntttttttttttttttttttttttggttttgggtttatttgtaaaaaaaaaaggaaaaaaaaaaaaaattggaaaaaagggggtattaaattatagcaaaccatgaaaaacaaacaaaccaaaggaaatgaatgacctcagcaaatgcaaactaaatatggttaatttggaaaactaaaaaatgactttgatgcgggtgcccaaacaatatgaataaaaaaacttaaacaaggggtaaaatcccaactaataaaagaattcatttggatgaaaaatttttgttaaccc

SEQ ID NO: 119652 - DNA, 696 bp, Zea mays
  Clone ID: MRT4577_40607C.1
gggagctgagatttcttcattaagcggcctgcttcgagttcgagcgtagcttgcgtagggaacccccggttgcttgctcgtcagtcgtcactgtactagagtccagaaaccgctggaactttacgtagtaaaacaaaacataacaacacaggtgccctgagtttcggtacgatggagttcatcggcaccaacaccaaggacgtcgagatggccggacgggataacaccgagctgtcatcgagagaacacgcgctcccggcgctcctgatcaaggttccgtcgcaggccatcgccggcttcgactgcgtgcccgccgccgccgacgccaccgtcgtctccctgaacgagccgggtgacaaggcggaggacgtcgccatcagcatcctccccgcgccggcgagagcctacggcggcgacgcgcacggcgtcccgtactccgtctcgctcagcatgccggcgtcgccgtcggggttccacctgtcgtcgcacttcatgtgcgcgggcgacgcgcccgtggcgacggccgacgtccgcccggtgctgctggaggatcagcggcaggcggcggcggcgcactcgccgcgcctgatcaagcagacgcggttccactcgcagcccatcctcaacctgcacccgccgtccaagaacgtcgtcgacgaggctgcggcacggcggtgggacagcgcgcgcgacacg

SEQ ID NO: 119653 - DNA, 229 bp, Zea mays
  Clone ID: MRT4577_40608C.1
accaaatatttacgatcaggcaggggaaaaaataaaaaaagggggggcagaaaagagacgacgacgacacaactaacaggcagggatttaaacacgagcatactccagcacagcgctagagccgggattaacacagaagcctgcttcggcgacttctcggctgtcttaggcgaggaggaggccaccttaggaggggacgatgctctccttgctgacggtagaaaactca

SEQ ID NO: 119654 - DNA, 576 bp, Zea mays
  Clone ID: MRT4577_40609C.1
ctccttctactgtggctccggcggcctccgccctatcccgctccgcaacgtccgtacctgggtgttggtttctacttcgactctccgtgtggatcgagaagagaccacatgccaacaaggttcccgctagtctgctaataccgcgagctgcagaatctcacgccataggtcttacttgaaaccgttgggagacagaggaggccggactagctagctaacaaccagatggaggccgtggtgccgaaggggcagcacccggtgaggaaggccctggaagagatggatcagtgggatgacctcaacactcggctcctctcccaattctccaacgctggcgcggtcatctatcaacttcaggcccttggagaggacaagaattatggccccttgcgtgctgtgcccaacatcagagtggacctcatgggtgaactcagatgcgaggtgtctggcagctcatatttcgtctaaaattacggagacactgggagaagttcaatgacatcgtgaaagctttaaataaggctctgcgtgataccaaccagatggtgagaggcgggtcggcactcacagcgaaac

SEQ ID NO: 119655 - DNA, 851 bp, Zea mays
  Clone ID: MRT4577_4060C.1
ggtaccctcccggtccggccggggaagcccaggggcctggccaggctcgaaccttctctccttctctggcttgtcttctccttccttcctcttcctcctcccctccacgcgatcgaaaccgaagcacgaattaatcatcccggttcagccctctccaggcgctccaccccgcgtcgcggacccccgacccgccccccgcctcgtcctgttcgcgtccccctttccccgcgtgtgcgttggccggctggttccggatgagggggttgctgtcggtggaggccgctggtgcggcgtcgtcgtcggcctcggcctcggtgctcaacggcgccgtggactggtggcgcgacgtcaacgagtcgccgtgctctacggcatcgtctccgccgtcgcgctggtccaattgatcagaatcgagtgcagggtgccagagtatgggtggacgacgcagaaagtgttccatttcctaaacttcctcgtgaacggcgtgaggtctgccgtgttcgtgctgcggcggaatgtgcaactcgtagagcctgagataatacagcatgtgcttctagatatgcctgggcttgcattcttcacaacatatgcacttctagtgctcttctgggcagagatttattatcaggcacgtgcaatgtccactgatgggcttagaccaactttctattggatcaatagcgtgggttatgcaattcagataatcctatggttggttttgtggtggaaaccagttcgaattatggtcatcttgtcaaagatgttctttgcaggtgtatcactatttgcagccctcgggtttggttctctatggaggaagggtgttcatgatggtgcgacgttttcct

SEQ ID NO: 119656 - DNA, 232 bp, Zea mays
  Clone ID: MRT4577_40610C.1
gtctccccaggggggggggacccagcaaggggtttttattttttcatatcgcatcaacagggcacacgcgaggattatctcgtttacgacgtcagtggtgcagactcaaacacattcctaggtagcaaccaccctccagtttttatattttcccaaactagccgtacgcggcaaactggggattcttacacacttatgaacaatgacgcaggagtcgactggacgagaccca

SEQ ID NO: 119657 - DNA, 260 bp, Zea mays
  Clone ID: MRT4577_40611C.1
ggcgagcgaggtggtgagagagctagcgagacggacatggcagccacggtgtccttcccggcggtgaacatggagaagctggagaccgaggagacggacacggccatcgcggtcatccgcgacgcctgcgacaactggggcttcttcgagctgctgaaccatggcatctcgcacgagctgatggacgaggtggacctgctgaccagggcgcactacgcgacctaccgggaggccaagttccacgagttcgcggcgctcac

SEQ ID NO: 119658 - DNA, 597 bp, Zea mays
  Clone ID: MRT4577_40612C.1
tttaaatattaatagagctcctgcagagatctgggggggggggggggggggggggccccaacggtggcccagccccacagagtcgctcgctccaggtagcctacacgccacacaataagtctcacagggtttacacacaggctgggtgcactgcaagccagtcacaaccaacaccgactctaggctcaagccctaccaaacgagacgtattcttaaggaatgtaaggaggttcttacttttcaggacattgaggattaggttaaggttaaggttattatttttcaggaggattaggataacatcaaggaggagatttacagggtataggttgaaactactactattaaggagggttaggttactaatagtaaggagggtcaggttattattattaaggttaattaggtttttatttttgaggttactattattaagggtaattaggctaaggttgaggtttttcgtaaggaggttattatgaatctctaggtgcatcctaaggtcaaggacatctaggtaaaggttagtattcaaacattctagttcgttccctacgaggaggtcctggttaattactctcatataattaggtaaaa

SEQ ID NO: 119659 - DNA, 231 bp, Zea mays
  Clone ID: MRT4577_40613C.1
gggtttcgttgggtagctgaccagcatcgcggcaggggggttttcggctgctagagacttatcgtcgccgaaaacggaggaagcggcgtgcacacatgttgtgtgagcagacggcggctagcactagcagcagccggggcggcgtcaagcagtcggacaaggtggctgcagccggtggctgcgaactaggaggaggaggaggaatgcacggacatacactcgcttaggccg

SEQ ID NO: 119660 - DNA, 664 bp, Zea mays
  Clone ID: MRT4577_40614C.1
cccacgcgtccgcccacgcgtccgcccacgcgtccgcccacgcgtccgggctttttatcaacgcttctcctgctggttactccgcgcgccttctctttctctcccggacgtcgatcgtgttcttcagcacgggctagctagctccctccctcccagccatggcgagcgccggacaacaaggggcacgggcatccgctgcccaagtttggggagtgggacgtgaagaatccggccacgtccgagggcttcaccgtcatattccagaaggcccgcgacgacaagaagaccaccaccggccctggggctgggaacgcgcgcgcaggcattccgccggccttcaggaacggcggcggcgacggcgggtacaggcccgacttcggcgacggcaaccagtacacgccgcccaaacggaagaagtgggccttctgtggctgctgaatcgaagctcgctgtgctgctgtgctgactcgaaaggagaacggatcgtgcagcagctcaagtgatccaggatgatgggagcgccgagacacgatggaaggcattaattatttttgctcatctctaccgaggaacactagttccatcgggtaactgaacctgcaaatcttcatgatgaaactgtcgcatcatttggttcaaaaaaaaaaaaaaaaaatttgcggcc

SEQ ID NO: 119661 - DNA, 730 bp, Zea mays
  Clone ID: MRT4577_40615C.1
ccggccgggcccgtctaattttatcaacgcttctcctgctggttactccgcgcgccttctctttctctcccggacgtcgatcgtgttcttcagcacgggctagctagctccctccctcccagccatggcgacgccgttgcatctccatttcgttctggaattggggcgttgcacacccatgccgtcgcgttgccttgggttgtaggacaacaaggggcacgggcatccgctgcccaagtttggggagtgggacgtgaagaatccggccacgtccgagggcttcaccgtcatattccagaaggcccgcgacgacaagaagaccaccaccggccctggggctgggaacgcgcgcgcaggcattccgccggccttcaggaacggcggcggcgacggcgggtacaggcccgacttcggcgacggcaaccagtacacgccgcccaaacggaagaagtgggccttctgtggctgctgaatcgaagctcgctgtgctgctgtgctgactcgaaaggagaacggatcgtgcagcagctcaagtgatccaggatgatgggagcgccgagacacgatggaaggcattaattatttcagccatggtgtttcgccttgctttaaccttttgctcatctctaccgaggaacactagttccatcgggtaactgaacctgcaaatcttcatgatgaaactgtcgcatcatttgtttctaaaaaaaaaaaaaaaaaatttgcggcc

SEQ ID NO: 119662 - DNA, 970 bp, Zea mays
  unsure (1)..(970): unsure at all n locations
  Clone ID: MRT4577_40616C.1
ccgtaattctcttgtttacccactccatagggcgattggttcctcgagggcggccgggtcccgtctaattttatcaacgcttctcctgctggttactccgcgcgccttctctttctctcccggacgtcgatcgtgttcttcagcacgggctagctagctccctccctcccagccatggcgacgccggacaacaaggggcacgggcatccgctgcccaagtttggggagtgggacgtgaagaatccggccacgtccgagggcttcaccgtcatattccagaaggcccgcgacgacaagaagaccaccaccggccctggggctgggaacgcgcgcgcaggcattccgccggccttcaggaacggcggcggcgacggcgggtacaggcccgacttcggcgacggcaaccagtacacgccgcccaaacggaagaagtgggccttctgtggctgctgaatcgaagctcgctgtgctgctgtgctgactcgaaaggagaacggatcgtgcagcagctcaagtgatccaggatgatgggagcgccgagacacgatggaaggcattaattatttcagccatggtgtttcgccttgctttaaccttttgctcatctctaccgaggaacactagttccatcgggtaactgaacctgcaaatcttcatgatgaaactgtcgcatcatttgtttcaaaaaaaaaaaaaaaaaatttgcggccattcgggcccgtatttctacaaaactcgacgatcaccctgccggcggcggcggcgagcaacattgcaaaccgtcgcatctaatcattcgccaatcacaaagttttaactcattttaggacagtgatcacacctagggtgacaaatagcatctctcacgcggcatgcaatcatccagtattcatcgaaagattaaacaatagcgaaaaaaaaaaaaaaaaaatttcggccggctttgagaacnccaatcgcccttaggagt

SEQ ID NO: 119663 - DNA, 386 bp, Zea mays
  Clone ID: MRT4577_40617C.1
tccccttctcccagccccgccgccatgtccacgccgccgccgacgaccatccccgacgagctcctggaggagatcttcctccgcctgcccacgccggacgcggtcgcgcgcgcctctgccgcctgcacatccttccgccgcgtcatcaaagcccgcgccttccgccgccgcttccgcgcgctgcaccggcctcccctcctcggcttcatggacgcggtcggattccaccccgcccaggctccgcacccctccgctccgctcgccggcgccctcgccccccgcgccgccgatttctccttcgtcccggccgtcgtttcttctgcctcctacttcgtgccgcggggcgtccaagaagacgacggggaagggacccgctggcgcccctg

SEQ ID NO: 119664 - DNA, 249 bp, Zea mays
  Clone ID: MRT4577_40618C.1
cttgacaagcaatggccctcgaggaggaacatacaccacccgagctgcgctaccttttgggcctggaaaacaccttaacggtgcgacgagctgcccttggtctttcctcagtagtgcataacatcgcgttagagtgccagttgagactctaagtttttcaggattaaggaacctccttcaccacacgaagcgcccggaacctgagcacgtggctggaccggatcatgccgtcatgtgacccacgaacct

SEQ ID NO: 119665 - DNA, 303 bp, Zea mays
  unsure (1)..(303): unsure at all n locations
  Clone ID: MRT4577_40619C.1
gctcctacagcatgcatttgcatctggtttgtcattgccaccattagttacactcagaacaacatgtaattgagtttctataatagacatatcatatgtgtggttgcgccaatgggtttggtatgctactggaaataacttgatttgcttgtcttaataaattttaatcaatttttgttgaggctaggtggtcaggatggctcctttccttagntgnttgntttacatgtgcaacatgtttttaaaataatttggctcaaatttgatattttgaaaagtattaatatttctatgatagcttca

SEQ ID NO: 119666 - DNA, 740 bp, Zea mays
  Clone ID: MRT4577_4061C.1
gcagcagaagaagggcaagtggaagtcgggtcgcacgccatgatggacaagggcttcgggtgtcgccgcagcagtgcgaggacaagttcaacgacctcaacaagcgctacaagcgcgtggtcgacctgctcggccgcggccgcgcctgccgagtggtcgagaaccacgcgctgctcgacgccatcgacgagctcacgcccaaggccaaggacgaggcgcgcaagctactcagctccaagcacctcttcttccgcgagatgtgcgcctaccacaacagcggcgttgccgggggctcgcacctgccgccgcacgccggcggcggcgcggcgggcgacgccgcctgcctccaccacccgccgccggtgcccgtggccggcgcagcctcgtccgccgctcgccactaccaggcagccccgtccccgccgtgcatgaaggactcctccgccgacgtcgcggacgatgaagacgacagcgacgccgtgagcgacaacggcgaggaggacgaggacgactacgacgaggaggacgacggtcacatgtaccacagccacctcaccagtcgtcagcacagcggcggcggccgccggcgcggcaagcgcgagcatggcgaggatagcgccgcggccgaggacctcgaggacgaggcggccggcggtgggaaacgcgcgaggacgggggcggcacccgacccatcggcaatgctgcagcagttgaagagcgagctcgcggccgcggctgcc

SEQ ID NO: 119667 - DNA, 173 bp, Zea mays
  Clone ID: MRT4577_40620C.1
tttcttttgaattaaaaagaaatctctcttctaggctggtgcttttcgactataatttggagattgttccaatgtccgtgcaatcatctgaacatgttactacttattgtaccttgtcgtgcaaagttttgctaagatctcaaaaaaaaaaaaaaaaagggcggccgccgact

SEQ ID NO: 119668 - DNA, 1269 bp, Zea mays
  Clone ID: MRT4577_40621C.1
ctcgaggcggccagttatcctgttcgctgccgtgttgtttaccctagtccagagggtttatcttcgttcgtctcgtttgttgttgcccatctgtgtttttgattgcaaggtcgctctgtgtcagttgttagtgctgtgttcatcctcggctccagcagacccatgcatcaaccagcatggactgcggatcgatggatgctgttacccccgtcaggctttgttctaagttaatcataaggaaaaaatggtgcttcaaaaaaaaaaaaaaaaaaaaaaaaaaaaaaaaaagcgccgccacttcccctccgagcctcagttcgcatccacgcgcgccgccgccgcctcgccggtcgacgctcaccgcgcagccatggcggaacagactgagaaggctttcctcaagcagccaaaggttttcctcagctcaaagaaatctggcaagggtaagaagcctggcaagggcggcaaccgattctggaagagcattggccttggcttcaagactcccagggaagcaatcgaagggacctacattgacaagaaatgcccattcactggaactgtttctatcagaggcagaattattgctgggacatgccacagtgctaagatgaacagaactatcattgttcgcaggaactacctccactttgtaaagaaataccagaggtatgagaagaggcactccaacattcctgctcacatctctccatgcttccgtgtgaaggaaggtgaccatgtcatcattggccagtgcaggcccctgtcaaaaactgtgaggttcaatgtcgttaaagtcattccagctggatccgcagctgctggaaagaaggccttcacagcagcctgagtttatagactatgttccatgagtagtctatagaatgatgtctttttaattcaaaagaaatctctcttctaggctggtgcttttcgactataatttggagattgttccaatgtccgtgcaatcatctgaacatgttactacttattgtaccttgtcgtgcaaagttttgctaagatctctattgtttcatgtcttctgataaaaaaaaaaaaaaaaaaaaaaaaaaaaaaaaaaaaaaaaaaaaaaaaaaaaaaaaaaaaaaaaaaaaaaaaaaaaaaaaaaaaaaaaaaaaaaaaaaaaaaaaaaaaaaaaaaaaaaaaaaaaaaaaggggcgccctttttaagggtcccaagtttacttccccgtccttgcaacttcaaaccttttttatggggcccccaaaattaaattcccgggc

SEQ ID NO: 119669 - DNA, 364 bp, Zea mays
  Clone ID: MRT4577_40622C.1
ctggtcgatcgtcggtgactgatggcgatggcggcggcgcaattggaggcggaggaggagctgcggctggaactggaggcggtggcggcggtgtacggagacgacgtccgcgtgctccgcgacctcccaccgcacctcttcgtccacgtgcggccccgcaccgccgacgacacctcgcagcaggaagctgaacttggacgactgggatcctaagcagaagagccactatccttgtaggctgttattcgaaacttgtttcctacgagttggtgtttcatctcttacaatgataatcaactaatcgtaatggaagcctttgtccaaatgccagcagtaacttcttggtgtttcttttgttgaaaat

SEQ ID NO: 119670 - DNA, 519 bp, Zea mays
  Clone ID: MRT4577_40623C.1
ccgggcataatcggactgcgttgctatggatacgagttgagggtcggcttgttctagccgagagcgggggggctagagagacctttctttttcttggggaagaccccaggaaatggatgcgttgcgaagctaaagacccacgggaggaaccatggctgagctaagcatggatgcgggaagagcctttgtgcgcatgggtggattagacacttacaggtgtgatgccatgccaggggctttgaactgaaataagagggtcattgcgtgcagatcattccactctgttgatatggacatttcgcagttgtattgagctccttaagaaaggtcatgatgattaccgccttcatgagttatggactgtgatgaatctccttaacacggatggctgatgcaagtattgcagggatgggacgatacatgagatcaccaaggatatctggagtatggaacctgacatgcttcgctagaccagaggggtatacaagttactttgagctatattgtctaggcaaccct

SEQ ID NO: 119671 - DNA, 154 bp, Zea mays
  unsure (1)..(154): unsure at all n locations
  Clone ID: MRT4577_40624C.1
catcggacgagtgatcgtcgagagattgcacganattaacagtgtaggtgatctgagacgatagttgtgactgtcagcatgtgtaagtgtcgacagtctcgtgatactagtgagcgtgacgacagcttgagatctgtagagacgactcactgct

SEQ ID NO: 119672 - DNA, 837 bp, Zea mays
  Clone ID: MRT4577_40625C.1
ccggccgggaacagacgtattgcccgcgaccctcgtgccctccgctcctctctctatctttcgctcgctctcggcgacagctgggcgaccgtcgtcgccgccgcccttctccaggtgcccaggtcttcgccggtccctttgccgcctcttcgccgccgacgagcaccagccaggaagaaaagaagctgaaccatggggaagagaaagtcagctgctaagccacctcctaagaagcggatggacaagcttgacactgtattttcctgcccatttgcaaccacgggagtagttttgagtgccgaattgacatgaagaatctgattggcgaagcatcttgtagaatctgtcaggaaaacttcagcacaactattaatgcactcactgagcctattgatatatatagtgaatggattgatgagtgtgaacgtgttaacactgttgaaggcgacgatgatgcgtgagcttgccccatgcggatgaaactgttacctacaatcgtaatgtaatgtgctggtattctcgaatgccatagcccatagtcagccatggcttggaataacgtagtggctgactgatatgccagtaggcaccttatctagtacttacagaactacaaaaagtttgtactatacatgtatggacaaccttataagtggctatgtgtgtacctatcctaacgctcatcccagatggtgtatcggcgtttttctgtgagattgttttcaagcaagggttgttcattcattgggtcttctcaggacaaagagaattatgctacagtcaacaagatggccgctgttgcgccgacaatacaggggtcatcccgttcattttaaa

SEQ ID NO: 119673 - DNA, 2712 bp, Zea mays
  Clone ID: MRT4577_40626C.1
gccggccggttcctgctctctcccgctaaatagatgggcacgctacgccggatttctctcccgcagccggttctttcgtctacacgaccgcgcgctcggaaaactctcacggagagtgagggaggcgaaccaagggcgacgtatccgctcgtccggagaaggtagccctcggatccgccgactcccgcgatttgtttttcttgcgacagctgggcgaccgtcgtcgtcgccgcccttctcacaggtgcgccaggtcttgcgccggtctcctttggcgcctcctcgccgtacgacgagcaccaggcaggttcaggacccggacgccgctacccaggccgtgcttccggacgttgacaacgccggcgggtttgtccttgtgctgccgcggcgtcgcccgcctgtcggataacagctctcagaccgaagggtcacggctcggcgcggcggccggcgcgggcttgcctgccggtcgccggatctgccagacctcgccgcgaaggttgctgcgcgagcacggggcactgctcaccttcctcgcgtgcggcacggcttggacgagtcggacccggcgccggccgagcggctccgctagaagggccagatgttgatattcagctcagaattttttacttgatttctctcttttatccagtgacatgaagaatctgattggcgaagcatcttgtagaatctgtcaggaaaacttcagcacaactgttaatggtatgccaaacctatgtataaaactgtaccggttgctcctaatttcacttctatgaactgtactaatttgcatcgaagaaagtttggtcccaaacaactcgtgaactcgttttcttattattgggctgatggacaaggcaacgtgaaatttttcatggtacctgggaacagaacttagcctacaaactgcagaaccattcccatttcatcttgtagtcttgtcttgctaataatggactttgtgggctgtctgttccctgtgtaattcatttgaccatgacagttcttgatcatgttatatcatagaatgtgtcaaaaaccgcatcacatcaaaattaaaactggatacaacactatacataggtaatagtagaattaaatgataagaagtatttctttttgtttattttaattactaattgtcttatgtgatctcttttcttgcagcactcactgagcctattgatatgtaagtcaatcctgtcaatctttgcaaattagtgaaaaatctgtgatgtttatcctcaactggaactgagctggaatccttttcttttcctcacagatatagtgaatggattgatgagtgtgagcgtgtcaacactgttgaaggcgacgatgatgcgtgagcttgccccatgtgatgaaactgttacctacaatcgtaatgtaatgtgctggtattctcgaatgccatagcccatagtcagccatggcttggaataacgtagtggctgactgatatgccagtaggcaccttatctagtacttacagaactacaaaaagtttgtactatacatatatggacaaccttataagtggctatgtgtgtacctatccaaaaaaaaagggccgcggaaaccctagccacctcgtcagtgccgcgcgccgggtgtctcgccgccgcccgtcactgccgctgacaccgccggagcgatcggatctcgagaccgtcaggagacacgatggaggattgggattctgaagatttccagcccgttgctcctgttgtgaaagtcgagccacttaaaaatcagtgggctgatgaagatgtcgatgccgacgacgtaaaagattcatgggaggaagaagaggaagaggagaaacctaagccagcggctgtgcaaaagaacgcgacgaaacctagcgctaaggctcctgctaaaaagggaaaacagcaagcatcaacaagtgccgaggaaccagacgagcctttgagtcccacttcagagaaaattcgccaacagaggcttgtggaagaagctgacttcaagtcaactacagacctttttgcaaagaagagcggtgaacaaaagtcactagatacttttatcccaaagtccgagagcgactttgcggaatacgcggagcttattgcaaataaactgctcccctacgataaaagttttcactacatggctctcctcaagaatgtcatgagactttccatgacaccgttgaaaggctcggacgcgaaagacatatcttcctccgtgacggcgattgctaacgagaagatcaaggctgagaaagaggccgcagcaggcaaaaagaaacaaggagcgagaaagaagcagctccacatcgagaaaggagacgacgacttcatccccggacggggtggtggctacgatgacccggacgagtacgacttcatgtgatttggctggaaggaagagtaagtagggttaataggtttccgtcttgtatacatttggcaagcagagaacatatcacgagagtttgcggcatactatactatggcatggaacatgcgttatctgtttgaggatgaattttgactctgcaggacaagaagagcacaagtgcttacttaattgttattgaatctctgtggtatttttttagcatacattgcattttcatttattttttgtcaactgtactgtaatactgtcgtcggtatgtactgtaatattgtcgccggtaccgggcgtgaaggtatgtcacacccgggttttggggca

SEQ ID NO: 119674 - DNA, 509 bp, Zea mays
  Clone ID: MRT4577_40627C.1
ggccctccctctatctttcgctcgctctcggcgacagctgggtgaccgtcgtcgccgccgcccttctccaggtgcccaggtcttcgcaggtccctttgccgcctcttcgccgccgacgagcaccagccagtgacatgaagaatctgattggcgaagcatcttgtagaatctgtcaggaaaacttcagcacaactattaatgcactcactgagcctattgatatatatagtgaatggattgatgagtgtgaacgtgttaacactgttgaaggcgacgatgatgcgtgagcttgccccatgcggatgaaactgttacctacaatcgtaatgtaatgtgctggtattctcgaatgccatagcccatagtcagccatggcttggaataacgtagtggctgactgatatgccagtaggcaccttatctagtacttacagaactacaaaaagtttgtactatacatgtatggacaaccttataagtggctatgtgtgtacctatcctaacgctca

SEQ ID NO: 119675 - DNA, 788 bp, Zea mays
  unsure (1)..(788): unsure at all n locations
  Clone ID: MRT4577_40628C.1
tcgaagccggccgggacgcatctacgacaacttctctatacccaccagcttgtacagcgccaaaccgtcaaaatggccccttccaacctccccgccatcttcaaccccacccagcaggacattgagatgctcctcgctgcccaatgccacctcggtagcaagaacctccaggtgcacatggagccttacctgtggaagaccaggcccgacggtgtcaacgtcttgaacattggcaagacctgggagaagattgttctggccgcccgcatcattgtcgccatcgacaacccggctgatgtctgtgtcatctctgcccgtccctacggacagcgtgccgttctcaagttcgcctcccacaccggcgccaccgccatcgctggtcgtttcactcccggtaacttcaccaactacatcacccgttctttcagggagccccgcttgatcgtcgtcaccgacccccgcaccgatgcccaggctatcaaggaggcctcctacgtcaacatccccgtcattgccctttgcgacggtgactctcccaccgagtatgtcgatgttgccatccccaccaacaacaagggtcgtcacgccatcggtctcgtctggtggatgcttgcccgtgaggtcctccgcctccgcggtaccctcgctaaccgcgagactgagtgggatgtcatgactgacttgtacttctaccgcgaccctgaggnncgagagaacaggacagcgctgncgttgaggaggccaaggtccccgntgccgacgaggtgntcccgccgctgtcgctgacg

SEQ ID NO: 119676 - DNA, 274 bp, Zea mays
  Clone ID: MRT4577_40629C.1
tctcggacgcgtgggggacggatcacagatcgccgtggtgaggctcaagagctggagcaacaaggccgctacggcgttcgctgtcgagggggcggtcctggcacgcgtgcggcacaggagccttctcagcctgcgcgggtactgcgccgccggccatgagcgcctgattgtctacgattacatgccgaacctgaacatacactctcaggtccatgggcagcacgcggcctaatgcaaccttagctgtgagaggaggatgaggatcgtcacggac

SEQ ID NO: 119677 - DNA, 673 bp, Zea mays
  unsure (1)..(673): unsure at all n locations
  Clone ID: MRT4577_4062C.1
ccgggtcgatcgaaaccgaacttgtatcaatcctccacccgtttccagcccctcgtcccggagccccgatccgcctcccgtctcctcctgggcaggtcccccttttccgcgtgtgcgttggccggccggttcccgatgagggggttgctggcggtggaggccgcgggcgcggcgtcggtcccggcctcggtactccacggggccgtggactggtggcgcgacgtcaacgagtcgccgctgtggcaggaccgcatatttcacgcgctcgccgtgctctacggcatcgtctcggccgtcgcgctggtccaattaatcagaatcgagtgtagggtgccagagtatggatggacaacgcagaagtgcggtctgtcgtgtttgtgctgcggcgaaatgtgcaacttgtagagcctgagataatacaacatgtgcttctggatatgcccgggcttgcattcttcacgacatatgcacttttagtgctcttctgggctgagatttattatcaggcacgtgcaatgtcgactgatgggcttagaccaactttctattggatcaacggtgtggtctatgcaattcagataattctatggttggttttatggtggaaaccattcgagttatggtcattttgccaaagnagttctttgcaggtgtatcactatttgctgccctt

SEQ ID NO: 119678 - DNA, 590 bp, Zea mays
  Clone ID: MRT4577_40630C.1
aattatttattgtagaaaaaacaaaacaaaacggtgatatgagtgaaaatgaaatggtgcaaaatagaagaagcttgtgagaattgtttctttttgatcactgatcttttttcagaagattattattatcagttgaatgttcagatccttgagttgttgatttcttgattttctttcctgatgaacggctcgattgattgtccgaatagagttcggcgatgaaacgtcgatatttttgttcgattgctttacgtttcaatttcagcgcgtctgtaacgagccccgtctcgggcgtccacatttcttttactattttgacgcgttgcggcatttcgaaacgttcgatgtcgccttttcgacaaacttcgtgaatatctttaataagttgctcgtgaaattcgggctcattggcgatattctgccaattggtctcatcgaaatgtttctgaacgtaatcggctaattgtttgggattcggagaaatgagaagaacagtaaattcagctgatgatgaggcatatagacaacaattttcgacgataagaaatttacttatcgccatttcgactttggcaagtgaaacgtcgacg

SEQ ID NO: 119679 - DNA, 820 bp, Zea mays
  Clone ID: MRT4577_40631C.1
cattgggtacctcgaggccggccgggacatctctttaactccgtcccttccggccttccctctatctttcgctcgctctcggcgacagctgggcgaccgtcgtcgccgccgcccttctctaggtgcccaggtcttcgccggtccctttgccgcctcttcgccgccgatgagcaccagccaggaagaaaagaagctgaaccatggggaagagaaagtcagctgctaagccacctcctaaggaagcggatggacaagcttgacactgtcttttcctgtccattctgcaaccacgggagtagtgttgagtgccgaattgacatgaagaatctgattggcgaagcatcttgtagaatctgtcaggaaaacttcagcacaactgttaatgcactcactgagcctattgatatatatagtgaatggattgacgagtgtgagtgtgtcaacactgttgaaggcgacgatgatgcgtgagcttgccccatgcgatgaaactgttacctacaatcgtaatgtaatgtgctggtattctcgaatgccatagcccatagtcagccatggcttggaataacgtagtggctgactgatatgccagtaggcaccttatctagtacttacagaactacaaaaagtttgtactatacatatatggacaaccttataagtggctatgtgtgtacctatcctaacgcttatcccagatggtgtatcagcgtttttctgtgagattgttttcaagcaaggggttgttcaaaaaaaaaaaaaaaaaaaaaaaaaaaaaaaaaaaaaaaaaaaagaaaaaaaaaaaaaaaaagggccccta

SEQ ID NO: 119680 - DNA, 307 bp, Zea mays
  Clone ID: MRT4577_40632C.1
tttttgtttttttttttttttttttttttttttttaaaaagagatcaaaaatattttggatcgggatttttaacaaaaatcaaaagggcgaataattaggattaacaggcacaattggacaggatttgatataaaatttggatggaatttaatttagggggtaccctgaagttaaaaagaatttcactaggtaataaccaaagatttggatccggcccagaaacgacagatcgaaatttgccgaaaatatatttgggaacgtatacgggaatttataaccacaacaacttgctgaggaacgaatggg

SEQ ID NO: 119681 - DNA, 1386 bp, Zea mays
  Clone ID: MRT4577_40633C.1
tgggtacctcgaggccggccgggcccattcccaatctcgtcttgtgttgttcggagcgggcagcagcacacagccccatcccaatcctagtcgatcttcttcccctcctcaaggaagaaaagaagctgaaccatggggaagagaaagtcagctgctaagccacctcctaagaagcggatggacaagcttgacactgtcttttcctgcccattctgcaaccacgggagtagtgttgagtgccgaattgacatgaagaatctgattggcgaagcatcttgtagaatctgtcaggaaaacttcagcacaactgttaatgcactcactgagcctattgatatatatagtgaatggattgatgagtgtgagcgtgtcaacactgttgaaggcgacgatgatgcgtgagcttgccccatgtgatgaaactgttacctacaatcgtaatgtaatgtgctggtattctcgaatgccatagcccatagtcagccatggcttggaataacgtagtggctgactgatatgccagtaggcaccttatctagtacttacagaactacaaaaagtttgtactatacatatatggacaaccttataagtggctatgtgtgtacctatcctaacgcttatcccagatggtgtatcagcgtttttctgtgagattgttttcaaacaaggggttgttcattcattgggtcttctcagaaaaaagagaattatgctgcagtcaaccagatggccgttgttgtgccgacaatacagggtaaaccaaatgcaaccagaatataatctgcagcggaagatattcatagatacaattgttttcagttcattcaacgctgaaagcggtttcggtctggaggctgagctttggatcattggatgacactatgcagctttggcacctggagtaccgctcattagtttttcatcaagtcccgttcatttcttgtgcacattgctggagattgggagatcgagatcaagactgtacgcatcataaaccgatcagtctattctttgcagtagaaaataagcagcagcaggtacacctgggttgtctttgtgcctgtggtctctgccaggagggtgttcttcgaagtttgaagtacatgtgatttgtgtcttaatgcagttcggtttcatggacgggttgtcaagtgttttaccaggaacagttgtcggtgcagcagtatgcttaatcatgaataaatgatgtttgtatttaaatctgggcgcgctgtttggtttgcatttcttatggttttcctgtgcgtttcctatgttcttttaagtgaatgtcgtttaaggtttttcgtacaaggttcaccacatgttctgacatggatttctagttttgattgaatgcatgcaagacaggtttatcagtcg

SEQ ID NO: 119682 - DNA, 1206 bp, Zea mays
  Clone ID: MRT4577_40634C.1
ccccattcccaatctcgtcttgtgttgttcggagcgggcagcagcacacagccccatcccaatcctagtcgatcttcttcccctcctcaagccggttccttcgtccacacgaccgcgcgctcggaaaactccgcggagggcgaaggaggcgaaccaagggcgacgtatccgccgccggagaaggtagccctcgatccgccgtctcccgcgattcgtttgtcttgcgacagctgggcgaccgtcgtcgccgccgcccttctccaggtgcccaggtcttcgccggtccctttgccgcctccttgccgccgacgagcaccagccaggaagaaaagaagctgaaccatggggaagagaaagtcagctgctaagccacctcctaagaagcggatggacaagcttgacactgtcttttcctgcccattctgcaaccacgggagtagtgttgagtgccgaattgacatgaagaatctgattggcgaagcatcttgtagaatctgtcaggaaaacttcagcacaactgttaatgcactcactgagcctattgatatatatagtgaatggattgatgagtgtgagcgtgtcaacactgttgaaggcgacgatgatgcgtgagcttgccccatgcgatgaaactgttacctacaatcgtaatgtaatgtgctggtattctcgaatgccatagcccatagtcagccatggcttggaataacgtagtggctgactgatatgccagtaggcaccttatctagtacttacagaactacaaaaagtttgtactatacatatatggacaaccttataagtggctatgtgtgtacctatcctaacgcttatcccagatggtgtatcagcgtttttctgtgagattgttttaaacaaggggttgttcattcaaaaaaaaaaaaaaaaaaaaaaaaaaaaaaaaaaaaaaaaaaaaaaaaaaaaaaaccctggaggcaactcctgatcgaactaaagctaggtcctaaaaaaaaaaccctcctttgaaaattaacaaggaaacctgaacacgaattgatctttgggccggttgaaacccggcccgttaaaaccaaggggtccggggactggtttaaaaacaacattaacaaaaaaaaatcgaaacggggaaaggcaaaacaaccaaagctttttggtcaagtagcaaatggagggaaccaaacaaaacaaaaatttaaaggccct

SEQ ID NO: 119683 - DNA, 350 bp, Zea mays
  Clone ID: MRT4577_40635C.1
ttgggtttttttctggttttagcattggaaagcccgcgataaacagaattgaagtatgactcctaacatgccaacttgattcaaaatgtgtacgagatagaattgacattaaccaaaccaaaatatactgtgagccggatgattcactgtttctcgcccatcgaacatcgccccaaagttttacgggccagcctggcctaacataatacaatggggtcgccatcgttcctgacaagcatctggggtaccaaataaaattggattgccagcagagactgtctacatccatagcgagtgcatctgcagatactaagagccctctggcgatctgttctcaagggacgaactga

SEQ ID NO: 119684 - DNA, 353 bp, Zea mays
  Clone ID: MRT4577_40636C.1
cgacaaccattgttccgcaatgctcacaagctactatagctcatcttctcgcgagaggcctcttaccagcgtggccttcagtatgtagaaaacctaattattcaacacctacaggatccatcatgcaagcacagcatgcatcttacctttatgcacccttgatcctccaacaatgataatccgtatcacatcagtcacctatgctgcattaattggcacagatcatgatggcacaacatctacaacatctcgagctagctcaccttgctgtctacactcagctacagcagttacctgagatgctaatgatggcacaaaacatgacgacacatcatctacatcatctagtgcta

SEQ ID NO: 119685 - DNA, 359 bp, Zea mays
  Clone ID: MRT4577_40637C.1
ttcttttttttttttttttttttttttaagaacattgttaaacctccacgggtattacatccattccatcccattctctccaagcttaacatgtactactaccactactaacaatctgacccttttttttcttaacacaacaaccaaattattaagtatcacacacaacacactctcacacacccactgccctaaacatacaccacttgcttttacgcacaaggaacaacactctacactcaaattaaaccacttttaaaattacccagccacctattcatcaactcttcacccctgcctttccaagtatcttttcatgtccccaacaagcgttaaactttcccaaattgtaaaaattt

SEQ ID NO: 119686 - DNA, 2382 bp, Zea mays
  Clone ID: MRT4577_40638C.1
gcctttcaggacctcgggaatccagaaattccggtggtcggtgcccacggacaggcgtgtgcgccacgagcccgacgaacaagggaacgaggccatttccaccggtcaaactaggagaagcaagcaaagctccccaccattagcagaatccgcccgaagtctgccccgctcttcggcctcgtcccttctctccagggccatggatgtagatgatgtgctcagtaacttgcgtgttgttggtgtgccaacaaagagtgcaatttacatatggggttataaccacagtggccagactgcccgaaagggcaaggaatgccacttgaggatccccaagagcctccctcccaaactattcaaattggggaatgggaagagcctcaggtggaccgatattgcatgtggccgtgagcataccgctgcagttgcttccgatggatcactgttcacctggggtgctaatgagtttggccagttgggagatgggacagaggacagcgcgaaagagcccaagaaggtcaagtcattggagactgagtttgtaaaatcagtatcctgtggcgcacattgtacagctgccgtcgctgagcctcgagaaaacgatggcacggtatcgaaaagcaggctttgggtttggggacaaaatcagggttcagattaccctcgtctattttggggagctttcacaccaaacacagtgattaagcaagtttcttgtggagctgttcatgtcatggctctatccgaggatggtctactgcaagcatggggtatacttggggactgggaagcatggggcagcttgggcattgctccctccaatctggagataatgagctgatccctaggcgagttgtggcccttgatggtatagtagttggggacgtttcttgtggaggtgtccactcttgtgctgtaactgaagggggagctctatatgcctggggcggaggacatgtgggtcagctgggagtcgggcctcagggtggcttcttctcttgctcccttaatggatccgacatgctgctccgaaacatcccagtcctggtgataccctcaggtgttcgtcttgctacctgtgggcactcccacacacttgtgtctatgaaagatggccgcatatatgggtggggctataatagttacggtcaagcgacgaacgagaaatctacttattcccaatctcgtcttgtgttgttcggagcgggcagcagcacacagccccatcccaatcctagtcgatcttcttcccctcctcaaggaagaaaagaagctgaaccatggggaagagaaagtcagctgctaagccacctcctaagaagcggatggacaagcttgacactgtcttttcctgcccattctgcaaccacgggagtagtgttgagtgccgaattgacatgaagaatctgattggcgaagcatcttgtagaatctgtcaggaaaacttcagcacaactgttaatgcactcactgagcctattgatatatatagtgaatggattgatgagtgtgagcgtgtcaacactgttgaaggcgacgatgatgcgtgagcttgccccatgcgatgaaactgttacctacaatcgtaatgtaatgtgctggtattctcgaatgccatagcccatagtcagccatggcttggaataacgtagtggctgactgatatgccagtaggcacctgtctagtacttacagaactacaaaaagtttgtactatacatatatggacaaccttataagtggctatgtgtgtacctatcctaacgcttatcccagatggtgtatcagcgtttttctgtgagattgttttcaagcaaggggttgttcattcattgggtcttctcgggaaaaagagaattatgctgcagtcaaccagatggccgctgttgtgccgacaatacagggtaaaccaaatgcaaccagaatataatctgcagcggaagatattcatagatacaattgttttcagttcattcaacgctgaaagcggtttcggtctggaggctgagctttggatcattggatggcactatgcagctttggcacctggagtaccgctcattagtttttcataaagtcccgttcatttcttgtgcacattgctggagattgagagatcgagatcaagactgtacgcatcataaaccgatcagtctattctttgctgtgtacacctgggttgtctttgtgcctgtggtctctgccaggagggtgttcttcgaagtttgaagtacatgtggtttgtgtcttaatgcagttcggtttcatggacgggttgtcaagtgttttaccaggaacagttgtcggtgcagcagtatgcttaatcatgaataaatgatttttgtatttaaaaaaaaaaagaaaaaaaaaaaaaaaaaagcggcc

SEQ ID NO: 119687 - DNA, 551 bp, Zea mays
  Clone ID: MRT4577_40639C.1
gcgggtacatttctaaaaaaaaaaaaaaaaaaaaaaaaaaaaaaaaaaaaaaaaaaaaaaaaaaaaaaaaaaaaaaaaaaaaaaaaaaaaattaaaaaaaaaaaaaaaaaaaaaaaaaaagtttttttcttgccccgggcgggccgtttcaaagagggggaatttttgggaaatttcatccacattgggggcccgtttggaccttgctttttagggggccccatttcccccttttaaggggagtggttttaaaattaattggcgcgggtttttaaaacgttgggattgggaaaaaccttgggtttccccattttattcgctttgcagaaattcccctttttgccagttgggttattagcaaaaaggcccgccccgttcgcctttccaaacatttgcccaccttgattggcaattggccccccctttttcggggcctttaaccccggcggttttggtgtttacgcccagggtgacctttacttttgccagggccttaggccccgtttttttcgtttttttccttttttttttcccccgttttgccgtttttc

SEQ ID NO: 119688 - DNA, 235 bp, Zea mays
  Clone ID: MRT4577_4063C.1
agaaacacaacattttttttttactatcttttttttttttgttctttatgatactttttttttaatccagcacccaaaaagtttactcttgtgagggaaagggcgcccggaccgtggggcctcacagatgttgaaatccataaaacatcaacattacctcagggccggaaagcgggaccacaatgggggccaattgaactacactgtttaaaaaaacaaacaggattcgaacccg

SEQ ID NO: 119689 - DNA, 374 bp, Zea mays
  Clone ID: MRT4577_40640C.1
ggacctttgggctgatttatgtgcttggcttgtcctccgaggagcgcggcccgcaccgtaatcaggacgctagcgtactagtcgttttagctcgtacacgtccgaagcacacccctcggcgcccgcttttacacctagcgctcgcagacaagagatacgaaacgctttaagccctccccgacttacggcgaattcatccaacactcgagagacacatcgggggaaaacggaggtcgtggtaacttccgcgtagccgggttgcggaacatagtacacgtaagcgcccgaccgcgtaatacctcccaccatccggctgtaacacagacgggtcgagttgaatagtaaggcaccccgacctcgtatcgtctttgcgc

SEQ ID NO: 119690 - DNA, 127 bp, Zea mays
  Clone ID: MRT4577_40641C.1
caattcacaacttgatgacttgttaaatggatcatgcgttatgaaaatataaatacccacgtcatcgcaaaaaccaggtatgtgctgttgaagcagtttggtgtgatgaccaaggtcacaggctcaa

SEQ ID NO: 119691 - DNA, 345 bp, Zea mays
  Clone ID: MRT4577_40642C.1
ccaacgcatacgctgagcctaccgatggatcgaccgtatatgcgctcacctgatcgcctacgacttcgaggctgtccccaatttcaccgtaaaggggaccactgagctcaaccaggattttttccgagccaggcggttacataacatgagagaacgactgaacctcaacatgcagatgacctgtattatgagcctgctagagctgctatgctccgaacagttaatctcctgctggtatatgacgaacccttctctcttcttagatgaagactgagctggcaatgacctacgacgaaactaacactttctagagtttgcttcgatgagattctggctctcactacc

SEQ ID NO: 119692 - DNA, 922 bp, Zea mays
  Clone ID: MRT4577_40643C.1
gggtacccgcggccccccctcgagtttttttttttttttttttttttttttttttttttttttttttttttttttccccagcttttttcgttttttttttttttttatcatgatgaacaaagcaatgtgtaatcgtccaaaacatggagacagtttcgtacatgctactacacttgaacagcttttcgtgtatacagaaaaagaatcggcatcctcgttttttctctattcaacaggggcaacaacggcagagagcaaagatgcgcatactatccgaaaagaaaagggacaaggagctgggcctcagctttcggaagaaccagatgattacgctgttctactcttgtttgctgctcttaacaaacagtgtgtactgatcccatggattgctctggcacaagatatttagttagattttgttatttctgcgtacggatccatggacgactcagttttgttatttctgactaaattttggacaaatagctctcctgcacggtaggaagaccgaaccaagggtccgctagcaacatatcggaaacccaccgattctccatactccttccaaaattggaacttttggggagtcacatactctcttactgttagatgtctttctgatggctgcaagtactgtcccaaagtaaggatgtcaacaccaattgcccgtagatccatcatggcttgtttcacctcttcatcagtctctcgaagaccaagcatgatagaagacttcgtaatcatgtcctccctggaaccttttgcatgcttgagaactgctaagctctgatcataccctgcccggggatccctcacaatcctctgtagactcctcacagtttcaatgttgtgcgcataaacatctaggccagagctagccaaagatgagatggcctccaagtcacctcgaaaatccgaggtt

SEQ ID NO: 119693 - DNA, 1187 bp, Zea mays
  unsure (1)..(1187): unsure at all n locations
  Clone ID: MRT4577_40644C.1
cgggtcatcccaccattcactcttccgccgcttctggatgcattggatcctctaggttcattctgccagacccttatcaagcctaagcattaggagtgcgctgaggcttgttaccccaaaaaggcagtttcgatctatagtttggcactgtatgctctataaccgttctgaatttgtctccagtcatgctgttcaagtttggtaactgtagtggcgctataggacatatgcccattttttgtcaatggtacattttttatgaaacttgctgaagagattataaccataagattgttcattggtgaaaaaaaaaaaaaaaaaaaaaaaacaatccaggtgtggaagagggaaaactggaaaaggcacagcaaaccgagaaaatggcggctcggcgtgggcgagagtgggacggggacgagcagggcgcggcgctgccaacgccggcgcccctcggcgcgccggtcgtctgccttctcagctccgccggagacctagccgccggcgccttcgtaggctccctcgtcggatacggaaaaggtttgatcacaaaccaaggcacgaaggcttgtcttagcattgctggatcttctgcaaagacatttgctgctcttgctggtgtccaaagtttcatcatgtgcttgctaagaagactgcgtgggaaagatgacatgatcaatgcgggtatggcaggttgttgcacaggcattgctttgagctttccaggtgcgccccaggcaatgttccacagctgtgtcaccttcgcagcattctcatgcataatggacggtctcagcaagcagcaggcagcaatggcactcacacttgatgtgaaatctccaactgtcaagtatgaggagggccgggtcatcccaccattcactcttccgccgcttctggatgcattggatcctctaggttcattctgccagacccttatcaagcctaagcattaggagtgcgctgaggcttgttaccccaaaaaggcagtttcgatctatagtttggcactgtatgctctataaccgttctgaatttgtctccagtcatgctgttcaagtttggtaactgtagtggcgctataggacatatgcccattttttgtcaatggtacattttttatgaaacttgctgaagagattataaccataagattgttcattgatgagcggccgatagttcangngggg

SEQ ID NO: 119694 - DNA, 366 bp, Zea mays
  unsure (1)..(366): unsure at all n locations
  Clone ID: MRT4577_40645C.1
ctgattgacggattcaataacctttctagcagtaggatgtcgtagtagcctgtaaagcggataatatggctgtcaagaatttttggaccaacgagtgataaagcaagcaaaacatgtttgtgcagctgccactggatcagtgtgtagtagggcaaacacagagagcagtttactgcaacaatctgacagtgttaccatctgattgaagctattttactttctacaaagaagactcagaattgttttacttgggtttcgatataccatgtaaattgtaatgcacagtgtccgatgtgcctgtctcaactcgattggtattgtgttgtgtgtntagtgattctgggttatcctttgggatgcttatgt

SEQ ID NO: 119695 - DNA, 307 bp, Zea mays
  Clone ID: MRT4577_40646C.1
aatggggagggaaaaagggggacaaggcaatgtaaaaatacacggcactcaaacgactcactatcatgaatacatcgatcacgtctattggctacaaaacccattagtctctggacggatttccctccaccccaggggcatcggtctaggcctttggcacgctcttaatctgggtcacaatctaaatttccctgctggtctcgaacctgttcactttggacaaaaactttcataaccccatcactgtgggaaggctctttagacgctttattgcacgaatgttgggttcttccattagttgcagcag

SEQ ID NO: 119696 - DNA, 876 bp, Zea mays
  Clone ID: MRT4577_40647C.1
cgccaatttcaaaaattttcggaaagttgttttcaatttttatttttcaaattagtattcctctaagaagttctatctcaattggtatattttaaggaggggtttttcaaaattggtgtctaaaatatttgatcttctttcaatttgtaaaaccctcttgaacactaagaggagaatttcattaagggggagttttgtttagtcaaaggaaaaacatttgaaacagggggagaaaatttcaaatcttgaaaatgcttctcgaaatcttattcatatacctttgactatttgcaaaaagacttttaatttttttttccaaaacatttgcaaaaacaaaacaagtggtgcaagtgtggtccaaaatgttaaaagaaagaaagcaatccatgcaatatcttatgaaaatatattggcttaattccaagcaacctttgcacttaccattatgcaaactagttcatctgcacttatatatttgctttggtttgtgttggcatcaatcaccaaaaagggggacattgaaagggaattaggcttacacctttttccctaactaattttggtggttgaattgcccaacacaaataattggactaactagtttgctctagtctataagttttacaggtgccaaaggttcacaagaagccaataaaaagaccaagaaaggggtcaaacaaagagagcaaaagacaacccaaaggcaccctggtctggcgcaccggacagtgtccggtgcaccaccggacagtgtccgatgcaccagggcacttgaagctgaactcactaccttcgggaaattcagagggcgctccgctataattcaccggactgtccggtgagtcaccagactattttggtgtgccagcggagcac

SEQ ID NO: 119697 - DNA, 342 bp, Zea mays
  Clone ID: MRT4577_40648C.1
ggggagcaggccaacgaacttggcgtgcaggtcactgatttcaagtaaaatgggcacagttggagcgttcgaagcaaatacagaaatcgacagagcagttggctacagatcagaggcctaaggacataacgttgaatactacagtctttcgagcaacatcgctctgatttttgctctcagttcactcggcacttcagttgttacctgagttgattgtgcaatgtcatcgagcagcttgtctgattcaaacttggcacctgatccaaacgcggacacttttgtgcgaccttgaggctcttgtgcttatgtttgtgaacattcttgctagggccttttgaatgc

SEQ ID NO: 119698 - DNA, 490 bp, Zea mays
  unsure (1)..(490): unsure at all n locations
  Clone ID: MRT4577_40649C.1
acactgggaggcaccatttcattattaacttggagaaacaagtttcaaaagggcggctttttttttttacattacactggaatgggaatcctttataaaaaaaacaatcacaagggaagtagaagggaaaaaaattttatgctcagcccgtctattggcagagcagcaccaaaattagtttttttggccaccaccctccctcctaaacatcattacaaaagttgggttggttcccgggacttcaagtcaccgttccccaccaccatttaaagttcggggggggcgtcgtagacgccgccgtcggcatcgccaccgggggggccgcccgaccggtggaacacgggccacaccatgggggtgcacacggcctccaccctcttgagctttgcctcgaagtcctccttctagggggactggttgggcnccatccaatcaagcgcctacttgggggcctcctgcaccttttcctttttccccggcgccagctggg

SEQ ID NO: 119699 - DNA, 834 bp, Zea mays
  Clone ID: MRT4577_4064C.1
cttaactaccatcgataaatgctgggccaggggcctctgtagtacatgccataattgtcttgagtctgatctcgtaataaaaactggaaaataatcacactgggtttgtagtgtattcatttttatttgatactgacattctggtttctgaattcagttgacatcaatgtatttcagataattctatggttggttttatggtggaaaccagttcgagttatggtcattttgccaaagatgttctttgcaggtgtatcactatttgctgcccttgggtttgttctgtatggaggaaggttatttctgatgttgcagcgttttcctgtagattcgaaaggaaggagaaagaaattgcaggaggttggctatgtgactaccatctgtttttcttgtttcttgatcagatgcgtcatgatgtgcctcaattcatttgataaagaagcagatcttgatgtcctgaaccatccaatcctgaacttcctctattacctgctggttgagatagtgccttcggctctggtgctcttcattctacggaaactgcctccaaaacgtgggatcacacaatatcacccaatccattagagagcaggccttggtgttttctggtggattgtcttatatagcgtggtaaatacagaaggcagagtgaaaagtaccacctttgctctcgagcttgcccagcttttcatacgagggaaggctttagaatctcaggtttagaaaatgcgatctctttctctcagatttagaaaatgtaaaatgtaatttatataactttattattctcagtgcatatcatttgttcacatcgcagtaatcgtttgcatgttt

SEQ ID NO: 119700 - DNA, 190 bp, Zea mays
  Clone ID: MRT4577_40650C.1
tcttctcaagcttcttccgtaaaacaaatataatcgcacacttctaatcttacatactcatccttgcttgttacatacaattgctaacgttcttgctgcatctaattctctatgattgtaatccgaacaatgtgcatttaactaaaatgtcgcttttacctgaaaaaaaataccattgtaatgacatatt

SEQ ID NO: 119701 - DNA, 338 bp, Zea mays
  Clone ID: MRT4577_40651C.1
aaaattaaatggcatttgtttagttacggggctcgataaacatggtaaagcaacttgttttaagcccctatgcctaacataaaatctaaaaaaggggcccaccaacgagcggttgcagagggaaccctgttgggaagggggaaaaaagtggactaaatggctaaactagtggcaaccgacagagggtgccaaccataggggcagcaggcaggtcgaactggctcaaaccaggatatgtgaacagatgaccgaggtggaccctaggtggggagacgcatgcgtggaagggaggctggaatgaatgaactggaaagttaaagcgcagaaaggacgttgaa

SEQ ID NO: 119702 - DNA, 336 bp, Zea mays
  Clone ID: MRT4577_40652C.1
tgcccctgctcctcacgccgccaccgccgccgccgtcgccgccagcacatccgagagcgcccagccggcggcagaagatgagcgagccaggaccagccaccatgggtcgcgcctcgaccaagaccgtgaagagcagctccaggacggtggtccagatgtactactgcctcatggcccgtcgactgccaccccaagaatgaggcgctggaataggtctcgatgcctcccctctgggctcctccactgcaaggttgtcggcttcaccacccacctgatgcgtgcgcctcctgcgcctgtccggtccgtgtcatctcgctccaggtgtcccatccagcg

SEQ ID NO: 119703 - DNA, 411 bp, Zea mays
  Clone ID: MRT4577_40653C.1
aactatcgatccctgcgcccaggagtatggcatgctcgctggcaacgagcaacgcaaaaacggacccttccctggcaccctctgtaatcctacaatgaccaagaagtatggacttacgatgctgagcccggctagtctttcttggtaactgccgccaagttacctttttttggcgctctctacagaataagaaatcccttatggcttgtacaatgctctgttgctatatctaacggtcatgctatgcgctactgaaaaactactgcttcaggtgaaagtctactttcctcacttgaaacaatgaatctgcgtacctcattggatctgtgcgtaacaggcaacgaccccgcggcgctgccacggttgggtctaataggacgaatctcacgaccggggcctggcggtactcag

SEQ ID NO: 119704 - DNA, 2123 bp, Zea mays
  Clone ID: MRT4577_40654C.1
cattgggtacctcgaggccggccggggcacatccctccccatcccgtgcccccgtctccatccccactcctccaacggccgcgtcgttctcgttcgcccgccggcatcccattcgctcgtctcctcccctccgccggtcgctgtcaccccgcgtcgtcacgcgcccccggccgccgccatcactgtcatcgttccccctcctaaagccacccgtacgccagccgcaatggatttttgcaccgcatctgcatcctctcgccatggcgccgccgcccgcgtcgcctgctgactcggcccctgatccaaggccgaccgccagcgcgcccgtgcccatcaccgtgccgagcccgcgtgaccacgcgcaccaccaccacctggtagatcgtcgggacacgccgcggggccgcgcgtgggaaccggagcggaaccggcgcggagaggcgatggacggtgctgcagcggtcaagctggtacccggtgaggccgggtacgtcttagaagacgtgccgcacgtgtcggactacctccccgatctcccgacctactcaaatccattacaagataacccggcatactctgttgtgaagcagtactttgtaaacccagatgacaccgtctgccagaagattgttgttcacaaggatgggcccagaggtaaccatttccgtcgtgctggacctcgccaaaaggtatattttgaaccggatgaggtccacgcatgcattgtcacttgtggaggattgtgccctggacttaatactgtgattagggaaattgtatgtggcttatctgacatgtatggtgtcaccaagatacttgggattcagggtgggtacagaggcttctatgctcgcaataccatcaccttgactccaaagagtgtaaatgacattcacaaaaggggtggaactattcttggatcatctcgaggaggtcatgacaccgtgaagatagttgacagcatccaagatcgtgacataaatcaggtctatgtaattggtggagatggtactcaaaggggtgctggagtgattttcgaagaagttagaagacgcggtctcaaagtttctgttgctggcattccaaagactattgacaatgacatccctgtaattgacaagtcatttggtttcgacacagcagtcgaggaggctcaacgtgcaataaatgctgctcatgtggaggctgtaagtgctgagaatggtataggtcttgtcaagctaatgggtcggcacagtggttttattgcacattatgctactctggctagcagggacgtggattgttgcttgatcccagaatcaccattctatttggaaggcgaaggcggactttttagatacatagaaaaacgtttgaaggacaatggtcatatggttatcgttgttgctgaaggtgctggacagaaacttattgctgaaaccatgcagtcaattgggaaagatgcttcaggcaacgagctgcgaccattaatctgaagtacatagatccaacgtacatgatacgtgccatcccaagcaatgcttctgataacgtctattgcacactgctggctcacagcgtggtccatggagccatggctggatatactggttttaccattggccaagtgaatggtcggcactgctacatcccattctataggataacagagaagcagaacagagtttcgataaccgacaggatgtgggcaaggcttctctcgtcgacgaaccagccaagcttcctttgcaacaaagtcgtcgaggaggcaaagaaggaacatgaaagagcaacgcgacttttagatggctcgccttcccatcgaaaaggttgacgtcgagaaggttgcggcttccaacttgggtcctactaccaactgaggtcgactgccgctgatatgtgcggcggatgaaccttttgcttaccacggtttcagtagctacggcgaccggtgtttctctcactccagttttttctatcaaaaaggaacacattatccctttctaataatttaatagtgttaaatactatcactatgtacagtttggctggcacatgtctgactataataacatgccattttcattgttgttcaaggaaaaaaaaaaaaaaaaaaagcggccattttcattgtttgttcg

SEQ ID NO: 119705 - DNA, 1177 bp, Zea mays
  unsure (1)..(1177): unsure at all n locations
  Clone ID: MRT4577_40655C.1
cccggatactctgttgttgagcagtactttgtaaacccagatgacaccgtctgccagaagattgttgttcacaaggatgggcccagaggtaaccatttccgtcgtgctggacctcgccaaaagggtgggtacagaggcttctatgctcgcaataccatcaccttgactccaaagagtgtaaatgacattcacaaaaggggtggaactattcttggatcatctcgaggaggtcatgacaccgtgaagatagttgacagcatccaagatcgtgacataaatcaggtctatgtaattggtggagatggtactcaaaggggtgctgtattgattttccaacaagttagaagacgcggtctcaaagtttctgttgctggcattccaaagactattgacaatgacatccctgtaattgacaagtcatttggtttcgacacagcagtcgaggaggctcaacgtgcaataaatgctgctcatgtggaggctgtaagtgctgagaatggtataggtcttgtcaagctaatgggtcggcacagtggttttattgcacattatgctactctggctagaagggacgtggattgttgcttgatcccagaatcaccgatctatttggaaggcgaaggcggactttttagatacatagaaaaacgtttgaaggacaatggtcatatggatatcgttgttgctgagggtgctggacagaaacttattgctgaaaccatgcagtcaattgggaaagatgcttcaggcaacgagctgcttcttgatgttggnctttggttatctcagaagataaatgaacatttcaagaaaaacaagatgaccattaatctgaagtacatagatccaacgtacatgatacgtgccatcccaagcaatgcttctgataacgtctattgcacactgctggctcacagcgtggtccatggagccatggctggatatactggtttaccattggcaagtgaatggtcgnactgntacatccatctataggataacagagaagcagacaganttcgataaccgacaggtgtnggaaggntctctcctcgacaacaccaactccttgnacaaatctcnagaggaaagaaggacataagacaccgacttanaggnccctccatnaaaagtactcaaaagtnggtcactggtcgacacacgangcacgcgcnac

SEQ ID NO: 119706 - DNA, 1092 bp, Zea mays
  Clone ID: MRT4577_40656C.1
cgggtgaagtaaaacccaaagttcttgcccttgcgcccctttccggtctcgagatcaaccaacttgttcattaccataaattcaactaatgatcattatttttttactaatgcaggttttatgtctcaattcggcacccgggctagcagggacgtggattgttgcttgatcccagaatcaccgttctatttggaaggcgaaggcggactttttagatacatagaaaaacgtttgaaggacaatggtcatatggttatcgttgttgctgagggtgctggacagaaacttattgctgaaaccatgcagtcaattgggaaagatgcttcaggcaacgagctgcttcttgatgttggcctttggttatctcagaagataaatgaacatttcaagaaaaacaagatgaccattaatctgaagtacatagatccaacgtacatgatacgtgccatcccaagcaatgcttctgataacgtctattgcacactgctggctcacagcgtggtccatggagccatggctggatatactggttttaccattggccaagtgaatggtcggcactgctacatcccattctataggataacagagaagcagaacagagtttcgataaccgacaggatgtgggcaaggcttctctcgtcgacgaaccagccaagcttcctttgcaacaaagtcgtcgaggaggcaaagaaggaacatgaaagagcaacgcgacttttagatggctcgccttcccatcgaaaaggttgacgtcgagaaggttgcggcttccaacttgggtcctactaccaactgaggtcgactgccgctgatatgtgcggcggatgaaccttttgcttaccacggtttcagtagctacggcgaccggtgtttctctcactccagttttttttctagcaaaaaggaacacattatccctttctaataatttaatagtgttaaatactatcactatgtacagtttggctggcacatggctgactataataacatgccattttcattgttgttcaagtatattcttttgtaattttgtgtaacaataagttcatagacccccaaaaaagttattataattttatgacagaa

SEQ ID NO: 119707 - DNA, 245 bp, Zea mays
  Clone ID: MRT4577_40657C.1
actcctctggtcttgccttctgcgatgaaggtggccactggattcgagtcgtgaacgagataccgccgtagggcgacatgcgcctcgaactatgcggactggtcgctgagcccgtccagggaaagattgatataatgatgaagcctccgattctgaccgaggcgaagcactcccctatggaggatgggttggctctcaacaataacgtgcagtatatggtgtcctgcgccacagccgaatgtatc

SEQ ID NO: 119708 - DNA, 231 bp, Zea mays
  Clone ID: MRT4577_40658C.1
cgggccgacccacgcgtccacccagtcgtccgagtagtcattcatgtacgcatggctgatcgatgagcttaaggctggtagtaacattggtatcactatgtggatgtttctgaggaacttttagaacagcacggtctatggtgcagttgttgatggtgctgtcatcagtgacatgatcactggtatgatacatgctgactgtgatgtcgatagtactgtctctatcattgg

SEQ ID NO: 119709 - DNA, 298 bp, Zea mays
  Clone ID: MRT4577_40659C.1
gagtcctctgggagaagtggttgaacagggcataacacgggtgtagaacgccacagatgcagttggaattgtgctgaaagagctaaagaggcaaagttctttgggtatgtttcacctcctagtggccgtggatggaatcaatgctctttggggaagaaccactctgaaaagagaagataaaagcccgattgcccccgaggaattagcacttgttcacaacttgaggaaaatgatgaagaatgattgcaatggaggcgccattgtgtcggctttgagccagactgggtctctctttaag

SEQ ID NO: 119710 - DNA, 1100 bp, Zea mays
  Clone ID: MRT4577_4065C.1
ggtcgacttgcgtccgcacaactataaaaaagcatgaaaatagtcacactgggcttgttgtgaatgcatttttatttgatacacgtaaaataggaacattctggtttctggactcatttgacaccaatgaatttcagataatcctatggttggttttgtggtggaaaccagttcgaattatggtcatcttgtcaaagatgttctttgcaggtgtatcactatttgcagccctcgggtttgttctctatggaggaaggtaacctttttctggcttcactttgccctaacaaattgatgatattctcctgcagttacattctttgctcgttttaacgggtgttatatgtgcagtgggtcttactatacactgtcctgatagagcatatcaaatgccttcttttgcttagatggtagtagagttctgacccaatttccactaaaagatccagagcaagacttgcattctgtaaccgccattttacaagcagaatcaggatacgtagaagtggttttctacacttatcatgactcatagtttgttctctatggaggaagatgcgagtgagatctccccagcgcataacttatacccttgcttcttggttgttcatgatgttgcagcgttttcctgtagaatcaaaaggaagacgaaagaaattgcaggaggttgggtatgtgactaccatatgcttttcttgtttcttgatcagatgcgtcatgatgtgccttaatgcgtttgataaagcagcagatcttgatgttctgaaccatccaatcctgaacttcttctattacctgctggttgagatagtgccttcagctctggtgctcttcattctacggaaactgcctccaaagcgtgggatcacacaataccacccgatccattagagagcaggccttgggaacaggcaaaggttttctggtggatagtgttacacaacgtggtaaatacagaagggagagtgaaaagtaccactcgagctttgcccagctttttatacggaagtctttagaatcccaggttgaaattgtgtgtaaaattgcgatctctttcactaagatttagaaaatgtaacttatataactttgttattctc

SEQ ID NO: 119711 - DNA, 225 bp, Zea mays
  Clone ID: MRT4577_40660C.1
agaaaaaaaagtattttcatttaattgcaaaacttgccaatgggttatgttgggagcatgcatccatgccaaattaagacattatattcaacaaaagcaatgaaatgttttgttacctccattgctgcataaggaaactaagggggggcaaatccaacgtttattacaacacatgttttacatttctaatttgactatttgtggacccaaaaaagagttgttact

SEQ ID NO: 119712 - DNA, 947 bp, Zea mays
  Clone ID: MRT4577_40661C.1
cctcgaggctcggccgggcacatcattagcggagaatgttctgtgtgctcttcctatgatttgcccattcctcgagtctttgattctaaggtttcaggtgatatctgacagagttgttagacgtctattggaatcagcaacaaatcttcaggtgctttgcctgcactattgtcttggaagtttaacttcatttagtttccaaacaaaggcacatgcattaagagtattgcggcttcattgggtaacttcatggcttacaaatgatgacttgacaatccttacagagaattgcaatttggctgaactttcactttctggttgcaaacttcttgactccagctctcaagacattatctcatctgggtggccaaacttggcacttttacaccttgaggaatgtggtaaagtaactgttgaaggggtttcttcttttttcaactgtaaggctttggaagacgtcctactacggcacacgggtaggggcatcggaaggagcatcatagacgatgctatcagagagttaccactactgcggaagctggctttggatctttgcgatgcctgtgaagacggttacgatagcccaaacgatgcggaagggaagatgattagaagtgtaaggatgagtcgatgcaagaagatggcggggtcgtgtttggaggtccccagacaagggtcttcaacttcaaggccggtgcacaaggacactgtagtgctggaatggagcagcagaatgttcccaccccccatagtgaaagaaagagtgtgatgagcctcttctgtagttttgtccctgatgaagaacccaagagcaggccccaatatatatgacttgtatgaatggtctccccgcttctgattttgaatgctttgtatgtggacatatcctcgtgtgtgaatgtatttgtatggtatcaaacgaagatcatcttttgcagtcgtactgt

SEQ ID NO: 119713 - DNA, 983 bp, Zea mays
  Clone ID: MRT4577_40662C.1
gtctattggaatcagcaacaaatcttcaggtgctttgcctgcactattgtcttggaagtttaacttcatttagtttccaaacaaaggcacctgcattaagagtattgcggcttcattgggtaacttcatggcttacaaatgatgacttgacaatccttacagagaattgcaatttggctgaactttcactttctggttgcaaacttcttgactccagctctcaagacattatctcatctgggtggccaaacttggcacttttacaccttgaggaatgtggtaaagtaactgttgaaggggtttcttcttttttcaactgtaaggctttggaagacgtcctactacggcacacgtccatctgtgcatgtcatttccaggacttctaccggtgtaacttttctccgttgaaaaagttgaattgttgattcacttgattggttatatagtttctgagagttgggaaccgcagggtaggggcatcggaaggagcatcatagacgatgctatcagagagttaccactactgcggaagctggctttggatctttgcgatgcctgtgaagacggttacgatagcccaaacgatgcggaagggaagatgattagaagtgtaaggatgagtcgatgcaagaagatggcggggtcgtgtttggaggtccccagacaagggtcttcaacttcaaggccggtgcacaaggacactgtagtgctggaatggagcagcagaatgttcacaaccaccatagtgaaagaaagagtgtgatgagcctcttctgtagttttgtccctaatgaagaacacaagagcaggccacaatatatatgacttgtatgaatggtctccccgcttctgattttgaatgctttgtatgtgtgaagttatacaagtgtgacggacatatcctcgtgtgtgaatgtatttgtatggtatcaaacgaagatcatcttttgccctcgtaaaaaaaaaaaaaaaaaaaaaataat

SEQ ID NO: 119714 - DNA, 147 bp, Zea mays
  unsure (1)..(147): unsure at all n locations
  Clone ID: MRT4577_40663C.1
attctacgtcgccgcggtctcgcggacacgcagccgtcctagccgccctgtanccgcactatccgtctcgagctccacgaggcccttgtacatcttttccgtcgccggctcgtgcggtccgacgcctgcaaccggttcctcctctcg

SEQ ID NO: 119715 - DNA, 344 bp, Zea mays
  Clone ID: MRT4577_40664C.1
catctttttttttttttctttctgtttgtttctctttttcttttttttttactgaacaacatctctctactctacattccaactccgaactcccaattcccaccggtagggaagccttatctagaagcttcacacggcctctgaggcagccaaacctgccacgcacgctattacaccttcttacacgggcagatcccccacacgtttacatgcacctcgaacatactaagcttccactcgcccaaaaaaacaaaataatcgccaatggccttgcgcccccctcctctttcttgcatgacctcgcgacccctgactgactcctccaggctcctcctgaggctccc

SEQ ID NO: 119716 - DNA, 320 bp, Zea mays
  Clone ID: MRT4577_40665C.1
ggatacagattagtttagatatagttccaaatccccgacatccattcatgccttttatatatatacattttttgtttagcccggttttgctgatagcatggggtgatgctgtatattggagccattcgacgctgccatacttttctttggttgaagatcatgtactcccctgctgtttggggcagctggtgtattggccaccaactgattaagcaggaagagtctacccttcggtctccactgaacattgcgtttggctatacgcgaggattgcagcctgtgatggctgttaccacaattataataaatactaatacgtt

SEQ ID NO: 119717 - DNA, 468 bp, Zea mays
  Clone ID: MRT4577_40666C.1
ttcgtcccaagcctctatactgagtcgtattaattgcccctactttcactctccctccactaacatctcagaagacaatgtcctcagtaacagcatcgcccagggcgcgttctctcggatgcccgcctgtctacctgctggtcgtcctctccgcactcttcaacttcattgtccaagcggcccctatctccaccagtgccaagaagcccaatgatgataacgacaacattctacgcaccgctcgcgatggtccatacaatctcactgtccaagccggcatcgcaggagccatcctgatcgtctttggcctcatcctctgcttccttggtgtccgcttcttccgcgtgtgcatgttcttgattgggttctacttctttgccaatgtctcgtacatcggcatgtccaatggcggggtcaccaacttctacctcctgctcgtcatctcgatcgttgtccgtatcctcggtg

SEQ ID NO: 119718 - DNA, 477 bp, Zea mays
  unsure (1)..(477): unsure at all n locations
  Clone ID: MRT4577_40667C.1
accgcacgcaccggctcttgccgccctacgncgccctcctcatcaaccggcgccttccggaggctgaacaacttcgcccccggctcgggcgaccattctcctgcctcgacgccgcctccgtctcgcgccagtgcacgacgtcgacgactccaagaacccccccgaggagaggccagagacggataagatggtcgacggtatggactacagggagctctgcagcgacttcgagcgcataagcagcccctaggcgaagccgaaggcgaggcaggacgcgcgggacatcgtgaagctccgcgaggacaaccgagnatttttggtgatttcccaanacaaagccacaaggacccactaaggaaatttggtgggggtgagaagtaaaaaaagaaaaagaggatccccgaggtggtggaaaaccctgtagcgacagaccaggaaaagtcaatgcagtcaacgagcaaccggaccatcagatgg

SEQ ID NO: 119719 - DNA, 246 bp, Zea mays
  Clone ID: MRT4577_40668C.1
taagcccaaggtttcctacgcaacgttcatcggcgtagggtgagtcggcccctaaggcgaggcagaaatgcgtagctgatgggaaacaggtcaatattcctgtaccagtgtgacatgcgatggggggacggatcgcggaaggttgtccgggtgttggaagtcccggtcgctgcatcgaagaaggcaccttggcaaatccgggtgcgcaattcaagggtgtggcgcgagcggcctcgagctgcgaac

SEQ ID NO: 119720 - DNA, 368 bp, Zea mays
  Clone ID: MRT4577_40669C.1
aattcggcacgaggagttggagcaggcgagtgtgatttcactgccactatgtcccctcctcctcctcctgctctctctctctcctcacctcatcagcacgggctctctctctcggcttcctccccgcccgcctcctctcctctcttctcgtctcgcactctcgcagcacgacgccattgtgtggagtgtgagagggagggagacaggtaaagagacgaggaggaggaatagagagacacgagacacagccagccaaaggcgaaagggagagagaaaaaaaggcggttgcgtccgcggcgtggcgtggggcgatgctgcggaggatggtgcccgacccgtgcggcccggactactacggcggtggcggt

SEQ ID NO: 119721 - DNA, 271 bp, Zea mays
  Clone ID: MRT4577_4066C.1
agacctggcgacaagacgagactcgcagctagctgacacggccgagaagcagcttgcattgcaggcgtagtacgtacccagcagtagctagcactagcagtccatcggagcgacgatggtgagaaagacggtactggcggcgctgctggtggccgccgccctcgccggcagcgcgcgggcgcagatcaaggaagggttctacgactactccttgccacaggcggagaaggtcgtccaggactacgtgaaggcgcacattccccacgcggcc

SEQ ID NO: 119722 - DNA, 707 bp, Zea mays
  unsure (1)..(707): unsure at all n locations
  Clone ID: MRT4577_40670C.1
tcgaggccggccgggctgggacggacatgtcttaccgttaccgaattcaccaaatcctcgttcaagattggatgcgcacccgagacactccggcgaacaaacctgggttcgctcaaggaaggctccaaggtcaacctcgagcgcgccgtctcggcaaatacacgcatgggcggtcactttgtgcagggccatgtcgatactattgctactatcgagtcgataactccagacggcaatgcccttactttccgcttcaaacctcgcgacacggcggtgctacgatacattgtggagaagggctatgttacgatagacggcgcaagcttgacagtgaccaaggtccaggacggccctgatgggtggtgggaggtgatgcttattgcctatacacaggaaaaggtagtgacggcgagcaagaaggctggcgacgacgtcaatgtcgaagtagaccaagtaggcaaatatgtagagaagagcgtggctgggtattttgaagggtcgaccaatggcgagtttgccatcctcgagaagatggtatcgaagctggtggacgagcggctgaaagcgctgggtcgataggcagacgcgaacatgtgcagtctcgagctgccaagtcgataggctggtcgtcgtcggccccactcggtgtagtacccaancagaatagatcattgtcatggctaanaaaaaaaaaaaaaaaggcccct

SEQ ID NO: 119723 - DNA, 1696 bp, Zea mays
  Clone ID: MRT4577_40671C.1
gtcgacccagcatccgccaatgtatgctgtgctgtcgttcttttttttcgttgtatttaaccattttttgtcagtcctctgatttgtttcaatttcatttagtcacttgatgcagctgtaggcgactttgctattgtgagaaacagaacaaagcttgcagaattcacacagccttatattgagtcagggcttgtgatagtagtgccagtgaaacatgtaacttcaagtgcgtgggctttccttgaacctttcacattggagatgtggtgtgtcacagttgctctttttattttggtgggcatagtagtgtggcttcttgaacatcgtactaatgaggaatttcgaggatctccacgacgacaacttataacaatattttggtatgctgctgttgctacttagggatgtattttatcttgggttaccaagtgccttgggtcgaaattcataattttattggcgattttttttaattgactgccatttctttattatgcttaatttcaggtttagtttctcaacaatgttcttttcacacagtaagtccactagatctatcacatgatattatgcttattttctccagcgtgctttccctatgtgaagggaaacatcttgacggcaaactcactgcaggacagaacactgtaagcgcgctagggcggtttgtgttgatcatatggctcttcgttgtgctgatcatcaattcaagttatactgccagcttgacgtcaatcctcacagtccaacagctcgcaacaggaataactgggatcgatagtttgatttcaagtggtttacctattggatatcaggctggaaaatttaccagaaattacctgattgaagagctcaatattcctgagtctcgattggtaccactaaatacaatccaggagtatgctgatgcccttaagcgtggaccaaaagatggtggtgttgttgcaattgttgatgagatgccctatgttgagatcttcctgtcataccactgcaatttcagaatagtgggacaggagttcaccaaggagggatggggttttgcattcaagagagacttcccccttgctgcggacttgtcgacagccatccttcaactctcagagagtggtcagcttcagaaattcacgacgagtggttcacccggcctagttgctcctctgatgacagcgaagtgggggcaaccaggcttggcctcggaagcttttggggccttttcctcgtgtgtgccctgatatgcctcttggctttgctggtgtttttcatacggatatgctggcagtataacaagtactccaattctgaggctgctggtgagcccagtgcagcagcagctgctgctgcagcagtagatgctgctgctgctgccgccgatgctgtcgaaagacagaggaggccatcacgtcttggcagcttcaaagatattatacagtttgtcgacaaaaaggaggaggaaattaagaagacgatgaaacgaagagtaagtgagaaagataataaccaagctgcaggatcctcagaagctcattcagtggcttcagcatagaacattctttccaactcctgtccttcacaaggcaaaacaaggaagcacatatacgataggaaaaagtcaaaattacttccctctactatgaacgatgtccatatagcccctaaaatattttttagtttaatttacatctccatatgtttg

SEQ ID NO: 119724 - DNA, 284 bp, Zea mays
  Clone ID: MRT4577_40672C.1
cccacgcgtccgaccacgcgtgcgtccacgcgtccgagacccctcgctgtaatccctgatttcttctgtcctctcctcacatgggatgccaaccagacgatgaaccccgctcggctatataaataagagcttgaagaaaaaaaaactttcatgtaagagctctttttaggcctcttgcagttcaaaaggcgagggcggtcgctctaagtaggcatgtctactgtatcgactggcaacaaagaaatcaagacacatatgcaccaatactagttcttctgagccga

SEQ ID NO: 119725 - DNA, 564 bp, Zea mays
  Clone ID: MRT4577_40673C.1
gattgagtctagttctctccccggatcgcctgggaaaccaagaaagagcagccggtttatgcttcttgggccagaagaggaatcctcgagaaaccgatagaaggtgcaggtagtcagatagctggatcgggtaagcctcgaaaggcgacgttttcgacgacgacctcgtcgcgtgcgggaagcaacaactccccctcccctgatgcttgtcatttaacacacaggatccgggcgctctgctgccggtgatggagccgcaggacctgcagcggaacgtactgcagctgcacgaaggccaggaggagctcaagcgggagatttcgaagctcgtgccggagcagcagcaacagcatcaccaccaccactacaatgcatcgcgtcgcccgccgaaaccttcaacggtacgccgcgccctccaagcagggccttccttgccgtcacgagtggagcgcgtgggccgagatcgggctcactgaccggcagcacgtcagggccctgcacgcgctgaggcaggccgggcttatcattgccgccggcgacaaagtcatttactgaaaccgttat

SEQ ID NO: 119726 - DNA, 1310 bp, Zea mays
  unsure (1)..(1310): unsure at all n locations
  Clone ID: MRT4577_40674C.1
ccggccgggagctgtgatgaaaagcacctgcactggtgggtccagtgcgatcttctgatcttgtgatgtgtctcgctactctgagcaattaaccagctcttgacggagatggatggcttcgctggcaacagcggtgtcattgtgcttgccgccaccaacaggcccgatgtgctggactccgcgctcctacgaccagggagatttgataggcaggtcaccgttgacaggccagatgttgccggacgcgtcaagattcttgaggtccactcccgaggaaaggctttggcgaaagatgttgattttgataaaattgctagaaggacccctggtttcactggtgctgacctccaaaacctcatgaatgaggctgccatccttgctgctcgccgtgatcaaggaaattagcaaggatgagatctctgatgctcttgagagaatcattgctggccctgagaagaaaaatgctgttgtttccgaggagaagaagaggctcgtcgcttaccatgaggctggccatgcccttgtcggcgccctcatgccagagtatgatccagtagccaagatttccatcatccctcgtggccaggctggtggactcacattctttgctccaagcgaagaaaggctagaatctggattgtacagcaggagctatcttgagaaccaaatggctgtagcccttggtggcagggttgctgagggaggtgatctttggccaagacaacgtgacaacaggagcttncaacgacttcatgcaagtgtcacgtgtcgcaagacaaatggtcgaaagatttggattcagtaagaagatcggccaagttgcgattgggggacctggtggaaaccctttcttggggcaacagatgtcgagccagaaggactactcgatggcaactgctgatgttgtggatgctgaggtgagggaactcgtggagaaggcctactctagagcaacgcagatcatcaccacgcacattgacatcctccacaagctcgctcaactcctgatcgagaaggagactgtggacggggaggagttcatgagcttgttcattgacggccaggctgagttgtttgtcgcttgagaattgagatatcacaaggcgtacggctagctagctcgtcgcagtgtatatgcttttgagtgatttgtgcgagagcaatcacaaagggaaatggagagcccagcttgtaggaaccacattgatgtagccaaagatgtttttgcatacctgtatagcactagctgattgtaaaaagcatctactgactttgagcaagtaaaatgtcactgcttacaattatagcac

SEQ ID NO: 119727 - DNA, 807 bp, Zea mays
  unsure (1)..(807): unsure at all n locations
  Clone ID: MRT4577_40675C.1
tcgagcggccgcccgggcaggtacgcgggctgaggaggtgatctttggccaagacaacgtgacaacaggagcttccaacgacttcatgcaagtgtcgcgtgtcgcaaggcagatggtcgaaagatttggattcagtaagaagatcggccaagttgcaatcgggggaccggggtggaaaccctttcctgggggcaacagatgtcaagccagaaggactactctatggcaacagcggatgttgtggacgccgaggtgagggaactcgtggagaaggcctactctagcgcaaggcgccggatcaccacgcacatcgacatcctccacaagctcgcccagctcctgatcgagaaggagaccgtggacggggaggaattcatgagcttgttcattgacggccaggccgagctgtttgtcgcttgagatgtcacaaggcttgcggtgcgtatgcttttcggtgttttgtgtcagagcgagcaatcacaaagcaatggagagcccagcttgtaggaaccacatcgatgtatagtagttgatacgcatgtacctcggccgcgaccacgctgagcaagtaaaatgttactgctcacaattaaaaaaaaaaaaaaaaaaaaaaaaaaaaaaaaaaaaaaaaaaaaaccctaaaaaanaaaaaaaaaaaaaaaaaaaaaaaaaaaaaaaaaaaaaaaaaaaaaaaaaaaaaaaaaaaaaaaaaannaaacccccccccccccccaaanaccagngcgccccccgngcgaaaaaaaaaaaaaaaaaaactttttctccctttgggggcccccgccccca

SEQ ID NO: 119728 - DNA, 863 bp, Zea mays
  Clone ID: MRT4577_40676C.1
tcatcacaactcaagcacccacgtagtacctcacaatggcagacaaaaagctaataccgttggggctcattatcctcatgagcataggattagccaatgctgttagggtggttagatactctaatgccgatggtactggcacaggacagggagaaggtggtggatatgtgaatggcggaggatcaggatctgggtctggcaccggatcaggtgatagtggtccttatggtacacatgcaagcgctagtgggggtggtggagggggtggaactagccagtacggtgggtctggatatggttctgggtcggggtcagggtcaggatctagtacatatagtcaaggagggtattctggttatggagaatcttctagtgctggtggtaccggtgggggtggagctggaggacaagctggaggcgcatggaattccaatgctcaaggatccggtagtggaactggttctggctctagctatgctaacaggtattggtatggatcaaatgaagcaggtgcaagtgctaatggcaatggtggtggcacaggaaatagtcaaaacggtggaggtggtggtggctcaggtgctggatctgggtatggcaatgcctacccctagtttctatatctaagtcaacctatagttggggcccaacaatctttcttgtttcaagttgtgaaattagttagtttgttcgtacctctattacactttttgccagaactaaataaataaagggcccaactattctagtaatggcagcagtttagtgtgaggttcagcttgtaagaatctgttgtaaacatgtcagtctatgaatgaaataataacttccctttagataaaaaaaaaaaaaaaaaagtccac

SEQ ID NO: 119729 - DNA, 549 bp, Zea mays
  Clone ID: MRT4577_40677C.1
ggaagataagatcaccaaaacttaagtactgtctgaacagttgaatgcgccataagctgatagtaaaaaaaattaggtatacttattcattatttgttgggctagttctctaggtaaaccatgtcatcatgcatgactgtttccttatgctttatctttactcatccactgttttctgaatggatctggtacaacaaagacaattggcataaccagacaaccaagacacatggattaaggggcaaagacctttttaaaaacatcgtttttaaagaaactctccgaacaaggcgatatatcgtaaaatctgacggatataagctatcccatattcttttggataagtcatccatattccaatacgatataagaactataatatccgaatatgatggggatatccaaataaaatatccaatcgaatacttaacctctaaagatgcacgggtaatatcacacctctctaatatttttttaaaaatatcctcccgcctccattctttcggttcatgctcaaattgatcggctggctgaatagctgttcgaact

SEQ ID NO: 119730 - DNA, 279 bp, Zea mays
  Clone ID: MRT4577_40678C.1
accacgcatggcagaccaggctgcagtggcaccctgaggtgccccccgccgagtcccagggccctgcaggggcctcgacaggagccgggcctatctctaaagcagagggaatggctgggcatgaacttcgacattccaaaaccccaagccaggaaaaagggcagggcctggtcctagggctgcttactggcagctagagcagtgcccagtcagggtgggaggtagcaccaggctctgtgaccctcacccaagtgggggggtggtcagtggaagctgggg

SEQ ID NO: 119731 - DNA, 651 bp, Zea mays
  Clone ID: MRT4577_40679C.1
ccggccgggattcccatatctcttcttgtgctgttcggagcgtttagtatcactcagccccatcccaatcctatgctatcttcttcccctcctcaaggaagaaaagaagctgaaccatgccagcaatagaaagtcagctgctaacccacctcctaagaagcgaatggacaagcttgacactggcttttcctgcccattctgcaaccacggaaatacggctcagtgccgaattgacatgaacaatctgattgacgaagcatcttgtagaatctgtcaggaaaacttcagcactactgttaatgcactcactgagcctattgatatatatactgaatggattgatgagtgcgatcgtgacgacactggtgaaggcgaccatgatgcgggagcttgccccataggatgaaactgtcacctacacatcgtaatgcaatgcgctggaattctctaatgtcatagcccataatcatccatggcttgaaataacggaatggctgactgatatgccagtacgcacctggctagtacttactgaactacaaaaaggttgtactatacatatatggacaaccttataactggctatgtgtgtacctatcctaaacgcttatctcagatggcgcatcagcgtctttctgtgagattgttttc

SEQ ID NO: 119732 - DNA, 1476 bp, Zea mays
  unsure (1)..(1476): unsure at all n locations
  Clone ID: MRT4577_4067C.1
ggtaccctccgagtcctgccggaaccttctctccttcacgcttggtcttcccctctacgcgatcgaaaccgaagctcgaatcaatcctccacccgtttccagcccctcgtcccggagccccgatccgcctcccgtctcctcctgggcaggtcccccttttccgcgtgtgcgttggccggccggttcccgatgagggggttgctggcggtggaggccgcgggcgcggcgtcggtcccggcctcggtactccacggcgccgtggactggtggcgcgacgtcaacgagtcgccgctgtggcaggaccgcatatttcacgcgctcgccgtgctctacggcatcgtctcggccgtcgcgctggtccaattaatcagaatcgagtgtagggtgccagagtatggatggacaacgcagaaggtgttccattttctaaacttccttgtgaacggcgtgcggtctgtcgtgtttgtgctgcggcgaaatgtgcaacttgtagagcctgagataatacaacatgtgcttctggatatgcccgggcttgcattcttcacgacatatgcacttttagtgctcttctgggctgagatttattatcaggcacgtgcaatgtcgactgatgggcttagaccaactttctattggatcaacggtgtggtctatgcaattcagataattctatggttggttttatggtggaaaccagttcgagttatggtcattttgccaaagatgttctttgcaggtgtatcactatttgctgcccttgggtttgttctgtatggaggaaggttatttctgatgttgcagcgttttcctgtagattcgaaaggaaggagaaagaaattgcaggaggttgggtatgtgactaccatatgcttttcttgtttcttgatcagatgcgtcatgatgtgccttaatgcgtttgataaagcagcagatcttgatgttctgaaccatccaatcctgaacttcttctattacctgctggttgagatagtgccttcggctctggtgctcttcattctacggaaactgcctccaaaacgtgggatcacacaatatcacccaatccattagagagcaggccttggtggacaggcaaagttttctggtggattgtcttatatagcgtggtaaatacagaaggcagagtgaaaagtaccacctttgctctcgagcttgcccagcttttcatacgagggaaggctttagaatctcaggtttagaaaatgcgatctctttctctcagatttagaaaatgtaaaatgtaatttatataactttattattctcagtgcatatcatttgttcaaaaaaaaataatcgatgtgaaaaaaaaaaaaaaaaaaaacaacccacccccccaaaaaacccacccccncacacacaacaccaccaccaacccccccccccccccccacccccacccccctcaaataaccccctcccccactaacaaccaaaccacccccccccccc

SEQ ID NO: 119733 - DNA, 1256 bp, Zea mays
  Clone ID: MRT4577_40680C.1
tcgtggacgacctcgtcttctcgacgtcgcaagagcgcgccgccggcgctggcgagccgccggtactccaacgcctgggccgcgctggcgagagcgcgcgccgggccgcgtttggggtcgtcgtgctccaggtgctcgccggcaagagcaaggtgacgacgacgcatgcgcagctgccggacaacgacgtcgatgagctcgtcgacggcaacctgcagggggataattactcggcggccgaggccgcccagctggcgaagatcggctcggcttgcaccagcgagaacccggaccagaggccgacgatggcggagctgctccaagaactgagcaccgtctgaaatctaatggaggtccaacaatcatccgctgtaactgtttcatgcaagagtcacatgccttttgtaacctagctacgtacgtaccctgtctaggatcaccagtcagtaatcgctgatcttagaaagaatctgagctagtaggctctactagttagctagtaatcgctgatcttaggaagcacatgtgcccatgatcatgagatcttgtatgctaatgatgtgtcgttacccccgcttttgaaaagtgtgcattgtttggatgcgcactagctcatggtagtaatgtgaatgctgctactaataccggcactgcatctatttgtgcggcctgcacaagctcctcgtggacgacctcgtcttctcgacgctcaaggccagcgccgccatggggtacctggcgccggagtacaccaccgtgggccgcttctcggagaagagcgacgtgtacgcgttcggggtcatcgtgctccaggtgctcaccggcaagagcaaggtgacgacgacgcatgcgcagctgccggacaaggacgtcgatgagctcgtcgacggcaacctgcagggggataattactcggcggccgaggccgcccagctggcgaagatcggctcggcttgcaccagcgagaaccccgaccagaggccgacgatggcggagctgctccaagaactgagcaccatctgaaatctaatggaggttcgacaatcatccactgtaactgtttcatgcaagagtcacatgccttttgtaacctagctacgtaccctgtctaggatcaccagtcagtaatcgctgatcttagaaagaatctgagctaggctctactagttagctagtaatcgctgatcttaggaagcacatgtgcccatgatcatgagatcttgtatgctaatgatgtgtcgttaccaccgcttttg

SEQ ID NO: 119734 - DNA, 257 bp, Zea mays
  Clone ID: MRT4577_40681C.1
tcactatttggaaagcacgcccgcagggaccggcccggaacggccgggccgacccacgccacctttctgctaaaacaaacaatatcatcatagccaagataataatagcattcggcgaggcttaacatacccgggaagaagatctaaacccctcatgtcataccaccggacttcaaggccagcaattatcttgttagaggcagactctactcccaaagtcactgactgtggaatcgcaggggaaccatccaaagcgg

SEQ ID NO: 119735 - DNA, 621 bp, Zea mays
  Clone ID: MRT4577_40682C.1
ccctctctcgagttttttttttttttttttttttttttttttttttttttttttttttttttttttttttttttttttgggggggcggccggggcactattatcccgacaataaaaaacggacaaagttggggggctagcaaaggaaaaaaaaaccccccccccccaattaaaacccgaaagccaaactgggcgacctcctccattttgttttcgccagggttttcctcaaaaggaggcatgggggggggggcctcgggagcctcgccctgggggatgctgaggcccattttgaccatgggggggatgcggcccccaaaggggtgggggtcgcaaaggttgaaccccgaggggagcagggccgtttaaaaaaaaagcaggacagggcccttgacaaacttggggtttttgggggcctccgggcgcttgggcagttcctccatgagggggttgcccgggttgacccccaggggcttttggggggacaggtccccaaacatgctcgagtccctgagcgccggggccttaaggaccctctccaggggggccggccagccgtactcgcccgtaaccaggcaggggggggagcccaccacgcggtcaaaaaccaaaaccttttcca

SEQ ID NO: 119736 - DNA, 424 bp, Zea mays
  Clone ID: MRT4577_40683C.1
gcctgcaggagccgggccggaagtatatagcccgctcggcgagcttttttgtcgtcggccggccttcttttttttttatttgacatatggcacacggtcacattcaacaccgggagaacagcgctcactaaccaacaaacggattcctaggaacaagtcctgcatgcgaccattctccaatgcccggacttgaggggactcaatgcacatgcagcatggtggagaacggggctcgttgaaactatctatcggtttccgctgaagagcctaaaggtgcaaatctcctgacctactgactgggcacactgcattcccatgcgactacatccgggggcgacgaatacggtcatcatcggcgttgtgcaggtcttccaaattaagggccacctgcctgagaactgtaacccatacgtaacagtctgca

SEQ ID NO: 119737 - DNA, 284 bp, Zea mays
  Clone ID: MRT4577_40684C.1
ctaaaaccaacggagggtcaaactgaaccggggagattaaaacatttctgtcctgacctatacactacaacatgccatcagcattatctatccacttacccaccacccgactaaactgctaccgaatcatccatgataagtaggtcctaaatacagtttaggccaccttcatttcttaagtattaaccatcctacacacttatccccgttagtttcaacaaccacatatgcaacggagggagaactctcatggcttataacagccaaaccatgacattgtcctg

SEQ ID NO: 119738 - DNA, 642 bp, Zea mays
  unsure (1)..(642): unsure at all n locations
  Clone ID: MRT4577_40685C.1
gccgggtnttngcgattgggtacctcgaggccggccggngaaaattcccaggattggggcggatcctaggtttctcgagactaggatgggcgtatgaagcgacgatatgcttcggggagttgaaatgccaactcgaacgcagtagcacgacgtctctcctctgggcctggggccgagacaccgagcacggactaccagatagacgagggcgtctcccagattcagcccatcgaggagtgctgctcggaggggcgagagcagcaaacggggcccggcgacctgaacggttcgctgctcatctccaggagagcgctcccctactacctcctcgtggctcacgaggccggcggcgatcctcggtgccgagctgctgctcctgtccgggccagacgtctacgacacctacgccttcttctccgagtcgctggcgattcgtacgctggtgtacatctcggtgccagagctcaaagagcgcggaatcgagatggtggggcgctccgcgctcgccaggtgctacgcgggcgactggaacccagaaagctggcagggagctcagctccttcggtgggcgctacgctcgttacgggctgacccatggtcatgatacaggccttcgccagggcctgcctcggcgccgacaag

SEQ ID NO: 119739 - DNA, 650 bp, Zea mays
  Clone ID: MRT4577_40686C.1
cattgggtacctcgaggccggccgggatgtctctctcgcatagagtttcccttacacaatccccagccaaactcacaccgtagaaggagaggagaagaaagcctgcatctgcaacaccatgctcttccatgtagctggacgacctcgtgatgctcatgaacgagaacacgtgcgcacacgtgctggacgacgcctcctcctactacgagatcgtgaccatcaacttcctcgccgacgagcacaaaagtgccgaacacctcgtccgaaaccctcttggtcatgttccaacctctgcaccgatgactgacttgatacctccttctaatcaccaacaatctgcaagtccctgctcgaaaatctaccagagctgatgaagcaaccaaacctcaagtaggtacaatgctggatgaatgaatcgaggcggaactaaacagacaccgctgcaatgaatctcatcctcttccacgtactcatcagtactatggttgaaatgaccaccgacacgaaagtagtgtatgagacacctctgaatgacgaacaaggtgctaaacccgttccacgcacaactgatcagaagaaaataacttgctgaagacttcctcaagctcaccaaactgactcatgagacgtgcaatctctgccggtttgct

SEQ ID NO: 119740 - DNA, 321 bp, Zea mays
  Clone ID: MRT4577_40687C.1
gtggggacttaagtcgaattgtctggttttttccaaaagattattctaatacatagaagggtctaacagattgccgaaaaaagctttttatgcattggactgctcattatagggcctactaagccaaagaaacctactttcatcagtatctaggggcatgaacatctccctttgctccttcttgataaaaagcttgggaccaatgaaatgctcattactaccaatccttgccccacaggatacaactaaatccattacttgtttgatagggacctctcctagtttctttgcagcaagcgcatcaacagaattcgcaatcct

SEQ ID NO: 119741 - DNA, 224 bp, Zea mays
  Clone ID: MRT4577_40688C.1
gcacgaggcgagctggcggacttctacaagagcttcaagatcacgctgaaggtgactccggccaacgtggatggcgaaggcggagccgtcgtcagctgagccatgcagttcgacaaggccaacgaccaggtgcctgacccggacgtcatcaaggagaccgccaccaagacgttccacgacctcgacgactacctcctcaagaactagatggagcgataactgga

SEQ ID NO: 119742 - DNA, 355 bp, Zea mays
  Clone ID: MRT4577_40689C.1
aaagccgaagacgggagtgaattgagtgatgttagctggtagctaggggtgtaggggtggtaatggatcacgatccaaatgttttttacattaagttagggtccttaattaattttagtttaaaagtgaatataaatagagtttgattttaatccaattcgattcttcaattttatagtgtaaaatttagagttcattaccacctttactggtaatagaacagaaaaatgtgcgcaacggttgtgccctaaaacgagctagcagattgtgctctgtaacttgaaacatgcattgtatggaaatctcgatattgtgtagcaatggagtatggttcttacaatacattgttgttgtg

SEQ ID NO: 119743 - DNA, 1643 bp, Zea mays
  Clone ID: MRT4577_4068C.1
acccccggtgacaccttgcacgcacgcagctcgaagccgaggggcctggccaaggctcgaaccttctctccttctctggcttgtcttctccttccttcctcttcctcctcccctccacgcgatcgaaaccgaagcacgaattaatcatcccggttcagccctctccaggcgctccaccccgcgtcgcggacccccgacccgccccccgcctcgtcctgttcgcgtccccctttccccgcgtgtgcgttggccggctggttccggatgagggggttgctgtcggtggaggccgctggcgcggcgtcgtcgtcggcctcggcctcggtgctcaacggcgccgtggactggtggcgcgacgtcaacgagtcgccgctgtggcaggaccgcatcttccacgcgctcgccgtgctctacggcatcgtctccgccgtcgcgctggtccaattgatcagaatcgagtgcagggtgccagagtatgggtggacgacgcagaaagtgttccatttcctaaacttcctcgtgaacggcgtgaggtctgccgtgttcgtgctgcggcggaatgtgcaactcgtagagcctgagataatacagcatgtgcttctagatatgcctgggcttgcattcttcacaacatatgcacttctagtgctcttctgggcagagatttattatcaggcacgtgcaatgtccactgatgggcttagaccaactttctattggatcaatagcgtggtttatgcaattcagataatcctatggtgggttttgtggtggaaaccagggcgaattatggtcatcttgtcaaagatgttctttgcaggtgtatcactatttgcagccctcgggtttgttctctatggaggaaggttgttcatgatgttgcagcgttttcctgtagaatcaaaaggaagacgaaagaaattgcaggaggttgggtatgtgactaccatatgcttttcttgtttcttgatcagatgcgtcatgatgtgccttaatgcgtttgataaagcagcagatcttgatgttctgaaccatccaatcctgaacttcttctattacctgctggttgagatagtgccttcagctctggtgctcttcattctacggaaactgcctccaaagcgtgggatcacacaataccacccgatccattagagagcaggccttgggaacaggcaaaggttttctggtggatagtgttacacaacgtggtaaatacagaagggagagtgaaaagtaccactcgagctttgcccagctttttatacggaagtctttagaatcccaggttgaaattgtgtgtaaaaatgcgatctctttcactaagatttagaaaatgtaacttatataactttgttattctcagtgcgtatcatctgttcacattgcattaattgtttgcatgtttcttttgggtctctgcctcaactttgctgaacaagagcagctaatgctcctggagtgcatggatgatgtgattcgctcaccatccgtatgtttggttgttaggacgagtagagcctggttcaagaccatatgcaggttgagtatatgcagactgagttgatgtaattatacagtagcatgcgtgtttggttggatgattctaattagccaggatcaacccaccctatgtttggttt

SEQ ID NO: 119744 - DNA, 135 bp, Zea mays
  unsure (1)..(135): unsure at all n locations
  Clone ID: MRT4577_40690C.1
tgcgggccgngacctgtcattcctatgcatctttcctaagctttcagattccgggggagcggggggagtgcatctattcttataggggcgggctttgggagatacacaaaggaactggcttncctgcggaaagat

SEQ ID NO: 119745 - DNA, 420 bp, Zea mays
  Clone ID: MRT4577_40691C.1
caaaagagagagagtgtatccatttttggaggggaaaacaaagtatgcagcagccctgtgtgatagtgggttcgaagtactgctcaccaaaccctgtaggtttggcgatcgtccgtaaggtgatgaagataacggacggtaacttcgtgataacgagtgcggacggtaagttattgttcaaggtgaaggatcctttgtttagtcttcacggcaagaggatcttgctggattgttctggagctaaggtcttaactttgagagggaagatgatgaccatgcatgacaggtggcaagtgtttagaggagggagtacggaggagggtgctctactatacacggtgaaaagatcgtcgatgattcagctagcccctaaacttgaggtgtttttggctaacaacgtacaggagaagatatgtgatt

SEQ ID NO: 119746 - DNA, 287 bp, Zea mays
  Clone ID: MRT4577_40692C.1
ttttttttttttttttttttttttttttttttttttttttttttttttttttttttggggttttttttttttttgggaaggtccacacaaaaaattatttttttgttcaaagataacggttttgggatgttacagggccggcactttggtggacatacttattggtccctaaaaccggaactttttttaaaaacaaaaaaagaacacagggggcggggtggtttcacaaaaaaatcaagcctcaaaatcaaacctgtgtgaccttgaattaaagaagggcccttgcc

SEQ ID NO: 119747 - DNA, 220 bp, Zea mays
  Clone ID: MRT4577_40693C.1
ttttttttttttttttgtatacgagaacaccttaagatgaaggttcaggcacacgacttgccgtgatatttatagacagcttacaaccccatgcaggacgggaagtttgccacagagaaatcaaccatgcgcacaaagtattgcacggtgtacacacatgatatgacaacggttgttcacgattcacacatagtacgcagcatgcaggggaggataactt

SEQ ID NO: 119748 - DNA, 897 bp, Zea mays
  unsure (1)..(897): unsure at all n locations
  Clone ID: MRT4577_40694C.1
ngtccgagctcgcngcgggaacgaaaccnctaccacaaagcaagttgctaggtcctttgaaccagcaactgaagcttcctcgtctctttatccagaccagtaagcaacatggcggataatctcaagggggctcatggtgctgagccggccgggaccaatatccaaagtgacttttcttttatcgcagcgacactacctcaacgcttctcttctctcctctatttcctcccccctttccccgccactttcgatcccatttgtgcttcctactctatttgcctcgtcgcctatctcttcttccttctcttccagctcatctgtgcttgctttgcctacttgactctgtggctcgcccatttatccatcgcatggatctatgacagcagcctagcacggagcaagcacaacaccgcgttcatagcgcacctcgattgcaactcgcccaagtccctcgacgccgcgctcgacttgttctatcaatcttgtcgaggtcgaaactgctcatcgcgctagcaacttccagtctatgatccgcctgggatcccttgttgggagggattctcatcagcgagnacaggacccttgtggttgatcttgattcaatcaatcaatgtatgcgcttgttttcttctgtctctatctcgtaacttctgttgggatagcatgacgacctctttttatacttcttcctctcttggcctactgcctttgagtacacacaccaccacttttgctgcgccaactttcaagttgtcctgtcactttcaatacatgcccaaaactgttaaaggtgtctatccgtcgtctgatttaatgcctaacttatctttacactccgtatcatgaaaatattatgtatagttcgcaaccgaanaaaaaaaaaaaaaacccgcggcc

SEQ ID NO: 119749 - DNA, 204 bp, Zea mays
  Clone ID: MRT4577_40695C.1
caagcatataacatcaagttctactgtatattcagatgtagaagctactacaacactatcttgaatggacacatagaatccctccaaagatcacattattttccctttgctactctaaaccttgctcaaatcctcttatttgtatgctcctcttttcccacaggagagtagctatgatggtgacttgagtgcctgcaaccaaca

SEQ ID NO: 119750 - DNA, 1064 bp, Zea mays
  Clone ID: MRT4577_40696C.1
cattgggtacctcgaggccggccgggcccacgcacaaatcttttggaatttggccgccgtttgcgttgcgtgggtaggggaagaagcaggcggccaggcgcagagccgcaaaagcagacgcggaagcagcccaggcccgagccgaagcggggaggcgacgccgctgcactaccactcacccggtcagcgatttgccgccttgcgggagccagttttggcgtcggcgtcggcgtggagttcccggagaggggttctggcgaggatgagcggcagcggcagcggcagcggcggagggggagccagggggcagtcggggcccgtgccggcgtccgcgaggaagctcgtgcaggggctcaaggagatcgtgaaccgtcccgacgcggagatctatgcggcgctgcgggagtgcggcatggaccccgacgaggcggtcagtcggctcctctgccaagatacttttcaagaggtaaagagcaagcgtgataagaaaaaggaggttaaagaaaccctagatccaagatctcgaggagcaagtaactcctgtcgatccagtagaggtggtatggaccgtgctggacgaagcagttcagtccagtctggatccagtggcactgattatgtgacttcaaggtcatccatattgggacctgctgtgccagttaagccaacagttcctagtttgtcaacaaacaaagatgtggtttttaatggatcagttggagcaccacaatcatcatctggttttcagcataattggtttggggtgccaggtcagatgtcaatggctgatatagtgaaaatgggaagacctcaagtgaggtcttctggaaagcctatggctgcagcagacacatcatatgctggtcaaaccccatctttatctagctctgtaaaccagaactcgaaacaatctgctagcacaaccctaccaactacttttgatcagggctttcctgctctcccagaccctattccacatactgtgaattctagtcatggttctgctgggaacaaccatacacatgagaatgattggtttcctcaagatgagcctcaatctggag

SEQ ID NO: 119751 - DNA, 1619 bp, Zea mays
  Clone ID: MRT4577_40697C.1
ccacgcgtccgctcgatgccaggaatcaagattactacgacaacgagattaactgatggggattcatctggatgccaggaatcaagattactacgacaacgatgctctaaatttgtcagcaaatgaggatgttgagacaagaattggtactaacatggataacattgatggaccttcagtttcacagtctgatgtaccgaggcagggggccatagatgtgcctggtcttcaatatgacatgccatcagttccaagtcatgcatattcaagcacaacgcagccaagtaaaatggaagacccacaaggaaacacacaagcacaacccctttcccatttttctggcttactgcaagcaaatactctacccaattacttgttggggtcaaatcttacccctattcgggagtttgacttctcgcagttacttcagacacagtcagctacaaagtataacccatctgcggcacctaataatctgccagcaatctccatgcaagagactttaaaaccaggaggctttcccaacactcagtctacgcaacatgttcccaatacgagcataccatcgggtcttcctctcccacaacaattgcctgtatactctcagccaactctgcctcttgggccttttaccagcctggttggctatccatatttgcctcagaactactacctaccatctgcggccttccagcaagcgtactcaagtaatgggcctttccatcaatctggtgctcctgctgtgcctggagctggtatgaagtattcgatgccacaatacaagagcagcccacctgcttcgagcctaccacagccatcatcactctctggttatggagggttcggaaatgcaaataatattcctggaaatttcagcctaaatcagggcgctccctctgcgcctacaactttgggatttgatgaagctttaggcacacaattcaaagaccccaatcactatgcagctctacagcagagtgataattcggcaatgtggcttcatggaggcgctggttcaagaacagtttctgcagttccgcctggtaacttctatggtcttcagggccagagccagcagggtggcttccgccaggcacatcagccctctcaatacggtggtcttgggtacccaagcttctaccagtcgcagtcgcaggccagtctgccacaggagcacccccagaacctcaccgagggaagcttgaacaattcccagggcgtaccatcccagccatcgcaccatctctggcagcacagctactaaaccttctgtgctctcttgggagatgcctctctacgctgccaggttatctgcaagccttggcacgctgcgccgtgaagcgaacagactagctgaactgccgtcttgagcggtgctgagcagaggacggtccatccaacagcgatggagtgcttgtttttttccctttctttcccagttgtgttctgaaactaatttaagctgtcgcggtttttatttgatagtgagtggtgttgcaaaggtgctatcttgtaacggtgaagtcctaactcatctaacagatctgcttcccatacccctgtaatatgccattttgttcttgatgcctagaagcttgaagcttctacgtgttgctgct

SEQ ID NO: 119752 - DNA, 530 bp, Zea mays
  unsure (1)..(530): unsure at all n locations
  Clone ID: MRT4577_40698C.1
atcatagccaggatcccagcctcaggaggtgcggcttaccattcaacgctaccataagttactcctactctgaacctcgaccagcaaggatgctattgaactatgctcttactgngactggacaacattcatgaacgggtataccctgcacttgatgcaagcatgaaataagcatcatccataacaacagttggctggctacgagactttcaaggacgcgattcggaaaaacgtacataaagaggtaactatcagcaggcatcctactgctgaagaacaacttgactgtaactagctggaacaaggaaacaaacatcacagaacagcttccattgcaacagctcggtgaccttagagaacctaccgactctgcgccagagatctccatatgagagccaaacccgagctccattgagtactacgacagagtgcctgtaaaacactatattttagaagagcggctgagttatttgagaggattaagttaccttgcattgcattcttcagctttcctcgaccacgattttgct

SEQ ID NO: 119753 - DNA, 3205 bp, Zea mays
  Clone ID: MRT4577_40699C.1
aggaatttggcgccgtctgcgttgcttgggtggggaaggagcaggcggccaggcgcagagccgcaaaagcagacgcgaaaaagcccaggcccgagccgaagcggggaggcgacaccgctgcacctgcactaccgctcgcacggtcagcgatttgccgcctcgcgggagccagctttggcgtcggcgtcggcgtcatcgtcggcggggagttcccggagagggattccggtgaggatgagcagcggcggcggtggagggggagccaggggaccgtcggggcccgtgccggcgtccgcgaggaagctcgtgcaggggctcaaggagatcgtgaaccgccccgacgcggagatctacgcagcgctgcgggagtgcaacatggacccggacgaggcggtcagccgcctcctctcccaagatacttttcaagaggtaaagagcaagcgtgataggaaaaaagaggttaaagaaactccagagccaagatctcgaggagcaagtaactccagtcgatccagtagaggtggtgtggaccgtgctggacgaggcaattcagttcagtctggatcgagtggcactgattatatggcttcaaggtcatcaatattgggacctgctgtggcagctaccaatgccatgcagaagccaacagttcctagtttgtccacaaacaaagatgtggttcctaatggatcagttggagcacaacaatcatcatctggttttcagcacaattggtttggggtgccaggtcagatgtcaatggctgatatagtgaaaatgggaagacctcaagtgaggtcttctggaaagcctatggctgcagcagacacatcatatgctggtcaaaccccatctttatctagctctgtaaaccagaactcaaaacaatctgctagcacaaccctaccaactacttttgatcagggctttcctgctctcccagaccctattccacatactgtgaattctagtcatggttctgctgggaacaaccatacacatgagaatgattggtttcctcaggatgagcctcaatctggagttcagtccacaggcattgaggcatctggtgaccaatcgctatctgtggcatcactggaccaatctatgttggttgctggtactgcttactcacaagaaaattctcatgcagaagagaacaactcaactgcagttaaagcaacagtgtcttccgaaagacacttggaaattgtggaggaggacaatcattacaacgatgggttattgcagaactcaagtgcttaccaggctcaagtgcattcctatgttgataatgaagttggggtttctaatgttgatgcagaatcagcttcgatgaacttccagcatttaagcctgcagaatgaagatatagctgcaaccaagtctgctgaggataaccctgcggttatactccctgatcatctacaagctgcaaatgcagattgtgctcatttgagctttggtagttttgaatctggtgccttctctggcttgctttcatcaaaggtcccaaaaggcagtttggaggacgacgaggtgctcattccagatgaatcccgatcagttaatcgaatagatgttaggaatcaagattactatgatgacgatgctctaaattcttcagaaaatgtggatgttgagacaagaattggtaatatggataacattgatggaccttcagtttcagaatctgatgcactgaggcagggtgccatagatgtgcctggtcttcaatatgacctgccatcagtttcaagtcatgcatattcaaacacaacacagccaagtacaatggaagaaccacaaggaaacacacaagcacaacccctttcccatttttctggcttactgcaagcaaatactctacccaataacttgttggggtcaaatcttacccctcttcgggagtttgacttctcccagttccttcagacacagtcagctacaaaatataacccatctgttgcacctaataatctgccaccaatctccatgcaagagacttcaaaacagggaggcttccccaatactcagtctacgcaacatgttcccagtacaagcatttcgtcgggtcttcctctcccacaacaattgcctgtatactctcagccaactctgccccttgggccttttaccagcctggttggctatccatatttgcctcagaactattacctaccttcagcgccattccagcaagcgtactcaagtaatgggcctttccatcaatctgctgctcctgccgtgcctggagctggtatgaagtatccgatgccacaatacaagagcagccctcctgcttcgaccctaccacaaccatcatcactctctggttacggagggttcggaagtgcaaataatatccctggaaatttcagccaaaatcagggtgctcccgctgcacctacaactttgggatttgatgaagctttaggcacacaattcaaacaccccaatcattatgcagcactacagcagagtgataattcaacgatgtggcttcatggaggcgctggttcaagaacaatttctgcagttccgcctggtaacttctatggtttccagggccagagtcagcatggtggcttccgccaggcacatcagccatctcagtacggtggtcttgggtatccaagcttctaccagtcgcagaccagtctgccacaggagcacccccagaaccccactgagggaagcttgaacaatccccagggggtaccatcccagccttcacaccagctctggcagcacatctactaaaccttctgtgctctccttggagatgcctctctacgctgccagcttacctgcaagcgagcagactagctgagcccaacagcaatgaagtgtgttgtttttctttctttcttttttttctccagctgtgtgttctggaactaaattaggctgtcgtggtttttacttgatagtgagtggtgttgcagaggtgctatcttgtaacggtaaagtcctaactcatctaacagatctgcttttcatacccagaaatggtaagggtgaagtcctaactcatctaacagatctgcttcccatacccctgtaatatgccattttgttcttgatgcctagaagcttgaagcttctacgtgttgctgctactttcataagcataaaaaaaaaagaagacgtatgccggctgtgcggtcggggcctgccgtccctaccttagagcttctcgtgc

SEQ ID NO: 119754 - DNA, 443 bp, Zea mays
  Clone ID: MRT4577_4069C.1
atcgtgcaagccctcgctgctcgccccttctcgcccacgtcgtgcccccgtcgatccatcgtttgtgttcccccttactccctgcgccttcctctcaccctctatcgcctaaaaaccctagtccgtgcccagccactaccgtcgactgcgcgtggtcgctggccgcgtgcgtcgacccaactgatggcacgacctccctcaccttcgtcgctaacctgatccatggaaggcgaaagatcccctgattacccctctccttccaccttgctcggctccaccctgcctcgactggccgctctactgcaccgtcgtcaccgtcacaaccaccatgcggaggcggatccacgtcgtctaggtcgacgtcccgttgctggagactaggcgcaggcccatcaactaacacgccaccgtcctcgcaccgcatgaggtgctcacgatgcggg

SEQ ID NO: 119755 - DNA, 352 bp, Zea mays
  Clone ID: MRT4577_406C.1
cgacttgtagagcccggtcagtttgcatggggtgcctgcacgcgtcgtagcaccgcattggagcccctgcaccgcttctggctgggtaggcatgggcgggcgcggaaagggccttcctgcggcctcccaagccccttgcgcacgaaaataggcgtccacgtagctgcgccacagttggcggcgttctgcatcggtcatgtccagttcctcagagcaatgaagcctgggcagcgggtgcactggtcagctcgggcggcacggtctgcggctgcaagccttcgccaaagccttcgggcaagccttcctcgaagtccgcacaccactcgcccgcaaggtcttgcagcgcccgtag

SEQ ID NO: 119756 - DNA, 391 bp, Zea mays
  Clone ID: MRT4577_40700C.1
accaacgcttctaccgtcgctagctgccacatgcgctgagagcggagccggataccgatagcggcaagggacaggcgaacactgggcatagagagggccactactagcgcgggtgcgccgagccgtgcccgaggctaccatacaggaaggcgcgcgccgatgcaatggccttctggaagacacaaatacgaccgctccttgatcactatgattgcaaggcaggctctattggtctgacgcagacagcgaacaaatgagacaacactgggaatgaatgactactgagggcgtatagggacaccgctctatgccaggagaacgtgcgcgtgcgcggttctttggcattatcccccgaccatgatgatggccgtgaagtattgaatttcatatt

SEQ ID NO: 119757 - DNA, 333 bp, Zea mays
  unsure (1)..(333): unsure at all n locations
  Clone ID: MRT4577_40701C.1
acaacttaactttattaccaacaccnnnccaaccatgaaagctttcatttatttatgttagagcancanataaaacttnactcttcaatatttcctaccattaacaaaaataactcaacttcatgcaaacaaaattattttttatcatcgatccttactaaaattacaatgaactcaataatcatctcctcactaaatacatcaattattttttcaacctaaaaaaataactcttcaataatacaaataaaaacaatctccccaaaatatcccaacagaaacttctcattttatttaaacttcactacctatatccctaccccttccaaattt

SEQ ID NO: 119758 - DNA, 1774 bp, Zea mays
  Clone ID: MRT4577_40702C.1
agtccagtcccgtcccgtcccgtccgactgctcaccaccctccggcgcgccagtcccgtccccgtcccactcattccattccattgcacaaagccctgacccctgatcggcagcggcggcggcggcggcggagatcgacagaggcggcgcgcgcaggatgccgtaggcggcggtgccggtgaccatcgtgcggtgcggctgcccgtgctagctctctcccaccacgtcatatcccgtgcgtgacctcgcgccgctccggctgcggggcgatcccgcgcgacgaggtcgacgcccgcttggcaccccggcgatccccaccggtctctgagggggctgaggaccgcatgcgttttgggtctccgacgcaccaacaattcaggccgaacacttccgccagcagcttctaaagcccgcgacttagattctgccttcatcacccaaacccaaactaaccgaaacaattttgttttcgaccacaaaaaatagcaatctctcgaatttctccatttctttccgacgaccaagaggcgggaaacctcacaaaggccagaaaccaagcaacacttcacgatgcagggagatcccgggtacggctacggtagctacgggtacgggtacggctacggttacggagccggcgccgccggctacgactacgacatggccggctacggcagcggcggagccgcctactactcggcgaccgaccggtatcccgccgcgacggcagctgcctatgaggacccgctcgtcgctggtcagaggcagcacgacgtgcccgcgccgctcacggggctggagttccaggcgtccgacacgtgccccaagaactacgtcatcttcgaccatacgtacgaccggagccgggtcatgttccacccgtccctggccaacaacttcgcctcctcccccgccgccggcggcggcggcgggtacgactacgaccgccagtgctacggcggctacgaccagaactacgccggcaagagcgcctactacgtctgcgccgccgccgccgccgacgacgacggcggcggggcctcgatacggcagaaggaggacaccgacgagatcgacgccctcatgagcacggaggacggcgaggacgacgacgacgacgacgtcctcagcacaggccgcacgcccgggtgccgtgccgccggctcccccgactctacgtgctcgtccgggtacgctgccgccggcgccggtggcggcgagaagaagaaggaacggatgaaaaagatggtgcggacgctcaaggggatcatccccggtgtcgaccggatggacacgccggccgtccttgacgaggccgtgaggtacctcaagtctctcaaggtggaggtcaagaagctcggcgcgcgcgggtcaagcagctagctaagcgcgctggcctcgtcggtatgcggcggcgaccatgataatgtaatggcagtcgaaatccctctcttctttctcggcatcggcagctacgacaagccagtcggtgaacaatacatgcggtgatgacgacaagggacagcttctcatcttggcctcagatgcacgtgctctgtttgcaccgacaggatcaggacatggcttcggagagagctcggttgcagggcgctcggcaatcttttgtggtggctctgccacctctagcgttcgtgcgtgcatggattgttacatttcttccttcgtatctctttcgtatctcttgatacctcgtggctggtgttgtaactatcatgctgatgatatatatatacacacaccgtgttcttttgtt

SEQ ID NO: 119759 - DNA, 709 bp, Zea mays
  Clone ID: MRT4577_40703C.1
gccggccgggttcgggaacagtatcactgccgtgtaatgtacctatagcccgtgcactgggccggatccgcacagcaaaacggaaatgatcacgagtggcagcaccggatgcgcagccgcaggcggcggcagcggcggcgctatatgcaggggcggaggagagcgcgttccgaccaaagctgccgagacatcgacatgcccacccagctgccgctccaggactactgcttcgccaggtaggggtaggcagagggcgcgacgtgcctcatcagcgacggccacgaggaggacctacacgtactccgagacgcgcctcctgtgacgcaaggccgcgaagagactccacagattcggcagtagcccaaggcaaccgcgacatggcgactgctccagaactccagtccagatcgagctcgccttcttcggcgcgtacttcctcgtgcgtcgtcaccacggtcgccaaccctgtctgcacgtcgcaagagatacacaaaaagttcatcgtctcaggcgcgaaggtataccgaacccactccgcctacatggacaagatccggacacgacaccttaccgaggatctatacttcccatcgaaggtggcggttggaactacaatgcactcctcaccgtcctcaacatctacagagacgcctgctacaccccgtaaagctgcctgaagttctgagagctgctcacgctcgatagacgg

SEQ ID NO: 119760 - DNA, 513 bp, Zea mays
  unsure (1)..(513): unsure at all n locations
  Clone ID: MRT4577_40704C.1
gggggggggggggttttttaaaaatttttttttttgggtttttttttttttttttttttttttttttttttttttttgccgcattttatcattacttgggatatatgattcaattttgacaccccccggggcccagacccttcaaaatggggggggggggggcgcaaaagaccgggccatatcggttaaaaaaccgggggcacgggcatttaaggcaaattgggaaggacccgcaagagggctcccttgggggaacaaaagcaaccccggttggcccctaattttcttcagctggccaaaaaaggggggccagctttttttgccatttttttgcgggttccccaaggggacccaaaaaatacccaccggtctcaagggcaaaaacaatcttgccacgctgaaaaagccccggaaagggggggaacagaacattccccttaggttgaggccccttcggaaaggaatntcccctcttgaaccccggggaaaaaaggggcccaattttcaatggct

SEQ ID NO: 119761 - DNA, 392 bp, Zea mays
  unsure (1)..(392): unsure at all n locations
  Clone ID: MRT4577_40705C.1
gcaagctttttttttttttttgtgtggggttgtgcttttttttttttttgtggtttgttttgtttttttcttttttttcattctaggggttttttttatctcctggtgttctgtttttcttgtgatgtttatgaacttgcgggggggggggggttctaaattcattatacaataattaccatgctgtgttggagaggagcataaatacatggttgttcgtgtgaagtggtgccggtctaaggggctaattctaaagcactggtttgatggtactggtggattcgagtttgggtctgagatgggcgttctgatggtatagttgttggcggggacgatttgttttgcgatgaatgtggggaagagngctgagtcggttgtatactgtggaaagc

SEQ ID NO: 119762 - DNA, 155 bp, Zea mays
  unsure (1)..(155): unsure at all n locations
  Clone ID: MRT4577_40706C.1
ngttcaacaagggcggccgggaagcgctaaattctctccaccgtccacctaaggtcccacatccgctcccctacctctcaaggaactcccgccaccagtaccaccgtctccgatcctgacctcgccagccacgggcaagatcaagatcggaataa

SEQ ID NO: 119763 - DNA, 404 bp, Zea mays
  Clone ID: MRT4577_40707C.1
cggacgcgtgggcacacatatatttgtatttatacataataagtatttcttttttttgtgtgaattctggaacggtattgacaagcatggtcgagacacccatgtctcacatcatatgaacatgtcggtgattgatttgagctactgatggtttattcacttaagcaatctttcttgtgagtgtagagcttgagaatacttagctcattattcttgtctttttttgggcaggattcaaacaaaccagtacattaccaccatggttcttgattcattatcatcacctcacaggaggtcccaaaacacattcttcgtgtcatctgcaaaaaagcctcagtcatctcgtgacgacagttggtctgcactgggtgagcgacaccggtttcttctgacgacacttcctg

SEQ ID NO: 119764 - DNA, 440 bp, Zea mays
  unsure (1)..(440): unsure at all n locations
  Clone ID: MRT4577_40708C.1
aactaaaagtttaaaacggccctttggggggttggccccacagggccaaaacaatggaccaaaaagaacgtttaattccaaaagcagcctgggcgggcaaacaaaagacccccccccgattgagggggccaaaggccggcgggggagggacccaagggaaacccggggggggagcccccccccggggccccccggttgggaaaagggttggagcagttcggacgggagaaccccggccccgaaggggttttgggggcccaggtggggggggcccccgggaaaaaacccccggagccccttaatccggccgcggaacttttgaaacgccgccttacccaggggccccccccgccccgggggctccggaaacccccacagacacccccnggggggcgagggggacgaggggaggcccaggggggccgtgcccttgggggccg

SEQ ID NO: 119765 - DNA, 320 bp, Zea mays
  Clone ID: MRT4577_40709C.1
ctcgagagcggccgacctgtagtcctttttttttgcagagttacaaattttcatacggggaaaaaggaaagaccgaaggagcagggggggcctcaaaaagaaggccgggagcgacccccaagaagacgagaccagccaagacgagtcggtcaagcacgagaacaggagggcacaaagaaccggaggaaagcgagacaaaacagaacaagctacagcagggggaggcaaggggcaaacagccacagacagcggcccccgcaccagtggcacaggccgcacacgacactgagccgaagccaagaacagccagcagcggaaac

SEQ ID NO: 119766 - DNA, 211 bp, Zea mays
  Clone ID: MRT4577_4070C.1
gccgatcctaaggacggaggaacccctcgatagcgcgatcacgcgcgtcatccgaaaggaatcggttaagatggccgagcctgacgtggcagcagacggcgacgttaggaagtcctgtggtggacgtggggctacttcatgagaggcgtgttcctgtaattctgtactcacttagttctctctgcatgcgtctataattgagttcaataga

SEQ ID NO: 119767 - DNA, 438 bp, Zea mays
  Clone ID: MRT4577_40710C.1
cggacgcgtgggcggacgcgtgggcgagctgctgtcgccgatgccgcccccgccggaggtggaggagaagaaggaagatgaggcggagaagaagaaggacgatgagaagaaggacggcggcgagaagaatgaggagaagaaggacggcggcgacggagacggcgacaagaaggacgaggccggcgacaaggacaaggacccggccgccagcctgtacatgcactacccgcggttcccgttcgctggagggtactaccagccgccggcctacccgccgcctccggggtacccgtacgcctaccagccggcctacccgccgccgttctacgcgccgccgcaccaccacctgcaccagcagcagcccatggcgccgcagatcttcagcgacgagaaccccaacgcctgctccgtcatgtagttgtcactcaaatgtcatgt

SEQ ID NO: 119768 - DNA, 2122 bp, Zea mays
  Clone ID: MRT4577_40711C.1
cggggtttatgtgattgcgcatttgtggataataaaaataaaagtgtcaataacaatatataaatgggtctatagaatttaaactctaacttggagaaacaaagcattggctttaacaaaataaatatcaaaaataaataaattcaccgtgccatgtttaagttgggaaattaatgtgaagataaatctaccacgaaattgaatctaaatgggaattcaaattatgaatttagaaatagaaaggaaaagaaaacaggaggaaaaaaagaaaagaaaagaagactcccatggcgcgcttgggccgaaatcctcctagcggcccattctccttttctcgcccgcttccagcaatcggccaatctctctgacagttgggtcttcttgtcagttcgtcttaccagggaaccctgcgactcagtcagcctccacgctcgcgatgttgtcgcggtcacccacctgacgggcccactggtcagctccacactcggtcatgcgagtcactgcttagagggccaaccggcactgttgatcttctcgcttggcagacgtgcggggcagagcacaacagcaggggatccggggagggagggaagccatgggcgaggaggcggccaagaaggaggaggtggagaagcccaaggaggccgccgcggcagaggagaagaagaaggacgacaagcccaaggaagtaggcggcggcggcgagaagcccaaggacaaggaggaggacgagaagaagaaggaggacgcgcccccgcctccgccccgcgccggaggaggtcgagatgcgggtctacatgcactgcgaggggtgcgcccgcaaggtcaagaagatcctcaggcgcttcgacggagtggaggatgtgatcgccgactccaaggcgcacaaggtgctggtgaaggggaagaaggcgcccgcggaccccatgaaggtggtggagcgcgtgcagaagaagactggccgcaaggtcgagctgctgtcgccgatgccgcccccgccggaggtggaggagaagaaggaagatgaggcggagaagaagaaggacgatgagaagaaggcggagcccgagccgccgaagccggaggagaagaaggagccgccggtgatcgctgtggtgctgaaggtgcacatgcactgcgaggcgtgcgccgaggggatcaagaagaggatcctcaagatgaaaggcgtgcagtccgtagaaccggacctcaaggcgtcggaggtgacggtgaagggcgtgttcgaggagtccaagctggcggagtacgtgtacaagcgcacgggcaagcacgcggccgtcgtcaagtccgagccggccccggcgccggagggcggcggcggcgacaaggcggccaaggaggaggagaagaaggatgcaggcggagccggaagcgaggagaagaaggacggcaaggaggaggaagagaagaaggacggcggcgagaagaatgaggagaagaaggacggcggcgacggagacggcgacaagaaggacgaggccggcgacaaggacaaggacccggccgccagcctgtacatgcactacccgcggttcccgttcgctggagggtactaccagccgccggcctacccgccgcctccggggtacccgtacgcctaccagccggcctacccgccgccgttctacgcgccgccgcaccaccacctgcaccagcagcagcccatggcgccgcagatcttcagcgacgagaaccccaacgcctgctccgtcatgtagttgtcactcaaatgtcatgtaaaaaaaaaagaaccgtaggaccctgtctttgcgcggggtcctggcgtcctgcccctgccagagcgaaggaccctgtctttgccagaaatgcccctgggcaaccaagctaatggcgactttgtttgaacaaaaagtagcagacttttttgcggggttcgatttctctctctctcttttttcttttgtaattgtaacccttttttttacctttctggactggtataaaagtaagcctggactcgtcagtttatgggtgcaatatggaggagtatctttgtgtagaatattctggctggtactgcgcttcggactttgtatataaaaaaaaacaaaaaaaaaaaaaaaaaaaaggatttgcggcc

SEQ ID NO: 119769 - DNA, 509 bp, Zea mays
  unsure (1)..(509): unsure at all n locations
  Clone ID: MRT4577_40712C.1
cctcgagcngncgnggtccttctaccccgtacgagtgcctctcgctcgcgcacagtcttccttccgtggatatcactcctgggctgtacaatcgccaccaccctgctatctaatcaacgcctccttcatcagagagtagaattctcacaagcttatttgtatatcgatgcttttcccttctgcaacaatgtgccacccatggctatattggggaaaggtctcactatctaaatctctggaagctggagatcaatctgtcaaactcaaaagtgatatagctaatgcgcagacatccatgacgctacagtggcttatcgatcagaggagatttctggctgggaagaaaattaagcatctcatgtttgaaaatctaaaccggaaccctaagaagattgcgatctgatccagcggatgcaactgggtccatcaatttgctaaaaggcggctctggaaggaattctgccatgccacagtacctaatatgatgaaggatttcgcctctgacggga

SEQ ID NO: 119770 - DNA, 575 bp, Zea mays
  Clone ID: MRT4577_40713C.1
cccacgcgtccgcccgaataaatttgaagcgcggaccaagccctagatccgacaccagcaccaccctcagccatggcgccagcggcggcggaggctggtcccggcgatgacgggcttaggaagctcgaatacctttccctggtctccaaagtttgctccgagctcgagacccacatcggcgtcggcgacaaggtgctggccgagttcatcaccgagctcggccgcgactccacaaccgtccccgagttcgacgccaagctcaaggagaagggcgccgacttccccgactacttcgtccgtacgctcctcaccatcatccacgccatcctccagcctactgcttccaaccctagcgctgccaccgtcgccgagggccctgctggtgcggagtcggccaaattccccgggctcgcccgccccgacgaccccgaccatgcccgcaacctccgcctcgagctcgagcgggatgccgatgcggcccctcctgctccgatgagggacgaccgcgaccgccgctgggatgggagaggccgagaccgggactacggccgcggcggccgtgagcatgatcaaga

SEQ ID NO: 119771 - DNA, 1083 bp, Zea mays
  Clone ID: MRT4577_40714C.1
actcctactcgaggccggccgggagaagaccggccgggatcaaaaagatagacacacacaaacaccgcaagctaagaagatcccttgctgaattcagagagcacaaacacaaaagcgagtgcaaaaccaaatggctgcctcggcctacttccttcttgttgcctttctagcgttggtcacatctcaggccattgcctctgaccctagcccgctccaagacttctgtgttgccgacaaatactctccggtgaaggtaaatggatttgtttgcaaggaccccatggctgtgaacgcagatgacttcttcaaggcagcaaaacttgaccaaccaagggacaccaagaacaaggtgggatccaacgttactttgatcaatgccatgcagttaccaggactcaacacattgggcatctcgttggctcgcattgactacgcacccttaggtcaaaatcctccacacacccacccacgtgccacagagatcctcaccgtgcttgaggggaaactctatgttggatttgtcacctccaaccaagctaacagcaacaacaagctatttaccaaggtcctcaacaagggcgatgtgtttgtattcccccaaggactcatccacttccagttcaacccggtccatgacaagccagcagtcgcgatcgctgcactaagcagccagaaccctggagttattactattgcgaatgcagtctttggatcaaagccacctatctcagatgatgtcttggccaaggccttccaggtgcaaaaggggacaatcgattggcttcaagctcagttttgggagaacaaccactactaattaagtctgggctcatcatttgatattatagaaatttatttgcattttacatactactccatgtatttattttttcctaggctatgacccataataaaaataaatgttatgtgtttctttctgaaaaaaaaaaaaaaaaaactagtgtggctctaccaccatgttcttaatcgaaagtgaatgtaatgtatatgacactctatcgtttcccattttattgggacagattcatatagtaagccatccaaaaaaaaaaaaaaaaaaaa

SEQ ID NO: 119772 - DNA, 514 bp, Zea mays
  Clone ID: MRT4577_40715C.1
tgggcgcccaccgtcagagaaggacatacgcgtcaactacctcttcaccaggatagtgaagctcatagtcgtggagctctactgcacgcacacagcggcctgcatcttctattacctggctacgacgcttcccgaatccatggaagggcacacgtggatcgggagcttgcagctgggggactacaggttcacacatttcagggagatcgatctcgccaagcgctacataacgtcgttgtacttcgccatcgtcaccatggcaaccgttggctacggggacatccatgccgtcaacatcagggagatgatattcatcatgatctacgtgtccttcgacatgattctaggagcctacctgatcggcaacatgaccgcgctcatcgtcaagggatccaggaccgagcggtttagggacaagatgaaggaggtgatcaggtacatgaacagaaacaaacttgggaaggaaataagggaacagatcaagggacacctgaggttgcagtatgagagcagc

SEQ ID NO: 119773 - DNA, 192 bp, Zea mays
  Clone ID: MRT4577_40716C.1
gcgaccatgacaacccaccccacgactacacatcatagcacactcaccgtagaaaaacccatgggcacgggtgtattggtgtacaacctctacaataccatcatcaacttctacagcgacaactgcatagtggacagcctaggctttactcgaaccaatccagcgctttctgtcaatcatgccttgtaacac

SEQ ID NO: 119774 - DNA, 268 bp, Zea mays
  Clone ID: MRT4577_40717C.1
ccacgcgtccgcacctctactcaataaacccgcgatttcagtattcgacacccggcaacgacagaggctgcgcgacgtcctatctgagccctcctcccagccactccagacacagtcacacctaaacccacacctacccgcaccacttcttcttcacagcgcccaccaatccaactcccggcaacgaccccgccgctcctcacctgtacttccactcttactaaaacttttcttcgcgcttctcgcaactcgttctccacgacatatc

SEQ ID NO: 119775 - DNA, 206 bp, Zea mays
  unsure (1)..(206): unsure at all n locations
  Clone ID: MRT4577_40718C.1
agccgtcgtcgccttcatcgcctgcaccgccttcttcctcgccttctctgcctactcccgtcgccagggcgttgcagaggttcaattaccagcattttcttttttttctacctanatntaaattggtggggggggggggggtataattgtnattgntctntatggggaggtcgggccaaaaacagttgaaaactttagggctcttt

SEQ ID NO: 119776 - DNA, 279 bp, Zea mays
  Clone ID: MRT4577_40719C.1
tcagaaccaactgcaaaaaatggaggaagtgtgggtcatctctcgtgtgctaaagatatcacaacctagctattacctaccagtttcttatttgatacgatgggaaggtttctcgagccagtacgatagttggcatacggaaggagaattagaagaaatggaagtcgaaaacctacatctcttgtacgtcagacctaagaaacccgcaaaaccacccaaagaagggccgcctaaatcgaaaggaaccaccacgtcgacgactgtaccttcgatgcctca

SEQ ID NO: 119777 - DNA, 455 bp, Zea mays
  unsure (1)..(455): unsure at all n locations
  Clone ID: MRT4577_4071C.1
tttcccccacttcacccncctcnncnccatnnctaanctcnccctnncnctnncnctcctcctcctnctnnccntnncnncntcctcttcttttctcncnnnacccacctnnatcggggggggggggggcttttttttgggggccgccnnnannagtgccacaggacggtggccaactgcctcgccgaggactccgatcaggagggccttgacctggcctttttttccgccgcgcgctctacggcggcggggacatcacctacccctccctgcggcggggcggggtgccctgctcccgcctcttttcctgctactacaactgccgcccgggcggtcaggccaacccctaccaccggggctgctcccccctcaccctctgccgcggttgaggcggcccctgatccccccgactgccgcggttaggtctgcttggtccaggtcccctccctttcccc

SEQ ID NO: 119778 - DNA, 798 bp, Zea mays
  Clone ID: MRT4577_40720C.1
ggccttatcttctatgcacatgtctagcctcgatcttcaagccgccgcccgcacgagctcttctccatcccatccccatcttcctctagcgccggccgccctcctgcttctcgccatggcgcgcgctcctcctctctcccccaaccgagcgttcctccatggtcgctcgccctggccgcgacgcttctctactggccaacatcctccccagccatggagcgcccagtgacgcgccctgctccctggcgccgcaggctcgccggcgtttctccctgctccagttcggccctgccttcctgctccagcgcgtgcagtcgtgccctctgctcggatttcacttggccacaccccctggtgattgaggtcgccgagtccctttccccagctcgagttcccatctccctatgctcgatctccctctacttctccaataactccggctgtgctgtctgccgcgtcgagctcggggccggctcgcagtccttcagttagtgttcggcccagctcaaatcttccttcaactcgtcatcccctttccctgctgtggtggctggccgctgctgctaggcttcgctgatgcgcgcgatttgctggccaagtcccttcaccggtggtctcctcgccgtgtgcgctgaccgccttgtgtgctcggccgcgggcgccgtcgagccatcgaatcctgccctccccaactcgacattccttacataggccgtcatcgctcgtattcctccctgtgcatgcgatcttcactgttttggtttgtcgtcgcgcaagctcctctgttgggctcgccag

SEQ ID NO: 119779 - DNA, 685 bp, Zea mays
  Clone ID: MRT4577_40721C.1
tactaaccagtgctatttctcattttagtaatagtactaacgagtactattactaacgagtcatcacctacgttcatctagctatatatcacagatttgttattggcctaaccacctctgtggtacttattttgcattcagtaaagctctagtaaaactggtcttgttctttgccgcatgtcgtaacatgtaagcattgaaatacatgccatgattaatccttttctaacgtttattaattagttcagtgatgaatggtcaaactgtgtgcacatgactggttgattcccagtattttcctttgacaacttttcctcgagtagggcgatgtagtaagcgaacctgtgttacttgcaaccggagtatgcttgaaacaattgacaggtgtgctgtgctgggcgtccattgttgtgctctgctccactcaccaaataataaacgataaaagaaatacaatctgctcatgcgcaaacaatggtgggcttacttcattatacatagattagtgctctactactgcaaagcacctaggctcgcgctcaatccatagtggttgaacatgacgcgagatattttccacctcatcctggagcgcacacactgccagatgcatcttgacgtgctgccgtcctcaagtgacacagcagccccaacaaactgttggcgtctaaccaaagaacaagca

SEQ ID NO: 119780 - DNA, 267 bp, Zea mays
  unsure (1)..(267): unsure at all n locations
  Clone ID: MRT4577_40722C.1
gtgttctgctatactgcagcagcaaccaaccactgctgcattcggattatgcactgacatgcgggagcgccaatgagtggctgcgatggcctggtcggcacattagcgatggtcctccgngccgccgtaggaacggccgcaaccgatgctgccgaagccgaccagatcgctaatctacctgaacagccggcagctatacttttcatacactccgactacggcaacgcagacccagcgtccggtcggtgcctcttctactggttaatc

SEQ ID NO: 119781 - DNA, 383 bp, Zea mays
  Clone ID: MRT4577_40723C.1
agaaaagatgggccagaattggatttcccaccccaccttaattagtggggtttttcgttggttccggccggttccaaaaaaggaggggggtagcttttttccacctcctcaaaaacctggattggtacctcctaaattattgcgagatggaaattttttaaattttttttaggaaaaatgtttgttagcttgcttgcccccttcaacaaaccgaaacaaatgtgctttttgtttatgggattttttttttaaaaaaaaagcgagcgaaagaacttttgtttggacccttaggaattctcggacgtctccttgtaaaggtcgtaggcccggaccacttccccccatttggggagcggctccttccggaggaaggcaatggggtt

SEQ ID NO: 119782 - DNA, 209 bp, Zea mays
  Clone ID: MRT4577_40724C.1
tttttatttctcatatttttcattattaaaaacacaaaaaaagacgttctttttgaagggactttaaaagcctcccccctatccatctatcataccaataaacatcatcaaaactttaacatcgaacaccacccatgctcgcttgcaattaaaatgatcacggaatacacaaagctcttctactgaatagcatttaattccactctttt

SEQ ID NO: 119783 - DNA, 223 bp, Zea mays
  Clone ID: MRT4577_40725C.1
ttttggttttttttaattttttttcggcttgaaacacagggggattattcacaatacattagcccatattcatgtaggaaaacaaacaccgcacaacgcgatggtacagcactaaacaactccggggaaaagcaacactgttattaactgcacaaacatctgattacaaccaagggggatgacatgcttcgagagcctaagcctttgcttaaaacaaatttgg

SEQ ID NO: 119784 - DNA, 329 bp, Zea mays
  Clone ID: MRT4577_40726C.1
ggttggggtaaaaacaattattggtcaaaatacttcactctctttaaaaaaaaatattatatgcataaaacactccctcatttaataatccccacccatgaccaatttccccattaaaatctaaaaccaaaaccaccttctattacttctctctgatagaaaaatacacataggacatcggcccacattacgatataataaaaatcgaaatatctgttccaattcctgcgtaaaaaaaatggaaccccaggaaccaactcataagctggtccttttacatctccctagacacttaatctctcaaccttcttaaaaaaaaaaaacccccc

SEQ ID NO: 119785 - DNA, 345 bp, Zea mays
  Clone ID: MRT4577_40727C.1
gttgtaattcaataataaagttttttggatgatgtatgtggccaaccagaaataaggggttacatttccagattttaaaaaaaaaaaaaaataattaaactaaaaaataaatataaataaaaaaaaaaaaaaaaaaatataaaataaaaaaataaaaaaactaatataaataaaaataaaaaaaaacataaataaaataaaatgggagcttctttatgagaaaacaaattttttcaatcatatatgcttcaacaagcttttttatcaggcaccataaatttatcgcccttgctgttttaacaatagccatccctagaaaaaccgctggcattgctacatataatc

SEQ ID NO: 119786 - DNA, 421 bp, Zea mays
  unsure (1)..(421): unsure at all n locations
  Clone ID: MRT4577_40728C.1
cttccccgtattggagtccgcatcgctcgctagtcacctaccggctaccgcaccgccaccgccaccgccgcgcccgtctcgcacgcgcagcactggacgcgcgcgatcccttgcgtccggatctccatggccaccatggcctccacggcgttcgccgccgtcaagttcttccccgcgcacctcgactcctccccgcgcatcgcgccccgccgcgccgcgcccaccgcgagcctctccttctccccgctctccgccagcccgtcgtccctgctccgcctccggaccccctgcccgtccggcccggggggcaggctgcctccgccgccgccgccgccgccgcgatcgtacggcggcggcggcggatctggtggcgacgccgcgaactccggcggnggccgccgcggcgggggcatcctcgggc

SEQ ID NO: 119787 - DNA, 145 bp, Zea mays
  Clone ID: MRT4577_40729C.1
attcggttcgagccgacctttgttcagccagttctattttggagaacacaaaggtcaccttggcgggggggcttcttatgcggcagggggggagcaaccgcctactggcccgctggcaactgaagactgacgttatccactccgg

SEQ ID NO: 119788 - DNA, 176 bp, Zea mays
  Clone ID: MRT4577_4072C.1
gttctagatccttcgcggccgtcccggccatcctcggcctcgcccctccggaagcacgcaacagtcgccgtccatcccgcacattgtgtgctaacctccacgccaggcacgaccagccagtcgacgacaaccagcgagtggaggggaggcaggtcacgacggcagctagatccttc

SEQ ID NO: 119789 - DNA, 146 bp, Zea mays
  Clone ID: MRT4577_40730C.1
gccactcgtccgaatacgcttcagtctgcatgccaggggcaacaataactgagtagggggcaagcacgacctaatctccttcacacgtaaccccctacgaactacaggctccactccaccgcttccagctgacatagtgcagatat

SEQ ID NO: 119790 - DNA, 160 bp, Zea mays
  Clone ID: MRT4577_40731C.1
cctagccgcaagagaggagcgttcgcctgtcctccccgccctccgtctcccgtcgtctcgccccccgcgcttcgtctgccgccccttttcggagaaatgtttgagcatctctttgaggacacctttcttcttcactaagactcgaccctgttggctatta

SEQ ID NO: 119791 - DNA, 252 bp, Zea mays
  Clone ID: MRT4577_40732C.1
ctacgcgtccgcaaattttaatttatctttacaaatatatatatgcgtgtggtttgtatttgtaaagattcgttcggattttcattcccaccgggaagatttgtaactgtcctcctccctccttgtaagttgctccctgtaactcttcctgaattcatggcgtgtcgttgagcaatcaccacttcctccctgtgaatgcccacagcgtgtcttggtgaaagcatgtatgtatgaatattggagtatatgtta

SEQ ID NO: 119792 - DNA, 1589 bp, Zea mays
  Clone ID: MRT4577_40733C.1
cattgggtacctcgaggccggccggaaaaaaaaaaaaaaaaaaaaaaaaaaaaaaaaaaaaaaaaaagaaaacctcgaggccggccgggatcgctccctttcccatttctcccctcgattctccgggctgatccggtcgctgtccgggcctgttcgattggaggagaatcgcctggtttgaaggaaaggcttgggaagaaaggtaattatcactgtatctgacatggatgagcacatgggaagacgaacagtcggcggcctcctcttcaccaagggaggatccatccttctcttcagagaagacggctcgcgccccaaggccaagaactgctgcacgcgccatggctgtagcggtcagcatcctgctgacagagccaagggcaaggaggtgcacagggcagcagcggtgggcagtgaatcgacaccggctacccctcggagatcacaagcttttaggaagcccaacagaaggcctccacatgaaggcagtgcctcaggcagcatcgtcagggatgtaggaggcccttgtagcgaaaccggcagcgggtcaagagatgctcctgggcgtgatctgcttgctcggcttaaggagagggtcaacacatcaaggaaacgatcgttgaacagggagaacagcccgcagtcgccgagtggactcagtgtctgtgccagttccccgagcaacagtcggtcagtctcaaggccgtcgcaccggacagcttcgaggataagagaagctgacgaaggcgcgaatgcaggagctgacagtgtagtgcgcagaaatgctgctaggaggggttcagagaggagtgacgatgacttgctgctggtcgagcaggtaacaagaaaccagcgccttctgaagggtttctctctggattcatggctagatacagaagcgatcttcagggagagctttcgtccctggacgacagcatggaggatccaaatggatacttgcgctttgatgtgggcgggattgaagagctcgagaactatttcatattcaatgatcggcatagaggaatgaggatggatatcgacggcatgtcctacgaagagttgcttgctttgggggagcgaattggtaccgtaaacacaggtctttcagacgacgcgttatccgcgtgcctgaacaggaggctctacatgcccacagcttcaggttctcatgaagattgtgaaagaaaatgcagcgtatgccaggaggagtatttagcaggcgaggaggtgggcgagatggcatgtaaacactactaccacctttcctgcatagatcactggcttcggcagaagaactggtgtcctatctgcaaatctgtcgccctgaaaatcaactagcaacgtgtttcatgtttcttcataaatgaagtgtatagattcttcatctcctgtattccttccccaccccactccttttcccttttggaattttttttctttctttctttttcttttactcaaagcactcattttttattatcaatttaaatcagaaaagaaaatcttgtgttgggttagggcttgctgcgagccttactcgtgttggcccatggcccagtaaaaaaaaaaaaaaaaaaaaagcggcc

SEQ ID NO: 119793 - DNA, 692 bp, Zea mays
  unsure (1)..(692): unsure at all n locations
  Clone ID: MRT4577_40734C.1
aattcggcacgaggcacctgccaaaataaatccatgcgctctccagctcggtgctgcaatcccatcaaaagctagggtttcacgcctctcccgacttcacagttcacattcctctcctccccttcccacctccccaactcggccgccgtagacgcggtggcgcacgaactgccctagatttgagcgagccaccctgcgaatcttcacctgacgcacaaagtctgtcagagacagtgaagaattcgaacacgatcttaaacatcgttgattaagaccacacacaaacacatctacctggcttcccccctatcagttgtttttgtgtgtttttttttgctgtttcggacgattcataagaaccgacctgcaaggcttgcagatctaccttgagaaccagggcccttgttttggacgtccagaacgaacccttgaccctgcggatctgcttgatccgttttggatctgcttgtttttttgctggatctggagagaatgttcaagtcgatggtttattacgtgaacacctcaatcggagaggtggaggtgtggcccaagggcgaggcgagcgcgggcctgnaccatggcgcgtgggcgcgagaaatccgcgttgaacgcatttccccgcccagcgagcggtgccctccgctggccgtcatgcacaccgtggccgtcggcgcccgatgcctcgtcat

SEQ ID NO: 119794 - DNA, 611 bp, Zea mays
  Clone ID: MRT4577_40735C.1
ggccgcttttttttttttttttttctggttaaacatgtattgtaagctactacgtagtgtttacatggcgtgcacatgaacaatgaccatagaaataactgctgaaatgagatcagtaagacaaaaggatgacacttcgccgcgaaagaaaactgaacacttaacatacactagagacatcagacatgcattacaaaatcgctgtccggagggcaattacaagaggatatcaggatatgcacatgcctactatacaaagctagctattactcattttacaacaaacagcagctagaagatccgagtatgtacatttgcaggttttgcttctctgctcgccaggtacttggtacacaagggaactgctggtcactggttagagctaatgtaacggaactttcagcgtcaatgtacaactcatgtactggactcttccttggtttttatgttctccgagggctccaatcaaactcttggtatccattggtcgctctccatatttcggtcggcttacattggtttggttctttgctttttttgagctcggatttgcgccgaggtagcttggtaattgctcagtgacctgccaactgcactggtatctcggcttg

SEQ ID NO: 119795 - DNA, 371 bp, Zea mays
  Clone ID: MRT4577_40736C.1
aggtcatgtagagtatttctgtcactatattgtgtgttgcagctcgagaactatttcatattcaatgatcggcatagaggaatgaggatggatatcgacggcatgtcctacgaagtatgtctggatctctaccccttactctgacgacgccattttctgatttccttcgttacttcatcctcctctctctctctctctctctctctctctctctctctccagtcagcaagcagttcttgtttgtcatgcttttgtaagtgtagttatataatttgtgacactctgctttaaaggagttgcttgctttgggggagcgaattggtaccgtaaacacaggtctttcagacgacgcgttatccgcgtgcctgaac

SEQ ID NO: 119796 - DNA, 2695 bp, Zea mays
  Clone ID: MRT4577_40737C.1
gattaaacatgtattgtaagctactacgtagtgtttacatggcgtgcacatgaacaatgaccatagaaataactgctgaaatgagatcagtaagacaaaaggatgacactccttcgcgaagaaaactgaacacttgacatacacatgcattgcaaaatcgctgtccggagggcaactacaagaggatatcaggatatgcacaggcctactatacaaagctagctattactcattttacaacaaacagcagctacaagatccgcgtatgtacagctgcaggttttcctccactgctcgccaggtatttggtacacaagggaactgctggtcactggttagagctaatgtaacggaactttcagcgtcaatgtacaactcctgtactggactcttccttggtttttatgttctccgaaggctccaatcaaactcttgttatcgattgttcgctctccatatttcgttcggcttacattgttttgtttctttgctttttttgagctcggatttgcgccgagttagcttgttaattgctcagtgacctgccaactgcactgttatctcgtcttggctttccttctcttatgatgattctggctgctatacttcctagtcccatcaaggtaggcggtaaatcgtgcaccagctgggacatgagatatgcgccggaggaacacttgaatgtgattgtaaatgctgagtcggtgcctattacatgttgaaaagaaggcaacaaaaccatacaaaatgctccgtagtgcacggaaaatctgatacaaaagatctttccacagtgaggcccagatgttattatcagatgtaagcacaggtgatctgggaacagatccaacttgatataaggcacttagtgttgaccagctcccccttagaaaattgataatatcaacaaaaaggtccactacaaaacttgatagcccaatgactagtcggaaaggtgcagctagtatctctccgaggagccaaattatagggtacagaattgaattcacaatgctaaccatagtactgaagacaaaccaaaatggccagacaatcatctccactgtatcaataactacactccaagacacttctacagataacatgacaactgaactcagatatcctactgtctcagcacaaaggttccaaattggcatcgtaagttcaaaaacctccagaattggtcccgcaattggctttgtcaaaacactaagagcagacttagcagcacccacaatcttaagggaccatgtaaaagcctgctgaaaattatgcaggaaaagcatagttccaagatacttaagtcttgatatcatttcccatgtttctatccaatcaaataaagggccaaacaatcttgaggcagttgccttcagcatgggcacgttcttgtagaggtcataaaatcctataagaacagtgattaatgacatcaagacatacaatgctctggcaagagggcacatccatggccgatatatcttgcaaaacaccggatatgactgaagaaatataacccacgatggaaggccatactcaagtagcgtcaacagtctgacgtcagatagtatgacttctttcagtccgaatggaaggtcatgatcatcaaagcggaagcagatcagtacatccttatacgtgctaggctccaatagcggcttagcattctcattatcactgtcacatgatgaacacgaagatgacgaatgttttggcgaggccacaatttctgtgtatgattcttcagtcgaactacttccatcatctgattttgttatttttcttctcttgtaaggtccagagcaaggaggtgtagtgtaagatgagtctgtgaaacctgatgactctctgatgatttgaacatggctagaatcatcactatcacttggtaaattctcactatcccattcaggtgttaagaaatcattttgagcatcataaaatatatctccgttagaagagatgttggtcaaataatcctgtaggagctgacattcaaaaggatttccagagaaccaagaagtgatcaatgttgaagcttgtttgacactatcaaactcccatctcttcattattttagactccacaaccattgatgtatccgtctgaagttcattcaaataattgatgccacgcacatcagcccagtctacctcaaaaatgataaaaccatataaagtctgatgaagctccctgttcagtatgcgggcatccttcaacttatttacttgaagcttcttttcccgcatagcgtcgtcgatcaaggaataccatctggaagatttattctgtaaatggggagcagatactgagcttgttgagtacacaagcttttcatcagtttcatccctccttctcctagccctagagttggcgaaaggggaaaaccttgacttagtaaccatcaattgccatagatgagcaggttttgtatcctgatctagcaaccatgggcgattgtcgagcaatataaggaacttcttggtatgagggcacaaaaatattgtcagttctgcaagatatgactgtaaatctccgatttgcaagctggtgagcgggaagaaatgcctattctcgccggcccgcaccatctcgccgcagcagcctagctgagaaacggcaagttcttgcatcaaacggcagatcagacgctggagtcccccaaatccgggtggaaaccaggcccggccgg

SEQ ID NO: 119797 - DNA, 592 bp, Zea mays
  Clone ID: MRT4577_40738C.1
ccggccgggcatgtgtatgtgtcgaccaatttgcgcgggtagagcatctacctcaaggaattgcccttccctgtgcatgtctaaaaaaaaaaaaaaaaaaaaaaaaaaaaaaaaaaaaaaaaaaaaaaaaaaaaaaaaaaaaaaaaaaaaaaaaaaatcgccccctttcccatttctcccctcgattctccgggctgatccggtcgctgtccgggccggttcgatgggaggaaaatcgccgggtttgaaggaaaggcttgggaaaaaaggaaattatcacggtatcttacatggatgagcacatgggaagacgaacggtcgggggcctcctcttcaccaagggaggatccatccttctcttcaaaaaaaacagctcgcgccccaaggccaaaaactgctgcacgcgccatgggttgaagcggtcagaatcctgctgacagagccaagggcaaggaggggcacagggcagcagcggggggaagtgaatcgacaccggttacccctcggagatcacaagcttttaggaagcccaaaagaaggcctccacatgaaggaagtgcctcagggagcatcgtcagggatgtaggaggcc

SEQ ID NO: 119798 - DNA, 324 bp, Zea mays
  unsure (1)..(324): unsure at all n locations
  Clone ID: MRT4577_40739C.1
cgaggcaaccacacgggcgacncacccgggttcacgatcaccaacaccgtcattggcgggggggactactgcaggggcatgggggccagaaccatcaaggggaacatcaccggcgagacctgcggccctggccacgggagcagcatcggcagcctaaggcgggacaaggacgagaaggacgccacggacaacaacgtcaaagatggcactctgaagaagacgacgatcggcggccgcatcaaggcgtacgaggacgccgcctacgagctcaccggcggcaagatccactacgagaaaatcaagaaggaagactcagccaacccc

SEQ ID NO: 119799 - DNA, 349 bp, Zea mays
  unsure (1)..(349): unsure at all n locations
  Clone ID: MRT4577_4073C.1
ccgccgagnacaanagngannccccggggcacccacaccaaggagnncancaccaccagccccancaacgacnacaanggngaagaggnngncnncnacgcgacggggggggggggngcttttttttttttnaanagagnaccacaccaaccaaaagggggggggggggccacnagccccaacgganagccnannangncnggcacnnagggagaccgaagcnnnaagggcaagnnangcacnagagngacnacaacagggaagggaggccnnccaaggcaagaaagngcncgnngncggnngnganaacaccnnnccaaaanaaaggggcacgccnacanngggnggg

SEQ ID NO: 119800 - DNA, 264 bp, Zea mays
  Clone ID: MRT4577_40740C.1
aattcggcacgaggccaggtgatgctgggagtgcttgtgaatagtctagctggatttctgtttcttcgatgcttcagcagttctttgttcaagaatgcaagaaacaggttacacagacgtcgcatgattttgatgctcttacgattttgtcagtgaggtcatactgaagattaatgcaatgctataagctctggatactatgcaaaagagtacacccggatagggtgtgattaatcttgactacggacttgctggtgttttatt

SEQ ID NO: 119801 - DNA, 622 bp, Zea mays
  Clone ID: MRT4577_40741C.1
accccgggttgacccagcgtttctgttgacattcctgtttacttgttttggacttttattatcctccctttactttctctcatgttatacccgtgcaattgttcttattctaccccgccttacagcgatgtcggcgtcaggatccggagcgcccaacgcgccatctggttcctccaagaaggctttcccttccgtggacctggagggcaatgacctgcctccttcaccggctccttcgagtcctcatggaggtcgacggtacaacattgccactgagttggtcttcactgagggaaatgaccagtataatgcgagcagtgtgccgatctaccaaagcgccactttcaaacagacctccggcggcggaggtggagagtatgactatacacggtccggtaacccgacccgtacccacctcgagcgacacctagcaaagatcatgtcagcgcagcgtgccttagtagtttcatctggaatggctgccctggatgtaattacccgattgctacgacctggtgatgaagttgtggctggggacgatatatacggcggtaccaatcgtctactgaagtacctctcagacaatggtggaatcaaagtacaccacgtcgacacaacaaca

SEQ ID NO: 119802 - DNA, 508 bp, Zea mays
  Clone ID: MRT4577_40742C.1
ggattcccgggctgtaatcatgctcaatactgatcatcacaatgtaagggttaagaagaagatgactgaggaagactttattaggaacaatcgccgtataaatggaggaaatgatctgccaagagaatttttgtcagagctttattattctatttgccggaatgagatcagaactattcctgagcaaggagctgggtgttctgagatgtctttcagtcgctgggttgatctagtgtggaggtcaaagagaacatcattgtacattgcttgtgactcctacccttttcttgatcatgacatgttttcccttatggccggaccaacagttgctgccgtgtctgtggtttttgacaatgttgagcatgaagaggttcttacaggatgcattgatggttttctatcggtggcgaaactggctgcattctatcatcttgatgatgttctgaatgatcttgttgtggcactatctaaattcactactttgttgaacacttcctacattgatgat

SEQ ID NO: 119803 - DNA, 337 bp, Zea mays
  Clone ID: MRT4577_40743C.1
gtgttataaaaaatccgatgctttactcccaaaatttatacggcactgcaggataatagcaagcatatagcatatataggctatggcctgatggatacatggtaaagtgtactggagcatattaggagaactcgtggagagcgggccacaacggtgacaccctgccttaccacaccaactaaaggtagtccacgcttccggtgataacgaggtaatcgtgactaaccataaggaaccctccctggaaaatgaagaaaccgtgaatgagcgagtcaccaccgcccagatgaagatggttaaaaggcgtagtcagggcaatgatgggcagattgttcaa

SEQ ID NO: 119804 - DNA, 525 bp, Zea mays
  Clone ID: MRT4577_40744C.1
gagatttaaaaaaaaaaaaaaaaaaaaaaaaaaaaaaaaaaaaaaaaaaaaaaaaaaaaaaaaaaaaaaaaaaaaaaaaaaaaaaaaaaaaaaaaaaaaaaaaaaaaaaaaaaaaaaaaaaaaaaaaaaaataaaaaaaaaaataaaaaaaaataaaaaaaaaattttgtccttttttctgggggggcccttttaaacttaaattttgttttaattaaaattaactggccggggtttaaaaaattttttaaagaggaaaaaccttggctttacccaatttaatttcctttaaacaccccccctttttaacactttgttaattaaaaaaaaggtccggacacaaacttttttcccattagttaaacatcctttttgcaaatgggcgcttttgaaaggggccattaaaggcggctttttaaaattttcccccacctaaacccattatttccacctttttaccgctttttatttggttttgttgcttttttttctcggggcttaccattatttttcccaggaattttt

SEQ ID NO: 119805 - DNA, 147 bp, Zea mays
  Clone ID: MRT4577_40745C.1
ggaaaacttagtggcttatatagattatcactacaaaacaataatcttacaggtaccattgaggaatggatcggaaagatgacaaatctacaatttttaacactacagtcaaacaacttcatagggaaaattccaccttcaattggc

SEQ ID NO: 119806 - DNA, 375 bp, Zea mays
  unsure (1)..(375): unsure at all n locations
  Clone ID: MRT4577_40746C.1
aggggcaagaccaggacaaggagggcanncccccggaccagcagcggcncancggggggggggggcagcncgaggacgggcgcacacnngccgacnacaacanccagaaggagagcacccnccaccnggggcnccgccccaggggaggcangcagancnncgncaagacccncacgggaaagacnancacccncgagggggagncnncngacaccancgacaacggcaaggccaaganccaggacaaggagggcancccnccagaccagcagcggcncannnnggccggcaagcagcncgaggacgggcgcacgcnggccgacnacaacanncagaaggagagcacccnccacnnggggcngcgncncaggggcg

SEQ ID NO: 119807 - DNA, 976 bp, Zea mays
  Clone ID: MRT4577_40747C.1
cattgtgaccctcgatgccggggttcagggttccgatttccgccccaccatccgccgccgccgacgatgcttcgtcgttgcatccttcgcagcccttgcactacgtactatcgtagccctcttttctttatagcttgtgttgtctattttgatttggtaattcaggccccgtagaatgttttcttttgttttatgcatgcaaaggtcgatttggtgataggagcggtgatgattttgtggactagagtttccgatactaccacggtagtatttgacgaccaaacccttggctgtctgagctcctaaatcacagtcttcgaccacttcgctgtttatatatatacatgcgagatctgcggtctttattttcttctgcaatgcaatggtatgatgagattacgggtaatgaagaacaagtgagttttcgactagagtctctgatgctgctactttgttggcggtagttgaagaccaaacccttggctgtctgaactcaatctgagcatactacttgctggtttcatagtagttataaaaaatatcttttgctgcatgcgtccattaccaattccggaggattatttcgttcctcacggtataatggctcggacgcaacaagctattctcttgatgtgtggttatatcctgattggtggcgttcttatgccaatccgatcttggaaaggccacatatattttttcatttgcaaaaatctgtaaacgttttttttcttagttacgtgatctaaatgatgtgaaactttgaaagggaaagcacccaatctgatcggttgtggtgtaccatgacactttcttctattgaataggaagatctgatagatccatgaaacttttttttgttgctgtgctctgcttagagatgttgatgatgattacacaagtaaaatacagtaatccctgtctgattccttcaaaagggtgctgattacgttattttgacacatttgtgtttatt

SEQ ID NO: 119808 - DNA, 524 bp, Zea mays
  Clone ID: MRT4577_40748C.1
cccacgcgtccgcccacgcgtccggttacagcaataaggaatttgtctcttcttccacctccagcctcataagcctgcggttaggggggcataaccccaaccggagaggacggccgacggctacgagctacgtagccgtggtccggcgagtcggggattccaggtccttgacaatgacccactggaaaaggcaaatgcatccattaggagcagaactctcatgaacaagcttgttctgcctttacttttggttgaacttgtgataaccaacccaaactgccaaaaaatctggtgttgctacatttgtatcaatctttacctgagcttgtgtttttgtaagcttatgcatgtacctccacatgtatagatatgctacctacattttctttctgtggtcatatgatatgttgacaaggtcacagatatactctcagtatatgatgacgcttctatgaataaaaaaaaaacaaaatcatcaaaaaggaaaagctgcagggggatgccaactccacagtacacatact

SEQ ID NO: 119809 - DNA, 262 bp, Zea mays
  Clone ID: MRT4577_40749C.1
ttatatttacaggccccgctggaacacgtgtcgtgtggcatggaacctataccattgcatatgtacagggacaaatgacacccacaagacttggagccgcccggagacaagaaacgagaatggctaccactatacatgatttgcgcacagagaatcgcgccatctagcacctaatactcttggaggacaggccatggcacatgtgatccatacttcaatgtcgcgcttaactcacatttggaacaagacttgacaatactgt

SEQ ID NO: 119810 - DNA, 159 bp, Zea mays
  Clone ID: MRT4577_4074C.1
atggggaagcctgtcccatcactcctcgtgctcctcctcagccgagtgaccgcacttgtacccaccataaccggaatgggagaccacgtctcaggtcgtgtgaggggatatgtctgcgggcaggttcaatcaggatttagtaatcattatgctaagtga

SEQ ID NO: 119811 - DNA, 607 bp, Zea mays
  Clone ID: MRT4577_40750C.1
ggcagggatattatggaggcaacagacgcatgagagtgaggtatttatctgagggcgattgaagtcaccagcttaacagtggaaagaccttaagccagagaactccaggttcaagaaccaccacctgcaaacttggcaaatttggacaaatgtctctctgagtttcattgtcttcatccacaaataaagcaagattacttcgcctacagaattgcgaaattatgaccagaccatgagggtatgaaggatgaggaaaagggagcagtcatggagctgttttggagggagtcataattccttagacctctgacaactggaactctcaatctgccagtgaaagctgacatgagcccaataaggatggtcttttctattcaaagataggtccgtactatttccaatttagttttaagaatcaacttaaaatgttgttaactatacatatatttcacttttgaaagaaaatattagcttgtcatcaaacaggataaaccaagagacatcagtctttttgactgatatgaatcacatttagctaaatacaccagttagcaatatctgtccttaagattgacagtcttaaatataacactttaataaagctctt

SEQ ID NO: 119812 - DNA, 174 bp, Zea mays
  unsure (1)..(174): unsure at all n locations
  Clone ID: MRT4577_40751C.1
cnaganantactncgctacgaatgtggccngcntagcccacaggataatnnccggataaggnncatgcaatgcacgcccaggtggcngtgctnctcgccgccgggntcctccgccaccgtggncgcctcanccctcgttgcaccatcgcnagatctccntgcngtcngtntttc

SEQ ID NO: 119813 - DNA, 645 bp, Zea mays
  Clone ID: MRT4577_40752C.1
agtgttcttgctttctttcatcgtctgcaacttcatctagagtcataccgtgatagctaaataaatttgtcacggtattcactaactgacatattgccctgttttagtgatagaaattccttcttaatcttcattagtccagcaggaatgcggtaatttttgaactgtgtagtgaattctgcccaggtgatagtattagcagcatcataggcagcagtgtaagaatcccaccaatcagcagcgggtccagtaagatgaccagaagcgtagagcaccttctcctgtctgagcattgggcgatattcaacatcttcttcactgattttaaccaatcgtcagcctgtaacggaactggagagctggcgaaggtgcttgtggctcatgaactcccggtgcttgtcccggggtggaagtggtggtggaggcattggtgcttgttgttgtcgcaccattcactcttgtctcatttcctcccacatctcttgcctctcctggcgcatctcttgacgttcctgctgcgtttgagcttgcatatccgtcatagtatttgccatttgttgcagcatctgcatctgggctgcaaccactgaataagtctcggtccagtggatttgagcatttcgaacgactcctagctggattgtt

SEQ ID NO: 119814 - DNA, 752 bp, Zea mays
  unsure (1)..(752): unsure at all n locations
  Clone ID: MRT4577_40753C.1
cattgggtacctcgaggccggccgggaaccctttgcttcccttgattgtacagttccgcccacggtcaaccagcaatcatgtctttcggaaaaatctacagctacagcggtaacccgcgcaccacctccctccttgcggtcgcaaaggagaacggcctcgacatcgagttcgtcgacaccgagcccgcaaagggcgtctctaccgagtacctgaagctcaacaagctcggcaaggtccccaccttcgagggcgccgacggcttcgtcctctctgagaccattgccatcgctgtctacctcgcctcccagaacgagaagaccagcctgctcggcaagaccaagcaggactacgccaccatcctgcgctggatgtccttcgccaacactgaggtcctcactcccctcggtggctggttccgccccatcgtcggccgtgacccctacaacaagaagaacgtcgatgactcacagaaggccgccctcaaggccgtccacgtcctcgaggagcacctccttacccacacctacctcgtcggtgagcgcctgactcttgccgacatcttcgccgccagcatcgttgcccgcggcttccagtacttcttcgacaagaagtggaggtccgagaaccccaacgtcactcgctggtacgagaccgtctacaacacccccagctactccgctgttgctnccaagcttgagttcatcgaggagggcatcaagaacgttgccccanagaaggagcaggcccccaa

SEQ ID NO: 119815 - DNA, 285 bp, Zea mays
  Clone ID: MRT4577_40754C.1
ccccaagaaaacaaggccggcaaaattttggaatgttttttccccccagccccagaaagagcaaaggggggggatgttaacaggtttttttttttccctacccgggggtccccccctgcaaatttggggaaaaaaaagggtccccccggggggctctaatcaaagggggggacaaaccccctccaaacctggaactgaaaagggggggtggttggatctgggcgaccaccttctattggccataacgggccgggcctgtttttccggggaaagagcttggcccgg

SEQ ID NO: 119816 - DNA, 151 bp, Zea mays
  Clone ID: MRT4577_40755C.1
ccgacgcgttttcgtcgaagtaggaagcacgagcagtatatggcacggagggccagcgccccacactccttttgcatagccttcgcgctccattcccatctcctgggctctagagagatgcgccccagcttctattgtgagcaatagctat

SEQ ID NO: 119817 - DNA, 743 bp, Zea mays
  Clone ID: MRT4577_40756C.1
cattgggtacctcgaggccggccgggctcttcgagcacttcctccaccctctcagcccgtcagtggcaggaactctgtcgtctgctctcagcctctcctccggagtccgggccgccgctagagaaagagaagagaaggctgctcttccgtccgcgcgcgttctgctgcgcgcatgagcgggcgaggcgggcctttctgccgcgcccgcgagcgagctgctgctgcaaccggcatgggcgcgcgggtagccaccggacgacgagccatccggcctccttttgccttccaccgtgccagccagcgttatcatgctgccagccattgccgcctgctgcgagagatcaaagcaccagaggggggaatatatcggtctcggaatccgtttttcccttggctcctggcgctgcatgcatgcatgcagattgcagagagtggtgtggcgtggctggctggcctagatattagttgccatgctgcttgtgctagcttgcatgtgcgtgcatggatatcagcgctcgtccgcatagtacatatgatcatcggtcacattttataatgggtatatgattggcaaatagtgctaagcacgtcgcacgcagtggcagtgctggtgctgttcctgcggcttctgctgctgcatgcacgcatagtatgcgcttgcaggctgtgtgtgcagtcggccgcagctcagctagcagccaggcagaagatagtgtgctgccagcacacacgtacccgagcga

SEQ ID NO: 119818 - DNA, 769 bp, Zea mays
  Clone ID: MRT4577_40757C.1
gtctctcttcctattctgctcttaatacgttacaactacaaaagcaccactaaattcattttttccagaccttttaccgatttcttgatggaagtgggccagaaggagtatgactatgtctttaaggtcgtcgttattggtgatagtggagttggaaagtcacagttgttgatgggctttgcaagaaatcacaacttggagtccaagtcaaccattggtgttgagttcgcaactcgcagcattcgcttcgaagataaggtcgttaaggctcagatttgggacaccgccggccaggaaagatatcgtgcaatcacgagtgcctactatcgaggagctgttggtgcattgctggtttatgacgtgactcgtcatgtgacttttgagaatgtggaaaggtggttgaaggagctcagagatcatactgactcaaacattgtcataatgcttgtggggaataaggcagatctgcgtcacctacgggctgttgccactgaggatgccaaagcatttgctgagatggagagtacttttttcatgggaaacatccgctatggagagactagtgctctgaaggaggccttcaagaatgttttgactgacatttatcgtattgcctcacagaaaaatttgtcagccaacgctgcccaaacccatctgcaaggtcagggaaaggtggtgcaaaatgatgatgtgcaggagcctcaggggaagagcaagcgtagctgctgttcaaattagtctttgaaagtgcagagctaagggatattaa

SEQ ID NO: 119819 - DNA, 1097 bp, Zea mays
  Clone ID: MRT4577_40758C.1
ggaaaaactgcatgccaaacgaggtgacatttgacatgctaatcatattcttttgtcgagtaggttcctacgggtgcaatccagataccattagctataccacggtcctaaagggctggtgtcatgctgagcgatggaatgatgccaacgaacttttgtaagagatggcatgtaacaattactaccctccaaacgaggtaacattcaatacatttatctgcatcttgtgccaaaggggttgatcgagcaagctattatggttactgagaaaatgtccgagcatggctatatagtgggtgttgtcacatacaatgctcttgtaaatggattctgtgagcaaggtcatattgacagtgccctagaactgtttcgcagcatgctctgcaaacccaataccatcacacactactttgctgacaggcttgtgcaatgctaaatagttagatgctgctgcagatctcgtagctgaaatgcttcgtaggtattaccctccgagtgactttcaatatgatgtacttgcgagttttttctgccaaaaaggatttcttgagcaagcatttgagctcgttgagcagatgatggagcatggtcgcaccccctaacctgatcagatataatacatcacttgatgggattaccaagggttgtagttcagaagataccttggagttgttgcatggcttggtcatcaagggagtatcgccagatgtcaacattttcttcaatcatcggtatcctctcaaaagaagatagagtggaagaggtcattcaaatgttatctctcaaaagaagatagagtcgaagaggtcattcaaatgtttcacgtagtgcaagatattggaatgagacacaaagttgtggtgtataacaggatactacatggtctctatagaagatgtgaaatagataatgctatcaacttttttcctatatggtattcaatggatgcatgcccaatgaatcaacctatattatacttattgaaggccttgatcatgagggtttgttgaaggaggcccaagatctactgagcgtgttgtgttcaagaggagttgtaagcaaagacttaatagaagagtaacactaaggttgacgag

SEQ ID NO: 119820 - DNA, 1192 bp, Zea mays
  unsure (1)..(1192): unsure at all n locations
  Clone ID: MRT4577_40759C.1
gttctttttgccaatagcggnatagtacgactcgattctcaaatacaggaatggagccactctattctatttgactctccaactaaacgcacccatacggttgatgctgatttcttcacatcgcatgctcatttttttctctgtcccgcatagtgaggtagacaagttcgccatgctattttttcttatttttcgcgcaacaaggcagctaggtccgatgcacgtggcacaagtttttcctacgccgttggatcaccactctccacaggtccaccaccccattgtcttctgcccttgaccttgccgctagctagatccgacaagagcatgcttgctcttccacccacgaccccaccaccaagtcagctctaacgtgtcgccggtcaaccaccaaaactagatttaaaattgagctgctccccaaatattaagaactactggagaataaactattttttactcccgatagctatttagtaacttgctaaagatgaattttgggagctttagggaactattagagtttctcttatttcaagcaatgatcgtgcggtcagatttggaaagtagtaagggactagatgtgaatgatagactctcatcaatatcaaattaatgaattagtgatgcatagtgactaggttgtgagttaactagtgtttcacatataggttcagatgaaaatcgattgttcttcatgttgttttattttttaatgtagaaaatcgtgtgtatctttaaaaatccattgtaaatcataggaagattcaaaaaatgaaaaaaatgttttgttggacttcttatgagcaaatctacatagtatatacataatattgcatgttttagttttgagttttaattgtagatgtaaatctatgtgcttcaatcttaaattcatttgtgtagttgttttttctcatgttgatctgcttgtttattcaagctacgtactgaatgatcgagatatggtcgaaaattaacatttagtttatttatgtgtattgtgcaccaggtgtaatgaactagtgtttatttatggtaaaaaattaacgtttatgtttatttatggttagaacctgtaggcaagtcagttatttatgttaatttgtacctaatttcttgtcattaattttattaaaaaattgggtagttttgatgtatttttattcacaaaatagagaaattatttatc

SEQ ID NO: 119821 - DNA, 339 bp, Zea mays
  Clone ID: MRT4577_4075C.1
tgagccgtggcctggttctctatactctgctctgctctccctcgccggcgttcttttcctgtcccatcttgaagacgacggttcggtgcctggtttagctgtacacaaaaaaggcaccgccgcgtgggggcggtgctaatatgcttagccacgcccacgcgcggttgatctttaaccagctaagcgtgtaccaaatgacagttgtgtacctgtactgtctggtggagtgtgctgtgtatctggtctcgatcctatcgggctaagtatgaaaaaaaaagatgtttacgttctaaatggaaaatcatttttttcataataaaaagagacttaacggcgtgg

SEQ ID NO: 119822 - DNA, 346 bp, Zea mays
  unsure (1)..(346): unsure at all n locations
  Clone ID: MRT4577_40760C.1
caaccnagtataaaaacccccggaaaaggggtaaaaaccgggggaccggttaaaaacgtgggtcccgtcgaactaaatgggcaggcctcgccgacccacgcacgacccataagttcgacggccacgtggccccgtcgaacttaaggttaagaacgtgggtgccgacgaacttatgggaaaacatccgacggcccccgggaacttaaaaacccacgttcttaaccttaagcttgaaggcacccacgctgttaaccttaataacgggagggctgaggactgtactcatttaagtatgatcgaaatagctcgttggtgatattcgtgggtaaacccacacaattctgga

SEQ ID NO: 119823 - DNA, 362 bp, Zea mays
  Clone ID: MRT4577_40761C.1
acagcgccgtccatggaggtattaaaacagaatgtggggaaagagaggcggggtggatatattggtgtttgttggctgaagataataataacaagggggcaaagatgccatgcatagagagttggataatacatgctacatgcagtgccactgtaggctctaagcttcaaggggttcatgcatccaaataatcctatctcgatcggtgtaaaccgaagtgtcaccgctgggcatcttgaatcaggtcgaaattatacggtagcaaacacctgaactatctggcatggttacaatggaaggcttaagcttctgcagcgactgggctacatcaacaccattgcttatccaatttcatctatccc

SEQ ID NO: 119824 - DNA, 236 bp, Zea mays
  Clone ID: MRT4577_40762C.1
gtcagtgcagatcatgagaaagtagattgatgtcccagttatgctgacgattcacattttttcctcccaaaacaaccttaaaacctgacttaaaactagcttaatgagaaatctgaaaacaagcttaagaagaactgttcttgtgctataatacctacttggttaaaatacttggtcttggtcatacccctcgttcccctgggtgtattgcatggctatctgcactgtatacttgt

SEQ ID NO: 119825 - DNA, 768 bp, Zea mays
  Clone ID: MRT4577_40763C.1
atggtgtggcgcccggcgcggctgctcgcggcggcccccggcgtggctgctcgctcgcggcgcgaccccctcgcgttcggcgcggcccgacctccggcgtggcgcgcccgcggcctgcccgctcatggccatggcgcgcagtcggcccccggcgcggtgtggctcgcggctagcctgcctgcgctgcctgcgcagctagctcgcctgcggcatcgagcgccctacccatccccgcgcttgccatcaccgccgtttgacagagcagcgtctcgccgcgagattcgtcgtgccgctattgtcgtcgctgcacagcagcgtctacgtcgctctagtcgtcgccaagatgatgatgaggaggatggttatgattatgcttatggtaatggtaagtggtattcttttcgtttggaaagggttgcctttggtgcaatctatgctcaggaactgaaatcccgattggtacggggaggaaggatattggatgggatcacggggaaagagggaagagtccgccatcgttggtttggggaagaagcttctggcgggtgggatctagtcatcagtgaaacaagaggagagaagcaggctgaccaggggaaaaagacaactgatcaaaccaaggatggaggcaagaagagcttcgaggtaccgagtgtacgggagaaggtcaaggagaccagaaacccaaagccaggggtgaagaagaagacttgcaaagtcaaggttgatcgagttaagagttatggtgcatcaaggatcactacataa

SEQ ID NO: 119826 - DNA, 208 bp, Zea mays
  Clone ID: MRT4577_40764C.1
gacgagcgagggtgcgaggcgtgccacacgcgtacgtggtcaacgtcatgacgctcgccgtgcaacagcggaccgccggcgaggtgctgggcggcaggctgtgctggccggcgttgctcttgaaccgcgctgtggcgttgatagacgaggcgggcgtgagggccgagctcgcggcgttgtcgcgcgaccctcggatcgatacgtggag

SEQ ID NO: 119827 - DNA, 209 bp, Zea mays
  Clone ID: MRT4577_40765C.1
gggcggcaacataggatacatggggggtttaattcaaaacccagggcatcccacttcaggtcttcaggcttggcaagggaagatttttcgagaaaaccctggaaacaactggctttcgttttcggaccttgatttccacacctgccatgccccttaaaagcctggtgggtttgcttttcacaatcccggttaaccttctttggtttttg

SEQ ID NO: 119828 - DNA, 659 bp, Zea mays
  Clone ID: MRT4577_40766C.1
gggaccctcgaggccggccgggatgcctgttccctttctcaagtatagccgactactgttctctgctgcctgccctctggggagaaggcgtggctcatgtatcgccacatcaccaacgaaccataaccctacgccagccactggcctgatgttcctgacgccgagatcggtgtctacaatgatgtcgtgaagagtgaaggtgcatatgaaaacacctactgtgggaccctagtatcttgacacatcgagaatgtttcaatagtcgctctgaatgccgcccagtattgtcctgcgatctgtacgtgcccatgcatgttactctacacgactttcacattcgaagccaaaatcacaccttacatactcgtcgaatgaacaacacgccttcgaggagatgtacctagcaaaagacccgcaatagacatggagattgactgtgggagctcttcttatagaccctgtgaatactgcgcacattgcgcaattgctccattgctgtgcatatgctggactacaatagtttatatgtcagtgaaactatgacatccctcgaattcgagatttctgttctgcttgaaattatggaaatgataaatgatacctctgccactaacagccttgtgactaactgatgtgctagaaagaaggaagaattgctg

SEQ ID NO: 119829 - DNA, 466 bp, Zea mays
  Clone ID: MRT4577_40767C.1
gggggggaaattttttttttccaaaaaatcttttgaacccgggcggggtgggacaagctacatttattacaaatgccctcagggaccaatttggggggtaaccgaaacaactgggggggaaaatttacaacccccccagtaagggggtaccaaatttttctcgaaaaaaaaagggccacaaccggcttaaagcttctactggggatcaatcaagaaacgcgggggccttctttttggtcccgggggcccaggaggaacccggaaaaattgggggggggccaaaacgcgggaacggggtttcccttccccaagaatacccggagcgcgaggcccccaatttccctggttgggcgggggcccttgggaaaaaagaaactgggcggggggccccgaaaggggaacaaaacgaggaccggggtccaagtaacaaacattgggggcccgggaaccggaaacccgggggcca

SEQ ID NO: 119830 - DNA, 228 bp, Zea mays
  Clone ID: MRT4577_40768C.1
ccaagaccacaataatatcacctgtactcatttcagcggcagcgaagttaggcatcagtacgcggacacgctccatcagcgtcaggccacagccactatggcgaagctggcgaccgggtgcgagtgacgcgcatacagccctccgcgcacggtgcggggtccggcacggggtccgccaaccggggggagtacatcaaccgcgggcggtacatcccccccccccccccc

SEQ ID NO: 119831 - DNA, 652 bp, Zea mays
  Clone ID: MRT4577_40769C.1
cagcaatagacagactgagaggcgaaggcctcattcagttcaaacaaatcaatgtctccaatctcaaggcctgcagacttcacagcagctgttatgggcgttggtcctgccgtggccattcctgctgctgtgaagtctgcaggccttgagattggagacattgatttgtttgaactgaatgaggccttcgcctctcagtttgtctattgctgcaacaagttggggctggaccgttccaaagtaaatgtaaatggaggcgcgattgcccttggacaccctctgggtgcaacaggtgcccggtgtgtggctactcttctaaatgaaatgaagcgccggggcagagactgcagatttggtgttgtcaccatgtgtatcggatctggaatgggggcagcagctgtgttcgagcggggagacgcggtggatggactctccaacgtgagggacatccaggcacataattttctgtctaaggatgcgaagtagaggcgcagaaaaaacatccatccttgagcagcataagcttgctgcatttgtaatatattcgaaatccgtattttttttcttcacaaacactactctatatacgatgaataaaagggcgacaatacagtgtcatcttgtagagaaaaaaaaaaaaaaaaaagcggcc

SEQ ID NO: 119832 - DNA, 215 bp, Zea mays
  unsure (1)..(215): unsure at all n locations
  Clone ID: MRT4577_4076C.1
cgcgcgggcggnggagaagaaactnacgaggatgcccctaggaacggngagcgaaccgggagcagcccagcttgagaatcgggcggcctcgccggccgaattgtagtctggagaggcgtcctcagggacggaccgggcccaagttctctggaggggggggcctgnnatgttgttagccgcgngcgggctggaccctgtcgtaccacgaggcgccg

SEQ ID NO: 119833 - DNA, 268 bp, Zea mays
  Clone ID: MRT4577_40770C.1
ttaaccaaagaagacgacccatggcatacccaaactgccatgcgtgagaatagatagacagaaagaacaggaactcaaccaacacaagacacaacaagctgtatccggggaaggcatgggtgaccattgctgcactgacaccgggcccgaccaccattaccagccgacgcacactttatttaggccacgttaattttaggccgcaccggacacttttatgcgacaggtattgctagctacgtaccgggctatgttctgcacactctca

SEQ ID NO: 119834 - DNA, 360 bp, Zea mays
  Clone ID: MRT4577_40771C.1
gaagttagggtcatttttagggccggctcttaccattcttttaactccagaagatacagcctctcgacaactgttgaaaagggaaaatcagtccatgatggccacaaacatgcacgagctggaagtagattccgcgttgaggtgcaacaaccaaggctataaatatctggagtccacaacggtaccttatggaagcgctgacaggtgcacatgaggggcatgttatttaagtgaagccttcgcaccagggaacccggcctcctttgtaatgttgagcaccttcctcacctgttttgcaagctctatgatcgagagatgtctatggctaatgctgactaatgctttctccattgagaacag

SEQ ID NO: 119835 - DNA, 708 bp, Zea mays
  Clone ID: MRT4577_40772C.1
gctgttatgggcgttggtcctgccgtggccattcctgctgctgtgaagtctgcaggccttgagattggagacattgatttgtttgaactgaatgaggtctgtgtcgattgccttgatctacaccctcttctctcacctatttatccataacatctgattactgaatcatccatgcttaggccttcgcctctcagtttgtctattgctgcaacaagttggggctggaccgttccaaagtaatgtaaatggaggcgcgattgcccttggacaccctctgggtgcaacaggtgcccggtgtgtggctactcttctaaatgaaatgaagcgccggggcagagactgcagatttggtgttgtcaccatgtgtatcggatctggaatgggggcagcagctgtgttcgagcggggagacgcggtggatggactctccaacgtgagggacatccaggcacataattttctgtctaaggatgcgaagtagaggcgcagaaaaaacatccatccttgagcagcataagcctgctgcatttgtaatatattcgaaatccgtattttttttcttcacaaacactactctatatacgatgaataaaagggcgacaatacagtgtcaaaaaaaaaaaaaaaaaaaaaaaaagaaaaaaaaaaaaaaaaaagaaaaaaaaaaagcacaaacggaaaatacaataaaaagagggggccctggac

SEQ ID NO: 119836 - DNA, 381 bp, Zea mays
  unsure (1)..(381): unsure at all n locations
  Clone ID: MRT4577_40773C.1
cgcgggcggttcaaaaacgagagctaacccacctttttttcattttttaattacaatccatccggcaaattttgcagcatatgaattttttcggttctcacacaccaaaacaacaacaacgccaagaccaccagcgtcatatatgttacacgcaccactgctgacccataccctaccaccggatctaaaccaacaaccccacgccaaaaaaaaaattcaaccactaacccaaaagccacacaaatcgtaaacctagaccacaccctaaaccacatcctaatttccacaacataccttctgtacagcggggggggccaaaaatcacntacacacaccaagaagactagatgctagcaaaccttgctgcatactctcaccaac

SEQ ID NO: 119837 - DNA, 448 bp, Zea mays
  Clone ID: MRT4577_40774C.1
tggttgccgtagacccctgctgcattctcagccgccgccaagcccttcccgttctccgcacccgctgcgtgagaagacgagctggccgggaagggcgacggcccggctatccgcctcgatctcggtacgacgtactcttgcgctggtgtgtgtcagcaccaccgcgtccagatcattggcagcgaccagggtaaccgtgccgcaccctcgtccgtcgccttgcccgactcggagcgcctcatcgttgatgcggccacgaaccaggtcgccgtgaaccccagtcaacacctggctttgttgcccggcgtgtcatgggtaggaggtccagtgctgcccctgtccagagtgacctcaagctgtggcccttcagggcgtttctgcgcctggtgagaagccaatgattgctggccagtcccagggtgaggagaggcagcctgctgctgcagag

SEQ ID NO: 119838 - DNA, 864 bp, Zea mays
  Clone ID: MRT4577_40775C.1
acttacataaaatggtccaccttcctctcctcctccctctcctctgctcttccgtttcctcctcgcaatccatccatcgatccgtcggggagatggcgtccgagaagcacttcaagtacgtcatcctcggcggtggcgtcgcggcgggatacgccgcgagggagttcggcaagcagggcgtccagcccggggagctcgccatcatctccaaggaatccgtggctccgtatgagcgccctgcgctcagcaagggctacctctttccccagaatgccgccaggcttccaggattccacacctgcgtcgggagcggcggggagaagctcttgcccgaatggtacacggaaaaaggcattgagctgatcctgagcatggaaattgtcaaggctgatcttgcctccaagacattgaccagtgcagatggagcaaccttcacctatgagaccttgctcatcgccactggctcctcgaccataaagctcactgactttggcgttcaaggagcagaatcaaacaacatattgtatctaagggaaattgatgacgccgacaagttggtcgcagctatgcaagcaaagaaggatgggaaggccgtcgttgttggaggtggctacataggacttgagctcagcgcagcactgaaaatcaacaatttcgatgtcactatggtgtacccagagccgtggtgcatgccacgtctcttcactgccggcattgctcatttctacgagggttactacgctagcaaaggaatcaatatcgtgaagggtactgtggctagtggttttgatgctgatgccaatggagagatgtagtgtggtgaagctgaaggatggaagagtactcgatgccgacatcgtcatc

SEQ ID NO: 119839 - DNA, 682 bp, Zea mays
  Clone ID: MRT4577_40776C.1
cattgggacctcgaggcggcgggatcgcatcttaagtcgatatctgctcagctacctcttcatatgtccggtcatcgactcatcctcatcccctgctccattcgacacgattgggcatcacatccacatcccctacccgatcggatacgatggtcatgctccgagcacacaccacgccctgaagatccaggatgccaagatcatcaccagcaacaaccccctcctcaccacgagatcacatcgaaccaagatgacgcccgactactgcgtcttctcctgatgctaggaacctctactgctaccacaacgactacgagaaccttctcttcatccagaaggagcacaacgactaagaggatcacaatgctgatgacattgagcgatgatgtgatgcccgccgtcaaggttctgcaccctccctcgcggcctcactgtacgatgagcatggtggcgtggaattggtgctgcggtgtccaaaaggctggtatatctgtcacgagcaaagatgtgcccatgatctggagtcgaagtctgagagagaattgcactgctactcgtatgtgaacatcgtcgtagaagcatacagtgactcagacactgccttgctcgccttgatgacgtcatatatgagaacttggccattatagatcggattgccgatacatgttcctgcatcactgcc

SEQ ID NO: 119840 - DNA, 295 bp, Zea mays
  Clone ID: MRT4577_40777C.1
tcgagcggccgcccgggcaggtactttttttttttttttgttttttttttttcgggcaaggcaaaagcgtcccggttttattcaatatatgtacacctaacaggaagggccttttgcttacaaattacacatgcaagagggtgttggacaaccaactaatatttttgtagagaccaaggactgggacatttaaaaaaataaaaaataaaaactcttgaaagaatgatccatcccttgaaccaaaaactctaccataattgccggcgcgcgaagtaccttgggcgaaacaacgctt

SEQ ID NO: 119841 - DNA, 426 bp, Zea mays
  Clone ID: MRT4577_40778C.1
tctctctctctttccctatctcacgtctcgcctggatcgagagcaacagcgacgggcagaagcttccgtcgcgtagcgctcccgacctcctgcggggcttcgcctctgctaggccgcgcgaatcccgaggtggaggaggaagaggagagaggagcgccggtgggccccatcagacatgagtctcacggggcccggcctggaggcgtagctacaggcggtggggcgcgccctcgacgccggtgaagaccaccgggtgctctactgcaaggccggcgcaaggcccgccgcgctcgaggaggaccgagggctggacctcccgctccccgacggcgaagaccccccgagcgtgccccctggtgtccagggcgagcagcgccgcacagaccgccagcgcatctcgccccgtcacctcaggcccagctaagc

SEQ ID NO: 119842 - DNA, 234 bp, Zea mays
  Clone ID: MRT4577_40779C.1
agcccacgcgtccggctcaggcgacctgcaacggtcactccacaggtaccggcgctcctgttaacggcagtcacgtgcgcgaatagcaacgctcaactgacagcctagagtcccatgacgaggtgcggcatcgtcccaatcttcatcgactgtactggctgcggcacatgctacgacgtgaaatgcagcgaagaagctaactgctccggcaagccactcaacgtctgcatcact

SEQ ID NO: 119843 - DNA, 235 bp, Zea mays
  Clone ID: MRT4577_4077C.1
aggacgcgtggttttacccaaaaatttcataccggttcctttaggccaaccagttttccctatagaaatatctattaaaacttggcgaaaccaccaccatacctttttcctgtggaaaataaaaatccgctcaaaattccacaaaaaatacaacccggaaaaataaagttgaaaacctaaggtgcctaaaaaatggactacctaaaattaatttcttagccctcacttccccttt

SEQ ID NO: 119844 - DNA, 172 bp, Zea mays
  Clone ID: MRT4577_40780C.1
ggtgggacaaacctaagtatgatgtgagaaaattaccatggaccacataatgtacatacttgttagggagagattgcttagattgatgttgtgctcgatgtatctttgtagcggcgaaacaacaatttgtgcttggttgaagatgagatccaatgtcacactgattgttctc

SEQ ID NO: 119845 - DNA, 144 bp, Zea mays
  Clone ID: MRT4577_40781C.1
cattgttgaccgactctatcttacctctctttgcaagtcagtaggtcaccactcaaaagcttgtgaagcatgtgatatgggcaaggaggtggatgagtacactctggaggaccccgacattcgtgaccgagactacaagaaccc

SEQ ID NO: 119846 - DNA, 1018 bp, Zea mays
  Clone ID: MRT4577_40782C.1
cttgcgtcctgatcccaccaaccgcagaggacagaggaccatggagagcggcacggagcggcggcggcggcggcaccacttcgtgctggtgcacggcacctgccacggcgcgtggtgctggtacaaggtggccaccctcctgtcatccgcgggccaccgcgtgacggcgctggacatggccgcgtgcggcgccagccccgggcgcgccgaggaggtgccgtcctttgaggagtacagccggccgctcctggccacggtggccggcctggcgcccgaggagaaggtggtcctcgtcggccacagcttcggcggggtcagcctcgcgctggccatggagcagtacccggacagggtcgccgtcgccgtcttcgtcgcgaccggcatgccctccgctgggaagccgatggcgttcgtcttcgagcagtttttgcaagaagagtacccagcggaccgctacatggactgcgaattcgaaaccagcggcgacccccagcgtcccgtggagacatttcggttcgggccacagtacctgaagcagagactgtaccagctcagtcccccagaggacttgaccctggcaatggcgatggtgaggccgtcacagcggttccgagacgacgcgacgatgaaggggggcgtcctgacggcggagcggtacggcggcgtgaggcgggtgtgcgtcgtcgccgaggacgacgcgtcagtgccggcaggcttccagcggcggatggcgtcgtggaaccccggcacggaggtgagggggttgcagggagccgatcatatgtccatgctctcgaaaccaggggagctgtcagaacttctcatggaggttgccaacaagtacagctgaaacttgtatcatgtaatgtaaatggctatcagcaaaatggttgttcaggtacgcttgtttcagatgaacaaatggagacggaagtttgaagtaacacgatgaaataagactagattttgtatccaatgcagttgtaactttctaaggtataaggctatttctatcagc

SEQ ID NO: 119847 - DNA, 429 bp, Zea mays
  Clone ID: MRT4577_40783C.1
aaaacacaacaacagtttttgaccttaaaaaaccctgcccgccaccatgggatgcccccccgtgggccggggggggggcccacctccccaaaaaaaaaaaggggaacgccacacacgcccgcaaaaataggggtgggtcaatacaaccaaaaatcaacaacgaaaagggatcggcggcacaatttggacaaacacgggtacaggttttattttttttaacgaatttccccccccccctccttttttcctgggggtttttttacttgatgttgaggggcaagggtttgcccccccactccttggggcactcgagcatgggggccaaaaacttgccctggttgatgccaaaaaaaaccttgttgcactcctcgccgggggaattgagcctttcgccgggaaaaaaaacccagccgagcttcttgggcaaaa

SEQ ID NO: 119848 - DNA, 479 bp, Zea mays
  Clone ID: MRT4577_40784C.1
gccagcgtgcgggcggaggccactagcacagccgaacagggcatgccgcctggtcatgtgcctgggtctgcaagctgctaccgtatttaaactgcacaggctctgcctctgcccgaggcacacaggatgtctgcgacggcaactaggccgcctgccatagaccacgaccaatgggcaggcgaaccgtgtgtacctggtagcaccgtaactctgggacacggagtgcagtcccttaggggtgagggcatactacaccgggacgcggtactactagcctcatggaccagccgttccggagacagggctgccagaactaaagcaggatgaaggcacagcacggcaccaggcaatatttggagttgatgatgcagttcatagcgtaccagtagccgcagagcgagcatgtaccagcgatgtctgtggcagcagatagcagcagcatgctgacagcgatgtgcggtctagcacaggccactaca

SEQ ID NO: 119849 - DNA, 125 bp, Zea mays
  Clone ID: MRT4577_40785C.1
aaaaaggaaaaaaatactgctaaaacatgaggaggctctaaataggaaagaattttgatggtaagagagaggaatgttggaaaaagaccacaaaaaagtctgaaaagggtagcttggaactggaa

SEQ ID NO: 119850 - DNA, 421 bp, Zea mays
  unsure (1)..(421): unsure at all n locations
  Clone ID: MRT4577_40786C.1
ccgggnaaaaaattttcaccccccaaaacaaaaacaaaaaaattaaaaaaaaccgccgcccggccatgggcatcttgagaagaacagagaagaacgggaggagtttgagtctttgagaagcaagaagggcaggacagacggcagatcacggccacaaacctcgcgacggcagacgggctgagaagtgacaacagaacacgaccacagacctcgtggcggcagacgagctgacgaccacagatcagcggcggcggttccaatcgacggcggcggcggctccaatcggtggggtctccaatcggcagcggctggcggcacacatacaggagacgtggaggcttccgctgcgggcctttggctgccctacagtatcacgtgcactgtatacggaggtagggatatactgtatcttgcagggggt

SEQ ID NO: 119851 - DNA, 468 bp, Zea mays
  unsure (1)..(468): unsure at all n locations
  Clone ID: MRT4577_40787C.1
ggggaggagacgccagcgccatccatcgcggcattacccgacattttaccacgaaacccgacccggggccattcggggcccatacggcgctacccccccactatccctcaaaacctgaagctgaacccatggcccctctcatcaacccccaaccatcgatgacgctcaccttgcggcgtcagaggatgcaaccatctcccttgcttactgcatttcctcgtcactcagctaaactgtgcactacaaggctcacaaacttctccacaaaagcacctgaaaaaacccctatctgacgaccacgatcgcaaagacacgctgaccattcagagcatcgttnaacttgcctggacgaacaggcagttatctaacatcacatggaatcgaaaacacactgaccctactgcacatgcttccgttcctgccatgcacaggcttgcacaaagcttgagaaaactgacctcttacact

SEQ ID NO: 119852 - DNA, 280 bp, Zea mays
  Clone ID: MRT4577_40788C.1
gactttttctattttctcgcgcagggatagggggctgtacatcgatgtcgaggagccgcatgctgctgagtccgatgaccttgaagaggacgaattccttaacgccggcgaaaaggtcaattgcactaatatcgcacccgaatatggacttccttggcagaagcacaagcaacattcacgtagggggagcgttaatatgattggggatggcaaactgttgacaaaggcacattgcgttgaacacaacacccaggtcaaagtacaaagaaggggagatgac

SEQ ID NO: 119853 - DNA, 213 bp, Zea mays
  Clone ID: MRT4577_40789C.1
ttttctttgttgtaaataccagactaatatatttagcaacatcagaggcactttaacatcgtttgtcctcctaacacgcctgaatcaacaataactgaactaaaacagtaggaaaaactacctacaaggacaaaagagagcaccagccgccttggcccaatcccccctctactagttattcaatcttattgtatacacataaacatactatcc

SEQ ID NO: 119854 - DNA, 291 bp, Zea mays
  Clone ID: MRT4577_4078C.1
aaccttgaagatattttttctgcagcccagggacataagtggaaggtacacagtgttgcagacttcgtggggacgcataacgaaaccatgactaggtataaactgtggccactcccattaacaagactgtttccacacaaaaacattggcaatatggctgaaacaaaacaaaggatgtttactccatgttaaatccagccagcccacactacctatttcttgttcatgggggagccagtcccacaaggacaaatgaggtcggccatagttatcacaaggcccctcctaatg

SEQ ID NO: 119855 - DNA, 230 bp, Zea mays
  Clone ID: MRT4577_40790C.1
accaacttgcttcggcaaactcaacagtgttctaccaacaacccatcattggtggtggcctcttttagattgcttatgagtcatagttcaatagtgaagttttcttggatgatgtttgcggcgtcccagaaataagatagtacatttctagattcttaacacataacatcaaagaccgatacactatgtgaaaacacatctcttaaaccatacgaagcttgaacgcgcta

SEQ ID NO: 119856 - DNA, 451 bp, Zea mays
  Clone ID: MRT4577_40791C.1
attcggctcgaggccagcccggggcttcagattacaatagctgctgaaggagccttacctgcgagggctcggatccactccaccaaggaggcagcattatcgggtgcatgcactgctgacaatgcagtaaagaccagaccaattgcctatggactgcggctaccgagcacactgcaagatcattcatgggatcctcctcgtgatgcatctgaggctgcaacacatgctcttctaaagccatcgactgctgctcctgatgcaggtgcacaaggcccgtcaggagctgacggtcactggggtataacatgaacgagtgggcatagcaccagttctgtagatgcaaaacctagcagtgctaatgacacacttgacaagtgaacacgctagtatcttaccaagatagctccaggaggtcatgacagatgattcaaactgatggctgacatgggag

SEQ ID NO: 119857 - DNA, 388 bp, Zea mays
  Clone ID: MRT4577_40792C.1
gaaagattcttttgcagcaaaagttatcgtggtccatcgtgcaacttttattgtcggtttctctgattcaattaagtgggaacccttggtagtgattcaattaagtgagaagtgagaaccctcattgtgctattttttgtttcagggttgttatctatctttgtagccgaagaaacaatcctgagaaagaatcgaaagctccttggctaggaataatgtttctaagtggaatcacctgggttatgcgagaagcacatcaatggattccactggtcctctgttagctggtaggagaagtagcagacatggctcaagtgagatgggggactgcatattcagctcaatgagacattttcttcagttggcgaatcaattactaggagaattt

SEQ ID NO: 119858 - DNA, 283 bp, Zea mays
  Clone ID: MRT4577_40793C.1
ggacccgtgcggaaggcgggttcccgagcttcagtgcgccgcggtctccctgtgcttgccagcgctgcttcccttgcctacctactccccgagccagctctcctacgcgcgctgctcctcgctgccccagccgcgtccggccaagcattcctgcgccctgctctagctcttgcgcgcggtgccccagctgctccatccatggcgcgcgacgggactgaccgtgtgcccagctccagtttggttcttccctgggcgcgtcgccctgcttcctctctctccctca

SEQ ID NO: 119859 - DNA, 419 bp, Zea mays
  Clone ID: MRT4577_40794C.1
cgctctcccccgctccgtctccctcccccctcctccaccggtccgctccctccgccgccagatcccgtcgagcccccccgcgcccccgcgtcgaagatgagggagtgcatctcgatccacatcgtgcaggccggcatccagatcggcaacgcgcgctgggaactttactgcctcgagcacaggatccagactgatggccagacgaacggcgaccagaccatcggaggtggtgatgacgacatcaacaacttcttcagcgagaccggagccgagaagtacgtgccccgcgcggacttcgccgacctcgagcccaccgtgaccgacgaggtccgcaccagcgcctaacgccagatcttccagctggaggaggtcatgcaacgcaatgaggacgcgatcaacaacttcgcccgtggacacta

SEQ ID NO: 119860 - DNA, 2192 bp, Zea mays
  Clone ID: MRT4577_40795C.1
cccacgcgtccgcggacgcgtccgcccacgcgtccgacattcttccttaagcttgtgtcggttatgcggagttcctcaaaaggacaaagtcgttactgcagttcgctctctacttgaatgatattagtgacaaggtaaaactattcctttactcaaggttattttctatatgcatgatggagatagcgaaaatattggattgtgttggacatcattctcttccgtcggcggattagctaaccacataatcactgaccttaaccctgtgaccatttaacaacgtatataatataaatttacattagatgctttatttttgcactgtggacctattgcacatataagggctccttagaacttgggttgttattttcagtctcattattccattctttactaaagaattgtacatcaaacaaatttatgtagtacatatattgcagaggtcctcaaaatctacaccaagttatgtcagggactatatctccactcaactcattttaaccttgtacatttcaatcaaatccaaatagatgtgaaataaatgtagtaggttactctgaccagtgttgcgctcgcgcgccagcatgctcggactaaccaacgaaaaaggtgaagtgggatggtataccatttgcaattgacatttatggtttttgctacgctggcactcagtgtttccaaatatctattagtcaatgtgcgatcgtaccaaattcaacagggctctctacatatggtatgtataactatctcaatttgaactgcattctggtgggagtcgctcttattgtttagtaatcatttttctcaatgttatgtctaaccgtgttattcaattttgcaatatgcacggcaatttatggtgctatatctattataggctacctcatgtttggagacaagatgctctcataaataactttcaatcttctgaaagattcatttgcagcaaaagttgcacgatggaccacgataactattattgtcggtttctctgattcaattaagtgggaacccttggtagtgattcaattaagtgagaagtgagaaccctcattgtgctatttttttgtttcaggtgatcattcctttcacaaagtatccttacacatcttagttatcaactctgtaagttgaggtttttaggatggcgttacattcctgaaattgtttgaatcctttatgggatttcttcatccttaatcacttgcagatattctttagtgataaaaccattagcttagagtatggaagggttgtgtccagcaaggtttatgacggatagtcttcgctgttatgctgcgtactcgatgtgttgcctttctcctgccattctttggtacataactaacacattatgcttaaacatggagtcattatcttataaattctttttctatcactaatcattgttttggttcctatttggcataaattgtctaaatacttataaatgtgttgtcctatattttttgttctggacattgtttggttcccctgcttccagaatttatatgacttgtgaattttaaatgaaagaaaagaaaggaaaattatgaatcatggattattgattcatgccataacattgacttttgtgcagggttgttatctatctttgtagccgaagaaacaatcctgagaaagaatggaaagctccttggctaggaataatgtttctaagtggaatcacctgggttatgcgagaagcacatcaatggattccactggtcctctgttagctggtaggagaagtagcagacatggctcaagtgagatgggggactgcatattcagctcaatgagacattttcttcagttggcgaatcaattactaggagaatttgttagatattaagattaatagtaacatgtattaattcaattttatataatcgttgtgcaccaacattttatttgaaagggagaaataaatcctagcaaaattgactaagagagaagggatataggaacaaaaatggaatatgggagagggaacaaactcatcggcctatgcgccttgattagaatgtctcctaaaagttttaggtattgaaaatatgataggacatttattgtaatatgtttattttctgaaatactaattttgatgtatagaatattgacaaaaaaaaaaaaaaaaaactcgacccccagcccgggtagagcaatgcacttgttctgcccgt

SEQ ID NO: 119861 - DNA, 404 bp, Zea mays
  Clone ID: MRT4577_40796C.1
gtgagcaacgatcgctggcccaggctgtacccgaactatgcttctgaccgtcggcgtgacagcgctcctctcctccatggattcactggatttcaagtactggaataagagggcgcactacccggacaaggagaacgggatcgagatctaactgatgccgatcaaacgaggtgcgcctgtgagcttcagtattaacacatatgatggggagaccatatgcaatgggaaactagttatcgatcttgatgactgaataaaccatgtttacaaggaaacataaaacgcttgcacaaagacattttgcccgaatgcaacaggtgaatttgtgatatcccataagcagacactatcatccttcatcccacccggtttagacacgcttacaaagaatctcttgagatgaa

SEQ ID NO: 119862 - DNA, 604 bp, Zea mays
  Clone ID: MRT4577_40797C.1
ctctctcctgcagctccacttcctcctcgggcgcagccattgtcttctggctcatatctcccctccccctcccctcctcgtccgcctcagacgccattaaaccccacctcgcctacgactgccggcggcgagccccgaccggagcagggatcgagcccgccgaaggggggaagacatggggacactcgggcgcgcgatctacacggtgggcaagtggatccgtggaacggggcaggccatggaccgcctcggatccaccatccagggcggcctccgcaccgaggagcaggtgtcaaggcatcgtacagtcatgagcatatttgacaaggagcctaggatcaacaaagatgtttttgttgctcccagtgcatctgtcattggtgatgttgagattggacatggatcatcgatctggtatggctccgttttgagaggtgatgtcaacagtattcgtattggatctggatcaaatatacaagacaactcccttgtacatgttgcaaagactaatattagcgggaaggtccttccgacgatcattggaagcaatgttacagtaggtcatagtgctgttttacatgcatgcaccattgaggatgaagct

SEQ ID NO: 119863 - DNA, 492 bp, Zea mays
  Clone ID: MRT4577_40798C.1
ccgggtcgcccagcgtcgtctggatggtttagacagggtatccgtctggcatgtgctcaaactatcaaaacatgggtacactacacctgtaacaagggttctgcaatgttgcctgaggtgggaagtcccgccaatgcaatctactataggattgatccaacagggggccaaatccgggtgtctcagttgtttggcagaaacattgccctgcaattgacatatgaggaactttggatttgggaggcagtggacccaaccgggtcttccagaatgattcgtgcttcctcctaagttaaggggatctttaaggaagaaaacgcccgaaaggggtgtttgcaatgggtcagagaggaatttgaataccttctgcagctgttccatccagctgctacagatggctagctaacagatgcctgttgtttgtgagttctgcgggttcttgagcgtgatatagtgtgtgccttgagtctgtctggtctggccccatggcgc

SEQ ID NO: 119864 - DNA, 298 bp, Zea mays
  Clone ID: MRT4577_40799C.1
aaattcccacctcccatccgtcaatgcctcaatcccgagacgcatgctgccagcttcagcttccatcactcaaggttcaatccccgatcagcaaaggagctcttctcctttcatgctgacatgctggaggtgctcgcacacgatcaggctagtttccatgcgacgacggaggatgccgtacggaagctcacttcgactgctgcagctgcgtatgcacaagtcacgtttcagcgccctactgaacagcgcaagccagatgcgcatccacatctgttcaaccacattgcgcgagtccaag

SEQ ID NO: 119865 - DNA, 777 bp, Zea mays
  Clone ID: MRT4577_4079C.1
ctcgaggccggccgggccgggaaaagcccctctgcctctctctctctcacctcctgtcccctctcctctccgtgtccggtggagcttctccacctccggccaagatctggaaccagcgagggtgcccggcggttctcatcccggaccccgactctttcctcatctctgcaacctctggatcctccatctgcccccctgcaggatctggaagctgcacccgtcggggggagaagcaagcagcacatccagcccgctcgagctcgctcatccgacctcaccactgagcttccgcaggatcttcacatccccattccattgacaacgtgaaagagaacatgtgacggggctgccaagctacatgccaacgacgccgattgccgaatgccgagacaccgcgcacgctcttgcagataaagatgatcgacgtggtatttgtaccactttgctgtccgtgaaagcccgctatataggtggtgacatcaagtgatcaagattttatggtgcgcaagaggttgggttatagttcccgtggccatcgaattccaactatgccacgtgttccaaactcagctcgggggaaacgttctaccagaagaaagaaagatgagaatgatgatatgtgtgcaatggatttgctcgcaactgtggcaggaaagttactagcagatcaggacaattcatctagcgttcctaataccagtgcagcgaaagctaaaaaaaggaaatcagttaaggaagaacactttgatgaaattccgctctaaaaaatgtggctat

SEQ ID NO: 119866 - DNA, 523 bp, Zea mays
  unsure (1)..(523): unsure at all n locations
  Clone ID: MRT4577_407C.1
cggtccgnattccgggtcgcccaggacctaccgagtccccttcaaagaaagcaataggttgcatttgcgtcgtttcgtgattcatcatctatttgaacatagacataaaaatcaagagctgaaagccggcgacggtggcatgccaagtagaggggaggaactgttgtgaagagcggcggtggtgagtggtgacgctgtgaactgagctatgcgtatcactcatgatgagaaaaggtgcgatctcaggatcttctagctggtaccatgcaagaactagaagaggagaatatctgttctctgtattcatatgtactgtacgaattacaaaatatataggcacgccagattatcagagataagcacaggtaaagtgatcctagaaaaatgggcatgcaggcccgaagactcggacgaacaggcataaaacgaggatctagccaactgactttgtacaacgtttagcaatattgacaactaaaaaatgcccatgcatcagacaaatgaaggacctgttgtttttggc

SEQ ID NO: 119867 - DNA, 595 bp, Zea mays
  unsure (1)..(595): unsure at all n locations
  Clone ID: MRT4577_40800C.1
naaagaagtgtattcagtgataggatggtattcgtccgtgctgttcacgaagctaattggatgaatgagatggagatcagcatctatgattcctggtttgatccagttgtgtcatcactcccaggtctcatccctgacggatttatctatttaagagctagtccagatacttgccacaaaagaatgatgcataggagaagatcagaggaaggtggtgttacacttgattacttgcaaggtttgcatgagaagcatgagagctggttgcttccttcgaaagggtcgggtcctggtgtattatcggtcagtcaactccccatgcatatggagggctccttgcctccagaaatacgggatcgtgtattttacctggaaggaaatcacatgcactctagcatccagaaggttcctgctctcatcatggattgtgaaccagacattgatttcagcaaagacatagaagctaaacggcaatatgctaggcaagtcgcagagttctttgaattcgtgaagaaaaagcaggaacgagctccatctgggcaaacaagcaatgacaaggaccggatgaacccacaggtattgcttcctaacagcg

SEQ ID NO: 119868 - DNA, 522 bp, Zea mays
  Clone ID: MRT4577_40801C.1
ttttttttttttttttttttcttttttttttttttttatctcaaagcttataaaaaaaggggtcttctcttgtttttccttttttgggttcaatggagtatattatttcaaattcctcaggtgcatgaatctagcagacatgccaaggagcggaaaaaaaatacatgtaacaactctccccgtatgcaataaccatgcattcttctaatgttgtgtgagggagttaacatgggaagtatagtccctgacctcttccaaaaacaaataaaagaacatcgcacatataactacacgttaaaacaggctactaaaacagctcgacgatggctgggttgccatgcccgcgctagcttctgcgagactgcaattcatcacggcggcggggggcatccattgtttgggtcccaggtcgagcccttgcacgaggggcctggcccgcttagccgctgccagtatagctgccggatgaacctgacgatggagtcgccgccgccgccgacggcgggggcctcttcggccagt

SEQ ID NO: 119869 - DNA, 115 bp, Zea mays
  unsure (1)..(115): unsure at all n locations
  Clone ID: MRT4577_40802C.1
acnaccaccgctgcggctcacggctacgcagcccgctctcccgacaccnccgtgcncnncctctttttgctacnagcacatagagttcgcccgaatcgatcgccgacngactccg

SEQ ID NO: 119870 - DNA, 407 bp, Zea mays
  Clone ID: MRT4577_40803C.1
gttctagatcgcgagcggacggccttttttttttttttttgaacacaagggtcttgaacatcacaaaatacaatatcgaatgctcatgtaaaatgcattttaacctttcaccattgatcaagtcagtccgaccaaacaattacactgttgcgctttacaataccaaaaccatgaatgctaactcttaggtattcaatatacaagcgattcattctatttaactacttgaaacatgattcatcaacatagaagtctgtcgtagaacaatgaggtcaggaaacacctttatgagggcatatcatggaggaacaacaactacaacaacctgtacaggaaaagcttgatgtacactatcatttacaacagatcattccattcaagcatcgatctgcattgtcctttacttc

SEQ ID NO: 119871 - DNA, 361 bp, Zea mays
  unsure (1)..(361): unsure at all n locations
  Clone ID: MRT4577_40804C.1
cttgacgctatggacctctgacatttcagaggacgctgctgaggagatcagggaggcgcccaaacgcgactcgagtgatgggcactcaagccggctagatgtacctacaaactaacagctagtgtttgctgctgtctaatgacactatgcattgtgatctgcaacctgggttcttgcgtgcaatgcttgtagccgtgttatgactgtacaacgtataatttgctggctaccgaggagggatgctgccatgcaaggcctaggtgtcccacctactctgtagagagcggctctggatccagatctgcttgctgtggtaaaccatctaaactgtngtcacttgcatttcaccttttacatcgct

SEQ ID NO: 119872 - DNA, 1478 bp, Zea mays
  Clone ID: MRT4577_40805C.1
gtaatctgacaataatgatgctgcccttggcgagggtgcttcacctggagccagctatagtactcctcgccttcctagtaagcatctgaacaatgagcttcatagtgattctgaaatgctgaaatctgcaatgaagtcctcttctgtgggatcccgcggaagctcagattcagtttctcctctgcccagggagagttggaacaacaagtccttcaagggaagtgcagaggctccccgtagtttaagaatgacaatgaaacttcgtgatttttacaaaaccccaaaggttgatcctgaattgctcaaagagattgagcagtggaacgaagcacttaagaatgatgtgatcaaattttgccaagagaacaattttcattctggtttctttgatggaactgaaaacaacatggtagctgatgcctatgaattgaaggtgcgtcttgaacacatcattgaaaggatagccttgatttctgatgctgcaaatacagaacgaccttctcttgttgtcaacaacttgttcataggtggggctctggctgcaaggtctaagtacaccctacagcatttgggcattacccatgtactctgtttgtgttcaaatgagattggtcaatccgattcccaatttcccgatctttttgaatacaagaacttttcaattagcgatgatgatgatgcaaacatcagtgatctttttgaggaagcatcagacttcattgatcatgtggatcatgttgggggcaaggttctagttcattgctttgaagggaaaagtcggagtgccacagtcgtacttgcctatcttatgcttagagagggctttactcttgcaaaagcctggaacttactgaagaaagtacaccgtcgagcgcagccaaacgacggcttcgcaaaggctctcctggcccttgacaagaggctgcatggcaaggtatctatggactggcaacacaagcggccagaaatgaaggtgtgtccaatctgcagcaagaatgttggtctaagtacgagttcactcaagctgcacctgcagaaggcacacaagcgtctatctgcaggcagtgtcgacagcgccatgaccatggagatccaaaaatcgatcgagtcactccagatcagccgaggaggaagcctgagcccgtcccagaagctgaccaaggtgttcagcaatgagctgagcttctgatctgttttcctgtactatagatgaggcaatgtacttggctcacattgtaataacttgtactatcagactgaacttgtgactgtaggtttagttcacacgcctatatgattagcacacgaatgttcaggtgtgaagggtgcaacactaaagaatgttcaggtcttgtatttgttgcctgcagtatgcagttttcttctaaagggatctactctcaatctttgtatagagttactaattttatgggtactttaaaaaaacaagaaaaaaaaaaaaaaaggccgctacctcg

SEQ ID NO: 119873 - DNA, 487 bp, Zea mays
  Clone ID: MRT4577_40806C.1
cccacgcgtccgcaaggatgaaatagagacacaagtacgtgacatgctgtcgcagggagtcatccaaaagagccacagtctgtttgcatcgccagtattgctggtcaagaagaaagatcaaacgtggcgcttctgtattgattaccgctatctcaacgctataacagtgaagagctcgtatcctgttccaatctttgatcagctgatggatgaactgtcctctgcacaatggtttagcaagcttgatctgaaagcgggttaccatcaaatctgtctagtaccaggagaagaaccaaagacggccttccaaacacatttgggtcatttcgagtttcgagtaatggcttttggcttgactggagctcccaacacttttctgggtgccatgaatgatacactggcaccagtattgcgtcgtcgtgccctcgtgttcttcgatgacatacttatttacagtcctacatttgagtcccacttgcaacattta

SEQ ID NO: 119874 - DNA, 2020 bp, Zea mays
  Clone ID: MRT4577_40807C.1
gttaccctcaatggccgacgaccccctggactcgtccccgtcggcgtccgccgccgccgctgctggcggagtctcctccggcccccgcccagcgctccggccccggcgggaggcatttgagtacggcgctcggcgaggacggctcggggagtgctgacctccgcgacctgcttcttttcctctacatccaatcctacaagcgcctcgtgccgcgcgtgcacaaggactcgcccgccgtcacggatgtttggccgtcgacctccgccttcgatggatacctctccgcgctgtcgccgatccagtttgtacggagcaatagtcgccgttttatgccttcacaagcagatgaagaagctcatcagctatcgtatttacaaaagcatatggccaacattctaacacttttagcagattctattgatggcgagggagatgattctatggtattgacaatggagacttttgagcaccttggattttttttgcagctctctgaaggaactccattaagccaagcagctaccttttttgcgaattcggatccagacatgcccgctgctcctgtacctgctgctttggtacatgattgggtcttgcagcatatagcttcagcattagaatttatggcagagaagactgtggcaaaagaaaacagccaacataatgcatttgatcctgatgtcacaatgtctgatgctgtcacgaatacaagaattcatagcagttcaccaactggcagttctgcaccaaactatcctggatactaccgaaatgcatcatttgtggagggttgctcgaaaacttcagttgtcaaacaagcatcggatctgaaagggcattcaataaaggttttgaactgccatgattctgtaatttacattttagccccacttaagtatgcaactgtctatggatgttctgacactaccattattcttggtgctattggtaaggttgttaaagtggagcattgtgaacgtgtacaaattattgcagcttcgaaacgaatttgtattgccaattgtcgtgaatgtatcttctacttgggagtaaatcaccaaccacttattgtaggggataaccataaattacaagttgccccatttaatacttattatccacaactcggggaacatttggcacaagttggtgtggatcctaatgtcaacaagtgggaccaaccttttgtgttgggagttgttgatctgcatgactcattatctcatcctgccggggtttctgatgtccaggctgagtccaccacttgtctagatcctgatctatttacgaactttttgattcctagttggtttgaagtagaaggacctaccaaatacaatccatttaccctgcctgaagtttattgggcgtcccaaaggaaaaagcatgcttctctggaagatattcaaaagaatatccgggagctggagatcgatgatatccggaagaaagaattggcatgtgcccttcatgctcaattcaaagattggttatatgcctcagggaatatccgccagctatactgtttgcaaggcgaatgagcataagatggggttcttgtgtaagcgcgagatgcagcagtacgcgtctgcaagtgcaatccaattccgggcgcctccgaaatctgaaagtgacttccaagctgagttggtgtcgcctgccctgatgcacttggtatttcagctgtagcgtttgtggaggcaagtaactgtaacgtttttgtttgttccaattagtttttaccacttttcccattcagttggccgcaaggtttctgtaaatctttcggtactgttggtttcatatttagaaaattcacaaagcggccactcaattctctttttggaaagtaactttattttttttttcaaatggtgtttggtttttagggactaatgtttagtcccttcattttattccattttagtctctaaattgctagaattttagtttttgtatttgacaatctagggactaatatagaataagatgattagtccttacaaatcaaaaaaaaaaa

SEQ ID NO: 119875 - DNA, 890 bp, Zea mays
  Clone ID: MRT4577_40808C.1
ctgtctatggatgttctgacactaccattattcttggtgctattggtaaggttgccccatttaatacttattatccacaactcggggaacatttggcacaagttggtgtggatcctaatgtcaacaagtgggaccaaccttttgtgttgggagttgttgatctgcatgactcattatctcatcctgccggggtttctgatgtccaggctgagtccaccacttgtctagatcctgatctatttacgaactttttgattcctagttggtttgaagtagaaggacctaccaaatacaatccatttaccctgcctgaagtttattgggcgtcccaaaggaaaaagcatgcttctctggaagatattcaaaagaatatccgggagctggagatcgatgatatccggaagaaagaattggcatgtgcccttcatgctcaattcaaagattggttatatgcctcagggaatatccgccagctatactgtttgcaaggcgaatgagcataagatggggttcttgtgtaagcgcgagatgcagcagtacgcgtctgcaagtgcaatccaattccgggcgcctccgaaatctgaaagtgacttccaagctgagttggtgtcgcctgccctgatgcacttggtatttcagctgtagcgtttgtggaggcaagtaactgtaacgtggttttgtttgttccaattagtttttaccacttttcccattcagttggccgcaaggtttctgtaaatctttcggtactgttggtttcatatttagaaaattcacaaagcggccactcaattctctttttggaaagtaactttatttttttttcaaacaaaaaaaaacaaaaacaaaaaaaaaaaaaaaaaaggggcggccctagttctagatcgcga

SEQ ID NO: 119876 - DNA, 1606 bp, Zea mays
  Clone ID: MRT4577_40809C.1
aacatggaagattgctctgctggcctgggtttttcctcctcccgttcacctcgccgtcgacggggccaggcggccgaacacatccttgacgaccgccgccgccctactcgcagcttcctgggtttcatcggatcctctgctagcgacgagcaccccctacaccaggccgttacttgggcgccggtgccatgcccggcgggtcttcgggtccagatggtgaagtggatgcaggatttgcgaagctccagggagaggatttcgagtattacatgcaaacgtactccatcatgctgggacgcaacagcaagaaatcaacagtggatgtggatctctcgagcctcggtgggggtatgaacatctcccgccaccacgcccggatattctacgacttccagcgccgcaggttcgcgctcgatgtcattggcaagaacgggtgccttgtcgagggcgtcctgcaccttccagggaacccccctgtcaagcttgactcgcaggatctgctgcagattggggacaagaagttctacttcctactgccaacacggtccatcttcgcttcggctgctgctgctcggcatgctcctattattccacagcagcttcctcctccaccgtatgcacatgcacgggcaggccgccctcgtttgtccgagtttcatgaccgctccttcgaaggtgattatgggccgggaggttgatgagattgggaatggtatcagtgaaactgggatgaggggaaagctggtaaagaggaacaagaagtcttctggcgacttggatatctatggtgggcatagaatcaatgtggaaccaatagggacgctaggtgaagacagtagatcagaaataagatcaaggggtgacagggatattgacaaccaacaagcccttcaagcagaagagaaggatgttgtgtcatctgtggccacagtgttatctgatctctgtggccctggagaatggatgcccatggcaaaactccacaacgagcttcttgagcagttcggcaacgtgtggcaccccagcagggtccggaagtacctgacacaggacgactggtcgccgacggagacgaagggcaggccttggttcggccttctggcgcttctcaggaagtacccggagcactttgtcatcaacacgaggtccaagggcaggatgacctcggagttcgtctcgctggtctccttgctctcctagagggacggagagggcgtgttgtgtccagtccgtgtccagaagggtcggaggtgtactggctctcgtttgcttgccccttgctgtgtttcagcagctgttatatggacccaccctgttgtgctgtagtatctcgtgtggtcgaggcagctgcactggtccgtgaccgtctctgtagtgtcggcagcagtgtatggaaagcatgcgttttaagttttaacctatgctagcaattcagcagcagctcggtgattaccgtatccagcatgtatatccaatgccatacttgtaactgttgtgcggtgtcctctttgcagcttcccgactctcgtgaactacgtgagtacaaacgtctcaaaagatgtcacggccactctatataattaaaaaaaaaaaaaaaaaagcggcc

SEQ ID NO: 119877 - DNA, 2390 bp, Zea mays
  Clone ID: MRT4577_4080C.1
tcgagggcctggcccgggctcaccctttactactcccgccccactcttccttctttttttttccgcgcggggatttgagttggaggagacaggcagctgggttggggttggggacgacgcgcagcgcaggagcaacgcccgagggaaagcagcgtacccatccattctccggatgtcccatggcaattccggacgccggagcggttcgccgcgtcagatgcccgaggtgccactgcgtcctcgaggagcccggcgccccagtgtaccagtgcggtggatgcggcgctagccttcgagcaaagaaccgcaccggcaccagcgcaggagacaccgacctgcctccgcctcctcagagcaggcacctggacgccagcgacgtcgcgaccaccagcaggtccagcaccccgactgctcccgatgtcgggagcactagcaggtccggcaccccgacccctccgcatggcgggagcactcctaacgccaccgcgactggccatgccgagtcccccgaccccgtgccgccgaggaatcgtgtttctgaccagctgaggttggtcgagaagagggggcgcgaacagacttcggccgctcaggaggtccatggcggcagcgcaacaagaaatgccggtgcgaacagagacgccacttctgaatcgctggatgattcagacaagaggacgaaacgccagatcgaatcgaccgatgctgccagaaagagaaaatcaggaaaagctgcagcgcagccgcagtaccgccagcaccaggacggtcatcagcaacttgcgccgaaaccatcagctgctcaacctgcacggggacaagaagaagaggaagatgcaggggagcggtggcggggccggcctcgggcctccctgccagtgctcgccacgtcacttcttctgccgaaggtcaccgtggcagcgtagctcgtgcggcgaagccccgtccagccgcggctcctccccgtggcttgccgtcccggcgctaccgccagtgcagagcgcacccgtgctgccatgagctacgtgtcccgcgcggcggcggcggcctcggtcctccctgccagagcgcgtcacgccgccgctgctaccgacggctacctggcagcgcagctcgtgcgctgaagccccgtcaagccgctgctcctcctccacgtggcttgccgtcccggcgctaccgccagtgcagagcgcacccgtgctgccatggcgtggagccgaggtcgtgccgtcacgggcacggctgctgccgccaccacgggcagccggagtggagcagctgccgagggtactgctgcaggcccagagcgcagccgccggccgccaaggaccccaagcggcgcttggcgccccggaaccactgccggccggtgctcaagggcgcgccgttcatcgtctgctccagctgcttcaagctggtgcaggtgcccgccgacttcgccgtctcgtccaggacggtgcgcaagctccggtgcggctcctgctccaccgtcctctcctactcctacagggacccggccaggaagaaggcctaccaggactccgtcgaccggtgcagcacagtcggctccgagctgcacggcggcaaaggcgacgaagggccggacccgttcgcgccgttcatcgacggcttcgggctcagcagctactcgacggaggacgagcagcggctgcccgtctcgaggaacacgtcgttcgacaccctcgacgggaccaaaggcgtgggacgcctgcaccggctgatggggtacgggtcggctagcgagctgctgcgccactcccctgacctgtacgagagcttcagcgagcggacgacgcctgacgtgagacagcacgacaggaaagggaaagccgtttgcatcgacgatgacgacgacaactacgacgtcgatgactctgacgaggaagagtacattggcgcgctgaagcgatcagcggggaaagggtccggctggtcgctcccatggatgcccggcaaggggactccagcaacgggaggcattaggatcaggtaaataccaggaaaggattgtgtatattgcaggaagccaggaataggttcaggatttggaattcgaattggaattcctatcgttgtagttttactattcattttcagtgcggtattggatttataggctgtttgtttgccatttttttcgagcgcgaaaatgctgtaaaatgaaatgtaattattcagcattggcagtctcattatggctttgtttgggaacaagaaaattgatggtgcctgatgaagaaacggaagtgtataacaaagaaatatcgcagtatcttttttgaaagatattgttgcggtatgttgaaacacaagaactacaaacatgaatttgtttgcatgaggtgcaagcggagagcacttccattaat

SEQ ID NO: 119878 - DNA, 1214 bp, Zea mays
  Clone ID: MRT4577_40810C.1
gtggatcctaatgtcaacaagtgggaccaaccttttgtgttgggagttgttgatctgcatgactcattatctcatcctgccggggtttctgatgtccaggctgagtccaccacttgtctagatcctgatctatttacgaactttttggtacgtgagctatatattcctttcattattgctatcttatgctagacttgaaaaaactcaaatgcagttaaaaaagttttatgatgagatatctcttgctttgacaacatgttgcgtctgatgcatctgcattaataaggttactcgattttttgcagtattattgtgtccataacagctggagtaggaacctatattccatatttttgtaatactatgttactaattgatcaatcaattgacattaatttttagtttctgaatgttctcacctaaatatgggtggtaatggggctttggcctctccagattcaataaaatattgtgggtggtaatatattgtgttgtggttctgtaaaagttacatctgatgcattttaaatgactacagtgtgcattttttcttgcaaaatattaaaaatggcagccagctaattctctatgcagattcctagttggtttgaagtagaaggacctaccaaatacaatccatttaccctgcctgaagtttattgggcgtcccaaaggaaaaagcatgcttctctggaagatattcaaaagaatatccgggagctggagatcgatgatatccggaagaaagaattggcatgtgcccttcatgctcaattcaaagattggttatatgcctcagggaatatccgccagctatactgtttgcaaggcgaatgagcataagatggggttcttgtgtaagcgcgagatgcagcagtacgcgtctgcaagtgcaatccaattccgggcgcctccgaaatctgaaagtgacttccaagctgagttggtgtcgcctgccctgatgcacttggtatttcagctgtagcgtttgtggaggcaagtaactgtaacgtttttgtttgttccaattagtttttaccacttttcccattcagttggccgcaaggtttctgtaaatctttcggtactgttggtttcatatttagaaaattcacaaagcggccactcaattctctttttggaaagtaactttatttttttttttttcaaatggtgtttggtttttagggactaatgtttagtcccttcatttt

SEQ ID NO: 119879 - DNA, 840 bp, Zea mays
  Clone ID: MRT4577_40811C.1
gccggccgtgtcgggagatctctgtttgtctctgcctcctctggcccattcagtcagttaccctcaatggccgacgaccccctggactcgtccccgtcggcgtccgccgccgccgctgctggcggagtctcctccggcccccgcccagcgctccggccccggcgggaggcatttgagtacgggctcctgccgatccccaagctggtcttcccagaaggcgcgctgacgcaaaccctatcccagctgaaggagaggctcgcgccgggggggccgcgggtgggcgccgcagcgctcgctgaggcgctgcagatccctgccgagcaggcagcgctggcgctcggaacgctcgctgcggtgctacccgcggaggattcggcgctcggcgaggacggctcggggagtgctgacctccgcgacctgcttcttttcctctacatccaatcctacaagcgcctcgtgccgcgcgtgcacaaggactcgcccgccgtcacggatgtttggccgtcgacctccgccttcgatggatacctctccgcgctgtcgccgatccagtttgtacggagcaatagtcgccgttttatgccttcacaagcagatgaagaagctcatcagctatcgtatttacaaaagcatatggccaacattctaacacttttagcagattctattgatggcgagggagatgattctatggtattgacaatggagacttttgagcaccttggattttttttgcagctctctgaaggaactccattaagccaagcagctaccttttttgcgaattcggatccagacatgcccgctgctcctgtacctgctgctttggtacatgattgg

SEQ ID NO: 119880 - DNA, 257 bp, Zea mays
  Clone ID: MRT4577_40812C.1
tcaaagagtgaaagaccaaacgaaatacaaatactaaactaaaatagaaaacgctatacatgtgaagaatcaaaaacgagctaaaacattgcacaaaactacaaaatgatagacgttactgagaggccaaaagacagagtaaatgccagtacacataaacactacccatctacacaagatattagaacattaggaccaaaaaaaaaaaaaaaaaaaaaaaaaaaaaaaaaaaaataaaaaattattaaaggaaacaa

SEQ ID NO: 119881 - DNA, 395 bp, Zea mays
  Clone ID: MRT4577_40813C.1
ttcgagatgagtatgccgccgccataggtgggtcaccatgaagccgtcgctgtccaccgcgacttcgaccttgagatggagacgctagggctcgagtcttatgaagaatgccgtgggggagtccttgtcgactacccctatggtgaagcagacgctgacagtctgactgttgactaacttgcaaagcaagagctgaactgtcatgtagcagcaggcaatgcagacccaattaaacccattactgctagtgtaaaaggggatcttgcacgaaatttaaggtgaacttctggtacaggaatagacttttgagcgattgaaggatgagatgtattaatgcatattgacattgatgtatgtcaccatgcagttaaagatgcaacaccagtgcctgaaga

SEQ ID NO: 119882 - DNA, 218 bp, Zea mays
  Clone ID: MRT4577_40814C.1
tgtatcgtgcagttcacgttagatgacgacacggggggcatcatttgactgtggtctgcagaaccaacacgcaccatcgctatgcctccggccatgggtgcgagcagtcatgacgcgccgatacttatacgacggtacaagctggctgggtcttgacttgctgcgacgcctgagtacctatgatggtttctttagctgcaaacgcccggggcacacta

SEQ ID NO: 119883 - DNA, 370 bp, Zea mays
  Clone ID: MRT4577_40815C.1
acaacacggcaccacacctcttcttcttcttcctcctcctcctagcacagctagcgcctgctccccttcgcctgtgatcatgtcttgcaccagcggcaagtgcgactgtggctccagctgctcctgcggcatctcatgcaactgcatgtccactaacgtagtcaccaccgccgccagcagcatcaacaccatcgtccactccgcaccgatcactaccgctagctccagccgctttgaggcgcgtaccgacggtcgccgctgcgactgtcaaatctgcaactgctgtacaaggttccgctgctcctgctgcagctgcaactgaaccggtcacgcgatcgtgctatacagtccagaggacgacgactagtcg

SEQ ID NO: 119884 - DNA, 348 bp, Zea mays
  Clone ID: MRT4577_40816C.1
gcccaaaaaaaggggatagtttatgccgctttgaaaaaaaaaaggggttctgttttggactaaatatcttaaaaacccccactggtagcagattgaaacagtccagaccagatcacaacaaattgaaacgttggccacatggctttttggaaaaggaaatgggccccaacagaaaaccaaaacgacgggccctgggcataaatttttgaaccctttacaacaaagtcaggcagcactccaaggacaaaaaactttttggggcatctcgatgttcttaaaaacatggccctctccctcatgggttgggcacccaaaccctgaaaaaacggggggccaaaaactcttggg

SEQ ID NO: 119885 - DNA, 648 bp, Zea mays
  Clone ID: MRT4577_40817C.1
attgggtacctcgaggccggccgggcccctcctcctccccatccccagtccccacacccacccacccggacccggtgccgcgctctgcaggcggaggaagaccagcgacggacggacggtgagtcctctcccccgtcttggtcgagtccttcgggcttgtcagacctggattcccctccggctccgggagaggactggtgcggacgcgttcagttacggtcccggggggatgtattaatctagcttcaggttctgtcggttggtctacgggccgctctgcttcatgaggagagtgccgggagacaactcggcgagtgaaggaccagtgttgaggtcaagtgaagaaagtcgagaggtgagaccgaatggtgactgattactcggctctgtaggcttccgctgggtagatggcgatcaagatggggttctgcagagtccctgaccatcttgtaaactgagcgccgaatgtttgagcgaactggatgtggttcgcagaccagcatcgcccttggacctcgaggttttcactggtcttggcaacaaagcacccggatcatcctccgttgacgccagccagaaccagaagatcttgcttggtgacagggttgcgcttggacttgtggattccctcactgatgacgaccccgc

SEQ ID NO: 119886 - DNA, 373 bp, Zea mays
  Clone ID: MRT4577_40818C.1
cactatattggctgctgccccggctgcagccgccgcgccgtaaccggcgcgaccaaccccgccttcttttcgttcggcgagagcgcaccccgcgggcgcccatattcatatctcatggaggccaccccgatcttaatgaagccaccgtgttcggctgccgattgttccacccccaaccactctggcccccggggacttgccaacctatgaaagcgtggggaccgagactggggccgtccagcatgaactaccctcgcacttacgggcggtccccaaacgggccaacgctggacgaacaagcggactggtacgggtgcaagcattgggcctgtaaaaagtcctgatgcgggaagagatatggcccttgtttttc

SEQ ID NO: 119887 - DNA, 433 bp, Zea mays
  Clone ID: MRT4577_40819C.1
gcggtggggggggggggttttttttttttttttttgttttttttttttttttttttttttttttttttttttttactaaaacctcccggggaacaaggggaccaataaaaaaatgtggtaccggggacacgccaggccaaacctgaaccaaggggggggggggggggctcaacccttaacaacacgaaggaacctgagtttccaaaacaaaaaaaggaaggaggaggcattaagggggggggggcccccaccttctacaggaacaagcggctggggaccccctggtacaggaccggaccagcaagaggggccagccggctctggaagaccccaacaccaaggacaaccccctcaacaaattaacgacggatggctagcatgggaaccctgccactcttaagggcctttacccggacaaaattcacatccttac

SEQ ID NO: 119888 - DNA, 679 bp, Zea mays
  Clone ID: MRT4577_4081C.1
cctcctccctctcgattccgatctgaatcgcaactagctccgccgcttgattagccggcagccccgtccccatggcgtccaagcggatcctcaaggagctcaaggacctgcagagggatccccccaccacctgcagcgccggccctgtggcggaagatatgttccactggcaagcgacgatcatgggtccatcggaaagcccatatgctggtggtgtatttttggttactattcacttccccccagactacccattcaagccacccaaggttttccacccaaatatcaacagcaatgggagcatctgtcttgatatcttgaaggagcaatggagccctgcattgacagtttcaaaggtgctcctttcaatctgctctctactaacggacccaaaccccgacgacccgttggttccggagattgcacacatgtacaagagcgaccgtgcgaagtatgagtccacagcgaggagctggacccagaagtatgcaatgggctgaccctggagccgcgcttggaggatgatgttggggccatcttcgcttgttacacctaatgtatctttgttcctgttctgctgctgctatatgggattgtactgtccacctacctgactgaattcaagtgtcatattgtgaagtgatggcagaaggcctctatgggtctatgggtgcaccca

SEQ ID NO: 119889 - DNA, 389 bp, Zea mays
  Clone ID: MRT4577_40820C.1
tgagcactgttcttctagatccaattcaggaactactgggattcccaattcaacaagcaagtacagagaggtacgctaagcaagccaagtcaataaattccttggattgcttgaacagttgtgtgatgtacctatccttggatggattgttgcaggacaaaagggtgaactggcactcgactccctttactatcaggctggatagagctttgaagaaaacttcggcatgaatgaattgtttctgtttattcagtcttgaatcgattgtatcttcattcagcatggccttgcaatacgcgacagtggatagtgcctatttctatctctttagtctagtagtttacatgtgctaattcgactgcattacacgggggttgatatgtatgtta

SEQ ID NO: 119890 - DNA, 332 bp, Zea mays
  Clone ID: MRT4577_40821C.1
ggattgtgcatgtctagtgcgatgttcagttcacaggagggtgaatcgtggcgcgtgcgtatgtgtttgttgctgtagtgtgtatgttgtccaattgcattcgagattgatcatttgcttgtcaactggtcattcactcgttgtccctgttatctattatcaacaattcttcagcatttttaagataatggaaaaagttgacttcataaaaaaaagaagaaaaaataaaaaggaagaatcataagaatgggaacactaccaatcaaatgactgctcagtcaacagcaccattaccataaaaaaaaaaaaaaaaaaaaaaaaggggcggcccc

SEQ ID NO: 119891 - DNA, 321 bp, Zea mays
  Clone ID: MRT4577_40822C.1
ccatagtgtgcaatatatgcttcttgccttctggtgcatcatcgccttttccttcatccactccctacacatatgtcccctttcatgcaaagtggattttagggctattacgcatgcttagcctaggtatctctctgacaatgacatgctgatatatgtgacatcatcccccaccatattcttctgggtgatttgttgctgaacctaggcaattcgtcatgtcacgatccgatagtctatctggattgcagcctctgtgtcaccatacagacactgagaatgaacgctgcagtggataatccggagaaatatacacaagga

SEQ ID NO: 119892 - DNA, 257 bp, Zea mays
  Clone ID: MRT4577_40823C.1
aattcttgggtcgacgagtccactcgccggcggccgccctttccattggggtttttttaagccacagcgcggatacctacacatacacaaaaggcgcaacaatgtgacctggcccacaacgcaagaacgaatgactctgaatagccacacgctacattaagcgggcgggaagaaagcctgccaaaacatcaacgatggcactgcaaaatgtaactgatccaaaggcagtatccacacatggcacatgagaaatcaca

SEQ ID NO: 119893 - DNA, 550 bp, Zea mays
  Clone ID: MRT4577_40824C.1
cccacgcgtccgaaggaaggcagggcgtcacatttacagagagaggaaacgcaaccacatcaagaactccgccatcaccagacgacatcagctcccccaccatccatcgttctccagggattacgctttcattcgaagccaggtccaaagatacgaagttcatccgtaaaaaaggtgccgacagctcaatatcgaccatcaacaaagataaggatgcctaataaaccactttcagcattgactctacaagatcgaaatgcagaggttcaaatacaggtccacaggaaatgggagtttcgaggtgccgttgacaatggccctatattacacatcgacatgatcctggcagactgcacaggcaatgctatccattgtcagattccttcgttcctagcagctacaagaggcgatgaatttcaagttggcaaaatatacaagatgacccgcttttcagtagcccgtgcaaaatccacctacaagcctgttgatggggatctcatgttgtatgtcaaaccatacacaacccttgaactttgccacacttgaccat

SEQ ID NO: 119894 - DNA, 239 bp, Zea mays
  Clone ID: MRT4577_40825C.1
gagctctctagtcggcggccgcccgcggtctgtggaagctcttttgtgaaggctaagacagcggagctcactcaacagtgtggatggagaggcatactcaattgggccacagagctagacacatgtcagatgccgactgcgatagctatgaccggatcttttgcatgacactgaactataagccaggtgtttgggccactgtactcgctcatatgagaaatgtacaagagcggctgcag

SEQ ID NO: 119895 - DNA, 2480 bp, Zea mays
  Clone ID: MRT4577_40826C.1
ggtaccggtccggaattcccgggtcgacccacgcgttcggttttgttaacgatgaattctgcaatcattccaaggaacaccaaagagccaaggatggcagtgttgttgatgattgtcttcagacaagcagtaccagagagcttgaagacagtagcattccccaagcagctgcatatgctgtcttggagcccaaaagttctaggactcctattcatgtagaacttgagaggtctaaaacgaaatctgttggtaatgacagcattcagagcatgaaacctgtgccttctgcattgactgttgacaaagccacttcagttcgtgggaattgttctattacacctaataattcatctaaagtagcagatagtcttcctgatagaaattttgaaccttcagataggtcaggttcaacaacaaataaccttgcaacatctctgaagaaaatggtcaggcagcaaactgcaccaaaagttgtgaggcattatccatcagaatctacactcttcccatatgaactttttgtgaggctctatgtcaaggttgagttgcgcccgtttggtcttcataacctaggcaacagttgctatgcaaatgctgttcttcagtgtttgatgtttactcgaccactcacaacatatcttttggaagggcttcactcaaaaaactgttctcaaaacggatggtgcttcatgtgtgaatttgaaaaactcattgtggagggcaaacggcgcaagattgccttgtcaccaactgggatactctctcatttgaatgacattggcagtagctttggtcctggtaaacaagaagatgctcatgaatttcttaggtatgcaattgatgctatgcaatctgtatgcacgaaggaagctagaaaaggaggtgttcttcggtcagcggaagaaacaactcttgtccaattgatatttgggggctatttgcgatctaagatcaaatgttcaaggtgccatgttagttctgaacaatgtgagcccatgttagatcttactgttgaaatagacggtgacattagttcgctcgatgaagcacttgtgcgctttacatccacagaagccttggatggagaaaacaaatatcactgcagcagatgcaaatcttatgaacgtgctaaaaagaagctgacaatagaagaagcgccgaatattctgactattgcactgaaaagatatcagtctggcaagtttggaaagatcagcaaagccatcagatttccagaaaccctcaacatagtttgctatatgaatccagatactgatgacatatcgccagtttacagcctctatgcagtggttgtccatcatgatgtcatgaatgctgccttctctggtcattatgtatgttatgttaaagatacacatggaaagtggttcaaggcagatgacagtcaggtgaaacctgtatctctggacaatgttatgtcaaagtgtgcttatatgctgctgtatgcaaggtgttcaccgagggcaccgagctctgttaggcaggctatttcggacccagcacgcccgaagaaggccaaacagaaggtggttccaggaggaacaacatggcgaggaggttctttcaacaggcaccaagatggtcagcggcatagcaaccacacggcagatgaccttacccatgcatttgacgaatataggaatgcaccatattcgccttcagattctccgagtcctagtgagagttcatccctctttagcaactctgatgcagggtcgcacagcactgtaagcaccgatagcagcgagagcacgaggaactcgaccagcaccgaggagtatgagtatgtgttcggagctgctgatcagatgtacccaggaggccccatgggaggagcacctgtggagagtgatcaaatgtacccaggaggccccatgggaggagcacctgtggagagtgactattctacgtattcccgatccaggtccagcttgaataccagctcatcaggccgggatgcatacagtgcggctagctctgccgaccacaagcatcaggtcgtcggttccggtgggcaggttgagggcgatgagagcacgtccttgttgtatactgacagaagtaatcagcagttgagcagtaagttaacagaccaatataggcagttagatgggagcggacatgaccctggagaaaccaggggcggtgtcttattgagaagaccatctagggacaggaccgctcaaacattttattgatgtgcagggtttgggctgtagagaaataatgtaatgtagcctgtaatattatctcgctgcattgtgtaaaaagagaagagagatgtcgtagtccataaaagttgaatccccaacttggtgatataatcccgaggaacctgtaacaaatgtcacgtattccacgggatcgacgtaggactgtaggagtagatcataagattaatgcaaaagttcattgaacacagacattgtataatgtagcctgtaatatgtttctcgctg

SEQ ID NO: 119896 - DNA, 645 bp, Zea mays
  unsure (1)..(645): unsure at all n locations
  Clone ID: MRT4577_40827C.1
aagggattattttggccgccgtcgctgcccttcctagtcgctgtcgcgacctcatctgcttccagagtccggcctcgtctgcttgcagcgtcgccgaccagatccacccgcacgcggccgtccgcgcctcgtccatcgcagcggccgcccgcacgcgtccatgacctcgtcggcttccggcgccggccagatccgcccagcctctccgcccccgccgaccgcgctgcagccctctccgcggtgcctcggcccctcccgtcgcggctacctccagccgccggtcaacctgccgacgtggccacctccggccgcccagatccgctgtaccacctccagacgccagccgccgaccgcccagaccccctgctccaccagggagagtcgccagccgctacctctagccgccggtcgcgtagatcccctgctccaccagggagtgggncgcccagatcccctgctccaccagggagagccaccagccgctccaccactgtgtcccaaccctatgccgagggattgcgcgcctccctgacgtgagccgcgactgggtgaacacaggtcataacaattgagaaagagagggtcattgttggtgaagctttatttcaaccacatatattgggcttgggagattatgggtatcgt

SEQ ID NO: 119897 - DNA, 598 bp, Zea mays
  Clone ID: MRT4577_40828C.1
acggaggccgatccaaggaagtggagggttacatgggcaggtggaggtggcacaggtggaggagatgatggcaacggcggaggtgacggaggccgatccacaggaagtggagggccaacatgggcaggtggaggtggcacaggtggaggagatgatggcaacggcggaggtgacggaggccgatccacaggaagtggagggccaacatgggcaggtggaggtggcacaggtggaggagatgatggcaacggcggaggtgacggaggccgatccacaggaagtggagggccaacatgggcaggtggaggtggcacaggtggaggagatgatggcaacggcggaggtgacggaggccgatccacaggaagtggagggccaacatgggcaggtggaggtggcacaggtggaggagatgatggcaacggcggaggtgacggaggccgatccacaggaagtggagggccaacatgggcaggtggaggtggcacaggtggaggagatgatggcaacggcggaggtgacggaggccgatccacaggaagtggagggccaacatgggcgggtggaggtggtacaggtggaggagatgatggctacg

SEQ ID NO: 119898 - DNA, 871 bp, Zea mays
  Clone ID: MRT4577_40829C.1
agatggtgctgatgaacagaactgaaggtggatagacaaaacaaatatcagaacaaaagctgattgtcaagcggacgtcgtctaacaacactaacctagtgttatccaggtatgcaattgatgctatgcaatctgtatgcacgaaggaagctagaaaaggaggtgttcttcggtcagcggaagaaacaactcttgtccaattgatatttgggggctatttgcgatctaagatcaaatgttcaaggtgccatgttagttctgaacaatgtgagcccatgttagatcttactgttgaaatagacggtgacattagttcgctcgatgaagcacttgtgcgctttacatccacagaagccttggatggagaaaacaaatatcactgcagcagggctaacatcttcatcaatacctctgtcactgggtagcactgatcctaaatacctaaagatgcaaatcttatgaacgtgctaaaaagaagctgacaatagaagaagcgccgaatattctgactattgcactgaaaagatatcagtctggcaagtttggaaagatcagcaaagccatcagatttccagaaaccctcaacatagtttgctatatgaatccagatactgatgacatatcgccagtttacagcctctatgcagtggttgtccatcatgatgtcatgaatgctgccttctctggtcattatgtatgttatgttaaagatacacatggaaagtggttcaaggcagatgacagtcaggtgaaacctgtatctctggacaatgttatgtcaaagtgtgcttatatgctgctgtatgcaaggtgttcaccgagggcaccgagctctgttaggcaggctatttcggacccagcacgcccgaag

SEQ ID NO: 119899 - DNA, 571 bp, Zea mays
  Clone ID: MRT4577_4082C.1
ggccgggaccctttactactcccgccccactcttccttttttttttccgcgcggggatttgagttggaggaggcgggcagctgggttggggacgacgcgcagcgcaggagcaacgcccgagggaaagcagcgtacccatccattctccggatgtcccatggcaattccggacgccggagcggttcgccgcgtcagatgcccgaggtgccactgcgtcctcgaggagcccggcgccccagtgtaccagtgcggtggatgcggcgctagccttcgaggtaacctctcgtcggtcccactccgatttcatttggatggttgctctgctctgctcgtctcgccagaggttttttctttccttttggtttggtttctccgtatctgacggattctcccgtacgtgctcagcaaagaaccgcaccggccccagcgcaggagacaccgacctgccttcgcctcctcagagcagccacctggacgccagcgacgtcgcgaccaccagctggtccaggtccagctccccgtctcctcccgctgttgggagcagtggcaggtccggcctcccgccccctcc

SEQ ID NO: 119900 - DNA, 591 bp, Zea mays
  Clone ID: MRT4577_40830C.1
gccatgtaactctcattcttcaccaaacattaatggtcatagcagttttgtaaacaaagaattctgcaatcattccaaggaacaccaaagagctaaggatgccagtgttgttgaggattgttctcagacaagcagtaccagggagcttgaagacagtagcattccccacgcagctgcatctgttgtcttggagtccaaaagttctaggactcctattcatgtagaacttgagaggtctaaaacaaaatctgctgggaatgacagcattcagagcacgaaacctgtgccatctgcattgactgttgacaaagccacttcagttcgtgggagtctttctattacacctaataattcatctaaagtagcagatagtcttcctgacagaagttttaaaccttcagataggtcaggctcaacaacaaataaccttgcaacatctctgaagaaaatggtcaggcagcaaactgcaccaaaagttgtgaggcattatccatcagaatcgactctcttcccatatgaactttttgtgaagctctacagcaaggttgagttgcacccttttggtcttcataaccttggtaacagttgcta

SEQ ID NO: 119901 - DNA, 557 bp, Zea mays
  unsure (1)..(557): unsure at all n locations
  Clone ID: MRT4577_40831C.1
tatgccccgtttatttacaaatattaggtggccacgtttcaatgtgaaggtttctctgtctcagtatccttaaggttgcattgtttctcaaactttaacaatggtagccatttaagattaaaaacaatataaaaatccaacatccaaattgcagaagccaagtattgccttaattacttcaattacgttagttacattgtcacttaaatgtttgtaaatataaaattaggtatgcttatgtatataggttttacatagtgatacaacccaaacacactgacagtgtaaataccaacaaaagtgcattaccagtaaaaatgcaaaatagcaatataaagctagagatactctgctcaaactaaattggtgttcccagtgtgaccgtggcactgagtgctgagttaggtatgctgtatgtcagaatgccgtgtaatgagtcagttttgcacagctaatgagtattcctgtagagcaaaattttgtcctctcgccttaacttgctgtgaacatgtcttttatacgtatgaagtccacttccctttttccttgntgattcc

SEQ ID NO: 119902 - DNA, 164 bp, Zea mays
  Clone ID: MRT4577_40832C.1
ggtgtcatttggctctacaacatcggcttctacttgccggtggatataatcaaagggctcatacgctatgcgctgagtgggaggggacatgaacccttgccctagaccagaggatcgtttacacgcgcaaaaaaattttggacacgaaaaaaggggagcccagg

SEQ ID NO: 119903 - DNA, 2216 bp, Zea mays
  Clone ID: MRT4577_40833C.1
gcagtcgaaacaatactgtggcatatgcaagaaaatttggcaccacacagatggtggaaactgggtttgttgtgatgagtgccagatttgggttcacgttgaatgtgatctaacatgcaacaacgtcgaggatttggaaaatgcagattatttctgtccggattgcaaatcaaaaagtaaaacagttccagcaactgaaaatttgaatacttccacttcagaatgtgctagcacttctaagggaaaactgaccgcaatgatagctgtttgctgcaatggcgaggatgcactgtatgtacctgagaagcacatgatactatgtcaatgtaagtcttgcaaggaaaggatgatgagtctgaatgagtgggagaagcatactggctcaaggaaaaagaattggaagatgagtattagacaaaagagtacaggggaactactcattaatttgctggatgatattccttgtgggacatcgaagtattctaacccaggcattaagaaagaagagctgctacaattgcaagctaatccttacagtcctgtctgtgctaaatggacaactgaacgatgtgctgtttgtcgatgggttgaggattgggactacaataaaattataatttgcaacagatgccaaatagctgttcatcaagagtgctatggagcatgtgctgtacaagatcttacaacatggctttgtcgagcatgtgaatccccccaacagaaaagagaatgttgtctatgccctgtcaaagggggcgctctcaagccaacagacattgatggactgtgggttcatgttacatgtgcctggtttcagcctaaagtatcatttccggttgatgagacgatggagccagctatgggaataatgagcatccctgtagaatactttaagaagacttgcgtcatatgcaagcaaatgcatggtgcctgcacacaatgctacaaatgctctacctattaccacgcaatatgtgcgtcaagagctggatattgcatggagttgcaatgctctgaaagaagtggcaggcacattacaaaaatggtttcatactgtgattttcatagtactcctgacccagacaatgtgttgatagtgaagacaccggaaggtgttttctctaccaaattttttctccaaaatggtgagaaacagacagctgcaagactcgtcaggaaggaaaatcaccaggagaaagtgcttcctcctataatttctgactgtctagtcgcaaagtgcctgacctatgaaatgtcgaaatacaagaaacaaccaggagaggctattgcccaccggattatgggacctcgtcaccactctcaggattttattgatggtcttaatgcatgcatggatcgtaaggatgaccaatctttttcaacatttaaagagcgacttcggtatttacagaaaactgaaaatttgagggtctcgtgtggtcgatctggaattcatggatgggggctcttcgccgcaaggaatattcaggagggtcaaatggttattgagtaccgtggcgaacaagttagacggtgtgttgctgacttgagggaagcacagtaccatagagaaaaaaaggattgctatttgttcaagataagcgaagatgttgtcatcgatgctaccgacaaaggaaacatagcgcgcctaattaatcactcgtgtatgtcgaactgctatgctaggatcatgaccgtcagcgatgacaggagcgagatcattctgattgccaagagagacgtctctgccggagaagagctgacgtacgactacttgtttgaccctgacgagtccgaagactgcagggttccatgcctgtgcaaggctcctaactgccgtgggtacatgaactagaagactaaccaacctcagaaatagggactaaagactaacgtgacctcagaaacagggaccaaaggctggccatttttcccggaattctaccgttagcttctcggtttatatttactggaaagtttattagttctcgtggctgcccaagttttgaaccattttgtttagatattgcgattgagggcagccacaccattgtatattctttcattgttgtaataagacaccagtataatcaagaatgctgactttgaaatggaaagaagaagaaactcaacttgatgccgtccaaaaaaaaaaaaaaaaaaaaaaaaaaaaaaaaaaaaaaaaaaaaaaaaaaaaaaaaaactcgagggagggc

SEQ ID NO: 119904 - DNA, 177 bp, Zea mays
  Clone ID: MRT4577_40834C.1
atctccgtgagatctctctccccctcgttctctgttgccaggagttcggcgctccattctctcccaccgcacagtcaaggatggccgcctccaggacgtcaagtcgtcaaccatcgatcccatcggcaagaggtgtccccttttgatacggcacctccgttccccgctgccacacag

SEQ ID NO: 119905 - DNA, 520 bp, Zea mays
  Clone ID: MRT4577_40835C.1
gccggccggttccggacagactctcagcacgaataatttcctctactgtcgccagcatccgacctccctgtcatcttgatctacctgtccggcgccaacatgattctcaactcccgagacctcgtacaccaccccgccaccaccgcaagaggcgtcttccggagagggcgcatcagcatgcgcttcaccgacgccgagaccaaaccctagcgctgctgcaacccctgagaccggggccaccgatgtatataacaagatgccgcctggccgaccagaccccaaattacatgaccgatgagataccaggaaaatacagctggcacacccgagagattgtacaccgactcttagagtgtcaaggagaaccacaagatgaagtgcatccactgtagctgtgccatggtctcgccctcttcttcgcatgatcaagctaataataaggcccaactgcaacaagttcgtcaaagccgagatgtctcacagacgactcccacatcatcaaatgcccgtagttgactac

SEQ ID NO: 119906 - DNA, 318 bp, Zea mays
  Clone ID: MRT4577_40837C.1
tcgagaaaatcaactgttctggggccaaaaggaacttcaggttcaattaagtggatccttctgaaaaaagaaaagtaatactctgtatttctagcatccttggtgtgctaatttatctgtttttttttcctttcagatattgttgttacttctggctttgatcgctgttccatggatgctcttcccaaaaccttttatcttgaagaaacttcataaggagagatttcaaggtcacacttatcgtttcctagggacatctgaaatggatccagattctgaacctgatttcgtccgagcacgtcatgatgattttccatt

SEQ ID NO: 119907 - DNA, 162 bp, Zea mays
  Clone ID: MRT4577_40838C.1
tcgacgcaagccacccgtccacaacatcatcggcacctgctctacccctcaagcccttagactgctcttcacggccagggacacatgcaccggcgtcaccatagatgacttcaacgacgactatacctacaccaacaacaagaccatcgctatattcacgaa

SEQ ID NO: 119908 - DNA, 645 bp, Zea mays
  Clone ID: MRT4577_40839C.1
gatgcccgtcggccacctcgggcaaagccaggcgccccaccaagcaaccgagaggagagagagaaaagattaccgtcgtcgttgatctgcgtctgcgctaatgattggtggctagaatcaagtcacggaggttcgcggtattacgtggatcgtgttccaggggtttcccaggagcttgggtgaatggtttggggcgaattctccaccggatctgatgaaggccaccagtccgcacttcgccatggccagctcatgtcgtcacctcgagcgttgacgagcaagccactgtggaaactgaggttcaacaagtagaagtagctgagcaggagctcattaaaggtggttcaggaggagccacaaggcgaggagtttgatctgatctaggtggcgtttctcagttgacatctgcgccgacgatccttagttcgttttatactcattatttttattttgtaataagtcttccgctatgtaataaatactctgattattatgatatttatctctatacactctgttattatatatgttgtcttctttggcgcatgtatgagatgcacccggctttgttctttaaaaccgggtgttacaccctacaatttggtttagttattaatattaataaagttagtcatttggttgggc

SEQ ID NO: 119909 - DNA, 287 bp, Zea mays
  Clone ID: MRT4577_4083C.1
ctgacggcgcttttgtctccggtgaattttgtggcgggaagcttctgcgctggtgcttagtaaccgactttcctccggactcctgcacgacctgctcctacagccggcgatccactcccggctgttcccccggagggtccagaggcctttcagaaggagaaggcagctctgtttctctgcagcggagtagggtcctttcagccatgaagcatgtgttgaacctctacctgttaggtgtggtactgaccctactctccatcttcgtcagagtgatgaagtcctagagg

SEQ ID NO: 119910 - DNA, 287 bp, Zea mays
  Clone ID: MRT4577_40840C.1
cgacaggcgtcgttgcccctagctcatcactcatcagctagccccccgccgtctgcccctctccgccaacgcgcctataaataaacacgacgcacatcagcgtgcttcattcaatccggccgggtccgtccgcgcgcgcaccaaccggcacgcacatctcagccttcaaacctctcaaaatcttttcactcagttcgagcaaggggggcagcgagcgagccacgtgctgcagccaagctagtgccaatggcgagggcggtggcgatgcttggggccctggcgctggt

SEQ ID NO: 119911 - DNA, 415 bp, Zea mays
  Clone ID: MRT4577_40841C.1
ggggaaaaaaaaaacccccttttggaaaaaccgtttgagagcactgtaacgtccaacagccgtcccttaatcagaaggggagcttctccctgcttgggggtaccctcctgggaaaaatggggattaaaataacaccccccgtaaaagcccacaaaaaccaaccccaatttgttttacccttagtaggcacccttttttaggatgttcctcccagtcccaaaaaaaagaaaataagccttgcccccctacccctgggtggggaccttgccgtccccgccaacggggtcccccgcttttttgggcgtggggtcggcccactccacgggaggggccccctttttgggggcctccacctccccgggggggggggggggcttttcttttgcgggcggggcgggggggcccttgtttttcc

SEQ ID NO: 119912 - DNA, 337 bp, Zea mays
  Clone ID: MRT4577_40842C.1
attaaaaaaaagtttttttttttttcacttaaagtattattatttattaattataaaaaaggaaaaaagggggaaaaaaaaaaaaaaaaaaactgaaaaaaaaaattaatccaccttctctatcttggggccagggccaccggttccaaccggagcgttcttttccatgccgccggaacctctaatgttggaaacccgcgccctggtacatcttaggaataatggggggggaaaggctctccaactccttgatcttgaaataaaactcaaccgcctcgggaaactggttggggtccaaacaactaatggccgagtaaatggcgtactcaaaattttt

SEQ ID NO: 119913 - DNA, 515 bp, Zea mays
  unsure (1)..(515): unsure at all n locations
  Clone ID: MRT4577_40843C.1
ccgtccgtcccacgtcgtctcgcgtgacgtccgttgtgtgcgtnngtccgagtgacgtntngctctgtcacgcctcgcgtgtangggtgcttcgatgggccgtccccaccggcngnntgtcggcttttcatatcgtggatgcctcatagtntnncgatgaccgacnccctcttctatcacnnggaggagtnaggcttacncnntgcatcncnntaaaatccnnngttctcaagagtgtgnntcttcgagccaccgccccaacgacaagnngcccatcanntcttctctcagacttttccaacaccgtatgtccgcngccagcttctatctcgcaaagcgtgcatagaacataataccccttgtgtnntcttctctgaccccaacggagtggaccgctatggtgtaccgccccgtacccgcgtctggaacctcgtctggtnagggggccgtcatagctgttgcgtcgccccggcgggctgcagaggaaatcgtgtcgaaggtcccgggcgatactc

SEQ ID NO: 119914 - DNA, 440 bp, Zea mays
  unsure (1)..(440): unsure at all n locations
  Clone ID: MRT4577_40844C.1
accaccaaaggcggcaggaaacagacggaggaaaaacacatcgaataaagggacaaattccggggaaaaggcccggggcgggggggaaggggaggggggccagggggcgggccccaaactacgacccggagccacccccggccacacaagaagggcggaacagacccgagacacaacactggcaaagacccagagacaccacgcacgccaaaccaacacagaagaagaacaaacgggggaccctaaagggggaactgccgggggggaagggccgccccaggaacgcatagaaggagcccatgacaaacctctatgagaaaccgggaaaagaagaccggaacctccaaccgaaccacccaggcgtacaaggaggggcaatagaggggggcaaaacaacgcgcagagctgcttgctgtgggaaattgctatncggttacaat

SEQ ID NO: 119915 - DNA, 1119 bp, Zea mays
  Clone ID: MRT4577_40845C.1
cctcgagccggcctggccgggatgtcatctcatctcatcgcacaagtccagaacacggttattgatctccattgccagtccacatcaacggtcgtcgtcatgaaaatgaacatgtccctggttctgcgcgtagccttctcggcgtgcctggcttccctcgccgccgcgggctggtctcccggcaccgccacattctacggcggagcccacggctccggcaccatgggcggcgcgtgcgggtacgacaacctgtacaacgccgggtacggcgtgaacaacgcggcactgagcgcgacgctgttcaacgacggcgcgtcgtgcgggcagtgctacctcatcacctgcgacacgtcacgtccgggcggccagtcctgcaaacccggcagctccatcacggtgtctgccaccaacctatgcccggccaactacgcgctgcccaacggcgggtggtgcggcccggggcggccccacttcgacatgtcgcagccagcgtgggagcacatcggcatctacggggccggcgtcatcccggtgctgtaccagcaggtcaagtgctcgcgcaccggcggcgtgcgcttcagcctcgccggctcgcagtacttcctgctcgtcaacgtccagaacctcggaggcagtggctccgtgggagctgcctgggttgagggcgacagaacgaactggatccagatgtccaggaactggggcgccaactggcatgcgctcgccgggctcgtcggccaggggctcagcttcgcagtcaccaccaccggcggacagtacattcagttctggaacgtcgcgcctgggtggtggcagttcggacagacctataccacaaacctgtatttctactactgaaacctgcaggcagcagcagaatgcttggatcttcctgtcgccgcccacagaattcttttggttcggtcaaatatatgccaagcttgggaggtcctcacctcataaatgcctgctgttaatttcttatcaacgagttgtagatatatttgttcagcgttagatatttctttcgaagttgtaggtatctcaaacacactatatatatacacatacatgtatatgatttccgagaacatgcatatactactctattaacaaact

SEQ ID NO: 119916 - DNA, 1020 bp, Zea mays
  Clone ID: MRT4577_40846C.1
aatttaccgagtaaattttagaaaagcggttgggagatgttcttagccacgtataaaaccagtcctagcagtggtaacaacgcagagtaccttttttttttttttttttttttttttttttttatggcaaattggcaatcagcatgccaaccaaacaggcccttgagcgctgcatgatgctgaatgctgattgatagaggcttttattcccatatttccgatgtacacatttggcaaatttgcctacatgataaaaccacaacctcgcagttccaccactgatccgatgtaaaaaaaaaagccaactaaccgagccaaagacaaggaagaaagaatggaccccccaaaactcttttcacaacttcaagtgccgcgtatccacaacaggagtccccaaagtgagctagtatcagcggcatcgttgcacttgttctgtcctatgtaccaagtcaaatgcaagcaagaaacatactgaacccaaatctgatttttcctaaccactcattcaaccttgggcaaccgatatagaataaatctcatcttttccattataatttcctcagcttccccatgaaagtctaggcacaataagatgtgaataggcacggcagatatgccaagcaacacgggaccagcgatgtggcatcattcagtgagcaatagatttccaaaggaccaacagttctttttcttcctttgatgacacatgtgggtttccgtgtcacgtgtagtaagggctaaagatcaatggtcaccgttgcattacgccgaatcatatcgagctccagatgtgaaagaagagaaaaacccagctgctggtccaagaaggatgtcacttagcttaccaacctgtccatcagagagcatggaaccccatctcgatgtgttctccccaaatttggtccccacctgagtaacaaatgacttaagcaatggagcagcaccaacaagacttgcattatcatcaaactctggtgtagtagatccatctccatttgaataagatttccaaggattttt

SEQ ID NO: 119917 - DNA, 339 bp, Zea mays
  Clone ID: MRT4577_40847C.1
acgctacatagggcgcgatggcaccatcattccagagggcaaacaacacagtcggagtacttacaacggtggtaagacatgcttatgcaaatgactaatctaaagcccgccacctggggtggagcgggcattacgggggtagggaattttacaggatgacgttacagaagcagtcatcctatgaacacccgacacaatacaaggacgacaagccggatggctctgatactagaggtgactggcggcacggctcactgtatgactgaacaatctgctgggaactctccaattgtcacgcgaacaacgaataaaaaggggcggagctgctcttggtttgcc

SEQ ID NO: 119918 - DNA, 1258 bp, Zea mays
  Clone ID: MRT4577_40848C.1
ccacgcgtccgcctactcttccttccaagaaccaattggaagaaaaacagaaagcgaaggaacgaacgaagctagccattgcttgtttgtcgcgattgacaccaatgcatgccccgaggaggttcaagaaggccttcatggcgcagcttctgctgagcctgcgtgcggccggccaggcgtccaagtccatgggcctccgggagcgccgggacgccgtgcggctctcctccgacgtggcgatggcgctggcgtccgcgcgggcccgcgcggcgccacgctcgacggtttgggcccgcgcgctcattgccaggcacgcggcggagcagcgcaacgaggcgctcatgcgccgcatcatgggcggcgccggctacgagatggccgccgcggcggtgagggccaggaaggaggctcggtgccggaggatcgtgaggaggtcgcgctgggtatgcagcggcgtcgggaggaagaggaggagcttgctggcggcggagggcggcggaggcatcagatgcagcgcaatggcggcggccaggaggatggtgaaggcgaggctgcaggtgctgaggagccttgtgcctggaggggaggcgatgggtggcctctccctactcaccgagacgctggattacgttgtgtgcctcaaggcacaggtggagctaatgcaacgcttgtgcaaaggatcctgttcccagtcccagcttggctgaggagatgacatcatgtctcacatctcaggggacggagcagcaactgcgagactgcaggggccatgcatgcacaaaaggcaaggaccgcaagcaactgaagccgtctggatgggtgggcgtggcagagctccgatgaattgtctccgtgagccaactttactatacatatagctagcagtactagacgtaccggtgtaatgtaactactgtccaagtacatgtcgctgcaaagatgggcttggttttgctgtatcacctcacaggagaggatgaacacaagccatcatccatttggtgagtcatgttttgtcgttaaataataactagcaaatcttggtttattgggtgggcaaaatataatattctcttgcacgtggattctggagtcttgaagagatgggcatctttgtggtcaaaggctctgttggtgtatgttcagaatatggcataatattactagcatgtatgtaccggtaaggataacaaagaggtggtgtgatcaatggtgatttaattataatgaaattaaaataatcatattttcgagtagg

SEQ ID NO: 119919 - DNA, 137 bp, Zea mays
  Clone ID: MRT4577_40849C.1
cggccgggccgggtactcccaacagagagaggagcctcggacaagttacagcggcactcgttcggtttccttgctgaattcccgatcgctcgctcgcccgaagagaaagaagctagcttttagcacgccgcctctgg

SEQ ID NO: 119920 - DNA, 767 bp, Zea mays
  Clone ID: MRT4577_4084C.1
agactccgtcccatcctccttcctctcgattccgatcggaatcgcaactagccccgccgcttgattagccggcagccggccccgtccccatggcgtccaagcggatcctcaaggagctcaaggacctgcagagggatccccccacctcctgcagcgccggccctgtggcggaagatatgttctactggcaggcgacgattatggggccatcggatagcccatacgctggtggtgtatttttggtcactattcacttccccccagactacccattcaagccacccaaggttgcatttaaaacaaaggttttccacccaaatatcaacagcaatgggagcatctgtcttgatatcttgaaggagcaatggagccctgcattgacagtttctaaggtgctcctctcaatctgctctctactaacggacccaaaccctgacgacccgttggttccggagattgcacacatgtacaagagtgaccgtgcgaagtatgagtccacagcgaggagctggacccagaagtatgcaatgggctgaccctggagccgcgcttggaggatgatgttggagccatcttcgcttgtaacacctaatgtatctttgttcctgttctgctgctgctatatgggattgtactgtccacctactgactgaattcaagtgtcatattgtgaagtgatggcaaaaggcctctaatgggtctatgggtgcacccattcaacaaattaatagagatgggaactggaactaaagttgttccgttgcttg

SEQ ID NO: 119921 - DNA, 354 bp, Zea mays
  Clone ID: MRT4577_40850C.1
ccaaaagccaacctgaaaaaatggggcaataccaatccccccccttttgggggggagtccttttccagcattatgaccctgccccccattgcccatgggcaaaccttggaaaatccaaaccccaaccttgaagggggggttgatccaaaactccaatccttttaggggggggataaacccccaatccttccaccttaaaaaaaagtttgttgtgattagacccccccaccccccgcgggttgtccctcctaaaaaatcccccccctgcaatattaaaaagcccgttttacggggcccaagctgtttttctttggccagtttccctttattggagttaatttgtttccaaaacca

SEQ ID NO: 119922 - DNA, 395 bp, Zea mays
  Clone ID: MRT4577_40851C.1
cattgggtacctcgaggccggccgggaaagaccaaacgatgtcgacaccaggagccccgagcctggccacgacagcggcggctgtcctgtgcgtcctggccgcggcgctcgcggtcacggtcgcgagcggccagcagtgcgggcagcaggccggcggcgcaacgtgccgcgactgcctctgctgcagccgcttcggcttttgcggcgacacctccgagtactgcggcgccgggtgccagagccagtgcaccggctgcggcccgcgtcccgcgggccccggcgtggcatccgtcgtgccgagagacctcttcgagcggctgctcctccaccgcaacgacgcggcgtgccctgcgcgcgggttctacacctacgacgcgttcctggccgccgcggcc

SEQ ID NO: 119923 - DNA, 294 bp, Zea mays
  Clone ID: MRT4577_40852C.1
cgttcgtatccttctctcgtcttcctctccttctccaattcctctccgagagcttctagtctagcactccgttaacaatcgagtaatccacggcgcggcagtaatgtacttatatgtgctaccaggtagtgagcagacgaaggctcggcagctgagcgacgggcaggcccggaagcggcggctgagcgacgggcaggcgcggttcctggagctcagcttcgggaaggagcggaagctggagacgccccgcaaggtgcagctggccgccgagctgggcctcgacgccaagcaggt

SEQ ID NO: 119924 - DNA, 402 bp, Zea mays
  Clone ID: MRT4577_40853C.1
aaaaaaaaaaaaaaaaaaaaaaaaaaaaaaaaaaaataaaaaaaaaaaaaaaaataaaaaaaaaaaaaaaaaaatattaaaaaaaaataaaaaaaaaaaaaaaaatataaaataatttttttccttttgccggaaccactttaggggtaatttttgccgttttccttccctttgggggcctttttggctttcttttggggggcccttttccccttttattgggtctttttccatttttttgcccttttttttacaatatcacgtttggaaaaacctttgttttccccaatttaatacctttcttgaccattccctttttcctgtttggggtcattcaaaaagggccctttcctatctcttttccaaatatttggtcaacttgaatgcgatatggccccccct

SEQ ID NO: 119925 - DNA, 210 bp, Zea mays
  Clone ID: MRT4577_40854C.1
aaaaccaaatagcatgtcacagctgtgcatggaacttatatgggatgaatcaaaattcctaacacttgtgtcccccaaaccaaaaggaaaaaaagccagttttgggggagccggcccccgcctagggacttctccaccccggaaataaatcccgacccgttccctgaaggctaccaagttttccttataggaggcggaataaaacctggg

SEQ ID NO: 119926 - DNA, 1443 bp, Zea mays
  Clone ID: MRT4577_40855C.1
atggtgacgtcaatacctcatattttcatcaacatgccagttcattacagggactctactctaaatctagatgccttccataggccggccttgaatttacatgatctggatcagaacttcagtgaggaggaggtctggaatactatcaaggccctgccatctgacaaagcacctgggcctgatggctatactgggagattttataaaaaggcctggccagttattaagggtgatcttatgacagctattaacagattgctacatggggatatttctaaactgcatctccttaattcagcttatgtgaccttactacctaaaaaggaggctttggaagttaaagattttaggccaataagtctgatacacagctttgcaaaaattataactaagctattggccatcagacttgcaccaaggcttcctgttctggtgtcaaaaaatcaaagtgcatttgtgaagggtagaagcatccatgagaattttatttcagttcagcagactgcaagggctattcataggcaaaaggtgccccgtatcctgctgaaattggatattggaaaagcttttgattcggtatcttggtccttgtttgaaattttcaggcatttgggttttggtcctgtatggtgcagcatcatttctaaattgttgtactcttcttcaacaagagtacttgtgaatggggaacctggggagattatcaagcatcatagagggcttagacagggggaccccttgtcccctatgcttttcatcctagtaatggatgccttggattcacttattttaaaggcacaagaaaggggtctgttgctgcctgtattgagacatggaaatggtcaacagatttccctgtatgctgatgatgttgtacttttcttacagccaaacagaagagagatcacagtgatcaaggagattttaaggatttttggggaggcctcaggcttaaaaaccaatgtcagtaaatgcagtatgactcctatccaatgtaatgatctatgtgttggtgaggcacaatccttattcccttgcaaaggcgtctcggagccccgccagggaggccgacagcagcgcacgcggctacgctggtcaaggtgtccgcgcccgcggcagaaaagaaggggagtgtcggatccggccgggaaggccacgacagcgacggatccggacggggagacgcgatccagccaaagggacggcggatcgagccgagaaggacgcagcaacgtggatccggccgggaaggccgcggcagcgacggatccaacgaaggcgaggaaggggagggcgacggggcggttccagccaggcaggggcctgcgccggacctggcagaggatgggtgatgctggtgataagagaagcgtgaggaggcactgctcggtgacggcgcagtcagaggacgcggcggcggcgcggatccgggcgacgctgtag

SEQ ID NO: 119927 - DNA, 169 bp, Zea mays
  Clone ID: MRT4577_40857C.1
gagagcatgagctttatctactcagagcggagataaccggactgacaccatgagggtgaagctcgataccctatatctgctggctctcattgcgaactgcaccttcagcataaagcgggaggtgcaggtgccagccaacgcccgaggattatctaccgtcggacatgca

SEQ ID NO: 119928 - DNA, 280 bp, Zea mays
  Clone ID: MRT4577_40858C.1
gggttggcttctcctacccctccggttcgtgttcggattcaataggttgtgcggggttcggtttcgtggttgagcggatcgagacggctgcgtatgatgttgagtaccgatgcttcatcggccggctcgactgcaccacggacgaccactcccttcacaacgccttcaacacctacggtgaggccctctggttcaagatcatgctccatcggaagaccccttggccccgctgcaaaggttttgtcacctactacaccgaagacactataacgaaacgcca

SEQ ID NO: 119929 - DNA, 1375 bp, Zea mays
  Clone ID: MRT4577_40859C.1
ggaaagggtaagagaagaaaaaggaaggaggtccggggtacacgacaaagagacgaagacagtgtggaggggaggcagggtagcccccgcggcgccgctccgctcgaaatccccaaaaaggcaagatcaaatcaaatcagatctctccacccccagcccatccatggcgatcgtgtacgccctggtcgcgcggggcacggtggtgctggccgagttcgccgccgtctcgggcaacgccggcgccgtggcccgtcggatcctcgagaagctgccgcccgacgccgagtccaggctgtgcttcgcgcaggaccggtacatcttccacgtcctccgatccgacgccgccggcatcaccttcctctgtatggccaacgacaccttcggaagaaggatcccctttctctacctggaggacatccaaatgaggttcatgaaaaactacggcagagtcgcccactctgcgctggcttacgccatgaacgatgagttctccagagtgctccatcagcaaatggagttcttctccagcaacccaagcgccgacacactcaaccgtctccgtggagaagtcagcgagatacacaccgtcatggtcgacaacatagagaaaattcttgacagaggcgatcgcatctcgctccttgtcgacaagacatccaccatgcaagacagcgcctttcacttccgcaagcaatccaagaggctccgtagagctctttggatgaagaatgccaagcttctagttgtgttgacagttgtcatagtagtgctgctctacttgatcatttctgctttctgtggaggcctttccttgtcatcatgcagatcatgagtaacacaccagatggctttgcccctcccttaaatggagggtagaacaccatggaatgatgcctgctgtgttgagcaccggagcttccggaggcaaaaaaaaaaaggagatcgatggataccactgtggtttccagtaacttggatcagtttgtacagtggacgagtggagttggccgttgctgtttttgatgtcgccatggttgtgggtgaactcaaatcttaaatcgtggtgtgcttagcatctttcttggcttgtcaaactgtcgttgtgacttgtgagggatgggactagtgagttgggttttgtagagttacttggttatcaatgtgcagacatatatgtatgccgcgatgagtgttagtacatgcctactatggttatcggtgtacgaaagtgtcttagctgctgttgttttgagtctgccatggatggatgtggttgtgttttgaaggaactgcccttgtggccatgtgatgaataaaagcacgtaaagcaaaaaaaaaaaaaaaaaaaaagaaaaaaaaaaaaaaaaaagcggcc

SEQ ID NO: 119930 - DNA, 495 bp, Zea mays
  Clone ID: MRT4577_4085C.1
cgcgccacgcgcgcgcccacctcgtcttcccaaacaagaaggctacgtgtcccgcgcggcggcggcggcggcctcggtcctccctgccagagcgcgtcacgccgccgctgctaccgacggttaccgtggcagcgcagctcgtgcgctgaagcgccgtcaagccgctcctcctccttcacgtggcttgccgtcccggcgctaccgccagtgcagagcgcacccgtgctgccatggcgtggagcccaggtcgtgccgtcacgggcacggctgctgccgccaccacggcaagccggagtgcagcagctgccgagggtactgctgcaggcccagagcgcaggagccggccgccaaggacaccaagcggcgcctggcgccccggaaccactgccggccggtgctcaagggcgcgccgttcatcgtctgctccagctgcttcaagctggtgcaggtgcccgccgacttcgccgtctcgtccaggacggtgcgcaagctccg

SEQ ID NO: 119931 - DNA, 306 bp, Zea mays
  Clone ID: MRT4577_40860C.1
ttgcatacaacatgacacagttcacagggaactggctggaaactcaggtcttggtttcaggagatgcagcatagtcaaacaagactcacatatcacggcatgacaaattttacacgggactagggggaatgtgaccgctttatggagattacaattatgagcaactgacatacaacggtggtagctactaagctacattaactaagacgcgagcagtgacacctgactcaaaactagaactacgtattgaagctgattccttaccggttgtatcttcaaggacgatagctacaaaacccacagata

SEQ ID NO: 119932 - DNA, 286 bp, Zea mays
  Clone ID: MRT4577_40861C.1
gggcgtggttaccaattcacttcattcaaaaagtggtcacgggacattttatctgagggaatcacaatgcaacacatttgctaacaaaatgggggaattgctacggcctcgaccattacaaatcggcaataaatcgcctggtatttatgcacaccggaaactgtttaaataaccgtgacctagtaagacgggggaacagccataaccatggcataagtctgcctcgcctagggtgcaaaaactaggacacctttgtgaactggtaaggcaaaccaggtcctttgcc

SEQ ID NO: 119933 - DNA, 357 bp, Zea mays
  unsure (1)..(357): unsure at all n locations
  Clone ID: MRT4577_40862C.1
gccgncgggnnacaacgncgngacngggaaaacccnggcgnnacccaacnnaancgccnngcagcacaacccccnnncgccagcnggcgnaanagcggggaggcccgcaccgancgcccnncccaacagaagcgcagcccgaaaggcgaaggggacgcgcccngnagcggcgcannaagcgcggngggngnggnggnnacgcgcagngngaccggnacacnngccagcgcccaagcgcccgcnccnnncgcnnncnncccnncccgncncgccacgnncgccggcnnnccccgncaagcncnaaaacgggggcgcccggaagggcnccgannaagngcnnaacggcaccccgacccc

SEQ ID NO: 119934 - DNA, 784 bp, Zea mays
  unsure (1)..(784): unsure at all n locations
  Clone ID: MRT4577_40863C.1
gctgcacacagtgggcacccgagctccgctcagctcgacccctctcagacctacttcgccggcttccttccacgccgccgcccccatgctcctcccgacgcgccgcctccccgctgccccttccggcccagccgtccacccgtacatctcccctgcgcggccctccctccggttccggcgacagcatggtcgagcggcgacggcgagggcgacgtcagcgacacctcccgtgtttggtgacacactgctgggtctgtacgagaaagagaggttaggcctctcgcggtacgccgacgaggagtccagagaagacgtgttctgggaaaccttggacgctgatttgcagtactggaccagatccctgcgcccggtgcagtggtatcctggtcatattgcaaaaacagagaaggaactgaaaggacagctaaagctcatggatgttgtcatagaggtccgggatgctagaattcccttggcaaccacccatcctaagatggattcctggctaggcaacaggagaaggatcatagtgatgaaccgcgaggacatggtgtcggccgacgacagaaatgcatgggcaacttacttttctagtcagggtatcanagttatttactcaaatggccagctgngcatgggtacgatgaaattaggcagaatggcaaaatcagcagcatctactgtgaacacaaggcgaagagaaaagggattgcttcctcgtccggttcgagctgggattgttggatatccaaatgtcggtaaatcttccttgattaatcgcttg

SEQ ID NO: 119935 - DNA, 1532 bp, Zea mays
  Clone ID: MRT4577_40864C.1
cctcgaggccggccgggagtgatctattcacataacccccccttcaccactcatattcaaaatgttcaagcttgcgcggagcagccagttcgcttcggcgctcaagggcgcatacagcgctcctatcagacaatctgctttccagcagcgccgcaacctttccatccacgagtggcgctccgcgcagctcctcgactcgtacggaatcaaggtcgccaagggcaatgtcgctcacaacgcaaaggaggccgaggaggtagccaagaccattgagggcgacgacatggtcatcaaggcccaggttcttgctggtggcagaggaaagggtcacttcgacaacggcttcaagggtggtgtgaggatcgtctactctccccgcgaggctagcattctcgccgaccagatgattggccacaagctcatcaccaagcagaccggcgagcgtggtcgcatctgcaacagcgtctacattgtcgagcgcaagttcgcccgccgcgagttctacctcgccatcctcatggaccgtgctacccagtctcccatcattgtcgcctcctcccagggtggcatggacatcgaggccgtcgccaaggagagccccgagtccatcatcaccacccccgttgacatccacgttggtgttaccgacgagatggccaagaagatctccaccgagctcggcttcagccctcagtgcatcgacgccggtgccgacaccatccagaagctctacaagctcttcatggagaaggatgccactcagatcgagatcaaccctctgtccgagacctccgaccaccaggtcatgtgcatggacgccaagctcggattcgacgacaacgccgacttcaggcagaaggaggtcttcgagtggcgcgacgtcacccaggaggacgctgatgaggtcaaggctgccgagcagggcctgaacttcatcaagctcgatggtgacattggctgcctcgtcaacggtgccggtctcgccatggccaccatggacatcatcaagctcaacggtggtgcgcccgctaacttcctcgacgttggtggtggagctacccccaaggccatcaagagcgctttcgacctcatcaccgccgaccccaaggttactgccatcttcgtcaacatcttcggtggtatcgtccgttgcgacgacatcgccaagggtctgatctccgtcgccgagaccatgaacctccgcatccccatcattgcccgtctccaaggtaccaacatggaagccgcccagaagctcatcgacgagagcggtcttaagatcttcagcatcaacgacctccagagcgccgccgagaagagtgtgcagttctcgaagattgtcaagactgcccgcgacatcgatgttggcgtagagttcaacttgggcatttagagcgttgttttcttttttccctcgatctaaactttcctggactgccactttatcccgctagtctaggtggtctgttttgtacatttatctgctacggtccaaattttgatacctgcgaaagcaccattgacattgtaag

SEQ ID NO: 119936 - DNA, 126 bp, Zea mays
  Clone ID: MRT4577_40865C.1
gctagcctttcctactctatggcaagggctgccaggttagggtttcttcagcttttgtggagtgggcaatcggggcggcttgtgttgaacacccagactgagtcggtgctcttgtccaaaccacca

SEQ ID NO: 119937 - DNA, 255 bp, Zea mays
  Clone ID: MRT4577_40866C.1
gcggaggagtttctgtgccaagccacaatgggtatttcccgtcagcttttttcacaagcgcggggccaccttttgaaagcataacgcctggaggaagaagcgaatgtatgagcttggtcgctagtcaaccaacaccaagttgtcaagcattaatacagtgatgagggtctctgtttctgaatgtaatgtgaaatggagggctctttctcttgatactggttactacttatggagaagtgaatcttttactctcaa

SEQ ID NO: 119938 - DNA, 145 bp, Zea mays
  Clone ID: MRT4577_40867C.1
tcgagccgccgggcggtatctccggtcaagattgagacttcctactatacaaagcaagcagctcccagagagcagctagccatgccgccttacgattccgagcccccccccttgatcactccctggaagctcatgagcttcacta

SEQ ID NO: 119939 - DNA, 472 bp, Zea mays
  Clone ID: MRT4577_40868C.1
aaaaaaaaaaaaaaaacaaaaaaaaaaacaaaaaaaaattaaaaataaaaattaaaccaaaacataaagacaaaactttaaggctattcctcacaatggccaccacctctgggggtgctttttcgcgtcccccttcaccctgtagtgcgccctttcccgcttctctgggccccctttttgcccccttgtgactggcctaaccctccctttacccctctttttccccttgttttgcggccctgctcccctccccccccttggtaaatgccgggacagccccgatcccccttcccttcggccttttccccattttgccctttggactggccctttaacgcccccttacaccccccttttctagcggtccccccctgggtggccgattagtggccagtgccctggcgcccccccccacggcggcctttccttttttcctccccttatcccccgcctcttcccctgattttccccc

SEQ ID NO: 119940 - DNA, 660 bp, Zea mays
  Clone ID: MRT4577_40869C.1
agcgactgtacagtttactcgaaccaattcatgaacagtgaagcgcacatggtgttccgaaaatggctctgaatttggaggcaaaagctttccaaagcatcgaatctacaaaaatcatgttacactaggactgaggcattggcagtggcacgcaggccaagcctcgtgcaaccagagcaactccgatggagatcgtcttctccgactctccggcatccgctcgatctgatctaagagtacgtttctccgaatcccaaccttgacgaggcaaacgaccaaccaaaccgttggcttgagtctctcaatctgtgcaggcgcagctccgggccaccccggcgggcgttcatcaggtcgccaccgcggacaccttgctggcctcccggggccccctccgcgcctccgtccctgacgcgtacggctgcctggcgcggatggcgtcgagctgcatctgctcgtagcggcactcctcgctgcaaaagggcgagaaccctctgtacatgaagatgtcgctgtcgcgcgccagcggcatggcgcagagcgcgcacgcgtcgagcgcgtgcacgccgggctcgccgacgggctcggcagcgaagaagaaggcgctggcgagatgagctgccatgggtttggttttggctctccgtgcgctgctagctgcac

SEQ ID NO: 119941 - DNA, 255 bp, Zea mays
  Clone ID: MRT4577_4086C.1
cgcacgcgtgggcggactcgtgggccgaggaggtcatggacgaggtgcgccgcctcatggacaagtacacgggccaggagctcatcatcacagtcgttggccacagactctgcgccgccctggcgctactcgtggccgacgaggttggcaccttcattcccgacgcgccccccgtcgccgtcaaatgcttctggggccccaaagtgggcaacgccgcgttcgtcgataggctcgccagcagcggcaaggtcaacg

SEQ ID NO: 119942 - DNA, 1004 bp, Zea mays
  Clone ID: MRT4577_40870C.1
cacagttgaagcgacttgtacagtttactcgaaccaattcatgaacagttgaagcgcacacggtgttccaaaaattggctctgaatttggaggcaaaagctttccaaatgcatcgaatttacaaaaatcatgttacactaggagtctaggactaaggcactgactgtggcacgcaggccaagcctcgtgcaaccagagcaactccgatggagatcgtcttctccgacttccggcatccgcgggcatcattcaccgcgaagctcggctcagggccgctcgatctgatctaagagtacgtttctccgaatcccaaccttcacgaggcaaacgaccaaccaaaccgttggcttgagtctctcaatctgtgcaggcgcagctccgggccaccctccggcgggcgttcatcaggtcgccaccgcggacaccttgctggcctcccggtgccccctccgcgcctccgtccctgacgcgtacggctgcctggcgcggatggcgtcgagctgcatctgctcgtagcggcactcctcgctgcagaagggcgtgtcccctctgtacatgaagatgtcgctgtcgcgcgccagcggcttggcgcagagcgcgcacgcgtcgagcgcgtgcacgccgggctcgccgacgggctcggcagcgaagaagaaggcgctggcgagatgtgctgccatggctttggttttggctctccgtgcgctgctagctgcactgcaagagtgtagagaaagaactagagactggagaggacgggatgggcgatttgagctcagctcggacgcgaactgcggagcagtatatatggcgggctgggagtcagggactgggcgggcgctcgcgctgggcgtgcaagccgtctcgctgggcgaacgggcaataccgcccgcccgcattgacggagccgacaaaccgggaaggacaacggagtggtttccattctttattattaaggcaagggccatggacatgatggaccaatggttcggtggcttccggcc

SEQ ID NO: 119943 - DNA, 208 bp, Zea mays
  Clone ID: MRT4577_40871C.1
caggtctaatcactagagcgttcgtcgatttgtgggctatgggacagggattgacattcgtgaatgtgccatgcattctgacaccttacatataaggtgcgtcgcatgtcagctcgcagaattgataattatagcggattcctgcatagatgattatgtcgtctgcagtgaactacagattggtatcttactagctcatctgtatacc

SEQ ID NO: 119944 - DNA, 293 bp, Zea mays
  Clone ID: MRT4577_40872C.1
gcgattgagctctagtccaatgtattgataatatctgctgttgtccaaaaaaagtgtactcatcgagggggagagatggcccgtcgcgccgtcgccttgctcgtgggcggcgcgctcgcgaccgtgctgctgcgtaccgggggggttgccgcggttccctatagggcggcgactgacgcgtggcggtaggactggccctacctgcggcgtgaggggagcgggcgtctcgtgcgcgatatctccgcgctgggcgccgggaggctccaggcgctcccctgctgcgcctagtgccg

SEQ ID NO: 119945 - DNA, 378 bp, Zea mays
  unsure (1)..(378): unsure at all n locations
  Clone ID: MRT4577_40873C.1
caactatcttgtgctgggtattgaaccaatcgactaatcnnggtggaactcccaatgnaaaagnttcggctagctgggtttaattcngggnggtgggatcatccctgtgctgtgggtggggctgatgattgctaggggaggattaatggcttanggttgcanggnaattgtgcantctgggatgcttcnggtaaattaaaagctttcnaaaaggaggagaggattggcacaaatttaaaattattacntaattggntgcnggtccttggaaaaatgtttgaagcnagcacacaagtggttaccgtaaaagaactgtgggaattccctccggattccaattgcccgagatttggatgccacctcnggtttccggacnaa

SEQ ID NO: 119946 - DNA, 1028 bp, Zea mays
  Clone ID: MRT4577_40874C.1
ggccgcttttttttttttttttttaacattgaaaaagcagaatgagaaattgcactagctatcaaacaatttttttttttttcaagccataggaggaattgttaccggaactggttttgaaacagcaagaatacttacacgattgaactgaattgtgcggatgttgcagtattctatgataggatggagcctatggtttcccgcggaattgaatgaaagtgtcggcgatgttgtggccggctttaagagcttccagacactgctgatcgacgcgggtgttgcgcgtgcaaatatccaagacctggtcgatttcctggtggggaatcaccaccacgccgtcttcgtcgcccagaatgatgtcgtatggattgactgtggtgggtggaaagctgcgcaggttctgcttgccttctagcgtcttgatctccggatcacactccaaattactctctgcgttcatggctggatggatcgtgatgggaacttgaatacgtgaaggacgggtgaaggtggattgtcccaagatcgagtgccctctagcaaagaccgggtaatccgctgctcggtgttcagccagatcgcgacaccgaccatcaatcacaacccctttgatcccccgcacctttgcccttgcagtcatcagtccaccccagacggcattcttcgaatttttcggactcgagattaccatcaccgtattcttctctccagcgtcaacaaaatgttgtgcgagatgaggagactcggtatccgaagccgggaccatttggacggtaaaagctggaccacacagcttaaaatcgtgacccgctcctgtttgtaagttgatgtcgggtagatagccgccattgggatggtgtaatttgatcaaggcatctgcaacatcgcaagaagagaatcttcggatttgtatgatagtctcagcagagaccaccaccgtgttgtcgggcattctctgttacactgcaggtgtctgttcgcgtgaaggaaaaatggcacgtgttcccggccggcctcgggggtacccc

SEQ ID NO: 119947 - DNA, 281 bp, Zea mays
  Clone ID: MRT4577_40875C.1
attcggctcgagcactgtcaggctggtttgtcagaatgttgattgtcggcacgttagtgctgccatatgctgcctctattctcattgggaccttaggtgacagggatgccactgaggggacaggcccagaaggcaaaaggtgtatggcgggtctccagatcctggggatctgatgcgtgagctgtcaaagcactgattgggagagcagtaacaggccatctggtggagcttgaagaggacaaagctcggaacctgatgtgatagaggctgagtctgaatag

SEQ ID NO: 119948 - DNA, 522 bp, Zea mays
  unsure (1)..(522): unsure at all n locations
  Clone ID: MRT4577_40876C.1
agctccatctatggctcatcgcacaataacctgtatgtactccagagggcggagcaacgccgacctcactatgctggctctcgctgggagccctacctctactcgtatcatggctgcgagtgccacttccacccatacacgcgggggcatctactgccagccaccgatgtggcatcatctaccgacctggcagcttctgcgaatttcggatcgccggcccacttgggggcatctgtcaacgtgggaccacctgtccatgtggggccacctgttaatgtggggccatgagcctgccactattcttctgaacccgcccccattccacttcattactaaacacacccatgctcaggctaatagccagatacaaccatgcgccagctaacaggaacatgcaangccgtgccaactgcagagaacctgcagtgctggcagcaccccgagcctgagcccaggccgacagttactgactaatgattgcatcacggccgggacgccctactgctgggctgacagccagtc

SEQ ID NO: 119949 - DNA, 513 bp, Zea mays
  Clone ID: MRT4577_40877C.1
actcacttgcctggtacctggccatgtgtgtgcccagtaccaggggtcatgcccaaggactattacaatgactattggtgtaaccataagcacttccataggcacgtttactggacaacatttattcataccaaaatccatacaaaaatgctaaaccaaagactctggcaaatagaacgcattctgcgaaccatgcttcactacttgtatcaacacttgtaatcacgattattagacttgttacaaaccatgagtccatctaaaactatattagaacttgaatgaatagttaaaggaactattgatggaaatatgaatggaaaatacatgtgttgacatatataagaacctgtatgataaccgatgaactaggaaatgacttaagataattctgacagagacatgacaaatggatttgcacacagatcacaaatgtgacaagctagctaacgagaaactgctagagaaactgtttgactactatgctgactgctcatgacatcactcgtctca

SEQ ID NO: 119950 - DNA, 638 bp, Zea mays
  unsure (1)..(638): unsure at all n locations
  Clone ID: MRT4577_40878C.1
ccggccgggaaaaaaaaatacaactctccaactcaattcgctgccgtctttgtcgcttatagactagactctttttttactgtttgcatatcacaccatcaccacttatagattcatctcgcggcttcacaagcccccccaaactcaattcaaaatggcacaaaacgatcaaatgcccgagtttcagcaaacttacacaaatgatctccctcacgactcggacaagacttttgagcgtcagacaactgctgctcaccaggcagctcatcctcatctctaccccaatcctaaccacatccatcctgcattcggtggtgctatgcagcccggtctttggaagcctgtagaggcgcatcgcaagttcgccaaccctgctcctctcggactatgcgctttcgctctcaccacttttgtcctgtcatgcatcaacatgcacgctcgtggtcaaacgtcccctgctattgccattcccgtggctttcggntatggaggtcttgtccagcttttggctggaatgtgngaaatggctgttggaaacacatttggtgctactgctctgcatcttacggagggttctggatctcctacggtctcttgcagactccccactggaacgtcctcggtgctgatggacccta

SEQ ID NO: 119951 - DNA, 340 bp, Zea mays
  Clone ID: MRT4577_40879C.1
caacacaagggcggacagcaagtgtacaaagggtccgtgacttgcgtttccgccgtagttgctagtggcgtaggcaatttcggcacgtgggcatctccaccaggtcaatgccaacgaggggggggggagaacactaggactatgcgcctacatccaaatgattccgagaacgacgatgttcattatgttaaggcatgtgtcttttaaatcaatttctctttattaaatgatattttttagtaagatgagtcataaattaatttttctatgacttatctgctccaccgtaaattttctagctctcagtctagtcttcgcagtaggaatctaggataatatt

SEQ ID NO: 119952 - DNA, 170 bp, Zea mays
  Clone ID: MRT4577_4087C.1
gatggaggggatctccaagtccacacccgtagtattataaaggtcgtcccaccatgcaggaaagcaaggagccctttaagattgcatggcctgatcacgtcttacatctaccctcgatggtcaaccggcccaaccagaattaccacttttcattagtcactagctaccac

SEQ ID NO: 119953 - DNA, 841 bp, Zea mays
  unsure (1)..(841): unsure at all n locations
  Clone ID: MRT4577_40880C.1
agggcgattgggttcctcgaggccggccgggatccattcgctcttacactgcatcttacactcgttgtatctcgccttatcaaccaacaagaacaaaaaaacaaacaaacacacattcaaaatgaagtactccgtcgctttcgtcgctctcgccgctgttgccgctcaggctcagtctcttgccgacgtccccaagtgcgccattccttgcctcgacaaggccatcgccagcgagaccagctgtgacaagaccgacctcgcctgtgtctgcaagggcttcagcgctgtccgatccaaggctacctcttgtgtcattgacgagtgtggtaccgacgttgccatcaacgaggtccttcccgctaccgagaacctctgcaagaacccccccaaggagtctgaggccaagtccaccgccgaggaggagaagcccaccaccaccgccgctgccacctccaccttggtcgttgtcaccaccagcgccgaggttgttgagaccaccgccgctgccaccaccactgtcgctcccatcattcccaccaccgctgctgaggagcccgccaccagcacccccgccgctgccacccctaccaagggtcccgagcaggccaacggtgctgctggcctcaagggtctcggtgccctcgccatggctgctttcgctgcccttgctctgtaaaggagtttaaggaaccagcttgtcagttatgaaaagacaattcctcaagtagtcgaactggacagccaatgtgcatctggtgagacgaacggggtaagaggcattgttttttttaaagntgaaaagacgatatttgatatgtgtatgagaattggaaacgctatc

SEQ ID NO: 119954 - DNA, 1966 bp, Zea mays
  Clone ID: MRT4577_40881C.1
ctcgaggccggccgggactgcacgcggcgccgcggcggctctctgcctggccgctccccgctccctctctcagatcccagtgcgtggttgatcggcaggcaggcaggcagcagtacacagctgccgcggccctcggccctcgggaaacggggagagtgagacggccggtcccggtcggcagcaggcaacagcagccgcggctcggcggctggtaggctgcgctcgtcggccagagcgcggtgcgcctgcgccgctgtggtcggccctacatgaaatgtttggctgggtccgccactgccgctattgctggcagcttgccgaattcaattgtgctcgcccgcggctgcctctacctctacgcgcagcctgagctcgcccgcgcctgcctcttcccttacgcgcgaccgccgaacgctgctgcacgtttgcgtgagcgtgttcccccactgcccggtcacgctcgtcaggtgcttgacagaatgccgtttcagtcctagcgcagctgcgctaggactgacagatgcaggggaacctcggtgtccgatccagagcgtcgtgcgggtctctgcgggttctcctcccgcggcagctaaccgcgcgggcaagatggctgcagggcagcgggcggacagggggctcggaggaggacgaggcggcggtcccgtacgtggacgtgcctcgccctggtaggaagtgggagcggaagccgtacgtgacgccgatgaaggtgctcatccggcgggccaaggaggagaggcaggcccgccgggagaacccgtgccgcgtgctcgagcacccacccgacaacggccttgttgtgccgcacctcgtcgacgtcgcccggcgcgtgcacgccgcgagggaggggctcctcggcggcctgaccaggctcgtggagggcgctgtcccggtgaagcgatgcaggttttgctcggaggtgcacgtcggccgcgtcggccacgagatcaggacgtgcgaggggcgtaacagtggcgcgaggaactccctgcacgtgtggcggccggggaccgtgcgggatgtcgtcggcttcccctactgctaccacctgttcgaccgcgtcgggaagcccagagtcgtgcacaaggagaagtacgacgtgccgaggctcccagcggtcctggagctctgcatccaggccggcgtcgacgtccagcgctacccgaccaagcggcgcaccaggccagtctactcaattgaaggcaggatcgtggacttcgagcccgacgtcgacgacgacgaagcagccaggacgttacatgaaccgccagcgtgcacaccatcgctgcctccagcggcggttgttaacggagagggggaagaggcggagatcaccgtgcctgagttagcgtcgaggacactgcaatcgtggctggacatgaaatccggcgcagcgaagctgatgaagaagtacagcgtgcacacctgcggctactgcccggaggtgcaggtcggtcccaaggggcacaaggtgcggatgtgcagggccaccaagcaccagcagcgggacggacagcacgcatggcaggaagccacggtggacgacctggtcccgcccaactacgtgtggcacgtcgcggaccccgccggcgaggaatcgcctttggccaacgagctcaagcggtactacggtaaggcccccgcggtggtggagctgtgcgtgcaggctggcgcgcccgtgcccgtggcgtaccggagcatgatgcgactcgacgtcgtgccaccagcgcgcgacgaatacgacctcgtcgcctaagggctgcttgcgcgttgtcgtcttgggccttgtgcgttggtcgcggatgatctcccgtggccgtcggtttgaatgtactgtgtcagaacgaacagtttgcagaggtgttagatatggacgttcaaggttgtttatgcaggagcgcacatggaaataactaaataagacataggaaagacttatcatcatgat

SEQ ID NO: 119955 - DNA, 175 bp, Zea mays
  Clone ID: MRT4577_40882C.1
cacacacgtccgttcggtgacaatgcgttctgcccctggcacgagccagtggcgttaaggggagccacataaagggacagacttcacagaacccaactcaaggaaactggatcgggcctataaagccaaagatttgaacctatcaggacatcactgccgcaggaccatcccaacg

SEQ ID NO: 119956 - DNA, 367 bp, Zea mays
  Clone ID: MRT4577_40883C.1
acggcaacggagttacctttctttcctgtccataaaaaaaaaaacaaatataacaaactttttccactgaaaaaacaaacccctttttttaaaaaaaaaggaggagggggcgcaagggggtaaacataccggacaggcagaggaaaacaaaatgcaccggaaacgtgcccactacatacacattgttcctcaacataccgaacaaccaatttggggaacaaatggggcggtcacggaccaaagaaactggtgggagcacttccgactccaacagcaaacaatctctccaacgaagggtggaccgcggacccctgggtcaacccgggaatttcggaccggtccctggaggcgtaccaactttccctaa

SEQ ID NO: 119957 - DNA, 865 bp, Zea mays
  Clone ID: MRT4577_40884C.1
gggtacctcgaggccggccgggtccacgagtccagaagcctagagcagccaagaaaagcacatacccgagtcgccgaaacaacaacaatcccaatcccccctcgtcactcaaaactcgagcaacaatgtcgctgattcgccgtggaagcgcattcgaccccttctccctcgacctctgggaccccttccagggctttcccttcggctctggaagcagcagcagcagcagcctgttcccctcgttcggaggcaccaccaccagctcggagacggccgccttcgccggcgctcgcgtcgactggaaggagacgccggaggcgcacgtgttcaagaccgacgtgccggggctgaagaaggaggaggtgaaggtggagctggaggacggcaacgtgctccagatcagcggcgagcgcagcaaggagcaggaggagaagacggacacctggcaccgcgtggagcgcagcagcggcaagttcctgcgcaggttccgcctgccggagaacgccaggacggagcagatcagtgcgtccatggagaacggcgtgctcaccgtcaccgtgcctaaagaggaggccaagaaggccgacgtcaagtctatccagatttccggctagtatgctcaagctcataaccgatggtgtgccgtcttcgtcttagtgttgatcgatcgggtagttcttcacatgccgggggtccataaaatgccagcgtccgtgtaatgtacttgtcatagtgtcactgtattgtactggtatcgtggctgtcttgagtagcgtgtgttgtgtctattgtgttccgaacgatattgaagtctcatccgtcgtgtatcagtgtcgtctgtcgcgtctgcaacgaacccagtttt

SEQ ID NO: 119958 - DNA, 2164 bp, Zea mays
  Clone ID: MRT4577_40885C.1
gccaggaacaggcgttagttactcctataatatattccttctgttatgttcctgagcccacatgtcggggctcagcatccttgtatgtgcctcccttgagctataaaagggaagacacacgacgttacaaggcaggttcactcagaccctcagactcacaagttcatacaagctctcaagttcacaaactcaatacaacacacagtggagtagggtattacgctccggcggcccgaaccactctaaatccttgtgtcctcgtgtgctcttccaccattaatgactgtaattgcagggacacgaagagttgtagcgcttttgccaacaagatccgctatatgcttgtagagtggaacctctttttcagcagcaccagctttgcaagctgcaattgacactccaagcatagtatttgctccaaactcagccttgtggcgcgccctgtcaagtgcatgatggcctggtcgatctgcgtctgctgctgcggatccatcccaacgagtgcctccgacaccttgtcgttgatcacccgcaccgcgtaggcgacccccctggcgaggaacttccgcctctcggaggccccggccgcgtcggcggcggcgccctcgagcgcgcccacgctagccgtagatgctcggtgcacggccttgttggtgtgcaactcgacctcaacggccggtgcgctacgcccgtcaaggatctggcgcgcccgcaccctcgtgatcacggtgggcgcctcccgcctcatgtggccgacgatgaaaagcgccgggtcaggggccttggcgcggaccgccgtattcagggcctcctcgctcttgcgcgagagcaggtgcttccccaggtactcctgcactgacatggctgccacagcggtggaattttgtcctcacgacttcgccacgtcgtcctcacctccctggcttcccacgactccgccgtatcgaggtgctcggtgggtcgtcttaatccgaagtccgaactaggaagacgagacagagaggtctgaggaatgggcctcgtttgatgttgagctgaattatttttccagcataagcccaggtcttggtccatgaacaaaattactagaaacccagcccagtactacgatctaaaagagggactgccactggatagctctctctagcattctccacgctccaatacagcggcgtcgtgtctatccgggtctatccgcgaacacgtgagaactctccagaaactgctttctcctccacttcatctctctcgctttccctctataaaaagaccccttctaggaattgagggagacagcaagcaccaagcagcgatccgaagctcaatcaattcactcaaacctcttccccaaatcttcgattagattctcgttgacaagaagactagaaccgaacctgaccatgtcgctgatccgccgcagcaacgtgttcgatcccttctccctcgacctctgggacccctttgagggcttccccttcggctccggcagcagcagcagtctcttcccctcgttcccgcggaccagctcggagaccgcggccttcgctggcgcgcggatcgactggaaggagactccagaggcgcacgtgttcaaggccgacgtaccggggctggcaccgcgtggagcggagcagcgggaggttcctgcgcaggttccgactgcccgagaacgctaagacggagcagatcacggccgccatggagaacggcgtgcttacagtcactgtgccgaaggaggacgccaagaagcctgaagtgaagtccattcagatctccggctagacctcggtctgcggtcgtcgtacctgcgtggtttgaggaaccctcgtgccgaatttcgtggtacctgcgtggtttaaggaacggcagttcccctcggtcgtttttttaaataaaattgggttccaagaattatggcgtttgtcaatatggtcgtaatgtcgtaggatggtggaatgtggtcccaacctttgggtatgttgggtttacttgtggtgcccccccccccccatggatgtcatgagtttgtttactaaagttctagttcctgtggtgttcgtatgatgtatatcatgagttaactctatctaaaattttttccattatggtaaaaaaaaaaaaaaaaaaaaaaaaaaaaaaaaaaaaaaaaacacccccccccccc

SEQ ID NO: 119959 - DNA, 451 bp, Zea mays
  unsure (1)..(451): unsure at all n locations
  Clone ID: MRT4577_40886C.1
cccagcgtccggnaaggaatggtttaacagttgcagcagcagcctgtggccaacaatttttttggcaacgaatctggagggcactggnntcgaagttctgaagaataacaagcatgttgctgtacagacttaacatatatgaagatcaattctacagcaccggtgtctgagctcgacgaccatctcgcgcctgccagagctgcatctgctgctgaaagttgatgtacatagagaagatgggatcagctgttttaccctttttagtttgcctctaatagtgacaggtagataacgggtgtctagttttgcaactattgattttattttacacaagatgtaaccgcaacggcgacaccgccgccattgttgaaccgtcattcatactcttcatgatagatatatagagttaatagaaatgggaacgaggttgccctactaatttgttactacc

SEQ ID NO: 119960 - DNA, 450 bp, Zea mays
  Clone ID: MRT4577_40887C.1
tttttaccataatgaataaattggggggtagttgttaagctcatgacgcgcatcatacgaacaccacagtaactgggactctagtagacaaactcatgacatccatacatagattcagacaccaccagtagacccaacatacgcacataacgaccagtcgaccatattgacaaacgccataattcttgtaacccaattttatttcacagaacgaccgaggcgaactgccgttcctcaaaccacgcaggtacgacgaccgcagaccgaggtctagccggagatctgaatggacttcacttcaggcttcttgacgttctccttgggcacagtgactgtaagcacgccgttctccatggcggccctgatctgctccgtcttgggcgttctcgggcagtcggaaacctgcgcaggaaactcccactgcttcgctccacgcggtgccaggtgtcc

SEQ ID NO: 119961 - DNA, 1048 bp, Zea mays
  Clone ID: MRT4577_40888C.1
gagggccccggccgggaaaaaaaaaaaaaaaaaaaaaaaaaaaaaaaaaaaaaaactcaatcaattcactcaaacctcttccccaaatcttcgattagattctcgttgacaggaagactagaaccgaacctgaccttgtcgctgatccgccgcagcaacgtgttcgatcccttctccctcgacctctgggacccctttgagggcttccccttcggctccggcagcagcagcagtctcttcccctcgttcccgcggaccagctcggagaccgcggccttcgctggcgcgcggatcgactggaaggagactccagaggcgcacgtgttcaaggcagacgtaccggggctgaagaaggaggaggtcaaggtggaggtcgaggacggcaacgtccttcagatcagcggcgagcgcaacaaggagcaggaggagaagacggacacctggcaccgcgtggagcggagcagcgggagattcctgcgcaggttccgactgcccgagaacgccaagacggagcagatcagggccgccatggagaacggcgtgcttacagtcactgtgcccaaggaggacgccaagaagcctgaagtgaagtccattcagatctccggctagacctcggtctgcggtcgtcgacctgcgtggtttgaggaacggcagttcgcctcggtcgttctgtgaaataaaattgggttacaagaattatggcgtttgtcaatatgatcgtaatgtcgtaggatggtggaatgtggtcacaaactttgcgtatgttgggtctactggtggtgtctactctgaatctatgtatggatgtcatgagttccagttaaaaaaaaaaaaaaaaaaaaaaaaaaaaaaaagtccaggccggcccgaacacgaaaaaaaaaaaaccataacaaaaaaaataaaaaaaaataaataaagggtttgaccctccccggggggccgttcaaaggggcaatttcaaccacactgggggccgtaattgggggacccgaccttgtccccaatctgggggaaacaatggcattaatttttccctggggaa

SEQ ID NO: 119962 - DNA, 207 bp, Zea mays
  Clone ID: MRT4577_40889C.1
agacagagaaagagtacgtaagataggaattaggatagaggtaatatataggggtattttattaaagaagattagtaatgaaagaaaaaagataaataagaggaagaagagatacattcattattagaagtaacgaaacagaagactacgatgagagcacagagagaagagaggtagtagatagaaggagcaaggaaagtaagagag

SEQ ID NO: 119963 - DNA, 1131 bp, Zea mays
  unsure (1)..(1131): unsure at all n locations
  Clone ID: MRT4577_4088C.1
ggccgggctccgctccgccgcccctcttcattttctattgctcccccggtgccggccccgggctggggggggtatccgcggaggcggaggagctgccgctcagcgaactcgacgcgcccatcccgtctcccccctggcgattcattcggccgcccaaacccacagggagtcggagccggaggagggaggcgttctggagtccgtccaaggagcagtgggcgacgacggaaggcgcagcacacgagcaacgtacgagggaaaggggaaacaaagagccttctccgatcgtcgccagctagctacccacctgtcctccggatgtcctggagttctgcatgcccatggaaaattcagttcgccgcgtgagatgcccgaggtgccacagcgttctcgaggagcccagcgcgccggtgtaccagtgcggcggatgcggcactagccttcgagcaaagaaccgtaccggcaccggcaccggcagcacgggagacgcggccggggccgtcgccggcgcggagctggctgcctcctcagagcaggcacctggacgccagcgacgtcgcgagcaccagcaggtccagcaccccgacccctcctcgtgtcgccagcaccagcaggtccggcacccacgcctccgcggacgccggggccagctggcaccgagacaccgacgcgacaggcacccggcatggttccggtgatctcgctctcgtgtcggccgggacgcgtgggtccggtgacgtcgcgagcaccagcagtactcctgttgccaccgcgagaagcaggcgccgccaaggcaccgacgcgacgagccgtggctccggcgacgtcgccagcaccagcagtactcctgacaccaccgcgagaagcaggcgccaagacaccgacgcgacgacccttggctccggcgacgttgccagcaccagcagcacaccggacgccagtgccgacatgacgagacggngcgagtccggtggtcccgtgccggcgaggaatcgtgtccctgagcaagcggcaaggggactcgggagccatcaggatcaagtaaatagcaggaaaggcctgtgtatattgcaggaataggttcgggttttggaattcgaattggaatttatttcaaaaaaaaactcgtgc

SEQ ID NO: 119964 - DNA, 1126 bp, Zea mays
  Clone ID: MRT4577_40890C.1
tccaaaaagagcgatccgaagctcaatcaattcactcaaacctcttccccaaatcttcgattagattctcgttcttccccaaatcttcgattagattctcgttgacaagaacactagaaccgaacctgaccatgtcgctgatccgccgcagcaacgtgttcgatcccttctccctcgacctctgggacccctttgagggcttccccttcggctccggcaacagcagcagtctcttcccctcgttcccgcggaccagctcggagaccgcggccttcgctggcgcgcggatcgactggaaggagactccagaggcgcacgtgttcaaggccgacgtaccggggctgaagaaggaggaggtcaaggtggaggtcgaggacggcaacgtccttcagatcagcggcgagcgcaacaaggagcaggaggagaagacggacacctggcaccgcgtggagcggagcagcgggaggttcctgcgcaggttccgactgcccgagaacgccaagacggagcagatcacggccgccatggagaacggcgtgcttacagtcactgtgccgaaggaggacgccaagaagcctgaagtgaagtccattcagatctccggctagacctcggtctgcggtcgtcgtacctgcgtggtttgaggaacggcagttcgcctcggtcgttctgtgaaataaaattgggttacaagaattatggcgtttgtcaatatgatcgtaatgtcgtaggatggtggaatgtggtcacaaactttgcgtatgttgggtctactggtggtgtctactctgaatctatgtatggatgtcatgagttccagttaaaaaaaaaaaaaaaaaaaaaaaaaaaaaaaaaaaaaaaaaaaaaaaaaaaaaaaaaaaaaccaaaaaaaaaaaaaaaaaaaaaaaaaaaaaaggtttgtccctgcccggggggccgttcaaaagggcaatttttgcaaatttccttcaccctgggggccgttcgagcttgcttttagggggcccatttcgccttttagggggtggttttacatttcattggccgtcgtttaacaacttcgggactggaaaaaccctggctttccccaactaaatcgctttgaagaacatcccctttttcccag

SEQ ID NO: 119965 - DNA, 687 bp, Zea mays
  Clone ID: MRT4577_40891C.1
actcctatgggcgattgggaccctcgaggccggccgggaagcaaagattgattccatctaatccctatctctctctctcaagccgtcggctagggggtacaccccaaccagcgaagaatgacgaggggggcataaccccgccagctaccacgggccgagactacgaactttgtagtcgaggtccgacgtccttgggcacgtacgcccttgacaggcaattctctggaaggtatgacttaacaatcttgggtgtggcaattctttacaatacttcaaagttatttgagcctttctgcaaggtatgtctttataatctttgagctgcttacatattttatcaaatatgttgtctgacatgttccatgaatacatcatgtcctggtcaatttcattcaccttcctacacgtaaaagactgatgtaacatttttagtttccatgttcgtattggagtaaaccatatttatttatgtatttattctgtgtgttcgagtgagcttgttaatgtcttattgtttatctagaatcataaatgtatttatttgtagtgctgatattcatcacacatagaggtcctattcatattgttcgtccatctatgtatattaatagttggcacatccatttatatctttttatagggctaatcattgagatatctcttcgaaaaaaaaaaaaaaaagcggcc

SEQ ID NO: 119966 - DNA, 156 bp, Zea mays
  Clone ID: MRT4577_40892C.1
gccaaaacttacaaagggactatgcacctggctatggacaccagttttcaatggagaaacagtgaaccatacactgcggttacagctaactatgactacaacaaacaatagccttttgagctacataagaccttaataggccccgctatgcaacat

SEQ ID NO: 119967 - DNA, 976 bp, Zea mays
  unsure (1)..(976): unsure at all n locations
  Clone ID: MRT4577_40893C.1
gctcgagggccggccggggcccggaaaaaaaaaaaaaaaaagcaagcagcgatccgaagctcaatcaattcactcaaacctcttccccaaatcttcgattagattctcgttgacaagaagactagaaccgaacctgaccatgtcgctgatccgccgcagcaacgtgttcgatcccttctccctcgacctctgggacccctttgagggcttccccttcggctccggcagcagcagcagtctcttcccctcgttcccgcggaccagctcggagaccgcggccttcgctggcgcgcggatcgactggaaggagactccagaggcgcacgtgttcaaggcagacgtaccggggctgaagaaggaggaggtcaaggtggaggtcgaggacggcaacgtccttcagatcagcggcgagcgcaacaaggagcaggaggagaagacggacacctggcaccgcgtggagcggagcagcgggagattcctgcgcaggttccgactgcccgagaacgccaagacggagcagatcagggccgccatggagaacggcgtgcttacagtcactgtgcccaaggaggacgccaagaagcctgaagtgaagtccattcagatctccggctagacctcggtctgcggtcgtcgtacctgcgtggtttgaggaacggcagttcgcctcggtcgttctgtgaaataaaattgggttacaagaattatggcgtttgtcaatatgatcgtaatgtcgtaggatggtggaatgtggtcccaaactttgcgtatgttgggtctactggtggtgtctactctgaatctatgtatggatgtcatgagttccagttcagaaaaaaaaaaaaaaaaaaacagaaaaaaaaaaaaaaaaaaaaaaaaaaaaaaaaaaaaaaaaaaaaaaaaaaaaaaaaagaaaaaaaaaaaaaaaaaaaaaaaaaaaaaaaagcttgtacctgcccgggcggccgccgaaagn

SEQ ID NO: 119968 - DNA, 449 bp, Zea mays
  Clone ID: MRT4577_40894C.1
aagagccggccaaaaggaattcccgtaaccgtaaaaccaggttggtttggttaagggtttaaacaattcccctacctttccttttaatccttccgtacctttaaaggacccaaccggccccttagttttacctttaccaaacccccaaataacctaacctttccccccaaatttggcggccgttaaaaaggcccaaccaacagcttttgggtaaaaggcccttaaaaaccccggtttcctaaagggcccctttctggagggcccatcccccaagggagggccaaacaaccaagggcccggtggaaaggggaaccaaaaaccggggtggttcccccttttcctccggccctggtacctaatccaaaaggaggggttttttccttcccggggttaaacaacgttcttggttaaatccaagaagctttttttttttccttttaaaacctaaa

SEQ ID NO: 119969 - DNA, 1002 bp, Zea mays
  Clone ID: MRT4577_40895C.1
tgggaccctcgaggccggccgggccggattctcccgctccatacagcggcgtcgggtcattacgggtaaatccgcgaacacgtgagaactctccagaaactgctttctcctccacttcatctctctcgctttccctctataaaaagaccccttctaggaattgagggagacagcaagcagcgatccgaagctcaatcaattcactcaaacctcttccccaaatcttcgattagattctcgttgacaagaagactagaaccgaacctgaccatgtcgctgatccgccgcagcaacgtgttcgatcccttctccctcgacctctgggacccctttgagggcttccccttcggctccggcagcagcagcagtctcttcccctcgttcccgcggaccagctcggagaccgcggccttcgctggcgcgcggatcgactggaaggagactccagaggcgcacgtgttcaaggcagacgtaccggggctgaagaaggaggaggtcaaggtggaggtcgaggacggcaacgtccttcagatcagcggcgagcgcagcaaggagcaggaggagaagacggacacctggcaccgcgtggagcgcagcagcggcaagttcctgcgcaggttccgcctgccggagaacgccaggacggagcagatcagtgcgtccatggagaacggcgtgctcaccgtcaccgtgcctaaggaggaggccaagaaggccgacgtcaagtctatccagatttccggctagtatgctcaagctcacaaccgatggtgtgccgtcttcgtcttgtgttgatcgatcgggtagttcttaacatgccggttgtccataaaatgccagcgtccgtgtaactgtgttgtactggtatcatggctgtcttgagtagcgtgtgttgtggctattgtgttccgaacgatgttgaagtctcatccgtcgtgtatcagtgtcgtctgtaacgaacccagttttaaagcatttcgaagtgagttgtttggtactcgt

SEQ ID NO: 119970 - DNA, 1019 bp, Zea mays
  Clone ID: MRT4577_40896C.1
ggtctagaataccgggccgagccacgcgtccacccacgcgtccgcccacgcgtccggactagttccggaaccccccgggctggccgggagaagcagcgatccgaagctcaatcaattcactcgaacctcttccccaaattttcgattagattctcgttgacaagaagactagaaccgaacctgaccatgtcgctgatccgccgcagcaacgtgttcgatcccttctccctcgacctctgggacccctttgagggcttccccttcggctccggcaacagcagcagtctcttccactcgttcccgcggaccagctcggagaccgcggccttcgctggcgcgcggatcgactggaaggagactccagaggcgcacgtgttcaaggccgacgtaccggggctgaagaaggaggaggtcaaggtggaggtcgaggacggcaacgtccttcagatcagcggcgagcgcaacaaggagcaggaggagaagacggacacctggcaccgcgtggagcggagcagcgggaggttcctgcgcaggttccgactgcccgagaacgccaagacggagcagatcacggccgccatggagaacggcgtgcttacagtcactgtgccgaaggaggacgccaagaagcctgaagtgaagtccattcagatctccggctagacctcggtctgcggtcgtcgtacctgcgtggtttgaggaacggcagttcgcctcggtcgttccgtgaaataaaattgggttacaagaattatggtgtttgtcaatatggtcgtaatgtcgtaggatggtgccatggtggaatgtggtcacaaactttgcgtatgatgggtctactgttagaatctgaatctatgtatggatgtcatgagtttgtctactggagttctagttcctgtggtgttcgtatgatgtatatcatcagttggtggtgtctaaatcttcttcattatggcattttaagaaaaaaaaaaaaaaaaaaaaaaaaaaagcttgtacctgcccgggcggccgctcga

SEQ ID NO: 119971 - DNA, 1388 bp, Zea mays
  Clone ID: MRT4577_40897C.1
gccggccggcccgggatcagaagctagaagcctagagcagccaagaaaagcacatacccgagtcgccgaaacaacaacaatcccaatcccccctcgtcactcaaaactcgaccaacaaattgagggagacatcggctccagctctctcgctttccctctataaaaagaccccttctaggcctcgaggggggccgggaggcaagcaccaagcagcgatccgaagctcaatcaattcactcaaacctcttccccaaatcttcgattagattctcgttgacaagaagactagaaccgaacctgaccatgtcgctgatccgccgcagcaacgtgttcgatcccttctccctcgacctctgggacccctttgagggcttccccttcggctccggcagcagcagcagtctcttcccctcgttcccgcggaccagctcggagaccgcggccttcgctggcgcgcggatcgactggaaggagactccagaggcgcacgtgttcaaggccgacgtaccggggctgaagaaggaggaggtcaaggtggaggtcgaggacggcaacgtccttcagatcagcggcgagcgcaacaaggagcaggaggagaagacggacacctggcaccgcgtggagcggagcagcgggaggttcctgcgcaggttccgactgcccgagaacgccaagacggagcagatcacggccgccatggagaacggcgtgcttacagtcactgtgccgaaggaggacgccaagaagcctgaagtgaagtccattcagatctccggctagacctcggtctgcggtcgtcgtacctgcgtggtttgaggaacggcagttcgcctcggtcgttctgtgaaataaaattgggttacaagaattatggcgtttgtcaatatggtcgtaatgtcgtaggatggtggaatgtggtcacaaactttgcgtatgttgggtctactggtggtgtctgaatctatgtatggatgtcatgagtttgtctactagagttccagttcctgtggtgttcgtatgatgtatatcatgagttaactctatctaaaatttcttcattatggtatttttaagaaataaattctttattatggtttttttaaaaaaaaaaaatccgtcctttggggtgggtttctatgctcaatctcacaaccgggccggggccgtcaaagaattgtgttgatcgatcgggtagttcttaacatgccggttgtccataaaatgccagcgtccgtgtaactgtgttgtactggtatcatggctgtcttgagtagcgtgtgttgtggctattgtgttccgaacgatgttgaagtctcatccgtcgtgtatcagtgtcgtctgtaacgaacccagttttaaagcaaaaaaaaaaaaaaaaaaggccccta

SEQ ID NO: 119972 - DNA, 254 bp, Zea mays
  Clone ID: MRT4577_40898C.1
ttactatctgcccattacagaaaggtttgctaatccctgctctagacaattcatggaactggtgcttcctggtaccccctttcagagatgctactagaagaagatatacatgggttgttctagcactgctttatgataaatctgcctcattttattctgtttccatactgccatcattcgtgcctcttgctttaaactactttatctctcaaccatttacccattatccaggatccaaacctgggttccatgtg

SEQ ID NO: 119973 - DNA, 706 bp, Zea mays
  Clone ID: MRT4577_40899C.1
atcagaacacatactattggcatatggtcggcaacatagttcactgttgaggaccattttgatcaatggggagaccagagttcctgtgtacacagtcttggaggtgtatcgagtttcagacatggagcttgtaagagttcttcctagtgtaggagaggaagtcaatgttgcatgttttcatccttcccctggatcaggtcttgtttatgggactaaggtgagtagcaagttaagatcagcgacaaaaatggaataaatatatgctctgctgatgcttctggtgtacaacagcaagggaaggttaggtttcttcggcaccatggtgcatcattcacttgctggggagaacgttcatgagatttagaggcatgtgctacaaatgcagttctggacataataactgaatttgagcatcgcattcttgtgctgctgaatcttatcttgattatggcttcggcaacatcctggaagaggaatttatggtcaactgagatcatctccaagaccgagagggctaacagaaaacatcagatttcagcatccaattactcttgactaacgttccactctttgcaaaaccattgtgccggcaaggagggctactattttaggtccggttaacgtgtgtaagtagccccgtctatgagaaaatggacaaggaatcgcagcctcattcagcatgaattaccaacgatggttgactact

SEQ ID NO: 119974 - DNA, 720 bp, Zea mays
  Clone ID: MRT4577_4089C.1
aaaccctctcctctcgagaagcagcgcggtggagaccggagagaagcagtcggcagccgggaagcccgtcacgtgcctttcttcctcgacgtgccatgattaacggaatattgagcactcgggagttgtagtcagacctggagcgacaatgaagtgtgacccaggagagttctggtgccatgtttcagagatagcattacatgatagaaaaccagcaccatctctgcccttggcttcaaatgttggcattgcaagagaaatgtcacaagtaccaaagaaggctattccattattcccaaaagcagatgatgataaaagcaaagaaagtaaatgtgatgtggagaagcctgctgctactgagtcctctaaaccgaaggttagcttggaggaaacaaaggatcctgagaagcatgaagttgatgttggtggcactgacgatgatgaaagtgacgaagactttgttgattcagaagagggtgaatcggatgatgacgagagtactaagagcaagaataggccaagcagcctcacccttgaagacacctccagggaaaaaggcaaggatcacaacaccgtctgtgggcaaaaaaaacctgctgagaagtgttacattcgatcgcaaacttgtatagctcatagttcttttccatggcactggaacctcaatttgtgatgtgtagtttgcagttagtgatgatgctaagaaaaatatccacgtcc

SEQ ID NO: 119975 - DNA, 2796 bp, Zea mays
  Clone ID: MRT4577_408C.1
atgacctctcacggatcctcagaaggagggaacacacattcccacacggacggacttgcacgagagggctttccccacatcttgttggaggtgctgcagggagcaggttacacgacgcctccccagtatacggtgcagctgttcgagaagcaccgggtgccccgctgtaggccaggttggcgttcgttggactccgagtctttcggataccggactgaggatactatcgaggccattgctctccacgggctgaccaccttctgtggttttcaccccttggagctgtccactcaccccattggtttgttccccacggagaaggaggacgacccaaagtggaaggatcgagtggaacatgccaaggatgtgtgggccctatacccagggcagactgctcacctcacggtgcgatgcatgaatgccctgtatctgtatcgtctgcaagtgatgcggggagaggcaatgtcccagctaatggcatcgttggaggctaccaagatcaccctagataacagagaggaacttgtggtggacctgtccactgagatggtggaaaaggacctgcagcttagggtagtggaatccaaatttccactactaaatggagtttgttcagatgtggctaaggtccggttcgccacccagcagctccgcggacccgcgtggacatggtgggaccacttcctcgctatgcagccaattgaccacgtggtggaatggggaaaatttaaggcaactttcagagggcatcacataccgacaggcatcatggaccgcaagcttaatgagtttctggcactcactcaggggaatcgtattgtattgcagtacgctcaggccttcaatgacctatgtcagtatgctggataccacgcagacactgatgagaagaagaggggcaagttcaggaggggcctcagtactaagctccacgaccgtctcaacgcagtccgggccaacagttacaatgagttagtcaacctggcaatttctcaggaagattgcatcacatctcgccaggcagagaagaagaggaagacccctatggaaggaccttcagttcagcctcatcgcttcaggattgcatctgacactcagaacaggggccctcagcagcagaatcagcagaggcagggacagaattccaatcagaatcaaggcaagaggcagaaggtgcaagtgagacaaggaaggctgaacttcaccaccatggctgatattccagaaggagcacccgtcttgactgctagagccatagaaattcactccccactggatggagagatcactctgtacctacccgaccagggatgtacccgttcctgtgccttcactatgatagagtcacctgttgagagaatcccagtggtctgcgagtacccagatgtttttccagatgaattaccagggatgccacccgacaggaacatagagttcgcaattgagttgcaacccggaactgcacctatatccaagagaccctataggatgcccccagcagagctggcggaattgaaaaagcagttacaagagttgttggacaagggatttattcgcccaagtacttcaccatggggatgtcccgccttgtttgtgaagaagaaagaagagagtctgaggttgtgtgtggactactgccctctcaatgcggtgaccatcaaaaataagtatctgttgccacgtattaatgtattgtttgatcagttggtgggagccaaggtgttttccaagatagacctccgctctggctatcatcagattaaaatcagggctagtgatattccgaagatagctttctctaccagatatgggctttatgagtacttggtgatgtctttcgggcagaccaatgccccggcttatttcatgtatttgatgaactcaatgtttatgccagagctggacaaatttgtggtggtcttcattgatgatattctggttattccaagaatgaagacgagcatactgagcatctacacatcgtacttcagcgactgcacgatcatcgtctatatgctaagttgtccaaatgatgggatattagttgaccctgagaaagtgcaagaagtgatgaattggaaacctcctaccactgtacggcagattcagagttttctgggattagcagggtattatcgacgatttattccggatttctccaggattgccaagccaatgacggagttgctgaagaaaggagtaaaatatgagtggagtcagaaatgtgaagaggcctttcatgcattgagacaacatttgacaacaacacccgtattagctcagcctgacaacaccaaacccttcgaggtttattgcgatgcttcaggcactggattaggatgtgtcttgatgcaagacaacagagttattgcctatgcatccagagcactcaggcctcacgagcagaactaccccactcatgacctggagttagcagccgtagttcatgctctaaagatttggagacattacttgatgggagcttattgtaatatctatactgatcacaagagtctcaagtatatttttactcaggcagatcttaatatgagacagagaagatggttggagttaatcaaggactatgatttggaagtgcattaccatcctggcaaggccaatgttgtggcagatgccttaagccggaaggcccagtgtaactgtgtgagtatagattccaagattgccaccctgtgtgacgagttgtgcaagcttaacatagaagttgtttcctcaggtgccttgagttatattttagtggagcccaccttacatgagcaaatagtcatggcatag

SEQ ID NO: 119976 - DNA, 374 bp, Zea mays
  Clone ID: MRT4577_40900C.1
ggggggccgggttaaccagtccataaaacaccccggctccaaagacaatgataatggaaggacaccgcaccagtggcgactgttcaagcacaaacacacgcgcggccgggcgccacaagggaacttgaaacctcacatacgttgaagcagggcactcaacccatacagctttaggggcagaaggaaaccctaaaaagaggcaggagcagtaaattgcgagcaagggagccggcacggaaaacaaaaagggggaccccattatcggaggagaactcctccccggggggcgccgcgaaaataaccccgggccaccgctccaagacccccccggcggcccacggtccacttgcttccgttgggggaagcgcggaaat

SEQ ID NO: 119977 - DNA, 310 bp, Zea mays
  Clone ID: MRT4577_40901C.1
gaacgaaaacgtttatttgttattcaaagagaccctacttctcaataactgatgagggattacagcttacacctggtagaggctcccatccaatgtgatcaatggaggtgaaatgaactgcaaatggagcttaccaacaacgctaggaacatatgccatctacatatcaagttattagaatgcagaaaatgtctaggaaaaaagaactttacagcttgcacatgaaatggtcttggaagaatccactaaaagaaatcaaattcaagataattgtctggacctttctcggctgacggtgttgccttctgac

SEQ ID NO: 119978 - DNA, 616 bp, Zea mays
  Clone ID: MRT4577_40902C.1
gccatcttgtccaaaaaaggaaaaccattctcttcctgtcctctgagccctctctatattgctacctttcctgtctttgtcctctgtccacagctgcttcttctgttccttggcacccaggagcttatggtatgatacttgtgcttatgctgataatgaggcaaggggttgcaatatggagtagtaatggtgtttatttctttttttatcttatggaacaattccatcctaacaatctcactagatggcatgcatgacatggcaatgtaatgttgggctagtatgtcttaattttactttcctgtcagaaactggatttggattttgcccaactagatttcagctatcacatgtagttcaaaattatcgttgtcctatttgttcacaaacaagtttattgggatgctggtatacctactatcaatggtcagtctcttttgtgtggaatgattttcttctggttaataattgtaagcaatatataattcatgtgacctgcgcaggagttggatgaatatgataccttctataagaaaaacagggaaaactctggatattcaagtatttacattcagcgatctggagacaaacgagatggctgtggtatattctataa

SEQ ID NO: 119979 - DNA, 642 bp, Zea mays
  Clone ID: MRT4577_40903C.1
catgggctgtggaggatccgtgcagaatcattgaccgtttgcgcaggtctggtggctcccgcaggtgtccctatcagggcttagaaaggacgtgtttggacgaactcagggagaactacataatgacgattaagtgacgggttttttaagaaggatttactgatgacttgtttacatgcagctttcggctccaggacttgggtttggtaagctgtttctctgttaagtctgctattagtggattgcctgctatggggggtgcagatccaatgcaccgaatgatcaacagaaccacatcggcctggtttggtaacaccgaaagtcacgccctctatttacgatgttggaaagtcgttgccattgtccaagttcatcgttatcactaactgttgtgtgctcgagccatgtgcgcctgacgtccgaagctgcaccgagtgtcgctttatcttcgtacgttgctccgtatcgagttcgctcgcgtagtgatcttctccctgtcgtgcttgtcgtcgctacgtcgtggtaaaaaggattagattagtgtatggttgtcaacatatttgtgtgtcattacaaaattctaaattgactctttagaaataatttgtgtaatattgataatgtttaccacacggattttac

SEQ ID NO: 119980 - DNA, 508 bp, Zea mays
  Clone ID: MRT4577_40904C.1
ggcccaaaaaggggttcaatttttggtttttttcccccctttttaaaataaggacccccggtggttgggccccacctttcaaaaagccaaaccggcattttaaacccccccctaacccgggggggaacgtttaaaaaaaatccccccccaaacggttcccaaaattccggaaattaaccttccggaggggcccccccggttttggccctacttgggggaaacaaaaaatcctttggggtttcctggggggcgggcccccccccttaagaagaacttttttgggccggttggggggggcccccgttgaccccatggtgggggcccaaaattttttccttccccttgttttccgaaaccatgtccttggggttttgggggaaatatttccccccctcctaaaaaactccccgggttttggaaccttgctcccccctgggggggcccacctccttgccctttttttgaaggtaaacagccccgttcccttttggagggttccgggcttttg

SEQ ID NO: 119981 - DNA, 156 bp, Zea mays
  Clone ID: MRT4577_40905C.1
gttactcgtcaggtcacgccaggagatcggagcgggcgaccagggccacatgttcggtgttatacacaacttatctcttggcgcgattccgatgagccacgtgctgtccaccaagctcggcgcgcgcctgacggaggtccgataaggacggcacct

SEQ ID NO: 119982 - DNA, 312 bp, Zea mays
  Clone ID: MRT4577_40906C.1
gttgcttcatcagcctcgacgacgtcatcgagatcgccaggaccatgaggcacaggtgcatggccattgaattggccggcaccgtcatggagatcctctgtacctgctttagctttttttgcacctgtgtcggtatgtaccccatggacctgcatcatgagattgacgacagtttggtggtttttccgttcgttaattaagtgatgttgtttatatactgtgttttctattgtttcagtaaatattttttttatatcttatatttatttctattaatatttctatgttaaactttataattatttattattt

SEQ ID NO: 119983 - DNA, 382 bp, Zea mays
  Clone ID: MRT4577_40907C.1
aaaacaaaaccccggacaaaaatatgataaagggggatccggcccccccaactgggctgttcttgaggacttacctgaaataaaaactccctcccggaaaggggcgtgccctcccaacaaatgtaatttaacctctggaagacatattgatgggggggcctatatatgcgtatatattaacgaacttgaggttatgcataccttgaatatcttgccttcaccgaaattaactacagcctttccaacaaaactgggcaaaaaaacaccttcccttcctttacaaaaaggggggtctcccgaacttaaaaaaaaaacattgccacccgggtgatcatccccatcttttttggggtgcggctttttccaaagtaactgaacaaca

SEQ ID NO: 119984 - DNA, 452 bp, Zea mays
  Clone ID: MRT4577_40908C.1
ctttgcagctgcggcggcggcggcggacgcattgtcgagggatggctggagcacacgggacgatggctgggtggcgtcgacgacgctggatttcctcttgaatcggttgcatctgctgctgccggagttgccggtggccaccgcttctttggagccaccgcagcccatggtggctcaaaggagaggagaggagagagagagagagcggcggagatggaaaaaaatgcaacgagaggacgaggaaccgatacgggcttcttggatctgagggaatgaaaagtcggaggagattaagcggggtctatgtgccacgtggatgcatgaatggacaaagtctcgtgggggaaagggaaacgcatgcatgcatgcatgacgtgacaaatttagggagaccgtaaccaaacaaaagttgtcgtttttttgatgttgaagggaaggggttgcgagacaag

SEQ ID NO: 119985 - DNA, 3654 bp, Zea mays
  Clone ID: MRT4577_40909C.1
atcaaaggtagtgtctgacaatagttttgatgtcttgtgcaatattgaggagcaattggatgatataatagctgaaatgttgtctgagcttagcaagggtgatggtgtttcgacatttgagttcatcggaagtggagttgttacggctttgctaacctatctgtcatgtggaacatttgggagggaaaaggtgtctgaggcaaacataccaaatttgcgtcatcaggcagtcagacgatacaaaacatttatatcttttgcacttccaaatgataaagatgggaataaaactcctatggcattcctagtccataaactgcaaagtgccctatcttcgttggaacgtttcccagttgtgctcagccattctggaagggcatcgactttgggaggatcccgcctgacaacaggtttaggatctctgtcgcagcccatcaaattgcgtctttgtcgagcgcctggtgagaagtcacttaaggatttttcgtccaatgttgttcttattgactcattagctagtctggcagctgttgaagattttctttggcctagagtccagcgcactgaaccagtattgaagcctccaatgtcatctgcaaataattctggatctggagcatcaagctccacagcttgtgcgccttcaattccatcagaaactcaatctgtcggtcgcacatcgttaagatcagggtcatcagattctctttgtttggttgtatagtatgattgtcctttgggaagcataaacacctcaaagggaaaaggaaaagctgttcttaaattgagtttggatgaacctaaaggcccacatactaggaatgctgcgcgcagaaaagctacttcagagaaagatgttgaactgaagccatcacatggtcacatcacttcagaggatgaagatcttgatgcttctcctgttgagattgatgatgctttaattcttgatgatgatgacgaggatgtcccagatgatgaagatgatgatcatgaggcggttctccgaggttctcttccttcctgtgttcctgagagagtgcatgatgtgaaattaggagatgctgatgattctagtgttgcctcattggcaaatgataaccaggcacagccctcatctggttctagtacaaaaaatacttctagcaggggattggacactgctgaatttagaagtccagccacatttggttcacgaggtgcaatgtcgtttgctgcagctgcaatggctggattaactccagtaggtggtcgtggaattagaggtagccgagatcggaatggccttccattgggtgctcgtgcaactgagcattacaacaaattgatatttacagctgctgggaagcagctgaacaaacatttgactgtatatcaagctgttcaaagacaagtagttcatgccgaggatgatgaagatcgattcggtggatctgatttacctgatgatggtaaccacttctgggatgatataaggggtgatgtgttcactataacgtatcagaaggctgataacacagcggagaaggggtctgttggaggttcagcttcagtgccaaaatcttccaaatcagattcttgcagaactttgtctgaaaaacagtgtacttctcttcttgatagtattttgcaaggagagcttccctgtgatttagagaaatcaaaccaaacctacaatatcttatcactattacatgtgttggagggtttgaatcagttatcacctcgtctgagactgcagtcagcctgtgatgattttgctgaaggaaaagttgctacattaaatgggctatacgatgttggagctaaggtaccctcaaaggagtttatcaacagtaagatgaccccaaaacttgctcggcaaattcaggatgttcttgcactgtgtagtggcagtttaccatcttggtgttatcagctgacgaaagcttgtccttttctgtttcctttcgaaacacgaaggcaatacttctattccacagcttttgggttgtctcgtgcacttcatcgtcttcagcaacaaccgggcaatgataataacactgcttttgaaagagaagtcaggattggtagattgcaacgccagaaagtccgtgtttctcgtaaccgtatcttggattctgcagctaaagttatggagatgttctctaatcaaaaggctgtcctagaagttgaatactttggtgaagttggaactggtcttggtccaactttggagttttatactctcttaagccgtgagctgcaaagggttgacttaggattgtggagatctcattcttcagataattctgggatgcaaattgatgcgaatgctgatgatttaataagaagtaaaaatcatgaatcagaatcacttactgagagcaggaacatagtacaatcacctcttggattatttcctcagccttggccacctactgctgctgcatcagaaggtagcaaattcttcaaagttgtcgagtatttccgcttagttggtcgagtgatggcaaaagcattgcaagatggaaggcttctcgatttgcctttgtcgacagcattttacaaacttttgcttggacaagaacttgatttatatgatatattatcttttgataccgagttcggaaagacattgcaagaattgcaaattctcgttgcacgtaaacaatttttggactcctgctctagtgagagccaaaagatagatctatgtttccgtggtgctcccgttgaagatttatatttggacttcactcttccgggctatcctgaatatgttctcaaggaaggtggagagaatgcagaggtcaacatttgtaacttagaagagtatatttctttggttgtggatgctactgttaagaccggcataatgcggcaagtagaggcatttaaggcaggattcaatcaggtgtttgacatatcatcactgcaaatattttctcctcaagaacttgattatctgatttgtggtcgctgtgaactttgggagccggaaacactgcctgaacatataaaattcgaccatggttatacctctaagagtcctgcaattattaattttcttgagatcatggcagaatttactcctgagcagcaacatgctttctgccagtttgtgaccggtgctcctcggcttccacctgggggtttggctgctctaaatcctaagttgaccattgttaggaagcactcttctgtggcaaataataattcaaatgcaactggagcgacagagtctgcagatgatgatttgcctagtgtcatgacttgcgccaactatcttaaactaccaccatactccaccaaggctatcatgctaaagaaactgctttatgcgatcaacgaaggccaagggtcatttgatctttcgtgaatctcaacactaacataggtattggtccacctagaaatctgcgtcattgttacccagagttagtttctacctcattcatgtatgacataggttaaactcagctctccggagtcccaccgaaggtttggagcccgtacctttgggtgtggatgtctatactctcttttcttcttggttgtatattcttgcggatctttatagtgaataatagtaataaattgttttgcgcttcttactatgctctaaaaaaaaaaaaaaaaaaaaaaaaaaaagggggctgcgttgttaccactgct

SEQ ID NO: 119986 - DNA, 666 bp, Zea mays
  unsure (1)..(666): unsure at all n locations
  Clone ID: MRT4577_40910C.1
aattcggcacgagggcccctctcatgtcctgagcagcggctagctagctccacggcttcgtcgccatggatcttgtggccggcgccgtgggcagcatcatccgcaagctcggcgagctgctcctggctgagtaccagctgcaggcgtgcctgccggaggaaatcgagtctctgaaaaatgagctcgagagcgcgcacgtggctctccgcaccgtggcggaggtgccgccggagcatcttgatcaacaggtccagctctgggctcgcgaggtcagggaggcgtcgtacgacatggaggacatcctcgataccttcctcgtcaacgacgcaccggctgagaaaaaggatggcctcggcaaacgtcgtcgtcttggtcgtcgtctcctggacaatatagctggcgccatggaaaagatgaggaagctgttcaaaaagagcaaggagtgtcacaccatagctggcgccatagagaagatgaaggaacggctccgggaggtggctgaccgccgcgacaggtaccgccgttccggtggcagcgcctgcgccggcgaggaacgctggatcctcgcctcgcatacatgcacagggaagcggcacagctggtcggcatggacaggtccaaggctgaggtcatggccatgcttctgccgctngccgtcgtcccgct

SEQ ID NO: 119987 - DNA, 652 bp, Zea mays
  Clone ID: MRT4577_40911C.1
gcagatccagtgatggatttgatttccccgcccccggtccatccttcctccgaatctgacgcaacaaaactgccgtgacctcggccgcacgtggccttgccgctggtcacctccatcaccacgaaagccggaacgcactgcggaagtccgggcgaggttggccggggcggcgccatgaacctgggacggctgttgacacctgattccttgggatagggctccggaccgcgcggcctcgacaccaaccacgcctggggcccagggatttatccgcctggtgtatctccctcgcgaaaactctcccagcgccatgcacggagttcgttatgaactaatcccgtgaataaagaatccgtctgaccgatctcctccgtggctgggctccatctcgagctgaactatctcctcccccagagccatttgacctactggtcgacccagagacaaagaaagcaataaaaattattaatatggccgaagctactgaagaccaagttgtcaccaaactgctacccaaagctccagaaaaagttctgaaggaagaagcgtagcgattgtagtaacatttctagaaaattaatgcaccatctgatagactatgttcgaaatatttggcgatcacacacttgcatgcaacatatgaagtgtccgt

SEQ ID NO: 119988 - DNA, 694 bp, Zea mays
  Clone ID: MRT4577_40912C.1
aattcggcacgaggcatcattgaaatagaaatcgtgtcagtgttgcagtcgtgacataagaggcggcgatgaaacttttaacagacaaaaaacatttaggagtcacatgtggctatcaaaaaatggactttgaacaaaattattttagattattttaaaagtatccgcccttaggcttggcagggcgccgcgaagcgcgcaactttttctagtaatatataatatctcaatcaaatatcacgtttaagatcatgtttggtcaaaccttgacttaaagaaaaaagagaattcaagcttattttatatcgcacgcatggactaagaaaactattaaagatggctactctatcacatcctttatactatttaaacacactatatataatgcatgcatgcaaagaataaaaatgaaataattattatgagtatgtatatccacacaaatactatatctaacgcatggatgcaaagaataaaagtgaatcaattaatatgagtatataggaagatctcacatcttgtgttgatgttttaagtactatgtaagtttttattgatggataattgtatcttgtgtttgcggtaccatgagtttttgacaattgtccattatggccctattgttgggatcttatttttagtagagattttctaagaaacaatctatctagataatccattggctagacattct

SEQ ID NO: 119989 - DNA, 158 bp, Zea mays
  Clone ID: MRT4577_40913C.1
tcttcctgctgatacttatccttatcggatgaggtttataccgagtatccaaaaaaaatagttcgctatatttaatttgcttgctgacttaattcccataatccccgtgtacatatctatcaccctgtgaatattctcagtttgtaatagggacgatt

SEQ ID NO: 119990 - DNA, 1279 bp, Zea mays
  Clone ID: MRT4577_40914C.1
acagtacattcattcgctccggccggtacgttcagcatcgtcgtctttcgaaaaatgtggttcggtggcggacccatcgacgcggcgggcgcgctgcgcggcttcgtgcgggaagcaggcgggtgcgcggtggtggacgggggtctcggcacggagctggaggcgcacggcgcggacctgcacgacgcgctctggagcgccaagtgcctcgcctccgccccgcatctcatccgcaaggtccatctggactacctcgaagcaggtgcggacgtcataatctcggcgtcctaccaggccacgatcgaggggttccagtcgaggggcttctcgcgggacgagagcgaggagctgctgcggcgtagcgtgcacgtcgcgcaggaggcgcgcagggtcttcgcggcggagggcgacaggtcatcgcgccgcggacgcccgccggcgctggtggcggcctcggtcgggagctacggggcgtaccgggcagacggctccgagtacagcggggattatggaaaatcgatgacgaaagaagatctgaagaacttccacaggaggcggctgcaggtgctggcaggcgcggggcccgacctcatcgccttcgagacgatcccaaacaaactcgaagcgcaggtctacgctgagctcctcgaggagaacggcatacggatcccagcctggttctccttcacttccaaggacggggtgaacgcggcgagcggagatccgatcaacgagtgcgcggccgtcgctgattcctgcccgggggtggccgcggtcggagtgaactgcactgctcccaggttcatccacgggcttatcctctccataaagaaggtgacgagcaagccgatcgtcgtgtatccgaacagcggggagacgtacgtcgcggagacgaacgaatgggtggactcggacggcgccacggggacggacgactttgtgtcgcgcgtcggcgagtggaggcgggcgggggccgcgctcatcggagggtgctgcaggacgagcccggccacggtgcgagccatcgcgcgggcggtgcgcgaggcggaatacgacgatatccctgccgtggccgtgctctaagcttttgctagttcttccattcccggcggagaaactgaagacgatcattttcggcaataaagtacacacgctcgagtgccacattgtgcgcagttgtctttgatgtggagaaactggagacggcgattcgtcgtcatgctcacgttccttcggcaataaaaatgcacgtgcacgtgtgccacattgttcgtagttt

SEQ ID NO: 119991 - DNA, 231 bp, Zea mays
  unsure (1)..(231): unsure at all n locations
  Clone ID: MRT4577_40915C.1
ttcccccagctgtccaagccctagtggcgtgcggggcggggggggcggcgangggatggggatgggccccgacccgggggggaaagcgttcctggggcgctactaccgggcctgccacaccaaccgcgcggggctgggggggctgtgtcangagacctccatgctcaccttccaggggcannaaggggagggggcatccccgattgcgcggaancgccgatctcttccctt

SEQ ID NO: 119992 - DNA, 434 bp, Zea mays
  Clone ID: MRT4577_40916C.1
cgggccaaaaaaaagattttatcatagcagccccatgaacggaacaaatttatgggttcattagcggttcctataaaaaagggcctaatcggaaacagggcaatcactagctgctcctgtggcccccgagaccaaaccatttttttttctatattggggacttctggggggccccaaaaacgggaccagctttgctgcttttgatcttccaacaacagttaactaacacttgatagatttgtatatgggggggacaaaaaacaagggggcccggaagccccccttcccaagcttaaaaaaaaatgcatagcaaatgcaggccatgtacccaaaaaaaaaaaatgtctgcttgaagccaaacatatccgatcgcccatagtagtagaccaggcagtacccgtttacaaaaaatccagtggaccccccgcatagga

SEQ ID NO: 119993 - DNA, 310 bp, Zea mays
  Clone ID: MRT4577_40917C.1
aaaaaaaaaaaaaaataaaaaaaatttattataaaaaaaaaaaaaaaaaaataaaaaagcaaggaaaaaaaaaaaaaaaaaaaaaaaaaaaataaaaaaaaaaaaaataaaaaaaaaacaacaaaaaaaacgggcagtcccaaaacatttcacccaactttaacaaagaattcttttaactctaaacttacatattattgaaaaccaaattaaattcattcccataacaaaaataacagatatacatacaaaaactctaacaaaccccactttaataacattgactcattcaggaacattcccattttta

SEQ ID NO: 119994 - DNA, 374 bp, Zea mays
  Clone ID: MRT4577_40918C.1
ggcggggaccttcccgaggccaccgactaaagataagagaggcggtggtcaacttgtgtgctgaggtgcccgtagaagcccaaggacaataaaccaggataagagtagatctacctctactccaccgatgagcgcgtctcggttcatcatgtgcaccaccgggggggcaagagccggcggaaagacctgcgtgctcgtctcctacgcgtccaacactttccccaatgagtatattaaaaatgtgttcgacaacttgaatgacaatgttgtggttgcaccgcagtactgcccattttcctctgtgggatacacaacggtaagaagattagaatagactgacggcggtcaactatgagggtgatgatccgtttctg

SEQ ID NO: 119995 - DNA, 245 bp, Zea mays
  Clone ID: MRT4577_40919C.1
cctactcttcctttttctcactatctttccttccttcactccatatcccactgggggggcctataccccgacgcatctaatctgctcccccctcaaggcgaaagtgaccatattgacctcacgctcaccaagcttctcacccggcttttccccaagactgatatctcggatcctgatgcttgcactctccgcccccggaactaccacacttctatacatgcttaaactcgcctagatcctaccac

SEQ ID NO: 119996 - DNA, 271 bp, Zea mays
  Clone ID: MRT4577_4091C.1
tcgtttttcctacgccgagctgcccgtgcgaggttgggcttacgtcccaggcgagctgaactccaccccgagccgagtagcatgcactacaagtcgcattagccgcgcagcgaagccgtgattttaccggtgacccgtcctgagaggatatactgccccaaccttctgtagcacagaaggatacagacgacccgtcagactgaaggcaagttcaaagcgcgctggcacaggcgccagattgggatggagggtttcctggcaatgctgaatg

SEQ ID NO: 119997 - DNA, 316 bp, Zea mays
  Clone ID: MRT4577_40920C.1
agctaggattcattccaactggttgtaactaatatgtttttgggataccacacgcaccgcatattacacaaccggaacagattaaaaaccaaactggcctcggatgaaagcagcaccgaacttttgaaaaggaatgcaactccccgtaccatagtccggtataattgtcaacagccaacaaaccatgctttgaataccgggcacatctcccagcatcaacatccactcctttaatacctactcttgaactggatcgccctaatgatcacccgattgcatacggcagtccgcaaaacacccaaaaacgagcctgccc

SEQ ID NO: 119998 - DNA, 1809 bp, Zea mays
  Clone ID: MRT4577_40921C.1
ccggccgggtggttgcccagaagatgacaaccacagcgctacggcaccttagacaaattgctcaagaaacaagtggagaggttgtatatgcgctaggaaggcaaccagctgttctacggacatttagtcagaggctgagtagaggctttaatgatgctataagtggtttcaatgatgatggttggtccgttatgtgtggagatggcatggaagatgttatcattgcttgcaactcgaagaagatcaggagcagtagcaatcctgcaactggttttggagcccctggacctggaggtatcatatgcgctaaagcatcaatgttgctgcagagtgttccaccagcagtccttgttaggttcctgagggaacatcgatctgagtgggcagattataactttgatgcgtattcagcttcagcattgaaaacaagcccttgttcccttcctgggttgcggcctatgaggttttctgggagtcagatcatcatgccccttgctcacacggtggagaatgaggagatcttagaagttgttcgtcttgaaggacagactcttacacatgacgagggccttttgtctagagatatacatctgcttcagctttgcactggaatggacgagaaatcaatgggatcctgcttccagcttgtctttgcaccaatcgatgagcttttccctgatgatgctccattggtatcttcaggctttcgcgtgatcccgttggacataaaaacagacggaccaccctctggaagaacgttggatttggcctctagccttgaagttggcgcaaccacgcaacaagtggcaggggatggatctcaggacgtttgcaacctgcgatctgtgctgacaattgcctttcaatttccctatgaaacacatctccaggacaccgttgcagctatggcccggcaatatgttcgaagcatcgtttctgcggttcaaagagtatcaatggccatttctccctcccattctggcttgaatactgctgggcagaagctaatttctggctcccctgaagctgctacacttgttcgctggatttgccaaagctaccggtatcacttgggggtggatttggtcagccactcggatcaagctggggaatcacttttgacaatgttctgggaccatcaagacgctgtcttgtgctgctctttcaaggaaaagcctgtgtttactttcggcaaccagatgggagttgacatgttagaaacgactttagtcgctctgcaagatctcacccttgacaagatctttgacgagcctggtagaaaggcactacatgcggaggttccgaaactgatggaacagggctatgcgtacctgccggctggggtgtgcctgtctgggatgggccgccatgtctcctacgagcaagctgttgcttggaaagttctcggtgaggacggcaacgtgcactgcctcgccttctgtttcgtcaactggtccttcgtctgatgtgatccaagtgcaccgcggaaactttacgatcagcgtccatttttgcattctctgtagacgagaatggtgcggtgttgctgctactgttagctaggcaacggcatgttcaggtagtcttggggaaagccagtattgtgaagatgtaaatttgcgcccgtttccgctaatttaacccgctgaacttgctgttgtttgttaaggccaggggcactcgtacgtgagattaaatgttgtgaaattgtatgtgctgaaacataggtttacattgaaattggcataaaaaaagaatgttgtcataaactgctaaaaaaaagttttgatattaattaaggggggtttg

SEQ ID NO: 119999 - DNA, 510 bp, Zea mays
  Clone ID: MRT4577_40922C.1
ccgggttcacctcggggtccttgtcctgctttgttggcgaccgacgtggctgcttactcccgcgccgttggtggatgcggccccagaggcgcccgccaacaccccggcggcgcctgctgccggcgcgaaccggccaagccaacaaggcccggccgaaaatcgcgccacccgctcaggctctaatccaagaggtctcggaggctatcacttctttataggagaggacggagggcagctgatttgcgatcgccaagatcgggtaagacaaccacaaggacaagctcactatcaacttgcgcaagctaatggagcgtgtcatctgaagaagctcgatctcagtgcgcaagctgaccatggtgaagataccctacaatctgtcggtcgacgtcaccaaacaggattcgaacctcaatgcccttactataaaaccaaggactcggactaaaaagcccaaggccgctgcacaagaccaaagctaaaacccactactaggcaaataatgtcacaaat

SEQ ID NO: 120000 - DNA, 675 bp, Zea mays
  Clone ID: MRT4577_40923C.1
aagcctaaagcatttccattatagaatgtcaactgaaggtccagctagaaaaaattacaagaaagaatgcgcatttctgccatttcatggggatcttgcctagggagcacaagtggtgtctctgttccctgtgcggcgagcagtccccatttttggttctgaagatcagcggtctgttcggttcatcaggattgagcaccagagtcattccagcttataaagatccaaccgtgaattattccaggcgctcattccggaggaaccgaacgagccttaaagaagctggcgaccccgcatccatgcatcctaggcgcagaggatgaacttgccggagggcaaggccgcggcggcgacggcgagcaggcaggctgtgacgacgttctgccggaaccaccggagcggcgcccacaggcccgcgccctccacgctggcgcacttggccctcgtcaccccgtactgcggctccttggacaggtcgaacgcggcgcccttcaagcgcagctcctgcacggcccgcgcgagtgcgcgcgcgtcgccgcggtcccggcgcagccgcgccgcggcgcgccagtaggcgcccacccggagctgcacggccgcggcgagcgcgagggacgccgccagggacagagacgacggcgcccaccacctcctgcacgcggcggagggggaggt

SEQ ID NO: 120001 - DNA, 348 bp, Zea mays
  Clone ID: MRT4577_40924C.1
cccacgcattcggcgttggaggctcccttgacacagaaagacatgcatgctgtgccgggttaaaaaaccagagccttcttgcgcttcatgatactcacgtacacaagatgtggttaggcattcgctagcgaaaccagggcactaaagttcctggggacgttcaagagctacatcttcaaggaacatatccaggggcacactcacatgtcgttcatgcccgagttcctgtgcatcagctaccagttcatagaagacagctgtgagcagctggcgtacgagaaccgcatgctggaacgatttgacaagaagctcaccatcaacctacactggatccagaccttggtgcgc

SEQ ID NO: 120002 - DNA, 193 bp, Zea mays
  Clone ID: MRT4577_40925C.1
tttatacatcccctcaacctccaataccccggggggttttatgaaaaaacagggggttaccaacaccaaccgtgagcacatgggccccaacgaatacctcttccccttgtgcgcactagtaatccaagattgtcacactatctctatcaatagaccctctggtttatggactaacgttgatatcctatgtacc

SEQ ID NO: 120003 - DNA, 3708 bp, Zea mays
  Clone ID: MRT4577_40926C.1
atggttgtcgatccgccgcctcctccaccgctcacccaccaggaagacactgtcgccgccctcaccgctgctcgtgcggagcacgctgctcgacaggcccgcttgcgggaagcggccctcgcgtgggagcgcgagcgcgcggccgccgatgctatcgctgctcaaattgccgcggcggaacagcacctcgcttcgcctgcggcccacgacggcggggccacctccgctaacaccatgggcgacgtgtacggcgtctcgaccgtaccgacagtcgggaccgggccccggaccatccccgcggtgctctggcatgacccggctgacccgctcgtggctcagctccacctacaggctgggagtgtccagaacattcgcctgatggttccggtcgtcctggagtcagagtcgccatcctacacgcgttggcgggacttgcttcttctcactcttcgccgctacgccctggatgaccacgtcctctgcgaccccatcggtgtggcgccgactgctgcgtgggtgcgcctcgacagcatcgtgctcacctggatcgtggggacgatctccgtcgacctccacagcctcctccggaaccttcctcacgctcgtgctgtttggcttgccatcgagagccagttcatgggcaacgccgaggcccgggctctccgcctcgacgccgcttttcgcaccttcgtccagggggacctcagtgtcagtgcgtactgccgccagatgaagaccatggcggactcccttggcgatctgggctgccccgtggaggaccgcatcctagtcctcaacgtcctccgcggcctcggcgatcgctacacccacctccggtcattgctcatgcgccagcgcccctttcctaccttcctccaggttcgcgacgacctcgccctggaggagatcactctgggggctcaggctgcatcgatctctggcccggggtcctcgtcctcttcgacagcactggcggctttcaccccgacccgtccgcccactccgtcacagtctgcccttggccctcgccctctcgggccgagcatgggcggcgggggtcgaggtggcggaggcgggggcggtggtggacgtcgccgccgtggtggccgcggtggtggtggtggtgtccgtggccacgcatcgacgccgggaccccagcagagtgcgccttggcccactttccaccacccgtggtcagggcgcatctccatgtggccgttccaggggccaggctctgaggctcggcctccggcggccatgttcgctggtgcgcagccagggttcgctttcgcctctccgtcgccctggacctcgacacctgccgtttcgtcgtggcccacgcctccggcttctccaccgtccgggctggttggttgggacgcggccgccctggctgctttccagactcctactctgactccgccgatgggtcccgagtggatcgcggacaccggtgctacctaccacaccacccccgaccctggctacaaatactatcttgtggtgcttgatgatttttctcattatgtgtggacttttcctttgcgtgccaagtctgagactttccccgccctccgccacttcttcgcctgggtgtccactcagttcggcctcaccattaaggccgttcagtgtgacaatggtcgggagttcgataactccacctcccgcgacttctttctctcccacgggatgcaattgcggatgtcttgcccgtatacctcctcccagaacggcaaggctgagcgcatgatccgcacgaccaacgacaccatccgcactcttcttctccaggcgcaccttccggctcgtttctgggccgaggccctccacacctctacctacctcctcaaccgtctcccttccactgcgtgcccggcccccactcctcaccaggcactcttcggtacccctccgcgctatgaccacctccgtgtcttcgggtgtgcttgctacccgaacaccgctgccactgctcctcacaaactagcaccccgttccaccctctgtgtgtttctcgggtactccccggaccacaaaggctaccgctgctttgacctctgctctcgccgggtcctcatctctcgccatgtggtgtttgatgagtccgtatttccctactcctccaccaccacaccaccctactccgaccctgaccttgacctcttcactctctttcagactgacgcggtggtcgagccacctctccttcctctctctgcaggtactcgctcaccacctgtcggtcctactcccggcccggtaccttgctcgggttcggtggtgtcgcgtctccgcggagccccgtctccgatcgcccccgggccgagcgagggtggtgggactgcaccgcctccggggccgtcggttacgacccctccggcccgcttcgcccagccggtgcgggtctaccagcgccggctgccgccaccggggttcgcacctccaccgtcgccgcccctgccgctgtcaccgccggtggcccagtccccgccagggacacctacacctccgccgcggccacccgcggcccgtgtcgcgacgccggtgtaccatccaccgctccttcatcgcgacccgcggcatgtccacccgatggtgacgcggcacgcggccggtaccccgccgccccgtgtcttggcggccacgaccgcagactcgcaggtttctccagtaccctcctccgtccgcaccgccctgctggacccccactggcgtcaggcgatggaggaggagtacgcggcgctcgtcgccaaccagacgtgggatctggtgccccgtccgcccggcaccaacgtcgtcaccggcaagtggatctggacacacaagcgacgggccgatggtaccctagaccggtacaaggctcgctgggttcttcggggcttcactcagcgccccggagtcgactacgatgagaccttcagcccggttgtgaagccggccaccgtccgcacggtgctctcgctggccctcgctcgctcctggccagttcaccagctcgacgtcaagaacgccttcctgcacggcgccctcaccgagaccgtctactgctgtcagcctgcggggttcgtggactcctctcgccctgacatggtctgccggctcaataggtccctctacggcctcaagcaggccccccgggcgtggcattccagactggctaccttcctagtgacactgggcttcgtggaggccaagtccgacacgtctttgttcgtgcaccatcatggcgcagagactgcctacttgctactctacgtggatgacattgtcctcaccgcctccagtccgtctcttcttcgccgcttcgtcgacgcgcttcagcgggagtttccggtcaaagatctgggcgtgcttcaccatttcctgggggtcactgctgagcctcgcccctcaggactcctccttcaccagcgacagtatacgcttgacattctggagcgggcccagatgagtgactgcaagccctgctccaccccagtcgacacgcaggccaagctctctgaggccacgggtgacccagtcgcggaccccaccggctacaggagtcttgccggtgcccttcagtacctcaccttcaccaggccggacatctcctacgccgtgcagcaggtctgcctccatatgcacgaccctcgggagccccaccttgcggcgctcaagcgcctcactccaataaatgggagtcaaaactccacgcacaaatga

SEQ ID NO: 120004 - DNA, 325 bp, Zea mays
  Clone ID: MRT4577_40927C.1
gggggggggaaagggtatatatatataagttcatggggaaaaggaggttttatacgggggggtccagaaatccgggccggtgttatccctgtacacttggggggggcatgagacgggtaccaaacacaggcctttattttggagggccatttccggttgggacttggccttcaaggcaaaccccccccaagcattggagccctgggtactacgggtgggcttaagggaggggacaacaaaaaactgcacttgtttatgcaaccacttgggggaatttattggctaaaaaaaaaatgacccggaattgggtttttaaaaaggggaa

SEQ ID NO: 120005 - DNA, 1128 bp, Zea mays
  Clone ID: MRT4577_40928C.1
atggcaaatccaccaaaaacagagttcttttggagacatatggttaccctggagcggtacaaggctcgctgggttcttcggggcttcactcagcgccccggagtcgactacgatgagaccttcagcccggttgtgaagctggccactgtccgcacgtccaccagcttgacgtcaagaatgccttcgtgcacgacgccctcatcgagaccgtctactgctgtcagccggcggggtttgtggactcctctcgccctgacatggtctgccggctcaacaggtccctctacgctctacggcctcaagcaggcccctcgggtgtggcactctagactcgctacgttcctggtgacactgggcttcgtggaggccaagtcagacacgtctctgttcgtccaccttcatggagcagagactacctacttgcttctctacgtggatgacatcgtcctcactacctccagtcagtcacttcttcgccgcctcatcgacgcgcttcagcgggagtttccggtcaaggatctggatgtgcttcaccatttcctgggggtcactgctgagcctcgtccctcaggactccttcaccagcggaagtacactcttgacattatggagcgagccaagatgattgactgcaagccctgctccaccccagtcgacacgcaggcgaagctctctgaggtcgagggtgacccagtcgatgaccccaccaggtacatgagtcttgccggtgcccttcagtaccttaccttcaccaggccgaacatatccaacaccgtgcagcaggtctgtctccatatgcacgacactcgggagccccacctcgcggctcttaagcgcctcctccgctacctccggggcaccgtcgactacaggctgcttcttcaccggtccaccgcctccgagctggtcgtctacaccgacgctgactgggccgggtgcacggacactcggcgctccacctctggctatgccgtcttcttaggcggcaacctggtgtcctggtcgtcgaagtgccaaccggtcgtctcccgctcgagtgccaaggcggagtaccgtgccgtggccaacggcgtggcggactgtgtggctctgccagctcctcaccgagctccacagtcccctctctag

SEQ ID NO: 120006 - DNA, 1153 bp, Zea mays
  Clone ID: MRT4577_40929C.1
atggaggagtacgcggcgctcgtcgccaaccagacgtgggatctggtgccccgtccgcccggtgccaacgtcgtcaccggcaagtggatctggacgcacaagcggtgggccgatggtaccctggagcggtcactaactcaacgtcaagaacgccttcctgcacgcgccctcaccgagaccgtctactgctgtcaggcggcggggttcgtggactcctctcgccctgacatggtctgccggctcaacaggtccttctacggcctcaagcaggccccccgggcgtggcactccagactggcttcgttccttgtgacactggacttcgtggaggccaagtcagacacgtctctgttcatccaccatcatggagccgagactgcctacttgcttctctacgtggatgacatcgtcctcactgcctccagtcagtcacttctttgcgcctcatcgacgcgcttcagcgggagtttccgatcaaggatctgggcgtgcttcaccatttcctgggggtcactgccgagcctcacccctctagactcctacttcaccagcggcagcggcaacctggtgtcctggtcgtcgaagcgccagccggtcgtctcccgctcgagcgccgaggtggagtaccgtgctgtggccaacggcgtggcggaggctgcgtggctccggcagctcctcgctgagctccacagtaccctctccaggagcacgttggtctactgcgacaacgttagcgccgtctacctctccaccaacccggtgcagcaccagcggaccaagcatgtggagatcgatctacacttcgtccgagatcgggtcgccgtcggtgatgttcgggtcctccatgtcccgaccacctcctagtttgccgacatcttcaccaagggtctcccgtcctcgaccttcgccgagtttcgctccagcctcaacatcagtagtggctagttgagtctgtggggggatcctagtgtgtgatgtacttcttctttttggatccagtctgtaaactccgctgcgacggatgttcagactgcgggggggtgttagattatatgtggttaggcccatgtggctaggcccatatggcccatgtacaaacactatatagctaccctctagggttagccctaatgatatacaattatttacctct

SEQ ID NO: 120007 - DNA, 1934 bp, Zea mays
  Clone ID: MRT4577_4092C.1
gcagtactcctgttgccaccgcgagaagcaggcgccgccaaggcaccgacgcgacgagccgtggctccggcgacgtcgccagcaccagcagtactcctgacaccaccgcgagaagcaggcgccaagacaccgacgcgacgacccgtggctccggcgacgttgccagcaccagcagcacaccggacgccagtgccgacatgacgagacggggcgagtccggtggtcccgtgccggcgaggaatcgtgtccctgagcaagcggcagcggcactgatcgagaaaagagggcgcgaacagagcgcggccggtcaggaagtccgtgacgactctgaaggccgcggaacacgagatgccagtggtgcggagtccggcgtcggtggtgtcggattctccggaggaaacagatatgccactcctgaattgcaggatgacacggagaaggggatgaaacgccagaacgaatcggccgatgctgcgagaaaggaacgtcgtggtgaagctgcagagcagccgcgttacgaccatgaccgacgccaagaacttgcaccgaaatcatcggctcaacccgcggctgctcagcttgcacgcgaagatgaagctgctactgccggagaaaaggcgccgagcccttctcgccacgaggttcaagaggaacatctgcggcccctgcggaagaagattctgaagacggtggatgagctgaaaggcgatctctctgaacttttcagcaagtcccccgagctcaacgcgccacgcgcgcgccctcctcgtcttcccaggcaagaaggctacgtgtcccacgcggtggcggggccggcctcgggcctccctgccagtgctcgccacgtcacttcttctgccgaaggtcaccgtggcagcgtagctcgtgcggcgaagccccgtccagccgcggctcctccccgtggcttgccgtcccggcgctaccgccagtgcagagcgcacccgtgctgccatgacgtggatccgaggccgtgccatcacgggcacggctgctgcggccaccacggcaaaccggagtgcagcagctgccgaggatactgctgcaggcccagagcgctggagccgtccgcgccgcggaagcccacggcagccaaggagcccaagcggcggctgccgccccgcaaccactgccggccagtactgaagggcgcacctttcatcgtctgctccagctgcttcaagctggtgcaggtgcccgccgacttcgccgtctcgaccaagacagtgcgcaagatgcggtgcggctcctgctccaccatcctctcctactcctacagggacccggccaggaagaaagcctaccaggactcggtcaatcggtgcagcacagacggctccgagctgcacggcggcacaggcgaccaacggtcggacccgttcgcgccgttcatcgatggcttcggcctcagcagctactcgacggaggacgagcggcggctgcccgtctcgaggaacacgtcgttcgacaccctcgacgggacgaaaggcgtgggacggctgcaccggctgatggggtacgggtcagctagcgagctgctgcggcactcccctgacctgtacgagagcttcagtgagcgaacgacgcctgacgtgagacagcacgacacgaaagggaaaggcgtttgcatcgacgatgacgactacgactacgacttggatgacactgacgatgaagacattggtgcgctgaagagatcagcgaggaaagggtccggctggacgctcccatggattcccggcaagcggcaaggggactcgggagccatcaggatcaagtaaatagcaggaaaggcctgtgtatattgcaggaataggttcgggttttggaattcgaattggaatttatttcatagttttgctattccttttaaaaaagagaatgctacagcaaaagtcacaagtcgccacactagg

SEQ ID NO: 120008 - DNA, 485 bp, Zea mays
  unsure (1)..(485): unsure at all n locations
  Clone ID: MRT4577_40930C.1
tgtgcttacctctgacgatgcaggatgcacgcgggcgcgacccttctgcatgccaggtgtgccgaccaggtctcgcctccattcgtctccacgctcccatgagagccgcgcgcggtcgggagatctcacgccatacactaccgtccaaccccacgtgtctttaccgcaacacaccatttgctccgacagcagctgctcgccacgtggcagtctgccagtcccagcggcgagataccatttgccaaagagagggagcgcgcctctacctggcgctcatgcaggggcaccatattcgaatcgcggatcactccctgcactatgacgagagtaggattttcgaatctgcagttaggctctatcactctatccagaatctacgacgctgacattgttgcatgtctttggcgatgccataccgaaactctggaccaatgcacaagntttaccctttgaggctctcagtttcgtttgaagggtcacactaa

SEQ ID NO: 120009 - DNA, 5090 bp, Zea mays
  Clone ID: MRT4577_40931C.1
atggctggtcagcagcgcccctctctctccaactcctccttccctcccctctcctcctgggtgcgcgctgcatcccctggccgacgcgccgccgtgccccaccccctgccagccgccgccgtccctacctcccctgctggcgcgcccaccctggtagcaggagcgtgggggtcggttcccgtctcccccgcacttgggcccacgtggggggctgcgcctagcgccaccagtggggaccccactgctgccggcgccgcctctgctcttgcggctgtggcggctgtggttccggcgggaactgccgatctggaggactccaacccgccaccgccaatccccccgtcgatggttgtcgatccgccgcctcctccaccgctcacccaccaggaagacactgtcgccgccctcaccgctgctcgtgcggagcacgctgctcgacaggcccgcttgcgggaagcggccctcgcgtgggagcgcgagcgcgcggccgccgatgctatcgctgctcaaattgccgcggcggaacagcacctcgcttcgcctgcggcccacgacggcggggccacctccgctaacaccatgggcgacgtgtacggcgtctcgaccgtaccgacagtcgggaccgggccccggaccatccccgcggtgctctggcatgacccggctgacccgctcgtggctcagctccacctacaggctgggagtgtccagaacattcgcctgatggttccggtcgtcctggagccagagtcgccgtcctacgcacgctggcgggacttactcctcctcacccttcgtcgctacgctctggacgaccacgtcctctgcgaccccaccggcatggcgccgactgccacgtgggtgcgccttgacagcatcgtactcacctggatcgtggggacgatctccgttgacctccacagcctcctccggaaccttcctcacgctcgggcttttggcttgccatcgagggccagttcatgggcaacgccgaggcccgggctctccgcctcgacgctgcttttcgcaccttcgtccagggggacctcagtgtcagtgcgtactgccgcaagatgaagaccatggcggactctcttggcgatctgggttgccccgtggaggaccgcatcctagtcctcaacgtcctccgcggcctcggcgatcgctacacccacctccggtcgttgatcatgcgccagcgcccctttcctaccttcctccaggttcgcgacgacctcgccctggaggagatcactctgggcgctcaggctgcatcgatctccggcacggggtcctcgtcctcttcgacagcactggcggctttcaccccgacccgtcctcctactccgtcacagtctgcccttggccctcgccctcccgggccgagcatgggcggcgggggtcgaggtggcagaggcgggggcggtggtggtcgtcgccgccgtggtggccgcggtggtggttccgggggtggtgcccgtggccacgccccgacgccgggaccccagcagggtgcgccttggcccacttttcaccacccgtggtcagggcgcatctccatgtggccgttccaggggccaggctctgaggctcggcccccggcggccatgttcgctggtgcgcagccagggttcgccttcgcctccccgtcaccatggacctcgacacctgccgcttcgtcgtggcccacgccaccggctactcctccgtccgggctggttggttgggacgcggccaccctggctgcctttcagactcctactctgactccgccgatgggtcccgagtggatcgcggacaccggtgctacctaccacaccacccccgaccctggtatactcacctctgttcgccctccttcttcctctctcccttcgtccatcatggtggcgaatggctcatgtcttcctgtcacatctgtgggtgccgccggccctcccggctcttttcgcgttcccgatgttcttgtcgctccttctttggtccacaatcttctttctattcgtcggtttactgctgataattcttgttctgtcgagtttgactcttttggtcttactgtgaaggactcggcaactcgacgccccctcctcagatgtgacagcaccggccccctctacacccttcggcttccgtacgccacatcttctttgtcttcgtcacctgacacagctgctgtttttgctgccgccacgtcttctaccacctggcatcgtcgccttggtcaccccggacgcgacgccttgatgcagcttactcgtagtgccactatcccatgtactagatcccatgatgagcatctttgtcatgcgtgccagttgggccgtcatgttcatcttcctttttcttcttcttcctcacatgctactcatgcatttgatcttgtacactgcgatttgtggacttcacctattaccagtatgtcaggctacaaatactatcttgtggtgcttgatgatttttctcattatgtgtggacttttcctttgcgtgccaagtctgagactttccccgccctccgccacttcttcgcctgggtgtccactcagttcggcctcaccattaaggccgttcagtgtgacaatggtcgggagttcgataactccacctcccgcgacttctttctctcccacgggatgcaattgcggatgtcttgcccgtatacctcctcccagaacggcaaggctgagcgcatgatccgcacgaccaacgacaccatccgcactcttcttctccaggcgcaccttccggctcgtttctgggccgaggccctccacacctctacctacctcctcaaccgtctcccttccactgcgtgcccggcccccactcctcaccaggcactcttcggtacccctccgcgctatgaccacctccgtgtcttcgggtgtgcttgctacccgaacaccgctgccactgctcctcacaaactagcaccccgttccaccctctgtgtgtttctcgggtactccccggaccacaaaggctaccgctgctttgacctctcctctcgccgggtcctcatctctcgccatgtggtgtttgatgagtccgtatttccctactccaccaccaccacaccaccctcctccgaccctgaccttgacctcttcactctctttcctactgacgcggtggtcgagccacctctacttcctctctctgcaggtactcgctcaccacctgtcggtcctactcccggcccggtaccttgctcgggttcggtggtgtcgcgtctccgcggagccccgtctccgatcgcccccgggccgagcgagggtggtgggactgcaccgcctccggggccgtcggttacgacccctccggcccgcttcgcccagccggtgcgggtctaccagcgccggctgccgccaccggggttcgcacctccaccgtcgccgcccctgccgctgtcaccgccggtggcccagtccccgccagggacacctacacctccgccgcggccacccgcggcccgtgtcgcgacgccggtgtaccatccaccgctccttcatcgcgacccgcggcatgtccacccgatggtgacgcggcacgcggccggtaccccgccgccccgtgtcttggcggccacgaccgcagactcgcaggtttctccagtaccctcctccgtccgcaccgccctgctggacccccactggcgtcaggcgatggaggaggagtacgcggcgctcgtcgccaaccagacgtgggatctggtgccccgtccgcccggcaccaacgtcgtcaccggcaagtggatctggacacacaagcgacgggccgatggtaccctagaccggtacaaggctcgctgggttcttcggggcttcactcagcgccccggagtcgactacgatgagaccttcagcccggttgtgaagccggccaccgtccgcacggtgctctcgctggccctcgctcgctcctggccagttcaccagctcgacgtcaagaacgccttcctgcacggcgccctcaccgagaccgtctactgctgtcagcctgcggggttcgtggactcctctcgccctgacatggtctgccggctcaataggtccctctacggcctcaagcaggccccccgggcgtggcattccagactggctaccttcctagtgacactgggcttcgtggaggccaagtccgacacgtctttgttcgtgcaccatcatggcgcagagactgcctacttgctactctacgtggatgacattgtcctcaccgcctccagtccgtctcttcttcgccgcttcgtcgacgcgcttcagcgggagtttccggtcaaagatctgggcgtgcttcaccatttcctgggggtcactgctgagcctcgcccctcaggactcctccttcaccagcgacagtatacgcttgacattctggagcgggcccagatgagtgactgcaagccctgctccaccccagtcgacacgcaggccaagctctctgaggccacgggtgacccagtcgcggaccccaccggctacaggagtcttgccggtgcccttcagtacctcaccttcaccaggccggacatctcctacgccgtgcagcagagtcgaccattgcgcgcaggtagcaccctagaagtatctttggttgaaatacctaaaattattaagaaagatgcttctacttcctgctttgatttaaataatgattctaaccactgcaatcaagttcttgttaagaatgttattatagaaacttgttcggacgatattgcaatggaaattgagcaattaaagcaagaagtcgctcacctaggaaaatacttgtatgacaagaaaagcaaagccaaacaaacccaacctccacaggataacaccactatgggagtgaacaagcctatgaagggcgaaactgtgatttgtaggctatgtctaaaagaagaccacaagtctttccaatgcaaggcaagtaccgaggataagcaaaagacaacaagcaaaatctccaacacctacatcaaaagggtggataaaaaggttgctacactatatttgatcaagaagaagaagaatggaaaggtgatagcaatcaaggccaataagcaagccaacaaaggaaaaggggccaaacgcatctag

SEQ ID NO: 120010 - DNA, 366 bp, Zea mays
  Clone ID: MRT4577_40932C.1
gaccacacccttccgtttttcaaaaaaggtaatggttggtaacctttaattcctttgtcaattcctcccgatatgtttaaaattataatggggagggcattaaccccaacacccataaacattgttcttgcccctaaattcaaagggcctttcattgaacttttccatttgttaattccaaaacccattaaattccttccttttcgtaaggctttttaccgccaaaaccttccaaatttaaccaatttctttgccactgcttgggatttcctaatagtaatttttttccaagccttcctttttgggcttccagggggatcaaaaattgctcttgtccaccaaggttaatttccaattaacttgttt

SEQ ID NO: 120011 - DNA, 205 bp, Zea mays
  Clone ID: MRT4577_40933C.1
ccggaccggaaaacccgggacgacccacgcgaccggtaagacccgggagcggaaacggccgagcggggactcgaacgaggacagcagcaagaccagcacaacagaagacgggcggagccccccgcaccaggaaaacggggcacagcaaagaccagggcacacagaacgggacacaccaagcagacccgagacaagaggcagacac

SEQ ID NO: 120012 - DNA, 425 bp, Zea mays
  Clone ID: MRT4577_40934C.1
cggtcgcgtgggcgaccgccggcatggctacactggccccgtgccgcgtccgtcgtgacagggatccgagaacaccctatggatgtgtctgggattcgaggcctcccccctcccttccccttccccaccctcatcggcgatgcctggatccgcgaccgacaccgtccaaccccgggctgcgtgtatgaccgctccgtcgtgtcgcaagcgctggaggcatgcacagggggctactgatggctgtgacgggttcgtgctcaccaccgatgactgggacgtacatcgggggacctttctagcgtggatggtgtcttcacacggaaacggcagctcgctggtgctgctgaacacccgtccgggtccggctgcggacagtgcatgcattggcagagcacctgaagctgcacctggggcaggtgagccta

SEQ ID NO: 120013 - DNA, 1062 bp, Zea mays
  unsure (1)..(1062): unsure at all n locations
  Clone ID: MRT4577_40935C.1
gtattacgtgttttttgatatttgtttcgtctggtttactcctaccctggacctcgtggctgtggttatatttcgtagttagttgtgtggttgtacgaagttacatatagttaacccgtgggtaggttctaaacgtgtttacgtgttcgttgcttctctcttccatagttgtaaggggtcattatctttgtgtagctctcacttctcaatgtatactgtatttcttttcttagtctagcataatcatatattgtttttgtattccgttgttcgttcataanctatgttaagtagagtttccttaaacaattccgtctatcatttactatgccgcttttgttttttgttgcttgtttttgttctattatatgttgtgttcgcgctttattctactctattttgacatcttataattttttttttttatttcttgatcttttattcttttttttactttttattttttttatttattttattttttttttttttttttttttttttttttttttttttttttttttttgttttttttttttttttttgttttttttttttttttttttttttttttttttttttttttttttaatttttttttttttttttttttattttttttttttttttttttttttttttttttttattttattttttttttttcttttttttttttttatttttttttatttttttatttttttttttttttttttttttttttttttttttttttttttttttttttttttttttttatatttttttttgttttttttttttttttttttatttttaatttgtttttttattttttttttttttttttttttttttttttttttttgtttttttttcttttcttttttttttttttttttttttcttttttttattttttttttttttttttttttttggttttttttttttttttattctttttttttatattttttttttttttcgtttttttttttgttatttttttttttttttttttttttttttttattttttttttttttttttttttttatattttattttttttttttt

SEQ ID NO: 120014 - DNA, 290 bp, Zea mays
  Clone ID: MRT4577_40936C.1
aattcggcacgagggcgcactttttctgccccagctccccctccgataccaccgaggcataccatggctcttcgctacgagacgttgcccatactagtctgtgtctctgccggtcccaaaccactgggatggcagggagaagctccagtccctgggtccgggtgagcacgaggggagatagccgcctcggagctggaggaggccaggaacgaagcattaccaacgagatctatcctcacaattcggagggtcagatatgtccggaaccgaccccaaacctacgtatcctg

SEQ ID NO: 120015 - DNA, 127 bp, Zea mays
  Clone ID: MRT4577_40937C.1
ccatgatctgttagaatctgggatccatcttatttggtgaccagtggggacacgaagatggcgtatacatgggcgatgctgacccagctccacgctttcagaaggccgaatgttactgtgatatacc

SEQ ID NO: 120016 - DNA, 387 bp, Zea mays
  Clone ID: MRT4577_40938C.1
gcagtggctcgcgccggcggcacggcccttggccgacagctccggagcggccccgaacctcaccactacatttcgcgggtgcggcgcgccttccgctacacggggtctccgctgccccaagccgggcgggcacttcgagggccgggagcgccccgaggtgcgccgccgccgcctcgttcctgggagcgccgcgagtgctagcgcggtctccacttggtcaaggagcatgggctcgggcatgacgtcatcatgacggagaacagggattcatcggcgccgaaggtgccgacgtcggagcacgcaaaactgtgcgaccaaaacttctgtattggtgccgacgtgaacatgttcaccatgtcaggggatgatgatggcgaggacaccatg

SEQ ID NO: 120017 - DNA, 596 bp, Zea mays
  Clone ID: MRT4577_40939C.1
gaaacgaatgccagactgggtctgtataatagccgtcctttccaaaataaataaatggttacatcatatcataaggagacaatgatccagcaacccatacttgactaggagacgacggcctagatctttcacaaactcgtcatagcatcctccatgcaccttatcctgcggtacctgttcttgacctgtgggggtgtgagacagcaagagtgagctcacatacgttcatcgctcaacaagttgtggggaataatgtggcaatgaactcaccaaaggtgggagttcatgaagtgtaaggcttatcaatggaataaaggctgaggctgagcattgcttttataagttggtcaaaattttattagcaattactaagtataagtaaataccaaaccttaataataataaagaaaagtaatagtaaaataatcccaaatgcgatgcaaatgtcaaattaaatttaagttccataattaatcatgtgagggtccgagccgctcatgaccgtgagcacggctagtataccagttttacactctgcagaggttgcgcatctttacccacaagtcatgttacccatctgccaagagatggccaat

SEQ ID NO: 120018 - DNA, 370 bp, Zea mays
  Clone ID: MRT4577_4093C.1
gccggccgggctgggacacaacaacccctacctcatcatcactcagacaaattactcaaaccaaactcggaataattcctacccctcttaaaccaaccagacaaccagaatgcctgtccccatgtcttcaacaacgcaacaaacctcctctaccacggcagagacagcgcaaaacgtggaaaacccatcaacacaaagcgtagccagcgccacccaaacccaaaagaccgaggaggaaaaggaagcagagcgacgctacgaagaagcaattgaagaggagtacgcaaagcgtgaaggaggagcttaattaaccttcaacctatatataatatttctctcggctcaaaaaaaaaaaaaaaaaaggccccta

SEQ ID NO: 120019 - DNA, 344 bp, Zea mays
  Clone ID: MRT4577_40940C.1
agcatatacactacagagtggagaactcgacaccatgaaggcgctgatcggatacccttactctcctggtgcttattgtgagcgctgtctctacatcaagctgctagctcgggatgccagactccatggttacatgtaccgactgctttcatatgccgccttagctctatctgacgatagattagaagtcggaaacctgagattacccaacttatacaccgcagctaagccctggccagcagctcatatcctgatgggcctggaggggtgaacgaccgtcactgctacattgcgtgcagttactgatgcaccccagcaggccgcaggagacgccctaccgctcg

SEQ ID NO: 120020 - DNA, 1125 bp, Zea mays
  Clone ID: MRT4577_40941C.1
ggtggcccatgctgcaggccgaggtggccttcgcgcgtgtcttcgagttgtgcgcgctgctgcaggggtggcccgtgctggaggccgaggtggccttcgcgctgcatcagcgcgatctcctgctcgaagtcctgggaccttctgctcttcgacgcgtatcatctgccgcactttggctagtgcggacacgcgctggcgcttggcctccagtatctctttctgcctctggggattgcggttcttgaggcgcagggtgtcacacccggttttaaaggacaaagccgggtgcatctcatacatgcgccaaagaagacaacatatataataacagagtgtatagagataaacgtcacaataatcagagtatttattacatagcggaagacttacaaaaataaaagataaatataacacgaactaaggatcgttggcgccaatgtcgactgagaaacgccacctagatcagatcaaactcctcgccttgtggctcctcctgaaccacctgttcttctccttcaatgagctcctgctcagctatctctacttgctgaacctcagtttccacagtggcttgctcgtcacgactaaactcgactcgactccgcgagatcaacaaccatttccggttgaggcgattcaccaagcacttggcaagcgcctcgctaaagctttcttctcatctaaatttcctgggctacagagatctggcatgttgctgctgcgcctagtattaatcagggaaaggagaggagcgaccatggagaagactggagcaaggagggagctcggcgtggtccgatggaggtggaagacagccagtgcgcgccacaacagagaagatcgacgagtagagagggcgaaatccagggaggggcggcagccagaggatgaaggcgaggggagataggaaacgggcggctcgacagcgtccatggctggggcagggcgagctggggttgggcgaccatgggacttgtgcttggggaaggagatgggagaggggctatccatggcaacaagagagggggctggcgtccacaccatggaaggagcagggagggcgccatgggagagacgccgagggagcagggatgatcggcgaggctctgtaggatcgccgcctac

SEQ ID NO: 120021 - DNA, 351 bp, Zea mays
  Clone ID: MRT4577_40942C.1
aaacaactaaccatgataaaaataaattaaatatacattccatgttgggctttttagctgttgcacttacatttaagataatgatacaaattgtgatgcaaaaattcgaaatgatgccgtgcagagggggaaatgatctgggggactatcccataaataatgttcgtgagatttgaaattctcgaccgtgtttctgaaacacgaacagctccatatcgatctggtgctttcatctctacatgaagccgctcttgcgatagtggtagcttgggcgaggtaccgcccttcaaacgatcacacgatgtctcataccgatctggtgttttgatctttacatgaacaactccttgg

SEQ ID NO: 120022 - DNA, 421 bp, Zea mays
  unsure (1)..(421): unsure at all n locations
  Clone ID: MRT4577_40943C.1
gggaaaaccctatttttgggtgggttttttatttttttttcaggggacaccctaaaacaaaacagctggggcccccactgccctaaaaacgggattacatttttttctgggacacatttaaggggcaggggcccaaatttgaagcattacattaccattcctccatcgaggggggggacctgtccagggatgtaacttgcaacagggctgggggctaaaaattccaccaggcctggtacaacctttggccgaccatagggccctaaaggaatagttgacagaatttttttttttaactcttcaccaaggtcaggagtcatatttgaagcaataaattcaggggcgaaaaccgtgggattaatatttntgcggggaaactcccctacaactggtttttggaacccaaaaccccaaaccttgg

SEQ ID NO: 120023 - DNA, 607 bp, Zea mays
  Clone ID: MRT4577_40944C.1
cggccgcgtgggcggcggcgtcggggcggggcgggggcttcggcgggaacgtcggcctgtgcagcgcgccgctcccgccatgcaaggacgaggcgccgcagccgaacgcgtctgcggcaggggactgccctccggcttctgccatggtggcgtcctcaccttcgggtaagccagcgggcgccgaggcggcgggcggcgtcaagggaaagatgagccgcgccgccgtggtggcaattgtggcgggggacttcgccgtggtggggctcgtggccgggctcctgttctgctacttctggccgcgcctctccggccggcgaagcgcccggcgcctccagcagggggagaagatagtgtactcctcgagcccctacggcgccgccggggtggtcgcggcggcggccggtggcgcgacgttcgagcgagggaagatggtgttcctggaggacctcagctgcagcgacggccgcacgaggcggtttgagctggaggagctgctgcgcgcgtccgcggagatgctggggaagggcggatgcggcacggcgtacaaggccgtgctggacgacggcaccgtcgtgaccgtgaagcggctgcgcgacgccgcgacgcc

SEQ ID NO: 120024 - DNA, 837 bp, Zea mays
  unsure (1)..(837): unsure at all n locations
  Clone ID: MRT4577_40945C.1
attttctcgcccccatttctctctctctctctctctctctctctctctcagttaccggtggcgagtcctccctctctcttccctggcggttctccggcgttgttgccgactgcgattctcagcggtgcacgggcggaggcagaggctcggagccggaggctcgcacgcgtcacacggcagtcggatctcgatgccgcgaccttgtcgatgacggcgagaagaggaacccatgcacgccgtggtggtaccgtgattcggtgggacggagctgccggaggcgaggcacggaggtgctcgtgcgggccgtttgcatccaccccctcgacatgtggtggtggtctggtggacggtggataggtctcgccgacggcatcccgatgcgcggccgtgtcgacggtggtggttagagcggctgcgcgcttggtgaagccgtagtgtttttgggccggagttgatgctcgggtgtgccggcgccccatctggtgctggagggagatgctcgtacgcgccagcaagggcccgccataggtgtggatcctacaccttccgtcgcatccccacgtctcctccgcctacagcctactccgtaacacggcgaaggagctcgtngtgggtggatgctccggcggcgtgcccggagacaancgggtggggngagctcgtgtgtgcctgccctgacggagaggagcggaagatgctcctggagtgggagcacaacgctcgtgctctggcggctccggcgacgtacaagcagctgcatgagcgcagagaggagcttatcttttggtatatatgtttcatgcctcctcgagctcgacacccgcggctacgcactgc

SEQ ID NO: 120025 - DNA, 240 bp, Zea mays
  Clone ID: MRT4577_40946C.1
ttttttttttttttttttctaaaacatttggggggggtgaactcaagtatgggagacacccacaaaatatgtatgtgttttccacatcgagctcttctaagggatggttcccttgaccgaacattgtacatgataaatactctgcggcctaatgagcctgaaaacaattgtttaatttgttacaatcatgttgaatatgctagaccttttattgggctataaaaacctttggttgctaat

SEQ ID NO: 120026 - DNA, 1118 bp, Zea mays
  Clone ID: MRT4577_40947C.1
cattgggtacctcgaggccggccggggcaataaccatccgcacgagctttcccgttccagccgtcgcgttgagttgctgccgcctcccccggtccccccacctcccgccccggcgcccctctctctctctctcttctgccgcacagagcccaaatcgcggcggatccctcgctctccagggagccgctgcggcgccgggttttgtacaccgacttgtttgcctacctccagctcctcctcggcgacccatggctctcctcgcccccgccatctccggcgaggttggtctgcggctcttattggcaccgctaagctctaacatagtcatgcgtacagccagttgtgctgttgggattggtctacctgtatactccactttcagagctatagagaagaaggatgaacaagagaaagagcggatgcttttgtattgggcagcatatggatcttttagcattgctgaagtgtttgcagataagcttctttcaagtgttcctctctattatcatgtgaagtttgctatccttgtgtggctccagttcccttcaaacagtggatcaaagcatgtatacaaaagatacctgcgcccatttttcctgaaacatcaagcaaaaattgataggtttctgaatattctgtcaaaggaacttacgaagtttgtgagcagccatgaagatgaaattcgttttatagaaaatatggctatcagaggggctacaacagcaaaccacatcgtaaatggcctcgaccaacctgaagaaacacaagcggttaatacaattgaaggtccaaatacaactgtgacagaagaagctggtgtgtcgggaactgaaacttaagcaaaactttctatctctgctcatgatcccagacgctgcttcaaaattgttgttgaggtcacccagcttgtttggattgtgaatactactgttcctgaaaggctagatctagaggcaatgttttagctttaactagatattcatatagcaagtaaaatcggtgttggacaaatttattacagtgtaaaaatgacccggtgtggaatgcagttcccagcaatgttgtcatttttcacgtgggaataaaaaaaagtctgcgatgaagaatctttctaaagc

SEQ ID NO: 120027 - DNA, 245 bp, Zea mays
  unsure (1)..(245): unsure at all n locations
  Clone ID: MRT4577_40948C.1
nnncatgatagctgtacagccatctacatgatgtgttattatgcaaaaaaaatggttctctcaaatgtgtcaagggacttggcaaaggctcagcatcaaagcacccagattgccatagatgctgtttacaaccacaggatggtaacctcctttggatgttcatcaaaggttcttcagctattcgagcatgcgcaagatgaacccatgaaaaaagcaaggtagaaatcatgggtagcagggatcac

SEQ ID NO: 120028 - DNA, 970 bp, Zea mays
  Clone ID: MRT4577_40949C.1
taccctcggagcctgccgggcgacacgactctcggcaacggatatctcggctctcgcatcgatgaagaacgtagcaaaatgcgatacctggtgtgaattgcagaatcccgcgaaccatcgagtttttgaacgcaagttgcgcccgaagccttctggcggagggcacgtctgcctgggcgtcacgcagcagctccagacctcaccagaggcacctaccacaccgcccgccgccgatcccgtcacccgtctcctccccgctgcggagcgtctccagccctgcccggtgcccgcccagatggcaaacgcggcgtcagggatggccgtggacgacgactgcaagcgccggttcctggagctcaaggccaagaggacgcaccgcttcatcatctacaggatcgacgagaagaagaagatggtggtggtggagcaggtgggcaagcccgtgctcggctacgacgacttcgccgccagcctccccgccaacgagtgcaggtacgccatcttcgactacgacttcgtcaccgaggagaactgccagaagagcaagatcttcttcatcgcctggtacgccacgtcgttcctcgccgctgtccagtccaccctggcttttgaagtgctcgccactcacggacgcagttgcatgatgtgtgtgaatgaaggtctcctgacacggcgcgcgtgaggagcaagatgatctacgccagctccaaggagaggttcaagcgggagctggacggcattcaggtggatctccaggccaccgactccgccgaggttggccttgacgtcatccagggccgtgcaagctgaggatgcccagcgatgaactgcccatgccagaggatgtatgagcatcatcagttcagatgagaacttgactgggcgggctatgtaaaaactgcatccaccgcagtgatgaaatcaatctaatcaatctaccacccccaaaaaaaaaaaaaaaaaggcccta

SEQ ID NO: 120029 - DNA, 303 bp, Zea mays
  Clone ID: MRT4577_4094C.1
aattttggggaaggcgggtcccccggaaggacccggcccgaattcccggggtcacaccacagccttcgagggcgcttgggcatgccggggcccgagggagacatcgggctgaccggcagtaagacatcatctctacgtactgcggctggagagcccacgggaggtggagccttctatcgcagggaccgctccaaggtggaccagaagggggcctacgtggagcaggcaggccggcaagagcatcgaggccagcggcctagaccaccgctgcctcgtgcaggtgtcgtacgccatcggcgtgcc

SEQ ID NO: 120030 - DNA, 840 bp, Zea mays
  Clone ID: MRT4577_40950C.1
tgggaccctcgaggccggtcgggccggggcgttccccttcccctgccattcggtcccgctcccgccgcctccgccgcgattccactctcccttccgcctccgccgcgattccagtctcccttccgcctccgccgcgattcttgtctcccttccgcctccgccgcttaccgccgcggccacgccgcaagcgtttcgtctcgggatccccacttcgtctcgctcgagcggtagagccacgctcccaccgcccaggcgtccgccgcggaggcgtcggtggcctatctgagcaggctctcctcgtcgggcttttttgctttagagggagagacttcctggtcggcgcgccgcgagaagagcaccagccatgtcgcaaactaactgggaggcggacaaaatgctggatgtatacatatatgattattttatgaagagaaatttgcaggcaactgcaaaggccttccaagcagagggaaaggtctcttcggatccagttgcaattgacgcacctggtggatttcttttcgagtggtggtcggttttttgggatatattcatagcaagaactaatgagaagcattcagatgttgcagcctcatatattgagactcagctcatgaaagccagggagcaacaacatcaacagcagcaacagatccctcaacagaggcagcagcagccacagcatatacaaatgcaacaaatgctgttgcaaagagctgtgcagcagcagcagcagcagcagcagcaaccactacaacaacacaacaaccacaacaacaccaacaacaacacctcagcagcagcaccacagcagctgccacagcaacagctgcaacagca

SEQ ID NO: 120031 - DNA, 763 bp, Zea mays
  unsure (1)..(763): unsure at all n locations
  Clone ID: MRT4577_40951C.1
ggccggccgggaccgctatactcgcagcctgcaacaatactccactctgcctctttgtaccgctcttttctgcctgcaccgccctaccgccatgcctatccgcaaccctttccgtcgcgctggtgcgcccgatcaggctgatgacgcccaacggaacgctccggagaacgacttcaagaccgcaactgtctcgggagctacgcccttgcagctggaggatccagcagaatacaaattgagtgagatcaacgatagcggcgtctacttgccgccctcaccacacaacgagaagcctaccttctggcacaccaagtccaacgtctcgacaacctcatcgaaccaccggagccttcttgccgaaaatgagccctttagcatttcgcgcgaaagttttgattcatatcgaagatcatttgacatttccgcgcgctcgccaatcactgacagtgtccacgagacgtatccccgccaatcactcgatgcgcgcagatccatggacacgcgccgctctttcgacgcccgtcgctcgcgcgccacaccccgctcatccatgcaacaaggccgctctagcgaaagccgcgatcaggtacccgaggagggcttcgaggatgtggggctgaatgacgagcccaagccccagccccaaaagcgcggcatcttctcccgncttggcgacaacaccactccaatgatcgcaccgaaagacgtcctacctcgagtcaccactttttcctaacaggtcgcaagagggcggaaagcggag

SEQ ID NO: 120032 - DNA, 989 bp, Zea mays
  Clone ID: MRT4577_40952C.1
acaaatagccggaaacctcgagggccgggcggggaccggccggggccgggacatcaccaccaccccgcggctgcagctcagcagctccagacctcaccagaggcacctaccacaccgcccgccgccgatcccgtcacccgtctcctccccgctgcggagcgtctccagccctgcccggtgcccgcccagatggcaaacgcggcgtcagggatggccgtggacgacgactgcaagcgccggttcctggagctcaaggccaagaggacgcaccgcttcatcatctacaggatcgacgagaagaagaagatggtggtggtggagcaggtgggcaagcccgtgctcggctacgacgacttcgccgccagcctccccgccaacgagtgcaggtacgccatcttcgactacgacttcgtcaccgaggagaactgccagaagagcaagatcttcttcatcgcctggtctcctgacacggcgcgcgtgaggagcaagatgatctacgccagctccaaggagaggttcaagcgggagctggacggcattcaggtggatctccaggccaccgactccgccgaggttggccttgacgtcatccagggccgtgcaagctgaggatgcccagcgatgaactgcccatgccagaggatgtatgagcatcatcagttcagatgagaacttgactgggcgggctatgtaaaaactgcatccaccgcagtgatgaaatcaatctaatcaatctaccacccccttcagcgtgcgtgttcttgctacatatcaacaacagcattatgatggtggaattctggtaatcagaaaaaaaaaaaaaaaaaaatttcttgatgatccaaggcactttttgccttgtgcgatctcaggacctggttgaaggatatgcagaggttgaagtttgagcatgatcagttcagcggagaacttgactgggcgggctatgtaaaaactgcatccaccgcagtgatgaaatcaatctaatc

SEQ ID NO: 120033 - DNA, 150 bp, Zea mays
  Clone ID: MRT4577_40953C.1
aagcactgcaacgccaaaggttgtgcataaaagatccatttatgaaacttggtgtgcctagacatgtttacatagaaatagtgccttgtaacaaatatcatggggtctacattgaagatatccaagaacttgctaacgccataccattac

SEQ ID NO: 120034 - DNA, 718 bp, Zea mays
  unsure (1)..(718): unsure at all n locations
  Clone ID: MRT4577_40954C.1
ggatgcctcctctctatcctaccggctgcagtctcgccaactaattcctcggtgcagcttagctaaccaacccctcgaatctttaatcattactagtatttttttctctatcgaatccaacaacgaaacgaagcgatatagttttactggtagtcgaaagaagtagatctggacatctggtgagctagcgtgtgcatgattgggcggcactgggggttcaggtacgcatgtgacgagtccggggcaataattctcggtcacaagcggacaggatgatgcgcatggagacccaaaaccccctgttcgactaacccgacagctcaggaatatctggatcgcaggagatgccatgccagtgccacacatcgcttgctcccggcggggtggttttggtactagttgcactgatgactggttcgtcgcggtctaaacttgacccggttgcccccctccttttttttcttgctataattaactgttaaagctcgtgtgagttgtgaccactgctccaggaaaggatagccgctgagatgctgacacgcgggtccagctgagaggtggggggtacgtcctacgtgtcagtgctggggtgggggagtgacgggcacagncgacgtgaccggacgcgacgcgattagcgggcgcatcgcatgtgcgagggaggaacgatgacgggtaggagacaagacaagcgtatcaactgcagcttcctgcagct

SEQ ID NO: 120035 - DNA, 1988 bp, Zea mays
  Clone ID: MRT4577_40955C.1
gcctagagtcaaagcaacctcaagaccctcttaccacatcatatacatgtaatggcagttctagtctgactccaagttcgaaggaggctttgctaaagaacatatcatcaggcaagaagggcggtagtgctggcaaagtaacaaacaaggataacagactacacaaattggtctttaatgttttgcttgatggcacagaagtagcttactatgttgatgggcagagaaaggttgacgggtatattaaggatcaaagaatctactgtaatcactgcaacaaagtggttagcccatcagcatttgaagctcatgcgggtgagggatcaaggcgcaaaccgtatgataacatattcacatcaaacggagtatcattgcatgagctggcaatgaaaatatcaaaggatatggaactgtcagaacgtgagactgatgatctgtgcagagaatgtggtcagggtggagatattttcccatgcaaaatctgtccaaggtcatttcatccagcttgtgttggactctctaaagtcccctcagaatggtactgtgataattgtcgcaatcttgtgcaaaaagaaaaggctttagcagagaacaaaaatgctaaagctgctgggaggcaagctggagttgattccattgaacagataatgaagagagctatacgaattgtccccatctctgatgatcttggaggctgtgctctatgcaaacagaaagatttcaacaatgctgtgtttgatgagcgcactgtgatactctgtgaccaatgtgagaaagagtatcatgtaggatgcttgaagaatcaatggcaagtggaactaaaggaattgccagagggggagtggttctgttgcagtagttgctctgagacacgatcttcattagacaagataatctccgacggagctcaactgttggtggagccagatcttgaaatcataaagaagaaacatgtgacaagaggtttatgtatggacaccagtaaagatctcaaatggcaattactttctggtaaaaggactactgaagacggaagcatattgctctctgctgcagtgccaatttttcatcaatcttttgatccgatccgtgaagctctcactggtagagacctgattccagagatggttaacgggaggggacctaaggagggaatgcctggacaagattacagtggaatgtactgtgcactgttaactgtgggctctactgtggtgtcggcagcacttttgcgtgtgatgggaggtgatgtggccgagctgccactagttgctacaagccaggatgttcaggggctgggctactttcaagccttgttctcatgcatcgagaggatgctagtttcgctgaagatcaagcactttgtgcttccagctgcacacgaagctgaagggatctggatgaagaaatttggattctctaggaccactccggaagagctggaagcttatcttaatggggcacacctgactatattccatggaacatcatacctgtacaaggctgttccaatgtcatgatatatgggatgaaaaagatatgggtgttgcaatagctagcaggattttgtcttgtcttttctggagtcgctattgtgatgtacataaagagttgatgaggaaacaaagcattggcaagacaatgaaaggttggtatacaggagctggaagccaaggggaagaaaagagctacaagaggtctggattagttttctttctttgtttactcttgaatcgagtgtagtggcgctggggttggcaagtggtggcacacctagcaaattttggtgtaatactagatgcaatgcaattgaagcagttccgtgagtcctggtccgatagccatattttgcaattgaattttgatgtgtttgacaccgacaagtggcggggctcgtatgtgagtaatcggtggtccttttcttgctgtcctggttaaagttgcgatattgctgttttgaagtaacggcccctttggaatgacttcct

SEQ ID NO: 120036 - DNA, 415 bp, Zea mays
  Clone ID: MRT4577_40956C.1
gtgctctgtcaagtttgcctagagtcaaagcaacctcaagaccctcttaccacatcatatacatgtaatggcagttcgagtctgactccaagttcgaaggaggctttgctaaagaacatatcatcagggataacagactacacaaattggtctttaatgttttgcttgatggcacagaagtagcttactatgttgatgggcagagaaaggttgacgggtatattaaggatcaaagaatctactgtaatcactgcaacaaagtggttagcccatcagcatttgaagctcatgcgggtgagggatcaaggcgcaaaccgtatgataacatattcacatcaaacggagtatcattgcatgagctggcaatgaaaatatcaaaagatatggaactgtcagaacgtgagactgatgatct

SEQ ID NO: 120037 - DNA, 297 bp, Zea mays
  Clone ID: MRT4577_40957C.1
aatatgaacccacaacacttacaggggggctttttttcattcaaaaacaaaaccaacatctatgattaaatccaatattatatctttactttaaactggtacccccaattccttgcaactcatttcccgaaattagaaaaaaactgcttactttttaataacaacacatactagctctgtcttgtcatacattcttttgaaacgaaaccattccccccctatggaatccattctccttttcataacctttaaaactttttatggtccttaaactaaccccgggctaaaatttcccta

SEQ ID NO: 120038 - DNA, 615 bp, Zea mays
  unsure (1)..(615): unsure at all n locations
  Clone ID: MRT4577_40958C.1
ctgtagtctgagtcgaagttccaaggaggctttgctaaggaacatatcatcaggcaagaagggtgggagtgccggcaaagtaacaaacaagttgggataacagactacacaaattggtctttaatgttctgcttgatggcacagaagtagcttactatgttgatgggcagagaaaggttgatgggtatatcaaggatcatagaatctactgtaatcactgcaacagagtggttagcccatcagcatttgaagctcatgcaggtatgataacatattcacatcaaacggagtatcattgcatgagctggcgatgaaaatatcaaaggatatggaactgtcagaacgcgagacagatgatctgtgcagagaatgtggtcaggggggagacattttcccgtgcaaaatctgtccaaggtcatttcatccagcttgcgttggactgtctaaagtccccgcagaatggtattgtgatagttgtcgcaatcttgtgcaaaaagaaaaggctttagcanagaacaaaaatgctaaagctgctgggaggcaagctggagttgattccattgaacagantatgaagagagctatacgaattgtccccatctctgatgatcttgg

SEQ ID NO: 120039 - DNA, 522 bp, Zea mays
  unsure (1)..(522): unsure at all n locations
  Clone ID: MRT4577_40959C.1
ccgggttcgacccacgncgttcgtaaaaaaaaaaaaaaaaaaaaaaaaaaagggaaagaagaaaaaaaaaaaaaaaaaaaaaaaaaaaaaaaagaacaaaaaattataaaagaatacagtttgttttagtttggggggcggccgtttttaggggtttcctaatttacgggccgtgggcttttccatggttttgtcttttttttagggtgccgtgggggggaattgcttgggccgccctttttcaacggctttggctggggaaaccccttgcgtttcccacctttttcgctttgcggcccttccccttttgccctgttggcggtttagcgaacgggcctggacctgtcgcctttcctgcagtggcgcgttctgtcgggggttgggaccctcccttttgcgggccctttagcgctcggggtttggtgtttcctcccttttttgcccgtttaccttgccggggtctttccgttccgttttttttctttgtttccttccttggtggggccggttgtgcgggtttcc

SEQ ID NO: 120040 - DNA, 322 bp, Zea mays
  Clone ID: MRT4577_4095C.1
acaaacacaaaaacgaacattctgatctattatgtggggatcagcaacttggcccaataatggagtcatgggtaacatcacgagcttcctatatatgggtccgatagtctaaacaacgtgagcagggagatattgccaaaaactggcttctgacagaaaaagaaaacttactccatgtcaaatgccactatatctggggggcgaatgatcacatgtttgtagaaatctaagacctctcgtaaagattcaagatttcacggagaatgacgactcaggacgcagtggcaatggcaattacataaagtcagcgggcttgaaactt

SEQ ID NO: 120041 - DNA, 1105 bp, Zea mays
  Clone ID: MRT4577_40960C.1
tctcgaggtttatgcatggacaccagtaaagatctcaaatggcaattactttctggtaaaagggctactgaagacggaagcatattgctctctgctgcagtgccaatttttcatcaatcttttgatccaatccgtgaagctctcactggtagagatctgattcctgagatggttaacgggtaagataaccgaacaacactttgttttggaggtatgcagaaggtcctcatctcatgtaaatgtaccaggaggggacctaaggagggaatgcccgggcaagattacagtggaatgtactgcgcactgttaactgtgggctctaccgtggtgtcagcagcacttctgcgtgtgatgggaggtgatgtggccgagctgccactagttgctacaagccaggatgttcaagggctggtgggtcttagaattgctttgcagctcaaactagactgtttgttctggtcatgtgggttggttctttgttcattgcttgatgtttcacctattgcggtgattgatgcagggctacttccaagccttgttctcgtgcatagagagggtgctagtctcactgaagatcaagcactttgtgcttccagctgcacatgaagctgaagggatctggatgaacaaatttggcttctctagaatctctcccgaagagctggaagcttatcttaatggggcgcacttgactatattccatggaacgtcatacatgtacaaggctgttccagtgtcataattgatgggatagaagagatatgggtgatttcgtctgtcttttggggggtgggggtccgctcgctattgtgatgtacagagagagttgataaggaagcaaagcatggcaaagacaatgtacaggagctggaagccaaggcgaagcatcggatgaatctaaatgaatgaattccccttggtttgtttactcttgaatcgaaggaagcctgtcttttttttggtgtgatatactagactagatgcaatgcaattgaaggagtcgcaccgagtcctggtactagagccagattttttgcaatttaaattttgactctgaaactgctaccagagctgctgtgcattcttctctttctgcatacaattt

SEQ ID NO: 120042 - DNA, 314 bp, Zea mays
  Clone ID: MRT4577_40961C.1
ggacgcgtgggcggacgcgtgggctatgacaaagaacccatactccagtgtggatgttggccctctaatgcgggatgtgaaaaataaaatatgtaaccagcttgatttaaatggacttttggaggatgattatggtatggaattattagttggtggtagtataatctcacttgatctgagcatttcccaagtctatgagcaagtatggaggaagcaccatggtcaaactcaacattgtttgtccaatgtcagcgcaataactggtgcttcatctatcagagattgcccaccaatgacagtgacctacagactgc

SEQ ID NO: 120043 - DNA, 807 bp, Zea mays
  Clone ID: MRT4577_40962C.1
ggctctcgatcgccttggtatatcctcctccgaccgggctccggcaatccgccatggctgccgccagctccgtccacggcttcaccgtcaaggacgcaagcggcgaagacgtgcacctgagcaccttcaagggcaaggttctcctcatcgtcaacgtcgcatcacagtgtggcctgaccaactccaactacacggagcttgcccagctacacgagatgtacaaggaccaggatttcgagatccttgcgttcccgtgcaaccagttcggcgggcaggagcccggcacgagcgaggagatcgtccagctcgtctgcgctcgcttcaaggccaagtacccgattcttcacaaggtcgatgtgaacggcgaggacgctgcgcccatctacaagtttctgaaatccagcaagaccggccccatgggcgaagacatcaagtggaacttcgccaagttcttggtggacagacaggggcatgtcgccgagcggtatgctccgaccacctacccactcagcatccagaaggacatcaagaagctgctcggcgggagctattgaattgaatatccggagacaatagatagatgcatgcactgccacttgaaacgcctgaaataagcttgctatgtttctaccagatagttttgataaataacatggtcgtcgcctcgtctttcttgtagtactagtttgtaaactaattagcatgcatcagaatcggttgaaattaaataagcttgtaaactgtaaccgtgcatggctccttccttcttccgaattatatattgggatagcaatctatttctcccac

SEQ ID NO: 120044 - DNA, 103 bp, Zea mays
  Clone ID: MRT4577_40963C.1
tttacgaagggtgttacaggtaatactggtctacccaacgctaaaatcgcaggtgtatggttctaaccctgtagtttgcgcaatctaactaaaggatacccct

SEQ ID NO: 120045 - DNA, 440 bp, Zea mays
  Clone ID: MRT4577_40964C.1
aatatctggtcccaaccggtggcaacaagaacctttctgacagtcagttttgacttgccgctttgtcacggatgcaaaggccaaagacatgaggtgccagcaccttgatggaactgccattgagccacctacctgtccaaaatttggtgttaaccccgttgcccacctctgtctccactgcataatcaaacaaggcctaagtacaacccttaatcgagatcccaaaatctgcccaggcctcgtactaagagtgatcaaacaaccaggtgatttttcacaaatttgaactatgagattttatctgcactgaattgtttctgtttctccaacgccctgcaggctgcttttttcgatctcttatttcttttggattaggttcagaatttcagttttcatgcattcattcatgttccaggcagttttatatcctgaaaagaatt

SEQ ID NO: 120046 - DNA, 305 bp, Zea mays
  Clone ID: MRT4577_40965C.1
gggtgggattttataaacacattaaacgtcaaaggcaaaccaacagacaatcgggggaaacagactgaacaaaccaaggctccgaacacgcaccgacaagaaaccggcacagtaaaaccagacggaagaacccaaaaaggaaacaggacaaccccccaggacaccaacaggaacgaagggtagtcgctcaaaccactcgcaaagaggacgggcctaagggaactcatggcggaccgggccgcccccacggaaaaggggacaacggtgtggagcagtaaccaccacacagacccgcccccggggag

SEQ ID NO: 120047 - DNA, 314 bp, Zea mays
  Clone ID: MRT4577_40966C.1
aacgacccaaccaccgatttcacccctgcctttgcttatccccttgtccagaccctggggggggatcattcccatgctgcaactgacaccctcctcctcactaatccaagtgcccaattcatcgaaagctccttcgccagcaactagcactcacctgaaacctggattgacctctacatttcacgacattatagcacctgtaatcatggcgctgagcaaagcaacactacacgctgtcccatggatgtacaatgtcactacatccttttgtatcatcatcgacaacaatgacttaatgactacgcatggtttta

SEQ ID NO: 120048 - DNA, 392 bp, Zea mays
  Clone ID: MRT4577_40968C.1
ggcccatcaaaataacaatctatttctatagataatatatggggggataaaaaagcataccgggaccggcccgacaatttgtttccccacccagccccccatgggtgggtcccaatcgatgtctccgggcagatcatgggcccatgggacagcagccgcctcagcaatgaaaaatgaaagatgacgggggggaacaagccgaggcccaagcccaccactaccgaaattactgggcgggtctgggcgaccccttggagcacttggcctgcaccgcaagcgtggcggtggtgcccgggcaattggcgtcccccccgtaaacctcgggggacacgggcagggtgcaaatgcgcttgccgagggaggcctttttcaccagctccttggggcccggg

SEQ ID NO: 120049 - DNA, 188 bp, Zea mays
  Clone ID: MRT4577_40969C.1
ggagccgctgcgtttggactctgcctggcagctcgtgctgataatccgcgccgtatccagcgccgagggcatctttgcaggcttccttactctgatcatcctcgctgcggcatagtgtaccatgatgatccgcatctatgagcttcgcatgagcttcgtctcgaggctgaaccagtaccggcttctgg

SEQ ID NO: 120050 - DNA, 365 bp, Zea mays
  Clone ID: MRT4577_4096C.1
ctgtgcggcgctcgaggcggccggttcgaaatcaagtatgtagacgcggctctttgcatctgtcaatgcatctgtaatggaaggccaccaccaaaagaagcgtgcacttgtctgtggtgcgacgttacgcctcgagctaatgccggtgctgctctcgcccgtggctaccgcggcgcaactctacatggaactcactcacatccgttatatgaccagcgcgcagcgccggagcgccgacccacaatccctctgatatcactcaatcccctaagatgccaatgtcatcccatcagagctgatgccatctcgtcgacagcgagactcaccgaaccgaccccatggattccgtccgaatgtggctccag

SEQ ID NO: 120051 - DNA, 533 bp, Zea mays
  Clone ID: MRT4577_40970C.1
ttaaatattaatagagctcctgcagagatctggggggggggggggggggggccacagattcggagcccgggacggccccgcacccctctgcacctcttgtcaactccagagttgggcaatcccacgcactcgcactgagaggcggcggcaatgccctgcagcttgtcacattcgcacccagaacttagcccgtcagtacgccctagacataaggttttcttggccgattcgtactgctaagacgcccaagcacaccttggcgcgcgcggtgcgcacgccggccgaccgtcccgcgtgcccctggcgcgcgcgcgcggtgcgcacgccggccgaccagtgcccgccatagtaagcgcgcggctgtgtgacaccgcgcggggtaggcactgtgcccgaacttactgcgtaagtgcgcgagatctggtcccaactattccgcccgtgcgtacgcgccccagtgagagacagcgcgcgggtcccctaacggctccgcccctgacgtagagcgcgagggaactatgatccgccacgag

SEQ ID NO: 120052 - DNA, 462 bp, Zea mays
  Clone ID: MRT4577_40971C.1
aatcccgggttaaagggggaattttccaaggaaccccaattggggggaacaaggggctaatccccaggggggggggggggcctgggaatttgcttatttgaaggggggggcaacggtgcctttaaaaaccggtttcgccgggggccacgaacgctcacccccgggggggccttgttattgaagggtttttggggggtccggtttaaaaaaaataatcctccttcccgggggggttaagccggggcggcacctaaaggttctttcaggggccggggaacatttgggggaactttttggacaaaccgaaaaccacccgctttggcggttgccccttgccagggtccttaagaccgggcaccagaacaccccccgttccaggggtggggcaccttcgggggcttcactcccggggagaaaaaggttttgcgttttggaccaccgccctggccccaaaagggggcc

SEQ ID NO: 120053 - DNA, 373 bp, Zea mays
  Clone ID: MRT4577_40972C.1
attccggtccgacccacgcgtcagcccacgcgtccgcggacgcgtgggcgggcgcgtggcgctaggtggaatactcaggtgaggttggatcagcgctggggcctactcgacagttttacacccgcttaacccatggtttacaaagtgctcaactgggactagggtgagctatctcttcatatgattcacgattgcacacagacaggaaggatgtgatccgttgacatcctgaatatgggtcgtcaggaaagtcacttagtacagatctaccaagtgatggcatgtatttgcaatatcctccacgtggattgttgtcacgatcttggccatctacagttgatacatcagaatgtatcagaatcttcagagtttt

SEQ ID NO: 120054 - DNA, 304 bp, Zea mays
  Clone ID: MRT4577_40973C.1
gtgacaacatttaacattaatagcaaggggcgttttttttaattgtaggttaaacgggtatgagaccccgttggggatttatccccgcgaggaacatggaatatcgaataaatattttattaccacctatgacgagatccctgtagaaaagttttcgctccctgacacagacctggagtactatccgcggggaacatagcgttgtcccttgatagacgacctcacccccccgcttgtgcaacctgcttctgagaggagactgccttcctctaagggagggtgctagctgcgctcttacaactcc

SEQ ID NO: 120055 - DNA, 269 bp, Zea mays
  Clone ID: MRT4577_40974C.1
atgcgatgatatatttgaatttgaggacatgtgttttgtccaaattgaatatgaaagacttacagggttcgagccaaattcgcatacgaagctccttaatgatatagccaaatctaccaagacttaccaaaaggtggaaacttccactttaaatgaggttacacttaattgatattgcaataatattcagacaatgcttcatgtctatcatgtacaggaacctaaaagtcatgaaagtgtgcaaatcccatattctgaagaaatattat

SEQ ID NO: 120056 - DNA, 401 bp, Zea mays
  unsure (1)..(401): unsure at all n locations
  Clone ID: MRT4577_40975C.1
aggggaataaagcttacaacgtaagttgtaanaaccccaaccaaccannacgacagatagataagaccgnnnnaaaaccccaaggaaaacaaccgataggagccactcagggcagnnaattcaccaggatagcagtggcacacaagcccgacgacgccgcgccagtagagcgcagactgaccctgcgcgcctaccctgcaactagcaccgacctctgagccttctaagcgccgccagatcctcacgagcctcggagaactcgccctcctccatacccctcaccgnaccgttaccnccagtgcacgaaggcgcgcttggcgtacatgaggtcgaacttgtggtcaatgcgggagaagacctccacaacactggtggagttggagatcatacacacggcacgc

SEQ ID NO: 120057 - DNA, 269 bp, Zea mays
  Clone ID: MRT4577_40976C.1
gcgacgacactacttctgaggcactaccttccactgatgatcttgtcgctgagatagaagagttgaaggcttctttggctagtcaggataagttgcttaggcaagctgcttttgagaggagacaggatacaagagggcatatttgtatggcaatggagatagagaaagtgtcaaataatcttatccaacatcctatgaagcagatgatgtcttcgacaagttccaagtatgagaggtgctttgaaaccaagaaaaggaggggcaccaat

SEQ ID NO: 120058 - DNA, 819 bp, Zea mays
  Clone ID: MRT4577_40977C.1
cggaccgggcgcgcacgttgggcctgccgccgcattgggaccgcaacttcatcacgttgttgctccagggcagtgtcgccgccctccaggtgtcgtaccgcggcgactggatccgcgtccagcccgtgcccggcgctttggtggtcaactttggcccccagctcgagatccgcagtgcccgccagcagatccacgaacgggctgctgaagagcatcgagccccgcgcggtggctagcgcggcggtcccgcccccctcggtggcgacgttcatcatgcccaccgacgactgccttgtcgccccccccgcagagctcgccggcggcggagacaagccgccgccgcggtaccgcgccgtcacgttccgggagttcatgagggtgtacaagaccgtcggcgcgcgcagggagagcgtcgagaaggccttcaagatctgatggatgcgcatacatgctcgacatgcgttctgctcggcagagatctggtagttgttatctgcactgaataaaaggagagaaaacagaaaacgtcgcaagcagttcgcggcacaaattctgtgtctctttcgttccaatttgcaactgtgtgtgtgagccgatgatagtgagtagagagcttcgttcccaactccggtgagtgccagaagagccaacaagtcctgcacgaacaccagtcgtcaccggagagcttcctgccggtgtcggcaaggatgcaaaggtgccaagagaatcgctttgtgtgtgaccttgtgccccgaaataaagggattgttcttgttttgaattcgagcaaaaaaaaaaaaaaaaaaggcccctagggcc

SEQ ID NO: 120059 - DNA, 904 bp, Zea mays
  Clone ID: MRT4577_40978C.1
ctacccgccgtgcccggacccggcgcgcacgctgggcctgccgccgcactgcgaccgcaacctcatcacgctgctgctccagggcagcgtcgccggcctccaggtgtcgtaccgcggcgactggatccgcgtccagcccgtgcccggcgccttcgtcgtcaactttggccaccagctcgaggtccaccacgcgtctatctacaatatctctctctgcgtgtgccgtgttgatggagaacgacgatgatgcatgcagatcaccacgaacgggctgctgaagagcatcgagcaccgcgcggtggctagcgcggcggtgccgcgcacctcggtggcgacgttcatcatgcccaccgacgactgccttgtcgcccccgccgcagagctcgccggcggcggagacaagccgccgccgcggtaccgcgccgtcacgttccgggagttcatgagggtgtacaagaccgtcggcgcgcgcagggagagcgtcgagaaggccttcaagatctgatggatgcgcatacatgctcgacatgcgttctgctcggcagagatctggtagttgttatctgcactgaataaaaggagagaaaacagaaaacgtcgcaagcagttcgcggcacaaactctctgtctctttcgttccaatttgcaactgtgtgtgtgagccgatgatagtgagtagagagcttcgttcccaactccggtgagtgccagaagagccaacaagtcctgcacgaacaccagtcgtcaccggagagcttcctgccggtgtcggcaaggatgcaaaggtgccaagagaatcgctttgtgtgtgaccttgtgccccgaaataaagggattgttcttgttttgttttcgagcagtcaagtgattttaatatatatattataagaaaaatttacaggat

SEQ ID NO: 120060 - DNA, 536 bp, Zea mays
  Clone ID: MRT4577_40979C.1
tgttactccttttttaccgttaggtacaagcttttgtttattatggtcaatgtctatgaggtttttctacacattttttttgcgccattggtctggtggtttttcgccggcgagccgacgaccaaagacactcgagccgtggagcgcgagcctcacgcgccgaaaaaaaaatattccccctcgagttgcaaaaagccaccgccacctggtgctaaaaaagtaccttctgtacgtgcgcaagcaggggccgaaccgtcataaacaagaaccgaaattgaatactctacacgaacatcctaaaagaaggctttgacgactggtaccctttaatgaacatgtggacatgcatgtacaatctgcttctataatatgtatgtgtatgtaacttgcttggataaacctgcagtttgtaccgagacatttttacacatgtaccgttggagcacctcaagaaattcgacaagctggccatggaccccgtataataatgacgtcctctatgacctctatatgttcaagcagagcaaggactacta

SEQ ID NO: 120061 - DNA, 585 bp, Zea mays
  Clone ID: MRT4577_4097C.1
cgcggactgctcgtgtcgatctgtgcagcagatctgaggtcccggtcgaccgtgaagcagctgcaatcgtcggcatggcgctcgtatcgcatagtggggctggaaacaagaatgccttcaaagcacttattgctgcagaatacagagggatcaaggatgcaccgaccaatgatgtttgagatgggtgtctccaacacgacccctgagtctcttactatgaaccccctcgtgaaggatcctgttctgcagactcctgatggccctgtttttgagagtaatgctatcccacgctatgttgcctcgcttgacggatgacaaccctctttttgggtcttcccgtattgaacaagcccacgtcgagcattggatggattttgcctcaacagacgctgatcctggtgtagcatggtacttgtatccaacgctggtgtacctcccttatggcagcacaactgatgaaacagctatgtctttattgaagaggacgcttggcgctctgaacacacacacttgctcaaacacatacctcggagtgcatgctgtcactctagctgacattgcgatgacactgcaacctctaccatg

SEQ ID NO: 120062 - DNA, 562 bp, Zea mays
  Clone ID: MRT4577_40980C.1
ccggccgagatctgcgcatgcaagcttgcatgtccatgtcttgtccagccagatctgccaacaacctcactgtacaaaagaactcggagcctgtctcgacaatcatggagcttgctgctgcttgcacccatgaaaaacaagaacgcatgcagagctggttaactacctacggtatatacatatatcatatatgggtatgatggtgtggatgataataaaacaaacaaggtacgcaccctccatgcctctggtcttgctcagtgactgcgagcctgccatatcctcgcataagttcatgcatggcatgcctcaagaggcagatctgaaacttgcgcagccactactaacttgttttccagaaatcattgtaagcatgggagcctgtgaatatatctagaacacaaatcttcctgctttgttgtggacagcaatgatagggaccgagcttactcctcctcctccctcgagcttcgaatggtcgctcccactgcttgaccggctgctcagcgccctatatctgtccacatcgacgattatccggacgacgccaccgacaatgtga

SEQ ID NO: 120063 - DNA, 607 bp, Zea mays
  Clone ID: MRT4577_40981C.1
ccacacgcatctcgtcccttctctgccgcatagaccccgcccagcagagctcgctccggcgccctgcgagcaacgactgcggccccgccaactcctcgggcctcgccgctgccgccgtgtcaacctggcccgctccctccagccggtgggtgaggagcggctgtagccctgcaggaacccccggcaaggacatggacaagccaccgccccaattcgccttctatcacctcatccctgccctcaccttctcatgcctctccatgtatactttttactttttttgttctaaatatataaagcattattctctctgtgtgtgcaattgcccctgctcggcttctctgtttggacactagatgatagatgatgtgctcctgcctcctaataaatgcgtatggtatgagtcgacattgttttgtactattagaagatgaggcatgaattttagctgaaatcagtgtcctatcaaaatacagagtgcaagattgagttaatgacacttccaatgctgattaaaactaatttatgttcctattttttccctttaaaaacaaagtaggtctaactaacttgatggaatggactcattagtatatactgattactg

SEQ ID NO: 120064 - DNA, 418 bp, Zea mays
  Clone ID: MRT4577_40982C.1
gggggaaacccggcccgccagcttgcaaacaaagcaacaatcaagggccaaacaatctttggcagggaattcttgctataaaaagacaaacgggaacattttaacacgatttgctttaattttaaaaaggctaaaaaatgggggaaacattggataaaaaaaaactgaaacaatgggcaccaacaacaaaacaaaagcttaaggcggaggctgcctgtttttttttttgacaccaaacttggaaacctggagggtgggggacaaaaaactcaacctaccaagggcccacttggtcaaaacaagcctgtaaaaattgtccccaacccggtttttaacaaccttggccattttggggaactccttgggcattacaaaattgggggtgaacttcgcgggggggttccgcttcttgggcttg

SEQ ID NO: 120065 - DNA, 163 bp, Zea mays
  unsure (1)..(163): unsure at all n locations
  Clone ID: MRT4577_40983C.1
agcgtnagatcttctgtggcaagcagcagaatgatgggcgcaccctcgactgttacaacatccataaggagagcacactgcacctggtgctacgtctcaggggtggcatgcacatcttcgtgaagacactcactgtcaagacaattactcttgtggtggagtc

SEQ ID NO: 120066 - DNA, 390 bp, Zea mays
  Clone ID: MRT4577_40984C.1
ggaaaaaaaaagggcccccctcatttttaaaaaaacccccctaaaaataacctaacacattgggcaaatctttccgtaacaaaaaatgggctccaattcatttttacaaaaataacgggacaaccccccctccaagtttttgtttccaagtccagacaactaaaataaaagggcaaataaaactttaaaacagggggggttcgtaatagtccaagatcccaattgacctacctggcgggaaatcaacataaacttcacaactttttcaggggagttggaacagcaccgttactacagcaacatggatttttgaccgaaaacaccgggacttcctcctaaaaacgggcccctaaaccctctctctcttttggaccgacccttttggacaaa

SEQ ID NO: 120067 - DNA, 413 bp, Zea mays
  Clone ID: MRT4577_40985C.1
acaccctcaaagtcagggggttacaccgtcatacataatatcactgccggatgacagaaatttaactgcagcgcgtcaccaatggatagcatgtaaggggccatgcgcggaccagagaaaaatgataactagagagatcggccagccaacggagggcctagaagcatgcaagctcattgagggaaccctcggtgctgcccttgggggtggagcatatagccatgggctcgacgttggtgacgttatactcgacgccgacgtaatgcatggagactccggtgcatgggaccttggcaatgcttagcaagctaaccgcctacctggtggaggaggtgcccgagatgctctagcaggtgacgcccctgaccgtgaccttggaagcaccgctggaagaacacaacttgttggggaag

SEQ ID NO: 120068 - DNA, 319 bp, Zea mays
  Clone ID: MRT4577_40986C.1
aaacccaaaggaaatgagaccggaatggccgggggaataccaattccacacttttaagaaaaaaggtggccaaaaatgttcataatgatgggagaagtgctatcgcagaggcctatcccgaagccaaaggagatgagatcggaatgcctcggggaaatccacagccacatttccaagaaagaaggaggcaaaaatgttcatatttgaagaggaattaatgggcccgctcattaggcctatcctgaagccaaaggacatgagatcggaatatcctagggggtcccgagctgggatttcccatagaggggcgaatcaaatc

SEQ ID NO: 120069 - DNA, 370 bp, Zea mays
  Clone ID: MRT4577_40987C.1
gtgaggtgaccataatcaaatcatgaacggagcccaccagaacttacgagtcacaacatcagatttcatcgcgtcatgacatgcacgccggacgcgcatagtctaggagagagctacgggggctcggagtggaccgcctgccggtctagataacaaaagggacgcgacggcaagggcgacagaggccacccaggccgctaagctcacgggcggtgcggcgccgccgttcttattagatcctaccttgtgcgcggtgtcctccgttggcgcgtcggcggaggccatgtcaggcaagtccgcccggggcccgggcggggaatgcgaacgggacctgccctttttttttttcctcttaccccctgccttgggg

SEQ ID NO: 120070 - DNA, 429 bp, Zea mays
  Clone ID: MRT4577_40988C.1
gtatgggggaatgccagaagggaggcaagggggggccaggcaaagggggagggggggggggaaaggaggggggccagagggggggaaaaaggggggccaaagaacgggggccttgagggtggcagggaaatggcgggctgggggaggccaagggggacaagaggcacgggggaggggagggcaagagaaaagaaaaaacttagccctttcaggggagtataaaaccccaaccaaaacctgagaggctgaacagaaaccaaagccaaaaaggtaagcggggaagcggctacaaacccgcaaacgaaagataaggagctggagggaaggctaggacaaatggcctagaggaatgggtggaagaaaaggaccggcggatgaggatcttggccagaatcgggacaagagggggagaggggaactccacgcttc

SEQ ID NO: 120071 - DNA, 442 bp, Zea mays
  Clone ID: MRT4577_40989C.1
ggggaaaaaattttttgggaaatgaaaatttgggggccaaaaaaaaaaaggaattttgggggaaagaaaaagcccccagttgggttaaagggccccaacccccccttacgaagggccctggggggaaaatatccgggggaaaaaaaaaaaaaatgcggggtgggaaacgggggggaaaattgcaaaacttttaaaaccccccaaagggttttccttaaaagaatttccggaaaattggggaaacaatgccttacctttttttggaaaaaaacccgcttttttttccaaacctggggaggttaaaatttggggggaaactcgcaattgggcctaaagaaacattaaaagaagcctaaaaaataagttttaaaacggggaaacggggggaaaaagggggggtgggaggataaacccggggggattttaccagggggggggaaaa

SEQ ID NO: 120072 - DNA, 781 bp, Zea mays
  unsure (1)..(781): unsure at all n locations
  Clone ID: MRT4577_4098C.1
tgggaccctcgaggccggccggggttctttttcgctctctattctctcttctatgtgaattgagggtcaaggcatgggagctggcaacaattggcatcaaagcctaaggttgggagattgatagcgatgtcaggcttaggcggcctttctctctctccctggatcggtgtggatgccaaccatccctgactccctgtcactagtgtcatctgctcatggtgcaatttatttatgtggttggccattaataaccgatgttggacttcggatagattggctaggagagggctacctcaccagctagcctgccccttttgcgatcaagctgaggagactatcaatcacattctcttagcttgtgttcttaccaaggaggtctggagctggatcttaaaatggttgaggctggagatgatacagaacaagcaatattaaagttacaacgagtgtctttggcaataaaaagtgtgataaacctatggagcatggaaggtggcaacttgggattttcacagtacgattactctcatataaaagaagctacaaataacttttcggttgataataaactgggagaaggtggcttcggccctgtatacaagggccaattgagaagtggaattanaatagcagccaagaaacttgaagcatggtctttacaaggactattgnaattccaaaacgaaatccagcttatagncaagcttcaacacaaaaatctcgttaagctgctgggntgctgcactagaggagatncagaaaagatgcttatatatgaata

SEQ ID NO: 120073 - DNA, 305 bp, Zea mays
  Clone ID: MRT4577_40990C.1
agcccctcacctcgccctaccctgccctcggcctcgcgcagcgcgatacgcggtcgtccggctcagctacccggcgcggctagcccagcgtggtggccggcgtagctcacccggcgcggcggcggggccggcctgcctgcgcggcccgcggcgtgtgtagctcgcgcggtcagcacggcgcgcagccagcgcggtccgcggcgtgtgtagctcgcgcggccagcgcggcgcgcatcctgcgcggtacgcggcgtgcagccagcgcggccaacccatcgtggcggccggcgtggctcgcctgcgcg

SEQ ID NO: 120074 - DNA, 219 bp, Zea mays
  Clone ID: MRT4577_40991C.1
gaataatcgcatgttagcactgttgctagtgtgcccgcctctcttggaatggaagcagcagagccagctatcagactggcagtgaccaccacctcctcagctacctggttgcagtgactgtgaggtatgaaaaaacagtgtaaataacgcggttgcctccgtacatgtgcgacattttatacacgtgcaagaaagcatcggtgtccaccgttgtccgtg

SEQ ID NO: 120075 - DNA, 625 bp, Zea mays
  Clone ID: MRT4577_40992C.1
gccggccggttcgggaacagcttcacttccttcactacattctcaattccccaaccaagacataaccgtcaaccaccaaccaccttcaacatgcagttctccaagatcttcgctatcgtctccctctcggctactgcctactccgctgccatgcctactggtgctaccgatgttcccaccaccatcgccgcttgcaacgcggccggtaacacttcggttcagtgctgctccggcggccttctcaacctcctgggctgtgtgaacctcctcggaagcacctgctccaacaacggaaacgcctactgctgcaagcagaaccagcagggtgttctcatcggcctcaacacctgcggacccatcttgtaaattcgctatttagtacgaaacttcagacttgcgtcccagattgccaactcgtactgttggtagaaggtgtcaaggcggttatgaagcactaatgagatgtttggttttggggaatttttgaaactgatttggcatttatatgcgtccgctccttaatcagtataatcaggtcgcttgatactttagcaaatcctattctacctgcgcttaacaacctttcacttgacctcgccaaaaaaaaaaaaaaaaaaggccccta

SEQ ID NO: 120076 - DNA, 2082 bp, Zea mays
  Clone ID: MRT4577_40993C.1
cttatattggccgttccgttgggtacctcgaggccgggccgggaaaactgactgattgtctgattgtgattgcggcagcaccgccgaccacgagcccgccgaaaggctcctccgcctgccgttccagggtgcactgccgccattgctcatctccccgtggtgcggaggtccacccgggcgccaattggtctcctctttcgttggcagactgagtggcatccaatcctgaatcaatgaggggctggggtttgctcgtgttatcgctacatgttctttcatgcctggttagtggcgttgcttctggtcgaacaagctcttatgtgcgcacagagttcccatctacagatatacctctagaaagtgaatggtttgctattccaaagggatacaatgctccacagcaggttcatatcactcaaggtgattatgatggaaaggcagttatagtatcttgggttactccagaagaacctgggccaagtgaagtattttatggcaaggagaagctatatgaccagaaagcagaaggaacaacaacaaactatacgttttacgattacaaatctggatacatacaccattgccttgtcgatggccttgagtataacactaaatattattacaagattggaagcggaaattcagctcgagaattctggtttcaaacgcctccagcaattgatccagatgcatcatacacatttggcatcataggtgatctggggcaaacatttaattctctctcaactcttcaacattatgagaaaactggaggtcaaactgttctatttgttggggatttgtcgtatgctgatagatatgaacataatgatggcattcgttgggattcctggggtcgattcgttgagcacagtactgcataccagccatggatttggaatactggaaaccatgaaatagagtacaggcctgatctgggagaaacttctgtattcaagccatatttgcataggtacatgactccatatttagcatcaaagagcagttctcctatgtggtatgctgtcaggcgtgcatctgctcacatcatcgtgttgtctagctactctccatttgtaaaatacactcctcaatggctgtggctgaagaacgaattcaagcgcgtggacagggaaaagacaccctggcttatcgttctcatgcattctcccatgtacaacagcaacgaggcacattacatggagggtgagagtatgagggctgctttcgagaaatggtttgtgaagtacaaggtcgacttggtgtttgcagggcacgttcatgcttatgagagatcataccgcatttctaatgtcaactacaacataacgtcgggaaatcggtatccagtgccggacaaatctgctcccgtttacataacggtcggtgatggaggcaaccaggagggacttgcttcaaggttttataacccccagccggattactcagcgttcagggaggccagctatggtcactcagttttgcagctgaaaaacaggacccatgctatctaccagtggaatagaaacgatgatgggaatcctgttccagcagacaccgtgatgttccataaccagtattggacgagcagcacgcgccgcaggaggctgaagaagaaccatctccatctcgaggaccttgaggatttgatctccctattatagaaaaccgggttcgcaggacgcatgaactgtgtgtgggggaataatcgcaggttagcactgttgctagtgtgcccgcctctcttggaatggaagcagcagagccagctatcagactggcagtgaccaccacctcctcagctacctggttgcatgccacagatctgaaattctgaaatgctgtgactgtgactgtgaggtatgaaaaaacagtgtaaataacgcggttgcctccgtacatgtgtgacattttatacacgtgcaagaaagcatcggtgtccaccgttgtccgtgaaccattttcacatgtatgcgcttgtgcccagtggaaatcctttccatctcgttggtttgctggtgaggggttaaaaaaaaaaaaaaaaaaaaccacaaagggggacagtccgaataccaggaaact

SEQ ID NO: 120077 - DNA, 567 bp, Zea mays
  unsure (1)..(567): unsure at all n locations
  Clone ID: MRT4577_40994C.1
ttttttttttttttttttttttttttttttttttttttttttttttttttttaaaggaaaggggggtcccttcatacatcatcaactttcacatgtggaggaacttggatgttttttttttcctcggcttttggtcccgaaactaggggggggggtttcctcttttggaagtccccancctcctccaactctggttctgtggggaacaaacccccccccttcagttaagcaatccccccccaaacataaggtttgttgtcccctggcccttgtcccccaaacagctgggttgggaggccttatgtgcttgatttttgatggtgcctatcaagtttgggaacccctttagttggtctgcctccgctccgcctgatgcttctccaagtcggcgtgggggtcttcagctgcctttggcttgctgcgctccttgccgcggcgcccacccccngatccccctcttccccttccccccctgtgaggggggcttctgtgcggccttcctgctggggctggcccccttggggccctcctcccggtcttccttgcctttccccctttggagacagg

SEQ ID NO: 120078 - DNA, 660 bp, Zea mays
  Clone ID: MRT4577_40995C.1
ggtgcgcgcgctgcgcggtcggtcgctcccctcctctgtccgcgatctcggctgggcgcctgggcttggccctcgccaccgctcccgtctccggttccggcggccgagccaggtttgctcgggtcttcgtgccagcgacgatgaaggacaagcgtgggctcgaggacgccggcgacgggcgccctgatgccaagaggccgcggcctccggctgtggccaggtaagcaaaggaatcaagcccagcttggttggttaaagggtgtagttcagcgattgcgtgctcagccaacacaagttcaagttctattcaatgtggatttgggtgcctatttcttcttaatgtaaagtcacgtgatttctccaagtttggtgtacgtttccaggaagtatgtaaaaatctcaagtgaaattagagtgtggtagcctatgcaaacatacaatgttggtgagtatgagtctagatggattcagggacacatggattgctgtagtacagtaagtaggaatagatttatctgtgtaataaccagtgttatagttcagttacatatacagtatacctgtattctatttgcaaacgcaagttgaagattgaaccttgtgttaaacttctcatgttttttgagagtgctgaacaccatgttaatagttttagtgaat

SEQ ID NO: 120079 - DNA, 765 bp, Zea mays
  unsure (1)..(765): unsure at all n locations
  Clone ID: MRT4577_40996C.1
ctcgaggctttggccgggatctttnngggtacttaacacatgcctgaaagaggcaaagggttacttcaacgataaaatatctaactcaagcattgtggaccagaccttggctgcggtttttgggatcgatcttcgtttcttaagatgtgtaaatgattactcgtacagaagtaaattgttttgggctatggtcgccatgatatctactgtaggcattgtgaagttcgtgatagtatttggaatactatcgaggtttgtgtttgcaccattaactgtactgaccttcctcgcctacaagtactggaaaacaaggatatccattgacgcagtcgagaagtttctccagatgcaacaagctcttagcccagcaaggtatgcctacactgacatcaccgcaatcacaggacacttcagagagaagctgggccaaggaggctacggatccgtgtacagaggcgtgcttccaggtgacgtcagcgttgctgtcaaaatgctgagcaactcgctgtgcaacggagatgaattcatcagcgaagtgtccaccatcggaagcatccaccatgtcaacgtggtgcgtctggtggggttctgttcggaagaaaccaagagggcgctcatctacgagtacatgcctcgtggatctctcgataagcacatcttctcttccgagcaaagcttttcgtgggataagctcaatggaatagctttaggcatcgncagagggatcaactacttgcaccaaggctgtgagatgcagattctgca

SEQ ID NO: 120080 - DNA, 1145 bp, Zea mays
  Clone ID: MRT4577_40997C.1
aattcggcacgaggcgcatttctaatgtcaactacaacataacgtcgggaaatcggtatccagtgccggacaaatctgctcccgtttacataacggtcggtgatggaggcaaccaggagggacttgcttcaaggtgagaggaactaatagccagcaaaatgttttactggtgctattatgtttactgaactcatactcatacactcatgtggcctactagatagaaaattatggttgaggtcaggtcatggtttcaacttccaagtctcatctcaacttagcatcagagatagatagtttccccttcgcattattgtcttcattcttttcccgaagtcttacagcattacgcgcctttgcctgttgggctaacccaccatcttgcaggttttataacccccagccggattactcagcgttcagggaggccagctatggtcactcaggtttgcagctgaaaaacaggacccatgctatctaccagtggaatagaaacgatgatgggaatcctgttccagcagacaccgtgatgttccataaccagtattggtgagtgtcctactttgcggtgtttatctacgggcaagcattgcttccagttccagatgtaacgcgcatgccggtctgactgtaaccttccacaatttgcaattgtgtgtttccttagctctcttaactgttgttgcatgccgtccattctgactgaattggcgactgtttggtgcacaggacgagcagcacgcgccgcaggaggctgaagaagaaccatctccatctcgaggaccttgaggatttgatctccctattatagaaaaccgggttcgcaggacgcatgaactgtgtgtgggggaataatcgcaggttagcactgttgctagtgtgcccgcctctcttggaatggaagcagcagagccagctatcagactggcagtgaccaccacctcctcagctacctggttgcatgccacagatctgaaattctgaaatgctgtgactgtgactgtgaggtatgaaaaaacagtgtaaataacgcggttgcctccgtacatgtgtgacattttatacacgtgcaagaaagcatcggtgtccaccgttgtccgttaaaaaaaaaaaaaaaaaaaaactcgagaagggggcccggtacc

SEQ ID NO: 120081 - DNA, 651 bp, Zea mays
  Clone ID: MRT4577_40998C.1
gccggcctactcgggaccattccgcgcacaccccggctgccgcaaacgccttcgccgtcgcgtcccgctcctccgcccgcccgacgcgacccctaggacctggagagagaggtcggcatggctgccgcagtggtcgacgacgctggtatggacgccgtccagaagcgcctcatgttcgaaaacgaatgcattttggtggacgagcaggacaatgttgttggccatgagtcaaagtacaactgccatttgatggaaaagattgattctgagaatctgctacatagggcattcagtgtgttccttttcaactcaaaatatgagctgctacttcagcaaaggtccgcgacaaaggttacctttcctttagtttggaccaatacctgctgcagccaccctctgtaccgtgagtctgagcttatccaggagaactaccttggtgtgagaaatgcagcacagaggaagctactggatgagctgggcatcccagcagaagatgccccagttgaccaattcacccctctgggccgcggaggggtttgttgtttgtttgtttgtttgttcggtgaccgaatcgcgagttggacgcctgtttaatccgtgcttatacatcgtctgagtaaacagcaaaaaaaaaaaaaaaaaaggccccta

SEQ ID NO: 120082 - DNA, 368 bp, Zea mays
  Clone ID: MRT4577_4099C.1
acgcggccttccttatgattgcaacggcattgactgctgcatgttctatcaggggctggacagagtggactgcctgctgccaaaacaggaccaggcgcttaccggcgaggtttttgagaacacacaaacatctcatgcagggatgaggacgggctccacagggacacgcagaatagaggctgaggtatctcaggagtacgacaagaagcacatgactactgtgcactgctagtgtggggaaccaacaagatcatttcaaggctgtgaaccctggttaaactactgatacgatggctatgaagtcccttgaacagtagggctgcatcatgcacacaactggtgctacacttcgtgaagtgtcctactat

SEQ ID NO: 120083 - DNA, 533 bp, Zea mays
  Clone ID: MRT4577_409C.1
ggggggggggggggttttttaatttttttttttttttttttttttttttttttttttttttttttttttttttttttttttttttaccgaaagggaccacaagggggggaccgccattattggatgataaaacaaaaaccccacacggggggggggggggggtcttcttcccctttctgggttctgttttggcacaccaaaaaaacctgacccccaaatgatctacctagataaaaacaataataaacaaaccgaaccgaaggaacaatggctttgcaatccctttggggacccttaaaccaaacggccccggggctaaaggcttccaaaaaaagggggtctccgcgaacatggaggggaccacctaggggtccattttgaacccccggcggcggtcctcaaaaaacccttgccgttttgttccgtttcccggcccacccccaccaaccccccggggttggccaccccccaactaaacctgttaatttcggcggtctcctcccttccggtaaacccgccctcctttccctccc

SEQ ID NO: 120084 - DNA, 660 bp, Zea mays
  Clone ID: MRT4577_40C.1
agtccactaccgccattccccaatcgccgtgtgcgccagccccaaccccaacccaaatccactcgcctcaccgccaccgtcgcgcctcatttgtttatcaatcaccagctcccctcccctctcccccgttcttccaaagaaacaatccgcgtttagatccgtccgctcaggcgctagtgaggggagaggaggatttaggtgagcaagcatcttgattttgaccagtcccagctcgacctgcctgcgcgtttctccttaaatctcctgcggtggagggaggaggggccgtggccggaccaagaaggcaagaacagctgctgctccggacatcttggctgccggtgtcccaaggaaggcttcaggggttgagatagcaggttgctctgttgcctcgatagactgataatgctgaggcagagctctagtaggaaccacagatcgaaaggtctgaagctaaagaaagctcttcagataagtcttttggttcttgtgtctgtttggttgctctaccaagtaaagcattcgtacgagaagaagacggcatataatgaaaatgatgccaccagtcacgaagccggtgatgagcataaagatggtcagagccaggtggtcgtcataaaattgggcaggaaagacctgccagcaaaggaggccgactcg

SEQ ID NO: 120085 - DNA, 1059 bp, Zea mays
  Clone ID: MRT4577_41000C.1
atggaggtcttgagtacaatgaccccgatcattgtgattgggaaaattgcggcatttgagatgtcgggaaaaatgggtcgacaagaggagccaacctcttcaagaccatatgcttttgcatgtgatgaaagaaaagacaaaaagaaggctcccactccaagttcctcaagtgaagaagagtcgaggatcttcactttaacattgacaagaaaaagcaaagaaagagaggatgcttcacatgtggggagaagggccactttagggacaattgtccaaatatggccgaacccacaaaggggaggagcaaaggcaaggagcttacaagtgtcaaaacttgggatgactcttcaagcgaagatgaacctccaaggacgcgcaaccaccgatcctcatcacggtcatcgcacaagtgctttatggcaagagctatcaactaaaattgagcaattagagtctagtgctccatccacagctactgatgatggccttattaaaaagaatgaaaaacttaaggctaagttagctagctcccaagaagccattgaaaatttgctagagaaaatggaaattcttagcatacacaatgatgagctaactactaagctagaaaacattggtagcaccccagaagtatctttggttgaaatacctgaaattattaagaaagatgcttctacttcttgtcttgatgtaattgataattctaatcactgcaatcaagttcttgttaagaatgttgttatagaaacatattcggatgagattgcaatggagaatgagcaattaaagcaagaagtgtatcaccttggcaatgctttgtatgacaagaaaggcaaagccaaacaaatccaacctcctcaggataacaccactgcgggagtgaacaagcccatggagggcgaaactgtgatttgtaggctatgtcacaaagaaaaccacaagtctttccaatgcaaggcgaagaccgggataagcaaaagctcaaacaaaatccgacaagcaaaatctccaacacctacatcaacaaggtggacaaaaaggctgctacaccatacttaa

SEQ ID NO: 120086 - DNA, 418 bp, Zea mays
  Clone ID: MRT4577_41001C.1
tttttcttatttttttttattttttcttttttcttttctatgttttgttttatttttttctttttcttattttcttcccaaaaaaaaaaccaaaaatactcttaaccctccccacattaaaataaaataaaaactattccatttctcatttcttggctatgtaactacctgtttgctgttcaccataaaaacctctattgatattgcttaacgcaacttgatattcatcaaacccaccctaattaattacaaaatcatttccattgaaggaaaccacaccccatctatgacaagtattctccaccatccttttatcagcagaagagctaaatgtttctttacctatattccaaggggccacttggccattgctcccttggttatcacatcttacgatccttatagaatcattttgcca

SEQ ID NO: 120087 - DNA, 720 bp, Zea mays
  Clone ID: MRT4577_41002C.1
cccacgcgtccgcgcgcgtcgagcgctggctcctcggggaggaggtgaagaacatcgtggcctgcgacggcgcggaccggcgggagcggcacgagcgcctggaccgctgggcggcgcggatggagggcgccggcttcgcccgcgtcccgctcagctactacgcgctgctgcaggcccggcgggcggcgcaggggctgggctgcgacgggttcaaggtgcgggaggagaagggcgccttcttcctctgctggcaggagcgcgccatcttctccgtctccgcctggcgcggccgtcgcttcgactgatggaggaacgcgtcgacgccttcccgtatttgtgcggaggaggagacgggccgcccgtcgtggcgttgcgcgtcaggtggccgtcacgcacgttggggcttcttttggtcgttttgtgtgttcagtttacgccgtatctagttagatttcaatcaggtttgttcatagtgtacccctgccgctctccaatttggatggatggaatctcatgcttgtttggatcagtcagtccttttagatctgttaatgtaacaactagagctgcttaacagctactatctcactcggtcccggtcccggtcctataacaagcgtggtaatgtacttgtggagtttcaaattttctgacaattatggacatttgtaacaaacacttctggagtttaaaatttgatgcatggattagatttgtttt

SEQ ID NO: 120088 - DNA, 749 bp, Zea mays
  Clone ID: MRT4577_41003C.1
cgggctcattctcgctcttcttaccggagctttcgacacctcgagcgccgtatttctcgcttaccgtctcatctaccaagctacagatggcgatttcacccccaaaaaattcttccttgtctatttggttgtgccagcgtacatttttctggtccagattttcttcatgcctggaacatcatacaagacagttggtgaacttgtgcaacatgtggaagaagctacacatgacgtgatacatgacagcgatgaggagatcgaagacgacagcctcgtgagccgactccaagaagctcgccgtggccatcgcgaaagtgtcgtcagtcaaatcacagagcttttgggcaccaaagacgccacacagcaaaccgaagaggaagagaagaagaagaacatttcaggcgtgtggggcgctttgcatggccgcacggctgcccagcagatccgtacgccttggttcattttcatcgcgctgttcacagtgctccagatgttgcgaatcaactatttcgtggctaccattcgatcgcaatactcgtacttgtttcacagctaccccaaagccatagagatcaacaacttcttcgatgtagctttgccgcttggaggcgtcatctccgtacctttcatcggactgttgcttgacaacaccagtactacgacttgtttgacattgctcgtcaccatcgctaccacgatcggtgttctaggtattgtgccggaggcctgggccgcgtatatcagcatct

SEQ ID NO: 120089 - DNA, 253 bp, Zea mays
  Clone ID: MRT4577_41004C.1
cggacgcgtgggtgggaaatagctttgctgctagcgactgtggcttgcatatcttcctacagtggccttctctggtgtgctcttcatgtggttaaatccatacagtcatggctggggtctgaatgcgttacttatctgcactacactcatccttgcttttgcgtatggaatcggtgctttacatcctcatgtccatgggagcgttatgcctgcttgttgcacttttgtgtactgcgcatacctgggctacacg

SEQ ID NO: 120090 - DNA, 346 bp, Zea mays
  Clone ID: MRT4577_41005C.1
cgcatctggcactagcagccaatcaaataaaagtagagcggcgagcgactaccggtctgggccactctttcggccgaggcgagccagcaggtcgtcgtcgtcgttgtcgctcgcgtctcagaacccggccggctagcatggcctacaaagaggcagcggtggtggaggtgcctgctggcgtcgtgtagctgcgccgaggtccagaagagcaggatcttctatatcctatggaccccatcctccgccaaggtgaagaccgagatgctttacagaagctgaaaccagaaattctagagtggcctcaatggcattcaggttgaactccaagccacagatgcaagtgaaa

SEQ ID NO: 120091 - DNA, 801 bp, Zea mays
  Clone ID: MRT4577_41006C.1
ttttctcatcaccaatgccgtcttgtacggtcgcaccatcttcaagtccatcagaaagttcgtcgtcttccaatcgaccatcaacttggcctccacgttgatcgtcttcttgggtccattcatgggcttcgacttcccgctcaccatcattcaactcttgtgggtcaacttggtcatggacacgttggctgctttggccttcggaggcgaaccagctttgaagagctacatgaaagaacaccccaccaagcgtaacgaggccatcatcagccctgagatgtggtcatacatcttgttcaacggctctttcatcgccgccttgtcggtcatcttcttgacgtgggacccagtcgccgagcacttcactcgcgacggcaagcccagcgaccccgtgttcttgaccgctttcttctcgttcttcattttcatcagcgtcatcaacgccttcaacgtgcgcactcctcgcttgaacgtcttcaatcacttgtggcagaacagcggctttgtacgcgtcatcacgctcattttcttcgtgcagatcaccttcagctacttcggtggatctgttctccgcaccgttcctttgacgatgaacgagtggctcactatcatcggtgcctcattggtgattattccctgggactcaatccgcaagattttcatcgcacctcttttacccaaaaagttcaaggatctttcgtggctcgaagaatatgaaaagcaagataagaaagatgattaagcgaaacaaatcaagatcaatatcataactgtgaatacaataaatatttttgttaccgt

SEQ ID NO: 120092 - DNA, 281 bp, Zea mays
  Clone ID: MRT4577_41007C.1
ctcgagaccggttcagcaacaagcaaccacagggcccggcccccaatatcgggttctgggaaaacaaaaccaagcaccccaccaccgcaccgacatgcatgagagcacacaagcagccgccggcaaccgagacccacactacccgcaaccccaccacctacacctcaccgaccaagccaacactacaaacgcgcccacgcaccgcgcaaacaaaccacacaccccacccacgctgctgagcctgtacatcacagcagccaccgagaccgggtacaaacacc

SEQ ID NO: 120093 - DNA, 311 bp, Zea mays
  Clone ID: MRT4577_41008C.1
tctggggagccagcgatacacccgcgaacctatcttggaatcgacgccgcgcgctcgatcgtagtcggaggagaacacccccatggccgtggctgaaggagtgcaagaggttaactatccttcacagatgcgtctctcacctcctaccccaagctccctttgcaaagagatcactgtgaccgacgcggacgcccttctgcgagaggattcgagcacgccttggagaatcccaaggaaccagacccaaagcaccgacattgtcaacaaatgtgcatattgctgtcaatgcccctatcagaggaagaaacatt

SEQ ID NO: 120094 - DNA, 489 bp, Zea mays
  unsure (1)..(489): unsure at all n locations
  Clone ID: MRT4577_41009C.1
gcggcgcgtggggcaggagcgaggccagctccggcaggtagaccgggtccatggccaggtcgcgctcgtcgacggcggcgcggagcccgcgcagaatggcgcgcaccgcgcggnagtccttgtaggtgccgcggaccacgcggagggaggtgaagtacagtaccacccgcccgccgtcgcaggcgcccggtgctggctccttgccgncggcgggggactgggacgcgggatgctggatcgcgcggaggacccggagcgccgaggcggcgacgcggaggcggtggaagacgcgcggtgccggggaggcggaggagttcggtgaaagcagggaccggaggtccttgagacacgggttggggatggagaggcgagggcacgcgccgacggcggtggaggtggaggtggnggtgccgacggtggagtagtnagagctgngcgttttgacccaggacgggcacatggggacggaactggggatcgatgttcgtg

SEQ ID NO: 120095 - DNA, 132 bp, Zea mays
  Clone ID: MRT4577_4100C.1
ataactaatcaagatcgaacgtgaatggcgtttccgaagcctacaagtcgtcaagtcgctcaagttgtcctcgctgctgctatggcgtcagcgatgatggccgccaccgcctctgcgcagaacacgccgcag

SEQ ID NO: 120096 - DNA, 549 bp, Zea mays
  Clone ID: MRT4577_41010C.1
ataaaaaaaaaaaaaaaaaaaaaaaaaaaaaaaaaaaaaaaaaaaaaattttaaaaaaaaaaaaaaaaaaaaaaaaattttttttcttaggccacaccccctttaagggaaatttttgaatttttttttctccctgggggccctttttgggtggttttttggggcctttttccccttttggggggtttttttaaaattttttgggggccctttttcccctttttttgggtggttaaaccctttcctttgcccaactttttgcacctgggagaatttggcaatttttcgcgggttgccttatttaaaggggggtgcccctttttttccttttttccaaattgttgaaaaggcctagaatggccacagccttcccccttgttccaccatttttaagcccggtgggtttgttgtttcccccctgtttgacctttttatttgcgggggttttggcgccccctccttaggtttttttccctttttttttcgcccctttggcccgttttttcccgtttttttttaaagggggggcccccctttgggccccttttt

SEQ ID NO: 120097 - DNA, 331 bp, Zea mays
  Clone ID: MRT4577_41011C.1
ccggtcgacccagcgtccgcccacgcgtcgcccagcgtcgccagcgtcgggaccgtgggcggagcgtgggcggagcgtgagcggagcgtggtcgactgggaattcggatggtcctgcaggcgtaaagcttttctatgtgatcgaataacttttttttgataatataatttgtgggggtgggtgtttttatcgcgttttaaataaacaaatgtgggtgttggtcggcaaggggggtcgtttaatatccaagcttatttgctttatgcgagtcttcttttttatgtgtatcttgttaattgatggccgtgtttttcatgttgggatgggaaaa

SEQ ID NO: 120098 - DNA, 273 bp, Zea mays
  unsure (1)..(273): unsure at all n locations
  Clone ID: MRT4577_41012C.1
gttaaagtccaatgtgacaatgaattccgccgcttcgtccttgccgaagttacctacagcaaccttgctacaaccatacgctccctgcttggttttaacactgactccgtcttgaaactgtcctatcttgatgacgagaacgactgngtttactttgcgactgacagcgagctccaatacgccgttactctntccaagtctcccttgaagatttccgttaagctcagctctgcttctgaaactcctgttgaagaagaaacagctgacgaggag

SEQ ID NO: 120099 - DNA, 233 bp, Zea mays
  Clone ID: MRT4577_41013C.1
gaattcctccagcaaaagctgaagcagtcccagctgctggctttgaagaaagagctgatggtgcagaagcagcaggaggcacttgaggagcaggcggctctggagcctaagctggacctgctactggagaagaccaaggagctgcagaagctgattgaagctgacatctccaagaggtacagcgggcgccctgtgaacctgatgggaacctctctgtgacaccctccgtgttc

SEQ ID NO: 120100 - DNA, 659 bp, Zea mays
  unsure (1)..(659): unsure at all n locations
  Clone ID: MRT4577_41014C.1
tttcttcctacggcgtcgttgcttccagccgccgccgtatccgtgtctccaagcgctccagccgccgcaggacttaccgtctctccatctcggtcatggcgctcgtggaccacatgcaggacaccgcgagattcttcgaccgatggtccttctacgatgaccaggcgtaccacatctcactgaacaactacctcgctggggacgcgagcaagcacgcgatgcatgtggcgcacaccgcgagacgctactcccacaatgggatccgctgggagcagtgaccgatcgtgcagcggctctcgaaatcgctcatgatgaacgggcggaacaacgaccagaatgttctgagtgcccgatatcatccctaatacccatgtagatcgtccacctgctcgccgatgacaaccccatccagggcacctacgactggatcatcaacagagnaaccccgtgaggatggcacccgaattggctccggtggcgatgctacgaggtgagtcgtgcatatctcacccctgaggagtgtgaaccagaccatctacctgctcacgcactgttgccatcgatagtgctttccacaacatcaaaaccattgtcgagcgccttgctcatcgatctgagcgactctgccgaggactcatgcaacagttacgccatcaaga

SEQ ID NO: 120101 - DNA, 174 bp, Zea mays
  unsure (1)..(174): unsure at all n locations
  Clone ID: MRT4577_41015C.1
cgccaatactgcgatgtcgatgatctctagatacagtagcacccgatcagtattcacgtaataatacctgcctcacgccattggtcccannanagnactatnnacgngntnggngnaatggcgggataaactttaaagtcggaatggttaatggcaggcatgcatatataccat

SEQ ID NO: 120102 - DNA, 303 bp, Zea mays
  Clone ID: MRT4577_41016C.1
ggcccgccaaaggttggcatcgggaacaacttggtagttaattttccctgccaaagggggaccttttttgggcagcaaaagttgggccggccaacatattggcccaggcagggcatttggggggggcgctgcccaaactagaccggatgcaaattttggggggttattcttcaactccaagcaaaaaacctatgttcaggctagggggccccactctttaaactagacctaaccctaggcattgcgggtccaaaactaaagcctgggcgggcagtttttaaagggaatcgaggggcggggtcc

SEQ ID NO: 120103 - DNA, 743 bp, Zea mays
  Clone ID: MRT4577_41017C.1
caaatacattcccagccgtcagatacagtgtgccgccgcgaggcgagtggccgacgtacgcgccgtcgcctccttccttccagatccgcggcgagccgccaacgaggaaaacagaaggatgaacttgaaatttaaagcaccgtggaaaaaagagttagttgccctgggcaaagctaacgtcaatggtgaagataaaacaattactataagaaatgattatccggattaccctgtcccttattttcaagttactgagggttttaatttgagaaaggtcaaggagcttatgctagaaaggaatgttaagatcgccaagtccatagcaaatgacataatcatcccagaccctgctccccagtgggtggctgataacttcttggacaaatatgccgaattggagcccatccttgtaaaggacagtgcccggtgcttcctccaactcttccagaactgtagaggccggggcatgtcatcggatcttaccatcaccgcacaaaccttaaccttcattgtcagtttcaatgccctgcgttgtgcaaaagtcgtattggagggcatggcacctgagctctatgggatgcacgccaatcccaactgcataaacaaatatggatacttcccgctccacgaagctgctgaaaggttctctcttgacatgatcaagctgcttttacgccatggtgcatcacccaatgtgcgcacagttggcaatgatgtcatttttgatgtcattgagaatctac

SEQ ID NO: 120104 - DNA, 656 bp, Zea mays
  Clone ID: MRT4577_41018C.1
atgggcgcaccaacatttggatccccatgctgcaaacctttggaatcatattgctcaatgatgggccatggcttttaacagtcccttccattgctatcattggaagagaggacttccttcgagtgggaaagaagcgattgaacttcttgacatactattaaggtggattgtcttacgcttttgtgaatctaacacaacatgtttgttgaaggttcttgactttctaccagagctttttgatatcttaaaagaccagtcttacatgttgacagaagctgaagctgcaatttttcttccttgcctcataatgaagtcaagatttgttgcgaggaaccaaaaaattacgctaatggttatgaggagactgagtcatcgcagccagaaaccactgtctcaacgcgtgggacattgagttgcaacaaatcatcgatggagaccgagtcaccgcagccagaagccattgtctcaatttgaggagattttccatctatgtttgttagaaggcataatgcctatttatctcttatattcgaacatttggcaattaagaaatagaagattacttccccaatatcccttcttcctaatctcacctttcacggcttctggggaacaatcacttgctattactgactgacatgttcactcctcatatg

SEQ ID NO: 120105 - DNA, 416 bp, Zea mays
  Clone ID: MRT4577_41019C.1
attcggctcgagaggcgtttgacgacattcctcatcttaccgaaagtagacagtgaggacggagggataagtcacaagaggcgcgcaacgccaccttaatacaggcccatggtcggcccacaggtggaccccccacctctcaatccccctgatcgtccctcattgcgtactcgatgatccttgccaagaagcatcctacactgcgtatcaattgtttgacgcctgttgctgggaaaaccaacatgcgtatgcacatgggggtactgtcactggaggaaggcgctcgtacccccgtgaaggttgctctctcgcctgacgacggaccgactggtgctatattccgatctagaaggggagcaaaacttatgatgacggtgactcgtcctttttgcctccggaaacatagaaggagctaa

SEQ ID NO: 120106 - DNA, 1149 bp, Zea mays
  Clone ID: MRT4577_4101C.1
cctcgaggccggccgggacacgtttctctctaaaaatccccagcgcaacgagacgcctgtgacgaggcgggagccctcttggtctttgatgaggtgcagtgtggtttcgggcgcacaggccacctctgggcgcacgaggcgtacggagtggaaccagacataatgaccttagcgaagccactggccaacggcattcccatcggcgttgtcctggtgaaggagaaggtcgccgcagccataaactacggcgaccacggcacgacgttcggcggcgggcctctcgcctgccagaccgcgataacggtgttcgacaagatcacgagacccggtttcctggccgaggtgtccaggaaaggggagagcttcaagcagctgctccgcgccaagctgagcgggaacccgcacgtgagggaggtccgcggggtcggccttctcgtcggcgtcgagctggacgtgccggctggtcctctggtcgacgcgtgcttggacgccggcgtcatcgtgctgactgccggtaagggcaatgtggtgaggctggtgccgccgctcaacgcgggggagaaggagctggagcatgccgcggatgtcataagggactgtctaccggcgctcgatgtccggatatgaaacctgattccaaattttggaatcgaataatttcatgtcgggccaataatgttgttgtgttcattgaaacaaactctttttttggaatcgaataattattacatgtcaaaaaaaaaaaaaaaaaaaaaaaaaaaaaaaaaaaaaaaaaaaaaaaaaaaaaaaaaaaaaaaaaaaaaaaaaaaaaaaaaaaaaaaaaattttaaaaaaaaaaaaaaaaaaaaaaaaagggccccctggggccgccccccccttggggggaaattcccaaaactgggggggggtttttttggggtccccccctgggccccaatttgggggaaaaaggggaaaaaaggttttcccgggggaaaattttttcccccccaaaattcccacaaaaaaaaaaccggaaaaaaaaaagggaaaacccggggggcccctagggggggcccccccccattttttggggggggccctctggccccttttcaaaggggaaaacctgggggcccattttttttttaaaatgcccccccccccggg

SEQ ID NO: 120107 - DNA, 1083 bp, Zea mays
  unsure (1)..(1083): unsure at all n locations
  Clone ID: MRT4577_41020C.1
ggcaccggccgccgccngacgtgtccagtcggctcgagtaacaacagcaatagaatgggtggcggcggcgggagcccggcagcgagcggcgggagcagcagcagcgaggatgacggagacgccgcgtggaaggcagccattgactccatcgcgtccgttgggttcagcgtcccttcgtccaacggcgtggcgaaggcagcctctagcggcagccgcgaggtgaacaaccgcgctgatctggaagagccgcgtgaggggaagccaaagagtcctgggcttaagctgtaccaggtcaaggtaagaaacatgttggatgatatgttagagaaaaatctcgaaatagtcaaagctccgtgcttgaacttagtagaccccatggaaacaggaggaggaataaagttatttaaaaaagcaccacctggtattagcatggattctacggataaatggcacgtgcaactcaagcgaccaagaatcgtgcctggggaagaggtcgatgagaaatcaaagaagttccggcatatgctccggtctgttgttgtcgacggcagtgacatagttgtttctgcaaagaaagcatctgagagatcattggctagattggaagtgagagaagctgcagcaaaggcaaaagccaagagggaggaagaaagggtgcaggaactaaagaaggttaggggagagaaatggcttccttctgttgctagacaaatgaaggaggaaaaggcttgggagctgcgaaggcaatgagctgatgatgcgccagatcaatggggctgcgtaggcttatctccgagtccagttatcctggtgcctgttctgagtggccacaaaagtaatgtggcctatttctgaagtttggcgatggcaataggattagcagaaagagtacatagaatggaagctttgttctaactgagaatgtagcactggatatgccagcgttcatttccatttaacttatgtagtaaaatttgtggctctgatgttccagaatatgatttgacatcaaactcttttggaagtgcattgcgaatcgttgtcttgtttctataaatgttgttgaagtgctcggcggggggc

SEQ ID NO: 120108 - DNA, 1260 bp, Zea mays
  Clone ID: MRT4577_41021C.1
ctggccgcttcgaggcacgagcaaatgcgactagccgaagcggccgcggcggaacacctcggcgatcggcgtgcgtaccttccacgcgggagtgcgggaccgttgctgcgacgctgcgtcagatcgacgcgcggcgcgtccgccccccaccctctcgccgcctatataactcgcgcccgaatcggcggctccctcctttgccctctccgcgcaccttccaccacgctctggaagctgtttcccctttctcgagagtttagaaagctggtgcagagatggccggggagagctgcgtccccaagcccctgttcggcggcgccatcttcaccaccttccccgaccgcttccaggacgtgagcaacatccgggaggtccccgaccatcaggaggttctcgttgatccatcccgcgacgagagcctcattttcgagctacttgacctcaagggcgaggtggacgacgccggcagcgcgctctggttcctgcaagacatcgccaacgagcaagacgccggggacaacttggtggtagagcattctgggacacttgaactggctgctttgcatctcggagaagctcctgcagtggctgcaactgcagttggccagctggccgtctcaaaagggaggcagggcagagaagcacaaaacattgttcgaatttacctggcaaacatacgccttaagaatgcggcaaccgatgtacttatcaccgcatatgagccattgttgataaaccccctgagtgaaagtgctgtggcagttgcagctggtccggcaatacctgctgaacaagtagggtgcttgccaatgtctgaggtcttcaaacttgcagtgacgaatttcaatgtgcgtgattggaaccttttcgatggtggcccttgaaccagagtggataatctctccaaaatcagatgtagagcatctggttgacatacggaagactactacctgttttctagatttacaattcattgtcagaaattatgctatctgacttaatcttccaaatactcctattgaacttacctctggaacattagctgagtttgtcatgatagattctactagtggattgtacgcagatggtctgtgtcgcttcatcggtaaagcaaactctgctcgttcctgttgaacacaggccatttaaatttagaaattagaattgatgctacgaaaaatccaatagtagcatgctttcagtttaaaaaaaaaaaaaaaaaaaaaaaaaaaagggggccgctcgcgatctagaactaga

SEQ ID NO: 120109 - DNA, 310 bp, Zea mays
  Clone ID: MRT4577_41022C.1
ggccatcagagtcggcggccaggccatgtcgaggttctggaagccagggtcgtcgaagccgagcaccctactcgtcgacgacgaggagggcggagtcgtcttcctgccctcctccagctccgtctcctcctccggctttggttacgcgagtctagagagacagcggcaacggctgccggtgtacaagtaccgcaaagccattctctacctggtggagcggcacgccaccaccattgtcgtcggtgagactggcagcggcaagtcgacgcagatccttcagtacctgaatgaggcttgtgggctgactttg

SEQ ID NO: 120110 - DNA, 254 bp, Zea mays
  Clone ID: MRT4577_41023C.1
aaaatgatcttttcttatatgttttttttccttttatgccacattacactaacaaatcttttaggaaaattctaagtttttaaaaatatttagttcaacttcccttttttcaggcacataacccttttttattttccctctattttttttttaataagggattctattaaagcttatgcctgggaaaaacctgctgttaaaaaacttattggctttgaggatatatcccctttttataggtgtggggtttttac

SEQ ID NO: 120111 - DNA, 253 bp, Zea mays
  Clone ID: MRT4577_41024C.1
tcttgttttctttctaaaacatacaactttaagtgaggcaaattagacaaaatgcgaccggcctatcaactattataatattcaagagatataattatggcgaaatcattctactatgctgcaatttaagattcaatcccttaacttcaattgatcttgactcaacctctttactttcataatgctattcagaacgtcaaatcgataacactgatagccgttgctgcttagccattatgtgcattaattttta

SEQ ID NO: 120112 - DNA, 371 bp, Zea mays
  Clone ID: MRT4577_41026C.1
cttccaaaaaagatgaaatgctcgtatctgtttctaggcactatcagaccagcaaaccagcactacgagccgctcagtccaggcattacccgcagctaccaactaatggccaccgctactgagtagaccccgcgagccggccgtctcattcaccatccgcgccgagacaacgtccactaccgagaaccatgaaccatgcagaggaaaccaacacgaaagctgcgcgcgcaagccacctacaacgagacgctcatcacctagaacgggaaggtggagatgcgggagaccgacaacgtctacatcctggaatacgccgaggatgaaggcctcaacctgcattactcctgccccgcggccgactgctcctcatg

SEQ ID NO: 120113 - DNA, 415 bp, Zea mays
  Clone ID: MRT4577_41027C.1
cttcctcccttctcacttttccttccatttattaatatactccactcaaccccgtcccgcgagattcttttttatttcttcatcttcccctcctacattctccctcattccaaatccaccttatctactttctccctgcccatctttcacctctccctcttccgttacttttttcttctctccatcctctaatccttcaattacatcttcttcttccacgtacttaaccactacttctccctttattctattcattacatttattacttattccattatttctttcttcttccttcgtattacatgtctcttccttactcttattacacttttatatcaaccctaatctacttcttctccattttcaacacgtacgccttatatttctatccctacttccttccccttccttttt

SEQ ID NO: 120114 - DNA, 406 bp, Zea mays
  Clone ID: MRT4577_41028C.1
ccggccggcccttgggaaggggtaattgcaaccaaccggggggcgggccggggggaaccgggcccccgcccaaggggggcagaagcagggaaacacgggcacccccggggaaagggggaaacgggcaaaagcccacacaacctaacaaccgaaagcacaaagagaaaaagcggggggcccaaagggggaaaaaaaaaaacaaaaacgggggggcccacaggggccacgaacccgccaaaaaaccgggagagccagccgcccaaaagaaaccaccaaccccccgagaaaggcggaaaagggaaagggcgccattccgcttccacgagcactaacaccctgggcacgggcggtcagacggggcgacccggaacaaggcaataaaaggcgaaaaaacggggaaccacaa

SEQ ID NO: 120115 - DNA, 539 bp, Zea mays
  Clone ID: MRT4577_41029C.1
gccccccctcgagtttttttttttttttttttttttttttttttttttttttttttttttttttttttttttttttttttttttttttttttttttttttaaaaacccaacctttctttttttcccaacgtccaaaaggaccaaggaaaaaaaaaattttgcagggaggggggacaaaaaactcctttggcccttacgggggcctgatatttcttggggccccccccccccgcccccacaaaaaaagcccaaactcgggggcgccccctttcacccggaatcccaaactttggccttttttttttttgggggtccccgggagggggggggaaaaaaaaaattttttggggggcttgggggggaaacccccccggataaaggcccatttaaaacctttaaaaaaggggggccgtttaatttaaaaagttcctttaaaaaaaccaagccggtactcggtttttttaaaaagcacccctttgataaaatctggggggggaaaacttaaggctggactggaaggaaacttcaacccctgggaa

SEQ ID NO: 120116 - DNA, 1628 bp, Zea mays
  Clone ID: MRT4577_4102C.1
cattgctcccctcgaggccggccgggaaacccccgcttcgcaaccagacgctggtggcgtcccgcacgccaccccccccccccccaactccgatctgccatggcctcgctccagtcctttctcgccgtcaaaccgaccaccgcgacgcggcgggagatgtcggtcgcatcgctgtcggcctgggacgggggggggcggccccacccatacactaccgcgccctccccaggcggcttcgcgcccggccgctcgcctgaccgatacggatacgagggcccgacgtacctcgacatggccgccggcatcgccgtcacggcgctcggccacgcggacccagacgtgtgcgccaccatcgcggagcaggccggtaaggtcgtccacgtcagcaacgtcttctacaccaaaccccaggtggagctagccaagcggctcgttgaggtgtcgttcgcggaccgcgccttcttcgccagcactggcacggaggccaacgaggcggccatcaaattctcccgcaagttccagcgggccgcgcacccggagagcggcgacccgcccacggagttcctggcgttcagcagcagcttccacggccggaccatgggcgccgtcgcgctcaccagcaagtcgcagtaccgggagcccttcgcgcccgtcatgcctggggtgaccttcgtggattacggcgatctggaggcggccaagaagttcgtacggtccggcagggtcgctgctgtcttcgtcgagcccgtgcagggtgagggtggcattcacagtgccaccagggagttcttgcaggggctgcgggacgcctgtgacgaggcgggagccctcttggtcttcgatgaggtgcagtgtggtttcgggcgcacaggccacctctgggcgcatgaggcgtacggagtggaaccagacataatgaccttagcgaagccactggccaacggcattcccatcggcgttgtcctggtgaaggagaaggtcgccgcagccataaactacggcgaccacggcacgacgtttggcggcgggcctctcgcctgccagaccgcgataacggtgttcgacaagatcacgagacccggtttcctggccgaggtgtcgaggaaaggggagagcttcaagcagctgctccgcgccaagctgagcgggaacccgcacgtgagggaggtccgcggggtcggccttctcgtcggcgtcgagctggacgtgccagctggtcctctggtcgacgcgtgcttggacgccggcgtcgtcgtgctgactgccggtaagggcaatgtggtgaggctggtgccgccgctcatcgtctcggagaaggagctggagcatgccgcggatgtcataagggactgtctaccggcgctcgatgtcgttgctgctgcctaatgtatatggtggtgcaataggtccggatatgaaacctgattccaaattttggaatcgaataaatttcatgtcgggccaataatgttgtgtgttcattgaaacaaactctttttttttttggaatcgaataattattacatgtcagaccgatgctagctgttccgagagcaaagtggttttattatacaaaatggtctgaagagtgttcgttttagatgaagagcgataaggtgaccaaccga

SEQ ID NO: 120117 - DNA, 655 bp, Zea mays
  Clone ID: MRT4577_41030C.1
gacaaacttgatttaggattcctcattgctgcaaccagtaatccaggttggctcaagcattttcatacaagaaatcgaaggcttaataaaatttgtagtgcaaattgaggtggctaatgctagatacgaggtcacatcaaactgatatatatgcaacgtgataaaggtacttaatgctgggtggggactgactatcgcattatttcactaggacaagattatggtaatatcctactttacttagcaaaaactaatctgagccaacctccaaaccttcagttcatctcacaaatatcattgtgacagtatgcaccttgagcataggactccagactagatctgcacgccagcatgtcctacttgaaccgcaaacaaaaattccaatgatgttaaaagagcattagcaatgcaaaatatatatgtaagctcttcatcaaagatttttttccagcatgcgtgcatgcttggttaccctaatgcacacacatcaactaccaaatgggaaactcgttactgtttgtcagtagaaaattgtgcagaaaccaaatgaaaacattgggttcacagaacaattcacagcacctccattatacctgatattcattcatcacgtgctaaaaactctggctgcctgtgccaagctgtcacgacaact

SEQ ID NO: 120118 - DNA, 1006 bp, Zea mays
  unsure (1)..(1006): unsure at all n locations
  Clone ID: MRT4577_41031C.1
ctcttcccgttgcttatcacgtggggttgccgtgaatcaccgtcttctccgcctacaatctctcagcaaaaccaccaaagccagctgctcatttggggggaagaccttctttgagtgaggtccaacccttggaggccatttcaaccttcgtcctccgcaataaaagttgggcaatcctatgtcagtcaggtctcttctagcacaacccattccatcgctgtttgctcctgctcccgcgccgtcgagagctcaccgaaaccgaacctcgcggcggcgtttcttagctgcaacaaaactaaccatggatggcactagctttgatctgacagagcacgaaggttcaaatttgtctccgtttctactcaaacattttaatgagtataaacatgaacggtcattgcagtgggatgatcgcaagacaaggggcttgtttcaccatgacatcagttcctgtgaaacaaaggtgctacctggagtacataattttgtggcaacattaattgaaggacgtgaccaaaagaagcggccaactgagttcacaatgaaccaagttctccagccatttgttagtgagaagttcaatttcacaaaagtcagcccgttggaggtgatctttagattcaatgacactgagaaagaccctgcacaatattttgatggtgttcctgatactgtttcagcttcttctagtgccatcttgatcaatgtgagcccaattggctactgccatgtgctattgactcccaagatccaggactgtttgccgcaaaggattgatcaagagagcttcttaatagccatgtatgttgcaagaggagcaaagactcccttcttcagagttggttataacagcctgngcggctttgcaactatcaaccaccttcacttccaggcatactacctgaaagtacagtatccagttgaaaaggcaatcacggagaagctcaagaccctangnaatagcgtgagcatttttcacctggtggattaccagtcaatggctttg

SEQ ID NO: 120119 - DNA, 127 bp, Zea mays
  Clone ID: MRT4577_41032C.1
cgcagacctgtttgtccgccgccggcgcggctaccactagccagcaagccatctcctagagctggagggggtctgcttcctccttgactgcccatcgacgtctccgccctcgtaggattcgcgccgg

SEQ ID NO: 120120 - DNA, 656 bp, Zea mays
  Clone ID: MRT4577_41033C.1
gcactccattgggctgcattttgtggcagagagcgaacagttgttgcacttatcgcacttggtgcggctcctggagctttgacagacccaacgccaattttccctacaggaagcacaccagctgatctggcatcagctaatggatacaaggggatctctggtttcttggccgagtcttctttaacaagtcatcttcagaccctcgatcttaaggaaggcaaggggagcaatccgccagaaatatccggtctgcctggtattggagatgttactgaaagaagagcatcaccattagcaggtgaaggtcttcaagctggatccatgggagattcactaggtgctattcgaaatgctgcccaagctgccgctcgtatatatcaagttttcagggtgcagtctttccagagaaagcaagcagttcagtatgaggatgacaatggtgcagtatcagatgaccgtgccatatcactcttatctgttaaaccatctaaacctgtacagctcgatcccctgcatgctgctgcaactcgaatacagaacaagtaccgtggatggaagggaaagaaggaatttctacttatcagacagcgcattgtcaagatccaggctcatgtgcgaggtcaccaagtgaggaaagcatatcgtaaaatcatttg

SEQ ID NO: 120121 - DNA, 735 bp, Zea mays
  Clone ID: MRT4577_41034C.1
ctcgaggccggccgggccgggaataagcagcgatcgacccagccttcgccatcttcgtttctgttgttgctgctgctgcttccggtcacatgcatggctaatttcggctctgatcaactaggggatacccgctgtgttctacatatgcatggatgaaatcagtggtggagccaagagtcgccgccggatggctgctggacttctggaacgcatgggcaacggagatcctggtaatcctgagcctcctgctgcagggggtcctgctcttcttctccgggactcgccggcgtcaaggccgcagccccaagaggctccttctctggctggcataccagctggcggacagcacggcaatgtacgccctgggcaacctctccctcagcagcacgctgcggcagcaccggctggtcgccttctgggcgcccttcctgctgctgcacctcgctggccccgacaacatcacggcctactccctcgaggacaacaagttgtggaagcgccacctgctgacgctcgtggtgcaggtgctgggtgcagggtacgtcatctacaaccatatcgccggcggcgggatcctcttctcgctgggcgcggccttgacgacggctatcgcggtcgccaagttctgtgagaagacgtgggctctccggtgcgccaacttcggcgtcatcagggagtccgtgggaggcggaggacaccgagcagctcggaaaatgtgatctttacctgggagac

SEQ ID NO: 120122 - DNA, 252 bp, Zea mays
  Clone ID: MRT4577_41035C.1
aaaaccggtattttttcccctgaaaatttattaacttaagggttggccaatttttcatcagggggctttcaatgatgatccaaaacaattgtcttttttcttggaaggattattgagaccccctaaaaatcccccaacaaaaacaaatgaacttttccaccccgtgaacggggcatccctttaaagggcaaaaccccaaattccttttccggccaaaactggtgcttatggaatttccacgccccggttttc

SEQ ID NO: 120123 - DNA, 223 bp, Zea mays
  Clone ID: MRT4577_41036C.1
ctcgagccctagttctagatcgcgagcggtcgtcctttttatctttaatccgactccctgtcattaaatcacaagcgcctgtaggagtgaggcgtccattaagttctgaatcggcgaactaaataccccttggctaatttcgaaacttaaaaaagtggccacaaggtttctgaatgtgatacaggccggctcattgggcccctaaacttggaaaataaagttg

SEQ ID NO: 120124 - DNA, 1415 bp, Zea mays
  Clone ID: MRT4577_41037C.1
aagaatattgtgatgagattgaaattaaatatgaagcatctgcaacatacaaccttcaacaaaatggtgtatctaacataaagagtagtgtatggccccgtttggattcctcggagattttagcattccagatctgtagagattatagaatctagattttagatgataaaacactatgacgtttgggtccatacattcaacatgtatattgtccatagcaccctcaagtttctctggtagttaaatcaacatgtataaggatcaggtgtgtgtgtgtctgtgaaatgaatgtcgggtgcattctgtgtcaagtgccaacacgtactggaaatttatccgttccgttgagtggtttatgggtatctgggatttgtgctttttttttttttttttttgacaaggcaaaacacaaattttattaattttgatcaacgaccagctaaaattatattgcaaaagaaagctgaggattaaatccaagggcggagcttcagtgtgtgcgtataatactccagtttatatcctgatgaacatctgtactgtccggcatgtttaacctagatccgtctcggctgcgccctcctgttcttcttgctgctgggatctggtagactcgagggagtcaacttccgaagcgaggcgtgcaacatcatcaacgcatagctcaatccgatggcgtacacgagagcaaactgtaggttgcagacgtacaggagtatggcggtagcaatctgcgcacagtgcagcagagcctgggcaacccctggagccctggtggtaagaccccaatggtcccggcagtagcgcacgccctcccagacggcgaggctgaccagcatccccagcagcgccatcggcatccggtacaggcagcacgcgaagacgaggatggtgagcgcggcgtagttgcgcgcgtaccggcggacgttctcctggacgcggagcctggcctgggtgggtgtgggcggccaggagtaggacgcggcgccgggggtgcctaggaaggcaagcgaccaggaaggggtgggcgcggccaggtcggtggcggagaggcgcgcgaaggggttgagcgcgaggagcgaggcgagggtgcgcgcgaaggtgaggatgtcgaccgcgacgccagatgagtccgggcccgcggcggggctggatgtggagggggctgaggctgacgacggccctccggttggggtggagtcgaggaggtcgaggtagccggtgtcccggagccagcggtcgagcgcggggtccggcacgctcagcgacagcgggttcggcttgaacgacgacgaggccgccattgggatcgtcgaatggatttgcccgccgccgcgagacctcaccaggggaagaggattaacatgtccgtgtgcctgtgcgtcccccccggcccgcctcgagctacacaatgc

SEQ ID NO: 120125 - DNA, 811 bp, Zea mays
  Clone ID: MRT4577_41038C.1
tacctcgagccggcgggaactcccaaaagaattaattatctgacggtgcatgtcatgcccatgacacccctcgagtgcgacatggcccctgcagcttctcgcaacaaacacctctcgcggtcgtggcctctccctcgctgcggcctgctggtcttggtccttgcactggcggcgaccgccgcggtgggcagcgcgcagctgtcgtcggaggactactacgacgcgtcctgccccgccgcccttctcaccatcaggaccgccgtctcgacggccgtgctgctggagccccgcatgggggcctcccttctccgcctccacttccacgactgtttcgtgcagggttgcgacgcgtcggtgctgctagacgacacggcgagcttcaccggcgagaagggggcggggccgaacgcggggtcgctccggggcttcgacgtgatcgacaacatcaagatgctgctggagctgctgtgcccgcagaccgtctcctgcgccgacatcctcgccatcgccgcccgcgactccgttgcacaactgggaggaccatcgtgggcggttccgctgggcaggagggacgcgaccacggcgagcgcgtccctggccaacagtgacctccctgggcctaccagcagcctcaacggcctgctcaacgctttctccaacaagggtttgagcagcaccgacatggttgccctctcaggtgcccacaccgtcggccgggcgcagtgcaagaactgccgggcccggatctacaacgacaccgacatcgacgcctccttcgcggcgtcgctgcgggccagctgccccgcgcagg

SEQ ID NO: 120126 - DNA, 822 bp, Zea mays
  Clone ID: MRT4577_41039C.1
aaaaaaacttccccccttttccttttactcccatctcctctctctctccctcctctggttccccttcgccattgctgccacaggctggattcttctcgagctttgctacgcgcggttctttgcttgacgaatgagtggatggagcttctgctgcacaaagagggagaaggattcgtctacagttgctgatgcctagcagtgctctactctgatgcggtacagctccaaattttagcacactgccgccatggtttccactggtctgagtttagagatgacgaagaaggttcttggcctggcattgtgggtctggattgcaatcggtgtagtcgctctcctggttgccattctgctgatgatatgtatctgggcggcgtcccgtcgcaagacaaagagaaccatggagaacttgagccagacacagatccccatctactccaaggagatcccggtagacagggtgggcggtgggcgcagccttgcgcaaacgatgcatgaacgtgagcagcctagcttcccaacgcaggacaagcacgccgtgaatcgggagccggggaaaacggtggggcatatggcattgagcaagtcctcggatcatgataacgtgagccagggaagctcagtgtgcaatgtggaccgggttggcagtgtgcattctggtgaagatggcggctcggggcacggcaggaaaccgtattctcctgcggcatttgtgtccgcgtcgcccctcgttggccttcctgagtctctcatctttggttggggtcactggttcactctgcgcgaccttgaattcgccaccaatcgcttctcaaaggagat

SEQ ID NO: 120127 - DNA, 426 bp, Zea mays
  Clone ID: MRT4577_4103C.1
acgcactcggcatcttatcccccgcctactccggtcctcttgccgctgttgctcacttctgagtccgtacgcgcgagctcccaagagctagccatggcgtccaccaccctctcctccgacttcaccctcctatcccgcccctccacctccccgtgccccggcgcctagctcccgaggtcctaccacgccgcgccccacattcgccggggccgtcgcgccgtctccgtcacgtgcaccgccaccgagtcccccaagatcctgaacctcgagaaccccatccccggcctaaccctcaaggaggcccgcaacctcctcgaccacctccagaaccggttcggagtcaccgccgtggacttcggcccggccgcccttgaaggggcccccgggtcgaacgcctggcccgcgtccaagaaggagccccccttc

SEQ ID NO: 120128 - DNA, 356 bp, Zea mays
  Clone ID: MRT4577_41040C.1
aaaaaaaaaaaaaaaaaaaaaaaaaaaaaataaaaaaaaaaaaaaaaaaaaaaaaaaaaaaggaaaataaaaataataaaaaaaaaaaaaataatataaaaaaaaaaatataaaataaaaaaaaaaataaaaaatttaacttataacaactctaaaaatggatttggtaaatcatgatccatgacgaaaatgatctaacttgataaataaaaagcttgctcttttatatattatgatttaacattttactaaaggtactttcaaatttgtaacatgttgaaattgtgatgaatctctaagatcacttgcatattagcgttgatgaattcagctctcattcaatcgtcacagttgaa

SEQ ID NO: 120129 - DNA, 222 bp, Zea mays
  unsure (1)..(222): unsure at all n locations
  Clone ID: MRT4577_41041C.1
ttttctgtatttgtcttctcgaaaaacatttgtgttgggagattcaattgacggtaggagaaataaataccaacanangcttaaagtttaatgccccaataatattgatgatgtgcacatagatgcagctcaataaatacattctcattcatataagctaggacatggtccatcttttatttctgtttcaagaatagtagcaccttctattgattattgctc

SEQ ID NO: 120130 - DNA, 1382 bp, Zea mays
  unsure (1)..(1382): unsure at all n locations
  Clone ID: MRT4577_41042C.1
ggccggccgggaagccggtcggggaactcccaaaaaaaaaaaaaattatctgacggtgcatgtcatgcccatgacacccctcgagtgcgacatggcccctgcagcttctcgcaacaaacacctctcgcggtcgtggcctctccctcgctgcggcctgctggtcttggtccttgcactggcggcgaccgccgcggtgggcagcgcgcagctgtcgtcggaggactactacgacgcgtcctgccccgccgcccttctcaccatcaggaccgccgtctcgacggccgtgctgctggagccccgcatgggggcctcccttctccgcctccacttccacgactgtttcgtgcaggtaagtcatcagtggtctcaatcaaacagagacgacagatagtgagtgagtgaccatatgcatggctctgcgctgtgcatatgcatgcacctacctacgtacggcagggttgcgacgcgtcggtgctgctagacgacacggcgagcttcaccggcgagaagggggcggggccgaacgcggggtcgctccggggcttcgacgtgatcgacaacatcaagatgctgctggagctgctgtgcccgcagaccgtctcctgcgccgacatcctcgccatcgccgcccgcgactccgttgcacaactgggaggaccatcgtgggcggttcctcgaggcaggccgggtcatgcatgcgacagcacagcaagcttttcgttgcgtgcatcaccggtcaccgcccacggctcaccacgcggacgcgggcatatgcaaatgcaatgcaggtgcccacaccgtcggccgggcgcagtgcaagaactgccgggcccggatctacaacgacaccgacatcgacgcctccttcgcggcgtcgctgcgggccagctgtcccgcgcaggccggcgccggcgacggcgcgctcgagccgctcgacggctccacgccggacgccttcgacaacgcctacttcggcaacctgctctcccagcgcggcctgctccactccgaccaggcgctcttcggcggcggcggcggcggcgcgactgacggcctggtcagcgcctacgcgtccaacgccggccagtggggggccgacttcgcggcggccatggtcaagatgggcagcatcagcccgctcaccggcacggacggcgagatcagggtcaactgccggagagtgaattaattatttattacagccacgttgattgcatttgctcttggggtagtggactagcgtgcatattttgcaaagaggcagagaagaattgaaatggagcctaagctcatatgtatacaaatgttgnttattattccatattatttcttgcatatataatatatatagcatacatgaaaaaaaaaaaaaaaaagcggcc

SEQ ID NO: 120131 - DNA, 667 bp, Zea mays
  unsure (1)..(667): unsure at all n locations
  Clone ID: MRT4577_41043C.1
tgcggaggcccagcctttggggngaatgtcatatccgtgtataggagaaaccgcgttttatgcgaacaggaggggaaatacagaaaagaagaattataaagaaatttattatctgacggtgcatgccatgcccatgacacccctcgagtgcgacatggcccctgcagcttctcgccagtcgtggcctcttcctcgctgcggcctgctggtcttggcccttgcactggcgacgaccgccgcggtgggcagcgcgcagctgtcgtcggagagctactacgacgcgtcctgccccgccgcccttctcaccatcaggaccgccgtctcgacggccgtgctgctggagccccgcatgggggcctcccttctccgcctccacttccacgactgtttcgtgcaggtaagtcatcagtcgtctcaatctaacagagacgacagatagtgagtgagtgagtgagtgaccatggctctgcgctgtgtatatgcatgcacctattatatgtacggcagggttgcgacgcgtcggtgctgctagacgacacggcgagcttcaccggcgagaagggggcggggccgaacgcggggtcgctccggggcttcgacgtgatcgacaacatcaagatgctgctggagctgctgtgcccgcagaccgtctcctgcgccgacatcc

SEQ ID NO: 120132 - DNA, 1429 bp, Zea mays
  Clone ID: MRT4577_41044C.1
ccgggattgcggggccagcctttgggggaagtcatatccgtgaaggagaaacgcgttttaggaaacaaaaaaaaaatacagaaaagaagaattataaaaaccatcctaatggcctccctcgcggccgggcgggaaaccagaattaattatctgacggtgcatgccatgcccatgacacccctcgagtgcgacatggcccctgcagcttctcgccagtcgtggcctcttcctcgctgcggcctgctggtcttggcccttgcactggcgacgaccgccgcggtgggcagcgcgcagctgtcgtcggagagctactacgacgcgtcctgccccgccgcccttctcaccatcaggaccgccgtctcgacggccgtgctgctggagccccgcatgggggcctcccttctccgcctccacttccacgactgtttcgtgcagggttgcgacgcgtcggtgctgctagacgacacggcgagcttcaccggcgagaagggggcggggccgaacgcggggtcgctccggggcttcgacgtgatcgacaacatcaagatgctgctggagctgctgtgcccgcagaccgtctcctgcgccgacatcctcgccgtcgccgcccgcgactcggttgcacaactgggaggaccatcgtgggcggttccgctgggcaggagggacgcgaccacggcgagcgcgtccctggccaacagtgacctccctgggcctaccagcagcctcaacggcctgctcaacgctttctccaacaagggtttgagcagcaccgacatggttgccctctcaggtgcccacaccgtcggccgggcgcagtgcaagaactgccgggcccggatctacaacgacaccgacatcgacgcctccttcgcggcgtcgctgcgggccagctgtcccgcgcaggccggcgccggcgacggcgcgctcgagccgctcgacggctccacgccggacgccttcgacaacgcctacttcggcgacctgctctcccagcgcggcctgctccactccgaccaggcgctcttcggcggcggcggcggcggcgcgacggacggcctggtcagcgcctacgcgtccaacgccggccagtggggggccgacttcgcggcggccatggtcaagatgggcagcatcagcccgctcaccggcacggacggcgagatcagggtcaactgccggagagtgaattaattatttattacagccacgttgattgcatttgctcttggggtagtggactagcgtgcatattttgcaaagaggcagagaagaattgaaatggagcctaagctcatatgtatacaaatgttgtttattattccatattatttcgtgcatatataatatatatatagcatacatgtactaaaaaaaaaaaaaaaaagcggccattttagaccttaaaaaaaaaaaaaaaaaagccagt

SEQ ID NO: 120133 - DNA, 284 bp, Zea mays
  unsure (1)..(284): unsure at all n locations
  Clone ID: MRT4577_41045C.1
cttnctcttctcgggccnncccatatgtctctctgagccggcggagcccgcttatctagtgtctcctccagagcagttcctcccccccctgtctccgacccaactctctccagtctcctcgcgtacagcagacgtgcatagtcaggagctgaatcaatcgtgatcgaaccgtggcagctcttggaggacttcctcaccctctccatgtatagtcatgctcgtgcaacatcctcaagcacgacctcttctctcccgacaccgaggagatggccttgcacctcaca

SEQ ID NO: 120134 - DNA, 202 bp, Zea mays
  Clone ID: MRT4577_41046C.1
tttatgagaagattaaggctctgaggcgggtgattatgtctcccacagacgagctgaggaatgactctctttatctctttaacaacttaccataagccttacctttaacgcatcttgcgggctatggatggtcttttacctactattaaactgttagaccctcaaactcaacaagtgccttccctaaaggaacttcatgtaa

SEQ ID NO: 120135 - DNA, 282 bp, Zea mays
  Clone ID: MRT4577_41047C.1
aattaacacacaatagcatccttccaactcttctcccttatattaaaagaccaatacttgcataactcattcattcgaaaaaatagctagcctttggttacataaacctgtaactgtcacaataaactgtctatattgaaggaataaatgtttaatgacattcccagactggaaatgaaattcaaagcaaacaggttagattagctgcttttaaaccaatatattggccaaccttacataaaagctgtccacaactcttcccgacatttaaaatggttttat

SEQ ID NO: 120136 - DNA, 293 bp, Zea mays
  Clone ID: MRT4577_41048C.1
tttagataggccgcgtacgtagcttgtagttcgctcgaggataaccctagctgcgcgagcccaccgtcgatgtcggaggccatccgctcaggcgagctacttgcgtgtcctgtcgcactctgtagggcgccctaagctgtgtctgtggcgacgacgcggatgatggctaggggcgctgttgcttgtcggtcgggagcaacggtctgaggggtagtgaaagaggggaagaaggcgccggggaagaagaagccgacgagcgggatcaccaagccgaagcccatctctacagagct

SEQ ID NO: 120137 - DNA, 276 bp, Zea mays
  unsure (1)..(276): unsure at all n locations
  Clone ID: MRT4577_41049C.1
gggacttacgcgtccgctcgtanagagaaggtaaaatttccctaataccctagctcccgatcncgagatagaacccttgcagacttgggcggcacgaccgncggcggcgccccggcgggccggatcgtgatggagctgtacgccaacgaggtgcccaagaccgcggagaactttcgcgcgctgtgcacgggcgagaagggcgtgggcaagtccgggaagccgctccactacaagggcttcaccttccaccgtgtgatccccgagattatgtgccag

SEQ ID NO: 120138 - DNA, 680 bp, Zea mays
  Clone ID: MRT4577_4104C.1
attcggctcgaggaaaaaatgtttttcatatttctcccttttcccagatgattataaatttgataagtctgagattattcgtttatgggattcaataggaatcataggttctagtatacagcaaaagaaaatagaggacataggatcggattattttgatgaactattagatagtggttttcttataaaagggagcaatgatttttatgtaatgcatgatttaatcaaaaaaaaaaaaaaaaaaaaaatgggggcacgattgtgcctatatcgattgttctagttttgaggcaaataacatcccacggtctatccgttacctatccatttccatgcaagatcattgtgctcagaatttcgaggaagaaatgggtaaactgaaagaaaagatagacattaaaaatttgcggagtttgatgatatttggaaaatacattaggttacatctgctcaatattttaagggacacatttaaggaaataagacgtcttcgggttctatctatattcatatactcccatagttccttgccaaacaacttttcagagcttcttcatctccgctacttaaaacttttgtcaccttattactcaaaaatgtcattgccaaacacggctcaaggttttatcacctgaaatttctagatcttgaacaaggggaaggatcgttctttgcctagg

SEQ ID NO: 120139 - DNA, 355 bp, Zea mays
  Clone ID: MRT4577_41050C.1
gagctcactagtcggcggtcgccctttttttttttttttatatcagttaatccagattcaaacttacgtgaatggagtttcacatgacatccagagaacatccaccaaatcggcgatgtacagtctgtcgcggcgtgaccccaaagggatcaaagatatcaacagggctgatacaagaaggatgggcattttagccttgatgcttatacagtaagcatctactcaagagctgcctgcgcagaagatttggcctgcatgaacagtatattctgtgccccctgttgcgggcggttgggagcatcacatatccagctcaacttcaacttaaaaagctttgccacttggattgcttatg

SEQ ID NO: 120140 - DNA, 266 bp, Zea mays
  Clone ID: MRT4577_41051C.1
atcttcatacacataaacaacacaaacacatactatatatatacaccttgctctcctctcgaacttctcatcaaccacttacaccccatctcatctctcaacatgtccctctcctccaaagtcatcctcgtcaccggctccgccagcggtctcggccgctgcatcgccgaaaccctcctctcccgcggcgcctccgtcaccatcagcgacatcaacccggaccgcctcgccgcaacagcctccgagctctcggcaaccttctctcc

SEQ ID NO: 120141 - DNA, 282 bp, Zea mays
  Clone ID: MRT4577_41052C.1
cttcaccaccgacctttctttttcatcttaccgtatttcttatcgcgttctcacttgactctcatcatgtcggaacctatcagaaataaaaaggctgatttcccagtcgctccaactcctcagaatacacctgctaccaatgctccgatttcttctcatgctcagcagcctggtgtagccagcatctcagaggaaaatcttgatgctgccgctgccgcaagcttgttcgcaaagaacccggctctggtctcaatgatccaaggccgtctgggttctctgatc

SEQ ID NO: 120142 - DNA, 1208 bp, Zea mays
  Clone ID: MRT4577_41053C.1
tgggtacctcgaggccggccgggaaaaccctggttttagccccgccggccctcggcaataatcccacctgtctgcctccctccgcactgcttctcctctcctcgcggcgcgcatccatggcggcctcgtccgcctccctcctcgcccgtcgcctcatcatgtcccgccgcttcctgtcatccccactcggctccctctctaccacaaccgcgacgcgcagtttctcgatctcttctcccgggtttaaaagcttcgttgtggagtccgaccttgagaacgagcacgaccagccccccgcggaccagaaccgccagcagacgtcgaacagcccgcgcccgcccgacaccacccgccctctcgagaacggcctcgaccccggcatctacaaggcgatactggtggggaaggtcgggcaggagccgatgcagaagcggctgcggagcgggaagaccgtcgtgcttttctcgctcggcaccggtggcatccgcaacaaccgccgcccgctggatcgcgaggagccgcaccagtacgccgacaggtgctccgtgcagtggcaccgcgtctgcgtctatccagatcgcctcggcaccgtcgcgctcaacaacgtcaagactggcactattctctatttggaaggaaatcttgagaccaaagtgttctgtgatccaattactgggctagttagacgcataagagaaatagctgtgcgttcaagtggtcgtctcttgtttctgggcaatgacgccaatgctccaaagttaggcgaagtcaagggcgtcggctacttctgattatggggttatgtttaactgagcataccagttgcagggacagagtcatcataacgggggtactttactggaatctgagtggaccaacaaatcctggcggcgattcgagtcttttgccgtgttgaattttaccagattcctgttttgtcaagctctcagcaccactgtagataccttgtaatcgttgtaacagcaacatgtaggatgtgtgatcagtaatctgtactatccttaaagtactagtttcaacggtcgttctgcgtcatatttttacaaataatcactcacatctatttcaaattaaaaatgaaaacctaaataaaaaaaacaagaaaaaacataaaaaaaaaaagaaactcggtagtgtgcatctcgtgcaggaggtggggtttgaacctgaaaaaaaaaaaaaaaaaa

SEQ ID NO: 120143 - DNA, 529 bp, Zea mays
  Clone ID: MRT4577_41054C.1
tttttttttttttttttttgttttttttttttttttttttttttttttttttttttttttttttttttttttttttttttttttttttttttttttttttggtctttttttttagggccccaacctttttttttgggggagaggggggggggttttgccagggggggtaaaggggaaaaaaaacaagagaaccccccttttggttccagccttttatgtggtaaaaaagcggggggggaaaaaacaaaaacccttgaccgggaaaaatggaattttacaaagggttttttggccccccttggggggggggccctttttaagaatttggggggttggttttcccataggtttccatgacccgcctttaaaaagaggtaatccaaaaacattcggggttccaaaaagtaaaatggttattcggccgggaaaaatttttttaaaggtgtaaaaaaccaaaaatttgtggcaaaggttttttctgaaccttttattttggccccccttgattttggaaaaaatttggcgcccc

SEQ ID NO: 120144 - DNA, 437 bp, Zea mays
  Clone ID: MRT4577_41055C.1
agcaggggtaacaacgcagagtacttttttttttttttttttttttttttttttgttttttttttttttttttttttttttttttttgggaaaaccaaaccacccgactaaaaaaaaacccattaaacagggcccaaagggcaaacaaaaagggaaaaaagcattctgggttggggggggggggaaaaccaggaggccccataaacagatgaccggccccccaactgccccgaaacgcgggggggttcccacggctaaggggcgaatcccatcaccctggggggcgggtaacgggggtacgaagggcggaaccaagccgggggtttaccgggtcctctatggagccggggggaagatgcacccccggaccgattcccccccactatcggcccggcggcaagcagtgcgaagcgggggggcgcctaggggggggcccc

SEQ ID NO: 120145 - DNA, 315 bp, Zea mays
  Clone ID: MRT4577_41056C.1
ctgagcctggataagcggccgccctcgcccttttttttttttttttgtcttaaaacagacaacacattatcatggcattccaatgcggtatactgaacactgtacatagccagcgtcattcatttacgctcaggcgtattgcattcatgaaacggacccaccaacattcttgagcgaacacaaaggtggcctacaagctagggtgcagacaaaatcccaaacacatttaagagcctcacacaccgacccatataccaatgcgtgctcaaccctgcctgcagagaaaggtctgaaaaaagctattatgacatcctg

SEQ ID NO: 120146 - DNA, 2482 bp, Zea mays
  Clone ID: MRT4577_41057C.1
cccacgcgtccggttaaagatggggaaatggttaatgttaatcttgattggagggcggctgttccacatccagatgaccgtgttgagtatgagttatggacaaacagcaatgatgaatgcgggcctcgatgtaaactgcatcggaatttactccgttgggcctcgcttccgatgcgccggagctcgcacgcgatgggagcgcaagcgtttcggctgctgctgcttctgctgctcgcggcggcggcggcggaggcgcgcttcgttgtggagaagaacagcctgatggtgacgtcgccgacttcgttgcggggacgacacgacagcgctatagggaacttcggaatcccacagtacggcgggagcatggcgggcgccgtcgtctaccctaaggacaacgccaaggcttgcgacgatttcgacggcaggcaccccttccgtgccaagcctggcgcgatgcccacgttcctcctcatcgaccgcggtgagtgcttatttgcgaagaaggtttggaatgcacaaaatgctggtgcctctgcagtacttgtagttgatgacaaggatgaaccattgataacaatggatttacctcgtgaagatgacgaggcttcaaagtatatacaaaacataaccattccttctgcattaatagatgaaaaatttggtgaccagttgaagaaggctgttaaagatggggaaatggttaatgttaatcttgattggagggaggctgttccacatccagatgaccgtgttgagtatgagttatggacaaacagcaatgatgaatgtgggcctaaatgtgatatgctgatgaattttcttaaggaatttaaaggagctgcccaactacttgagaaaggtggctatagccaattcacgccccattacattacttggtactgtcctcaagcatttgtgatcagtaaacaatgcaagtctcaatgcataaaccatggaaggtactgtgcacctgatccagagcaagattttagcataggctacgaaggaaaggatgtggtggtagagaacctcagacagttatgtgtgtttaaagttgcaaacgaaaataagaaaccatgggtctggtgggattatgtgactgattttcacataaggtgtccaatgaaggagaagaagtacaataaaaaatgtgcagaaactgtcatcaaatcactaggtctggatgtgaagaaggtcgataaatgcatgggagacccaaatgctgattctttgatagttgttgctgatgtggcagcgggaagttatgttgtgtacaaatacagactaaggtcatacatggactccgagattagagctatcatggcgcagtatatgccacttgacaatcaaggagaggtcccaaatcatacacatgacgaagatcgttcataagtgtgcagatcattacgtggtgggcccatatggcctaatctgacaccaatgcagatcgtcgtgagctctacaaacagaagctacaggccaataatagcttgatttttagagtacaaaaatctgttatttgcctgatagtttatctggagcagtttcattttacatatgactgtaatttgtgagaatgcacatcttacgatttttgttgaccagtattcataggtttttagttagcaatgtgttgttggcccgttgctagtccttgtaatacaagcccacctgtttttttgcgcacggcaagacttaaactgacaacattttgtagtaccttttattttgtatcacctgctctatacacgagttttcttggaacatcggaaataataatgccctccagtatcttggaccttttgtacatcagagagcatgacacctgcataagcaagacagcagttcaggctaaagcagcatgggctgcagtgtggggtatcttgatagttgttgctgttgtggcagcgggaagttatgttgtgtacaaatacagactaaggtcatacatggactctgagattagagctatcatggcgcagtatatgccacttgacaatcaaggagaggtcccaaatcatacacatgacgaagatcgttcataagtgtgcagatcattacgtggtgggcccatatggcctaatctgacaccaatgcagatcgtcgtgagctctacaaacagaaactacaggccaataatagcttgatttttagagtacaaaaatctgttatttgcctgatagtttatctggagcagtttcattttacatatgactgtaatttgtgagaatgtacatcttacgatttttgttgaccagtattcataggtttttagttagcaatgtgttgttggcccgttgctagtccttgtaatacaagcccacctgtttttttttgcgcatggcaagacttaacctggaaacattttgtagtacattttattttgtatcacctgctctatacacgagttttcttggaacatcggaaataataatgccctccagtatcttgcgaccccaacaaaaaaaaaggcccccccaat

SEQ ID NO: 120147 - DNA, 1756 bp, Zea mays
  unsure (1)..(1756): unsure at all n locations
  Clone ID: MRT4577_41058C.1
ccagggaccccgtgcaggtccacatccagatgaccgtgttgagtatgagttatggacaaacagcaatgatgaatgcgggcctaaatgtgatatgctgatgaattttcttaaggaatttaaaggagctgcccaactacttgagaaaggtggctatagccaattcacgccccattacattacttggtactgtcctcaagcatttgtgatcagtaaacaatgcaagtctcaatgcataaaccatggaaggtactgtgcacctgatccagagcaagattttagcacaggctacgaaggaaaggatgtggtggtagagaacctcagacagttatgtgtgtttaaagttgcaaacgaaaataagaaaccatgggtctggtgggattatgtgactgattttcacataaggtgtccaatgaaggagaagaagtacaataaaaaatgtgcagaaactgtcatcaaatcactaggtctggatgtgaagaaggtcgataaatgcatgggagacccaaatgctgattctgaccacccgttacttaaaatggaacaagatgctcagattgggaaaggttcaagaggagatgttactatattgcctacacttgttgtgaacaaccggcaatatcgagggaagcttgagaggaaagctgtcctcaaagctatttgtgctggttttgaggaaactacagaaccaaatgtttgcctgagtgatgatatagagacaaatgagtgtctgaatgacaacgggggctgctggcaagacaaatctgctaatgtaacagcctgtagggacaccttccgtggtagagtgtgtgaatgccccactttcaatggcgtacaatttaaaggcgatggctacagcaattgtgaacctgctggaccaggaaaatgcttgataaaccatggaggatgttggcatgaaactcgcaacggaaaaacattctctgcttgccaggaatctggagatgggaaatgcctgtgcccagctggtttccgaggggacggcgttaaaaaatgtgaagacattgatgagtgcaaggagaaaaaagcttgtcagtgtcctgaatgcaactgcaaagatacatggggtggctatgactgcacttgcagtggtgaccttttgtacatcagagagcatgacacctgcataagcaagacagcagttcaggctaaagcagcatgggctgcagtgtggggtatcttgatagttgttgctgttgtggcagcgggaagttatgttgtgtacaaatacagactaaggtcatacatggactctgagattagagctatcatggcgcagtatatgccacttgacaatcaaggagaggtcccaaatcatacacatgacgaagatcgttcataagtgtgcagatcattacgtggtgggcccatatggcctaatctgacaccaatgcagatcgtcgtgagctctacaaacagaagctacaggccaataatagcttgatttttagagtacaaaaatctgttatttgcctgatagtttatctggagcagtttcattttacatatgactgtaatttgtgagaatgtacatcttacgatttttgttgaccagtattcataggtttttagttagcaatgtgttgttggcccgttgctagtccttgtaatacaagcccacctgnnnnnnngcgcacggcaagacttaaactgacaacattttgtagtaccttttattttgtatcacctgctctatacacgagttttcttggaacatcggaaataataatgccctccagta

SEQ ID NO: 120148 - DNA, 303 bp, Zea mays
  unsure (1)..(303): unsure at all n locations
  Clone ID: MRT4577_41059C.1
caggggcgggcccnnnncacagcaaanananggcngggaagcagggncccnnncnggcnacagggancaacncagggccanncccncgagggaaaggcnggcnagaaacncngnaacaccagggggagaannacaggacngggggangganacnacaggganaagaanaacgggacgggacggaagggancaggggcagggncaaaaacccgnacaacanncgggggggaaganaananananncacaggagaaggancancncggggagagggcaacncngaaaannnncgggcaaggggaa

SEQ ID NO: 120149 - DNA, 432 bp, Zea mays
  Clone ID: MRT4577_4105C.1
cggacgcgtgggaaagaagaaactccgcatggctcagcaatctaactctcatgtacagcagtcaaaaattggatctggtgagggtgattgtgtcgctaccccagcacccccatccattgaagcttcacctgcacttcctgtcgattgcgatgatggtgagccttcactcaacttgaaatctgcatcattgtcatcttcagctggcagcaaggggctagatgagttacctcccgcatttaaagaagcaaatcaaaccgtggatggctcagaagctgttgcggccaagtcagatgctcctgaaattggttgtcaggtacctggttcctctccattacatgacaaaggtagcgaatcctcggggtcgccagtgaaagacactcctgaggctggaatcagattgccaggatcagataactcaactattgcattttt

SEQ ID NO: 120150 - DNA, 410 bp, Zea mays
  Clone ID: MRT4577_41060C.1
agcagtggtaacaacgcagagtactttttttttttttttttttttttttttttctttttttcttttttttttttttttttttttttttttttttttttttttttttttaggggacaagagcggttttatacaaaagttgttccgggggggttgaaacaactacacaagggtaatgggtgaggaaaaacagaaaccactatcccaccgaaagacccttccaaaaaaaaggggggggaagggtttttccctgaaaaggtgtgtgaccggaaatactgaaaatacatgggtttcttattaattaaggccttgagggagtattttttttctgggaaagctggaaatttgggggattttttttgggggttttttgttttctttttgggggggttaaaatttaatgcaaaatggaa

SEQ ID NO: 120151 - DNA, 645 bp, Zea mays
  Clone ID: MRT4577_41061C.1
tgccactaacggctcaaagactcgaaggagaaccaccttcaggagtcaggacaaaatgaggtgccgatcatccatttttctgacatgatcagttctagtttccaatataatacaggctcaatcctcacatgaatgagaaaaagctgcatatacctaaaagttttctatttccaaggataaaataagcacccaactctatgacaactcagtgtgaggtggaaaaaattgtcagtggtgagtatgtaaccaaacaaagctgtagtggcaaacagaacaaaattggctcagcttttccaggaattcctccctaccaggctgtcatttttctgcaactttaatctgcccgagttaacctatgagcatgagctgtgccaaagctgatgtgaaggatcagcgacgatccccagctggagaactccacttcgacaagtgtatggactacatagctgtatgccatgccagacttttcccctcttggtgagcatatgtgcaatcgcctgggagtgctgaccggctgaagttcatttcagctgaatattgcatcggaataaatactgacacggacagtatatcagctgaacatcacacatatgttccagaggatttccatattctcccctcaagagaaataactcgtgccgaatt

SEQ ID NO: 120152 - DNA, 446 bp, Zea mays
  Clone ID: MRT4577_41062C.1
ccggccgggccgggattttcgtccctgtggagtcgagtcttgcagtgttccaagccctatgggctgagctgtcagattgaggagtgagatcacgacgccgccacggccggagtcgaggagaaccaaagcgtcgcccgcgacatgggggcgaattcctcgctggggagaaccaccgccgtagaaccgcttgttcaccatgggcatggtaccctgtgccttcatcccgggtaggaaaccatccatgaagttcgccatcctctcttcatcacgtagaaccattcgtgttgtgatgacttagtctgtttgcggtgctagctgcttgtttagaatctcctgttccaaaacatttctggataggtttgattctgttggtggttatgtgctttaagtcatataataggtagttgtttagtttaaaaaaaaaaaaaaaaaaggcccctagggcc

SEQ ID NO: 120153 - DNA, 162 bp, Zea mays
  Clone ID: MRT4577_41063C.1
cacagatgcagatcagcaggtacagatcacagcaggtacagatcagcaggtacagagcacagatgcagatcagcaggtacagaggcacagaggcgtcaaatgatgtggaggcaacctgcggcaacaaagcagaggacactgttggattggaggctatcagct

SEQ ID NO: 120154 - DNA, 1333 bp, Zea mays
  Clone ID: MRT4577_41064C.1
ggccaggatacgcctgcttgcgaagcaccgctccgacatccgcgagctgatcggcgtgtcgggcgccatcccggcgctcgtgccgctgctgcggagcaccgaccccgtggcgcaggagagcgcggtcaccgcgctgctcaacctctcgctcgaggagcggaaccggtccgccatcacggccgccggcgccatcaagccgctcgtctacgcgctgcgcaccggcacggcgccggccaagcagaacgccgcgtgcgcgctgatcagcctctcgggcatcgaggagaaccgcgcaaccgtaggggcccccagcgccaaacccgcctctccccgcgcgttggccgattcattaatgcagctggcacgacaggtttcccgactggaaagcgggcagtgagcgcaacgcaattaataggagcgcgccgtcagcgccggcgccatcgtgccgctcgtgcacctcatcggcgagcgcggcagcgggacgtgcgagaaggccatggtggttctggggagcctcgcgggcatcgccgagggccgtgaagccgtggtggaggctggcgggatccccgccctggttgaggccatcgaggacggccctgccaaggagaaggagttcgccgtggtggcgctgctgcagatgtgctccgattccccgcataaccgtgcgcttcttgtacgcgagggcgccatcccaccgcttgtcgcgctatcgcagtctggctctgcccgtgccaagcacaaggctgagactttgcttggctacctgcgggagcagcgacaaggggttgcctgcagagctggagcagtggcagctactagcttggctaggtaaaaaggcaagagctatggtcgaaatctgctccatttattctctgtgagaggtgttgagagcagatcagcgacgccaggggggcgcatctgtaaataacagctggctctggttggtttggctatgtgtctatgtgaatacacatgtggtttgcgagaaaaaaaaaaaggttggttactaacgtaacgtcagttaagagtcttaagagggaggagggttcaggggtcccaggttatgctattagaagatttgggtggtaatgaagatgatgctggtttgtagctgtgtacagggtgctagggtatgcttgctttgtcttttcaggttatccggaatgttggatcgccaaccatgtgattttttttttttaaaaaaaaaaaaaaaaaaagggggccacagggtgctaggaactagcccgggtgtctttttgagattatcgggaatgttggatcgccaaccatgtgatttttttggttgaggttccgagtccaaattcctctgttcctt

SEQ ID NO: 120155 - DNA, 608 bp, Zea mays
  unsure (1)..(608): unsure at all n locations
  Clone ID: MRT4577_41065C.1
cgacccagcgtccttggncgcgtgggaggcgctctattgacatactgggggatgtgcacgctgccaagnagcgtgggaggccatatgtcattgtttttgttggggtgaatggagttggcaaatccaccaatcttgcaaaggttgcttattggcttcttcagcataacctcagtgttacacttgcagcatgtgacaccttcagatctggtgctgttgagcagctgagaactcatgcaaggaggcttcagaacctagcaagctgatccggtggtgggaggcatcccaaaccaagattctgaaaagtgagaggaggtgattcaatgaggtattgatttacactatttggaacattcggaaagaacggaacaaaaggatcttcaccggcgcgtttgaaacggcagcacaagtggcctctagagcgaaagaggacatcgagcaacaaagaagggccttaatttgggaaatgtagaatcataagtgttattttggttttttgcacctttgtgcttgccggaactctgtcccgatggtgtttttttttaatttaagcatgtacataaactcttccctattttaattgaaaggcagagctcctgccactgcgtttc

SEQ ID NO: 120156 - DNA, 1257 bp, Zea mays
  Clone ID: MRT4577_41066C.1
gccggccgggtcgggaaactcgcccgcccccatggtctcgctcgctggctcccagatcccctcgccttcgccggggcagagcccctgcgcggccgcgcgcccgcagcgccgccagggacactccatgcgcaccatccgctccgctctgctgcagccggactcctccccggggtccccgtccccgcgcgatggcggcgccgacgcgggcgactcggacattgagaacctcaccgactccgtcatcgacttccacctccgcgagctcgccgccaccgcggggcccgccggcgccatcaagccgctcgtctacgcgctgcgcaccggcacggcgccggccaagcagaacgccgcgtgcgcgctgctcagcctctcgggcatcgaggagaaccgcgccaccatcggcgcctgcggcgccatcgcgccgctcgtcgcgctgctctccgcgggctccacgcgcggcaagaaggacgcgctcaccacgctctaccgcctctgctccgcgcgcaggaacaaggagcgcgccgtcagcgccggcgccgtcgtgccgctcgtgcacctcatcggcgagcgcggcagcgggacgtgcgagaaggccatggtggttctggggagcctcgcgggcatcgccgagggccgtgaagccgtggtggaggctggcgggatccccgcccctggttgagggcatcgagggacggccctgccaaggagaaggagttcgccgtggtggcgctgctgcaggtgtgctccgattccccgcgtaaccgtgcgcttcttgtacgcgagggcgccatcccgcctctcgttgcgctatcgcagtccggctctgcccgtgccaagcacaaggctgagactttgcttggctacctgcgggagcagagacaagggtttggctgcagagctggagcagtggtagcaactagcttggccaggtaaagcaagaattatggtcgaaatctgatccattctctgtggaaattttgcgagcagatgtaaataacagcttattctggttagtttggctatgtgaatacacatgtggtttgcgagtgaggatgcttggttggttactaacgtagtgtcagttaagagtaaggcttaagatttgggtggtaatgacgataatgctggtttgtagctatgtacaggatgctagggtatgcttgctttgtcttgtcaagttatgggggaacgttggattgtcaatcagtgttttttttgctcaaaaaaaaaaataaaaataaagggcagccgatcgca

SEQ ID NO: 120157 - DNA, 325 bp, Zea mays
  Clone ID: MRT4577_41067C.1
gtcctgggtgactttggaagtccgtagtgtctcattgcagataatttttagcttagggcctggtggctaggtcggttctctcctttccagtcggagacctctgccgcaaacatgctccgccagatcatcggtcaggccaagaagcatccgagcttgatccccctctttgtatttattggaactggagctactggagcaacactgtatctcttgcgtctggcattgttcaatccagatgtttgttgggacagaaataacccagagccctggaacaaactgggtcccaatgatcaatacaagttctactcagtgaatgtggattaca

SEQ ID NO: 120158 - DNA, 451 bp, Zea mays
  Clone ID: MRT4577_41068C.1
cccgtcccaatttagataagcacgaaaacatccttttaatacagggggggggcgggttccctcccaaatccccccagcacatttaacacttaaagaaaaagcgcacacgtacacagggggggttcgggacacgttaaactgttaaaaataaaccggcccgtaaactagacaaggcacgcgggagtccgtgttttcgtttatagctaaaccccaaaaccaagccccgggggccttagttccttacacacaccaaaaccgggaagcgaaaacaccccggcgggggagagccaagcaaattttaaaaaaccatggccccggggtaattaattcaactcaagggcctggaaccccgcgaggggggcccctttccggcactgggtgggccccaacggtttgcacccctctttgataacccccgccccctgggggagcggcccaaaaaggggggtgg

SEQ ID NO: 120159 - DNA, 500 bp, Zea mays
  Clone ID: MRT4577_41069C.1
cgagcggccgcccgggcaggacacagagctatatgttttatttgtgtgatgttttcgtgtgttctatccttttttgtaggccgtcagctatccgttatggtaatcctatgtagcttccgaccttgtaattgtgtggttcttgttgttttccttctggcatgtgtcatatgagatcataccaagtgccttttgctgcatataaataagatataagcactgctatgcagtggttctgattttttcacccccccccgggggggaaaaaaaacccccaaaaaaaaagggggggggggcccctggggccccccccgggggggggggggggcccccccaaggggggtgccccccggggaaaccccccccaaaaaaaatttttctccctctttcccccccgcggaaacccccggggggggatttttaaaaatttcttaacccggggggggcgccgctctttgttttagggggccccccacccccctttggggggggttttatacccc

SEQ ID NO: 120160 - DNA, 999 bp, Zea mays
  Clone ID: MRT4577_4106C.1
cgacgcattgcactagctagaccttgggctcgcaaacctcacacacccttccgcttaacctgcagcccttcggtcatcatcagcactcagcagtagcataggcaccaaggtagcgacccccgacacaatgcagtacggcgcggcggcggcggagcaggcgtggtcgtacatgccggtggtggcaccgtcgtcggccgtggagacggcggcggagcgcgtggagcggctggcgtcggagagcgcggtggtggtgttcagcgtgagcacctgctgcatgtgccacgccgtgaagcgcctcttctgcggcatgggcgtgcacccgacggtgcacgagctggaccacgacccgcggggccgcgagctggagcgcgccctcgcctgcctcctcggcgcctccggagcctcggcggcgggcgcgccggtcgtgcccgtcgtgttcatcggcggcaggctggtcggcgccatggaccgcgtcatggccgcgcacatcaacggcaccctcgtgccgctgctcaaggacgccggcgcgctctggctgtgatctcatcgccggccgctagctactagccattgccgccgttgcagctgttcgatcggggggctagctgatagtaaggcaggttacttattaattaatacacccaaagtagtgagttattaatcatagagtgcgtgcgcttgtgtgtttgtgtgtgtgttagtgggtgtgagagagagaggtcggtgattctttttactgatgctgcctccgtcttgtgtgtgggagctagctagttagatcgtgcttgcatgcccacgcgcgtatgtacgagtgtgtgtgcactgctactgctactgctagctaggtttggtcggtgctagaagagatcgatcggtttagtgttcttctcttccatgcatcttattaatcagtttggcttggggttccggcccctcgtctttgtgttttctaatttgatatcctttaattttaataaaaaaaaaaaaaaaaaagtccac

SEQ ID NO: 120161 - DNA, 415 bp, Zea mays
  unsure (1)..(415): unsure at all n locations
  Clone ID: MRT4577_41070C.1
cacgggggtcgccgncggcaacnnnggcgaggaggagaggcagagccagcagaacaaccagnagagcgggaacnnccnngcgccccnncggaagaagaccgggcagaagcggagagccnggacgncaagagcaccangggggaagccanacagggggnngcnaaggangcgcnnnngngaagccngcgaggggcgggcggcgaggnnnnanngaannaaacccnngngaaggagannggncnggacgaaccnanangncggcccggcgcgacgaggggncagaaaggcggnaccacnanaaggaacccagcgcgacaaggacggcgggaaaggaccaananaaagggcggggcagacccgcggaaaaaaaaaaaaaaaaaaacaaaagaaaggggggcgcgccaggaggacgcaa

SEQ ID NO: 120162 - DNA, 320 bp, Zea mays
  Clone ID: MRT4577_41071C.1
aaaaaaaaaaaaaaaaaaaaaaaagaaaaaagccctttaccatttcagggtctggacgtaggcttactatttcttttcccgaatccatcctggcctacagagacaccacggtgattgattgtttaatcccggctctgttgccttcagattcaggttctggaagcatgaggttatggtctccctttctcttgcctctgctctgtctacctgggcgggtggggtcagaggattactcggatgcacctgtcattgttcgaggctctgagacgattgcttcgaccagtgatgagtttgtttgcgcctcctttgcttggggtcct

SEQ ID NO: 120163 - DNA, 908 bp, Zea mays
  unsure (1)..(908): unsure at all n locations
  Clone ID: MRT4577_41072C.1
atgtgaacgcaatgctgtttctcattaataaaaatgcttacaaactctccaattacattagatcgacgtaaattcctcaaatcaatancaagcctctgaggatctttgtgtttccccagtattaatccattgaacatgaccagaaatgaacccggcgtatgaatttcttcagatgagagagacaataaatcctccacgcctagactataacacagatatatcagtgggccttcctcttggtctgttgtgacatgagaaagcaaagctaaattttttgtcaatccacaagcttctccttcaggagtatcacatgggcagagcataccccactgactaggctgcaaagcacgtggaccacttgttttacgagtcttctcaaattggggtgttatccgcgtcatatagcctaaagatgccatgtaggatagcctcgaaagaacctgagatacacctttcctatgcatcctaaaacgtttaatatcccaatttcctgtggaaatagccctttccagaccaaaggtaatggaatcttgcattatcaactggctaaaatccaaaggactagagtgagtcttgtcactatttttattcatgcgctcaacagcttgggaattcattgttttgaataggtcctcaaaaagaagggatattagttggccagacaactcaaatctcttgtttccaacataatccttatcatcaaaggtgtcagaatttacgattgcgtccatcatgcgccttaacattaaggcagtgtatatacactttggtcgtaggttcccatttttaaccggcacatgggcaataaacacatcacggaggattgagtttgaccggccttccttctgatttgtggcaccaggatacgtcaccttctcgtccatgtactgcaaggctcgcagagcgtg

SEQ ID NO: 120164 - DNA, 244 bp, Zea mays
  Clone ID: MRT4577_41073C.1
agcaaaaggaattttaaatacctttatttttgaccattcacaagggtttgttttgaacattcccacccggcacgttttgaacattttcctcctaaaaaacgttggccccctacgacccttaaagacaacaaatcattccctgtttttacacccaaacgagggctttcaggcaacattttccatttgtttgtaaacccaacatggtatcggggttcccctggtttagaggattttgcactttttt

SEQ ID NO: 120165 - DNA, 452 bp, Zea mays
  Clone ID: MRT4577_41074C.1
acaagctttttttttttttttttttttttttttttattttttttttttttttttggggtttttttttttttgggggggtctttccttgggggcccccccccgggggcccccagggaggaagcagcgggggggggaccccccggggggggaacccccccagggggggggccccaccaaagggggcccggacaccaaaacagcccgggcgggggccgcgctaaagggggggcccccgaaaaaaaagggccccgggcaaaatggcccccccccaacgggccccccgccaaggggggaaggccgggggggcccaacgcggggggggacaaagagggggggggaaggggccaattcccgtttgccccccggcaaacctgccgggccgggggctttaggggcccggcccgctaccggggaaagccagggcgggaaaagggcgctccccaaaatggggg

SEQ ID NO: 120166 - DNA, 402 bp, Zea mays
  Clone ID: MRT4577_41075C.1
agccttccgggaccgcaatttcaatttcaatcttaacttaagggtctgcctggaactggcacacacagaacagcctggggaccattaaaccaccccttaacgaaaaacccatccccgaccaagccaaaaaaaatccccccgtttttccgggaacaaaccacttgacccggtggcagcgaatacagcggagcttcttctgtggccggccgcctacgacgcggacgacgaccacaccacattcctgccgccggcgtttccgttctttcatacgcggccaggcggggtcttcacggggccgttcccctggtcgccgccgccgtcgtccgtggcggagcttccccaggatacaccgttcttgacttcagggcatgcgcggtgccacagctgccgctgcacgctgtg

SEQ ID NO: 120167 - DNA, 242 bp, Zea mays
  Clone ID: MRT4577_41076C.1
gctcgttgtgcttggggaggagaaaacgaaaagactataaagggctgggtctgacgaagattgcgttcacggcagtgtgagtccgcgagctggcgcgcagcgacccgtgcaaacaagctccactgtggccttctgcgctcgaccgctgtctcagtcggacacggcactgctatcacacaacagcctctcgccagtgtcgggcaagacagtgtctgctgtcagggtctgacacctggtcttga

SEQ ID NO: 120168 - DNA, 2262 bp, Zea mays
  Clone ID: MRT4577_41077C.1
cattgggtacctcgaggccggccgctatccccgtgtcctccaggtccaactccacccaaccccaccccgtcccgtgatcgtttgcccgtccctatcgttctctctcccccccttttttcctgcgaccaatccgcgcgctttagtttttgttcctgctcctcgcaccgcgcgccgccgacgccgcagccatgaacggtgacggcagcaaggaggacgccaacaggcgcctcgagtgggccaccttgaacctggagcgcggcgtcgtcgtgagcgagacgacgaagggcgacggcaatggcaatgcaggccggaaggcgccgataagcatcgtccggctcttcttggcctgcatggtctccggcggcatccagtacggctgggcgctgcagctctccctcctctcgccctactctcagactcttgggatctcgcacagctacgtgtctctgacatggatctgcgggcctatcgccggatttgtggtgcaacccatcgtgggctactacagcgaccggtgcacctcgaagatgggccggaggaggcccttcatcctcgcgggatgcatcatcatctgcctctctgtgttggtgatcgggttctcggcggacatcgggcggcgcctcggcgacaccaaggagcactgcagcacgttcaccggctcccgctggtccgccgccgccgtctacattgtcggattttggttccttgacttcgccaacaacacggtacagggaccggctcgcgcgatgatggccgacctggcagctggacagcacggccccaacgttggccaggcgatcttctccctgtggatggccctcggcagcgtgctcggatacttgtccggcgccaacgcgaaatggcacgactggctcccttggctcaaaaccgcggcgtgctgcgatgcgtgcgccaacctcaagggcgccttcttgactgcggtggtcctcattataatcagcatgtctgtcaccttgtggctcgccggcgaggagcggctcgacaaggaaagcgtcgacacctccggcggcgcgtgctccgcgttcatggatctcttcaagaccctcaagaagcttccgcctgccatgttcagcgtgctcgccgtcacggccgtcacatggctctcgtggttccccttcttccagtacaacaccgactggatgggccgggagatcttccacggcgagccgcagggcgcgggcggaaaggcggacctgtacgaagccggcgtccgcgagggcgccatcggcctcctattctgctccgtcgcgctcggtgtcacctccttcttcatccccaggctgtgccggaagctcacgtcccgggtcgtctggtccgtcagcagcctgatggtgttcgtcctcatgacggccatggtcgtcctcggcatggtctccatgaagggctacaggccctcgctcgccgcctccctctctggccccgaccactcgttcaagggcggcgccctcgccatcttcgcgctcatcggcatccctcaggccgtgctctacagcgtgccttgggccgtggcgtctgaggttgccaccgaggacggcggtggtcaaggtctcaccattggcgtcctcaacattgcaatcgtccttccacagctggtgatcgcgctgggcgcaggccccatcgacggcgccttcaacaaaggaaacaccccggccttcggcatcggcgccgccttcgcccttatctgcgcggtcctggcgctcatcctcctcccaaagacgagaggcgtctccaacgccaccgtcatggccggcgggcactgatctattatctatctccaggcaggcttgtcgcagcggctgaccggctgagagtagatcagaaattcagaatctgcttcttggtttcagccccacccgattaaggaggtgtttgattcatccggagtccgggttttagatgccgattaagactataattataaagctaattgataagccatggttaattcgcgagacgattgtattaagtctaattagttcataattagcacatttttagtatcgcaaaatatgagcaaatcatgtattaatagattcgtctcgcgaattatacaattagttttataattagcatgtgtttagtcgtcctaattggtatccaaactaattggtatccaaaacaccccataaacgaatctacagttaagggacaaagtaaacgctgatttaagcaaggaaggctgggtttggtttctacttaaaaaaaaaaaaaattaaaaaaaaaaataaaaaaaaagggtgg

SEQ ID NO: 120169 - DNA, 347 bp, Zea mays
  Clone ID: MRT4577_41078C.1
cgggagaaccaagtctcgctataagacataaaagcggggtcccgcaggatattgttggaatcgagacagtcagggagatattgatgagttttggggttgcctatggcctccaaactaatttgcaaaaaagtttcttcttgccaattcggtatgatgaagaaatggtggagttggctgtgcaaacattggggtgtgccactaaaagtattcctacaacttattttggtcttacttttgagtataaaagacttaatgctggagatcttctactatggattcagaagactgctgataggcttacatggtggaaaactaatctcttaaacctttctaaagaataactttga

SEQ ID NO: 120170 - DNA, 236 bp, Zea mays
  Clone ID: MRT4577_41079C.1
tgatgtattaggtctactgatagcacctagtatagatggccaaacgggccggcacgccgatcccggcatcgcccgacggcggcatggcccgccaggcccggctagcgaagttgccgtgcccagataggccggcgtgccgctgccgcggcccaggcacggcccgtgagcctgttagtcgtgccgggccggcccggtggcactatggcccatctgagtatattgtagaatttagcaaa

SEQ ID NO: 120171 - DNA, 107 bp, Zea mays
  Clone ID: MRT4577_4107C.1
cccacttcgtcggtggagatctacaacgtaggggactgtttgaagaccctggtcatggtgtacttgtaccatactgctctgtcctctcatgtcactatattgattca

SEQ ID NO: 120172 - DNA, 669 bp, Zea mays
  Clone ID: MRT4577_41080C.1
ttcgaaaaaatggatcctgaagaacattatttccctataaacactaacatcttctcctcctcaaaatgtccttccctctgaagcggtaactcacctcgctctctccattccggttgtctcaagcctcatgacttatgctgccttggctggtcatcttgccgagaagcctggtcgctcgttcgatgtggggtgcatcttgactgcgacggccgcattcagtgccaacgatgggctagttgatgagctcaatagccgcccagcactcatccaccagtcacgcccatccggtcgaagacagatggtcgcgctcgtttgccctggaggatctgaatgccgccaagctcaacagacccatcacggcagaggacgatggcatcgtgcccgctggcgaggggagaccacacgggccgggagataaaagcattagacaaatcaccgtgcccaccgaaacccatgctgaccatcaagtctcgatgcacaaagaccccgggaacatccgaggagcatcgggcaaaatggacattgcccgcgcccagagctcccagcgtggcgctcagtctacctccatcgacactaaggccgtccaagctcaagcctccgtaaaccaccaagagaaaacgggttaaaaaaggcgcgtctttctcaaaaaacaaaacaaacagaactcct

SEQ ID NO: 120173 - DNA, 632 bp, Zea mays
  Clone ID: MRT4577_41081C.1
gttcaagtggacaactcttctgatcccccccaccactgtgcttgtgattaacctggttggtatagtggctggagtgtcgtatgctatcaacagtggctaccaatcatggggtccactattcgggaagctgttctttgcaatctgggtgatcctccacctctaccctttcctgaagggtctcatggggaagcagaaccgcacaccgaccatcgtcatcgtttggtccgtccttcttgcttccatattctcgctgctgtgggtgaagatcgaccccttcatatcccctacccagaaggctctttcccgtgggcagtgtggtgtaaactgctgaaatgatccgaactgcctgctgaataacattgctccggcacaatcatgatctaccccttcgtgtaaataccagaggttaggcaagacttttcttggtaggtggcgaagatgtgtcgtttaagttcactctactgcatgttaactgtcgtgactacctgttcaccgtgggctcatggactgtcatgatgtaatctgtatgttggaacttccaagtactgattgagctgtttggtcaatgacattaagggtttctctctcttgaaatttaaaaaaaattaaaaaaaaaaaaaaaggcggccgct

SEQ ID NO: 120174 - DNA, 457 bp, Zea mays
  unsure (1)..(457): unsure at all n locations
  Clone ID: MRT4577_41082C.1
caccacggactagcctgctagaaccacaaggcgggggcaccagcacacggggagcagaggcagagcagcacacgccacatcaagcgtgccctgcacacaacagaccacccaaccatccaacggcagacgaccgcagcaggaacggccaccacacgacaccggccccagacagagacgcggggggcgaccgccccaaaggccgacgaccagcacgccgaccaccccccggacgaggtgacgagccgtggcacccggccggcctcggccgccacggccgcggcgtccagcaacacgacgncaaggagaagttcgaggaggncgacacggnctcacgcgccggcgccaaccaccaccaccaccatggncaccaccgngggcaccggctngnggggcgcgagaccaggggncgaggaggacancaacaccnggaccggcgaggnccacnagcgcagggaga

SEQ ID NO: 120175 - DNA, 151 bp, Zea mays
  Clone ID: MRT4577_41084C.1
aaatgatgattgtttattgttaaggcaggtttactgtcgtagcattgtcctgttcgggagtgctgcgcattagtgcagcactgctctggttgctaaggctttgattgggattgctttgctctatatgtacactgcttcccaggaacacaac

SEQ ID NO: 120176 - DNA, 317 bp, Zea mays
  Clone ID: MRT4577_41085C.1
cgcgcgtgcaagcaacagccatgagaagtgcgaatcgccgctactcctccgccatgctgcagacaaaaatacgccagagagagcctccatgtcattcacgctcaaagtgtataagccgcggtggagaacgaaccgtatctcattctcagtcagtgaactcaccgcggcggcgatcggcggcacgaatgtggcggcgctggaggacttggagctggggttggggccttcacattagcccccgcgatgcgcgcgcgtgcaaccaacagccatgagaaatccaacaagaacaagaagaagaggaaaatggaaggaaacaa

SEQ ID NO: 120177 - DNA, 434 bp, Zea mays
  Clone ID: MRT4577_41086C.1
gttctttttttttgtttgttttgttatttttttttgatttcgttatgcttccttaaatcttgtatgattgcatcaacagctacaaattgagcacagcgatcttttttttttttttttatgtctctcttttttgtacttttttttttttggccggcggtggtcagcgtcctgttttgtctgttagtttcttgtgtttgtgttatttatttttattttacgattctgttagttgtggttctgggtttattggggtagtttcgttcttctcttgtggttgtttttattttttgctttttttttatatactaaacccgcatttttcctgctgtacagtaatccttaggaatgtttggggactttcccactcttacaatttgttgaatatcccttcatttttctttaccaaggacttggcttttacttttttcttggtt

SEQ ID NO: 120178 - DNA, 548 bp, Zea mays
  unsure (1)..(548): unsure at all n locations
  Clone ID: MRT4577_41087C.1
ccccctcgngagtcgcacccacgccgtccggttggtgggtgactccactctgggacagctaacggtggggggttctttgcacctttggtgctactctggctgatgcgtattcgagacgcagccggcttatccgaacactctcgcaaggtcacaataggcgactgtgtctcataagcgtggcgagcacaccactacagtgttaccggtgtctcactacgaccgcaaggtgtgaagaaccaagacctctctgcgcgggacacaagctcttcatgctacgccccgaaaaggagtgtgccctgctatgcgctctcctctggctcggctcctcagtgcgcggtcaacatatcggccaccccctgccttctgctgacggacagtgtcaccggtgactacatccacgactacacggaccatctcattcatgccttcatacacggtcctcccagacggcatatacgggcaagtcttgatgatcacatacatggcggggggggtgaaccgttacatacacatctttgatccctaaagccgaatcaaggaggcgctca

SEQ ID NO: 120179 - DNA, 258 bp, Zea mays
  Clone ID: MRT4577_41088C.1
cggacacgggggagcggtgcgccagcacctgccagcactgcgagcaggtggaggagggcggcccccgccgctaccgctgcctcgacacgcaccgcggcgacccggggccaaggtgcggcgacggcgaggacgatggtggggagtggtcgtcgacgccgaggcgtgcgaggggccaccgcgtctagcgagctatgctatgcgaggcatagacagcggggactggtttgtagcgggcaagatggaggtacgtacgtgtct

SEQ ID NO: 120180 - DNA, 213 bp, Zea mays
  unsure (1)..(213): unsure at all n locations
  Clone ID: MRT4577_41089C.1
ttaaataccaagcncaaatggaaagatcaaagtactactaacacacccaancnncccnannccgtgaaaagtacccacacacgatgacacccaaccaaatggcgcaacatatctcccactacccgggaaaaacaaaaaaaaaccccctaaaaccccacacattcaaacaatgccacaagtgtacaatcaaacaccactaaaaaccaccaaaaa

SEQ ID NO: 120181 - DNA, 327 bp, Zea mays
  Clone ID: MRT4577_4108C.1
tttttttttttttttttttttggtttggaaacagtcccaaaaaaacctttaacttcgccgccccaaaagaagagttctaaactagaaccccagttaaaagcaggggactttaaacaaaccctaggaagcaacagggtacatcggaattggccgaaccaaagagggaagctctaaacaaggacgctaacaaaaaaaactcgggaagctacggcctccaaaaggggaaagagcccagggccaagctataaacaacaggaagcagctgctggctactgcctcaaccccgggccaaactccaaactccgttaccgaaaattaggcacccgc

SEQ ID NO: 120182 - DNA, 173 bp, Zea mays
  Clone ID: MRT4577_41090C.1
tttggttttttttttaaaatccatgggggcgacaaaacctccaccgtagactgactggctccaaacataatgcgcgctagcattgatcttatataatcgaaacaaacgtgggttcaagtggacggcaagaactaataaatcatcggcctgaacgtacaggaaacggaggccca

SEQ ID NO: 120183 - DNA, 725 bp, Zea mays
  unsure (1)..(725): unsure at all n locations
  Clone ID: MRT4577_41091C.1
gcaatggnatctacccaaataaagtcctccaaaatttcaaaagggtgtattacgtacaaactgtatagattgtttggatcgcacaaatgttgctcaatatgcctatggcctagctgctttaggataccagttacatgcacttggttctgtagaatctccagaagttcatttagactcccctttgtctcggcatttgatgcatttttatgaacggatgggtgacacacttgctttacagtatggtggttcggctgctcacaataagatattctctgcgaaaagagggcacttgaagttcgccattcaatctcaagagttctttaggactctgcaacggtactacagtaatgcatatatggatgcttacaaacaagctgcgataaacttatttctaggatacttccaaccgcaggtgggaaaacctgcactttgggagccagaatctggtgacgagcatgtgcttgatgacgagacaagtaaattgatgaagagggcaagatcagatggcagcattcttaataaaagcaaaccatcaatatccagtaatggcccaaatggaattttaaacttagcatttactggttcaaaaaatgaagggcagcatccaaaccggagttctgatacagccctctgacaatggcatgtcaaagtcaaggtatactccgacactgtctcacattaagcatantagctgtgaactagactattacaatggtttctggtga

SEQ ID NO: 120184 - DNA, 1853 bp, Zea mays
  Clone ID: MRT4577_41092C.1
cggactcgtgggcggacgcgtgggtgcgatatgtgggaaggatattatgctgacgctgattgctagacgctccaggcattatgctggcaccaggtatctaaagaggggtgtgaatgaggagggcagagtagcaaatgatgttgagactgagcaaattgtttatgaaaacatgcttggaccatggcaaataagctctgttgtgcagaacaggcgtccgcgattccactattctggtcccaggagacatcaaagctgaatcttaagcctgatatcatattgcatgaaaaggacaaaaattatgaggctaccaggcttcattttgaaaatcttaggaaaagatatggaaatcctatcatcatcttaaacttgattaagacacgtgagaagagaccacgtgaaatcatactccgttgggaatttgacagagcaataaagattattaatagtggtctaccaggtgaagatcatttaagatatttacattgggatcttcataagaactctcaaagcaaaagtacaaatgcccttcaagtgcttttgaaagtggcatttgaagctttgaacttgacagaattcttttattgtcaagtttccccagatcaaagggcaaagggctcccctaatttaagccctacattgaaaattggttttggtcatcatgcgtgtgatgacaaaaattgtggcaatgcagattatgttgatgatcttgatgacatttcccaagaagatacctgtggtagttctgatcctggcaatggaattgcggaagataaatctgaggtcaatggatctgctcaaataaagcctccaaaatttcaaaagggtgtcttacgtacaaactgtatagattgtttggatcgcacaaatgttgctcaatatgcctatggcctagctgctttaggacaccagttacatgcacttggttctgtagaatctccagaagttcatttagactctcctttgtctcgacatttgatgcatttttatgaacgcatgggtgacacacttgctttacagtatggtggttcggctgctcacaataagatattctctgcgaaaagagggcacttgaagtttgccattcaatctcaagagttctttaggacactgcaacggtactacagtaatgcatatatggatgcttacaaacaagctgcgataaacttatttttaggatacttccagccacaggtgggaaaacctgcactttgggagccagaatctggtgatgagcatgtacttgatgacgagacatgtaaattgatgaagagggcaagatcagatggcagcattcttaataaaagcaaaccatcaatatccagtaatggcccaaatggtgcaacggtactacagtaatgcctatatggatgcttacaaacaagcagcgataaacttatttctaggatacttccaaccgcaggtgggaaaacctgcactttgggagccagaatctggtgacgagcatgtacttgatgacgagacaagtaaattgatgaagagggcaagatcagatggcagcattcttaataaaagcaaactatcaatgtccagtaatggcccaaatggagttttaaactcagcacttactggttcaaaaaatgaagggcaacatccaaactggagttctgattcagtgcatgggatgtcttcagcctctgacaattccatgtcaaagtcaaggtatactccgacagtgtctcacattaagcatataagctgtgaactagactattacaatggttctggtgattcaaatttcctggatcttgactggctttcagcttcagacaatgaaaggttgttcatgctgttcttttccttttgtggtctatcaggcgtcctgttttttgtgc

SEQ ID NO: 120185 - DNA, 753 bp, Zea mays
  Clone ID: MRT4577_41093C.1
ccggccgggcctctgccccgggtttccagggaaacccacccccagatccaaatccagcgaagcgacagagatcaaggatggagctggaggtgggtgcgccttcgccggcgaggtacctggtgggggcagcgatcatgatggccggcgtggtgctcccgctggcgtacatgatcttccgcagcaagcgttcgccttcctccgcctccgccgcggggccctcctccttctccaagcagacgtaggaacaaagggctcatctgatctgagcgagtgggtgaatcgatcgccttcccctgatgcttgtcattctgtctgttttggcaccgcgagatcctccaactgcttctcgagactgggcatcatcacgtcaaatactagctgattagtagagctgacacatacattgttgctaagtgcattagtttgttatctgataatccacacctccagatgtgccctgtatgtttgtgttcttataagttggctcctattgaattgtctgtgttcctgcacatgaaggtagtaaacaaatcagtgtgctgccccagaaaagtcagatggatcgattgtttttgtggctacatgaagggcttgcggtttgccttgtggcttgtgatcaagatggtaattctcatggaggctactgggtattcaggggctacccttcctcagtattgaatcaaaccccgatatttaagactgtcccttctgaaagtgacgtgacatgctcgagcgctggagcgcgtcgacatc

SEQ ID NO: 120186 - DNA, 487 bp, Zea mays
  unsure (1)..(487): unsure at all n locations
  Clone ID: MRT4577_41094C.1
ggatggagctggaggtgggtgcgccttcgccggcgaggtacctggtgggggcagcgatcatgatggccggcgtggtgctcccgctggcgtacatgatcttccgcagcaagcgttcgccgtcctccgcctccgccgcggggccctcctccttctccaagcagacgtaggaacaaagggctcatctgatctgagcgagtgggtgaatcgatcgtcttcccctgatgcttgtcattctgtctgttttggcaccgcgagatcctccaactgcttctcgagactgggcatcatcacgtcaaatactagctgattagtatttacctaaacaagccacttgccctcttctgctgcttggctggtttattacgataactgtgcagaatttctctctatgctagttctccctcaattccaaaatgagctgacacatacattgttgctaagtgcattagtttgttatctgataatccacacctncagatgtgcccct

SEQ ID NO: 120187 - DNA, 761 bp, Zea mays
  Clone ID: MRT4577_41095C.1
ccggccggctctgccttcctccctccatgagatggaggtaccggcgacgcaccagatctgcgcgctcgttactaacggatccgtgatgcgcctttgatgcaggaacaaagggctcatctgatctgagcgagagctgacacatacattgttgctaagtgcattagtttgttatctgataatccacacctccagatgtgccctgtatgtttgtgttccttataagttggctcctattgaattgtctgtgttcctgcacatgaaggtagtaaacaaatcagtgtgctgccccagaaaagtcagatggatcgattgtttttgtggctacatgaagggcttgcggcttgccttgtggcttgtgatcaagatggtaattctcatggaggctactgggtattcagggcctacccttcctcagtattgaatcaaaccccgatatttaagactgtcccttctgaagttgacgtgacatgctcgagcgctggagcgcgtcgacatcaccggtttctaccctgagtgtgtcctattaaagtgagaagtgcctgctggacctagcatgatgtatgtgtccttgagtcttgagaccgcaacatatcaacatcactcgaagaggctgggcacctactgatcagtgatcacataacacagatggagagaaatatatgtgttcctgttttttattttgtattctagtaaaaaaatactagcttctacagtttccatcatcaaacgcttatcccactgaaaaaaaaaaaaaagcggcc

SEQ ID NO: 120188 - DNA, 830 bp, Zea mays
  Clone ID: MRT4577_41096C.1
cgggcgctcgagccggcctggccgcaacataaccacaaccacagccagcaagatctagtcaaagaaacacatcaatccagagcgtccaccagagtcactaacttgtccagccgcagcaatggcggtgcggtggccatcgcccgccgtggccgcgttgtggatcggcgcgagcctcctagtcctgtgcacgctcatggcgtcgtcggcgtcagcccaggcgccgccgccacaggtgcgtaaggtgcccaagggcagcaacctggtggtgatcaagccgggggtcgggaagcgcaacagcaagttcacctgcaccgacaccaagaagaagcggcccgggtgcgaggccacctgccccagccgctgccccaaagagtgcctcgtcctctgcccatcctgcatgaccttctgcctgtgtgacttctacgcgggggcgtcgtgcggcgacccgcgcttcaccggcggcgacggcaacaacttctacttccacggcaagaagaaccaggacttctgcatcctctccgacgacgacctccacatcaacgcgcacttcatcggcaaccacaaccccgcgacgagccgcgacttcacctggatccaggccgtgggtgtcatgttcgcccaccaccgcctccacctcggcgcggtccgctccgcccactgggactccgccgtcgaccacctcgacctcgccttcgacgacgagcgcatcgaccttgctcccgccgacggcgcacgctggtcctccgcgtccgtgcccgggctctccatcacccgcacggcgcaggctaacaacgtcgtcgtcgagctcaaaggggtgttccggatcgtgg

SEQ ID NO: 120189 - DNA, 1021 bp, Zea mays
  Clone ID: MRT4577_41097C.1
ggggtcttgagggaagagagactggatcatcctgcaggatggaagaggcaataaatacatgcaaagaagaaaaaacagagaatcccggccgggagtaaaacaactcaagcctcgcccggtcgcccctccctccctccctctgccccgggtttccagggaaacccacccccagatccaaatccagcgaagcgacagagatcaaggatggagctggaggtgggtgcgccttcgccggcgaggtacctggtgggggcagcgatcatgatggccggcgtggtgctcccgctggcgtacatgatcttccgcagcaagcgttcgccgtcctccgcctccgccgcggggccctcctccttctccaagcagacgtaggaacaaagggctcatctgatctgagcgagtgggtgaatcgatcgccttcccctgatgcttgtcattctgtctgttttggcaccgcgagatcctccaactgcttctcgagactgggcatcatcacgtcaaatactagctgattagtagtcagttccttttgtaccttgtgtagatcagatcgattgcttgtttggctgatttgatacaattataaacaatgggtttacttttgagtgcactacttacaagcatcattcatacggatttcagtttacctaaacaagccacttgccctcttctgctgcttggctggtttattacgataactgtgcagaatttctctctatgctagttctccctcaattccaaaatgtaagttgttttagttttgtctgagttaagcttctctaagactaagtttatagaacatcaaattggtttcgctgagaccaccaggaaatatgtcttgccacttgccagtgcatttatttggtattgtagacgttaatatattttctatagacttcatcagaattagagaattttgacttaggacatgaaaacggcctatgttttggaaacatagggaatactatgtttgtggtttaataagagcacacttggtgtggcattcatccttttgcatcatcag

SEQ ID NO: 120190 - DNA, 831 bp, Zea mays
  Clone ID: MRT4577_41098C.1
cgctcgagccggcccggccgcacaacacaacgacgacgacagccatcaagagctagccaaagaaacacaccaatcaatccagcatccaacaagtaactagcttgtcgagccgcagctaacaatggcggtgcggtggccgtcgaccgccgtggccgcgtttgtgatcggcgcgagcctcctggtgctttgcatgctcatggcgccgtcggcgtcggcccagcagcacaaggtggtgcccaaggtgcccaagggcagcagcgtggtggtgatcaggccgcagtttgggaagcgcaacagccagttcacctgcaccgacaccaagaagaagcgccccggttgccaggccacctgccccaaccgctgcccaaaagagtgcctcgtcctctgccccacctgcatgaccttctgcctgtgtgacttctacgcgggcgtgtcgtgcggcgacccgcgcttcaccggcggcgacggtaacaacttctacttccacggcaagaagaaccaggacttctgcatcctctccgacgacgacctccacatcaacgcgcacttcatcggcaaccacaaccccgccacgagccgcgacttcacctggatccaggccgtgggcgtcctcttcgcccaccaccgcctccacctcggcgccgtccgctctgcccgctgggactccgccgtcgaccacctcgacctcgccttcgacgacgagcgcatcgaccttgctcccgccgacggcgcacgctggtcctccgcctccgtgcccgggctctccatcacccgcacggcgcaggccaacaacgtcgtcgtcgagctcaaaggggtgttccgcatcgtggc

SEQ ID NO: 120191 - DNA, 287 bp, Zea mays
  Clone ID: MRT4577_41099C.1
cggctcgaggctggcaaaaggccctctggaaaagatgctcctggacaagttgcacactcagcaggctctcctctactgcgctctaatgaaacaccccctgaaaaaggtggcgaatttgatgcttgccgacttttatgtgtgcagcaatagcagatgctctagcttacccccaagtgtctatcgtttttgcctgccctattgcatgaaggtcaccaaccccattagttcatggcaacttatccttttgagacattgtgtccagagcctctcatttatgctttgtctat

SEQ ID NO: 120192 - DNA, 2183 bp, Zea mays
  Clone ID: MRT4577_4109C.1
atatctattggctcgcttttattccagaaaaatggtttacagaaagcgagagaagtccgtctgctggttgcaaccgagcaggatgctgtcattgcccagaacggcggcggcggtgactgtgtatgcgctggtcgctcttatcgccggcgccggcgccgtcgccgccgcggcgggaggtggcgagcagccgctgtcgaggatcgccatccaccgcgccaccgttgcgccccagccgggtgccttcgtcgacgcttcgcctgcccttctcggccgggagggggaggacagagaatgggtgaccgtcacatatagtaaccccaggccctcgaaggatgactggattggagtcttctcccctgctaatttcaacgattccatttgtccaccagagaatgaatgggtggagccccctcttttatgcacagctcctatcaagttccaatttgcaaactacacgaatcgtgattatggaaacactggaaagggatcgttgaggcttcagctgataaatcagagagagggtttctcttttgcattgttctctggaggcctgtcgaatccgaagctcatcgcccactcaaagagtgttactttcatcaacccaaagactccggtgtacccgcggttagcacaaggaaaatcctggaacgaaatgatagtgacatggacaagtggctatggtaccaatgaggctacaccatttgtcagatggggcatagaagggcaaatccaaaccctttctcctgcaggcacccttactttcagtcgcgacaccatgtgtggtcctcctgcaaggacagttggttggcgtgatcctggtttcatacacacaagttttctcaaggacttatggcccaatctcttgtacacataccaagttggtcatcgcatttttaatggttctatagtttggggacatcagtatagcttcaaagcacctccttatcctggggaagactctttgcaacgtgttgtaattttgggggatatgggcaaggctgaggttgatggttcaaatgagttcaatgactttgagcctggttcacttaacacaacaaaccagctaattaaagacttgaagaacattgatgtagttttccatattggagacatcacatatgccaatggctatctttcacaatgggaccaattcaccgcacaggttgagcccattgcttctactgtgccttacatggttgggagtggtaaccacgaaagagattggcctggatcaggatctttctatgcaaatcttgactcaggtggtgaatgcggggtaccagctcagaatatgttctacgtgccagcagaaaaccgtgagcagttctggtactcaacggactacggaatgttccgtttctgcgtagccaataccgagttggactggaggccaggaacggagcagtacaggttcatcgagcactgcctgtcatctgttgatcggcagaaacagccatggctcatcttcctcgcgcaccgtgtcctgggttactcgtcggccaccttctacgccgacgaaggaacgaccgaggagcccatgggccgcgagagccttcagccactctggcagaagtacaaggtcgacatcgctatgtacggccacgtccacggctacgaacggacctgcccagtatatgagaacgcgtgcgtggccaaggggtccgacctctacgccggcgccttcacggcgacgacgcacgtcgtggtgggcggcggcggcgccagcctcgccgactacacggccgcgcgggcgcgatggagccacgtgcgggaccgcgactttgggttcgtgaagctgacggcgttcaaccacacgaggctgctgttggagtacaagaagagccgggatggcagcgtgcacgaccacttcaccatctcccgcgactaccgcgacgttctggcctgcggcgtcgacaactgccccagcaccaccctggcgtcgtgagcgagcggtggtgtcgattatattcggtttgtgtcgctgttggattttgatttcaagatcgatgcactgtgctgtactgttgtggactgaatgaaatacctgagtgaggaagcagctgctggtgcagcaggtctacatgctgcttcggattgtccccacggccaaaaatgatcacacccctgaattctttgcttaaaaaaaaaaaaaaaaaaagaaaaaaaaaaaaaaaaaagcggcc

SEQ ID NO: 120193 - DNA, 171 bp, Zea mays
  Clone ID: MRT4577_410C.1
gcgtaaattaatatctcaaccacataatctctttccttaaaacaaaaatgacatatgtgagtgctggagaaatcactccaagatcatcaactactgcgctttcttgtcaattataggtttaggagtacacactacacacttaataactatacgatggtcgctcaaatattt

SEQ ID NO: 120194 - DNA, 383 bp, Zea mays
  Clone ID: MRT4577_41100C.1
cccacgcgtgcgcagacacgtgcgtcaacacgattgttcagaagggaactatgaggcgggcctacgaggcagacataccgactaatatgactctattggacggcatcttatcgaactaacgaactaacgcggactactacgcaatccgaacagagcttacgacagctacctaggatacagatcgagatgaatacgatcctcttcgacttcactgtatgaatgggcgactgggtcagcacactattgggatgaccaaaggccggaatcaacggcgcctcaactacttccgagtattactactacgctaccgatagcactggcgctaaagcatcctttggcaccaccgtactaacggacttcaccatgaactgtgcactatgaat

SEQ ID NO: 120195 - DNA, 111 bp, Zea mays
  Clone ID: MRT4577_41101C.1
cttttgttcttagcaagacaggaaatgtctagacatatatattgagaaaaggtgtgtgaacaatgtgtgcgctctgttactgctgatgagtctaaggacctgttcggaaaa

SEQ ID NO: 120196 - DNA, 444 bp, Zea mays
  Clone ID: MRT4577_41102C.1
ggatacgaaacaactcgcactggaggccacacatacttttttaatagagtcctcccgtccagtttttttttagatcggtactgcatgcttctcctggcaaaacaactagctttattttattttttccctggcttaataactcgggcagcgcccgggacatacctttaccttcgggaggcttattaacttgggcggcgtataacttaactgatcttgttgcaatcgggggacattcttatggggaatcccacggaaaccccccactttccggggatgggggccaccgggcccattttgacccttttgacccttttggcgaggcttttgaggaaacggcaccccccctgggggtcccccctggtcccccccccccttttgaggcttttgaccccccttcaacacaacccggggagcgccctggccctccccttcccgtacgggatg

SEQ ID NO: 120197 - DNA, 341 bp, Zea mays
  Clone ID: MRT4577_41103C.1
ggaggcgcttgctctggatggaacgtttggagaaactcctacgcttcgaggagatcagctcgacattgagaggacgatgggacgggcgcgcgctgctgctccttctggtatcaggacaccatgatgagagtgcacttcctgactcccatctggccaggccgcctccaggtaggaaagcgtgctgagagctgtactgccttgagcatggcattcacgctgacggtcagatgcccggtgacaagaccattgggggaggtgatgacgctttgaacaccttattgagtgagactgtggctgagaagcacgcgccccgagctgggtacgttgaacgatgacccact

SEQ ID NO: 120198 - DNA, 583 bp, Zea mays
  unsure (1)..(583): unsure at all n locations
  Clone ID: MRT4577_41104C.1
aataaagaagagaccaagaggtcgagcagtttatttatccttgtacttatattcaaattccactctataaacagtacaatgcagaacaatgtaaaaagtgctttgaggtaaactttaggtccactgttggaaacggcctaacaggcagctccgtacgtcaggactttcttgcttatgcttttgatttgctgattataatatgtagtactcatattttataacaaagatgactgcagaccggatgccttttattctgtcccagctctcgtccgaacaatgcagtcttcataacaaggtccagttcttctctcgaatcaatcccggcggagttatgccattggaaaatcggagtcgttgtgtaaaactacaatgctgtgctttttacctacaccaatggagccgttactgtaccggtccatcagccaccagttcctgcaagccgcgccgtagcctctcagcggccagcctggtgtcttcctccttgagccctccgaaggagatgcggatgtgccncgggcctccgctggcgctgccaggnatcacggcgacgccgtgcctgttcgcgagccacctgacgacctcg

SEQ ID NO: 120199 - DNA, 698 bp, Zea mays
  Clone ID: MRT4577_41106C.1
ctagttagtcatacatgaaccgtctgctgcagatcgcatttccaaacgaagtcgatggcttccacgaccagctcctcaaagtgcaggacaacatacccatctgcgcctccatcatcgggcagcgcctggcgctctactcgctggaggccggccccgagtggatcaaagaaagggtgagagacctggtgaaaaaccgcgcgctgctcgtggacgcgctgtccccgctcggtgacggcaacgtcaggggcgggcagggcgccatctacctctgggcgaagctgccggacacctgctccgacgatttcgaggtcgtcaggtggctcgcgaacaggcacggcgtcgccgtgatccctggcagcgccagcggaggccccgggcacatccgcgtctccttcggagggctcaaggaggaagacaccaggctggccgctgagaggctacggcgcggcttgcaggaactggtggctgatggaacggtacagtaacggctccattggtgtaggtaaaaaacacagcattgtagttttacacaacgactccgattttccaatggcataactccgccgggattgattctagagaagaactggaccttgttatgaagaataaaaggcatccggtctgcagtcacctttgttataaaatatgagtactacatattataatcagcagtaagtatttgtttttgtttggttttc

SEQ ID NO: 120200 - DNA, 468 bp, Zea mays
  Clone ID: MRT4577_41107C.1
agcagtggtaacaacgcagagtacttttttttttttttttttttttttttttttttctttttttttttttttttttttttttttttttttttttttttttttttttttttttttttttttaaaaaacccagcgggggaaagggccccggttaaaaaagcaggaaagctccaaacaacaacgggcccgtttaacccaagcatgggggaggaaaagacggggccaagatacaacaaagcttggcgcccccaaaataaattaaaataaaataaaggggggaaacaaatcttgggggtcaaacaacgggcccacgagcaagcccaggccccttttagccggaacaccccccacgcggggaacaggacgaaggcccccctaaaaaatagggaaggggatccaaaaaaaacaaggtttaaggggccggaggccgcaacctttccctagggggcgccgccggggaaaggaaaacc

SEQ ID NO: 120201 - DNA, 423 bp, Zea mays
  unsure (1)..(423): unsure at all n locations
  Clone ID: MRT4577_41108C.1
agcagcggcaacgacnccnaaccaancaaaccaagccgccgncancggaggcgcccgggagcncagccgccaaanccgggccgggcgcgcgcccgggcancngcggccaacganggggagcgagncggagcccgccaagggccngnngcccnaccngcagcgcgccgangagcngcagaagcacgaaccccncgnggcgnacgacgggcggcgcnacgcganggagaaggggcngagganaccccagaaggagcgcaccaagaccacgaacnccanccncancacccncaggaaccagcncgagaaggacaagaaangcgggacnngggggcccgacgacaaacnacaaagggagggagnggcanaaaacgagcgaggggaaagcaggaaaacaggaccgggcnggacgagcngacaaaaaca

SEQ ID NO: 120202 - DNA, 1128 bp, Zea mays
  unsure (1)..(1128): unsure at all n locations
  Clone ID: MRT4577_41109C.1
tccgnagtcccggggcgcccggcggtggcgttcttggcgctggcggcgcccgctgtggcggcggcggctacggtggtggtggcggcggctacggcggtggcaaccgtcgcggggatgacgtcaacctacgcctataactgctttatgtatgatggaatggagcactactgcttataatatgctcatattgtcaacctcttctcgttctcaaaggcttatggaatgatggggtggcgtgtaggatacattgcatttccaaatgaagctgatggcttccacgatcagctcctcaaagtgcaagacaacataccgatctgcgcctccatcatcgggcagcgcctggcgctctactccctcgaggccggccccgagtggatcaaagaaagggtgagagacctggtgaaaaaccgcgcgctgctcgtggacgcgctgtccccgctcggtgacgacaacgtcaggggcgggcagggcgccatctacctgtgggcgaagctcccggacacctgctccgacgatttcgaggtcgtcaggtggctcgcgaacaggcacggcgtcgccgtgatccctggcagcgccagcggaggccccgggcacatccgcatctccttcggagggctcaaggaggaagacaccaggctggccgctgagaggctacggcgcggcttgcaggaactggtggctgatggaacggtacagtaacggctccattggtgtaggtaaaaagcacagcattgtagttttacacaacgactccgattttccaatggcataactccgccgggattgattcgagagaagaactggaccttgttatgaagactgcattgttcggacgagagctgggacagaataaaaggcatccggtctgcagtcatctttgttataaaatatgagtactacatattataatcagcagtaagtatttgtttctgtttggttttcagttatctatattactgatggcacccatttgtacagaatcaaaagcataagcaagaaagtcctgacgtacggagctgcctgttaggccgtttccaacagtggacctaaagtttacctcaaagcactttttacattgttctgcattgtactgtttatagagtggaatttgaatataagtacaaggat

SEQ ID NO: 120203 - DNA, 405 bp, Zea mays
  unsure (1)..(405): unsure at all n locations
  Clone ID: MRT4577_4110C.1
gtgaactgacaatcaccattactatataggtacgccaggatacgcaaacagatggaactaatcgcatacatagaaagctaaaatggatacaccacacacattcactgaaccctaactaattcctggtacgaagacgcacttcacacaaccgctccggaagacaaagaactggcagtcgagcagacggaactacttatgtgtacattctgcagaccaaaccgccaaggacaacacggccatatccttaaccagagcgcccgtgccattgttnagaatctcagatgtttcactggcctgcaactgaccaccttcagagtcggactcgctgaggcaaacacagactttgaattggtctccaaagactgcatgcccatcactggcaaaacagcgttccacctgcttagc

SEQ ID NO: 120204 - DNA, 1051 bp, Zea mays
  Clone ID: MRT4577_41110C.1
aagagatagaaaaagagtaaacagtccccctcgaacctttcagtttttccctgtctgtcttcacttcatgtgtctttgtttagagaccttgccttgttggggcaggggacttgggacgacagagaggggagggcggagttggtgagcgagcacgggatcagctggtgacctcagaggctgttgcctcggggggcgggggaattctttagcacccaatcttccacatgtctttcgactcgctgctgctcttttggttggtatccttggatctctgactctagactgttccacgaaatctccagtcctttcttcctcttggaggaggagggctgcggcctgagcaggagacggagacatgggtagcttcgttaaactggcgaggagggcggtggagacggacgcgccggtcatggtcaagatacaagaactgcttcgaggggccaaggatgtcatgtcgcttgcgcagggagttgtttactggcaacctcctgagtcagcaatggctaaggtcgaaaaaataattagggaaccaacgctcagtaaatatggctctgatgatggtcttcccgagcttcgagaagcactttttgaaaagttacgcagagagaataagcttactaagtcatcagttatggtcactgctggtgcaaatcaagcttttgtgaacttggtcctcactctttgtgatgccggtgattctgttgtcatgtttgcaccatattatttcaatgcctacatgtcattccagatgacaggtgttactgacatattagttggtggttctgatcccaagacacttcatcctgatgttgattggttggagaaggttctgaaagaaaatgaccctatccctaaacttgttaccgttgtgaatccgggtaacccctctggagcttttattcccaggcctatgcttgagaggatttcagatctgtgcaaaaacgctggtgcatggcttgtggttgaccatacctatgaatactttatgtatgatggaaaggagcactattggctagaaggcactcatattgtcacctcttctcatctcaag

SEQ ID NO: 120205 - DNA, 257 bp, Zea mays
  Clone ID: MRT4577_41111C.1
tcgcccacaatttcagccgtagcctgactgtgatgagggacttatggcagtactggtctcgggggcgtagtcgtagctaggtggtgtatacggtcggtctggacgtccactccgacacccacgcgatcgtgttaacttgggcggcggcggtgaggaagccgaccaactcttcgaggagtacgcgcaatggtcaccggtcccggagcgcgtgctgtcacgctcacccgtcctctatggctcgcgacatggctcatggg

SEQ ID NO: 120206 - DNA, 271 bp, Zea mays
  Clone ID: MRT4577_41112C.1
gcggcagcaccggggccgggcggcggcgggcggcggagcgggcccgcgacgccgctgctgaaatgggacgtgggcggccggcgtggtgagggcacgaaggctgcttctaagaaggcacggaaggcctccgcatgagatgggtttctttaggtctaagctctgattgtggttggtgtcagttaggtactgtacaaactaagtgtgtgcccaaagtgtctcaggcggtgtgttatgtgcttagcaagttctatctatcagagtgttttagttt

SEQ ID NO: 120207 - DNA, 1882 bp, Zea mays
  Clone ID: MRT4577_41113C.1
cacctacagttccgcacctcgtcacacctgctgcggccgattcgagcgccacacctgcggcgtccggagtgtggcgtggtgtggcgtccggggcggccttaacagagagaccttgccttgttggggcaggggacttgggacgacagagaggggagggcggagttggtgagcgagctcgggatcatctggtgacctcagaggctgtttgcctctgggggcggtgctatttcggaatcctttagccccccttcctcttcttcttctttccttccgcatgtctttggactcgctgctgttcttttgcttggtacccttggatctctgactccagcccgttccccgaaatttccagttcttgcttcttcctcttggaggaggagggctgcagcctgcaggggccggagagagcaggaggaggcggagacatgggtagcttcgctaagctggcgaggagggcggtggagacggacgctccggtcatggtgaagatacaagaactgctccgaggggccaaggatgtgatgtcgcttgcgcagggagttgtttactggcaacctcccgagtcagctatggataagatcgaaaagatcatcagggaaccaatagtcagtaaatatggttctgatgatgggcttcctgagcttcgagaagcacttctcgaaaagctaagcagagagaacaagcttaccaaatcatcagtcatggtcactgctggtgcaaatcaggcttttgtgaacttggtcctcactctttgtgatgctggtgattccgttgtcatgtttgcaccgtattatttcaatgcctacatgtcattccagatgacaggtgttactgacatattagttggtggctgcgatcccaagacacttcatcctgatgttgattggttggagaaggttctgaaagaaaatgagcctatccctaaacttgtcactgttgtgaatccggacgcgtgggcggacgcgtgggttattccaaggcctatgcttgagagaatttcagatctgtgcaaaaatgctggtgcatggcttgtggttgacaatacctatgagtactttatgtatgatggaatggagcactactgcttagaagatgctcatattgtcaacctcttctcgttctcaaaggcttatggaatgatggggtggcgtgtaggatacattgcatttccaaatgaagctgatggcttccacgatcagctcctcaaagtgcaagacaacataccgatctgcgcctccatcatcgggcagcgcctggcgctctactcgctggaggccggccccgagtggatcaaagaacgggtgaaagacctggtgaaaaaccgagcgctgctggtggaggcgctgtccccgctcggcgaggacaacgtcaagggcggggagggcgccatctacctctgggcaaagctaccggacagctgctcggacgacttcgaggctgtcaggtggctcgcgaacaagcacggcgtcgccgtgatccccgggagcgccagcggaggacccgggtacatccgcgtctccttcggagggctcaaggaagaggacaccaggctggctgctgagaggctcaggcgcggcctgcaggagctggtgaccgatggaatggtaaagtgacggctccatgggtgtaagtaaaagctccagttttccaacggtgtaattccgccgtgattaattcgggagaagaaaaggaacttgttttcaagaatgcactgcgttgctcggacgagagacgggacggaataaaatgcgtctggtctgcagagtcacctatgttatgaatcatatgtagtgcatatatcatgagtgagtaattgtttctgttcgacttccagttctacatattacagatcgaaaacaaaaaaaaaaaaaaaaaagcggcc

SEQ ID NO: 120208 - DNA, 196 bp, Zea mays
  Clone ID: MRT4577_41114C.1
cggccggggacgcacttcgcaattccgcatcacgcagaggcagagcgaccaacccagaaccccaccccaccgcccgcaaccgcaagctcagattccctccccaccacagcctacaccagcgaccaggtgactacagcacagaccgccgacccaaagcctagagagagtggtgccagtagagatccagctatgtgtg

SEQ ID NO: 120209 - DNA, 684 bp, Zea mays
  Clone ID: MRT4577_41115C.1
ctatcgccgtcgccttcctccctcgccctcgcctccccgccgccaccccaccaaagcagagagctccccgcttctctcccccacgaggttaggcaaggatggtgagggttagcgtcctgaacgatgctctcaagagcatgtacaacgctgagaagcgtggcaagaggcaggtgatgatcaggccctcctcaaaagtgatcatcaagttcctcatcgtcatgcagaagcacggttacattggtgagtttgagtatgttgatgaccacagatctggcaagattgttgtggagttgaacggcagactgaacaagtgtggagtcatcagcccccgctttgatgttggtgtcaaggagatcgagggatggaccgccaggctccttccatctcgtcagtttggctacatcgtcctgacaacctctgctggcatcatggatcacgaggaagccaggaggaagaacgttggtggcaaagtgctaggctttttctactgaaggaaaattttgtgaaagttgtatttcagaccggtgtgataggatgttatctcaggacatcaaggttgtctactttttgcctgcatagctgctatgcctttgttatgttatgttggattcagttaattatgaggtgcacttttgaatttcgagtcgtacctgcgatgaattatgactttgaagatgccattcg

SEQ ID NO: 120210 - DNA, 279 bp, Zea mays
  unsure (1)..(279): unsure at all n locations
  Clone ID: MRT4577_41117C.1
gaggggggttgtatttaatattatcttttgctatagccagatgaagacgtatgcgaatttggcagctactagaaacgaccactctttggattggattattttatggagttaaagaaataagggtttttgttgcaaaaaatattgtagaatagggggaggggccaattccgctccccgtgaatgaaccgctgggagctcaaataagagacgcttctcctgcccgaactatgcgccatgattgccgtgatggtaatgggcatgacgtgctgntattcatcg

SEQ ID NO: 120211 - DNA, 199 bp, Zea mays
  Clone ID: MRT4577_41118C.1
agcctgcctaaggtgaatatggcaacactttgcttgagaagtctgattatctcacatcggaggcaaaggcttctaacatagaaaacagattgcctgccgacactacaaattcgctcaactattctaagtatgacagagtgaaaacaacaccactatcactgctctccaacacgaacgttcaaccatctgaaagacaaat

SEQ ID NO: 120212 - DNA, 954 bp, Zea mays
  Clone ID: MRT4577_41119C.1
caagaacctgatcaatcaacttcagtcccgggcgtaggagggtgggggaagggcaacgaacacctctgagagagttcaaccggagcctgaatggcaacgcccaagctgtccccggtctcgccggtgcggcaggacggcaacgacaagccgtgcgcgccatcctacccctcctcctccccgtcgaccgttctgagtgcgcaggacgcgtacgagcagcacctgcgcctgccggagctgacgagcctgtggacggccggatgcttcccggagtgggcgggcgagggcctggtcaagccggcgctgcaggcgctggaggcggacttcaaatttccgcgtccgggccttccaagcagtggaggtggccgtgagaggattcttcttcgcgtaccggcagctcgtggcggtgatgggcacggcggaggcgttgggcaaccgggcgctgttcgtgccggcggaggggatggatccattggcccagatgttcctcgagccgccctactaccccagcctggatgccgccaagacgttcctagcggattactgggttcagcagatggcggaggcctctgctccgtcaagacaaagctgaaacggcgaaatggcacggctgagccaccgaatcgcgcagttttgcagggactgaagatactatgcatgcatttcgttggggccttttgcccttgtggcgatagagtgattcatttctatagcgatcatgtgctattgcactacatgtcgcactagattctcttactatcgttgtgcacagcgttgtacgtgttgtgttctacctagatagattgattcagttagatgtcacttgtattgccaagtaggtcaattggatatggaacttttgtaaataccgaaatactgttgttgagcaccgtgtacgtagatagactgaatgttgttgatcgttccaatgcagagtttggagtaaattcaggagcc

SEQ ID NO: 120213 - DNA, 3856 bp, Zea mays
  Clone ID: MRT4577_4111C.1
cgttgctgtcgattcttccgccctcttcgtgagtccttcccctaggcgctactcgtctgctctcctctcttcttgtcacgagctctcctctcttctttccagtagctcgctcgccaggccgccaagccacatgcagcatgtggcggagcgcaagtaggtagctgctgcgtcttcctggcctgagggtttcggattcatcagctgggctgccggggtcgccatcgccgccgttgggccggcggcggcggagtttggcgtcgagttcttcagagggttaggtgcacgcgtctctcgcgttcctcctgcccaagtcgagttcctttctttccatacccgtccccatgacgttccttcttccatgattcccttccatatttgctccagccaggccatccgcgggctgcgtggctgcgctcctgctattttaatgcctgccttctctccctctcacgcctcataaaaaaaactaataattccttgggatctgaggggatccgcgtggggttggtaggatcgcgggcagagattttagccaggactggaggaaaaccagtccgctctctctccatgagcttcggcggcatgttcgatggcgccggctccggcgtcttctcctacgacgctaccggcggcggcacgggcatgcacaaccccggccgcctcgtcccggccccgcccctgccgaaacctggcggattcggcgccacgggcctctccctcgggctgcaaacgaacatggaaggggctcagctgggcgacttgggtcgtatgggcctgattggcggcggcgggagcgggagcggaggcgacggggactcgctgggccgcggccgtgaggacgagatcgacagccggtcaggcagcgacaacgtcgacggcgcctccggtgacgagatcgacccggacaacagtaaccctcgcaggaagaagaagcgataccaccgccacacaccgcagcaaatccaagaactcgaagctgtgttcaaggagtgcccccaccccgacgagaagcaaaggatggagctcagcaagcggctcaacctagagagccgccaggtcaagttctggttccagaaccgccgcacgcagatgaagacgcagatcgagcggcacgagaacgcgctgctgaggcaggagaacgacaagctgagggcggagaacatgacgatccgggaggcgatgcgcaaccccatctgcgccaactgtggcggcgccgccgtgctcggggaggtgtcgctggaggagcagcacctccgcatagagaacgcgcggctcaaggacgagctggaccgcgtctgcgccctcgccggcaagttcctcggccgcccaatctcctctggcagctccatgtcgtcgtccctgcaaggctgctccggcctcgagctcggcgtcggctccaacaacggctacgggctcggtcccctcggcgcgtcagcgctgcagcccctccccgacctaccctctagtcacggtggcattccagatcctggtgaacaactgcgcttgcccatgggcattggcgccctcgacgttgcgcgtcagcaacctgctctcctgggcatcgaccgcaccgtcctcctcgagctggcgctcgccgcgatggaggagctcatgaaagtggcgcagatggacgagccgcctggctccgcagacccgacggcagcggcttggaggcgctcaacctcgacgagtaccaccgagcgttcgccagggtgttcgggccgagcccaacaggctacgtcaccgaggctacccgcgaggccggcgtcgccataaccagcagcgtagacctcgtagacagcctcatggacgcggctcggtggtcggagatgttcccgtgcatcgtggcgagggcgagcacgacggacatcatctcgagcggcatgggcggcacgcgcagcgggtcaatccagctgatgcacgcggagctgcaggtgctgtcgccgctggtgccgatccgtgaggtggtgttccttcggttctgcaagcagcacgccaaggggctgtgggccgtggtcgacgtctcggtggacgccatcctccggcccgacggcggccaccaccacgcgcagaacggcggcggcgccgggtacatgggctgccgcctgctccccaccggctgcatcgtgcaagacatgaacaacggctactccaaggtcacgtgggttgtccacgcggagtacgacgaggcggtggtgcaccaactctaccgcccgctgctccagtccggccaggcccttggcgcgcgccgctggctcgcctcgctccagcgccagtgccagtacctcgccatcctctgctccaactctctccctgcccgcgaccacgccgcgatcacgccggtggggcggaggagcatgctgaagctggcgcagcggatgacggacaacttctgcgccggtgtgtgtgcgtcggcggcgcagaagtggcggcgcctggacgagtggcgcagcggcgagggaggagacgctgctgggaacggcggatcagcagccgcgggcgagggcgaggagaaggtgcggatgatggcgcggcacagcgtgggggcgcccggggatccccccggcgtggtgctcagcgccaccacgtcggtgcggctgcccgccacgtccccgcagcgcgtgttcgactacctccgcgacgagcagcgccgcggcgagtgggacatcctggccaacggtgaggcaatgcaggagatggaccacatcgccaagggccagcaccacggcaacgccgtctccctcctccgcccaaatgcaactagtggcaaccaaaacaacatgctcatcctgcaagagacctgcaccgacccgtcaggctctctggtggtgtacgccccggtggacgtgcagtccatgcacgtcgtcatgaacggtggcgactccgcctacgtctctctcctcccctctgggttcgccatcctcccggacggccactgccagtcaccaaacactgcacatcagggttcaccaagctgcggcggtagcagcagcagcagcagcacggggtctctagtcacggtggcattccagatcctggtgaacaacctgcccaccgcgaagctcaccgtggagtcggtggagaccgtcagcaacctgctctcctgcaccatccagaagatcaagtctgcgctccaggccagcatcgtcacgccctagctattagcgggcatttgacatggattccggccgccggttctcagaaaaaaggacggagtagtcggatgccatgtcaaatgcttagctagaggacgacatgctgtgacggcgcagatgctaaacaaggctgtgctcgtacgtacgtcgatcgcttcacatcagaccggcggggaactggtgcttgagaaggcagtgaaagaaaataagggtattaaaataaattatgtagtagtgtggagtatttattgcatagagcaatatatatatggggtgaggtacacagggattaagtcaagaacgaaccgttcgctaggctttgattgcttgagcaaacacgttttgctatcgctcaagcttgttatatgctcatgtggtggttcgggtattgacttaagtctctggcaaaagaaagtgaaacaccacctattagggcttctcctatatataaaatatatatgtagcagtttgttttcaatgccttctcaagcaccagtttcccgccggtctgatgtgaagcgaccatcttgtgaagagttctgttcttttgttttgtctccgatatagcgaaatatagagatgagaatgtctttgtgtttgtaacgtttgtgtagtgttatttcgtttgagttgatatatatgacatgtacgctttgttcatgcatgtggaaaaaatatgttctagtgtagctcactttaaa

SEQ ID NO: 120214 - DNA, 2009 bp, Zea mays
  Clone ID: MRT4577_41120C.1
cggccggggaggccagcgaaacccacaccaagaacctgatcaatcaacttcagtcccgtccgtaggagggatttgaaaagccaacgtacacctctgagagttcaactggagcctgaatggcaacgcccaagctgtccccggtctcgccggtgcggcgggacggcaacgacgagccgtgcgcgccatcctccccctcctcctccccggtctcgccggtgcagcgggacggcaacgacaagccgtgcgcgccatcctccccctcctcctcctcgtcgaccgttctgagggcgcaggacgcgtacgagcagcacctgcgcctgccggagctgtcgagcctgtggacggccgggtgcttcccggagtgggcgggcgagggcctggtcaagccggcgctgcaggcgctggaggtcaccttccgcctcgcgtccctggcgctctccgacccgcgcgggcacgccggccgccgcgagctcgcgcgccggctggagtccctcgcggcgcgggaggtggagctggtgtcggcgctctgcgagggcgacgaccggggcgcgccgctcgccgagctgagcgcctccgggggcgtgctcccgcgggagcgcagcgcgtccgaggtggtggtgtggcagctgcccgggagcgccgccgcggtcgtgtgccgggccagcgaggccagcctgctcccgcgcctcgccgcgtgggagaagtctgaggcgctcgcggccaggatcacgtacgccgtcgagggccagatgcagggctgcgccttcacgctcggcctcggcgagcccaacctcgccggcaagcccgtgctcgagtacgaccgcgtcgtgcgcccgcacgagctgcacgcgctgaagcccgaccctgcgccggagcccatgtccggctaccgcaaccgggagctcgagacgctgttcaccatgtaccagatactcgagtcctggctccgcgtcgcgtcgcagctgctcacccgcctcggacgagcggatcgaagacaagtgctgggaggcggcggccggcgactgctggatcctggagcgcgtgtggaagctgctcgcggacgtcgaggacctccacctgctgatggacccggacgagttcctacggctcaagagccagctcgccgtacgagcggcgccggggtctgagtccgcgtccttctgtttccggtccacggcgctcctgcacgtcgctagcgccactagggacctcaagaagcgtgtgccctgggtgctcggtgtcgaggcggaccccagcggcggcccacgggtgcaggaggcggccatgaagctgtaccacagccgtaggcgcggtgagggcgaggaggcaggcaaggtggacctgctccaggccttccaggcggtggaggtggccgtgagagcattcttcttcgggtaccggcagctggtggcggcggtgatgggcacggcggaggcgtcgggcaaccgggcgctgttcgtgccggcggaggagatggatccgctcgcccaaatgttcctggagccgccatactaccccagcctggacgccgccaagacgtttctagcggattactgggttcagcttcagcagatggcggaggcctctgctccgtcaagacaaagctgaaacggcgaaatggcacggctgagccaccgaatcgcgcagttttgcagggactgaagatactatgcatgcatttcgttggggccttttgcccttgtggtgaatggtgatagagtgattcatttctatagcgatcatgtactattgcactacatgtcgcactagaatactagattctcttactatcgttgtgcacagcgttgtacgtgttgtgttctacctagatagattgattcagttagatgtcacttgtattgccaagtaggtcaattggatatggaacttttgtaaataccgaaatactgttgttgagcaccgtgtacgtagatagactgaatgttgttgatagtcccaaaaaaaaaaaaaaaaaaaaaactcgagactagttctctcctcgtgccgaa

SEQ ID NO: 120215 - DNA, 446 bp, Zea mays
  Clone ID: MRT4577_41121C.1
ttaagcaatcagacattaactcgaccgtgacaacaaacgcacacaaacagcaccacatgtccaaaggccacatgacctatacatcagcatcctttgcctacaggctgtcgcacatatcaccgaaccctgactcatctgaccatgatcttctcactgctcgaacggaggtagacaaggctgctcgcgcctcaccatacatatactctggtggccgaaggcttgtgtgcctcggtgaacacttagcctacctgcacatcaaggcaatctggacacacctactgaggaactttgagctcgagctggtatatccatttcaagagaacgactgtcacgacatggttgatggcatcaaggccgacgtgatggttcactacaagaggcggaagcttgacgtggacaactaagattgtggccacaatctctacatgcttgcttcttggcgattc

SEQ ID NO: 120216 - DNA, 2159 bp, Zea mays
  Clone ID: MRT4577_41122C.1
tccaccaagatggccttgagattgtccgtagtgaggccgtactcttgctgtatggagagcagaacgtgtatgaggcatgcagatcttcgtgaagaccctgaccggcaagactatcacccttgaggtggagtcttcagacaccatcgacaacgtcaaggccaagatcaaacgctgctggtccggtgggatgccctccttttttttttttttttttttttacacggtgctcaacaacagtatttcggtatttacaaaagttccaaaacaccaattctccgtcgtccaattcctcctattctcagttcttcatcctgtgtcaacatcaacattcagtaattgatgaatccatctaccagtgtttataaaagttctatatacacggtgcccaattgaaacacttgcctagagtgacaaatgtcatctaactgaatcaatctatgtagaacacaacacaacgcagtgcacaacgataataagagaatctagtgctacatgtactacactagtacaggatcgctatagaaatgaatcactctatcaccacaaggccacaacgaaattacgatgcatgcatacatagtatctttaggctgcaaaactgcgcgattcggtcgccatacagccgcgccatttcgccgtttcagctttgtattgacggatcagaggcccccgccatctgctgaacccagtaatccgctaggaacgtcttggcggcgtccaggctggggtagtatggcggctcgaggaacatttgggccaatggatccatcccctccgccggcacgaacagcgcccggttgcccgacgcctccgccgtgcccatcaccgccgccacgagctgccggtacgcgaagaagaatcctcttacggccacctccactgcttggaaggcctggagcagctccaccttgcccgcctcctcgccctcaccgcgcctacggctgtggtacagcatcatggccgcctcctgcacccgcgggccgccgttggggtccacctcgacaccgagcacccagggcacacgcttcttgaggtccctagtggcgctagcgacgtgcaggagcgccctggaccggaaacagaaggacgcgtcagaccacggagccgctcgtacagcgagctggcccttgagccgcaggaagtcgtccgggtccatcagcaggtggaggtcctcgacgtcggcgagcagcttccacacgcgctccaggatccagcagtcggcagccgccgcttcccagttcttggcttcgatccgttcgttgaggcgggcgaggagttgcgacgcggcgcgcagccacgattcgagtatctggtacatggtgaacagcgtctcgttctctctgttgcggtacccagacttgggctccggcgctggcttgggcttgagcgcgtgcagcccgtgcgggcgcacgacgcggtcgtactcgagcacgggcttgccggcgaggttgggctctccgaggccgagcgtgaaggcgcagccctgcatctggctctcgatggcgtacatgatcttggccgcgagcgtctcggacttgtcccacgcggcgaggcgcgggagcaggctggcctcgctgacctggcacacgaccgcggcggcgctcccgggcagctgccacacctcggacgcgctgcgctcgcgcgggagcacgccaccggaggcgcccagctcggcgagcggcgcgctccggtcgccctcgcagagcgcggacaccagccccacctcccgcgccgcgagcgactccagccggcgcgcgagctcgcggcggctggcgtacccgcgcgggtcggagagcgcgagggacgccaggcggaaggtgacctcgagcgcctgcagcgccggcttcaccaggccctcgcccgcccactccgggaagcacccggcctcccacaggctcgacagttccggcagccgcaggtactgctcgtacgcctcggccgcggacgcgtcctgcactctcagaattgtgcacgacgaggaggatggcgcgcactgcttgtcgtcccgccgcaccggcgagaccggggacaaatcgggcgttgccattgcagctccagctgaagtatcagaggtgtacgtttgggttttcaaattcctcctacgggacgagactgaagttgattatcaggttcttgttttgagcttagcctcccggtca

SEQ ID NO: 120217 - DNA, 573 bp, Zea mays
  unsure (1)..(573): unsure at all n locations
  Clone ID: MRT4577_41123C.1
agatgttggatggcgtaaagtctaccacaatacccttacccacanaatgataaatgatatatcaaactggtttaccactataatcactttttaacttatcactataatcacttgggtgatattttggtagctattgaatattttcttttacaaaagtatgccttttgtaattaggatgtgacaaattattttaacttttttactcactttgcacaatttcaatatattatctagcagattatctagattaccgttatgctttatctcatttacttctgttttgtattgagtgatatcttctttatatatccttcatgttctggcgtttacagatctgttttttcatagaagaaatgcgcaaatatccagttcactcaaatggactattggatcctcctaaagttctgtgtgacattgtggaatctcttattggtgccatatacttggactccaacttcgaccaagaggaggtttggcgggtctttcgaacattggctgatccacttattggcttagagacattaggcaagcaccctgtaagcgagctttttgagttttgccaaaagactcacc

SEQ ID NO: 120218 - DNA, 685 bp, Zea mays
  Clone ID: MRT4577_41124C.1
cattgggtacctcgaggccggccgggaaaaaacacgaaattgctgattgggctccccgctcgatccaaaccctctcgctcccgttggcggtgtgcggcgaggtgaccacggcggcggaagaatggcgaaaggcagcgggctgatctgggcgacggcggaggatctggcgcggaataggccggtggtgctgtcgctgtacaggcagattctgcgggccctcaactcgccggagctgccgcttgggcacgcggcgcggctggccaagaaggccgagtgccgggccatcttcatcttcggcgccgaggagaggtcgctccacaacatccgtgacctcgtcgaggctgcgcgacacacgcttgggctgctcaaccgtggccgcctcccgtagagaggaacgaggaatctatctgtaagatttggttctggtgcgtgccgatgaatggctaaattgatctgttctagtataagctactatcaatatactgtacacttgctaattaaaagaaagaagttttatgtatgaatgaacaaaaacttgagtcattgaaaagttgttgctggtcttctttagtttgagttaggggatgcgtcatgcgtggttttgaaggtgttctgcttgcaatattacatcataatctgtgactgatgaaaaaaaaaaaaaaagcggccaaaaaaaaaaaaaaaa

SEQ ID NO: 120219 - DNA, 387 bp, Zea mays
  Clone ID: MRT4577_41125C.1
ggcttggaacctttgggctgatttatgtgcttgtttatgtgcttgagactgtgagtggttctttcccccccccccccccccccccccctggtaggtaagtcaacgcagttacaaacgggtaaagacaacatagtaccctcccggcacataagcccacttccttgcacgatagaaccttagtccacgccggaatatcctcaagcccgcgttgtaactaatatcgtatactctacccaaaaaatgaaggttcaacagacgcagaaaccaaatcaaaactcgaaagtcctataaaacgcccgcacttgtcttctcagtacccccggcgccgcaaattatattctcggccattccaatcagaaataagtaatcaattcgcacaccaactcg

SEQ ID NO: 120220 - DNA, 500 bp, Zea mays
  unsure (1)..(500): unsure at all n locations
  Clone ID: MRT4577_41126C.1
gaaagcaggttgttgttttgcccaaccagtgcatgatgtttacactggttacattgttggtatacatcagagacctgatgactttatatttaatgtgtgcaagaaaaagctgctgcaacatgttcgttccacacaatgatatctacagcggttcttgatgagcctttaagctacagtttggatgactgcgtanagtttatccaataagatcgtatagcggaggttactcctgcatgctccgtatgtgcaagcatcccaatcgttattcataaagaagtaacatcatctccttcttttcgtgacaatgcatattgtacacataaaatctgcatgctccgttcctacttctcatatgactgactgttgcactgcgtcctcgatactaaatctcgatatttatggagttctacagacaaagactaagagtcgccagatttatatgattgattatatggcatttttgtgatgaataaatcaaccgacacctgttatgacattat

SEQ ID NO: 120221 - DNA, 190 bp, Zea mays
  Clone ID: MRT4577_41127C.1
gtactttcttaaaaccattaggttcaggctgtaggtagccgcacgtttagtcagcacgatcgatcagtgaagtagtaatggccttcgacaagagctcgaccctggtgatctggtcgccggtggctgcgcatcgcctgatccgcgcgcgcgagattgactagcacaccctggtgcccacggtcgcatctca

SEQ ID NO: 120222 - DNA, 699 bp, Zea mays
  Clone ID: MRT4577_41128C.1
ccggccgggccggggattcgatccaagaccaaccgccgccatgacaaagagatgcatgagagaatcggcgtggcaaaagctccgcatgtcgcttgatctgccagtgcccgtgacggtgaactagctcctacaacacgcatatccaagaacctctacatcatctccaacaaggtcatcaaggaacgcctcaatcacctcccgaccgcctgcgatgaccacatggtcatgtgcaccgccaagaagacgaacaccgacctcaggaacaaagcgatgccctccttcatcgtccgccagagcaagacgggacaccgcaagagacatctcctacatgtacttctacatataatgctggaatgattgctaatccaaaggctgagatgaaacgatacgatatcactggacctatctacaaggaatgagctgatcttgtggcctatgattgctagccacagaaaatcatatctgttgacacatatgaggaatatgcacatacttcaatatcatcatcttattatcagttgctaataggactattgactgtaatgggccctttatgtgtgttcactcaatttcggaaaaaacacaatttggtataccccggagatctatatataaatgtatgccatgaatattctgactaccatttctcatgacatgcttatatggcttatattgctctggcgacagcaaattatttgc

SEQ ID NO: 120223 - DNA, 388 bp, Zea mays
  Clone ID: MRT4577_41129C.1
aacctgaaatttctttgtttcgttgatcctttttaagttctacttcatcttgtaaggcaaaaaatgaaatggcgaagtggcccaaacaaatgggaacaaaagggacaggggtccaaccccatcccgggggaaaaaacaaataagcgggccccaaatcaaacgggtggagcccgggctccaactcgtgaaaagaaaagctgacgacaagggggagggaaaaaacactaacaaaggggaggcaaaggggtccctctatcaccaccaatgccaaccaaatcacccccacgcctggggaaggcccgggaacaacaaaagagctcaggacagcaaacgtttccccccacctagggtttttgggacgcgcgggggtgcccgggaattgccgacc

SEQ ID NO: 120224 - DNA, 437 bp, Zea mays
  Clone ID: MRT4577_4112C.1
gtgtatttttttcctttttttttctttttttttttttaaaaaaggaaaaacgatccctcaaaaaaacgaggaaaaacaaaccgtgaaaaaaaaattagaacctttgcttgtttcagtgatgaccctaacacgggaattaggggggtacgaccggtgggcaacaagaacaccttacccgggcaacgaaaggagcacatgacttaacttaaaacacgggaatggcaatgggaagttttctgcctggaccaagcttagggaagggggatatatgctttagcccacaatgctgttggttgggggacactgatcactttataagccccccatagggatctaaaacagcgcacgcccccaaaaaaaaaagggttttttaacaattatgagtcatagctccttgagaaagttagggctttgacggtgctttaaccttaaaaatg

SEQ ID NO: 120225 - DNA, 506 bp, Zea mays
  Clone ID: MRT4577_41130C.1
ttaaatcgctgccaccgagtatttgcctttctactctttcgtggtctccgttcccctgcctccgccgtcgccgcagccatggtgtctcggtgctgcctcctccgcctactctcgagtcgcctcgttcctcagagatctcaaccttttgcaccgggatcgatcgcgagcagaaccctgaccacttcgtccgaggccctcgcccccccagctcccaggtatcctcccctcccgctcggatggactaccgtcacgtgctgccagttgctgacccgatcctccggcgaagaggacgagggatatggagacgaagaagattgctacttactgagaggatagagaggtgcaatgaatcgacaatgacggggctcggtggagataacactgcgcacgggagaaattgagatgagaatgtaggggaagtgccatataacggcgacaaggtgctcggaccgctcgatcgtgacaagagaacattccgggcctactcatcgcgtattctgcatgcg

SEQ ID NO: 120226 - DNA, 865 bp, Zea mays
  unsure (1)..(865): unsure at all n locations
  Clone ID: MRT4577_41131C.1
cctcgaggccggccggggtgacttctccaaggtgaaaccctagcttgctgcatccaccactcacgccgtcgccgccgacgccgactatcgccggaaacaggtcaacaggagagggacctctcaattgtcccttttctctctccccgcccaacttcccctgctctgccgccgcctccccagtccggcgtgcatcagcagcgacatcagagtcggcgatgggaggcgtcaccgacgttctcgtccccttatgttgatgaagtggcgtgccgtggagattcctttgaccgatttcttgccggttttaccttctctccgtcgtgcaagatcaatccttcattttctccgtcgtgcaaggtgggtcaattgaatcagatgctccacgttacgtccacccttgagctcgatggcagaaggaagcagtagccataggaggagtgcattctcccctgggctggctgtgttattatctggcgatgaagctaagattagctcccagaagtcgcacctggtgtcctatcatgacgaaattgggcaccaggctgttgagaggacgatagagcacatctttgatctccctcacaagtcagtggtccggcctcctggaccaattgacacaggcttcgtgcactcagtggtgaggaatcaagctagaaaatttgatcttgactgggaaaactgcattcggggataccatcgcagcgtcttcattgtggacaaaggtgctgggcagaggaaggtggttcttgatgattcgagcatttgtggtagcttcaggaatgtccggngaccttcacttgttgagangtccgcccctttcagcagtgncagggctaatgcttgtgtgtggaaagcaaatggatgtatg

SEQ ID NO: 120227 - DNA, 883 bp, Zea mays
  unsure (1)..(883): unsure at all n locations
  Clone ID: MRT4577_41132C.1
attgggaccctcgaggccggccgggacgtcttccaatacagcggcagccatctagccacacacagcaacgcaagacgcgacgacggagcccagacaccccattcagcatcatagttacatcacgcacacacaaagtcatcgatgggcttcctggccagcccatcaccatccgacaatgtctgcaacgtcccgcatcgacgagccctcgagctaaacggcatcatctctcacgcgaactacctcacagacacccggcatgctaccattggtgccactacatacttacagatcaccagacagcctcgtccactgtcgccccacgtgttgaaggactggtcccccttcgacacacctgacaaggtctgaggaggttcgcataagagctctcatgcttagtaggcttgacgacacgcacgagcggagcatcgctcctgtgaaactgcgttgtgacgaaatgctgctgccgctgtgcccggtggcaggtcacaccacaagatacggccacataggaacctagtggacggcatcataacacttgaagaacatcagagattggggaacatactttgagccctaggggtattagggcaagctagcacacacgatagctgaacgctagggggagactgaaggtaccacagacgcaaagcatgaggcaactgtgcctctacgagccttgaacaacgctgcacacacgaggctttgagcacggcatacacatggaaacacagtttgcagaacacacagataggcaaaagacgtcacttctagagacgaatgtacatagtcgtagatagaagccagacaacggcaggcctctggggacagatggctctntcgagagtgaagtggggcgttgtagaactcacgtcgcatcgcgtcg

SEQ ID NO: 120228 - DNA, 382 bp, Zea mays
  unsure (1)..(382): unsure at all n locations
  Clone ID: MRT4577_41133C.1
gggggggggggggccgtctccttgtgctgctcgcgcgtcgttgtggttcttcccttgtctgggccgcggcgggcgttgtcgttgctgttttccgtctcctcctcttcgtccttccttttttttttttacnctgctgccgcnnggccttggggggggcgggcgtnngttcgccgcgcggcgcggnggtggtttcgctctggctcgntctggttnttgtggcggtgctccctccgtcctgctctgttcggcggtccttcccggcgacttcgtgctttgnctccttgtggccttttggtctgtccccggngagctctggggtggtccgtgcgtgcggtgttgggctccctgtgcgtggggcgttgcttgttgcggtgtgttgtct

SEQ ID NO: 120229 - DNA, 395 bp, Zea mays
  Clone ID: MRT4577_41134C.1
ccggccgggcttcttcgagagcaaccccatcctcaagcagcgcccgaccaaagaggatgatctgcccatctgtactgcctccaccgccgcgtagcctactaggagggccgggggcgaactgattaaccggagacccatcaatcagcttgcatgcattgctgtgtgttgtgctcttgctaagctttattaattagtacgtaccacgaacctaatgcatgggccgtatctcatagtactccgtcagttctattttatttgtcacggtttagtttaaaaatgaactaacggacaacgaatattcgaaaacggttatgataaatgagaactttgttggtatgatcagctaatgcatggagctatcggttgtgatcaaaaaaaaaaaaaaaaaagcggcc

SEQ ID NO: 120230 - DNA, 157 bp, Zea mays
  Clone ID: MRT4577_41135C.1
aacgattgtgaggaggaggggattaagaacatggattgcaatgacatatccacagagaaacaatcgtcctgaggggacatgattacagccagtaggactgacacgaactcataagggccagccattagccttagtagagcgtgactgaatgatggcg

SEQ ID NO: 120231 - DNA, 1703 bp, Zea mays
  Clone ID: MRT4577_41136C.1
attcggctcgagggcaaatgcatttctctaggatgtttgtggcaattagagcatgtgttgatggatttctaactgggtgcaggccttaccttggggttgattctactcacttaactgggaaatataaagggcagttagccacagcaactgcaattgatgggcacaattggatgtatccagttgcatatgggatatttggcaaggagacaaattccaattgggcatggtttatggcacaactaaaaagagcaattgggaattcccctggattaacaatccacactgatgcttgtaaaggattagcctatgctgtgaacaaggttttcaaaggtgatgtggaacaccgtgagtgttttaggcacctaatggctaatttcaggaaaaaaatcaagggtgatgtgctgaagtatatgtggccttgtgcatgggcatgtacagatcatatgtatgatacactaatggagaaaattgcagcatctagtcctaaagcaattcactttctaaacaataaccacaagctaaaatggagtagatctaaattctccaaagaatgcaaggttgattatgtgaacaataacatctcagaatgcttcaacaattggattaaagattacaaagatctcccagtcgctgatctaatggataagattagggagaaaattatggagaagatttatacaaggcaagagatagccaatcgaatggaagggcgtatcctacaaagtgtgatacgtgagttgaacatgaagagcagaggattgcactatgaaatcgtgaagagtggactgttgtcagctgagatatcaggaataacaaaagaagggaagaattggagagttgcagctgacattaagaaaagaacttgtggatgtggacagtggcagatttctggaaaaccttgcactcatgcaatagctctatttgggaaacttagaaaccttaacattgaggactttgtggatgactactattcaattgagaggttcaaaatggcttatcagtttgtggtcgctccgatgggtgacaagactcaatggccaaaatttgaccctgggtttaaaatggttcctccaaagctagaaaggcctgctggtagaccaagaaagaaaagaatcaaggctagtggagaggcaggaaaaagaggcccatatcagtgcaaaaggtgttttcagtttggacatatagagaagggttgtactgctactcaagctgaattagaacaagagcttccaccacctcatccaaagaaaccaaaaaaacaaagaaaatccaaatctgaagctgttgaagtctctatggttgatgtcgagccatctcaaaccgacggtgttccaaaagtgatgtctagcccaggtgtaacaacaagaagcatgtcttctgcttctccaactagtccaggtcctacaacaaggaggaaggcatccatctcaccaggaggaattaatcggaggctcattattagctagatatagtagttgtcattctctattttgtgtgtgggcatggctgtgcaactattttgtgtaactatttttccgctatgcaacactatgtctgatggtggtgcttctatattctgaattgcaagaactcatttaaatgttgcagttatggtactgaaatggcatcaaaattatatatatatatatatatatatatatattgtgtccaaatgtaattgaaatggaggttggactacaact

SEQ ID NO: 120232 - DNA, 742 bp, Zea mays
  Clone ID: MRT4577_41137C.1
tcaaaatggcttatcagtttgtgtcgctccgatgggtgacaagactcaatggccaaaaattgaccctgggtttaaaatggtcctccaaagctagaaaggcctgctggtagaccaagaaagaaaagaatcaaggctagtggagaggcaggaaaaagaggcccatatcagtgcaaaaggtgttttcagtttggacatatagagaagggttgtactgctactcaagctgaattagaacaagagcttccaccacctcatccaaagaaaccaaaaaaacaaaggtactgtaatacaacatgttccttgtgtagtgcattatttcccatgtctaacccatgttgtacctcctagaaaatccaaatctgaagctgttgaagtctctatggttgatgtcgagccatctcaaaccgacggtgttccaaaagtgatgtctagcccaggtgtaacaacaagaagcatgtcttctgcttctccaactagtccaggtcctacaacaaggaggaaggcatccatctcaccaggaggaattaatcggaggctcattattagctagatatagtagttgtcattctctattttgtgtgtgggcatggctgtgcaactattttgtgtaactattttgccgctatgcaacactatgtctgatggtggtgcttctatattctgaattgcaagaactcatttaaatgttgcagttatggtactgaaaaaaagaaaaaaaaaaaaaaaaaaggcccctagggcc

SEQ ID NO: 120233 - DNA, 685 bp, Zea mays
  Clone ID: MRT4577_41138C.1
ctcgaggcttcggccggatagacctgtctgctctctcgtccttccagctcctatcgatcgtctaccgccacgctggagcacacggcacgctgcagggaggtcagcagtgacgaggaccgccgtgctgatggcggccctcacgaccatgtacgaacgctgacaagagcgcgcctaggcttgacaggagcaggcgcgcgctcaaggtcattatgactctgctgaggcgcatgcagggccgcccgttcattggataggtccagcacggctatgaccaccgagcgggcatgatctcggacggacttaacgggaggatctacaagtgccgggacgggagcactgggttagctattgaagagaaagacattgatggatgacacttgcacggctgatatccgccaggcacggagaatgcatctggctcacaaattgggaaggcatcatgggccacgaggaggaccggccaaagagcgcctgaggagagggtctaggatattgctattgaacaagctgagaatctatgctctggacagactgcctgtcttactctctgagactagagaacctgttaacagactatgatctgggtatctcagactagagcgcctgattctactagtatgttggagactgcatatgaactctcactttaaaaggcgtggactgaaggcggctagatcctgaaaca

SEQ ID NO: 120234 - DNA, 641 bp, Zea mays
  unsure (1)..(641): unsure at all n locations
  Clone ID: MRT4577_41139C.1
ggtacccccggtgccggccggtggccgggttgctccaatttctgaaattcagaatctgcatttcactaagtctgaaatctacaatttctgacagctttactttggaccaggttttctctaagttccaaacagtgttagggccaggtgacttaaccaaacttatactcctcatatatctctataactttgttatatggatcatcttcaaaatgcttatagatcagaatttaccagagttcaaagttggctagtttatattaatttcagaagttccaatttgaacctaaaactaaatttcttcaaattactccaaattcttccaaataacatggaaatattcaaatagtaaagttgttcacttttccaagctctacaactttggtactttgatatttgcccaattctctcaaaattttgaattccactttggggcaagattagggtttcaattgtggtcccttttcttcaaatgattcgtccacctaaagcaaagttattccttagtgtaaaatccaacttttggtatatatataactcaggttcaaagtgtccttggtttaggagttgtttgcttacactcaattccaacaaggttttcaacctaagtnctatactcaacacacgacatcacacttttaaaa

SEQ ID NO: 120235 - DNA, 2074 bp, Zea mays
  Clone ID: MRT4577_4113C.1
ctgctccaactctctccctgcccgcgaccacgccgcgatcacgccggtggggcggaggagcatgctgaagctggcgcagcggatgacggacaacttctgcgccggtgtgtgtgcgtcggcggcgcagaagtggcggcgcctggacgagtggcgcagcggcgagggaggagacgctgctgggaacggcggatcagcagccgcgggcgagggcgaggagaaggtgcggatgatggcgcggcacagcgtgggggcgcccggggatccccccggcgtggtgctcagcgccaccacgtcggtgcggctgcccgccacgtccccgcagcgcgtgttcgactacctccgcgacgagcagcgccgcggcgagtgggacatcctggccaacggtgaggcaatgcaggagatggaccacatcgccaagggccagcaccacggcaacgccgtctccctcctccgcccaaatgtaagcactactactgccctcctccttacttcaatttttactgccgtttttaccgttgcgatcaatgaatcatctctttgatttttttttggtcccacattgtaatgcaatactgtttctcatcaagtgtagtacagtaccgtggtgccggatttgtgtttatatgcatgcactgcagtattgcatgggttgagggacaccatgacacagagaaaaggacaaaccggaaaaggttaaaacactggcagtttaccagaaactggtccatggttgacatttgtgagggaaagctcctgtcacttttgtgtgtttggaaccacgcaggctgcccttgtccttgccttcatcatccctctctgatctactagtactcaacagtctatttttagaattttaagttttaattaaaccaatttaaaagtttaatcaatacaaaaatagtatgacaatattatatatatctaaacaacatgcagtataaataagttcgcaatacatattttttactctcttcattacccctgatgaatttctgatgagatgtgttgcaggcaactagtggcaaccaaaacaacatgctcatcctgcaagagacctgcaccgacccgtcaggctctctggtggtgtacgccccggtggacgtgcagtccatgcacgtcgtcatgaacggtggcgactccgcctacgtctctctcctcccctctgggttcgccatcctcccggacggccactgccagtcaccaaacactgcacatcagggttcaccaagctgcggcggtagcagcagcagcagcagcacggggtctctagtcacggtggcattccagatcctggtgaacaacctgcccaccgcgaagctcaccgtggagtcggtggagaccgtcagcaacctgctctcctgcaccatccagaagatcaagtctgcgctccaggccagcatcgtcacgccctagctattagcgggcatttgacatggattccggccgccggttctcagaaaaaaggacggagtagtcggatgccatgtcaaatgcttagctagaggacgacatgctgtgacggcgcagatgctaaacaaggctgtgctcgtacgtacgtcgatcgcttcacatcagaccggcggggaactggtgcttgagaaggcagtgaaagaaaataagggtattaaaataaattatgtagtagtgtggagtatttattgcatagagcaatatatatatggggtgaggtacacagggattaagtcaagaacgaaccgttcgctaggctttgattgcttgagcaaacacgttttgctatcgctcaagcttgttatatgctcatgtggtggttcgggtattgacttaagtctctggcaaaagaaagtgaaacaccacctattagggcttctcctatatataaaatatatatgtagcagtttgttttcaaccatcttgtgaagagttctgttcttttgtttctccgatatagcgaaatatagagatgagaatgtctctgtgtttgtaacgtttgtgtagtgttatttcgtttgagttgatatatatgacatgtacgctttgttcatgtggaaaaaaaatgttctagtgacaaaaaaaaaaaaaaaaaaggccccta

SEQ ID NO: 120236 - DNA, 318 bp, Zea mays
  Clone ID: MRT4577_41140C.1
cggctgctgcacgggcgacgccctctgcgcctactgcctgccggcgcaccgagaccaccacgtcgtccagatacgtcggtcgtcgtaccacaacgtgatccgggtgtcggaggtggggaagctgatcgacatctcccacgtgcagacgtacgtgatcaacagcgccaagatcgtgttcctcaacggccgcccgcacgccaggcacggcaagggcgtcaccaacacctgccagatctgctgcctgagcctcccggactccttccgcttctgctacctcggatgccagccggtaggatgcagtgggacccgagctgacgt

SEQ ID NO: 120237 - DNA, 208 bp, Zea mays
  unsure (1)..(208): unsure at all n locations
  Clone ID: MRT4577_41141C.1
gggccggttttccaacgaggattttcgcctctcctttttccnnctgctgaaggctcccgtctggcatcgcgtccgagatgaacgcgatgcacgaggactgcgtgcgattccagatcttcccgccggcccacctccactccagcgccggcgcagagccccggaggtggcaccccccgcactggacccaggacaaggcgccccgaacgcc

SEQ ID NO: 120238 - DNA, 588 bp, Zea mays
  Clone ID: MRT4577_41142C.1
ggggcccttgagggctggcggggccgtttccgcgtggcgcccatgcccctccattactctgctggcccctacactgctgtgtgggtgccaccaagccgagtgcaccaaccaccgcccactcccggtgccgtctcgcactctctgtgcggcgggctcagatttggccccatcggcctgcctgggtttactaccgtgttgccacagcacgtagcagagccagagctgcgagtagactgccaggggacctaccgcctactccaggatccatgatctggcttggctgaacgccctgtactgctccatcactcgcatcctacaaccgagctgtcgttacctcccgatagctctgcgcacggagaacacccaatctcttgaccgatgcatgcaaagaccactatggcaccgggcgtaccgtgcgtcattaagcccacttggattcacgtattactgcaggatctaggaatgagccctggctaggcctggacgatcacctaccggacggcgatgaactggagcatgctgctatcattatacttgcacagaatattaggacccgtatatggacacttagttcacttctgtgggaga

SEQ ID NO: 120239 - DNA, 282 bp, Zea mays
  Clone ID: MRT4577_41143C.1
aaaatgaccatcacctttccacgttttggaactaaacatatgaaccagaatctaggctatctctcacaacttaggccagcacgatacatcaatcgggatacttacaactgcatgaacctatgacaacttgccttacatggagaatacctagcctcataatacattaccacatgcttcaacgcgatataacttgcaccggacttaccctaataatatacaacgcgtactagcattaccaaaacaaatccaactccacaacctgaacataagaactttactggc

SEQ ID NO: 120240 - DNA, 550 bp, Zea mays
  unsure (1)..(550): unsure at all n locations
  Clone ID: MRT4577_41144C.1
acgcctgcatgtaccgggctcctattacacggtcgacctcagcgttcggagcttataacagttgtgaagggctgagtggggtaagactaccaatggcccaaagctcacttagccttatcatttgaaatcagttgcttgaaggatgacaagattgaactacttactggtgataaacctaaacgttatgctcttagatcatgaccacaaaaatgaaacacacatgatatgaatctgtaggaacaagtaacaatgcactgacncaccttgaaatatctgacatgaactcatgacgtaatacattctcgtgagaccagtgcttatcgcctatgaatcatactagcagtatcattcatatgccttcttagcaaagcgcacacatatatgcactgagataaattattgcacgacaatcgttctatgctgatataagctataaatatgattattacaaacaccctaaattgacgataaaaatgagctctactaatacatacagcagttgttcatgtggctagtgtcaactcctacactgtgcattcttgaataaaaa

SEQ ID NO: 120241 - DNA, 890 bp, Zea mays
  Clone ID: MRT4577_41146C.1
ccggccggggttcgggggagaagcattgctcataacctgttcttggctattttaagggccgctaatgatgaacacaaacagcggtttagagtgaatccgcaactccatactccaaccagcgctccttcctcggcgcgccttcagccatcgcacagctgagcagtactagtaacatccagtttgctggtcaatcaataaaccactcggtgtgctcgtgggaggaagaagatggaatccatagatttgaaggtgcaggtggtagagtcatcatttatagcgccgagcgagccgacgccaagcaagggcctctggctctcttccttggacatcctgctggtcaacataggccacaccccaacgatctacttgtacagctccaacgatgtagccgcggctgattttttcgacgtgggcagactcaaaaaggctatggccaaggctttggtgcccttctaccccctcgccggccgcctcggcaacaacagcgacaatggtaggacggagatcagctgcaacggcgaaggtgcactctttgttgtcgctcacgcggatggtgatctcactatcgatgacatcaagaaattgaagccatcgccagagttgaggaggctgtttattccactcatcgagccatcgtctatcataatggccatacaggtgacttccttgaagtgtggagggggtggtgttaggaacagctatccaccacgccgccgcagacgcttcaagtgcgttccacttttttcagacatggtcggcattctgcaagcatggtgaccgtgctgccgtggcggtggagctcccgtgccacgaccgcaccctactccgggcacggtccccacccacagtccaccccgacgcgctcttgacattgctgcctcggctcaccc

SEQ ID NO: 120242 - DNA, 472 bp, Zea mays
  Clone ID: MRT4577_41147C.1
atttctaaaaaaaaaaaaaaaaaaaaaaaaaaaaaaaaataaaaaaaaaaaaaaaaaaaaaaaaaaaaaaaaaaaaaaaaaaaaaaaaaaaaaaaaaaaaaaaaaaattaaaaaaaaaaaaaaaaaaaaaaaaaaaaaaagtttttacttgccgggggggcctttaaaaggggcaaattttgaaaatttcaataaaattgggggcggttgaaaattcctttaaaaggcccaaattccccttatagaaagccttttaaaaataaaggggccgggttttaaaaactagtgaattggaaaaaccttgggtttcccaaatttaatccctttgaaaaaaatccccttttcaaaagttgggtaaaaagaaaaaaggccccaacgaatccccttcccaaaaatttggcacccctaaatggaaaaggaacccccctttaaccggacaataaagcggggggggtgggggggttaccccaag

SEQ ID NO: 120243 - DNA, 376 bp, Zea mays
  Clone ID: MRT4577_41148C.1
aatggatatcaaggggttaccagcaagcaacataccccatcactatagacacacgcggttcatatattggtacaacgccaactgttcatacgcggttgccccggcactgctacgttaaataaaggacacactggcctatcctgtcattgatcaatacacgtacgtacgccctatacggttcgatagacaatgaagatgtatggcacaggcgctgcgcttagatgccgaggcctaatttgcaggccgtcgcacctgcctatgtgttgactgggtcagtgatgcattcagcgaggttctggagcgtgcccgtgcctgagactattgatctggacgaagaaacctgacatggaaaacatggtgaggtggtcgaacttga

SEQ ID NO: 120244 - DNA, 170 bp, Zea mays
  Clone ID: MRT4577_41149C.1
cccacgcgtccggcgacgtccgcgacgaaggatacttgtaagccctccactcccgtcaatatcttctccctgcgcagatcagatgtcccccatttcgattgcgatctcgattcagacccctcctctcttaccttgctttatagattcctcaccgctagtattctttattt

SEQ ID NO: 120245 - DNA, 800 bp, Zea mays
  Clone ID: MRT4577_4114C.1
gtaactccggaatgtctgcatcaccgtcggaaggcgatgaggccctcatcaacgaggtgctcaccgacgatgagctccgtgcggtgctcacccggctgaggcccgagtcggagcgcgacgcgttcgggctcgtgtgcaggcgctggctccggatccagagctccgagcgccgccgcctgcgcgcgcgcgccggtccgtccatgctgcgccgcctggcagcacgcttcccgggcattctcgagctggatctctcccagtcgccgtcccgctctttctaccccggtgttatcgatggcgatctggacgtcattgcaggggggttctgcaatctgcgagtcctcgccctgcagaactgcaaaggtatcactgatgttggaatggtcaaattaggagaaggcttgcaatgtctgcaaaccctagatgtctctcactgcaaaaaacttagtgataaaggtttaaaggtggttgcgtcaggctgccagaagttgagacagttgcacatcgcaggttgcagattaataactgatttgttgcatgctgtatcaaaaaaactgtttgaacttggaagagcttggggctgcaggatgtaacagcataacagatgctggaatctcagctctagccgatggttgtcataaaatgaagtcactagacataagcaaatgcaataaagttggtgatcctggaatttgcaaaattgctgaggtctcgtcatcatctctggtgtcattgaaactgttggattgcagcaaagtgggcaataagtccatctattcactagctaagttctgctgcaacct

SEQ ID NO: 120246 - DNA, 304 bp, Zea mays
  Clone ID: MRT4577_41150C.1
gtgtgcacatctaaagaaagcgctgatagaaaaacgaccatttctgattctccattgtgagacacaaggctaagagatatgaaagaggtggactggacaggaaagacccatgacatgatggacgctgtatacataataaacccattgacaaaatgaactgtcactatacatgtaaagtcccggatctacgcagacttttaggataccccatcaaatcaaacgttgaatctcctgtactgacatactgattctgatctcggacagtgcctaggcactcacctggaagatgctctacttgaagatg

SEQ ID NO: 120247 - DNA, 226 bp, Zea mays
  unsure (1)..(226): unsure at all n locations
  Clone ID: MRT4577_41151C.1
tcaccanatgttccgttaagtcttcaataacactctggttttcacgccattttcagttcttaatcgccccggcaaacgtttttttcttttttcnnacantgccctgaacatgggggggggggggtgttnccactnggtttccctcacgcccacactgtacctgcctgacacatcgttgcttgtttgcggcggccttggtcacctcggctccngctgggtcctcctt

SEQ ID NO: 120248 - DNA, 468 bp, Zea mays
  Clone ID: MRT4577_41152C.1
gacctttgggctgatttatgtgcttgggcacgccaggagtctagcgttcggtccccatccgagtttaggcgcccccaatcccgccgcgttctagcccacgtagcacgataccggccacgcgtaactcttcggtacgcttataaattagtacatcacgcatcccggttagttcgactcaataacagggctcctcggagtcgtcgcccactgataccggttaattttaataacgacgcacttttaccgtcacgacaacgccagcttaacgacgctctaggccttctcgcattagctccctaattacgaccaggagacctcgtccgtcggaaagccgggaataacctctcgccgaatccgtcacgccgcgccgcttcacgccaagcggagccttcccagacctgagtttgccccaccataaaaaaccgcacaaggagcttcaaacctgcgaaatcaccctgcgaatcaact

SEQ ID NO: 120249 - DNA, 225 bp, Zea mays
  Clone ID: MRT4577_41153C.1
ggccgcttttttttttttttttttggggggggcagaatgcatccattgacacttatctgacatgcgtacttctgtgggggcggctcacgcacacaggaggaaggtggtccaatatgcaggtgtttcatccaactgattttgttttggtttagcgatccaatgccaaattgctcacattataccggggggggggggttccatcgtatatatcaattattaagaaaa

SEQ ID NO: 120250 - DNA, 232 bp, Zea mays
  Clone ID: MRT4577_41154C.1
attcggctcgagcccaactttgccaccccgggtgtcacccccacagcaaccaaagccccaagaggggcctgtagaactaacccgggggggcacccaaccccaccgcccacaaacccgcacaacccacgaacgcaaacaatccccaccgccagaatcaggaccgacccccaacactaaccaggaatgccgaaaaaccacccaagcacaccacgaacacacatcaacggccccg

SEQ ID NO: 120251 - DNA, 287 bp, Zea mays
  Clone ID: MRT4577_41155C.1
ctgcctttcctctacgcgttccttgccgccatcaccccccgcgggcggcaatcttctgcacgttctttcagggccgaaaatatggcggtcctctcaggcctcgctggcttttgcttcctatcgctataatgctcagacgtgaactgaacaaaccacaatgacactattttggtgtcagattggatttattgcctgtgacagttgagagattggagattttcatacatggctccgtttactaaagcaaggttgtcttggatattgtgtccctaaacaaggactacttg

SEQ ID NO: 120252 - DNA, 313 bp, Zea mays
  Clone ID: MRT4577_41156C.1
aaaccttaccgttttgtaagaggacaaacacactgtttaaagaggacaaacgtacaggcaatgtgagctaaattaaaagggatggaaaacatagctaagaatgatggaaaagaaatgctatgctgatcatcaaagaatgatattaaagggattaaaccgaacaataaaacgaccataaaccaaaaacaaagcaaccacccatgaaaaaaaagataacgatcattgccttcaaacatatcggttatatcagagaatgcaaaccggccaagcaaagaatgtgaacaatcaattgcagcaaaagggccaagcatat

SEQ ID NO: 120253 - DNA, 575 bp, Zea mays
  unsure (1)..(575): unsure at all n locations
  Clone ID: MRT4577_41157C.1
gcgttcggcccctcagcctgaanaanagaggatcaaggggccaaaccggtccgcatgagcaagcgactcgcggcggttgtctagtcacgcgacaacatacaagagcgcgctcgccaagtcctcatgaagcgactggggatcttgcctagcgttggccagccaacaaccgctgctaatggtgaagttgcactggagcactacatcaacctcttcaagggtccgttgacgaccgtgactcttcaggcgctgctacccctctatggaatcatcccgcaggggcaggcagtgcatgggacttgatcctgccgcgcgacatcgtgctgtgtgggtacaagatcttagtaaatgtctagtagctccgtgttcgatcgcccaggacgcgtccttgtgtttgtagtcccaagtcttcatcaacaccttgtccgattgcccaaaatcacggtagcagccagaggctttcaattgttgtgtttctgttggaccactccacttagtcgtttaatgttgccacgtctgttcgtcaaaaaaaaaaaaaaaaaaaaaaaaaaaaaaaaaaaacccccccnnnnnnnnnn

SEQ ID NO: 120254 - DNA, 422 bp, Zea mays
  unsure (1)..(422): unsure at all n locations
  Clone ID: MRT4577_41158C.1
tggtggggtgttcctccacctccggggggggggggggtgtcctaggttactgctggctcggggcgtgtgtgaccttcatctgacaggctatctatgttggtcgagaaccattggttgggggggggcctcgcttgggctatttattttcctggttttcacaacgccttcaacacttgtggggggggggggnaatccaagatcatcctcctatctgtatacgcagaggggggggggtttcccctttccaaacatatccacatgagaggcgatgcggaacgccattctaggcatgaacggcaaggagctggacggccgcaacatcaccgctaacgaggcccattcccgccgaggccgcggaggcgtgggccacgggggatactgcggtggccctggaggcgggggctaccgcggcggcgggcgcc

SEQ ID NO: 120255 - DNA, 417 bp, Zea mays
  Clone ID: MRT4577_41159C.1
ctttaaaagaggtaagagcaacgtgctttgggagcagagaagagggagaaagcagcatcttgcctggatgagccaggggacacagaagagaagcccactatctcatttaatctttacaactctcttgcaaggttccctggttgtgaaaatacatgagataaatcatgaaggccactatcatcctccttctgcttgcacaagtttcctgggctggaccatttcaacagagaggcttatttgactttatgctagaagatgaggcttctgggataggcccagaagttcctgatgaccgcgacttcgagccctccctaggcccagtgtgccccttccgctgtcaatgccatcttcgagtggtccagtgttctgatttgggtctggacaaagtgccaaaggatcttccccctgacacaactc

SEQ ID NO: 120256 - DNA, 1406 bp, Zea mays
  Clone ID: MRT4577_4115C.1
gcggagcgcaagtagatagctgctgcgtcttcctggcctgagggtttcggattcatcagccgggccgccggggtcgccatcgccgccgttgggacggcggcggcggagtttggcgtcgagttcttcagagggttaggttaggtgcacgcgtctctcgcgttcctccttcccaactcgaattcctttctttccatacccgtccccatgacgttcgttcttccatgattcccttccatatttgctccagccaggccatccgcggctgcgtggctgctctcctgctattttaatgcctgccttctctccctctcacgcctcataaaaaaaactaataattccttgggatctgaggggatccgcgtggggttggtaggatcgcgggcagagattttagccaggactggaggaaaaccagtccgctctctctccatgagcttcggcggcatgttcgacggcgccggctccggcgtcttctcctacgacgctaccggcggcggcacgggcatgcacaaccccggccgcctcgtcccggccccgcccctgccgaaacctggcggattcggcgccacgggtctctccctcgggctgcaaacgaacatggaaggggctcagctgggcgacttgggtcgtatgggcctgattggcggcggcgggagcgggagcggaggcgacggggactcgctgggccgcggccgtgaggacgagatcgacagccggtcaggcagcgacaacgtcgacggcgcctccggtgacgagatcgacccggacaacagtaaccctcgcaggaagaagaagcgataccaccgccacacaccgcagcaaatccaagaactcgaagctgtgttcaaggagtgcccccaccccgacgagaagcaaaggatggagctcagcaagcggctcaacctagagagccgccaggtcaagttctggttccagaaccgccgcacgcagatgaagacgcagatcgagcggcacgagaacgcgctgctgaggcaggagaacgacaagctgagggcggagaacatgacgatccgggaggcgatgcgcaaccccatctgcgccaactgtggcggcgcggccgtgctcggggaggtgtcgctggaggagcagcacctccgcatagagaacgcgcggctcaaggacgagctggaccgcgtctgcgccctcgccggcaagttcctcggccgcccaatctcctctggcagctccatgtcgtcgtccctgcaaggctgctccggcctcgagctcgccgtcggctccaacaacggctacgggcccggtcccctcggcgcgtcagcgctgcagcccctccccgacctactcggcgccggccttccgggccccgtgggctcggccgccatgcgcttgcccatgggcattggcgccctcgacgttgcgctgcacgg

SEQ ID NO: 120257 - DNA, 225 bp, Zea mays
  Clone ID: MRT4577_41160C.1
acccacacagcaaataacccctaactcctgaaggatcaactctcctgtaaccctcatcatgctgaactacagacccaaactaccacctacacaacatttcctaatattatgctgcaatgcaagaacctgaatagctaccacgctatctccacaaacaacacctacaccaactcatacgcaccatacacattgaacctaaatgatcttcactcatacaacatatac

SEQ ID NO: 120258 - DNA, 562 bp, Zea mays
  Clone ID: MRT4577_41161C.1
gcattcaaggaatcaatgggaagtaggctccaatcatacaaatgacgccataaacagcaactcctggtccaatgtaacaattgaacctaagtacaacaataccattataccagtaacaaaagcataaaaagtgtcactatctcgtttatgagaaatcatgcgcctaatctgaatgatggatgatccagtgatctactttggcaagaagggcttgaggtcagacttgtccacctgaagctttgttgagatggcctcgatctgctgattcctgcaaatccaagagccatccatctttgggaaacagaatatataaaaaaaaatgaccaataacagagttctttctttgtgttttccaccaggaccttcacttcagtaattccagatgaaaatcgtaacttaaccaacttatacatgatgagaggagtcactaattcacactaccttatcacgcagcagctcagaagcagtcatcatccgtgctggagtgcagcctcgtcttggccctcttggcatccgggccagatgcagccatggggctcgcctccaattggcactcgctgta

SEQ ID NO: 120259 - DNA, 251 bp, Zea mays
  unsure (1)..(251): unsure at all n locations
  Clone ID: MRT4577_41163C.1
acgtaagctcggaacccggctcgagggcgcgcccgccgcgcgttttcacgcggcccacgaggaggccgccgaaaagggcggagggancccgcacgccggagggccgggcggcgcggacgaagccgccgangctcaagcccgcgaaggagcgccgacaaccggaggactgcccaccggacaccacaaacgagagggccgggcacgaggaccgcgagccgcgcgcccacgccgcgaggctcccacacgagaac

SEQ ID NO: 120260 - DNA, 1409 bp, Zea mays
  Clone ID: MRT4577_41164C.1
gacgtagagatcgacgctaacatatagctcaagtttacagtacaatgatgataacatggggtcttttttcgacgctgttacttgtcttctccctcgactcactgcgctgcagctaatatcatatcactgcttatctggcaccatctacagttctacacgtagtagcgcggggactccgttccggccaaaaaaaatcctaaggaaacgcggccgaggacgagagtgggccagcggggtcgaggaggtaaagaaaactaatggcagcgaaggagggaggcagtggggaaggtgggaagcggctgcccaaagccacctccaccaccaggccttcttctacccccatcccaacgcccaggccacaccagcgctgcgagctctctcctcgtagtcgtagcggagtcccagcccctcacgccctcccgatcgcgctcgtcggcgccctgtcgactcgagcccgcttctgggccgatcgacagcgagaggagcgagcgcagcggcgcgccgaggagagctctttcggtgctgtataacgacgacgacagcaggcggcagataacacataaaggcgcgcgatgtgcgacgcggcggccgtggcggctccgcggtacaggggcgtgcggaagcggccgtggggccggttcgcggcggagatccgggacccggcgaagcgcgcgcgcgtctggctcggcaccttcgactccgccgaggccgcggcgcgcgcctacgacgtggccgcgcgggccctgcgcggcccgctcgccaggaccaacttccccgcgctcacctcccgccctcccgccgccccgcgcccacgtgcagctccggctccaccgtcgagtcctccagcgggccccgcgccggggaccccagggccagggcggcgcatcgcggccgtgctgctgcgaagccgcggcccccacggcaggcgccaccgccgcccaccgacgccgactgccacagcgactgcgcgtcgtcggcctccgtcgtggacgacggcgacgacgcgtccacggtccggtcgcgcgcgcgcccgtcgctcgatctcaacctcccggcgccgctcgacttggacggtggccacgacctcgggttctgctcggacctgcggctctgtctctgagcgatcggatccacggacgaggcggattctgctttgacttgtcgtgagcttgtagcagtagtgccatgtactacgcgatacgaatgacaaattggcaatagaattgaatgatggttcctttttgttatcgtcgagagtttccgtccttttttcctcatgtcttgatctgatttgtatctttgctctcattctgtatgtactttgtaccccagaaaacatctaaaagggagttgttgacgaaaaaacatctaaagagagatgttggcgaactaacacgaatctctaccgc

SEQ ID NO: 120261 - DNA, 1069 bp, Zea mays
  unsure (1)..(1069): unsure at all n locations
  Clone ID: MRT4577_41165C.1
cgggnccagcccttcttctacccccaaccctcccccaacaccacaccagcgcagcgcccgccctcacgtggccgactcccagctagcccctcacgcgctcgtcggcgccctgtcgagtcgagcccgcatctcgcccgatcgagagcgagcgcatccgcgcgccggggagagctttgctttcggtggtctgtaacgactcaacgacgacggcaggcggtagataaaggcgcgcgatgtgcgacgcggcgccgaggtacaggggcgtgcggaagcggccgtggggccggttcgcggcggagatccgggacccggcgaagcgcgcgcgcgtctggctcggcaccttcgactcggccgaggccgcggcgcgcgcctacgacgtggccgcgcgggccctgcgcggcccgctcgccaggaccaacttccccgcgctcgccaccacctcccgccgccccgcgcccacgtgcagctccggctccaccgtcgagtcctccagcgggccccgcgccggggaccccagggcaggcggcgcatcgcggccgtgctgctgcgaagccgcggcggcccccacggcaggcgccaccgccgtccaccgacgccgactgccacagcgactgcgcgtcgtcggcctccgtcgtggacgacggcgacgacgcgtccacggtccggtcgcgcgcgcgcccgtcgctcgatctcaacctcccggcgccgctcgacttggacggtggccacgacctcgggttctgcacggacctgcggctctgtctctgagcgatcggaatcggatccacggacgaggcggattctgctttgacttgtcgtgaacttgtagcagtagtgccatgtactacgcgatacgaatggcaatagaattggatgatggttccttttctttaacgctctccggattcattcagaggtcagtcagatcgtcgagagtttcagcctttttctcatgtcttgatctgatttgtatcttgctatcattctgtatgtactttgtacaccagaaaacatctaaaagggagatgttgacgaactaacacgaatctctaccgcaattctgagtttt

SEQ ID NO: 120262 - DNA, 183 bp, Zea mays
  Clone ID: MRT4577_41166C.1
gttaatttagtaaataaacaagtcaaagatttgtggaaaataggaagtgaacccatattttaaattctcataagtagtcttcatgtaataaacaggtttttagtttgttcttcagattgatagggagttttaaagaaattttagtagttactaaattatgttactgtatttttcagaaatcca

SEQ ID NO: 120263 - DNA, 294 bp, Zea mays
  Clone ID: MRT4577_41167C.1
cccacgccgtccggcacacggctccgtgacggtggaatactgtggcgccctgggcgataggcagtccctggagccgagggggccgctttgtaagaggccaagctgactcgcgcgtgcatgaggcagcataggtctttgatgggtgcaccggaaattcatttgactgacctggtgtataacacgtgcggattgcgcacctcctggctttggccaacgtaatggacttgacctgcatcctcctttctcgggttgagggctggatcctaataggcgccgttcagcttcccccttccc

SEQ ID NO: 120264 - DNA, 312 bp, Zea mays
  Clone ID: MRT4577_41168C.1
gtctgctggttttttttatttttattattacttaatctgttttacatgtgattttattgactgagaacatgaagcaaaaaagaacacaagctggagggggacacatggggcaccaggccccactaccaccaccagaccagacgacgcccactctatttagcccaaggcactggcaggccggaccgggcagcccacgcaacagccactgctatagctacgacacactggcacacacacagagatggagagaaaccgacacgttcgcggaggactgaacaggaagccggggccaagtaggcgcgcgcgcgctga

SEQ ID NO: 120265 - DNA, 326 bp, Zea mays
  unsure (1)..(326): unsure at all n locations
  Clone ID: MRT4577_41169C.1
ttttattttttttttttttttttttggttttggtaaaaaaaaaaggtggtaaaaaacaattaaaggttattcttttaaacacgatgtaaatagnnttctcatacacaacaaaaacaaagttttcttttaaaggtataacaacacccaactaaaaaaaatttgtggtgaaaataaaacccaaaacaagtaacacaattatgtaatggcaaaaatacacaaaaggtaaaccaagaccgccattaaattcctaataattataaacttcagcaacatttttacccgtgctttttaattctttcccaaacctattttaaagttaaaaagga

SEQ ID NO: 120266 - DNA, 343 bp, Zea mays
  Clone ID: MRT4577_4116C.1
gatgataatactgtcatcattactgggagagcgtaagtcgtcccataaatacacgcccgacacctgaaagagtaccatatgggcctatggggagtggatttaaagctagacaaaacaagggccatagccgtgttctaggaaaaagagaaatgcattaacaatttggcagaacaaacaaactgaaagcaaaaaatggaaagacaggggggcctaataactgagttaactcacaataatctgcgagcgctcacgggacgattagcagtatgtaaacacggcttgccaccagcatcacagaatacaacaacgcacagagagaggcggtgcgcgtatcgatcgccac

SEQ ID NO: 120267 - DNA, 1245 bp, Zea mays
  Clone ID: MRT4577_41170C.1
atggtgcaaatcgtcgagcaccgcaccgggacttcggtggattttctggtggaagaggaagctgcctattctacgccacaggttcccaaccgcccagtgccgggcactgctgctgtgcacgctgcacggcagcatacaactgcgcagacatctcggactctgtcgagggcggctccgggggcattgtctgcagccagggagttgctgcgtcaccctccaagctccacggcctcattgggggccaggaagcagtggcgggacgacgttgaccgactgctcggcatggcacattctacctcgaccagggcgcgtgagcgccggcaaaacatcgagggtcgcaacctcgatcaagacttcactgcggtagcaccgcaaaccccagtgggcgcccggttccagacgggtgtccccttggccggcgtgggttgcgccgctctcgcggatcacctcagcgcagcgtcctggccatccaagtttcagccgcacctgctagaaaagtacgacggtacatcaagtccgttggaatttctgcaggtgtacgtcaccgctatcatagcagcaggtggaaacaccgctgtaatggcaacatattttcatgttgccttgtctgggcctacccggacttggctcatgaatcttgccccaggatcaatctattcctgggaagagctctgcgcgtggttcacagcgaactttaccagtgcttaccaacaacacagtgtggaggcccacctccacgcagtgaggcaggaaccccgggaggctctctggatgtttatctcccgcttcaccaaggtgcgaggtactatacctcgtatttcctatgcttccatcatcatggccttccgtcagggagtacgtgacgaaaaaatgttggaaaagttagccacacatgacgtggagactgtctccacactcttcgctctggccgacaaatgcgccagagccaccgagggtcgggcatggcactcggccccacaaactggagctgcccagacgggtggctcgggtgccgtcccccgggacggtaaaaataaaaagaagggtcgcggccacgagaagccccgatcaaccgctctagtcgtcgcagctgcaactgggggccggggcgaccacaacaagcgcccacgaccgcagaggggtaacagtggctcatgccctgtacaccccaacagtcgccatagcaccacggagtgtcgcgagatcatcaacctcacgaaacgcgtcagcgagcggcgcgagtag

SEQ ID NO: 120268 - DNA, 168 bp, Zea mays
  Clone ID: MRT4577_41171C.1
ttctttttttttgaccacaaaaactgagacaaagtgggggcatattacgaggcaacgggggcatccgtactgaaacacatgaactttagacaatctaaagcacaagtagacagaaaaacaaccgacaataaactataaggcggccctagtcaagccttggaggctaga

SEQ ID NO: 120269 - DNA, 679 bp, Zea mays
  unsure (1)..(679): unsure at all n locations
  Clone ID: MRT4577_41172C.1
aaaaaaaaaaactcctctccccacntttccccatttttaccgcacatctctccttcctcggcgtctcgcacaccccagcaccttcgtctcccctcccctcccctcccctcccccaacaatcggaaccggatagaaagttcggcttcctcccggacgactcggcgcaagttcttccgacccgaggagcccctgttatgaacggcatgccgatctctgcgtcctctgcggcaagcgtcgacagtggcgcggtggcggccggcacacccatgaagaatgcaacggcggcggacgctctcgccgagatggcgagacatcttaccgtcgacacggaagacaccttcgcgggcctgctggagctcgccgctgacgacgacgcagaggggctgcgcctcgcgctggagcgcgcgccacctgccgccgcggacgaggctggcctctggtacggccgccggaaggtcctggagcaccgcaccccgctgatggtcgctgccacctatgggagccttgccgcgctccgcctgctagtgtccatctcgtatgtggacgtcaaccgccgctcgggcacggacggcaccactgccctccactgcgccgnctctggtggctcacggacggctgttgagtccgtcaagctgcttctgggagctggggcagacgctaacaccatggatgacgctgg

SEQ ID NO: 120270 - DNA, 151 bp, Zea mays
  Clone ID: MRT4577_41173C.1
gcccgacgggaggtgcaccaagtcttcgctgaccccttaggggaggacccggttccatccttcgccggaggcgaccgcccgtcaacaggtatgcccaccctttctcttgccggccccgctctgcgaaaccgggcatctaaaccctaaccta

SEQ ID NO: 120271 - DNA, 959 bp, Zea mays
  unsure (1)..(959): unsure at all n locations
  Clone ID: MRT4577_41174C.1
ctcgaggccggccgggtcagcgaagcacgactccctcaccccgcatgcccgctcttcccccagtctactctcttttcagtttctctctccccactttccccatttttaccgcacatctctccttcctcggcgtctcgcacaccccagcaccttcgtctcccctcccctcccccaacaatcggaaccggatagaaagttcggcttcctcccggacgactcggcgcaaggtcgcagcttttctctcgatttttcgcgcttccccgttttgacgcttgcttcgcatggggattctggagatctttggggcggttcgctgctgagatggttcgcctcatcacgcgctgctgtgactcccaacagttcttccgatccgaggagcccctgttatgaacggcatgccgatctctgcgtcctctgcggcaagtgtcgacagtggcgcggtggcggccggcacgcccatgaagaatgcaacggcggcggacgctctcgccgagatggcgagacatcttaccgtcgacacggaagacaccttcgcgggcctgctggagctcgccgctgacgacgacgcagaggggctgcgcctcgcgctggagcgcgcgccacctgccgccgcggacgaggctggcctctggtacggccgccggaaggtcctggagcaccgcaccccgctgatggtcgctgccacctatgggagccttgccgcgctccgcctgctagtgtccatctcgtatgtggacgtcaaccgccgctcgggcacggacggcaccactgccctccactgcgccgcctctggtggctcacggacggctgttgagtcggtcaagctgcttctgggagctgnggcagacgctaacacatggatgacgctgngcgtcgtcgggctgatgtgatctctgtggcaccggagatgtttgatgccaagttcngcccttcagatcttcttggattcccccagtctg

SEQ ID NO: 120272 - DNA, 285 bp, Zea mays
  Clone ID: MRT4577_41175C.1
ttttttttttgtttcattttttgactcaactgggtggggtgttccttgtttcttatttgtacagctgcttccatttaaccaagttgtctttgcgtactttgttgtgttcctacgcaaaagcggggggggcttttttcattggggagggggggggaatgcccgaaaacgggggcaaggacctaaaatgttggcgttcttccagaccattttgatgaaggggggcggggcccctcaactagcgaggggaatatttttcagctcggagataacaaatgatacgtgccc

SEQ ID NO: 120273 - DNA, 568 bp, Zea mays
  unsure (1)..(568): unsure at all n locations
  Clone ID: MRT4577_41176C.1
gtaccgggccccccctcgagttttttttttttttttttttttttttttttttttttttttaacgaagcataaactattgatgatattgcctcattacatngcggaactggatccacccttcgattaggggtggattgagaagaatttgcaagttacaagtgcacgcactggcactgcgaaaaaatggggaaacaactaaccaagtcaagaactactaaggttcatcaacaaatccaactctccacaagttattctttccttgcagttacaactacacgcaagatttaaacgaaagcatctcagcaatagacagttagcttctgattctaaactcaggcactgcttcgatgaacagacttgttgatcctctgcaacaatttttttaaacgcaacatccacggggtttagataccgaaaaagaaaattgttggctggtataccatctgaaccctgaagctgacactagatgaatctttggtcatcattttgtttggctgcagcctgcagctatggcagcaaccctcatgcactctgctggccgttgctgctacattctgaactttctccg

SEQ ID NO: 120274 - DNA, 333 bp, Zea mays
  unsure (1)..(333): unsure at all n locations
  Clone ID: MRT4577_41177C.1
tccggattcggtcgacccagcgtcggcagcacgacgagtatcttaatacgtatatacgaagcgcatgatgtggtgcatatctgggctgtactgtgtctatggcgggaacccgatggcaacggacatccccaaacagacagacgcgaatgcttcctgtcgattgaaaagaatacaggatccagagttctacatctgaacactattatacagacgccggccgcgatactgcngtggaatgggtacatgcacaaagcacccaggcggtcattgaactcaactcacagcaaagttgcaagctaatcttcatcttggaacctaccttcttaaatactg

SEQ ID NO: 120275 - DNA, 368 bp, Zea mays
  Clone ID: MRT4577_41178C.1
aaaaattccgttcttttccttctcagggggggcccctaaagaccccattttttggcccccaataaacctttccagattcttggaccaccgtttcaaaaaggggtggccccgggaaatttactaacacctttttggggggacttagaaccaccatttttagccttggcaatttaggacccctgaaaattaaggtgggcgcccacgcccaaaattaagggcttttttttttccttttgggcccatacattttcgtcaaactctcatttgttccggccaatttttccagctcaaaattgtctggtccgaaatccgtgggcccccaaactttaggggggccccgagcccgtttttcggaggatacaaaatct

SEQ ID NO: 120276 - DNA, 332 bp, Zea mays
  Clone ID: MRT4577_41179C.1
gcacccttctaccccacagaagcgaatttcacgtctcccgcctttctaatcgtactgtgccacataccctgtctaggtacgtacacggcatgacaccatggcttctcttatctcctctcgtgtggcgcttgagagaccgaatggccagagatctcactatagcccctcgagaactggaaacagacgctattcgacaagatggtgaatgatatgctgccatcgaatctggctatgtacatgggccaaccatgaccgttgttgacagataatgaccagaccatgagcgtgttcagagtggagagacgctgggcacctatgaccccgtggagaag

SEQ ID NO: 120277 - DNA, 250 bp, Zea mays
  unsure (1)..(250): unsure at all n locations
  Clone ID: MRT4577_4117C.1
gagaccaacaagcaacagagaaaggggaanccaggagcaacaanagagcagcgagggcgacgaagaganggncccngcgcaagccccaggcnncgncagcaagagaagcnaacgcgacaaggnncccgcaaagcgcacaagcnccnanagcancccnncnncccccaaaccncccaacaaaganagcnncagnangcgaaaacccagcncnncaacccnanaggcgccaacaagcaancgcagcaagcaa

SEQ ID NO: 120278 - DNA, 257 bp, Zea mays
  Clone ID: MRT4577_41180C.1
ggagtccacacaggcagacttgaccttgaccagatagtcttcaagatgctcaacttaggcggaggcgcaaaatgtggagcctgtgaaaagaccgtctaccatgcagaagaaatccagtgcaatggaaggagtttccacaagacgtgtttccactgcatggcctgcaggaaggctcttgacagcacgacagtcgcggctcatgagtcggagatctactgcaaggctggctatgggcgcagatgatgggcccaaaggat

SEQ ID NO: 120279 - DNA, 454 bp, Zea mays
  Clone ID: MRT4577_41181C.1
gggaaagcgcgggtggggggtttcaaaggggggaagccccgcgacgatgggggttcaaattcaaataactcccaatgcccagaggcaaagggggggggggggttgattaaaaggttcacgggggcccatagacccgacaaaatatgggcccttaatgctcaacccacccctggggtcccccccacatagtttcagaccttccggggggaaaaattattctgggaagcacttttctccggggggggagaagacaactggggcggttcaccagaccttgggttcttcataatcctaggtggggccggtcatggggggggtcagggcgaccacccgggggccggatccccactcggggggggacccggacacgggctttacaaaattgccgttcaagggaatgccccccttagcatcaaagatgctggacctggggtccccccggaaaggggggaaa

SEQ ID NO: 120280 - DNA, 446 bp, Zea mays
  Clone ID: MRT4577_41182C.1
aacaatacaaagcaacccccaagggggttttgggggacaatacagggaggggttttggttaaacaactcatcagcaatagataaaaccccccagcatgcttttgggccagctactggtacaactttttggggttccagcattaggatcaaaccgggtaacgggttttaaggcctttgtccattttttttggatcgtcatgaacaatgaatccaatggggtccttggaggccaaaagttccttccactggttcccgatgcttacctgagggggttaattgggggcattttttggccaaatagaaatttttttctggttcccacgcacactgacaatgtggccacaaattttatcaccatagtgggaattggtcaccaattatagccaggggagggggccgccaaaaagtattaaattttcctttttcccagggggggggggcattta

SEQ ID NO: 120281 - DNA, 839 bp, Zea mays
  Clone ID: MRT4577_41183C.1
gccggccgggttgcgccctgcgtccaccaagaaaaaaatatccgcaacaaattcctagctaaaccctcctccccgtcgtccaccgccggtcgccgccatggcgctctccaagcctctcctctctcgcctcctccccctttctctccgcctacgtcctcaggcccgcttcctctgcctcgccaccccgcctttgaccccgacccccacccaaatcgacgaccagccacccgcggacgccgccgccgagcgccgccgccgcaagcgccgcctccgcgtggagccccctctctcccgaggccccgcgccgcagcgcgcgccgggggctccccgccccgcgtcaaaccccaacgcgcccaagatcccggagccggcctcggtgctgtcggggaagcgcctcgacctgcaccgccgaatcctcacgctcatccgcgagaacgaccttgacgaggcggcgctcctcacgcgccactccatctactccaactgccgccccaccgtcttcacctgcaacgccgtcctcgccgccgctgctccgccaggcccgctacgccgacctcctatccctccaccgcttcgtcacgcaggcctctgtcgcgcccaccgtcgccacctacaacctcctccttcaggcctactgcgactgccgccgccctgacgtcgcgcttgagcacttccgcctccttctcaaggacgactcgcccgtgctcccatcccccaccacataccgcatcctggcgcgctccctcgccgagaacggcaagctagaccaggcgctcgagctcaaggatggcatgctcgagcgtggccttattgcccctgataccaggtgtatgcttcat

SEQ ID NO: 120282 - DNA, 605 bp, Zea mays
  Clone ID: MRT4577_41184C.1
ccggccggaaaagccaaggccaggtggtattaccacatcgccatccgtcacagtaccaccataaccaactgtcctgcctataaaccctttaacttcgcttccgcctccctccctccctccaccacgacacacctcgccttccccacgcaccgggccaggtggtataatcaatggacctcgacgccgacatgatcccgacctccccctccgccgactcctcggcctcctcctccgacctcgacaccgagtgtgccgccagtaggaagcaggcgtcggcggctcccagctcggcgagcggcgacacctgcccagcagcggcgcaggcacgcaaaaggcgttggggttgggccgtcggtcgctcactcactccacgcctcgcctcccagcaaggtagtccagctccgcagctccatggctcctccgctcctgcagacccgcgccggtgcgctgccagcaaaggttgaagccttgaaggaagcgaggaaccgaagggcagccaccaagccacagaagacagagcgttgggcggctcgttcaatgggcctgatgcgtaatggggtcgtgcgttagggtacagacgaggtctgaaatgtggatttgagaac

SEQ ID NO: 120283 - DNA, 320 bp, Zea mays
  Clone ID: MRT4577_41185C.1
ataactcaaagtccccactgaggggtttcagcataaacacacagctcatcgaacttacctgtacaggtataacgttagggggaacaggtactattagcatggaaaactgcagaagctaagaagtgctgggcgtataagatgaactcacggctaataaatgagccgagaccgggtataaataccacactgaggccaggatggcctgcgccaaagctaggacggatccaccgaacaaagcctcccgagcatacgcccaaaacacggaccggtgcgggtgagcaagaccaccgtgattgcagccggggcagttggtccaggag

SEQ ID NO: 120284 - DNA, 365 bp, Zea mays
  Clone ID: MRT4577_41186C.1
gtttctttctttctttcttgggacgatatggatgccgccgcggtttcgtcgttgctgtgcgcaccgggggtccgcgccgcggccaaagaagggggagttttgaatggacaacatgaacctgaacaaaaaaagcaccagggggaaggggacggggcctttgaaccggaccaggttggccaccaggtttggttgaagggggggcagaacattaagccaattcagaaccttgaggccccccccccgcccccgcccgagaaacccaaaaaaggggaaacccccccccccccccccaaaaaaaaagaggagcccggccccccgcccccggcgaaaggggagcccccacccaaagagaagaccccgccacc

SEQ ID NO: 120285 - DNA, 209 bp, Zea mays
  Clone ID: MRT4577_41187C.1
tttcccggcgctcgcgttcttttatctgcagggcatccgaaaaaagtccgcccccctaaaggaacggtgaaacagaatgtccgccggatcaataaaccaaaggtccaacccaagcgggccggggggaagcccccgggccccgactttttggggaccatgctcaagcttaaaaagaaagccgcgaccggaaagcgttctttaccatgaca

SEQ ID NO: 120286 - DNA, 537 bp, Zea mays
  Clone ID: MRT4577_41188C.1
gggaaccaaaaatttctaattccttgatccaaatacagcaaagggggcggttctctgaacccccccagcccaatcaaaaatttaaaaaaaggtaaagctcgctgttggtggtctcggtccataagaacaggataaattaccggatatcctcgctaccggggggaactggaccaaaacgttgggctattttggactttgaggggctcgtggccaacaggcttgcctggactgaccattttctttggggaggtaaatccacaattctgaaagaaaaacaggggaaggattttaaacattttccaaaaaagccccttgcgtgggctaagaacagtactttctttcctgaaaaccaatcttagaaagtctttcctaaacacggatatggccttcggcattgcctttttagcggcttctatgggcataaaaccaccactggggagcacaagttgagaaacactatacagtttccccggggggccttccctctctaaactttgggaggcattgaggagcctcccgcaagggcctcctagccta

SEQ ID NO: 120287 - DNA, 281 bp, Zea mays
  Clone ID: MRT4577_41189C.1
tcctctcagggcgggcgggatctgcatcagcagcagcagcacgaaaccctgtaggagcctgccatgactacccgctgctgcctggggggcgctgactctcctcgcggcgctggtctcgcccactgccagcctcgagaccggcctctacaacaagatgagccccaccgacgagaccatcgagcacaacacctgggtcgaggggatgcaacagcaaatcgggcgtcgctccgccgctcctccccatgaagtaccatgactggtacagcacaagccgccacggc

SEQ ID NO: 120288 - DNA, 499 bp, Zea mays
  Clone ID: MRT4577_4118C.1
cagccactacgaaggcggaggtatctgctggagtatacaatctttcacgcctctattctctaaccatatcattcggcacagcgtatacggatgatggcacttggaactaagactgaccactgtgcggaccagaaaccccaacggtcctgatccccaaggagggggcgctacgccttacaaccttgtaataacaaccaacagccggctcgaacatctactgtgaacacttaaacactaccttatacctaccgagcatctaaggaaagtaacataacaataaatcggtggctcatgtactggttgttgcaattgataacatccacccaggtgtgattcctgataagattctccactatgcaagaacaaggacacttttacattaacaggaatctatgggtctgatgctctagctctggctatcagtaacactttatccaaagcagtacactaagtaacacacagcggaaggacagaaataagtcagcttgacaaccataca

SEQ ID NO: 120289 - DNA, 401 bp, Zea mays
  Clone ID: MRT4577_41190C.1
acaatctcgtttacacctaactatacagatcatctcatcttgcaccttacgactgaattatctagcacaggtcaacatttcatgcgcgtcggcaaaatctatatcatatagtctacatctctcatctcactacaaattgctactacattcttataaaagaacttcatcactctattctttcatggctatgcacccatctgactcaaataatattgatctatagtacacacaccttctacttcatgacaaacttatcctatattataaagatcttacgatctgtcacatcgtttactatgtctacaccgaatgttctaattatctatatccttccttcctacaactattaccgtatcttcccactctcacctcttaacctatcatatctgatcccaacattc

SEQ ID NO: 120290 - DNA, 191 bp, Zea mays
  Clone ID: MRT4577_41191C.1
ttatttatttaatttttttttttttttctattgttaattttgtatttttttaacccataaaaatgccttgcaattagaatggggaacacaatttatgcgtaaatgcgtgcgaaggtaataaaacgtgtaggcccacacaaacagcatattacctcgagcagtgtgactgacacaaaagttgacgatctcaa

SEQ ID NO: 120291 - DNA, 682 bp, Zea mays
  Clone ID: MRT4577_41192C.1
cggggctctcccccgggctgagttattcgaattgctccagtcagggctagtccagtgcccccctgaacccgcatccggagctcagaaacccccgccaccggagcccggacggagacgatgccggagacccatccgccgccgccgaggccggtgatgctcgccgacctcaactttgaaccagcggagagcgacggcgaggaccgcccaccgacccccgcacccaacccccccgccgccgccgcggctccggcggacgccgctgactcgtccacgaagagtggcaatgaggagggtggtttgacaaaaactgtgatcgctacaaaggataccgacactgttgaatgtgaagatgttgatcaacattgtcaaggggcttctgctccacgggaggaaaaagtagcaacctgaaagctgctttggttcatgtggcccgaaaaatgcctaagaatgctcatgcacattttatgttgggtttgatgtatcaaagacttggtcaggcacagaaggcaatagcatcatatgaaaagtcaactgagatactgctacaagatgaagaagaagtgcggagacctgatttactctcatcagtgaggatacaccacgcacagtgcattttgcaagcaagcatgggggatagttttgatgaagagcttgaaactggtgagttagatgacattctttc

SEQ ID NO: 120292 - DNA, 347 bp, Zea mays
  Clone ID: MRT4577_41193C.1
ctttctttttttttccttctttgttttttttttttcttggtcttctgaattgaaacggccacttggctaaggctttcccgataacactttaaccatacgcccataaaaccttggccgtgtatgacaattcacaaaaacgttcttttcacaggatccaattgatgtcgggggcccctctcatgtaaagaatttcataaccaccatatatgctcacatgtgaacaggaggaatgcggctttccgacctggggccgccaggcgaagatcttgatgccgggaccgagctcctcactatgtttgcagaaaccgcttagacgccgggccggccttccctttttgcaagtctag

SEQ ID NO: 120293 - DNA, 563 bp, Zea mays
  Clone ID: MRT4577_41194C.1
cgagtaccataattagtattagtatatatcataaattagtcctgacgagtctagctgcatgtctgttgcagcgacctacatttatgtaggaaaacaagcatttaaaaatagaaactgtcacatatcttttttttctaaatttatgtgcatgcagggaaatgtgtttgactcatgcatgatttcctattttttgcatgcacaaacgtggggtttggggtgcacccgacagcctggcttggcaagtgggtgcaatgggcgcatcgggctggaccaggtcgcaggggtggtcggcctggggctcctaatatatctgccctatatatataatcacaatagttgttgttgtcccttgtttaaactcaagattccctaaaaagataatgcatattggatctgttatgtgtaacatgattttgcctataataatcatatgaagttggatgacatgcgaggcatatatattccacaagatgcctcgaaagtgcatatttggtagtgagtatggagggaggggagacgagtgatcatggaggaaaggtgttagggagggagataacgtgtgc

SEQ ID NO: 120294 - DNA, 469 bp, Zea mays
  Clone ID: MRT4577_41195C.1
gcgttattccctgtggttgaggttgttgttatcaggaaatgtccaaagttaccaactctacttagggcgccaaaggtcaaagaactacgtatatatgaagaaaatggacatatctctgtaggagggattagatgtatgacgtcattgtccactttgcatttgatcggcgtcaagccggatggtatggagaggtgggaccatccgtcatctgtggtagatatgaaactgtggaggtgcaatttgttcttgcaagttccaaccacgtgcactggcactatgggtttgctttgggcagctgcaagatctgtcagttacaggatgcaaagagcttgtctactggccagagaaagtattccaaagcttgatttcattgcggatgctatgcattaggtattgcaacaatctaattggatacgcagtggcaaatggtcctgaccaagcaacttctaggaaggaaccagcttttgcc

SEQ ID NO: 120295 - DNA, 620 bp, Zea mays
  Clone ID: MRT4577_41196C.1
tctctatatttaagttggtttggaacaaagggagacaaacccagggagacaaaaccacccataaataactaaatatcttatacgaatagtatgtccgggattggctgacactgaaaaaacgtaagaatccccagggaattttggtttccaaactagaccttaaattgaagtttctttgtgtgtgtcctctcgagaattccctcgcacactcagtgctagaaaagctagaaaccccatcgttgttctttcccacgtgaaaatccaaaaaaataaatgcagggcctagggttagaaccttaactccctccaacgcttagcgtctaaccactaaaacacatatttattcatgttctagaaataataaattttagaaatattttaaatatagaaaccgtagtaacatacagaaaactgactagtatataaaaaagaaaatgttctaacaactagttagaagaattagttgtctatgcctatgcatgcgcatacaaaatagtcttttttagcaaagaagaactttggggttctttggaaagttggcagttcatttcactatgtattaaaagttccagtataatatatttgatataaatataaatagtattgaatataatttgttt

SEQ ID NO: 120296 - DNA, 165 bp, Zea mays
  Clone ID: MRT4577_41197C.1
tgtgtgctctcaaaaagctcggcgctaatggtagctgtgttgagagtgggagaggatgctatcattctacttcaacccccacattgctttgacgcatgttttatctatgttcagatcccatatattatatgtttttgatgcaacaagacaaataatgctcacatg

SEQ ID NO: 120297 - DNA, 584 bp, Zea mays
  unsure (1)..(584): unsure at all n locations
  Clone ID: MRT4577_41198C.1
cccacgcgtccgaatcaatctccgcctcccttcctgcttaccccgaccccgtcggcatctcggagaatcgcggcggtcaaagcccagcctaccccacctcgcgccgcgtcgccgcggtttccgcgggccagtgctctcgggagtcgggagctcagatcaggagggacgggctaggtagggttcgcgagcgagcgagggtgctgccgtccggcgccggtgtccgagtagcaagaggagagatggacgcgttcctgcagaggctcaagcggttggacgcgtaccccaaggtgaacgaggacttctacaagcggacgctctccggcggcatcgtcacgctcgtcgccgccgtcgtcatgctgcttctcttcatctccgagaccagtaagcgactctccggcggctggtagtagtcgcatttgttcttcttttcccttttttttctattgtgtggccttgttgccgcggcatggttgtggaattcgatgtgtaagttcgtcagaagtaaagaaagaaaatgatgaattctgagccnnnnnaaaaaaaaaaaaaaaaaaacccaaaaaaaaaaaaaaaaatttgcggcc

SEQ ID NO: 120298 - DNA, 407 bp, Zea mays
  Clone ID: MRT4577_41199C.1
tcgatttacattgaaatgctgccggctgtacatgttttttctgagtactacacctgctgggggggcttatgtgacggtgcagtattgtgcctttaatatcaacctaaaaaaaaaaaaaaaataaaaaaaaatataaaaaaagacaacaaaaaaaaatttatagatttaaaaaatatacgaaaagcaaaattgaacaaaaacttaaattgggggctttttttaaaggaacaatttttattttctcatggttgcgaataattagctttattaaagtgtccccaaaaataaatttaagggatgtgttttaataacgtggtgactgataaaaccctggcgaaacaaaataaatttgtattgaaaaaaaattcctattaaatagagcttttaaaaaaaaagagcctcaaaaa

SEQ ID NO: 120299 - DNA, 372 bp, Zea mays
  Clone ID: MRT4577_4119C.1
aatgggccagatcgcgagcggccgcccgggggggcttttaaaaaacaaggggcgtagccaacccccaagagcgcacccaagcaaaacaagatcccgaaaactcccctgcgcgaagcgaaacgcgactcccggaacagcaagcacaacacagcccacacagacgagggaatagccagaagccaccctggcaccaaggggaagcatcccacaccgcgaaccggaaacccacaagaagccggcgcacggacaccccgccggccaaggcgcgaaccccaccaacaaagcggcgccacagaacgcccagcacgaccccccggggaacaaacccggaggacaccccaacccaaaacccccggccggggcggcccggga

SEQ ID NO: 120300 - DNA, 377 bp, Zea mays
  Clone ID: MRT4577_411C.1
ctcctctctcaattcttgcagccaccaaaccgtatcagccgccctcaatcccctcctcccaaggtgccaatccttgccgctcggatcatcgtctcatggtgcgaatctccaatcgttttggtggagggaaggagggaggaaggaaagggggagaacccaaggtggtggacttccggatagttcttagggattttgcccaaacttcggtgaagtggggtgttacagtcatcacggggaacaagagcaatgtaacaggcgtccccatgaacatgacggcgacagtgactgagtaactctgatgccttgggtcacggcttcatagcatagaacctgacaatcagaaacatggcatggctagaaaggagataggacgtggc

SEQ ID NO: 120301 - DNA, 257 bp, Zea mays
  Clone ID: MRT4577_41200C.1
cggacgcgtgggtttttctatctttttcttagtttatattcagttgctgcttgctggtgtttatttgattgatggcggcttcaacatcgttgaatacatccagtacccgactggaacatcaagaaccccgcacgccgaggcgaacgaaaaaccattcgctgaaaaagagagggttccaagccgcaactgcgttcaaaaaatatgggaccacatcatcactacagaaactagaacatgagcaaatatatccacgcaaa

SEQ ID NO: 120302 - DNA, 692 bp, Zea mays
  Clone ID: MRT4577_41201C.1
ttattcggcacgaggagcgagccaatctcatccgctgctgctcgtatgcgcactctttgtctgtgacccgaccccgtcctcaccaaattgctctgagggaatcgattaatcgtccgcctacgccgagcgcggtggaggatcgggacaaggagccttctctcgtagaaatcattaacatcaagtttgtagagagtggttattaggagaagctgacggagctcctccgcgagcggctcgtcgagtgcggctggatggatgagatgaaggcattctgcagggactatgtaaggaagaaaggaagaaataatgtgagggtagatgacctcattcatgttattgttccgaaaggaagagcatcagtgcctgcttcggtgaaggcagaactcctgcaacgtatccggtccttcatggctaccacacttcggtagtcatttatcgtgacggttggagctacatgtaccattgtacgaacactgggaggtcgatcttgttggggaccaagggtgcaggtactgagcatgaaaaggatcagtgtgatcttcatgatgctatcgacatgttcctcgtcagacaggcggttggcgtgatttcaggtgtagcaacacggagttataaccctgaatactgtaccgttaaaggaactttgtagtttgtaatgctacattgccttatcattgtatcaacagatgctt

SEQ ID NO: 120303 - DNA, 572 bp, Zea mays
  Clone ID: MRT4577_41202C.1
gccggccgggccgggtcaggacatgcttcatccatgggcacctatcacaatgatcttgctagatctgagcttaggacaactctccacgcctggatgtatcatgaatgacactgcgtgggctgtgaggggacatgcctcctggtttaactgctatcaatagctgatatatacggaggggaacacgatctgtgcacgcaacgacgttacaaatctccgtggctaacatttggcgatggactcatcttatagatcaactacctgctggatctgatgaatgtatctgatgctgtcaaccttccatggatgaaaaaaggaggtgctgtgcctacattgaacttatgactctctgtactggcataatgggatagagtcctttctttacgtagcggtgctctaccaagctcttacctgtactcatttctcttatctagatttcatgtgctgattttgactggagtgccaaccctattgcctggcttaactcttggtgatcttgccatgtgaggatgctgagccatgtaccttgcgctgacctagaatgatctgagtctggcctgcctactactttgtgt

SEQ ID NO: 120304 - DNA, 345 bp, Zea mays
  Clone ID: MRT4577_41203C.1
tcttccttcctctcgtccaacactactcaaggatgcatttactcttccacctcatcatcctatagacgggcatttttctatattcgtgctcccaaatcaaactccacttccactaatcatattcgattctactctcctattcacatacctctttgcacattttacacattcatactctcatgccaaattcatcatatcatctcactattaaacgccattactctactcactctgacttaacattatatcacatcccataaatcttcaccctatatcttcccccaaacgataacctcatactctttcctactatcaatgcaaaactccacgctaactctaactttc

SEQ ID NO: 120305 - DNA, 871 bp, Zea mays
  Clone ID: MRT4577_41204C.1
ccggccgggatgtaagcgagccaatctcatccgctgctgctcgtatgcgcactctttgtctgtgacccgaccccgtcctcaccaaattgctctgttaatgcttcgctcaaaattttgctcgtgccctttttttcgtctgagaaaaagaattctgattttgatgcggtggggcgacggtttcaggagggaatcgattaatcgtccgcctacgccgagcgcggtggaggatcgggacaaggagccttctctcgtagaaatcattaacatcaagtttgtagagagtggagagaaggagaagctgacggagctcctccgcgagcggctcgtcgagtgcggctggatggatgagatgaaggcattctgcagggactatgtaaggaagaaaggaagaaataatgtgagggtagatgacctcattcatgttattgttccgaaaggaagagcatcagtgcctgcttcggtgaaggcagaactcctgcaacgtatccggtccttcatggctaccacacttcggtagtcatttatcgtgacggttggagctacatgtaccattgtacgaacactgggaggtcgatcttgttggggaccaagggtgcaggtactgagcatgaaaaggatcagtgtgatcttcatgatgctatcgacatgttcctcgtcagacaggcggttggcgtgatttcaggtgtagcaacacggagttataaccctgaatactgtaccgttaaaggaaccttgtagtttgtaatgctacattgccttatcattgtatcaacagatgctttatttcacaattagaaaacagaaacccaatcttgatataaatgactaaaaaaaaaaacatcacgcaaaaaaaaaaaaaaaaggcccccta

SEQ ID NO: 120306 - DNA, 757 bp, Zea mays
  Clone ID: MRT4577_41205C.1
ccggccggggtacacaaagctcctggcgagcaatgaaaagctaacagccatggccgacgaaagaagtccattgattcaacgcgtcgatgtgcgcccccatcgcgaccgttacccgtaccatcgccttcgattcttctgcactaccctcctgagcgcgacaataatcgccggtggacttgctgccatcttctttctcgctgttgcgcctcctacccaagacgatgaagcttctgtatcacgagtatctgcactcttgtcctcgtctgccaaacaagttcctgaaggatgggcacgcaagacggcactagactttgaagacctacaaaagactctgcttcagacaccaagcgcagaaaaggcggaatactggagcaggtactataccagcgggccacatctcgccgggaagaactttagccaggcactatggacaagagaacgatgggaggagtggggagtcgctagcaccatcgtcgactatgaagtgtacatcaactatccaaaaggtcaccggctggctctgatggaaaggattggagacaggcacgagaagaaggatgtttccgctggttcagagggcgcatggaaggttacgtacgaagcgctgttggaagaagacgtcttggacgaggacaagtcaagccaacttgcagatcgtgtacccaccttccacggatacagcgcctcaggaaatgtcacggccccctatgtcttcgtcactatggcacatacaaggattttgaggaaactcaggcag

SEQ ID NO: 120307 - DNA, 471 bp, Zea mays
  Clone ID: MRT4577_41206C.1
atttcggcacgaggcaactcttcgtgctcacgctaaccaggaaggccacagagcggggagccaccgtcggacggcggctcatcacaccatcggtatgattgcgacgatcccatggccaggccccacctgcccctttcctgctaccgcgccggaaacattcgccttctccatttgaccacctgctcccgacacaccacctcctgggggactacaaccactacctctacccttccgcgctggaagcccggcacccgatacatgctgcactagtcaacgccatcgcctttttgtacttgttgggggcacggatcacaacaggacgcagtatccccatgccacattgatcaccctgaaccgatgaggtggcatctctggaggagccgcttggcactgatatctaccaggcgcatgctctgcttgcccatgaccagcggttgacacacatggccctcgtgcatgacgtcgctacca

SEQ ID NO: 120308 - DNA, 550 bp, Zea mays
  Clone ID: MRT4577_41207C.1
tgggaccctcgaggccggccgggctcactcaacttctccactactttccaaacaaacaacccccaaaccacccatcaaaatgtctgctcccaatgccaacaagcccaacgagggtatcgtcggtcagatcggcaactccatctccaacgccgccaactacgtctccgagaccatccagggtaactccgctgaggcttccaaggaggccaacaagcagcaggccaagggcaacgtccctggaaaggactccgtctccgaccgcgtctccggcgctcttggtgccgctggcgacaagatcgaccagaccaagcacgagggctctgctgaggccaacaagcgttccgtctaagcgtctcactcgaatcacttgcgaacgtcagcataacacttcatcaacttacggtcgacgacttcacaatgcggttcgcctggaatatcgataggatcagattgggaagcagtgtgacacttgtccctgctgcatgattatgaggctatgagataccaatgaataactttcaacttcaaaaaaaaaaaaaaaaaagcggcc

SEQ ID NO: 120309 - DNA, 173 bp, Zea mays
  Clone ID: MRT4577_41208C.1
acgcgaacatatactcgtacttattctcataaccactacacgactacagccagtggccggtttacaaaactcattcttacatatacaaacatgcaactgcataaactgtatcattataaaagctaaactcacatccaatcttcccaactatacaacgaccataattctaaaac

SEQ ID NO: 120310 - DNA, 1349 bp, Zea mays
  Clone ID: MRT4577_41209C.1
gccggccgggtcggggtcgctcgttcgcctgttccctttgttcgtctgtctgtctttgacaccacaccacagcctccgtttgcactgttgcctgccgccctccttcctgctcctgctcggctcgctacggctacgggggcactggcatcgacagtgacatccccgctcgcgccgtcctctccctcttctgcctctcgctcgcgcgtgcagttgagcgcggctcggcagcgcagcgtgcgcggacacggcagcgccagttactctctctctctgtctactcgctgctcggcgtccaattcaatgcgctcctgcgcaacggggcagagcagcgacctccttccttctccaccattgggttgagctccgccactcaattcaatgcctgcccgctcttgaagaaacgcctcctcctctcttctttaaccgccccgtgtcatcactcttactcgtacgtgctcgcgcacgccggtttcaatacgtccgctggcctctgcgtgcgtcgtctcgtcacgcaggcagcaaggcgtggagaggagaagagggaggggattgaattgattgatggggttgctccgctgagctagctcctccggccgtcctttccgtcttctacctctaggtgggtattgccattgctcggtggatcgcagtgggagatgaattacctccggagccggagcctgaagcggctcctgtccctcggccgccggagcaacgccgacgagtgcgccgaggagtgcgtcgacgtcgacccgccgccgaacaagcccacctggaggtgcttctcgtacgaggagctcaaccaggccaccaatggcttccaccaagacaacatggtgggcaagggcgggtacggagaggtctaccgcggggtgctggacgacggcagcgccgtcgccgtgaagcgcctggcgccgacggccgcggcggacgagaagaaggagaaggacttcctgacggagctgggcacggtgggccacgtccgccaccccaacgtgtccgcgctcctgggatgctgcgtcgaccgcggccttcacctcgtcttccacttctccacccgcggctccgtctccgccaacctccacgacctgaagctgccggccatgtcgtggaagcagcggcacgggatcgccgtcggcaccgcgcgggggctgcgctacctccacaagggctgcgcgcgccggatcatccaccgcgacatcaaggcgtccaacatcctcctcaccgccgactacgagcctcacatttcggacttcggcctcgcccggtggctgccgtcggagtggacgcaccacgccatcgcgcccatcgagggcaccttcgggtgcctggcgccggagtacttcacg

SEQ ID NO: 120311 - DNA, 138 bp, Zea mays
  Clone ID: MRT4577_4120C.1
atggatcctaaaggaaaggggatggtggtcaacgacaatgagaaggagtccatcttcaacgagccgagggacgacaaagccaatgactccggcttgagtcaaaaaaagaaggatggaaagaagaagaggcgcatctga

SEQ ID NO: 120312 - DNA, 324 bp, Zea mays
  unsure (1)..(324): unsure at all n locations
  Clone ID: MRT4577_41210C.1
tatccagtaattctatcggtttcaggaccatcacgaaaagttgacgcagacgctgccattcttggcgcacccgcacgccgggcacgccctcgccggggccgngcacggcgcgcacgcgcagaggtggnggnacgggagcagcagcacgtcggccgtgttgtcgccgcacacggcgcacgcccccctgacgtggcccgacgacgacgtcccggtcccggtctcctcttcgttctccgccgtgcctgctccgttgatgaagacgtcgttctccccgcagcagcacaagtcggcgtcgtcggcgcggcggcgcgtctgctggccgtc

SEQ ID NO: 120313 - DNA, 685 bp, Zea mays
  unsure (1)..(685): unsure at all n locations
  Clone ID: MRT4577_41211C.1
agaacgacgacagtcttcgattgaaatcttcaatcaaatagctgacgagtatagaacagagcttcactttctcttccatccacaactcttataatctctccatattaactagaactccgcataaacgatgatgattcttgttctagcctttcgccgagcacttgaggtatcgaccaggggcttgcttctttacatcttcttgggattcctttgtcagtgtgaacacaagtcgaggtgaggtgaccgaacgacgacgacaagataaaggaaacaggggtgcgtttgaccgacaactaaaacccacgccgaaccgagcagagagcgcaggaccacggcaaattgagcattccgacgaaagaacacaaccacacagacgtggccagggactgagcgacgcagcgactgcaagctggagcagagggcagggaggaaggggagtgggagatccgggcgccataggagagaagtgatgncggtggtggcgcagatgagccagagcaggagcggggattcggacagcatggtgtgcggnggccatagccgagcagaggggcgcagcttggggatggcgaccaggcagaggacagagataggggcgagcagggagcaccagagaaggccagcggcgagctcaccgcggggccaagctcggaacggcgagcagggacagggacgctcggcgagc

SEQ ID NO: 120314 - DNA, 884 bp, Zea mays
  Clone ID: MRT4577_41212C.1
cattgggaccctcgaggccggccgggcccttcgcatttcttcccttttctgtcaacccctcttcatccctcggactacaaatgcggcgcaaccgtgggcgcagctgcagttggggagtgtgcagcagtatgttctcggtctcgccatcgcatcgcgcacagtagacactcaaaatccgattgccgagggggagaaggcggagaccgttgcaacggctagttgcggcggcccgatggacccgtcgtaccatggcggcggcgccgccggtggaagcgccgacgaccatggccaaactctctgggattggacagtagagcattgtgaacccaacgattcaagtcatgcagatgctactaaattcgtgtgggattgcctcaatcaagatgacgatgagctaatgggattgcttggaaatcaaaccccattgagagactgccgtgatttctttgctgaccttggtgatttcacatgcaaggagaccttggacctggaggaatctcgggaatcaaagcggcggcgcacattggagtaccctttggagtctagtcagtcagaagttgggactcatgaaaccggttcacctttcgtcacacctgaggtagcagaaatttcattgctctgcactgataaaccacagagcttaaattgtgatatgcaccacactttaaataatctagatctgtcagatgaagcaccctaccagcaagaagatatccttttggaacattgctcttatggaactgcagtgtaccttgagcctgatcaaacaccttgtagtcagcagagcattgcatgtataaatgatcaagctggtatttcaggaacaagtgagattggaccaatgacagaaagtttcataatgcaggaaactaggaagctttcta

SEQ ID NO: 120315 - DNA, 626 bp, Zea mays
  Clone ID: MRT4577_41213C.1
aggttcggccgggatatctctcgtcatgcccaactctccgccgtcgcggtgaattcactctcctgtgcgcccttctgctcccgcgtcgtccaccccgccactagctagcgtcgacaccgcgagtatgccgcaccctcccgctctcgctactaggccacgccgtccacccccttgacctccgcctcgcacaccaagtgaagcacgcgccaccacattcatccgttcgcgtgatggattcggaggcacatcgcacgcatggagatctggggcaatccactgtcagtttgatgctccggcatgtgcttcctccaataagatttgaaggtcagatgctagtggatcagcccgatggcaatcgaattgcccttgcttgagttgtgatgagcatttggaaatgctgctcttgcaaggacgttgaccatgaacacaaggaaaatatgttttttttctttgcttattaatctgcagattctagggcgccatgtttatttctttgtttctatctttgtttagtcagctaggaattacaatcgggccaggaaaacaattagacaagtcccacggtctgtacaccccattcacttgcgacatgcctgttcttctgcgtgttcgggaaattgcagaat

SEQ ID NO: 120316 - DNA, 468 bp, Zea mays
  Clone ID: MRT4577_41214C.1
ccttcattaccattccgtaatttgcggggggtggcactctttcgcttcatcacctgttgctgcagatcatattatgccacaccaagcagcataaatacggggtggatccatgcagggggggagagggcatcctcaccgcctgctggaacatcattctcttcaaccccaccacccacacaatttttatcggccccaccacacactcatttcttgtctccaatgcaatcaacattccatcggcaatctattatggcgaacatatccaccccttaccagagtgtactgggtatcatcattaaacatcgacgcctcattctcaatatcactagctgcatcctggggtggaacatactctgagcatttctgtgcttttgcaggcacaatatcaccctatggacatacggtgcgctcaccactcatgcctggcaaaccatcacacagtcttttcaacattcatactattaatgc

SEQ ID NO: 120317 - DNA, 292 bp, Zea mays
  unsure (1)..(292): unsure at all n locations
  Clone ID: MRT4577_41215C.1
ccacccgntccggggaggcagcgcggaaaggcgggccgtccgnggggcatcaaaaccaggcggcgagccctcacccttgtaaagtagaaaccacccctcacaacacacgctgactacgcacgtagcaggagctgctgatcatgcaatgggccaagacagagtggggccacggcaagcaagctgcagccgtgtggcatgccaggatgtcatgggtcagacgcaccaggtgctcaagggctcacgtgtggctaacacgtatacgaggtcccttgctgacacccaaaagcaagcg

SEQ ID NO: 120318 - DNA, 225 bp, Zea mays
  Clone ID: MRT4577_41216C.1
ttgtaagtgagcatctctttcctctgtatcgcgctgctctgtatcgcgctggtgtgcctcctatggcacgatttaacccaggcccccgccggaaggcctgcaccggcacggaggcaccgccgccgcgccgagcctacacataggcaacatatacggacatggagccgccgcacaccagatacgacgcaaagctcgctcgatgtgacggagacgaagggcgcagca

SEQ ID NO: 120319 - DNA, 539 bp, Zea mays
  Clone ID: MRT4577_41217C.1
gtgcggcgctcgaggcggccggtcatcgatcccatcaactccactcgtcttttctcgtcgacatccactaatattcccccactcacccctaacgatgtcacgtgtacgcatgggacggacaacaaagccgcgaaggagcgggaacaacgtcgcgctcgagggcaagggacaggatgccaatgagaagtccttgacgataaccagcaccgcccagctgaagatcctcatgaaccgttattgtgactacctgaatgaggacctgaacgcccttggcgtgctgactgatgcccccatgttcctcgccgacgacatgcatgattacgctcggacgatggatcaggaggtacgagatcagatgccatgattcaccacacagagacgcagatcatctagcaccacctaatactgcagatccgaacctatcagtatgttctccaacctgctgaagacgacaccatcggcaaacagtctttttctcgacattgtcgcatcgtctctggctcctgtgcgacatatgctgagggacaatcgcttacact

SEQ ID NO: 120320 - DNA, 323 bp, Zea mays
  Clone ID: MRT4577_41218C.1
ggccgcttttttttttttttttttctttatttcctttttatttttttttttttatttttttttttttttttttattttttgttttattttttttattaatttttttttcgtgcttaatgcccgaggagagaaaaagggacataaaccttagaggtctatttttagaacccacgagcggaaagaaggacgaaccaagcttaaattgttcgccccaaccgcaagtcggggaaaaaaaaagggggatcccaacccaaccacccccccccaggcggggcgaacgtgttatcacccctaaaaaggagttccccccgccgcagaggacc

SEQ ID NO: 120321 - DNA, 193 bp, Zea mays
  Clone ID: MRT4577_41219C.1
aagactaaaatcgttctacacatggttggggccataactccagccgtgaggctttatcgcatatttaggaaaagaactaagggttttccttaaacaagatgaaaatcatccatttaggaatgggattaccacatatgcatccagtgatttggagaccaatgcactccaaatagaagaatcgctggacaaacta

SEQ ID NO: 120322 - DNA, 294 bp, Zea mays
  Clone ID: MRT4577_4121C.1
tgacccgcagtacggtcggaatccgggtcacctcctacgaacgagcgcgacctggcgacctgggcgagagctgagcacgagcaccgaggcggaggcaaggaggtgtctcatcagatcctgcatggctactgcaggacgaaagaactgagcagatttaaggtgccaaggtcttattaccagtggaggcagccatttccggcgaccacgacggggaagatcagaagggaggagctgaagagggaactcctggcagcaattcgactgcccagcaacctgtagctttttgaggcgatg

SEQ ID NO: 120323 - DNA, 2415 bp, Zea mays
  Clone ID: MRT4577_41220C.1
cattgggtacctcgaggccggccggggattccccaccccccgcccggtcgtcaccatggccgcgctccttcagtcgtctttcctcttccctcacgccaccttccccaaccccaagccccaccacctcgccgccgccgccgccacgagacccgagtcacccaacgtggcccccaatcccgccagcgcccgcctccgccgcctcattgcccgcgaggacctcgccggtgccgcgcgcctcgtcgagctctccgcctcccgcgacggggaggcccccgacgtctacctctgcaccaagctcatccggaacctctgccgccggggccgcacctccgacgccgcccgcgtgctccgcgccgccgagggctccggctcccccgtcgacgtcttcgcctacaacaccctcgtagcggggtactgccgctacggccacctcgacgccgcgcgcaggctcatcggctccatgcccgtcgcgcctgacgcctacacgtacacgccactgatccgcgtgctctgcgaccgcggcagggtcgccgacgcgctcagcctgctcgacgatatgctcctctgcgggtgccagcccaacgtcgtacgctacactgtgctcctggaggccatgtgcaagaacagtgggttcgagcaggccatggcagtcctcgacgagatgcgcgcgaagggatgcacacccaacatcgtcatgtacaatgtcatcaccaatgacgtgttcagggaaggctgcgttgatgatgcaagggatatcttgaataggttgttctcttacgggtgccagcctgacactgtcagctataccaccctcctcaagggtttgtgcgcttccaagcggtgggatgacgttgaggaactatttgctgagatgatggagaagaactgcatgccaaacgaggtgacgtttgacatgctaatcagattcttttgccgaggaggtatggtggagcgggctattcaagttcttcaacaaatgacggagcatgagtgcgccaccaacaccaccttgtgcaatattgtcataaactcaatttgcaaacaaggccgggttgacgatgcctttaagttcttaaacaacatgggttcctacgggtgcaatccagataccattagctataccacagtcctaaagggcttgtgtcgtgccgaacgatggaatgatgccaaggaacttttgaaagagatggtccggaataattgccccccaaacgaggtaacattcaatacatttatctgcatcttgtgccaaaaggggttgatcgagcaagctattatgcttattgaacaaatgcaagagcatgggtgtacagtgggtgttgtcacatacaatgctcttgtcaatggattctgtgtgcagggccatattgacagtgccttagaattgtttcgcagcatgccctgcaaaccaaataccatcacatacactactttgctgacaggcttgtgcaacgctgaacggttagatgctgctgcagagctcgtagctgaaatgcttcatagggattgccctccaaatgtagtgactttcaatgtacttgtgaatttcttttgccaaaaaggatttctggacgaagcaattgaactcgttgagcaaatgatggaacatggttgcacacccaacctgatcacatataatacattatttgatgggattaccaaggattgcagttcagaagatgccctggagttgttgcatggcttggtcagcaagggagtatcgccagatgtcattacattttcttcaatcattggtatcctctcaaaggaagatagagttgaagaggccattcaaatgtttcacttagcgcaagatatcggaatgagacccaaagctttggtgtacaacaagatactgcttgggctatgtaaaagacatgaaatagataatgctatcgactttcttgcctatatggtatccaacggatgcatgcccaatgagtcaacctacattatacttatcgaaggccttgctcgtgaaggtttgttgaaggaggcccaagatctactgagcatgttgtgctcaagaggagttgtaagcaagaacttaatagaagagtagcactgaggttgaagaccaaactgtgcataccctttggctcatgatgaatcctgggattaaatgcttattcattattcacagtgagtggatcgatagcctcgtctccttcaagctgcagtgcttcatgtaggtggttgtttgagggcccataacctcctatgaaggaatcttgacaatgtgagtttctgcttacatgtatttatcgtacttttgccaaggggaatgtaaagtttcccgttttagcttactctaatttgtgtacgctgtatatattgctaaaagcattttgggtgtgaataggcttagggtgtagaaatcttaataacaacaataatcttgttcaggaacctcat

SEQ ID NO: 120324 - DNA, 319 bp, Zea mays
  Clone ID: MRT4577_41221C.1
ttagcgagctggggaggcccgaatatcaagcgcggccccccttgcgtgagaccgagatggcgctgccgaatcaggggaccgttgatcacccccgcttcaagctcgtcatccggccgcgatggcggaactggcaaaactacatttgacaagaggcctctttttggagaggttgagaaaaaatctgaacccacccttgggggggaagttcatcccgtggatctcaccactaactgcggtaagatcaggttctactgctgggatcccgccgggcaagaaaagtttggtggcctcaaggatggatactatatccgtggcccgc

SEQ ID NO: 120325 - DNA, 547 bp, Zea mays
  unsure (1)..(547): unsure at all n locations
  Clone ID: MRT4577_41222C.1
attactgaatttatacaatattattaatatgagaacttgaggctcaacttgaaggaatgtgtaaacatatgaaagaaacacagtagatgaaaatatatcaacaattacaaggcaaacacagatatcgcagaactgtagacatactctggccatagcatcagcatttgggttccagttgttgaagtcacctactaatgctgcagactgcagtaagatgtaagaacccgttcttaaatcttaatgagttgatcaggaagataaactatagctttgaagagaatcgtgatattcgtgtaaactatctgtctgtattgcgcacaaggtaacaagtgaatcatgaacactatcatgtgtttaaaaggtgactgccaaacttgtggagaacatacgtatgctccaggagcccattctctgtaagtgataccttcagcgctgcgagtaaatccaagcttttcgtaaccgcgtgaaaatgcatccaaaccaccttcatgttgatcaatagccgcacgtaatctcttatattcactgtatcggnagtcaaggtgac

SEQ ID NO: 120326 - DNA, 345 bp, Zea mays
  Clone ID: MRT4577_41223C.1
aggaaaaccacgtcggaggagacgttatttttgaactccatccacagttcacaccccggggagtagtatagctgcctttatctgttattccaaaaggcggcaaacaaagacagtgtgggagggaggaggacatgcacaggctactgctgagtgggatctgcttctatctatctatataaaggcagggccaccctcgctccggatgcccacacgcacacttgagcttgctctgcttgctccgatgctctcctctgccacgaccacgataagcccgtgaccgtggagggaacagaacgagcgagcgagcgaggatgcacggtgcgacgacgacgaggaagctcatgt

SEQ ID NO: 120327 - DNA, 1845 bp, Zea mays
  Clone ID: MRT4577_41224C.1
cccaccgcccgcgcccgccaggtgatcgccgcgtccgggcgcgccgaccccggccctcgccgtacatacccgcatcggcccccgcccacggtcaggccctaacgctataggaacctcagtccggcccagcgacgtgccggctcttgggtcttgcgaagccgtgcaagtatcctgcttcgcggaggatttcagtcatccgcctgccgagggccgagctcttccgagtttctgcggagagtgggcaacttttctcggtcccgaatcgatttgcctgctactcgcggtaggcgaagggaaggattcaaatcaacataacatggccgcagccaccgccgccgcttccaccatgtcgctgctcccgatctcccagctcaggcagcagcacggcgcgggcgccatgaggcggcggccctgggtcgcgcggcggaggcgatacgtcgttccgacggcgaggctgttcgggccggcgatcttcgaggcgtcgaagctgaaggtgctgttcctgggcgtggacgacgaggccggcagcaagcagcacgggccgctgccgcggacgtacacgctgacgcacagcgacgtgacggccaggctgacgctcgccgtctcgcacaccatcaaccgcgcgcagctgcagggctggtacaaccgcctgcagcgcgacgaggtggtggccgagtggaagaaggtgcgcggccggatgtcgctgcacgtgcactgccacatctccggcggccacttcctgctcgacctcatcgcgggcctccgctacgtcattttccgcaaggagctccccgtggtgctcaaggcgttcgtgcacggcgacggcgacctgttcagccggcacccggagctggaggaggccacggtgtgggtctacttccactccaacctggctcgcttcaaccacgtggagtgctggggaccgctccgcgacgccgccgcgcccgccgaggacgactccaccgcgccgcccgacgcctccaactccaaggaggccggccagatgatggccatgtgcgagtggccgcaccggtgtccccagcagtgcgactgctgcttcccgccgcacagcctcatcccctggccgaacgagcacgacatggccgccgcagatgcctccggctccgcccaacagcagtagcgaaactgcacttgtgctgtacctgtacggctgtacgtacggaggagggaccttcgctcctacgcaatgtaagccgtcgtagctagactactagaactagcgtgttgtttggttgggtacgtagctgcaaccgcgcgcgtgcagtagagtggctccaacaccacaacacctgcatctgcatgcccggcccgcgctgcctattctttaattggtagcttagcttagctcgttcagctccacttctacaagctcttcgtctttggattggaagtcggggatgaacatggtcttgtacatatagctagaacacttgatctctggatggaaaacctgcacggtacacacatatgttgcaggcaaagtatcatccgaagtattcttgaactggaagtcctagatttgtgtagtggtgtactcccgccgtttcttcgtttctttttagatgtggctggatagttcaattttgcactatccagcggcaactaaaacaaaacgaaacaagtagtagcttggtcgaggtcggaaatgaacatggtcttgtacatatagctagaacacttgatctctagatggaaaacctgcacgtacacacatatgttgcaggcaaagtatcatccgaagtattcttgaactggaagtcctagatttgtgtagtggtgtacaaaattggatatggttaattgtttgttcgaccgtaacctctt

SEQ ID NO: 120328 - DNA, 1575 bp, Zea mays
  Clone ID: MRT4577_41225C.1
ccggccgggcaatcgccagccagccaggaagcgctcctgcacctgtcctgtcctgcacacgcccaacggcctaatatttgcgtagccgctacaacctacaggattctcgatccgtcatccatccggtccggatcttgattcttgccaaggcgtgcaagattcctgcttcgccgaggttaaattttagccgccggctgagcttctgcggagaaccggcaggtttgcttggtgcccccgatttgcctgctactcgtggcgcgccgctcctaggcgaagggaaggatccgactcaacatggccgccgccgcttctaccatgtccctgctcccgatctcccagcccaggaagcagcagcagcaaggcgcgggcgccgtggtcgtgttccggcggcggaggcgatacgtcgacgcacagcgacgtgacggccagcctgacgctcgccgtctcccacaccatcaaccgcgcgcagctgcagggctggtacaaccgcctgcagcgcgacgaggtggtggccgagtggaagaaggtgcgcggccggatgtcgctgcacgtgcactgccacatctccggcggacacttgctcctggacctcatcgccggcctccgctactacatcttccgcaaggagctccccgtggtacgtacgtgtacgtgtctacctgctctgccgccccacatgcgtggaaacatgtacacgacgaggacgctgcagattgcgatttgatttctccgcagggcccttgttgtgttcatataatcagatcgtttaagtcgtcagtcaccggcaccgcgcaagcttcttatcttgcgtctctgcttttggtgcaggtgctcgaggcgttcgtgcacggcgacggcgacctgttcagccgtcacccggagctggaggaggccacggtgtgggtctacttccactccaacctggcccgcttcaaccgcgtcgagtgctggggtccgctccgcgacgccgccgcccccgcgcccgccgaggacgactccaccgcgccggccgccgcctccatcgccatggagggccagatgcccgtgggcgagtggccgcaccggtgtccccagcagtgcgactgctgcttcccgccgcacagcctcataccctggccgaacgagcaagacatggccgccgccgccggccaggtccgacagcagtagtgaagctgcacggaggaggggcctttgcctcataccctggccaaacgtcctagatacactactagcgcgttgtttggtttgctattgctattgctagatgcaagcgtgtgcgtgcagtgcaggtgtggagtggcgtcaacaccttgcatgcacgcgctattctttaattggtagcttagctcagctcagttcagttccacttgtacaccttcgtatttggaagcagcttggttgaggttgggggatgaacgttgtggtcttgtatctactaggacgtttgatatggatgccaaacctgcaaagaatctgcaggtgcatacatgttgctgcaaagtggcactcggcaggcaaagtatcatcgggtgtagtacttatttctctccgaaaaaaaaaaaaaaaaaagcggcc

SEQ ID NO: 120329 - DNA, 500 bp, Zea mays
  Clone ID: MRT4577_41226C.1
tccaactccgaggatggccagatgatggccatgtgcgagtggccgcaccggtgtccccagcagtgcgactgctgcttcccgccgcacagcctcatcccctggccgaacgaacaccatcaacagcagtagcgaaactgcacttgtgctgctacgcaatgtaagccgtcgtagctagactactagaactagcgtgttgtttggttgggtacgtagctgcaaccgcgcgcgtgcagtagtgtggcgccaacaccacaacacctgcatctgcatgcccggcccgcgctgcctattctttaattggtagcttagcttagctcgttcagctccacttctacaagctcttcgtctttggatcggaagtactccctccgtttcttcgtttctttttagttggtgctggatagttcaattttgcactatccagcgacaactaaaacaaaacgaaagaagtagtagcttggtcgaggtcggagatgaacatggtcttgtacatatagcta

SEQ ID NO: 120330 - DNA, 330 bp, Zea mays
  Clone ID: MRT4577_41227C.1
cggacgcgtgggaaaaaaaaaaaaaaaaataaaaaaaaaaaattaaaaaaaaaaattacatggaaaaaataagaaaaaataaaaactacatattcttatagaatacaatgctcttactgatcgtgaacttcaaaaggagagatctattgtatctgtcatcactaatcccattaactaagacgtggctttatatcttgcccagcattgctaaccctgcatatgccatcctctataggatgcaagctgatgaaccttcatttaaaatgtgtactttagaatggagttcttagcttgacgagcttttcattgctctcaatatctatcccctga

SEQ ID NO: 120331 - DNA, 1696 bp, Zea mays
  Clone ID: MRT4577_41228C.1
gggaccctcgaggccggccggggcccattccagccagccagccaggaagcgctcctgcacctgtcctgcatacgcccaacggcctaatatttgcgtagccgctacaacctacatgattctcgatccgtcacccatccgttccggatcttgattcttgccaaggcgtgcaagattcctgcttcgccgaggttaaattttagccgccggccgagcttctgcggagaaccggcaggtttgcttggtgccctcgatttgcctgctactcgtggcgcgccgctcctaggcgaagggaaggatccgactcaacatggccgccgccgcttctaccatgtccctgctcccgatctcccagcccaggaagcagcagcagcaaggcgcgggcgccgtggtcgtgttccagcggcggccctgggacgcgcggcggaggcgatacgtcgtcccgacggcgaggctgttcgggccggcgatcttcgaggcgtccaagctgaaggtgctgttcctgggcgtggacgaggggagcagcaagcatctgcatgcgcaccacccggcgccggcgccgctgctgccgcggacgtacacgctgacgcacagcgacgtgacggccagcctgacgctcgccgtctcccacaccatcaaccgcgcgcagctgcagggctggtacaaccgcctgcagcgcgacgaggtggtggccgagtggaagaaggtgcgcggccggatgtcgctgcacgtgcactgccacatctccggcggccacttgctcctcgacctcatcgccggcctccgctactacatcttccgcaaggagctccccgtggtgctcaaggcgttcgtgcacggcgacggcgacctgttcagccggcacccggagctggaggaggccacggtgtgggtctacttccactccaacctggcccgcttcaaccgcgtggagtgctggggtccgctccgcgacgccgccgcgcccgccgaggacgactccgccgcgccggccgactcctccaactccaaggatggccagatgatggccatgtgcgagtggccgcaccggtgtccccagcagtgcgactgctgcttcccgccgcacagcctcatcccctggccgaacgagcacgacatggccaccgccgccgccgccgatgcctccggctccgcccaacagcagtagcgaaactgcacttgtgctgctacgcaatgtaagccgtcgtagctagactactagaactagcgtgttgtttggttgggtacgtagctgcaaccgcgcgcgtgcagtagtgtggcgccaacaccacaacacctgcatctgcatgcccggcccgcgctgcctattctttaattggtagcttagcttagctcgttcagctccacttctacaagctcttcgtctttggatcggaagtactccctccgtttcttcgtttctttttagttgttgctggatagttcaattttgcactatccagcgacaactaaaacaaaacgaaagaagtagtagcttggtcgaggtcggagatgaacatggtcttgtacatatagctagaacacttgatctctagatggaaaacctgcacgtacacacatatgttgcaggcaaagtatcatccgaagtattcttgaactggaagtcctagatttgtgtagtggtgtacaaaattggatatggttaattgtttgttcgaccgtaccatctttggtcaaa

SEQ ID NO: 120332 - DNA, 732 bp, Zea mays
  Clone ID: MRT4577_41229C.1
ctggccgggaatcgccagccgccggaagcgctcctgcacctgtcctgtcctgcacacgcccaacggcctaatatttgcgtagccgctacaacctacaggattctcgatccgtcatccatccggtccggatcttgattcttgccaaggcgtgcaagattcctgcttcgccgaggttaaattttagccgccggctgagcttctgcggagaaccggcaggtttgcttggtgcccccgatttgcctgctactcgtggcgcgccgctcctaggcgaagggaaggatccgactcaacatggccgccgccgcttctaccatgtccctgctcccgatctcccagcccaggaagcagcagcagcaaggcgcgggcgccgtggtcgtgttccggcggcggaggcgatacgtggtcccgacggcgaggctgttcgggccggcgatcttcgaggcgtccaagctgaaggtgctgttcctgggcgtggacgaggggagcagcaagcatctgcatgcgcaccacccggcgccggcggcgctgctgccgcggacgtacacgctgacgcacagcgacgtgacggccagcctgacgctcgccgtctcccacaccatcaaccgcgcgcagctgcagggctggtacaaccgcctgcagcgcgacgaggtggtggccgagtggaagaaggtgcgcggccggatgtcgctgcacgtgcactggcacatctcccggcggacacttgctcctgga

SEQ ID NO: 120333 - DNA, 271 bp, Zea mays
  Clone ID: MRT4577_4122C.1
gaacacattattcgggcggacaaccattgttatgcccatccatgaccctcgcatgattgtcaaggatatagaaagaaatggccactgtagtggggaccttaaaagaaaccccagcccatcttggctttcaaataaccacttgccccaagtttaatggagaacatgaacaaaaggctctctcactgtcatcataagggacccctaaccccttctatggagtggcgctaaaagtacccgtggaccacttaagaggggctcctaaaacaaaacc

SEQ ID NO: 120334 - DNA, 260 bp, Zea mays
  Clone ID: MRT4577_41230C.1
tcgcgatctataactagttttagatcgagagcagtcggccgggacattacgacataaagtgtgcgcaaatgcgcggtatcagtccatgccacacagtcactaaaacattaacaaagtcactcatacatacacgcaataatttaatgtattacgtaagcacataaatattctcactcctaaagaatgatgggggtacaatttaacaacaagttccgttaacctattataaaaaaatctacccaagattctcttatttctaa

SEQ ID NO: 120335 - DNA, 367 bp, Zea mays
  Clone ID: MRT4577_41231C.1
acggtcgaacaaacaattaaccatatccaattttgtacatcactacacaaatctaggacttgcagttcaagaatacttcggatgatgatactttgcctgcaacatatgtgtgtaccgtgcaggttttccatccagagatcaagtgttctagctatatgtacaagaccatgttcatccccgaccttgaccaagctactacttccaatccaaagacgaaaagcttgtaaaagtggagctgaacgagctaagctaagctaccaattaaagaataggcagcgcgggccgggcatgcaggtgttgtgtggtgttggcgccactttactgcacgcgcgcggttgcagctacgagctacagctacccaaccaaa

SEQ ID NO: 120336 - DNA, 263 bp, Zea mays
  Clone ID: MRT4577_41232C.1
caaataaagtgaatccggatgtttcactcaacattggtcaggaaaaaatctagatctggaataaaaactggtgctacagtgaaggctgttcgttttgacaggtttgttgctgctcagtttcggccagcatagctgctgcccagtcccagtttcggccagctgctgtccagttttggtcaggataactgctcagctttgtttccaatgcacttgcacatacatacacatattaacaactaagcaacaatggtgtacatacatac

SEQ ID NO: 120337 - DNA, 321 bp, Zea mays
  Clone ID: MRT4577_41233C.1
tcgctcctgctaccctcctatgcctaagcggctcttcgcaagggtgagtgtccgatcgcttctctgccctagcgtggatggccaatagctattagggtaatcacctgaccatgacccttgttctccgccgactactttgatctacgataggctgtcaggattcaatatgtacaccagcacattcgctactttctgcacgctgtttagcaatatttgatcaactcttgctctccagacatcagtgaagaacccttcctctctaatcttatttatccaatctacgataagttcaaacctgaagaccttcaataaacttgatgt

SEQ ID NO: 120338 - DNA, 192 bp, Zea mays
  Clone ID: MRT4577_41234C.1
ggagttcgtgggacgggatgctcctcggacccttccctccaggggcaggaactgagttagcatgggcggggccggccgagcttccaggcgtattttctctgttacatgtacctctgtctttaagctgtctcattttctaatcgctggcatgtcttgcctagataagcatttggaattgcttatgttcaatta

SEQ ID NO: 120339 - DNA, 826 bp, Zea mays
  Clone ID: MRT4577_41235C.1
tccctcccggcaccatcctctcctccttgtgtcaactccaattggmgctctattccctccccacatdagacaccgtaccgtggsggtgctggagcrgctgccaagagctctattctcctccccyattttttmaagcgatgtcgccttgcccgtgtaggccggctcaacatgtgataatccatsgytcttttgtaaagtcagtaagaggggcaactgaccrgtacagcaaatcctttgcacggcgctaccggcgtggmacgmgctgcaaccggcactagacgtggctacctcatcccktgtctccctccttgcctcccctgcaaatctcctcttggcttcccgctttaccgtctctagagttctagatccccaagttaactttaagamaattgcatttcacctgtmattmacatggccacaatgtatcaaacaccttatctttgwactgcaccgatgaaggttgatcagtattcagtacttcttgctcttccatcttactactattgctactactaattcattgcacgtttacatgacattcaatagaggctgaaattagttgagtgggttaacctgcagttccagtatgcaaactacaagaacaacgtctgcaacaagagtgggaactgggaagggatcctaaggctggagctgatcaaccagagagcagactgcgcctttgcgttcttctccgaatacttctcggctgttgctcacctacgattgaatgaaaacmactccaaatcccaamactttcaactccgaggacaacatgtacatttaattaasacgcccaatcttccccattttatttgtaacccatcga

SEQ ID NO: 120340 - DNA, 1521 bp, Zea mays
  Clone ID: MRT4577_41236C.1
agagacgggttggggacggtggaggagaggatgaggcgcctcccctcgcgtcgcagcgccgccatcgccatcgcgtcgcctgagttgccttcgcctccctctctctcacacacacacagacctggttttttcggacgcgtgggtccgtccccaagaagtgcagcctcgccgtcgcggcgaaggacacggcattccttagcgtatcccagaagaaggtgcaggcggcgtcgctgtcggtgagaacgcgggtggcgacgacggcgcctgtggccacgccggggtccagcacggcggccaaggatgggaagaagaccgtgcggcagggcgtggtggtgatcacgggcgcgtcgtcggggttgggcctggcggcggccaaggcgctggcggagaccggcaagtggcacgtggtgatggcctgccgcgacttcctcaaggcggccaaggcggccaagggcgccggcatggcggacggcagctacaccatcatgcacctggacctggcctccctcgacagcgtgcggcagttcgtggacagcttccggcgcgccggcatgccgctcgactcgctcgtctgcaacgccgccatctaccggcccacggcaaggacgccgacgttcacggcggacgggtacgagatgagcgtcggcgtcaaccacctgggccacttcctcctggcgcgcctgctcctggacgacatgcagaagtccgactacccgtcccgccgcctcgtcatcctcggctccatcaccggcaacaccaacacgctggccgggaacatcccgcccaaggccgggctgggcgacctccgcggcctcgcggcggggctgcgcggccagaacggctctgccatgatcgacggctccgagagcttcgacggcgccaaggcgtacaaggacagcaagatctgcaacatgctcaccatgcaggagctgcaccggcggtaccacgaggagacgggcatcacgttcgcgtcgctctacccggggtgcatcgccaccacggggctgttccgcgagcacatcccgctgttccgcctgctcttcccgcctttccagaagttcgtcaccaagggcttcgtgtcggaggcggagtccggcaaaaggctggcgcatgtggtcagcgaccccaccctccccaaagtcggggtgtactggagctggaacaaggactcggggtcgttcgagaaccccctgtcgcaggaggcccccgatccggagaaggccaaaaagctttgggggatcaccgaaaagctcgtgggggttgcctgagctcgccggcccggcgccccccccatgatgaatttgtcgagcagaggagctttcgcttcgttgttttttggggccccctagccccccttttgtttgtttttagaagttggtaatgcccgtcggagaaaagcccgtaattgttcggtccatgtattgcttcccattttttttttaaaaaaaaaaaaaaaaaaaaaaaaaaaaaaaaaaaaaaaaaaaaaaaaaaaaaaaaaccgagggaggagccccggtaccc

SEQ ID NO: 120341 - DNA, 250 bp, Zea mays
  Clone ID: MRT4577_41237C.1
tggagcgcgcacgcgtccgggtaccatttctttcaacgcaccgggcgtcacccaaatcccaaaccctatcacagggaggggggaagcgcagggggggatcctgttcgggtaactcatacacgactatggccgcgaccttgatttacttctcccggcccgtgtcgacatgcggacccttctagatcgggctgaagatggacatcgaggaccgtttcaacgacaaccggaacaaggtccgggtcatgaccac

SEQ ID NO: 120342 - DNA, 1256 bp, Zea mays
  Clone ID: MRT4577_41238C.1
aaagctcaatacacgattttataattctttgtatgagaaaaaaagatggctctgctcggctcaaactcgcagctcatgctagcaggaaaaaccgttgaaatcaaactcgaagcccaggcaagcagccgtcctttggcgactctacgcaaaaacgatccacagagcgactctgatagactagtcatatcgctcggcggccaggccactctacccaaaacgatcgaacggcagcgagtttccagagttgtacacataagatggcaacagagcagttattcaaacagataaggacagtagcaggcaggagtacaattgtacaagtactagtaacaaaaaaaacgatctgtgacaggccaaattgattgattcatcataattccggtaggccgcaacttatttcgagacaccgtcgacatcaagtaggtgcagcaactcttggtcctaactccagcttacttcatctccgcagaggctcggctgcctaagctgatctttccctcatgcagcagctttcgacgcaatcattcctgtcttccgggcgtaggcaaagatccctcccgcctcaattacagggccagcatcaccaattggtttcagcttgtactccttgccagaggtgtggttaataaaaacggagttagcaaggtccacggtgaccacatcccctgtcttgcactccttccaggccccaacgtccgtgagctccagagggtacacctctccagtggccacggagttgcgaaaaaagatgcgcgcgtagccctccgcaaacatggcgcgtgcgccagcggccccaagcgcgacggggcgcgtgctcgcgagaggaaccgcgcccgaaggtggctccgccgacaatcatggcgtagcgggaggactcctcggcgggagcgacgaacgccgtcgggtaggccgcggatgcgagccccgcgaaggcgaaggaaccgaccttgcggtactcgtccggcttggagggcaccagagtgaggtgctcggcggggatgatctggtcggtgtcgatattgtcgcccaccacgaagcactcgccgtggaaaacggctgacgtcggcgagctgctgcccgccgcggcagcagcgaccgcggggacgatgggcccagctcggcggcatttcagtgagtggaggcgatgacaggtgacactgggattcctcgccgtctgcttcgtgcggaccatcggagagagctgcgagagggcgggcggcgctgcgcgatcgaaggagtgaaattggaaatcggat

SEQ ID NO: 120343 - DNA, 1246 bp, Zea mays
  Clone ID: MRT4577_41239C.1
gtgcggcgctcaggcggcgggctacacaaacgttcgctcgaggccggccgggccgggcattcgatccgttcccttgccctaagacccacccctgatttcatttccccaatcatggcggcggctctgtcggggacggcggtgtccacggcagcgcttctagccccaatccgagctccaaccagcgcgtttatccggcgctcccagctcacctgtcatcgcctccactcactaaaatgccgccgcgctgggcccatcgtccccgcggccgctgctgccgcggcgggcagcagctcgccgtcgtcagccgttttccacggcgagtgcttcgtggtgggcgacaatatcgacaccgaccagatcatccccgccgagcacctcactctggtgccctccaagccggacgagtaccgcaagctcggttccttcgccttcgcggggctcccatccgcggcctacccgacgccgttcgtcgctccgggtgaggagtcctcccgctacgccatcattgtcggcggagccaacttcgggtgcggttcctctcgcgagcacgcgcccgtcgcgcttggggccgctggcgcacgcgccattgttgcggagggctacgcgcgcatcttttttcgcaactccgtggccactggggaagtgtaccctctggagctcacggacgttggggcctggaaggagtgcaagacaggggatgtggtcaccgtggaccttgctaactccgtttttattaaccacacctctggcaaggagtacaagctgaaaccaattggtgatgctggccctgtaattgaggccggagggatctttgcctacgcccggaagacaggaatgattgcgtcgaaagctgctgcatgagggaaagatcagcttaggcagccgagcctctgcggagatgaagaagtaagctggagttaggactaagagttactgcacctacttgatgtcgacggtgtctcaaaataagttgcggcctaccgaaattatgatgaatcaatcaatttggtctttgtcacagatcgtttttttttgtttgttactagtacttgtacaattgtactcctgcctgctactgtccttatctgtttgaataactgctgtgttgccatcttatgtgtacaactctcgaaactcgctgccgttcgatgtatttgagcttttggtatgcaattaaatggttgcattcaaaaaaaaaaaaaaaaaaaaaaaaaaaaaaaaagcccctagcgttgttaccactgct

SEQ ID NO: 120344 - DNA, 530 bp, Zea mays
  Clone ID: MRT4577_4123C.1
gacatgcaccagaccagttatgctagcttcttctagctctagctaggatcgtctgctgcaagaaggtaacagtaacagcaggcatggaggggaaggaggaggacgtccgcctgggcgccaacaagctctacggagcgccagcccatcggcacggaggagtacggtacggacgacaaggactacaaggagcccccgccggggccgctcttctaggccggggagatcaagtcctggtccttctaccgagccgtgaatcgccgagatcgtcgccaccttcctcttcctctacatctccatcctcagcgacatgcgtgtctccaagtccacctcctagtgctgcaccggagggatccagggcatcgactggcccttactacgcgcatgatcttctgcctcgtctactgcatcggacgggtctcacggaggaaacatcaacccggcggagacctgcggactggtcctggagaggaatgtgaccctcaccagggaggagcttcacgtcgtcatgaagagcctgcgagccgtctgcg

SEQ ID NO: 120345 - DNA, 1333 bp, Zea mays
  Clone ID: MRT4577_41240C.1
cattgggtacctcgaggccggccgggacacagcgccacgccacacgcaacgcaagcagctgcttctctctttccgctccgcaggccgcagcgcccatcaagagcgagaagccctgtcgcgcgcggagacgatggaagggccggcggcggcggaggcggagaacggcggcgcgggcaaggggtccggcagcaggttcaggcgggtgtgcgtgttctgcgggagcagctccggcaagcgcagcagctaccgggacgccgccgtcgagctcggcaaggagctggtgtcgaggaaggtggatttggtgtacggcggaggcagcctggggctcatgggggaggtctccgaggccgtgcacaggggcggcggccatgtcattggcatcataccgaccagtctcatgggaaaggagatcaccggggagacggtgggcgaggtgcgggccgtggcggggatgcaccagcgcaaggcggagatggcgcgcaactccgatgccttcatcgcgctcccgggcgggtacgggacgctggacgagctcctggaggtgatcgcgtgggcgcagctgggcatccacagcaagccggtgggcctgctgaacgtggacgggtactacgacttcctgctggcgttcatcgacaaggcggtggacgacgggttcatcaagccctcccagcgccacatcttcgtcagcgcccccgacgccagggaactcgtccagaagctggaggggtacgaggccgtgcaggacgaggacccggcgacgcccaagctgcggtgggagatcgagcaggtcggctacaacgcctcgctcctggccgagatcgcccgctgatcggccgcgcgacgatcgctgctgctgcgggagctctggtggctccagtccacgcatcgtctgccggccaggccactggcctccacctgctgctatctaccctacccctactaccccatcgatgatcgatgcgatgatcctgcgtatcagatcaacagaagcacgcattcatatgtgtgtgtttctcaagtgtgaccgcagaaacggggcaccggtgagcaagacgcacgcgaggacttgttttttttaggggtgtgcgttctgctcctagtcctagcagctagcagcggcttgatcgtcctgccgcatgtactctgctcctagccacgtactcgtactcatattcctgatcgacgatcacgtgtttgtttactacccagcagcagctagtactaatgtactaagttaatcgtcgtcctctggtaatgtaactgacctccagctccagctagctagctgcgacattattctgtataaaaaaaaaaaaaaaaggcccctagggcc

SEQ ID NO: 120346 - DNA, 426 bp, Zea mays
  unsure (1)..(426): unsure at all n locations
  Clone ID: MRT4577_41241C.1
tcacattatgtttttttttggtttttttttttttttttttttgtctcttctnccannannattttttttttttttttaaaaacaagtgggcgagcgcgcgccccccccaaattttttggaaacggtaaccgccaaaattgcaaaaatttgggccttattaacttttgccttcaacaacaggaaaagtgatacccttggcctttttgtttttggtgtaaactgcaaaaatcgttggcaaatatttttttgacgagcccccccccaaaggttttttttccccataaaaataaatttatgccccgttgaaaaattaaaaaacagttccccaagggttttgtttttttttccccaaaaaaaaaaacttttttgggttttccttccggggggggttttttgggggggccttaaaacccaatattttttttt

SEQ ID NO: 120347 - DNA, 1269 bp, Zea mays
  Clone ID: MRT4577_41242C.1
gggtcactagcacagccaggagccagcagcgcggcagctttccctctgtcacgctcacacgcctgcaggccggccagctccattgccaaccatcgtcgagcttgcagctcgctggtcgcatcgtccgtccaacgccacctatggcccgccgctcctcctgcccggcaccggcacgcgctgcttatttttgttgttgttactgcagctgcagcaggagcagacgcgcagcatccgccgtcgccggggttctacccgagcaagcgttaccgcgcgcgtcccttctcccgcgacttccgcaccctgtggggggcgcagcaccagtcggtgtccggcggcggcggcggcgtgaccatctggctggactcgacgtccgggagcgggttcaagtcgcggcgggcgttccggtcgggctacttcggcgcgtcggtgaagctgcaggccgggtacacggccggtgtcatcacggccttctacctgtcgaacgcggacgcgcacccgggattccacgacgaggtggacatggagttcctgggcaccacgccggggcagccgtacacgctgcagaccaacgtgtacgtcctcggctccggcgacggcgggcctggcagggtcgtcgggcgggaggtcaagttccgcctggactggttcgaccccaccgccgacttccaccaactacgccatcctctggagccccacgcacatcatcttctacgtggacgacgtgccgatccggcggtacccgcggcggagcgagacgttcccgcggcggccgatgtgggtgtacggctccatctgggacgcctcctcctgggccaccgacgacggcaggtacaaggccgactaccgctacagccccttcgtagcgcgcttctcggggctgctcctccgcgcctgctcgccgcgcgccccgccaaggtgccgcgcgccaagcggcggcccgaccggcggcggcggcggcgatgcgctcagcccgcagcaggaggccgccatgcggtgggtgcagcgcaaccacatggtctacaactactgcctcgaccccaagcgagaccacagcctcaccccagagtgcattattcaccacgcagcagctggcgatacctactagctagctaattacataattagatatatacatattcatcagcttatgtatgtgtctacgtaccatatgtcctatcgctatatatctctagttttgttgtaatattaaagagatgacatttgcttcagcagattctgagaaacacatgcatctgtatcccattattt

SEQ ID NO: 120348 - DNA, 969 bp, Zea mays
  Clone ID: MRT4577_41243C.1
gctgcaggaattcggcacgagtattgcgaccagatgagcaacttcgtctgtattgtatttatatacgaagtaaataacagcattgacctcgctcccctctcccctacctcccctactatataacagggccctggaatccatggaagccccacaataaccaggagcgagctacctgcgaagccacatctctccttcctcttcatcgatagtacttctccatattcagtgcagaggcacaagctaagccatgagcaacggtggtaaccgcagcaggggcggcgcgaggttcgagctgcagctgcacctgtcgccgccgccgcccgtggctaggagggtggaggtggacggcggaggcgacggcagcgactcgtcgtcgtccccgagctcgtgcgtgtcgtcggacggcagtccagggagcaagtcgccgatggtgatcggcgcctgcacgcggtgcatgatgtactgcatggtggccaagaaggacttccccacctgcatcaactgcaagcagccctgcctcgtggacctcctccactgctctggcgccggcggcagcggcaccggcaaggccaagtgaaaggacggtcagcgtgtcgtaccgtaccccggccgtcggtccagttgatgctcatacggatggttagctcagaccttagcttgtgggctttgtgcgctcatctcgaggcgcggtgggggagtgaccgccgttggatcatccactggatggacatggcctacttggtttagtaataggctagtgtagtactccccctattagctagctgctgatgctattagcttatcttcgtttatgatgttgttgcttctttaaccgcggcatcggtatgtgatcgccggcgtggttcactgcctattattgttgctggcaatggtttttagctgtaacaatgctatgtttaaatggagaatgtcatctttcgatggttgtttctaaaaaaaaaaaaaaaa

SEQ ID NO: 120349 - DNA, 179 bp, Zea mays
  Clone ID: MRT4577_41244C.1
ggggaaggaagatcaggataatcaaatataactgggtgccgataagacacaaggccatggtaatagtatagattatgcacgccacacctcgagaataattagtgatcagaattaggaatgttctcttttttctatcctctatacctcgacactatttttacctgtagcatatatatatt

SEQ ID NO: 120350 - DNA, 267 bp, Zea mays
  Clone ID: MRT4577_41245C.1
ccccattgcacgactgccacatgtcggcgtccttcgcgccaagccccaaagactacgatggaccgcacgaagcaaacggcacgcatgtcaacgggcggcaaggcgccccgaaagcagctggtgaccaaggcggcgcgcaagtctgcgcctaccgccggcgtcgtgaagaagccccaccggttaggggggggcacggttacgctacggtagattcggaagtaccagaagagaacggagctgcctatccgcaagttgcccttacagcgc

SEQ ID NO: 120351 - DNA, 392 bp, Zea mays
  Clone ID: MRT4577_41246C.1
ccagggaaaccggtttctaggagggacggaactttttctacctgtcttaaaccacactctgcaaccatgttggtacccccccaacacccttttacttcagacctgttaacatataaagcccgcagagccagatcattaagccactgtgataacaaacaacatgacggggaaactcttctagtacataccctaatgccttagcaaggggaccccagactatgtcttctatgcaggatacctaaaaaggggcacgttctgggcgcggacgaatcattcatgggctagggatatgctagatgaggcattcaggcaagtcaccgtttaaatccaactaaactctaacagaatgtctgtaggctccagcctggacatctgatgctgatgagcttttt

SEQ ID NO: 120352 - DNA, 282 bp, Zea mays
  Clone ID: MRT4577_41247C.1
cgacccatgccttcgcacgcaccaatatcaacgatcagggcactggtcggctgcacgaagtgctgcgccacgatgcggcgctggatctttccggtggccgtcttgggcaggtcgtccgtgatgaacaccttcttgggcaccttgaaggacgccaggttccgtcggcagtgcgccagcacctcctcctcccgcagcgccgacccgtcccgcgggatcaccgcgcagttgacatggcctgactgaacctgaataaacaaacacatgcatcgtctctctctcgtc

SEQ ID NO: 120353 - DNA, 299 bp, Zea mays
  Clone ID: MRT4577_41248C.1
aaatccggacgcaaagcacaccagctcatttgcttcgaccgttcgacgtgcgtgcgtcgtcaaccaaatgactcgtttgcttttttgagctgatgatcgctccttccttccctggaaccctttccacggaagctcgacgctgcgctgcgttcggatggcagacggaggcggggtgtgtgtgtcgtggcactcgccgacacgggtcgaggcgtcgtcgaataagacaagtaccacgcggggccgtccggaacgtgaggtccagtgctcgtggcaggcgcattacgtgctgcgttctcagg

SEQ ID NO: 120354 - DNA, 1505 bp, Zea mays
  Clone ID: MRT4577_41249C.1
cattgtgctcctcgaggagggccggggcgtcaccgcatgaaaaatgggaaaaaaaaaaaaaaacctcgctagtcgctactcactgtaccgcaccgccgccgccgtctcgcacacggggcacaggacgcgcgcgatcccctcgagtccggattgccatggccaccacggcgttcgccgccgccaggttcttccccgcccacctcgactcctccccacgcatcgcgccccaccgcgtcgggcccaccgcgaatctctccttctcaccgctttccgccaactcctcgtccctgctccgcctccattccccctgcccatccggccccgggggtaggctgcccccgccgccgcgatcgtacggcggcgccggcggatctggcgacgccgcgcactccggtggcggcgacggccgccgcgggggcatcctcgggctcctcctcgccgggtgggccgcccgcgtcgctgcggacccgcagttccctttcaaggtgctcatggaggagctcgtcggcgtcaccgcttgcgtgcttggcgacatggcctcccgccctaacttcggcctcaacgagctggactttgtcttctccacgctcgtcgtcggatccatcctcaacttcgtcctcatgtacctcctcgcccccaccgcgggcgtcgccgccgccgcgtcgtccgccgcgtccgcgcttcccagccacatgttcgagcccggcgcgtactccctcggctcccgcgtcgccacgatcatgtccaagggcgccaccttcgcggtggtcgggttcgcggccgggctcaccggaaccgcgatctccaacgggctgatcgcgatgcggaagcgcatggacccggcgttcgagacgcccaacaagccgccgcccacgctgctcaacgcggccacctgggcgctccacatgggtgtcagcagcaacctgcggtaccagacgctgaatgggatcgagtacctgctcggcaaggtcgcaccggcgccggtgttcaaggtgtccgttgttgctctccgctgcatgaacaacgtgctgggtgggatgtccttcgtgctgcttgccaggctgaccggggcgcagaaatcagacaagccagcgacggtcgcggaagagaaggagaggttgatagctgtgggcaatgccgcagcagatgccatcaacgaggcgaggcatggagagggtaagtaggtggtagaggagagagacgagtaagttgatggtgcatcatctcagactcgtttgctggttcttggacatagaccaagaaactcacctagtcacctgtagagttggttggaataaggagtggagtgaggttcagaacttcttttttaaaaaactctgtttgtggtttatcggtgttgatgatgacatgcttagtgatggtagaataaagtttttttttcctctcatgctcatttgatcgttgactcgatgggtagcctgtttgttaaataccttcagtttttgcatgcagtatatatgattctgaatggtactatgatgtcc

SEQ ID NO: 120355 - DNA, 870 bp, Zea mays
  Clone ID: MRT4577_4124C.1
cattgggtacctcgaggccggccgggagaggaaggaggccagaatcccccgtcgacgcgcacgcgccgtcgcgcagagctccgcgtccgcatcggccaccgcccacccgcgccggccgccggcggcgtggatggggaagctcgccgccctgaagcgggaagcggtcggggtggactaggtgctcggcgaattcctagtttagactttagaagcagtaggtggaggtgatgcggggcggagcgatgaaggctctgcggcgatccagcacctcctcgccgccgtcttccccgcattttcattcgtggatccaccgccggtacctcctcgttacctcgtcggcgacgtcctctttgtctgcatcggcgaattcggccgcggagggttcggattcagcgtcagtggtggcagcttcctcgtcgccctcgttggatccttcgtctccgaacatggaccggggtgtaattaaatctccatggtctcgaagaaaaaggaaacgagcgctcacttgtcaacactggattcgtctattttcagcgaacgggaagtttcgtgatgggggaagaaagtttctaaagaaggttcgcagtgggggaattgagccaggcataagggctgaagtttggccatttctgcttggagtctatgatttgaacagctctgaggaggacaggaataccatcaagataaagaaaaggaaagaatatgaaaaattgaggcgacagtgccaccatgttctgcattgcaatagaggaaatggtctgaatgttataaatgagttcctggatgagacttctctgatggggctgaagggtcagagtcacatattccatggtgctagtaagagggctgtgtgatgcccagagattgaaa

SEQ ID NO: 120356 - DNA, 362 bp, Zea mays
  unsure (1)..(362): unsure at all n locations
  Clone ID: MRT4577_41250C.1
tattgcaataaatacagagcaattatacttaagacaacatgaacctctcaaggggggggnatgtntattattttatgaagagatacagttttttgnnggaatgggatgtattcttccattttgtttattacatacaattttaaaaaaaatacatgctatctcctcaaaatgctgcccatcagctttgtttggtcatcccatcaatttgctaggagnagttgcttgtcttcagtaatattcagtttaggatacatgacatattacttacattcagtaaattcatatttttttagtaatggcatcatctggagaccaatcacattctgtgtcctctcctttgaaggagcagcagcaggagtttg

SEQ ID NO: 120357 - DNA, 257 bp, Zea mays
  Clone ID: MRT4577_41251C.1
gaaacccgcggcctctccccgtcccgttcgcccacatcccccacctaccccatccccaacgctgccatggactcgctccaccccacaacagcaatgctggcccagcgccaattcccctgccccctctctcagcgcatcgtcgctctcatggtccgcctccatcgccgggttccgcatccccccagcccctggcctcacactaaacccactagtgaatcctcccgcctccggcaaccgccacagcccggtggcgcgtg

SEQ ID NO: 120358 - DNA, 418 bp, Zea mays
  Clone ID: MRT4577_41252C.1
ttcccggggtcaccgacgcttgcgattgtcgctgcacgcgctgcgcagccatccggcatccggcaagacggcgagggagtatgtaccgatccatgtatcatagtcgtgttccagcaccgattccatccaaatctaaacttcagcagtttcactgattcacttagtacgtagtcagctaatcaaccttgatccatcctaagttttctgtcatgttgtgtagttcctctatttccagtttacacgacaaccatgacgattaatttcgaatggacggagttcatagctaagttgcaatcacctgctgtatagtgttccaagtcgtggtaatctatcttcttcattatgataggagattagccagtcagtgtgactcagatcacacatgtaacaggtgcaggtatcattggattccatatgc

SEQ ID NO: 120359 - DNA, 2897 bp, Zea mays
  Clone ID: MRT4577_41253C.1
aattcggcacgaggctcccagaacctcctcctccgcttctctccactcttcacgccgccaccgagtttatacacgcttcgtcccgtcctgccgcgcccgtctgttccatagcataccattattgtgataaaccatccaatccagagttccattccattctgaattgctcctcccagcttcagataaaccatcgagattgtgccgccagcgccccaccatggccgccgcgccgccgctgtccgccgacgtactctccttcctaacctccgcccccgccgcgccgacgccggtcgtagccgcggcgtggggcgcggcgagggcgggtcctgtgaggggtaaggcggcactaaggacgacgagaggaggaaggggcggggtgctggctccgctggtcgggaggaggccccgccggacgccgctctcggtgcgctgcaacgccaccagccgggacggcaggattacacaacaagagttcactgagatggcgtggcaagcaattgtctcatcccccgaggtggcaaaggagagcaaacaccagattgtggagactgaacatctgatgaaatccctgctggagcaacggaatggccttgcccgccgtatcttttctaaggcaggagttgacaatacaaggcttctcgatgccacggagaagttcatccagaggcagcctaaggtattaggtgaagaacctggatctatgttggggcgtgacttagaagctctgatacaaagagcccgggacttcaagaaagagtacggcgattcatatgtctcagttgagcatctagtccttggctttgctgaagataagcggtttgggaaacagctgttcaaggattttcagattactgtgaagacgttgaaatcagccattgaatcgattagagggaagcaaaatgtaatcgatcaagatcctgagggaaagtacgaagccttggagaaatatggaaaggatctgacagctatggcacgtcaagggaagcttgatccagttattggaagagatgatgagattcgaagatgtatacagattttatcacgaagaacaaagaacaatccagttctgattggtgaacctggtgtagggaaaacagctatagctgaagggttagctcagaggatcgttcaaggagatgtcccacaagctctgacaaaccgtcgactaattgcacttgatatgggtgcattgattgctggtgcaaaatatcgtggagagttcgaggatagactcaaggctgttctcaaagaagttacagattctgatgggcagaccgttcttttcattgatgagattcacacagttgttggagcaggtgccacagatagctccacggatgctggtaatcttctcaaaccaatgcttgggagaggagatctacggtgtattggtgcagcaacccttgatgaataccgcaaatatattgagaaagatccagcactggagcggcgcttccaacaagtttttgttgatcagccttcagttgaagatacaatttcaatactccgagggctaagagagagatatgagttgcaccatggtgtacgaatatctgacagtgcccttgtagctgcagctgttctttcagaccgctatatcagtggacgattcttgcctgacaaagcaattgatctggttgatgaatcagctgccaagttaaaaatggagataacatcaaaacctactgctctggatgagattgatcgtgctgtcttgaagcttgagatggagcgtctctcacttacaaatgatacagacaaagcatcaaggggcagactgtcccgtcttgaagcagaactatcactcttgaaggataaacaacgtcaattgactgagcagtgggagcatgagaaagcagtaatgactaaaattcaatctatcaaagaagagattgacagggtaaatgtggagatacagcaggcagaacgtgagtacgaccttaatcgtgctgctgaactgaaatatggcagtctgaatgccttgcagcgccagcttcaagcgacagagaaggagcttgatgaatatcagagttctgggaaatccatgctaagggaagaggtgacccaagatgatattgcagaaatagtgagcaggtggacaggaattccagtttctaaactaaagcaatctgatagggagaaattgttgtatctggaggatgagctgcacaagcgagttgtcggtcaggatcctgctgtaaaagcagttgcagaggccattcagagatccagggctggattatctgacccaaaccgtcctattgctagtttcatgttcatgggacctacaggagttggcaagacagagttagcgaaagcccttgcttcctttatgttcaacactgaggaagctgttgtcaggattgacatgagcgagtacatggagaagcattcagtctcgaggttgattggtgctccaccaggttatgttgggtatgaagagggtggtcaactgacagaagctgttcgtcgtaggccatattcggttgtcttgtttgatgagattgagaaagctcatttggatgtcttcaatgtcttccttcaaatattggacgatggtagggttactgattctcaaggccggaaagtgagcttcaccaactccatcattatcatgacgtccaacgttgggtcacagtatatactaaacatggatgaagaagatggatcatctgattcagcctatgagaacataaagaggagggtgatggatgctgcaagatcggtgttccgtccagagttcatgaatcgtgtagatgagtacattgttttcaagcctctcgagagagaacagatcaacagcattgtcaaattacagctttgcagagtacagaagaggattgcagatcgcaaataaagctcgatgtctcgcctggagccattgaattcttgggaag

SEQ ID NO: 120360 - DNA, 177 bp, Zea mays
  Clone ID: MRT4577_41254C.1
tgcaatttgaagtttatgcagcacggtactcggagttgggaacacatggtgtgccgttggagcagctcccactaattgatgtgatccaacatcttgacttgcgcctggcataacttgctttcacttgagcaagcaatagtcaaagtcaacttgcttagtgctactgctgcacaagtg

SEQ ID NO: 120361 - DNA, 768 bp, Zea mays
  Clone ID: MRT4577_41255C.1
acagacaaagcatcaaaggacagactatcccgtcttgaagcagaactatcactcttgaaggataaacaacgtcagttgactgagaagtgggagcacgagaaatcagtgatgactaaaattcaatctatcaaagaagaggtaaggtttgccttcccacaatgactgtgaatgcatttacagagttggttcaggcaatcgacttaaatctactacctgttgcaacagattgacagggtaaatgtggagatacagcaggcagaacgtgagtacgatcttaatcgagctgctgaactgaaatatggcagcctgaatgccttgcagcgccagcttcaaacgacagagaaggagcttgatgaatatcagagttctgggaaatccatgctaagggaagaggtgacccaagacgatattgcagaaatagtgagcaggtggacaggcattccagtttctaaactaaagcaatctgacagggagaaattgctgtatctggaggaagagctgcacaagcgagttgttggtcaggatcctgctgtaaaagcagttgcagaggccattcagagatccagagctggattatctgacccaaaccgtcctattgccagtttcatgttcatgggacctacaggagttggcaagacagagttagcgaaagcccttgcttcctttatgttcaacactgaggaagctgttgtcaggattgacatgagcgagtacatggagaagcattcagtctcgaggttgattggtgctccaccaggttatgttggg

SEQ ID NO: 120362 - DNA, 1187 bp, Zea mays
  Clone ID: MRT4577_41256C.1
aatgaattggctcattcctcaaaccaaacgcctcgttaatgcacgaaatcctcttcaatcctgttgcaatcgaacaaaacctccttttgtttatcggcatccttaaatatgtcttaacagcatccgggaatattatcttctctaggtgctacaaacaatacattcaaggaaaaagagaaaatatgagttttatccctgatgaggacaggagacttgtggataccacttccactgaaaagaaaaatggcagaaacaaaacaaaattcgctgctccatgtaaactgagctgtaccatagaacaaattctggctgtgatgctctactaagccaaacggagtactctaccagtttggcacctttatatgtacattttattgctcacgatctgtagaactgcaaccgtgctccatcagacagccggcaagaacttctcgccttcagcagcgggcttcgattgctcacccactttccggaaaactagcttctgttgcggaagctggccgttagagggcaccgtgacctgggtgtccacaaagatgctgtcctcgtccttgaaatcacctctgaggatgcccttcgcgagttcgttctccacgtgctgttgaatcactctcttcaccggcctcgcgccatagttcgggtcataccccaggcttcccaagaattcaatagcaccgggtgagacttccagcttgattttgcggtctgcgatcctcttctgtactcttgcgagctgtaatttgacaatgctgttgatctgttctctctcgagaggcttgaagacaatatactcatctacacgattcatgaactctggacggaacacagatcttgcagcatccatcaccctcctctttatgttctcataggctgaatcagatgatccaacttcttcgtccatgtttagtatatactgcgacccaacgttggacgtcatgataattatggtgttggtgaagctcactttccgtccttgagagtcggtaaccctaccgtcgtccagtatttgaaggaagacattgaacacatccgaatgagctttctcgatctcatcaaacaagacgacggaatatggcctacgacgaacagcttctgttagttgaccaccctcttcatacccaacataacctggtggagcaccaatcaatcttgagactgaatcttctccatgcccggccggcctcgag

SEQ ID NO: 120363 - DNA, 370 bp, Zea mays
  Clone ID: MRT4577_41257C.1
aaggcaaaaaaaatctttccaacttaaaagattccaagcctttaattgggtttcaggttcaaatcaataattttgcacaaggtggcatttatttttttcaattcaactaacacatctgagtttgcagggacatttgccccaaatttggatgccattattttttttaaaacgcccataaactttgcccctttaaacattttggtgtggccttcccaccacatgaaaaagctgctctttttaaaaaccttcgcagggcatgggttgctttaacacttgacaaactttcgggcaaaaatggggttttctgaccttttgaatctaaggctcacgaggggttccaaccgtttgcacttgggacagggagggagcg

SEQ ID NO: 120364 - DNA, 149 bp, Zea mays
  Clone ID: MRT4577_41258C.1
tttatttttttttttaagcaataaactaggggacagcgttttaactgagtaaattgataatattacatccataaccatgtaaaggtatacaaaaaacattttaagggcagagtttacacgttcaatctgaattaccttgttgcaacaaa

SEQ ID NO: 120365 - DNA, 361 bp, Zea mays
  Clone ID: MRT4577_41259C.1
agtggatggacaacgaagttgttaacctcatgctaaggttgtttacttcttgtaatgctactcttgttaccttaatccatgagaatcctaggtacgagaagatgactctagaggaggtgcttgaaagttccttggccatgagatgatggttaaggactccaagcacattgaggatttggctcaaggaaacgtgaccaccatggagccacaaccgaccgccttgaaggccacaagtaaaaaggaggagccccaagaaacaaggaaactattgaagatttggggctcgacgatgaggagatagccctcatcatcaaaagctttcgacaaatcctatggaaccagaaggacaaggactacaagc

SEQ ID NO: 120366 - DNA, 698 bp, Zea mays
  Clone ID: MRT4577_4125C.1
cattgggtacctcgaggccggccgggcttttaactccctctccagggaaggaggccagaatcccccgtcgacgcgcacgcgccgtcgcgcagagctccgcgtccgcatcggccaccgcccacccgcgccggccgccggcggcgtggatggggaagctcgccgccctgaagcgggaagcggtcggggtggactaggtgctcggcgaattcctagtttagactttagaagcagtaggtggaggtgatgcggggcggagcgatgaaggctctgcggcgatccagcacctcctcgccgccgtcttccccgcattttcattcgtggatccaccgccggtacctcctcgttacctcgtcggcgacgtcctctttgtctgcatcggcgaattcggccgcggagggttcggattcagcgtcagcgtcagtggtggcagcttcctcgtcgccctcgttggatccttcgtctccgaacatggaccggtgagctatccggtctggattcctcttggtggtgcaaatggttcacctcagaatggggaatttttgttggctaccgtacctgttgacatttcctataacaacgattcactaaatctcagaattatgctactctgatagcacagtggaagtggtagtttgttcggtactattattcttataagaattgctttacaccccaaaaaaaaaaaaaaaaaagcggcc

SEQ ID NO: 120367 - DNA, 462 bp, Zea mays
  Clone ID: MRT4577_41260C.1
atctggtcttgctgtttttttttctcggtttttcgcttggtccgtctttttttctggaaatgtattattgtttcgattccttggtaggatcacctgcttaattccatggtgagctgcgcgcatgcaggcggcccaagggaatcaggggagatggccgccaagcaaccggagaattcggcatgaacccccggccccgggaaacagcccggaataaaggcaaaaggggggaaaggggccagctactaccagggccggcctaagccctgggccgggccctagccaggtcaggcccatgacccgcactcccccccgcccggaaccaaaaaaaccgagggcggggaaccccccccgaaggggccaacggacaccgggcctgaccctcccccgcggacccccgcataaagacggacccccccgccggagggggcccaccttcctaatcgggggccggcgcccggcccc

SEQ ID NO: 120368 - DNA, 230 bp, Zea mays
  Clone ID: MRT4577_41261C.1
gggtaaacaggccttttccacattgacaaagagggaggggccagcgggactaacaaccaatgacctgtgggtacacccggacgatctggcaagcctggaatggagggccaacaaagaaatttgggagcggcgggccaccaaaaaaacttaaaaaaaagggagcaagcgggccttttaaaaaacaaaagggggagccagcagggccccaattttttttagataaacccact

SEQ ID NO: 120369 - DNA, 175 bp, Zea mays
  unsure (1)..(175): unsure at all n locations
  Clone ID: MRT4577_41262C.1
gcttcctcgccgttgcgttctccctgtacgcgagtcagtatccagctctggatcccctagtggcgtgcctggcgccgttgctccagttcagcaaccgagccatccggcggcggcggngtggctcggcctcggnctgctcttccagatcctgctccggatcctcccctcctccctg

SEQ ID NO: 120370 - DNA, 278 bp, Zea mays
  Clone ID: MRT4577_41263C.1
gggggcccccttttttttttttttgggccaaaaaatttttgggagagacgccaataagacgggggggtcttgggggccccttgtttgctccacattttataaaaaggtcacccccctcgttccttgccggttggggcggccctcatccttttttcgggccaaaaacaaggagcttggcccgtcttcatggctttagacatttgggaccattagcccctatctcggtcgggggctgaaaaggagaaatagcttctcgactcttgtgaaaacagggatgt

SEQ ID NO: 120371 - DNA, 252 bp, Zea mays
  Clone ID: MRT4577_41264C.1
agttgcgttaaagcagttttttttccttaaaattggcaccttcaccatccggacatagtacatggatgaaggggacgctcctgcccaatgttgttcgcatgcacacatcgcattttcttctgtaccattttaattgaaccaagctaatttcttttcttattcaacctaaaaggattcataattccctaattcctgcacaactaatctagcatattcacaggaaaagaatgtacaaggcaatattacaaaatc

SEQ ID NO: 120372 - DNA, 376 bp, Zea mays
  Clone ID: MRT4577_41265C.1
gggcccaccaattctttgaaaagctttattacatgttcatcggggcggaactcgtaacaccgggtttaaccagcaaggggggcgcccatacaagggaaaaaacctatgggcgccagatggggtttttagagcctaaaaccaggaccttttttgggcctacaaacatccagaggtacctgctcgaaattgtatgagccgcatgggtgttttgttacattggaaaaaaaaacctttgggagcttgaagaaggctcccaaagggttccagaagtccacctttttaggattttcagagcagcctttggttggtccataagggccatgtgacccgcatcggggacctttaagaaacttaaagggccgggggttttttaaac

SEQ ID NO: 120373 - DNA, 228 bp, Zea mays
  Clone ID: MRT4577_41266C.1
cccgtcacagcagcacgcgtaacgtacagcatcgagaattacaggctacgaaggatgaaccctacccatcagaccgcgtacagaacgcatacctacgaatccaaagctctctctgctcacgccatggcgaagaactacccgaccgtgagcgccgagtacaagaggctgtggagaaggccggcgcaagtccgagccctcatcgccgagaagagctcgccccgtcatgct

SEQ ID NO: 120374 - DNA, 368 bp, Zea mays
  Clone ID: MRT4577_41267C.1
cgaggacgtctggttccatgtggacaaggtatcctcggcacacgtctacctgaggctagagaaaggcgagacgatgcacaccatcagcgaggccctcctggaggactgtgcgcagctcgtcaaggctcactccattcaaggtgcgtgctcgatctcctctgacctctctctctctctgtctctctccatgggagaagaaccaaaaacagaacacggtgtgccctgccctacaaggcttttcagctcccacattgcagcatgttgcggcggctggaatcttttctcactccccccctgtagccatcgagcaggagatctatcaagagagcgccttcttcgtcttcctctctttctcctaactccattat

SEQ ID NO: 120375 - DNA, 453 bp, Zea mays
  Clone ID: MRT4577_41268C.1
aggaaaaacgggattcccccctaccttgcaaagcccggctggaaaccccccccctattattcgggggggtaaaaattcccaaaaaccccccccccgggttttgccccccccgcaaaaccgcccccgggtggtttagttcccaaaaccccccccctgaatttcccccccccggaaaaaccgcccccaggttgcggcccccattttctaggggcccacaagggccctgcctaacaatcccccgcccccgggggcccccccggaattcccgacccggccccgcaggcgtacccactttccctataggggggcggattaaagcctggcggaaacaagggcaaagctggtccccgggggaaaatgttatcccctcacaattccacccaacaaaccagcccgaagcctaaaggggaaaacccggggggcccaaagggggggccaacccaccttaattgg

SEQ ID NO: 120376 - DNA, 218 bp, Zea mays
  Clone ID: MRT4577_41269C.1
ctacagctgcattctctggtggacattcagtagaaacaatattttatgtgctcacagtgcaggtgtaatctctgtagagacagctccttgcactgttacattaacagtgacatttaaggattctctacctctacgagcaattgcatctactatcatggaaaccatacttatagagactagcactacatctgctattctagcccgagaacgctaccctt

SEQ ID NO: 120377 - DNA, 2306 bp, Zea mays
  Clone ID: MRT4577_4126C.1
gcgtccgcggacgcgtgggcccgtcgacgcgcacgcgcagagctccgcatccgcaccggccaccgcccgcccgcccgcgccggccgccggcggcgtggatggggaagctctccgccctgaagcgggaagcggtcggggtggactaggcgctcggtgacttcctagtttagaagcggtaggtggaggcgatgcggggcggggcgatgaaggccctgcggcgatccagcacctcctcggcgccatcgccaagggtgccgtcttccccgcggtcttattcgtggatccaccgccggtcgcttctcgttacctcgccggcctcgccggcgacgtcctctgtgtctgaatcggcgaatttgcccgcggagggttcggattcagcgccagcgtcagtggtggcagcttcctcgtcgccctcgctggctgcttcgtctccgaacatggaatgtacatttcattctaggggtggaattaaatctccgtggtctcgaagaaaaaggaaacgagcgcttacttgtcaacactggaatcgtctattttcagcaaatgggaagtttcgtgatgggggaagaaagtttctaaagaaggttcgcagtggggggattgagccgggcataagggctgaagtttggccatttctgcttggagtctatgatttgaacagctctgaggaggacaggaataccatcaagataaagaaaaggaaagaatatgaaaaattgaggcgacagtgccaccacatcctgcattgtaatagagaaaatggtctgaatgttataaatgagttcatgaacgaggacttctctgatggggctgaaggttcagagtcaccatattccaatggtgttagtaagagggtttgtgtgatgcccaaagaattgaaatctttaggcagtaaggcagaagaatcagagagttctaactgggatgctgtggaatgcatagatgaagacataacctctgttgatccatgtttggtagaatcagaatcttctgaatctgagtcttcctatgaagaggaccctgatagaacacctgtctctaccaatatggaagagaactgtggtcccaaaccaaaatttgcccggaccgcttcatctaagtcggagatttttatttcagacagaactcctgaggattttgccacatggcagcgcattatacgtgtagatgctattcgagcaaatacagaatgggttctgtttgcccgtaaccaggctgaagtctctaaagagaaagcgctgcagtctgcaatatctgtcgggttgaaagattttgaccatttagagccttacatgatctatcatgctgcacgattagttgcactgcttgaggcatatgcactttatgatccagagatcgggtactgtcaaggaatgagtgatctcttgtcaccaataattgcagtcatggaggaagatcatgaagcgttctggtgctttgtgggtttcatgaggaaagccagacacaacttcaggcttgacgaggttgggataaaaagacagctgaaaaccgtctcgcagatcatcaagcgcaaggattcacacctctacaggcacctgcagaaacttcaggcggaagactgcttctttctgtaccgaatggtggtggttctcttcaggagggagctcacttttgagcagactatgtgtctgtgggaggtcatgtgggctgaccaggccgcgatacgagctgggattggaaggtccacttgggcaaggataaggcttcatgccccgccaaccgacgacttgctgctctacgccatcgcagcctgcgtcttgcagaagaggaagctgataatcgagaagtacagcagcatggatgagatactgcgggagtgtaatagcatggccgggcagctagatgtctggaagctcctagatgatgcccaccacttggttgttgaccttcatgacaaaatctgatgcgactgccttcctcagctatgtttttgggtagagtatgcagacatgaacacattttccgaggtgtatttagtaagctgttgtgtactgttcatcacccggaataaaaaaaaactttcatgggagtacatgtagagaaccttgtagcttcaagtgaggacgaagttgtcttccactttggttaagctgataaaccattggatagcgcaatggtttattcaagccatccatagttaaaacttgatggaaaattttgttcttgctcctaatgtctgtccttggcaggaacaacattttccatgaagtcttttacaggaaagttaagttcccagattttgggtgtaatgtgtagtaataatgaaatcacagcagtttctttcc

SEQ ID NO: 120378 - DNA, 302 bp, Zea mays
  Clone ID: MRT4577_41270C.1
ggcacaggccggatgcggctacaaggaggccatccttggcgcgatgggaggggttggtcagacagtgaccctgctggccaagattgtgcccgctcgtctaggagatggacctgtacgacatacgcaccaatatggatggcgtggacatcgacctgagccactgcaacaccccgtggcgggtatacggcttcacgggcgaacacaagctcacggggagactgtcctgcgcgaacttactggtggtctacggccgctggccgcgaaatctcggcatgacgcgggaggactaacggttcggagcc

SEQ ID NO: 120379 - DNA, 472 bp, Zea mays
  Clone ID: MRT4577_41271C.1
cccacgcgtccggaatgttgtcaataaagctgcacagacttgtagacaaccttcacgttaactttgaagaatccttgagagcttatgtgcctgctgtagaatctatacaagctagtatgcttgctcgagcgaatgctttcaggcagcacttcgatttggatcaggagaggctgtatcttgagctttatcttgacatattgccggtcaagtacgctgaagagtattccgaagcatcgatctgagtttcgagagttggaagcagacactgaggaggctactcacatgtttggacacatagttagactactggatcaagagcttgctcgtttccaggcgcaaaagtcactcgatatcggtctcgcattccatggatttgccaagggacctgctaagctagctgaagactttccggattcattgcccacgttcctcccaaagctcgaagcatgaaccacatcatgaaatgtcactt

SEQ ID NO: 120380 - DNA, 631 bp, Zea mays
  unsure (1)..(631): unsure at all n locations
  Clone ID: MRT4577_41272C.1
aatctgagaagcgaagaaactttgattccagaaagggagaggagagaggggaagaagacgccagagtcgcaacccgccgcagatctcctccgtcctccgcgcccagccccgctctgtcctccatggagtgcgtccgctccggagctcttgatctggggcgctccgggaatttcttggggaagagcggctccacgacgtcatgtggtaaagtcagatgttctacaaaccttgctggttctaccaaatgcgagcaaaacttgcatgggaaggttaaacccttgctgttgtcagcaagtggaaaagcaaggggaacctctggtttggttcacagaagtgcagtacttaaacatcagcaccatcntttctgtgagatccacctctaccgatgtatgtactacttttgatgaagatgtcaaaggtgtatcttcacatgctgttgaggaaaagattggagtgctgttactaaatcttggtggtccagagaccctcaatgatgttcaaccatttttgttcaacctctttgctgatccagatatcatccgactccctaggctgttcaggtttcttcaaagaccactggccaaacttatttctacttttagagctcctaagagtaaagaggggtatgcct

SEQ ID NO: 120381 - DNA, 450 bp, Zea mays
  Clone ID: MRT4577_41273C.1
cttggttgatacaagagtttgtttgtttttaatcatgcaatttctcactttgacttgagctttcctattattttgcagatgcttggcaacatagtagtttttgtcaaggcaatgccatcattgtttgccccgttttatgaggacttctttgtaaacgcttcagatctgtaccagacgagggctttgaagcttgaaatactgaccactattgccacagagtcatctattcccgccatttttgaagaatttcaggtaattgcttgtggctgcaatggacagtatatctgctgagttcttggaaattgcaatgttctattaacggcttttccttaaaaaagttgcattaagtttttaacatctaacaagaaatcttagctaaatgtttgctagatcttgagatcatgtattgacagtatggcgtcgtgtctatcttaagacatgtaatttcac

SEQ ID NO: 120382 - DNA, 752 bp, Zea mays
  Clone ID: MRT4577_41274C.1
gggtacctcgaggccggccggggcgcccgtgcatcccagcaccggaagctggatccgcccctgcggtggcagcatgagcggcggggcgtcgctggggctcaggtcgtcggggagctacggatcgctgccgcatcagcagttaggtggctgccagtcgtcgtccccaccgctggccgcgcggaagcccgcgaagatgtccctcggcgggaccagcggcccgcgcgtctgcgcccggatctgcaagctcgccggacgccgccagcggatgctcctcctcctcctcgtctccgtcgccgtggcattctgcttcctcttctcatcacttgtcagtaaagacgaagatgcatcacctggtgttgagaccatgcttgtgttttctgatcatgtccggagctttgtgaaccctgtttggacatcgtcaggcagaccagtagctcagagaggttcgctgactgtgaatggtttgaatacaccatcgcagatggaaaaacaatctgatagtaaacaagttcaggaactcatgcagagttctccaccggctattgttgtggatcaccatccttgtgaaaacttttcattgtctcctccaccagttgatagaaaacgcactggaccacgaccttgtccagtttgttatttgccagttgagcaagcactggcactgagaccagctaaaccatcattgtcaccagtccttcaaagcttaaattatgttcttgaagagattttgattcccaaagagtccaagagcg

SEQ ID NO: 120383 - DNA, 706 bp, Zea mays
  Clone ID: MRT4577_41275C.1
ctccccacgtaaactccgtgatattcatattcctaatacagctaaattgtctaggaatccagattcgcagaaaggctgtttagaaaaaaagttgtttagaggacatagtgtgtcgggctcgacaactccgtggtgtcgtggctgaatctcaacctgatcacattggcgcggtactgcaagaccgacgtgtctgatgaggctctgcttagccatcccttgtagcccgtttggacataactaatcctcttttcccgccgtgcgatggatgtccgctcgctttgccgcgttgtccactagctactagctagtgcaggcgccttgttgtggaaacgagcccaatgtacaatgcagccgtaacattggttttacagtaaccgtgcagagaccaaaaacctcgctcactcccagtcctgggcgccactcgcgcaccagctgaagttgaggctggaggcgtgatcctccgagaagaagccggccgcgccgtcgctgccgacgacgtccgaggttgcgagccattcctccgtgaagccgtatccggcgcagcagctcttgtacgattcgaaagcgtacgtcgtcggcccgtgctgccacttggtctcgaacacggggggagacgagcagcccgtcggtggcggcgccgccgccgccgatgcggccaagaacggtgcaccgaacccggcgaaagcgcccggctgctctaacgccg

SEQ ID NO: 120384 - DNA, 325 bp, Zea mays
  Clone ID: MRT4577_41276C.1
tcaacacgtaccacaattctacacgcattaatagttcatcagatgtcccttcctacactacttgatcaggttttatttacctgctgagccgctcatcaagtggtccaactccaactttaacaagttcatagcatcctaccacgtctacacaccctagctcacggccctgatctattcgaggtagttcgtgctcgccgcgttcttccacagctcaccctatcttttcacattcacgctaacgttctcctaaacgtctctcgccatgacaatacaacctggcttaagaacaatatcacaatcaccaacgacaatggccgtctctcca

SEQ ID NO: 120385 - DNA, 657 bp, Zea mays
  Clone ID: MRT4577_41277C.1
cctttttttttttttttttttttttttttttttttttttttttttttagggacgagacggcagaatatgtaaatgcaacagttgggaaacacgtcgagcaccatgagcaagactgcaagaacaacacaacgcggcgtgtgatcgatcaccattgactcgttctgcttttgccactgcatggacttgcgcttggacttccaacacgcgttctgcgcttggacttccaacacgcgttcatcgacatccgacaggcagcttcccgggatgggcttgcgcttggacttccaacacgcgttctgcttttgccactgcatggacttctggccctgagttcacgggacatgcaactctgaacaagtgatcggagttgcttctccctcgagtcgagagcctggacgacgacttgtggttgtgggcttgtacacctgccgccagtcgtcgatcttggctacccctcactcaggaagaactgtttttctttacctgaagaaacaagaccacaggcagtggccctcgctccctgcttgctcaaaagcccacagctccagtagcccactctccctgcttgctcaaaagcccatagctcatttacattactttgacgcttttatcttgaagtaactatacccgcatcacttctctgcaaaaaaaagaaag

SEQ ID NO: 120386 - DNA, 292 bp, Zea mays
  Clone ID: MRT4577_41278C.1
cctcactcgtccgcctcactcgtccgggacgcgtgaggtgcgagtgtgcagcggcgagccggggctcggtcgacacctggtggtacatagctgagacgcagctgtctgagggatgggcagatgcgagctgctggttagagtccctggttagcatgggcggtttgttggtgtcgcacgggtgcgggacgtgtgtcgatcgacgactacatgccgggtggggagttgttcaagtcgtgggtgctgggtaaggtcgcgggctagcagtctcctgtcggtgtggtcgtcgtgtcgg

SEQ ID NO: 120387 - DNA, 697 bp, Zea mays
  unsure (1)..(697): unsure at all n locations
  Clone ID: MRT4577_41279C.1
ccggccgggaggccatattcgcagcactagccggaggcacccgccgctgccgaggcggcgtgtgcccgcactgcctccgcgaccgcctcctccgtctgtgccccgcctgcgcctgcacacggccctgcgcctgctcctgcgcgtcctccccgtcgtcctcgtcctccggcgccagcgcgctcggccgcgtgcacagcctcatcgagcgggagcaccgggtcgcgcgctcgcgctctgtcgccgcgcacggagtcgaccagcggcggaccatgtccgggctatggggctgggtgtcgttccggaagccgccgccgcgcggtgcagggtcgtggagctggagtacgacgacgcggtggcattggcgaggtcgaggtcggtgtcgatcgcggcggtggcggcggccccggagcccaagacgacacggtggggagtctcataccagggaagatcaaggcgctgcggaaccggcatgaagccccgccccgccggcgatcggcgagacagcgtgagatggaaccgatcgcgtaactcgcgttgtagcccgggtcagtctgttgttcatttcctcgatttaagtggcgttggctggtcgatcgatcgcgctcgcagccgcttgcgctaatttactccgctaattacgatcgcagcaaatgtaaatatgttagcggntcctaatcgtgcatttctcagcttaccg

SEQ ID NO: 120388 - DNA, 744 bp, Zea mays
  Clone ID: MRT4577_4127C.1
ttcgggaatcagcagagcttgtcacacctaacaacgacttcactccaaccctccctcagaagatccgtgtacacataaaaccacagacgtctgttcccactagctcttcgcctcacatggttacccttgattcccagcgcagcctcaacgagaaccagctgctccaggaagtcctagactgctacggacgcgggcgcacccgaccgctgggacaatgtggcccgagccatgcgaggcatcaagacacgcgactaggatcaccgccatcactacagccttaatgaggatgacacgctcatcgaatccggaagagttccattcccccactaccacacactcggagattggaactatcgagtgaaagatgatgtgaacaaccaccagacaagaactactgctacccatgaaatagatatcttagccattcgtacaacatgtgctgatatattgtgcataaaaatgtatgattgctcaggcaataaattgaactagctatagaatacacataagagtgttatgtgcaactagctatatataggctgagaacacatcctcaatgatggtatatataccaacgaacgctatctgaccataacgcgcacagtgcagctatatacccctcccctatgtatgaatacttgtatagtatggcgtgcgggaaaactcttgtccccgtttgttaattataaagttgtgcttggttaaaacttgaaagcaaaaaaaaaaggaccctggcccctaggg

SEQ ID NO: 120389 - DNA, 163 bp, Zea mays
  unsure (1)..(163): unsure at all n locations
  Clone ID: MRT4577_41280C.1
ccgccacactctacgataaggaagaggaggagggcaggatgtcgaaccgaaagaacaagcanccgaggaacggataccctcggattccttcccaggaagagctcctcccgacaccgcggnaaggngaagncgttcccaaggaaatgaccccgtgaagccttga

SEQ ID NO: 120390 - DNA, 276 bp, Zea mays
  Clone ID: MRT4577_41281C.1
ctgggaagtggagaccattcagatttgctttgtagtttgggaccattgagcagaaccaatttgattctgaacatgtggagatccttagagacttcactgtctggacttctgcattcgaaatcataatcatgaggttacaatgaatcaaaggtccgaacacttcttttaataaatggtccaaaaagaaagtcagcagcaaaataatttattagaatgcaatagacgtgagtaagaaacacatgaattggcaagcacgtccaccctagctgagagaga

SEQ ID NO: 120391 - DNA, 1586 bp, Zea mays
  Clone ID: MRT4577_41282C.1
gagctactagctagctagcggccgggcgggtacggcaccaacgagagctactagctagctagcagcactgcgggtacgtacccaactactacacattacgtacgtgagctagctagctagcagctagtgatagagaccagatcagctgcagcggcgacgatggctcctgagaagctgaagctgctcgtcggagtgctggccctgcagttccttctggcagggttccacatcgtctccagggcggcgctcaacatgggcatcagcgagatcgtgttcatggtgtacaggaacctcatctccctcgccttgctcgctccgttcgcctacttcctcgagaagaaagacaggccgccactcaccttctctttgctggtggagttcttcctgctagcgctgtgtgggataactgcgaaccagggcttctacctcctgggcctgtatcacctgtcaccaacctacgcctctgcgatacagaacaccgtccccgcgatcaccttcgccatggccgctgtcctcaggctcgagcaggtggacctgagcaggaggcatgggctggccaaggtggtgggcacggtggtgagcatcggaggggccaccgtcataaccctgtacaagggcctgccgctgctccatcacagtgatgatctgcatgtcaagtcgtctccggtgacgctgtcctcctccagcggcagccccatcctcaactggactctcggctgcgtcttcatcctcggccactgcctctcctggtccggatggatggtccttcaggtgccggtgctgaagaggtacccagccaggctctcggttctgtcactgacctgcatcttcgggctcctccagttcctggccattgccgccttcaccgaggaggacctgagcaggtggaaggtccgctcaggaggggagctcttcaccatcctatacgctggccttgtggcatccggggtagcgtttgctctgcagatctggtgcatcgacaggggaggcccgctcttcaccgcgtcttccagccagtgcagaccgtggccgtcgccgtcatggcttccgccatcctcggggaccagctctacacgggagggatcattggagctgtgctgatcgtcatcggcctctacttcgtgctgtggggcaagagcgccgagaagaagggcgccaggaacctgctgcaggatcagctggcgcagggagcagacgtgacgcggcacctgctcggcggagaagcttcggcgaaagatgaagaagcagccccggccatgctggcgtgatgatcgtttagtcgtctgtcaattggagcacagcgtagtcctgttgcatttgggaccgtatgagtcgtgtgatttcagctgttccaatctggcaaccaagaacaagtgtgcatgggttgccggtgtggaacagtgtgtagccatgctgctgtgagtctgtactctgttgctgtaatgttctgtgcaagcgtaggtaaggtgtataactataaaatcacttcatccataattcgtaccaaaaaaaaaaaaaaaaaaaaaaaaaaaaaaaaaaaaaaaaaaaaaaaaaaaaaaactcgaggggagggcccggtacccccg

SEQ ID NO: 120392 - DNA, 488 bp, Zea mays
  Clone ID: MRT4577_41283C.1
gccggccggttcgggtacggtaactcgtctgctcgcatttcctcccatccatcccgcctccaaacccgaactccaagtcgccccgcatcgatggcgcccaaggccgagaagaagcccgcggcgaagaagccggcggaggaggagcccgctgccgagaagcttcggcgaaagatgaagaagcagccccggccatgctggcgtgatgatcgtttagtcgtctgtcaattggagcacagcgtagtcctgttgcatttgggaccgtatgagtcgtgtgatttcagctgttccaatctggcaaccaagaacaagtgtgcatgggttgccggtgtggaacagtgtgtagccatgctgctgtgagtctgtactctgttgctgtaatgttctgtgcaagcgtaggtaaggtgtataactataaaatcacttcatccataattcgtaccaatctaggtgtggtcacaaactaaaaaaaaaaaaaaaaaaggccccta

SEQ ID NO: 120393 - DNA, 1222 bp, Zea mays
  Clone ID: MRT4577_41284C.1
ctcgaggccggccgggccgggacagcaacgagagctactagctagctagcagcactgcgggtacgtacccaactactacacattacgtacgtgagctagctagctagcagctagtgatagagaccagatcagctgcagcggcgacgatggctcctgagaagctgaagctgctcgtcggagtgctggccctgcagttccttctggcagggttccacatcgtctccagggcggcgctcaacatgggcatcagcgagatcgtgttcatggtgtacaggaacctcatctccctcgccttgctcgctccgttcgcctacttcctcgagaagaaagacaggccgccactcaccctctctttgctggtggagttcttcctgctagcgctgtgtgggataactgcgaaccagggcttctacctcctgggcctgtatcacctgtcaccaacctacgcctctgcgatacagaacaccgtccccgcgatcaccttcgccatggccgctgtcctcaggctcgagcaggtggacctgagcaggaggcatgggctggccaaggtggtgggcacggtggtgagcatcggaggggccaccgtcataaccctgtacaagggcctgccgctgctccatcacagtgatgatctgcacgtcaagtcgtctcttttcacgccagtgccctccatcgccgttcccatcctcaactccaccatcgtcggggaccagctctacacgggagggatcattggagctgtgctgatcgtcatcggcctttacttcgtgctgtggggcaaaagccccgaaaaaaagggcgccaggaaccttctgcaggatcagctggcgcagggagcaaacgttacccggcccctgctcggcggaaaagcttcggcgaaaaattaaaaaacagccccggccatgctggggtgatgatcgtttagtcgtctgtcaattggagcccagggtagtcctgttgcatttgggcccgtataagtcgtgtgatttcagctgttccaatttggcaaccaaaaacaagtgtgcatgggttgccggtgtggaacagtgtgtaaccatgctgctgtgagtctgtactctgttgctgtaatgttctgtgcaagcgtaggtaaggtgtataactataaaatcccttcctcccaaaaaaaaaaaaaaaaaaaaaaaaaaaaaaaaaaaaaaaaaaaaaaaaaaaaaaaaaaaaaaaaaactcgagggggggcccg

SEQ ID NO: 120394 - DNA, 227 bp, Zea mays
  Clone ID: MRT4577_41285C.1
ataatatggtggtatggtatagacgataccctaaatacaattgactgagtagggacatgaccacgactggactgagtagaccctaacatgacataacgatgtctataagtagcagattcacatatgactatctgacgggataactatgaggctcgaactgattgccctagcgatcaatgacgcaacatgggagtacattagatcacgatgagtatctgagaattgag

SEQ ID NO: 120395 - DNA, 577 bp, Zea mays
  Clone ID: MRT4577_41286C.1
cccacgcgtccgcttgtgtccatactagagatagccctctctcccaccaccaactcggtcggcccttgtgcacagggcgctatctccctgctagtggtgacctcattatggccagaacgtaatcgcgccaccgcaaatcgtcgtcgtgtttagttttcatcgtcgaccagccagcatacgtcttccccgagcagtttcatgcacccaccgagaacatggactgtcagagctcctaaaggaagaggtggaaatccagaagaagtggtttctggagagaagtctacttctaaatctgttcctcaagtggattgagttgtctaactaattatgtggtagaaggatcctgaatcttatctacaacaaaggtaatcatgagctttctaggtgtccctgtggctggaagatgcttccagtcttaaaggaggattagttaggtttatgggtgagctttggaagggttctaccttcctgctttgtaattaagttatgcactttgagttctatcaggacttgtaataaatattactctttctatgatgtaaaacttgagttttgggaattataaagaatgttttgt

SEQ ID NO: 120396 - DNA, 417 bp, Zea mays
  Clone ID: MRT4577_41287C.1
aaaaaagaaccgagcccagcctactatataaaggcttgggggctcagataagggtcattttatgtgaatggggagaacacatgcataaggggcagacctgggtcatggcatccgctaaactaagcatactatgtgaggtcactgtacaaagggtctcagcgaggctctgaagaccgttcacccggctttgctattcaggttacagtagcttcttaggtcccgatccatttgtgcactaaacatctgattctccaccagccttcaaccttcttacgatcttgaattgcccctggctgaccttatctgaaggaccaccaccatcttcatgtactctcaaacgccgacacataaaacccattcccttggacagagcattccacttctgactatggtgagaagaaaaattaatgaatggta

SEQ ID NO: 120397 - DNA, 254 bp, Zea mays
  Clone ID: MRT4577_41288C.1
agctaatctacttgagaacagtagctgaagactgactcggtcagcttgaccattcagaagctggtcaagctatcacctctagccctagctaggagctagccactggctctagcagtgataaacctactcaacgtgatccatagagactgcacgatttaacaactccgcgtcgtattggctgacctaggatgtgtccctgatgaagacacttcctgctacagacgacgggtaggccgatgagggtcacccagacg

SEQ ID NO: 120398 - DNA, 461 bp, Zea mays
  Clone ID: MRT4577_41289C.1
ccgacggcgtgggcggacgcgtgggttcagcgagacacaagcagaacagtggtggcaggagaaccgggcgagggtataccagcagtacaatgtccgcgtggttgacaaatcaacggccagtgccgacaatgacattgcagctaactgacactagactgacctggagaaacatatctgattacaagtggagctgaggccatgtaccctacctacgtgaaggctctctagtcagtcaagctgggttgctaacgtggctaccattttacctaggtggttttcgctcccaggaaaacaggaggtttttttaatccggttttacataattctttctcttactcccttctcttttctccttgtgtggaaagtagagtgcttgagcagaggtaatgtaaatgcttagtagaagcaggctaatctaccttgtaaatgcataagcaagcatcgattttagaatgtcttgg

SEQ ID NO: 120399 - DNA, 463 bp, Zea mays
  Clone ID: MRT4577_4128C.1
gcaagatacaaagtaaataaatttatttaattatttccatccacaaatctgtattgagaacataaccttgaaaactttaagacaaagtggactgctttcaaacagggtgggtgatgccaaactaacctaacatctttcactacaaatgctcggtagtactgaattgagtactaaaatgaattacagttatagatgaccttctgaacttccattttgctgcagcaggaacctcaacaggtggcagtgcctctttcttccatgccttgagtgcatcaagcgcattaaaatgaaatttgatgccagtttgtgtatgttgaagtgacaagaaactctctccaaaaaccatctcaggtaaatgtgttgtttgaagttcatcttcaaagcgttgcatagaggcggcgttgaggatagggcctttgtgggactggatgacccaccccttcactcgcacgccgccgggaat

SEQ ID NO: 120400 - DNA, 2016 bp, Zea mays
  Clone ID: MRT4577_41290C.1
cctcggggccgtcggggccggccgccccgcgaccactaacctctgcctccgcatctctctctcgcgcgcgcgccgcccttcccagcgccgtcggctgccgctcctcccctccaccgccgcctctgctccgcccgtcctcgcgccgtcgcgaccgctgcggcttcgtctctccccattgtctgtcccctctcaacgcactctacgacggaccgatgacttgacggatctgggggtttgtctagggtgggtgaacggaaggggatggagttcacggagtcgttcaagcagacgggcccgtgctccttctcccccgactcgcgcttccttgctattgccgtagactaccgtctcgtcgtccgcgacgtactctcactgaaggtggtacaattattttcatgcgtggacaagataagctctgtagaatgggcaccagattcagaatatattttatgtggactttacaagcgacccatggtgcaagcttggtcactgagtcaacctgattggacctgcaagattgatgaaggtccagcagggattgcatatgctcgctggagtcctgacagtcgtcatatattaactacatctgagtttcagctccgtctcactgtgtggtctctcgtaaatacagcatgcgtacatgtccagtggccaaaacatggttctaagggtgtttcttttaccaaagatgggaagtttgctgcaatctgtaccagacgtgattgcaaggattacatcaatttactatcatgtcactcttgggaaataatgactgtctttgctattgacacggtagacttagctggtgttgaatggtcaccatatgatagtgctattgttgtttgggattcacttcttgaatataaggttctgatatattcgccagacggaaggtgcttgttcaagtatctagcttatgaaagtgggttgggtgtgaaaactgttgcttggtcaccatgtggacagtttttagcagtgggaagctatgatcaagcagtacggactttgaatcacttgacgtggaaaacttttgcggagttctcacatgcagggtatattcgtagtccttgcaatgctgctatttataaggaagtggatgacccatggcagcttgatatgtcagaattatgtctaagtgaaggcctctctcgaaacatgccagacaatggtgcagaaaatggcaccgagggaggaggctctagagttaaatatgctgtgatggatgttcccatcaccttaccttcgttgaaaccagcttttgacaagcctaaccccaaacaaggcattggtatgctgtcatggagcagcgacagccactatttcttcaccaggaatgacaacatgccaactgttctttggatatgggatatatgccgccttgagcttgccgctgtgctcgtgcagaaagatccaatccgtgctgcagcatgggaccctacctgcacacgccttgttttatgcacagagagccctcacttgtacatgtggacgccatccggtgcctgctgtgtcaacatcccctttctgaacttccgaatcgttgatttgaagtggagctcgaatgggagctgtctcctcctgaaggagcgcgaatctttctgctgtgccacaatcatatctgccctgcctgaggaagaacctgatcattctgatgatacttctgaagatgaatgagtggcctcatggtatgtctagcagcttatgcgaatggaactgggaactaacagtacaaatgatcttgtgatggtgaatgagtgacactgactgactacttagctacttgtagaatccagagtggattgcgataccatgaatcgataaggtcatttcgctgcttagatggcaaatgctctatcaccaggcactacagaatggacagagaactgtgtggttctatttgttgtattcttgctcttgtttgtctgttgtagtttctccaaggttgtactgcttgaccttacttgttggatcttaatcttacatatccagtcaccagggtattttcaatctgggagt

SEQ ID NO: 120401 - DNA, 412 bp, Zea mays
  unsure (1)..(412): unsure at all n locations
  Clone ID: MRT4577_41291C.1
agaggaaacacaccgcagggnngaagaaaacncggcngnncagcagncnancaagnnnccnnnacngnnaccganganncgaanccggannacaaaggaagacggccgaaggaccnaaagaacacacgaancccacggcancaagaanccaagancagngggccacggnaaggcccccggnncccngagaaaaaccacggggcccncgaaagggcaggcancgancgancaggacgagcagcacaggaaggccaggangcnggagcagcaancgnagcagcaagagcaacacncgncgacggccnngncccggaaggcgncagncgcggacaacgcccgggcggaggggggccccaaggccagcagnnncnngcagccgcggggggagcggcggaancccagaagaaccaaa

SEQ ID NO: 120402 - DNA, 254 bp, Zea mays
  Clone ID: MRT4577_41292C.1
ggggaaccaaccccaccttcaattttggggggggggaacaatttctgcccccccttttcggggtgaacaagggggcccctttttaccccgggaacccccatcccaaaatgggctcccccctttcccggttccctggaggggggaaaacttttccccgtttggtgaaatggggcccatttatgggggcccccccccagtttgggagaaacaccccccccttgaatagaacccttggggggggatagcagggggtt

SEQ ID NO: 120403 - DNA, 487 bp, Zea mays
  Clone ID: MRT4577_41293C.1
catacttcataagtaaaaccaatttgaacacactcaacagacatgctcgctcggtacccctaggtaactagcattttaaacctaagttttacctcgctacactagtacgccataatcatgtcctcacatgcgacaaaatattttggcagccatctaatataactatgacctatttatgcttcaatcaagataatcgtcgcgattaatatatctagtcatactattcatcaatgtactaacacgaataataaattagcttaccctgaacaattcgacgcgatagtcacaagcacgacgacggtttccggtcgacgtcattgatcacacacgtctggcgagcgaggcatacagtttccattcttgaccaaatacccggggggttccttttgtcaagctagtaacgcgtggccagcaccagagtgtcttcacagcttgggggcttggcgtaaacgaggatgacgatcgacgatttcgacgtgccagcgcg

SEQ ID NO: 120404 - DNA, 181 bp, Zea mays
  Clone ID: MRT4577_41294C.1
gacagacaatattatccttattgtacagatgggggagctctggaggatctgaaaaagtttttggtgatattccccaagtttataccacaaaatgatggagccagaatttagttgcagaacttctgactccaagtccagagttctttactagacatctggtttcatactagctttttgctag

SEQ ID NO: 120405 - DNA, 156 bp, Zea mays
  Clone ID: MRT4577_41295C.1
gccggctcttatacgacgtactatggggaaagctggcgcgctctgcaggtcccggaatcggaatcaatggccgggtggacgaggtgactattaggaggccccacttattatgatacttggtgcaggcgctcacaccagactatacatcatctttcc

SEQ ID NO: 120406 - DNA, 251 bp, Zea mays
  unsure (1)..(251): unsure at all n locations
  Clone ID: MRT4577_41296C.1
aaaaaaaaaggacgcganatataaatagtggcaagttggnacaagacctccnncccgnggacaacaagaaccaacatccttctcttctccgcaaaaagaataacaccaaaaaaaatctacagccaccaaagaaatatcagcagcccctatagtaggcccccccgccacagatatcaccagcttacttgctcaccaacgaactacaaatctaccaacaccagttttagccaatcaatggatcgacagctagg

SEQ ID NO: 120407 - DNA, 602 bp, Zea mays
  Clone ID: MRT4577_41297C.1
ccgggctctcttcccaaagcctgtcgtctccgctgcgcgtcgtccgacggagccaccgccgtcccccagtccccggatctcctccgtccgcaccgccgtcgccgacgcacgacaccgggtcaggtgaggccaataaaagctggaattccaaatcatagtccgtgtgaaccagttgaatttcatccatcctatcaggtccaaagcctgaactagttgtagggagttcccctcacaagggcaaaaagatcaaacctcatctccagcctcctccaaaaatgcacaaacaagaaccactgaaaatcaaggatttgacaggaccaatgcaccatcaagaatgatatgtgcaagcacatggaagtaatttaaaagtagctattgtctttattttgtgcaagctagccacccttttgtaactctataactgtagtgctgacaccactaagtcagttcatatggcctagcccgtttttcttttggatgattgcctttctacataaggcataaagactatatattattagcttgtataactaatattcagatcctactgactacttagtgctttaaacattatatatatttcatcgggtctgcctttcacc

SEQ ID NO: 120408 - DNA, 438 bp, Zea mays
  Clone ID: MRT4577_41298C.1
ataaacattgttaatcctcacctaatgataccagataataatattcacatgtaagaaaactgcttctgttaaaattacagagaccatcaccagggtcagctctttgagctcttcctggggtggggtgcctaccaaagtgaaatgacagcagataaacagaccaattccaaaccaccattacgcacaagcaatctgaaacaatgattttcattttcatgatctggacaataattatcctatacacactgttgatgctacaaagagtccagctggtcctctgcaagcttgtgtatcaacttctccattggcttgatgtacttgggcatgtaatgttctcctatcatggacctcgccagggcgaatcttactgtacaaaatgccggggtgtctcatacaaggcgacgacctcctcctgggccccttgctgacttggggttg

SEQ ID NO: 120409 - DNA, 150 bp, Zea mays
  Clone ID: MRT4577_41299C.1
gtcgtcaacgagagcgatgcgcttgcagtcgcgcagcaggctagtccagtttcaattaaagcctgtacgtaacaacccaccagtcgagctacctgctctgagtagccagaacgctacaactatgactatcggcaatgcagcctttagatg

SEQ ID NO: 120410 - DNA, 193 bp, Zea mays
  Clone ID: MRT4577_4129C.1
gaaccaactgccaacaaaaacagagacacagttcctagtgaagtctggctgggttagagccatggaacaccaaaaaaaatttgcatatcgatcgttatcacgaaactggctagagcaagaacaaccacgctgacacaaaagagcattgtgacaggatacatgagagggcctcgcatatcctctcgagaagcat

SEQ ID NO: 120411 - DNA, 563 bp, Zea mays
  Clone ID: MRT4577_412C.1
ccggccgtcatggtgcctcacgcgtacgtttccgctggactctaggatgaacgggtcgacttcaggaatcacgatgctaagacagagttcttcacgcgcaacatcctccagagagatacttggatgctcgaagactgaacgcgttcgacctcctctcacactccagaggcgtacacctgccacgtctgttactggtggaccgagagcataaggacaaccactctcggtgcatgacacaaatgcctctccctcggacacggtagaaagtggatcagattgcttggacagaggggttcatgatgacaaaacatgacggtctggagaatgtgcagggtaccaagacaaggaaggacaggggaagactcgcgatgcgacgccgatgatcttactcaggcgacaccgcgacttgtcactgcgcatcaggtgaagaagacgactccgagacacgctgtcagtatgagatggtctgctgcacggggctatcacctgcactcatggacactatgctgtagtagtcgatctgaagagatgatgcctccttctctgcgtcaagcatcataact

SEQ ID NO: 120412 - DNA, 248 bp, Zea mays
  Clone ID: MRT4577_41300C.1
aattcggcacgaggtttgactgcatgatacttctacaatagttattagtagtaaaaatataatttttttttcgaaagtgcaagagagctgcacatcatttaattacagaagaaatggaccaaaatggaccaaggtacatagccctgaacaggcccaacaaaaaacacccactcacacactacatcctctcccaacagattaggccctgtgtatattaagcgtgatctcaatgcctaaactctgaagat

SEQ ID NO: 120413 - DNA, 380 bp, Zea mays
  unsure (1)..(380): unsure at all n locations
  Clone ID: MRT4577_41301C.1
tattatcgcgaccaactagttgcattaaaagcacactagcgtcccagcggcggcagacaaaatattttgctgcgctatgcgccctggtcgtgaccggcagcagtaggctacccgaataccattacaaccacaaagctgacaagctcctatagcttccacttgttcccccatacctctcaccagcggggttttcaatgtgtgaaaacccaattgatcaaccctacacgatccaacaggcaatcgcaacaagcatattaccattatcacccttgttactacaacaaccgtcagccctattacagcagctacctttggtccatttggcggcacaaaacatcagggcacaacaactacaacaactngtgctagcaaaccttgct

SEQ ID NO: 120414 - DNA, 293 bp, Zea mays
  unsure (1)..(293): unsure at all n locations
  Clone ID: MRT4577_41302C.1
gggggggggttctgntccncaattcccgggggggcgccacncgtccgagatattgttgaatatatccagaatgtggctattactgaanatatccaaaacggcacgggtgttgagcctaacgtggtgggggtcgcatacaggaatgtgattggggctcggcgggcttcatggcgcattggctcttctattgaacagaagggggaggcccgtaagaacgaataggatggtaaccttatcaagggataccgggcggagatcgaggcgtaactgagcaatatctgtgatggcattct

SEQ ID NO: 120415 - DNA, 432 bp, Zea mays
  Clone ID: MRT4577_41303C.1
ctggaaagcccgccggtacgcggtcgcggaatgaaccgggtgcgacctacgcaggccggtttgtattgagagggggggcgtcccagcctcaaggagcctacctttagaccactgactgtgcgtcacgacacgccaagacgaggctaacaaaaaaacaatagaccgacgagcgggcacaacacctgcggcagagggtgcaggtactgcagagatgacgcgccagaaccagacacagagcgcggagctgctgcccaagatcatcatcctggagcagaacgacgagagccagagcaacctcgacatgtcggagtagagcaccacaccggactaccgcgtggcgttgaccgcgcttggcgcggagcaggcgcgcaccaagaggcagcccatccgcagcgcggtgggggccacctgcaactggaaggtatagtacta

SEQ ID NO: 120416 - DNA, 234 bp, Zea mays
  Clone ID: MRT4577_41304C.1
gtgcatgtctacaccgtcttctccgtcaccgacgccaagcgcagcggccgcgactcccacgtgcccatcctggcgccgctccccataggttgggacgccttcgctctgcacctggcgaccatcctcgacagcggtgctcggatcaaccccgcgcgcacgctcggcgccggcatcgtctacaacaggtcccacgcatggaacgatgactggatcttctgggttggccccttgatc

SEQ ID NO: 120417 - DNA, 181 bp, Zea mays
  unsure (1)..(181): unsure at all n locations
  Clone ID: MRT4577_41305C.1
gtggtggtggtggtggtcgtaagggaacaacggcaacccgcaacggccgttgcttacggggcggtgttcgttcggccggggcttgggctttttccggggaacgggggcaaccaagccgggcttgttcttggacccggccccggtggaaaggaaggaagaccactnttatctttttttgtcc

SEQ ID NO: 120418 - DNA, 165 bp, Zea mays
  Clone ID: MRT4577_41306C.1
cgcttgatcgagtacgacatctcggcattctgctccacgcggcggcggcggcggcgcgccgcaggcttcggttcatcaggagcagcgcctcccaccagagtagttcccaccagatcgtcgaagacaacaagcaacaatcatctgtaggctgcatgagtcaacaga

SEQ ID NO: 120419 - DNA, 479 bp, Zea mays
  Clone ID: MRT4577_41307C.1
tatgtagtccacccacttaaagtttctctggaagatctttacaatggcacctcaaagaagcgcctgatactgacactggagacattgtattcgtcctccagcagaaggatcactccaaattcaaaagaaagggtgaagacctcttctatgagcacaccttgtctctgaccgaaccactatgtgggttacaatttgttcttacacatctggacaacaggcagtttctcatcaaatcagaccctggtgaagttgttaaacctgaccaattcaaggcgattaacgatgaggggatgccaatttaccagaggcctttcatgaaggggaagctgcacatccatttcacggtggagttccctgactcgctggcaccagaacagcgcaaggctctcgagacagtactctcacccaaggtcttcatccaagctgacagacatggagatcgatgaatgcgaggagacgactatgcatgatgtgaacac

SEQ ID NO: 120420 - DNA, 248 bp, Zea mays
  Clone ID: MRT4577_41308C.1
cggctcgagcaccaccgtacctgccgaggttattaaagctgcttcttggtggcgtttgcagatacaacagagccaaaaggcttcgcctgaaatggccgacaagttcgaaacagctttagttacccttctgcaagagaaagtgaacggacattggtggactaattgcccgtggaagggactaggccacagatctctttctttggatcgtttgagctctcgacctgacccggtcctactaaaagctgcaa

SEQ ID NO: 120421 - DNA, 606 bp, Zea mays
  Clone ID: MRT4577_41309C.1
agggtcccggtccccccctcggagtcacccagcgtccgggccgccgtctcccttcccctccgctactgcgacctgcccaccccactcccccgcaggagcggcggcggcggcggcggcgaggtcgtaccccacatgggcgagcggcggcggcaccgccggtaggcaaaggcaagatgttcgggcgcgcgccgtaacaacagcgacaacaccaagtactacgagatcctcggggggcccaagtcggcgtcccaggacgacctcaagaaggcctaccgcaaggctgctatcatagaaccaccccgacaagggcggtgacctcgagaagttcaaggagctcgcacaagcctatgaggttttgagtgatccacataaacgtgagatttatgatcagtatggtgaagatgcccttaaggaaggaatgggcggtggaggatcccatgttggtccatttgacatcttgctcatcattttttggaccctcttttggaggaggtggttggagcacaatgccaagcacgcaaacgatgggagaagatgtagcccacccacttaaagtctttctggaggatctttacaagggcacctctggggagctctgtctttcgc

SEQ ID NO: 120422 - DNA, 168 bp, Zea mays
  Clone ID: MRT4577_4130C.1
attccctctcgacccactcgtcctcccacacttccttccactctccaaccttcttttcctaccacccctcctctcacttcacgaagcttttatccaaatttagacctaacctcctattccttctaatctcatcaacaaatacaacaccctaatcatcatctaccaaca

SEQ ID NO: 120423 - DNA, 2647 bp, Zea mays
  Clone ID: MRT4577_41310C.1
agaggtctcgattccatagcggtggcgagggcgccgttgcacgtcgggtaacccgggaggccgagcccagaggggaggagcccggctgcacacgcgctggccgcgttggtagcagcgactgcactgggcgcgagagggctgagcgcagtggtggtgtggaccacagcggctgcactggccgcgttggtagcagcggctgcactgggcgcgagagggctgagcgcagtggtggtgtggaccacagcggctgcgctggccgcaaccgcgaagctgtacgcagcagggtcggggatgagggccggaccagtgctggtggtggcggcggcggcggcggcggctgcagccacggcggcctgcagggccgtgacggcgtcgacgggggagtccatcaggcgcaggcggcggcggcggcgaggtcgtaccccacatcggcgagcggcggcggcaccgccggaggcaaaggcaagatgttcgggcgcgcgccgaagaagagcgacaacaccaagtactacgagatcctcggggtgcccaagtcggcgtcccaggacgatctcaagaaggcctaccgcaaggctgctatcaagaaccaccccgacaagggcggtgaccccgagaagttcaaggagctcgcacaagcctatgaggttttgagtgatccagagaaacgtgagatttatgatcagtatggtgaagatgcccttaaggaaggaatgggcggtggaggatcccatgttgatccatttgacatcttctcatcattttttggaccctcttttggaggaggtggtggaagcagcaggggaagaaggcaaaggaggggagaagatgtagttcacccacttaaagtttctctggaagatctttacaatggcacctcaaagaagctctctctttcgcgcaatgtcatctgctccaagtgcaagggcaagggctcgaagtctggtgcctcaatgaggtgccctggttgccagggctcaggcatgaaagtcactattcgtcagctgggcccttccatgatacagcagatgcagcagccttgcaatgagtgcaaggggactggagagagcatcaatgagaaggaccgctgcccagggtgcaagggtgagaaggtcattcaagagaagaaggttcttgaggttcatgttgagaaggggatgcaacacaaccagaagatcaccttccctggtgaagctgatgaagcgcctgatactgtcactggagacattgtattcgtcctccagcagaaggatcactccaaattcaaaagaaagggtgaagatctcttctatgagcacaccttgtctctgaccgaagcactttgtgggttccaatttgttcttacacatctggacaacaggcagcttctcatcaaatcagaccctggtgaagttgttaaacctgaccaattcaaggcgattaatgatgaggggatgccaatttaccagaggcctttcatgaaggggaagctgtacatccatttcacggtggagttccctgactcgctggcaccagagcagtgcaaggctctcgagacagtacttccaccaaggccttcatccaagctgacagacatggagatagatgaatgcgaggagacgactatgcatgatgtgaacaacatcgaggaagagatgcgcaggaagcaagctcacgctgcccaggaggcgtacgaggaggacgacgagatgccgggcggagcccagagagtgcagtgcgcgcaacagtaagcagactatcatcaaggcaattgggaggggtggtgcccttaaagcatgggagtgatctctggttttgctgtcgccgagctgggaaataggaagctgaatcgacctcgcaagcggggaatgtatccttttttgctgcaacataaaaaatgctacccaggcatagctgggtaccttttaacttctgtttgtgggatttgctagagtgatggtttcgatatatagggggacttgaatgtctgtggaatgctacggtataacgcacatttgggtgcaatgtctgttgcattgctgtctgaatgacatcgttggtacatttattttttcatgtaacgcctgtagtttgctaatcaacaagcttggaatggcctgattgatgatgcctgataatttgtcctttacaggttataaaggtgctgctaagaaacaatagtcatttgtggagcgtaacataacggtgagcagtctagccttgttggatcgtgacatggaacttgaggccaagtttgcagtagttgccgacgctgcagacgtagtagcgcacgcctttatagtcgagcgggacgacggcgggcgggacgcggaagttgttgtaggggtcgtcggtggtgcagtcctcgtactccctcccggacacctgcaccacgtcgtagaacccaatctggaacctgaaaacgaggttgtcgccggcgtagaacgtcctgttgttcgaccaggccatgtacaggtcgtcgcgcagcgggatggaccacatcgagcccccgacgacgtggtctgtcgccaccgtggccagcggcacgtggacggtgagaaggacgacggcggttaggagcgtggccatggccgccgcgccgagcgtccccatcctggatgcccaccgctgttgggtatggcagaatagaatacgcgaaaaccccggccgg

SEQ ID NO: 120424 - DNA, 1345 bp, Zea mays
  Clone ID: MRT4577_41311C.1
acacctcgttggtgtccccctcatgcatgaataaagccagcctgtcgaggccgcggcagcggctgtggctgcggcacaaacaccgcgccagcacaacgcatacgcatacctcaccttcctttcctcctcccgtcctccatcaaaagaaggcagggaaagatctgatctggggggtgagagagcaggaggagaaagccaagccattgccctcccctcttgaaggcttggagcttggttctacatcctcttctcttcccctccgtctctctctctctctctctatttggtttgcttgcttgcctctactagactctagtcgtcgggtccggccatggccaccatcctggagaacatccagaaggcgaggttcctgccgaccaggccgctcaaggacgagctgcccaccttccagggcggcggcaagagcaaggaggagagccacctcatgggcctgaggaagcggctgtccagcttctccggcaagatccagcccatctcctccgcgtcggccgccgagtgggcgttccgccgctccaagtcggcgccctccctcggcgccgccttcgccgcggggggcggctccctgaggcagtggtggcagtggggcgtcggctggctcctgtccaagaagcccgggttcgcgggcgacctcgagatgaacgaggaggaggtcgccgcgctgggccgccagagcaggggcacctgggcccacatcctcttcaagatgcggtccggcgtccgccgcctcgtcgcgtccgcgcactcgctccccaccacgcacaagcagcagtccctgccgtcgtcgtcggccgcggcggcgcacagcgtccagtgcaagccggcggcgtcgttcgcctacgcgcagcggcagagcttccaccacaccggccacgccatggcgcactaggcagcgtctcgcggttgccggtgccgtctgcggccggtctcctccagatccagggatggagagcgctgagaggcgcgggaagaagaagattcaggttacaggtgcgtgagatcgacggtgaagatgtcgttgaattgatgatgaatgaaatggaatgtaggattaccgttctgtgatctgtgtagatctagtgcccctgtagaggtgaacaagtgttatactacatgctcgttctttctttatattattcttttgggttcgttcgttggacgatgtaaatgtaaaatgttttgttgatcttgtactgttaaataaaactgatgcaaattgtgcccaaaaaaaaaaaaaaaaaaaaatgtttggtaaaacttgaactgttaaataaaactgatgcaaattgtgcccaaaaaaaaaaaaaaaaaaaaaactcgagcccgg

SEQ ID NO: 120425 - DNA, 585 bp, Zea mays
  unsure (1)..(585): unsure at all n locations
  Clone ID: MRT4577_41312C.1
ccggccgggccgggatctaccttttgagcgacactcccatgtgcgacatcctctgcctgccgctaagtccccacaccaccgcccccacgccgagcaatccatgcccatcccggctcttcttgattttcgtaactacgcgcctctggctcgctcttctcaattcctgctgcatgtccgtcgtgccgccgttgcgcgggcgcagggccaagcgtcactaanaggcatcaacagagaagaaggcgaccgtggccgcaaggggtaagcaggcgcattgagcattctaacagtctgcaactttcattcagaacagggaggaacaagccgaagatttggactgttttggccaaaccatttcagcagcatacacttctgctaattcgtcatctgagctactttggtcgcattatactatatgtacgttgtgacgcattgttttagcagtctctttgctccggctttcgcaagccaaagctctatggtgtaaatgtgctagtgtaaaaaaattgaatgccttctaatctttcttttaaataatatcgtagaccattaaaggcaaaaaaaaaaaaaaaaaaggcccctagggcc

SEQ ID NO: 120426 - DNA, 272 bp, Zea mays
  Clone ID: MRT4577_41313C.1
gatggttcaaattttcaaagtcccgcgaaacactcagtagtttggctctaatactggaagtactaattatttcggaaagtatccgctccttttaaggtggtcctatattaatattgtcatcttcttccatgaattgccatgactcaatttcgtttaattcctatcacagaagctctaacacatatgtatagcctttaatggtctcgtctcttgattatatgaaagatctctctttctgtatttcaataattggaccctctaaatggatattg

SEQ ID NO: 120427 - DNA, 263 bp, Zea mays
  unsure (1)..(263): unsure at all n locations
  Clone ID: MRT4577_41314C.1
gcgtccggtaggtagtagcgtgntgtacacctgtgttgctctagtagtaggtgccgtgctgctgcagctgccggccgtgatcgtcgccgccggcgatggccccagcatgcaccacctacacttgtacatgcacgagaaagacgccggccccaacagcacggccgtggtggtcgtgaactgcaccggcccgccgctgccggcggggagggggtcgtacggctgcttcggcgacacgagggtggtggatgacgtgctgacggcag

SEQ ID NO: 120428 - DNA, 334 bp, Zea mays
  unsure (1)..(334): unsure at all n locations
  Clone ID: MRT4577_41315C.1
aaggggggaaaactcagagcccccccccctctctanaantatncatgaattccataacactactttaattcaaacagacatttaaaataaaaatcccccttaaacccacacaaaaaaaacatatccactattcccaaacacacaccttcattatatcaaataccttccaacataccttgaaacactacataatcctgtccacacacctcaccagcacctttccaccctccagcgaaaacaaacactccgaccaccctctcatataacacattccaaccatcttctatcccctaacccccaaaattctcactttttcaaccacccccccaacaat

SEQ ID NO: 120429 - DNA, 429 bp, Zea mays
  Clone ID: MRT4577_41316C.1
gcttgttaatgtttttttattttgtcgggggggcctaattgaagaaccacaaaacccaagagaggttctgtctaaagaaaaaaaagaccctgtttttttctcccagatttattttcacaaaaaaaccatttttttcccaaaaaaacccagttaaatttttaaccccccccaagaaaaaaaatttgcaatgacccctttttttccccaaaaaaagggggaaaaaaaaaaaaaccctcttgtttatttatagccgggcccccttttaaggacacatcccgaccccccctttaaggggcccgggacattaattctttggaccccccccttgaaccacaaaaagggtttaaaaaaaaaaatgggggagccccttgtgggtccctttggaaaacaacttgtgaacaccccgggggtatcttttttataccaaat

SEQ ID NO: 120430 - DNA, 1296 bp, Zea mays
  unsure (1)..(1296): unsure at all n locations
  Clone ID: MRT4577_41317C.1
cattgggtacctcgaggccggccgggatcacaattcggtttcttgggtggtttttttttcttgcttgctcggtttcttgtggggcgggccgcgaaccggcgtggcgggggcgcggggcaacgcaaagcagcgcagcggcaacgcagtgcagcaaaagcttcgatctttatccgccggattcctctcctcccctttcctctctctccgtctccccgcttgctttgtgcttcgttgttgagaggaggggagaggaggggagacccacatccacttgcctttctcctctctcctctcgcagccccccttccaactcctcctggtccctggaaaaaggagaccttttggtgcaagattcgatctgctgtggctgcctcggccttgctgcgtgcgcggagatttggtttcttggctggcgcgcgcgggcagttggagctctttgattcaacaggttcagattgcagcggcgagcgactgctctgcggtcgaggctgctgctcgccgggtgattccgtgcccgctcttggtggcggcgggcggtgtcctcgtctgatccgtttcttcgggaggctttggttgatgtgctgggtttcctcggagctcagttccccaattcgccattttgatgaggagctcttcccactgtgagagctactgcgctcctcccctgtgctacctcccctgcctccccaaatccaaagacgttgcagtcggtgacccggagtccgggtccccgagccctgccgctgtcgccgaggacaagccgcccgtggtccagaagatcgaggaatctgtggcggcaaccggcggcgatggcgtcggtgatggtgacaagtgctatcgggaggtggcggtggctcccaagagttgcttgaagagggctaattgcgaggacagcagtaagaatgcggtgaaaggcaatgtgaagtggaaggatttgctggggaaggatctcacgctcacgcaggtcaaggaattcgagccaagcgaatctggagactcagacgacgaagagtacgctggcgcctgcgcctgcgtaatccaatgaggccagggatctttagtgtaaattctgtgaagaaaaaaaatcaaaacaaacaaacagaacgctctcagtcagccattagtcctggtcagtagagggtagggagcagctgtgttggtaattggtatgtggatgccatggctcgtgttgtgttctgtcagcagcttcaactgtaaaatgttgttacaaatgcatagctttagaagatattattattatctgccaaatgtgatatgttctcctgtctgnaaaaa

SEQ ID NO: 120431 - DNA, 351 bp, Zea mays
  Clone ID: MRT4577_41318C.1
agcgcccacccttttttttttcgactacggctggctataagaagcgcgatgatactacaacttctgacgcaccggcgcccgagctccctgagggagcggctctgcttcccctagacctggccaaggaggcatcatgattggcactggtgcgactgacaatctgaagggtgctcttgcacaagggatttgaaagatctcccccacatgagtgctgttcaagattgaatgcgttgaaaactgcgacctagacctgaaggagtaccaagctactgccaaccgttacatgaagcctggagactgcttaaaaactgtttataacactgggtagagggcacaacactcgcaggacga

SEQ ID NO: 120432 - DNA, 115 bp, Zea mays
  Clone ID: MRT4577_41319C.1
ctctcgttacaggacctagctgcacacctactggagggcgggggctgggagaccctattaccgaacacccaacctcgtcctcctacggttcgtgcgccacttcccggccatggtc

SEQ ID NO: 120433 - DNA, 547 bp, Zea mays
  unsure (1)..(547): unsure at all n locations
  Clone ID: MRT4577_4131C.1
tcgtttgataaagacccttcggtactgcttccacggtccggacatggcttggtgatgatctatctcatcgtgtcgtcattgcttgatagtactaggtcggctcttcccccagtagaggtgtttgtccaagagacgattgtcgccttgttgggttgctaggcagacaagttgatcggtagccccgcctcgctgcgttgatcggcaggcaggttgatcggtagccctgcctcgctgggttggtcagcgagtgggttcatcggcaattctgccccgccaattttctcatcaggcgggttggtcggcagtcacgccccgccgggttgctcgatgggcgggtaggtcggccaccctatcaggttgcttggcgggtgggtaggtcggcagtcccaccccaccgggttgctcggtaggcttgttggtcggtagtcacgccccgctgggttgctcacgggcgagtagatngattgtccctctggttggctcggcagcgggtagtacggtagtcccccccgttcggttgcttgacgggcgggccgtcgattagtgg

SEQ ID NO: 120434 - DNA, 278 bp, Zea mays
  Clone ID: MRT4577_41320C.1
cacgcacacgcgaagcataattctgcattggattaagcattccgataagtattccgattgcgtaaatatgattacaggatctctggctgaagacacagacaatgttatttccatatcgcaactaaatcttctttagttttgcaggaaatggaagcccaatagctaaaacactatggttctggcctactagaaccatcagtatatcatacttgcttcaggctcggctgaaaacccaactcattttcctaaggcatctcatagaatgaatactactggaa

SEQ ID NO: 120435 - DNA, 323 bp, Zea mays
  Clone ID: MRT4577_41321C.1
gtgagctcgtgaatcggctcgagttgtaatcggtgtccctgtaaaacaatccccacagattactttcagaaatagatgtatttctctacgtaagggccaggtttattttctccttttttgagatttctagaaaaaatgctgcttgcacatgttggttcttgaaaccttagctagaagaatttcaggtcataccaacatgtggataggctatagctgttcagaggtctcctgggggagcttaaaacgggggaaacactggttttcacagatgctccacatggctgtctttaaaagactcaaaacttttttttgtcctctttgtt

SEQ ID NO: 120436 - DNA, 277 bp, Zea mays
  Clone ID: MRT4577_41322C.1
aggcccacgcgtacgcacacaacacatccaatgaaacactccaacggctgggggtgtgctttagcaggtggcaagtgccgataagcatcacccgccaaggcatacggaccaggccaagactagctgcatcaatggagtacgctggcctgcacggaacaagccggaaccatgacataaatgcgagacgttacacggagacgagaaagagcttcgcagagccggagaacttgtacgtgcattgtgacgagcttaagcaacttcgactaaccatggagat

SEQ ID NO: 120437 - DNA, 1061 bp, Zea mays
  Clone ID: MRT4577_41323C.1
aaaccagagagctcgagcagcaaattgcataaatacagagcgaggatccccacccccaccagcaagtcgtgcgctcaacataaaccctcgtcacccccacatgccaatcttcgcaccggctgccttccaagtgttaaattaccttgatgaacaaagccctcttgcaacatagctacatgcctccccttgacaacaaaactttagagcaggcacttatccaaagtacaatggcagtgtaaacacaactcagtacatctataaaacactaatttcctactttccatttctgtccattttacaaaaaaaatcctaatatttatttctgatcttaggacccaccatttttgtgagtcatcaaatgactcgtatcaatatcttccataccataccgttaaaggacaccaacacaacacgaagccatatgtaacactcccatcgcactagataaagaaaaagagcaaccatcttagctaaaaaaaagtgcatatctacttttcaacttatatcttttttaatattttagttaagataaaatatattatgtaacatccactttatttttaaatttatttatttgaaaagggtccactttaattttaaatttatctttgagtgtcgtaacaaagcattagtatttttatttattttgttatttgtataaaaagaatagtacacatcagtttttgttggaaaaagattgttttatttatatttatttaaattttgaattcattagttcatcgtctcgatcagttaaattatgagttgtgcatctaccgtcagcggccagcgagttgaggagaagaccaatgcgacagacatgaaaaagaaatcgagagacaacaagtgcttctctggcgagttatgtttggttcgtgtttaaatgtgtcacactttgtctaaatttagtcgttcgaattaaagaactgaccttagcagaaaagttaccttagcagaaaagttaaaagtgtggcaagttcatcgaaccaaacaggcactagatgaagctcctccaggggaaggcgtgtcagcgaaactcccaggggacatcgatgtcggcc

SEQ ID NO: 120438 - DNA, 307 bp, Zea mays
  Clone ID: MRT4577_41324C.1
ggaacaacgtatcaaggtcattggacaaaaatagctgcgaacaaaaaccttgctcattcttctctcgtctcgtttcatagcgggagcaaacaaagggaacaacaggggtaccaacacctaatccaaaggtagaacggacactaacacggggacagaagcgaacgggaacacgatactcttgatagatgaaataactcggcgcgacccaggatgggcccacacatgaatccttccaaacaaatctgactctcgcgtagccgacaccaccaccctcgtgccgaccgccgtagccgccaccgtcttcgta

SEQ ID NO: 120439 - DNA, 267 bp, Zea mays
  Clone ID: MRT4577_41325C.1
gggatgaagaaaatcaagaaatgtcttcatgcaaatcagcaagaatagaaacgtcttgttctcttttagaacaaacacaacctgctacacgctcattgtggaaaaataaggagcagcatctatctgagaatgagcctgtggacacaaactcagacaataacttatttacagatacagatttaaaatctattgtgaaaaattctgccagtaaatctcatgctgcagaaaagctaaaaaaaaaaaaaaaggggggcccccgattagtga

SEQ ID NO: 120440 - DNA, 426 bp, Zea mays
  Clone ID: MRT4577_41326C.1
gcccgacgggcacgcgggcggagggcgcagtcacagggagataaaggcggccgtagtggcatgggcaaggggggctagaatcgatgttgccttgtctaaagagaacatgcacgaaactagaatatgaggaaagatatgaatatattaacgcagatgattatcatatagccgggggttaggaaggatacagtgccggggaggacatctatttgtcataactaacctacctgcactagactatctatgacaggaaactagggaaaagcccagtaccttaacaaggacttgaatgaatatacagtgatatgaaccgaacaataggacaagtacctgaccagacggacagtaagggcgaattggacgacactaggctaacgtactattgcatcacacctcggaccaaactaggggataccatcgtcatac

SEQ ID NO: 120441 - DNA, 925 bp, Zea mays
  Clone ID: MRT4577_41327C.1
tttttaactcttttttgatgtgaagataaatactgtggtaaaagtttgcaacaacgtacctaatcaaatgacaatggcaggtacatataaacgtaccccacatcgatatatactataaacaaacaaatacaatatggatcgagatatgtatggcgctccgcggattaatcaacgaattaataatcaattaatgaatcttggcgcgggcggcgggcgccggcgccggcgcgtcaccggcgccaccggtggcccgcttgatgagcgcgtgggcgacgcgcatgagcgcctcgaagtccttgttcttggcgagcagcgtggttttgacgggcgtggatggggcgtgcttgcagcagacgtcgcaggaccacgtgtcctcctccgccgtgtccaggaacagcttcacgtcgtggagcttgccgtcgtcgaggccgccctcggtgtcgtccaggtggtccagcgcctcctcgatctccccggcgcactcgttcaggcactgccacatgtcgttgtccttcaccacgtccatctcgtgccgcgcgtagtcgcccgccgcgccgcccgcggtcgtcgccgcgcggagcgccgcctccgccaggtcccgcggggtcttggagtcgctgtccgcctggagcgcgcgcaggcacacgtccgggtccggcgtcgctgcacacgacaccttgatgtcaacgccggcgccggcgccggcggcgcgcacgccgagggacacggacaggaacagcgcgatggccacggccagaagggagccgcagtaccagctcatggccgctctcgcctccatcgccgtggatatgctcgcacgatggatcggatcggagacgcttgctactccgggcgaccgggccggtgggagaggcgagaagaaatagctatagctagctatagtagctagaatcccggccggggg

SEQ ID NO: 120442 - DNA, 400 bp, Zea mays
  Clone ID: MRT4577_41328C.1
tcccttatcgtagcaagaggatgatgatccggagaaccgactcgagatccatccgtagccccgacgaaaacacgacgaggcaaaggcaagcgatcgcattctatgagggaggatcgtgccgaacaggccagtacttcgcgatcgcgttagctttccctatcccgaagagcgatggcggccagagcggagcagggcttctgggttcttaccggaccaacggaagacggcgcgcgccagcaggaagtgggttccgcgaccgatgggcggcctggcgtgtggtgtggcgaatccctcaccggcagagatgggaattgggttgcggagcggagtggagcggatcggattggattggaacacagcgcaacatccaacgagtgttttcgtcgtcgagcgatgagtc

SEQ ID NO: 120443 - DNA, 233 bp, Zea mays
  Clone ID: MRT4577_41329C.1
gtatgtcgccgtgtacgaggcgactcgcggccgtaggttccgtttgtacaagccgggcgggacccccggcggcggcaaccagggcaagctcccggtgctggtgtacttgcaccgagggggctactgcggctgtgcctactaccaccccttgttgcactcctgctgtcagcgcttccccgtcgaggtacccgccgtctagctctcagtccagtacctgctcgtcccggagcacc

SEQ ID NO: 120444 - DNA, 1456 bp, Zea mays
  Clone ID: MRT4577_4132C.1
tgggtacctcgaggccggccgggagtattgggcacctcgacgccgcccgggactgcaactgcgaatttccgtcagcttggagcggtccaagcgccctgcgaagcaaactacgccgatggcttcggcggcggcgtgggagggtccgacggccgcggagctgaagacagcgggggcggaggtgattcccggcggcgtgcgagtgaaggggtgggtcatccagtcccacaaaggccctatcctcaacgccgcctctctgcaacgctttgaagatgaacttcaaacaacacatttacctgagatggtttttggagagagtttcttgtcacttcaacatacacaaactggcatcaaatttcattttaatgcgcttgatgcactcaaggcatggaagaaagaggcactgccacctgttgaggttcctgctgcagcaaaatggaagttcagaagtaagccttctgaccaggttatacttgactacgactatacatttacgacaccatattgtgggagtgatgctgtggttgtgaactctggcactccacaaacaagtttagatggatgcggcactttgtgttgggaggatactaatgatcggattgacattgttgccctttcagcaaaagaacccattcttttctacgacgaggttatcttgtatgaagatgagttagctgacaatggtatctcatttcttactgtgcgagtgagggtaatgccaactggttggtttctgcttttgcgtttttggcttagagttgatggtgtactgatgaggttgagagacactcggttacattgcctgtttggaaacggcgacggagccaagccagtggtacttcgtgagtgctgctggagggaagcaacatttgctactttgtctgcgaaaggatatccttcggactctgcagcgtacgcggacccgaaccttattgcccataagcttcctattgtgacgcagaagacccaaaagctgaaaaatcttacctgactgacacaaaggcgccctaccgcgtgtacatcatgactgtcctgtcctatcgttgccttttgtgtttgccacatgttgtggatgtacgtttctatgacgaaacaccatagtccatttcgcctgggccgaacagagatagctgcttgtcatgtcacgtttgaattagaccattccttagcccttttttttttcctcctcttattctctgtctgccagtctataaaacgtcttacatttgttgacctgaaaaaaaaaaaaaaaaaagatgtttccatgtcgtgccaccattgaattttacccctctgtcgccctgttctttttccctctgtctgcctgcccccacgtcgtcatctataactgtaattcattttagtactcaattcagtactaccgagcatttgtagtgaaagatgttaggttagtttggcatcacccaccctgtttgaaagcagtccactttgtcttaaa

SEQ ID NO: 120445 - DNA, 436 bp, Zea mays
  Clone ID: MRT4577_41330C.1
ggggcccaatgcaaaagccggcggggaaattgaaaaacaaaaaaacgggcaaacttttgggaaacggaaaaaccgggggggggatcgcccaaaagactttccccggttttccaaaagacaactttggaaccccggggaaaaaaaaaacagcccggggaggggttttaaaaagccaaaaggttttttttttgaaacaaagggggggggccctgccttttcaggggaaaaaaaaaaaaagtttcatggacaaaaacaaatttttttaaaaagccaaaaggaattcaggaagggggggccaagaaccccacggggaggtccctaaccgggcctttggccggaaatttccctggggggccaaaaaaaggaacctttcccccccaaatagggccgggggtgggtttcacctggggaccccaaacgtaaaaaaaaaataggg

SEQ ID NO: 120446 - DNA, 269 bp, Zea mays
  Clone ID: MRT4577_41331C.1
cccagcgtttttccttccagttaccccacttgctctctttctccccagtagcaacgaccgggcgtctcgcgccgactaaaccctactcatgtacccaggtctgcgtgggcccttgccggcgatgagaacccgcgttcaaagatggctcgcgtggattgatggaacaggacttaagcaaactggatgtgacgaagcttaccccctgtcacctgagttatctacgccaagcaacaataatatgggtaccattggccatgtggctcatggaa

SEQ ID NO: 120447 - DNA, 224 bp, Zea mays
  unsure (1)..(224): unsure at all n locations
  Clone ID: MRT4577_41332C.1
gactcctatagggcgattggngacctagcagccggccggggtgtctcacttacaaggacgaaatctgacccgggccacactccgctgctccgccatggcgatccgctccaccgcctggatctcgctgttgctcgcgctggccgtcgcgctctccgcccgggcggaggaggagtccgccgccgccgcgaagggcaaggacgtgctcaacctcgacgtcgacagaa

SEQ ID NO: 120448 - DNA, 365 bp, Zea mays
  Clone ID: MRT4577_41333C.1
gcgtcgatgcgtgagctttatatattggggggtggacccacgggcccttactttatagtgcattaacattgacgatttgatgacatgaatattggaatgaggaacactttaaacatattggggactttacaattgtgcaaatactatgaggtgcaacatgacgagatcatgtgtgacctcctttcatttgaagctgacacaagagctgctaacattacaacgaatgaggctggctctgacttgacaagaaatgaccgctaggagctggactacaacttcggtttattggatccataccgccaccaagaattcggccgttatgaacatccttaccaagctctgtgtgcaatggataaatacccacc

SEQ ID NO: 120449 - DNA, 413 bp, Zea mays
  Clone ID: MRT4577_41334C.1
ccggccgggaagcgcgcctggtgccgctgcctgtgctcgaccttttttttacccacccggcacctcgactctgtgcgtctggcgttgcactgccctcgtcggacgccggcaaggcccgcaaaagcctagctaggctaccagactttccgcggcggcatgacgcataggcatgcagatgcagcacgatgacacgactgtgaaccatgatgagggggcgaaagaagctgatgctgaaagagaacgatatcaacgaccgggggagagtcgactatcacataaacaaccatgctaagcacatttaccaacttggcgggcgatcagagcactcattccagcatataaccgtgtaaaacgtgctctggatgtcgatgaggcacaacatcagatggaggccatagactgtgagagggcag

SEQ ID NO: 120450 - DNA, 200 bp, Zea mays
  Clone ID: MRT4577_41335C.1
cgtgcgcgtggattgattgatgctgttagatgcatgtgtgtgtgtggtttttgttgcattgcatacgcatggagagatgatgagttggcgttgtcactaatattaaccatgttggtgcaatagtgggggtttttgtttcctgctggttaattgttggtatccatactagcgtgcgggtaaaattaatgtatttacttgag

SEQ ID NO: 120451 - DNA, 319 bp, Zea mays
  unsure (1)..(319): unsure at all n locations
  Clone ID: MRT4577_41336C.1
agccgaacaacaggaaagggcacacaagcaanaggcagcaaaacaccagcagcgggcaaaacagcaacggggaaacccggaccacgacaggacgcacaacagaagcgacacacaccngaccgggggcggcaggaccgcggcaagganagagganaagaaccaacaaacgacccaaccggacaagaaagcagacgacggnggggacccgcaaaagcaaaaaagggagaacaggagcagaagnaacagaccncngaaacacacaagacaagaagggaagagaaacagacggagacacagaaacaaagagaggaagccgcac

SEQ ID NO: 120452 - DNA, 840 bp, Zea mays
  unsure (1)..(840): unsure at all n locations
  Clone ID: MRT4577_41337C.1
aacactcccagatagcagtgcagtactgatagtagagctaggaaggatcgatggcctgcagtagagcaatggtagccctgatggggcttgtccttgccgcgctgctcttcccagcggctttgtcgtccaggcggccggatcagcttatctccatgaccaccgatggccagtaccatagtacacgtccagtagtgaccatagccgacggtctcactgcggactaccatgacgtgtcgtgccccgatctgcagggcatcgtgcgcaccgccgtggtagaagccctacagggagatatcaccatcgccgctgacctcctccgtatgttcttccacgactgcttcccgcagggatgcgatgcgtcgattcttctgctgggaactccatggagtgagatgagaatgccgccgaacctgtctctagatatcaggcggaaagtggcgttcctcatggaggacatccgcgccaaggtgcacgaagcctgtgggcccaccgtctcctgcgccgacatcatggcccttgccactcacgacgccgttatagcgtcgggtggcaaaccttaccatgtgccactcggtaggctcgacagcttcgagcccgcgccgctgaggttcgtcgaggagctcccgccccccaccttcagcattggccagcttatagctgccttcaaaagccgcagcctcgacgagaaagacctcgtggtgctctctggtgcgcataccattggggaaagctcattgcgccaccttcagcgaccgtttccccaactccgactctgatgactttgtccgaaggctacaagataactgcaccgncgacgtgaaccggcgtcaggaccttgat

SEQ ID NO: 120453 - DNA, 196 bp, Zea mays
  Clone ID: MRT4577_41338C.1
aggtgcacagtatacaccgtgtttgagccaacatatctttgctacggaaaaacggaacaccgcacatgaggtgaaagctacaataaagcatatgcaatatccacgcttggaaaacaagcgacggacgcaattttactgttcggataggttggacggcatatgacggtgtatactgtgcacctgtagacaaacaggg

SEQ ID NO: 120454 - DNA, 578 bp, Zea mays
  Clone ID: MRT4577_41339C.1
aaacctaaagataaggtttatattagagtgatagctcaatcagcttcataaacagacaaaaagtagtccaggaatttacatgttaacatgataacttggcaatctatcaaactaccaacaaagaaaaagaaacctcacaaggccttcctatatacagagaggcaaaggccatgggcgtccgccgatttggagcagcacacacggtggttgagggcaacaaccccaatctttgggcagagcatcgatctggcagtgctcgtcggtgggctggcactcagtggggagatcatcagtgaggaggcactcccggcggggaggcagccagcaggtggggcagcacttatgacggatagaacgctcaatgggagaaactcgtcacagcagaggcaagctactaggaggcactcaaggacggcgagaaaaggccaagacaagctcctcagaagctgcttaatgaggaaaccagctcatatttgttttgcagggaagtttcgcgtttggttgctccactgttttttttcctggtgaaaacctgctccaaaagcagttccaaaccgaaccatactacataatgcaac

SEQ ID NO: 120455 - DNA, 999 bp, Zea mays
  Clone ID: MRT4577_4133C.1
tacctcgaggccggccggatacttgactacactatactttacgacaccatattgtgggagtgatgctgtggttgtgaactctggcactccacaaacaagtttagatggatgcggcactttgtgttgggaggatactaatagatcggattgacattgttgccctttcagcaaaagaacccattcttttctacgacgagggatggagatggaacagatggttcataatttatctggatactggtttacccctgacaggatgtatgtaggttatcttgtatgaagatgagttagctgacaatggtatctcatttcttactgtgcgagtgagggtaatgccaactggttggtttctgcttttgcgtttttggcttagagttgatggtgtactgatgaggttgagagacactcggttacattgcctgtttggaaacggcgacggagccaagccagtggtacttcgtgagtgctgctggagggaagcaacatttgctactttgtctgcggtatgcaaatcgctggaaccaagcactttctttgaatgagattaagtgggcaccatcttttatctcttttctataatgcagaaaggatatccttcggactctgcagcgtacgcggacccgaaccttattgcccataagcttcctattgtgacgcagaagacccaaaagctgaaaaatcttacctgactgacacaaaggcgccctaccgcgtgtacatcatgactgtcctgtcctatcgttgccttttgtgtttgccacatgttgtggatgtacgtttctatgacgaaacaccatagtccatttcgcctgggccgaacagagatagctgcttgtcatgtcacgtttgaattagaccattccttagcccttttttttttttttcctcctcttattctctgtctgccagtctataaaacgtcttacatttgttgacctgaaaaaaaaaaaaaaaaaaaaaaaaaaaaaaaaaaagaaaaaaaaaaaaaaaaaggcggcc

SEQ ID NO: 120456 - DNA, 636 bp, Zea mays
  unsure (1)..(636): unsure at all n locations
  Clone ID: MRT4577_41340C.1
gnaaaagcaactgatgatgcacagaagagatgcaaagggtggtggatttggatttaacccaacaatggtaaggtgctctatgttttttatgcaattcttggtgcttgttcttgattgatacatgatgatgcattgtacaccacacgacactcacttttggattcgaaggaaacaaaaaagctctgcttagcgtttagtccttcacttctttatttgccagtcccgtgtttaattcagcattcttacaaattagattaattcatcttacatagaagtttgtggttagagggagcatttgtgaatgaatgttgacttacatgtatcataagttattatggtatgcagttacagtaaatcagcgagctcatacaaatgttgttccaaggatcctaatgtacagtggaaattgaagctgatttcctcttgctctggtgtcagacatctgattctgcaagaacttaattgctccaatgcccagcttttggaatcttgagatatctatgttatgaactcagaagttttcgccgctgtttttttatttttcacttagttttgatggtgtcttgctgccatagttatctagaagcagatttcttggtgtgtacggttactggatttgtttgtttattttacatg

SEQ ID NO: 120457 - DNA, 1571 bp, Zea mays
  unsure (1)..(1571): unsure at all n locations
  Clone ID: MRT4577_41341C.1
cattgggaccctcgaggccggccgggcgtgggcgaaaaaaaaagatgaacagggagggagagaggaaaaagatgaacatgacaggacctcgtcgctaaaaccctagcgcagcggcgcgggagcggatgcaccttgccctgatcatctcccgcattcgcctcttgccgaccgccatgcccagcacccgctccgcctccgcctccaggctgctggtccgcgctgacaacagcccagttgcacgagaaatcaaacgtgaatccagtgtttcttttgacactcccaagcccgaagcaactgtctctgttaagcggagaagggtgaagcgagaacttgaagtaaatgggcagcatcataagaagcaggtccctgacattgaggattttatatacgaaaaggccaaaacattgacatcgtcaagtaaggccacgacatctttggtcaaggtggagaaaaaggtcggagtttcttcagttataaaagttggagctccagataactgggaggcagttcttggaggcattaaaagcatgaggttatctggtgaagcccccgtagatacgaagggctgtgaaaaagctggttctctccttccacccaaggaaagaagatttgcagttctgatatcaactatgatgtcaagccagacaaaagatgaagttacacatgctgctgtggaacgcctctctgaaaacggtttacttgatccggatgctatagtgaggactgatgagaccacgcttgcgaatcttatcaaacctgtcggaaatttttncctatcagcgaaaggcgcagttcataaaagaagcttctaaaatttgccttgagcgctttggaggggatattccggattctctgaatgaactgcttgctctgaggggagttggccctaaaatggctcatttggtgatgagcattgcttggaagaatactcaaggaatctgtgttgacactcatgtgcatcgcatttctaaccgacttgggtgggtttttcgggaagggacaagacagaaaactacgacaccagaacagacaagaatttctctagagaaatggctacccaaggatgagtgggaacctataaatccattactggttggatttgggcaaactatctgtactccactgaggcccaaatgcgataagtgtggcatcaacaacctttgcccttctgcttttaaggaatcatcaagcccaattccaaagcaaaagaaaacaaggtctccatagaactctgactgtgacttgtctggcaccgacgtgagatgatattttgggttgtccgtcggtggtaaatattatggggtttccttttggtcagttattgttggatcaccttggtgccgtaccattggcatttggcaagtcatgtatatcattttgtataccggtaaattgttcaagacggtatgaagacacgcttatctaccagttactgtaaaaagtactggtaacaagcgaaattttcatgtgccaaatgacacatgattcgtgaaaggtgggtgccatagagaaaattctgttgcgtgcaccaaagtctatcaccggttcctataagacctaacaagagatat

SEQ ID NO: 120458 - DNA, 455 bp, Zea mays
  Clone ID: MRT4577_41342C.1
tatagtgaaagctgggacgcctgccgggacgcggatccggtaattgactgggctcgagcccagacccaccgtttgccgtcaagacactcgagcaggagaacaccgcgctccgggcacgcaccgacaagctcggcgaccggctccgctaaggctacgaggtgctccgcctcgtcgaggagttcagcggcgtcgccatggacatccaggaggagatgccggcagacgaaccgctggtgcgtccctggcagctgccctacatgacagacgtcatgcccatcggcgccccgaacatgcttcactactgaggatatgattcaccaaccacaccaacgtacatctggagctgccagatggtgctgggagagatcaagacaagatgacatgggtgaatattaagaacattcacatctactacctacctggctgtgttgagaattacagggcctgtactatat

SEQ ID NO: 120459 - DNA, 405 bp, Zea mays
  Clone ID: MRT4577_41343C.1
aaaaaagcaaatggggggtaaacccatcatggggggggcccccgttaaaagaggggaaaaattttccttttaaggctcccaaatttaaagaaaaaactttccctggttcacggggccgaaattttccaagtttttggtttgaaaaaacccctttttttttcccccccaataaccttccctaaaaaacccgcaaaacatgataaaaaaataccgggggggctttcttggggcccacgggggggggtcattggttttttaaaaaaaggggtaaatccttttttggggcttccccttactgttttttgggggggcccctggcttggacaacccgggggccaacttttgaagcccttttggggcccccggtgggaccccccccaaaaaccctttgggggggcccacaat

SEQ ID NO: 120460 - DNA, 576 bp, Zea mays
  Clone ID: MRT4577_41344C.1
gcatttaaagatcttgggaagctgatgatggaagttggtttgatgttggctcatcattgtgatcgctatgtaatgaggcaaggagtagggtcatatgatggtgacagtcttgagcagacaattgctcgttcaaggtgtcacaagggtcgtctgttgtactatttcccacgacagtttaggttgtgttcgacgaggatcagctagcttaccaaatcggggaaactactgaaatactgtcaagaggttatctatgtgcaaccccacactgtgtgcaggcacccagcagcgaaaatgcttcaaatgttgaccgctctacttttgccttgttcatgcaaccagattggaatgagaagctgaagtttccaagcgaaatcccctatcaccaagagttgattccaccaaacggaacgctgactttcggggagtactcagaaaggctggtagacaagtattaccagacaacaacgtagagcatacctcaagaaaagctaccgtccatacgttcgtaccatcaagtgtgttcttgtgtattcatttttagctttgatcataactctgtacaaaatatagtcgatc

SEQ ID NO: 120461 - DNA, 1275 bp, Zea mays
  Clone ID: MRT4577_41345C.1
cccccgggtttgccggacaaaaagggaccttggcgacaagatcgaggaaggcctgggtccccatgggctcggcatcgtcaccattgccgatgtacctgagtttccagagctaagaaaaaggctgctgcgcttggcaccaaggattgcaaaccttcctgaagaggtgaagaaacagcttgaagatccagatagcagatataactttgggtggagtcatgggaaggagaaactcgagtccgggaaacttgacacatttaaaggttccttttatgcgaaccctgttttggatgtccctactactgatgatgtgcttgtgagtaggtatccatcatattgccgaccaaatatatggccaaacgataatattcctgagcttgaaatagcatttaaccatcatttgaaacagattttaaagctcttgggaagctaatgatggaagttggtttgatgttggctcatcattgtgatcgctatgtaatgaggcaaggagtagggtcgtatgatggtgacagtcttgagcagacaattgctcgttcaaggtgtcacaagggtcgtctgttgtactatttcccacgacagtttagcaagcagacagacttcaagtcgaactgatcatggatctctaacagggcttacatgtggcttgtttacgaagaattctatggaggtaccatgtccagacagtgcggctggactatacattcggactcgtgataaccaagttgttaaggttgttttcgacgaggatcaactggcttaccaaatcggggaaactactgaaatactgtcaagaggttatctatgtgcaaccccacactgtgtgcaggcacccagcagcgaaaatgcttcaaatgttgaccgctctacttttgccttgttcatgcaaccagattggaatgagaagctgaagtttccaagcgaaatcccctatcaccaagagttgattccaccaaacggaacgctgactttcggggagtactcagaaaggctggtagacaagtattaccagacaacaacgtagagcatacctcaagaaaagctaccgtccatacgttcgtaccatcaagtgtgttcttgtgtattcatttttagctttgatcataactctgtacaaaatatagtcgatcatcgaatcgaatacagcgcacagtaatgtatcacgcctattgctttggctgaatttacgtatactacgacgactaagaagataatgattagatgctaatctaatatacatcctgcagaacagtcgttttctggagttatcagaggttt

SEQ ID NO: 120462 - DNA, 255 bp, Zea mays
  Clone ID: MRT4577_41346C.1
atcagcatcgatgtaaagcctatgccagtggcgtctcctagacgacagtaccagcatcttgctgcagccgcatactcgcataaaaattaccaaagtagttgtagcagcagcagactaggactctgtttatggtactggtaacttggttgatgaaattatttgagtatctgtgggattaacaagatgcaaagcgtgtgaaatagaagcacttatgattatatgataatggggagcttaagaagagctctttctaaa

SEQ ID NO: 120463 - DNA, 642 bp, Zea mays
  Clone ID: MRT4577_41347C.1
ccctcgcgtccggcgagaaggcacccgcaccgccgaagcaaactggtgaccatcaccaccagaggcgaccacgtcagcagacggcgctggtggaggaggccacctggcgcgcgtactgcaacggccgcaagtgcggctacgcactgcggcgggactgcggcgcggacgagtggcgggtgctgcgcgccgtggagccggtctccgtgggcgccggtgtgctccccgacggcgacaacgtgggcacgggagccgccgccgccggcgagggcgacctcatgtacatgagggccaagttcgagcgggtggtggggtccagggactcggaggcgttctacatgctgaaccccgacggcggcaccgggcccgagctcagcatctaccttctcagggtctagatgacaaaatagacatgtataacatagtataataatatgctgttcgtttgcgtgccttttgctttttattattgtgaaaacaacatgggcttctttctgcgtgtgttttggttgttttggctgcattgtgcatgcaattactggctaatttgatagtgtcactttgtcattgtctcgattctctacttagactactcatgcagtcatgccccttttagaatgcacgaattttggagaaatcgtttag

SEQ ID NO: 120464 - DNA, 335 bp, Zea mays
  Clone ID: MRT4577_41348C.1
aaaaaggaaagccccaatctaacccacattcattcgggcccccccaataaaacgccgaacacaacgggccatactagaccccaagggcgacccaacacccccagccgggcggccttcgaaaattccttttgcccggccaaagggctttggcattccaaaaccacaaaaaagtcttcgggctttaagaaaactgaaacggggaaccccccgcccgaaagagagaaaaaaactggggaaaaccctaacagtttgcccgttgttttccaacagcgacaaaatggacccccaaccctttagggccccatgcctgcccaattccacaacctgccttggtt

SEQ ID NO: 120465 - DNA, 456 bp, Zea mays
  Clone ID: MRT4577_41349C.1
cggacgcgtgggcggacgcgtggggttcagattcgtttgaggcaaacaggaggaggttgggtttcatggctcggtcttcagttttaccagtgcatgactttttcctgctagtaacattttgttcgtaataagcaatattacttctattgtcctgccttttcacaaacaaatgatactgtgttctacctcatggtttcttcaccgtcatgttttctgttgtcaggtccttgagctagtggagtcaccaattgttcctgtgactgtcatgttttctgtgtttgttcgactattgcagatctgcagtagcttgtagctccatttggttgtttcatatcacatgactctgttgacacttgccacttgctagttgcgtgcaaccgtggttctattctgtctggcataatgctttttatctcattgtaaagagaggggtcaacgggcactggagcaaagatt

SEQ ID NO: 120466 - DNA, 304 bp, Zea mays
  Clone ID: MRT4577_4134C.1
gagctttttatgtcggcggccgccctcctttttttttttttttggtttatgaaataaccccaacacttttgacagtgccttttacagccattcattgaccaaccccctgccggtgttgatttcttccctcctcttgagcattcaaccaatctacttcacagcactgtcagagagacacaatacacctctaccatgtgcccatggcccgtgtttaatttcaccccacagctttctaggaccaactgagagcacccacatgccaccgcatccattaatttttactaacaaggcgctcgagccgaat

SEQ ID NO: 120467 - DNA, 337 bp, Zea mays
  Clone ID: MRT4577_41350C.1
cgacccacgcgtgagccaagccttccgcccacgcgtccgcccacgcttacgaccatatgggatggccatatggcctcccagtgagactgctcaatcgagcgatgcgctcaagacattctgagatacatgggatacctcaaggctgtctggcacgtcagcactctctattgcgcagttacaaagatgcaggttccaaactcagatggcgctatcacttgccgaccagctgcaaggctgctaccaacttaatggcacgtcagatgccgctaaagtggaatatgctggccaatggtcgcgtctcatctacatagcactagccagaaagccttattgattc

SEQ ID NO: 120468 - DNA, 580 bp, Zea mays
  Clone ID: MRT4577_41351C.1
cagccatctcgacggctcgtcggctcgaccacttcgcctccccaccccgccggaaccctaaccccagccgcgagagctccacccgccgcgccgtgccgatgggacggtcgttgtgaattgaagtagcttggaagagcagtgttatgcacagcgatgggagacaatgtcctaaaactcagggtgggcttctcagggtaaactgcattatggattctggcaacagttcatgctctagaacacgaagtgggcttctaagattaacgtgcttgctggcgtggggtggtgtttcgagttctagaactcgagtggccttttaaggataaagagctttgtggattccagtgatggttcatgttcgaggtcacaaagtgaccatgtaagatgtagccctcctattgtcgaggctataataaatgacgaagcagtcttgaaggagtctcctgatggagggatgaaaaaagatatacctgttaggactcaaaatgagtttgttagacagaactctgctgacaaggctgtaaccaaggacgattcaggcatgcggacgcttcccaatgggagtttgagtgaagatatgcct

SEQ ID NO: 120469 - DNA, 356 bp, Zea mays
  Clone ID: MRT4577_41352C.1
gaagccgcatcttagagcgacccccttttttttctttttttcattatttttccctttcctttctcagggggaaaaatgggatacatttgaagaggatttcatgtttaatgccaaccactctgccacgactggggcccgtcgttcaccacttgctattacatattcatcgtcgaccttccatgtgatattactgatcgacgttttcattcgagtccaactgtttgagcagcaaggcacaaatgggcaaagtcacttcctttaggtatcccaaccggttggcagcgcgcatgatgtcgctgatgccgaccttcctggtgagcaggactccggcacggaccctgtcctgctgcacctct

SEQ ID NO: 120470 - DNA, 1374 bp, Zea mays
  unsure (1)..(1374): unsure at all n locations
  Clone ID: MRT4577_41353C.1
ttgggtacctcgagggccggccgggaccggatgcaaattggagggactaaacagtctcctttgattttcttctcgtcacccccttcactttactcttccctcacttctggccgcagctttgagctcagtagcaaacaagaagcagcaagatagtgatcctccatgggaaacaccctcggctttggcgtaggtgtcggcctcggcctcggcctcgccgtcggcgccgctgctctgatccagcaccgaggacattgacgagttgtctgccgaggagctgcgcgatgcgatgagctatgtgatgcacaatccgatgctgatccaggtgccggtgttaggaacaacgaagacattctggcgattatctgaggaagccactaggatcagcagaaaactttcattgatactgcgcaaccaccactcagcctgcaagtacctcgaagctcctctgcaggtgtccaatgtctggattgggagcactgggagtgtcaagctaaggggggtcagtttcactggcagcggtttctttagaattgagcgtgtgagagatgactacaagcacctttccagggtcctggaactgttgattatgatctcaggtggggatatcaacaaattgcctccagactacaaagaattcctctcgctcttgaggaggaagaaccttacaagggatgatgaattcttaattgtaaacaatgctgccctactacccatgaaaaaccgcactgaggtattcctgatgctacacgatagaattgtcaattttcttggtcagaaaaatcgagcaaagaagaagaaaatactctccaatctcccttacaagaacaactggttggatactgccacggcaaatgcaaagatcaaccagtgggttgtaaatgttcaaaatgagtacaaaaggactacaattgatctactgcggctcaacagaaatgtaagaagccacttgcatcagtacaaccacgaagatgatattgaggaaattctgtattgtgaatggcccatgctgctcattgtcatggagaagatgttgcactcgcggggtgagctccaagacactggcatccataactagttcggctagggttctactgcaaaacagatgaaagatgtattctgcatttccatgggttggtaagctactgttcttcgatcttcattgagaaagtttatcagttcacggtgatgaagtgtaatgctacctgtagttgttttctctggacacgtcaacttgaaggtaaagctggtcagcttttgtaaagcatgttgtaagatatcacattacaagctctaaaattgtgctgcaaaattgaatggtattgagtttgcatgcatcctttaaaaaaaaaaaaagtcnnnnnnnnnnnnnnnngg

SEQ ID NO: 120471 - DNA, 857 bp, Zea mays
  Clone ID: MRT4577_41354C.1
cattcccagaaaaaaaaaatgatggtgacccgttcgcgtcggctcgccccgccaccatgacccataagcgccacgccgccaccggcttgcgcacgggcggcaccatactgcacgcgctctccgccgcctcggccgcccacctgcacgcgcacgccctgaaggtcggcgtcctcttcacctgcctccacctctgctcgggcttgctcaaaacctacgcgtcctccggccgcatcgccgccgcgcggcagctgttcgacgaagcgcctcgccggaacgtcccgctatggaacacgctggtgtccgcctacgcgcgctgcggccacccgcgcagcgcgctggccgccgcgtccgccatggcgcgcggcggcggcggcggcgcgggggcccggccgaacgtcgtcacggtggcgatcctgatgtcggcgtgcgcgaagctgaggaggccggcgcccgggcgggaggtccacgggtacgcggcccggaacgtggccgcgctcgacctccacgcgctcaacgcgctggtgcacatgtacggcaggtgcgggcggctcagggacgcgaggacggcgttcgccggcatcggggccggcgcgaggaacgccgtgtcgtggacggccatgatcgacgcgtgccgcgagaacgggcgccccgcggaggcgctgggggtgttcgaggagatgcgtcggctcgctggcgccgaggtcgacgaggccgccctgctcgccgccgtgtcggcgtgcgcgagcctggactgcgcggcggtgctaggggactgggtggaggcgtgcgcggcggatagcgggttcctgcggcgggggacgacgagcgcccgtgtcgccaacgcgctcatacacatg

SEQ ID NO: 120472 - DNA, 881 bp, Zea mays
  unsure (1)..(881): unsure at all n locations
  Clone ID: MRT4577_41355C.1
gcgcttctcgtcacccccttccctttactcttccctcacttctggccgcagctttgagctcagtagcaaacaagaagcagcaagatagtgatcctccatgggaaacaccctcggctttggcgtaggtgtcggcctcggcctcggcctcgccgtcggcgccgctgctctgatccaggcttttggtccgaaaattgacgaggaagtggtggtttctcagtatcaatgcaacaccgaggacattgacgagttgtctgccgaggagctgcgcgatgcgatgagctatgtgatgcacaatccgatgctgatccaggtgccggtgttaggaacaacgaagacattctggcgattatctgaggaagccactaggatcagcagaaaactttcattgatactgcgcaaccaccactcagcctgcaagtacctcgaagctcctctgcaggtgtccaatgtctggattgggagcactgggagtgtcaagctaaggggggtcagtttcactggcagcggtttctttagaattgagcgtgtgagagatgactacaagcacctttccagggtcctggaactgttgattatgatctcaggtggggatatcaacaaattgcctccagactacaaagaattcctctcgctcttgaggaggaagaaccttacaagggatgatgaattcttaattgtaaacaatgctgccctactacccatgaaaaaccgcactgagggattcctgatgctacacgatagaattgtcaattttcttgggcagaaaaatcgagcaaagaagaaaaaaatactctccaatctcccttacaagaacaactggttggatactgccacggcaaatgcaaagatcaaccagtggnngtgtaaatgttcaaaatgag

SEQ ID NO: 120473 - DNA, 344 bp, Zea mays
  unsure (1)..(344): unsure at all n locations
  Clone ID: MRT4577_41356C.1
cgtttcaaccttttccatcgctcctaatcctaacaaccaaaaaatctgagccgtaattattggccccaaaggcggaaaaaagcccggcgcaaaaaagtgcggangagaaccctcggaaaagcggctccgcggagaaagcccccgcggggaagaagccaaagcggagaagcggctacctgcgggcaagtccgccggcaaggaggcggcaacaaaaggtagaagaagcgaagaagagcgtggagacctacaagatctacatcttcaaggtcctgaagcangtgcaccccgacatcggcatctcctccaaggccatgtccatcatgaactccttcatcaacgacatc

SEQ ID NO: 120474 - DNA, 680 bp, Zea mays
  unsure (1)..(680): unsure at all n locations
  Clone ID: MRT4577_41357C.1
cgaccacagaaacattcgactgcaattatatgtgtgaatgtgtaattacttcaaacaaatttatgtcatcagtcaatgcctcaaatgtgtgactactacattacacaaaaaaaggtggtatggctgctaacttttcaactactttcaccactactctccccatgatggaaaatgcacacatgaagtcaaattcaagcacaagtcgaagcatcattcttcagtgttaaactgacagggaacacttctctggaagaaataactggtgcaaagccagcatggcctctataagaaagctgaatcgcagaccctactgactactgttacaccattcacatcatcttcacagctttcccattgttcatatgcattcgtgtatggcagtgtgcatttacatttgacaaaagaaaagaaaaataataggaaacaccaggatntatcatacaggctgatctattagtcaagtgccatgatttcactgcagaacatataagatttgccgataaagcaaaacaattttgagaaacaatgtacaaagcactaccaaaaccttaagacacttcacattcataatntcattgtaaagttcaaaatggctaacagaagatttttggtaacgaaattcttgtatatatgaacnacttgtcgttgttaagggtacgtacaatggaaagagtaagtca

SEQ ID NO: 120475 - DNA, 350 bp, Zea mays
  unsure (1)..(350): unsure at all n locations
  Clone ID: MRT4577_41358C.1
cgnaacaacctcccgttcctccgcgacccagcgacgcctccgcggccgtccgatcgccctatgggccgccggtaccgcctcctccctccttatctccttgcctcgtccgcttcccctttcctctctttcccccacccaatcattgatctcggcttgagcttcaactacggattgattgattgattgggttcctggcgttagcttgatagcccacctgatgaataccacgcgtgatctgcttcatttttttgtcagatgcaatgttcatatggtgagacgcctttggtatttgaatttcgttgcagatagtgacatatggttctatcagctgaagagtgatgcctttttcc

SEQ ID NO: 120476 - DNA, 495 bp, Zea mays
  Clone ID: MRT4577_41359C.1
ctcctaagggcgattgggttcctcgaggccggccgggatgtcacctgcggccggacgacgaccataatgacctgctggtccctcagggaaacatcagtgcgatgggctcacacccacttgacgggaaagccaagcttatacacactctcatccaccatacgaagctgccaaatcttcgaaacataacccagccatggctgatcattcgtacccatcatgatagagccttcccactgcccctgcagcatatgctgcaaaggcatcttgtccaaagtgctcgactacgacgccgaacacacgcatgatcacccggaccttctacacaacgccaaggcatgcagtgctcagagtgatcattgactattgtcctgaaccggcgtgcagcgcatgatctgcgacaaaaggtacgcactggctgcgacgctaccaatgtacgactgacagataccccttcttaaatacattgactggtcgtactgatctcctctgctgtct

SEQ ID NO: 120477 - DNA, 343 bp, Zea mays
  Clone ID: MRT4577_4135C.1
aacccggggacgggtggaatttttttatctgaaaacgcccgacaccccccaatttgcaaacccgtaatttccggaaccaaacttttaaaaattaggaattaaacataaacagagccgattcatgggcaaaagtgataactggtaaaaattgtaaaccggtaaaaattccacaccataaaataaccagccacctaagggtaaaaagcgggggagcccaaagagagagcgaaccaaaaaaaaacccctttccaataaagccccctttccagccaggaaactgggggagccggcaaccctaaagaaaaaggcaatttacctattgagccccccgggggatagggct

SEQ ID NO: 120478 - DNA, 403 bp, Zea mays
  Clone ID: MRT4577_41360C.1
atatatatcaccccccccggagaaaggagctcttaggcgggcccccccggggcgcgtgccgcgcgggctctgccacaatcacacggcctcttggcgcgcacaccctatcacgtgtctcggcgcgcgcggagcacagacgccccgtgctatctcggatattgtctcttagacgcgtacacatattatgcggcacacgagctcttcgcgactgtgttttttaacaaacgcgcggtccccttgtgtgtatataaacggcctctctcactctggggaatatctatagcggggcgcgcatatgaagggggaaaatataatgtgtcacaagagggtataaacacatcacacgtcctatttgggggggagcacaacaccactctttgtatattgttgttcacagatatgg

SEQ ID NO: 120479 - DNA, 260 bp, Zea mays
  Clone ID: MRT4577_41361C.1
cccacgcgtccgcacaaaagggcgcgaatgccggctcgggtctgaagaaaagtggttagcagcgatacttatcacgatattacacttccttgcgcttgatgacgtttttgtgagctcaacaaatgccttcattattccacaatgctaaattgctactagtgccattataccacacgtgctgctacaagtgactttcttgggccttagatctcttagctctccatgcgttaactatgatacagatggttcctgataataat

SEQ ID NO: 120480 - DNA, 348 bp, Zea mays
  Clone ID: MRT4577_41362C.1
gagccctccagtcggcggccgccctcctttttttggtttgttattgaagcattttattcatgtggcggcctgaaaattgaacatggcaacaggcagccacatacacagaatatcttaaaacttctgctcacaaaccatgctggtagaaccaaggatgtgcggacagcgctgatgaacacagaaggaacaagaccggctgcataacctctccatcaaaaacacaaatgggcgacctcctaccagaccaagcgttgttacccctctggactagggtcaacacaagggaagctcacaagattacatatgcgcacgggccccaccgtttagttcatgcacaaccccacggac

SEQ ID NO: 120481 - DNA, 263 bp, Zea mays
  Clone ID: MRT4577_41363C.1
cacacacgtgcaacaacacgatcatccaccttatctggccacaccttttattctttaaacatgccactgtcgatcctgcatggcgcgaacatctaacccgccatattttactgaaacatcataatttgattaaacacaccattcgacacagactatcaaaccaccttcctctactcaacttacaacttcatcatctagaccaagcaactcaacttcggcactatcatacctcacttcctcaaactgactccatctttctcctg

SEQ ID NO: 120482 - DNA, 765 bp, Zea mays
  Clone ID: MRT4577_41364C.1
atctttccttttcctgccataggccgtgacgggagcttcttgcttgcgtgcttgttccgggccggctatcatattgcctgcctatgaagctctctgtctctggccaatggaggagctacttctcctctagcctttctcgtctctgattcgtccattgaccttgggtgacgtcggcgccacttctgcgccccgcgactcctcgcgccttgtgtgagtgagtggctgagtgctacaagcaagcgatggacatgaacgagagcggcgagacagggatggagcagggcaacgcgtcctccggcgccccggtggagtggcagactcaattcaacgccgccgcgttctcgtgcgcgccgcagcaggttcccatgatggactccgccttcgcgtccgccggcctgtgggcgtccacctcccaagccatggcgctctccgacgtcgtcggcgccatgtcggccgcgcggggaggcgggttcttggcgccggtgcccggtttcctcccgcagggcctcggccatttcgccgccgtcgactcctgcttcatcgagcgcgccgcgcggacgtcctgcttcagcggcggcggtggcggcgcgggtgatgggcgctagcgcagctgccttcgtcggtgcggctggtctgaccgtgaacaacgcgttcagtggttcgtcagaggcgctgctgctggatcaccagaaggaaggacgtcgtcggcgagaagggcgagccggagctcggcggcgacgacggggtgctgagcccggaggctgc

SEQ ID NO: 120483 - DNA, 154 bp, Zea mays
  Clone ID: MRT4577_41365C.1
accgccctttacacctatccaagggattcccttttatttcccaaaaaaatgcccaaatttttaaaggcttttcgctcatatacgtatcggtttatacgcacatcttaaaaaaacaactcatttcttttacactccaatatttacatcttctttt

SEQ ID NO: 120484 - DNA, 1233 bp, Zea mays
  Clone ID: MRT4577_41366C.1
atggcggcgagcacggccgcggttgttcgtcgtctctgcgtggccgcggaggtgcggtctgctctggctgtgctcgcccgcgggacgaagtccggcgacgcagcgctggacgtggccgcgtgcaccgcgctggtccacgtctgttgtcagagcggcgacgttgcggaggcacgtagagtgttcgacgtaatgccgcgcctgggcgtggcccctaacgaggtcacgtacacagcattgatcaatggctactttgttcgtggacacagagagatgggtttcgccttgtttgcggagatgaggagagacggagtcgagccaaacctctacacctacaactgcttgatcggtgaatggtgcaggacaggggagttcaagagcgcccgactcctattcgacgaaatgcccgtgaagggtgtcgtgcataatgttgtcagctacaacatcttaattgcaggcctgtgcaggcacagcaagctgaaagatgccgtccagctgtttgaagcaatgagaagggagggtatccgtccaagcattgtgacgttcaatcttctaattgatggctatggcaaggctgggaagatggctaatgccttacatttcttcaatcagatgaaggcggcagggctgccacctagtgtggtgacatacaacgagcttatatgtggattctgtcgtgttagagatatagcccgtgcagtcagggctttcttagacatgaaggagcgcggtttggcacccacaaaagtgacgtacaccatactcattgctgcatttgctaaggaaaatgaaatggacagggcattcatgatgctttcagagatggagaaggctgggttggaagtggatgtgcagagttatggtgttctcttgcatgcgctctgcatggaagggaagatgatgcatgccaggaaactgtttcagtcgatggatctgaaaggtgtcaaaccaaacagtgtgttatatgacatgatgatctacggatatggacgggaagggagctcatataaggctttgagattgatcatggaaatgaggaagaatggtttgattccgaatgttgctagctattgcctaacgatccgtcttctctgcaatgaagggaagtgccaggaagctgaggctttgattgatgacatggagcatgctggtttgcaaacaagtgagactatctgcagaatactactcgatgctaaggcaagattgcatggttctactgatgattcttttacttaa

SEQ ID NO: 120485 - DNA, 753 bp, Zea mays
  Clone ID: MRT4577_41367C.1
gaaaaaaaacgatgcagccggccgaaagcccgactggctgcattcgggcctggcccttgtgccacttcctccgcaacgcctcgccagttgcaaggactgaatatcccccgaccgcgacggcgccggtctccctcgctccatccttctaggcaggccctcgctctcccgtggatcctccgccgcgccgccgcccctttatctgagccatccagcggagcggagatccatccgttggggcgtggattcagtcccttcccttctcggtggttactcccacagtgagggtaactcgaataactgtgagtgctactgtgagatgggtggtgtgctctctcttttagcttggtgatcatctgaaaaaaaggaagtgctgtttatttctgtaagatagaaagcaaaccattggttcatgaatggtttagtcatgctaagaaaaacaaagttctaagaacacatatacagtgcacgtgcttgctggcaatatgaatgaaaactctgccattattatttcggatagtgataatgactcaattggctcaatattcgatgatgacgaccagccagcgtctgcaatcgcaaggcttgatcaaaatgctgaaggacgaataatcaattttgaggatgaagattggcaaaggagcgctcctgctccaccatcgactaagcctactgagaacaacaatggtcaatacagaattcttccagcatcccttacgaatggtagacatgctgagagtagtcgttatacatttg

SEQ ID NO: 120486 - DNA, 490 bp, Zea mays
  Clone ID: MRT4577_41368C.1
ttttttttttttttttttttttttttttttttttttttttttttttcccggaaaagcatcaggttcccatagggggggaaaaagaccttaaaattttaaaagggctttttccaagcccgggggttaaaaatacctttaagccgggtctttttcctaaaaaggaaaagcccataaagttttctttttgggctaaaacggctccgccctaggggatttttttggggttaatgaaactttactaaatctctcccctatccccctaaagcttgggcccatgctaaaatcccagctccacatcccaataagccggacaaaaactttacgggcggaaaacttccactaaacataaggatctgggtggggtccgtaaaatctggacctttatttccactaaccgacacccttgttttattgttcatcatgcccaggataaatgtctttggaaaatatacaaatttaacccccacagtggtttattaaatcttgcagt

SEQ ID NO: 120487 - DNA, 177 bp, Zea mays
  Clone ID: MRT4577_41369C.1
ccaagcgttccaattgttcatcgggcgagacccacgcggaccgccgagcagagaatgacgataggtaggctggcaatgcaagcaatagaaaaaccacttacccaacttgtgagacacccaccgataagccttgcaacactgggaatttgaggtaccctgacccaaaataaccctgac

SEQ ID NO: 120488 - DNA, 406 bp, Zea mays
  Clone ID: MRT4577_4136C.1
aaagacaacaaaacaacatagataatatattgatcaataaaggcaagataccctgatttcagtgaaggagaaactactctgaagcagaggagtttcatgggagagaaagacaaaaatttgcatgcgttacggaaaaatgtatccagctgaggacagccagaggaaacaaaaatagagaagtagtctagcatcctcgaagcatagatgggataacatacatcaggcggttggaagaagaaacaggaagatcgccaactctctaaaatgcaaagcccaaatggttaaatggcgtggtcagaaggaggaataaaagggcgaacgttctgagctgacttcatcagcgcgcttgacagaagcacacttgagcaagtggacgaagcttcccttgtgctcaaaaagaccggag

SEQ ID NO: 120489 - DNA, 231 bp, Zea mays
  Clone ID: MRT4577_41370C.1
tgcgaccgtgcgagtgcccagagactgcgagagttaaagatgggcgatagaaatggggagtgtaaaagattgcaatgcacacagcaaacacctatgccctgcaacaacaatagcatgtgagcacgcagaaggcgatggtcccgtccactgtacagagtgatgtctgcggtcacgcagcggcccgtacacccatgagcagctcacttgatgcaaaaccagtggtgcgcactt

SEQ ID NO: 120490 - DNA, 706 bp, Zea mays
  unsure (1)..(706): unsure at all n locations
  Clone ID: MRT4577_41371C.1
agacctaaacatccctcttctccacttcccctatccctcttttgcccgtggaaaaagctcgacctgctaatggcggcggcggcggcggacttcacgcagagcaagcaggccatgtcgtacgcgctctgcaagcacctgaacctcgatccaaagagcatatccagtacacttgtcaaggagaatgatattgcgagcctattctcacatatcgtgacctcaccgcaggatgaggtcaagaagtgggttgagttctccagcaattttgttctaactgatggagaacagcatgcattacttggtaatttgaatcaacatttgtcccagatgtcggtactattagctggtttcaaaccatcagcggcggacattattgtgtttgcaaccgtgcatgttttcatgtgtcatcttagtgacagtgagtcgcagaaatatccaaatatattgcggtggatggactacattcagaatgttgttgattttggtacgatgctgcaaaagataaacttgaccaaatctatcttcaacccacctgcacctgcaccttctcacccaaagaaagctgataaaggagatggtgaaccaaattccaagaaagctgttgcaggacagaagattgcggataagtcagatggagctgctgattccaaaaaggctgcaggggagaataagatccctgnggataaggcaaatcctacttctgccaaaa

SEQ ID NO: 120491 - DNA, 187 bp, Zea mays
  Clone ID: MRT4577_41372C.1
ggctaaagtagccaaacgtgaatcatttgttgctgggacaggcattctaacgggagttggggatctgagagaaaggattactcatgctaaagaatcaaatgatatgcatgctggcgtggtttttggcgagaaagctattttaaccttatatgcacgtgtgacttaattttgactttacaggctttca

SEQ ID NO: 120492 - DNA, 133 bp, Zea mays
  Clone ID: MRT4577_41373C.1
tcggtgtgtgaacagtcttgggaacggcttcgttcacgccgtcgacgaggactgtgtcggggcggggcactttttagactgcgccgtgcgcccgagcccggaacgctctcagatcgtggagctgctgactttt

SEQ ID NO: 120493 - DNA, 329 bp, Zea mays
  Clone ID: MRT4577_41374C.1
gttctagatccgacggccttccctttctataacttctatatcctatcactggctggttcatatttggaggattgacaattatcaatgacaacaaattctctatatataaagtaacattttcatacacttactaattaatatataactatactttatatcaataaaaaaacacttctaataaatacacatatacccataaaaatactacctaaaactgacacaacaagaatcaattactaactatataaaaatagcattcataaaggacactatcaacatttttctaaacaatggatcctacgctaactttgaaaaaatgcaaataccaa

SEQ ID NO: 120494 - DNA, 1371 bp, Zea mays
  Clone ID: MRT4577_41375C.1
tctagatcgcgagcggccaccctttttttttttttttttttttgggaaaggattctcaattaaaaaaaaggtgaaacttgaacaagaatataaaagtgctagtcaaacatttgggtaaatcgcacagtacatgttagcttaaaagagctaaggttttttacagataggagcaccatggcgagttggcgagacatccttcagatgtctcctctaggctatatacgccttcaaaaaggccggcaaatttctgactactctgtctgttagccacttgactttgacagaagcgtttgccaccaaactgtcaatttcttcctcgcattgttcatagacaatgaagacaatgaacaaggatgccagtacaagtcccatcaaaaatctgaactgaaagttcagcattagtttgatgctgtacagaaatgcaaataccttcaaaagtaaactccagtcttcaccttctgctaaaagccttagtttatgaaaactcccattccatgcagaagccacacacataagtgaattcctcaatgctgagtgtgatacttcaaaatgatcagatgtgaccttctcgactgtaaaaccaaacacttctgaaggcagcacaccatggataaagagagcaagcgagagcactagaagaaatttggcagctgatgaaacaaaagttctgtctgaaagcaggaaccagtagaaaagcagaaacaatactgtgacaaatgaaaaggttctcttttcatccctccaaagaagaatatcagcagctgttccacttcctagcagcttatctgccttcgaggatccacaggagccctgttttcttgacaaccccaaattatctgctagttctgaaaatgacccaagagttctcataattccatcctccaatgatacaattgggtggtatccaagtaatcttctggctcttgaagtgttaaaggttctcgtacacgacaagaagtatattgtatctggatgaagaagaggggtggaaagcatttgaaaaccaagcctgtgatgaatcattttggagaacaaggctgcaaacaataacatcttggcaggaagattaatcctgggcctctgacaacccatggcttccatcatgcaattcataaactcccatgtttccataggttcgtcattggtaacaaaaaagggcttcccagctacagaagctgcatttgaagacaaggcttgctcagcacaaatattggcatgggccacattttccacataggtaaagtcagacatgttactgccactgcctattacaaacttgcccaagggagaccttgcatatccagcaacaaacctcaccaagctggaatcacccggaccgaaaagattgctaggtcgcagaacgcacgtccc

SEQ ID NO: 120495 - DNA, 343 bp, Zea mays
  Clone ID: MRT4577_41376C.1
gttctggaacttaaacgcccaccgcgtcatgtacggtatcaggggcagcgccagggtccaggtcgccagcgacaacgggacaacggtgtttgacgaccttctgcgagcggggcatctacttatcggaccacaaggctacctcgatgctaccaaggcgcaaggagaacgttatcattacattgacttagagacgaaacatgacaccatggtcagtcatatatgggcgaagaaatctgatctgagcgacttgctacacgttgctatcgacagctattattacatctgcatgcaagaagctgaacatctcaggaacggaaggaagcctgatcttggtgggcatact

SEQ ID NO: 120496 - DNA, 272 bp, Zea mays
  Clone ID: MRT4577_41377C.1
tgggcctacatggctttgattctgctactagttgttctaaccaagagattgtagtgtcaaccatgggactaaaagcttctggtgttgccaatagaggcgcctcaactgtaaaaaagtatgaagctacatcaacgaggagtacaaatctagcaagcaagtctccattgttgcagaaaaaactgcaaacaccaaccaggaacaggaaccagctaacttcgagcaccataggtggaagaagaacaccaaatggaaaattggcattgcaaagtaat

SEQ ID NO: 120497 - DNA, 1713 bp, Zea mays
  Clone ID: MRT4577_41378C.1
cctcgaggccggccggggcccgcggtggccaatcaggtgccatcagcttcctgttaaatcaaccagccgccgctcccttcttccatttcctggccgccaagcttccaacgtacgcagcctgctcgtcttccacctccggccatcttcctccctctaccgcgcttccctccccacagcagcagaccaccggcgctccctgttcttcttccccgtgggcgcgcccccttcatccaggcagcagacggcgcacgcacgccaggaacgcccgagctctccatctctaatccagcgctcaaggttccactccctctctcctccaagcgtgtggtgtcttccctgctcctccatggtgcccagatccggcgcgcgcccctgcaaatcttcattagcacaccaggctcctccctccttagtgctcagcctccatggatgcacaccacctcctcccatgggcgccagcagcaggagctcctactcccagggcgcctctcccccatccatggcgtccgaccccctctcctttctcctcctcgctcggagctctgctatggcacacgcaaatccctcccctttttgtgcagctcgccatcccctgtagccgcgatgtctccctctggacctgtccggttccatggaggacgacttccccatgggcaggaactcgacgccgcctccccaagtgcagccatggctgagctttcccttcccctgctcgggacaagcccctccctgcttcatttttttctctctctctgctctcggccgctggcaaccagggcgctggcccctgctccctgctgcttctcctctcagcttcctctctgcagtagagagcgcagggacatgctcggcgcttcagcgcccaaccttctgtaggagcagcgcactcctcttctgaagcacctcgctggcgccctcatcgtccattgacagcatcccatggcgctgctgcccccatggtctacctgctgcaagttttgcctcatcccactcgtcgtcgggctcgaaccgggtgtgcgcagcccgtccgcgacagcgtcgaccccgcggcagccttgtacttgtgttgcttcccgagctgagaccttgcacgcaacagcaagtcctggatcccctctgcatcgcgtgcttcgctgggtctgcgcagcgctgcgcgtcgtcgtcgaaaccctcggtgagcccctcgctgttctcattattccacactctaggtgttagacaagatgactaaattagtacagtgtgtgtgttaatgattacagcctctcagtgtcgcgcctcacgtaccccgcgtccaacgagacgcctaaaccatggacgcatgcgcaactccacttgggtttcagccaggttgttcgctttagaaaaattgtggtttttgttttatttacgattcagtcgatggcgtaaatatgtgtgtgaaaatataattgtatgaataaacgcgtgtagagaagaaactgaggtagaaaagaactcgggcatttttatattttgataggaaaattatgcgatgtgttgtttgatgcgaaaaactaagttacaaaatacggattatgttttgggaaatgcgtcgatatgtgtttatgtgaaaagtataattgttttatgcaatgtgatgagattgattatatcgggagtatatttattaatgtgacgagtagtttagaaatgctagtttgtgtagaagatgtattgttaagactgagtgtc

SEQ ID NO: 120498 - DNA, 488 bp, Zea mays
  unsure (1)..(488): unsure at all n locations
  Clone ID: MRT4577_41379C.1
cgccnccgcggccggncgccgacnccgaaaccccgacaggccgaccacaaggncnngngcggganccacagaagggagagngaagaggacaagacggcngccncngcngagcagccgaagagggcccccaagcncaangaaagganccncnncngcgcgggccaggaggnccgnagcngcncanccanggcangancnngagancggnccngangcnccngcngnnnncaaggggngnnngcgagancacaaagggaagcaaagnnaaanangagcccgacaagaaaacnggacngannaagggggancgagcccngnacccancagnngnanacccncacaannanggnnncgnnccaaggacnccnnngngaagacaangacccaanggacngngnnagnncccgagcaggagccccgnngnnccnggnnncgggcccgcgagcaagagcaagcggccccaggcccanngagggaccagggngaaa

SEQ ID NO: 120499 - DNA, 285 bp, Zea mays
  Clone ID: MRT4577_4137C.1
ctggaacactgtgggaaataagatctgggtgagggctggctaatagatgccgaagatctgctgtgcatatctatacgcaaatgctgcttaactacaatgtggtgcctagtgctttggctgtgcaaacaataagagtgctttgactattcatgaagacgtgtacaatctgagtcatttctgatgtgggctaggaggtaaacaatagaactgctgagaacgctgcaacactggctgagactaacggcttaaaggggaatatatggttctaaacatgaaataatatat

SEQ ID NO: 120500 - DNA, 364 bp, Zea mays
  unsure (1)..(364): unsure at all n locations
  Clone ID: MRT4577_41380C.1
caaggcacanccnngcccnananangccncnacaaggggcnagcacacacaccanganacaaggccacacggcccaacacagcaagccagacaggggaaccgcaagcancaaanccggnacncnnnagccancggacgagccggagncaccgnagggacaanaccccgcngaagaaccgccnggncnccagancggnganggaggaaannnagccnngagaacanggnagncnncccaggaagccannncggcnggnagcncannccannnnaccagaancgaaacaanggccnaggnccccganggcaccagcccgcggggcannanccgcccaggggagggggaggcangccccccaaaaac

SEQ ID NO: 120501 - DNA, 426 bp, Zea mays
  Clone ID: MRT4577_41381C.1
cccacgcgtttgattacgcgtccgcggacgctgggtcgacacgtgggcgggggcctgtttcgtggcgcgggtccaggaccggctattgtaggcggagctgagcttactgtctaacgagtgtgtttagttcagctcatcaataatccttatttatatcatgggtggctgaatcctgtttcgaggaaatgttgactgaaaaggtatataataaagctatggttatattacttccataaaatggccttgatcatcatgctgttatgcttaattgttttcttgatgatacattgttacccttctttttcttaacagggtcttacttctgtaacaagatacgttcaatgtaggtaggtgaggacatttagggattgattcccccgtttgcacggcatgtgcggtgcctctgcttgtgggcttgattcacct

SEQ ID NO: 120502 - DNA, 338 bp, Zea mays
  Clone ID: MRT4577_41382C.1
ggcaaccaaaaatgcaagtttttttgggcccctcctgttccatgacagcaggtttgttaatttcaggggatctggaccatgcctgctttttccaggaaaatagaaacatttccgatcgacactgacttatcaaatttccaggtccaggaaatgtacagggacttttatggttaccacaaataaaccagggtgatacaaagcacattgggatcaactaagcggttcttaatcacctggacgcgttggtcaccgttggcacagactcttttattatccaaacattgggaaaacaaaattttcactgggcaaatgatgcattctctggtggagccggagcc

SEQ ID NO: 120503 - DNA, 183 bp, Zea mays
  unsure (1)..(183): unsure at all n locations
  Clone ID: MRT4577_41383C.1
caactcacaccacccttctaggccacccgacaaccgacaaaccgcaggaataaaaaaaccgccagccatcaaaaagcaaaaaacacactacncccccaaccaatgctcccaccttcctgcaaacctactcatatctattaccatcatttcatataatctaacatccagctctaaccactactt

SEQ ID NO: 120504 - DNA, 252 bp, Zea mays
  Clone ID: MRT4577_41384C.1
ggggagaggaaataatggcctgcaaaaacaaaaaaacgtggtcatacatgaactccaagaactacaattcaaatgtctggacaaatgattgttatggtcattaaatatgtgaaatcttagtgataatggtatatggaaatcagcattaagcacggaagtttggaatccttccatccttttacatcttgcaatcgactctgcaaatttgcatgtcattgcagtttctcccaaatgttcaaaacaagattaaat

SEQ ID NO: 120505 - DNA, 122 bp, Zea mays
  Clone ID: MRT4577_41385C.1
agccgaccagcaggaggtacgagagaacgcctcctaggtggtcttgctcgtacctccagctggtcgtctgaacaagataggtggaggaaaggacggcgagcgtatggtttgagggaggaaga

SEQ ID NO: 120506 - DNA, 565 bp, Zea mays
  Clone ID: MRT4577_41386C.1
acttctgagggcgacagggacgacaagtcatgaacatgatcgcgcgctgcgaacccccctggactaccaaaagcggactcgcgccctgttgcagagctccactacacctaataccccctcggcgatagaatgcctccagtcggaggagtcccgacgctccgagacggcatggcgccgtctaaaaaaccgagagggagatagtgggccctgccatcaaggcccccagcatcgcatgcaacaacctcatcaggggcatgatcagtgacgctaggagcgttatacgtacaatagctacatctatactgcacacaaacatgggcaccctgacaacatcctatacgtacaagccgtgagtcattatgaactccttattaaagatatgtatcgagaagttatctgctgatgccgtcaagttggctcgctataacaagagggcataatcagatgcagctgagaacagacctacgctcacaacttatcattcttgtgagatattcaaggacaccgacatcttagggcaccaatgtcggaatgaactgtaccattgcctacattattatgtcat

SEQ ID NO: 120507 - DNA, 363 bp, Zea mays
  Clone ID: MRT4577_41387C.1
gccgagtgcgatgatgattcaatacatggttttggcagtggttaccccttgtggtcaccgtgagccgtcaaacctgaaaacgacttctctttccactgagcataccttttggcattgttaaattgattttaggaagtcgtatagttagttttcaaaaaaaaaaaaaaaaaaaaaaaaaaaaaaaaaaaaaaaaaaaaacccctgccttgtcgtggcagcaacccatcgttgggggggccatcttttaaattacatatgaaatgtactcgataatggtgccctaatagcggcatgtgtttcctaaaaataatcaatatattgattgaaatttatctcgacaaaaaaaaaaaaaaaaaagcggcc

SEQ ID NO: 120508 - DNA, 388 bp, Zea mays
  Clone ID: MRT4577_41388C.1
agtgagtcgtattatacagaacaatctggcacaatcttagctgacgaatgttgggattgcaacgagaaacatcctcgatgtacaagagaacgtcatcgagagattatgctccgatgatcgacgtcgaacagagctcaggtcttttagacaatgatgtggacaatgaaatggaaactacaaatccttcatggaagtgttctcttccgcatgttctagtggctacaatttcgtcgtttctatttggttaccatttaggagttgttaatgaacctcttgaaagcatttcgtctgatcttggttttagtggtgatacattagctgaaggtttggtggttagtgtatgtcctggtggtgcatttctcggatctttaatcagtgggggagttgc

SEQ ID NO: 120509 - DNA, 245 bp, Zea mays
  Clone ID: MRT4577_41389C.1
cgagtacagtcggctatgtaatctcgtggtacgacgacatggcggccaccagcagcaagtcgtcgtcgttctcgagctcagcgcagagaacatcgctgaggctgtttctggctctaagccggggggggagcggatgaaggcgaacgacctccctatttatctaatccgagcgcacacgctccgcctcaaggccccccagcccattcagataacacaacctgtcccggtccaaccacatccacatg

SEQ ID NO: 120510 - DNA, 681 bp, Zea mays
  unsure (1)..(681): unsure at all n locations
  Clone ID: MRT4577_4138C.1
cgactcaagaaaccagaatgggactcccaaaaacccatttgacattgtcttataagttgcgccaatactcatgcaacatgttatacagcacaggaaccgctttgacaaaaatataattcatttatgctgtataggaggcaaaacccaactcccgacaacacccgcgactccatgcctgatgcctcccaccagaggtggtgctggtgggagcaagagcccaaatgatccaaccggctgaccttcaagactgaccaccgaccaagctgcaccactggtaatgcagcccaaggactgaccctgctgactgggactgacatgacaactccctgagaccagaccaatgggactcaaccatgacttggttgacgccgctaccccacacctctgactagcccagagcactagccaaggcataatggcacagcggccattccaaatgggcatcttcagccaaagttgaatccacctgatggaacagagnggctggttcccaaagttgaagccattctggnggattgtcgcctgagggcatggcatcatcttcctcctccagccagtaggattccagcatcttcacagccttctcatatatctcgngngttgtcatggctctgcaggttctcaatcttgtccaggccctcagcatcatcaatcatctgtgcatagacattgacatcacct

SEQ ID NO: 120511 - DNA, 606 bp, Zea mays
  Clone ID: MRT4577_41390C.1
ggtgtttttttttttttttttttttttttttttttttttttttttttttttttttttttttttttttttttttttttttttttttttttttttttttttttttttttttttaacccccctttcaagggccagggaattagcttacaagggcgggggggggccccaaacaaaggtcgaaaaagataaaccctaaggggaaaggacaggaaggggcctttcaaaaacccaattgagggggatgggggggggttttttttgggctttaacccctttatcgggggccttcttttccatcctttttattttgggcggcaacccccccaaggagtcccccccccccctccccttcccggggagccccccccaaagttcctccaccccccactgccctataaaaggctcaaaaatggcccggtattcgaaaaccgggtacctccccgccttttgcccgatgggaacaaaaccagcgtaaaaacccccccttcttgggcggccctctttaataaacacaaggggcattttaatcccgccccccattatgtaccccatggcccccacgggggggtccgggtcggccttaaaaaacttcccaaaaacgggggaccc

SEQ ID NO: 120512 - DNA, 252 bp, Zea mays
  Clone ID: MRT4577_41391C.1
acgaggcctatgatcgatgtaaacaggttttgctgtgtctgatgatgaagtgtcgacctctgaaggtcctgctcctttcgagaccgagccccctggtgctggtgattgcgatggtcttgctggagatggtggagcacgaacatgggatcctgcaggtcccggagatgcttttgacaagtcattacccccccccccccttagaccagcattggtaatagagggaggagtaacacacttctgtacaactggtcc

SEQ ID NO: 120513 - DNA, 306 bp, Zea mays
  Clone ID: MRT4577_41392C.1
atgctggcgcgatgcgcgagcatcatgttcgcgacagcgcacgcctcccatgcatccgggcacccggctcactgtctgtctgagttgctcggagtgaattctggtgtgacgcgggtggcagctagcaccgaggtgaccgcacgtggcaagtccattggctctctggagttgtttactcatgtgacgttcctgtcagagccagctctaaacactcctgtgactgagcgacggagagatccagattgtattgctgttcacagcagtgactccggcgatggtaaagctccagagccacctaagggctga

SEQ ID NO: 120514 - DNA, 544 bp, Zea mays
  Clone ID: MRT4577_41393C.1
gaaaaaaaaaaaaaaaaaaaaaaaaaaaaaaaaaaaaaaaaaaaaaaaaaaaaaaaaaaaaaaaaaaaaaaaaaaaaaaaaaaaaaaaaaaaaagaaaaaaaaaaaaaaaaaaaaaaaaaaaaagtttccttgccccgggcgggccttttaaaaggggggaattttccaacccctttgggggccttttttatggggacccgggcttgggccccaagtttggggtattaagggcaatagttgttccctggggaaaattgttttccgttcaaatttccccaaaatttccaacccggaagcttaaagggaaaacccggggggccctaagggggggcttacctaaatttatttgggtgggcctaattgccctttttcaagtgggaaaacctgtggggccacttgttttaataaatcgcccaacccccgggaagaggcgttttggtttttgggcctttttccgtttcttggttaattgactcgttgccttcggcctttcggttgggggaagcggtttaagttacttaaaagggggaaatacggttttcc

SEQ ID NO: 120515 - DNA, 687 bp, Zea mays
  Clone ID: MRT4577_41394C.1
aaacacctcttttatattttaggatgaatttgagcgccaccctaaaccctacatccaaaaattgatctctctgaaaatcagcagctacctctggttcagctggcgcagacagaagtagtatacaggatacgacgcgcaggaagatacggtgcacgagcctcacagctgattgcacctagctgataatctgttcccctgtcatcaacggctaattggatggtgattattcctttcccctgttcggtaggtttggcttaattagctaggttcttgtataatcgatctagctgagcagctaagaataagatcttgaggtatataatctacagatgctgctgcacacctcctcaccagccgctatgttagcattcacgagcaattacaccgttagctggtcaaagtcgtcgtcgtctgcatatgcataccattgcgtgattacgtgcacctaacccactaatcatgcttggggacatctttgtctgatgggcagcttattatatatgcttgtctaaagttattcttgcacttggaatgaacgcatcctcgttgtcagcccaactccgaaggagagaggaaaacacggaaaagggagctgctggtcacctggaaaccgcatgccttttgagcagcagcgaagagcacagccaggcagtcaggagagtgctctgttcccttgattcttgcttc

SEQ ID NO: 120516 - DNA, 429 bp, Zea mays
  unsure (1)..(429): unsure at all n locations
  Clone ID: MRT4577_41395C.1
cttgcgttgcatgcacgcgtacgtagctgatcttaacgccccctttttttttttttaattttaggaatgagtgatttaaaggtttgtttctttattatatgtgtctntttttttttggttgggaaaaatcctggcctctgggggggggggtgaaaaaataaaggaattcaagaaggggccctatttgggtcaccgcaatataaatacaaggttacaacccaaaaacttgggcttttgggaaaccggggggtcttacccgggcggggataagggatataatcctaaaaaattggtcccaaaggctcagaatttaaaagggggcaacccgcctggtacctttggaagcctaaaggaaaacctacggtgggtttccaacccaggggaggggggggtatttttcccttcccaagtttatataggaggggcgcc

SEQ ID NO: 120517 - DNA, 444 bp, Zea mays
  Clone ID: MRT4577_41396C.1
actcactctgttgaccccatagatgatgaagactgactgttatcagtggagcgggagttgcacaccgctcgtgcaatgatagagaaaaggttttgtatggtccctgtctgttgaggggagcaactgagtcctggtggtagtcttatctcgccacctgttggggacttgttctcaaatgcttcaaattaagaacaaggcaacacataatgttaaatgttaatgaccttcgtcctacgaagcattacttcccttaggatataatgatcttcagatgaaggtcatgaaggacatatcttcatgatcgcagtatatgttaataaaagaagaagcatatgaaatataagagacaatataaattatcatataacatcattaattcggttctcattatattatcatagagagacagaaacaatacttaattataaatgtacccttcggctt

SEQ ID NO: 120518 - DNA, 176 bp, Zea mays
  Clone ID: MRT4577_41397C.1
aggcttccgctgctgcttcccccactcgaatccagcaaccacgcggggcggcgggggcgaccccaacccgcgaagctggcgcgcgaggcggccgacgaaagacatcgcctgcaggagccccgtcgctggagccgagggcgtgatggttgtgagcggcgtgggcgcctactttttgt

SEQ ID NO: 120519 - DNA, 391 bp, Zea mays
  Clone ID: MRT4577_41398C.1
gggtcggggaggtattttctgggacaccggacaatcaaccttttgggatccacgcccaggggttttcaaaggatttcgtgcagtggctcaatcaaggagaggcgttttggtactgacatcgtaaggtgggcttaccatgtaaaaccaacccacacgatggttgcacttacaaaaaaaaaaaagaagggagaagtctacatgatggctgcagcccaaacctggttccaaaagcatcacaactctcaaaggccattgcaagcaaggagggcaccatcgacgtccacgagatttgcttgtcaaccatcagcattctcctcgcggccaaatatgatgacgggacttaagagtcgcacacactgttagtagacttgtctagggaagtgtaccattc

SEQ ID NO: 120520 - DNA, 402 bp, Zea mays
  Clone ID: MRT4577_41399C.1
aaaccaaaaccaggcacattggatatgcaggcggggaaattgataaacaaacatacggacaaactttttggaaacgggaaaacatggggggggatcgcccaaaagactttccccgcttttccaaaagacaactttggttacccagggaaaaaaaaaaaagccctgggaatggttttaaaaaaccaaaaaggtttttttttaaaaaaaaagggaggagccctgccttttcaggtgaaaaaaaataaaagttttatgtacaaaaaaaaaatttttttaaaagccataatgaattcagcaagaggtggccatgaactccaaaagaaggtccctcaacgggcctttgggcgggattttccctggggggccgaaaataagaacctttcccccgctaaaagggcccgg

SEQ ID NO: 120521 - DNA, 252 bp, Zea mays
  Clone ID: MRT4577_4139C.1
aaaagacatgtctcccaaaacaactatataatcactataacataattcagttcaaaagacatacagatccccccagaaaaccagatgtcattatgagactttacctccactttacctctctacatagtcaaaacaaagaacatgaaaataagaatacttaaaaacttcttaattggactaagtatattctaacttctaaaattcactacaacactcaataactattatcttaacagaattaacaaaatccaa

SEQ ID NO: 120522 - DNA, 365 bp, Zea mays
  Clone ID: MRT4577_413C.1
catactcttctcgcgcaaggacacgtgcccggagtgcgactgcgccgggttcatccggggggcgggcgcgacgctgcgggcgaacgcggcgaggaaggacgaggcccagatcgtctgccctaactgcaacggcctcggcaagctcggacagatcgacaagtagctaaataatcccaagctcatatacatgtgcatatatgcatggaccaaccaaactgctcctttgtataagctctaaattaaatctcgtctccaacagtgtctgaatgtatatgctgagtgagggttaattgggccggaaatatacccggtggcttggcaaaaaccgatgtggggcattaccatggtggccgtgggggtggtgg

SEQ ID NO: 120523 - DNA, 779 bp, Zea mays
  Clone ID: MRT4577_41400C.1
atactcccggctctgtctcacattcagccgacgatcaagtttcttggatccacgcccaggggttttgaaaggatttcttgcagctgctcaaccaaggagaggcgttttcccaatgaaaggtcaaaagccataagccctcctgatgtgaatatttcaactgatagtggtgttcgtgatgtaatatctgggacaacggacgatcaagcttctgggatccacgcccaggggttttcaaaggatttcgtgcagtggctcaatcaaggagaggcgttttggtactgacatcgcaaggtgggcttaccatgtaaaaccaagccacccgatggttgcacttgcagcccaaacctggttccaaaagcatcataactttcaaagaccattgcaagcaaggagggcaccatcgacgtgcacgagatttgcttgtcaaccatcagcattctcctcgcggccaaatatgatgacggggcttagagtcgcacacactgttagcagacttgtctagggaagtgtaccattctgttcattgattggagcttgctcaccaggcgggtagatagcgcatcgctgttgttcttctttaaaaaaaaaggaaagaaagaaggtggtaggtagtagtatattcttttgaagatgtaccattgtccagacatcatcgtctccatctccattgtgtaaatatatatatatgtcccaggtgctccccaaaaaaaaaaaaaaaaaaaaaaaaaaaaaaaaaaaaaaaaaaaaaaaaaaaaaaaaaactcgagaaagaaggcccg

SEQ ID NO: 120524 - DNA, 386 bp, Zea mays
  Clone ID: MRT4577_41401C.1
cgacacgaactggtatgctttcatgtattgtaaacagattctttctttttgttttttctttttttacagaacccgaagggtttaaggggcccaactttaattccaaaggcaaattctagggcctttcaaaagggggggggggggggaaacccccaaaatttccccaggacacaaaaaagggtttttaaacccataaagtgggcgggctcttcaaagaattttcagggctctgataagttttctttctcctgatcggggggatacttgcgcccctttggggggccccccgggaaattcttttccgggggggccaggtcctcgggggccctaaaaaaaccccctttttttatggcttaggcgagaaaacaaaaaaaaaaccccccctt

SEQ ID NO: 120525 - DNA, 327 bp, Zea mays
  Clone ID: MRT4577_41402C.1
acaagcttttttttttttttttttttttctgttttgttatggaacggcttttttttttttcttcgttctaatcatcgcgccgtctgttgctgattggcacggcgatggaagaccatttctttttttcggacgtggaaacgtgggagctttgctcgggcaacgcaaagcgcgcctaaacgcgtgcttacgcccgtgcacgctctggccagcagactgtgcgccgactctgcggccggggcgaaagacgatccaaccatctagaatctgttccctccacatggttggatcaccctagcggggcttggaagctacccaaccggacaccct

SEQ ID NO: 120526 - DNA, 348 bp, Zea mays
  unsure (1)..(348): unsure at all n locations
  Clone ID: MRT4577_41403C.1
catccgcatggcgcgcgatgtggccgcgaaggagggccactgcggcatcgccatggaggcgtcctaccccgtcaagnactcgcccaaccccaggtccgcgccgtcgtcgtcggcgacgacgacagccacgacgagctctgaatcgcatgcgcacacagcaggcacagctggcgcttatttattgattaaaccatttaaaattatcactacacattttacactacagtaccgatgtatgtatgctcggacaggaacatctctgttgcggtctgagaatgtctgaatgacatacgcacattatacaacgtgcattcatgtaataccataccagtcgagagttgatctacc

SEQ ID NO: 120527 - DNA, 384 bp, Zea mays
  Clone ID: MRT4577_41404C.1
aaaaaacatactaacacttcaacaaacacatttaaactttaaaaaacaaaaaatctacaaagtgagaggcgtcaataaactaaaccaaaaacaccagctatcaaatacactatcaatctcccagattgtccatactctctccttcattttcaactaagaaaacctgcttattccatataaattttctgctcgtattgtatcccagtctatccgttacctgagtcctgacattctggatttttacacttgcacagtgcattattgattttagaccatgttgacttgaacttttgttaatagggtatatttacacccttatgcaactgaactttgtgctcaagatactgcctctcatctgctccttttcttcatctacaacgcact

SEQ ID NO: 120528 - DNA, 392 bp, Zea mays
  Clone ID: MRT4577_41405C.1
ggactgcacagccattgacgtatccgtctacaatgataaaagaaataagtttgtgactttgtaacatcaatttgaaagaatgaatttgcccctctttgaaaatgataagtcacagagttgcaaggtataaacacgtgcatcaatttgcaacaaaaaacactgtggaagaggtgtttcaaatgtcatcttagggcaccatggcacattcggagggtgaaagggttgagataaattaggggttagtttgcaataatttatcatggtgaatgattatataatggcagtacatattaaccatattcagaaggcatcatctcatcaagaaagtattctgtggttctggagtgcaaggacagaagccttcttcattgtcctcaagtcaatcgctgtca

SEQ ID NO: 120529 - DNA, 566 bp, Zea mays
  Clone ID: MRT4577_41406C.1
gccggccgggtcgcaaccttgactcctcttcctcgtttccttccgtgcaatcgggtgatctgacagcggcggcggcggcggcggcggtactcctagcttccgcaatatggcgacgtgcctggctgcggtcgccgccgccacgttcatgcggagcctggccccagcgctgcccaccactacctatcctaggcggcagcatctacggcgcacgcggtgacctgcgggcgcgcatacaagaaaatcaagctgcgtaatcgtgctaggtctcctacggaaacgcccgaccgaagctgcgacaagaatattgagtgcatcaaggaccgcgtcgaggagccccgatccactccctgatccctccccttcaagattatctgagcgcctcccctcggtccgccgggggtaccttgagtttgctgcgacagttgctgctgcttctccgcttccaaatagatgcacgagctgcacgggcgagtgtttcctatggttttaattgtttctcaattgtgtggcgtcagatatgtactgccgccgaactgctgtggatcgagccatatccttttggatgg

SEQ ID NO: 120530 - DNA, 667 bp, Zea mays
  unsure (1)..(667): unsure at all n locations
  Clone ID: MRT4577_41407C.1
ccggccgggcgaggcaacagcctaactcacaaaccaccagacgactggacccaagtacaaaacccgccttcctctcattccccaatcgccacaactctcgtcggagctccgagccctaaacaacagccttcgccggccgactcccgggcggaggaggcggccggggagatggacgacatcggcggcggcgcaccgggtgcctgccccaagaacaagaagccccggcacctgtcccgctcgctgacctaccaccaccacccgtaccaggggcgccaggtgctgccggcgccggcgcccaacccgcagcgcccgcagtcggtggtcctgtacacgacgtcgctccgcggcgtgcgccgcacgttcgcggactgctgcgcggtgcgcgccgcgctgcggggcctccgcgtcgccgtggacgagcgcgacgtctccatggacgcggcgctccggcgcgagctgcaggggatcctcgcggcacggggccgcgggttctcgctcccgcagctcctggtcgggggcgcgctcgtcggcggcgccgacgaggtccgccggctgcacgagtccggcgagctccgccgcgtcctcgaaggcgcccccgggcaggaccccgccttcgtctgcggcgcctgcggcgggttccggttcgcgccctgtncggcctgcgacg

SEQ ID NO: 120531 - DNA, 258 bp, Zea mays
  Clone ID: MRT4577_41408C.1
ccgttaatggccactctgtccgaattggcaacttgaaaatggctaccgcctctctagtagtccctcccatcactacgaggcctgtcgcgcaccactgtccatggtcccaggttccagaacctcagagctaggaagccagaaagggccctccaccgacaccagcgaggagcgcagaggcgaaagcaagggggctgggcttgtgtcggtgtgggaccgaacgatagggtgcggggaggagaaccggcacgcgcgcgccca

SEQ ID NO: 120532 - DNA, 1891 bp, Zea mays
  Clone ID: MRT4577_41409C.1
ccggccggggagaagcgggccctccactacacccccctgctctctctctcgcaacagccccacgtcttacaaccgatcccgagactacacggcacgctcgtctcctggcgcggctgcaccctgtagggaacggcgggtgcgggtgacatgagctgcttgggctggttcaagcggaggtcgaggagcggaggatcggcggcgaagcgaggagcgtcggcgccggtgtcggcgtcgggccccgcgaccacaacgacgaccacgacgacggccacgacagcgtcggcggtgagcacgagccggtcggacgactcgggcgcggcgcggccggcgagcaagtcggcggggtcggccggctcgtcgtcgcagtcgcaccggagcatctcctcgctgtacgaggagcggggccacggccagctgcgggtgttcggctacgaggagctccagggcgccacggccgacttcagccgcgcgcagaagctcggcgagggcggcttcggcagcgtctacaagggcttcatccgcggcgccgacggcaagggggaccgcgtccccgtcgccgtcaagaagctcaaccagcgcggtatgcagggacataagcaacggttggcggaagtacagtttcttggtgttctggagcacccaaatctcgtaaagctacttggatattgcgctgttgatagcgaaagaggggcacagagattgttggtctacgagttcatgcccaataagagcttggaagaccacttgttcaggcgagctaatcctcctctaccgtggaacagaaggcttcaggttatcttgggagctgcagaaggattggcgtacctgcatgaaggggaagttcaggtgatctaccgggacttcaaaacgtccaacgttttactggacaaggacttcagagcaaagctatcagacttcggcctagccagggaggggccaactggagcaaacactcacgtctcgactgcggtcgtcgggacgcaagggtacgccgcaccggagtacatggacacggggcacctgacgacgaagagcgacgtgtggagcttcggcgtggtgctttacgagatcctgacggggcggcggtcgctggaccggaacaggccggcggcggagcagaagctgctggagtgggtggcccagttcccgccggacagccgcaacttccggatgatcatggaccccaggctccgcggcgagtactcggtgaaggccgcccgggagatcgccaagctggccgacagctgcctgctcaagaacgccaaggagcgccccaccatgagcgaggtggtcgaggtcctcggccgggccgtgcaggcgcacgccgagcctgacagcggggctcccggtcccggccccggcgccaaggggaagaagaccgacgcagccacaccgtcccggcggcggcgtgactgactgctacatgtcgtcatcggtaaaggcgattataccttgtttccgagtccattggttctttagtctagtcgtgagttgtgcctgtgacagcacaaaaggagtgagtgttatgcttcgacatacagtattacttagacgtgcgtagagacgagcattttgaaaagaaaaaaaaaagtgtagaggtctcaagggtttcgaaagcgggcatttcaaaagattttgcgctggctctaaaaaaagatctgttttagcataaccgagtgaaatcagagtgtcagacgcgagcgcacagatttttcaggaagcagctggcaagagcttcgtcaagcatgtattaacagaaaacataatttgtataaaaaaatagcgcacaaatttgattgtattggatttcgctgggatcttgttgattgcataaattatttggtcttttacgagcactccgtcttgtgtgtgctattaggccattctcaat

SEQ ID NO: 120533 - DNA, 362 bp, Zea mays
  Clone ID: MRT4577_4140C.1
tttttgggggattttttaagatatttttgcctttttcccccaagaagaagagatatattcggatcaaagagatctggacaaactacaaggcctcctcatgggggcccgaaacacagcaaactgaaacaatccatcaaactaaacaagtccccaatctccatgaattatggcagcaaggcacgaaagacccttagtcccaaccatttcccaagaatgaatatgctccctggccaaaccaatggacagatgtaaggtaggaggccaaccattaaaaacacaactataacgatgtttaccgggtatccaatttaccaaggccacaagagttcccggggctttaccaaggaaaccccaaggcaacc

SEQ ID NO: 120534 - DNA, 241 bp, Zea mays
  Clone ID: MRT4577_41410C.1
gcccacccaccggcccccggtaccagcggatccatgcccctctccggggccgacggatccctgcggcgcagttaatgcccgcgcaaaactgcgctccgctcacacttgcccatgctggcacaccggacatcaaacagtgcctggccggcgggccccggacacccagcctgccccacatgtcggagctccacccgctccaccccttcgggtgcgatgacctggctggcggccccggtctgtc

SEQ ID NO: 120535 - DNA, 2187 bp, Zea mays
  unsure (1)..(2187): unsure at all n locations
  Clone ID: MRT4577_41411C.1
gcatggtcgccgcgcctgctgcctgatgacttctcggcgccgccgtcgtgtcttgcccgaggcatcgcagcctccgattccccgagaggcggcacgtcggcacggcacgctcttctcctagcgcgggtggtgtgggtaaccgcggcgcgagaagctgctcgatcttgcagctcgtgccgggcgccgggggtgtgcggtgcgggtgctgcggacatgagctgcctgtgctggttcaagcggaggtccaggaaagggcgatcgtcgtcgtcggggaagcgaggggcgtcgtcgacggcgacggtgtcggtgtcgggccccgcgaccgcgaccgcgaccacgaccacgaccacgacggcgtcggcggagagcacgagccggtcggacgactcgggcgcggtgcggccggtgagcaagtcggcggggtcgtcgcagtcgcagcggagcatctcgtcgctctacgaggagcggggccacggccagctgcgcgtgttcgactacgacgagctccagggcgccacggccgagttcggccgcgcgcagaagctcggcgagggcggcttcggcagcgtctacaagggcttcatccgcgccgccgacggcaagggggaccgcgtccccgtcgccgtcaagaagctcaaccagcgtggcatgcagggacataagcaatggctggcagaagtacagttccttggtgttctggagcacccaaatcttgtaaagctacttggatattgtgctgttgatagcgaaagaggggcacagagattgttggtctacgagttcatgcccaataagagcttggaagaccacttgttcaggcgagctaatcctcctctaccgtggaacagaaggcttcaggttatcttgggagctgcagaaggattggcgtacctgcatgaaggggaagttcaggtgatctaccgggacttcaaaacgtccaacgttctactggacaaggacttcagagcaaagctatcagacttcggcctagccagggaggggccaactggagcaaacactcacgtctcgactgcggtcgtcgggacgcacgggtacgctgcgccggagtacatggacacggggcacctgacggcgaagagcgacgtgtggagcttcggcgtggtgctgtacgagatcctgacggggcggcggtcgctggaccggaacagaccggcggcggagcagaagctgctggagtgggtggcccagttcccgccggacagccgcaacttccggatgatcatggaccccaggctccgcggcgagtactcggtgaaggccgcccgggagatcgccaagctggccgacagctgcctgctcaagaacgccaaggagcggcccaccatgagcgaggtggtcgaggtcctcggccgggccgtgcaggcgcacgccgagcctgacagcggggctcccggccccggcgccaaggggaagaagaccgacgctgccacaccgtcccggcggcggcgtgactgactgctacatgtcgtcatcggtaaaggcgcttaccgagtccattggttagtctagtcgtgagctgtgacagcacaaaaggagtgagtgttgtgcttggggccctacatataattttttttggacatacagcattacttagacgtacgtagagacgagctggcggattgaactttgtgtagctttcgaaagtgagcattttgaaaagaaaaaaaagagtagaggtctcaagggtttcgaaagggggcatttcaaaagattttgcgctggctctacaaaaggatctgttttagcatagccgagtgaaatcagagtgtcagacgcgagcgcacagatttttcaggaagcagctggcaagagcttcgtcaagcatgtattaacagaaaacataatttataaaaaaaaaatagcgcacaaatttgattgtaaaaaaaaaaaaaaaaaacgctcacccgacgactacgcccgcaaacaaaaaaggaggttacggcaggctgccggcgaaaaggttacggacggcggcggcggcggcgtccccggtatacgccgctccgtcgtcccgttctggccctccgggtgtgttctaacttccgaagtttgtatgtatcggaaagtatacgtcaggagaaacgaacaattttctgaacaggctatatactacatgtgagattcgatggtgaatttccgaccaaaacacgcnaataaagacccggt

SEQ ID NO: 120536 - DNA, 255 bp, Zea mays
  unsure (1)..(255): unsure at all n locations
  Clone ID: MRT4577_41412C.1
cccgcacgccaccccccaccagggccgccgaggggcaaggaaaacaccgccagcgggggccgaggcggggcacgcccggccaggccagcggaccaccggagcaagaggcaagacgcgcgggaaccggcccagagaggagcgngggccgcacccaggcgcgcaacccgcanggcggggaggggggagccgcccggancgagcgaggagaagaaaaggcgacacgccggaggggcngccgaccaacggcaagggcga

SEQ ID NO: 120537 - DNA, 393 bp, Zea mays
  Clone ID: MRT4577_41413C.1
cgtgtgaagttagtagctagaggcgctgcttgtgtgactggacacagcatcggcgttctcaagcataggtcagcagacacttataatgagaaaggcacgaggaccattagaaagggagcacctgaactctatggatgttgaggccacctataactgctgtgatttgcgacagaccaagctctaagagatcaatgaatatgtgcgggcgacctcactgggtgtttgacctgaacttttctgcagggagctggatactttggatgacctgatgccggcttctcacagaacggtgggccctgtgcaatgctctattgcaactgtgctccatgcaagcttgagaacacccaatgtcaaagcccgtctgaataccatcagagaggaattccgggctgt

SEQ ID NO: 120538 - DNA, 706 bp, Zea mays
  Clone ID: MRT4577_41414C.1
ccacttcccagcccccaagttacgaacaaccccccctcatgaagtcatggtcatggcgaagagcgaaggcccgtccgccgccgcggggctccgcccacggcagcggggcgccttccttctgggggagccaacctgggaggacaccggcagcgggcggtggcggtgcgcggagacggggcacgagctgccggagcgggagaaggaggcctacgcgcggtcccgcgcctgccgcctcgcgctcattgaccacgccgtcgcgcacaagaagccgccgctcaacgccttcaagccccaccccgagcacaaatgctgctgctggtggtggtgataacgacggtggtgatgaaaatgttacggctgagaaggatgacgctgaatcaagggaacttgcctcaatgacaaagcaaatttcttcctggctgcagctaaagcaacagattcgggcacccgtgagcgcagcctcctttcaaagttcaacgaaagggcctaaaagtcagcaggtagaatctttagaatgtcagcaacaagttattaccagggccggccctgagattttgggggcccagagcaagacttaaacctgaggccctctcttattacaacacatatatacatcttgtatcacttattagtttaggtgctaagcaattgttacaataccggtaagaaaaaaatttcatcctcgaagataaaaacaatatctcag

SEQ ID NO: 120539 - DNA, 1139 bp, Zea mays
  unsure (1)..(1139): unsure at all n locations
  Clone ID: MRT4577_41415C.1
cattgggtacctcgaggccggccggggcggctacaaaacgctccgttgcctttcctttccccacttccccggctcctgcctcccgccgccgacaccaccaaaaaccctagcagctccaccccgccgccgccgccgccgccatggatgaccctcggatgttcccatcaggatccgacgaccgctccgacgccgaacgccggctgtacaacccataccaggacctcaacatgccctacagctaccggacgctctacgacctccccacttcgccggagttcctcttccaggaggaggccctggcgcaacgacgctcgtggggtgagaacatcactttctatacgggcgtcgggtacctctccggcgccgttggcggcgccgtcctgggcctccgcgacgccgccaggggcgctgagcccggggagaccgccaagatccgcgccaaccgcgtgctcaacgcctgcggcagctctggccgccgcgtcgggaatacgctgggcgtcattggcctcatgtacgccgggatcgagagcgcccatggtcgcggcccgtgaccgcgacgactggatgaacagcgtcgccgctgggcttggcacgggcacgctcttccgcgccgccaacgggccggaatccgccgccgtcgcaggcgccctcggtgggatcctagccgccgcccgccgcggggggcaagcagctagccaagagatacgtgaatgtcatatgatcgtgtttttttttgtggtagcaatgatgagcgaacaatgatatcgtctagtgctctagtagggaaggggtttgccttttctgagaacaagctgaatgggaaattttgagcttgcattggaattgcaatgcaacatcgtgcttcaagatgctttagttctgctttgtccttatatgttaagggctagatgaaggtatttttatctccttgtttggatgcacatgtattgtcgtcaatccatttcatgttctcaatccatacatagaaaagcggattagggtgaacgttagtttaaattctaactaaatccacttctcacacatatggattgctaaacatgcccttanaagtgtgtgtgtgtgtgtgtgtgtgagtacgagtgtgattgcctctgtttgaacctgcgcgcaaagctgtg

SEQ ID NO: 120540 - DNA, 1593 bp, Zea mays
  unsure (1)..(1593): unsure at all n locations
  Clone ID: MRT4577_41416C.1
cattgggtacctcgaggccgcgggacgcaaacacgcacgcacaccgtacccctcagctcgcgccaccggccaccgcacacagaacgcgtgctccgtccgtcctccctctgcctcgcgcgcgcagggttagcgtgagctgatcgagcaacgagagctagctagctagaggacacgacacgatggccttgcaggtcaccggcggcgtgggctgctgctgccctccgggcagtgcccggcggttgccgcaagcggcggcgctgtgtcgcccgccccgcgcggtagtgtccggcgcaaccagggtggtggaggaggacgagggcaaggtgaggctgggcggctcaggcgtcgcggtcaccaagctcggcatcggcgcgtggtcctggggcgacaccacctactggaacgactccgagtgggatgacaggagactgagggaagcacaggacgcgttcgatgcgagcatcgataacgggatgaccttcttcgatactgcagaagtttacggtacagcactgatgggagcagtcaattctgaaactttactaggaggattcatcaaggaaaggcaacagaaggaccagatcgaggtgtccgttgcaacaaagttcgctgcccttccttggagatttggaaggggtagcgttctttcggcgctgaagaaatcgctagaccgtctaggcctagcgtctgtcgagctctatcaactccactggccagggatttgggggaacgaaggataccttgatggtctcgcggatgcttatgagcaaggcctagtcaaggctgttggagtctcaaactacaatgagaagcgccttcgggatgcacatgctcgcctgaagaagcggggggttccacttgctgcaaaccaggtgaactacagcctcatatatagaacccctgagttgaatggcgtgaaggcagcctgtgatgagctcggcatcaccttgattgcttattccccgatagcgcaaggtgttctgacaggtaagtacactccagaaaacccccctactggtcctcgagcaaacacatacacccctgagttcctcgccaagctccaaccacttatgaacaggattaaagagatcggagcaagctatggcaagagtccaacccaggtgtctctgaactggctgacctgccaggggaacgtggtgccaatccccggagccaagaatgccagccaggccaaggagttcgccggtgcactcggctggagcctgacgggggacgaggtggaagagctacggactctggcacgcgagatcaagggcatcaggatgcccatcgaggagtcgtagatactctgtatttcaccaacccatgtcgtagcaggcgctgacggagaagacgacgcaaggatctagaaataaaccaggttgtgtaagtagaatagcttccaacgaatctcaggcctaagcattgtaagtatgcaatattcatttgccgaaaccagggctgtacctctgctgcctgttctctgctgaaaaaaaagttaggatggaaagatnnnnnnnnnnnnnnnnnnnnnnnnnnnnnnnnnnnnnnnnnnnnnnnnnnnnnnnnnnnnnnnnnnnaaaaaaaaaaaaa

SEQ ID NO: 120541 - DNA, 596 bp, Zea mays
  Clone ID: MRT4577_41417C.1
acggcctcgaccgatcgcctgctgctgcgagaggaggcgatggagccggcgcggcggctcctgctgtcggactacgacggcgcgatcgagtcgccgctgccgtcgccgccgccctcctcggccacgccgttccgccccggggtggccgtcgtcgtcggcatcctcaccagcgtcttctccatcacgttcctgctccttctctacgccaagcactgcaagcgcagcgctgcggagtcgtcggggccctacgggagcgccggctcgggcggtgggttcgggtcctccggcaacggcgcgggcggggaccggaggaactccggcgtcgaccgcgccgtcgtggagtccctccccgtcttccgcttcggcgcgctgcgcgggcagaaggaaggcctcgagtgcgccgtctgcctcggccggttcgagcccacggaggcgctccgcctgctgcccaagtgccgccacggcttccacgtcgagtgcgtggacacgtggctcgacgcgcactccacctgcccgctctgccgctcccgcgtcgacccggaggacgtcctcctcctcccggagccgcccaagccgtctaccacgggccctcctga

SEQ ID NO: 120542 - DNA, 377 bp, Zea mays
  Clone ID: MRT4577_41418C.1
cacgcgtgcgccgatgtggaactattggtgtctgctttatctcgaatagtaacaccagctggaacctgtactatcgttgggtacattgaacgtgaccccttttacacccgtggtgagtgatcaagttggtacagagtgcactcctcgacttcaacgcaacccagctgtgtccagggaccttgttctatactgtaacttctacgaagtaatcggctcagatcagagtaaccataaacagtcatcttatggactatctactctaattatcatggaggaattttcttaactccacttataatcttaatagtatacgcttgtatttacatatcactacgtgtttataatataaccaaacacatctcagttatgattcatac

SEQ ID NO: 120543 - DNA, 687 bp, Zea mays
  Clone ID: MRT4577_41419C.1
atgaagacatatgttgtagctgagatgattgcccttgcatcgtgctaattaaatcacatctgcatttcgataatcccagaatctgattattaggcatagaagtgagaaaacttccacgatgaagtgactgcttcacatgcacatggcttgcctgatataatcacgacccctgttcaagaattcatctgattaaccagttaacttgctgcttaatccctactcgtagggtcaccgagtagccagttaactgattaatcgcttgagtaattgattaaatggccgattaacttgccgattagcctattaatcccctactcgtcagctaaccgagcagctaccagttaatgatttcctcaacaatgatcacgaccttcgtgtgtgatctggagaggcctgagatagttcagggtcttgaacatgggcaaaagcagtcgacatgactgatattaccgtacgagtgcatcagatgaagcttcttgattacctgcagaaaatcagcaccgggcaggtgttcgggactgtcgttgctgttgtccacaccgtggagttccaaaagaggggtctgccccatgcacttatccttgtttggcagcagaagaacagtgcccagggatctaaactgactgatgttgatgatggtactcctgccactgcacttgctaagaccatggaaactacacttgctca

SEQ ID NO: 120544 - DNA, 345 bp, Zea mays
  unsure (1)..(345): unsure at all n locations
  Clone ID: MRT4577_4141C.1
gacccacacggccgccaacggcggcgggcgaggccaagccgggacaaggggaaaggcacgaggaacagagggggaggacagcaacaacaggggggagcaaaannnacaggaggcgggcgccncgngaaccagagcaaaagagcggcngaagacgcagangcaaccgcgcccaaaacagannnccaccgcgnggacggcgagaacgcggagagcgcaccnccaccaaagaagaaggacnacaagcgggcnaaacaacnccggcgggaggaggaagcggaagccaaggaggagaaggcgggagagcaagaagaggaagacgggacgacgaggacgaaaagaaacaga

SEQ ID NO: 120545 - DNA, 412 bp, Zea mays
  unsure (1)..(412): unsure at all n locations
  Clone ID: MRT4577_41420C.1
gcggccggccgggcgggcactttttagtttcttgcttatatgctttgaacgggtgccttcattattccgctagcgtacatccactgcttcctggccgcggcnnnggggccaggcagattcttcacagactcttgagaccctgtcggacgccgctctctgtgggtggggggggacacgtaaggggtaatgcgccggggttctctgttggtgcgttgtctctgcggccgggctagggacccggggctgtgtgaccctgttccgtacccattgcccccgactttgccggccgcggttatgggncctcctttcgcaggccccggtgcggctttcgtccctcggccgcgccctcgctgggggctttttcccgcccgcttggcggcgcgttccttggtggatccgggcgtcggtcccc

SEQ ID NO: 120546 - DNA, 244 bp, Zea mays
  Clone ID: MRT4577_41421C.1
aaaatccaaaaacccaatagataagccaagatgaaaactgattcatcgcatgacaaatcgtaggctgtcaaagccataaaacacaatgacagtaaagcatttacagaccactttcatatatttaccgatacttaaaaggacattttctataaaactacatgaaagcattttagggcttccaggatgcttggggactatgggacatttgttacaagtaactttttaaagtacatagcaaagcctg

SEQ ID NO: 120547 - DNA, 294 bp, Zea mays
  unsure (1)..(294): unsure at all n locations
  Clone ID: MRT4577_41422C.1
gagaaggacagggagtgagccagagctagncaggncgtcccccccagagccgctatgtccggcggcgcgcccctcctggccctgctgctgctggcggcggcggccatgatcgcaccaggccagggcaatgccgccgagtcgtacgaccgcagggccgcggacgtccccggacaagaccgcatacgcagctggggatacatccacaaccaccacatcacgccgaagaagagggacatccatgacgaagacggggcgtgacctcgacgacaacgaaggtgcacacgcacctaccga

SEQ ID NO: 120548 - DNA, 549 bp, Zea mays
  Clone ID: MRT4577_41423C.1
caaaaaagggttaatttgtttttaaaacattttttacctgtttaagttacaaaggtttaaaaaaaaccgggcccaaccccatattggaaaaaaaaacctacaaatgggctccttttcccacaaatttacaacagtccacaaccccctgcggttgggggaagaaaaaggtttttttgccaaactaagcgtccaaaaaggtaccatcgaagtttccaaaaggcccattttgctcgttggtttttttgccgaaagcaggttggcaaccccatcaaaagttttctgaggaccatttgttggccaactacccacctggcccaagagttcgaggaaaacccactttgcttttttggatcttggagctgcaccaggagctccttatttgcagcattagtagggcaccatcagtggaattggcctattcccatctttttttggatggctctttgactagggtatacaaacaaatttatgattccaaaaacggggaacccccctccaacaatagcgcaaactttagttaaaaagggaaaaaataacacatgttgttcc

SEQ ID NO: 120549 - DNA, 197 bp, Zea mays
  Clone ID: MRT4577_41424C.1
tttctctttcatgcaacgtcatattttttttatagggttacctaaattcaattaattggccgtgtgttttacaactttcttactttttaaacctttgtttttccctaatttattgccttttatgacatactcttttttcatagttgcgtattatctataaaggtctttacttatttctatttcaaatattttttcat

SEQ ID NO: 120550 - DNA, 445 bp, Zea mays
  unsure (1)..(445): unsure at all n locations
  Clone ID: MRT4577_41425C.1
ggaattcccgggtcagacccacgcgtnccgccgactcgtagcggccacgcgtctcgaatttacaatattccctcaccctgcacggagctgtggcaacgtgtaccgcggctggcgcacggcctgacgacgatgataggcgccggcgggctggacccctacgcggagtacctgaagcaaatcgcatggcaccccgttggccgctgagcgctactacgacctgagtggccagacgagcgccatgtaccagccggtccggcaacagtgctgccatcaccagatgaagatgatggacgtgcaatccgtattgcatcaactgcagatgatgatgcagctcgagcgtgccgctgccttcagaaacatgctgaaccagccagctctaatgcagcagccccagcagctggcggcagatcacggtctcaaccgcatggccatgatgatggcccat

SEQ ID NO: 120551 - DNA, 497 bp, Zea mays
  Clone ID: MRT4577_41426C.1
aagcaaaaataatctcattttttatcgatttgaattaaacccagatgacacccccttaaacaaaacttttaaaattccaaattgctcaaatcctcaggggcttttgaaaaaaattgtcctaatttcctaacaagcccaaaacccaagcataatattaaccccaaatccaaatgtaaagttttactgaaacgggttacatttagggcaacttgacatactcctgcactatgttaaggccctaaaatttttcaccgtagtccttgacaacaacacaggagcagcctacaaccttttttgccttgccctgggagtaaattttgcaaagcccaccccactcgccaagagttttaccagcaggaacagggacaaggggaacatttgtgttcaaaacaaagcgccttcaccagtttgacataatctggctggccacagtcctcaacaaaaacccaaagctgagcagcatgcttttaaatggccttggcagcctcgcaaaaacc

SEQ ID NO: 120552 - DNA, 110 bp, Zea mays
  Clone ID: MRT4577_41427C.1
acgcagcagtctacttatcgataccaccaaacttaacaacagccagcgacgcgaaaataatgagagagccgaatcatgacatcatgggcggcgcactcgtggcatagtcc

SEQ ID NO: 120553 - DNA, 378 bp, Zea mays
  Clone ID: MRT4577_41428C.1
ctggaacagcccatgacactcagggggtattaaaaagtggggcgggacaaaaatccgggtctcgaggcagaatcaggttttgaaaaccaccgcctggcgtatggttcacgcaggcctttgtaaatctaggcgcaggagtttaaacactcccatatgtgagcaagggaccacacatcgaagctctgatgatggtgcaagaaaatcctcggcgatgtgaaggccgtttttagtcctgacatggggggattcttggaatctgcttcatcctggggtctgtgacagttttcatcccaaggcatatgcccgataaattttcagacaatcatgatcaacaacctgaagtttagtggcaggagactgctcttcatgaaccaaaca

SEQ ID NO: 120554 - DNA, 313 bp, Zea mays
  Clone ID: MRT4577_41429C.1
gtgctctgcgtcgcgggcgccaccgtcatcacgctcttcaagggccccgccgtcttcggcccggcgccctccgtggccgcagccgtgcccgtgcccatgcccgcgccgggtggcggcaacagcagcaacaacaacaacaagagctgggcgctggggtgcgtctacctcatgggccactgcctgtcgtggtccggctggctcgtgctgcaggcgcccgtgctcaagcgctacccggcgcgcctgtccgtcacctcctacacctgcttcttcggcctcctccagttcctcgccgttgccgccgtcttcgagcgcg

SEQ ID NO: 120555 - DNA, 2525 bp, Zea mays
  Clone ID: MRT4577_4142C.1
cattgggtacctcgaggccggccgggccgggaatctcccttccgttccccaattcgaaatcgaatcgggtccgacgggtcggtcttgccgtgcgtgcgtggctgcgcgagcgactcgactgcaccccccgctcctcccagtccccacacactgcgcgccgccgccgggtcctcctagggtttcgccgcgatgtcgctccggccgagcgagcgggagcagatgcggaagggcaactacaagcagacggtagacgcggaggagagccgccgccgccgcgagggccagatggtggacatccgcaaggccaagcgcgaggaaagcctccagaagaagcgccgcgatgggtttcccgcctccgccgccggtgtgccgccgatgggccactccaccgcgctccagcagaagctcgatggcttgccggcgatggtgcaggccgtccactccaacgacccctccgtgcagcttgaggccaccacacagttcaggaagctgctttctatagagcgtagtcccccaatcgaagaggtgatcagcacaggagtggtgccgcgattcattgagtttcttacacgtgaggaccatccccaactccagtttgaggctgcatgggcactcaccaacattgcatcaggcacatcagagaacactaaggtggtggttgagagtggtgctgtgcccatctttgtcaagctactcaactccctcagcgaggatgttcgtgaacaggctgtatgggctttaggtaatgttgctggtgactccccaaagtgccgtgatctggtacttggtcatggtgggctataccctttgctgcagcagcttaatgagcatgctaagctttcgatgcttaggaatgctacatggactctctccaacttctgtcgggggaagccacaaccaaactttgatcaggtcaaaccagcattgccagcactacagcaccttattcactctcaggatgaggaggtcctaactgatgcctgttgggcgctctcatacttgtctgatgggactaatgataaaatccaagctgttattgaatctggcgtgttccctcgccttgtggaacttctgatgcatccttcggcctctgtactcattccagctcttcgcacggtgggtaacattgtaactggggatgacatgcagactcagtgtgtcattgacaatcaagcacttccatgccttttgaatcttctgactaccaaccacaagaaaagcatcaagaaagaagcatgctggacgatctcaaacatcacagctggtaacaaggagcagattcaggctgtgatcaatgcaaatataattgcacctctggtgcaactcctgcaaactgctgaatttgacatcaagaaagaagcagcctgggcaatttcaaatgccacttctggtggcacacatgatcagatcaagtaccttgttgcccagggttgcattaagccactctgtgatctgcttgtttgcccggatcccagaatcgtaacagtttgcttggagggtctcgagaacatcctgaaggttggcgaggcagagaaaaaccttggtgcaggtgatgtcaatgtctatgcacagatgattgatgatgctgagggcctggacaagattgagaacctgcagagccatgacaacaccgagatatatgagaaggctgtgaagatgctggaatcctactggctggaggaggaagatgatgccatgccctcaggcgacaatccccagaatggcttcaactttgggaaccagccctctgttccatcaggtggattcaactttggctgaagatgcccatttggaatggccgctgtgccattatgccttggctagtgctctgggctagtcagaggtgtggggtagcggcgtcaaccaagtcatggttgagtcccattggtctggtctcagggagttgtcatgtcagtcccagtcagcagggtcagtccttgggctgcattaccagtggtgcagcttggtcggtggtcagtcttgaaggtcagccggttggatcatttgggctcttgctcccaccagcaccacctctggtgggaggcatcaggcatggagtcgcgggtgttgtcgggagttgggttttgcctcctatacagcataaatgaattatattgttttacctgttggtagaaagaaccttgaaagatagggaacgtgtcgttttttgtcaaagcggttcctgtgctgtataacatgttgcatgagtattggcgcaacttataagacaatgtcaaatgggtttttgggagtcccattctggtttcttgagtcttcttcattggtctattgtgtaacatgtacacaggtttgtggttcgtcttgtcttgtctgttgtatttgccaccgttgtctggaagttgttgcatgcttatctagaacagcagtataccagggttaattctgtgacatttatggttcctaacttggtgggatcagaaaaaaaagttgtatggccatgacgatatcaaagaaataattcggtgcatttttgctccgtttttcgaaaaaaaaaaaaaaaaaaa

SEQ ID NO: 120556 - DNA, 643 bp, Zea mays
  Clone ID: MRT4577_41430C.1
cctcgaggccggccgggccgggctcctctccggcctcccccatggctcatccactcctctcgtccgcgcttgtttgttcgcgtcttctccctgtagggaactccgttacccggccccggctgtgcgcggcgtcagcacgccccgcgggcaggagggtgaggctgctgagcgtgaggtgcgagcagggagccaagggcggtggcgggctggacgtgtggctgagccgcggggcgatgctgggcttcgtcggagcggtggccgtggagctgaccaccgggaaaggcgtgcttcagaatgtggtcggcgtcctcacggccttcctcatcttccagtccgggacgcgggactgatgggtgaattgtcaaagctcccaaaaagacatgcataagtctgtcagagtcttgtgctgtgtatgtctatgctgttgtagttgccttgccttaacaggaagctgaggagtaacacagtgcgaaaaggataattattattattttttaccaattgtgtttacagtactcttccttgaaggtcttctcagtctcttccaaacaagttggtttcttcatttataatctcaagtattatgaatgcaaaaaaaattaaggtgtttttgaaaaaaaaaaaaaaaaaggcccctagggcc

SEQ ID NO: 120557 - DNA, 650 bp, Zea mays
  Clone ID: MRT4577_41431C.1
ccggccgggaagaagcttgcgctccgctgtcccgtctccgctccggcctccacccatggctcatccactcctctcgtccgcgcttgtttgttcgcgtcttctccctatagggaactccgttacccggccccggctgtgcgcggcgtcagcacgccccgcgggcaggagggtgaggctgctgagcgtgaggtgcgagcagggagccaagggcggtggcgggctggacgtgtggctgagccgcggggcgatgctgggcttcgtcggagcggtggccgtggagctgaccaccgggaaaggcgtgcttcagaatgtgggtcggcgtcctcacggccttcctcatcttccagtccgggacgcgggactgatgggtgaattgtcaaagctcccaaaaggacatgcataaagtctgtcagagtcttgtgctgtgtatgtctatgctgttgtagttgccttgccttcacaggaagctgaggagtaacacagtgcgaaaaggataattattattttttacaaaatgtgtttacagtactcttccttgaaggactaaactgcatttatgttgaagttgtcaataatcctattctcactacaccaaattccattccaattcgaagaggttcttggaaaaaaaaaaaaaaaaaaggccccta

SEQ ID NO: 120558 - DNA, 772 bp, Zea mays
  Clone ID: MRT4577_41432C.1
gccggccgggccgggtctcctctccggcctccacccatggctcatccactcctctcgtccgcgcttgtttgttcgcgtcttctccctgtagggaactccgttacccggccccggctgtgcgtggcgtcagcacgccccgcgggcaggagggtgaggctgctgagcgtgaggtgcgagcagggagccaagggcggtggcgggctggacgtgtggctgagccgcggggcgatgctgggcttcgtcggagcggtggccgtggagctgaccaccgggaaaggcgtgcttcagaatgtgggattgaccgcgccggtgccgacgctggcgctggcgctcaccggcgcggtcggcgtcctcacggccttcctcatcttccagtccgggacgcgggactgatgggtgaattgtcaaagctcccaaaaggacatgcataaagtctgtcagagtcttgtgctgtgtatgtctatgctgttgtagttgccttgccttcacaggaagctgaggagtaacacagtgcgaaaaggataattattattttttacaaaatgtgtttacagtactcttccttgaaggactaaactgcatttatgttgaaaaaaaaaaaaaaaaaaaaaaaaaaaaaaaaaaaaaaaaaaaaaaaaaaaaaaaaaaaaaaaaaaaaaaaaaaaaaaaaaaaaaaaaaaaaaaaaaaaaaggggggcccttttaaaggaatccaattttacttacccgtgcttgcaaacttaatagtttttttttggggccccctaaatta

SEQ ID NO: 120559 - DNA, 323 bp, Zea mays
  Clone ID: MRT4577_41433C.1
gggaggacatattttttttttttccttgaacacccccttttcaaaaaagcccttttttcgtgggcatttgcccacattttttttgggtttccccccaaatttgttccaaaaccgttcccttccccgaaaaaacacctggggttggttaaaatttggggccaacccccccgccccctgggttggcccgggattttcgggccgggacctgggggggtaccaggtttccctttaggggggggtattaaagcggggggaaaacatgggcataagttgttcccgggggaaaatggtttccccccccaaattcacacaaaattcttgcc

SEQ ID NO: 120560 - DNA, 807 bp, Zea mays
  unsure (1)..(807): unsure at all n locations
  Clone ID: MRT4577_41434C.1
cattgggaccctcgaggccggccggggctggcttctgacctctctctacatccttttgtttgttgccctcctccccatatcatcctcccttgttcgtcatcgtctctccctcagctccctccagccgccaattaatcgatcacctagccggccggttgctggttctcttcttcgcatgctgccgataattaatttattccacgctcgattgcagtggctttagttaatagttatagggagcttcaagatagcaaactagaaacggcgcaggattattggaaggaatagagcttcaattcagatagcagcaggctgctgttgattcggcgatcggtcgatcgaggatgtgcacgaggggccactggaggccgtcggaggacgagaagctgaaagagctcgtcgcgctgtacgggccgcacaactggaacgccatcgccgagaagcttcaagggagatcagggaaaagctgcaggctgcggtggttcaaccagctggacccgaggatcaaccggagccccttctcggaggaggaggaggagctgctcctcgcctcccaccgcgtccacggcaaccgctgggccgtcatcgccaggcttttcccggggcgcaccgacaacgccgtcaagaaccactggcatgtgatcatggcgcggcggtgcagggagcggatgcggctgtcgaacaggcgtgccggcggcgctgctgctgctggtgcctgnngccgtcgtcgtcgccaccggtgctgctgccgaagatggcagtaaccctaggagcgncaataaagagccgaggcctgacgcgagcggc

SEQ ID NO: 120561 - DNA, 1040 bp, Zea mays
  Clone ID: MRT4577_41435C.1
cattgggtacctcgaggccggccggggagaagcttgcgctccgctgtcccgtctcctctccggcctccacccatggctcatccactcctctcgtccgcgcttgtttgttcgcgtcttctccctgtagggaactccgttacccggccccggctgtgcgtggcgtcagcacgccccgcgggcaggagggtgaggctgctgagcgtgaggtgcgagcagggagccaagggcggtggcgggctggacgtgtggctgagccgcggggcgatgctgggcttcgtcggagcggtggccgtggagctgaccaccgggaaaggcgtgcttcagaatgtgggattgaccgcgccggtgccgacgctggcgctggcgctcaccggcgcggtcggcgtcctcacggccttcctcatcttccagtccgggacgcgggactgatgggtgaattgtcaaagctcccaaaaggacatgcataaagtctgtcagagtcttgtgctgtgtatgtctatgctgttgtagttgccttgccttcacaggaagctgaggagtaacacagtgcgaaaaggataattattattttttaccaattgtgtttacagtactcttccttgaaggtcttctcagtctcttcaaacaagttggtttcttcatttataatcttattatgaatgcaaaaaaaaaataaaaattttctaaaaaaaaaaaaaaaaaagcggccgcacacagcttcccatatccatcagtcccatccaacctttacacatgtgccgaccctacatattctttccagatcaccagtcgcccgggttacgacatctacgccatcactgtcacccacaaagtctcagacagcgttactttgaccggtatgaccgatgttggctgcaatggtcctattccgatgtcttgccaacaagttggttccaggcaaggcactctgactgctgcttgagcgccgaacatgaataatatgagaatcgaattgggtctcggacagggccatgccgctcatagaaacaacacttgataatagtaatactatagagagc

SEQ ID NO: 120562 - DNA, 453 bp, Zea mays
  Clone ID: MRT4577_41436C.1
ccgattgggtacctcgaggacggccggggcagatttcgactcccccctccctcctctctctctatccgtctctccgctcgacgctcgcaccaccgccgaaccctcctccgatccaaaccctcctcgcatcgtgccgcatgcctccacgcgccacgaggcggcggcgctgcagctgaccaccccacttgaccagccggggggcagagagagagagagagagagagagagagagacaaccggacgcggacggcaggcatgggcggcgtcacgtccaccatcgccgcgcgcttcgccttcttcccgccaacgccgccgtcctacaccgtcgtcgtcgccgacgccgccaccggtcgcctcgccataccggagatctcccgggcaccctcgcgccgccggaggcgggatggcgccggcgccgggggctcctcctcggcctgctccgtcgtcgcggcc

SEQ ID NO: 120563 - DNA, 182 bp, Zea mays
  unsure (1)..(182): unsure at all n locations
  Clone ID: MRT4577_41437C.1
cntgcttcaggnctnngctgcggccgtactgggcgcgtacagcgctctnntctgcgagggtggctccgtaacctcgccgccgcgggnagggagcgtgccggtagccacttcaggtaacgttgtatgctggtagttcggcggcggcgtgtgncgtaagctgggcgcggttttttttttttttt

SEQ ID NO: 120564 - DNA, 412 bp, Zea mays
  Clone ID: MRT4577_41438C.1
agtagcgaggcgcgccgcgatgaagcgttctgtctgcgacctcctccgcatccgccatgcagaccaccctaagcaagtcagctcgtgagctgcaccagcgctcgacccacctgcacgcatgcgtcgttctctagcccttgtccaggactgaccagacctaagcacgcttgaccttactgatctctactgctgaacggaggacagctagccggaccttgcagagcacccgcgaggctcagcgaagatcaccgaggtctagctagccctcccggcagccaccaacgggctcaacgcgatcgaactggaggacactgccgcatcctgcacaagtctacagaaccttgtggagcccaacgtgggtaaacgtacttatatagacttaatcagcgactaatcactactaaccatcgcc

SEQ ID NO: 120565 - DNA, 614 bp, Zea mays
  Clone ID: MRT4577_41439C.1
ccggccgggttgctagacaagtaccgaagagaattttccgccgccgtcccgtttgccattaaccatgatagcaatcagcagcagggctattgttcaaatactaacgaagaagacgcaaacaaatcagtcgaattctacgatttcctccaagtgaacgcgaactcgagcgacaccaagtgtggttcgagcattgaggagcaagaggcggagagccgggatgacgatcaagccgaagggcaggtgcagttcatagatttcctggaggttggggcttcccatcgccgccggtgatttttatctatatatttaactagggatgcatccaaagcaggttgtaatgctttgtgaaagaggcaggcatgctgcaaatagcaatcgtcgtctaacaccaaacgtacttgtagaggaagcaaaatgcaccctgcatatgacatgtaatttattgatgtatacatatatctgtccatatatatccaccgttggggggacatgtgcaaaattattctgagatgtataaacgaggaattgattgttatctcatccatatttgtaagttttatatatctgataattatagataatgtttgatccaaaaaaaaaaaaaaaaagcggcc

SEQ ID NO: 120566 - DNA, 1092 bp, Zea mays
  Clone ID: MRT4577_4143C.1
attatatttgcattgatcacagcctgaatctgctccttgttaccagctgtgatgtttgagatcgtccagcatgcttctttcttgatgcttttcttgtggttggtagtcagaagattcaaaaggcatggaagtgcttgattgtcaatgacacactgagtctgcatgtcatccccagttacaatgttacccaccgtgcgaagagctggaatgagtacagaggccgaaggatgcatcagaagttccacaaggcgagggaggaagatgatgccatgccctcaggcgacaatccccagaatggcttcaactttgggaaccagccctctgttccatcaggtggattcaactttggctgaagatgcccatttggaatggccgctgtgccattatgccttggctagtcctctgggctagtcagaggtgtgggtagcggcgtcatggtagtcatggttgagtcccattggtctggtctcagggagttgtcatgtcagtcccagtcagcagggtcagtccttgggctgcattaccagtggtgcagcttggtcggtggtcagtcttgaaggtcagccggttggatcatttgggctcttgctcccaccagcaccacctctggtgggaggcatcaggcatggagtcgcgggtgttgtcgggagttgggttttgcctcctatacagcataaatgaattatattgttttacctgttggtagaaagaaccttgaaagatagggaacgtgtcgttttttgtcaaagcggttcctgtgctgtataacatgttgcatgagtattggcgcaacttataagacaatgtcaaatgggtttttgggagtcccattctggtttcttgagtcgtcttcattggtctattgtgtaacatgtacacaggtttgtggttcgtcacgtcttgtcttgtctgttgtatttgccaccgttgtctggaagttgttgcatgcttatctagaacagcagtataccagggttaattctgtgacatttatggttcctaacttggtgggatcagattaaaaagttgtatggccatgacgatatcaaagaaataattccgggcattttatctaaaaaaaaaaaaaaaaaa

SEQ ID NO: 120567 - DNA, 1912 bp, Zea mays
  Clone ID: MRT4577_41440C.1
tgtctctccctcagctccctccagccgccgattaatcgatcgatcacctattcacctagctagccggccagttgctggttctcttcttcgcatgctgccgattaatttattccacgctcgattgcggtggcggctttagttaatagttatagggagcttcaagatagcaagcaagaaacggtgcaggattattggaggaatagagcttcaattcagatagcagctgcaggctgctgttgattcggcgatcggtcgatcgaggatgtgcacgaggggccactggaggccgtcggaggacgagaagctgaaagagctcgttgcgctgtacgggccgcacaactggaacgccatcgccgagaagcttcaagggagatcaggtacgggtgctgtgtgctgatgctactatgtctgtatgattatcaaaactaaaaatcgtatattattaagcatgtatatacatgtctgagtttttttttcgggttggatttggtgagctatatatatccaccaagagctaatttccttccttctcgttgatccaccaatattgttcgcgttggggtttgactttgcaattggggcatgcatgcatatgggtttagttagttaaaggaagtttagatctgttagggtgtcatatcagagagaggtgccattttttagctccactatatactctcgccttgatgtgcatgtcatatccgtgtcacttgtagagcaattttgtctagaaatataccctctctatatatctaccgagttcagcttttcttgctttctaatttacctgagtacgtggccgtgttccttctcgcacgagctactggccatggagtagctaagctagctagcttgcgcatgcacgccccaagagagaacagctagctagctagcgtgattgaggagctgtataataacctaattaaaatgaaaaattgaatcttttcagggaaaagctgcaggctgcggtggttcaaccagctggacccgaggatcaaccggagccccttctcggaggaggaggaggagctgctcctcgcctcccaccgcgtccacggcaaccgctgggccgtcatcgccaggctgttcccggggcgcaccgacaacgccgtcaagaaccactggcatgtgatcatggcgcggcggtgcagggagcggatgcggctgtcgaacaggcgtgccggcggcgctgcttccggtgctggtgctggtgccgtcgtcgccaccggtgctgctgccgaagatggcagtaaccctaggagcgccaataagaagccgaggcctgacgcgagcggcatggcctccttgctagacaagtaccgaagagaattttccgccgccgtcccgtttgccattaaccatgatagcaatcagcagcagggctattgttcaaatactaacgaaggtgaatactgctactactacgtactgcatgtatgctagctactaccatatatacaagacaaatttttcatcaactttactaattacatgccatttcgaatctgatctgcagacgcaaacaaatcagtcgaattctacgatttcctccaagtgaacgcgaactcgagcgacaccaagtgtggttcgagcattgaggagcaagaggcggagagccgggatgacgatcaagccgaagggcaggtgcagttcatagatttcctggaggttggggcttcccatcgccgccggtgatttttatctatatatttaactagggatgcatccaaagcaggttgtaatgctttgtgaaagaggcaggcatgctgcaaatagcaatcgtcgtctaacaccaaacgtacttgtagaggaagcaaaatgcaccgtgcatatgacatattgtaatttattgttgtatacatatatctgtccatatatatccaccgttggggggacatgtgcaaaattaaac

SEQ ID NO: 120568 - DNA, 522 bp, Zea mays
  Clone ID: MRT4577_41441C.1
taaaaaaaaaaaaaaaaaaaaaaaaaaaaaaaaaaaaaaaaaaaaaaaaaaaaaaaaaaaaaaaaaaaaaaaaaaaaaaaaaaaaaaaaaaaaaaaaatttaaaattttaaaaaaaaaaaaaaaaaaaaaaagtttttcctttggccggaccccccttagggggaatttttgaaattttccttaaccttggggggggttgaactttttttttaaggggcccatttcccctttttgggggggtttttaaatttaattggccgggtttttaaaacgtgggatttggaaaaaccttgggtttcccaaatttaatccctttgaaaaaattccctttttcccaatttgggtttttaccaaaaaggccccccccattcccctttccaaaaatttgcccaccttaattggaaaatgacccccccttttacggggcttttaagccggggggttggggggtttcccccaagttggaccttttattttcaagggccttaccccccgtttttttggtttttttcctttttttt

SEQ ID NO: 120569 - DNA, 227 bp, Zea mays
  Clone ID: MRT4577_41442C.1
agaaactgagaataaagtttttataaactgtgacataaactagtatatcagtttataaaaactagttttttttttaaaaaaaaataggtgattccaaacaagccctcattatataagaaaccaggcatggctgcatggctccttcatgtcactttcaccttatcgatcagggtagccactagccagccatctaagtcggtttcttcttcacagtcgtgtcgcaagct

SEQ ID NO: 120570 - DNA, 449 bp, Zea mays
  Clone ID: MRT4577_41443C.1
ggggggcggggggggacccgggaaatcgggggggggaggggggggggaaccagttttctgtgggggggggggaataaaaaatgggggaaaaaaaggggaaagggggttcctggggaaaaaagggttgggctccaagtgaaaaaaaaaaacaacccggaagcaaaaaaggaaaaagccggggggccaaaagagaaacctaaccaacaaaaagggggagggaaaaaccgcccgctttgaaaaaggaaaaaatcgggtgcccccggggaaaaaaaattccccaaaccccgggaaaagggggttattattttggggacaagggggggtttttttttcaccacggaaagggggaaaacttgattggcctcaaccgccgggcccctagaaaatgcagaaaaagggcaacattgttttgccccacaaggaaaaaaatttctttgaagggggagaaa

SEQ ID NO: 120571 - DNA, 478 bp, Zea mays
  Clone ID: MRT4577_41444C.1
ccacggccccccgaccgggaggtctttatgttttaacaaagggacctttacagagcctggaagaggaaaaaaaacctccttattaaacaaaaaccttccaaaccttggccggcctttttacaaacccctttaaaacccctacttttttccctacccctacagggggggggaaaaaaaaaaaagagatccttgggcataaaaaacccaacccctcaaccgggtttaacagggggagcgggtttccctttccttgccgtttggccgccttggttatccaagctcggggggccgggcctttttggagggggagggtaccctcctttttgggggcccgggggctgtttaaacgttgggaccacctcgtccttgcggggcctgggccggacctcccccgagaggctttggggggggagcccccaacctttttgcccctgggaaggggagtccggcccccccagccgggggcccagaaggcaaa

SEQ ID NO: 120572 - DNA, 600 bp, Zea mays
  Clone ID: MRT4577_41445C.1
ccggccggatatgcgtgatagaagggacatgaaaacagcaggacgagatatactactacaagatgaatgctctgagagatatgatcagccgtagggcagatcacgaggatgatgctgatccgcaccacacaaaagccggccagagggcgggcgacgcggcgaagtatcatcctcgcatgcgtcgatcattcgagcgtgtcaccgacgctcagcgatcgggggatcgatccttcagtcaagatcagcggacggctggcgccaccactacccggcggcctcatcgccacatctatgacgtgcgccctctccctattgacgtccaccacccggggtgcctacatctcacagggccgcgcgaaccctgtacagacatatggcgcactttgtgggaggcatagatgcacgtctacctcaaggccctagaggctactggatggatcacctcctggaatacagggtaggctgtctcgtcctcaatatacccacaggcgatgacgccagtggagccttactctggtgtctgcaaacgctcggccactaaacgcctggacaggtggagatagactactgacctatctggcaatgcgtgcacgacgatac

SEQ ID NO: 120573 - DNA, 313 bp, Zea mays
  Clone ID: MRT4577_41446C.1
ccctctccggcgcggccacgggggagcatgtgctgaagaaggcaccgcctgcggggcgatcagggggcgcccaggcacagttgccacacggagctccgcccctcaaagggggggttccgcgggcgcccggggccccccccagcgtcccagcctccccgagcgagagggtggcaagactcctccagcggagccgacgctcgcctagaccgccaagaaggaccgctggcgcgaggttgccgggggggccactcgtcgcccgatgaaggaggacccccgcgcgtgcggacagggatgtgcgctggcaaggagtccc

SEQ ID NO: 120574 - DNA, 279 bp, Zea mays
  Clone ID: MRT4577_41447C.1
tgaggtcatgggcaagattctgtttcagagctatgtcatttggatcatgccgtcgacgctaattctggtgctgtgcgcgctcgaggtggtggagtgggcgaagtgaggtggttgtggtctcgtgttgcgacacaagactgtcgttccttttctctttggtctttttctctctatgtccactgcatcgttggccattcctaccaacctgaactggccacggcggcgtttgtgttttatgcatctgtatcataaggtcatggttgggaaggctctagcatt

SEQ ID NO: 120575 - DNA, 874 bp, Zea mays
  unsure (1)..(874): unsure at all n locations
  Clone ID: MRT4577_41448C.1
gcattccattagactccagtccccagcccgccgccccgtcaccggagttccgcccgccgcccgccgcccgccgcgcccgcattttcctcaccgccagtatgtatccgcctccccactccttctgcagtacggaccctaacgccgccatgtccgacactgaacacgacatggcggtactttttacaaaccacaatcgtgttctcaaggtggctcgggacgccaacccgcaccctgacgctctgggacgcctccagcaggtgctgctgggcgccgtgctgcgttgtctctctgatgacgcaggttcgttcagaaggaggatggacgacttccttgtcaaattcagcaacctcaccaggaagatggacgacatcagcgcgcgcctccaggccacgcgcagccctaaagcccgccgccgcggcatctccccctcccccgctgcccagctcgccggcctttatggaaatgatctcttccgcgcgctgatgggcgtgcagctgcccgtggccacacctgcggaggtctgcctggaggtcgccctcgctgcacagcgcctcatcgtacatgaccagctcgactttttcatcaacctctgtgagaagactgtcttcggggccgacactacgacgatcagggagtacaacatcatggccttcaaggaccacaggaaaacattggagaagttcgttcaagagcacattgaccttgccgacgccgctgccacttcacatccatctacaggncgagcagagtaaaagctcgattgccattattatcctagctagctgcaaagacgaanngagggggtgttgatgtatcctatttggctcccttatgtagttttctgcatcatcgntgtcgagccaagacaactact

SEQ ID NO: 120576 - DNA, 1133 bp, Zea mays
  Clone ID: MRT4577_41449C.1
ggcgcacggttctgcctctgcccgcgacaccttgccccgcttccgtcaataacgcgccttgcacaaccgccccatccgcagccctcccacccccatgaccccgtccgcccagatctggatcccgcccccgtcatcggcgcctcccccccgcgcgtccgagacccggatccgccgcttccccgtcaagctccccagtctccccctccctgctcggtccatatggcggcttgacggcgaatcggatcttcatcggcctcctctccctgcgcccctctggtcgccatggagctcgcctagaggttttctcaaactcctcgccgccggttttctcaaattgtcaatttgagaaaacctctagacccggatccgccgcttcctcgaactcctcgccgccggctctcctcagctccgccgactcgcttcgctgtcctcctcgccccaggccccagcctcctcctgatcccagattcgcctcgccggccccaggcgcccgccacgagcgccgtcaagcgaagccgttcttccctggcgtgcgccgctggcgtagctgccaggctccttccgccggagcacgtcgcggccagctggtcccgcgctcgtcctccaccgtcgtcgcggcggactttgtccccctcccggaagcacatatccgcacggtctcggctgcatttctccacttgctggtaaggaagctcgctccgatggattactccgagggttagttccgccctggtcttccgtttctacgctgccagcaatcaagttccaacaagtcgtcgatggactgcgatttgttcgctgcgtggtggagcagcagcaccagattagtctccaggatttttcgaggggtcagctgatgccccgggcccgtcgccagcgaggccagccatgccgcttcaccagaagcaagcggggctcgctgctagcaagctgggccgtggggacctcgaagaaacacagggcttttgtcgcaagcgatgagcagtggtacaacaagatttttgatccgtcaagcgacttcatcttgacatgggaccgcattttcctcttctcctgcttcgtcgcgctatttatagaccccctctatttctatgtgcccaagatcagctacggcagcccccaattctgtatcg

SEQ ID NO: 120577 - DNA, 2544 bp, Zea mays
  Clone ID: MRT4577_4144C.1
ccggccgggcttcccgttccccaattcgaaatcgagtcgggtcggtcttgccgtgcgtgcgtggctgcgcgaaccagcccacgctcccactccccgcccgccaccgccgggtccctctagggttttgccgcgatgtcgctccggccgagcgagcgggagcagatgcggaagggcaactacaagcagacggtggacgccgaggagagccgccgccgccgcgagggccagatggtcgacatccgcaaggccaagcgagaggaaagcctccagaagaagcgccgcgatgggttccccgccgccggcgccgtgccgccgatgggccactccaccgcactccagcagaagctcgatggcttgccggcgatggtacaggccgttcactccaacgaccccactgtgcagcttgaggccaccacgcagttcaggaagctgctctccatagagcgtagtcccccaattgaagaggtgatcagcacaggagtcgtgccccgattcattgagttccttacacgtgaggaccatccacgactccagtttgaggctgcatgggcgctcaccaacattgcatcaggcacatcagagaacactaaggtggtggttgagagtggtgctgtgcccatctttgttaagctcctcaactccaatagcgaggatgttcgtgaacaggctgtatgggctttaggtaatgttgctggtgactccccaaagtgccgtgatctggtacttggtcatggtgggctataccctttgctgcagcagcttaatgagcatgctaagctttcgatgcttaggaatgccacatggacactatcaaacttctgccgtgggaagccacaaccgaactttgatcaggtcaaaccagcattgccagcacttcagcaacttatccactctcaggatgaggaggtcctaactgatgcctgttgggctctatcatacctatctgatgggactaatgacaaaatccaagctgttattgaatctggcgtgttccctcgccttgtggaacttctgatgcatccttcagcctctgtactgattccagctctgcgcacggtgggtaacatcgtaactggggacgacatgcagactcagtgtgtcattgacaatcaagcacttccatgccttttgaacctactgaccaccaaccacaagaaaagcatcaagaaagaagcatgctggacaatctcaaacatcacagctggtaacaaggagcagattcaggctgtgatcaatgcaaatataattgcacctctggtgcaactcctgcaaactgctgaatttgacatcaagaaagaagcagcctgggcaatttcaaatgccacttctggtggcacacatgatcagatcaagtaccttgttgcccagggttgcattaagccactctgtgatctgcttgtttgcccggatcccagaatcgtaacagtttgcttggagggtcttgagaacatcctgaaagttggcgaggcagagaaaaatcttggtgcaggcgatgtcaatgtttacgcacagatgattgatgatgctgagggcctggacaagattgagaacctgcagagccatgacaacaccgagatatatgagaaggctgtgaagatgctggaatcctactggctggaggaggaagatgatgccatgccctcaggcgacaatccccagaatggcttcaactttgggaaccagccctctgttccatcaggtggattcaactttggctgaagatgcccatttggaatggcggctgtgccattgtgccttggcctagtgctctgggctagtcagaggtgtggggtagcgtcgtcctccaagtcatggttgagtcccattggtctggtctcagggagttgtcatgtcagtcccagtcagcagggtcagtccttgggctgcattaccagtggtgcagcttggtcggtggtcagtcttgaaggtcagccggttggatcatttgggctcttgctcccaccagcaccacctctggtgggaggcatcaggcatggagtcgcgggtgttgtcgggagttgggttttgcctcctatacagcataaatgaattatattgttttacctgttggtagaaagaaccttgaaagatagggaacgtgtcgttttttgtcaaagcggttcctgtgctgtataacatgttgcatgagtattggcgcaacttataagacaatgtcaaatgggtttttgggagtcccattctggtttcttgagtcttcttcattggtgtctattgtgtaacatgtacacaggtttgtggttcgtcacgtcttgtcttgtcttgtctgttgtatttgccaccgttgtctggaagttgttgcgtgcttatctagaacagcagtataccagggttaattctctgacatttatggttcctaacttggtgggatcagattaaaaagttgtatggccatgacggtatcaaagaaataatgtcgtgcatttttgctccgtttaaaacaaaaaaaaaaaaaaaaaaagagcgcgttcgcggaatccgagcctctacgcacgcgtgcgtgtgcagtcaaagctaatgcagagt

SEQ ID NO: 120578 - DNA, 461 bp, Zea mays
  Clone ID: MRT4577_41450C.1
cccacaccccccgctggcggatccccccgccgcctgcccgcccgcgcgccaagaattccattcacctccccccacgctgccaggagctctgcccggcccccgggtgccgaacgaccaccaggttcacccgtgtctgccgccggcggatgcccccctcccccggtggctaggagctccattcgtgctgccgtcgtgtgctgctgggcgtctcccccaatggtgttacagcatgggcattagagcactcaatgacggacggggagctactctggcgcgcatcgttcaccccggcagtacctattctgacgcgtatggtaggtggccatcatgttcctcacgcaaggtcaggtgcaactcgggaggtgcctcactactgcatctacgtccacacgctatcggccaatttcaccttcaaatccatcttcccccaacgccaaatacccagtaaggctaggccacat

SEQ ID NO: 120579 - DNA, 503 bp, Zea mays
  Clone ID: MRT4577_41451C.1
ataaaaaggcggggagaacggggctctttctattaagaagaggaaaaggtgcgtacaagccccaattacatatacaaaaatgctccttacgggtgaccacaaacgcgcgtataataaacaaatctcggatggcgaggcttacggagaccggcaagggtataacccaaatatgaaaggcccttggctcctggtagttcccaagggatttttaataataagattggctcacgatttgacaaaggaatgggggtattttcattaaacacacatttattgcggagggtccaaatcttcctggctcccaaaatgaagagagaatccagcccttttttgaccattccatgcactgcctgtgcagccaccttccaccactccaagaaggatgtgagaccaccctgtggagccagggcatgtaacccaaatttccttaaaagcatataccagaaaattcttgtgaaaatgcaggaaataaggagggggttcagggtttcatactcttggtc

SEQ ID NO: 120580 - DNA, 464 bp, Zea mays
  Clone ID: MRT4577_41452C.1
taaatctttaataaaactctataaattaacctccactaaatctcaaaaaaaaaaaaacttttacatacctaccgcccgtacacacaattttacataccgcaaacaccttacctaaacacccccattattttaattattactaagctgacacccacctttcaaccctcaccactttattccctacacacaaataaccactaccgtcacaccgtccccccaacaacaaaacttactctcacacttacccctccttcctttttgcactttattatttaccactataattcctttaccgatcccacctttccaaaccaaacctaaggggtttttttaaatccattccggccctttaattccactttttaaactttcccccccccctttttccgtttcccccccccaacccccccttctttccccccccctaaaaacccttgttccccccccccccccccaaacttttt

SEQ ID NO: 120581 - DNA, 350 bp, Zea mays
  Clone ID: MRT4577_41453C.1
gagctgccagatgggcaggttatcaccattggcaatgagcgcctccgctgccctgtcgaccctcttccagccttcctttattggcatggagtccgctggaattcatgagactacctacaattccatcctgaagtgtgacattgacatccgtaaggacttatatgccaacaatgtcctctctgggggcaccaccatgtaccctggcattgctgacaggatgcagaaggagatcacagccctggcccccagcaccatgaagatcaagattattgctcccccagagcggaagtactcagtctggatcgggggctctatcctggcctctctctccaccttccagcagatgtgga

SEQ ID NO: 120582 - DNA, 1746 bp, Zea mays
  Clone ID: MRT4577_41454C.1
tgaatttgtgctagctagccaacagacattaccatcgttcaccccgccaggttcctacaccctcacgatgaagttgctgggggacagcaacgaggaactgacctgcatctctttcgggttcagcatcgggtttgttgcgccgaatcccgtcatctgaacccagtatcgaatttgtcatggatgtactttacatgaaccttgtagtgcaacattctccagtaagactcggaactcccaggctgggcgcctggaattggttaattcggtcttctcagccttaccaatgttcttcatgtgcacgctcaagatttctaaaaccatcattaaggaaattggtactttcaaaaagcactgcctgtggagaggaaatgacatcaactccaagaggccacctttgattgcttggaattcggtcactcaaaggaaagtgaatggtggcttgggtgttcttcgtttagaaacgcagaacgaggctctcctaattaaatttttgcataaattcttcaaccacagcgacttaccttgggtacatctgatctggcacaattactatcttactcgaggtcttcctggcaatagaagcgttggatctttctggtggaagaacattgtaaaacttccgccaaacttcaaaggactggctacccccgtcattggcaatggcagatcaatttcattctgggatgatcagtggagtcagggcatcccgaggcatattttcccagagctcttctcctttgccaagaactcaaaaatgactatcaaagaggtcaaggatcaagagcagtttcatgatctttttcatttacctgtctctgatcaagcgtttgatcaatttctggtactcaaggggtcttgggagcaaattattcttaataatgttcatgaccgctggaagtacatttggggatcggacaaattctcgtcccaaaaagcttacagatctctcatgggccagatgcagactcatcctatctacaaactagtttggaaaagtaagtgtcagcctaagcatagagtcttctattggctgtggctcaagaacaggctaaacaccagaaatatgctgagaaggagaaacatggagatagattcctattcttgcgaaaactgcctttggcaaagagaggagaccctttatcatcttttcctcagatgcaacttcgcgaaagcctgctggaactcaattggcattaccccacccagaatttctaatcctgaagaggcatctgtgaacctcaaacaccagctcaacgttcccttctctatggagatcattattcttatgacttggagcatctggaaaagccgaaacgagtggctgttttcaaacaaagatccctcggtgctccgctgcactcaggaatttagtagagaattgcgactaatcattcacagagcacggggagaatttgacacctcaatcccgaattggctaaatttgtggcaaatatagaaatagctcttcttttttcttctttttctcttctttttattgattgtaaaaggaacagggcctaacctttaattttcgctttctaataaaatgcgcagtaggggtttccccctcctgatccttcaaaaaatcacctacagcccagctccagtctcatctgcgctgatactgttcgcacatagcttctgcaggtcaatgtagccaatgatcgtgtcctcgaacacgacatccccgatcgtcctcaaaggtcgaccccgacagaaccgtgtttctgaagatcgtcctcaaag

SEQ ID NO: 120583 - DNA, 213 bp, Zea mays
  unsure (1)..(213): unsure at all n locations
  Clone ID: MRT4577_41455C.1
ccggccaagccccgcggagcaaccatggcggcggcctcccgtcgagcaacggtagcggcctcccgtcgagcaaaggttggttgctcaaattaatgttgctcatcgtcttcttgtttataaataagcacaaattaatgttgctcatgttcttctgctcgcctctgaagctgnaaggaagtgatgtccgatgggtattacccaagcccaatgcgg

SEQ ID NO: 120584 - DNA, 806 bp, Zea mays
  Clone ID: MRT4577_41456C.1
ggacccccgagttcggccgggaaaaaaaaaaactacctcaagtcaccctctgggggacccagcactccacatccagcaatccgccgccctattcgcgtctttcctttttctttcactctcactccccgcgcaacgctctctccgtgccctctgtgacggcactcgcttcaggcgtcatcgtcatcgtcgcgcgccatcgtggacccttgattgggctacacgatgtcctccaaccccccgcaggtcgcatcgtcttcaaaagcctccgcgtcctctggccccgcctcgcccgcgcagacccagccggccaccctcaacaccgtcaacttctttggccagcagcggggtagctccggcgcgggtgtctcgagtcgcgcatcgcccacgccacgcagcaaccagccggcgaagaagcagcacaagggctcgaagcgcttccgggccaccgacgaggatgccatggtcgagtcgcacgccatgcgccccttcaacaatcgcaagggccagacgtccatcacccacctcatgaactttagccttccgccacggccgcagaaccaccattcgcacggctacggccggaacagccggcgcaacccgacctggggtctgggttccggctaccacgctgtcgacaaggcgcggtatgtgcacgccaactaccgcttcatcgtcgacccgcgaggcgactatcgcgcccagagcgtcgacgccgacatccatctggactggaataatgtcctgcagattttggcgtccgagctctcccaggaggcgtcctgtccgatatgcctcgggacgcccgt

SEQ ID NO: 120585 - DNA, 369 bp, Zea mays
  Clone ID: MRT4577_41457C.1
aaaaaaaaaaaaaaaaaaaaaaataaaaaaaaaaaaaaaaaaaaaaaaaaataacaaaaaaggggagggagtaataaataatggcggggacataaaaaaacaaaagctcggccactcttggggccccatttttacttgccccttccttactgccctatcctatttcctatggtttcacctaaatttatttccctggtcttctttctccaccctcttttttaaaacaacctccctgttacccccctgattttccttattttatttcccttttttaccatccccttttttcaaaaaggggccctccccaaaggcccttcccaaaaggtccttcccatcaattgccaatgctaaccccccttttggcccccc

SEQ ID NO: 120586 - DNA, 322 bp, Zea mays
  Clone ID: MRT4577_41458C.1
cccacgcttccgcccacgcgtccgggcgttttgtttgtttgggatggaaaggccgaccgggcggggtttgttttccctatgcttaggtattttccggcctttttttatcaactctggtggccaagcccaaggggaaaatctgggctttttttccatatggtattattaaacatggtccattcggcaaaaaaaaaaaaaaaaaaaaaaaaaaaaaaaaaaaaaaaaaaaaaaaaaaaaaataaaataaagggggggccgttttagaggtcccaagtttccgtccccgggcttgcgacggattagtttttttttggggccccct

SEQ ID NO: 120587 - DNA, 390 bp, Zea mays
  Clone ID: MRT4577_41459C.1
gcagggcgctctgggggggaggaccagatctttttttacaagaaattcattcgtcaaagcaagctactcaggtagatgacagcacaatggccatcgatgaaccaagcggtgtcaacaatgaaccttaaagctgaactaaattgcaaggccaagcagcttgtgtaccacacgccttagctgcgaccatgaagagttgctgggattctgctaagcaacttcctgcttgttcgggacggtccagaaaacacaagggaattcgtaatacccccttgccatttcaaatttgacttggttacacctatctgcgacaacgttaaggcaaagagatcccatgccactagtgaagttcccaggtgtccacctgggattgcttgccgttgagagagacca

SEQ ID NO: 120588 - DNA, 286 bp, Zea mays
  unsure (1)..(286): unsure at all n locations
  Clone ID: MRT4577_4145C.1
cgtgtctctccctcgtcggtcggtctatgtctcgggtcggtcgtggtagcggatcaatgctggtctgtgtgataccgctcttttctgcggctcgctgtgcacggaaaccactccctcacaacgccttcagacctacggcgaggtactcgagtccaagatcatnctcgatcgggagacgcagaggtcccgcggcttctgcttcgtcaccttcttcacggaggaggcgatgcggaacgccatctatggcatgaacagcaatgagctggacgggcgcaacatcaccgtc

SEQ ID NO: 120589 - DNA, 208 bp, Zea mays
  Clone ID: MRT4577_41460C.1
ggcagaggcgacgatcggacccgggtcgtaagcggtaagcccaccgagtcaacagcaggctgcagatccccccaccccccacgcaactccatctgctctgcgcctgcacctgcaccgatagagcaccgaacggcagcttcttggaggctggtggcaaggaggtcgcgatcggggtggtgatctccgcgaataccaccctgagggagga

SEQ ID NO: 120590 - DNA, 423 bp, Zea mays
  unsure (1)..(423): unsure at all n locations
  Clone ID: MRT4577_41461C.1
aagaaattctaaagttaagggcgtgaagcaatctgcagattctgcctgtgttgtgattccaacagtggtgttccagatctcaaagcaaccactgcatgagttccgtggtcactctggtgatgtactgaatctgtcatggtctaacaacaagcatctactgtcagcatcaacagacaaaactgttcgcttgtgggaaattggatctgcaaactgcatcactgtttttccgcacagcaactttgtgacttgtgtccagttcaatccaaccaatgagaatcaattcatcagtggatccatagatggcaaaatccgngtgtgggatattcccagatgcagngtcattgattgggnggatattanagacataataacagnggntggctatnnacctganggaaagggagcanngnnngnaaccattac

SEQ ID NO: 120591 - DNA, 235 bp, Zea mays
  Clone ID: MRT4577_41462C.1
cggggctgcgaagaacacgcgcacacggggcgcgtcgacggcgttcacaatcgccggtgcccccgcacaggaacataccgcggacaaggacgaggcgtacatcaagcagacggaacctaggcttgcaaccaaacaaacatcacctgaggaggactacaggcccgacccacgcgagagcccacggggagcgacctataggtgcacccaacggaaccgaacgggacggcggggggcc

SEQ ID NO: 120592 - DNA, 276 bp, Zea mays
  Clone ID: MRT4577_41463C.1
aagaaatgaaccatcttttttctgggaagccacaaacatcacacaagggggctctattattgaactacgagcgatcagaaatctaacagagggcaccaccaaacatgggttgctggttgagcaaacaccaaaattaaacccctgaaggatcaaccaaaaccacacccccaacaaattgggaaacataactgcccaaacaaaacccccccctaaaaccaattcctccccccccctaatttctctcccggatagaaaatcacgcctttttttactttt

SEQ ID NO: 120593 - DNA, 2178 bp, Zea mays
  Clone ID: MRT4577_41464C.1
cgtaccggtccgagattcacggacagacccacgcgtcgccccacgcgtccgcccacgcgtccggttctgcgtcagcacattcctgaatctgaagccaaggataagttcatatctaaatggaataatgtggctcataacagaaatattacttctggcttgaactcgtatggtttatagtgcttatgactcggtttgtactgttgcacgtgctgccgataaatgctgctgccctgagccgcagaccaactaatcgccaggttcctgcttagaagattcaaatggcagcacgttgcacctatcaagtctcaagatatttgacggtggtgagcagatgctgcatcaacttctcctcacaaactttacgggtgtaacaggtccagtccagtttgattcagagcacaatttggtacgcccagcgtatgatatccttaatgttgttggttctggctcccgcttgattggccggtggtctaactattctgggctttccgtggctgctcctgaaactttgtatcagatgccacgaaatacatctacaagtgcccagcagctgcatgatgtggtatggcctggcgattccactacgaagcctaagggctgggtattcccaaacactggccttcctctgagagttggggttccaattaaagcaagctttaaggaattagtgtcaggcagaggagataacatgagtggttactgcatcgagatattcaacgcagcaattaaacttcttccttacccagttccttgccaatttataactattggtgatggcacaaaaaaccctagctatattgacataattagaatggttgctgccaattcacttgatgcagctgtaggcgactttgctatagtgagaaatggcacacagcttgcagaatacacacagccttatattgagtcagggcttgtgatagtagcgccggtgaaacatgtaacttcaagtgcgtgggctttccttgaacctttcacattggagatgtggtgtgtcacagttgctctttttattttggtgggcatagtagtgtggcttcttgaacatcgtactaatgaggaatttcgagggtctccaaggcgacaagtcataacaatgttatggtttagcttctcaacaatgttcttttcacacagagagaacactgtaagcacacttgggcggttcgtgctgataatatggttgttcgttgtgctgatcatcacttcaagttacactgctagcttgacgtcaatcctcacagtccaacagctctcaactggaattacagggattgatagtttggtttcaagttctttacctattggataccaggctggaaaatttaccaaaagatacctgactgaaaacttcaatgttcccctctctcgactggtaccactgaattcgatccaggaatatgctgatgcccttaaccgcggaccaaaaaatggcggtgttgctgcaattgttgatgagaagccatacattgatatcttcctgtcaaactactgcagcttcagaatagtgggggaggaattcacaaaggaagggtggggctttgcattccagagagactcccccctcgctgcggatttatcgacggcaatccttcaactttcagagagtgggcaacttcagaggatccacgacgagtggttctcacggtctagttgctccgcagatgacagcgaagtgggagcaaccaggcttggcctcggaagcttttggggccttttccttgtgtgtgccctgatatgcctcttcgctctgctggtgttcttcatacgagtctgccggcagtataaccagtactccagttctgaagctgccggcgagcccagcacagctgctgcggatcctgtcctaagacagcggcgaccatcacgccttggcagcttcaaagatctgatccagttcgtcgacaagaaggaggaggagattaagaaaacgatgaaacgaagatcaggcgagaaagatagccaagctgcaggattctcatacgctcagtcagtggcttcagcataggacattgctccaaccatattgaattaggttatctccaaaagcataggacattgctccaaccatattgtaaatagtagtggtgtactgtgatcagaacgaagatcagggttctcatacgctgtttgtatttgacaactgttttcggtgattggtcattgctccaagctgcg

SEQ ID NO: 120594 - DNA, 684 bp, Zea mays
  Clone ID: MRT4577_41465C.1
atggccagaagtatggggttcccgaagcttgaagctggcctctgcgctatgacaaaggacgatcttgcggatagtcttgcatataacagtctgaagggtttaatacgtagcaacgccttaagggcgcaaaagaatgctgaagacgagagttgcaccattgctctcaacaaccttcgaacggaggttatcaagctaaggaacgaagctttggaaaaagacaaaattctacttacattggtggataaagtaaaagaagatgaagctaacttcaaaacccaatctgaatcccaaaaaattgagattgaagaccttcggaagcaactggccgaagctaaagagaaatgcgcagtcgcagaagctaaacgagaaattagcgaaaactggacaaatcacttagagaaaaacgttgaagaacttcgcacatccaaggaaagatgctttgaaaaatctatggactgtgtgaagaaaataaaaaccagttttgctaatgtgggcgcctattcttccgaagaaaacttcatacaaggcgaccccgaaggcgttattgaatggttaagtggggaggtcgaaccctttgaagaaattctaagtgaccgcggggatgtgtgtgcgttctctggtgcgagggtagttgcagctattttggaaaagtcaggttgtgaacatgttaaaaccttggcttag

SEQ ID NO: 120595 - DNA, 2629 bp, Zea mays
  Clone ID: MRT4577_41466C.1
cattgataccctcgaggccggccgggaaagacggtaacgcccacaattcccacttcccagccgcgccgccgccgccgtgaacgagatggcggcagcccttttgctccgcagtctccgcccatcggtgagccgggcacatatccaccttctttcccatgcctcctccccgacggcgctggggtctttccttttaccccgcctctactcctctgcggcagcgtcaaccgccgcctctcctgttttcacgcccggcggcgtcatggacccatcccgcatccgcaacgtagcggtgatagcccacgtcgaccatgggaagacgacgctcatggaccggctccttcgacagtgcggggccgatatcccccacgagcgcgccatggattccatcagccttgagcgcgagcgcggcattaccattgcctccaaggtcacttctgtctcttggaaggaaaatgaactcaacatggtcgatacacctggccacgctgattttggtggtgaggttgaacgagttgttggaatggtggaaggagctgtcttggttgttgatgctggagagggacctttagcacaaactaaatttgtgctttcaaaagctttgaagtatggcttgcgtccaattcttctcctcaacaaggttgataggccttcagtttctgaagaaacctgcgatgaagtagagagcttggtttttgatctttttgcaaatcttggtgctacagaagaacagttagatttcccagttctttatgcatccgctaaagagggttgggcttccttaactttcactaagagcccccctgataatgcaaagaatatgtcttcactgctcgattccattgtacgacatgttccttcaccaaaagctgatcttgaggctccattccaaatgttggtttccatgatggaacgtgatttttatctaggacgaatactcactgggagagtaaggtccggagttgtccgtgttggtgacaaagtccatggtcttcgcagtgcagatgatggagttcataaaattgaggatggaaaggttgtcaaactcatgaaaaagaaaggcacaaatatggtaacagtagaggctgcaggggctggtgatataatttcaatggcaggattggctgctccagcaattggacatactgtggcaaattcagagatattgagtgctctgcctacaattgagttggatcctcccacaatatctatgacgtttggcgtgaatgattcaccgttggctggccgggatggcactcatctaactggagcaaaaattggtaaccgcctgatggcagaggcagaaacgaatttggctattaatgttctccctggaccattatcagaatcttatgaagttcaaggaagaggagagcttcagttaggaatattaattgaaaatatgcggcgtgagggatttgagctttcagtttcacctccaaaagtgatgtataaaacagagcgtggtgaaaggttggagcctattgaagaagtgactgttgaggttggtgaagagcatgtgggattcgtcttggaaaccattactcacaggaagggtgaagtagttgacatgggcccggttcctggcacaactggaagaactcgaatcttcatgacctgtccatctaggggtttggtgggtgttaaaggaattttcagcagctttacacggggaactggatttatgcaccgtgcttttcaggcatatgctaaatacagaggtccactgggcagtgtcagaaaaggagttctgatatctgttggcaagggacttatcacttcacatgcccttatgagtttagaagctcgtgggatcctctttgtatcccctggaatggaggcatatgaagggatgatagttggtgagcactcacgtgacagtgatcttgaggtgaatcctgtgagaactaaagaacttacaaatatccgagcccctggaaaggatgaaaatgtccgtttgtctccaccccgattgatgagtttggaagaggcaattggatatgttgctgcagatgagcttattgaggttactcccaaggtcgtacgtcttcgaaagaagtacttggattccactaagcgtaagatgatgaaaaacaagcctatgaattagaactccagagacaacaaaattacatcaagcactgccagcactactatataagtttatcatgcaagactcttgcagcaagagtgttgctgtctcttgcagcaagagacagcatttatgtataggttggtgttcaatgttgcaacctgagctctttaccagcagcttcacccaggttttacgtgcacacaggattggctgacagaataagcccaccgtagcagctactggaggtaggatcctcgttggttatatctatttagacttttttatggtgaaatttcagacacccacaggttctttgaaggttgtattattctttggaagttcaagaaatgcaggccaatccccataggtattttgtttgaaccggcttctttgttgccaattttatgcccatgtgttatttctgattaagtgcaagaaaaaacaaatgaaattggcctccttgctctagggcaattttaaaaaaaaaaaaaaaaaaaaccaaaaaaaaaaaaaaaaaaaaaaaaaaaaaaaggaaaa

SEQ ID NO: 120596 - DNA, 1720 bp, Zea mays
  Clone ID: MRT4577_41467C.1
caataatactgaattatttagtctgcaacatgtaaagtggttgctatttttagatattgagtgctctgcctacaattgagttggatcctcccacaatatctatgacgtttggcgtgaatgattcaccgttggctggccgggatggcactcatgacgggttcatccatcattttcttggaatggatccattccgcagaatcgcctagctgttggcttgcgggagcactgtgctgctgtgcagaatgccatgagttcagctcgtgctgcaaaccaaacagctaagggaggttcagtttctggttccgatgcgctataaaggaacccaaaaaacaactgctgatacggctttactttcaataattttgcagctaactggagcaaaaattggtaaccgcctgatggcagaggcagaaacgaatttggctattaatgttctccctggaccattatcagaatcttatgaagttcaaggaagaggagagcttcagttaggaatattaattgaaaatatgcggcgtgagggatttgaagctttagtttcaccttcaaaaagtgatgtataaaacagagtgagttgaaagtgtttagcctattgaagaagtgactgttgaggttggtgaagagcatgtgggattcgtcttggaaaccattactcacaggaagggtgaagtagttgacatgggcccggttcctggcacaactggaagaactcgaatcttcatgacctgtccatctaggggtttggtgggtgtcaaaggaattttcagcagctttacacggggaactggatttatgcaccgtgcttttcaggcatatgctaaatacagaggtccactgggcagtgtcagaaaaggagttctgatatctgttggtaagggacttatcacttcacatgcccttatgagtttagaagctcgtgggatcctctttgtatcccctggaatggaggcatatgaagggatgatagttggtgagcactcacgtgacagtgatcttgaggtgaatcctgtgagaactaaagaacttacaaatatccgagcccctggaaaggatgaaaatgtccgtttgtctccaccccgattgatgagtttggaagaggcaattggatatgttgctgcagatgagcttattgaggttactcccaaggtcgtacgtcttcgaaagaagtacttggattccactaagcgtaagatgatgaaaaacaagcctatgaattagaactccagagacaacaaaattacatcaagcactgccagcacaggtgttcaatgttgcatgatatacaagtttatcatgcaagactcttgcagcaagagtgttgctgtctcttgcagcaagagacagcatttatgtataggttggtgttcaatgttgcaacctgagctctttaccagcagcttcacccaggttttacgtgcacacaggattggctgacagaataagcccaccgtagcagctactggaggtaggatcctcgttggttatatctatttagactttttacggtgaaatttcagacacccacaggttctttgaaggttgtattattctttggaagttcaagaaatgcatgccaatccccgtaggtattttgtttgaaccggcttctttgttgacaattttatgaccatgtgttattactgattaagtgcaagaaaaaacaaatgaaattggcctccttgctctaggacaaaaaaagacaaaagaaaacaaaaacaaa

SEQ ID NO: 120597 - DNA, 827 bp, Zea mays
  Clone ID: MRT4577_41468C.1
atcctgtgagcctgtgactgttgtgagctgctgaatccaggatgggcagatatttgcgccaccgtggctataaagcctcttttgaccaaacccttctccctctcacaaaaccctagctttccctcccctgttttgcggcgcgccacgaactcgcgacgctctcgagagatccatggatcggcgcaatggcggctgagggtcgaatccgacgaggaggcggaagaggtggggatggaggtggaagagagcttcgacgcgggggtggaagacgagcaggcggcggcggaggtgattggaagcgaaaagaccagcgccgactactacttcgactcctactcccacttcggtattcatgaatcagtatgcctatgcagtggagatgccaattatttgcatgtgctgactgcaggaaatgctaaaagatgtcgttcggacaaaaacatatcaaaatgttatcacccagagtagctttcttatcaagaacaaagtagtccttgatgttggtgctggaactggaattctttctcttttctgtgcaaaagcaggagctaaacatgtctatgcgattgaatgttcccagatggcagacatggcacaggaaattgtaaaatcaaatggatattcagatgtcataactgtaataaaagggaaagtggaagaaatagaacttccagtcccaaaagtagatgtcatcatctcagagtgggatgggttatttcctcctgttcgagaatatgttgaacactgtcctatatgcacgtgataaatggcttgctgattgggtggtgtggtcctgccagataggacttctttgcgtcttactgcga

SEQ ID NO: 120598 - DNA, 414 bp, Zea mays
  Clone ID: MRT4577_41469C.1
gtctttcttttttttttttttttttaacattgcggtttttgttctgttgtgttttgtgctttttttgtcttgtcgctcttgtttttttttctggccaaaaaaaccaaggggggcgtgcaaattgggggaaacccgggtcccttccttaatccctgggtttggcaacctttgcctgggaattggaatgggggaaaacccctgcccccttttttgcccctgggttttaatttaggaaaacttaccggccccccccaccgccggtttgggtggggactgtttttttttttttcaagccgggtttttacctttttaaaactttccccttttttggggggggggcggccacaactgttttgttctggggctttttcccaaaattattcaaattttgggcttttggaatcggcccccccc

SEQ ID NO: 120599 - DNA, 2361 bp, Zea mays
  Clone ID: MRT4577_4146C.1
tttttaaaacccttttttttttttttttttttttttttttttttttttttttatcgcgaaatcgaacctagtcgcgagcgccgcccttttttttttttttttttacagatacatagatagctagctatatagatataaaacttaacataggacagtgctgccgtatttcaccaagaagagaaatacaatacaacgttgaagtgaccgccttggtctaaattgctctgttacatactcccgccgtttcaatcaaatatatacaagaaaatttcagcatttattatacataataactatcatggagatgttgctactgttttttgttgctactgttttttttaagtcaaactaaaaaaaagaaacatacgtagaaccaaaacgatacacggagctagcactccggcctacaacgaacacctcagggaactaatcaatgacaaacatgtacagaaacctcatagcgcttgaaacccaactccatctcagaggttaatatccacattccccagaggttagcgatttacagcaaacgttggcaggcatttgtcataatacacatttacaatgaacttaataaaactgtcattgctgttaccagccattcacagcacaaacaacattcccaccttgtcagaacggactcaagggagccgtaaaataatgcctagtcctttcaagcagtcatctataactgtcagccttgtacacgtgctagcatcattcatcatctgacaggcataccacatctatctcggaaccaccatttgtagcagaagcaatcgccccaggcgaattactgctggcaggagcaatcaccctaggtgaatcactgatcaacccaagactggttgtagttgtagcaggagtcgttcccctaggcacatcactgctcaacccaagactggctgtatttgtagcaggagccgtacccctaggcacatcactgctcaacccaagactggccgtatttgtatcaggagctgccctaggggcatcactgctcaacccaagactggctgtatccttagcaggagctgtagacgcatcattcaacccaagattagctgtaagccatgcatccagcgatagggaaccagaatctggcagctgcatgcctgtagggatggaaggcattgttgcattcgagcctttcggtgccccggcttgtaaagttgggttaggagttggtggcacacgttgtgccaggtgactaggatgcaagcttgagggtaatgaggttgaagggagaacagagtgtaaacttgacaaggctgaggctgctaggggtcccacatgtatatctgatggggatgtgcttgccgccagcactggttgtgtccttgaggacattgcatccacactaattgctggcgattgctgctgatttccaggtgccatggaatgtgcccgtggcgatctgaactgaagatgaggagcaggtgagcgaggagccaattcactctgaactccatagctcccacgttgaggtggcatatgactaagagtcgttgacgttgctctgaaaagattgcctagttccaggttgggaggttggaccacttgcaaagacggacgggagaactgcgacaatgacaataatggttggtccacctgtggagcttgaaccctaggcctcggcactggtggtcgacaagctgatgacagggcaattgatgatgtggaggacaccacttgggtagcctgaggtgtgtgacgaactggaggggtatggccttttgctgcaccttgtgctgcagacagtgatatgaatttggcccgaaaatcctcagccagcgattggttgcgctgaactttctcataaaaatcaccaagtgccttcttttgctgaagatgagtggaatcatgttctttaattaacaaatcatattttctctttaccttctctagttcttggctacatgcggtctgaagttgggttttcttcatttcatggactttattgagtgtgtccatgtgtaatcgtaatttgtgcaactcatttttcagtggttcagaatcaataggtgcgtgattaaacatcattgacgtcactggaaagagttctgcagactgtgcacaaccaggtgccgcatctgtctgataatttggttgactctgatcaagctgtgctctttcaagcagattattggaaacagagattaattgttgcctctcagattgcaagggttgagttgatgctgaactagacaaatctgcttgttccgactcatcctgcaaaggttgtgctgacactaaactctgttgtgcccggccggcgttctatatgctcccggccggcctcgagcgagaaaccagcaatgttgcctgcctggatggagcagtcaaagctggtttgtcaaa

SEQ ID NO: 120600 - DNA, 451 bp, Zea mays
  unsure (1)..(451): unsure at all n locations
  Clone ID: MRT4577_41470C.1
ggtacaagctttttttttttttttttttttttttttatgtttttttttttttttctatttcttttggttttcctttctccctactgtctgctccaacaatttcttccattccaccaactatctacactgaaccctgctgcttatggggggggggcgctnttaccattcagccagcttgctactgcctactctcatcaacaacaacttcttccattcaaccaattggccgcactggaccccgctgcttatttgctgctgccaatatttctaccatttatccagctagctgcntctggccgtgcttccttcttgacacatcagcagttgccgcctttctactctcagtttgcgggtaaccccggatccctcttacgtctgcttcacttggtgccctttgtcccacttggtttggcataccccgccgcctcctacctgcagcacgtctttggtg

SEQ ID NO: 120601 - DNA, 1751 bp, Zea mays
  Clone ID: MRT4577_41471C.1
ccggccggggtagggaaagtagcgggaggctaagttgtgagcctgtgactgttgtgagctgctgaatccaggatgggcagatatttgcgccaccgtggctataaagcctcttttgaccaaacccttccccctcgcacaaaaccctagctttccctcctcccctgttttgcggcgcgccacgaactcgcgacgctctcgagagatccatggatcggcgcaagggcggcaaccgcgacaccaacggcagcctggtcgaggccacggcgtcgcggctgagggtcgaatccgacgaggaggcggaagaggtggggatggaggtggaagagagcttcgacgcgggggtggaagacgagcaggcggcggcggaggtgattggaagcgaaaagaccagcgccgactactacttcgactcctactcccacttcggtattcatgaagaaatgctaaaagatgtcgttcggacaaaaacatatcaaaatgttatcacccagagtagctttcttatcaagaacaaagtagtccttgatgttggtgctggaactggaattctttctcttttctgtgcaaaagcaggagctaaacatgtctatgcgattgaatgttcccagatggcagacatggcacaggaaattgtaaaatcaaatggatattcagatgtcataactgtaataaaagggaaagtggaagaaatagaacttccagtcccaaaagtagatgtcatcatctcagagtggatgggctatttcctcctgttcgagaatatgttgaacactgtcctatatgcacgtgataaatggcttgctgatggtggtgtggtcctgccagacaggacttctttgcgtcttactgcgattgaagacgcagaatataaggaagacaaaattgaattttggaataatgtatatggatttgatatgagctgcataaagaaacaggcgatgatggagccactggtagatacagtggatgcaaatcagattgtcactaactgccagttactgaagacaatggatatctccaaaatgaccccaggtgacgcgtcctttactgtaccattcaagctggtagcagagcggaatgattacattcatgctcttgtcgcatacttcgacgtgtcgttcaccaaatgccataagctgatgggcttctcaacaggcccgagatcgaaagccactcactggaagcaaactgttctctacctggaggatgttataactatctgtcagggggaaagcctgagtggttccatgacagtcacacccaataagagtaaccctcgagatatcgacattaagctcaagtactccataaatgggcataggtgtcaggtatcaagaacacagttctacaagatgcggtgacaatggaacaaacaagagttgcttcaaagctcattaaattttgtttaacgagtatcttgtttgacagaaattgtgctatttttattgttcatgtactatgcatcaaatattagattctttggaatctagcaaaagtagggagtagattaaactggtctgctgatatgagattgatgtagtgcaaaactgtcatattgccacaaggccgttggtggttgtatgcatttgaagtcggttgcaaattattgctttacgcattccaccattaatccttgccttaggtttttgtgtgtatgtgctcattgtttcaattgcttggacagtcaaaactttcctttgcgtaataaaatataatatgtaatgtttaaacaataaaataataaatagttg

SEQ ID NO: 120602 - DNA, 572 bp, Zea mays
  unsure (1)..(572): unsure at all n locations
  Clone ID: MRT4577_41472C.1
tcgagcggccgcccgggcaggtgcttttttttttttttttttttttttttttttctttttttttttttttttttttttttttttttttttttttttttttttttttttggattaaaagctgggtacccccaatcttaggaaaagtaattatcgaacaccctgggggaccaaaatcacattaaaatcgggaaaggaaactttttatttcgggggggccacatacatcatccaaaaaactttattatggaattacaactaaaaatcaatctaaaaaagggccccaccaatgatgtgttgttggaaggaggctgctgggtttgtaaaaacaagttggacaaagggcaaaaattgttgtaattgaaaaagggttggggggttagcccaaaactgcttgaaaaaaggcaaaaactgttgctgggtaaaaaaagaaacacaacttgctgcaactagctcgctaaaaggcagaagaatttgctgctgaaaaaaaacaggggggttaaaggcggccaattggtaaaaagaaaaaagttgttgttgctaaaagaaggcannacctagctggctaaagggaa

SEQ ID NO: 120603 - DNA, 212 bp, Zea mays
  Clone ID: MRT4577_41473C.1
tttctttcccccacggaccctcgccaccgggaagacgcctctcgctcaggaggacgagcattccaccggagccggatgatgatattatgaacgagaagaatccccgtccgctcgactaggacgacattgtgctcctcaagacttattgccttgagccgaacaaaacaagcattaaaaaggtcgttaaagatatcaaagatattttcaattaa

SEQ ID NO: 120604 - DNA, 294 bp, Zea mays
  Clone ID: MRT4577_41474C.1
ggcgacaaatcctttgaaaggtccggttcccccattgtttcagaaggaaactaagtgggggcaattccaacgtttttttccaccaaaggtttaacatttttaattggactttctgggttcccaaaaaagagtgcttccttttaaacaggtcattacaatttcgcctaaatttcccggagcctaactttttaaccttttaatactttgcctccggggcctggtcaccgtcaccctgaggtccaaaacccgattgtgagtccccagagccaccacctgacatgtgcttaccaattt

SEQ ID NO: 120605 - DNA, 1235 bp, Zea mays
  unsure (1)..(1235): unsure at all n locations
  Clone ID: MRT4577_41475C.1
ccaccgcgcgcgcaggagccgcgccctgctctgcgccaggcgaccgacgaaccgcgccagcagccgacgccgagtgcctcgagcccgaccacgaaccaacgccgtgcaaccgaggccgagtctgacccgcgccatccgtttcttcttcgcgtattaagggacttcaaatcttccatttcttcctcctcccattatttcttttcttgaaaccgacgcgtcaatggccttgaaggaccgccggccattgattcctctccctggccgacccttcttctcctctccctctctataaaagggaaccgagcctctctcccattctcccctacccgaacttgtctctctttctagctctcctcgctcgccagtacaccgcaagtcgccggagtttgtcgtccgtcgccggagttcgtcatcaccggagcccgtggagttcgccggagctacgccatccgtcgtccgtagtcaagccccctgctcttctccatccggccgaaacccgttgatccatccccgtcacacgcacgaacccaagaagctgagtttgtggtagacgaaccgaattcgttcgaagacgatccgcaggacgcgtttgagcaagagggtgatgctggagactntgatggagattntaacgacgacgaattctaagtctaacgatgcgccggtcatcttcctgtgggagattgcccctgttatttactcctgctttaattgttctttatacttattacacttgtgatgtcaacatatgtgtggaaatagatcctggcacacctatgctatgcacccggctctgccctttagaaacgggtgtgacaggcgctccccaccatcatggaggggtttatgtcttatgcctccctggtcacctgcgagggggcgatgaacgcgctctctcgcgaagggtgccggcactatgaggtcttcgaccaagctgatgaggatttcgagcgtgatatctacaaggtcgaggaccctatagtgaaggaatctgctggagccctctacgaccggatgtggggcccccacggtcgagaggtggtcagggagcgggccgagacggcgagaaggtcaggcggcgcgtggcaagagggtggatgactttggggctttgaacagcgcgctgcctgacccggagccgaacccggcggcgggctgcgtccgaggccgccctggagccgcccccggaaaccgccaaaagcgttcctgatgcccccgcagccgctgcggccggc

SEQ ID NO: 120606 - DNA, 177 bp, Zea mays
  Clone ID: MRT4577_41476C.1
cggtccaaaaaaggtttataaagagcctttattatattacactctctttttcgttttagttatcgctggatagtacaaaatttaactattcagcgacaactatctacatttatatgttctagagtctctatgttatatcctaaagtttcttaactgtctctctgtctcttgtacttg

SEQ ID NO: 120607 - DNA, 180 bp, Zea mays
  Clone ID: MRT4577_41477C.1
cccacgcgtacgcccacacatgccatctacattgaacatatcacacttcatcgctacgattgtatccctaactaataacatcatgctctaaattatagtccttctagtgctcgatcccagatgttcatacagatcctatattgtgtcttcatgtcactacattaccaccaactacatctt

SEQ ID NO: 120608 - DNA, 448 bp, Zea mays
  Clone ID: MRT4577_41478C.1
aaacccatctaaacaaaaaatattgcccatacaaaaaacaagctaaaaaaaggcttttttttactaggggtcacatgcaaaagggcaaaaggggggggggggataactaggcaagttcaaaaacactaattacaagggggggagggaaacacaaacggggaaagcccacctgatacaggggactagttgaacaaaaaatcattacccaaccttctgtagaagcaaagggatcatgggaaggccccacataatggccaagggttttttgccccaagcgctgaaaggaagccaaaaccttgggctcccgctttgacttctcccggaagtaaaacagggccaaagctcttttatcctaagaacttaaaacccgatttctcttccggatacggaaagaattcatccttgggggcctactcccccttaaaacataccccaaatcctaaaactt

SEQ ID NO: 120609 - DNA, 353 bp, Zea mays
  Clone ID: MRT4577_41479C.1
aaaaaggggtgaacaaggtaccacattatcgatctgcatcgctgtgttattaccgttttataactggctgggggggaccggaggggacattccagcgcctgaaataattggcattcagggttttggttgcctaaacagggggccgaccctcttaacccaaatgggcaaaaattttgagctgggcccaatttggcaccattatattggtctgcagggccccagccttggggtggcccactaaactcggttctcttaaccacaatccccaattatatccaccaaattttttgccccctttcgacactttggggaggatgttcatttccctttcctccaattgaagtgaaaatatg

SEQ ID NO: 120610 - DNA, 502 bp, Zea mays
  unsure (1)..(502): unsure at all n locations
  Clone ID: MRT4577_4147C.1
actctccctccccactctgctctcagtccggccgccgccgccgccgctgaccgccgtaggagacgagcgtcagagaacgcggctctctctcgtccatgcttcttgcttaagcttgacacatctcttagcacggcgagtcagctactggctggttgcagtaacgagaggcgaggcgagatgccggggatggaggaggcggaggactacgagtcgtgcgccttctcgctcacttgccccgaagacggcgccgagctcggggacggcgtcgtggacgacggcgacctcttcttgttccttgtcggcggaggcgntgatcgactgcgcgcccggccaccactgcagccgcgccgacaagaagatcaagatcgccgagatgaacctctcctgcatgaagaacctaaagtgcaagcatgcgtgatggccggtacggtaccttagctgcagcttcctactacaagtatatctcgtctctcgtttgtgtgtccatctccgagtgttgatg

SEQ ID NO: 120611 - DNA, 222 bp, Zea mays
  unsure (1)..(222): unsure at all n locations
  Clone ID: MRT4577_41480C.1
gtcgccccgcttttttgccgggngtgccgttcgccccgtgcgggcgcgggngctgccgctcgggggactgcggcggcgtgctgccgtgctctgggttcgggcgcgcgcccttctctctggcggggtgcgcgctggtggngttgttcggcctcgtcttcttgggctttttcctcttcttctgctttgtggggggggtgggctttctcttggtcggctggtccg

SEQ ID NO: 120612 - DNA, 457 bp, Zea mays
  Clone ID: MRT4577_41481C.1
acaacgaaaaagcacaggggagacatgcttgctctggctagcaggtagtgagggggaaaaaacaaggtgagcgggggtggatgcaggggtgctggacgcgatgagcatcattagggcccgcgggggaagcgcacgggacgctcctaattagctgaggacgagcagcaactcccatgaatgacattttggccaatggtgagatccaagctgtctcttgggaagcctgagagagagctagggcttgcgcaaccttcagaagctcggggatacgcttgtgataaggagcaaagccagcaacctcattgatcaggccggtgcaccatgggcaccctcttcgatgctttccccttgcggtgggacgggcacaaaggcagatcgcgcttggggacaacatggcccttgttgatgcccacgaagaggcccgacttgagatgcggcggcgccaagaaggacgaac

SEQ ID NO: 120613 - DNA, 500 bp, Zea mays
  Clone ID: MRT4577_41482C.1
gtgcgactgcaccgcaatatagaaggcagtcatgtgctgcgaaactgctcctgcgcctcgccatccccttagccgcggcattaaggaagttctcaccgagaaccccaagtgcaagcgctaccttgtagccgccgactgctgcggagaaagttccacatgatctttgtacctccgcctcgtcaattcccacgtgctcatgtccttatacgaacataagctccttgacgacgaccacgtattgatgcagaaggggatagttgccttttccgctgtactgcatgcatggccctttacactcaataactttgtcaacatgtatgcatccatgtttggagttgatgaacctaacacgatgcagaggctatgtagcgagaatttttttgaccctgccatacagaaatggaccaccaaaaagacaggtttctcctacctgcgagaaaggatttgctcatttctgctacgagccattcctgcaaatcatcaaaaacctgcatgaatga

SEQ ID NO: 120614 - DNA, 180 bp, Zea mays
  unsure (1)..(180): unsure at all n locations
  Clone ID: MRT4577_41483C.1
cggacgcgtgggcggacgcgtgggtgcacagataacttatacgctttatctatgcatggcnaactgggagcactcgagacagcagcagcggctttagttgagatgcatagataaagcgtataagttatctgtggtctagcgcgtacgtggaagcttgtggaggagcttggtgttgactac

SEQ ID NO: 120615 - DNA, 638 bp, Zea mays
  Clone ID: MRT4577_41484C.1
gtccctcgaggcctgcctccactggatcgctcacctatgctccaatctttattggtttcacgttgccccctcgccgtccccaaccatcgaccgcgccgcgcccgctgccgcctcccagctcgctctatataaacgccacgtacgcgccgaagcatcagcacagccacgtacgaccggcttccggcgggtgagggaagagtgagaagcgggcgggcggtccggtgacatggcggagggggagttcaagcccgcggcgatgcaggtggaggctcctgccgaggcggcggcggcggcgtccaagccgcggttcaggatgcccgtcgactccgacaacaaggccaccgagttctggctcttctccttcgcgaggccgcacatgagcgccttccacatgtcgtggttctccttcttctgctgcttcctctccaccttcgcggcgccgccgctgctcccgctcatccgggacacgctggggctcacggccacggacatcggcaacgccgggatcgcctccgtgtccggcgcggtcttcgcgcgcgtggccatgggcacggcgtgcgacctggtgggcccgcgcctggcgtccgcggccatcatactcctcaccacgcccggcgtctactactccggcgtcatcg

SEQ ID NO: 120616 - DNA, 569 bp, Zea mays
  Clone ID: MRT4577_41485C.1
ggggaccccggccgggacacccaaagtactcaggactgtcatctctcagttgcaattgcaaaaaaaatacagagagagagagagagagagagagatccctaccctgcaaagagagactgacaatggacgcaaaaccggcgagtgtctgcatcttcctgctgcttcttctggcgcagaatccttcttcctcctctgcagacgaccagaagtgcttttacaccactgaccgggtggcgacctggtgcgtggactgggcgtgcaagttcggctgcctgatcgacgccaagcagtaccataccaagtacaagaacagctggtgcgaaggctccaggagaggcatctgtcactgccacttctgcgactgattctcacgaacagtcatctcgaaataaacaaatcatgtaataaaagccccgtggtcgtacgatataattttaaaaaacaccgattatagggatggagtcggatggaaaatgttgttcttttgtggtagattaaagccccctctgcctctggcaatagtataatgttatgcgcttggaaaaaaaaaaaaaaaaaagcggccggcc

SEQ ID NO: 120617 - DNA, 539 bp, Zea mays
  Clone ID: MRT4577_41486C.1
tcgcggaccgggacggtgccgagacgctgcgcgagttcttgcagtttgcgagcgcggacagagacggggatgagctagatcaacgccgtgcgaattgaacgactatctgcattctgattacagtagacaatacagcgtgatgctgaagctactaaaggacaagctgatcgagatggaccatgacagagacggtaggctaagccaggaagagctagtcactcaatctcacatgatcatctgcagctcgcgttacaccgaccacggtggccatgcccatgaccttgagcgtgcctaaactgacaagaagttcacagaactggactccgactaggacaactacttgacagtggaagaagcgcactgagtactgcagagcctcgggctgtggagtcctactatgctcctccatgccaagtattgtgcatgctgatgtgcaccattacgagactactgtcgattgaggagatgctagacgactacatatccgtctacagcaccgggtatatgcacgatcattacgccagcgaaagataagtcga

SEQ ID NO: 120618 - DNA, 272 bp, Zea mays
  Clone ID: MRT4577_41487C.1
acgccgaacaacagattatcacataaacataatgccaaatggagaggccaagacacagaacagcatggacacctgggacctgagagggtgtgccagaactgaaaaaacaacggctccttgatgaggacaggccaacagaggccttgagaacttacaggccgatcaatccaacagtctactataagggctcacggtgaagacatatacggcatggaaagaacctactgtcactaacaacagaagaggaaagcatgcataccacaaactggact

SEQ ID NO: 120619 - DNA, 718 bp, Zea mays
  Clone ID: MRT4577_41488C.1
cccactgtccgtaactggatcatcgttgcccttttttttttttctacactttaattcaccggatcatcaatatttcagcacatgttaccattgctaacaagctaagggcagtaatattctacaaatcaaagaatctgcaatcagtgattttcctggctaactgggatgcgaattaggtgtcaaatgttctgaggcatgcaaattgagggatacttctgaatctttccagagttaagaagattgcgcttctgggatgttagaagcaagagcatccaaatgatcgtcacccatctttcaccattctagctctctcgaggatgtacttcccttccttgtatttctggctttgctcgtaggctttctcatatctccagccaagaatctgttggcagcagctacagtagatgtcattcacagtatggagcccggttacaagatatcgatcctcattagggcctaggcatatgttcacaacatggtcgaagagcgtccaaatgatcgtcacccatcttggacacgcggcagcgccggcacctgaacacgccctccccctcgagccgctccaggaagagcagccccatcccagaaatgctctgcagccactatcgcctgagcaattgacgggtcaattggaagcagcaagacaaggggggaggggaaaatcaccggtcccggttctcggctgtaccgacatgagaattgagatgatgcggaaaag

SEQ ID NO: 120620 - DNA, 505 bp, Zea mays
  Clone ID: MRT4577_41489C.1
ggccgcttttttttttttttttttgatattttttttttttttttttttttctttttgtttttttttttttttttttctagaagggatagacttacacatgaatccttttttaacacacgggagatcgtgacaggccatcatttttaatacacggacacacactatgataagcactgcagacacacgccgaaggagggttcgatgttaactcggttgattatttaggtagagaggcaaacacacaggagggcttgcattgcatgaaccatagatcagctactgaggacatcatcctccgaagggcttttaggttcccgtatgccatgttgtgcccgtgcccaactccaagaataccgcgaaacctgttgaaaaagccgaccgggaccttgttggttttggagcgcgcggcggagcgaccctgggcgaactataaacaaccgaggatgatgtgcgagagcagaccacaacgggggagccctcccggggaacggccgtggcaggaggg

SEQ ID NO: 120621 - DNA, 477 bp, Zea mays
  Clone ID: MRT4577_4148C.1
aaaagccccccggaaccttttaaaaaatttaaagggcggggcgtttaggttaaatttaaaccgacttcaacggggtccacaaaatttatctttaaaaaaaacaggggggggaatttaaacaaccgattttaatttgacccgaacgggccatttgaatttaaacaaccggtttttatttggccccaacagcccggatgaaaggatcacccgggggaaccggtcccttccaggccaaatgtttacccatggggcgggaaaaattcctggacggggggaccaagggggggcccaccccaaagggtctggaaccattggggggggagccggaccctttccagggtttggtttggggctttctcaaaggaggggttaactgggcccgaaaaaaaccgggaaaccccggagggtttttcctgggggggaaaccgggggacaagggacccaaggaaatctgatatgagggaacccgatttccag

SEQ ID NO: 120622 - DNA, 325 bp, Zea mays
  Clone ID: MRT4577_41490C.1
tctgatcttcataccattatctgtttctactccagagcgcacaagaacccgatcagcaccattagggtgtggctcgtggccctcgctctcctggctctcgctgcgagcgccacctccacgcatacaagcggcggttgttgctgccagccaccgccgccggttcatctaccgtcgtcggtgcatctggcacctccggttcacctgccaccttcggtgcatattccaccgccggtccacctgctcgcgccggttcaactgccaccgtcggtccatgtgccggcggctgttcatatgtcggcgccaccatgccactaccctactcaac

SEQ ID NO: 120623 - DNA, 480 bp, Zea mays
  Clone ID: MRT4577_41491C.1
aacaacccggctttcttttttttttctggaggaaaataaaaacaattttggaatttccccttgggacccttcgacttggttggacagcaaagggtcccaaccgggtgcacaaaacaaatgcccagtttgcggggacaggacgggggcccttttttttttttttttggggccgggcgccacccctgtgaaataacacccatgccccttacatttggtaaagacccttttgtgggccctccaggggtaaataacccttttccttttaaaggggggcccttttttttttttataacaaaaatcccctgtgcataaatttgggtttgcgccaaccctcctattttttgtgggggttcacaccgggggtgtggtcccagtcccaagggaccatacttattatactttaattcccaagaatgacgacaagcatcaggtgaagcttttaacaaaacaacttgcgagctatgtacaccggcttcactt

SEQ ID NO: 120624 - DNA, 200 bp, Zea mays
  Clone ID: MRT4577_41492C.1
aagaactatttctagatctccagttcctcacagcgaggtcattctcaactatggtcaggagctctacctaaacattctttacatctattaatttcactactacaaataccttattccatatttgaaccctctttttttaacatatcaccactcatcatccaaaaacccactaaatataaacatggatatttcacatctat

SEQ ID NO: 120625 - DNA, 338 bp, Zea mays
  Clone ID: MRT4577_41493C.1
cccactcgtgcagccagtcacgctatgggaccacatttcacatcacagaaaagacagatcacatcaatgccacacggatcacagtgctgctgtctcacgtcatgaaaggcactgccccgggtatcaactgatgtaagtccaggatgctcgacatcaagatcgagcacgcattatagcatgaccattaaggatatcaccgtaagcacgccatccgaagtagagagcactgacgccttcaacatctgaagctccacgactatgtctatcattacttcgacgatcggtacttgctaatagtgcgtttccagtgaacccgcatgaaactccatcatgctgaa

SEQ ID NO: 120626 - DNA, 108 bp, Zea mays
  Clone ID: MRT4577_41494C.1
tacctcagcattcgattcgagtgctgtcacatcctttcagctctgcaccccggggcagttcacttggctgctgcagaccaccgcttgaccatcgggtcaacctgcccc

SEQ ID NO: 120627 - DNA, 425 bp, Zea mays
  Clone ID: MRT4577_41495C.1
attcggctcgtgcggatacgcgagaggaagtttacttctgaatagacacatgtaatggttgcagtggggggcaaataacagccctcggaggtccttacatgtaggattgcggtcttcagtcgtatttacgtctggctgggatgggccgctatgggtcctgcctcgcccacctaggagggtgctacccgttggtaggtacggtccttccacacggcggtttggaggcatgcctgatttaaagacggggacaatgtctgggctacttatccttcatagatggcaacgatggatcggaacactgaccaatgtaacattgcgcgactactgggtttgacgcgcgacagaagttgtgtgccgggagcagaccataggcatgtgctgcctaccagacggattggtcctttttgttggcgctggtttgcaag

SEQ ID NO: 120628 - DNA, 478 bp, Zea mays
  unsure (1)..(478): unsure at all n locations
  Clone ID: MRT4577_41496C.1
cttccttcgnctgtgatcatgtcgtgttggtgnggcggcaagtgcgggtgcgggtgcagctgtttttgtggtagnggatgcaacggttgtggtttgtaccctgacgtgttttttttttttttagnagagttaagaccattgtgggggggggggggtntattaaggncagtgttggttgttttgatgtgggtttggtttgttgtttgtttttttgtttggtttgtttgggttgttttcgttttgttatttgtttatgttgtgggttgttgttttttgggggtttgttttgtngtttgggttttggtttttttgggggtttttttggggttgtgtttggtgttgttttttttttntatttttttttttttttttggttttttttttgtttttgtttgtttttggtttgattttgtttttttttttgaattttttgtttttttttattttgttttggtgttttttttttcatggttttttt

SEQ ID NO: 120629 - DNA, 440 bp, Zea mays
  Clone ID: MRT4577_41497C.1
gtaaaaaaaaaaaaaaaaaaaaaaaaaaaaaaaaaaaaaaaaaaaaaaaaaaaaaaaaaaaaaaaaaaaaaaaaaaaaaaaaaaaaaaaaaaaaattaaaaaaaaaaaaaaaaaaaaaaaaaaaaaagttttgtccctgccgggggggcccccggggaaggaaaaaaaaaaatttttttttttaaaaggcacccccaaaaaggggttgttgaaaaaaaaggggggaaatcgcaagggccttggggtaaaaaaaaaagggaaacgggggtggaaaaaaattttggaaaagggggtcaaaggaaatttggggaataatttttgggaaaattttgctgggaaaaaccatgggggaaataatgctgggaataataaagggggacatcttgtaaggggtaataattgggggaataatcatgggattcgctgaaaggggaagggcc

SEQ ID NO: 120630 - DNA, 256 bp, Zea mays
  Clone ID: MRT4577_41498C.1
attggaaacctttatcggcatattataaaaagaactatatgtctataccatgccaattgggtattaattttccggcagctcgctagattactggacttctttctaatgagccaactattcggatgttcctttataacctgcgcggggcgaacgcctcccaaccaaaggaagcaacgctcattagggtatacccacagcccgaccaggattggtaagatcatgggccctggccacggcgcctttgaggctacccagc

SEQ ID NO: 120631 - DNA, 560 bp, Zea mays
  Clone ID: MRT4577_41499C.1
ggcagcgcaaggggatttatttatttttttatacccccccaaaaaaacgggaaatcattggcccccctccccaaggcctggggcaggggggacctggttttttcaatgcaaaagtcccccccaaacaaaaacgaacccccaaaaagtttccatggttaaatatcccccccaaatgggaaaaaaacaaacatactattatttcaaaatcccccccaaacgaaaaagccaaaattggtaacgaaaacttttacagccatacgggggggcccttattgacgggaaaaactgatttgatttcttttaggaaaacccaaacccaggcccaggcccggaattttttttaataagggccagaagcttttcctttttggcccccaaaaggggcggaaccgttttgccttttttgaaaaaaggaaagggcggaatcccctcaacctcgaaggccggggggatttttttaattttgtccacgtccaccttaagaaaaacaacctgagggaactttttggcgggttcaacaaacagtggggcaaaggccccgtatgaacccccccaggggg

SEQ ID NO: 120632 - DNA, 607 bp, Zea mays
  Clone ID: MRT4577_4149C.1
gggtacctcgaggccggccgggaccgtgtccttctatagatactccgccatgactttcgcgtatcagtattgagcattgtcctgtctcctgcatggccgatctcctccacggcctatgtcccgcttacctcccatctaatgtggagcttccgttccacgtgcaggagcctggatcgagccatcgtcccatactaccgccgggcgaaggccaatgcgaccggcgtccgccacctcctgaaaaggccccaactgcagcacgtagctccgccccttgtgcggccagtccccgagatacaatcaccaagcgagctaaccgagggactactgttgaaacaccacaggaataaccgccgacccctaaacctgcaccaagaaaagctgactggagaggacccactcccgttgggccatgtgcggctttctccaatgccctctagaccatctagactcacggaatcgacgccagctcgcgcaaggccggtgtctacctgacggagtaacagatcttcaagcgaggccatcctgaaatacctcaaaatacccgagctggccactagcatagcattctcgccatcagggtctgctcggctgtgtgtcatggctgcct

SEQ ID NO: 120633 - DNA, 270 bp, Zea mays
  Clone ID: MRT4577_414C.1
aaaaaaaaaaaaaaaaaaaaaaaaagattataaaaaaaaaaaaaaaaaataacaaaaaggttaaaaaatctaggaaagaataacaccaaactactatctcttttacacccttcactcttttacctcatctttaattcaccccactgtctactccatccttccaccttttatcaacttactgcttccacaattaaatccctttcataataaaatccattaccccatcaaactcattacctatccatcctaaatccttttctatactttcac

SEQ ID NO: 120634 - DNA, 401 bp, Zea mays
  Clone ID: MRT4577_41500C.1
agagggatcccccgtccgcctccatccaccgcccgtgggaagggaaggcaagggaagagcagcgagcgtcgcaggcatcggccccagctccggctccgcccgccgccgcaccgtccccctcctcctcccccgatccgatcgccgatcgccagcctttgcgtcgcctcgcggcaatatttggaacccctgttaccgatcgcctcatgccgtaccactgaccgatcccgtcccgtcccctccgacccccgcctcccgtctgctaccccgtcgagaccctacctcccgatcggactagggtgcgtacgatggctagcagcgccgacccgcatgctgccgttgccgcggccatggccgggacgaccccgtccgatagcctgctcggggcgaagaaggctggggcg

SEQ ID NO: 120635 - DNA, 1450 bp, Zea mays
  unsure (1)..(1450): unsure at all n locations
  Clone ID: MRT4577_41501C.1
gggaccggccggcgctacagacacgcgagcagagcacagacacagagcacacagcacagaggcagccaccaccactaccaccacaggcactcacccgcaccgctcggtcaccgaggagtggaggtgctttgcagtcgcagcagcagcagtacagtgtgtgagtgtgaagggactagagcagggcacacagcgcaggccgcatgggcgaggcggaggtggagaagcccaaggaggcggcagaggaggagaagaagaaggaagacaagcccatggacgccacgnnnnnnnnnnnnnnnnnnnnnnnnnnnnnnnnnnnnnnnnnnnnnnnnnnnnnnnnnnnnnnnnnnnnnnnnnnnnnnnnnnnnnnnnnnnnnnnnnnnnnnnnnnnnnnnnnnnnnnnnnnnnnnnnnnnnnnnnnnnngnnnngnnnnngnnngngnggagggnnnnnagggggngngngnnnnnnngttnttttnnagannnngtgngggngactnggtangcggcggcggaggacaagcccaaggacgccgcggcggcggaggacaagcccaaggacggggagccggagaaggaggacgcgccgccgcctccgccgcccccgccgccggaggaggtcgagatgcgggtctacatgcactgcgaagggtgcgcccgcaaggtcaagaagatcctcaggcgcttcgacggagtggaggatgtgatcgccgactccaaggcgcacaaggtgctggtgaaggggaagaaggcggccgccgaccccatgaaggtggtggagcgcgtgcagaagaagactggccgcaaggtcgagctgctgtcgccgatgccgcccccgccggaggtggaggagaagaaggaagatgaggcggagaagaagaaggacgatgagaagaaggcagagcccgagccgccgaagccggaggagaagaaggatgcaggcggagccggaagcgaggagaagaaggacggcaaggaggaggaagagaagaaggacggcggcgagaagaatgaggagaagaaggacggcggcgacggagacggcgacaagaaggacgaggccggcgacaaggacaaggacccggccgccagcctgtacatgcactacccgcggttcccgttcgctggagggtactaccagccgccggcctacccgccgcctccggggtacccgtacgcctaccagccggcctacccgccgccgttctacgcgccgccgcaccaccacctgcaccagcagcagcccatggcgccgcagatcttcagcgacgagaaccccaacgcctgctccgtcatgtagttgtcactcaaatgtcatgtaaaaaaaaaaagaaccgtaggaccctgtctttgcgcggggtcctggcgtcctgcccctgccagagcgaaggaccctgtctttgccagaaatgcccctgggcaaccaagctaatggcgactttgtttgaac

SEQ ID NO: 120636 - DNA, 417 bp, Zea mays
  unsure (1)..(417): unsure at all n locations
  Clone ID: MRT4577_41502C.1
ggccaacctacccgcctcggccgccacctccccgtttttctcacgctcttcgtgcccgccgcctcccctcttcccctccacctcactcctcccgtctgacgcacatggnctccatcgccggatcttncgctctctccttcgccatgcctgtcaaggcnatcaacttaaattctctagccttctccccggtgaggaagggtaacacatttcttcgggctggaccagtgcctatgagatctgttttctgcgctggccngaaggatacggtggacaaggtttgtgaaattgtgtggaaactggttggtctttctggccaccctgaagtttgtgggtggtttcggattctctggacctggggcgggttcggtgggcccggttgtgattgggatggggcttgtggagctttttggcttttgc

SEQ ID NO: 120637 - DNA, 324 bp, Zea mays
  Clone ID: MRT4577_41503C.1
accacgcgtacggtttgttgcgatgttgccctttcttttacggacagacggtaacagaagttaagtgtcattgtacatattgaagatcgtgtcctattgaatacaatattgttctacggaaaacaaaaatgcactactacccaaatacaacaacgtcagggccttcacggacatcgtcgtcaagactgcgcagaagatcaaagctaataaatagacggcaactaggcccaatatgcctaatgtcgagaacgaaccactcttcacggtggagaagcccaacctgaacacgaaggaccagggcgacacgactgttagagacatgtt

SEQ ID NO: 120638 - DNA, 3499 bp, Zea mays
  unsure (1)..(3499): unsure at all n locations
  Clone ID: MRT4577_41504C.1
catgnacgcgctggnaaggcaatgggggaagccggaggcgtcggaggaagtttgtgaatgctggcatgttcggtgaccacctgccctgtgggtggaaactgctgcttgggctcaagcgaaaggagcgtgtcgcatagccaactgccgcctgatatccgagaagggacaagaggtaggaagatacttctttgcaagtagcaaactgttgtcccttcttggatatcaggaggcaaagccaactgcctctcagattaacaatgcaggagtgcatgacctacatgttaattctgtaggtcttcaccagcaaaccatctcaattgaggaaaagcaaattgcagtgccagttaattcagttgcattgtttaattcctctggtgattctcatcaacaaaaacttcagaaggatgaagctccaatagaagtgaatgcaaaggagtgccggaaatgcaatttgacgtttcatgaccagagcgcctatatgcaacatcagttgtcctttcaccaaaggaaagctaaaaggcgcagggttagtaaatctggagaattgggtaccaacatagatggaaactacgagaagactcagcagaagacctctggagaggtatctggcaattttggccacagcgctgcaaatgtaaggtatgaaggtctgagtccagcagaactgttagatggtcgaccatccttgatggcagtgccatgtggatctcaggagatcactatcttgcctcaacagggaaaagaaccttgtgtgttgcctcaacagggaaaagaaccgtctgtgttgcctcaaccgggaaaagaaccgtctgtgttgcctcaacagggaaaagaaccttctatgttgcctcaacaggggaaagaaccttctgtgttgcctcaacagggaaaagaaccttctgtgttgcctcaacagggaaaagaaccttctgagttgcctcagcagggaaaagaatcttcaggagatatctctgtgaatcagaaggaccctcttaaggagatgaatggctttcctgaacaggaaaaaggacttgttgctggagaacttgtctctgcacatcataaggaccctctaatggatattacagatgcatttgaaatgataaaaaaacatcctgccagagagccttcctctgggcatcatctggatactgtcgacaattctgatgatcataaaacccacgatgaagcatgtgacaatgttgtaacttctctttctattgatgctgaaaggaaattgggtgtttgcaactccatgaatgttcatgagaatatcagcttaaaagatccagaactttccaatgcagattattcccaaaagttcaataggtctgatgaaacttgtgatgtacataaagaggtttcttcaactgtgaatgatcctgatgaaagaaaatgcacagatgattcaacgaggtgtactaatatgtcctgtgatctactgcatggcaaaattgtcagttctcctgaagaacatgattttagtaaccagctagaaagtaacccactttcagtatctaggaatgagcctgatcttaattcaattggtacggaagtggatggtggcaatataacttgcaatgcggaaaaccccagaagcttcaaaagtgagaaatctgctgagctcaagattatggattgcgaaatgacttcttttaaagacagtgaaataaaaaatgatgtcagagtaagggatgtaaatctcaattcatgtttggattcaatatcttctcctatttctggtggaaacaatgaaacatctgatactcctgatgatgctattcgatcatccattatcgcccaatgcttcggtactacctctaatgatgacacggcttgtaaggatggaaactttgccaaccagaacgacacctgtaagggtgaaaattttgtcaaccagaaaaatgtcacaatgtaccaatctaatttgaccatggaacctatacctcgagctcaaataaatgtggattgtttcacttcttcctgttcaatgactcctgaaatcaaggactatggcaacagaggtgaagatcgtgcgaaagaagcactagtgaactcacaaaacatgacaagtaatgaaactggttttgatgctgaagcttataacagtgatatcttcaatggtactatcacagaaagtagtcttgcccagttgagtaatgtcattagtatgaaaaatgcttttgcaaactgttactcattatctgacctaaacacacttactggtggtactgcaactgatgatattgatatgcacaatattaggagttcttttgtcagctctaccagtcgcactgaaccaaatgagcactgcacgttggattttgatatcaagggttccatgcttgaggcattggaaaaatctgacagtgacttagataatcaatacaatgatgcaggcccttcttgtgactcactacctgctactgggacaagtgggactattgatgattttatgtccatgcaaaccaattttggtagctttacttctttggttcgtgctgttgaagatgttccactgagcaggattattcaagatcagcggtgtgatttgcaacttggatttggtggccccaagcagcagatgtatccaagctttgagcaacagctaaggatggcctcggctggagctccgccttatgggaccatcggcaggcatgaccctatacctgtaccagagccaacattgatgctaggttatgcaccgcagctaggtaactgcccccctccgttccagttgggctggggtccgtcttattcgaagatggttggcatgctccaatctgtgtgcgtgtggtgcaatagcccattccagcatttcggcaccgtcgctgagcagcaggcagattcacttggttacatttgcccgtcgtgcaagggaaagttttctggtcatcttggcatcaacggtccatctatttgaaatcagtttcttgtaacctgaactggtgctgctgccccaccatcaatttatagtctagttgatatgaatcgttttgtacttgtagtatgtatcctttaactcgtggctagtggtggaaacaggtttattcgaatcttacatttttggttattaaaactcaaccatcaagcagttgttgcgaacaaggaagctaagttgttggatacatacaagactgtgctctcaagagacactggtgggtactctgctgaagaaaagaccaattggcctgaagactaaattgtccatcttcaattgcagcaagagaaaggatctccatggcactggtggctggtgcatgtttgaggcttggatgatggcagaagtgtcatgtttttttatgttgaaccttgtttctaaatagtaagtctagacaattgttctgtttgaaatctgaatgaattgtggctggttgttggtggactggattacaggcaaaagtgtcatgttttttctatctttaaccttgtgtataatatagtaaaggacggatgattgctctatttgaaatatggagtaatggttgctagttgcctg

SEQ ID NO: 120639 - DNA, 2636 bp, Zea mays
  unsure (1)..(2636): unsure at all n locations
  Clone ID: MRT4577_41505C.1
aattcggcacgaggtttttatctatctaattccaccacgcgacaccatctccagctccccccactcgcgttgtctcttgtcgctgcctcgtcccgtccaatccttccaagcctctcttcttgctgcagctgccccaagaccgccccgcgccggctcaatccggcgggacgaggagacggcattgctcgcatcgcctgccctagcctgcgctgcccccccatgcgtgttgtgcgcatgaacagaggctaggctaccaacacatagcacgacagccatggatcccgagttcggcgtcggcacggcgccacaaaaggggcggcaggcgtggcggacgacgctgctgctggcgtaccagagcctcggggtggtgtacggcgacctcagcatctcgccgctgtacgtgtacaagagcaccttcgccgaggacatcacgcactcggagaccaaccaggagatcttcggcgcgctctccttcgtcttctggacgctcaccctcgtcccgctcctcaagtacgccaccatcgtcctgcgcgccgacgacagcggcgagggcggcacgttcgcgctctactccctcatctgccgccacgccaatgtcagcctcctccccaaccgccaggtcgccgacgaggagctctccacctacaggctggagcgcccgcgcgaggccgccgggaggtccggcctgctcagggcgtggctggagaagcacacgaggctgcacaccgcgctgctcgtcatggtcatgatcggcacctgcatggtcatcggcgacggcgtcctcacgcccgcggtcgcnggttctccgttgnctagttttcgagctctccctccgcaagggcccttatgaatatgccgtcatcccgataacctgcgccatcctggtgttcctgttcgcgctgcagcactacggcacccaccgcgtggggttcctcttcgcgcccatcatcctcgcctggctgctctgcatgagcgccatcggcctgtacaacatcgtccgctggaacccccagatctaccaggcactcaaccccgtctacatgatcaggttcctcaggaagaccaagaagtccggctggatgtcactgggaggaattctgctgtgcatgacagggtcagaagcaatgttcgcggatcttggacacttctcctaaaaaaaactccagcttgctttcacttctctagtgtacccttcactgatcctgggttacatgggccaagctgcttatctgtcccagcaccataaccttgacgcaagctaccagatcgggttctacattgcagttcctgagtgtgtacggtggcctgtgctggtgctggccatcttggcgtccgtggtgggcagccaggccatcatcagcgggaccttctccatcatcaaccagagccagtctctgagctgcttccctagggtgaaagtcgtgcacacgtctgacaaagttcatggccagatatacatccctgaggtcaactggatcctcatgatcctctgcgttgctgtcactgttggtttccgtaacaccaagcacatggggaacgcgtctggcttggccgtgatcacggtgatgctggtgaccacgtgcctcatgcccctggtgatcatgctgtgctgggaccgctccccctggctggccctcgccttcttcctcttcttcggctccatcgaggcgctctacttctcggcgtcgctgatcaagttcctggacggcgcgtgggtgcccatcctcctggccctcatcctgctcgccgtcatgttcgtgtggcaccacaccaccatcaggaagtacgagtacgacatgcacaacaaggtgaccctggagtggctgctcgccctgggcgacaagctgggcatggtgcgcgtccccggcatcggcctcgtgtacaccgacctgacgtcgggcgtcccggccaacttctcccggttcgtgaccaacctgccggcgttccaccaggtgctggtgttcgtgtgcgtcaagtcggtgccagtgccgtacgtattcccggcggagcggtacctcatcgggcgtgtcggcccgccgggccaccgctcgtaccggtgcatcgtgcgctacggctaccgcgacgtgcaccaggacgtggactcgttcgagacggagctcgtggagaccctggccacgttcataacgctggacgcctcgtaccgctgcagcgaggccagcgagcgggagctggagctggatcccggggagcaggagcggcggctgaccgtgatcgcgagcaacccgctgcggcgccgcgtcagctacgcgccggggcccagcgtgcagcattcggcagccgacagccacgtggtgagcccccaggcccgcgggcacacttagcctgcggatgagctgaaggcctcggcggcggcccgggaggccggcactgcgttcatcctggggcactcgcacgtgcagtgcaagcccgggtcgtcggtgctcaagcggttggcggtggacgtcgggtacaacttcctgcggcgcaactgccgcggcccggacgtcgcgctgcgcgtgccgccggcgtcactgctggaggtcggcatggtgtacgtgctttgattgaggctgagacgatgcgactttttcttatgaacatctgatatagtaatcacgactgttgtcagttttccc

SEQ ID NO: 120640 - DNA, 438 bp, Zea mays
  unsure (1)..(438): unsure at all n locations
  Clone ID: MRT4577_41506C.1
cgtcncnngccttgatnnggcagtngnnccatgtgnnncctcgatggcagtgccatgtggatctcaggcgatcactatcttgcctcaacaggttggagaatcttgtgtgttgcctcaacagggaaaagaaccgtctgtgttgcctcaaccgggaaaagaaccgtctgtgttgcctcaacagggaaaagaaccttctatgttgcctcaacagggaaaagaaccttctgtgttgcctcaactgggaaaagaaccttctgagttgcctcagcagggaaaagaatcttcaggagatatctctgtgaatcagaaggaccctcttaaggagatgaatggctttcctgaacaggaaaaaggacttgttgctggagaacttgtctctgcacatcataaggaccctctaatggatattacagatgcatttgaaatgataaaaaaaca

SEQ ID NO: 120641 - DNA, 124 bp, Zea mays
  Clone ID: MRT4577_41507C.1
gagccacaacagccccactctgtctgagtgtttgtgcctgctacctgttcaaagtagggttcccaccgggacacaggccgcctccatcccatggcgcgcgccgtcgcctccaggctcgccgccg

SEQ ID NO: 120642 - DNA, 2148 bp, Zea mays
  Clone ID: MRT4577_41508C.1
gatgaggtcccttccggaaaccggctttaacctggcctgtcgcttttgcctgttcttctgggcggctggtccccctttctttcttccctccctcccagtagattcttcactgctcggggatttggaacaaaggccgtggttcgaagctggtgtgttcgttcaattgtgcggaaagaaaggccagtgttatgtgtgaagtagcagtgaaggctagcaggtaggctggctctcgccgagcgatggatctcgagttcggaaggggcctgaggtccccaaagagagactcgtggaagaccaccttgctgctggcgtaccagagcctgggggtggtctacggcgacctcagcatctctccgctgtacgtgtacaagagcaccttcgccgaggacatccagcactcggagacgaacgaggagatcttcggcgtgctctccttcgtcttctggacgctcaccctcatccctctcgtcaagtacgtctccgttgtcctgcgagctgacgacaatggcgagggaggaacgtttgccctctactctctgatttgcaggcacgccaatgtgagcctcctcccgaaccggcagatcgccgatgaggagctttccacctacaagctggaatgcccgaaaaaaaaaaaaaaaaaaaaaaaaatccatcctcagatctaccaagctctaaatccgtcttacatgttcaagttcttaaaaaagactagaaaatatggatggatgtcacttggtggaatcttgctctgcatgacaggatcagaagcaatgtttgcagatcttggacatttctcatacagtgcaatccagcttgctttcacttgtctagtttaccccgcactgattttggcatacatgggtcaagctgcttacttatcaaaacatcatgacttttactctagctcacaagttggattttacatcgcagttccagataagatcagatggccagtgcttatattggcaattttggcttcggtggtcggaagccaagcaatcatcagcggaacattctcaatcatcaaccagagcctgtccctgagctgcttccctcgagtgaaagttgtacacacatctgagaaaattcatggccaaatatacatccccgagatcaattggttgcttatgatcctctgcattgctgtgaccgttgggtttagagatacaaaacacatgggaaatgcatctggtttggctgtgatcacagtgatgctggtgaccacgttcctgacatccttggtcatcgttctctgctggcacaggccaccgctgctggcgttggctttcctcctgttctttggatccatcgaggcgctttacttctccgcgtccctgatcaagttcctggaaggcgcgtggctccccatcctcctggcgctcatcctgatggccgtcatgctcatctggcactacacgaccatcaagaagtacgagttcgacctgcacaacaaggtgaccctggagtggctcctcgccctcggggacaggctgggcatggtccgcgtccccggcatcggcctcgtgtacacagacctgacgtcgggcgtcccggcttctcccggttcgtgaccctcccggcgtttcgtgtgcgttcggtgagtgccgtacgtatgcgccggtcgtgcgctgcatacgctacgtgtaccctgcagcgagagcgagcgagcacgagcaacccggcgccggcggcggggccgaagcaggatcgacagccacgtggtgagcccggcggagaacaagcaggttgcggatgagctggaggcgctggcggcggcccgggaggccggcactgcgttcatcctggggcactcgcacgtgcagtgcaagcccgggtcgtcggtgctcaagcggttggcggtggacgtcgggtacaacttcctgaatcggcgacaactgccgcggcccggacgtcgcgctgcgcgtgccgccggcgtcactgctggaggtcggcatggtgtacgtgctttgattgaggctgagacgatgcccccctcccttatgaacatctgatatagtaatcacgactgttgtcagttttccccagtaacataatgaggccgttctgtatagcttagcttgttcgtacttctacagctgcaatatatagagtcaaaatactgtagaattaaaaaaaaccccccaaccc

SEQ ID NO: 120643 - DNA, 760 bp, Zea mays
  Clone ID: MRT4577_41509C.1
ccggccgggggatcaccgtgaatatgctgtcattccaataacctgtgtcatattagcattcctatttgccctccagcactatggtacgcaccgggttggatttctgtccgccccgatagttctagcctggctgttctgcatgagtgctcttggcctttataatatcatccactggaatcctcagatctaccaagctctaaatccgtcttacatgttcaagttcttaaaaaagactagaaaatatggatggatgtcacttggtggaatcttgctctgcatgacaggatcagaagcaatgtttgcagatcttggacatttctcatacagtgcaatccagcttgctttcacttgtctagtttaccccgcactgattttggcatacatgggtcaagctgcttacttatcaaaacatcatgacttttactctagctcacaagttggattttacatcgcagttccagataagatcagatggccagtgcttatattggcaattttggcttcggtggtcggaagccaagcaatcatcagcggaacattctcaatcatcaaccagagcctgtccctgagctgcttccctcgagtgaaagttgtacacacatctgagaaaattcatggccaaatatacatccccgagatcaattggttgcttatgatcctctgcattgctgtgaccgttgggtttagagatacaaaacacatgggaaatgcatctggtttggctgtgatcacagtgatgctggtgaccacgttcctgaca

SEQ ID NO: 120644 - DNA, 626 bp, Zea mays
  Clone ID: MRT4577_4150C.1
gtgggggttttttttttttttttttttttttttttttttttttttttttttttttttttttttttttttttttttttttttttttttttttttttttttttttttttttttggccccccccccccccccgggtggttggcttggttccggggggggggcatttttgggggggtttggcccccccccccccccccttggcttccgcccttcccctgcctgggggggggattcccgggaacccctgggcctcccttggggggtttttttcccttccccccctgggggggccttttcccagggggttgttttttgggggtgttgggggggccccccccgtttccggaactttcccttggggatgcccccccgccccctgttcgggggtacgttccccgtccccaccacctttttttttttccaatcccccctgggcggcggggcgcccgcccttcttggggatgtggttttgggcccttttggggccccccgggggggggttgggcccctttggccccccggtttttgtttccctgggaaacgaggggttttgggggctcccccccaggtcccttggtgtttttccccgttcctccgttgggtgttcccccgggctctccttgaacctg

SEQ ID NO: 120645 - DNA, 312 bp, Zea mays
  Clone ID: MRT4577_41510C.1
actttgggcggccgtcctaagccttcttttttcctttccgtttcggaacaagcacaatccttatgttactattgaaaatccaatttagacaaacaaagcgtggtgctccctgcacatatcgggaggcaagagcatgggaggtcgcaattggggagtattatgcttcagcgcaggaaaacatcatcaaactggaactagacctagaaccttgctcggcctctaaaccaccaaggatggcaccccttggacctcggccaccaccccttggtggtgctctcccaccccggagcaaaccagcacaggctcagccac

SEQ ID NO: 120646 - DNA, 515 bp, Zea mays
  Clone ID: MRT4577_41511C.1
aaaaagggggcgggccatattttttttttatggcgggttttgacccagttttaaacacttgggggggggcaccccttaatcctaatcctttcctatatccacaggggggctccacaatcccgacggggttgtttcctcccccaaagtccaccccgtagagggagcagggtcaaacaaagccggaagcaggtccttcctcccattccccccattggcattgtagctcccccccgtcggggggtccacccccaggttccctgcaaaaccggggtaggcccccttgccgtaaacccctgtgcaggcagggggggcctccaggggggcgtccttgtccccctggtaaaacccctcgcggaacgggttggtaaccgccccgggaaccatgctggcaatgttgataaccatgccgtccgccccaacattcccttttgggggcacgagccccggcgtttggggaccctacaaaggccgggggaacggccacccccactgcccggggcactgggtgggggaat

SEQ ID NO: 120647 - DNA, 124 bp, Zea mays
  Clone ID: MRT4577_41512C.1
gtacaggtacagggaaagggacacctacccgtaccactttttcttcatcgctccgaccatccccaccctcgtcaaggacgccgacttcccggacctgaacttctacttcaacttctacttttct

SEQ ID NO: 120648 - DNA, 4143 bp, Zea mays
  Clone ID: MRT4577_41513C.1
caatttcttttggccgtcctttccttgcctctccctggcgggattttttaacgcagggggagggcgccaccggctttaaccatggcctgtcgcttttgcctcgtctggtcggctggtccctctgctctatcccatcccccttgagcatgctgctgagcaagctgaactcatacgaacctcgatttcttccggccggcgttattttctctctcggtttctgaggtatttctccccctttctttcctccctccctccctcccaagcagattcttcactgctcggggatttggaacaaaggccgtggttcgaagctggtgtgttcgttgaattgtgcggaaagaaaggccagtgttatgtgtgaagcagtgaaggctaggtaggctggcctggctctcgccggcgatggatctcgagttcggaaggggcctgaggtccccaaagagagactccgggatttctttgattccccccagtccgcgccgtgggggcggggctgcagctccaccaaggcacgccgccatcaaactcaaagctccttgctctcttcgcgggcgctttcccctccccgccccgccgcctctattttatctatctaatctatctatttccacaacgcgctcgtgtctcttgtcgctgcagcctcgtcccgtccaatccttccaagtctctcttcttgctgcagctgccccaagcccaccccgcgccggctcaatccggcgggacgaggagacggcattgctcgcatcgcctgccctgccctgccccccatgcgtgttgtgcgcatgaacagaggctaggctaccaacaacgcatagcatagccatggatcccgagttcggcgtcggcacggcgccacaaaaggggcggcaggcgtggcggacgacgctgctgctggcgtaccagagcctcggggtggtgtacggcgacctcagcatctcgccgctgtacgtgtacaagagcaccttcgccgaggacatcacgcactcggagaccaaccaggagatcttcggcgcgctctccttcgtcttctggacgctcaccctcgtcccgctcctcaagtacgccaccatcgtcctgcgcgccgacgacagcggcgagggcggcacgttcgcgctctactccctcatctgccgccacgccaatgtcagcctcctccccaaccgccaggtcgccgacgaggagctctccacctacaggctggagcgcccgcgcgaggccgccgggaggtccggcctgctcagggcgtggctggagaagcacacgaggctgcacaccgcgctgctcgtcatggtcatgatcggcacatgcatggtcatcggcgacggcgtcctcacgcccgctatctccgtgttctcggcagtttcaggcctcgagttctcgctgtccaaggatcaccgtgaatatgctgtcattccaataacctgtgtcatattagcattcctatttgccctccagcactatggtacgcaccgcgttggatttctgttcgccccgataatcctagcctggctgttctgcatgagtgctcttggcctttataatatcatccactggaatcctcagatctaccaagctctaaatccgtcttacatgttcaagttcttaaaaaagactagaaaatatggatggatgtcacttggcggaatcttgctctgcatgacaggatcagaagcaatgtttgcagatcttgtacagttctcagacagtgcagtgaaggctagcaggtagcctgcatctgttcgcctaatagagcgatgtctctctagttcggaaggggcccctgaggtccccaaagggagactctggttacgcccgccttgtttctggcgtaccagagcctgggggtggtgtacggcgacctcagcatctatccgctgtacgtgtacatgagcaccttcaccgggattttacatcgcagttccagataagatcagatggccagtgcttatattggcaattttggcttcggtggtcggaagccaagcaatcatcagtggaacattctcaatcatcaaccagagcctgtccctgagctgcttccctcgagtgaaagttgtacacacatctgagaaaattcatggccaaatatacatccccgagatcaattggttgcttatgatcctctgcattgctgtgaccgttgggtttagagatacaaaacacatgggaaatgcatctggtttggctgtgatcacagtgatgctggtgaccacgttcttgacatccttggtcatcgttctctgctggcacaggccaccgctgctggcgttggctttccttctgttctttggatccatcgaggcgctttacttctccgcgtccctgatcaagttcctggaaggcgcttggctccccatcctcctggcgctcatcctgatggccgtcatgctcatctggcactacacgaccatcaagaagtacgagttcgacctgcacaacaaggtgaccctggagtggctcctcgccctcggggacaggctgggcatggtccgcgtccccggcatcggcctcgtgtacacagacctgacctcgggcgtaccggacaacttcgcccgagataagatcaaatgcccagtgcttatattggcacattttgtccttcggtggtcgtaagccaagcaatcatcagtggaacattctcaatcatcaaccagagcctgtccctgagctgcttccctcgagtgaaagttgtacacacatctgagaaaattcatggccaaatacaggacgtggactcgttcgagacggagctcgtggagaccctggccacgttcataacgctggacgcctcgtaccgctgcagcgaggccagcgagcgggagctggagctggatcccggggagcaggagcggcggctgaccgtgatcgcgagcaacccgctgcggcgccgcgccagctacgacctccaggacagcgtgcaacattcggcagcgtccaccgtggaggtgcgcgccacggccgccgacagcctgagccccagggacgcggagatcagctcggcggcggggccgaagcaggtgcggttcttcatcgacagccacgtggtgagcccggaggccgcggagaacaagcaggtggcggatgagctggaggcgctggcggcggcccgggaggccggcactgcgttcatcctggggcactcgcacgtgcagtgcaagcccgggtcgtcggtgctcaagcggttggcggtggacgtcgggtacaacttcctgcggcgcaactgccgcggcccggacgtcgcgctgcgcgtgccgccggcgtcgctgctggaggtcggcatggtgtacgtgctttgacgaggctgagacgatgcgactttcttttatgaacatctgatacagtaatcacgactgttttcagtcttcccagtaacataatgaggccgttctgtatagcttagccgtttttcagctgttcggactgttacagctgcaatatatagagtcaaaatactgtagaattacggagctcgtggagaccctggccacgttcataacgctggacgcctcgtaccgctgcagcgaggccagcgagcgggagctggagctggatcccggggagcaggagcggcggctgaccgtgatcgcgagcaacccgctgcggcgccgcgccagctacgacctccaggacagcgtgcagcattcggcagcgtccaccgtggaggtgcgcgccacggccgccgacagcatgagccccagggacgcggagatcagctcggcggcggggccgaagcaggtgcggttcttcatcgacagccacgtggtgagcccggaggccgcggagaacaagcaggtggcggatgagctggaggcgctggcggcggcccgggaggccggcactgcgttcatcctggggcactcgcacgtgcagtgcaagcccgggtcgtcggtgctcaagcggttggcggtggacgtcgggtacaacttcctgcggcgcaactgccgcggcccggacgtcgcgctgcgcgtgccgccggcgtcactgctggaggtcggcatggtgtacgtgctttgattgaggctgagacgatgcgactttttttatgaacatctgatacagtaatcacgactgttgtcagttttcccagtaaaaaaaaaaaaccgtaatatatagaaaaagaaaaaaaaaaaaaaaaaagcggcc

SEQ ID NO: 120649 - DNA, 281 bp, Zea mays
  Clone ID: MRT4577_41514C.1
atttccacgactgaattgcatgtataatggcatcacgtactggttttaccaatcataggaagcatgaagtattaggataattgtatagacacttaacacttgtactgttctttgtacttcccctgtacatggctctctctctatatatctaacccacacatgcagcctttctgctaggcccgcgacacgcgtgacgcctctttcgcatgactcgcgcgccatactccattccaccctcctctgtgtgatcccctcatgtcctcttccaccacgtgcgttca

SEQ ID NO: 120650 - DNA, 398 bp, Zea mays
  Clone ID: MRT4577_41515C.1
ccacccgtccggaagacctcagttatgggtcaaatacaatacacaacattccaattttcgctggcaacggcacacatgcggggggggagcttatacgctttccatacgctcattcatcctcttgctatgcacatgatggtctggaagtgcatcacaaacatcatgaggcacacaatgcgcaataccaaacgggccctccaaagcagccgaacccggtggacctggtggagatacaggcacaagaaaacacacttaccaacctcaacctgagcgaaaacacaaatagatgctacgtcatatactagatgcagatgataggacccgtcgaatcacaacataaaggcttctatgcctatgatcaaaaactcagagcctttcaaccaactgacgtccggaac

SEQ ID NO: 120651 - DNA, 458 bp, Zea mays
  Clone ID: MRT4577_41516C.1
attcattccgtggaagagtttgcgagtgtccagttgtgaaaggcgtcaaatttgttggcgatggctatactcactgtgaaggtatgctacacaaggcataaggagattcatcttttggcattttcttttattatgtgttaacagagcttctgaattataacgtttgtgttttaagcttccgggtctggtcggtgtgaaattaacaacggagggtgctggaaagataccaagaatggtcggacatactctgcctgtactgtaagtgttagttgaggtttcgctgtccttaaaactgtcattttatcagtaggatcctgtccagttctttttgttttattaagaaatgctatagaaatctgatgttttggttctgggcctgtaacatgcaggatgatggctgcagatgccctcacggactcaagggtgatggcaagcacaaatgtgaaggtaagggacat

SEQ ID NO: 120652 - DNA, 218 bp, Zea mays
  Clone ID: MRT4577_41517C.1
gactactaagatacttgcttacacagactgctacggtttcagatagatctatcatctttcattggaaagggtatcattgactgggctcaggtgctctgaccagcttgtgcgctgtcataccatccagctgggatacactactcggatctgacgctgtcaacgtccacatgaacagtaactagtaaatgcacatacttaccaaacctttcatacactga

SEQ ID NO: 120653 - DNA, 401 bp, Zea mays
  unsure (1)..(401): unsure at all n locations
  Clone ID: MRT4577_41518C.1
aaggaaagaaaaggagccctggttattggtacaagacgaagggggggccccccgggggggtaaattaaaaacagaccccctggttttacatgacaaaacgcaagaagcgcctgccttggatatccctaaccggagaggggcccggggttgaaaacaaagagggcccccccccccaggaccccaacgagggggacggcccaaaacaaaaacccagggggtccccccacgtaaacccccccggggggaaaacaaacatccccggtggaaaagggggtgtatcccgcaacgttcgccccctacttgggaacaaactgggacacccccttgcccttgccctttttcccggggggggnnacgtngacgggcaggccacccccaaacccgggggcttggggggcttg

SEQ ID NO: 120654 - DNA, 761 bp, Zea mays
  Clone ID: MRT4577_41519C.1
agacagccgcttccaggtttgaaactcaaatgcaaatgcaaatcccccccaccacggccaccgcccccctttccgccgccgtcgccgccggtgtcccctccggctccggcagtgcccagcggcgttagcgaccatgggggtcaagaacctttgggacattctcgactcctgcaagcagaagctgccgctcaaccacctccagaacaagaaggtgtgcgtagatctctcctgctggctcgtgcagttctgtaccgccaaccgctcgccggccttcgtcagggacaaggtttacctcaagaacctcttccaccgcatccgcgccctcctcgccctcaactgcagcctcatctttgtcacagatggggcaataccttcaatcaagctggctacttatagacgtcggctaggatgcaattctgaggctgattgtgatgacacgagttcgcaaccattgacctcccttaaacggaacaagggatcagaattctcgcgcatgattaaagaggcgaagcatcttggcttggccttaggcatcccttgcttggatggtgtcgaggaagcagaagcacagtgtgcattgcttgatttaagctcattgtgcgatggctgttttacatcagattcagatgcttttctttttggggcaaggacagtttacagagatgttttcataggggaacggtggttatgtcatttgctacgaaatggaggacatagagaaaaaagcttggttttggcaggaaatcactgatatcatttgc

SEQ ID NO: 120655 - DNA, 304 bp, Zea mays
  unsure (1)..(304): unsure at all n locations
  Clone ID: MRT4577_4151C.1
gngaagaagttcgtgaaaacgatcaacgagagcatggacgagctcgccagccagcgcaaaagcatctggtggagccggtggatacccagggaggagtaggccgccggccgccggcgcacctgtacattgtccacttttgctgtataaaacgtcgcccagtagcactggtgatggtatactacactatcctacggtacttcgtacagtacatgctgatgactggtgagtaaagtttgtctgaaaagatcggagtaacacggtgtatagctgtaaatatttgctattgaagcatcatgatttttgt

SEQ ID NO: 120656 - DNA, 111 bp, Zea mays
  unsure (1)..(111): unsure at all n locations
  Clone ID: MRT4577_41520C.1
ctcgagccgatgtcggctcgagagtaccacgttagctttatgctactccagnagcgcagnaagaactgccgatcgacaccgatgagggatgatgctcgtgtgccctcgctc

SEQ ID NO: 120657 - DNA, 530 bp, Zea mays
  Clone ID: MRT4577_41521C.1
cccgcccgcgcgcccgcccccgcgcccccgccctccctccctcgcgccctcgccctcgcccgctccctcgcccgcgctctccccccctctccccctctctcgcgctcgctctcgctcccgctcccccccccgtgccgggctcggcacgcggcggcctcgcgcgtgcttgcccagcccccccgccgacctgcccaggtggccgggtcctcctcaggcccttggccagcggcggccacctttgtccccggcggtggggttcgccccagggcccggcccacgaccgtcgcggggcggaggtgccgtccttcttgccgccggcagttgcagcagcgcctgtgtatgcggaggttggggagtcccccaagggtgatagctcatctggggctcgggcccgccgaggtggtgtgatcgaccccaatgcaaagctgaagactgactcggaaggtggaaaatccaaagatggggggtctgttccaaagaagggcagtaggtatgttccatccttcttgccaccatcatttgcaaaagag

SEQ ID NO: 120658 - DNA, 238 bp, Zea mays
  Clone ID: MRT4577_41522C.1
agtcgattcggtcagctggctcaattctcccttgtctcgctcgctgatcatcagacaggtcgcatgtcgactcgagagacactcgatcgaagcgacgtgggcgtcagactaccgagcagctgcacgtcgtagacgctcatcgcatagatcgcctgagtgtgagttcactcagctgtacatgcagcaatcattgtcgctgctatcatgggtactgagtatgtctcatacatggcatcga

SEQ ID NO: 120659 - DNA, 171 bp, Zea mays
  Clone ID: MRT4577_41523C.1
attcgtttttcgacgattaggctggtggactgaaagggatggtttgttgactatcgttgaagctgctggctgacattgaaaagaccgtgggcacacgagcagtgagccctagggaaccttgtgcgacgcggttcagtgcatgaaacctacatgatctgagagggactgatg

SEQ ID NO: 120660 - DNA, 230 bp, Zea mays
  Clone ID: MRT4577_41524C.1
tgactgcctactcaacttcataatcaaagctgttaaggactttgcttccttcagcgatgacctgggatgcgggcttgtctccctgggtgcctggatatgaacgctaccttccacgtatctgcatatggggtaatctcccaatggatgctgtgccactaggggtaaacttaaggtgaattggaaccttggtgcgggtatcgcaaattaaaacctgaaccctgccgtgaaaa

SEQ ID NO: 120661 - DNA, 449 bp, Zea mays
  Clone ID: MRT4577_41525C.1
gggccgatccaaaaatgaagggccccggcccccgatgggatgggttcatcccctggggaccaaccctgcggcggggcgggggttacatcgaccgcttacagggggccgcccttggcattggtgggggggcccccctcggtcatgagcctcccccggggggggcaactcccacccccctacgatctgaacaagggggggcccgagaaaacccccctggtcaccccacgggcgggccaaccaagggggggatctgaggggaggccccatggccgggggtgctcaaccagttagttgccggggaccaaattcggggggtttgccccggccttggtggccacggggtcggccaccgggccaaaaagggtctcgagggggcccctgccggggaccatggcccgccccaaaaaccccaacatggaaaacatggcaagggggccgttcttgagccc

SEQ ID NO: 120662 - DNA, 386 bp, Zea mays
  Clone ID: MRT4577_41526C.1
gggaatcaaatgcatttcctaccttgcagctatcagcgacgattattctgacaatattgtcagagctgatcgaggagtacaccgcgctggtggcccgcatgctggagcagtctgctcaactatcgcgcgcgttccatgcacctggatgcatccttctctcatgactgcgagtagcctccctctgtcgtgctcgcctgacgtatgcgccccacacgactcagcctcacaccctccaccttaccactggagtctcactattggatccatttttctcagccgtttcagcctactgcccgccatggccgcgcagccagtagcctgcgcttgatgcatctaggataagatactgtaggttcaccaggggtccacgggggaccggtgagctt

SEQ ID NO: 120663 - DNA, 501 bp, Zea mays
  Clone ID: MRT4577_41527C.1
gttctgcgccttcttgactccacctcttgcgccgccgtccgcctcccctccagagatccgacccttcgcaccgagcatgggcgagagcacgatgaggactcccggacgtctctcctcgcctgaagtgcgtgacctcgggacttaggcaatcaaaaggaactctcgcctaggaacatctgcgagaactggtgggcatacatcgactgcccaatagctgtggctactatgaggctacacgtgcctcacatgatctccaacgcctaggcttccctatgcgtaatctcgcccaagccacatgtcacatctaccctttgcgatcctctggagaaacacaagatcccgcactatgtgttatcttactgccgaggaggatctgctattctatatgacgaggacgcctcctgcctgagatcagatgccgctactccaaatccaattgctgtgatctgctcacccatacagccttaacttgtcgatcgcttgcttgttcttgccactcaa

SEQ ID NO: 120664 - DNA, 567 bp, Zea mays
  unsure (1)..(567): unsure at all n locations
  Clone ID: MRT4577_41528C.1
attcgtcaaactcgtttcactttctcctcgtccccgacaagccactcgaagccgnnatacggccatggactccaccggcaccagagcagcggggaaggntaagaagagagcggccaggcgcaangtcggcaggccaaggaaagaagtcgtgtcgaggtcccgtggggctgggctccagttccccgtcggccgcatcgggcgctacttgaaagaaggccgctacgcgcagcgtgtcgncaccggcgcccccgtctacctcgccgctgtcctcgaatacctcgccgctgnagttctgganctcgccggtaatgctgcccgggacaacaaaaagctcgcattattccgcgccacgtgcttctggcgatccggaacgacgnagagctcnagaagctgctgggcagcgtgaccatcgctcacggaggtgtgctccccaatatcaaccctggttctgcttcccaananagacggnagagaaggcgtccagtgncgagatgaagggaggcatagtcgcccaagagggcccccaattcccctaagaaggcataaccgactgtccggaagtgatct

SEQ ID NO: 120665 - DNA, 666 bp, Zea mays
  Clone ID: MRT4577_41529C.1
gtcttgctttgcagctgtgtgtattgttattaccttaccaagctagtgacttcattgttagcgcgtgtgcagatatggacttgttggagatatctgtcctgaaaaattctctgtgctatataaacattagaaactgcttcctgttgacggatgatggtatttctaaccttttgatgaagtgtacaaaggtccattcgatggttctttcttatacttcttttggaaatcgatcaatccaaatgctatgcgctgccaatccttctggccacaacagtgggcatgctcatgttatggcatcttatatgcaagaattacatctggatggctgcaaaggtattgactctgttgctttgtcgcagctaatgagcattataagtatcacaaagtttttgagcttaagggaaacatcacttacagatggtgcactctgcaagtttgttggctctagtctggagtatcttgacgtttcagagactgtgatttctatggtatcattagcaccagttattcaaagaaactgtaaattgaactgtctgaaaacagctggatgctgtagtcttctgttgcaatgtgctaatgtagaacatatcaatggtaacaagtatggagattttctacatgagttaggaactacctactgttggaggattgttgaatgggctggga

SEQ ID NO: 120666 - DNA, 365 bp, Zea mays
  unsure (1)..(365): unsure at all n locations
  Clone ID: MRT4577_4152C.1
ccggcaggaaccggggcggagaacccgggncgacccacgcatttatagcagccgcagggagaagccacaatggcggggggaagggaaaggacccgcccacccgcccacgagagagcggagacagcagaaaggccacgcacacgcaaggcaggcaacgagaacatcagcaaaagaccgaaaaagggaaataaccaacaacaagaatagaccccgacgacaggcacaaaaccccaacagaaaaggagagccacacctccagaagggcccaaagaggggagcaagacacgcagaggggaccagcagagaagagcaaggaggggcgaagagcgcaccccacaggccagaccaaggggggctcgcaggga

SEQ ID NO: 120667 - DNA, 434 bp, Zea mays
  Clone ID: MRT4577_41530C.1
tcgcgatctagaaccggacgcgtgggtttttttttttttttttttttttttttttttttttttttttttttttttttttttttttttttttcactcttttttttttgcttttttttttcttttcttttttgccttggttttccctggttttttgggggggggggggttcactcccttttttctttttttctgtgtggggtttaaaattttctttttcacggggttgtttttttcctgggttcaattttgttttggcctgaatttctattatattgcaggcgggggctgttgattggcaaattttgggtccatttggggggtgttactctccattttttcgttggggttcctttgccggtttttgttggttggactttcctgaccccttgcttttaggatctggagtatggcccgcccagggggttttttttttt

SEQ ID NO: 120668 - DNA, 805 bp, Zea mays
  Clone ID: MRT4577_41531C.1
ccggccgggacatccggacgcgtgggcgtcaccatccgaaacaacgcgaaaatgaacggaaccaccggcgaaccgaaaccgaccaccacggagactaacacgaagcagccgaccggcgaaccgacctccacagagactaacaagaagcagccggccggcgaaccgacctccacggagactaacaagaagcagccgaccggcgaaccgacctccacggagactaacaagaagcagccggccggcgaaacgaccaagctacgccccggaggcgtgtcgtcggcgccaccgtacgattcgatgctcaggtccacgatgtacgagcggttacgcgcgcagcacccggcggagttcgaacccgcgagcgtcttcttcacgcacgatgagcggagcttcatcgaccggcgcaaaagcttgcgggtgaaggccgcgctcgtctacgaggccgtcacgggccgtcacgaagacgacgaccagatgcagagcgccaaaatcctactcctggctctcgccaagaaatgccactccaaaatgcacccagaaaccgccgtcgtccatggtggtggcactggtactggtactgctggagaaacaggaggaaatgccgccgacgaaactggctgggacgataagatgatgcgcgtgctcgacggcatcttcctcgtcgtcggcttcctgccaaagctcaacgaagcgatcagcagcagcaacgccgaccgcgactccgtcgaccagagcttcaggtcgcgccacatgctcgagatggtcgcggacgtggtcaagctcgagaaccagctactctggctgc

SEQ ID NO: 120669 - DNA, 187 bp, Zea mays
  Clone ID: MRT4577_41532C.1
attcggctcgagccgacccagggctttttctcgggctcggccccggaagacgacgaactacgactcgcccgacccagggctcggactcgggctcagccccggaagacgactaactgcgcctcgcccgaccccagggctgggactcggcctcggtctcagccgactgtctgcgtatcgcccgacccaa

SEQ ID NO: 120670 - DNA, 746 bp, Zea mays
  Clone ID: MRT4577_41533C.1
gggtaccctgcgggacccaccagttctgaagcgtaccatccgaacaacgcgaaaatgaacggaaccaccggcgaaccgacctccacggagactaacaagaagcagccgaccggcgaaccgacctccacggagactaacaagaagcagccggccggcgaaccgacctccacggagactaacaagaagcagccggccggcgaaccgaccaagctacgccccggtggcgtgtcgtcggcgccaccgtacgagtcgatgctcaggtccacgatgtacgggcggttgcgcgcgcagcacccggcggagttcgaacccgcgagcgtcttcttcacgcacgatgagcggagcgccatcgaccggcgcaaaagcttgcgggtgaaggccgcgctcgtctacgaggccgtcacgggccgtcacgaagacgacgaccagatgcagagcgccaaaatcctactcctggctctcgccaagaaatgccactccaaaatgcacccagaaaccgccgtcgtccatggtggtggtactgctggagaaatgggaggagatgccgccgacgaagctggctgggacgacaagatgatgcgcgtgctcgacggcatcttcctcgtcgtcggcttcctgccaaagctcaacgaagcgatcagcagcagcaacgccgaccgcgactccgtcgaccagagcttcaggtcgcgccacatgctcgagatggtcgcggacgtggtcaagctcgagaaccagctactctggct

SEQ ID NO: 120671 - DNA, 995 bp, Zea mays
  Clone ID: MRT4577_41534C.1
cggctcctttcctcccatggcgcccaggcctgctcctcccctcggccagccagggcgcggtggcccctgcccctgccccttcttcctcgcgcacgctgcagctcccagctatggcgcccgctccctgcagggatgcagttccctggccgagctccagctccagctccggccagcggccgtggcgcggcgcccttgcagcggatgcgcagagcttcctcccatggcgtcctccccttcctcctcctgtttcacggcagcaagcagcctctccatggccgagctcgcccagcagccatgagagcctcttcccatgggcgccaccccctgcaacttccccttgtcggcgcccagaaatcgcagcagcatgctcctttgcctcacgcttgagtgctcgacgaaatgccgcagcgagcagcggtcatgagatcccctctgtgttgcttgcatcggcccgatctgcgcagttccgacccaaggcgtcgcgtgggtgtttggacagccccacactacgtcgtcgatctgcgcgattcgaccgtctacgtgtctcacttcgccggatctgcgcagccccaacatcgacgccgttcaccccggtgaggcgacgatgatttttgtttgattccacatcggcattgttctccggtgattaaattgtgtatatgtgctgttttgttttattttattttgtggaggcgaggaaccccatgttttgcgtggagaagaaggcaagtcgtcaacgctcgtcggatgttcggagtgatgcacaaatcggaatcgccatcgtccttacaaacacaaattgggtttgtttatggtgagccgatgcatatcgctctcgatcgactcgattaattattttgaatggatgtgtgtaaaacatttcagttatgcgcattggtaggatcgcgattgcggttggagaacaagaagttgtttgatgtgtgcgatttgtagtttgtctaaatacgtttggtcgaaaaaaaaaaaaaaaaaaa

SEQ ID NO: 120672 - DNA, 272 bp, Zea mays
  Clone ID: MRT4577_41535C.1
taggggccttttttttttttttttttgatacaatgacgaggcatgatactgaggtagccatctcttgcatgaagttacacctataaagccatgtattccaaaaaacttgcatctctgcaaagcatttaagaacagagacggacacaacagagaaggcggtgagatcatataatgcgtagggcggcagctatcatgatagatagatgatgatgggcgctgcggtcccggaattggcctgggggtggaggtttcatgtccacggcccggtcgtc

SEQ ID NO: 120673 - DNA, 191 bp, Zea mays
  Clone ID: MRT4577_41536C.1
ggtttttgacttttatgcttctctcctccttcatatcgtcaggctattctatgattttaatcctgccctgagtgtcctctatcccgaaacaaacccaactcctaaaacaaaagcctgaacccgcacacattaaaagcaaaaaccttaattggaggcaacaatggccacccccacatccccacacaatacac

SEQ ID NO: 120674 - DNA, 1916 bp, Zea mays
  Clone ID: MRT4577_41537C.1
gggacctcgagccggcgggcctggagcggagctttcgagctcgcacactcccccctcgcaaccatcaccgccgcggcctctatttctcccccatcccccctcgcatgccccgctcgccgccgctacctcctcccgcccccaggtgactgtgactcactaactccctacttccgtcgcccaaatttctatctcactatctccgccgcgagatctccggctgcccgcgccatggtcgccgcctccggcctcgcgctgccgcgggtgtccgcaccatgcccggtgcgcacgcgtggtggcctccgccccgccttcctccgagtcgcgcagcccgtgacgctgccaccgccccagctccggtgctgcgcgtccaccgtcgacgatggcgtggtgtccgctgcggcttccaagtcccgcctccccagggtggttggtatgggttcaaagctcgttggatgtggatcagccatcccaacacttagcgtttcaaatgatgacctttcgaagatagttgaaacatcagatgaatggattgcggctcgaactgggattcgtaacaggcgagttctttcaggagatgaaacattgcggggactctcgataaaagcagctcaaagggcacttgagatggccggagtaaaagctgaagatgttgaccttgttctcctttgtacatctactccagatgatttgtttggaggtgctgctcaggtgctgacggacgtggggtgcacaaaggcttttggatttgatattacagctgcttgcagtgggtttatagttggcttaatcacagctactcgttttatcaaaggtggaggttttcagaatatcttagtaattggtgctgatgctctttcaaaatatgtggattggacagacagaggtacatgcatcctttttggtgatgctgctggtgctgtgttggtacaggcatgcagtgctgatgaagatggcatgcttggtttttgtgttcaaagtgatggcaatggacaaaagcacctaagtgccataacggcaaatgatgagtctatcttgtccaataccaatggtgttcctggatttccgccaaagaaggcaacctactcatgcattcagatgaacggaaaggaagttttccgctttgctgtccgatgtgtgccacagtccattgagaaggcactccaagaagctggtttgcccgcctccagtatagactggttgttgttacatcaagctaatcagcggattattgatgcggctgccagtcgattagatatcccgtccgacaaggttatttcaaatcttgccaactatggcaataccagcgcggcatccatcccgttagctttggatgaggctgttcgcagcggcaaggtgaaggctggcgatattattgcggcgtcaggttttggtgctggacttacctggggttcagctattgtcaagtggggctaattattcaacgtgaaccggaacaacacatcaatgagatagcttcaagctttcaaaggccttgggaggcctacatctgttggttctttccagtgtttttctgtgcaacatttttctttcgcatgtgccagttttccttgcacatgaaaatgcagtgcgccattttaccgtaatccatctgttccttaggctcattacacagttgagagagattgtaatgtagttggcagtagtttgagtggtggatgtaatgtaagttcttgaattttgcatggagataaatttggtggggttaaaagatgagatcacactgtaaagctaattggccttttgtctgggaactgtactgagcggtttccgatcttgtggccccaggcaataagcatgttacaaggagaattggaccgtggacgtatgctgtaggtcaattcttagtaattttgatctgtttttattatacaccattcttcgtgtatttttttttc

SEQ ID NO: 120675 - DNA, 515 bp, Zea mays
  unsure (1)..(515): unsure at all n locations
  Clone ID: MRT4577_41538C.1
ggacctcgaggcggccgggccgggagcacgtcccctcctcgtcctcccctgtatttgcatctgtctccccttttttactttaattgcaggtcacaccgaatcgagaggtaacgaaggccgagaatgaacccgcttccgaaggaactcgcggaggacgagactgcgatcgagaatggggccggagggaacaacgctaaggcggagagagatggctccggatggaaagtgcggtgccaagtaaatcgtaaatgccaagtaggggnaactgaatcgggaagaagagggcggataactaaaagatatatctcatcatggtgatgaagaagtggaacacgtaaatgtggatatgctccattggcgtgatgatagtgatcttcgtaatgatttgtatataatacaaagtcgatgctgaggacggcatgctcgtgaggtatctcaacaattcctacacattgcccctcccgggtgatccaaacctctgagcgtgtcgtacctttcgctgaggtcctcctctg

SEQ ID NO: 120676 - DNA, 275 bp, Zea mays
  unsure (1)..(275): unsure at all n locations
  Clone ID: MRT4577_41539C.1
ccgccgtgtgctggactcgcccttagcagtggtnacancgcagagtacttttttttttttttttttttttttttttttttttttttttttttttttttttccgttaaacagtctatgggtttcctgggttggcccaaataaattatgggggggcatacatgaaccttttttcttggcccccggcggggtggcgggggggggggggcgaatcctgcgcctttccttccctctggcggccgttcggccttcttcccgggggccccgttccccttttc

SEQ ID NO: 120677 - DNA, 657 bp, Zea mays
  unsure (1)..(657): unsure at all n locations
  Clone ID: MRT4577_4153C.1
ctcgaggccnnggccgggnaanaaattacaaaaaaaaaaaaaaaaaaaaaaaaaaaaaaaaaaaaaaaaaaaaaaaaaaaaaaaaaaaaaaaaaaaaaaaaaaaaaaaaaaaaaaaaacccgttcccaaagggtcaatttttgatgggaagaagaagttggttccaagggggggggaatcgttgaaagtttcttaagccgggtcctcgccggaaaggccgcctccccaaggagggccgggaacccctcggggaacaaaaaaaacctgaaggaccaggggcccccggggttcgggccgaacaatggaatcggaagccccggaacccccaaaaagaactggacccccccccccaaaaccggggttttcggcccggggggggggaaccccaagttgcccgttgggggcgccccgaaccccggcgcgaatgttgaagaaggaacggggttgaaccaaaagggggggtcccccccgctcaagaacgtcaaaaacccccccccccccgcgtgacccgcgcggggttgttaggccaccccacattgttgttcgttcaaaaaaagggcgggggaaaaccctggaatgggaaggaactctgttcgggttcggccgggttgggctccctgtttatatcacggcaatattatactactagaaaggggg

SEQ ID NO: 120678 - DNA, 1202 bp, Zea mays
  Clone ID: MRT4577_41540C.1
ccacgcgtccgaagatgtcgacctcgttcttctttgtacatctactccagatgatctgtttggaggtgctgctcaggtgctgtccgaagtggggtgcacaaaagcttttggatttgatattacagctgcttgtagtgggtttttagtcggcttaatcacagctactcgctttatcaaaggcggaggttttcagaatgtcttagtaattggtgcagatgctctttcaaaatacgtggattggacagacagaggtacatgcattctttttggtgatgctgctggtgctgtgttggtacaggcatgcagtgctgatgaagatggcatgcttggtttttgtgttcaaagtgatggcaatggacaaaagcacctaagtgccatagcggctaatgacgagtctatcttgtccaataccaatggtgttccaggatttccgccaaagaaggcaacctactcatgcattcaaatgaacggaaaggaagtttttcgctttgctgtccgatgcgtgccacagtccattgagaaggcactccaagaagctggtttgcctgcctccagtatcgactggttgttgttacatcaagctaatcagcgtattattgatgctgctgccagtagattagatatcccatccgacaaggttatttcaaatcttgctaattacggcaataccagtgcggcatccatcccattagcattggatgaggctgttcgcagtggcaaggtgaagactggtgatattattgccgcatcaggttttggcgctggacttacctggggttcagctattgtcaaatggggctaattattctacgtgagccataacaacatcaatgagatcttcataggccttggggacctacatctatttggtctctccccccttccacccattttctgtgcaacatttttctatcgcatgtgtcggtcttccttgcacatgaaaatctagtgccattttaccgtattcctttggctcattacacaactgagagtagattggtggatgaaaatggttgaattttgcatcgaggatgattgtggtggtactaaagatgagattacactgtaaagttaatgagcctttttgtcagggaattttactgaataagcatgtacaaggagaggtgggccgtggacatatgctgtaggacaattcttagtaattttgttctgcttttaaaaaaaaaaaaaaaaaaaaaaaa

SEQ ID NO: 120679 - DNA, 654 bp, Zea mays
  Clone ID: MRT4577_41541C.1
tttcaaaacgatgagtcaatcttgtccaatttaatggtgttcctggatttccgccaaagaaggcaacctactcatgcattcagatgatcggaaaggaagttttccgctttgctgtccgatgtgtgccacagtccattgagaaggcactccaagaagctggtttgcccgcctccagtatagactggttgttgttacatcaagtgagtgtgcttaactagaaatatagttgacctgaatcattgctattataaatgatcttctgcgttacaggctaatcagcggattattgatgcggctgccattcgattagatatcccgtccgacaaggttatttcaaatcttgccaactatggcaataccagcgcggcatccatcccgttagctttggatgaggctgttcgcagtagcaaggtgaaggctggcgatattattgcggcgtcaggttttggtgctggacttacctggggttcagctattgtcaagtggggctaattatttgacgtgaaccgtaaacatatcaatgagatagcttcaagccttcgaaggcctcgggaggcctacatctgttggttcgtttccgtgtttttctgtgcaacatttttctttcgcatgtaccagttttccttgcacatgaaaatgcagtgccattttacc

SEQ ID NO: 120680 - DNA, 555 bp, Zea mays
  Clone ID: MRT4577_41542C.1
tgtgttgggtgtgtctctctctcgctcgccagcgcgccaccagacaagagcgcactcaccaatctcgagagagacaagagcggggggggctctcgcgtctcctcttcactcagtgctctgcgatggggcgctgcctccaccaagacggcgcgctgtgtctccccgccgctggccgcccgccgccgcagcagcggcgagagcgtcgccgccgcctccatcatgaccgccgccgtctccaccaccggggagaacaacaagacgtcagctgctcctacggaggagcatcatcagcatgcacatcatatgccgtcttacaagatggaaagtatcaagacagctagctgattgggcgtagagatagtatcttgacacactccaagccagccgagaagtgagggcagccacaggattgactccctgaccgaccctctgaaggatggcatgatggaggtaaggagctgagagaacgtgccaaggagagccctgacgagtatattgtttgtttggttggagacatgactacgtgagaagctctgccatcccaccatactatgc

SEQ ID NO: 120681 - DNA, 309 bp, Zea mays
  unsure (1)..(309): unsure at all n locations
  Clone ID: MRT4577_41543C.1
tatanttttttttatttttattctaaacacagggggcttttttattccatgcagggtatatcgttccatcacattgaacatttttatctagggcgtacactcgatcaacacaccctatcaacccttgggtagaacaatcgcctaccacggagtgtaaggcccaccatgaacaaaaaaattggcacacaacggaccttggatatatctcagagcaacttccaccaggtgctttgtgcactttttttagacattccaaacacatactccgatttaattcccagggcgcagctagcctccattacccggaaa

SEQ ID NO: 120682 - DNA, 533 bp, Zea mays
  unsure (1)..(533): unsure at all n locations
  Clone ID: MRT4577_41544C.1
aaaaaaaaaaaaaaaaaaaaaaaaaaaaaaaaaaaaaaaaaaaaaaaaaaaaaaaaaaaaaaaaaaaaaaaaaaaaaaaaagaaaaaaaaaaaaaaaaaaaaaaaaaaaaaaaaaaaaaaaaaaaaaaaaaaaaaaaaagaagaaaaaaagaaaaaaaaaaaaaaaaaaatgaaaaaaagaggggggggggaaaaaaaanagaaaagcgcgggagaaaccaaagggaaacgcctgggagaacataccacgctagacaggtgggccaatacgaaagaggcccaaaccgaacggccaaccgaacagtgcccaaacctgaatggaaaaagggacgggccctgaaggggaccataaagggcgcgcgggcgcgggggatacccccagggggaaccgctaaaggggccagcnccaaagcgcccgcgcaaagggggcacgtccctacggtaagggccaagtcggccggcttcccccggaaagcccaaaatggggggccccgctcagggccccaaaaaagggcgttaggggagccggacac

SEQ ID NO: 120683 - DNA, 233 bp, Zea mays
  Clone ID: MRT4577_41545C.1
ttccctattcggggggtgagaatgaagggaccggcccttaacacataagggtcagttacaggcttcgacttctgaagacatttattagggcggaattcaataacaggggtgcaggcacaaggataaacggggccgtatttgtgggcaacaagaattaacgccacccttcgtgtgaaattgaaagccacaagctgttcagactgaatattcgtttttagggcggctcactttgg

SEQ ID NO: 120684 - DNA, 236 bp, Zea mays
  Clone ID: MRT4577_41546C.1
ccgcccttttttttttttttttttttatataaaatagcgaagcttatgctctcaattcaactgactataagtcagaggccttatctcatggaggatggggtattatttctacaatacataatcaatacacactgctagtttaaaatataatccacacctttctcgtatggcatcaagttatactataactagaatctgtcaaccacaacgatgttaaaaatccaatcaagcatata

SEQ ID NO: 120685 - DNA, 2386 bp, Zea mays
  Clone ID: MRT4577_41547C.1
gaatgacaactggcacgatatcttgtatcgataaatcatataataaaaaatccaccacctacatatgttgtcgaggaaaatgaaaggtaattaaccacgtactaacattttcaatttgcatcttgtatatttcccgacgaaacagaaggtcaaagtcgtcagcgcctccgacgaaaatcaggagcagaaaccgtcggatggaaacgaaacaaactcaaaactgaaatgacaacaactcacgagctaatcgcacagtctttttcgcgtggcttggctgacatgtgaaaaagctaggcgcccccgataaaaagggcctccccgctccccggacgcggcggctactgtttctgtttcttccttcgaccccggtcgtcccgtcctccgctgggcatcgaaagtcgaacgcctcctccctccctccctccctcccagttccgtcgtcggctcctgcagcagcagcaagcaatggcggcttcctggagagccgtggcgctggcggtggccgcagtggtctggcttcttgccgttgccggtggcgcgcgggcgttcccggccgaggacttggtcgcgcggctgccggggcagcctccggtcacgttcaggcagttcgccgggtacgtggacgtcgacgccaaggccggcaggagcctcttctactacttcgccgaggcgcgggaggacgccgccgccaagccgctcacgctgtggctgaatggaggtcctggctgttcttcggttggaggtggtgctttcaccgagctagggccattttatccgcgaggagacggccgaggcctcagattgaacaagaagtcatggaacagagcgtccaatcttctgttcgtggagtcaccggctggagttggatggtcttattcgaacacttcatcggactacagcactggagacgtgcggactgctcatgacatgtaccaatttttgttgggatggtatgcgaagtttcctgagtacagatcaagagctttgttccttaccggagagagttacgcagggcattacataccacagctcgctgatgtacttatcacccataacgagaaatcgaagggtttcaagttcaatattaagggagtcgctatcgggaatccgctcctcaagcttgacagggacgtccctgcgacctacgagtacttttggtctcatggcatgatctccgacgagatatttccaggcgatcagccacagctgcgactttgaggactacaaccttaacgaccctcacaacgagagcaagtcatgcaacgacgccatcgcggaagcgaacagcgtagtcggagactacgtcaacaactacgatgtcattctcgacgtctgctacccatcgatcgtgatgcaggagccagatcgctgatgcacttgtcacccataacgagaggtccaagggtttcaagttcaatattaagggagtcgctatcgggaatccgctcctgaagcttgacagggacgtccctgcaacctacgagtacttctggtcccatggcatgatctccgacgagatattcctggcgatcagccacagctgcgactttgaggactacaccttcaacgaccctcacaacgagagcaagtcatgcaacgacgccatcgcggaagcgaacagcgtagtcggagactacgtcaacaactacgatgtcattctcgacgtctgctacccatcgatcgtgatgcaggagctacggctgcgagaatacgcgacgaagatcagtattggcgtggatgtctgcatgtcctacgagaggtttttctacttcaatctaccggaggtgcagcaggctctgcatgctaacaggacgcatctgaagcatcactggagcatgtgcagcgatatcctgaactacagcaacaccgacggcaacatcaacatactgcctacacttcaaagaatcgtcgagcacaagataccactttgggtgttcagcggcgaccaagactccgtcgtgccattgctgggcacccgaacccttgtgcgagagctagctcacgccatggggctgcatgtcaccgtcccctacagcacctggttccacagaggccaggttggagggtgggtgacggagtatggcaacttcctgaccttcgccacagtgcgaggtgcatctcacatggtgccctttgcacagccggaccgggccctcgggctgtttcgatccattgtactcgggcggagactaccaaacgcaaccagtcccccaattggctgaagtgtatctatctacaaatgaaggtggagatatagaaaaaaggttgcttagggtttttcttttttcctttcagttatgttatagtagattagttcataaacatgtattggatgttgaataagttctttattgtttataaagagcagaaaataatactattattt

SEQ ID NO: 120686 - DNA, 749 bp, Zea mays
  unsure (1)..(749): unsure at all n locations
  Clone ID: MRT4577_41548C.1
cattgggtacctcgaggccggccgggacatgctggacttcacctgcgcctcgctgttcggcgggaagctgccgagcaaggccatcggcgacggcgccgcggcgaaggcgttcaagtggctcgtgttccagctccacccgctcgcgagcaaggccatcaggccctggccactggaggatctgctcctccacacgttccgcctcccgccgttcctggtgcgccgcgactacgccgagttgacggcctacttcgccgacgtcgcggcgggcgtcctcgacgacgccgagaaggccgagccgggcgccgtcccccgcgacgagctcctccacaacctcatcttcctcgccatcttcaacgcctacggcggctacaagatcttcctgccgcacgtcgtgaagtggcttgcgcgcagcgggccggagctgcacgccaggctcgccgacgaggtgcgcgccgtcgtcccaccgggcagtgccagtgccggcgacgcgatcaccctgtccgacgtggagaagatgccgctggtgaagtcgttcgtgtgggagacgctgcgcatgaacccgctggtggagttccagtacggccgcgcgcggcaggacatggtggtcgagagccacgacgcggcgtacgaggtgaagaaggccgagatgctgttcgggtaccagccgctggcgacgcgcgacgagcgcgtgttccaggggcgnccggggagttcgtccccgaaacgggttcggccgtctgctccgacga

SEQ ID NO: 120687 - DNA, 519 bp, Zea mays
  Clone ID: MRT4577_41549C.1
agttaccaaacccccaaccccctccgcctccggcgacacccctcccgccgccgcccggcgagatgtcgtcgctctgccgcgcgccgcgggagaccgacttcgcgcgcttcccggactccgcccccatcgtcatcgacaacggcgcctccaccttccgcatcgggtgggctggcgaggcggagccgcgcgtctccttccgtaacatcgtgcagaggccccgccaccgcagctcaggtgaaactgtgacagttgtaggagacactgatccagctctaatgaagtactttgactgcacacggacatcaattcgctcagcgttcgatgatgatgtcgtctatcagtttgagtacatggaatatattcttgattatgcttttgaccgattaggtgccacatcagaggtgggccatcccattcttatgacagagtgtgagtgcaatccatccttttctcgagcacgaatgtctgaacttcttttcgagacatatggtgtgccatccgttgcttttggtatcgatg

SEQ ID NO: 120688 - DNA, 202 bp, Zea mays
  Clone ID: MRT4577_4154C.1
aaaatatcaaattacagcaaaattgattcaacatcaacatattcagaccatggcaagggtcattttctatgaggaatatgcctctaatttaaccaactaccaattcttatcacatatgagtatttgttcataatccctcaagatgcattaatttcatcctacatttcctccaactaccaactaatattggttatcatacttc

SEQ ID NO: 120689 - DNA, 250 bp, Zea mays
  Clone ID: MRT4577_41550C.1
ctggatattagcctatccggcaggaaggtaaattagttggagattctaacgacggctgctggcaagttcgtcatagactggaaaacaaaggacggttgtttgaagattatgatacttaagcgagtaaagggttggttgtaagatcaatatgttcatgagcacaccagtggggaggcaaacaacttcacaatggatctttttgcaccgtatgatgtccaaaggtattggcaacacattggaaaagcctttt

SEQ ID NO: 120690 - DNA, 331 bp, Zea mays
  Clone ID: MRT4577_41551C.1
gcctggcgtgcggccacacgggcgggagagagacgcggctggcttgctgagttgtgatgctggcggctgaaacatactgactcggggacgtgtgcggtggacatgagggtcactgcgcggccggatcgccggtagtggggcctgggccggggagtgagtgccaccacgtgatggtaagaggggcttccaacaggatgcgtatgatcttgtgggagaacttttgttcaagatacgattcctacttttggtggcgggttcgagagtcagggaccttatggtcatgggggtggcagaagagaacgagcacttctggatatagagaggagaaggg

SEQ ID NO: 120691 - DNA, 324 bp, Zea mays
  unsure (1)..(324): unsure at all n locations
  Clone ID: MRT4577_41552C.1
cgcccgccgccagacggggagcaccttcaccgccnncaccagcaggggccggagaggacgngaccaaaccccgccgacaaagcggnccncnncgnccgggcgnnaaacaaggaanaggnanncaagnnnngnancaccaaganggngcagnacaannnnaagaagancacggnngncccnccngggaaggaccccanngacaggggggggggccgcacccaaaggcagacaccnacagnngnccacaagggagaggcgaacncccgcanacgacagcacaacaagcgcaaggggagggangcccagcagaaccccgacgaaaag

SEQ ID NO: 120692 - DNA, 255 bp, Zea mays
  Clone ID: MRT4577_41553C.1
atagtattcacttatctttcagacggtctgtagtaggaatgtgcatttggtatagttcttgtctgaagtcattgtggtgcgcggacggtccgctggaaggaaccgaacggtccgaagccaagtggtattttcaaaaagagctcccggacagcccgcactagagcctcggactgtccatgatgtgttgtttttaagggttgatcttcttgaagaatgttttgagtacctgattcataacttagcaaactagttagt

SEQ ID NO: 120693 - DNA, 232 bp, Zea mays
  Clone ID: MRT4577_41554C.1
cagaccattagctctatgtactccagagcgcagaagaacccgatcgacaccatgagggtgacgctcgttgaccatattctcctggatatcgctgagagcgccacctacactcatacaataggcgggtgctgctgccaccaccgacagaactttatataccactgactgtgcattggccacatccagttaacctgccagcatccatacatttctcaacgactgaacacctgcc

SEQ ID NO: 120694 - DNA, 638 bp, Zea mays
  Clone ID: MRT4577_41555C.1
tttttttttttttttttttttttttttttttttttttttttttttttttttttttttttttttttttttttttttttttttttttcctccccccgaattcccccaccccgggggcccccctaatccaaaaggggccccaaccggggggcacctcaaggtttgttaccttttcgcgggggtaattggggcccttggccgattccggggaaaaatggtttccggggtaaaattggaaaccgctcacattcccaaacaataaacgacccaaaaggaaaaggggaaaaaccggggggccctaaagagggagcaaaccaaaaaaaaccggtttgccctcagggccccctttccagccggaaaacctgaggacccggccgacttaaggaaagagccaacccgcggaaagaggggttttgggttttggggctttttgccttttttcgcttattgattcggggggctcgagcgttcgcctcgggcgagggggttgacctacctaaaagccggaaatccggttatcccccaaaccagggcatcccgccaaaaggcccgttggagccaagggcccaaaaaaggccccaaaccgaaaaaagcccaaaaaggcggcgttcttccaaagggcccgcccccctggcacgctt

SEQ ID NO: 120695 - DNA, 392 bp, Zea mays
  Clone ID: MRT4577_41556C.1
cccacgcgtccgactctgattaccatgtaccagatgctcgcgttctggttccgccatgcgttccaattgctcactcgcctcgatgacccaatggaagacaagtactggaaggcggccaacaggtactgctggatcctggagcgcgtggggaaactgctcgcgcacgaattggacctctatctgctgatggacgcccgacacgtttctaccgatcatgagccatttcgcgcatgcgagcggagaccggacctgcgtgcgagggcatatgtgccccgtgcacggggcgactgcccgtcagtagcgtcactagggccctgaagatgcgactaccgtgagtgatttgggtaaaaacggaccctagatgcggaccatggctgcaggaagcgaagatg

SEQ ID NO: 120696 - DNA, 246 bp, Zea mays
  Clone ID: MRT4577_41557C.1
tctatgagctatgacgcacgactgcacgcatgcttaagactcgaatccagccggagttcacagtgtggaaaaggctgctcattggggatgggtctcccgttaccaggcatggggttggactacatgtgcccgatgtgcactagcagcctccttgtaacctacagatatgtgcctacaaggccatcgttgcttgtcaacaagccgtacaaatggacaccggcgcgcccttggaacagaaagcctgcg

SEQ ID NO: 120697 - DNA, 416 bp, Zea mays
  Clone ID: MRT4577_41558C.1
aggccggccgggccgggactcctacccagtctcggacagtcacctccttgtcgctctcacgctcttcgtgcccgccgcctcccctcttcccctccacctcactcctcccgtctgaggcacatggcctccatcgtcggatcgtccgatctctccatcgcgatgcctggcaaggaaatcaactcaaattctctagccttctccccggtgaggaaggggaacacgttcctccgcctgcaaccagtgcctatgagatctgattcctgcgctgacaagaaggatacggtgtgcaaggcttgtgatattgtgaataagcagcttgctctttgtgagcacactgaagcttgtgatgaatcaagagtctctgaacttgcagcggattctatggacacgaatgagattgtgatgatgcttgagga

SEQ ID NO: 120698 - DNA, 462 bp, Zea mays
  unsure (1)..(462): unsure at all n locations
  Clone ID: MRT4577_41559C.1
actaccagagcctacgccctacacagatgggctngncacttaatatagatgtttcggcaacgtcattttacaaggctcaacctgttattgacttcgtagtggaatatctgaaccttcgtgatactntaaaacgtatttctgatcaggatcgcataaaactgaagaaagcacttaagatggtctgggttgcaaccaaccatatgcaagataaatgcattcactacaggattacagggctaacctcaactccattaaaggatttgacgtttgatcaagaaggcacaagggtgtcagttgtgcattactttaaacaacgatataactactacttacaatacactcactggccatgccttcaagctggccgtgttgacaagcagatctatttacctatagaggtttgcagcatagttcagggacaacgctactccagtaagctgaatgagaatcaagtcaggaaca

SEQ ID NO: 120699 - DNA, 551 bp, Zea mays
  Clone ID: MRT4577_41560C.1
aaaaaaaaaaaaaaaaaaaaaaaaaaaaaaaaaaaaaaaaaaaggaaaaaaaaaaaaaaaaaaaaaaaaaaaaaaaaaaaaaaaaaaaaacacaaaaaaaaaaaaaaaaaaaaaaaaaaaaaaaaaaaaaaaaaaaaaaaaaagggggcgcccgttttaaaggtcccaattttcctcccccgtgcttccacctaattattttttttttggggcccccaaatttaaatcaattgcccgggttttaaaaacgccggaactgaaaaacccttgcgttacccaaattaaatgcctttgaaacaaatccccttttgcccagttggattaaaagcaaaaggcccccccccaaccccctttccaaacatttgcccaccttaattgccaaagggccccccccttttaccggccctttaaccccggggggtggggggtttccccccacgggaccctttaaatttgccgggcccttagcccccgtttttttcgttttttcccttccttttccccccactttcccggtttttccccgaaaaccttaaaaggggggcctcctt

SEQ ID NO: 120700 - DNA, 685 bp, Zea mays
  Clone ID: MRT4577_41561C.1
ggggggggggggggggggggtctctcgtttactatggcggccgcaacttctacgtgcccccagcgctttccccacgtgaacgcgcagtgttacttgcgtaccctgcctgcgcgtcaaattgtgatcggagagtcacttgtgtaatgatccataccataccataccattgtgtagcaagccatacagtatccataaatctcttgaaaatgccccgtgggtcgttcaaaccgactgttgggttcttacaaccccgtaagaccaagcgcccataaatcattttatgaggacttccattgaacggaactatgataccctaggagatttagactaggatccttgagttcaacaggtcctatgctatcaactgatgatgatgatgcttacttccaaactagtggtagtaatgaactaggagaccatctgtatccatgtaatgaatgactccttgacggaagatttacataatctgctccgtgctatggacatcacagtaaaggaagtccctggtctaggtattttcatgagtctagtcacgagaatccagaacaaaacttcttgtgttctgatccacaccataagtttcttctgaagcgggtaggtgaaccacgtgagtttttagtccccgggtgatttcaagagggtgggtaacaacgttagtgctacctgggagttccagaagtccgtg

SEQ ID NO: 120701 - DNA, 281 bp, Zea mays
  Clone ID: MRT4577_41562C.1
gtccgaccacgcgtccgcccacgcgtccgcccacgcgttcgcccacgcgtccgaaaaaaaggggactggttaatttaaagaagggagagcgcaacaccctccgctttaaaggatccgacgctccttacacaggcatccgaccgtcatacctcttctatagtagggccaaacattcattctactgcccgttaatttacaactgacgcgacgtgtaaaaccctgtcgtgaccgaactaaactgcggtgcaacacatttcactttcttcaggtggcgttttatt

SEQ ID NO: 120702 - DNA, 1268 bp, Zea mays
  Clone ID: MRT4577_41563C.1
tccagactcacacagtccacactccccgcatctggcgacattgtgtgctcggcagtctcggactcggagtgagagcgagcaacaagaggaggaaatggactcctcacacggcggcccaggttgcaccctgctccgccgcggcgccaccgacgccgccatggcgttcctgctgccgcggtccgccatagctgccaacgacgccgagtggcacgcccatgcccatccggtcgccggcgccgtcggccacggtgcccccgcgccccacgaacacgcggccggcctctcgccgctctcggcaccgccgcccaccgcgggagccgacgacgacttgctgccgccgccgagccgcgcgcccgtgcagaaggccgccccgcacttcggcttccctctgcagccgggcgacgcgtccgcggcggccccgtccggaagcgaggggtacccgtttatcggcagcaacccgacggtgccgctgcccaccggcatgaccgacacctccaccgtgctgccgctgccggacacggggaccggggacgccaccaccaaggcggtggggttggcagcgtccgttcgtgctcccgtctcctccatgattgggcttggggttttcctcgccaccctgttcctgtgtgcaacatctaatcatataatacacttgtactagccttgagctcttggcatgaactaatctagagatctgctaccagttcctttcaactttcatcttccagtgaattcattgttctgccttggcgaacaaaaccagcaggccgcattatccctttcgactcccacaggccacagccacacacaacgttacaaatattaaaagaaaagaagaacgaacgatcgatcaggccggctcatcccatccattcttcagttacgagagcaaagtgaagggcatggcatgaaatacatacacgtctgtctggcatcactgcctacaaggatgcacagcttcctctacaggatggtacagcaagagttggttttcttcgcttgcttgtagaacatctgcatacaagttaagggaatgtcagcctcatgctgctgcctggactccacacactgctgctatcatttcctaggatagcaagttatccaggcaaacaatggaacagctataactgattctacaggtatggggatttcgttctgttttgcatcccacctttttctttcctcgacacaaggaggtagaccaaaagatttggtcctatatatgctcaaacttgcaaggataagtttatcagtgacacactgacacc

SEQ ID NO: 120703 - DNA, 289 bp, Zea mays
  Clone ID: MRT4577_41564C.1
gaattgtacttttttttgttgctttcccttcggtagggagacggtgacaatcgggatgaccgcgagtgacccatctcacatgggcgcccgattggacacgagcgcttgcgcactgcgaacgtggtgctccgggcctggtgccgagccatgtactcccatatcttaaacttcaagggcggttgggcagaaaccgacgtgagctcctacttcggcgtaaggcgcggaccggatcttgacgacgctaacaccacgcgacggcgggggcatcaacctcaagggtgacatcatc

SEQ ID NO: 120704 - DNA, 426 bp, Zea mays
  unsure (1)..(426): unsure at all n locations
  Clone ID: MRT4577_41565C.1
ttttttttttttttttttttttttttacgaaacactgtctcgttattgaccggcctcgataagattgatctgttaagaacttggngaaacataaaccattcgaagtgcaaatcttttggggaaagacagagggagtgctttctctttttctactatccaaatgttcaaattccaaccaagcccctttgtagacatcttgnggcctctcatgaaaagttcttaggtcctgatttctgaagctgagacctcggcctgcttatgtgcagcgaccctccatcctcaccaaattatcggcatcgccctgctcaatgatggccttgacgactgcattcgacagatccccatcgtcgctggcttcgaagtagcagcctcgatcacgtgcgtccttcactattttctgccaaactgacttgctgctggacaaag

SEQ ID NO: 120705 - DNA, 349 bp, Zea mays
  Clone ID: MRT4577_41566C.1
ggagcaacaggagccgtatgccccttggacccttattggatgtattgaacacagccaggcgcacacacgatccatatattatacctgttgctcgcggcccacagcaatagggttgcttgttgcaaaaaggcctgacagcaataaagatcggacctacgccattataaggtgctggggagaacgtgatctcgccacagatgacgatgcccccgcccccgatgtggccgacggagacgaagaccaccatgagcccaagggccaacctctggtggacatccatgagctaaccaagaaggggggcctgcaaatgctgcttccgcgcccggtagaacttacactacctagctag

SEQ ID NO: 120706 - DNA, 271 bp, Zea mays
  Clone ID: MRT4577_41567C.1
cacgtaccaaatggtagctcttgttgcctttatcaacagggaaactgtcaggtctcaagagcttcaagacagcactgagatgaatgacaaggaactgacaaaatcaatcaaatcattacttgatgtgaaaatgattaaccatgattcagaaaaggaagatattgatgcagaatcttcattttcattaaatatgaactttagcagtaaaagaacaaaatttaaaattactacatcaatgcagaaagacacaccacatgaaatgtacaagggc

SEQ ID NO: 120707 - DNA, 2242 bp, Zea mays
  unsure (1)..(2242): unsure at all n locations
  Clone ID: MRT4577_41568C.1
gaccctttcctacctccaagctccctgccttctgccggccggtcggcagcggtggtagcggccaccaccccagggtatggccgcccgctccctcctcctctacgcgctgctgctcctggccctcgccaccgccgcaccgtcccacggcctcactcaagcggatgttgcgaagcgattgaaggaggtgctgtcggagaggaaccgagggcatgagatgctcgattcgtggaatggggatggggacccgtgttctccgtctacctgggaaggcttctcttgcgaacccaaggatggtgcccaggtcgtcgtcaagttgaacttttcttcgaagaaactgcaagggccgattcctgcagagattgctaacttgacggagctaaatgaaatacatctgcagtataataacttcactggatttattccggcatccttttctgctttcagacacctgctgaagctgtcggtgatttgcaaccccttgttgaacaataagcagcctgatggattttctagtggcgtaaatttcagctatggaggatgtgccacccaagagtactatagctcaccagctgaagagtaccaaagcccacctgcagttgccagtcagaaagtatatgttattggtggtgtcgccggaggatctttggcatgtactgttgcactcggatcattctttgtttgttttaacaaacgtgaacggcgttctccaaaaaaggattgctcttctacaacaaatcctgtttttcaagaatgcagcatccataacactacaaatcctgcagtacaacagttgtccctcaaagcaatccagactgcaacaagcaactacaaaactatgataggagagggtgggtttggagcagtttatcgaggtgcattagcaaatgggcaagaagttgcagtaaaagtccgctcaagttcatcgacacagggaacacgtgagtttaacaacgagttaagacttctttctgctgtgtggcatgagaatttagtcccacttatcggctattgctgtgaaaaagatcaacagatattggtctatccgttcatgtccaatggctcactacaagatcgtctttacggtgaggcatcaaaaaggaaagttcttgattggcccacaagactatctgtttgcattggtgctgctagagggctagtatatctgcacaattttgcagggcgttgtatcatacacagagatattaaatcgagcaacatacttctggatcacagcatgtgtggcaaggtagccgactttgggttttccaagtacgcaccacaggaaggtgacagcaatccatcaatggaagtgaggggaactgctggatatttggaccctgaatactattccactcaggtgttatcaaccagaagcgatgtcttcagtttcggagtagtcctgttagaaattgtgacaggaagagaacctcttgatgtcaaaaggcctcgtcatgaatggagcttagttgagtgggcaaaaccatacatcagggagtacaagatcgaggagatggtggaccctggcataaaagggcagtattgctcagaggccatgtggagagtgctcgaggtcgcatctgtgtgcaccgagcccttctcaaccttcaggccgaccatggaggacgtcctgagggagctggaggacgctctgatcatcgagaacaacgcgtccgagtacatgaggtccatcgagagcactgggactctgggctccaaccgctatctgtccatcgacaggaagatgttcgcgtcagggtcagcgcgaatcgagtcgatgaaggggaatctgcaagcaatgccctcgcttccgcggtaactagacgccgcattgtgatttcgtagcgggcgtcgtcagggtgtgatccatgctcaaggcacatctaaccacgctgaggcctgactgagcacctgagatgggcatagacatgaagggatagtctgtactctgtaccatgtacagagcccattcagtggtgagagcacagatcagcgatacctacactgggaaatgccttctgaagccaatgtgctagttttgcctgttgaatttcccaaaagcaggcgaatgtgtgggcacaaactattctttggaccattataaacacgtaaaatgtgtcgagggaatccctcaagaaatcgaatattcagatctgtaccgtcacttcattatgtgaactattgctcgcttgttgtaattgccctccttgcctnnnnnntnnnnnnggggtattaatcaangggg

SEQ ID NO: 120708 - DNA, 277 bp, Zea mays
  Clone ID: MRT4577_41569C.1
atcgcgtcacttgcagagaaggagggagctcgcacggggctacgcacacacatcagaggggggtcgtcgatgtcgcggtgggctgcggtgctggcgctggccgcgggcaccgccatcgccgtggcgtccgtggccccaagatacatgtacacggtcttgacatgaagagcaggcctgctgatgagcctggctcctggcctgaagtacgtgcaggggcagggccgcgcgccgccgcacgactgttgtagtggcctgcgcccggtgccagggaagagac

SEQ ID NO: 120709 - DNA, 331 bp, Zea mays
  Clone ID: MRT4577_4156C.1
atggccgtgggattagcgtggtcgcggcccgagtcggccgaggtcagagatggtccgactggtgatcagagccatgtgtctactagggttatgggaacttatggatatgctgctccagagtatctatctacaggtcatcttactgcaaagagtgatgtatacagctttggggtagttctgttagaaattctatccggtaagaaagcaatagacaagaatcgacccacaggggaacataatcttgtcgagtgggcaaaaccttatttgaccaacaaacgtagagtttttcgtgttctagacagccgtcttgaaggacaatatttactcaatc

SEQ ID NO: 120710 - DNA, 228 bp, Zea mays
  Clone ID: MRT4577_41570C.1
ctcgagccgctcgagccgatcaccggctcgagctcgagcgctacgagcacggaaaatttcatatagcagctgtttcgcgtacacgatcgactacaaaggtcgcgtctcgaaacgtcttgccctgttcggaagggatggcgtcggaggtggaggacgacgcggcggtgcctggcgcgccgctggtcgccaatggtgcagccgacgtccgccggcagagggatcaggcga

SEQ ID NO: 120711 - DNA, 847 bp, Zea mays
  Clone ID: MRT4577_41571C.1
gtaccctccgggttctgccgggtgcaatatcaatctattttcttaaattctccattaaatatttcttaatagtgcatctattcgaacttatagatgttaatatatttttctaaaactttggtcaaagttagagaagtctcaaagttagagaagtctaacgtaggaaaaagcataaggaactacaatttgaatagagggaatatgttactaacttactattgttcacattaatgcgcattatgttgacttctaaattgcccaggcggaggctggagaagcgaatttatatcccacttccagattccgaaagcagaaaggcacctatcaacattaatcttagaacagttcagatagctgcggatgttaacatcgatgaggttgctcggaggacagaaggctatagtggagatgacttgacaaatgtttgccgtgatgcttcaatgaacggtatgcggcgcaagatagcaggcaaaacccgcgacgagatcaagaacatgtcaaaggacgatatagccaaggacccagtggccatgtgcgactttgtggaggctctggtgaaggtccagaagagtgtctcgcctgcagacatagaaaagcacgagaagtggatggctgagtttggatctgcctgagacctcggtcatctccttcaacattggtttctgtggttgacacgacaagtgtatgttgatatccgctgaccgctggtgcatagatcagaggcacgaactatcttgtatattttcagggatactacaaattaagttcacgattatttcatttcaatccctgatatgtacaaaaaacaaagtatttattcctttgtctttttcattctatctaaaaa

SEQ ID NO: 120712 - DNA, 331 bp, Zea mays
  Clone ID: MRT4577_41572C.1
ggggaccataacaatcaaggcgttttttgtttaataaataaacggggatacacacgtatgggtggaggacttcggaaccccaactgacaatttacctacacagtgggggagacttacaagcaggggcccggtcaaatccttgccttgatgattttctattcacaaacagagtttccgttctgtttaaaccatagccaacctcaaggtaaacatccttttttgttgccaaacagaccatgtaacacttcggaagggcctttcgcgaaaatagggttggttgcacacgtggcaacacgggacatgtttttggccatttccattttgaagtaac

SEQ ID NO: 120713 - DNA, 976 bp, Zea mays
  Clone ID: MRT4577_41573C.1
cttcacaggcaagtaccacattactggtaaatactagcagtaaacaagtaagcgtggtcaaagcaccgttgctgccagtgagtgcggcaggagcagtaactgatcactagccgttcgatcgggttcaggcaacggccaacgggcgtcgatcaaccatgtggacacaggacgcgacagccggcgagtggagcggcggcgcggcggagaccaccactgaaatcaccaccaccaccagagcggcctgaccctgaccctgcacccgcggttgacaacgacggcgtcgccgtcgagcctgttgacggacacgtcgcagcgcgccctgacggggacggtccatgtccgcagcaccgagccgaagcgcagccgcacgggcaccgtggcctccacctgcagcggcacggcgcccggcggcctgctcggcggcgatccgcgtcgcctggtcctccgtgagccgcacgccgcgcccgctcatggcgaccgcgaacgccgtcacgttcctcggcggctggcggaacgcgggccacggacccgcggcgagccgcgcgccggagtaggacacggcgacagacccgctgccgcggtagtccacgcccaccttcgcgttgcgcccgttgtccgcgcgcacggcggcgtcgagccgaggcgagagcgtcgcggaggaggaggaggaggagcgggcgagggaagcggcgtcaaggccgcggatggagagggaagtgacggagaaggacggcgcgcgcgggcggtaggcgaggtagacggcggcggcgaaggacgggtgctgctgcagaggcgtcgtctccgtcgtcggggggtgctgcggaggcggcggcgtggaggagagcggcaggggcggaggcgccgggtggacgcggtcggccatggtacgtgcggagtacggtggtggaagtggaactggagcctagaggtagagagggtgacgcgcggtgggtggttgtgagctctcggctaagac

SEQ ID NO: 120714 - DNA, 204 bp, Zea mays
  unsure (1)..(204): unsure at all n locations
  Clone ID: MRT4577_41574C.1
tccgcctccctgtcccaagccttaccccgcgggagccgcaacgaagcaaacagagacgcaagntcgacggggcggaacggcgtcgcggaaaccgttggcgacgaaagcagcgcgcaagtcgtagccgtggagaggcggagtgaagaaaccaaaccggggggggggggggacggactgattccgcgagatccgcaagtacaagaa

SEQ ID NO: 120715 - DNA, 385 bp, Zea mays
  unsure (1)..(385): unsure at all n locations
  Clone ID: MRT4577_41575C.1
aggccagcagccggcggaggcagcagcggagcgggggcggctctgtgttcggcgacnaggcggacgtgtacgtggccagctagagtaagagctttgtgagcgggggaaggggatctgaaagagtcgaaggctgaagaaggcgatcaggagacagatccagacaacccgcgcgcgggttgaaaacttggatatcgacgccatacgtgctctgctctgctctgctcctcttgtttctgttttcccttccctgatgggatcttttgggctgtgtgggttagaagtcgaggcctgaggtgtctgcgactgcgagagctagcagcatcgatctgtaaatgtacacggcgtttcaggacgtcgttatgatcgatagtcacgaaattttgat

SEQ ID NO: 120716 - DNA, 327 bp, Zea mays
  Clone ID: MRT4577_41576C.1
ctcatcacacggatatatagatcgatatgttcccccattatacaaagagatgccatcgaaagccgaaacgaagctttggattcgtaatggtcgttgtatggctagccatatctgcccaaaaaaaagaaagaaattagcttatgattgatttgcttatgcgagggatggctggaaaatctaatcagggggaggggtcgggcatttttttggtaataattgtctttgctggatcccccagaggggagtaattaggggagttctcctacgccggcgacaaatgcggatcggcggcgggatggccggggccggaccctgtccagccgccgg

SEQ ID NO: 120717 - DNA, 840 bp, Zea mays
  unsure (1)..(840): unsure at all n locations
  Clone ID: MRT4577_41577C.1
cattgggaccctcgaggcncggccgggaggcttctacaccacgaaaacccaccatcaccgcccctcctctactacttcgacaacaacgatgcctcccaagcaagccaccgcctccccgcgggaccaacgtcccgcaaaatcctcacccgttaagaacgcctacctcctcgcctacaacgccgtctccgccacgctatgggcaggcgtgctctacaaaaccgtaaccattggcgcacacgagattgagagcgcgcgcaaggccggcagcttcttcgggcggagcgacctgcagagcgcggcggcggggctggcgagcgggaaggtgtttggcgagctggacgagtacgtgcggttggtgcagagcctggcggggctggaggtgctgcatagtcttgttggcatcgtgcgcgcacccctcctcaccacgctgatgcaagtggcctcccgcttcctgctcgtctggggcatcgcgtacaacttccccgccacaacctcgcactcccccgcctacagcagcatgctgctcgcctggtccttcaccgaggtcgtgcgctacgggtacttcgtcttcaccctctcgggcctgggcgtccccgcgctgctctccttcctccgctacaacaccttcatgatcctctacccgctgggcatctccagcgagtgctggctcgtgtaccaagccattcctgctgcgaagatggtggatgagaggatcccgtacgtgttgtgggctattctggcgatctatgtgcccgggtcgtatgtgctgttttcgccatgctgaggcagaggngaaggatccagaagcagcagaggcaggcgtgactagccgggctgctc

SEQ ID NO: 120718 - DNA, 1281 bp, Zea mays
  unsure (1)..(1281): unsure at all n locations
  Clone ID: MRT4577_41578C.1
gggtacctcgaggccggccggnnnnnnnnnnnnnnnnnaaaaaaaaaaaaaaaaaaaaaaaaaaaaaaaaaaaaaaggaagtggcaactggcaagcggaagccgtggcggagatattatataaggacgaagaggaggaggaccgaccggaggaggccggaaagcgggccctgcactgcagcgggatggcgtcgccgccgccaccacgcgtgtgcgtaaccggtggcggcgggtacgtcgcctcatggctcgtcaagctcctgctctcccgcggctacgccgtgcacgccactgtccgcgacccaagtgatcccaagaacgcccacctgcaacagctggacggggcccgggagaggttgcgcctgttcaaggccgacgtgctcgaccgcgacgccctggcgaccgcggtcgtcgcgtgcgagggcgtcttccacgtcgcctcccctgtgcccgcggacaaagtcctcgatcccgagtccgaggtgctgtctcctgctgtcaagggcactctgaacgtcctccaggcctgctcggcaaacaacgttcagaaagttgtcgtggtttcgtccacggctgctgtttactttaacccgagctggccccaaggtagaaccaaagacgagagttgctggtcagacagagatttatgcattaagaacgagaactggtactgtgctgccaagacgattgctgaagaaactgcagtggagtatggagagaagaacgggctgattgttgtcacggtctgcccttgtatcgttttaggcccactcctgcagccgctgatcaatgccagcagcgaactcctcgtctacattataaaaggaggtcctagggtgctgaaaaacctcccctggaacatagtcgacgtccgtgacgtagctgatgctttgctcctagtatacgagaaagtggaatcatccgggagatacatctgtgcgcctaatcggatcagcacaaacaacatggtgaacttgtttaagaagtcctaccctaactacaattatgtgaactgcgacaacaaggactatgaatctgaaatctcaccagttacatcggagaaacttaagagtctaggctggaacccaaggacaatggagaaaactttgttggacaacattgagtatttcgagaaggcagggtttttgcgtgatggagagggttatccttgtcgtctacctcatatttttcatttcgcttctgactaatgaaatatattctgtaaaacaattacgacaactactataactgtcttcggacaatttatttctcttctgtgtcc

SEQ ID NO: 120719 - DNA, 197 bp, Zea mays
  Clone ID: MRT4577_41579C.1
gcagcagcgcgcacgagctagacgccggcgaacaagagatagatcgagcgcacggagcagcggggagcgggaggaccaggcgcgggcgacgaccgggaaggggaagcgcggcgaggagccgacgagaccgcacgccggaacgccggccctcacgacgcgcaggcggcgccggccgacggacaccacgaagagggcga

SEQ ID NO: 120720 - DNA, 819 bp, Zea mays
  unsure (1)..(819): unsure at all n locations
  Clone ID: MRT4577_4157C.1
cattgggtacctcgaggccggccgggaagctatatctagccagccatcctactgtcacacacacacacacacacagacaagtggtttccaaagccaagtgtgtgtactagcaaccagctagctcgggcggcagcaggcagccatcatgtcggaggagaagcaccaccacttcttcaaccaccacaagaaggacgaggagcagcccgccggcgagtacgggtactccgagaccgaggtggtcaccgccaccggcgagggcgagtacgagaggtacaagaaggaggagaaggagcacaagcacaagcagcacctcggcgaggccggcgccatcgccgccggcgccttcgcactctacgagaagcacgaggcgaagaaggaccccgagcacgcgcacaggcacaagatcacggatcagaatgtgactcattgtcagacgcaagccaaaggtcagaggatcaggatgagtgtggcatagttgacgcattggcggcagcaataacacgtgttagaatatccgagccaaagagaagtcggctttgtagccccgcaattaccattcagcaggaatgctcgtcaaacttgaagaataatctttgcacggctttctgacctgacctagtttatagcacctgatcggagtggcgtctattcttctcgctgagaaggtcgttctgatttaggtgttgtagaggcgaggataataactcagcttttccagccagcaacaaacgtctggtatttagtggttctttcagtttttcctgatgaaccccgcagttgtagctgctgtaaaatctgtnaatagcatggtcccttctc

SEQ ID NO: 120721 - DNA, 424 bp, Zea mays
  Clone ID: MRT4577_41580C.1
cggacgcgtggggcctaatcggatcagcacaaacaacatggtgaacttgtttaaaaagtcctaccctaactacaattatgtgaactgcgacaacaaggactatgaatctgaaatctcaccagttacatcggagaaacttaagagtctaggctggaacccaaggacaatggagaaaactttgttggacaacattgagtatttcgagaaggcagggtttttgcgtgatgcagagggttatccttgtcgtctactacctcatatttttcatttcgcttctgactaatgaaatagattctgtaaaacaattacgacaactactataactgtctttggacaatttatttctcttctgtgtcgtgtttgttttcagatgtactgcacacgcttttacagattgaactggataacaacaagccttcattat

SEQ ID NO: 120722 - DNA, 235 bp, Zea mays
  Clone ID: MRT4577_41581C.1
tttgggtcgttttgcccgaagtcggcaaaatatcccaaatatggatcgacgcattaccgctcgatggttatagttagaggagatataagttgttgatcttagcatgcacaccgaaagtttatcaaagtaaagctgggggaccaccatatccatttagctaaagccccgcttaaaagagtcttgccggacttcctgttgtaaggcctcgactgcaaaaaaaagattcatgttattt

SEQ ID NO: 120723 - DNA, 597 bp, Zea mays
  unsure (1)..(597): unsure at all n locations
  Clone ID: MRT4577_41582C.1
ccccggttcgacccacgcttctcccagcgtccgcggccgcgtgggtgcagcggggcggggaggcntcaccgccgccaccacgcgtatgcgtaaccggtggcggcgggtacgtcgcctcatggctcgtcaagctcctgctctcccgcggctacgccgtgcacgccactgtccgcgacccaagtaagtaacaagcatgcacaccccatgccgctctccagctgcttctgcgtttgcgtctgcgtgaacacgcgctgggagttggggccgggggactcatgcatgtcggccggctctctgcttcaaggtgatcccaagaacgcccacctgcaacagctggacggggcccgggagaggttgcgcctgttcaaggccgacgtgctcgaccgcgacgccctggcgaccgcggtcgtcgcgtgcgagggcgtcttccacgtcgcctcccctgtgcccgcggacaaagtcctcgatcccgagtccgaggtgctgtctcctgctgtcaagggcactctgaacgtcctccaggcctgctcggcaaacaacgttcagaaagttgtcgtggtttcgtccacggctgccgtttactttaacccgagctgg

SEQ ID NO: 120724 - DNA, 427 bp, Zea mays
  Clone ID: MRT4577_41583C.1
gcacgcccgccgacctcaccggcgtcctgcagcagggtggaatgttcgtgttcagagggaaggagttgctgtactcgtggagagaccaaggcacgggcgaccatgctcctctggacgacgtgcacagcgcctgccgcaaaattcccagtcgcttgacctgatggatcggattccggcagcacatgaacccgtcccagcattcaggcgctgctacctaggaaatgccatatcggaaagagagaccaaaactgctatacatctgcttccaaattggttcgtcctgaacgtgtaaaatccacacatgacatatgtacacaatatgcttttttcccacagaaaactaagaacagtgtatcccgtcgcgaaaaaaaaaaaaaaaaaaggcccctactttccatgtaagtgccgggagtctcggcgagctacc

SEQ ID NO: 120725 - DNA, 137 bp, Zea mays
  Clone ID: MRT4577_41584C.1
ccaagaataggggaccaccgctcttttatctttgttccatttatcattagcattgtgcaaggagtaagagagaccatcccagctctgtttgtcattatcgtgttataaggtagacattcggagctactattttataa

SEQ ID NO: 120726 - DNA, 324 bp, Zea mays
  Clone ID: MRT4577_41585C.1
ttccgagagggctttttggacttcccaaactaacacaggttgagcttcaggataattatctctctggagagtttcctgaggtgggttctgttgctgttaatcttggtcagattactctctctaacaaccagctttctggggttctacctccctccattggtaacttctccagcgtgcagaagctccttcttgatggcaacatgttcacgggtcggatacctccccagattgggaggttgcaacagctttctaagattgattttagtggcaacaagttctcgggtcctattgtgcctgagatcagtcagtgtaagctgttaactt

SEQ ID NO: 120727 - DNA, 394 bp, Zea mays
  Clone ID: MRT4577_41586C.1
cctatcagcaaatgtacacacaacttgcaagcattaacacgctcaaattcccaagaacagagaaatgttctatcgtcattgcgaaacgacagttatgcaaccaagaacgagaagtcaagaaattaatatatctagagaatttgtttatgcaacactctagtgttttgggctcttccgacgtccggttttttctttatatcttagctggcttgccttggtttatcccttcctgagtccttagtcacttagagcctttctgcctatttttctccttctaacatgccccacaaccaaccatcctgcgggcgcagtaaggtttcgctagagctttactgctactgccggaaccgtgaagcttcaatgagaccctacctcgctggagtaacctactact

SEQ ID NO: 120728 - DNA, 202 bp, Zea mays
  Clone ID: MRT4577_41587C.1
cggacgccttggccgaccccttggggcaacttgttagactgggagatagagagaggagagggagggtttcctcaaagagaacctgaacccaaacccaagcagagaacactagcgttccctcaccaaggcgggcgtccatcccagcagccatggcgatggcgtacaagatggtaaaaccttccccgcgctccggccatgcgcc

SEQ ID NO: 120729 - DNA, 350 bp, Zea mays
  Clone ID: MRT4577_41588C.1
gtctcgggttcaaactcatctagaggtccttgggtgtttttgcagtgtattactgcatgcagccctgaaaacgaaaggttaaggctgacctacgttcaggacttagtgctgatacggctccgtagcgagcaaatgcagctgccgagaaggagatatcaggcggatgcctgcctggttattcggctgttgtactgtaacatgtctcaaactcacctagagatggcgcatgttcttctgtcgatctgcaccattgatgctgacgaagacacagtgcgccaaacaaacacggaccttgtccggtctccttccatgcttgtggggagggctcacataacaaacacaaaccaggc

SEQ ID NO: 120730 - DNA, 611 bp, Zea mays
  Clone ID: MRT4577_4158C.1
actcctatatttttttctaccacccccatttctttctagcctagtttttatttaaatactcggttcttaaccccccacaaaaaaaccggacgaataaaccacaaaaacacccaaaccccaaacataaaaaagcacaacaacattaacataaaacacaagtccacatcaaaaacaaacggtgcatacaaatcaaaataatacccccacctccacgaaaaacactattaccaaactcaaaaatcccacaaaaaacaaacaaacaccttaaaaaacaaaaaaaaacacctctcatgccaaacaaaacaaaaaacaaacaaaaaaaaaactgctttaaaaaacactagcaactttaaaaatctaaaaaaacttcataccagcaacaaaaaaaaaaacccaaaaaccccagaaaaaaaccccaccaaaaatgtcaccacgatctttactacccttaaaaagcaaaaacaaataataaaaaatttcaatcaatcaaaaaaaaaaaaaaattaaaattacaacccaacaaatccataaccccaaaataaaaacataattacaatccaaaaccacaaaataccatataacttaaaataaaacattataaaaaaccaaaa

SEQ ID NO: 120731 - DNA, 196 bp, Zea mays
  Clone ID: MRT4577_41590C.1
gctttcttctcctccccctctcattaaatcctcctcgagttaaacttccgggggggtttattaataagcgagggcggccacataatattcaataccgttacttcttccgccctctcgcctgttccaccatcaacaattctctgaacaatatcttcctctttctatcttccaccctctcttatgtaactaaattaat

SEQ ID NO: 120732 - DNA, 649 bp, Zea mays
  unsure (1)..(649): unsure at all n locations
  Clone ID: MRT4577_41591C.1
ccggccggggcacctctccagtgagccagtcaccgccagtccacgccatggcttgtcgcgccactctcctgcctctcttcctcttcctcctcgtggcgcccgagcctgcgctcgccacatccggcaccatcgtcttcaccacgctgggccggagccgctacgcctttgacgtcttcgcgctcacgatcgccccgctctccgccgcctccgcggagctgcgcctcacggacggcgcctccgtcaactacaacggcaacttcgcgccaacaacaggagcgcctactacgaggtgacccggcccgtggccccgcgcgcgcaccacttcaacccgttcatctcgccggacggcgagcgcgtcgggtaccaccggtgccggggcagcgggaacggggactcgccgctgctgctggagagcatcaagggccccgcgccggacacgttctcgctcttcaggatcgacgggtcgttcccctccttctcgcacgacggcaagaggatcgccttcgtcgggctgccggngctgtacgtggtcaactccgacgggctccggtggccgccgncgngtcttctcgggcaacgcgttcccgacgacatgggactggaagnnagaaggggtcatctacaccagcgtcggcccagacttcgcgag

SEQ ID NO: 120733 - DNA, 689 bp, Zea mays
  Clone ID: MRT4577_41592C.1
cccacgcgtccggtcgacgtacagcagatggagaactgcgaggtactcttcccgggaggcagcagcggggccaacgcgttcaccaggccagagcaggagaggaagcgcgggcagccatggacggaggaggagcacaagttgtttctcttgggcctgaagaaatatggccggggggattggaggaacatatcgcgcaattttgttcagaccaggacgcctactcaggtggtcagccatgcgcagaagtacttcatgaggcacaactccggcggcaaggacaagagaagatccagcatccacgacatcaccacagttaagctgagcgacgaccaggaccagcctccgtcctcgccatcccagtcctctctgatcactgaccagttcaacgcattagctctgacatccggcgctgcgtattcgccctccaattaacctttgcggctttgccggactactgggatatgtatatgccaatctttggaacggggtttgcaagatcaacgcctgcagtgtggcccgttcaattggatggaagctagaacattctgttttttttgggtgcaattcagtctgcagcaccatgaatctatcagatttctatctacttgtatagtacagactggagagaccgggagtgttaacaagtttgttgtatcatcttgtgtggtgtaataaacctggaatttgat

SEQ ID NO: 120734 - DNA, 245 bp, Zea mays
  Clone ID: MRT4577_41593C.1
gttaggaaacaaatgacaaattttaaaattttttctgaaacaaagaaacaatgcggattttaatgggttgcacaaaatagaggggatggccaatcctgtcttggcaaataaaatactgcgaaggccaaatgggtgtactacacaacacaatggccatgatggagatttttggttattttccatggggagaatcagagggggggcaaacaaaataacctaaattatgttcttttacgtgggatgcc

SEQ ID NO: 120735 - DNA, 392 bp, Zea mays
  unsure (1)..(392): unsure at all n locations
  Clone ID: MRT4577_41594C.1
gctgactcacacccatggcgcccaagccctttttcttcctcaagccagcggcgccctcattgctccctgcgcagcgccccttttcttgtgcctccagcagcaagaagccatcgcccctctccattttcccccacgtctcttccctctgtttttcctgtacgtgcgcaggagtatggggcctcccatggcgccctcctccctggtctcccttgcgcagggcagccatggccgagctcgccctcgcctcctgctctccatgggcgtgggtccccatcctctccctcctcccaaagtgcaggtagcagtccagcagccatggacgcccaggctgggaaacgctggaactcgcgctctctctggtttgggtggagcagcgcctntccctgcgctca

SEQ ID NO: 120736 - DNA, 2096 bp, Zea mays
  unsure (1)..(2096): unsure at all n locations
  Clone ID: MRT4577_41595C.1
gccggccgggcttggctctttcggaaaaaaaatcacccccaaactccgaccaaactcatcttccccggtaggccttatccggattctgcttgcacctctccagtgagctagtcaccgccagtccacgccatggcttgtcgcgccactctcctgccgctcttcctcttcctcttcctcctcgtggcgcccgcgcctgcgctcgccacatccggcaccatcgtcttcaccacgctgggccggagccgctacgcctttgacgtcttcgcgctcccgatcgccccgctctccgccgcctccgcggagctgcgcctcacggacggcacctccgtcaactacaacggcaacttcgcgccctcctcctccggaccgccctccctcctcttcgtctccgagcgcaacggctcgctcaacctctacctcactcccgtccccacatccgcctccgcccgacgccgcgacgcgctggaggaggaggacgtcacggcgccgcccacgccgctgctcccgtgggaccccatcgcgctcaaggaccggccttcgctcacccccgacggcgcccacctggtgtacgtctccacggcggagcccgcgggggcgccgcgccggagctgggcggccgtgtactccacgagcctggcccccggcggcgccacgcgccgcctcaccccgcggggagtcgccgacttcagccccgccgtgtcgccgtccggggtctggaccgccgccgcttcgcccggcccgcgcggctgggccggcgaggtggaggacctccgcaccgacatctacgtcttccggacctccgacgggtcgcgccgggcgctggccgtcccggacggcgggtggccgacctgggccgacgacaccaccgtcttcttccaccgccgggacgccgacggctggtacggcgtataccgcgccaggctcaccttcacggacgacgacgtcgcgtccgtcgtcgaccggatcaccccgccgggtttccacgcgttcacccccgccgcgtcgcccggcgcgccggggctcgtggccgtggccaccaggcgcccgggttccgactaccgccacatcgaggtcatcgacttgtccggcggcggcggcggcgccaacaacaggagcgcctactacgaggtgacccggcccgtggccccgcgcgcgcaccacttcaacccgttcatctcgccggacggcgagcgcgtcgggtaccaccggtgccggggcagcgggaacggggactcgccgctgctgctggagagcatcaagggccccgcgccggacacgttctcgctcttcaggatcgacgggtcgttcccctccttctcgcacgacggcaagaggatcgccttcgtcgggctgccggggctgtacgtggtcaactccgacggctccggtggccgccgccgggtcttctcgggcaacgcgttcccgacgacatgggactggaagaggaaaggggtcatctacaccagcgtcggcccagacttcgcgagcgagagcaccgaggtggacgtggtcgccgtgtcgctcggcgacggcgacggcgacgaccccagcgtctccatcaagaagctcaccgtgggcggcgagaacaacgcgttcccgtccccttcgcccgacggcaagtgggtggtgttccggtccgggcggtccgggcacaagaacctctacatcatggacgcggaggacggcgaggccggcggcatccggcgcctcaccgagggtccttggtccgacaccatgtgcaactggtcccccgacggcgagtggatcgcgttcgcctcggaccggcacaacccgggcggcggcagcttcgccatctacatggtgcacccgaacggcaccggcctgcggagggtggtgcacagcgccgacgtcggccgcaccaaccacccctggttcagcccggactcgaagacgctggtgttcacgtcggactacgccgccgtgtccgcggagcccatctccaacccgcaccactaccagccctacggngagatcttcaccgtaaacatcgacgggnctggcattcgccggctcacgcacaacctcccttttcggaggacgggacgcccgctcggtggggacgccggaccacctca

SEQ ID NO: 120737 - DNA, 244 bp, Zea mays
  Clone ID: MRT4577_41596C.1
cgaattgcaatttcgacctagacctacgcatgcgcataagcatacttccaatcgttttcataaacctccaaaaagtcaaatatagagagcagttaagacactgggtagggccagtcattaataaaatcatcatattatatatgactaactattatatttcaaatcatattgaaaattagattgtatacagaaagtattacaacaactcttaaaacaatctcttatatgataactttaatctatt

SEQ ID NO: 120738 - DNA, 778 bp, Zea mays
  Clone ID: MRT4577_41597C.1
atctctctcgcgttctcccaccctccctctctgaagcggcgacgacaggcaaagacagcaggcggcggacgcaccggaggctcgccggcggtggctgagccatccaacgtggcggcgcgccgtcggcggcggcggcgatgcacacgcaacctatggcttccagtgatgaggccagcatgttttggggccccccgaccgaggacggccatgcagatgcatacatggatgctgagtaccgagatcttgtgtctggggatgttccaatggagattcaagacattgagcattgtggaattgaggtcgatagcaagataaaatgtttccatggggatgatccaattaaaaaggttgcatttgagggtgtggacacaggaagaagattcaacgcttgtaagaatgcaaaaccttgtaaattttgaatttggtatgagccagagtggcctgcaactttgcaacgagctctacaacagttgtggggcatggttcagacaaaccagaagaaaaaggaggagtccgaggcccttgtcaaccagatgatgttggagaaaatgacatttgcagctgcaaacgcttctgtcactcaggagaagaatgaggttgtacagaagaagatgcaactagaattagatgtggctgatatgaaggagaagtaccagaggaagatgaaaagaatgaaaagagagcttcagtgcaaggagaagtggctactgatgtcagttagctgcaatgtaactgttgtggctgtagtaatttgtctgtttgcaatgaagctgctttc

SEQ ID NO: 120739 - DNA, 536 bp, Zea mays
  Clone ID: MRT4577_41598C.1
cggccggggttagcttgcaagtgggctgcttatttgctgcgttctgttcgttggagggatgatcgacgagccattggcatgcacccttactttcctgctaagaggaagattacctcggcgaggttcccagggagatccccactgacgacttgattgtaacaatataaggctacttctctgtggatttttgctgactttcgccagttccattaaaacagggctttgttattgtgacaaatatgaaatttgccgaaaagacaattcctgccaagctgatctatctttctgttgggtagattgatatacctgcttacacacaaatgacaattggtggtgctctaaaggtgggacttatgcgaggaagactggctgcagatctagaaaaggatgaacaacctacttacatggttatatcaacggagcctaccggctcattggattacagcttatactgcgttggggcccttgaagcaaatgtgccattacagtgtggctgactcgacgctaaccgtgatggactctactttagcaaagtg

SEQ ID NO: 120740 - DNA, 448 bp, Zea mays
  Clone ID: MRT4577_41599C.1
atccccaaggggacatcacatctgggggttggttgggaaaattgggttaatgccaaatccaagccccaccggggggggaaaagggtaatccaccctacataatcataacttccaaaacaccggtggaccttcaaggaaaaagattggctcaagccttacagccatcaactttgacatttgattttgggaactatcctgaaactcatttttttgctaaaacatattcaattggtaaacaaaaaacgagcccaacactcagggggccccatttggaaaaaacgaaggccggctcaaggtttttcacggggggtcgggggcccttctaaaaagccttggggggggagacaaatcgggttttgggggacaggatgcatgccaactttttggcagattgccgcaatttcagcagcactgatcttatccgggcgggaaacaaaatcttccaaaa

SEQ ID NO: 120741 - DNA, 380 bp, Zea mays
  unsure (1)..(380): unsure at all n locations
  Clone ID: MRT4577_4159C.1
ggggaattaaaaaatttaaaggaagagtttgggtgagaaaaatggggttgaaaattgtgattctgatggggaagattgttgggtataagaggtggttatggagagcgaaaaaggtaaggggggcgctganacaggnggtgagataggctcaaacacgagagacaacacccgggagaaaccagccagagaaagctggaggaagaaacctggctggcccccctgagggggaccgcgtaggggggagaggggcggctttggggagtccggggggggggcccgcaacggggggcggcaaaaaaaaaacccctacgagaggcagccgaaaaggggggcccaccagagggcccccccccccaacccccagggggggccccagtccc

SEQ ID NO: 120742 - DNA, 402 bp, Zea mays
  unsure (1)..(402): unsure at all n locations
  Clone ID: MRT4577_415C.1
ggcccgctgctacactcgtgctgtcccacttttcttcgaggttgggggcaggcgtcggctggcgaggctcatgacgtacgagggcgtcccgccgccgtgcgacaggactaggcgcctggtcgtccctgtcgctcttggggttctgaggctgcggccaggacacatgtcctgcctccttggggcgctttctgggcggtcgggtggggctgccntggcgccctgcgggggcttgcggcgctgcggatggcgatggcctgggtggcctntgcgaggcggaagcngctggcctcgctgcgcctcgcggctgcggcctccgccgcggcggcgcttgggtcgctgctggtcgttcttgctccggtcgggtgctgggtctgtggtttcgtgcctgtcggttctgggggg

SEQ ID NO: 120743 - DNA, 1811 bp, Zea mays
  Clone ID: MRT4577_41600C.1
tccgcgcctctccttcgaatcttggttggaacaatcgcgtattacatcgggtgaatcgtcctctcaaggtttctgtacacccaaaaaaaggccatacgtccctacagtgtgtgcgtcattcatacccatctgtgtggacagaaggaagcctgttattggaatgtcctttcattcttgtaatgacgcagaggagttctacaaatcatatgcacatgatggagggttttcagtgcgtgttggttctcaaaataaagctcttggtgaggttattaacaagagatatatgtgttcaagggctggttttaagaaggtgaaagaggccgatgatccccctaaaaaccaaaagaaccacgcactaacaagatgtggttgtgatgcaaacatgtatgtcaagttgggcccggataagaagtaccatatcacttcaatggttgaggagcataatcatccactttgctcgcctaataagattccttttcttcgatcaaaccgtgttgtgagccaaagagctaagaatacattgtttacatgccacaaagcaagcataggtacctcacaggcattcagaatcctacaagttagtgatggtggatttaataatattggttgcacaaagcgagatcttcagaattactatcggggacttagagagaaaataaagaatgcagatgcacagttatttgttgcacaactagagagaaagaaggaggctaactctgcattttttatgattttgttgtcgacgaggagggaaagttgctctacatattctgggctgacgctacaagcagaaaaaattattcactttttggtgatattgtgtcatttgattccacatatagcacaaaccactacaatatgaagtttacaccattcactggtgtcaaccatcatatgcaaagtatctttcttggaggtggattcctaataaacgagaggattgagtcgtatgaatggttgttcaagacattcctagtggcaatgggaggaagagccccatgactaatcataactgatgaggatgcaagcttgaaatcttctattggctctatattacctgagaccatacacaggttctgtatgtggcacatattggagaaaattcctgaaaaggttggccacacaaaaactgcagaagaggatttttggaagcttttgaatgattgtgtgtggggttcagaaactggagatgaatctgagaggtgaaaagcttaatgaactacctttggcttactttttaaagagattcgaaaaaagatgcaagagagagatcgtgtacgatgaagaaggaaacttgttggacgagaagccattagatgctaatgaagttgaaacaaggagaaagatagcagctgtgcgaaacaaaattgaagacatgattcaacaagcaaagagttcaaaagaaggcatggatttcttagtctcaagcgtgatgaacatggaaggaactcttggtcagattgtacctagcacgatgcagagtagacagcaagagtacgaaggtttcattggttgtcaaattccagaacaagtacatattcatccaccaactgatgtccgatccaaaggaaggagtaaaagaattaagaaatctaaagaactaccaaagtcacgaaagcgaaagaatgccaaccatgagccagcagctccatagatgttgatttgtagtattttgttttcagttagtatcttctggactgtactgttttttgggcacttttctggttagtagttcagcatggtgacattgtttccagtcatgaaacaatctttatttcacatggtctatataatcagtttacaatcacttt

SEQ ID NO: 120744 - DNA, 285 bp, Zea mays
  Clone ID: MRT4577_41601C.1
agcagactcatgtgtgtctggaattgccttgaattgctctttccttaaaatagctagctcttcaggagagtatctaaggcccactccatcttacctgaaccagttggtaagggtaaccatgacatagagtgaggcaaggaagaagacaagtggaaggcagaatagttgtaggaaagatgctggacttggactggaggagctggaagggtttcttggtcagctgacctcgcagccccacgcctttgccctggagagaggaaatggctgctgggagcagactgctga

SEQ ID NO: 120745 - DNA, 273 bp, Zea mays
  unsure (1)..(273): unsure at all n locations
  Clone ID: MRT4577_41602C.1
gggcactggttcaaaattagctgcaacttttttttttttttttaacaaaatttccttttttttggttgttggggggcccaanttacatcacaaatttggttttctggtccggaagttattttccccttttggggggttaaaaagttaccttgacccgatttcttgccttccaaaaaattaatttggggatcacctttgtcccatgggggttggcctttgcattttattggtttccattgcccgagttttcctttgggttttccacaggtgcag

SEQ ID NO: 120746 - DNA, 188 bp, Zea mays
  Clone ID: MRT4577_41603C.1
gtcgaagtttacagggtattagccgcttgcatctatcctactcatatcatggaaaaaatttgagtggtattgaaggtgtccaaggcggttaataagttccacagcgaagaatgttgcgctttatgagcccttggataacgcggcttttgccgaaatgggccccatgcggaagaagcccaaggcggtga

SEQ ID NO: 120747 - DNA, 291 bp, Zea mays
  Clone ID: MRT4577_41604C.1
tcgaggtttgctggctaccttcctcctcatcttattaagtgcggagaatgaatatttagccaggggaggtttaaaccatgaatgggacgttactgattgtgaatgctttgactgcatcctgtagcaacctgatagctcttggccattaggcgccatacccatcatatggcaatacatactgatttgagttccaaaatgcacttgaaaaacttacaagctacatattctacaagagctatcatatgatagattatgatctaccacaacgaatcattgcatacttctataaag

SEQ ID NO: 120748 - DNA, 607 bp, Zea mays
  Clone ID: MRT4577_41605C.1
cacgcgctgcccaaaaccctcgtccccgccgcggcgcttccggcgacggccatggacacccgggtgccgcccgttcccatggatccggcgacggcggagaggctccggcgcgacggccatgacccggatgagatggaggccgtcttcgcccgcgtgctctcccggatccacttcgccctcccggaccagtccgtctccgtcgacgctcgcctcttcggtctcctcccccacgactcggtcgactgcgtcagccgcctccccgacgtgctcctccgcaacatcgtctcccgcctccccgtgaaggacggcgcgcgcaccgccgcgctctcccggcgttggcgcggggtctggcgctcggccccgctcgtcctcgtcgactcccacatcctccccgcaggcaccgcggccgcgcgcgctgacgctcgtcgcgtcacctccgccgtctcccgcatcctagacgcgcacccggggcccttccgctgcgtccacctcaccagcagccacatggaagacttccctggcctgctcgcgcgctggctccagatcctcgccgtcaagggcatccaggatctcgtcctcgtcaaccgcccttgggcgctcgacttcg

SEQ ID NO: 120749 - DNA, 218 bp, Zea mays
  Clone ID: MRT4577_41606C.1
ggccgggaagggcctcgcgcgctacccccgttcttatccccacctcgcgcctccactcctcaccaccttcaagtctataagcacctactccatccgtactcatctccgaggccatgggaaagattcgaagaacacgggaaaaataacagcgggagcagataaacaggaaagagctaggcgaatgtacttggagcaaaaaggtcccccacaccccccac

SEQ ID NO: 120750 - DNA, 860 bp, Zea mays
  Clone ID: MRT4577_41607C.1
tagggccctttttttttttttttttttcaaaatctaaaattttaaatatctgaattactcgatccgaaatttccggtaaacagaatcgatatccctacacccatagatacacagaacaattgattttgctttccaaataccaaaagggctccgcgaccagaagaccaaacgagcgttgtttcctgctgcattggccgacactactgctcttgtggcctccccccacaacatgacgcctgtttctgctctgaaggtgtgcagaacagttctttgattggattaatcccaaaccaatcgtgctaagggcaataaaattcgagaacattgcagctgtttcagcagaacatgacctgaagtaattgcaatggggaattccatctacctacctccgagatctacgacaacagctccagccaatcacagtggcctagctgaaacacgagaatgagaagcgctcgcgcgcgtagcggcggcggcggcatccatcctggccaactcttcctccagggcgaagatctccgccttcaacgtggcgatctcctcctcgagctcggctttctccgcctcgcgcctgacgcgcgcctcctcctcctccgtcgtctggccagtgggtggtagtccgggtcttacgccgcaagatgacactccaacggccgccgcgacatcgcttcggccgccgccagccgtcgaggctttgcccttcgaggcgagggtggagctctggtctgacatgagttgggtcgagcgtgggtaccactatcatatcgagcacccctcgcaaccggcccggccggcctcgaggcttccccgctgccgcagcagctgccggatccgggggggcggatcccagccgcaccgcg

SEQ ID NO: 120751 - DNA, 919 bp, Zea mays
  unsure (1)..(919): unsure at all n locations
  Clone ID: MRT4577_41608C.1
ctgagctgctgctgtatccgagcagcctgagctgnacgtcgtcgcctttttctcaccggncgccggtggcgggatcgccgcctccggacgcttcgtgtcgtccccggcaagaagcgggctgtagccgttctgcgcttccatctctcctcagctcgctagctagctggcttctctgctctacctgccgcttcttgatctggaggaagctgtttttttttttttttttttttttagaccaaacgagcgttgtttcctcctgcaatggccgacactactgctcttgtggcctccccccacaacatgacgcctgtttctgctctgaaggtgtgcagaacagctctttgattggattaatcccaaaccgatcgtgctaagggcaataaaattcgagaacattgcagctgtttcagcagaacatgacctgaagtaattgcaatggggaattccatctacctacctcctccgagatctacgacaacagctccagccaatcacagtggcctagctgaaacacgagaatgagaagcgctcgcgcgcgtagcggcggcggcggcatccatcctggccaactcttcctccagggcgaagatctccgccttcaacgtggcgatctcctcctcgagctcggctttctccgcctcgcgcctgacgcgcgcctcctcctcctccgtcgtctggccagtgggtggtagtccgggtcttacgccgcaagatgacactccaacggccgccgcgacatcgcttcggccgccgccagccgtcgaggctttgcccttcgaggcgagggcactgcacgacntctgacatnnnnnnnnnnnnnnggctacctacccagcccatcgatcacccctcgcaacgcaatggcgctggccaccaacttcgccgctgccgcagcagctgccggatccnnnnnnncgga

SEQ ID NO: 120752 - DNA, 421 bp, Zea mays
  Clone ID: MRT4577_41609C.1
ggaaaagggtttccccaattccttttttccccccagaattttgaaaatcgggtcattggggcccccatgcttggggcccttcaggggtcaactcagggggcgagggggccctggggggtcttgggggggggcccgtccccggttcccttgtcccccgggggggggccccccccggggcccgcggggacattgcagggcggggtttgccccgcccatccgggcctgaagggcccgcttatgttcttgacccggcccatgacgacggggggtagttccccgcggccccccgggcaggcgccctccaacgtttggccccggtttgccaaccccgggacgggccccggccccccaagggcaaaatggggggaccgcccccctttggggccggggccctttgccaccccaggcagggggccggggg

SEQ ID NO: 120753 - DNA, 311 bp, Zea mays
  Clone ID: MRT4577_4160C.1
acacaaacatttgctgtattatttttttggggggacactttttacctagattgtgtgttactatcattggatacccacactgatattacaacagcagcaagcagctacatttatatcagggcactgggaaaccgtgctttaccaaaccttacaggggggattaaagaaaaacctaccactgttatgggccatggccctcgcaggtacattaaagcaaagctgcgaaatgcatgagagggcctgcattttttttttcaaaggttcccctaagttggcaccaaagggggttttttgccggattttttttttgt

SEQ ID NO: 120754 - DNA, 358 bp, Zea mays
  Clone ID: MRT4577_41610C.1
atcatcacgtctccactccgcatagcagcattgaatatgggatctaaatagaaaattattttattgctgttgtatcatgtacgcctgccgccgctagtgaatagccagcacggcatgtgcacaactcatatagtgtcattgcccatataacacggatctagtgatgcacttggccctccatccgatacgacgccctgacacgatcaacaggacgccacgattaggcacgacttagaccactggtagccttgtagatgtgattgtgatatgcacttgccattatgattgcgatcgattatggttttaccgacgacacactcacttcataatggcatacatgcccgcgtcctaagattgt

SEQ ID NO: 120755 - DNA, 331 bp, Zea mays
  Clone ID: MRT4577_41611C.1
ctcaccctaccaaaaccctagccgctgaaccccaagcttcctcgcgctcgcctctccccgccgccacggcagcctagatccccgcgcgccccgcgtcgccagcttcggagcttccgcatctgggttggtggtgttctgttagggttggcccaccatgcctcggagttcgcgtcacaggtcgcaccggtcccacaggcggggagggtccgctgaccggtcggagtcagagggcgaggagtcggctccggcctcgggcgcgcgggatgaggccgcggcggcggctagggtttccaaagatgccgagcccgagaggcgtcgttcgtcctcgggg

SEQ ID NO: 120756 - DNA, 375 bp, Zea mays
  unsure (1)..(375): unsure at all n locations
  Clone ID: MRT4577_41612C.1
cttcactagctgccgggatctggtctgagtctccccaacctgtgtgactgtaccnggggccggaaacacaccttcctattacaaacaggtacatgttccacatgagccaacggagctatgccctggccctggttctattttggacgacgactctcgtaaaaaggaactctgggaccccaaatgtccaagaacggatctgagctccccgtgcctgaattgaacccactatttataaatacctcgtctcatactgagcggaagtatgtataatctgagagtactattcatgcacgggagcccctatccccgctcttggaccactggggcccactacctcaaacaaaaactcttccgtgtcaaaaaaaaaagcacacc

SEQ ID NO: 120757 - DNA, 432 bp, Zea mays
  Clone ID: MRT4577_41613C.1
ggggccggggccccaaaattatggggaaaaggggcggccatcaaccaaaaaaagggtaacgggctaggcccgggaaacaaaaaacccatggccctaaaaacggggccgggggaacaagctatagtcaaaaggcccccccggcccaaggggaggaaggggccgagggtcaaggggggcaagtaaccccgggcccccggcaaaaaccgggcaaaaaaaaagcgggttgccccccccgggggggggaacccgtcccaaaacacaaacacctggggggtggggaacacgttcaaaccccccgggcaaaacccgaacccgttggacgggccctggcccaaaaaccccacctggacgttcggaaacaccaaaacctgggggtttgcgagggaaccaaaatcaacccgtaggggttggcgggaaccaaaacatccgccc

SEQ ID NO: 120758 - DNA, 183 bp, Zea mays
  Clone ID: MRT4577_41614C.1
agctgcctcatgtgattgctggccagtgctctgaatgtcaaagtgaagatattgagccaagcgcgggtatccggggggcgtaactatcactctcttaaggtggccagatgcctcggcatctaattagtgacgctcatgaaaggagtaacgagagtgccactgtccctagctactactccacca

SEQ ID NO: 120759 - DNA, 221 bp, Zea mays
  Clone ID: MRT4577_41615C.1
atgcaatggataatatggagaatgtgggagacggcgaggctacatgggaggcactggcttcaactctgaaaaaaagaaccaagtgcacgaagccgcaaatctaagctcttgtctcatcagggggggccacaaacttatgaacctacacctgaatcctcctctcgtcggagagcgagggcgcgcatcttaccatgcccaaagacacggtgtcctgacatact

SEQ ID NO: 120760 - DNA, 593 bp, Zea mays
  Clone ID: MRT4577_41616C.1
ttttttttttttttttttcctaaaaatggtttccacttcaacccagtgcaaaggaaaaaactagagttgtaacaactataagagtagcgctacaaactaataaacaaaaccgaacatagaatattttccccagtaaaaaaatactatccgctcgatcgtacatacgtacggatgtcgtatgcggggtctgctgtttactttgtctctacattatggagcagctggtggtgtcatgctgcgcctggtagccgtaccacgggtagccggcagggtggtcgtagacgacgtttaccgggtgcggcggcgggtaataagcgggcacgacggcgggcggcggcttcttgtcgtccttcttggcctcgccgacctgcagcaggtgcgcgggccccaccttcttccgcagcgcgccagtgagcttgatggagtcgacgccgtcgcccacgacgacgaccttgtccctgccttcgccgtcgatggccacggagtcgacgccgagcgtggccgccaccacctccatggccttggaccggcacttgtcgcagctcatctgcaccttgatcacgatcttttgcttcattttgctgagggttgtt

SEQ ID NO: 120761 - DNA, 586 bp, Zea mays
  unsure (1)..(586): unsure at all n locations
  Clone ID: MRT4577_41617C.1
aaaaagccctgtccccgcagcttgcgaccggagatccacgaatgtcccaagtcccaggacccgtgcgcgtcccgggacgactggcgctgtgcgcgctccatgcacgagttttccgccaaggacatcgacgggcacatggttaacctggacaagtaccggggcttcgtgtgcatcgtcaccaacgtggcctcccagtgaggcaagaccgaagtaaactacactcagctcgtcgacctgcacgcccgatacgctgagtgtggtttgcggatcctggccttcccgtgtaaccagttcgggaagcaggagccagggagtaacgaagagatcaaagagttcgccgcgggctacaacgtcaaattcgatatgttcagcaagatctgcgtgaacggggacgacgcccacccgctgtggaagtggatgaagatccaacccaagggcaagggcatcctgngaaatgccatcaagtggaacttcaccaagttcctcatcgacaagaacggctgcgtggtgaagcgctacggacccatggaggagcccctggtgatagagaaggacctgccccactatttctagctccacaagtgtg

SEQ ID NO: 120762 - DNA, 139 bp, Zea mays
  Clone ID: MRT4577_41618C.1
cactcactcagcagatctctcttcgcagccgccgaggatccccatcacagcgcggtagatggctgaacaggaggtctcagtcgcggttgaggtaccaaccccagtatttggggagcctatggacttgatgactgctctg

SEQ ID NO: 120763 - DNA, 407 bp, Zea mays
  Clone ID: MRT4577_41619C.1
gctagtagaaacctggttctcttaacacaaccagatatttccactaatgttacaaccgctagtggaaactaatttccactggcggttctgttacaccaacgacccactggcggttgtgttaagataaccgccagtgaactatgtgttataagtaccactctttctccccaacgggagctatacgctcgtagccaacttccattggaggcgattttggaggtccagatttcacaaaatacaagggggaggttttggtcttcattttttggaagaaggtgaataagaaagggttggcttatgtttctttgacaatttttgttcattcttgctcaattttagccacattttaaatctaagattttacaagtgagtgagaagagtatagctaggttattttctctattttc

SEQ ID NO: 120764 - DNA, 285 bp, Zea mays
  Clone ID: MRT4577_4161C.1
ggggcttgcttcctctgactcgcctcctccccgaccctatgccgccacctccaccctagtcctctcttagtcgcccgacacttcggcttaatgcagggtggaggacgcgagatctgctgttgctatcctcatgagttggagcttgtcctcagactttcgccgctactcggcaaacagttaaatctgggaactgaaggaactgttaatatgtaattccacttcaggtgtagttgcctataatcgacgctcatgtaatttggttgcccatgcttcgacagctttagc

SEQ ID NO: 120765 - DNA, 302 bp, Zea mays
  unsure (1)..(302): unsure at all n locations
  Clone ID: MRT4577_41620C.1
agccgaccccanccccanggcggcgncnncnncccncncccccccagcaacgccggccgcgccccggcacggggcgngccacggacgaccagcgcnaccgaggaggggacgaaaggcnacnacnacaacgcggngcgccaaaaaacgccnggacgcgagcggcggccgggaccagnacggaggcgcgcnggnggacgagggcangnccgngccgaggcggcgganccgggaggcgcgganggcggagaccaaccaccaagcccccgcccagggggcgccgngggagaagcgcnaccaccccg

SEQ ID NO: 120766 - DNA, 153 bp, Zea mays
  Clone ID: MRT4577_41621C.1
agccttcggaattattttggcggcttatatgaaaaaccaacgccttaaaacgaccccaaccgaacggtccaggcccaaccggatgggcaatggaacctgcccaacccgcttcggtttcttctttccccgccggccaatggcggcccctttttg

SEQ ID NO: 120767 - DNA, 288 bp, Zea mays
  unsure (1)..(288): unsure at all n locations
  Clone ID: MRT4577_41622C.1
gggngngcccaggaanggnggaggaagaaacggaggaagnnnggcangagaagcnngaancgcncccncaaacaananggaaacangcnnncgancnacccncaaacaaaaangcaaggaanncnngcaacanggnagaagganngncnaggcngcngaaancgcaaaaggannggagnncngnncncnngngccngnangaagcnggaaggcangacaaagngcagcnnnngganancnncngngaggcagccagcccagannggcaaacngaaaangccaccagaa

SEQ ID NO: 120768 - DNA, 1659 bp, Zea mays
  Clone ID: MRT4577_41623C.1
ggaccccaccattctggcggcgccggcacgggccatgatgcacacacctatggcggcatgtccaataccttcaagctgctaatcgtcctcggcttacttgtctgctccattgcgtttgctgccatggcgatcttgaaggcccggtcactgaagaaagccagcgaggcacgcgcttggaggctcactgcgttccagcgcctcgagttcacctgcgacgacgtgctagacagtctgaaggaggagaacatcatcggcaaaggtggagccgggatcgtgtacaaggggacgatgccggacggtgagcatgtcgcagtgaagcggctttcgtcgatgagccgtggctcgtcacacgaccacgggttctctgcagagatacaaaccctcgggaggatccgacaccgctacatcgtgaggttgctcggcttctgctcgaacaacgagacgaatctcctggtgtacgagttcatgcccaacgggagcctgggggagctgctccatggcaagaaaggtggccatctccactgggacactcgctacaagatcgccgtcgaggccgccaaggggctcagctacctgcaccacgattgctcgccgccgatcctgcaccgcgatgttaaatcgaacaacatcctgcttgattccgatttcgaagcacacgttgctgatttcgggctcgccaagttcttgcaggactctggcgcatcacagtgtatgtctgccattgctggctcctatggctatattgccccagagtacgcatacaccctcaaggtggacgagaagagcgacgtgtacagcttcggcgtggtgctcctggagctggtaacgggaaagaagccggtaggcgagttcggggacggcgtggacatcgtccactgggtcaggtcgacgacggcgggcgcgagcaaggagcaggtggtcaaggtcatggaccccaggctgtcgagcgtgccggtgcacgaggtggcgcacgtgttctgcgtcgcgctcctctgcgtggaggagcagagcgtgcagcgccccacgatgcgggaggtggtgcagatgctcggcgagctccccaagccagccgctgccgctgcagctgcagggcaaggagacgaggttcccggcagcggcgacggcgacgaatgttccgccgcgccgtcgggtgctccggcagctgatgaatctgttgaagcgccgcatggcgaagccaccaaagaaccgagctcacagtcttcgccgaccactgatctcatcagcatctgagagctgtgtcgagcttgtttttttttcttctcgttgctatgtttccttccttctccttgcgaagttcagatgtttggatgtttctagattattagggtttggtgttttaggtctcacctgcacttagggtggtctctgagattcagacatcttgtgttcatccatcttcatttaggtaggccccgggattcagacatcttgtgttcatccatcttgtgttcatgcatcttagcctcacttaggacactgctgtgtacagtagtacatatcaagctccctaaatctccattttgctgtcagaactgaaggaccatttagggggggattaaggagcctaggattatggagcagtcaaggtcgttaatgttgctgtttgtacttgtgttaataaggtgggcattgatatgt

SEQ ID NO: 120769 - DNA, 269 bp, Zea mays
  Clone ID: MRT4577_41624C.1
gtgaagccatgcgatataaatcaatttttccctcctgcgcaagctagagacggagggctgcttccaatgtcatccggactcaagctacacctgtgcccaaccatggacatggccgcccgcattatcgactgccgagaccaccggttcatcctcttgaccagactttttatcgactagacccacatgtacttcgtgcttcaaccgcctcgacaaattttcataagaatcccgcacgttggaggattgagaactgacctgctccgtgacct

SEQ ID NO: 120770 - DNA, 390 bp, Zea mays
  unsure (1)..(390): unsure at all n locations
  Clone ID: MRT4577_41625C.1
ggggggggtggggtttttatagacacaccacagggggactatatcagtagagagagaaaaacgcgcagaaagaaaatgatcatgcgngagacacacacacgcacaaactgctctccttgcgatccagagaaacctcctatcccaaagggggtacgctnggggttcttttttaactaacaanaattccccgaaactttcttgaccgcaagacttctgggcacgggcngaaaacgttgcgtctgcggaaggggagaacatcgcgaggagcccattaggctagccgccgaagccgtagagggtgcgggcctggcgctgggggggcgggacgacgtgcatggcagggacggacttgcggcgggcgtgctcgagggaggtgactgcggtggggag

SEQ ID NO: 120771 - DNA, 517 bp, Zea mays
  Clone ID: MRT4577_41626C.1
tcgggaatagctcgtttgactccatgatccctcctcctccctcttcatccctacttctctgatgcaaccaggcctttgccgaagcaagcgtacacgcacggaaggggtaggtcagcacagctatcatcgtcgcacgcctgctgcatgccaagaaaactctcctcctgctgtacacccgcaccgcctgcgcagtataactggagagaataagacagcagaacgcaaaccccggatccgaaactatgagctacatgcgaatcgttgccgtcgacgtgttcaatagcaacttcagagaagggactgaggctgccccaaaaaagaacgctgctgctgccaactaagagccgatgtaggcatcaagaacctcagatcctagacgtcggatccgtttatggaatggtacttctccacgattggcgcataatactattacagtaatggttgaccgtgaattgaatggaagccagacgccatcttctttgcgagcgtgatgtatttatcaccccacctctatgct

SEQ ID NO: 120772 - DNA, 695 bp, Zea mays
  unsure (1)..(695): unsure at all n locations
  Clone ID: MRT4577_41627C.1
gccgccgcgcctcccctgcaagcttcatccttccctgcacgcacctagctccctctgaccatctatggccgcctctccgagccccattgcccatggcagctatgcccgctgcttgctccccctgcttctcctttatccccctcctcgactcctcgtcgagttcccctgaatcgcgacagcagcaccggggtagcaaggcaaggattttcctgctccgaatctacccggctcagcacgatgggcttgttgatgtcctgcctctccgacccaatcccgtcggggaacaggtccccgccgccacaggccaggcggcgttcctccacctcttcccgcggttgtggcagcggcgggagggactccgttatggcctccatgtccatggacgaggaggcgcttactgcagctcgcgcccgtcgtcctgcctgtcgagctcccggcaccggatttcctgcagacctctctcctcctcagcgttcatctctcttcccacggccgcactcgctttatttcccacctatcaagctcggcctctgctccttccctgctcgcgcccgtggtctcctagctcgccccgccgtacgctcgctctgctcggtgccttccccgctcccccatttncagtgccttgccgagctcgccctccactcggctcatggcgctcggccctgccctctgctcggcgccctgtactccgc

SEQ ID NO: 120773 - DNA, 465 bp, Zea mays
  unsure (1)..(465): unsure at all n locations
  Clone ID: MRT4577_41628C.1
gtggggggggttttttttttttttttttttaaaaatagatctctaatcttttattactgagaagtggcgcatatcagtatgagaactttattattacagtgtaaagcgtaaaaaaatctaaaagatggcaccaccaatggggggctgggggggtggggggttattattcctcaaagcaaggtgggtaaatgggagcaattgtggttgttgtaaaaaggcgacattgtttgccacatcctgtggggaaaatgggagcaactgttgctgtggcaaaaaggcgttaatgtgtcccacaacctgtggggaaaatgggagcaattgtggtggtggtggcaaaaaagcagcaatgtgtgccacaacttgtaaatggaatgggagcaactgtggctgcggtaaaaaggcgccagggctcctgacaaggtgggtgaatgggantanctgttgtgcccgacgcgtgggcgggcc

SEQ ID NO: 120774 - DNA, 439 bp, Zea mays
  Clone ID: MRT4577_41629C.1
catcaaggatttttatgttgacaaagctgagaaggcggcggagactgagcggggggtggactcaccacactgacgggtgactggcgagcatggcaggacccccaacatggagaggaacatgaaggcacaggccctgagggactccaccagggcgggctacatgccgagcaagacgacgacggcgatcaacccaaagaaccctgacatggatgaccaccgcaagcggcgccgaggctgccaagaacgcacaggcacgcaaggatcccaccacgctgcagatggagactgcaccactgacctgcggctgcagcccggaggaccccaacaccttctgcaaccggagacaccacaggctgaacaagcgactgaccaaacgagaggacgaccccgatgaggcagaagcagacaaccctaaggcttgaggacgacgctgcctgaa

SEQ ID NO: 120775 - DNA, 297 bp, Zea mays
  Clone ID: MRT4577_4162C.1
gctttcactcttcctttgagagcagtgccagcaacaccagggcccctggcaacagcccctgtgcgtgatcctccttcccgcagccaccagcccatggttgggtgggtgaggccagaagaaactgcctccggcaagaggtagcagccgctcaggtggctctgctggcatcggagcccacagaagtgaggagtggccgatggacctgccctccaaatgtgcctgactcggggtcttgccgtcactggatttcctggcatggcagacagaaagaaagatagtttgaccaagtcgtagaag

SEQ ID NO: 120776 - DNA, 298 bp, Zea mays
  Clone ID: MRT4577_41630C.1
tttacttttagttctaggaacgtcatccccaggtggggatccttcttaatgtgggggtggaacctattgacctgcttgccacagcatgttattttccaaaaaatatttaggaacaccatactgctatgcttccattatttattccaatgctttttaaacaatatcttactttgcttctagccttaatgaaggttccaccaacatcccatcatcagctgaccttgatttttctgcaaactacattaatctcaaattttataccatgcctcctgggaggagcttttaaaaaaatttgatt

SEQ ID NO: 120777 - DNA, 336 bp, Zea mays
  Clone ID: MRT4577_41631C.1
atacatatacagccacatttcttccatgggttcggctcaacagcataaacatatttcctaccaggacaccttaaacaaacgcaacaggatacaactgccagctaaacatgacactgggactcttcatagaatgttcgcctgcctacagtacgagcaggagaaacaaaacaaaaaaatgacagcttcagccacgctgtttttttgagctaggtaaatcatcatcgtagggaccgccattttccaccccatttttctcgcccttctttctagccagaatcttggtgatcttggggggggcattccgcagcttttgggccctggtctggttcctgggtt

SEQ ID NO: 120778 - DNA, 573 bp, Zea mays
  Clone ID: MRT4577_41632C.1
aattacaactcgacacccccaacctctgaccaatggagaagtaaagtggggcaaaagatccaatttctcccgtgctgcttcccccggcgttcgctgccccttccgaccagccggcgcatcacgcacggcacgccatgaagatcgcggtggagggatgcatgcacggtgagctggacaaggtctacgacacgatgcagcggctcgaggcggccgagggcatcaagatcgacctcctcatctgctgcggcgacttccaggctgtaaggaatgagagtgatttacagtgtgtaaacgtcccaccaaagtttcgtaccatgaactcgttttggaagtactactctgggcaagcagttgccccatacccaactatcttcatcggcgggaatcatgaagcagccaattatttgtgggaactgtactatggaggatgggcagcacctaacatctacttcttggggtttgctggtgttgttaagtttggaaatattcgaattggtggaatgtcaggaatacataagcaacatgattatcaccgaggacatcatgagaggcctccatacgataatgctacta

SEQ ID NO: 120779 - DNA, 378 bp, Zea mays
  Clone ID: MRT4577_41633C.1
gctataaaatataagtcaacaatcttaaggcaatttggtcaacaatacactatgtttgtgacatgacataaaaagaggagtttgccctcgaatagagacttcaaacacttgaacaccatgcatcctttagccaaggtcataggcccggacatggaaacataacatgaccatactcttgttgaaacaggactgcgccagccttgggcgaaagaaaaaacgaacggggatccggctatgggataatcgatgacatcctttcgccagcagcgtcggtatgatgaactacataaaccaaatactcaaactgcatccagaatagatccacaggagcgttcctactctgtggaggttatacctatatctgttccattgcagagg

SEQ ID NO: 120780 - DNA, 486 bp, Zea mays
  Clone ID: MRT4577_41634C.1
gatcaaccatagatgcatactgaaacaataaagcctacatgcagctacgacacgacctctccattaataacaactgagtacactgtaccctgcagaaaataagcagggccaactgttataaaggaccaagctaacttccgcctacttgcaacatcatcaattttttatattgaaacaaaagtccaatctagtagccgctgcttacaagcagcagcaaagactactgccattcagcgagctagctgcagcaaggcgtgctatcttcttgacacagcaacaggtgctgcctttctacaagcagcttgcggctaaccccgcaaccctcttacaactacaacaattgttgacctttgttcaacttgctttgacaaacccagcagcctgctaccaacaacacatcattggcggtgccctgttttagatcgtttattacttgtaattcaataataaacttttttggatgatgtatgtggccaaccagaaata

SEQ ID NO: 120781 - DNA, 220 bp, Zea mays
  Clone ID: MRT4577_41635C.1
gcacgagatggaggtgattcaaatgatacacatcagtgaagacaaccagcaactgaattacctgaacaatgacatggttaagacagacaagcgctataaagtagtagacggatcaatgggtgttgttatccacaagatacgagacactattgaagctgatatatacgttaggagtagagccaaagattagcacatgtagtacgaggaagagatgagtccc

SEQ ID NO: 120782 - DNA, 201 bp, Zea mays
  Clone ID: MRT4577_41636C.1
gcgatctagaactagtcgcgcgtaaagcgtaataactcgcggacacggctgccagccagccccagccgcccgtgaggccgcgtgacgcgaaacgttccttcctcgcgcggcttaaagcgtttcctctctttcccctcgcagatctcacccaccgtctacctctcagtttcgatcgccgtcgagctccaccacgcttaattg

SEQ ID NO: 120783 - DNA, 831 bp, Zea mays
  Clone ID: MRT4577_41637C.1
cgggtccataaattatactgctcttgcacataggattccatttttggcaataaagtggtagcatattccaagccagaaatttgccatagtatgaactgttgtgctatccttgtcatattctctcagctatgtccgtttataatttattacgaaattttatttgaatgtggttttatattttttcacatgaagctcagtgccatagcagcagaagctggaaacaagccgtgatcaactaaaacggaaatctccagcatttctgtggattaattgtactctctgtctctggtgtatagtttttttcctcggaaaacgcaggagagctgcgtttcattccattaagaagaaaaacagagataatacaaaacagccacctcgcgggggccaagtacaagcatactgatactcatccatgaataaaacacccaaaggtacaaactctaacacaaagcctacagacccgggatgcgattagttagcaaggatagctttcttgctccagcgagctcccacttctctcgctcttgatcagccatcctaacagcaagattcacattaggtctgtttctgtcgaagacacaactattctgatgtttccacagagtccatgctcttaaaattaccagggagtttactgcttcccctgccactccatgaatctgattgcccagccaactccacaagcccataaaagatgcatcaacaagctaagaggccatgctttggagattaacttgagatagtagtttaaatcagaaatcctgggcgaacacacacccaatcagcagatggtccaagtgtttcctgctcctgatcacacaaagggcagct

SEQ ID NO: 120784 - DNA, 402 bp, Zea mays
  Clone ID: MRT4577_41638C.1
cccacgcgtccgcccacgcgtccgcccacgcgtccgctcgccgccgcccggtgtgctcggtctgggcactcaggctggggcggagcagcagcgggagtaagaaggcaggcctcggcgtcgtcctcaacctcgatggatagtacaaggacacctttgacgacgtccagcgggtcgatgttctgcaaggtaatgccttggcatggaacgttctcgctgcagttcaacttgatggcgtccttgccttgtcgcagtagttctggtcgatgattatcgagttcttgacgtcgtgcataaccatgttttggaacgtgatgtccttggcatatccgcttcctccctggtaactttggagacatggaggttgtgagtcccgttctcgattgacatgcagtcgtcccctgc

SEQ ID NO: 120785 - DNA, 378 bp, Zea mays
  Clone ID: MRT4577_41639C.1
acagacactcgtgtcatctcgccatcggccatcgctggctcatgatcgagccgcacgaccgaggcatcacgtgagtcgcacacaccaccatgcaagccacgcgtcaggccacggagggggacgcacatgagcacgcggtgagggctgaggctgacgaggtgaagacggaggtggcgaacgcccacgatgaggatgaggcggtgcctgatgagaaatacgtggcggttgtaggggaggacgcggatgccgatgcggacacggagacagagactgaccgcgaggcggaggcataggtcgaggccgaggtggaggtcgaggtggaggcggaggccggtgcatcgtctgcgaagaagaagcgtatccaggtgtccagcaaca

SEQ ID NO: 120786 - DNA, 409 bp, Zea mays
  Clone ID: MRT4577_4163C.1
gccggccgggttggtctctatcactatctctctgttacttctcccagcagccacaagctcccttccttcatgaacacggtaccgccgcctgcggatgcccacatctcagcggccatcaacttcatctacccgccgactgccttgccgcagcaacccgcataggatacctctgctgcatactctggccttgacgtgagctgcgacgatcgtgtggagagcatcgacgaaacaagaactgcttgaccaaaactcccagatgtcgtccattgatattctgaacacgtcatcggaaatgccgacgagaactcggcgctgtcatctgcaccatcgacaccacgtttgatgccaagctgctaactcctctgaggattcaccgatgctcctgctgcacatgatagtacgatgacat

SEQ ID NO: 120787 - DNA, 455 bp, Zea mays
  Clone ID: MRT4577_41640C.1
ctcctatctttttttttttttttttttttttttgtttgttttaattaaaactttctaaacaaaaaaatccaattttcccccataacaacatacaacatcttttcctccatcgaaaacatccattaatcacaagcctcttccaattaaaaaaaaggaaaaaacaaaattatttttggggtgggcgtttggttcatggccctcccttttaaaattccacacaccacatttgcctaaataaacctaacgtaatcaccttcccaaaccaattaaaaacccacccagggaaacaaaatcttggtgaggagatgaataaattattaccggacccccgcccccccttacaaactgggcctatgcacctgctccgatccatttttttttttgggcctaaacaccccccccgaatttggccacgttccttttctttttttccttcaaagccccccccccctttt

SEQ ID NO: 120788 - DNA, 307 bp, Zea mays
  Clone ID: MRT4577_41641C.1
gtagaccagtttgtgtcacaacagagaaagacgggggggacccgagcccagaccagggcagacgcgcgcgccaacgaccaaaccgggaaggggccacaacaaccagcgcaaccggacaacgcaaccacacgcgccgagcgctaccgtatgcagacgggcaccacaggactcaccggcaaccgaaccatcaaccctaacggagaggcacggacgatgacagaaccgcctgccacggctgcgtaccgagcaaaccacaccccaggggagctcggcaacgcgcgcaagaacgacgtataacagctgacca

SEQ ID NO: 120789 - DNA, 454 bp, Zea mays
  Clone ID: MRT4577_41642C.1
gcgggtcctcgaggccggccgggccgggccaaataaaatggcgcctggtttgtgtgttacttgtgcctgtcttgtaaatgtgaaacagtattcacagatgattgctgaactgatatgattggtcttgtaaatgcggaacggtatgtacgcatgattgctggtgtttatgttgctaagctgaaggcagctaaacactcaagtgtttgggtttgggctgtcttctgcggtcagtgtgaaataaaatgtaaatgtgtgttgttcaatcgttttggactattggcatagcagctgtgtattcatatatttgctcatattgcaatctgaaatacgaaggcaaggggatccattgttgccgtgtaaaaaaaaaaaaaaaaaaaaaaaatagggccaaaaaaaaaaaaaaaaaaaaaataaaaaaaaaaaaaaaaaaaaaaaaaaaaaaaaaaaaaaaaaa

SEQ ID NO: 120790 - DNA, 326 bp, Zea mays
  Clone ID: MRT4577_41643C.1
aggcggggcggaaaccgccttttgaacccaagttttacaagatcccggtggtgctttgttgatgccaaccacataagctcccagggaaaagggagaaacctatggggggctgaagctaaacaggccctccattgggaaacccctttttttaaaacatcacttggcaaaattcttgatgaagggaactcagaagtttattacaggggaattattcacaaaatttccagatggcccgtttgccatcaaattccacacaggggggttgttatcaggaatccctggggtttgctcaaatgctcccccaactggggtttttgggccaccaa

SEQ ID NO: 120791 - DNA, 717 bp, Zea mays
  Clone ID: MRT4577_41644C.1
attcgcccttaagcgggtaacaacgcaaacgccggccggctgtgaggccggataccagcgacccgtaaaaccagcgcaagcctgctctctgctgcatcagcaatggaattgggacccttctttatattgcgcgtgtatattcgatgcttgtgtattccaaataaaatggcgcctggtttgtgtgttacttgtgcctgtcttgtaaatgtgaaacagtattcacagatgattgctgaaatgatatgcttggtcttgtaaatgcggaacggtatgtacgcatgattgctggtgtttatgttgctaagctgaaggcagcgaaacactcaagtgtttgggtttgggctgtcttctgcggtcagtgtgaaataaaatgtaaatgtgtgttgttcaaaaaaaaaaaaaaaaaaaaaaaaaaaaaaaaaaaaaaaaaaaaaaaaaaaaaaaaaaaaaaaaaaaaaaaaaaaaaaaaaaaaaaaaaaaaaaaaaaaaagactctacaaaaaaaaaatgagtccctcgccccctgggcccccggcccccttaaaaaaaagggaaccccccgggttgcgggaattcaatatcaagtttttcaaacccccccccacctcggggggggccccggacccaaattccccctaaagggagccaattaaccccccctccctggcccctgtttaaaaacccggggatgggaaaaacccgggggttccccaattt

SEQ ID NO: 120792 - DNA, 972 bp, Zea mays
  Clone ID: MRT4577_41645C.1
cctcgtacccggccgggcccgcctgaatccaaatctgtatgagtcgggaaaagtgtgcctcagcctcctgaagacatggacaggcactggtaacgaagtgtggaatgctgagagctcaactgttcttcagctgctgttatcgcttcaggcccttgttctcaacgaaaaaccttacttcaacgaggcgggatacgacaaatttgtgggcaaggctgatggagagaagaactccatcacgtacaatgagaatgccttccttctgtcatgcaaatccatgatgtatgttttacgcaagcctccaaagcattttgagacgttggtcaaggagcatttcacctgccgtgccccgcacatcgtggatgcctgcgaggcttatcttgggggcgatctcgtcggacatgcgcacgacaaagcatacgtagcagaggacggcaacaagaactgctcaaccggtttcaagataatgcttggtaagcttctgccgaagctcgttactgccttctgtgaggccggtatcaccagcgacccgtaaaaccagcgcaagcctgctctctgctgcatcagcaatggaattgggacccttctttatattgcgcgtgtatattcgatgcttgtgtattccaaataaaatggcgcctggtttgtgtgttacttgtgcctgtcttgtaaatgtgaaacagtatatacagatgattgctgaactgatatgcttggtcttgtaaatgcggaacggtatgtacgcatgattgctggtgtttatgttgctaagctgaaggcagctaaacactcaagtgtttgggtttgggctgtcttctgcggtcagtgtgaaataaaatgtaaatgtgtgttgttcaatcgttttggactattggcatagcagctgtgtattaataaatttgctcaaattgcaatccgaaatcgaaggcatgaaatccaaaaaaaaaaaaaaaaagggcggccccgactagtagc

SEQ ID NO: 120793 - DNA, 381 bp, Zea mays
  Clone ID: MRT4577_41646C.1
aaaaaaccgggccattataaatagtcccaagggaatttattttttgtccgacctgaaagggcgaacctcccacgggggctggaatctttttatgagcttttttccatcgaccttggcagcaaaaaatcgcttaaaaaaccctgggaaagccgccgttgcgacccgaactgggtccccttccttaaccagctccggaaaaggaccaagcatccaatcctggcccggaaagggaaacaccccccccaaaatcccctccttgggcgggggtataacggccctgggctcaacactcctgaaccctccgttgctaacaatctcaagcgcgtcaccgacgttaacaacaaaggccccgggaaaagcctgcacggggaaccacctgcc

SEQ ID NO: 120794 - DNA, 381 bp, Zea mays
  Clone ID: MRT4577_41647C.1
ccacgcgtccgggcgaggccgccgcctgcggcgcccgccccggtgaggcttcgtctgcttttcgaaaacagtcgcctcctgcagcgtgtacagagggatgaaggccttcggcgctgctggcttctccttagcccggagctcggcaccgtcgccgaccttgccgctcatgtcgcagcccgtttccgcctccgccgcacctgcccgcgcggcgttgtgctctcgatggacgggtttaccttgccaccattcgagtcaacctgcatcttcagggataacgatattataagggttaaacaaaaatcctgcaggaagcaggatcaaagggatggccgtaaacaccaatgagaagaggcacatgatgatcaccagcttgaggaaaat

SEQ ID NO: 120795 - DNA, 2414 bp, Zea mays
  unsure (1)..(2414): unsure at all n locations
  Clone ID: MRT4577_41648C.1
aaacggtctattgacctgcaggtaccggtccggaagcaattcccaggtcgaagagctctataattggctgttgttcaattaattttaattttagtgaattttcatcaacattaaataagctgacattgcatagtaacgagtcttgactggtctaaaaagttccctttgcatcagtcaccactttggaattttcaaaataggcagggcagtaattgcagttacatatataagaccaactacatcgacttgcttgaccttctccaaaggatcggatcaactttggattacataggtatcactgaagttattaaatacttaggcatcacttggagttctttcgattgggtggtttactctggctgttcttccctcgtagaattgccatcgtcgggccaagggcgctgctcctgagggctctgtaagaccaagctgacgtactagcattttgtttccatgttgcccagccattttgcagaagatcaaccttatcactgggctcaccatttttttcccagaccgtactttctgactttcctagtgcgcgttcttcgcctttagtgttgtttgacaccaagggtgatttctggctctcaatattgccttcgtttttgtgcaaggtaactggccttccggccggtgctgatccaacttcgttgcatgtttcgatacccttcagtagccttacatcaacaagtgaagagtactcgatctccaaggagccatcttccttgtacggtgacaaatccacaagcatatctgactcgtccttgttttcgttttcctcggtggtgattggatactcttgaacgggtacgagaatgatacgcaatgatacgggatcatataccagaacttttcccacacggtacgaagagagctccggacacaacatggaagacagctcaaccaatcggtaggcaatcagatctccctcctttggaagtcgtgttagggggtacaagctctcaaaattgaaaggttcgctagacttttcttcattagcaatattttgcacactggacatctcaatgttactgccttcattgttccttcgattattgacagcacaaaagccattttcagtaaccttaatgtccatgacatgattgttaacttctgtgctgcatccagctattcctgcatgatagccgatatcagcatttttcttgtttgagctattcattccccacttctggcccttctttttgctcattgttgcactccattggaacgtgccctgtaactcctttgctggcgatttgtcgggttctccacctgctggttcaaagcgaatgtgaccaggccgaaccacaactgggacaatctcatccgatgtatcagattcttcctcatctgctttgatgcttgaaaaatgaacatgtgatccattttgattgcttgatgggacaggcaagccatcttgattgcttgatgatggaaaatcaggagctattagtgaatcttcatgcacattcttatctgtttgtaattttcctctctgtctcatcagccttttaattttcttgcgacgagcacttctactctccaacttttttgtatcactttgagcattgtagtctgccacatttgcctcacatttcaattcggttttattgttcccctctgctttttgctgatccaccaaggtagtggtagtttcatgatttagagttgctttcttatcttcaatatcaataactgacaacttcaactttttagatccacgctgttcttccttgctgcaatctatatgttttccagaatttttcaccttcggcctttttccctttgagctctcaggtatttctgcaaccccatcattccacttcctcttagagcttgtaccattgttttctatgctatggctagcagtgacattttcttcaagctggtgatcatcatgtgcctcttcttcttggtgtttacggccatccttttgatcctggatggcaaggattttgtcatcaactggaagcggcatcttctctattatatcatgatctcgaatacagtgcacatcattgtgccctacctgcttcctgcaagatttttgtttaacccttataatatcgttatccctgaagatgcaggttgactcgaatggtggcaaggtaaacccgtccatcgagagcacaacgccgcgcgggcaggtgcggcggaggcggaaacgggctgcgacatgagcggcaaggtcggcgacggtgccgagctccgggctaaggagaagccagcagcgccgaaggccttcatccctttgtacacgctggaggaggtgactgttttcgaaaagcagacgaagcctcaccggggcgggcgccgcaggcggcgccctcgccattgatgggtgccggctaggttggggagaaagggttcatcttcccaagatancccggcccgccggctcgaggtcccaa

SEQ ID NO: 120796 - DNA, 196 bp, Zea mays
  unsure (1)..(196): unsure at all n locations
  Clone ID: MRT4577_41649C.1
ttaaaaacccgggccggctgggcccggtcagccngaccttcgcggggaggggngacgcgacctngcgcagcccgccggtccacgcacacggcggcttggccgcgtngcggggtttgttgtgcgtccgggctggggtngttgggctgggttgtccatcccctcctcnctgccctcntgagagntgaagctgcttgct

SEQ ID NO: 120797 - DNA, 336 bp, Zea mays
  Clone ID: MRT4577_4164C.1
cctgatcattgatgagaccacagtattgtttaacaccccgctcataggaatattattggggctgctactggaggtcttccgcatgtacgcaatcacacacgatgctccatataggctatatgccactgtccatgctgaattgcctgatgctcttacgaactctacatggtcccacatgcgtaatggatcaggactatgacatggagctgtactaaagctccaatgtggacatctataatgcagtgcagatcgaacttctcaatcctgaaatatatgaccaagatccctttaaagactatgactatgctgactcgtaacgctttaagtgagctgact

SEQ ID NO: 120798 - DNA, 465 bp, Zea mays
  unsure (1)..(465): unsure at all n locations
  Clone ID: MRT4577_41650C.1
ggtgacactatanaagagctatgacgtcgcatgcacgcgtacgtaagctcggaattcggctcgaggaatcgataaaatgaaaaaagttgggaaagaaacccagaaccctttccccccaacctagccggcacccaccaatggcgaggccgccgcctgcggcgcccgccccggtgaggcttcgtctgcttttcgaaaacagtcgcctcctccagcgtgtacagagggatgaaggccttcggcgctgctggcttctccttagcccggagctcgacaccgtcgccgaccttgccgctcatgtcgcagcccgtttccgcctccgccgcacctgcccgcgcggcgttgtgctctcgatggacgggtttaccttgccaccattcgagtcaacctgcatcttcagggataacgatattataagggttaaacaaaaatcctgcaggaagcaagtagggcacaatgatgtgcact

SEQ ID NO: 120799 - DNA, 541 bp, Zea mays
  Clone ID: MRT4577_41651C.1
attggaaagtaataatttcagtagacaaagcaatgtatttttcttctttttctctgccctgttactgaatccatgcatcttcggttacttcaaatcgtattggtattctttgtttgatacgtgattcatctagttcctgccatatgttattagcattcttctgattaatctgctccattttgttgactgacaaatttattttgaccaaaaaccctgctaagctggaatcacgttattctgtagatgtttttcttcaccataaatgcttatgaaacctaacctgataaattcatccgcaggctctttcaaatggcaggcccactgtggttgagttttatgcagactggtgcgaggtctgcagagaattagctccggatatctacaaagtcgaacagcaatacaagtaacgtgttttcagaccacttttcacatttttgcactttaaacctcaaataacaactgtggctcatttcatagaatcaatgcttctccatgatttttatcatgttgcctatcctattaaccgcaattgaattgacct

SEQ ID NO: 120800 - DNA, 543 bp, Zea mays
  Clone ID: MRT4577_41652C.1
cgggagaaaatcgctttgatacctccaaggagccatcttccttgtacggtgacaaatccacaaacatatctgactcgtccttgttttctttttcctcggtggtgattggatactcttgaacgggtacgagaatgatacgcaatgatacgagatcatataccagaacttttcccacctggaaatagcagggtgagacaacttagttttgccaaaattcaaccctgcgtcccatgcttttctattacaagttttcccaagccccaagcatgcaaaagttgctcagtctgtttgcattaatatcacttccgtttcaaacaaccctgagaaaaaaaaaaggtacttagacaatgcaaatgaaattatgtcatacacggtacgaagagagctccggacacaacatggaagacagctcaaccaatcggtaggcaatcagatctccctcctgcaaggtccaaaagacaggtaaatgcttgaatgagggggaaaaaaagggaactgtgatggtgccccattattcagtttcttaaggatataacctgtccg

SEQ ID NO: 120801 - DNA, 525 bp, Zea mays
  unsure (1)..(525): unsure at all n locations
  Clone ID: MRT4577_41653C.1
gttcatcgtgatcatgtataataattatccaggggatatatcatatccaactgattagttacttggcatacgctgaatatttgactacatagcatggtagactaattgggaaatatcgtctctgtttcttctatgaagttttttttaatgttaactaagccaaacttgctgaaaattactatctccgcctttatattttccatatacaagattacttgcattgccaattgatactatgatgaagtgtcacggatattagttgcaagccatccttttcctggaggcaaagaacaataaatatcatctggtttggggatgtgtcagacactgccaaatcccagtggcagagtatatattggtatttcactgttcctgacaatttctactgcaataagtcaaactaaagtgggattattcattaatagattggctggggaggcgttcatctcttatgatgtctgatgatgacttgattactggcccatnctcattacctgtttttgcagttgcaagtggttgaaattt

SEQ ID NO: 120802 - DNA, 159 bp, Zea mays
  Clone ID: MRT4577_41654C.1
cgcgcagcgcgtccgcctccaacgatctcgccattctccccctccagcgccccgtgttatctcgccggggctctcccgagcgacctcctgactcgcacgaaccgctgttcaggcacagccggtaaggcaaatgcctgccggggcccagcgccggtggcg

SEQ ID NO: 120803 - DNA, 297 bp, Zea mays
  Clone ID: MRT4577_41655C.1
aaaaacgattggttaataactgagaatttaaaatcggatccgatagacggataaagctttacatagaggaaccttatatataacggagcggacaaaaggataaaacaggatcaaggagaaagagggtaaactttaaaaaaaaaaaaaagaaaaaaaaagggaatataaaaagaaaaaataggtggggcaaaatgaaaacataaatcaaataaaaatggctagagttaatggctccagttacaaaaggaaaaatgaggttcacaaagtgaataaagaaattaaacaaaaatcgaggaa

SEQ ID NO: 120804 - DNA, 334 bp, Zea mays
  Clone ID: MRT4577_41656C.1
acgcgtccgagcaggaccagctagttagctcctcccactgctatcacccggccagccatctcgttgatgcattgtgaagacctcttggattcagcatgtagaggttctagcattcgactgttggctgggtgctaagctgggatttgtacttgagtgcatgtgatgtttatgaactcccattaccggtgtctatccgtgctttcgctctgtttggatcctccgttaccttttgttcatgtagcttggctgacttccactgcgtggtggatatatgtctgaacatttgaagttactttgcgttgcactggggttctgatgaaagctacaggttact

SEQ ID NO: 120805 - DNA, 187 bp, Zea mays
  Clone ID: MRT4577_41657C.1
aactagggcacttattatccaggggaacacatcgtaacacaagaaagaagcgccagtcttgcaggaaaaaacatccattctcccggtaactccacaaacagatagtctaacccaaacagaatttttgaagcctaaaaaaccccccgataccgacaaaaccactggattccaatcaattgattgcacc

SEQ ID NO: 120806 - DNA, 319 bp, Zea mays
  Clone ID: MRT4577_41658C.1
gaactaccggatcgacccacgctaacgaaattctacacaagcataccaaacttatcattttcatcaatctaaaatataaaaataggaaacggttccatcttaaacaagagatggatacaaatacacactctacatcatcttcctactttgccttccttcactaaagttccatctctcgcttcttccaagcaccaccaccctcttcactctctttcatctcaaccatctctaaactctccattacactacattcttttttataatcatcacccatccaacaatatccattcctatacatataaatacattattattaatt

SEQ ID NO: 120807 - DNA, 1144 bp, Zea mays
  Clone ID: MRT4577_41659C.1
gatcgatcccaacggcaacaggtaggggacggagtcggagaccgtaccgacgacgtcggctttcccgttccttgccattggctgcagaggcgacacccaagtccgtgctgagggcgatggccgtgccggggctcacgctgtaccacctcaagaggcacctgcaggtccgtccggccaccgccgaattatttctctcttggttggttgatgacgatcgcgcgctcaactctgccttgcctcctccttcctgatccatcgaccgtgtgcatgcggtgcacgcgcaccacactgccgctgcagaagtaccggctggtggcggtgagccgaggcgtcgcttccccgctgggcgacagcggagatggcaccgacgagcgttcgtcctcgtcctcggagaaccagccggcggacgagtgcgacgacggtaccgtcgccgagccgcatggcgattcttccaggagcgtggcgcggatgcagaggaagctgcaggagcagatcgaggtaaacgaaacgatagagtccggtcggtcgatcaccattgtcccgaccttgtggttgtggcagtgaaatccattaggtttcaggctttcagccgattgtgtgccgccggttcgtgcttggctgctgatcaagccgagctcggccattcatgaccacacacatccatacatggtggcaggtgcagcggcacctacagctgaggatcgaggcgcaggggaggtacctgcagtccgtgctgcgccgggcgcaggaggtcctcgccgaccacggcctgggctcggcagccggcgcggaggcggagctggcctccgcggtggacaccgggtccctgtcctcctcctgctgctgctccccgacgcgccgccgctccgccgacagctgcgtgacgtcctcctcttcggaggccgagagccaggcccccgtcggcggcgccacgtggctccacacgtgcgccggtacgcgcgactgctccgttgagcaacagccggtgcagggggagaagagtacattcctgcagaggcacggggtggccttcaaggttgggacttggggaggggggccaggcttttgagcaatgtctgctgctgaaacagctacctgctctgctcttcgttccagaatatgatgtgcatgtttattttcgttt

SEQ ID NO: 120808 - DNA, 774 bp, Zea mays
  unsure (1)..(774): unsure at all n locations
  Clone ID: MRT4577_4165C.1
attggtacctcgaggcggccgggaacatcaatcgagaacgcacacgcacttccgcacccaggtgctggaggcgcccctggatccgggatccgatactgagtaccaggacttccagtttcggttcatcccggaggcgttcgagctccagatgggcggcgttcccgtcggcggcggcggggcaaggaacggagacggtaaggtgacggagaaggttcttgagttcgagttcgacaaggtcaggattagcattgcgtccagggacgacgaggcggacggatacgcgccgccgaggagctccttctccggggcgagccacccgccggagccagtggacgagacggacaccgtctttgtcgctgtcgacggccgggagaagccggtcccgaagccagtcatctcgtgggacgcgtccaggccgccgagcggcgcggcgagcccagacagcagcatcgacagctccggcgccacggccacggtcaccagcatcgcgccgagctgcaccgtcaccagccgcagcgccaagaccagcgtcagcagcagcgcggccagcgacggcagcggctggagcaacggcaccagcagcggctgcggcggcagcgcggggaagccgcacaagggcggcgaccccaggtggaaggccatcctcgcggcgcgcgcgcgcgagggacccctcgcgatgggcagcttccggctgctgcggaggctcgggtgcggcgacatcggggacggtgtacctgtcggagctcagcgggggaggccccgnaaatggcgacg

SEQ ID NO: 120809 - DNA, 461 bp, Zea mays
  Clone ID: MRT4577_41660C.1
aaaccaaatgcaccatttgtgaagaaacccaattattgcaaaaaggctctcacaagcaaactaagcataaaacataggaaaattgcccggctgcaacaaagggcagaatacaacacaccctccgtccatgttttggggacccatgcctccacgctataggacagccacgagcgtaaagtgatcaaggtgtccgcccaaaacgaatgctggcaaacttatcctacatgaattattaacgtcgtggatttgactggcataaaccggaccagatcctgactgggctggaccggcagcgaactgctgttgtttggcatcatttttttccatttaagcaccgccggagccgtacttctttccgaagaagaagatctggagctggtcttagccagaacgcacaccagcgccagcaatggcacgaagaatgtgagcaccaccaccctataacatggacttggggccaa

SEQ ID NO: 120810 - DNA, 746 bp, Zea mays
  Clone ID: MRT4577_41661C.1
aattgcactccacctgcccctagttctcacccagccaatcaagttgacctctcctcctccccaatgatctcctccgaaccctagtcgccagtgttcgatacctgcgacatcagctcgattccgggccaccatggatccaacaacgttgaggataatctttctgaagctttggaacaccgaaatttgttgccacggcgcgagctcatcttcgattggagcatagaccatgtcggcggaggaaggagacacaacaaccctgacgtgggcgttggcttggggaatggcgttggacgcggtggtggtgtatcccgaggccgcggaactgccgatattgggcgcggaacgaccggcttgcagcgtggtgtttggcgcgggactgccggtggtctggcgcgaggcacgacgcgtggcgcagcatgcggcattggacgcaactccgcctacctgaagttcagcactggcgcacctacaggtgttgctacagatggactaccactgtcggggatagggtgtggctgtggaagcaagcatcataaggttcacagggatctatttgttcagtacgtgaacgtgggcgtggccaggcttcgagctcaaagtcttacaacccttcacgctctacttcgctcgatgtggatctaaaccttaactctgagcccaccgatgatgatgatgtcgaagaaatgatgcatatcaccatggtatatgcttgtacaattgttttttattccatcctgcattgtttg

SEQ ID NO: 120811 - DNA, 1471 bp, Zea mays
  Clone ID: MRT4577_41662C.1
cctataagagcccccgcgcggctcgcggtggcatcgaccgtcggtcgatcacccgctgagcttgcttgttttcctgccgcggtcgctgcttggccaggaccagctgcttgctgccgtcgtctcgtctgcggctactccggcctctcatgctggccacgccaccgacgctgcgatacgaagcgccgcggtgggcacgtcggaaatggcatcgtcgctgggagtgggtggtcagcagcaggggcacgggcacgggcacggcgaggccagggcgcggctcaggtggacgcgccagctgcacgaccgcttcgtgctcgccgtggcccagctcggcggcgcagacaaggcgacacccaagtccgtgctgagggcgatggccgtgccggggctcacgctgtaccacctcaagaggcacctgcagaagtaccggctggtggcggtgagccgaggcgtcgcttccccgctgggcgacagcggagatggcaccgacgagcgttcgtcctcgtcctcggagaaccagccggcggacgagtgcgacgacggtaccgtcgccgagccgcatggcgattcttccaggagcgtggcgcggatgcagaggaagctgcaggagcagatcgaggtgcagcggcacctacagctgaggatcgaggcgcaggggaggtacctgcagtccgtgctgcgccgggcgcaggaggtcctcgccgaccacggcctgggctcggcagccggcgcggaggcggagctggcctccgcggtggacaccgggtccctgtcctcctcctgctgctgctccccgacgcgccgccgctccgccgacagctgcgtgacgtcctcctcttcggaggccgagagccaggcccccgtcggcggcgccacgtggctccacacgtgcgccggtacgcgcgactgctccgttgagcaacagccggtgcagggggagaagagtacattcctgcagaggcacggggcagcagaggacggcacttcgtctgagatcgatcccaacggcaacaggtaggggacggagtcggagatcgtgatcggaagcatctctctgctctgcatgtgcccagcgtcggagaacagggaatgaatgattggcggggtggccttcaaggttgggacttggggaggggggccaggcttttgagcaatgtctgctgctgaaacagctacctgctctgctcttcgttccagaatatgatgtgcatgtttattttcgtttatgcgaatggttcttgtgtttcatgtaaaaaaattatgactgcaactcgaggaagggccagctgcaaatgatgcatgcagtgtgcttgaggtagcagtacaatgcaaggatgattgcatggtacagaactgtagtagctactatattattagtaagattgtatgccatcagtgagattgatgccttaagagggtaatggcatgagaactggaaaaggtttagaatgtatattaaggcctcatttgaaat

SEQ ID NO: 120812 - DNA, 1133 bp, Zea mays
  unsure (1)..(1133): unsure at all n locations
  Clone ID: MRT4577_41663C.1
gtcgatcacccgctgagcttgcttgttttcctgccgcggtcgctgcttggccaggaccagctgcttgctgccgtcgtctcgtctgcggctactccggcctctcatgctggccacgccaccgacgctgcgatacgaagcgccgcggtgggcacgtcggaaatggcatcgtcgctgggagtgggtggtcagcagcaggggcacgggcacgggcacggcgaggccagggcgcggctcaggtggacgcgccagctgcacgaccgcttcgtgctcgccgtggcccagctcggcggcgcagacaaggcgacacccaagtccgtgctgagggcgatggccgtgccggggctcacgctgtaccacctcaagaggcacctgcagttggttggttgatgacgatcgcgcgcttcaactctgcctcctccttcctgatcgatcgaccgtgttgcatgcggatgcggtgcacgcgcaccacactgccgctgcagaagtaccggctggtggcggtgagccgaggcgtcgcctccccgctgggcgacagcggagatggcaccgacgagcggtcgtcctcgtcctcggagaaccagccggcggacgagtgcgacgacggtaccgtcgccgagccgcatggcgattcttccaggagcgtggcgcggatgcagaggaagctgcaggagcagatcgaggtaaacgaaacgatagagtccggtcggtcgatcaccattgtcccgaccttgtggttgtggcagtgaaaaccattaggtttcagccgattgccggccggttcgtgtttggctgctgatcaagctgagttcggcccatcatgaccacacacatacatacatggtggcaggtgcagcggcacctacagctgaggatcgaggcgcaggggaggtacctgcagtccgtgctgcgccgggcgcaggaggtcctcgccgaccacggcctgggctcggcagccggcgcggaggcggagctggcctccgcggtggacaccgggtgcctgtcctcctcctcctgctgctccccgacgcgccaccgctccgncgacagctgcgtgacgtcctcctcctcggaggccgagaaccaggcccccgtcggcggcgccacgtggcttcacacgtgcgccggtacgcgcg

SEQ ID NO: 120813 - DNA, 1790 bp, Zea mays
  Clone ID: MRT4577_41664C.1
ggatccatcaccctgctgctgctgctgctgtcgctggttggccaggagcaacccgctgagcttgcttgttttcctgccgcgggcgctgcttggccaggaccagctgcttgctgccgtcgtctcgtctgcggctactccggcctctcatgctggccacgccaccgacgctgcgatacgaagcgccgcggtgggcacgtcggaaatggcatcgtcgctgggagtgggtggtcagcagcaggggcacgggcacgggcacggcgaggccagggcgcggctcaagtggacgcgccagctgcacgaccgcttcgtgctcgccgtggcccagctcggcggcgcagacagtgagtcctctcttctgtccacccctccattcacagtcacagcctcacaggcagtcctttgtctgatgctaccgaccgacgacgtcggctttcccgttccttgccattggctgcagaggcgacacccaagtccgtgctgagggcgatggccgtgccggggctcacgctgtaccacctcaagaggcacctgcagaagtaccggctggtggcggtgagccgaggcgtcgcttccccgctgggcgacagcggagatggcaccgacgagcgttcgtcctcgtcctcggagaaccagccggcggacgagtgcgacgacggtaccgtcgccgagccgcatggcgattcttccaggagcgtggcgcggatgcagaggaagctgcaggagcagatcgaggtaaacgaaacgatagagtccggtcggtcgatcaccattgtcccgaccttgtggttgtggcagtgaaatccattaggtttcaggctttcagccgattgtgtgccgccggttcgtgcttggctgctgatcaagccgagctcggccattcatgaccacacacatccatacatggtggcaggtgcagcggcacctacagctgaggatcgaggcgcaggggaggtacctgcagtccgtgctgcgccgggcgcaggaggtcctcgccgaccacggcctgggctcggcagccggcgcggaggcggagctggcctccgcggtggacaccgggtccctgtcctcctcctgctgctgctccccgacgcgccgccgctccgccgacagctgcgtgacgtcctcctcttcggaggccgagagccaggcccccgtcggcggcgccacgtggctccacacgtgcgccggtacgcgcgactgctccgttgagcaacagccggtgcagggggagaagagtacattcctgcagaggcacggggcagcagaggacggcacttcgtctgagatcgatcccaacggcaacaggtaggggacggagtcggagatcgtgatcggaagcatctctctgctctgcatgtgcccagcgtcggagaacagggaatgaatgattggcggggtggccttcaaggttgggacttggggaggggggccaggcttttgagcaatgtctgctgctgaaacagctacctgctctgctcttcgttccagaatatgatgtgcatgtttattttcgtttatgcgaatggttcttgtgtttcatgtaaaaaaattatgactgcaactcgaggaagggccagctgcaaatgatgcatgcagtgtgcttgaggtagcagtacaatgcaaggatgattgcatggtacagaactgtagtagctactatattattagtaagattgtatgccatcagtgagattgatgccttaagagggtaatggcatgagaactggaaaaggtttagaatgtatattaaggcctcatttgaaatagaggattagtaaaaatgtgtgtgg

SEQ ID NO: 120814 - DNA, 197 bp, Zea mays
  Clone ID: MRT4577_41665C.1
ctatatgacaatagaatcataaaatattagagttacataacttccataagtctacaaagcacacaagaagtatgaactaatcaaggtctggtaccagcagtcctttatcttgtctggttaacctatatatatatatgaagcatgaactaataaacaaatgaagtagacgatctgaactaataatcaactttgcaatg

SEQ ID NO: 120815 - DNA, 1694 bp, Zea mays
  Clone ID: MRT4577_41666C.1
ggcgcggctcaggtggacgcgccagttgcacgaccgcttcgtgctcgccgtggcccaggtcggcggcgcagacaaggcgacacccaagtccgtgctgagggcgatggccgtgccggggctcacgctgtaccacctcaagaggcacctgcaggtccgtccggccaccgccgaattatttctctcttggttggttgatgacgatcgcgcgctcaactctgccttgcctactccttcctgatccatcgaccgtgtgcatgcggtgcacgcgcaccacactgccgctgcagaagtaccggctggtggcggtgagccgaggcgtcgcttccgcggacaaggcgacgcccaagtccgtgatgagggcgatggccgtgtcggggctcacgctgtaccacctcaagagccacctccagaggtaccggctggcggtgagccaaggcaccgcgtccccggtgggcgagggcgacaacggaggtggcgccaacgagcggtcgtcctcctcggagagccagctggacgagtacgacgacggttccgtggccgacctgcatggtgattcttccgggagcatggcggcgcgggtgcagagagaggcgaaaaggaagcggcatgagcagatgcagatcgaggtgcagcggcacctccagctgaggatcgaggcgcaggggaggtacatgcagtccgtgctgcgccgggcgcaggaggccctcgccgaccacatactgggctcgccggccggcgcggaggcagagctctcggagctggcctccgcggtggagaccgggaccgggtgcctgtcctccacctcctgctgctccacctcgccttccccggtgcgccaccgctccgccgacagctgcgtgacgtcctcctcctcctcctcctcggaggccgagagccaggcccccgccggcgccaacacgtgcgctggtacgcgcgactgctccgtcgagcggccggtgcaggacgaggagagtacattcctgcagaggcacgaggacgaggacgaggcagaggaagccgacgttggagctgcagctgcagctgaggacgaggacggcacttcgtcagagattgatctcaacaggtaggcgacgaagatcctgatcagaagcatctgtgctgcatgtgcccagcatcggatgattggcggggtggccttcaaggttgggacttgcttgggagggggcaggcttttgagcaacgtctgctgctgaaacagctggctacatacactgcaagtctgcagcgaccacactgctcttcattccataatatatgatatacataatattccaatttatgcaaaaaaaaaaaaaaaaaaaaaaaaaaaaaaaaaaaaaaaaaaaaaaaaaaaaaaaaaaaaaaaaaaaaaaaaaaaaaaaaaaataaaaaaaaaaaaaaaaaaaaaaaaaaaaaggatctttgcctattcaccattgttaaagggcaaattttggaaaaattcaaaaaaatgagggcggatcaaacaaacatataatagggcccaatttccctaaaaggggattggaaaacaaaaaaatggcaactgattaaaaaaaatacaaaattggaaaaaactttaattacccaaaattaaaggaatggaaaaaaataccacctttaccagcagtaaaaaaagaaaaaagatctgcacaatgaggccctttcaaagatggactcaatcttaaggggaa

SEQ ID NO: 120816 - DNA, 472 bp, Zea mays
  Clone ID: MRT4577_41667C.1
ccggccgggagaaatcctaaacgtgtaggtctgacgaaaagagaaaagtctagaacatcctgcggcgagaaggctgcgtcagcgcctgtgagagatgtcattcctgtgggagaagagcgcgtcatggcgatggctgattaggcggacgcgtgactcaaagcccttctttttcacggtcgcgatgctcagactagtctgacccgtacgtagttctctacgacgtgatgcagctcacactgtgtcacagcaacgagcatcatgcacgcccaccttatgtgcccgcccgttccaagaccaccatgatgtgtcaagtgaacatagagaggcatgcggaaaatttctgggagctgatacggaccagaggacacaaacgacatggacgtggaccggctgatgggggagaccctgaccaagaaactctacaagacgcatcagaccttgactgccgtcaacgcgcaatctgagccaggga

SEQ ID NO: 120817 - DNA, 442 bp, Zea mays
  Clone ID: MRT4577_41668C.1
ttttgtttgtggaagtgattacttcattactgggctgggtatacaatgtcataggaaagctttccttggtatctcccatgcattcgtcgtgattgtgcgtactgaaatgcatctatttcatgaaaccggccttgccgtcaccatcggcgtcaaccttagggttgagcttgtccatcaacgaaggcttgtgttgacctatttcttgttggcctcatgttcagattctagttttcgcgcttcctcttcggatgcttgggagtgggggatggcctttgagcggtcctcggtaagggccttgggcaagctgccatcctcgttgagacggcgctccatgtggcccttgtcggaaccgtccacgacgtgtccactggggtctttcgtacctgtagcaccgcggttgccgctgcgtgcagggtccctgaaatcctggctatccatcttg

SEQ ID NO: 120818 - DNA, 347 bp, Zea mays
  Clone ID: MRT4577_41669C.1
ggggaaaaaattttttttgggggcaggaggttcacttttaggcttttattttaagcaattcaacattttgtttcttttaccgaaaaaaaaaaaaaccctccaaactaaaacttgggaacccccccttttggcctttaaaccccctttaaaaaattttaaaattcccccccgggcttttattttgcaaccctgactcggtttttttttccatccaaggggatgccactaaagggttgatttggcatttttgacccccccgggcgagcctttgggggcgaaaccaaacccccttgacccggcgtttttcctgtgggaaatgaccttaaaatacaaacctgttttttttt

SEQ ID NO: 120819 - DNA, 410 bp, Zea mays
  Clone ID: MRT4577_4166C.1
atactctgaaaccctacctcccaatcgtctcatcgtccccacgagcaaccgataatccatccgagcatagatgaggtcctatcaacagctcctatcggatgcaccattcctgtcgcttcattgacctacaaggagctccagagcgcgggcctgaggaaggtaccagggaccgcgccctcatgcccacggcctgctgatgaaactctgcgaagcacctccatacggcgatgctggagaactcgaactagaagattgcgcagacgtgaaggggctagagattgatgacactctccgactacactcaccacctgctctctcgagataaacaccactagtcgtcatacctaggatgacacctccaggaatctccctgctgagtctctatcacagaaagcagatcagctcctgag

SEQ ID NO: 120820 - DNA, 309 bp, Zea mays
  Clone ID: MRT4577_41670C.1
gctttctgagaatgattttgtttgtttttgacatttggaaaagcaaaattcgccttataaaatgtccttagcttaaaaaccgggctgacccacaggaggccatatcatgggttgaaccacagggacacaggaggccacattattatgggggggtggggaagccgcacgacaacttcatgcagacctagacggctaggcggagacgattagagctgatgcttgtcacggatgggatcaaaggtgacgatgaatgtgcggggctctattggccccaagtcagcgaccggcttagaaggatgcacagggcca

SEQ ID NO: 120821 - DNA, 371 bp, Zea mays
  Clone ID: MRT4577_41671C.1
cgcaggcaagtacaagtcgaacgcattagcaacgtacagccacaattgagggcaggatattctaactccttatgctggttgatatgactacatgcgttgctaacccgacaatcttccgtgaatgcgtcacaagctgctatcgcttacgttgttgccgcatactttggatacattataggttcagtatgtgaaaacccagatcttgaaccatatgggctgcaaccagcaatcgtaggaagcaacatacctttatcgctcttgttgcatgaacaatcaccagacctatttttgctgaagctattggtccaaaccatcagggcacaacatctgcaggaacccgtgctacctgggatcaaccaagtacttttgga

SEQ ID NO: 120822 - DNA, 501 bp, Zea mays
  Clone ID: MRT4577_41672C.1
gggccccttaaaaatggcttaatcaacctatacgaaacgagcaaaaaaaaactggcctgatactgggaggagcagctacagaccgggggctttattttattcaccatttggagcaaaagcttatgaatccaagtctacaagggtgggggacatcgcaaccacagtcgttcaatcatacgcccagtttctcagctcaggagctaaacaatcacaatccttgccattttatagcctaaaaaacctcgacgggccactggttgttctttttcaggggggacagcttttgggcccagctttcgcctttttgttcagccacctttttgagcgggtcctggatccccgggatcatccccttaaaaccacaaaagtaaatgggccccccgccttttagcagtctgaagatttgggggctgtacccctcgatcttggcctgcacgtacattttcccgccggtcttggtcttttgccccctgcttaacgcttggtcgcacctgggaacgc

SEQ ID NO: 120823 - DNA, 1695 bp, Zea mays
  Clone ID: MRT4577_41673C.1
atgccgaaggagaccaccgccgactctggtgagggtgatctggtccgactgaagtataccttcagattgagggagaagtttgatgagccgaacgacaactggctgaagtgcatcaaagctaccagtgatgagctgcttggagcatactccaaggccaaagataatgctctatccgcagcctttggaggtcgaggcaagaaaagattaaatagggtatttgatgctattggcttcgtataccctgattaccgctacccgctgcgagggcaagtgaaaaagaggaagattgctgcttcggtcaccccagctgagcctatgccgaagagcaaaaaggctgaagtcgaagccgggcctccagcgcccgtcgcggcgaagcctgccgcacctaaggaaaaaacggcagggcaagagatggcagaaagggcaagatctcctgcctccgaagcgcaggccgaagctgctgattacatttatcgacatgctttggggaagaaattgtccgaagatgaaattgcggaagcaaggcattatgctcaaaagctgaaatattcgaaaggagccttagtatttaacagaagtaatgaagatgatttcctgtactgtctcccggacaacaaagaaatattcgtttgtcgggagatatgtaagagcatgggatccccgaagctagaagatggtctttcgattttgtcgaatgatgatcttactgatagcctagcatacaacagtataaagggcttgattcttagtaatgccctgagggcacagaagaatattgaagacgaaggttatacaatggctctgaataaccttcgttcagaggtgattgaattgagaaacgaaggtcctgaaaaagacaaaatcttaatttcattggtaaacaaagtgaaggaagacaaagctagtttcaaagctcaggccgaagccaaaaagactgaaattgaagaccttcggagacaactggccgaagctaaggaaaactgcgcactcgcacaagctaaccaagaaattagcgaatattggaaaaatcatctagagaaaaatgttgaagaacttcgcacatccaaggaaaggtgctttgagaaatccttggattgcgtgaagaaaataaaagctagcttcgccaaattgggtgcctactcttctgaaaaaaacttcatatgaggcgaccccgaaggcgttgttgaatggataagtggagaagccgaaacctttgaagaaattttgagtgattgcggggatgtttgcgcgtttttcggtgcacggggaatttgagccatgttggagaaggctggatgtgatcatattaaacccatagcctaggccgaaactgccttctccgtagatgatacaaaggatccttcagccgaggcaaccttaatggatggaaatttttacaatgatgtctgggtgaatggtggccgagagatggcccatgaaattataaagaaaagtgaaaaagacacccatgacgcccgagcagaagcaagacaagctgaagaagctgcagagcgcgaaaagcatatagctgaactatctccgccaccggaactgttcgatcccttagctgatccagaaatgaaggaagcgctgaacatcataaacatggctaaatccattatcgacgaagtcgtcaacaaattgctgaacgaagttgcagagaaagtccttaaagaggaatggattttattgtaa

SEQ ID NO: 120824 - DNA, 419 bp, Zea mays
  unsure (1)..(419): unsure at all n locations
  Clone ID: MRT4577_41674C.1
aagagactgaatgactatttttttatttggtcttaagacaccaaatttctttttgagatcaaccatctgacatacggggtctaaccgactaggctgggggctggcctgccaaaggtccccgagctcgtcttgagcaaaggccgatggcgggccagaggatgaccgagcgggtgcatggccgaagctcccggaggggacgccacacgtggcgggcagccggagatcacccgcacggcggaaggggctgaagcccccccgtgcggccactcaacctcgccgacggccacgctcctctgctgtttcctgcttaaagtggnggctgtctactcatagtcccaagcgaatatttattccgacttgagacgtccctgaccccgacccttgggggctctcgttcaagtccaaacctcaacaaccgt

SEQ ID NO: 120825 - DNA, 792 bp, Zea mays
  unsure (1)..(792): unsure at all n locations
  Clone ID: MRT4577_41675C.1
ggctcattattgggcgagaaaccagcgtgcatgaaattcggtaaaaagagacgaaaaggcctgcgaaaaagagaggagagcaaaaaaaaaaaagctaaagtagtaaaagcttggagcgagtctacagcgtacgggtaccgggtacgtacgtactacgtagagctgcttttgctctagccaccggacatgtggatcccagtccaaagcgtcatcaatggagcacgtagtacgtacgtactcactgcagctgatataggcctttttagatcttatggctaattgtttacttgtgcctaataattagccggcaaataattagttggtaacattaagttaggctatgtttggagtcttgactaataatttttttatattagcacctattagctaggccagatagcacctattagcagcgggcgggacagtatgtacgccaacaacacacaagagcgggcgggcagggcaagcacgtcaccgtccccaggaccaggaggaggaccacctgtggactccgcccgcctctgcgtctctcgttgttctagagaagccaaactcctatgaagaaaaaaaaaaactcgaggaaatccagaggcggagatggcgtcgcacaacaccactnccgtctcccttctccgctcccccaccaggccaccacttgatgccctgacgccgactgatgccggagagctagctagcgntgcgtttgcgtgcaatgcgtgcaccaccagacagaacgaccgagctagcttgcagctattcctatatagcatatagcatgggaggattttcttg

SEQ ID NO: 120826 - DNA, 221 bp, Zea mays
  Clone ID: MRT4577_41676C.1
gggttgggtttaaatttaaacatgctttttcatcctcaccccttaaggaaaacatgccataaacccgaagggccaagttgaaatcctttattttgttttcataattcacaaacggtcaagggatccaccgccccccatacaccttttggatattcccctttttaccttcaaaatataaagcaatttgaaacccgtatcgaaaagggtaacaatctttaaaa

SEQ ID NO: 120827 - DNA, 555 bp, Zea mays
  Clone ID: MRT4577_41677C.1
gcgtttttcaacgacacacagctgccaagcccacagggcatattccctaccaaagggccgcctcctgaggcacaaaggacctgcacctgagtaagtataggcagcaaaggccttgacgagcaatacactgtagcacgcacgggaaccaacagcctgacaaggagaaccaaaaagcgaactggtatcgaggaggccggaactacaaacccatgggtctttgacaggaaacagacttggccgcccacagatggtgataaagaggggcgcccacaatccggaggggacaaagccctgctgtatgagccagtaaggcgccctgtagtcgatcagaacgctgggcatgaaaaggctatcatgatttcggaactatgaacgcatgctaaagctctacgaacataggccagccaaggttaaaataaacccctatcttggagtgataacattctgctgccgaatggaatcaagtgggcttttgcatttggagtcaatgtgaacaagcagatggcgaattgcctttctcgtaaataaaatttgtcgatgatgagccctaagctg

SEQ ID NO: 120828 - DNA, 429 bp, Zea mays
  Clone ID: MRT4577_41678C.1
acaaccaacagggggggcctcccttaattgcatttacaacattgggtttcctttaccaaatttttaacagtaaaaaatccaaaacgttaccgtccaaaaacagtccctttttgttttattaattgggccactaccaacaaaaagtgactcatgacaactgttgccgtacgtagcgaatactacggggctcctacagccaatttaaagaggggggctttggctacaattaaaaaacactgatttccgaccctgacaaactgttaaaaattctgaccttctggggccttggaaaaaaaaaaaaattggataaaaaacaacttttttttcctcccctactacaacatgcatgtcgggggctgctgctccctaacaatctaactaattgttaaaaagcatgcaacccccctttgtaagtacccctaacaacaa

SEQ ID NO: 120829 - DNA, 211 bp, Zea mays
  Clone ID: MRT4577_41679C.1
gacacgggtgaccatttatttggtgccgctaagagaacagttcgatacttatacggcatccctaatatctgataggttcatggagaaaaaggttcagataaattcatctatatttggagattataaagttatcaatatcagctatcatggattgcaatccccgccatcatctctgtctggaggatcggatccttcaggaactgaagaatat

SEQ ID NO: 120830 - DNA, 2618 bp, Zea mays
  Clone ID: MRT4577_4167C.1
gttttcctccttaaattcgtaaaactcattgtataactgaataatagatcaatgggataaggccgtggtcatttttcttgacatgctatagctgattatttaggtggcatttgaggttctgtggagcttcaatcgtgtgatggattttagaaaaatccgcacagtaagagaatataaaaccactgaatattaaattgaactcttattcctgaagcgttcactaaaattaattatacctttcttggttaaacttattatgacacctgactttctgaatttttgagtctttttgttttttgtcagttttatgactccaatagtggtctaacatgcatcatttttccttctatcttgggtacctcgagccggccgggagttgcgcggctcggctcgggactcataaaaatagcgtcttttatcatatccgttgctcgcaaaacgcccccacacgccgccggcgaatcggcgactccccttgcgacgggaggaagcagccacgccgccgtctcggcgcctccccgacgactgcctctccggtctcgaacgcgatctggcccatggtggctctggcgccgttggttcgtgagatctagggttgtcgagcgccgcggagtgggagcggatggggcgccggaagatgtccgcagcggcgccgccgtcccggagctggtccaacgttggcgggagcgtaatccccgaactacgggcaaaacacaaaacggacttggaaaatttgacgctgacaaaacatccaatcagaacattacattttttcctgttagccatgttacaatacttgaaaagattagcaacatatatcctgagaaagagtggtttgttctttctcttaattgttttggtggtagcttccggaatcttgctctctatttcagatggcctgcataagaagcatgtgcaggagttccttaattatgctaaattcgtgttgtggtggatttcattaggtgtggcttcatcaattggactaggttctgggttgcatacatttgtgctgtatctaggtcctcatattgctctgttcactattaaagctgttcagtgtggccgaattgatttgaaaatggctccatatgataccatacagcttaaggttgggccatcatggctcgacaagaaatgttctgaatttggtccgcctgtgtatccagcatcagctcattctgttaggatccccgtctttgatttactacctcagatacagctggaagcagttctttggggcattgggactgcacttggcgagcttcccccttattttatatcacgagcagctcgcttatcaggaagcaagtcaaaagctgttaaggagcttgatgccgctacttccaaagaagatgggacagtagcatccactcttgatcgctccaagcgttggcttctttctcactctcaacatctcaacttcttctctatcttgatacttgcttcggttccgaacccactctttgatctcgctggaattatgtgtggccaatttggtgtacctttctgggagttcttttttgcaactttgattgggaaggccatcatcaagactcatattcagacgctgtttatcgtgtccttatgcaacaaccagctcctgtatcttatggaaaaggagctaatctggatattcggtcacattcctgggttttctgctaccctaccatctgtgattgccaaactccatgctgccaaggacaagtatctatcaccaccgacaccagtctcggcgtcctcacagatggaggagaaaagttggaatctctcttttacattggtttggaactctatagtgtggcttgtgcttctgaacttctccgttaagataatcacgtcgacggcacaggattatctcaaaaagcagcaggatatggagatggaacgcgtttctgattctccgcccccggaacaaaactaactagcggcgcaagtttatttcagctgctagctgcacagattctcctctgcatttttagcaactggttaagcgtctgcagacgattccaagttccaacgattatcaattagtattagtagctattcatctacacagtcaacgaaaacatgggcctggcaactggccgggtgatggctgtgacctcctatcatatcattgagcctgtagtgggcagttcctggaggagaattctactgttcttttttgtttttccggacatctacacggatagacagtagggattgtttgtgtgaagcacggttggcttatgccgagatttagcactggtagatgtttctatttgttttggaaatgctatagaaacatgtgagcattcaacaatgatacgctctgttaagtttgttgtgtattttggtttgcaactggtgccagaaagagcaaacagtggctccatcaatttcctttggcaagtaaaaccccctatagaagacattgcttgtcctaaaaaaaaaaaaaaaaaacaaaaaaggaatttttcaattttttatgctgataattataaacgatgtctttagcaattctactggggcttctgttcatggcaatcacagacttgttcatgtgcagttttacttaccaagttgggaagggtgatcggtattcatgagtacaatatgttctgcctttagtagaa

SEQ ID NO: 120831 - DNA, 406 bp, Zea mays
  Clone ID: MRT4577_41680C.1
gtggggtgtttttttttttttttttttttttgtgttttttttttttcccgggcgaaggcgtttttccttttccccaacaattccggctgggaaaaaaattttggctttgggttttcaaacttttgggcccagaattcttttgctcaaattttccggggggggggaaaccccgccttgggtggggatgcttttggggctttgcccagccttttcttttttctctccccaaggggcttttcgttttctcgggaccggttttttttccccgccttgcttggtcctcccaaaacttatgcgggtaacatttcaagttccaaatttcggggctttttttctctcaacgcccttggggggcccttccgtttcgggggggggccaggttcttcagggacaaaaccccggcccc

SEQ ID NO: 120832 - DNA, 342 bp, Zea mays
  Clone ID: MRT4577_41681C.1
agcgatcttatcagaggacacagattatcagctgattgtcacggaaagatgtcgctagccaagaaagaagaggtttgcagtcaccgacttgtaccgcgcttggacgagcctgcggttggtgtgcctattaagaagaggccatttttcttgtctgaccgatcgggtgcatctggcataccggtcttgacaaaacccccatcttcaacgaatacaatgcctgttgctgctacagggtcaggcttgccggaggaacccttcttcaacatcggtaacttagacagaaatgtcatcaccaaaggtaaaggaatccctgacactcagatccaagaccatgttaacacg

SEQ ID NO: 120833 - DNA, 196 bp, Zea mays
  Clone ID: MRT4577_41682C.1
gccaagaggtgccatccataatgatatctcaggaaattgctaggcagcaagagtgacattagaactgaagccaacaaaaagatacataagagctatatacattgagacttatgactaactgtaaaaaattcttaccagctaaatgctgacatgatgaactgtaatgaaccctagagcacctttcaatggactggtt

SEQ ID NO: 120834 - DNA, 378 bp, Zea mays
  Clone ID: MRT4577_41683C.1
cccaaaaaaaaccagccaaagattttattcatatctaacgggttaaaaagcctcttccaacaaggcaaatccaacaatgggggtgttacacaaaagctacactgggccttacagatcactgaacagtttatggtgataaacgggcttggggctccccagggaaattattgatcccaggcccttattggtcggccccttgatcttttgaacatagagccctgttccatacaactttttccccccccctttttgcaaccctgtgcaaaattccagtggttcaccaccccaaaatttgcactatttttatggggggacccttggttctcactaggaaccgggccttgttcccttaggctctgtttcgttcccttggattgc

SEQ ID NO: 120835 - DNA, 365 bp, Zea mays
  Clone ID: MRT4577_41684C.1
gtcttcccacgcggaatgtaccaggaaggttcacgaatcccctcctcacttcgcccctccccctctcctatttcttctctccgggccccgggccaaaattccatcctaagttccatcgaagagggcggcaaggggcgatccggatagcgcaagagcgaccatggcctacgtcgagagaggtgttgtgaaaggcaaacggacaatctggagactaagcataatccccgacttctttaaggctattgtgaacttcatcagaatgttcttcctcacaatgttttctatcgagaaaacagacagctataagaaaggatatggtagtggtaagaagtgggatggtggacctggtgggggaggtcctggtg

SEQ ID NO: 120836 - DNA, 1466 bp, Zea mays
  Clone ID: MRT4577_41685C.1
gcgcgcgaggtatcgccaccgtctagcacggtagcgacttcgcagtatctatcgtcattcgtcatagagcatgttcgcagcgcaatagtgtctgccgtagctagtgtatgttagcactcattaggtgctgctgacagctccccttacagtgaaaagcatcttccacagtaccttgtagagccagttgatgcaacagtagttcctgatttagtatctactattgcagcatcaggctcaccaaggcgctcagaagcatgtgtttcagtgcaaggggtgctgtgagcagcacccagtgtgtgctcccatcatatgctggcacagattctctttcgctgttcctgtcgttttagcacgcgattcaccggcggcactatcgctcggcgctctgttcttcccctcgtatctctcccatcggaagccatagagcaagctctctccggcgctctctgccggcggcgctatcgttggccgcgccgctctttctctgacgatctgctacgtagcagaagggcaggcacgcgcagatcctctgcctgtcctgtcggtctcttctgcagctgttccagttcagcagcgtgcttcccctagagggaaactccggacgactacaacgatcgccctaggcacaatcatttccgactatttcttccttcgacttgaactagtacctgttcgacatcctacttctcaaggcttcataaacttctatcagtctgctgaggatttcggtgcttcattaaggttctgggagtgagaagatgaggatcaactgctgcagcatctggcgcaacaaggcactgaggaggatgtgtttcagtgaaaggggtgctgtgagcagcacccagtgtgtgctcacatcagatgctggcccagacactcttatcgtccgaacatcctttcggaggaattatgctgatcctaacgaagtcactgctgtcattttgggtggtggtaccgagactcagcttctccctctcacaagcacaagggctacccatgcctgggggaggctactggttggttctagggcacagcagacgtcgttaaaaaatttatctaggtacttgagagtaagcgctgaatttggaaacaagcatgacaagagagtttttacatggactgttcatgatatcagctccatgaagaagatgttgtatgagcatgttgatgccattatgaccagtaacccttctcttctgcagcggcttatgcaggagaccagagttgagtatatggaagatggttttatcttaccatagaaatttctagcagtcagaacataagggtttaacttctcagcagaggaccaagtagtgagttggctttgagggattattcataaattcgatgataattactttagtttttagcgcattttcgcacttcagtcataaatttcatgttactttgtctaattgttaccgcaaattaatattttagtataattccaatttgatatgcctcat

SEQ ID NO: 120837 - DNA, 418 bp, Zea mays
  unsure (1)..(418): unsure at all n locations
  Clone ID: MRT4577_41686C.1
ggggacacacactnctagtagcgagaggcgacggacgtaagaagtcntctncttcnatttgctctttttcgcctgcttcttccttccctcnccttcgtgtccttcctgctggtggccctcctcctcctgcgctgtggcgttcctgactctgcctccttgcctggctcgttgttctccgacgcgattgtctccgtcgatgccttcggacagaacaaggacctgtaccgccccgtcgtcaacgccaataaatacacctctcctgtgctagtctatataatcctgcaggggtcgcgctgctgatcaccaagcatacatataccacctcgcatttcttattattgcatgcacgtttatataaatgctcattgtcttgctgttgtaagtgccatcacaatcatatatactgttgtttatatat

SEQ ID NO: 120838 - DNA, 452 bp, Zea mays
  Clone ID: MRT4577_41687C.1
aattaatctacacatcttactaattaatgtcttatgctaccaaagcactcatacaatcactaacaatgacgaacactcaaaatcactagtcttaattaaaacatctatcaaatatgttttctgaaactttgcaatttctaattctctaattgcccaatttctttgccgcgttagcttcaaccctagcctcgtcatttcttttgcttccgttgttaccattcggcattttttgaaccacctcattatgttgtccacctttcccctggctgatgggtgaccttcttttccctccaacgcttccatggctggggcctgaccctcttgttcctccgtgcgttctcactttgagcgaggatgtagcttggcgaggcatggatctaagtgcctgaacaaggatttgaggtgaaggtttcccaataagcgaggcatgatatgggtaatgactaatgagc

SEQ ID NO: 120839 - DNA, 3188 bp, Zea mays
  Clone ID: MRT4577_41688C.1
atggaggaaacagggaatataaactccatagcaaccgacgggcagcaaattgcacagatgacacagaacgagtccatcaccattggaccagtgattccgcacacatcatccttatctgacggcgcaaacgccgaaggcgatgccaacatggttgttgataaagatggaccagttgtgatcgttcctaaagttggaatgtcttttgcttcagagaatgatgcttatgagatgtacaacacctatgctggcattgtcgggttcagcattagaaagagcgttataaagcgtcgtgcagataaaactatatacaacagagttatagtttgtagcagccaaggacatgcagaaatgggatcgtcaaatgccactacaaggacgggttgcaaagctctggtaaagtttaatgtcagcagagagggaatttggacattgcaaaaggttgaacttgatcacaatcatattttagcgacaccaaaaaagaagcacatgctgaggtcacaacgacatgttatagatgcagacagacatctgattgctcagatacgagaagccggaatgaagccgactcaagtgtatgagttcatgaagcagttttacggcggggctgacaaagttcccttcttgcgaatggattgcaataatgagattggacgcgagcggaagaagtacctagaatccaatgatgcacaaacgttgttggaatacttgaagaacaagcagatagaggatcctgcatttttttatgccatggaaattgataggcaagatggaaggatagctaattttttttgggctgatggtcagtctatcatggattatgcatgcttcggtgatgcaatatcgtttgacaccacatttcagacaaataagtttgaaatgccttttgctccactccttggaaccaaccatcacaagcaaacaataatttttggggcagcattgttgtttaatgaaaccattgaatcatttgtttggctgtttcaaacttttttaaaagcaatgtcaggcaagcatccaagcacaattttcactgaccaagatgcagccatggcaggagcaattgcttatgtattcccaaatacatgtcatcgcctttgtttgtggcacatctaccttaatgctgctaaacatcttggtcatgtaattcataagtatcctgagtttttatatgcttttaaaagatgtgtttatgaagatagatcagaggagtatttcacaaagaagtggaatgaattgttgactaaatatggtctagaagagaactcatggatggatcagctatatggtttgagaagaaagtgggcagctgtttatcgtaactcttttacagctgatatgactacaacccaaaggagtgaaggtatgaataatgtctttaagaaaagatttcgtaggaaacttggtctttctgaactccttgtagagtgtgacaaggtttctgcttccctacgtgagaatgagttggatgaagattttaaatcactttcaaaggtgccagttatttatgtcccagaattaccattgttgaagtccgccttagaatcatatactaggaggatgtatacagagttcgaaacagaatttaaaaaacagttcgagtattcttgtaaactgttacagactgaggggtcaatatcaacatttacggttacacatatgcattcagattatggagcaacaactatattgaacattgcagatatgaccattacatgctcttgcagaaagtttgaatccataggtatattgtgcaagcatgccttcaaagtattcaatatgaatgatgtttttattttaccatctcaatatatacttaacagatggacaaaatatgcaaaaagagggcattatgttcagaaaaaaggaaggccaaatgaaaatttgaaggcacgtgctgctcgtatctctcgaatagcaacatcccttgcattgaagtgtgcaacatcagaaccacttctagatgatttggagagggcattggaaaatttggaatcgatggctgatgattcactaaacaagatgcgaaaaaatgaagattctttcgttggtttgaatgaccatgatatatgtacagagaatagtgtgatatcatttagagttcctcatgtagtaaaaggaccgaaaagtaaacgagcaaaaaatgttgttgaaaagaatacaaggaagaaaaagaaaagtcatcaagaaaaagcatcatgtcttttaatagctgctatttcagatgctgttggagaagaaacaaggaacattggggacaatagtggtggtaatgtggcattaccaaacatttctaccaataatgcgatcaactttccaatcattgtgcaaggagaatatacaagtcttttgcttggtcttgatcaagatgcttcagctgctcgaaaattacaatttgacaccggagcaaatgatacaaccatgcggtatccagagaatttttttcccctctgggaccccttcgagggcttcttccccttcggctccggcgacgtccgcagcctcgttccctcgttgccgcgcaccagctcggagaccgcggcatttgccggcgcgcggatcgactggaaggagacccccgaagcgcacgtgttcaaggcggacgtgccggggctgaggaaggaggaggtcaaggtggaggtcgaggacggcaacgtcctgcagatcagcggcgagcgcaacaaggagcacgaggagaagaacgacaggtggcaccgggtggagcgcagcagcggcaagttccttcgcaggttcagactgccggacaacgccaaggcagaccagatcaaggcgtccatggagaacggcgtgctcaccgtcaccgtgcccaaggaggaggccaagaaggccgacgtcaagaacgtccagatcaccggctaggaaggaagcacgcgtgcgctgtggagtttgaaacacaactgttcaagcatgggtgtcctactacgcgtcttatgtaattttgtgtagtgattatccgttatgtactcccgttgtgtgcagtgatttctgttatgtggtctgggagggtgtccggcgtgccaccgttgcgtggagccgtcaagtacttaatgcatcgtatctttgttgcatggtgtgcgtttataaatgaaaacctaatacaatctgttctgtctatttcatcaagatttatgacggaatccagagactgatctagtgatttgtactacaat

SEQ ID NO: 120840 - DNA, 248 bp, Zea mays
  Clone ID: MRT4577_41689C.1
ataagggggtagtgggaaaagtggtactaacccacgattctcagccctgagtatgcctggacattgatgctaacatgaccatgcttgcactgtctctagctggtctggggatagctggagcattactcaggtggctggtgaaatgacacctcacacggaatgagtgctatagagaggagagaggagtgtactgcccaggtctttgacaggtgtaattctcattcaattaaagtttcagtgttttggtt

SEQ ID NO: 120841 - DNA, 854 bp, Zea mays
  Clone ID: MRT4577_4168C.1
ggccgggcccgggatcattatccgttgctcgcaaaacgcccccacacgccgccggcgaatcggcgactccccttgcgacgggaggaagcagccacgccgccgtctcggcgcctccccgacgactgcctctccggtctcgaacgcgatctggcccatggtggctctggcgccgttggttcgtgagatctagggttgtcgagcgccgcggagtgggagcggatggggcgccggaagatgtctgcagcggcgccgccgtcccggagctggtccaacgttggcgggagcgtaatccccgaactacgggcaaaacacaaaacggacttggaaaatttgacgctgacaaaacatccaatcagaacattacattttttcctgttagccatgttacaatacttgaaaagattagcaacatatatcctgagaaagagtggtttgttctttctcttaattgttttggtggtagcttccggaatcttgctctctatttcagatggcctgcataggaaggtgtggtcttatgctaatgtttttttattatctgtgggataggctagtcattttcattagaacatctgttactgtttattgtcagatttgcactacaatgcctaaatattcaaggaagatacatgctctgaaaatctgtatctttgtgagataatatttttttgatactatcttggtattgcatttgaacactaatttagtttttctgacatgtatgcagcatgtgcaggagttccttaattatgctaaattcgtggtgtggtggatttcattaggtgtggcttcatcattggactaggttctgggttgcatacatttgtgctgtacctagggcctcatattgctct

SEQ ID NO: 120842 - DNA, 398 bp, Zea mays
  Clone ID: MRT4577_41690C.1
tttaaatgtacgggctgacatttgtgtagtttgtgaaatactgagaggttgtggggaaggaatatactaagcatgtacgagatttacctgcatgctggtggcattgactcagtatggaccaatgatcgttacgaattttggcgatcgacaggcatgcttttaacgcaattagagttagggccggtggtgaattaggcagcttaaggaaagcggggactaatagggtactgttcgggggtcatgtgtgctgtatgaccggcatcatgggggcgctatataatactggcacggcgtctacactagcgtggtggaggtattcagagagggagctgaagaagactgtttagctatattgagatggttaggttggactgactgactatggggtcaaattggtt

SEQ ID NO: 120843 - DNA, 220 bp, Zea mays
  Clone ID: MRT4577_41691C.1
ctacgtgcagagtgtgccgccgctgtgccgtcggagccccccttcaacttagattatgctgctgagggaagtggctacccgcgctttgacgagagcgactatcatgacgccgatggggtccacaaacatagtggtatactctggtgcgcacaacggttataaagggaccctactagcatacctatctaccaccgggatggagttccccatctactatagt

SEQ ID NO: 120844 - DNA, 1550 bp, Zea mays
  Clone ID: MRT4577_41692C.1
cggtcgcctgggttaaacaccgcccacctgttatatctgcaatggaagaaagagcaaagggtctaggtgtttggacggataccaatggtcttgcatcaaaaatgtataacttcaaacgggaccctgaaccgctggtttctttaagtgattcaacagaccagttgagtgatgtgggagatggggataccaatcaagaaagtgatctgggaaacatggatgacgagtatggtggtgtaatagtgaattctgagattgattctttgcctgatccaaaggaccaggttgcctggctgaagttggagctgtgccgactcatagaggagagaagatcagctgttctcagagctgatgaactagaaacagcacttatggaaatggttaagcaagataacaggcgccaattaagtgcaaaggttgagcagtttgaacaagaaatatctgaactaagacaggccctgtcagacaagcaggagcaggagcaagcaatgtttcaggtcctgatgcgtgttgaacaagaactaaaaattgcagaggaagctcgcatctcagctgagcaggatgctgctgctcagagatacgcagcaaatgttctacaggaaaagtacgaggaagctatggcttcacttgcccaaatggagaacagagctgtaatggcagaaacaatgttagaagctacactgcagtaccaatctagccagcagaaagcactgtccccttgcccttctccaagaccatcgatgctcgacgcatcccctagtcagtcaagccagaattcatcgcaggagttccagccaagaaggaaaaacttgcttggcccattttccctgagttggcgtgataagaacaaggaaaaaccgaacaacgctgatgactccaccaacacaaagtctacaaataatgatgaaatggtagaaacctccaacacaaatgatgagaagcatagagaaacactagatctaaatagtgagcagagagcagaatcacccaaagcagatgtcaagatgagagcagagacacctgagaaagacaacgacctgccaggggtccaactagtcactgacgatttgaatgggcaccacgaacagatgcaagaaataaaattggattgataagcattaagcacaatgctcccagcccaaatatcttcgccaccacgtaagtaatatcagagtatttatgatctgatcacacggtgccagttggtgacagcactgagggtggctaagttttgaaatgatactggtccccccctcctctcccctttccctttgtggttccccgaattctttttgccaccacatctaggttacatgtcatttctctccattttttataattttgaggagaaaatgagcaagttatatatggttgcccatccgttgctgcctcccaatgtaaatgcattggaagaactgtgagaaaaaagatgagaattgtgggcaattatgacacccttattcttgtaaattatcatatcatttagagtttatgcgtgctttcaattgaagaacaaaaaaaaaaaagggcgggaagaaggagaagggagaagg

SEQ ID NO: 120845 - DNA, 220 bp, Zea mays
  Clone ID: MRT4577_41693C.1
atagggataaatggtataaatattatttttacatagaggggagtcttacaaaaaatgagaacaacaaagagaactaagttttatttcttagcgccataaaggtgactgggagatgccacctaaattagctcgaactcctcgtggtaggggttcccttggaccacctgttgtttttcttgaataagctcctgctgaggaactttacctactgaacacttgg

SEQ ID NO: 120846 - DNA, 618 bp, Zea mays
  Clone ID: MRT4577_41694C.1
agaataacaatattttcatattgtgaggagatgaacttgtaacagttctaacatctcatattacagtacaagctagggcaaacaaaccacacaatcccatagaattgcatgttacttcgggaatcacaaatgaaataacacaggcaataacaagtaggttctggtagctttttttttcagcctaagctcatattactcgacaaacttcaagcttactaccaaaaccagtaagccctgcccttcctcgaactaacagatgagattacacatccatgcttcccaagactacaggctacagccaccgagagatccagtttttagaacagcaccatgccaacgacgccaacaatgccaagaaccagtccagcactcgccttcaacccagccgcggtgttcaagccccatacgcggacgtcgtcgatcaccggcccgcacagcgagctgtggtcgtcactcctcgtgttgtagtacacgctgtagaacgccacgcgtgtcctctcagcacgcgcagtgaacgtcacgttcacagcctggctcgtggcgttgccaatggtgagaatgggaaagtctggcctggtccccgcgaagccatgatgccattggtggtgcacgagtccc

SEQ ID NO: 120847 - DNA, 147 bp, Zea mays
  Clone ID: MRT4577_41695C.1
ctctctcttaggagtgagccatgatgagcaacaccgctcttattttaacgataggggagttctacattgttttaatagatggtgccaatcaaagaatgtgatattagggggacaatgcaaagagtgtgctaaaagtgaatatatgaa

SEQ ID NO: 120848 - DNA, 254 bp, Zea mays
  Clone ID: MRT4577_41696C.1
ctcacgcgtccgcgttccttttcaacggactttgcatttttatcatacacagacttttcttatgtggttcctagttttcgtcaggcgacggcaatactttgttgggcaaagctcgttgccacattctaggcattcttttcttagtggaggcactgctcatctgagttctgatatttttcaattgacaggccacatgcgcaaaggcctaataggagatagaaatatgttactactgtgctatctatcgcactcca

SEQ ID NO: 120849 - DNA, 458 bp, Zea mays
  Clone ID: MRT4577_41697C.1
ccgaaaaaaaaaaaaaaactatgggttagctcaaagtttgagaaaagttaagttcaggtggaaccaggtgttggcatggcaacacagaattttaaagtaaatctcctttgaactttgtatagagaaggggagaaaaacctgacacttgtagtttgtttcctcttggccgttaaaagaaagataaagtatgtctgacacttgcagctatttcctctgtttggagacccctagccttcctacctgttaccctctcagtactttactttaaaaatcttaggaagtaatgattattaaatggatattgcaaggcttgacatttagcaacttcttgatacattttgtcttttatgtttatcactattattgcagatacctaatatattttcaaaatatattaaagatacgttattgggagtttaagtgttttaaaaagtctacttttctttaatgagatttta

SEQ ID NO: 120850 - DNA, 148 bp, Zea mays
  Clone ID: MRT4577_41698C.1
ccgtatccttttcgacaccggcgaaatggcccccttggctctcctattagagaggcgagtgaagcccaagaagacgccgcacaactgacataagatcatggggcccggcgagctcgaaccagtgctcagacagaacaagaactaccta

SEQ ID NO: 120851 - DNA, 567 bp, Zea mays
  Clone ID: MRT4577_41699C.1
ctatgacgtaagacgtgcacgcgctccgtaagctcggatcctgtatagcgggcgccctccacgcgttcggaaacgttaggtcatgatcagagccgccattcaatggagatccttagactcactgacggtcatagcaaacccctgggtgcttggcacacttcctttacatgcctgaccacatagctggaattatcgggcgcgtgctgagtggaaaactgcacatttgcggtgttataaacctacatcctgatgaccgagtttatgacagcgaggcatgtcatggtacgttttttccatatagactgttaggatcatggacccaacctgtcgagatggaataatcgtccatgaggatgcctggatctagatagcacctacgtaaagacgtagggctattaacatccaaattgatgcagtctgaccttcagatgcaccacaatactcccatgtttgtgggaggccaggtactacaactcaccacatagcctccatggggctgcatgaccgggatgaactttgtgatcaccttggatgaaggcctgtgcataacctgacttttccggacgc

SEQ ID NO: 120852 - DNA, 1970 bp, Zea mays
  Clone ID: MRT4577_4169C.1
ccggccgggaaaaaaaaaaaaaaaaaaataaaatagcgtcttttatatatccgttgctcgcaacgcccccacacgccgccggcgaatcggcgactccccttgcgacgggaggaagcagccacgccgccgtctcggcgcctccccgacgactgcctctccggtctcgaacgcgatctggcccatggtggctctggcgccgttggttcgtgagatctagggttgtcgagcgccgcggagtgggagcggatggggcgccggaagatgtccgcagcggcgccgccgtcccggagctggtccaacgttggcgggagcgtaatccccgaactacgggcaaaacacaaaacggacttggaaaatttgacgctgacaaaacatccaatcagaacattacattttttcctgttagccatgttacaatacttgaaaagattagcaacatatatcctgagaaagagtggtttgttctttctcttaattgttttggtggtagcttccggaatcttgctctctatttcagatggcctgcataagaagcatgtgcaggagttccttaattatgctaaattcgtgttggggtggatttcattagttgtggcatcatcaattggactaagctgggtaacacacatgggtgctgtgtcatgtttcatattgctctattaaagctttgatgaaagtgcagctcgcttatcaggaagcgagtcaaaagctgttcaggagcttgatgcagctacttccaaagaagatggaccagtagcatcatcccttaatcgaaccaagcgttggcttctctctcactcccaacatctcaacttcttctctatcttgattcttgcttcggttggtctcctgtcttccatcctctgttaccaagttcttcagtgtggatattttacacctgtaatttatgatatttggctttgtgtcttcacaattgatcttttttgcacctttggatcatgtgcaagctttagctccacatttaaaagctgtctagataaaatgacaccaacaaataagcgtatggaacattccctatacatcagttgccataagtttctctaaaggatttttattctatttttaaaaataattgcctaattttaatgctcttattaggttccaaatccactctttgaccttgctggtattatgtgtgggcaatttggtgtgcctttctgggagttcttgtttgctactttgattgggaaagccatcatcaagactcatattcagacactatttatcgtgtccctgtgcaacaatcagctcttgtatcttattgaaaaggagttaatctggatatttggtcacgttcctgggttttctgccacccttccgtctgtgattgccagactccatgctgccaaggacaagtatctatcaccaccagccccagtctcaccgtcatcacaaatgggggagaaacagtggaatttctcttttacatctgtctggaactctatagtgtggcttgtgcttttgaacttcttcattaagatagtcacgtcaacagcacaggattatctcaaaaagcagcaggatacggagatggaacttatttcggattccccgatccaggaccattctaaaactaactagtggcgcagctagtggtgtttatacacagctgctagcagcaaagattctcctctgtagcttaagctcctgcagatgatttcaagttccaacaattagtattagtagttattcatctgcgcagtggacaaaaacatggacacatggtcttggttaacttgtcagttgacgaccttttgtcattgagcctgtacctgtactggcagctcctggtggagtcattctgtttatttttcggacatctacacggataaacagtaggaattgtttatggagcacggttggctttgtgagatgtatcattcatacatgttcctatgtattctgggaacttgaaatgcaatagaaacctgggaggatttaacaaggat

SEQ ID NO: 120853 - DNA, 573 bp, Zea mays
  Clone ID: MRT4577_416C.1
cccaaaaaaaaaaaaaacagggttttctttggaaaagcctgttttggccttctttgaaaaaaaaaacccgaaggggttaaatcttgcggggttttaacccataacccctttatggggaaaaaaaccagacccccctggcctaaaaaaggctgatagggcttaaaaggggcccctcggaggggttgttcggccgaggctaaaccagttgccgtttataaccaaccttaaaaaaaaggccctgggagccagtggcaaatacctcgttgtacctaccctaatttccttaaagcgacgggccgacggatctctttttttttttttggccaaggataaaggcgggccgcccccttgattttcccgagggaagagatgggcaatttcaaagagatgttccttccaggggacaaaaccagggccggttgtttgccatttgaaaagctgaagggggtttcccgaataaacgatcatcctgaaaatctgcgttggagggaaaagggggagtacctcctttttccgggatccccaaaaatcatatcagggcccttttcagcagggcctagggccaaagaaggc

SEQ ID NO: 120854 - DNA, 453 bp, Zea mays
  Clone ID: MRT4577_41700C.1
cctcggcgtccaaagccacgtcaacccggggcgcgccctcgcccaccgcctcgcacggctacgcgccgacggctccatcacggccacgctctccgtgccggtaaccacctaccggcgcatgttccctcggtcggcggattccgcgccagcgacggcggagaccagcgacggggtcatctcgtacgtggcgcactcagacggcctcgatcgacgacggctcgtcgtcgtcctgggccgcggacgccgaggacagggcgcgcaggcgccgcgcgagcgccgacagcctctccgccgtggccgctcgcctggccggccgcggccgcccggtgacgtgcatcgcgtgcacgatggtgtcgcctccggcgctcgacgtcgcgcggagcacgccatcccttcgccgtctttggctccagccggcaccggcctcgcctctgtacactactccacggcacg

SEQ ID NO: 120855 - DNA, 285 bp, Zea mays
  unsure (1)..(285): unsure at all n locations
  Clone ID: MRT4577_41701C.1
cccacgcgnncggagcgagaacgcgggcgggcgctcgagaggagccaagcggacggacgcgggcacgcgacgccacaggggggccatagagccacccaaaagcaagacaccggccggcggggcacaacgccgggacggggaaaaccccggcgggacccaacccaagcgcccagcagcacaagcccccggcgccagaaggcggaacggcgaacaggcccgcaccgaacggccaagccaacagaggcgcacccagaaaggcgaangggacgcgccccggagcggcgc

SEQ ID NO: 120856 - DNA, 207 bp, Zea mays
  Clone ID: MRT4577_41702C.1
gtctgcgatgacactttccattaatatgctgaccaaattattaaacaccaggcgtccatatacaaatatatgactgtgtataaggcgcccgtacccgaatacattgcatagcatcgcatactcatttaggctgtttgcgcaacagcggggaagttggtggggggcacattaccaaaccgaccaacatctagaatggaatgtccaacc

SEQ ID NO: 120857 - DNA, 263 bp, Zea mays
  unsure (1)..(263): unsure at all n locations
  Clone ID: MRT4577_41703C.1
gtctacacaagcggnggggggagcaaaatctgcgacaggtggccggggctacttatacactccgatcgcccccgggagttactcgacttcgcttccttttccttcttccagattcggacccggcttcgggtctcacgcactaagcaaagatggcaccaccatccatgtgtcttgcggcaaagggggggcttcccttttcggaacttatttaaaggggggttacacaaaggccagggtcagggaccctttccttggggcccaaa

SEQ ID NO: 120858 - DNA, 1272 bp, Zea mays
  unsure (1)..(1272): unsure at all n locations
  Clone ID: MRT4577_41704C.1
aattcggcacgaggcggagcctcacttctagtctagtacaacttgcttctgcttctgcctctcccggtccaggtctcgctctcctccgctgttctgttctaccactaccactaccagcccgggcggtccaatccaatcccccccgctcccacctagtccttcctcctcgtgccaataccagatccacgcgctccattgcgaaataaccttaccaatcgcagaggacaaagagaagacgccatgccacatgtgagagcggggagcttaggtttgatctgattgctagctgccctctccgtctgccatcggccatcgccatcggagaaaaagaaaggattgaagggaccagaggaggcggccgcccccgaaccgccgggaaggcaaaaagatgcgccctttgcggcgaagctccgggggccttgcggccctcggctgctgcctcttcctcctcccgctgctgtcccgcggcgcggacatgccgctggggtcgaccctctcgccgggcaactcggcgacgtggacgtcgcccaacagcaccttctcgctcggcttcacggcgtccgcgtcctccccgtcgctcttcgtcgccgccatcacctacgccggcggcgtgcccgtctggtccgcgggcaacggcgccgccgttgactcggggagctcgttccgcctctcgtccaacggcgacctccagctcgtcaacggatccggggccgtgctctggtcctccaacacggggggccagaacgtgtccgccgcggccgtccaggagagcggcaacctcgtgctcaaggacaagaccggcgccgcgctgtggcagtcgttcgaccaccccacggacacggtggtcatgtcgcagaacttcacctcgggcatgaacctcacctccgggtcctacgccttctccgtcgacagggccacgggcaacctcacgctccgctggaccggcgccggctccaccgtcacctacttcaacaggggctacaacacctccttcacggggaacaagacgctcaccgcgcccacgctcacgatgcagaccaacggcatcgtctccctcaccgacggcaccctcacctcccccgccgtcgtcgcctacagcagcaactacggcgagagcggggacatgatgcgcttcgtgcgcctcgacgcggacggcaacttccgcgcctacagcgccgcccggggcagcaacgccgccacgnaggagtggtcggccgtggcggaccagtgccaggtgttcggctactgcggcagcatgggcgtgtgcagcta

SEQ ID NO: 120859 - DNA, 315 bp, Zea mays
  Clone ID: MRT4577_41705C.1
cgcggacgcgaggggtttggatgcaaatcgttgttagttaactttatagtttttaagtaactgtttggttgagaaagtgcgtgtctatcttctattttctctgctccctatagcaccaagctgatttgtgtctaatttatagggacgatgttagcgaaagtcaatttaatcaggtgttcatcattgggttgcaacaaatcatcggtggagactgagtcaccgcagccaaaaaaccacggactcaatttgaggagttcttccatctatgtttgctagaaggcataatgcctatttatctcttgcatttcaacattt

SEQ ID NO: 120860 - DNA, 665 bp, Zea mays
  unsure (1)..(665): unsure at all n locations
  Clone ID: MRT4577_41706C.1
tctgtatttattattttctattttgtataactatttcattgttcattctgttttgtttcagatacgaggcatgcacacaataataagggatgctgccacagcaacacatgatttcatattttatgctgatcggttgattcgattggtcagtatataaatgtatttgatgagttatcttttatgtgggtttgcatggtatcgtaaaactccctgtgaaaaataggttgtcgaacatggtcttggtcatcttcctttccaggaaaagcaggtcatcactccgactgggtctgtttacactggtgtggagttctccaaaaggttgtgtggtatctcagtgatcaggaggtaccaacttttcctaaacgatattttcttcatatgcctgtttaggttctaatcgagttaatgatttaggcactcacataaggagggggaaatgagctttgtacaagtataacagtgatatcattatgttgatactatgccttatatagcctgtgaatattttttgccgcattggcacttcacaaatgctcgacacttggccatattgaaaacttcatcccagtctcagttatctttgctatatatatgtactgttcattgntcctacaaatacagtatgggtggtttagctataaaacatgcacaattgacccctcatg

SEQ ID NO: 120861 - DNA, 285 bp, Zea mays
  Clone ID: MRT4577_41707C.1
agcgcgacgaacgtaaaatgtttctgcggagcatcctgaccgttgccgtcattctatcttcccgaagggcgtgtcacgcctgtaataagactacagctatcctggatcttgacgtggatcataacgcgcgatatgtttttaacaggctctacaaactctcgctcaaagagatcaaggccgtcccctaatacgagggtttctcgatggcctgcttatcacttcaccctttacacgtttccacatctgccttgatgaggaggactggaatcgcatccttgacctaat

SEQ ID NO: 120862 - DNA, 174 bp, Zea mays
  unsure (1)..(174): unsure at all n locations
  Clone ID: MRT4577_41708C.1
cgcatcgcacgccatcagcagctagcgcgctcctcgaagccagcagagaaaggccggcagcgctaatcgtaatagccatgggtctccaccgccggcgacgtggncgtggtgttaggatttgtgaatgagtgatgtgtgtttataattgtctttggtnaggtgtagtttttgtga

SEQ ID NO: 120863 - DNA, 513 bp, Zea mays
  Clone ID: MRT4577_41709C.1
cacgcctgcgtgtaccgggccgccaatacacggtcgacccagtcgttcgtatggtgaaactgtacaggctaaggacattaacctaactgaaagggatgtcggaggtcaggacaagacctgcccgtagcggaggcactactttcataacacacaactacttatttttgatgtagacagctaacgactgggtaacgtgtaaaaaaaggctacgtgagagctccacacgtatgcttaatgaggatcacctgcgaaacgctgtactacttgtgttagaaaacaaacaaaagcctgccaatgctctgaatgctgcctaaacactgcaagctaggtctctttatctgcaacagccgctctggtacatacagcgcaccaaggctgcatgtggttgaaggatgtatgaagggcttgacaggctttgcaggaacatctacaccaagagttgaaggttttccagatgattcctattcagcagacggctgaacaaattatgggcgctaacaacacgacatcctg

SEQ ID NO: 120864 - DNA, 243 bp, Zea mays
  Clone ID: MRT4577_4170C.1
aacgctgctttgattaagtaggttcatgtgacagctcgtatgtcaaatatcgcaacttctagtgcgtgtgtttggatgtgcgcttgtttttattataactgcggtgctacctccgatatcgagagagatttttttttttttttagaaaactagacatctccataacacacatggaacccacaagctgagacactctgataagtggcgtatcgctgtgaaaaaaaccagaaaaagagaaaggga

SEQ ID NO: 120865 - DNA, 1491 bp, Zea mays
  Clone ID: MRT4577_41710C.1
tttttttttttttttttttttttttttgatagatttcgacgaccaaaacaagctagaagaaagatgtattcgacgttgacgttcgttcgtcgtatgttatcagtgaacaaagatctgctgctagtggacttggagtcacgaaggagaggggacgacaataggagccggcggcacggagtcctccagcggccagcactcccagtcgccgtgcttgttctgccacagcgagaagtggctgggagtccacacctccccgcgctcgttcctctccttggcgagccgcctcgccgtctcctccacccgccgcttcgcctgcctggccgcctcccagtccttgttcaggattgcggcgctgacctcggcccagaccacggcggactccgaggcggacacgccctttctgtcttgcacgacgggcgtggcgaggtcagcgatggtttgccgtgcgtcgtagagcacggagacctcgccggtggcgacgtccctgagcgagacctggcggtcccagaacccgtccacctcgcacagcgtgtcgtcgggcgctgcggagcggaagaccctgcccctgacgcagcgcgcgtcgccgccgccgaggccgaggaaggagcggcggctgcggcggtagctgagcgtggcctcgagcccggactcggcgcaggagacgcggacgtcgccggcccactcgcagcccggcgacggcagcaggcggatcacgaggcccgggcacccgacggcgtacgtctcggcgtggcgcggcagccgcagctcccgcgcgccccgcaccgcggcctccacgctggcgccgtggaaccgcggcgcggggctctggcaccacaccagctccacctccccgcgcgcgtgcgtcgcgtgcagcgccgtcacgggcgggcggtgcgagacctgctccaggagcacgttgaggccggcgggcgtggagacgtggtgcgtctccccgagcaccgggttgtagggcgcgaagccgaagatggggggccgcgtggtggagatgctccacgccaccacggcgcacatgcgctgcaggctgtcggcgccgcgcgcgcaccgcgccagcatgtcctcgccgccgcagtacacggcctcgccgtacagctgcagctgcgacttgggcaggttgaacgtcgccggcagctggaagtgggagaggtcggagcccgggcggacgttgcggaagaggctgagcacccgttggccgaggttggccgggcggagctcccccgcgagcccgccgccccccagcgacagcggcggcgtcagcacggccgcgcgcgcagcctccgtctcgccctctgactccgtcatgtgggcgggcgggcacgccggcggagagggaggaatgatggagcgagcgagcgaccacgagctaccggcggacgacggccagggccagccagccaacccctcctctcttctctcctctggtttgctttctttggcagctccgccgttgttggtgttgctgttggtgtttgg

SEQ ID NO: 120866 - DNA, 450 bp, Zea mays
  Clone ID: MRT4577_41711C.1
tttctgatacgctttaattttggagagggaacggtagaacaacagaaggataaacaacttggcacggatagagatgggtgagaccgagctcagacgactagacaggggcacaccaaacagggcccttagtggaacgacaaaagcacaaccggccagctagcgaccacataacacaggggaaaaaatgccatccaagacacattagtcgccatgagatcatggtggaatgaccagcagcccggaatcagctcttaagcgcaaaacataggcatgggaaagctcaacccggacaggggcgggccactgtggctacggagacacatcagtctcacgccgtcagttttgatgagagggaggaccatgcccgatgcccaaaaaaatcaccactggctccgagccacaagcgaaaacgcaaaggcagagggatcacctagcgaccgaggcccgaaa

SEQ ID NO: 120867 - DNA, 450 bp, Zea mays
  unsure (1)..(450): unsure at all n locations
  Clone ID: MRT4577_41712C.1
cgagcccacgaacacaccnaggcacaatatcgatttcgccggggaaacgaacgcaacggggggggggggcagcaacacgcaccacgaacaccgggcccagaatgaggcccacaaacagaacacgcagcaagaccacagggcgccgcacggacacccgcacgggcacgggtactactaccacgagcacagagaccacggaacaccccaccgatcgagaaaagcatgcaaaacgggagctagagacagacccgagcgccaaacacgtgcctgcgtgcaagaaaaaaagagcaaacgcaaacacgcgaacgacgcacgaacacgacgccagcgaaccacccaagagccgtcagcaaaaaacgacgaagcgcacgccaaagcaacgcgaaacgacccaaaaaaacaaaaaggagcctctcccccaagaacaaacaagggactaggggccggcca

SEQ ID NO: 120868 - DNA, 558 bp, Zea mays
  Clone ID: MRT4577_41713C.1
atctagtggagcaaaggtcagagccccggccgccggaagccgctaccgctagcacctccgatcgagtcggcgccatgtaagacgtcatcaccgacgcgccgccgccttcccgcttttcccctgacaagctcgacaacttcgtcgatccggcagaggagaccaccaccatcttcgtggtgtccccgaactataggacagaggaccagcgcctcctcgtagctatcgtctccccgcctcccttcgcgctgctactcaccccgacgaacagctgcactgtcctctgctcgtaccggttctgacactactaacgagagcgtgaatgcacatgtgactccacacttccaatgagatatctctactagaggtatggtgcctgaccacggccaccgcgcgagtgacgactataatgatcttggctgcatcctgaccacagagtggagatgtgattgtacagcatttggatgagtatgctgcaggtaacgcctccgcgagtatgacagccagtaatgtaagcagcatatctgctggctttgcgactaaggatctctgaggtgtggc

SEQ ID NO: 120869 - DNA, 480 bp, Zea mays
  Clone ID: MRT4577_41714C.1
aaagggtaaaccaaaaagggccccaagcgggacccggggatggcccggggaatccggaacgggaccccgcgggctgccaagctagcccaataagaggcggggggggggggggccaaaaaaattaccaaagtaaaaacctaacccaaatacaaatccacaaacaatcccaaacacaaacaaacccaaaacaaccaacttaaaaccctgggggcccaaaaggggaaggaacgcacaatcaaagcgggggggccaacagccgggtacccggggggaaaaccggcatcccaacatgaataaaggaacgggcaaagccccgggggggggcgggcggccaatgggccccagggtggaccagttattcccccaacagagggggaaacagtaaagggccgtcaacacagggccccaggagggggaaaaagaaggggccccccagggagggcccaacccggcaaaaagcgggtaaggggggggaaaaag

SEQ ID NO: 120870 - DNA, 751 bp, Zea mays
  Clone ID: MRT4577_41715C.1
gccctctcctccccctagggttccaccagagagcaaaaggggatcgggtgtcagttatgcgccaccgcctgccgtgcgcccatcttccccctctcgccgccgcaatcgccgtcggatgcctcggatgaggatccagtgctgcttgcgaacaggcgaccaaataagcagctccccctttgggagccgcagtacccaatcgaagcagcaagagcagcagctcttttgggagcggcgatccgcaatcaagcagctctggtccggcaatccaagcaatcaagcggctcctccccgagccgcagtcggaaatcgaagcaatcaagcggctcctctctgagccgcagtcggaaatcgaagcggctcccttttttagtggctaatcaatccggaatcaaagcagtcctttccggattacaatcagaaacaggccctctttcgaattcagtctccgagtctccattggtggcgaggaccgagaggctatatatgtaaatatctggcctggtggacagcctagacatcagtacccgccaatttcaagaggagacgagcaacaactccctaaacatcagttttcggagtgaccagcaacttgggcgatggccaagtctagtcgtcggcgacgggctgccaaattgaatgctaagaagggcaagatagttgataggctcagcgcattgcctgatgacgttctggtcaaattcttgaccgactcaatgtccgtgaggctgccagaacccagcatcttctccag

SEQ ID NO: 120871 - DNA, 560 bp, Zea mays
  Clone ID: MRT4577_41716C.1
gcaaacaatgcatctctaagcacaaaaccatttacaatttgagatagaataagtggtatccttcaaatccatccaaaaagaaccggacagacagttccatggttgccttttgcctggaacagggtccagtccgttgtaaagaatgatcagtgccctaacaaaaccaacaaaactgagctttggtcaaaactttctgtacagccaacagcgtgagcttaataattcttcagcctctggctaggtaaacctccagaagttttcctttcccattcggttgtgagctccctgattgaagattgtactcgattctcttcctacattccatggctggagttttacttccaaatgtaatttgatgcagctgcaagaaagcaagcatacttactgcaaacactgcagcgttaccgagagtgcccccgatcttgtccagtcgaaatgaattcttggctaatgataaactgcaagataacacgtttgacattatccttgaaccactgcccctgttgtcatctgcgttatcctctgatcggctatgggtagcacgaacatcctcaggtgag

SEQ ID NO: 120872 - DNA, 405 bp, Zea mays
  Clone ID: MRT4577_41717C.1
aaatgagggaacatctacttttgagcagtttattttgaccttaagatccacagttggtgctcaggttcttgtacaagcaattggaattggcaaaggaaaatatgacctgacaggatttgcattagatcctagtagaaatcatggtatctcagcacgcccagaaatccctgttggcaaggcttgctcagcactttcatctggagatatcataaagtttttgactggtgatttcagaatgagcaaggcaagatcgaatgatctattctgggaggctgtttggcctcgcttgctttcaagaggctggcattcagagcagcctaaagattcttcaccaattggaaaacatgctttagtctttctgattccaggtgtaaagaaattctctagaaaaaagcttggcaaggg

SEQ ID NO: 120873 - DNA, 276 bp, Zea mays
  Clone ID: MRT4577_41718C.1
cccccggaggggaccttttggaacattttttttttttggcagggaacattgggggggtttattaaaaaaaccaaggtttttcctgaaaaggatgcttgggttaacagttgggagcttagcattaacccctcacccccaaaccaggtcctactacaattttggccctttaattaaggggaaaagttttttgccaaaaaacccaccaagggtttgtccagggcccttttgttttcccgggggttccccaaccaaaacaggaaaaaccccccgtttttg

SEQ ID NO: 120874 - DNA, 140 bp, Zea mays
  unsure (1)..(140): unsure at all n locations
  Clone ID: MRT4577_41719C.1
gcggtgtccatgctgatttttttacgcgagtgctgctctgcctatctgcactggaagcttcagattacataacgataagggcggccggcatgatgatccagtgcgacacgtgcgatgccgnggcggacacggtggtgtgc

SEQ ID NO: 120875 - DNA, 752 bp, Zea mays
  Clone ID: MRT4577_4171C.1
cactcctatgggcgattgggaccctcgaggccggccgggactccctatagctagctagatctcttctccattcgtttacctgaagcacaagaataaacgcagccgggcatgggcgaagctaagctcaacaacgtgaccgtcctgctggtggccctcctcctcctgagcagtggcgttcaggacgctgccgccatgccaggcacgttgaactacgacgcgattgtcgccgacgagccaaacggaaagaacaaggacctgtaccgccccgtcgccaacgccaataaatacacccgcgggtgcgagcccatagaacgctgcaggggcgcgcgctgatcaccaagcatatacatatagcacatcgatttcttattattgcatgcacgtttatataagtgctcattgtcttgctgttgtaagtgccagcacaagcatatatacggcgtttatatatactacatactccgatcgttcattccgttccttagtaaccaggttcccggatcaatgtgatcgaggaacaggaacgtggtacacggtacgctactaaaactaggatttaacgctactggaacgagattgtttccacgttcccggaacagaacgaacattcccggaacgaggaacgtggccaagttccccgtccccggttgctaagttccgttccaacttgtaaattatattaaagtgtccaagagtcaaagccactccatcagataatttctctattccaaaaaaaaaaaaaaaaagcggcc

SEQ ID NO: 120876 - DNA, 254 bp, Zea mays
  Clone ID: MRT4577_41720C.1
aatcctagcacctggcctccgtcgcgcatcagcgcatccccatggcccaacatcaagatcgggatcaatgtggttcggcacgatgagcacgctggacgccaaagtagcccggcacagtgacgatgtccagctcgtcgccgtggaggaccccttcatcaacaccgactacactgacctacatgttcaagtacgacattgtgcacggacagtgggaagccacaggaactcaaggtgaaggaccccaaaacccttct

SEQ ID NO: 120877 - DNA, 229 bp, Zea mays
  Clone ID: MRT4577_41721C.1
gcgccgtcaacagcttaggcgggcatcttatccaagccagaacctcgcccgcggggagagtccatccgttgtgtggcgtccgctacggacactacggcccaggccaatatggccgcggccatggcgttactcggcgccggcgacgtcgtgcactgtaacaccgatgccgacacgaaggccgacttcaagcgtgctgacaagattctgcatatattatcttcgattcttc

SEQ ID NO: 120878 - DNA, 752 bp, Zea mays
  unsure (1)..(752): unsure at all n locations
  Clone ID: MRT4577_41722C.1
gggacgcatcaccctcgatcatccaatatctcccagtttttttctattatcaaacagaggacctaaatttggaggcatcctttctagggactgcacgtgtgattgggtggttcagtctgatgcttggcacctacacctacaaccgctattttaaacagaagaagctcaggaatattcttgtgtttgctcatgttggccttgccgtaattaccctactggacattgttttggtgtcacggttacatgttcagtatggaattgccgataagtacatggtgctgtggggttccgcgttggctgatgcaatcaaccagttcaagatgatgccgttcctgatcctgtcaggacagctttgcccacctggaatcgagggcacactgtttgctctcttcatgtcaatcaacaaccttggttcaacactaggctcattcctgggggctgctatggcatcagctttgaacctctccacagcacagtttgacaatcttgctctgggtttgggtgtacagatgatttgtactctcttgccgattgggttcctatctctgattccaaaggaagtcacagggctaacatcataggttgagctgtgtaccagagagagaggaatatacacatcataggaaggaaattcaagatagtttggaaatagacagttgtgttgacagtatatgtacaagctctgtcccagnacgagagaaaatagagtgcatagatctgtaggcaaagattaaaatacttgatgttgacag

SEQ ID NO: 120879 - DNA, 663 bp, Zea mays
  Clone ID: MRT4577_41723C.1
ttgggtacctcgaggccggccggggatatgatgtgtttgtggctcctgtttccatgttcaattttcaggcctccacatgaataaaatagcatctattccaaaaaaaaaaaaaaaaaaaaaaaaaaaaaaaaaaaaaaaaaaaaaaaaaaaaaaaaaaaaaaaaaaaaaaaaaaaaaaaaaaaaaaaaaaaaaaaaaattcccgggcccccttcgaccttcaaggcccgctacggtggaggggaataaaaaaagcagccggatgggggaggagccccttggcccccccccccacggccttccccggaaagggcgggaaagggccggcgtcgccccccttcggggaggccccggggacgttgggtaaaacgggggggaagggcaagccagggggggggtccgggagcccggggttcggcccccaccggggggtgtaccggggccccctggccggggagcccccgggcttcctggggggggagttcccgggggacttcgggggggaccccggggggttggcgggggacccggaaaccttccccaaaaaccgggaggtgggggggttcccccccccctgggccttggtgggggggctcgggtgggtcttccccaagctggtcccccgaaacggggccaatttcggggaggccggggggttcaagggc

SEQ ID NO: 120880 - DNA, 1406 bp, Zea mays
  Clone ID: MRT4577_41724C.1
cggacgcgtgggcggacgcgtgggctgtaggtgggatttttgggagtttactgggaggatatgcattatccaatctcccaatacatgtaatatatattgttttctcagtcctcccattcttccaattagtttcctgcatgtttgttgaggattctccaaaagggttccacaacgccagtgatgaacataagtatgtagacaaccagagttctgttactgttttttctggaaaaggctctagtgagggcactagaaggcgaaagggaacttctaaaagtaacaacagcagtccacaggcaaagcgaactgagtctaatgaaaaacacaacgggtcaattaattcgttgccatgtttgtctctgaggtcagccttcttcagtctctgcacagcttttaagcagccaaatattctgcggcctatggcatggtttttcttttcaaatgttacaattccaaatatctccacagttatgttctattatcaaacagaggacctaaatttggaggcatcctttctagggactgcacgtgtgattgggtggttcagtctgatgcttggcacctacacctacaaccgctattttaaacagaagaagctcaggaatattcttgtgtttgctcatgttggtcttgccgtaattaccctactggacattgttttggtgtcacggttacatgttcagtatggaattgccgataagtacatggtgctgtggggttccgcgttggctgatgcaatcaaccagttcaagatgatgccgttcctgatcctgtcaggacagctttgcccacctggaatcgagggcacactgtttgctctcttcatgtcaatcaacaaccttggttcaacactaggctcattcctgggggctgctatggcatcagctttgaacctctccacagcacagtttgacaatcttgctctgggtttgggtgtacagatgatttgtactctcttgccgattgggttcctatctctgattccaaaggaagtcacagggctaacatcataggttgaggtacgggcctgatcatacttgttctattcctgccggaaggtaatggtctgtgctcgaacctcaaatttctgactcacgtaaagcacgcatacttacagctgtgtaccagagagagaggaatatacacatcataggaaggaaattcaagatagttggaaaatagacagttgtgttgacagtatatgtacaagctctgtaccaggacgagagaaaaatagagtgcaatagatctgtaggcaaagattaaaatcacttgatgttgacagatgttgatgttacttgacatgtgtagaaatgagaacaaacatgaaagtgacgttgctaatgaatgaatctgtgcatgtcttttgttttcaccgctattaaaaataattatggcgaattaat

SEQ ID NO: 120881 - DNA, 447 bp, Zea mays
  Clone ID: MRT4577_41725C.1
gggccgaccacacccttccaaaattcccttacttaagtttactttccatttttccgcccaccaccaaacccgggcgtccgtttaaatttaaaattgcctgggaaaccaaccctaccttttttttccaaacccctttcctttcctttaaacactcattaaactttgcttcatctccttttttttatttttccaataactactccaccccttccaatttcattaaccaacctatccttatttgttaacaaatttcttctccttctttcttatccattatccatttttattttcccatttttttttcctttcttgtattggcgtaccaaattttttttttatattatttttaaattacttattattattactattctccccttttttttattttttattttttcttatatatttacttcttctcctttctttccttctctattttattta

SEQ ID NO: 120882 - DNA, 402 bp, Zea mays
  Clone ID: MRT4577_41726C.1
aaaatatattcctcttcaccgctaaccgacctattctttaagtgttttttttaaatagtttacggggttttcccctcaaaaaacccccggcccaggggggtcccctaaatttgggggcacaaggaatggaaaaacccccaatccaggccaaaggctggttcaagcttttttttttttttccgagtccccgggtggcccattaaggcttgggccccgggggccacccggggatttcagaccggtccccggggggggtacaaatttcccctatggggagcagattaaaacctgggggaaacaagggtcatagctgttccctgggaaaaatggaaatcccttaacaattacaaaaaaaatccgagcggaaagaaaaaggggaaaccccgggggcgcctaaggggg

SEQ ID NO: 120883 - DNA, 248 bp, Zea mays
  unsure (1)..(248): unsure at all n locations
  Clone ID: MRT4577_41727C.1
gccggccgggtcgggcttgagaatcgggcggccanaaatttacaaaaaaaaaaaaaaaagaaagaaaaaaaaaaaaaaataagaggctgaggcggctgggaaggcgatctcctgtcattgaaaaacgaaaggttgagctggagcgattagtattcggagaaggaaaaaaaaaaaaggacccggggcctagggccgcgtccgatctagagatatccgccgcccccgcgggtgttcgatttcaagattat

SEQ ID NO: 120884 - DNA, 487 bp, Zea mays
  Clone ID: MRT4577_41728C.1
ggaaaaaccaaacccccccccaaacaagcccgggttatatttttgggggggggaaacggaaaacaaattttactggggggccatttattaaaaaggaccccaacaggggccgggcacccgggcaggcaaggggccacaaagctagacggcattactaggagaagaagcaagcatgccttattggccgggaaaaaaagcaaaggcttggttaaacaacctagctcgccagatttatccccaaaacaccccccctagctggggaagggcaaaactgccccgcccccacagtcatgactcaagagccggaaaagaaaacacagcaggagcgccccctggggggggggacccccaggggggggcaaaacaaaaacttggctagaaaaaacataagcccccgaaaaggggcgggggtccaaaacatcccggggccggggttaaaaaggggccctctttgggaaaacccaggctcgaaaaaaaaccaaccccg

SEQ ID NO: 120885 - DNA, 361 bp, Zea mays
  Clone ID: MRT4577_41729C.1
cacaagaaaaggggctcctcctactttatttggcccccttctattcaacatttcaacagtacattatgaaccttactgcctgctagaatctaacactccatgcaagcatgaaatcctaaaaggaaaatatgaacatcaacacaaatcataaacaatgcaatagggttcttaaagctccggccgcgccctgcctggaggctacactacactcttccgatgggagaaaaaggcgggtcaagcagaacagacggaggaggcgccttttctctactccggttgttattcttcttctgttcagctgggactgcctcgatcaggagcctaacgtcctcctcgaggagcaactggagcgagctggaat

SEQ ID NO: 120886 - DNA, 131 bp, Zea mays
  unsure (1)..(131): unsure at all n locations
  Clone ID: MRT4577_4172C.1
ccactctttcntctattcattacacttattcgttttctatagatacctataaagagaatctacggattcactcacctaccggtattgcatctattcaaaacactctttattcgctctccaatgcctactct

SEQ ID NO: 120887 - DNA, 311 bp, Zea mays
  Clone ID: MRT4577_41730C.1
ggttccgaatttctgggggcggccggcccgcttatggaattccccttccgaggggccaaccttaccccgctgtacccccgcctggtggattcctggcgcggcggccgcaaaggggttaatccgagggtgtcccaaacggtggatctagggcccaccaaaaacccaaattccttcgccattggagtgcacgggggggcccttgggctcttagacaagggcttggaagcccaaaaccctggggcgagtgaccccggggcctttgaccgggggaccaaaggccttccgaccccgctgggcctgaataacttacg

SEQ ID NO: 120888 - DNA, 165 bp, Zea mays
  Clone ID: MRT4577_41731C.1
ggggggggctccttttttagatccccgttgcatgccgacgtccttgctatgctatagggtctcctatattgaatccaactggcagtccattgccccgccttttactgggaaaaccactggggaaacccctgttattcccctgtttaatcatcttcctttccctcc

SEQ ID NO: 120889 - DNA, 280 bp, Zea mays
  Clone ID: MRT4577_41732C.1
aaacacaacggccggctaaaaaaacctaaaaaccacggcaggcatactctttacggctatccgggaccaccacacacataggccatgaggaggcgaaagaccctaacgggcatgcgtggaaggggacgctgccacaccacctgggggcctgggcacgtgaccccctgcgacgggaggctgagggccaaaaaccactgaacaatggcactgccttggaagctgcactcattactacagctagaactggttaaacctgaatttgtgataccctgtcctgctt

SEQ ID NO: 120890 - DNA, 1132 bp, Zea mays
  Clone ID: MRT4577_41733C.1
actttggctgcaaacctaaccacttgtgcattctctcaatacccccctggaagggaaggaaacatggtgcacacatggacttcactagtgttctgttcgtttgctttttgttcctgcgcgccgttaggaatttcgcgtctttctcgcatgcctctctgttcagacataaactgctgaaactttttttctttcgttctttcattggtttgaaaagagaggaactaactagggcgtgtggttgaaagcatacaggatttccgaaatggggaatgtctgaatttaaaaaaaaactgcatgtcttttttttttggggcagcagcaatcgcagaggaagatggtggtgtcgaagaagaagctgatcaaggtcggcccatggggcggcgccgggggacacccgtgggacgacggcggctactccgggatccgcagcatcaccatgtcctacgaccggttcatggagtccatcagcgtggagtacgacagggacggcatgcccgtcactggggagcggcacggaggagccgccgccagccacacgacccaggcacgtccgccgccaaaccaatcacccccgtcagtcacgatcagtgacacggctccttccgctgggtggtttctgaaccgtgcgcgcgtacgtacacagatcaagctgggctacccggacgagtacctgacaacggtgagcgggcactacgcgccgatcgcgcccggcggctcgccggtcatccgctcgctggcgttccggaccaaccagggggcgtacgggccgttcggcgtggcggagggcacgcccttcgagttcccggtggacggcggcgtcatcgtcggcttctgcgggaggagcgggtggcagctcgacgccgtcggcctctacgtcgcgccgctgcgcccggagaccgtgtacgacagggtgcacaagcttggcctcacggcttaccgcgcagtttggcagcggatcgggtcccagcagcagcagcaagaaccggtgaaactgctgaacggcaacgcgcagattactcacaagatgtaaccaactgccaggatgccacccatgactatctatattctgcagtccgaatgtatccagctagcgtatggatctaatgtacctgtacctcatcctgatttgaac

SEQ ID NO: 120891 - DNA, 222 bp, Zea mays
  Clone ID: MRT4577_41734C.1
ctacgctcacgccactcattcgtcgtgcctacgatatcctgtctccatggccgcaacgaggctcggccgtcttgatacgcatgaatgtgacactgctcaccaacttcatccattaccttctatactaaagatacttcaaactccttctggactgtaaccctatgcaaactaaatttcacaatatctgtaccaacacttgtacgagctgacaagttttgaaac

SEQ ID NO: 120892 - DNA, 528 bp, Zea mays
  Clone ID: MRT4577_41735C.1
tataaggaaagcgcacacgcccgcaggctccgatcctgtatagcgggcgccatccacgcgttcgatcatttcctaccagcactgagacacctagccatggtgaaccctgccgcctacttgaaacacgcagctgcttggatgaaacccacttgctctggctaacgtaggtgctaaccagccacaacaacagatgcatcagttgctgcctgcgctcaacaaactagccatggtgaaccctgccgcctacctacaacagcaacatctgcttgaatgtagccagctcgctgtgaccaatgcacctacatacctgcaacatcaatcgttgcaacagatactaccaactctgactcatatagatgtggcaaaccgtactgactacttgcaacagctgattacattcaaccaactgactatgacgaactctgctgcatacctacaacagcgacagcagttacttaatccactagcagtggctaacccatagggcgctgacttactacagtagcaacaattgctgccatacaacca

SEQ ID NO: 120893 - DNA, 279 bp, Zea mays
  Clone ID: MRT4577_41736C.1
agcagtggtaacaacgcagagtactctgtttttttatttttgttttcttattacctagccatatcaaagagagctacatcttttcttttaacattaccgatttgcctctgggtatatttggaagagatgttatgtgagatacctttggcatgacagtattgatacaattcttgctttcctgaataccgacccattatcacttctaacctttttgatgacgaaatcaaattgattgtgagccactgtagcaaatgacttgtatgttttaaacacattgga

SEQ ID NO: 120894 - DNA, 1030 bp, Zea mays
  Clone ID: MRT4577_41737C.1
tcgattcggtagcggcactcgccgtcgcgccgcccggtctggtcgggtcgggtctctggaaagtaatggccgaactcgccgttgcgcctgccggtcgagctttgacaccgacctcaccggcgggcatcggcggccctgccgctgtggatttcaggatttgcccggatgaatccacgcttgttcctcatcagatctgtaggtatgattcagcgagtggtgccattcagatattttgcccgtgcaatgggaccgtgattgatctccgcgcctcctgccgtcaccactccttttgggaacatggcatgccacctttagccaccacgcccacgagctcttcgcagctcccgtataaaaagctgcaacctttgcaggtctttgactccaaaggcggcctctttgtttcggcgctcgcccccctccatgttgggcatgatgcgttgcacttggtgcccgactcctctgttttctagctcctaattttttttgctgatgctactatagtactattagctaagcgcggagttggcgatgactgcgctcaagaatcgacctttggctcgggcaatcgatgcatggacgaagccacttgttttttttttctttggtcatgtttttgacatgcgaaactgcgaaggtggcagagtaggtggatctttctgtctatgttttggccctacttgagaggaagagacagtcgccaccgtgcaaagtcccaaaggcatccgacggtggcgcgtcgatcgttacgatgccagacaagcaccacggaacgagccacctcccccgcggccagcccgccatcgagcaggtcacgactgagattgaaagaaacgcgatctaatttttgtcttttcttttcctgtcccaagttccttaatacttgatacgtgagctctataacactagaggttttccattcggaaaaatatgttcgctaaagtcggtctctgattaaagtcggctgcttgacggctgcaactgtaatttatgtaatttattaaaacaaaaacactgtgttgaaaaaaaaaaa

SEQ ID NO: 120895 - DNA, 296 bp, Zea mays
  Clone ID: MRT4577_41738C.1
cgcgtccggaagtgaactggtgccgtgggccacattcatcaggacggatgagacctgctgtcgtgcgtatgcgagcgtcgataatcagggtgcttgggaatagagcgatatcaatccagctacgacgctacctttcatctttcctgttctgcttcggtccactattttgtcttccatgatcttacatcgtaggtcgttgcaggtggcgccaaagactttggtgtaatcgttgatctgtctggaactggtcctatcgtcggacgtacgagatttttggtgatccaaggtgaacctga

SEQ ID NO: 120896 - DNA, 211 bp, Zea mays
  unsure (1)..(211): unsure at all n locations
  Clone ID: MRT4577_41739C.1
gacacgagcacgnccgngacgacgccggagccggaggcgnacacggcggagacaagcgcaanggacaggcaccngncccaccngccgccaagcgcgaccgccagcgcaacaccaacagccaccacagcgccaacagcncccgcgacgccacgagcaaccacaccgacggacccaacccgcccgagacggggccgggcaccanggagacgga

SEQ ID NO: 120897 - DNA, 530 bp, Zea mays
  Clone ID: MRT4577_4173C.1
acgcgcgatacatcctatagggcgattgggaccctcgaggccggccgggccctatagctagctagatctcttctccattcgtttacctgaagcacaagaataaacgcagccgggcatgggcgaagctaagctcaacaacgtgaccgtcctgctggtggccctcctcctcctgagcagtggcgttcaggacgctgccgccatgccaggcacgttgaactacgacgcgattgtcgccgacgagccaaacggaaagaacaaggacctgtaccgccccgtcgccaacgccaataaatacacccgcgggtgcgagcccatagaacgctgcaggggcgcgcgctgatcaccaagcatatacatatagcacatcgatttcttattattgcatgcacgtttatataagtgctcattgtcttgctgttgtaagtgccagcacaagcatatatacggcgtttatatatactacaaaaaaaaaaaaaaaaaaaaaaaaaaaaaaaaaaaaaaaaaggaaaaaaaaaaaaaaaaaagcggcc

SEQ ID NO: 120898 - DNA, 143 bp, Zea mays
  Clone ID: MRT4577_41740C.1
gccgcccttttttttttttttatttaacataacatcggttccagaaacaaccatagcggaacagggtattgcagctccaatcccgcccttgtgtattgccctccacaataattagctttactacgaatagcgtgattattgat

SEQ ID NO: 120899 - DNA, 373 bp, Zea mays
  unsure (1)..(373): unsure at all n locations
  Clone ID: MRT4577_41741C.1
cggcccacaggcgaagggtaggggacctgtgtgctacgtgctgccacagtgcccagtctaggacactaggtccagtgnctatcgtaaaagaaacacgagcactggcgctgcagnnctgtagacttagtagtagtaggtgcgcaccgcnctcnatggatgccnagaaccggacctgcccgtcgtcgtcggtgtcgcgtagtacttgtttacgtatangccgtccngcatacgtacggacacgggcgccctacncgcgcgcacgcagccnagaccaaaaangaggtggcttgtcagtgtcaccctgcagttatatactgtaccactacactacacctatngtgctgataccgnaaaaanattaaataaaaggtgg

SEQ ID NO: 120900 - DNA, 652 bp, Zea mays
  unsure (1)..(652): unsure at all n locations
  Clone ID: MRT4577_41742C.1
ggggggggggggggggcctcttaacgcacncaagggaaccaatacatatcatataccgtaagaagccaattaccttgcataatggagtagacccggcatagccgtagaggtttcgcctatatattagagggcctagtggcgaattgcggttactgtggttactattgctcataggccaccttcaacgggcgacgtattctaaagctaggctcacctaagctggcaaagcctagtgctctttgggggcggcgatgctttgtttaatggtcgcgttagcagatccgatacttgctctggcgtctttaccgcaccgtgcctttacacaatgaccggtgctgtaaacttgccggggcaggcagttacaccttggtggttacacactacggtaactaatattatttccaactgagacatagtgcttgggctacacacatctttgcngctaagccatgtgccactgctagagtgagcacgatttaccatggctcgccagatagccgggggagttttacggccattcctggggcttaacttaaaattgcaaactgggctcggcaaggctcaagtcacaatagctggcagcttggcaaatttaaggagcaagcccggtactagtgcttgcgcataactttgactacggtaccccaatggg

SEQ ID NO: 120901 - DNA, 447 bp, Zea mays
  Clone ID: MRT4577_41743C.1
gggtggtttttttagtaagatggagacgagacgtacataacagaagggcggacaatgacacaaatggaaccgaagaaatagaaggcggggagaggttaataggaacagccgactgggaaagaggaatggaactagcctacaatagagggggagggggggcaaacatgaacgtaaaacatctcttttaagaccggaagttataagaagcagcagaatcggtttataaaagacctgctgaagaaagggatcgccctgcggagcacctggtggtaaatggcaggaagcgcagggacgatgaagggaccgggcgaacaaaggcagaggggaaccaacgcatggtgatggaagaaaattagggtgaagctaaggttgaacgcggggcagatgcgggggacggagagagggatggtggccaggagaaaaaggaagatggcaaacccgattggg

SEQ ID NO: 120902 - DNA, 327 bp, Zea mays
  Clone ID: MRT4577_41744C.1
ccgcgattccggcgccggcgccgggcatgagaggccgtagggcatgcctgtggtggtggccccgggcgcgggacgagtgagccggcggcggtaggactaggaacaggacctgtggctgaggctgaggcctgagaggagcagtcgtcaagtaggaggaggaggaggtcggggtgggtgatccgaggcccgaggcggccgtgccatgtctcgctgcttcccgtttccgccaccacgatatgagaagaccgtgcgccccgacgcccagctagcctcgcagcagcagcagcttgacaaggagaaacacatattataaagagaaggaggaag

SEQ ID NO: 120903 - DNA, 1335 bp, Zea mays
  Clone ID: MRT4577_41745C.1
ttgggtacctcgaggccggccggggtgttcggttttggttcttcaccatcttttggacaaacacagtttcttctggcagcactccctttggaaaactccttcaccctttggtgcaccagttcctgcatttggctcgcagacagcagcaccagcttttggacaacctcagtttgctaatcaagctggaggaaccagaataaaaccttattctcaaacaccagatgttgacagtgctactagtggtactcagcctgctgcaaaacttgattccatatcggcaatgcctgaatacaaagacaagagtcatgaagaattgaggtgggaagactaccagcgtggagataagggtggaccaaacacttctggaactcaagcagtggcacctagctttccgtcactaatacaacagaatgctccaaacccattttcgacaagcaatccattttcaacaaacaatccatttgctcctaagcctgctccaactattacttcaccattcaacacctcatttaacaatgcatcagttacaagttcgagcccattcacatcatcccctagtaccacaatgtttgggcaaacaggtgtttctacactttcagcaagtaattcgccatcattgtttggaaataccaatccaactcctgttacatcatcattatttgccacatcagtgacaaataatccaagtccattcggcactggctcattattccctaacactcagtcagccccattatttccctcagcatttgctcaaccgacatcaagtacaccgctttctcctctggcagcctatttggctcactccgggcagtctgtttagcagcgtcatcagcgtaaacaagaagaccggggaaccgtgccagggggcaaaagtggaaaggtacagggaaatgctggttaaaaaggcggaggagcagggcccaaagtttgtgtccttcgacgctgtcaagggagattggaagttcagggtgaagcacttcagcgcctacgggctttggtgaaatcctggggagttaagtagtttgtttgttctgatggagcaacgctttacgctcttgtcaaataccatgcttggatctgttgtgctgcttctgtacaatgttgctgctgttaaaatgcttgcaaattgcactgctctgctgctgaaaacaggagcagcagtagaaactaccgcaacaggagggcgtgctacctgctactgttatgtattattatactatattctaagtataataagacttagttttttaaaaaaaaaaaaaaaaaaaaaaaaaaaaaaaaaaaaaaaaaaaaacccacgcgtccgcccacgcgtccggttctagatcgcga

SEQ ID NO: 120904 - DNA, 1470 bp, Zea mays
  Clone ID: MRT4577_41746C.1
aaacatattatgatcagcctaatgtggagaatggtgtaggcaaagaagggaaaaaaccttgatggttcatggagactagcttatatttgatgccatgagactgctggattgttattttatatctgtagtctaagagcatggttttggcatagatcataattcagaaatgagtttttggcaatgattcctgttttttttcttttaacatggtctatcctgctgcatttttacccagaactcctaccctgtccagtatggtcatgcagcctgctcctgtttcaaatccatttgggatgcttccagcaatgcctcacatgtccattggaaatggtggatcttcaccttcagttcaatatggaatatcaagtttgccggttgtggagaagcttcttccaagtagatcattgtccatggcgtttcctaggcatttggcacagagaaggataaaactgctgccgagaaaatataatccaatatctgatggcaaggttccattctttgctgatgatgaagaatctccagcaacaccaaaggcagacgctttttttgtccctagagagaacccaaggaatctggtaattcgtccaattgagcagtggccttcgcggagagaaactgaccgacaattgactgtgaagaatgctactgatttgaacaaatatgaagatgcttccattgaaagtgagcgtggtaagtctgcctctgccatgtcaccaagcagcaggcctcctgcagtggaaaatgacaatcagcatgaggctagggccatggctcaacatgggaatgggaatgctacttcagtcgagaggttattgcctaagcttccacgtgcagattacttcacagagcctagtatagaggagcttgcggccaaagaacgtgcggaggcaggctactgcggtcgagtgagggactttgttgtggggcgacatggctacggtagcatcaagtttcttggggagacggacgtgaggtgcctggatctggagtcaatagtggagtttaacaaccgggaggtggttgtttacaaggacgacagcaagaagccccctgtgggtgaggggctgaacaaggctgcggaggtgactctactgaacatcaagtgcgtaaataagaagactggggaggagtactgtgaggggacaagggtggagaggtacagggagatgctgatgaagaaggcggaggagcagggcgcggagtttgtgtcctttgatgctgccaagggagagtggaagttcagggtgaagcacttcagcgcctatgggctcccttgtagttaagtattctgtttgttttgatggagcagtgataactaagttgcacgctttacgctcttgtcaaatagtaccatgcttgattctgttgtgctgctttgtacaatgttgctgctgttaaaatgcttgcaaattgccctgcaaaaaaaaaaagaacgtattctaattataagacgttttagtttttttaacc

SEQ ID NO: 120905 - DNA, 520 bp, Zea mays
  Clone ID: MRT4577_41747C.1
ttttcttatttctggggaagcttcttatttctgggaacccacaaaacgtttcataaaatttattattgaaatataactcataaaaaactataagagggcaccaccaatgatggggtggtggtagaacgctgatgggtttggcaaatcaagcaggttgaagggctgtaatagtagcagctgtaagagggtgccatgggttaggcgcatcgtgctggaagaacggcaacaactggggctgtataaagaaggttgcatggtttacaccagctagctggctgaatggtagtagttgttgctgctgtaaataagcaggagagttcaatgctgccagttggttgaatggaagaaattgctgggggttagcagcaggaatctggctgaatggaacaagtggttgttggaattataatgattatttactgcagctagatcgactactggtaaaaactgttgctggtgagagccgtgataaggtttggtagcacaacagttgtagttgttgtaccatgatgctgtgcgt

SEQ ID NO: 120906 - DNA, 3484 bp, Zea mays
  Clone ID: MRT4577_41748C.1
caaaagaagagctgtgacccgggacgcacctctactaaagaacccaatgggtttagacctattttagacaggataggcttaccctacaggtggtgcaccggctttatggtgtggcagcctatttcgatcaactaatcctggcaatacatttaccagctgcgctcctttacttgtttcaacaccaacatttacacatctgtccctgttaagagttagaacatgtaatccttccaacccaagatagagggagaggcaagagtcgcatcgcagacccagaccacgccgccgccacctccgccgccacctccgccggtgatcgagtcgcgtcggcgctaccttcaagctagaagacaataagcatcggcagacatgttcggctccaccaacccatttgggcagtcgtccacattctcattaggcaatacttagtttggaaccccatatgggggtggaccctcctccacttttacccacaactcttatgctccacaatcacgtggtggagccaccccgggtttcgaggcagggggcaagagtggagaggtacagggagatgctggtgaagaaggcggaggagcagggcgcagagtttgtgtccttcgacgctgtcaagggagagtggaagttcagggtgaagcacttcagcgcctacgggctttggtgaaatcctggggagttaagtagtttgtttgttctgatggaacaacgctttacgctcttgtcaattaccatgcttggatctgttgtgctgcttctgtacaatgttgctgctgttaaaatgcttgcaaattgcactgctctgctgctgaaaacaggagcagcagtagaaactaccgcaacaggagggcgtgctacctgctactgttatgtattattattattatactatattctaagtataataagacttagttttttcaactgcaccagccttcggtgccacgactagcccagcatttggttcaacttcaacatctttatttggtgcttctagcgccccaatgtttggttcttcagcctttggcacatctgctactggttttggaacttcagggactacagcatttggtgtgagtagtactactccgggttttggatcatcaagcacaccttcatttggcacatcagctagtgcgttcagttttggttcgtcaccatcttttggacaaacagcagtttcctctggtagcactccctttggaacaactccctcaccttttggtgcaccagctcctgcgtttggctcacagacagcagcaccaacttttggacaaccacaatttgctaatcaagctggaggaaccagaataaaaccttattctcaaacaccagatgttgacagtgctactagtggtactcagcctgctgcaaaacttgattccatatcagcaatgcctgagtacaaagagaagagtcatgaagaattgaggtgggaagactaccagcgtggagacaagggtggaccgaacacttctggaactcaaacattggcacctagctttcgatctcgaatacaacataacacttttgcttcgacaagtaatccattctcaacgaacccattttcaacaaacaacccgtttgctcctaagcccactacaactactagttcaccattcaacacctcatttaacaatgcatcagttgcaagttcgagtctattcacatcatcccctggtaccacaatgtttgggcaaccaggtgtttctacacttccagctccagcaagtaattcaccatcattgtttggaaatatcaatcctgctcctgctacatcatcaatatttgccacgtcagtgacgaataatccaagtccattcggcactggcacatcattggctaacactcaatcagccccactattttcctcagcatttgctcaaccgacatcaagtacaccggctttctcctctgggagcctatttggctcaactaatcctggcagtctgtttaccagcagcggtccttcacttttttcaacaccaacatttcaaccatctgcccctgctcagagttcgaacatgttctccttccaacccccaattcaaccagcttctaccggtggactccctttttttcccaacacaaatcaggccttgacgggacagccaacttctagcctgtccagtatggtcatgcagcctgctcttgtttcaaatccatttgggatgcttccagcaatgcctcagatgtccatcgggaatggtggatcttcaccttcagttcaatatggaatatcaagtttgccggttgcggagaagcctcttccaagtagatcattgtccatggcggttcctaggcatttgtcacagagaaggataaaactgctgccaagaaaatataatccaatatctgatggcaaggttccattctttgctgatgatgaagaatctccagcaacaccaaaggcagatgcttttttcatccctagagagaacccaaggaacctggtaattcgtccaattgagcagtggtcttcacggagagaaactggccggcaatatactgcaaagaatgttactgattcgaacaaatatgaagatgcttccattgaaagtgagcgtggtaagtctgccatgtcaccaagcagcaggccacctgcagtggaaaatgacaaacagcatgaggccagggccatggctcaacatgcgaatggaaatgctacttcagttgagaggctgttgcctaagcttccacgtgcagattacttcacagagcctagtatagaggagcttgcggccaaagaacgtgcggagccaggctactgcggtcgagtgagggacttcgttgtgggtcgacatgactacggcagcatcaaatttttcggggagacggacgtgaggtgcctggatctggagtcaattgtggagtttaacgaccgggaggttattgtgtacaaggacgatagcaagaagccccctgtgggcgaggggctgaacaaggctgcagaggtgactctactgaacatcaagtgcgtaaacaagaagaccggggagccgtgccagggggcaagagtggagaggtacagggagatgctggtgaagaaggcggaggagcagggcgcagagtttgtgtccttcgacgctgtcaagggagattggaagttcagggtgaagcacttcagcgcctacgggctttggtgaaatcctggggagttaagtagtttgtttgttctgatggagcaacgctttacgctcttgtcaaataccatgcttggatctgttgtgctgcttctgtacaatgttgctgctgttaaaatgcttgcaaattgcactgctctgctgctgaaaacaggagcagcagtagaaactaccgcaacaggagggcgtgctacctgctactgttatgtattattatactatattctaagtataataagacttagttttttaaatacatgaatattactttatgcacttagatatatgctatgtatggagagagaataattatgtataatagtttataaaatgatcgtaacttt

SEQ ID NO: 120907 - DNA, 726 bp, Zea mays
  Clone ID: MRT4577_41749C.1
cacacacacacacacacacagagcctaagcccactcttctcagagcagagcctctcccttcaccttcgtcttccttcctctcggcagttcgacctttgcatggcagcagtggctagctccaaggggcgggtgatcgctgggagcctcgtcgcgcgcgtcctcgccggcaaggccaacgcctccccgaggagggcggtgcacgcgtcggcctacgacaagaacgtggacgagcaggtgcgcccggccttcgtgccggacgatgtgatcggcggcgccgggagcccagacaagtactggggccctcacccgaccaccggcgtcttcggccccgccgcggtcgaccccaagctggccgccagcctcgcgccggcgagcgccgctgcgaatggtggcgcctccgtgctggaccagaaggtgtggttccgcccgctcgaggacgtcgagaagccccccgtcgcctgatcatcgccgacggcgacgatagcccagctcgacatctctatcactccgcttagctgggctcgacttcctacttataattacatataatctgtagtggtgtgctcgtgctatagtacagacatggcaggcaccagaaccagtagtagtaacgcggtgttgctgcccggaataagagcgagcagaagatgtgtgatgatgatgacagtgatgttggtggctgtgatgtactcccgtcttaaaccagtgctattgcaagtgtttggt

SEQ ID NO: 120908 - DNA, 584 bp, Zea mays
  Clone ID: MRT4577_4174C.1
acgcgcgaacactcctatgggcgattgggtctctcgaggccggccgggcactccctatagctagctagatctcttctccattcgtttacctgaagcacaagaataaacgcagccgggcatgggcgaagctaagctcaacaacgtgaccgtcctgctggtggccctcctcctcctgagcagtggcgttcaggacgctgccgccatgccaggcacgttgaactacgacgcgattgtcgccgacgagccaaacggaaagaacaaggacctgtaccgccccgtcgccaacgccaataaatacacccgcgggtgcgagcccatagaacgctgcaggggcgcgcgctgatcaccaagcatatacatatagcacatcgatttcttattattgcatgcacgtttatataagtgctcattgtcttgctgttgtaagtgccagcacaagcatatatacggcgtttatatatactacatactccgatcgttcatgcaaaaaaaaaaaaaaaaaaaaaaaaaaaaaaaaaaaaaaaaaaaaaaaaaaaaaaaaaaaagaaaaagaagagacccttgaccaaaagaaaaaaagaaaa

SEQ ID NO: 120909 - DNA, 506 bp, Zea mays
  Clone ID: MRT4577_41750C.1
cggggttactctctctctctctctctttcggatggcgcgccgtacctcaggaagatcgacctcaagacttacaagaactacaaggacctgtcgaccgcgcttgagaagatgttcagtggcttcagtactggtgagatgtctcggggttactctctctctctctctctttcggatggcgcgtcagtgagtaattatgtttcgttttgatgtggatggtgttagaagtacatcaagaagcctttaaaaagcagcatactcctacttgattcctaggataagcaatagcttgaacttaccccgttatattttgagtaattgtaagattacaaacaatctggcaccccttgttttgttaatttttgggtgaactttttattcctcccaaaacaaataccctggtgattgttcagttattgcatccgtatcaagtctctcttagaaagatgttgtttcctgtaaggcaaaaaaaaaaaaagaagaaaaaaaaataaaaactcggggggccc

SEQ ID NO: 120910 - DNA, 184 bp, Zea mays
  unsure (1)..(184): unsure at all n locations
  Clone ID: MRT4577_41751C.1
cgatcgcatcccaggnacgtaacagacgacgatggcgtcgtctgcctggttgctccagcttccacgccttcgctccagcttctccctcccgtcccgaccccagcccccgctacacctgcgtctccgcggcccccccaaccgtcgccgtggcgtctcactcactgcttactgcgccgcgtcccca

SEQ ID NO: 120911 - DNA, 666 bp, Zea mays
  Clone ID: MRT4577_41752C.1
gccggccgggccggatattcttctgctactgttgcttgtaccgtattgctgaagcaattgctaagaacatgtacgtctccgcctatgcgctgacggtctggactacgactgccatggcgcagccgctggaccttgtccgccatgttgaggccgattagcccggtgacggcgagaaaccccctgcatgagcgtgaacctggagaggaatggcaggatcacctgcatgacgtttccccgggactgcctgcggagggacctgagcgacatcgactgcgggctcctcggttggatggggccgtacagcgtcccggccatcaacggcaaccgcctcgcggggctcttcttctccagcatcatacaggagctggtccacttccccacgcccccgcccgttatctcccagttctggtgtgggatactgacggggcacctgtgactgttcatcgtgctcaccttccttcagatcggattcgagggcaggaccaaggactacttcaagaagcgaaccggctaagatcctatccatcatccctgatgctgcgctgcgcggcattacgtgcgtgctcgccgccatcgaacctttgctgaatagggctcctttttcgccgaatgcaatgtatgatgctacttctgagcttcaatgaaaaatctatgccgatccggccc

SEQ ID NO: 120912 - DNA, 829 bp, Zea mays
  Clone ID: MRT4577_41753C.1
tccggagctttggcttcttttgcgtgtattcttgaccctaattgacacaagtaaccataaagcccaaaaccttcttcttcgtcctttccatccatggagacgaaaccggagccgcaccgccagaaccacgtccgccacgaggaagcccaggagggggagcaggcagcagtcatggaacacggcgctctctcgctgcagcgcggagtcaccaacttgttcggcaggcggcacgacgaggagcaggcggtcggccgccggggcgagatcagggaggtggacttcttctcgagggtctccagagcccgagaccaggacagcggcggcgggcgcggggtgcccggaggcggacgtgacgacgtcaacatcgagctcgacctgctgaccaccaccacagccacgacctgcgccggcgacgaagtgatgcagaccaaaaatcaaaagatagaggcttcagctgtggaagcggagctcaggcgggtagtggaggagaaccggcggctgcgcggcatactggaggagctcacccggagctatggcgcgctgtaccaacagcttctcctggtcacgcaggggcagcaccaccacccacatcgactgcatcctgccgatctcatgatcagtaggccatcactggctcatacccacctgagcaccaccgcggcctcgcagtacagcgcgtccactcggctgctgctggaggcgcgcgcgtcgtcctccgccacggcgcagccgcgtgccgtcgaagacgaggttgtcagcggcgccggcggcggagccggggtcgtcgaggcgtcgccttcgctgagcaatggaggaaaacacgacacga

SEQ ID NO: 120913 - DNA, 302 bp, Zea mays
  unsure (1)..(302): unsure at all n locations
  Clone ID: MRT4577_41754C.1
aaccacaccaancctgtcttgttcacaatttatgacccgaactgcaccaaatgtacagcggtacattgtcaccatcttcaactctctactcctttaagccggaacaacgcagaccctccgatcctatccctcaaacccgcgtactacttctcacttcccgccattactcccacccgacccaaccctgcttgagcctgccatatcaaccccaatgttactgtacctgcactcactacacatctgacccaaaaactactcttcattgctcataacaatcccacttccgatcacacacctagttt

SEQ ID NO: 120914 - DNA, 484 bp, Zea mays
  Clone ID: MRT4577_41755C.1
tatacaatcagatatgagagagcatagccgatcatcgaaggccggatagaacgaagtgtccgcggcgatggcggccatactgctggttctgcaagtcatgggagctccaccgacgctcatggccgcccgatcgccccgcggagacgtgccggatgtctccctcgccacgacgcccaaggctgagcgatgcatgtcgcgccacagctatcgctacacgggggcagcacatgcaaagacgatccctgcttcgctcctgcttgctcctgcaactttatcgagcgcctctgatacgacatattgactcctggcggttgaaccgacgccgttccgcacagccactactctcacatgcatgaggcgcgcaacctctacgactctggctctcgagaggttctgccgaagcggtggatggtgcaaagcatccatggatgctttacggatatgcgtattaatcaggcggaccaggtaaccgtacaaaaaggat

SEQ ID NO: 120915 - DNA, 118 bp, Zea mays
  Clone ID: MRT4577_41756C.1
cgttgatgcaccaatccgtgttgatttcttatcagtgacgctggtcaacctgaagaccagaaagcaccggtctgttgcctggtttgatgagactggcaagcgattctttccatctctg

SEQ ID NO: 120916 - DNA, 626 bp, Zea mays
  Clone ID: MRT4577_41757C.1
cagagatctgggggggggggggggggggtaaactttaagcgggcggtgtgtgagcgcgcccccccacgacgggcaccgcgtaggctgtgacgccagtcaaatgccattcatgtcccggtctacgaagagtgtagcgccaccccggccccgaaacgtcatgtcctagcggcacccgacctcgacggaaccacagtttgggcgggggaagactgacgacactcctccatcctagaagtgtgcgattactagtttctcacacacacacacacacaacagatgtacttgactgcccctggaacgaacttactaggggttacaatacctatgagttcctattgcttgtacccggcccaatgaagagtgataggaggactgttgctctaggtgaactcgatgagggtccgggttaagggcgggtagaaagaggactgggcctatagtattgacaactaaattcagaattgtgaacattggacttaccactacatcgaggatagttacaagatccgggagatctaagatagtaggggtattaagggtcgctatcggtagtccaagaaggccggtagattgatggggttaccctagagtaccctaaggacgctgggcgaaattccggagtctaa

SEQ ID NO: 120917 - DNA, 283 bp, Zea mays
  unsure (1)..(283): unsure at all n locations
  Clone ID: MRT4577_41758C.1
ggctggctttgctggagatgatgctccccgtgctgttttcccaagtatagttggtcgtccacgccacactggtgtcatggttgggatgggacagaaggatgcttatgttggtgatgaggcccaatccaagaggggtatcctgactttgaagtatcccatcgatcatggaatcgtaaccactgggntgacctggaaaagntctggcatcacacnttctataaagagcttcgtgtancccagangagcatcnagttcttnttagaggggcncntttaaacnccna

SEQ ID NO: 120918 - DNA, 271 bp, Zea mays
  Clone ID: MRT4577_41759C.1
gtgtaagaccgatcttcccataccaatcatcttcctcgcccactcaatgcatccatcctcgattgaactagggcttcgcttcgctattgcctctcctggcttgtgtagtgccctctggggactgctctagttcgccagatcgtagccagatcagtcaagatcaatgctaaggattgtgggtgcgcagtggacttatgtgcattcggaagaaccaacctatactaacatgtacgaccgaaggacagactcctttccgaatggtctatggggc

SEQ ID NO: 120919 - DNA, 154 bp, Zea mays
  Clone ID: MRT4577_4175C.1
tcgaggcggcgggatgtctctctcccgctatctggcactatgagcagtgttctgttctatcagatacggaggtggacgcggtagctactgatgtgtaggtgcctgtaccgtggccgaataaatggctaggcgctcatgatgatggaggccacca

SEQ ID NO: 120920 - DNA, 387 bp, Zea mays
  Clone ID: MRT4577_41760C.1
atttcggttcgttctaatcgaatcaaagctatatttggattcgccataattgttgagttccatggaattgacgtgtgatttggctgtaggattttatgaagtagttgggctccatccatgggttccgagtgatttgcagagtttttttttctcttgtcatgggttcgaggggaagatctatgccttttcagtggtttgatttgtccacggttgtcagaaattgataaatcaatcgggtttcggattatgtggaaatggaaaataggaagatgtagccccatgcttgtatccccctggttgacaatttttttttcatggttttattcctgtacaggtcatgaaaacttgcataactccggtgacgaagcactcctgttgaagagaaaa

SEQ ID NO: 120921 - DNA, 143 bp, Zea mays
  Clone ID: MRT4577_41761C.1
actttcgtgaggtctacaagacgctgcgcgacctttcgccctacccggccagcttcatgctggtgcagctcaccgactcctactccttcattctcttcgacaagtccaccaactccttgctagtcgcatacgaccccgagggc

SEQ ID NO: 120922 - DNA, 318 bp, Zea mays
  Clone ID: MRT4577_41762C.1
ttcggtgccctgggatctacttaggaagttgatatctcaggtgccaattcgctcctggaagggtatatgaaactaagcaacccctgcctttcaagagcgcagaacattggtggggccttgaggaaaaacatggggtattcttaggagctatccacaacagttaccatactagtcgggttgtaatcagggacatggttatcaggaatgcgagggaagggctgcaaatctgcaatgattgatggaacaatatttgtgggccaaagttatcaacctatgctaaaatacaccaaaaatcaggtacaagagagaaacctgtac

SEQ ID NO: 120923 - DNA, 424 bp, Zea mays
  Clone ID: MRT4577_41763C.1
actagtcggcggccgcccttcttttttttttttttttacatattatgttttttctttcttcctcctacttttttggggaggcattacataatcccaaaattgatctcctcttatgcataacaaacacacctccccctttttaaaaaacgaccaaattctaataactgagcatactctagctatctaaaaacctccatcccaacaaaacttctttgttttttttaaaaaaaagaaaataccgccttaattacgccccactagtttttataacccccccactttttgcccccctggcacaaaaaaaaaaatccctccttaaaaaaaaaaaaaaaagccccgccgacgtccctggacaatccacatcattaccaagaggtgatcccaaactccacaaacttctgggcgaaccccctcaccgggtttt

SEQ ID NO: 120924 - DNA, 503 bp, Zea mays
  unsure (1)..(503): unsure at all n locations
  Clone ID: MRT4577_41764C.1
aattcggcacgaggctaaaatagaattgttttcaccattatatcaaatatacaatgacttctcctcaactattaaattgtgctttctatatttatccatatttcctaaagggtctacaatagataaggaaaaactgatccaacagtggattgcactcgagattattggatcaaaacatgactccttgcctccttatgtgaatggagagatgtgcatccaggactttttgtcaatatattttctccaagttcgagatacacactcagtttatggaatggataacagagtagttcctacaacattctacattcataactttgtccatgaatttgcaagacatgttgcttgtgatgatattataattttcgatggtaccaaaatgcaaaagggctgtgcaaaaagacaaaccttccaatatgcactcttgacatgttnaccggtgcagtcaacattttcccactcaatgctgaccaagacaaaggcattgcatatcatgaactctg

SEQ ID NO: 120925 - DNA, 299 bp, Zea mays
  Clone ID: MRT4577_41765C.1
caacaaaaggtccggtccggggcaatccaatcttctgcccccgcccggggaagggggaccctttccgtccaagccaaaaagcgtttttctcgctgcacatgtcacggctccaaaattttccccgcaacaaaggcggggcccggggccttccccagcgcgattccggctcgaaggacatccgtacccataacacacataccccccccccccgactacgacgccccacagggttccccgtggctgaccaaagacccaagcaaatcccgccggccccccgagtaggggtttctcacccggtt

SEQ ID NO: 120926 - DNA, 1977 bp, Zea mays
  Clone ID: MRT4577_41766C.1
gccccgccccgccatggaggacttcgcgcgcgcggtggaggacggactcaagctctcgaagaggctcgtgctcccgggaggggtgccgccgccgcgcccgccggcggggatggagcgcaccgtgtcggccgcctcggcgtcgggtcccgacccgcggctgctccctaccgcgccgatggcctacgcgctcgtcaccgacccggccgccgtcgacacccccgacgtgcccagctaccagccctacgtctacggcgacctcgacccgcccgcgctcatcccgctgcagatgaaggaggtcgacctggccgtcgactgcgcgctcgacgccgcgcacgtcaccctgcgcgcgcgctggtggctgcactgcatcacgcgaagccgcgactccgacgtgcgcctcgtcgtgcccttgggcgagcaggcgctgaggttactgttggaagaagatcatataatacccaagtaatcgaagtagaagaccacactttggagaaacatgcaaaaattgagagtggtggccttttgcagccacatctgtttttcttgacaatacctcaggttgagggaggagcagatatttgtgctacatttcaatggtctcagaagttactttatgatagcgggcgtttctctgttgacatacctttccgttttccatactttgtgaatccattaccaaaagtgttcatgaagaaggaaaaaattcagttgactgtgcacagtggtttcagtaaagagattttgctgcaaggaacaagccacccgttgaaggaaaagagtaggcaaggagataaattgtttttccatcatgaagccattgttgagaattggtcgatcaaagatttcaatttttcatacaatgtttactcgggtgatttgtctggtggtgtgcttgtgcaaccagcaacattatgtgactatgatgatagagatatgttctgcatttttcttctacctggaagtggcaacagaaaggccttacaattggagtttgctatgaaagatttgggtgacctacatcacttcctggggatgcaagttcaacggcgagatggcggcctctttctctcgcaacgtcaatatatgctggatattctggatcgggctggtatggcagattgcaagccttgttctacgcctgtcgacacaaacccaaaggtttctgcaactactgatttgtcttcacatgcatgatcctcgcgagcctcaccttgctgctttgaagcgcattcttcgttatgttcgtggcactctgcatttgggtcttcaatgactgtgtctcgctccagtgctgaagccgagtaccgggccgtcgccaacactgttgctgaatccacctggctgcgccagcttctggccgagcttcgtcacccgttacgtcgtgccacgttggtctattgtgacaacatcagtgcagtctatatgtcttcaaacctggtccagcatcagcgcaccaagcacattgagattgatttgcactttgttcgggatcgggtggctctcggcgatgtccgcgttctccatgtgcctactacctcccagtatgcagacatcttcaccaaggggcttccctctacagtcttcacagagttcagatccagcctgaacgtctgcggtaccgacgatcagactgcgggggcgtgttagctgatatatcagacttgtgtctcctaccatataggcgcaggataccctaccatacatgtgcaggcatccttgccttactagcactgcgcatataggaagctacagccgcatataggaagatatggattcaatcctcccatttaggggcagtgattgtttccttccattccaggagatctcagggtactgtttctataaacctgagatctcccacctctctgtctctctatatatatgtgcgcctgtactactctattaatcaatcaatatagacagcaattatcttgctatcactaaaaaataaaagtaaattataaaaaaaaaaagaag

SEQ ID NO: 120927 - DNA, 862 bp, Zea mays
  Clone ID: MRT4577_41767C.1
gtgttagactgccaagtcgaagacattctcaagtcatgggcagcgtaccttactatatcatgtgggcaacactgtttttggagagcaaatgaactccatcacagtcatgctgaagaagaagtacaagaaatacctgcaagcggggggggacaagcttgccagcaacacacaagctaatcggaatacgagactcaagcgaattcttgaagaaacaagagaggctgatggtgaaagtgatatacgagataggatgcaggctgtccgcctccagctctcggattcaattcacaatctgcatgaggtcttctccagcagaatatttgttgctatttgccgaggtttctgggatcggttaggccagattgtgttgagatttcttgagagcagaaaggagaacaggatttggtaccgaggatctgactatgctctagggatccttgacgatgtctttgcatcggagatgcaaaagctgctgggcagcgctctgcaggacaaggacctggatccaccgcagtcagtgattgacgcccgctccatcctctgctagggcgtgtggcaacagttttctctacagattgcttcagcaaaaggccggcgttggtttagtttttgttttatatatattccttggtgtgcagaatatgtacagatggagacaaccgattattcctgttcatagtgttttgctgaattgttcaaataaatagtggttaaaaaaactgtagcccgtaaacaggttagagaacacaatctgtacttgattgtgtactttctacctcagttcttgccttccccatctaattccatccaaatattgtaccctgaattgagtgaaccttgatacaactgattcttgttggct

SEQ ID NO: 120928 - DNA, 568 bp, Zea mays
  Clone ID: MRT4577_41768C.1
cccacccttccggttattttttttttttttccacttattttttttttttttttttttttttttttaaaaccaaccttgaaaaaaacgggggggttgatttaacccatcctcgtttgtttttttataaacccccccttttttttctttcgtacaacaaattttttggggaaaattttaaccggttttctgccaaactgttatttgccccacccggggggggtttaacccctttgcaattcacaaatttttttcggggtttctaggattttgaaagtgtaaaacacaaaaggtttaacccgctggaggacttttaagggggcccccttcaaagactttgacgggtttgttttccccctcgggtgataattttttggacctatttttttttacccggaaaatggtcttccccacaattgtttgggttccaaacagcttcccccaaaaaaaaacccattgccttgatggatttgaacttatccaccgaaagggggtgatccttttttggaggcaaaacaaatttcccccttttttttcccgctacacggatcccttgaccattttggcccct

SEQ ID NO: 120929 - DNA, 577 bp, Zea mays
  Clone ID: MRT4577_41769C.1
actcctatagggcgattgggtttctcgaggccggccgtcatcctccaggttccccccacttctatggaacctgagttgccaccctcgcatcaacgtgggcatcgctgttacctgcagtgcgatcgtgatcctgtcacaactacacaaggcagacgagacggactcataaagctgtcctactgttgtgtctcctcctcgacctaactcacatgaaaagcatcgatgtcactgtgcgatttcccatgcccatgcctgccttgatcaatgtgaaatacagtgaaacagcacgagaagggaaagagaaggataacgaatagaaaagtcttccatgcacatagatcactgactctatcgcacacgctccagctcgagggcttctgcttctacagtcactcatgcgccgaggtacgcatgtacgcagaaatttcccgatgacgcagtgaaagaacatcggggccatgcgccagtgcttctgcaagaacccttgatagttcatcgtgctggctaattgccgtaggctgcttcctcctgatgattatcagaaactcatggctacaagaaacagactacttttgcc

SEQ ID NO: 120930 - DNA, 581 bp, Zea mays
  Clone ID: MRT4577_4176C.1
gccccctctcgagttttttttttttttttttttttttttttttttttttttttttttttttttttttttttttttttttttttttttttttttcggggacccaaaatttttaaaccgggttccccaaaaacctttaatttttccgggggttaaaatttcccccccccccgtaaaaaggggcctctttttggctcctttccttaagaaaaaaaaccgggccccccggggttggattggcacccccccaccggggccacttttggaaggacttttccacccccggaaaaaaaaaactccgtggtcctaaacccaaaaaaaccccccccggttttttcccccctggaattttaacccttgggtttttttaattaattttcaacctccctgggaaagcccggatttttttactggggggcccggttgttaaagggaccccccggtttttgcccaaaaaacacccccccgggtggcccccaaaacccctggggccaaaaaggttttcccttcccccgccccagaataattttcttccccttccttttgccccaccacaaaaaagcggggccagcccccccggaaaa

SEQ ID NO: 120931 - DNA, 169 bp, Zea mays
  Clone ID: MRT4577_41770C.1
cgccttaagactgttctgtcacacacgtggcagtgtgtctctctctctgctattacacggcgcatagcgagaacactctgctcgttgtgctacaaatgaagtgtttctttaccaatttcgtgcagccacttagtgtcaaaatattgtctcttgatttttaatctttggg

SEQ ID NO: 120932 - DNA, 657 bp, Zea mays
  unsure (1)..(657): unsure at all n locations
  Clone ID: MRT4577_41771C.1
tgtaattcggcacgagggataggtggatgggggatcctttcantaaccctatcgcgaaaaaactatatgacgaatggctggggcaacctggttcagagaatgcaaagaagtatttgcacacagaatatcacccagtggtgaagagtgtggcctcacagttacagaactggtgatagaggtttcttgttgcactgggaattcctatgttcctcaagagccaagaggaacctgcaaaccgagcaaacatggcgacctgtccatgctaagcaaatatggatcacacaagaatttaacttactcaagtttttttggcattatggcgaagaagttttgttaacatataggttttcagctgctttctagttaaatgttgtgccagggaaacaacagctaaatcgcaatgtgtaaaatgaacgaagtaatgtgtaaaataaacaacagctaaacatggcgaccttttcattgtctggtacacgccctttgccacattttttttttgggtaaggatagctcgttggttgcccgtatatgttttttagatgctcgggcatagtagagaagggaacgaaaaacatactcagtcccggtatattttagggattttaagacagataaaaatgacaacacaagagatgcacgtgcttttacttttttcnc

SEQ ID NO: 120933 - DNA, 201 bp, Zea mays
  unsure (1)..(201): unsure at all n locations
  Clone ID: MRT4577_41772C.1
aggatattcaccttgatatcaatataagattatataaannacccggccctgtgganctatattgtggttgttgtaaaagacctgctgtaaccttatcaatgtacaacatccatgaatcaattacaccttatgctaaaacctccatggatatagctctttcaaaaaaatctgatattcatactcagcaccaataatacaatc

SEQ ID NO: 120934 - DNA, 362 bp, Zea mays
  Clone ID: MRT4577_41773C.1
gaatatagtccccctcctctctctctcacacacctgttcttcgatctcggcctaactagctagctagccagcaagctatagcttaactcggctagcccggtgggtcgcccgtccggtaggcaacccccgttgccatcccaaaatggcaaattccggggaggggccgccggtgtgccgcattcccgaaaaagccccactgcaccttgccaagcttgcgctctaatttgggtacccgggctttcacgtggggtcccgggtggcgctcaacatgggcataagaaaggtcgtgtttcccgtgtaccgcaacatcatagcgctctggcttctcgtgccctttgcctactttttagagaagaaagaca

SEQ ID NO: 120935 - DNA, 493 bp, Zea mays
  Clone ID: MRT4577_41774C.1
ggcagaacaaaatgggggcccaccagaaaaaaagaaccggttggaacgggggcaggggaaaaaaccaggggcaataacaaaaaagggaaacaacggccaaaaggaaattcaaaaatgggggggggaaaaaaaaaaaaaaaaggggctaaaaaaaagcaaaagggtacaaaaaggtcaaacagctcactctgaaaaacccaaagggtataaaaaggacccaaaaaggggggggtaacaccaaatacaaataaccggatggaaaaaaattaaaacaacgggccccaaaactttctgaaaaaaaaaggaaaaaagccaccatgggcgaaaaaagaaagccccacccaaagggcaaaactgagggggcaaggaaacaaattcccaaaaaaagggggaacgggaaaaattgggccaggcttaaaccaacccaaaatggggggaagggggaccgggtaacgctcaaggccggttaggcccaagggggctgaaacccccc

SEQ ID NO: 120936 - DNA, 153 bp, Zea mays
  Clone ID: MRT4577_41775C.1
ttaacttgagcaccactcgggtggggttttttttggggtgtgatggagactcatccaataatgaccaaggggggagacagcccctcgggggccctaatgtttccgattctcgcgattcatgccacagggggagaacgtatgagcccatagcaa

SEQ ID NO: 120937 - DNA, 393 bp, Zea mays
  Clone ID: MRT4577_41776C.1
gactgaacagcaactattttgctttttataatatgcggacccactgactatatacaatgaacttattacgggtccaacgccacttctaatgcatattcagcgtgtgacgccgttgcatatattgatgtggcactggagatctaaggctgctgtgattaagtgttataacttaattacacattactgagtggggctgcattattcatttactcgcacttgagcaatttatgtacgatgtttagaataaactgttgactgtacctgattgaatgaatggcaaaggctggcctttgttactcaaacatcttggacacttattgtgtcatcgacaccttaacgggggaagggactcatatgtcatggtagatttaatcggagaataccttggtggta

SEQ ID NO: 120938 - DNA, 395 bp, Zea mays
  Clone ID: MRT4577_41777C.1
gatactcattagggtgctcactgttgtgcactcagcagtccacgcaggagcctgggctacattcctgactccgtcatcatcttcagatctggagccaaaaacgcggtactaaatgacgtggaggacggcaaaggcgacggcaaagaaagcgaaccacgacgcgagagctactcctacagctacttccacctcatcttcgaccttgtaagcatgtatgcaggcatgcttctgaccgtgtggacgagcgcttcatcaaacagctcataacagatcgatgtggtatggactaccggatggacgcgcatctgcacgcaaaggttcaccgacggggtgaacatctggacgcacatgggcacactgatcgtaccagaccgtgattcatactatgcacccac

SEQ ID NO: 120939 - DNA, 244 bp, Zea mays
  Clone ID: MRT4577_41778C.1
atgaaaattcttttaaagcaataagcctttttgttgacaccattaaaaaatatataaaacttgttttttctaaggcataaaagcatttttacaggggtagagatttgtctacgtgactaagtaaaaacgtttataggactgcctgaaggcagggatactgtggcgctatatccgaaatagcttgaggagcagtaatctgatatttttgcctgacaggaatgcactggttagcaaacgatggttc

SEQ ID NO: 120940 - DNA, 270 bp, Zea mays
  Clone ID: MRT4577_41779C.1
cacacgcatgcgcctagaacgagcttgcactaaatcatcaacctcgactacttcttccacaggcgggcataataccaccatgacttaaatacctacaacctcctcagccacgaacacagacacctcaaggtctccgacttccatctaagcgcgctcattgactgtcagaaacatgacagactgctgcacaccacctgcaggacctctcactacattgcacctgagatcattaacaataaggtctactaaagagccaaggccgacatatgc

SEQ ID NO: 120941 - DNA, 407 bp, Zea mays
  unsure (1)..(407): unsure at all n locations
  Clone ID: MRT4577_4177C.1
aaccccaaagaggaggcgcggggcngnggacaccagaccagcggggacggcggacagagncncgagacggggccaagcggncgcacccccancaccacaagaagaaagcgagacgagcaagagggggcngnggagcaaagccaangggnggnanaccggagccacgggcgaggggcgggaggancgcgacggcangncccaanaaccgnnggaacacccgcnccgaagaacgangggagcgaagganngcagggccaagcanggancgangggagcggagggaagcggngnnggacaaccggacagggnngccccagaanncaaaagcacaagaaagganccaaagcgcagggggcaaaaaaacaancngcacanaaacgagaagaaagagagaggagaacacaaag

SEQ ID NO: 120942 - DNA, 213 bp, Zea mays
  Clone ID: MRT4577_41780C.1
tgttattttacgtctggatattaatggccgggacctcacagactggctaatgaaaaatatcactaagaggggttaattttggagaaactgcggtcagcgatgtattcttcgggacattgaggagacatttgagtatctcgctttcgactaccagcaagagttcgagactgagaaggacaggtcctcagagggaatgagctcagagctacctga

SEQ ID NO: 120943 - DNA, 1775 bp, Zea mays
  Clone ID: MRT4577_41781C.1
tctgcctggggcgtcacgaaaaaaaaaaaaaaaaaaaaaaaatccgtggatactccctcagattcttaccaaaacagaggagcccgtcggccgtcgcaaaaaaaaaaaaaacaaaacaagaccaccgcaccatggaatcgctgacgcttcgcgcttcgacggccgcctcgccgctgcagcgacgccggctgctccccgggcggcagcgcgcgacgtacgtccgcgccacggcctccgccggcgagccggacctctccgtgcgcgtgaacgggctgcagatgcccaacccgttcgtgatcgggtcggggccaccgggcaccaactacaccgtcatgaagcgcgccttcgacgagggctggggcgccgtcatcgccaagactgtgtcattggatgctgaaaaagttatcaacgttactcctcgttatgcaaagcttcgggcagaaccaaatggggctgccatggggcgcatcattggctggcagaacattgaactcatcagtgacaggcctctggagaccatgctgaatgagttcaagcagttgaagaaagagtatcctgacaggatacttatcggttcaattatggaggagtacaacaaagctgcatggcatgagcttattgaacgtgttgaagagtctggagtggatgctcttgaaattaatttctcatgtccacatggcatgccagagagaaaaatgggtgccgctgtggggcaagattgtgatttgctagaggaagtttgtggttggattaatgagaaggccactgttcctgtttgggcaaagatgactcctaacattacagacattacacagcctgcaagaatatctcttaagtctggatgtgaaggagtttctgcaattaacacaattatgagtgtaatggggattaatctcaaaacactgcgtccggaaccttgtgttgaagggtattctacacctgggggttattctgcaagagctgtgcaccctatagcacttgctaaagtcatgcagatagcaaggatgatgaaagaagagtttgctgatggacagtctctctctgccattggtggtgtggagactggcaatgatgctgctgagtttattcttcttggtgctgatacagtacaggtatgtaccggtgtgatgattcatggttatccccttgtgaagaagctttgcgcagagttacaggatttcatgagagagcacaacttttcatcaattgaagagtttcgaggggcctcgcttccgtatttcacgacgcacacagatctggttcaccggcaacaagaggcggtcaggcagaggaaggccatcaagaagggccttcaatcagacaaggaatggacgggtgatgggttcgtcaaggagaccgaaagcatggtatccaactgatgcatctctgccaccccccaccgggccattccctccaccatgctccaacttcatctttttaataaacgcgcaccagaaatgccacacaccaagcatctagtcctcatctgtacatggttctgaaccttgggccttcagtctatagaacaggccatgaatccacacaaagtcgtgacaaccgggtgacattgagcgatatatttgtcatgtgaacattaatttgtagcactgagctgagggcttgaccttgtaaaatcttggagacttcaatctcgcacaggttttctcaggagtttataattatacgtgagtgatgtgtgaggacactcgagcctcagcttcagttgaaaaaaaaaaaaaaaaaagcggccaagcccaacagctcgtcccagcact

SEQ ID NO: 120944 - DNA, 191 bp, Zea mays
  Clone ID: MRT4577_41782C.1
gctctggtcggcacttgtggcaagatgatgcttgttatcggcagaagtaagccagtgcatctcccatgtattttattttgctctaattttgagtcctgtcttgggctggtataagtattttacagggcaattgctggttcaattacaacatgatcatacgattgctgtatgcatgataccagcacatgcac

SEQ ID NO: 120945 - DNA, 156 bp, Zea mays
  Clone ID: MRT4577_41783C.1
cagatattatgctcaggaaaccgggaattaataggggaccggtcactgttgtcgtacctatctaacctatcaagcgacgtattactatttacactcatggaaggcattggttacaactgagataaagatcacttcgctcacaattctaaacaacct

SEQ ID NO: 120946 - DNA, 1031 bp, Zea mays
  Clone ID: MRT4577_41784C.1
cagcaagcagcacaccagcacccagaagcagaagctcctatatcctgagctcctggcacagcaacaatggcgagacccagtgcagctgctgccggcggcttcttactggcttgcgccgccctgctcttgttcgccggccaaagcaacgcacaaacaaccttcatcttcccattcgcatccctctttcctgtaggttacgtgccgccgatagtgaggatctacagcaagcagaataccgggctgaacatggccgttcgctacggcaaagttgtcctcgtcacagccaactcttgggaccaaacacagctatggtggaagatcccccctctcacgagcctttttgatggagagggcgccaagtactggctggtgaacgtcgcaaccaaacaagccatgacgtgcccaaacggtccaatgcaggtgcaactggcagaattcaacccttacaatggcgcgcagatgtgggtgccgagcacaccccgtctccaggacggcgtcttctaccagataaaaccatacactcaggattccaaggccctcaacggcttggggggatacgtacatgacggcacggagatcgggatctactctgacacacctgtgtcttccaacaccttatggttcacaagcaatatcttcccctttccgttctattaagaatggcgaatgaacatcaagggctctcgacgtgcttgttgttgcgtgcttgatcaagaataaagacgatacctgagatcttttctttctttcttttttcaaaatgtgatgcttccttgtgtccgcgtgccttacatgttttcacagaatttgttgtctcttttttttcttcaaaatttgaacaagttgaatgtgttccttatgctatgtctctgtttttcttttttggttctcaagaattccatgtaactacctgattagcacgcaaacatactgctatgctaaacttaattttgatttatatactatattattactagacatggttctctcatcttgctgtcaataatgttctccattcatgatgcatttct

SEQ ID NO: 120947 - DNA, 706 bp, Zea mays
  Clone ID: MRT4577_41785C.1
gggtacctcgaggccggccgggagctcatttctactcctctccttgatatcgccaatccacgactgcattgccaagtttgaccttgttcgtcgccgtacgtctacatgcatacagcatgcaaagggatgtacacataggcctgctgctacccctacagattggtcacatcatcgaccgcctgtaatgacgatctgcagagaaagtacttcctccacaaacatagttcatagcatcccaccatcactgaatatgcttatgacataaaccccttcatgtgaatacacagctactggtggctcctagtacatcccttatagcttacgatacgaacgcgtcactcagcttccattatgaatgggtgcttgtctaaaaggcgatgctcacactacatacaaattcgccatatggtaccaacatacaatagaactctcttatacgtagcggctatgtctaatctaacagtgaaggactcttgcaacaaccatagcccataccgacacaacactgcatatggctgtgttacaagtatgaacactagaggcaccacaggttatgatgatatcttcccaaacctatcagatgtcgtcgtcgtcatcaaacacgcaatgccggctgctggatacctctcacgacagactagtacgatcccctcagaagagtgatactgagaaaaccctgccacaactatgaggaaactcacagatg

SEQ ID NO: 120948 - DNA, 393 bp, Zea mays
  Clone ID: MRT4577_41786C.1
atggaatatcacgtggctggaatggccacaatgccacgaattgccatgggtcatgatgatgcgagcgatctggactccgcctctcgcttagtgtacttcgacgctctctgcctgtgcctgggggcttggctacaggcagcccggggtgccgatgctgtcaaccgcaccttcttcgtcttgggccactgcgttgtggacaacggtaacaacaactacctgctcacggaggcgcgcgcacactcgccgacctacggtatcgacacgcccgaccacacggccacggtccggttcagcaacggagagaacgtgccggacatcatcagggagcacctaggctgggatcccgtgctgtcgtacctgagcccggagctcgacggtcactagatgctcgtc

SEQ ID NO: 120949 - DNA, 265 bp, Zea mays
  unsure (1)..(265): unsure at all n locations
  Clone ID: MRT4577_41787C.1
agcagtggtaacaacgcagagtactttnttttttttttttttttttttttttttttttttttttggacgatcggagcagacataatcagtaaattatccggggcaaaccaccacccgcagtcaacaagagcgctggaccatataaactagatatcacactccagttgtagtttgacccatatgccatcacaggcaaaccgctcaagagttcagatgcttcaaccacactacgactgcccgcgtactctgcgttgttaccactgct

SEQ ID NO: 120950 - DNA, 2447 bp, Zea mays
  Clone ID: MRT4577_41788C.1
gatctctccactccagtcactatgttgggaatcctcagcctttggaggaatcatgagtgcatacttcagtggttctccagtcacttatggcgtaagatttgtctttggtgtacagcacttttgccactgttccgagtagcagagaaggacaactctggcaaactgtgaagaaaataaaagattttcacaagcggaatcttcagaatctgaataaaggagttcgtgggaatcagttgtaccaaaaactggttcagttttcgtattccaagcatactactggaagttcacactgatcggcgacaaactctcgcccaaggagaagttgaaggaggatcagcgtgaacacccactgaaagagagatggagttgaatgagaaatctgaaaagaatacgcaagaggtagatgagaagttccaaaacacaaacttgtatctcaagaacttagagatggagcttcgggagttacaagtgcttcataagcaatcagatagatctgaaagttttactgtgccaacacatgcacacactggtggtgcctgcatctagctattcagatcaaagcctgacaggtaccatagggcaaagtgaagaagaaacagaagagttgagcaagatcacgctagagaataaggatattcagcttgatatcaatataagagtgtttgatggagcccgagcaccggcgcgcctcatacgcgccgcgtgctccttcacgcgctccgcacgtgggatgcgcaacctgctcctgccccgttgcctcctctccgcccccaccaccatggctcgtgcttccgtctccggttccgctgcggtggccaaagcactgatccccttaaaccccgccagcggcggccgccttccttccctgcttcctgcgcgcctccatgtccccgggagcagccgcgtgctccgcggcgcctcgctccgctgctatgccgccgccgccgccgctgtggccgagcagagccgcatcaaggtgcagaaccccatcgtcgagatggacggggatgagatgacgcgggtcatctggaagatgataaaggataagctcatcttcccatacctggagttggatgtgaagtactacgatcttggaattctcaatcgcgatgccaccaatgatgaggtcaccgtcgagagtgccgaggctacattgaagtataatgttgctgttaagtgtgcaacaattacgcctgacgagactcgagtaaaagagtttaaactcaagtctatgtggcggagtccaaatggcacaataaggaatattctaaatgggactgtttttcgtgagcccatcttgtgtaaaaacatcccaagaatcctttctggttggaagaaacctatttgcataggaaggcacgcctttggtgaccagtatcgagctactgatatgattattaatggtccaggaaagctcaagatggtatttgtgcctgatggagctgaccctatggagctggatgtttatgattttaagggacctggtgtggcattatcaatgtacaatgtcgacgagtctattagggctttcgctgagtcctccatgggctatggctctttcaaaaaagtggcctctttatctcagcaccaagaatacaatcctcaagaagtatgacggcaggttcaaagacatcttccaggaggtatatgaagagcaatggaaggagaagtttgaagaaaactcaatatggtatgagcacaggttgattgatgacatggtggcctatgctgtgaaaagtgatggtgggtatgtttgggcttgcaaaaactatgacggagatgtacagagcgattttcttgcccaaggttttggttctctgggtttgatgacttctgtgctgttgtcttctgacgggaaaacattagaggctgaggctgctcatgggactgtcactagacatttcaggctacatcagaaaggacaggagacaagtaccaacagtattgcctccatattcgcttggacccgtggacttgaacacagggcaaagctggataaaaatgatagtctgctggatttcacacacaaacttgaatctgcatgtgttgaaacggtggaatctgggaaaatgactaaggaccttgcgcttcttatccatggccccaaggtaacaagggagttctacctgagcaccgaggagttcatcgatgcagtcgcgcagcaactgcgaggaaagattcaactaccaactactgtgtaatcctgaacctgaagcctgaaaccgaacgaactggttcattgtgcattcggcgcacattttgatagggatggcgagatggatcagatctcaaaacattctttttttttttgcttcagccaaacatttcatggttgggtatataatgacccgttgatcaatgtattcagagcgatattgagttaaattattactagtcggtcgtcgtattttacattttcaaaaaaaaaaaactcgttcccctcgtgc

SEQ ID NO: 120951 - DNA, 199 bp, Zea mays
  unsure (1)..(199): unsure at all n locations
  Clone ID: MRT4577_41789C.1
taaactcaaatcctctataacccccnncctttttttttttttctatacccccaactaacgcggtccgtttatattttaatacagccccacccccataatatnacctctttttctacaactcaattctcatctatcacttttaattcttctttttttccccctttctctctacattcattctacattaatttcacccaac

SEQ ID NO: 120952 - DNA, 249 bp, Zea mays
  Clone ID: MRT4577_4178C.1
cccacgcgtccgcctgttcagcagtttaggacgcacatcagctggtgttcacaaaagccgtgacggtcgctacggcgaccggaccactcgcgtcttgtgttatataatactgtccccgtttacaaccatcttataaggcggtgtaggcaagaacatcttgtgggcagaagctggctcacacatctctgggtgtcatcaattcaagggatcaggcgcgggtagccgacctgtactttgcaatctttgatt

SEQ ID NO: 120953 - DNA, 2803 bp, Zea mays
  Clone ID: MRT4577_41790C.1
cctcgaggccggccgggagctttttcctctgaagcttcaactaccccagttatccggcgcggttccttgcttgtgtcgagcatgacatcacaaaaccaagaaacagctgaggcgccgcgcgcggaggtagctgcctgaactaatcggtgtcgcaatggccgcaacgagtatgatcagggcgccgattgggccgaacccgaggctggcgtgccacgccccggcgaggggcggcggcgtgatcaggtgctcgttgcagggcgcggtcggcggcggacgggagtagtggcaaagcagctgcgccatgctgtccagcatggtggccgcgctcgggacgcactccatcaacggccgcgtcgcgttgaacttaaaaatcccctccaaattcctgttgctgtttctggcatctctattatatgccagctttccagcactttggatgcattaagttctgatgttagtggactggacttggatggtggggaagataaggttaacacagagccatctatttcaatgttggagactgatggagataagtttacattgtcaaagcttgacattgtattaggaggaggtgaaagtaaaagagtgcaacttgatgttactccaaaggttgaaggtattttgaagttggttgggataaggtggactctttcagagtcagtagtaggttatcaatactttgaatttaatgcacagaaaaaaatcaagaaagggaaaagaggcccacaccgttcttggaataacagcctggttgtaatcaagggattaccaaaacttacaggatctattgatcgcatgcctacaaaagcgtttgctggtgatttaaagctgcttacactaaatctgagaaaccattccgaatatgctgtgaagggtataaaaatgaaacttagcaacccaagatttttaattcccggagattcatcggacattggcctcaagttcccacactgcttaaagaggcacgtgcaatcagaaagcagtgttgtatcagccaaaactatgaaggacaatttcaagagtctgggctttgcatttcctcaggatatagaaattcaagcaggggcagcactctcttggcctatttggtttcatgcggcaactcctggaaatgtttctctttatatatctctgtattacgaaatggggagttccagtgatattaaataccgtacactacgcatgcacttcaatcttgaggttttgccgtcacttgacgtatccttttctgtaagcacgtcctcatcaagattgcaagagtatattgttcgcatggatgtcatgaacaagactccatcagagtcatttgtgcttcatcagttatcatgtgtcggtgataaatgggcagtttcagcattggcggcgtgcagttcaatcaactctgttgaaacagtatcagaaaatcaggctgtgtcgtacttcttcaaaattaaggattgtgaggcggattcttgtaaagaggcagaaagtgattcctgcacaagcgatatggctttgtgtccaggaagtagcactgatctgtttgacattgcacgatctccttttgttgattttcaccatcaagaaagatgcaggcaagtgaagatggcaaaggggccatgcagccttcttgattttgttctaatctcaaaggcagttgataactcttccaagcctactccagacttcgaactactttctcatcacacatgtcattgcagtgctctaagccagaaccctatatggtggcttatggaagggcctcggacaattagtcatgatttctcaaagtcttattgtgaggctaacctccaattggtcattcacaattcagaagctcataagattttggtgagagtggtcacttttgatgtaattccagagaaaactgtccatcctcatgactcaaccagtgctcagggtggatggtatgatgtatcactggaaagtgacgtaaaggccatctctagttccaagagtacacatcaagagaagcgatcttcgaagagcattccaccatatgtttggtgttcattgagttgtgctcaaatcgagctccaacctgacagttgtgctagagttcctctaaaagtgtgcatatttgcaccgggcacatacaatttttccaattatgagctgcaatggaaagtgcatctatctgagggaccacatgtgggtgaaaatgagaaccggttatctggcggtggtctaggctatcctttctatgtcactgtccttcaaggtgtctaagtaattatcaggattcaagaagtaccttcttgagcgtcaatatagaccagtgcaaaactcaggaactacacccaattgcaacgggctgatgataataggtgccagccagtccagtttgtgcaaagatctgccccggaagttccctgactgaatatacttggatacgctcatggttctgcttcggtaccgatatatttacacgtcattttgaaggatgagttctggtgagtacatgtatacaattgtcgctgggaacaaaaactaacggtaattgctggtggatttttggcagacagaatataccgatagaagttttgcttgtctaattgttgatggtggctagtaggagcatatactattcctgtacatcctgtttaacttgtcgctgctagacgatttcgcaaatgtagtatgtagtggtagatggatccgataaattttctgtaattttgacgaggtaatcaggcaatcgtctcgagattgttgttgtatgggcgacagtattttttcattgtttgtacaatccttttaaaaatcatcgtctggccttgagcctttatgccatatgggt

SEQ ID NO: 120954 - DNA, 152 bp, Zea mays
  Clone ID: MRT4577_41791C.1
cccacgcgtccgattccgttcatttaattcaggtcataatattcagcagttggtttctaccatggtccccaggtatcccaagcattctaattttcgttctagacgattaagtgccagggagttaaatatgctgaagcgtaaagcaaagagta

SEQ ID NO: 120955 - DNA, 331 bp, Zea mays
  Clone ID: MRT4577_41792C.1
tttggttgggttgtctttaaaaaacgaacggctaacccacacaaaaatgtgaacacgggtgaacatggtacacatgtggttaaccgcaaaaccttggtatggataagaaaacaggctgctatcctgcactgtcatgaaataaaaatacatacatggagtatcatgctatatactgggtgcgcgtcagcactccacagaactgagtaatctgacactacctggctcacaggggatcatgaatagcggtggccgtattcacgggcccttatgcatgccaggtgctcccgtctcgcagggagaggaacatacacatgcttgactgttagaccac

SEQ ID NO: 120956 - DNA, 280 bp, Zea mays
  Clone ID: MRT4577_41793C.1
atataattatataaatttttattatggtttttttgctaaaccattttttttatattcttaagtaaggccagctaattcgtttttaaatggtcatcaaaccctttttttaattttccagacaacattacactaaaacttgttttctgtccttttaccttcggaactaaattcttttattccaactttttgttgcctttgaaactattataattattgctctctttatttactggctttcttcgactcaatttttgtaatataaaactttaatatcttatta

SEQ ID NO: 120957 - DNA, 354 bp, Zea mays
  Clone ID: MRT4577_41794C.1
cggacgcgtgggcggacgcgtggggtcagagctagcaagctcaaagaaaactgagctcgtgtgtagtgagcagcgagtgagtgagggactggtgaccatttcaagaacagcgccgcagcagggagctaattcgttcgttcatcgtcgcatcatcagtttgatccttcgaccccatagcttcctgcaacttcgagctcactaaacaaccatgggaggaggcacgctggagtacctgtcggatctgctaggcggcggcggcggccggcgccggtacaagaagaggaagcagttccagacggtggagctcaaggtgcgcatggactgcgacggctgcgagatgaaagtcaggaacgc

SEQ ID NO: 120958 - DNA, 479 bp, Zea mays
  Clone ID: MRT4577_41795C.1
aaaaaagccccggtttttaaaaaaccataaactttccaaaaaaggggggggacccaagccccggaaaagaaaaaaggggaggaggggttaaaaaaaacaaataatccggatacaggggggaacccattatgaccaaaaagtttgttggggggccctggaggccacacaaacaaacaaaaataaaaaaaaaaaaaaaaaaaccccggtataggggcacaggggatgaggcccacgggtccaaaaaactttaaaaaaacaggggggtttaaaacccccgggggggaaccaccaaacttttttttatttttcggggggggggagcttaaaaacgggcccggggttgtccttacgggggaaatttaaaaatttacccccccctgtggcaaccgggggacattctggggggaaaagggacggaaaccccccacttgccggggatggggggaacgggccccattttgacccttttaaccctgggg

SEQ ID NO: 120959 - DNA, 159 bp, Zea mays
  Clone ID: MRT4577_41796C.1
cgcaaggtcgcaaatatgtctaccgtgctccagcgcccgaaccccggcaaggtccaatgcttcggccgcaagaagaccgctgtagccgtcgtctacaacaagccagggcgccggctgatcaatgtgaatggcgtcccgattgagctcagcacgccggag

SEQ ID NO: 120960 - DNA, 1460 bp, Zea mays
  Clone ID: MRT4577_41797C.1
agaagcagcagcctggctggagccaccagcccaccaccacttcctcgtctccggcgagccaccgacgatgggtagcagccgccggcggggcgaccgccacctcaagctcctgcaccgactcctcgccctctcgtcgctgctcctgctcgcctccggggaggtcatcttcgaggagcgattcgaagatggttgggagactcggtgggtcaaatccgattggaagaagagcgaagggaaagccggcatgttcaagcacacggcaggaaaatattctggagatcctgatgacaaaggcattcaaacaacaatagatgctaggcattttgccatctcagccaagatcccagagttcagtaacaagggccggacattggtagtccagtactccataaagtttgagcaggagattgaatgtggtggcggctatattaagctaatgtctggctacgtcaaccagaagaaatatagcggagacactccttacagcttgatgtttgggccagatatatgtgggactcaaacaaagaagctgcatcttatactctcttaccaggggcagaactaccctatcaagaaagatctacaatgtgaaactgacaggctgacgcatgtttacacattcattcttaggcccgacgcatcttatagtttacttgttgataaccgtgaaagagaatctgggagcatgtacactgattgggacatcttgcctcctcgaaagagaattaaaaatcctaactacaagggtaaatggaagaccccatggatcgataatccaggtaagcaaataaaaatcctaactgctgattttgaatgaaaccacacttaagctttaaagatcaggcgctgtcaactgtattatttttgcagagtttgaggatgatccagatctttatgtgctgaagcctttgaagtatattggaattgaagtttggcaggtaaaagctggttcagttttcgacaacattttgatttgtgatgaccctgagtatgcaagaaatgttgttgaggaaacttggggtgctaatagggaggctgaaaaggaggcttttgaagaagctgaaaaggagaggaaagctagggaggatagggaaggtcaaaaggcaaaggatgatggtgggcgccgaaggcctcgtaaaaaacactacagagatcactgggatgactaccatgatgagctatgaagtccccaaagtattgcattcctcaaagcataagctggaagttgctttggacattgtggatacttttcaataataattgattcgcgaggcccgaacaacctgaagtgtttcttgctatgtgccaaaaaaataatcaactacaggattgagatgtaacggacaaaacacaaaactgaagatcttttctgcttcctgtgcaacagcaggagattccagcgaaaacttggctctggcactgaaatagggtggacgaggttctgttcgttatgtctgtaa

SEQ ID NO: 120961 - DNA, 1004 bp, Zea mays
  Clone ID: MRT4577_41798C.1
ctcgcgggtcgatgcacgcctctagccgcggtgcctgccgagcctcgtcgtcgagctggcgctgcagacgcacgcgctgctgcgcgagctcggcaaccccgcgggcgcgcgcatcgtcctcgaaaccgagcgccgcgcggcactggaggccgccccctcagccgccgccgcccgagacggaggaggcggggcgtcgcgggctaataataagcgcggagtccgcgcgccgccgccgccgctgctggacgagccgtcgtggaccatgttctgcaacggcaagaagaccgggtacgcggtgcgaaggcaggccacggacgacgacctcgctgtgatggagacgctgcgggcggtctccatgggcgccggcgtgctccccgggagggccgccccttcgtcggcgcccgacgcggctgcggcggcggcagcggacgacgaggtgccctacatgcgcggctgcttcgaccacttcgtcgggtcccgggactcggagtcgctgtacatgatcgcgccgcagggcggcggcacgggcccggagctggccgtcttcttcgtcaggctctgacctccgatccgatccgccccgcgccttgcctctagctatctcctcgcccccatgcatgcgaagacggcccaagggcatccattaaccgccacgtacataaacatcgtcagcattcattggatggtgcaacctaaagattgactaacaagaaagagttaagaatcaaagagagagtcgcccaatctttgatcgtgcaacgacctcaagattgactaataaggtcttctggttaatttttttttggctgattcgttattaggttgttgtatacgaggtgttcttggatttgtgccctatgcagcattgcaccatctatcattagtcagacattcatcagagtacataagagagtagtcactggacggtggaactgtggtccaaaaagttgtttacttcagaatgtttttttcccattgtgagaaaaacaataaaaaaagggcgt

SEQ ID NO: 120962 - DNA, 723 bp, Zea mays
  Clone ID: MRT4577_41799C.1
aaaaagacaagcatagaacatctagagcaatttggttctgctggctagcgtactctatgggtggcctatcgggatcttagcaggagcaatacgaaagcttgaatgaaaagtttgtacaagcatagtcatctttacgagatcgtgataagaagctcgtgaggtgctgattgattgaaaaagaccttatattaattgggtgcacagctattcaggacaaactgcaagaaggcgtgccaacctgcattgaaactctctctgcagttggcataaaaatttgggtgttaacgggagataagatggaaacagcaattaacattgcatatgcatgcagcttggtaaacaatgacaccaaacagttcatcattagttcagagacagacactattagggaggctgaagaccggggtgaccctgtggaaattgcacgtgttattaaagattcagtaaaacagaatctgaaaagatttcacgaggaagcccggcattctttaattagcacccctgaaaggaagttggctctcattattgatggtagatgcctaatgtacgcactggacccaactcttcgtgttgatcttcttggattgagtctaagttgccactctgttatatgctgccgagtttctccgctgcagaaggcacaggttacaagcttagttaggaagggtgctgagaaaataactctcagcattggtgacggtgctaatgatgtgagtatgactc

SEQ ID NO: 120963 - DNA, 288 bp, Zea mays
  Clone ID: MRT4577_4179C.1
aaaaaaaaaaaaaaaaaaaaaaaaaaaaaaaaaaaaaaaaaaaaaaaaaaaaaaaaaaaaaaaaaaaaaaaaaagtttgtaccttgttccgtgacccccctaagggcaaattttgaatttttccatcaccctgcgcgtttggtggagcttttttcttgaggccccaattccccttttggtgtgtcgtttttcaattgactggcctttgttttacaatgtccggattggaaaaaccttggcctttcccattttaatcgttttggggaaaatcccctttttcccttttgg

SEQ ID NO: 120964 - DNA, 595 bp, Zea mays
  Clone ID: MRT4577_417C.1
ggcaaatgcataaggatgatgggaagcaacaacaacacttttgactacaacagtgggagttcaattaagttgttcacccaagtagatagttgtctccactctttcaacaagttattggagtgattatatatgtctgctccatatgaatgccttttcgttttagtatcacatctgaggattaccaaccttttagatcgggtattgacatctttgtgttctcctcaactcattatttagctacatatcttattaaatcttaatctttggtcattagctaccagcttgcactattattgtgaaaatccattaactttagtaagtgaaatggttagactatcaccacgtaggtgatattagtggcgttaagtgattaatcagtggcaaatcctattatcaactattttcttggctaatcattacaatatataatgaagaataccatggcttgcagtgatatttatacagttggctatgtatacagtctgcctaggcgcccaacaatgaatgaagtggtgaaggaacttgagatcatcagatagaatgaaggggcacaattgttaaactcagcgtctttattagttgaacaatttggaaa

SEQ ID NO: 120965 - DNA, 201 bp, Zea mays
  Clone ID: MRT4577_41800C.1
agcaactgttaatcttattgagggcgctttgaatgccatgaattacttctctcttgctgctttcaagattatctttgtcttgtgacattttgattattatgtgtctacttggaattcactgagtttcttggatgtgtggattaatattttgcatcaaatttgcgaagctttgagccattatttcttcaggtactcttgctg

SEQ ID NO: 120966 - DNA, 1569 bp, Zea mays
  Clone ID: MRT4577_41801C.1
cgcgatctaggggaacaggcatggatgtgtaccagtaccagtacaaaccagtggcaggcagcggtgtcgccggcaaaaaatttcgaaacgagaggtgtctgcctatcacttgcgaagaaatcgcgaggggaagcgtgacacctgacgagctgagcaggcaggcggtagtggccgagcgaaagcatcctcgatctcgtcgtatcgtagctgccgccgctcagagcaatggagagagcggtgccagttcggaagtcgcacaccaacacggccgaccttctctcctggtcggccacgggccctgacgcatctgcctcgccggccgcgtcctcccgccccagcctcaagccggccgcggggattacgccggcgatgttcggcgcgccggtcaccgagcaggaggccgaggatctgagcaagagtgaaaggaaattttgctctggctcaaagttgaaagagatgggtgggagtgggatttttgctgagaagagtgaaaatggtgatgcagaggcttcaaatcctgctaacaagacttccttgaggatgtaccagcaaactgtgactggaataaggcaaatttcatttagtgctgaaggaagagtttcaccaaagaatgcatcgtcaatacctgaggcggctaactaccccagagcttagtggcaccctgagaagatactgatgctaaaatccataagcagcttactgaagccaataccaaggagcttactgggagtgacatctttggtccgcctcctgagattccagcgaggccattggctgctcgtaacatggagctacaaggaaatgtcgatttttcacttccacagcgaagcgtccacacatccagttaaagtatcaaatcctgctggaggtccgagcaacatctcattcagtgaagagcccgtagtgaagacagcaaagaaaatccacaaccagaagttccaggagctgacaggtaacaacatcttcaaggaggacgtcccttcctcagccgagaagtctctgagctctgcgaagctgaaggagatgagtggcagtgacatcttcgccgatggaacgccagctccccgagaatacctcggcggcatccggaagccccctggtggcgagagcagcatcgcgctgatctgattgtcctggactgctttaattcggaccggctgtagctcccatcgccactaaagctcgcagagagtgcatttctcgacctctcgattctccatccgtgttgggatcataatttatgttgggtatcgttagtctaatataatgtagagtcagcagaatctgactcgtatcgtctgatacgctggtgtgtgatctcgcatcttttattgttgcgacattattatgttatatatttgtacacccgaaccgaaacttacgcaataattaaattttggactcattttcagggataaaaaaaaaaaaaaaaaaaaaaaaaaaaaaaacaaagcaaaaaaatgaaatactaaaatgtgctggggatcaatgctaaaaaacctgcatgcacgatctgtctatctgactaccatgcaagagagcatgatccggttcctgctcaaatgcaac

SEQ ID NO: 120967 - DNA, 452 bp, Zea mays
  Clone ID: MRT4577_41802C.1
tcaaacgtccgcactggcaggttcttttttatttctgcgaagccacactcatcacacacaaaaactttattatttatctataactcatactaatctaatagagggcaccaccactgatgggttcgatcgatctaaacgctcatgggctagccaaaccaagctgcctagtatgggagccattgttgcatttgcatagagggtgccagcgttaggcgcaccgtgctggtaataacggcaacaactgtggttgtgtcaagaaggcagcatggctcacaccagctagctggctaaatggtaatagctgttgctgctgtaaatcactcctagagattaacgctggcagctactactatcatataaactgctagctgtaggcagcccttatctcttcttaacgcaaccacagttgttgccaataataacaaaacgctaatgctaatacttggaccatt

SEQ ID NO: 120968 - DNA, 394 bp, Zea mays
  Clone ID: MRT4577_41803C.1
gtcagtgccttggcacattttgcacgcttggaacacgcaaaggtacacgggtgatacacatttcttgattaagaccgttgaccctttttttaagaaggattgttctatcatcaagagtcactgatgaacgattgtgctcaacattctgaagagtgttttatttatgaaatatggtactagcatatattgtgtggatcatatacttaatgtctaaaaagaaaaactacgtcatattcatcttgacagaggatcaagcttacaggaaaatcaggctccgtgctgaagatgtgcaaggcaggaatgtgctcacaaacttttggggtatgaattttaccactgacaaactcagatccctagtgaagaagtggcagacattaatcgaagcccatgttta

SEQ ID NO: 120969 - DNA, 483 bp, Zea mays
  Clone ID: MRT4577_41804C.1
ttttttttttttttttttgctctagaggcagagatatcagtctctccccctgctactgaatgtttgtctaacttctgaaagcaagaacatataacctttataaagcttctagagaagcgaataccatgcatgtcacaaatcagacagaagacggaagcgctgacgttaaaaagagccaagcaaaattaccgcagttcatgccgcgaatgaaaggggaactgatgcatcactatgggtgttgtcttctcctttactaccatgggcctgtcaacctgcatcttgggctcagtcgcttcgccagtagctgcttcctgatctctggctgcctgctgcttgttaggttcttcagatggaggtgggggcttctttttctttatcgcaggagccgctccaaagcatgtgaaaagtcccagaaccatctcacttgcttttctttctttctttcttttttgccggacgacaatctactctgatcttgggttg

SEQ ID NO: 120970 - DNA, 491 bp, Zea mays
  Clone ID: MRT4577_41805C.1
tcgggaagatactgatcactatcttcgttcgtccaccagagacgacaatggccatggagacgtgattcacagctgggatgctgtgcgcccccgttgccattcaggcacaggctactcctctctaacttggcgctgcctctcgaaaagcgctaggtcgcgtggcgaccggtggggggggtgaggtgatggcgatggacccgcacgtggtggtgaaagccttcgtggagcactactacgggacgttcgacaacaaccgcgcggcgctggtggcgctgtatcaggagacctccgtgctcaccttcgagggccagacgttccagggcccatccgccattgccggcgagctcggatctcttcccttcgaggcctgccagcaccatatcgtcaccgtcgactgccagccgccaggggccccaggtaggcatgctcgtccttcgtctccgagtaccatcccgcaccggccccgtaggagcacccccaatacaagttct

SEQ ID NO: 120971 - DNA, 292 bp, Zea mays
  unsure (1)..(292): unsure at all n locations
  Clone ID: MRT4577_41806C.1
actactaagggcgattgggatcatcagagccggccgggctttatgatgaagacgcattatacacagacctgtaccgaaatacaaataatgtggaaaaacttttgtccaaccgctgtctgacaacgccggcggaaatcaacctgcgccgctgccttctccgttctcgccgtcgcctccgcctccgctgccgccgcgcaggtcagggtcatgtcgatcttcgagtacaacgggagcgccgtggtggcgatggtggggaagaactgnttcgngatcgncagngancgccgcctcg

SEQ ID NO: 120972 - DNA, 411 bp, Zea mays
  Clone ID: MRT4577_41807C.1
actgcacggacattgatgcccctggacaccgtgtctttatcaagaacatgatcactgttacctggcaggctgactgaactgtccttatcattgactccaccactggtggtttctaggttggtatctacaacgatggccataccccagaacatgctctacttgcgatgaccctagcagtgaagcttatgacttgctgctgcaacaggatggatgcaaccactccacttttctccacggcacattatcatgagattgtgaaggaagtctcattctaactaataaaagtggggtacaaccacgatcagatcgtcttcattcctatgtatggttttgagggcgacaacatgattgacaggctcaccaatctagactggtgcaaatgtccaaccctgcttgaaggtcttgaccaga

SEQ ID NO: 120973 - DNA, 427 bp, Zea mays
  Clone ID: MRT4577_41808C.1
gcacgcgtccgccttcctcgcgcgcgcgctcaccactccgctcccggcacccgccgccctcccgcggcgccgcccggctagcgtggccgtcgccgccgcggcgccagagcgcaggccgccgggcgcggtggcgtccaccaccaactacttcgtgccgctcgacgcggcgccgtccgggatcaccccgcccctgagctgggacggtgggggagggattgaaccacgtgcgcaaccccatggcgcggccctcctaccgcgtcgactgaacggatgcacggggtataccgagctgccattctaataggatgtttagctattatgctgcaggttggtgtgaggaacttcgtgatgtatttacactgaggggggaaaggatactgttattacacgggattgagcacggaacagattgagaggtcacagggag

SEQ ID NO: 120974 - DNA, 328 bp, Zea mays
  Clone ID: MRT4577_41809C.1
ggccgccgcggccgacggatgctggcgctgcggggtgtacccggcgaggccatcgagccggcgccgtgtggcgtcgctgatctccctcgcgcggacatcgcggctccgcgccgtgacggacgcgctcccggcgctccgtggcgcggcgcgcgaggctgccggatcgtcggcttggcctcggctcctaacggatcggccggagcttccggtccgataagcgggcggctggcctctcgagctacacgtgcgctacaaagctgggctctgctcgcgactgccccggaaggggcgcgcctgtggtgctcatgaacccgagctggcggcttcg

SEQ ID NO: 120975 - DNA, 140 bp, Zea mays
  Clone ID: MRT4577_4180C.1
attcggctcgaggtgatctagattgccattttttcgatagtgggctcacatcatgctgtatcgggttctggaacgcatagtcacacagacatgggttgggaccagtgaactcaacaattggcgccctgtgacactcaagt

SEQ ID NO: 120976 - DNA, 716 bp, Zea mays
  unsure (1)..(716): unsure at all n locations
  Clone ID: MRT4577_41810C.1
ccctccggccggggcgggaccacccttcttgcattttctcataccttgaacaactaagcaagtccaatgtctcatgcccagccccttcgtttacaggcccagtggaaacacgtcgatattcaggataaccaagccaatgctatgaaggaaccaggaaccagtggtgggtatggctccccaatgaaagatgacaagaacaaggatgtggatacaatagcttcgaacttcatcaagcttaagcacagggcttgggcactccagaagagcacaaccatgtaccaaccttccacttaaaggtgttgctagttcaataagtcaatactatatacttatgcttgtctctatatagtctataggtcctagttcaaataacagatgctgcttgcagccttggatatttgtggagtgaacgcattgttgatagcatatggataagaaagtaatgtaatcatctggagatgtgtaattatgtggcaaaaaaaaaaaaaaaaaaaaaaaaaaaaaaaaaaaaaaaaaaaaaaaaaaaaaaaaaaaaaaaaaataaaggaaaaaaaaaaaaaaaaaaaaaaaaaaaaaaaaaagaagaaaaaaaaaaanttcctttcggggttcccaaaaaagacccccgggggcccaaaaagggggaggccgcggggcctccttgaatttttcccggcccccccctttgggggggaacaaagggcccccttaggggg

SEQ ID NO: 120977 - DNA, 355 bp, Zea mays
  Clone ID: MRT4577_41811C.1
gggggcacaaactgatagggggtcatgttcttgaaaactggatgaacccgtgcccaccgtttctttttcacatagggagatttttacggggtgacaatttttttttatatatactgacagcgttttttacattaaaactggatgttttcttgcctgtcctttggggcaacacactgccctaaagctttgtaggaatcaattttttttgcgtttatttcttttgaaccaaggttccgtgcctactcctgaatatcaaaaaatagctgcatacaaatcttgtctgtttcaaatatgaagctatttgagggctttggactaactcctacttgtttttgtgcaccttgggccagttttt

SEQ ID NO: 120978 - DNA, 736 bp, Zea mays
  Clone ID: MRT4577_41812C.1
gtgcggcgctcggcccggccggccaggctaccgaccttccttgcattttctcaataccttgaacaactaagcaagtccaatgtctcatgcccagccccttcgtttacaggcccagtggaaacacgtcgatattcaggataaccaagccaatgctatgaaggaaccaggaaccagtggtgggtatggctccccaatgaaagatgacaagaacaaggatgtggatacaatagcttcgaacttcatcaagcttaagcacagggcttgggcactccagaagagcacaaccatgtaccaaccttccacttaaaggtgttgctagttcaataagtcaatactatatatacttatgcttgtctctatatagtctataggtcctagttcaaataacagatgctgcttgcagccttggatatttgtggagtgaacgcattgttgatagcatatggataagaaagtaatgtaattatctggagatgtgtaattatgtggcaatattatttgcaacaatgatgcatggagtactttcatgtaaaaaaaaaaaaaaaaaaaaaaaaaaaaaaaaaaaaaaaaaaaaaaaaaaaaaaaaaaaaaaaaaaaaaaaaaaaaaaaaaaacattttgctttttgggttaaaggaaaacaacacaaatggggggggtttggggcccacaggttcaaaacacaaaagacgcaaaccgccccctatcggaaggacaagaacaaaaattttttttgg

SEQ ID NO: 120979 - DNA, 1562 bp, Zea mays
  Clone ID: MRT4577_41813C.1
cattgggtacctggccggccggccgggccgggagaccgaccttccttgcattttctcaataccttgaacaactaagcaagtccaatgtctcatgcccagccccttcgtttacaggcccagtggaaacacgtcgatattcaggataaccaagccaatgctatgaaggaaccaggaaccagtggtgggtatggctccccaatgaaagatgacaagaacaaggatgtggatacaatagcttcgaacttcatcaagcttaagcacagggcttgggcactccagaagagcacaaccatgtaccaaccttccacttaaaggtgttgctagttcaataagtcaatactatatatacttatgcttgtctctatatagtctataggtcctagttcaaataacagatgctgcttgcagccttggatatttgtggagtgaacgcattgttgatagcatatggataagaaagtaatgtaattatctggagatgtgtaattatgtggcaatattatttgcaacaatgatgcatggagtactttcatgtatgatactgaggctttgcatttgatttgcttctatttggaaattatagtaaagcgtcgagcatacatattcttataattattagccaactccacgatctgataagaaaaaaaactgtggtgtcaaacagaaatacagaattgacaagaaagctgtaggagcttatagttgaagagtcctggcatgctcatacgagtaccccaataaaccaaggtatcactgaagcacacagcatctcccaaggctctggacatgcggaactgtagctccatagcacatttgtttagtaaaaattgtcatgttaaaatgcatcagacattacaccagatcaaatgatcgaggcatgtagtaatattaagtaatactgctagtggttgcaatcatatataatattatttgtccaagcatttgcccacgcgtccgcccacgcgtccgcccacgcgtccgcccacgcgtccgcccacgcgtccggaaggaaccaggaaccggtgggtatggctatgggacgaaaaatgacaagaataaggatgtggatacaatagcttcggacttcatcaagctgaagcacaaggcttgggcactcagcaagagcacaaccgaggtaccaaccttctacctaaaggtgtcaatagttcaagaagttgatactatatacttatgcttgtctctgtatagtctataagtcctaattcaaataacaggtgctgcttgcagccttggatatttgcggatgcggagtgaagttaccatggcatcgttgctaagaataagaaagtaatgtggttatgaggagatgtgtaattttgtggcgatattatttgcaacaatgatgtatatatgggcatgtttggttcacggctaactgtgacacactttgcctaaggttagtcgttcgaattgaagaactaaccttaggcagaaaaagttaggcaaagtgtggcaatttatgcagcaaaccaaataggcctatagttttactgccaaaaaaaaaaaaaaaaaaaaaagtacctgcccgggcggccgctcga

SEQ ID NO: 120980 - DNA, 435 bp, Zea mays
  Clone ID: MRT4577_41814C.1
tttttgtttttttccgatgagggtcgtcgataccagacggtatggttagtaggacaatgaaacaacctcaaaactataacctgtcagcgtcattagcagtgccattttgcatgaacgagaatattgtcaataaacccggaaacacactaaacatccacataaaccccgcaagccaccatgtccacactaacagacaccagcatcacaaaaggcaaactccaaaattaaacgttcagtaaaccaccacaatccatggaaaccccctgttaaaatggttcttagcgccaaaccaggcatttccgactcattgagccagtgacaccataatgacatcgataccctcttaaatgcctttaaacccagacatggttaccatactgtagcacgttttcaggagcttccaacatatacccttggcactccggcctaggggtc

SEQ ID NO: 120981 - DNA, 2466 bp, Zea mays
  unsure (1)..(2466): unsure at all n locations
  Clone ID: MRT4577_41815C.1
cattgggtacctcgaggccggccgggaaaaaaataanaaaaaaaaaaaaaaaaaaaaaaaaaaaaaaaaaaaaaaaaaacccttcccaacgggcgggcgtgctggaatcctntccggccgggatctcgacaataagacattgccagccgactcaactttgagagatcgaaaaaatggcatctgaaatactaggcaacgttacggagaaggccaaggacctcgctggatccaagtcgaccaagatggctcagcttgctgaagtcaccaaggatgtccacgacgacaagtggagaattaccagcgactacggagtgaagcagaacaacaccgacgactggctgagggttgccacggacgaccagactggccctctgttgctcgaggaccaattcgcccgtgagaagattcaccgattcgaccacgaaagaattcccgagcgtgttgttcacgctcgtggctccggtgcctttggaaaattcactctttttgagtcggcctcggatgtcacatcggctggaatcctcactgatacttcgcgcgaaactccagtcttcctacggttctcgactgtgctcggtagccgtggttctgcagacactgtccgcgatgtacgcggctttgctgtcaagttctacacggaagagggcaactgggatatcgtcggtaacaacatccctgtgtttttcattcaagactcgatgaagtttcccgatgtgatccacgctggcaagccggaaccggactgcgaggtgccgcaagcgcaatctgctcacaacaacttctgggacttccagtacatgcaccccgaagccacgcacatgttcatgtgggccatgtctgatcgcacgattcctcgctcgtaccgaatgatgcagggtttcggtgtcaacacatacactcttatcaatgctaagggcgagaggcattttgtcaagttccacttcacacctgaactcggtgtccacagcttcgtctgggatgaggcactgaagattgctggtcaggacccagacttccaccgcaaggacttgtggatggccatcgacagcggtgcgtaccccaagtggaagtttggcattcaagtcattcccgaagcaaaggagcacgacttcgaattcgacattcttgatgctaccaaggtgtggcctgaagagcttgtgcccgtccgatacattggcgagcttgagctcaacaagaaccctgacgagttcttcacacagactgagcaagtcgccttctgcacaagccatattgttcccggcatcggcttcagcaacgaccctcttctacagggccgcaacttctcttaccaagacacccaactctctcgtctgggcatcaactgggaagagctaccaatcaacaagcccgtctgccccgtcatgaacttcaaccgtgacggagccatgcgacacacaatcacaaagggtaaggtcaactattggcctaaccgcttccagactgtgccacctgcgacggagaaggagggtgcatacgtagagttccccgagaagactgccggcatgaaggtacgcatgcagagcaagaagttccgggagcacaagagccaggccgagctcttctacaactccatgtcggagaacgagaagatgcacatgaaggctgcttttgcctttgagcttgaccactgcgacgatcccgttgtgtacgagcgcctctgtgagcgtctgtgcgagattgatctcgagctcgctcagagtgttgccgagatggttggcggcgagcaaccgactaagcagactcggcccaagcacaacaagaaggccaagggtttgtcgcaaatggacttccagcccgagaagcctaccattgcgactcgcatggtggcaattcttattgccgacggctacgacaaggctgcctacactggtatgaaggctgctttgaccgcagctggcgctcttccttttaccatttcgcctagaaggaacaagatctttgctgatggagaggacaagagcggctctggagtagtggcagaccatcaccttgagggccaacgctccaccatgtacgacagtgtgtttgttcctggtggcgccaagtcgattgagacgcttagcaagaacgggcgtgcggtacactgggtgcgtgaggcatttggtcacctcaaggccattggtggtactggcgaagcggtttccttcatcaagcaggctgtggatctacccggcatggaattctcaacgtctggtgatgtggtcaacagctacggagtggttacggctacggcagtgcagcctgagagcttcaaggaggcggtcaacatggcgaaggaggccaaggactttgttagcgcgtacatgtatgcgatttcgcagcacaagaactttgagcgcgagactgcgggactgaacgccatggttgcgtactaacggcagggagatgatttggaactgcctgtcctaatgatttagctgattaatgttaatgataccaattatg

SEQ ID NO: 120982 - DNA, 851 bp, Zea mays
  Clone ID: MRT4577_41816C.1
ttcggcagcgcgcctccgttcggcctggttccggcgcagcccttcaacttcaccagccccatcgagatgcctcacttctcgctcggccaggacactctggcggcgtcctcggctgccgccggggactacagcctcggtttctccacgtcctcaggtttcttgggtgccagtagggggacccttcagtccaattcgcagtccaacttctcaggccatcatcaccaccagctccagaggctggatggcccgctcttgtttggtcacgttcacggtgcggcggtggcgcatcccgcatccgagaaccagctcacatcatccgcggcgttacagctgtgggacggtctccggcactccggcatgaaggagaagagcaaaaactgattgctcattcttcaacgaaaactgaaaccacatccagttgctgggaccggttcgggcatatatggattcatccttcggagctgctaccgtttgttgcggtgatgaccatcagattgccgcacacaaggctgctatggtggccatcgtcaaccatccaccaccaccaggcaccagccctgctgccgtcgatcaagcaatcctgtgctttcttttttttcccttcttctctcttccattcctttcctaggcgctgttgtacaaattttgtgggagatgagagtttaaacaggctgttgtaagagtgtgctcggtagccgcggttctagtgctccccgcgcctaactgctggtctagactattctggagtttgtatgaacaggtccatcggacaaccgttgtgctcatagtttctcagcttggtttgcgagatatatatatcccccaaaaaaaaaaaaaaaaaacccgcggcc

SEQ ID NO: 120983 - DNA, 324 bp, Zea mays
  Clone ID: MRT4577_41817C.1
aggacaccaaggacccatttatacaaatttttagttccatttcaacgtttggagcattttagggggggcctttttatgttttgggtacaggtgcgcttatttaaaaggagctttttacaccaaattgattgccaatgtggtaccagtaaaaaaaacatacagttccaaacaagcggttttacccgaggggggggtttatttcacaatgtgacattataagttacacaaattccctggggggcacttcggctgtttcatacttgcatcaaattcagcttttcacacgatatttttcagctttgatgagaaatttttgtagaaatt

SEQ ID NO: 120984 - DNA, 875 bp, Zea mays
  unsure (1)..(875): unsure at all n locations
  Clone ID: MRT4577_41818C.1
ccatgtatgtctatatttattatcatttaaatgaatgtgaccataaaaaaagtatgctagaaagactaaattttaggncggaggtcctttttgtctaagtgtgaccatccgtgggaaagaccanctatggttgtatcttttatgcttacttggccaatacaaaaaaaaacacccagacaaattacgaatgaactaagcttagtgtgtggtcttactgcagtcacaagaataagaaaaaatagcatctctagctgcaaccgattcacacaaaagcataatatcggtgttgtgttagtggttagcagtgcaactcaaggagcaaagcaacatcagctgtagtagattgatgctaaacaaattaacaagtctgtgaggagaaggccgattgcatcgaatacgtactttggagcaaacaaaccccaaaccattaagtgacgcctttgaatagcaacgcatatgattgttagcgtagcagtgattgttgttataagaccatacatcaaaagcaccttattaatattgttgagaatcacgtccttcagttcgttgtccttggatgtggtgttgtaccacactatggcaataagtggaaggcttagaattggcaggacatgagaaataccaaatgtgtcaatgcaaagtagaaggccttgtcgaatgatatgaaaatgatcaaaaccgatgaaagctgcaccatatcggaggccatcaaatgtacaccagtgacctgtcatataaaatagacaaactgcaagaaggctccactgaatcaccgaaacagggtcagcaacagagagttttgtttctcgctgatggtgctgttgcaattttatcatacaccaagctacaaaataaagatgatggcaacagaaaac

SEQ ID NO: 120985 - DNA, 416 bp, Zea mays
  Clone ID: MRT4577_41819C.1
acacggactaccatttcattgatttttcattcctacccatgtgtctagacagcgaggaaaaatggggaggaaaagtgcattcaccaccggagcctgaccacctatagagagcttggtaaggaggctccctttaccctctaatggttctttgggtgtaccctttggggtatacgaagaccctacacgtttcccaccaacatgggggggggcgccagatcatagctttgtctaaaaagtaacctgtttcaacccccgcaaatgcaagacagactacagttgatttcggttcagccaagaaccatgcatggataaaaaaatatccagcaaatcaaaattgtttggcgagagtgaccatcctgtggccatctttaagagttgagcaaaactagtaaggcttgaatttgctctgggcccta

SEQ ID NO: 120986 - DNA, 187 bp, Zea mays
  Clone ID: MRT4577_4181C.1
atactttgattattctatgattttattctagatattattgggtacttttaggatttaggggactcaaacactttctctaatacctcttcgtaaggacctgttcgtttatagaccaccctggataacatttcaaccatgatgtttaaatgagatgcccttagctaattaattaaaggaactaaaggtg

SEQ ID NO: 120987 - DNA, 270 bp, Zea mays
  unsure (1)..(270): unsure at all n locations
  Clone ID: MRT4577_41820C.1
caaagtctgcttattgtttcattttttgtttaattttgtgaaacaccagttaatttaatttcaaaatgatttcaattcgtttggttttcgtagccaccattgttctatttgcttctgctgctttcgcacaggagtttgatagcgaatttgatccatcggccggtcaattgccagcttcaggtctagcatcatatgcagttcaantcggagtcagtccatactagactgctctttagaaaattgttgtgagttgtgactcttgtgtactct

SEQ ID NO: 120988 - DNA, 1704 bp, Zea mays
  unsure (1)..(1704): unsure at all n locations
  Clone ID: MRT4577_41821C.1
agggattgcagctgcaacagtgatttgcagctgcancagtgctcgtgcaagggcagccgaacgcgctcaaagttcttaaacgaacatgaatttcagcctccaaacaagtcatacaataggattttgatcagtgaaaacttgggtcagaaggaaagtgcgagtgaaccaagataatgatagcagccggcaggtatcaagagaacaatataggacaaaggtgtaactaagcttcatcagaatgagaacatatggtggatgtcaacaacaacaacaacaacgaaagatccaagtacacttcagatctgcctcatttctatgtagctacaagtcaaaatggtcgacacagacatatgcaaagcctcttttcatttacccctgctactatctaaagtcgatatagggtacattcatgctagcgtactgtatttaatacacacacacacacaaaaatatgaaacagtgagcaagataaattaaacatcattcttgggatacatgaaccaaaagagtcgagcttacagcagcaaaaaggaaaccaaggttacttacttgctcattctccccgaactgtgattacatccatcttgcggattgcatccatatcgacattttgtgcattgcatatttgcatgcatatcatgttgtgggagcgcagttgctacggcccttgccatgacatgttccaactctgctcaagctccacatttggtaccaagttttgccacccccctaacatctccggctgctcacctattaacacttctatttcacaggaagtaaaggaattgtccagcaaaaatattacattattccactcagccatacggatgggcgagtttcgaggaagcatgaaacaatctccatacccttcaaggctccaaaatagctccataacaactgcttgttaacttaataataccacaaggctcaggtgtgtccccacaattatattgtaccgtaatccagcctctcccacttgaaggattttccagaattgatccgcagcaaagctcgcatgaatacacagacgcatacgcagactgctgctatagcaagcattgaatgaatataaggccgagcaagcagtccccttgaccgcataggctgccttaacacaccagactccaaaatggcacactgggagcaagatcttatttgcaatgcctgaaccccagattttttacggtcatcaacattccctaactgatccatatgaatttcatcgccattgaccgttatagtaacctggctgttcttcatgtccaccagcttttgtgctacaagctcattatatgaattatgattcctcaacttggcatatgtttcaggagattggccatcttcgtctaaagctgactgccaacaggtcaaaccaacctgttgaggatcatctgtcaaggcgtcaactatatcctctgcattctcaatggatgcagcaagatgcaacggagttaaaccaccagggccaggaaagtttgggaggaaggggtaaaccttggaattatcaaggcatagtacaacaaactgtacaagcaaatgcaccattctcctactctttctttttactgctgagattcaccttctgaacagagcagtaaaaagaaagagtaggagaatctcagccagcatctccatagtttcctttgataattcctcgctgaccgagcttctctcacgagccgaattccgagcttacgtgcgggg

SEQ ID NO: 120989 - DNA, 506 bp, Zea mays
  Clone ID: MRT4577_41822C.1
gggaaaaaaaacttgccgaaataatcccccggggcccggggggtaaaaaaaggcccttggggaaaaaaaatttttcaaaaaactttaaaaaaacccctattttttgggggttattgggggcaaacaaactttccaaaattttttaattaaaaattttttttttggccttttcccgggaaaattaaaattttttttttggccttaccccagcggggggggggcccttggccccctaaggggcccaagaaaaaggccaatttgaaatggggcccgggggaattcccttggggttggggggcccaaccctaggctggggggggtttttttgggggcaaccccaaaatttttggggggaaaaaccacaggggctttgccaaaaagggcataaatggcttaaagtttaagggaaaaaaactttttttggcgcttaaaaaacgggggggaatttattttttcataaggggtgggggctttcccgaaaacctttggggccccgggggaaattt

SEQ ID NO: 120990 - DNA, 524 bp, Zea mays
  Clone ID: MRT4577_41823C.1
aaacaccacaaaaaatatttcccttttttttggacccccaaaagacgtaaataaaacaccccccctttttgccgggttccttgaccgggttaataaaaaaaccccatataataaccaaaaagcatccgggggggccttgaaacatgcataatttaaacaaaagctaacaaaaggcattttttttttcggccggcccatgcatgaaaaagttggggtttcgggaaagggcctcaaccaccgggagaaaatatgaggtaccaaaaacaaccactatggttgcaggaccaagcaggagggaggcacccaaggtttttgcatgtcccccccgggaaaaaaaggggggccaaaagaatcgtcactttgggcgtgggggggaggaacccatccggaacggttccgggcgggaagggggcggccatggccgtgggtggagctcccataacctgaaaaaccagaagtatggccaccaccgcacgggccatttcttttttgcccccttaaggagggaatatgcgttttttttt

SEQ ID NO: 120991 - DNA, 363 bp, Zea mays
  Clone ID: MRT4577_41824C.1
attcggctcgtggcttcaaggccttgttttcatacgctgtgacagattctgacgctgccttctcattgtggcatctaacacaccacccgcagatctgtgcaaggtgttcagctggattgagagaagctacttccagctcggggccgcaaggaagttgcttgtggacaggacctcctgtatatcttgtacagaaataccccgtgaactgcttatgagctctcgccgcgcgccgaagatggcttacttcaactggctcatgcacctatgcgtggacctgcaccagatggtgaagggctgcactctgctggactccgcacactatgttggtatctacgccaacatgcaaacgaggaccgagacaca

SEQ ID NO: 120992 - DNA, 314 bp, Zea mays
  unsure (1)..(314): unsure at all n locations
  Clone ID: MRT4577_41825C.1
cacatactttcaacgcataacacncaacaacgaacctcttaaaattttttagccctttaccaacaaccaacacgactgcaaacatacccatacaaacaaaagctccaaatccaacgccacaccccctacaatcaatatcaacatctacatcatacacaccatgagcacacagacactgtaacatcaaataaaccaccataaacatcatcaataacctgaataccttaaaacacgctaaatcagaaacataacaacattggagagcactaaacccaacgctaatccagatacctttaacatttaataaaaacact

SEQ ID NO: 120993 - DNA, 439 bp, Zea mays
  Clone ID: MRT4577_41826C.1
tcgacccacgcgtacgtacacttcttctgccgccgctgccgcatctaacgcatttctatcccacgtacctccatgccagaggggtgtacaaaacgacattggtctgataatcctctcctcaaaactccagaagatcttgcacagcaaaaacacactaatacaatcctccaactccttcttaactgatgtttaatgcctgtgaagcttcagcatagctactgcattaccccactctcaaactgttgtcattctccctgtctgccaaattgttctctaactaccctctggcagaaaagaaaaggtcactgatggctgattttttcctatgatttcagactaaagcgaatgtagtcttcatgttttgctcaatttctgatacttgcctcataaacctccttttaacttcattttccttaaatttttctttagctgctttcta

SEQ ID NO: 120994 - DNA, 1140 bp, Zea mays
  Clone ID: MRT4577_41827C.1
atgaagcaatggcgggacgacatcgaccgactgctcggcatggcacattctacctcgaccaggcgtgcgggagaggacgccagggtctctttggagagggcgcgcgagcaccgccaaaacatcgagggccgcaaccttgatcaagacttcgctgtggcggtaccgcaggcaccgatgggcacccggtccccaacgggtgtccccttggctagcgtaggttgcgtcgctctcatggatcatctccgcgcagtgtcgtggccgcccaagttccgtccgcacctgccggaaaagtacgacggaacgacaaacccgtcggagttcctacaggtgtacgtcaccgccatcacggcagcagacttggctcatgaacctcgtcccagggtcagtctattcctgggaagagctctgtgcaaggttcgttgcgaacttcgccagtgcttacagcagcatggtgtggaggcccacctccatgcggtgagacaagagcctggggagactctccggacgttcatctcccacttcaccaaggtgcaaggtactatacctcgcatttctgatgcttccatcatcacggccttccgtcagggagtacgtgatgaaaaaatgttggagaagttggccacgcacgacgtggaaactatccccacactcttcgctctggccgacaaatgctctagagccgccgagggccgtgcatggcacttggccccacaaaccggggctccccagtcgggtggctcaggtgtcgtcccccgggacggtaagaagaaaaagaagaaggaccgcgactaccagaagtcgcggtccaccgcgctggtcgttgcagccatgatcgggggccggggcgaccgcaataaacatccacggccgcagaggggtaacagcggcccatgccctgtgcaccccaacggacgccacagcgccgcggagtgtcgcgagatcattgacctcgtgaaacgcgtcagcgagcggcgcgagcagtcttccaaagacgactccccacctcatcgccgacctggcaaagaaaaggtggacgacggtgaggtggccgcggctgaacgggacctcgggtatcagtcacccgagggggacctgaaggatgtcttcgtcggaggctcctactccggtggagacaactag

SEQ ID NO: 120995 - DNA, 267 bp, Zea mays
  Clone ID: MRT4577_41828C.1
cacgcagatatccaggagctggaaaacattgcattagggagaaatgatgaagatggaaaaagatgaaggaatttatttggcaatagtcaccaccaagttcacgcaataacaaatttggaaccacaggttctttttgcataccctccagagaagcctcttccactcaagtacaaggataccctctctttctgccttcccggaggtgtacaggttcatgctgtcgaacgtactccttcgttcagtgagctgaatgaaattctcctggga

SEQ ID NO: 120996 - DNA, 699 bp, Zea mays
  Clone ID: MRT4577_41829C.1
attgcctacttcttggcgacgcagtgaaccaccgtagaaacagcatgtattagaccgttcttccgctgccggcgacatgagctcagcgcctcctgacgatgccactattcctacctccgtgaccttgcccagggaggggcagaggatcaagtactcgagggagctcctgctcgccgtcggcagctccgacgcctgcaaggtgctgcccgccggcgtcgacctgtccaagcaccccgatgacgtgaaactctgggttcgcgccgagacttggtctgcccgctcggttggacgccaagggaagtcggaattgcctcaccgagtgcgagagccggagtcttttcaagcaggcgtaggaagcaaatcgaagccatgcatcagattcttcaggtactcgaatatttcaacagttgctgtttcctttgcattctgctggttcggttgtttatcctcatgatgtttcccatcgtgcagtattgcaggttgccgctttggtgatgattgtcacttcatccatgacatcccgggcggctaccgggccgtcgagaaactgggcatcctgagtgccgcagctcctgctcctccaccagcacaaggcgaggagaagcctgccaagcatttgtccacggacaacgcgacgccaccacccatggaaccaactcccaccggtgaccatgcacatcgagcacagatggagcccga

SEQ ID NO: 120997 - DNA, 879 bp, Zea mays
  unsure (1)..(879): unsure at all n locations
  Clone ID: MRT4577_4182C.1
cattgggaccctcgaggccggccgggtgcgcgctctcccccctccctccctccctccctctcgctcgtggccacgactgggcgactgcctccgccgcatttcgctaggcgccacacggcccttggccggcgacgagcacccacagaaaaagtgttgctcctacgactagttctttttatgtgtaaccttcaatgaaggattctcaggatattcagagcacgacagagttgcagtcaccagtgcaaggtactaatgaagtgcaaagtcagcaaccaaactcaatggccgctgatgctcctgctggaaattcgggttccttgtctgtagctagtaatgacaataagaaggtgtctcgcgaagatattgaacttgtaagctttctagctatctagtggcatcccttctagggtagacccagtgcctgaggctcccacatgagtggtgtctggggaagggataaaccgaggcaggcttttcccttgcaaatgcggagaggctgcttcgaacccgcaacctggttcagaatttgatagagcgttgtctacagctctacatgaacaaaggagaagttgttagaactctttctactcgtgctagaatagaacctggcttcactactttagtatggcagaaacttgaagaagaaaactccgagttctttagggcttactatatacggttgaagttgaaaaggcagatcatcttgttcaatcatttattgcaacgccagtacaatttgatgaaatatccagcacctccgaatattccattggctccaatacaaaatggaattcatcatatgccagtgcagttagcaatttaccaatggggtatccagtacttcagcagnctatcatgcctgctcccggcaggctcaca

SEQ ID NO: 120998 - DNA, 1200 bp, Zea mays
  Clone ID: MRT4577_41830C.1
gtcgacccacgcttcctcaaggacaaaaaaaaaaaaaacagagcgcagcattggaggcgaggaagagctgtcggccggagatggacaagtactgggaggagacgcagcgctacctggagtacgaggagctcagcatctatttggaggcgcaggaggacgccatgtcttgctacgactccagctcgccggacggctccatctcccactcgtcgtcgtcggcggcggcgtgcggcaacaagaacatcctgatggagcgcgaccgccgccgcaagctcaacgacaagctctacgcgctccgcagcgtcgtgccgaacatcaccaagatggacaaggcgtcgatcatcaaggacgccatcgagtacatccagcagctgcaggcggaggagcggcgggtgctgcaggagctgcgcgtgctcgacgacgacaccgccgccgccgccaccgcgcaggtggagtgctgcgacgtcgacgggggcctgctgcgacgggaagccgagcgcgcgaagaagatgaagcgcgcgcagtccgtcgccagcggcgcgcagtctgctccgcctccgcctccgcccgcgccgccgcacgtcgaggtgctggagctgcgcgtgtcggaggtgggcgaccacgtgctggtggtcagcgtgacgtgccgcaagcgacgcgacgccatggccagggtgtgccgcgccatcgaggacctccggctccgtgtcatcactgccaacgtcacctccgtcgccggctgccacgtgcacaccgtcttcgtcgaggtagataaaatcgaccacatccaagtgaagaacatgattgaggctgctctcacgttgctcgacgcccccggaagcccccacagctcgatgagctattacgagacctaactatgttgagcaatgcttttcggacgtctactaggtcaacaactcagtccacaattaaccagaaaggagtatgtcgtgttttgctacaatgtgcttgttgtgttttttttcaacatcacccctaagagatgatggttgtttcctctaagatgcagctagtgtaccaagcaatgtttggacttcgtgtcatacatcaccacgagagtgacatgtatttgtgtactataacatgtatatgctaaagaaaataacaaggggacttgtctttcgaatgaagagctatcaaatatgctgtcctcataaaaaaaaaaaaaaaaaagtccac

SEQ ID NO: 120999 - DNA, 456 bp, Zea mays
  unsure (1)..(456): unsure at all n locations
  Clone ID: MRT4577_41831C.1
ctacacccccatcccggacagncaaaacctacctagccgccgccgcaggcgnncccccatcgccgccaagatgcagatctttggcgaagactctgatggggnaagaccatcactattggaggcgcagtcctcnggacaccatctgacaacgtcgaaggccaacagccagcacaagcggagggcatccccccggaccagcagcgcctcatcttcgccggcaagcagctcgaggacggtcgcaccctcgccgactacaacattcaaaaggagaccacccaccacccgccgctccgccctccgcggcggcgccaagaagcgcaagaagaagacgcacaccaagcccaacaagatcaagcacaagcacaaaaaggcgaagctctccgagccgcagctctataacgcgtacgacgccacacgcaacggcgacccgcctccgcaaggagcgccccaacacac

SEQ ID NO: 121000 - DNA, 1168 bp, Zea mays
  Clone ID: MRT4577_41832C.1
gcagcattggaggcgaggaagagctgtcggccggagatggacaagtactgggaggagacgcagcgctacctggagtacgaggagctcagcatctatttggaggcgcaggaggacgccatgtcttgctacgactccagctcgccggacggctccatctcccactcgtcgtcgtcggcggcggcgtgcggcaacaagaacatcctgatggagcgcgaccgccgccgcaagctcaacgacaagctctacgcgctccgcagcgtcgtgccgaacatcaccaaggcaagcggcggtcacgcactcacgctgcgaccgaccgacggtcgtctgtcccgtcgtcgtccgtgctctcggcattatattatattgcatgcatgcagatggacaaggcgtcgatcatcaaggacgccatcgagtacatccagcagctgcaggcggaggagcggcgggtgctgcaggagctgcgcgtgctcgacgacgacaccgccgccgccgccaccgcgcaggtggagtgctgcgacgtcgacgggggcctgctgcgacgggaagccgagcgcgcgaagaagatgaagcgcgcgcagtccgtcgccagcggcgcgcagtctgctccgcctccgcctccgcccgcgccgccgcacgtcgaggtgctggagctgcgcgtgtcggaggtgggcgaccacgtgctggtggtcagcgtgacgtgccgcaagcgacgcgacgccatggccagggtgtgccgcgccatcgaggacctccgtcgccggctgccacgtgcacaccgtcttcgtcgaggtagataaaatcgaccacatccaagtgaagaacatgattgaggctgctctcacgttgctcgacgcccccggaagcccccacagctcgatgagctattacgagacctaactatgttgagcaatgcttttcggacgtctactaggtcaacaactcagtccacaattaaccagaaaggagtatgtcgtgttttgctacaatgtgcttgttgtgtttttttttcaacatcacccctaagagatgatggttgtttcctctaagatgcagctagtgtaccaagcaatgtttggacttcgtgtcatacatcaccacgagagtgacatgtatttgtgtactataacatgtatatgctaaagaaaataacaaggggacttgtctttcg

SEQ ID NO: 121001 - DNA, 330 bp, Zea mays
  Clone ID: MRT4577_41833C.1
tttttatattgcgagtaaataaatggacctgtggtggtggtgttaataaaaaagatagaaaaactctaaaaaatacaccagaaaataacttcatctgtactagaggtccttggctttcgtcttccctctggcccgttttctcttttgttttgtcgggggggggcctttttgggggtccaggttttcccccccggggtttccgcgtttttcctttttttttggggccccttattttttttccctggccccttttttcccccctgggttttgggaaacccccggggttccccctttttttgggcttgggggccctccccttttgtcccttgg

SEQ ID NO: 121002 - DNA, 2209 bp, Zea mays
  Clone ID: MRT4577_41834C.1
tgggtttccacacagcgaggcccacgttgtagggttttcgtttccgacacagtgaggccacgttgtagggttttttgcttgcttcgcccggcggtaaagctgagcgcggcgagagccggagaccgaagaagcgccgcccgccgcgcgcccggtcatggagatcggacagtaccccgcgagcggctgctccaaggagcaccagaagatctaccaggagtggttcgcgctcgcggacgcagatggggatggccgcatcacgggccccgatgcgatcaagttttttggcatgtccaagctctcccgccctgacctcaagcaggtctgggctatcgcggacaccagaaggcaggggtatctgggtttctctgaattcgtcacggcgatgcagctagtctctctggcacaagcaggcaacgagattactcaagatagccttaagcgagatgatttgagcagtttgaatccacctgtgatggaaggtttggatgccctacttgcgaaatctaagcatttggtgaagcgtgttgatccagaaatggatggatatcctcaggaacaatctcctttaacaaacaaatggtttagctcaaagtcatcaaagaagatacctctgacagccgtcacttctgttatcgatggcttgaaaaaactttacatcgaaaagttgaagcctttggaagttacatacaagttcaatgatttcgtttcccctttgctgacaagtagtgattttgatgcaaagccaatggttatgctcttaggtcaatattctactggtaaaacaacttttatcaagcatctgctaagaacaagttatccaggtgcccatatcggaccagagccaacaacagacagatttgtagttgtcatgtcaggatctgatgaaaggactattcctgggaatactattgctgttcaagctgacatgccttttagcggtcttacaacatttggaactgcatttttatccaagtttgagtgctctcagatgcgacatccactgctagagcatatcacatttgttgacacacctggttgttctttctggtgaaaagcaacgcacacagcgcagctatgatttcactggtgtgacatcatggtttgctgcgaagtgtgatcttatccttctcctgtttgatcctcataagctcgatatcagtgatgagttcaaacgtgtcattggatcattacgtggccatgatgacaaaatacgcgtagttttgaacaaggcagaccaagtagacactcaacagcttatgagagtttatggtgcattgatgtggtctctcgggaaagtattgaatacacctgaggtttcacgtgtttatattggatcattcaatgacaaaccagtaaatgaatcagctgttggtccacttggaaaggaactatttgagagagagcaagatgatcttctttctgatctcaaagatatccccaagaaagcctgtgaccgccggatcaatgaatttgttaaacgtgctagagctgccaagatccatgcttatataataggtcatctaaagaaggagatgcctacaatgatgggcaaagcaaaagcccaacaacgactcatagacaatctgcctgatgagtttgcaaaggtgcaacgggaataccatcttccgtcgggagattttccttatgtggagcacttcaaagaggtgttgagcgggtacagctttgacaagtttgagaaggtgaagcccaagatgatacaggccgtggatgatatgcttggatatgacattcctgaacttctcaagaacttcagaaacccatacgagtgaacccatacaggcggttgaaagatgacttcgatctgcaacagaatgagggattgattgtcaggcgatgtgaatcatagtggtcaatgtctcttggggcgttcattgccatccatgcttagccattgttatataactttatgcataagaatcatagagccattgctcaagctttcaccagacatctgattatgtaaaatcgacaaaatagtgatgttagtgttaaagaatatactgtgatgttgtttcttcaaatgagtatttattcgtttggaacagctggagaatgtgggtttgtcaattatcagcccatgaagaatatttggaccaccgtggggtgttgtcctgagcaaaaaaaaaaaaaaaaaagggggctggctccttgttttgattttataatgtcatgtatgttgtggcgctgc

SEQ ID NO: 121003 - DNA, 550 bp, Zea mays
  Clone ID: MRT4577_41835C.1
aattcggcacgaggcaaagccacatcccatgcgtctacgcgtgaggctaggagacagacaggccgaacagatgatgcgggatgcaacgaaggagatgaaccgtgtgatccgtctggatcttcttttagggcacaggacacacaacacaggaaaccggccgcgtcaagaggactcttgtatcgtggatgttgtacaatctaagctagactcggacacgtctcgctacgtagttttgaaacttagctgatcgcacttctacctacacgaaccaaccgtcccaaaatcttccttattttctggacgctcaggcggttttgctcttatagaggtggctgttcctccctatcatttgtctgttgttaccgttcgttgcacacacccatgtcgtttctctattgttttgtgcgaacaccatctgcatttccaaaaaaaaaaaattctactttgattttgcataaagacaacctctcaggctctttgttctagctccatccatgctgtacgcctaatgggcgggaccatcgacatgtacacttactacaataccagc

SEQ ID NO: 121004 - DNA, 405 bp, Zea mays
  unsure (1)..(405): unsure at all n locations
  Clone ID: MRT4577_41836C.1
ccgacccgacccgacccgacatgtcttcagtacaggccgaggtgggtggcggttggagaccgaagcagcagcagtaccctctggagatccgcgaggtgtgggcggacaacgtggagcgcgagttcaagctcatccgcgccgccatcgagcggttcccctatgtgtccatggacacggagttcccgggcgtcatccaccaccctcccccgtccgtccaccactcggcgctcaccccgccgcagcgctacgcgctgctcaagtccaacgtcgacgcgctgcacctcatccaggtgggcctggccttcgcgccgtccgcctcgttcccacccgcgctcgccttccaggtcaacctccgcgagttcgacccgcgcctgcaccgncacgcgcccgacttcgtgcgcctgt

SEQ ID NO: 121005 - DNA, 525 bp, Zea mays
  Clone ID: MRT4577_41837C.1
ccggaattcttgggtcgacccacgcgtgcgcccacgcgtccggctctgcggagtgaaagcgattaatttgatttttctttggtattttgattctgctctgcgatcaataagctatagtttggaattcctatatgatagcttcacgtttataatctagccaagagtattgataatgacttcaactttttcgagcatggttagtttaatattgctttggcaatttagcaatagtgcaaaactcctagatgatagcttcgccttataatctagctaagggtgctgatgatgacttcaagtttaatgttgtgccaagtgaacgtgattagtttgagatcgctttggtattttaatgttgattatgcaatcaataaacattcttgttgaactcctatattgtagcttcaccttatgatgcctcagacttcatcgtgccttcttacttttgacagaatgatccattaattaatgccttaatagcgcaggagttacacatttacgatggcatcatctgcttctacatgtatg

SEQ ID NO: 121006 - DNA, 385 bp, Zea mays
  Clone ID: MRT4577_41838C.1
gctgaaaccggggcaaagctataaaacagggcagggcatatataccccagcccctatctaccctaaaaaaacacttggccgaaaacaaaaaacggaaacgggacggggcccccgcccctggtgggcgccagggccacgggttaagccccgaaccgccgccttttgggcgggtgggcctccgaccccttggggatcagggccagctcctcctccttggggagcatggggcccaaaacgaggcccgggtcgtcgggaagcttggcgaggaaccccataatttgggccggccggtttttgggggggcgcaggcgggggtccatggcccgaaattcgtcctccaccccgcgctggtgttcccgcaggcgctgcacggcccggatgggcc

SEQ ID NO: 121007 - DNA, 669 bp, Zea mays
  Clone ID: MRT4577_41839C.1
tttccatcatgcttctcgacacctagcctctgatctgatacacctgcagattatccatctatccatgctcggaaggaaaccactgcgattatgcctcgttgtgctcgaatctatgcgagggaatcgcacctccatgggtccagggtacgtggagcggcttcatccacgttaggtctgatgacaatgacggccccattcatctcgtggatatggacattctgcgatctccacgacatatatctcgatgacgctctaggggctatgtgcctaatagaccatccaggctgacggtgctaaccacagaaatctctcctgcaaaggaggtgctaattaatacgactggatcacgcgcatcatccacacgcctaacgtcctacatcatgtcactacgttcatcgcatagagagtctcttgcggcacctcattactagacttacaaatagtcgtcacgtaccgattgtactacgatgttaggttaagaggtaggaataccactgacacactatcagagtatagcttacattgaaaaagacttggagctccttgctgacgtcaacaatgtggagaccaacgtggagaacaatgttgtctctaataagccaagacatatgatcaactcgtggatcagccaggaatgaaggtcctaatgtgagagctcttcactatgac

SEQ ID NO: 121008 - DNA, 1782 bp, Zea mays
  Clone ID: MRT4577_4183C.1
acggatgccagctctctagctaccttgtgcccaaagtgccaaacggccccttaagtcttaaccacctgctttatcatctcccgtgcgcgctctcctcggtctctccctccctccctctcgctcgtggccacgactgggcgactgcctccgccgcatttcgctaggcgccacacggcccttggccggcgacgagcacccacagaaaaagtgttgctcctacgactagttctttttatgtgtaaccttcaatgaaggattctcaggatattcagagcacgacagagttgcagtcaccagtgcaaggtactaatgaagtgcaaagtcagcaaccaaactcaatggccgctgatgctcctgctggaaattcgggttccttgtctgtagctagtaatgacaataagaaggtgtctcgcgaagatattgaacttgttcagaatttgatagagcgttgtctacagctctacatgaacaaaggagaagttgttagaactctttctactcgtgctagaatagaacctggcttcactactttagtatggcagaaacttgaagaagaaaactccgagttctttagggcttactatatacggttgaagttgaaaaggcagatcatcttgttcaatcatttattgcaacaccagtacaatttgatgaaatatccagcacctccgaatattccattggctccaatacaaaatggaattcatcatatgccagttagcaatttaccaatggggtatccagtacttcagcagcctatcatgcctgctcccggccagcctcacatggatccaatggcctgcggtctgtccagtggtcatgtggttaatggaatacctgcaccaggtggttatcatcccatgcgcatgaactccggaaatgacatggttttggacaatggagcgcctgaagcaccacatgctggtgctaccggtagtgctatgtcatctgagatggctgtgagtccctcgtcggcggcttcaagcaaccatgctccttttacgccgtcagatataccaggcatgaccatggatgtatcggccctagactcggcatttgggtgtgatgtggggaatcctgaatctctgcaattgggaccagatgggtcgtcaagagactctattagatccttagggcagctctggaatttcagcctctctgatctaacagcggatttgacgagtttgggagcagatctggacgtgctggagaactacactggcacccctttcctgccatcggattcggacattttgcttgattccccagaccaagatgatatagtcgagtattttgctgacgccatcaacgggtctccgtcagacgaagagaaaccctagtttttccggggtggcgttcaggttcatcatcaggcagggctgtcatctcatctcatgtagtgtaaagcagccaatctaactgtgtattcggctcgcgcgcggtgatccggtaatcgggcctctgccactaaaagaattttgtagcggttaattgaaatcctaattctttggaataagtagctgggactgggatgtccagagagtagcggtcgttgttggcttagggattgctgctggtggatgcaaacctcacagctagctggtgactctgaaaccacaggaactccttttcttttctttttatttttacttgtatttgtatttgctgctacataagtaaacagaagtggggtgtacctagttttctggttctcgagtgtcttgaaagttgaaacagtggacgcgggttttcagctgaaagatcattatagtgttgttgccc

SEQ ID NO: 121009 - DNA, 2096 bp, Zea mays
  Clone ID: MRT4577_41840C.1
cattgggtacctcgaggccggccgggaaggaggcgccacacaaccaccaactcgcgatccatcgatttgcagaacaccacccaacagccaaaccatcactcgatcggtagacatggataaggcctacatcgccgccctctccgccgccgccctcttcttgctccactacctcctgggccgccgggccggcggcgagggcaaggccaaggccaagggctcgcggcggcggctcccgccgagccctccggcgatcccgttcctgggccacctccacctcgtcaaggccccgttccacggggcgctggcccgcctcgcggcgcgccacggcccggtgttctccatgcgcctggggacccggcgcgccgtggtcgtgtcgtcgccggactgcgccagggagtgcttcacggagcacgacgtgaacttcgcgaaccggccgctgttcccgtcgatgcggctggcgtccttcgacggcgccatgctctccgtgtccagctacggcccgtactggcgcaacctgcgccgcgtcgccgccgtgcagctcctctccgcgcaccgcgtcgcgtgcatggcccccgccatcgaagcgcaggtgcgcgccatggtgcggaggatggaccgcgccgccgcggccggcggcggcggcgtcgccgcgcgcgtccagctcaagcggcggctgttcgagctctccctcagcgtgctcatggagaccatcgcgcacaccaagacgtcccgcgccgacgacgccgactcggacatgtcgcccgaggcgcacgagttcaagcagatcgtcgacgagatcgtgccgtacctcggcacggccaacctgtgggactacctgccggtgctgcggtggttcgacgtgttcggcgtgaggaacaagatcatggacgctgtgggcaggagggacgcgttcctgcggcggctcatcgacgcggagcggcggaggctggacggcgacggcgacagcgacgagaagaagagcatgatagccgtgctgctctcgttgcagaagtcagagccggaggtgtacacggataccatgatcatggcactttgcgggaacttatttggcgccggaacggagaccacgtcgaccacgacagaatgggccatgtcgctgctcctgaaccacccggaggcgctgaagaaggcacaggcagagatcgacgcggtcgtgggcacctcccgcctgctgaccgcggacgacgtgccccgcctcggctacctgcactgcgtcatcaacgagaccctgcgcctgcacccggccgccccgctgctgctgccgcacgagtcggcggcggactgcacggtcggcggctacgacgtgccccgcggcacgctgctgctggtcaacgcgtacgccatccacagggaccccgcggtgtgggaggacccggacaggttcgtgccggagcggttcgagggcggcaaggccgaggggcgcctgctgatgccgttcgggatggggcggcgcaagtgccccggggagacgctcgcgctgcggaccgtcgggctggtgctcgccacgctgctccagtgcttcgactgggacacggttgatggagctcaggttgacatgaaggctagcggcgggctgaccatgccccgggccgtcccgttggaggccatgtgcaggccgcgtacagctatgcgtggtgttcttaagaggctctgaaaacctcatggatcgaattgctggcatcgtctgaagggtgtatgacgtagcttccgagttccgagcatatatattcacttgccttgtactagttgattttcgccgagtgtatggaatggattttctttttttttcttgccaaaaaaaaaaaaaaaaaaaaaaaaaaaaaaaaaaaaaaaggccggtacatcctaggttctcgctctataggtgaaagtttcatatgtagtttcgtaccagtatgcatgtctgatggtctgcgctgaactaagtacattatcatttagtacaaaatatcgtacatatacccccatatatgtaaacaactagtactcaataagtactggtcgttgtttgccggcgtgctttagcaaatttaatcttcggcgagcaagtctaaaaaaagcacaagcaccatact

SEQ ID NO: 121010 - DNA, 552 bp, Zea mays
  Clone ID: MRT4577_41841C.1
aattcttacttttcatctttctgcattttaattcagtccttatgatgtttattatatgcttttgacctaactaaatactgcaataaagccagtcatgatattcacttggttaattacaccatctgtatgtttaaaataaaactttttttttttgcgacctgaaaaaccaaatatatataattttagaaaatctcacattcagaatcagtcttgacccatttgttggcgtcaacacttgaacgagcttcatccataatcttatgattactttccaagtacttctttgctatagaatttgaacgttgtggatgtatcttcttgttgagtattggccttagcatctacacacaaaataacatatggaaaaaatgtttctagtgtacataactattattgaattcacttcttttcataataaaaataatattttgcttaaagattgaataatttgatcatatatgcttaccttttccattcgtgtgttgtgcaatgaatctcctctagataaatcaagaagaggaggtggagttttgaagccacttgtgcaaacca

SEQ ID NO: 121011 - DNA, 1932 bp, Zea mays
  Clone ID: MRT4577_41842C.1
gtcatcagttgcgtatgcacaagtgaataggtataataaactaatctcggactgtgtatatgtagcaaactagtaacgaaggaagaatggcgccacacactgccaccgccactgtcatacagatacagcacactagctaacaccaacttgcacatcagcacgtcatggataaggcctatgtcgccgtcctctccgtcgccttcctcttcttggtccactacctcgtgggccgcgccgcccctggcggcggcaaggggaggaagcggctgccaccgagccctctggccatcccgttcctcggccacctccacctcgtcaagacgccgttccactcggcgctgggccgcctcgcggagcgccacggcccggtgttctccctgcgcatggggtgccgccgcgcggtggtcgtgtcctcgccggagtgcgccagggcgtgcttcacggagcacgacatgagcttcgccaaccgcccgcgcttcgagtccatgcgcctcgtgtccttcgacggcgccatgctctcggtgtccagctacgggccctactggcgcaccctccgccgcgtcgccgccgtgcagctcctctccgcgcaccgcgtcgcctgcatgtcccccgtcatctgcgccgaggtgcgcgccatggtgcgccggatggctcgcctagccgcgggcggcgccgcgcgcgtccagctcaggcggcgcctgttcgagctctccctcggcgtgctcatggagaccatcgcgcggaccaagacctcccgctccgaggcttgcgccgccgacactgacgtgtcgcccgaggcgagcgagttgacgcggatctccgaagagatcatgccgtacctcggcacggccaacctgtgggactacctgccgttcctgcggtggttcgacgtgttcggcgtgaggaacaagctcatggccgccgtgaggtggagggacgcgttcctgcggcggctcatcgacgcagagcgccggaggatggacggtgacggcgacggcgagaagaagagcatgatcgccgtgctgctctctttgcagaagtcggagccggagctgtacacggataccatgatcatggcgctgtgcggggacttgtttggcgccgggacggagaccacatcggtcacgacagaatgggccatgtcgcttcttctgagccacccggaggctctgaagaaggcacaggcagagatcgacgcggtggtgggcaactcccgccgcctgatcaccgccgacgacgtgccccgcctcggctacctgcactgcgtcatcaacgagaccctgcgcatgtacccggccgctccgctgctgctgccgcacgagtcggcggcggactgcaaggtcggcggctacgacgtgccccgcgggacgctgctgatcgtgaacgcgtacgccatccacagggaccccgcggtgtgggaggacccgggcagcttcttgccggagcggttcgaggacggcaaggccgaggggcggctgctgatgccgttcgggatggggcggcgcaagtgccccggcgagacgctcgcgctgcggaccgtcgggctggtgcttgccacgctgctccagtgcttcgactgggacacggttgatggagctgaggttgacatgacggagagcggcgggctgaccatgccccgggccgtcccgttggaggccatgtgcaagcctcgtgcagctatgtgcgatgttcttcgggagctctaatattctggcacatcctaggttctcgctctataggtgaaagtttcatatgtagtttcgtagaagtatgcatgtctgatggtctgcgctgaactaagtacattatcatctagtacaaaatatcgtacatatacccgcatatatgtaaacaactagtactcaattagtactagtcgttgtttcccagcgtgctttagcaaatttaatcttcggcgaacgagaaatttgc

SEQ ID NO: 121012 - DNA, 420 bp, Zea mays
  Clone ID: MRT4577_41843C.1
ctgcgactccatcttctcgtgctgttcggcgcacgcggagacagcccgcgatcccgatcccgatccttcttcacgcgaatctcgacgatcccccccttccttccttcaagatgttcaatctttgtgggtatggatgatccgacggataaccccacatggttatggatataaaggtaaatctatatccaccggtgtatataagtgactcgatgtgacttttttttatcttaggtataaatatgagatagtaatatccaatagttatttactcattaccatctctaaagtgatggatgcccgcgtaagagatcatagtgctcatgtatgccatcaatgagaaagagaaaggagaactaagatatttatagaagttccttagagcaccttcaataggaaccccctatcacataataatttaac

SEQ ID NO: 121013 - DNA, 701 bp, Zea mays
  Clone ID: MRT4577_41844C.1
agagaagctaggttgattcacttcttgtaacgtcgagaaaaacaaaattcacatccattgcaagaaaaaaaaaagaaaatccattccatacactcggcgaaaatcaactagtacaaggcaacccacaatacgaatatatatgctcggaacttggaagctacgtcatagtcatacacccttcagccgatgccagcaattcgatccatgaggttttcagagcctcttaagaacatcacgcatagctgtacgcggcctgcacatggcctccaacgggacggcccggggcatggtcagcccgccgctagccttcatgtcaacctgagctccatcaaccgtgtcccagtcgaagcactggagcagcgtgccgagcaccagcccgacggtccgcagcgcgagcgtctccccggggcacttgcgccgccccatcccgaacggcatcagcaggcgcccctcggccttgccgccctcgaaccgctccggcacgaacctgtccgggtcgtcccacaccgcggggtccctgtggaccgcgtgcacgttgaccaacagcatcgtgccgcgcggcacgtcgtagccgccgaccgtgcagtccgcggcggactcgtgcggcagcagcagcggcgcggcgggggtgcaggcgcagcgtctcgtcgacgatgcactgaggtaggtggagggtgggcaacgtcgtcccgcggtcacca

SEQ ID NO: 121014 - DNA, 197 bp, Zea mays
  Clone ID: MRT4577_41845C.1
gaaaataaaaatatagatctctaatacctcatttacctgagaggaggcacatatcatcatgagaactttattattacagcataaatcatacaaaatctataagatggcaccccccactggtgggcgggctgcaataatgtgggtggatgggttaaaccatgtttgctaaatgacaacaattcgttgtggttgaagaa

SEQ ID NO: 121015 - DNA, 433 bp, Zea mays
  Clone ID: MRT4577_41846C.1
agctcgtcgcccgccccgacttttgatcccttatctccgcctcccgcgggccgtttcgacgcttccatcaccgtacatagatatccttctaccgccccgctccgtcatccagggctcgactgctcgcatggcaagtgcttgcgctgtcccgaccctcgaagacaaccatacgcgctactgttctgcctctcccaagagctgtctcacgaactggagtacgacaagatttactgatccaactcaccccctggctcttcatcttgagaagatacgggctgtgagactcagccacctatctctgctatatggaagtcgcgctcgccgtgccaggatgccgtctatggggagctcgatgcgctcggctgtgtgcccgaatgatgtcccgcttcgaagctacgtcgcatcatactgatgtccctgctgatgtgctgga

SEQ ID NO: 121016 - DNA, 286 bp, Zea mays
  Clone ID: MRT4577_41847C.1
tcgtattactggatcatcaatagtcgtcatccattttttaatctcctacttcaaggatgacgacacccctcaaaacttctcggcggtcagcccctgagtcggggagattctagtataagtgctatagaggaacgacagtacaatccctattcacaatacagccatccatctctctcatcgcatgtctgacatgttccttaagccttctttattatttcaatttactgccactacattattggttcgggataacctgagatctattcatatgtcagccacagatgtc

SEQ ID NO: 121017 - DNA, 1297 bp, Zea mays
  Clone ID: MRT4577_41848C.1
ctcccccacaggatctagggtttgctcgctcggccttcgtccttcttgggccgagccctaattcttctgcaccgccacccagcaggcttcggtttggttcgcatccgctgcgcccgcttcgtccccgtattcttggattccattggcttctatcttcagtatggatgagccaaacaacaattttaatgcaacggtgcatgccaatgagatgtttgatagcaatggtgtgatccatgaagatgagatggcccatgacgatgagatgatccatggccatgcgatgttccttggcgatgagatgattcgtgggaccgagatggttgaaggaagtgagatgatccatggtcatgatatggttcaggttaatgatctcatccacggcaatgagatggttccagttcacgacatggtcaacggtgacaagatagcccatggtaatgtaccggtccggaattcccgggtcgacccacgcgttcgatgctgaccccagcctatgttgaccaaagcgaagggaataatggaccagccaatgcgaatagcagtcaaggggctcctgcttccactggtgatgggcttctagacttcgatatgtacctttctgagatccaaagtagccagccctcgaaatctgagctggagcagtacctggatgaatccctcactccacgtatccaggagtttgatatcctgaactggtggaagctaaacacggtcaagtttccaaccctctctaaaatggcccgtgatatcttggccattccagtgtccatggtaagcagtggcagctctatattctgtgctggaacaggaagtcacatgctcgatgactacagaagctctctgcggcctgagattgtggaagcacttgtttgcgcgaaagactggctccagtattcaccacctgccaccgaggcaccgagttctgcactggtgaaggctcaaggatcgtaggtttgtcgtggtcactgcctgccttgtggaagcaaagcaagaatccatttacccatctgtcgtatctctgagtgtagttaactgtaggtgtattgtaggctgagattgtgaaccgattttgatatattctggtatttatcacgtaaaggtgtaacatgtgttgaactctgctgaactcgtgactgtggcaaaaaaaaaatgttctgatgtcgtctgaccctttgcagtttgcacgcttccctatgtgcttgtacaagccgtgggatgtatcttgtttttgtattaaatttgttttataccgtgaaaaaaactaaaaataccctaaactaccaactaaaattggggg

SEQ ID NO: 121018 - DNA, 339 bp, Zea mays
  unsure (1)..(339): unsure at all n locations
  Clone ID: MRT4577_41849C.1
atatctttcccncccnnnnnnccaacacccggggccgtttaaaannaaataccgttttcaacactcaaggaaaccttaaggagggcacaaaaaaaggcccaaagggggatcaccactcaggggaaccaaaaaaaattggaaaaaaacaaacacgagggcctgaaacctttttgaccccaagaattgggggcacgggccgaaaacccaccaacccaagaaggcgagaaaaaccccaagagaccatgaaaaaaaggggcccccaacttacaaggggcggggaaaaaacagctcccgaaggaacaaaatcaaggaaattacaaaaccccccgaaaacacaaa

SEQ ID NO: 121019 - DNA, 182 bp, Zea mays
  Clone ID: MRT4577_4184C.1
attccctcccaaaacacatccttctatcccttaaacctccccccagcatccatcatttggatgatacttttacaaagacgcggactaacccatcaaaaattcttcctacatcggcaccccttgcaacggtatccttgcttcttattaatcaacttgcaccattggcaagcgccttttccaca

SEQ ID NO: 121020 - DNA, 134 bp, Zea mays
  Clone ID: MRT4577_41850C.1
ttgcacaaaaacaagttttgtgtcctgctttttactagtctcagtgcaggtagaggacacaacatggattgcggggatgagagtgatttgatgacttctgcgctatacctctgagctaccgggtgaataatagt

SEQ ID NO: 121021 - DNA, 336 bp, Zea mays
  unsure (1)..(336): unsure at all n locations
  Clone ID: MRT4577_41851C.1
gtgcattatgttatggacacagacagnnnnntttttttacaattgcataacacagccgtacacatgactcgtctggtaccaatcatacgcgaacaagataacagcggaggtgcagagaacacctgtcagactcctgcgttgcgctgtgatccatgttcatcatgcagatcatctactactatacgcgatgctaaacagaggcgatattacaagcaggttttatatggactgacgggattgtgtccctccttgcgccaggcggtgctggtggcatcgctaacggacaataaactccgtgcacatgaggcgcctgcacatacgggctcaggtcaggag

SEQ ID NO: 121022 - DNA, 473 bp, Zea mays
  Clone ID: MRT4577_41852C.1
atatataaaatttaccttaccaacaggggtgttttccggtttgaattgttcaaaattattttttaaaggaaaatttaaataaattggtacaggggtgggtacctgacattcaactttttccacttcgattacactggcctggtaggtttaacttttaacgggaaccagcttcatttttttttcaggtggtttttttaacctgcacgtttttttggttttggtgcaacaaaacttcagagacttaatatccggggtcctaaactgcagccttagggggtctcgggtccttcagctttttttttagtggggggcgctgggaatgcttcctcaaactgtgttgaagttgagacaagtcccaacgagaaagggcccaagggtccaaactccaaactttctgccgcatgtaacaaatctgctgtggggggtgaggaaggctcgcagataccatttccttggccgttttgagcaagtgc

SEQ ID NO: 121023 - DNA, 2813 bp, Zea mays
  Clone ID: MRT4577_41853C.1
cttggctctcacgaacctggaggaactgaaatggaatcagaacctcatactcctccatgtagccccaactgagaaacaatactctcttgcttgatactgccacagagccaccaaaatttttgacaaacagactgatgaattcaggatgaaaatcagaggacgcagtagtgacaagattgcattgaacaacacattctgtcatgatatcaagctcttcccacttagccgcagtaccagcagaaggtatatcaaccataacctcaagcaagccgatggcatcctcccaccgcttgtctcttaacagaccttttatcaccaaattgaacccatgcgtgcttgacagcaatccctgctctatcatctgacgacatagctcatatgccttatctgtcatcccctctgcatcacaaccttttatcagaaccgcatatgtcacattggttgctgtcacaccatccctgacagcctcgttaaataaatccagcgctttcccaacttcaccgagcaagcaatacccatgcatcaatgttgtcgcgagaaccacatccatctttccagcaaccagcaacatctgatccttcaactttagtgcctcctccatccttcctgccttcacgagcacagccaccacaaaactgtatgtcaatgtcaagttccatggcctgaagccggcctccatcatctccccgagcacctggaccgccctgtctgcatcgcgcagcctcatcacgtcagcgtggtaccccttgcctcgcatcttctcgaacagcgcaagcgcgtctgcgacgatgggctgctccagcggttgctcgtcctcgtccatgacaagcgcctccatgcctggccccgtacacctcttcagcggtggggtagtacttcttgtccgcagcgagcaccacggcctgctgcgacggatcgccatcctcgtcgtcatcgtagacgtcgtagacgggttcactattgaggtggaagatgtcgacgttgtcgaagaagggcacggagggcgtcgcggtggatccggggacccccacggcgcgtgctgccgccatggacgcggtcttcccctgggaaccgaagtcgatgggcatctcgtcgtcgaagacaggtccctcgtcaaagcctgatgccgtggtgttgcccgcagatcgaccgaactgaggcagaacgggcagatcctccgccgcttcctgtgccaccgctgctgctagatctgcctgaccccccaccagcgactccaccttctggaccagacaactcggcttcttcataaccaactcccagcgcgcttcatctcattgtgccgcctcagccatcgtcgcgagcaccaaggacgaaaccgaggaaaatgtcgagaatcgactacctctgataccaactgtcacgtccccgtggccgccgatagtgagccgggacgtgaggagctgatgacgcaccgatatgccgcctctccgtggaggaagacgagcgaaggggacgaaccctgtttccgatttctgatttgatttccatccctctcctgccgttgtggtcctgcctttaggctgctccgagttgggccatgggacatcgaggcccatcgcgtggtgagccggtgccgggtgttacaggcaagtaactagtttactgagcaaaacatagaattaattttctagtaagtttgctcttcagtatgacagaacatatgactaattttggatagttcgcttaggttgcaccataactcagccacatacctttatggtttcatatgaaacttgtcttgattttgatccatctatcagatatcatatttctacaaacaataacctcctggccatattaaggatctggatatagttggagttgtatgacacaatagatgaaaatttacttttctttttcagcgtttcttatatggtgccacatggaataatttctcaaaaaaaaaaaaaccgtctacttcaaattgtcagtgtttttccattggaaagctacaacaatatatagcccatgcaaaaacccaaactgatcacatcagattgatagatgttgaattaatagatgagaacattttcatgtcctaacttatgtgctgtgcttagtatagtataatttgcaacctttcttccaggtcaaaactgttgtttcaattcatctcggattgactattatttggagtatgaaccccatccgtcatcaacaaaaaatttgcggcatcttttccagatgatcaggaaaggcagcttcgcaaagtacgactatggatggtggggaaacctaaggcgctacggccagctgcgtcctccctcattcgatctaagcagcataccggaatcactgccgatatggatggggtatggaggccttgatgccctggctgacgtaacagacgttgagcgcaccatcaaagagctgagatccacgccagagctcttgtacattggtggttatggccacattgatttcatcatgagcgtcaaggcaaaggaagatgtttatgttgacttaatgaggtttctcagggcccagcagggaatgcacagtagctattaggacgcacgtcacgtacgccttcaaataaatgcttatgctatgatgacagtacgaccatgtaaatacggacacagcatagcatgtaaatacaaacagtctattgcattgcatgtaaagtggtgtgtggattgttctccatttgatgtactgctttctgagtacagtacacatgtacatcagtacatgtaacatgtgtatatgacaaaaatgtagcacatgcaacttggcttatttcgtgccgattgtgtgcttgcatttggggaggaaatcgagttgcaaat

SEQ ID NO: 121024 - DNA, 501 bp, Zea mays
  Clone ID: MRT4577_41854C.1
gctggctggaaatatatatggaaaagggggacgctctgaaggctacagtcaaagcaatcatatatgtgttagacacagtatgagcttaaacacacggtggtcaagttccttacgaccttagcacacgaagctgaacctatcaccacacccgtaacaaaccacacgctaacgctcaaatctaaaacgtacaagggttcaagcggtcaccaaccatccacgatgcatggagggcgcggcacgccacaccagggtaaaggtctgagccaagtaagcccgctcgaatcacagaccccggggactccgattataccgaacagcgatggccggcaaaggaacgtggctctttgaccaaagcatgtccacatcgcgccacacaggtgcaaacgaggcacctggccctgaacgtacaataccttgctgatctaacgggaaacatccatgggattaacaccctcatcaattacagctcgtatactgctcgaaacacctgagacaacactg

SEQ ID NO: 121025 - DNA, 530 bp, Zea mays
  Clone ID: MRT4577_41855C.1
cgaaggaacatccatgcatgcatgctgatatacgcgtacaacggctctcatgctagtatagacagataataatagtttataggtacaactttataactctggcattagctgcatatatgcagatatggatgcgtatgagcaatgcaagtaaggagacaatgaaatttctgcttaggaaacacaacacgaccacaccatctatacccaaataatgatcacgtatgtatgaatacaaatgctgatatgcatgcatgcacggacacaattcatgtcaacacctgacgcgcttagcctgcaggcgacgcatgcatcgccacgggccacggggatacgagcttccggcggagaagtactgcctctgcacacggagaccagaggaggccgagctgatagaagcaccgtcgccgtgctggaccatgctgtaatctggcgtgcctagcgccatcaccagcggcgccggcttacagtggcgcttgcgctggttgatgaaccagctagctgatctgatattgcgttgagcccagtggact

SEQ ID NO: 121026 - DNA, 653 bp, Zea mays
  unsure (1)..(653): unsure at all n locations
  Clone ID: MRT4577_41856C.1
gttttgcaccctcaaacatctggtcagccatctcctcctgtgagtgctttcaattcaactgagcccatgagcctttgagctctacatacctacctgtcagctccttcccagaagatgctgccacacaaggaatgctgcaacaggaggaaaacactaagcgtgaaaaggctgatagagagcgaatgcagcaactgtgtactctcattacaagctcaataaataaggacttaccttctaatctggagaagtcacttaagaaagaaatttcttcactcgggcctgttgttgctcgcgcaattacacctgttgttgagaagtccataacctctgttgtttctgattcagttcagaaaggggtgggtgacaaggtgtgcaatcagctggagaagtctattactggaaaacttgaagctacgcttgccaagcaaatccaaatgcagttccatacatctggaagacaggctcttcaggatgctttgcgtactagctttgaatcattgcttgttccagcatttgagcaagcatgcaagacaatgtttgagcaagtagatggtgcatttcaaaagggaatgtctgagcactccaatgctattcagcagcaagttgaggctgcacatactccgttagcgctaactctaaaagnaaccatcaat

SEQ ID NO: 121027 - DNA, 420 bp, Zea mays
  Clone ID: MRT4577_41857C.1
cttcccgccaattcccaaaaaattcaggggttaaggacaccctccttacaagggcagacgggccaaaccccaggcccaaagggcctaatcacaaacaaaattcaattaatcagattactcctcccggtaaaccttttggtttttaaaccttccaaatgctcctttgcaaaacccatgttcctgaaaaaggacgtcggggaaacaaaagccatcaaacccaaccgggttttccaaaaagctgggcaaaaagaaggaaagcctttcgcaggggaacatttgtaccatccggggagcatgttttttagccagaagcaaaatacccaacataaagcccgaaaaaaaggggccttatgcaaagggccttttccggagcacttcccaaataacctaaggaaaatgttcaccaaataaccatttttg

SEQ ID NO: 121028 - DNA, 3383 bp, Zea mays
  Clone ID: MRT4577_41858C.1
ccggccgggtgatagtgaacaagttgttcaagtctattgtgttcaaactatggccattcagcaatatggtctagagctaccactctgtttgcctcctacagctgatagtactgggtttggaagagatcctgctatttctcgtgtttatgaggcacctctggaaatggcaggaacagagtcatctacagggactagtttcacagattcttactctgtcagttctttgagtaaaccatcaactgttgaccagtctgcagagcttgatctgaaaccatcagctccaccgcttgcatactcagaaggtgatggttccgtgcctcttccatctgcacctcctgcaccgaagatggaggctcctggatcaggaccagcacctggaggtcgtggtatagatcacgcaattgtcccggtgcattttcaatggcgggtcctcctggtcatgtttctggacaaccgtgaccacctgcccgagctgaggactctgcttatcagcttttgactatacaacaacttcacccggggacagaaatcgtgatgtttctgaaaagagaagatacacccatgcccattagaaaggatatgttagaagatgagccaagtgtagatggtcaaagtaatgttccaatgcttcccaatccccatttggtgtttcaagttggagggaatgctacacacttggttactccatctgaaataatatcgggcactctctcatctgctgaaaacaatgatgtttctgaatctggtggggaaaatcgagatgtttccagcggaagttcttgggttgcagaagtggaaccaaagcatattgatgagagtaaaccagatcaaaacttgggacttgaagcagtcaaggaaactcagattgtttgtgagaatatggcgaaaacttccatggagcaaactgttgaaatgatcactaagcgctcagttacaactgataagcacagtgtggaagaatcacagtcatcatctgatcgaccagcatcagatcagacttgtggcactgatgaaaatgttctgaagaagtttgtggaaatgcctgagaaaattgattactctgcttccagggagcaaccatctttgtttacaaaagagaaagttttgcaccctcaaacatctggtcaaccatcacctcctgtgagtgctttcaattcaactgagtcacatgagcctttgagctctacatacctaccagtcagctcctacccagaagttggtgccacacaagggatgctgcaacagctcatggggaggcaggaggacatggaaaagcagctgagtactgtggttcctgcatccatcgcaaaggagggcaaaagacttgagacatcattagggcgcactgtggagaaatcgatcaaagctaatattgatgcgttttgggctcgtctccaggaggaaaacactaagcgtgaaaaggctgatagagagcgaatgcagcaatttgttactctcattacaagctcaataaataaggacttaccttctaatctggagaagtcacttaagaaagaaatttcttcacttgggcctgttgttgctcgtgcaattacgcctattattgagaagtgtctaacctctgctgtttctgattcagttcagaaagggttgggtgacaagttgttcaatcagctggaaaagtctattactggaaaacttgaagctacacttgccaggcaaatccaaatccagttccatacatctggaaaacaggctcttcaggatgctttacgtactagctttgaatcattgcttgttccagcgtttgagcaagcatgcaagacaatgtttgagcaaatagatggtgcatttcaaaagggaatgtctgagcactccactgctattcagcatcaagttgagtcttcacatactccgttagcgctaactctaaaagaaaccatcaattctgcatcatcaatcacccagagtttttcatcggagttacttgatggcaatcgcaagctactggcacttgttacttctgggaatgccatggcacataataccagtgctttgcagcccattaatggtcctatgggtggtccccaagaggttgaggctccgttagatccgatgagagagctgagcagactgatatctgaacgcaagtttgacgaagcatttacaatggctcttcaaaggagtgatgtttccatagtgtcgtggctgtgctcccaggttgatttgcgggcactatgtgcaatggttccagtacctcttaaccagggggtccttctggccttattgcagcagctagcaattgacattcacaatgagacatcacgaaaggttcaatggatgacagatgttgccatggcaatcaacccagcagaccagatgatcgcggttcatgtgcggcctatctttgagcaagtctacaaccaactggcccaccagcggacactccccaccatgaccgcagcagatggcaccagcatccgtgtgatcatgcatgtaattaactcagttctgcttagctacaagtgattgtagctacgcaactgtgggaagtatggcctattctatcttgtatagagaaattttgaatggccacaacccacaacccaggagacattgtggccgagaatacttgcaagagggcggaggttactccttggtgtaaatttggcttctgtcgctcgtgaattcggactattgtagtaattgggcatcatcgaattcttcatttgacatgatcaccgggtcttgtatttccgtcataccttaatggaaatgggtcgaatatatcagttggactttgtagcacggacagtttggaaccaatagcagctgcttggtggtggttgttccacaaaattttgaagtccaatgtagacattgtcgggtcgcaactgcaaaattggaggtaatctgtttggctactcgacgacgatggatttgacatgttcttgtgacgatgtggaattagcgtgcttttgagggatctgaggcaacaactcggcattcgatcaggattattcaggagtcgccaagtgcccactgggtcaagctgctaaaatgcgaatcggtatattgtattctcgaatttttgggcggacatctcaattgcggtagctcaacgttcttctaggccttgttgcaactttttcttactaattactcctcgtcctagtatacttggaagagggtggaggttactctctagtgtaaattttgcctttgaaattaaaatatttgtagtaattgggcatcctctaattttctaggtcatgttcatttgtcgtatgatcaatgggtcttgtatttccagtcataacttgtagctcggacagtttggaaccaacagcagctgcttggtgttggttggtccacacaaaattttgaagtcccatgtggacattgtttctggtggcaactgc

SEQ ID NO: 121029 - DNA, 681 bp, Zea mays
  Clone ID: MRT4577_41859C.1
tcaaaggagtgatgtttccatagtgtcgtggctgggctcccaggttgatttgcgggccctatgtgcaatggttccagtacctcttaaccagggggtccttttggccttattgcagcagctagcaattgacattcacaatgagacatcccggaaggttcaatggatgacagatgttgccatggcaatcaacccagcagaccagatcatcgcggtgcatgtgcgaccaatctttgagcaagtccacagccaattggcccaccaacggacactccccaccacgaccgcatcagatggcaccagtatccgtgtgatcatgcatgtaattaactcggttctgcttagctacaagtgattgcagctatgcaactgtgggaagtatggcctatttgatatcttgtatagagaaattttgaatggcaaatagaacacaacccccgagagtatacttggaagagggtggaggttactctctagtgtaaattttgcctttgaaattaaaatatttgtagtaattgggcatcctctaattttttaggtcatgttcatttgtcgtatgatcaatgggtcttgtatttcagtcataacttgtagctcggacagtttggaaccaacagcagctgcttggtgttggttggtccacacaaaattttgaagtcccatgtggacattgtttctggtggc

SEQ ID NO: 121030 - DNA, 1469 bp, Zea mays
  Clone ID: MRT4577_4185C.1
gcgcgctctctctctctcccctccctgtctccctccccctctcggagtctcggtcgtggcgacgacgactgggcaggccgacgagcacccaccaggaaaagtattgctcctagcctcctacagctagttctttttatgattaagctccaatgaaggattctcaggatattcagagcacaacagagttgcagtcatcagcacagggtactaatgaagtgcaaagtcagcaaccaaacccgatgaccactgatgctcctgcaggaaattcgggttccttgtctatagctagtaatgacagtaagaaggtgtctcgcgaagacattgaacttgttcagaatttaatagagcgttgtcttcagctatacatgaacaaaggagaagttgttagaactctttctactcgtgctagaatagaacctggcttcactactttagtatggcagaaactcgaagaagagaactccgagttctttagggcttactatatccggttgaaattgaaacggcaaatcatcttgttcaatcatttattgcaacaccagtacaatttgatgaaatatccagcacctccaaatgttccattggctccaatacaaaatggaattcatcatatgccagtgcagttagcaatttaccaatggggtatccagtacttccgcagcctatcatgccggctcccggccagcctcacatggacccaatggcctgtggtctgtccaatggtcatgtggtcaatggaatacctgcaccaggtggttatcatccgatgcgcatgaactctggaaatgacatggttgtggacaacggagcgcccgaagcaccacatgctggtgctaccggcagcgtcatgtcatccgagatggccgtgagcccctcatcagcggcttcaagcaaccatgctccatttatgccgccggagatcccaggcatggccatggacgtgccaggcctagactcgacattcggatctgacgtagggaatggacctctgcaattaggaccagatggctcgtcgagagactccattagatccttggggcagctctggaacttcagcctctctgatctaacggcggatttgacgagtttgggagcagatttggacgtgctggagaactacaccggcacccctttcctgccttcggactcggacattctgctcgactccccggaccaagatgacatagtcgaatattttgctgacgccatcaacgggtctcagtcagacgaggagaggtcatagcgaagctagctcaaggtttttcaggcagggcgcagggatgtgtcttctcatggcctgctgcgagagatgctgcggctaatgtaatgtaactgtgccttgggcccgcgcccctgtgtgctgcggcaagtgtagctggtttaattagactttttttttaatttgtagctggttaattagaatcctaattctttggaataaaaaagtagtagctggagttatcggtaag

SEQ ID NO: 121031 - DNA, 2421 bp, Zea mays
  unsure (1)..(2421): unsure at all n locations
  Clone ID: MRT4577_41860C.1
ggaaaaaataggtaagatgcaacagatgtggaggtgcactcgctaaccacgcggttctaccatactcctaatacagtgctggctatcattttccgcatggttggatcgaaaattcatctacttaccctttcctaccctcaagtacatcaagagtgcaaagctactattaaccttttgtttctatggaaaggactaactttcaactgaatacgctaactggttgctctgatcaaatctgaaagtcatgttccttcatctgtatcagtacagtttgttgttaattgtttctaaacctgtagtgtggcaacagacatttagactgtgctagaagaaacccagctgaaatttgaggaggaaagacaaaatttgctaaaagtactacctaacaattccaaagagctgtgtgagaatttgtaattctgaagttgagtgtttggagagtttgtgagggctgtggaatgtcgaaggtgaagaacaataatggttatcatggagtcactgagccaatctcgctgagtgggccgactgagaagtaccttatgcagacagttgaggttgaaaagtacctttcagatgcacgactctatgagaggcaagatgaggctatcttgcgagaagaggttttaggcaagctggaccaggttgaacaatatccatggatgcccctccattttggattatcattcacttaggcatatattgatttgaagatgttggatgctgtggcacactgtgaaagctttgattaagaaggctactaggatcagcgggtatggggagcaatttgtgcatgaatggatgacagatgttgccatggcaatcaacccagcagaccagatgataagcaaatgcaaagcagttccttacatctggtctacaaccacttcagcccaccttgcgtactagctttgaatcattgcttgttccagcatttgagcaagcatgcaagacaatgtttgagcaagtagatggtgcatttcaaaagggaatgtctgagcactccaatgctattcagcagcaagttgaggcttcacatactccgttagcgctaactctaaaagaaaccatcaattctgcttcatcaatcacccagagtttttcatcggagttacttgatggcaatcgcaagctattggcacttgttacttctgggaatgccaaggcacataataccagtgctttgcagcccattaatggtcctatgggtggtccccaagaggttgaggctccgttagatccgatgagagagctgagcagactgatatctgaacgcaagtttgacgaagcatttacaatggctcttcaaaggagtgatgtttccatagtgtcgtggctgtgctcccaggttgatttgcgggcactatgtgcaatggttccagtacctcttaaccagggggtccttctggccttattgcagcagctagcaattgacattcacaatgagacatcacggaaggttcaatggatgacagatgttgccatggcaatcaacccagcagaccagatcatcgcggtgcatgtgcgaccaatctttgagcaagtctacagccaattggcccaccaacggacactccccacgaccgcatcagatggcaccagtatccgtgtgatcatgcatgtaattaactcggttctgcttagctacaagtgattgcagctatgcaactgtgggaagtatggcctattttatatcttgtatagagaaattttgaatggcaaagagaacccacaacccacgagggtgatggtatgacattgtggctgagtatacttggaagaagggtggaggctactctttagtgtaaatttcgcctttgaaattaaaatatttgtagtaattgggcatcttgaaattaaaatatttgtcttaaaattggactattagtaattgagcagaatctcttcatcggtgatggtatgacattgtggctgagtatacttggaagaagggtggaggctactctttagtgtaaatttcgcctttgaaattaaaatatttgtagtaattgggcatcctctaattttctaggtcatgttcatttgtcgtattatcaatgggtcttgtatttcagtcgtaacttgtagctcggacagtttggaaccaacagcagctgcttggtgttggttggtaaacaaaatttaacccacaagggtaaacattgtttctggtggctgagtaaacttgaaaaaagggtgaaggcacctctttagtgtaaattccgcttttgaaattaaaatattggtagtaattgggcatcccctaattttctaggtcatgttcatttgtcgtatgatcaatgggtcttgtatttcagtcgtaacttgtagctcggacagtttggaaccaacagcaactgcttggtgttggttggcccccaaaattttaaagtcccatgtgaaaattgtttcgggtggcncccc

SEQ ID NO: 121032 - DNA, 243 bp, Zea mays
  unsure (1)..(243): unsure at all n locations
  Clone ID: MRT4577_41861C.1
gagttagtaacaaacaggattcgagatccttgatctatcttcttggaaagcnagtaaacttacacatacgatgatggctgctatacaaacaatcagcaaactacccgataaaatatttgtggccctacaagatgcaatggatctgaacacctacatagcctagtatgttgctcgacaaataaaaacttggaaaaaaatgaacaaccaaaatttatccttaaactgccttcttgtaaaacatgc

SEQ ID NO: 121033 - DNA, 463 bp, Zea mays
  Clone ID: MRT4577_41862C.1
ggccaatcacctctcgcgcgctcatcggcaagccggctgctggcactagggaagtattcggcgagggccgaatcaccatgcgaaggaccgactccaagcccatgccggcggcgtccggcagcccctggtacggagccaaccgagtcctgtacctgggcccgctgaacggatcgaccccaagctacctgaccggagagatcacctgcgactacggttgggacaccaaaaggctgtcggcggcactccagagaccttacccaagaaccgcaagctggtagtgatccactgccagctgggccatgctcggcgcgctcgggtgcgtgttcaccggagctgctcgcccgcaacggcgtgaagttcggcgaggagaagtggttcaaggcgatctcccagatcttcactgaaggcggactggactaccttgacaacccgagcctggatcactcacagagcatcctgacca

SEQ ID NO: 121034 - DNA, 315 bp, Zea mays
  Clone ID: MRT4577_41863C.1
tcggcggctctagagagacgagggcaaggaagacccgatcgagcacggggctggcgagcggagagttcgctggcaagcactacatgggaccctcccacggcgccactgatcgacgcggctgatctggggtcctggtatctgtaccgagccgagatcgccgagttcatggccacgctgctgtatctgtacatacacgcaggacaccgtgatcgggtacaagacccagaccgacgcgtaagcgtctgatgccaacgctgggtgcggacattcgggggtgctgggcatagcctgggccttcagcggtatgatcttagt

SEQ ID NO: 121035 - DNA, 301 bp, Zea mays
  Clone ID: MRT4577_41864C.1
ggggagcgaaaaaaaggttgccttttcgaagccgccggacggagcgtaagcgtagcgctagctagctcccccaggccggagaggaggatggtggggcgacgcacaggaagaggaggaggaggaggaggaggagcggcgacggccctcgtgtgggcggtggtggcggtcgcggcggcggtgtcgcgggcgcagcagcagcagcagcagctgcaggtggggttctacgacacgctgtgcccggcggcggagatcatcgtgcaggaagaggtgagcaaggcggcggatcgcaaccccggcggct

SEQ ID NO: 121036 - DNA, 3924 bp, Zea mays
  Clone ID: MRT4577_41865C.1
atggacgaggccgctgccgcagcagccaaggctgccgaggaccgtcgcctcgccaagtacgaggccgcccacgaagccgtctgggcgcaggccaccgccgtcgtcaatgtgaaggcgctcatccccatcatcctcgacaaggccacgaacacctacaccaagtggcgcgggatattcctcactgtcctcggcaagtacgcgctgactcgccacgtgctcgacgatgagctgttccacgagcgccccgcgtggctccaggcggactgcgtcgtcttgacgtggatctacggcaccgtctccgtcgacctgcagcagtcgctcctgatccgtcaacgccccgcacgtgaggcatggtgctatctcgaggacgagttcctcggacaaaaggagtctcgcgccctgttgctcgagacgcagttccgcaacctccgccaagactccctgacgattaccgagttctgccgtcgtctggaaaccatggccgcgtctctcgccgagttcggcgaccccatcggtgatcgccagatggtgctcaccctccttcgtgggttgagcggaaagttccgccacatggtgtcaattctcaagatgcaccgtccgttcccgacgttcactgaggcccgaacgcatctcttactggaggagatggagattgacgctcgcccgccctcaccgcccacggccctcgtcgtgcatcagcagcaggccccgtctggtccctcctccacaccgcgccaggggaacccgtcagctacgcagcagcactcccacggtgtgcccactggtggccagcgcaccaatggccgtcgccgtggccgcggcgggcgtggtggtggccaacagccccctggaaggggtacgccctctgccggacagggcagtgcaccgccgggcatgcacccgtccttcgcacagccttgggcgggctcgctgcagatgtggccatatggtcgccctccgcctcagccggccttcaccgtctttccacagtacggcgggtctttcggcaacgttcccgacggcggcgtctacggcaccggctacactgcgcccccaccgtatgtctacgggggagctgtgcactcactgtcgacattccaggggccgccggcgccctatcaggcagctgcacaggcgccctggaaccccactcatggaggcgcatggaaccaggactccctcgtgcagtcattcaacaccatgacgctcaccccgcccgcaccatccgaatggtatgctgactccggtgctggctctcatatgactgcagacgctggtaaactctccaacattttatcaccatcatctcttacaccttcatctatcattgtgggtaatggtgcacttcttcctgtcacggccactggatcacacattttttcctttccgcatcgtaatcttgttcttaatgatgttttggtctccccaaatataatcaaaaatctgatttccattcgtcgatttaccaccgacaataactgttccattgaatttgatccctttggcctttctgtgaaggatctacacaccaggaacgtgatcgccagtgtgtcaggctacaaatattatcttgttattttagatgattgctcacactacatttggacttttccgcttcgcctaaaatccgacacgttttccacacttgccaatttttttgcttatgctcgcacacaatttggcaccaccatcaagagcgtccattgcgacaacggccgagagtttgacaattccctggcccgcacgttctttctctcccacggcgttacccttcgtatgtcgtgccactacacatcccagcaaaatggcaaagccgaacgttccattcgcactcttaacaatattttgcgctctctcttatttcaggcgagtctccctccggtttactgggttgaggcacttcacaccgccacatacctcgtcaaccggctccctaccaaaaccctcgcctcctccactcctcactatcatttatattcgacccagccatcctatgagcacctcaaggtctttggctgtgcctgttaccccaacatgtcttccacagcaccccacaaacttgcaccccgttcatccctatgtgtctttctcggctactcctcagaacacaaaggctatcggtgcctcgagctagagtcgaatcgcatcatcacctccagacatgtcgtttttgatgaatctttttttcctttcgccgacatgtcaacctcaccaatggcatcctcagctttggacttccttcttgacgacagtgacctcaccgctcctattcctggagcaagatttgtgcatgcaggtgctcctctcgatggtcgtggggcaactgggccacccacgccacctcctgcgccatttagcgtcgggctacggtctccagcatcgcgtgctgggccaggggcgcccagctccccttctgccacgacgaccaccggcgctgcagccagcagcacctcctcgccgaccacgtccccggtcggcgctgctgcccctgtgtctcgttcacagacagttgccagtagcgccgcggccaccggacgcacgatcgtcaccaggccgatctccatcacccccgtcgacaatgcgcactccatgcgcacccgcggcaaggccggcatagcacaacccgtggatcgcctcaacctccacgctgtgcccatgtcgcctttgccccgctccgttcgtgatgccctgtcagatcccaattggcgctctgctatgcaagctgagtttgatgcactgatcgccaatgacacttggagcctggtgccacgccctcccggagtcaatcttgttactggaaaatggatttttcggcacaaactgaatgcagatgggtctcttgatcgctacaaggcacgctgggtccttgaggctttacccaacgccctgaattggcccatccatcagttagatgtgaagaatgcattcttacatggcactctcacagagacagtgtattgcgtgcagccctttggttttgcatattcctcccgtccggacctggtttgtcggctcaacaagtctctgtatggactgaagcaggctcctcgtgtttggcatcaccggttcgcttcatatctctcttccattggatttgttgaaaccaagtcggacagttcattatttatttattgccgagggtcagacaccgcctatttgttgctctatgtggatgacatcgttctcactgcctcctctgccgggttccttcacacagttattggggctcttcagcgtgagtttgctatgacggacttgggtcagcttcaccattttttgggtatctctgtgacacgctctgccgatgacattgccttcgttgttcagcagatctgtctctatatgcatgatcctcgggagccacacctcgcagctctcaagcgcatcttgcgatacctacagggtactatgtcacttggactgactatgcatcggtcttcccctacggagctcgttgtctacacggatgccgactgggctggatgtcccgatactcgtcgatcgacctctggctatgcagtgttccttggagacaacctggtgtcatggtcttccaagcgacagcacacggtctcccgatccagcgccgaggcagaataccgtgctgtggcgaacggtgtcgctgaagctacctggttacgtcagttactccttgagcttcaccacctacctcgtcgtgccaccctggtatattgtgacaatgttagtgccgtatatctctctagcaatccagtgcagcatcagcggacgaagcatgttgagatcgatctccattttgttcgagagaaggtcgccctcggtcatgttcgagtacttcatgttcctacgacatcacagtatgccgacatcttcaccaagggtctccccacctcattgtaccaggagttccggtccagcctgactgttagcgatgctcccgattag

SEQ ID NO: 121037 - DNA, 270 bp, Zea mays
  Clone ID: MRT4577_41866C.1
tcacctgcgtcaccccaccatatccggccaccccaactaatatgtctcgcgccacagctgcggtcctcttctacatcctctccgtcgctgccctcggggcgggcaaggcaccggcagagtcaccgaaggcaggtagtcctgccattgcaccggccgattcaccgagtgcatgcactcctgcagctccttccaatgcacccgagtctgctgccactagaactgcccccgctcaggcatctcgagccgcctccaaccccggcgcttccgctg

SEQ ID NO: 121038 - DNA, 320 bp, Zea mays
  unsure (1)..(320): unsure at all n locations
  Clone ID: MRT4577_41867C.1
tgncagagaataaagcactctgttacaatggggcatatccttacctaccttgtctttcagtgcatactgccatccatgccatgcgcgcgcaagatctgtatgaacgaaatagcagagtgcagtctgtccgcaactccgacgtggaacagtttactggttgacaacatggaccgagtccagctgattgagcagtgcggcgcaaacggagaggggcacggccttcaagaatccctgccgatagctagcgcgcatggtgaaagagatgccgacgactctgaagagcacaacgacggaacgatccctgagcgcctggacctcgt

SEQ ID NO: 121039 - DNA, 1805 bp, Zea mays
  unsure (1)..(1805): unsure at all n locations
  Clone ID: MRT4577_41868C.1
ggccggccggggcgcgacggcctgtagcgaccttatctccagcagctagcgcctcagctcctgctcgatcttcttccatggcgcgcgcctgctactggcgctcggcctcctgcccatcccctgcgtttttcccctgctgaagcttttccatggcgtcctgttttctgcgcgcgtttctcggcgcccggctccctgctcgagctccccaaccatggccgccctcaaccccatggtcgagctcgcccagctccctgctccggtgactagcgctcagcgtccggatccctggatgcttgccctgctcgccgccattccgctggatcctgcgtgctccagccatggcgccctcccttgcttctctctccctctgccatcctccagctcgcccagcccctgctcctgctcgccatggctgccgcgccctcccagccgcagagttaccgcgcgcgtgagcttctctgttggccatcgctgttccctggtgcggtcgcctatgccgcgcgctctctctccagcgcccacccccagctcggccctccacctccctctcgtctggataccggtgctgctcgccctgagctcctgccttggccgtcgcagcttcaaatccgtggacgtcgcccatggaagctcgccgaactgtgtccatatctttcctgcgtcggtcgtggtcttcaagccccgacgcgcgtgtccctgctcccagatccaaggccggtcgtcgtgtatgctcgcctcggctgtgtggccatgctcctgtcccagtcatcgccggtgaaggtccgtcctgcagcagcaccctagtggtcgtcgacttggagctctgcgatgactccatgcccgagctcgccctcaactctacagcaccgccgagcttggtccggtcctttgctgcagctcgtccccatggccgccgcagtcctgccgagatccctgtcgttcgcgcgctgctcctccctcgccatgccgcgcggatccctctccttcctaccctgctcggattgtgccgcgcttgctgtcgcgttcggcctgctccggatccgaagttggtcgcctcgttgtgaaatcgtcgtcgcgtccgggattttgacatgtctccctgctcgccggcgaacttgggttccctgcttagcctttagcgctagcgcgtcgccgtgaggttaccgtctcgccgtgattcccgggtggtccgtgtctccgcatgttcaaatcgtcaaccctgtgcaccacctgctcgctaaatgggaaaccaacagtcttctccctgctcctctgcgcgcagccgcgttcctctatcagccatccgttgccgctgaaccactgtcgaattaatttgccgctgaaccactgtcgaattaattttcagcttccctcgtgcggctctctggagataagctcttcatcggctgtcgctcccaatcttcagttcgccgactgactgtcgtgttccttatttttcctcgtcagtcgacctcatcgcgacttagttcgtccatcgtgctggtcgctattccatactatacctattagctcagatcatgcccagctcgtcgtcgcgtcgtttgccgttgagtcgtcaaacacgtcatcccctgctcgacccccacctcaccagctcgccccaaacccgatctcgtcgtcgttccacgcgncagcaagaaatctcaagagtcgagtgaagacggagccaacaacgtggtgtttcaccaagtgcacgacagaaagctcgagccaagatttatcaccattcctacgagcattgggccccaccggatgacggcaccttaattaatcgcatgttgcgg

SEQ ID NO: 121040 - DNA, 1590 bp, Zea mays
  Clone ID: MRT4577_41869C.1
ggtaccctcgtaggccgggatcttcccagccgagattttcccagcgcccatctccctgccgtgcagctctagctcccgcgccctgagctcctcccagccatggagctcgccggcctgcagctcgcccagccagccgtggttctccctgtccccagctcggctgctcgctcctcccatggagctcgcccagcgcccttgcactctccctcatgtccggtcattcctccttttcttggtcgttgtcgagctcgcaggtgacaccagggtcggtcgtccctgctcccccttgcctccctccgcgcgcacgccagccgttgctccagcttgccgcgcccatggccgaggcctccttcctacgcgcgcagatttcttttccctagctcggtccggccctttgctgcagctcgtccccatggccgccgcagtcctgccgagatccctgacgtacgcgcgctgctcctccctcgccatgccgcgccgatccctctccttcctaccctgctcggattgtgccgcgctgctgtcgcgtttggcctgctccggatccgaagttggtcgctttggtgtgaaattgccattgcatccggggttttgacatgtctccctactcgccgtcgaacttaggttccctgcttagcctttagcgctagcgcgtcgccgtgatgttaccgtctcgccgtgattggtccgtgtctccacatgttcaaatcgtcaaccccgtgcatcacctgctcgctaaatgggaaaccaacagtcctgtcctctccctgctcctctgcgcgcagccgcgttcctctatcagccatccgttgccgctgaaccactgtcgaattaattttcagcttccctcgtgcggctctctggagataagctcttcatcggctgtcgctcccaatcttcagttcgccgactgactgggcgtgttccttatttttcctcgtcagtcgacctcatcgcgacttagttcgtccatcgtgctgggcgctattccatactatacctattagctcagatcatgcccagctcgtcgtcgcgtcgtttgccgtcgagtcgtcaaacacgtcatcccctgctcgacccccacctcaccagctcgccccaaacccgatctcgtcgtcgttccacgcgtcagcaagaaatctcaagagtcgagtgaagacggagccaacaacgtggtgttcaccaagtgcacgacagaaagctcgagccaggatttatcagcattcgtacgagtattgggtcgcgtttgatgacggtgagccgatttataatttttgtaagtttatctgatgattggattaactagaattattagtcgtaataatcctcgtatttagcgcacgcgcgttgtggtagtgttaaaaataagtgaagtacgatgggtttagtaatacgaaaggtagattaatttacgaatatctaatcgaggtggcgacgtacaggatagatttagtatttcatatcgctatctgatgaattgtatcattgacaattgcactaaatacataacatatagaaatgttcgattatttgtggacatgtgaaatatgtgaggagtgaaataaaatttaaattgacatagagatagcc

SEQ ID NO: 121041 - DNA, 554 bp, Zea mays
  Clone ID: MRT4577_4186C.1
acccctgacactctccatgccagccgctaccaggacgtcagagtactttcgtcctctcttgtacggagaagaacccccagtcgtcacccagatcacttgttaaactttgttgaggggtgatggaggtttctttcgcacacctacactccgaggcagggcttataaagcttgacgagtgccttctcactcgcagctacatcactggctaccgagcttccaaggatgacttgcactgtctacactttcttctcggttgctacctcctacatgtatatcaacgtaacaaggtgggttaaccacattgatgctctcgtgaggctgatcgtgattactgcagagggccactgtgcgaaggttgaatactcagcagctccttcagcacccactgcagatgttgctgaagcacaggccccagttgttgaggaggacgacaaccatgatgttgtcctttttcgtgaggacaaccaagatgagaagaatggctctgaacagagtgctggatctgccagcgcttttggcaagaagaaagtatctggggagtcgtcagttctact

SEQ ID NO: 121042 - DNA, 1140 bp, Zea mays
  unsure (1)..(1140): unsure at all n locations
  Clone ID: MRT4577_41870C.1
agcccatgtaagagtgtgcctgcaaaatattctagcactgacaagagacgcttagaaggaatggatgcttctgatgtgaaatcgaagggtccctcaggtatcaaggagaaagagccagtacaagtgaggatagacttggaagacaaagagacaactccgtcatttcaagtgctaaacgacaaaacatggagtccagacccaaagttatcttcgcacatggacaggctgaagaagcaacatgctgaagctgagagttatcagataaggaccaggaatgagaatgctgtcgagacccaaagccctccaaaaaatggagtgtcgttgttgtctaagccatatgttgataggagggaacagaatggtgattctgatctattggggcatggcctaagagagacaggtgtgaagaggaaaagatcacatcatgacgtggagcaaaacgatgatctgtctgattcctctgttgaatctttgcctggaatggagatttctccagatgatgttgtcagtgctattggtcccaagcatttttggaaagcgagaagagctattgtcaatcagcagagggtatttgctgttcaagtattcgagctgcataggttgatcaaagtgcagaagttgatcgctgcatctccacatgtacttattgagggggatccttgccttggcaaatccttggcggtgagcaagaaaaggctggctggagatgtggaaacacagcttgaatcagctaaaaacgatgatggcgtgcgaccaacgcagctagagcactcgaaagagaagactgaagcgaaccaaccttcaccatctcaagacgaacaggccgcaactaatggtgacgttgctgcctcgatgcataccccttccgacaacaaacagaagagctggtgcattcctgcacctccaagtcagtggctgattcctgttatgtccccgtctgaaggacttgtctacaaaccttataccgggcactgccctccggtgggaagtcttttggcgcccccattttttgccagntaccccacctcctccctcctcacagntgnggggggatttcatgagttcggcatgtggagcccagctgatgagtgcccctgtgtacctcccgtctttcagcatgcctgcagtgtcagggtctgc

SEQ ID NO: 121043 - DNA, 2799 bp, Zea mays
  unsure (1)..(2799): unsure at all n locations
  Clone ID: MRT4577_41871C.1
ngactccacacaacgcagcaaaaagcggccgtccctaaaaatctcccaaaagccgaaaccacacccggtctccgcctccgtctctgcctcctttcccctcgcttcctcgccggctgggatcttgcggcagctacgctcgctagctctcctccaacccgccgtcggctccctccgattccagtcccgtcctgtctcgccgcttcctggccccccgcttctcacgcggagaccggtcggatttcccacctcaaacatcgccggttttatccactcccgcagacctcttcctcagggacgggattggattggtggtggatcttctcctcaggggaggcacaagatccgttcatcatcctcgtcgcctaaacttggccgctcccgctcccacgctgctgctccaccctcgccgctactagaccagaccacggaggaggagacgaagcgccatgaggcggggagccaccaaggacgacgccgcgcccgacaaggtcatgggccctctcttcccccgcctccacgtcaacgacaccctaaagggcggacctcgcgcgccgcccaggaacaagatggcgctctacgagcagttcagcgtcccctcccaccgctacagcgccgccgtgccgcccgcgccttccccggcgcctccatggggcgcgcaacgacccgcctccgcggtcccgtccacgtccgccagccaggttggcggcggcgatagacctatcttcccattatttcgtgtgcctttaactgaacctgttcgatcatcagatcagacgaatgccaactccaatggccaggctgccaatggtacaatagctgaatcttggaggcagaggcaatccacacatcttaagagcaaggatactaatgctgcaggaccacctgccgagggtaataattccgttgggaagaaattggctaatgatgatgattttacagttccctctgtcttgtattctggaatgcctccgcattccagccaagaaaagctcactctcttccctaccacaagcccatgtaagagtgtgcctgcaaaatattctagcactgacaagagacgcttagaaggaatggatgcttctgatgtgaaatcgaagggtccctcaggtatcaaggagaaagagccagtacaagtgaggatagacttggaagacaaagagacaactccgtcatttcaagtgctaaacgacaaaacatggagtccagacccaaagttatcttcgcacatggacaggctgaagaagcaacatgctgaagctgagagttatcagataaggaccaggaatgagaatgctgtcgagacccaaagccctccaaaaaatggagtgtcgttgttgtctaagccatatgttgataggagggaacagaatggtgattctgatctattggggcatggcctaagagagacaggtgagaagaggaaaagatcacatcatgacgtggagcaaaacgatgatctgtctgattcctctgttgaatctttgcctggaatggagatttctccagatgatgttgtcagtgctattggtcccaagcatttttggaaagcgagaagagctattgtcaagtaagtatacaaaacttgagttcatgttcttggtgtttttacctattattgaacgtcctgtgtgagcataccatctcggcgactcctgtaatcagatagtgtttacactcgcttttgtttaacgtgcatacagtcagcagagggtatttgctgttcaagtattcgagctgcataggttgatcaaagtgcagaagttgatcgctgcatctccacatgtacttattgagggggatccttgccttggcaaatccttggcggtgagcaagaaaaggctggctggagatgtggaaacacagcttgaatcagctaagaacgatgatggcgtgcgaccaacgcagctagagcactcgaaagagaagactgaagcgaaccaaccttcaccatctcaagacgaacaggccgcaactaatggtgacgttgctgcctcgatgcataccccttccgacaacaaacagaagagctggtgcattcctgcacctccaagtcagtggctgattcctgttatgtccccgtctgaaggacttgtctacaaaccttataccgggcactgccctccggtgggaagtcttttggcgcccccattttttgccagctaccccacctcctcctcctccacagctgggggggatttcatgagttcggcatgtggagctaggctgatgagtgcccctgtgtacttcccgtctttcagcatgcctgcagtgtcagggtctgcagttgagcaagtgagccatgttgcagcgtcgcagcataaacggaactcgtgtagtgaagcggtgttggcatcaagggacagcgaggtgcaaggcagtagtgctagcagtccggcatcttctgaaacagcagctcaacccagggtcattagggttgttccccacacggcacgcacggcttcagagtcggcagcaaggattttccgctcaatacagatggagaggaaacaaaacgacccgtgactggcagataaaaatgaaagaacggagggagtagagtaattttttgaccgataattataatgatcgccgtaaattggctggcccgcccgccttatgttttttgttcagtgtaaatatgctgtgtctgtcagaatgatatggcatctgtagctattttggttctgtcagaatcatgttgattggaattcgtcggtcggttgagtaggatgaaaattgggcacagcccatacgtctacagcaacgtcaaataaaggaagagaaagcaatacatcaccc

SEQ ID NO: 121044 - DNA, 2018 bp, Zea mays
  Clone ID: MRT4577_41872C.1
cccacgcgtccgcccacgcgtccgcccacgcgtccgcccacgcgtccgcccacgcgtccggagatctgacaagtagacttggttcggactgccaacaagtgtctcgtgttataggcaatgaccttaacctgatttcacgcaatttacttcagggtgcaggtgcattaatttatctgctagtcttatcttggcctctcggattgtgtacaatgtttgtttgtgcaactctatcagcaattatgctagttcatggacggtttcagaaaagggcagctaaatttgcacaggagttcaccgcaaacgccaataatgttgctcaagaggtgataactttggttaggacagtgcgagtatatggaacagaaaagcaggagtttaaaaggtatgcaaactggcttgataagctgtatgatgtgagctttcggcagacagtggcttatggaggctggagcctgagcttgaactatctataccattctactcagctttgcgtaggtcattggggtggtgattggaggcctagcaatcatgtctgggaagttaactgctgagcagttgacaaaattcacactctatgctgaatggctaattttgtccacatggtggattggggacaactggtcctccctgatgcagtctgtcggagcaagtgaaaaagtttttcgtttaatggatctccttcctagcaagcagcttagctctgaaggcctcaagttagagaagttgaaagggcaaattcagtatgctgatgtatcattttcatatccatcaagacctacggtaccaattttgggaggcttgaatttaacactgaatccaaacgaagtagttgcaattgttggtcttagtggaagtggcaagagcactataatcaatttactacttagattatacgaacctacaaatgggcaaatactaattgatggtgtcccgctcactgagcttgatatcagatggttcagggaaagaattggtttcgtcggacaggaaccacgcttattccgaatggatatcagctctaatattaaatatggttgcccaagagatgtcagtcatgaagaagtgatatgggctgcaaagcaggcctatgctcatgacttcataatggctttgcctgatggttataacaccatcgttgatgatgctcttctcagtggaggtcagaaacaacgtgttgctattgccagggcccttctgagggacccatctatcttactgcttgatgaagccactagtgcgcttgatgctgagagtgaacattatgtcaagagcgtcatcacaaaagttagtcgagattcaaaggctaaaagaactgtggtaatcatagcacacaggctatctacaattcaaacagctgatagaattattgtgatggaaaatggtaatattgtggaggatggtaaacacattgatcttattgagaagggtggtctatattcaagattagccaggcgacaaaatgacgatctcaagtagccctggatcacagaatgtggtttagtgcacgccttctttttaaatggaatggcagaagggagagtcgtctgtcattagtgtattctttgcaagaactgacctggacccaggagctcgaataagctggcattgtttttcccatgaaccagaaacggtttgtgactgatcaaaataaaccaaaacggtttcccccacgaggacgagcacattaagcatcgagagcggcagtatggagaacagacttctaagaggtccagtattgtaaaagtagcttccataacaaagtgtatatgcgtttttatcttgttatcgggaactctgaaacttatcttacactacacacggaggaaacgctccaattttgttacgagcactgtgtgccttatttcctgaattttcgtgtaaaaatgtactccctgcgtcccaaaacagttgacgttataatatttatagttaaacttgtaacttaaattattagcaacataaattattataaaaatatatttaaagatctattgaaataaaaaaaaaaaaaaaaaaaa

SEQ ID NO: 121045 - DNA, 698 bp, Zea mays
  Clone ID: MRT4577_41873C.1
aattcggcacgaggaagcgactgacgccgcggcggggcgggggcggccgctgcacgacagcgacctccatgcggggacggcggagccctagatgcgtcgtggctgacccccactggcgccgccactccttccggtttgacgacattggtgagccagcccagctcaaccctagcgggaaaaaaagttcgcagctttgcttcaccgcgacattggtagtcatagttttttataaaaatatatatgtgcatgtgtattcttgcgattgatcgaggaactgaaaaatgattgcacattgttgcttccccgcgatgtggtgcgggagtgaacggagaagtaaagcttcattcaaacagaatctgacgagtgacgacgtccctgcccgttcctatcttcctttctcaccgtcatcatcttcttagctttgcttccactcgtgcaactcctcctctgcaaattgttagttccgtaaaggagtagcgcgtgtgtccaactgtccatataaatatgtgatgcctctttgagtttgagccgtggcctcactcgtagtcgtagctcacacaatgggcgtgcagagagccagtggcgtgtccttgctccatgcactgcttgttgtgttctgggcattgtcttctcgtcgtgcggaggggcagaacccatctggccacctgagcgtggatgcctctctgcagaaatctagg

SEQ ID NO: 121046 - DNA, 330 bp, Zea mays
  Clone ID: MRT4577_41874C.1
cattgggtacctcgagccggccgggccgggctttgccggatttgtcccagcggcccccgtcctcgccgtcccccgcctttgcctccctctatctaaagtcgccgacgacgacccagtgaaaagtccacagccttttccaagaggaagggatgggctgctgcagcagccggagctccgattcgccggccagccgcgtgacgcggtggcgcttcacagggatcgtggcgctccgagacgccagattgaaggaagtgtcaaatgaagttctaccagtgggcaattccttgagaactctggatttgaccaataaccagctagatgcgattcccc

SEQ ID NO: 121047 - DNA, 271 bp, Zea mays
  Clone ID: MRT4577_41875C.1
gccgttaacctttgctgagatcaccacacaagacacgccatagccatctaagacagttcttgcatttggattgcctggaaatccagtgagctgtatcgactgcttgaatctgctggatgttcctgcgatccgtctactcactggctggtcaaatcgtcatctgcaaagagtgcatgtgcgcatatcacatgcttgaagagcatacccacatcgaacagaggttcaccgtgcagtacttagatcggtgctagatgacggatcaggtcgacct

SEQ ID NO: 121048 - DNA, 1187 bp, Zea mays
  Clone ID: MRT4577_41876C.1
gccggccgcttttttttttttttttttcgccaaaagtgtacattcaattagaagaattccgatgatgtcgtggaattaaattttccacagaaacaaattagttcaaataccaaccatgagtagtaagtgcacttataggcacaatgatcatgcactcacccaccaggtagtgtaggaaaaaaaaacctgtaactgtacaacaaggctccacatctgtgtgcataccaagaaggcagactggcagatgaaactttcttgccgtaggccactataatatttttttactattcctgtttatcttcacctccatccgtgctggcatcatcaacgcatgctccttcaatatttacagcttcaacttcactgtcagcctttgcaacttcaaccttatcatcaccactttcccgccaattcaagcgtacaggccttcccagaagttcctttccatcaagctcagtgagagcagcctctgcttcttcttttgtcccaaaggaaacgaaaccgtacccagctgcttttccattgtcgaatataacgttagcagaaagcgggttaaagtttgcaaagaattctttaacattgggagcccttgctttccatgggagattggacacgtaaagcttgtgcctctctataatagtgcctggaggaggaggcggagctggtcttctgaagctctttgaaaactccactttgattgtccgccccattacatcatgggagttaagcttatcagcggcggcggccgcctcctccgctgtcgacatcgtcacgaacgcgaaccccctgtttcttccatccttccccttgatgacctcgacgtccttgacagtgccgtgctgcgcgaagagcttctcgatctccggcgccgggaacgaccagggcaggttggcaacgtatagcttccgccgcttctccccctgctcatcctccgccacgggggcagcctgcgcctccgggggcgaggatgctgcgacgcggaggcgtgcctggttctggcggcgagggcagcggagcgtgaggagaggaagggcaaagtggggaacacgcggggcggggagcgccgcggcggggttggggctgcgcgcgagcgagagcgccatagcgaagcggagcgtgcgtcgccggtggttcgggctgggaactgggaatttcggggactggccggctggtccgaaccggccggc

SEQ ID NO: 121049 - DNA, 661 bp, Zea mays
  Clone ID: MRT4577_41877C.1
cctcgaggccggccgggaccccgcatctcctagccccagctagtagatcattggacacatatcgaaaccgctctctagctagcgcgctcgtcgtataacctggcttccggcatggcttccaagcagatcggagacttgacctgcttcattgacatcaccgctctcgccttccgtccctgtgcatccgccgggcccatggacggaggctggacaaacggcggcgccacctggtacggccccgccaagggcgctggatccgacgggggtgcgagggggaaccagggtgccggcgaccaacctccgttctcgtcaatgatcaccgccggcagtcaatccatcttccaggacggtaagggctgcggcacctgctaccaggcgaagggcaccggacacgagtcgggctccggcagcccggtgacagaggtcatcaccgacctgtgccccggtgctgcgtgccaggcggagcccgaaccacttcgacctgagagggacggcggtcagcgacatgacgaaggccggccaggccgaccagctccgaaacgccggacggctgcaagtccagtacattcggatggtgagcaactggaacggcttggacatcgccttcaaggtggacgccggctcaaacgccaactacctgatcatggccatcgagtacgag

SEQ ID NO: 121050 - DNA, 566 bp, Zea mays
  unsure (1)..(566): unsure at all n locations
  Clone ID: MRT4577_41878C.1
cctcgaggccggccgggtaacgtggggctgagagacggcatgcatctcctagccccagctagatctttggacacatatcgaaacagctctagctagcgcgctcgtcgtctaacctggcttccggcatggcttccaagcagatcggagtcttgacctgcttcattgccatcaccgctctcgccttccgtccctgcgcatccgccgtgcccatgggacggtggggctgnncgaacggnggcgccacctggaacggcccagccaagggcgctggatccgacggtggagcgagagggaaccagggcgccggcgaccagccaccgttctcgtcaatgatgaacgcgcggcagcgaatccgtcatcaagaaccccaaggagagcgggagctgcgacgatggggatggaaacggccaggagtccagcgccggcatccctgagaaagagaaggttgctgaacagcggaacgacggtgccaacaaggtggatatcgctgactcaagacaaagatgcgcccatgtttgttggtgatgtcaaagacgacaaagacacatccgatgttaaaattggtt

SEQ ID NO: 121051 - DNA, 595 bp, Zea mays
  Clone ID: MRT4577_41879C.1
gtaaattggtgatgcgttctcaactgccgtgccgccgtgcattagcaaagcagcacttttggctggttatttttctaaactaccattgcgttatgacagcacatctaacagatcggttagttgcttttggatgttgtggcggcatgcatggttgtttgctcttcttgctcaattcctgccaaaaggctaatttccatggaagaggcacacgtttctcaattgaaagctcgcaacgatagagacccgtgactgaggcaggtccatgcccgggaggcaaggacaaggtcacgttacctacggtttctgggacatacagatctgagcactccatttcattcacccgtccaaaaaccatctaatatagatcaagattagcatctccaagactgtcacaaaaaatgaggcaaaaaatagtttttaatagttgcaaaaatgtattggataaaagggaacgtaattcttctgtccctatttttggtgtacaaagcctaccaggttaaatcttattccgttattcctatcttatgtggattgaacgagattgaaaaaattatgaaagatattgttgtttatagagtttaaataaaataaattc

SEQ ID NO: 121052 - DNA, 288 bp, Zea mays
  Clone ID: MRT4577_4187C.1
acgcccaaatctactcattgtatatactttctattactgatcgtccagcattaaaattgaggactgttaatctagaagcagcgtctggctacaaaaaacatttttctttgatcattacaaaaacatatctatccaaatttttatatattaatttaccgagccaccatcatttttgctctagacactctaatatgctatcttgaaacgtctgtctccctattgtcttatcaattcaatccaatcaaataccattttttcttttcaattttatcacatgaacttactaca

SEQ ID NO: 121053 - DNA, 475 bp, Zea mays
  Clone ID: MRT4577_41880C.1
gtactcagccggcgggacccgcatctcctacccagctagatcattggacacatatcgaaacagctctagctagcgcgctcgtcgtctaacctggcttccggcatggcttccaagcagatcggagtcttgacctgcttcattgccatcaccgctctcgccttccgtccctgcgcatccgccgtgcccatgggaacggtgggctggtcgaacggcggcgccacctggtacggcccagccaagggcgctggatccgacggcgctgcgtgtgggtaccagggtgccgtcgaccagcctccgctctcgtcaatgatcaccgccggcagccaatccatctcccatgacggcaacggctgccccacctgctaccaggtgaagcgcaccggacacgcgtcatgctccgggagcccggtgacaccggtcaccaccgacctgcgccccgccgctgcctgccaccatgcacccgcgcactctgacc

SEQ ID NO: 121054 - DNA, 769 bp, Zea mays
  unsure (1)..(769): unsure at all n locations
  Clone ID: MRT4577_41881C.1
cacccctgatcaagcagacagttttacacataaagaaaacagtacacacaccaatctaccacataacacggcagttttacaccttgcgtatcagtagaaagagtatctgatcaagcttgaagcgagcagcagtggaagggtcatccttaagcagctacaggagcccgcagaatgatgcataaatctcccttgaatgccgtactgttcaacatgtttgaaggaagtcagatcaactaagagcatacaaagcattcaagtgtttctggtgtcattgtgcttcgattatcatcaagaatacgaccaccagcgctgaacgcaaactccgaaggaacagtgctcaaaggtattgctaaaatatcacgcgccatagctgaaagcaccgggtatttgtttgcatttgtcctccaccaatttagaatttcaaatctttcatctattctcacaagttcttcctctaagtatgtgtcaagctcagactttggaaaacgtcttcctcttatttgggaccattgagaaaattcttcatccaaccttcnnnnnccaagaactgttgagcctaaattactagtccttatatcaataaaaggtgaacttttattatctatttgaacaagtgttgcatannnnncaaataatttggtgagacattgtttaaccaagaccacgtttatctggatgtcaacaaaatattgagacatcttctcataaaagaagtccnnnnnntccatcttctttgatggatcaagtatggtggtaagacaagtgtcat

SEQ ID NO: 121055 - DNA, 441 bp, Zea mays
  Clone ID: MRT4577_41882C.1
tgggtacctcgaggccggccgggatctcctagccccagctagatctttggacacatatcgaaacagctctagctagcgcgctcgtcgtctaacctggcttccggcatggcttccaagcagatcggagtcttgacctgcttcattgccatcaccgctctcgccttccgtccctgcgcatccgccggccatgggacggtggctggtcgaacggcggcgccacctggtacggcccagccaagggcgctggatccgacggtggtgcgtgtgggtaccagggcgccgtcgaccagcatccgttctcgtcaatgatcaccgccggcaggcaatccatcttccaagacggaaaggggtgcggcacctgctaccaagagaattgcaccggccacgagtcgtgctccgcacagcccggtgacagtgatcatcaccgatcggtgccccgac

SEQ ID NO: 121056 - DNA, 484 bp, Zea mays
  Clone ID: MRT4577_41883C.1
ggcaagaatactgaaataggaactcattaccatgaatccagagtgataaagaaaacaatactcacccctgataaagcagtcagttttacacataaagaaaacagtacacacatcaatctaccacataacacggcagttttacaccttgcgtatcagtagaaagagcctctgatcaagcttgaagctagcagcagtggaagggtcatctctaagcagctacaggagcccgccaaatgatgcataaatctcccagatgaagacgcatactaagggaagaatacaacaaataagctctataaatcaattgtcgacagcagactgtcgcttttggagcaggcacacttgagaaaggatccgcaggaagcagtttccttgaatgccgtactgttgaacatgtttgatggaagtcagatcaactaagcttgaatatttgagtattcatacaaccaatccttacagcatacaaagcattcaagtgtttctg

SEQ ID NO: 121057 - DNA, 435 bp, Zea mays
  Clone ID: MRT4577_41884C.1
ccggcggcctcctccacggggggcttcctcaccgaggacacgagcaggagctacgtgagcgaagcgaccagcgagtacgggctgcacccgtcgtcgtccagctccagcgacgacggcgccacgagcgaggcggccagcgcagggagggacgggcagaggtccggcgagatcggcgtcgccgacgggatgacacgccgcacgcggtcgggacgcgccgacgagtgacgcttgcaacggagttactttttttttttttttttgccggcgggttgccgtaaagttccttgttgggttctttaatttattaacgtttgttacaccatacaggtaattaggaattcaggttagtagtagggatggaacttttctagcttcctcataccattttggtcgaaaggtttgctcgataaaactacttccagtcaagttttggag

SEQ ID NO: 121058 - DNA, 275 bp, Zea mays
  Clone ID: MRT4577_41885C.1
gagggtgtgtgacgcaggcgtgagggaaaaggagagcagcgtggggaaccgagggtgcggctcaatgggtgaaaaaccggggcctggatacctgatcgagcgcaccacctcaatccgcgcgtcctgcctgctgctcgaccacctctcgcgcctccctggtacctcccccgtgccggcgcgctccctcgcacgcctccaaaagccgctggggctgacggcgcctgtgctgcgcttccttcgccgccatcccacgctgttctccgagcggccgtacc

SEQ ID NO: 121059 - DNA, 640 bp, Zea mays
  Clone ID: MRT4577_41886C.1
ttattgggtaccccctcgaggtccggcaccgggaaagacatagccctagaatactcatacaccccgcatgctcctaaccccagctagagatcattggatcacatatcgaaacagctctctagctagcgcgctaggaggctaacctggcttccgggatggcttccagcagataggagtcttgacctgcttcattggcataccggtctcgccttccgtgcctgcgcatccgccgtgcccatggactgcgggtggacgaacggccgcgccacctggtacgggcccgccaatggcgctggatccgacggaggtgcgtgtgggttccacggtgccgtggaacaacctccgctctcgtcaatgatcaccgccggtagccaattcatcttccaggacggtaagggctgcgggacctgctaccatgtgaagtgctccggacacgattcgcgctccggcagcccggtgacagtggtcatcaccgacctgtgccccggcgctgcgtgccatgcggagcccgtccacttcgacctgagcgggacggcgttcggtgccatggcgaaacccggccaggccgaccagctccggaacgccgggcggctgcaagtgcagtacattcgggcggcgtgcaactggaacggcttggaca

SEQ ID NO: 121060 - DNA, 955 bp, Zea mays
  Clone ID: MRT4577_41887C.1
atgggggcaacagagggcacagaatacggcgcggatcaactccggcaaagaatttcgcaggcactaggcggtacttggcgcaataaaggtttagatgagtttgtagtgatgatggatttaggggtatgtgagggttcaagtactaatatcacctcggattaccattcggtgcaaatgtcaaccagaacgacaaaggtttgggagtattttcaacaggagttagttgaggttgatggagtgatgaaggctatttgcaaatactgtgggacgaagctgacaaggaaaaggaattcatgcacaaatagccttagaaaccatgttgcggatacatgtcctaaaattctagttgaggaccgcaagcgattcattgctacaatgagaaaaaagccaggagaaggttcatttgtgtttgaccctcgaaagactcatgagtgcatggttaagtggtgcatcagtgccgaggtcgcattcaacaagtttgatgatccgttctttgccccgtggatggagtcattgcaaccatcgtttagcgcttttaatgagattgctgagaggtctggatttccttcaaaggctggattaattcttgatgttccaaattgttgcaattcgacacacaacatgattatggaggccattgagtacaaagttgtcttgaagagatatgctgaggaacaacttgagccttcaccagatgatgaagagtggacaaattctgaggcgattggagagtttcttgggggcatttgaggaagctacaaaagtattctcaacacatagaagtccaacatctcatttgtttttgcataatgtgttatgtattgtatccatcaagctctaagaaataaaaattggcaaatcaattgtgtgcttgaggatctagcactagcgatgtatccaggtgttggtgctcactggagtaatggagtcgaatgcttttggcgcgcttttttcc

SEQ ID NO: 121061 - DNA, 487 bp, Zea mays
  unsure (1)..(487): unsure at all n locations
  Clone ID: MRT4577_41888C.1
gcgggggggggggggggncnccggggggcgggcggttccctacctcgcggccggccggggacccgctccacataggcccagctaggagatcattgtttcatatcgaaacagctctctagctagcgcgctcgtcgtctaacctggcttccgttttggcttccaagcagatcggagtcttgacctgcttcattgccatcaccgctctcgccttccgtccctgcgcatccgccgtgcccatggacggcggctggtcgaacggcggcgccacctggtacggccccgccaagggcgctggatccgacggtgatgcgtgtgggtaccagggtgccgccgaccaacctccgctctcggcaatgatcaccgccggcagccaatccatcttccaggacggcaatttttttgtcacccgctaccaggagaagcgcactggacacgagtcgtgctccagcataccggaagaagagaacatcaccgagttgtacccccg

SEQ ID NO: 121062 - DNA, 2979 bp, Zea mays
  Clone ID: MRT4577_41889C.1
ctttgcttgacaacccactacattgatgcatactttatcttgaaaaaagaagactattgcgttcagggttgtaaaatatcaccctctcgcatacaagcttttaatgagattgctgagaggtctggatttccttcaaaggctggattaattcttgatgttccaaattgttgcaattcgacacacaacatgattatggaggccattgagtacaaagttgtcttgaagagatatgctgaggaacaacttgagccttcaccagatgatgaatagtggacaaattctgaggcgattggagagtttcttgggggcatttgaggaagctacaaaagtattctcaacacatagaagtccaacatctcatttgtttttgcaattggctcgaggccggccgggaaaaaaaggccaaaggtccagagcgctcgacctaggcgagtgggtgactgcttcaaccacgagcgcagcgcggcggcagcgccatctcccacggatgtagcttcgtctccttcccgttcgctgtcgtcgacgccatcatccacgagcacagcgcggcgccgctccataccgagtctgtgggcctgacaccaggggagtcgccctccagccctcacccggctgcccctgcctctgcccctcggctccgaccaccgagttttggccaagtcgccaatcgctcagccagtcagccactcagccatatggatttaggggtatgtgagggttcgagtactaaaaccacctcggattaccattcggtgcaaatgtcaaccagaacggcaaaggtttgggagtattttcaacaggagttagttgaggttgatggagtgatgaaggctatttgcaaatactgtgggacgaagctgagaaggaaaaggaattcatgcacaaatagccttagaaaccatgttgcggatacatgtcctaaaattctagttgaggacctcaagcgattcattgctacaatgagaaaaaggccaggagaaggttcatttgtgtttgaccctcgaaagactcgtgagtgcatggttaagtggtgcatcagtgccgaggtcgcattcaacaagtttgatgatccgttctttgccccgtggatggagtcattgcaaccatcgtttaaaggtgttgggcctcagacatgagaaatcggacgcgtggcagattcaagatgatgaggcaagagctaagaaatgagctacaaagtcttaactctcggatttgcttgacaactaatctttggacctcaaatcagaagttgggttatctttgcttgacagcccactacattaatgcagactttatcttgaaaaaaaagattattgcgttcaaatatttgaaatatccacatacaggcctagcaatcaaagaaggaattacagagtgtctcaaagagtgggggataaaagagaagatgtttactatcacattagataatgtttctaacaatctgtcagtgcgtgaccttcgagaaagtgggcgttcgaacatgttatttggaggcgatcttcgtattgtccaatgttgtgcacacatattgattctcttagttcaagatggaatggcaattgctcatggagcaatctataagattcgtgagctggtcagacatatcaattcctcaccctcccgcatacaagcttttaatgggattgctgagaggtctggattgccttcaaaggatagatttaattcttgacgttccaaaccgttggaattcgacacacgacatgattatggaggccattgagtacaaggttgtcttgaaaagatatgctgaagaacaacttgagccttcaccaaatgatgaagagtggacaaattctgaggcaattggagagtttcttggggcatttgaggaagctacaaaagcattctcggcacatagaagtccaacatctcatttgtttttacataatgtgctatgtatccatcgaactctgagaaatacaaattggcaaatcaattgtgtgcttaaggattcggcacgggcgatggatgctaagttcgataaatactgggagaagggcaagtataacatgacacttgtcttagccaccatacttgatccatcaaagaagatggattttttggacttcttttatgagaagatgtctcaatattttgttgacatccagataaacgtggtcttggttaaacaatgtctcaccaaattatttgaaaaatatgcaacacttgttcaaatagataataaaagttcaccttttattgatataaggactagtaatttaggctcaacagttcttggaaaaagaaggttggatgaagaattttctcaatggtcccaaataagaggaagacgttttccaaagtctgagcttgacacatacttagaggaagaacttgtgagaatagatgaaagatttgaaattctaaattggtggaggacaaatgcaaacaaatacccggtgctttcagctatggcgcgtgatattttagcaatacctttgagcactgttccttcggagtttgcgttcagcgctggtggtcgtattcttgatgataatcgaagcacaatgacaccagaaacacttgaatgctttgtatgctgtaaggattggttatatgaatacccaaatattcaagcttagttgatctgacttccttcaaacatgttgaacagtacggcattcaagggagatttatgcatcattctgcgggctcctgtagctgcttagggatgacccttccactgctgctcgcttcaagcttgatcagatactctttctactgatacgcaaggtgtaaaactgccgtgttatgtggtagattggtgtgtgtactgttttctttatgtgtaaaactgtctgcttgatcaggggtgagtattgttttctttatcactctggattcatggtaatgagttcctatttcagtatttcttgccaaaaagattgttgtgcattaaggatatttgacagatgttctttgttatttctctcaagacctgaaagtttatcaaccagg

SEQ ID NO: 121063 - DNA, 1888 bp, Zea mays
  Clone ID: MRT4577_4188C.1
cctccctccctccctctcgctcgtggccacgactgggcgactgcctccgccgcatttcgctaggcgccacacggcccttggccggcgacgagcacccacagaaaaaagtgttgctcctacgactagttctttttatgtgtaaccttcaatgaaggattctcaggatattcagagcacgacagagttgcagtcaccagtgcaaggtactaatgaagtgcaaagtcagcaaccaaactcaatggccgctgatgctcctgctggaaattcgggttccttgtctgtagctagtaatgacaataagaaggtgtctcgcgaagatattgaacttgtaagctttctagctatctagtggcatcccttctagggtagacccagtgcctgaggctcccacatgagtggtgtctggggaagggataaaccgaggcaggcttttcccttgcaaatgcggagaggctgcttcgaacccgcaacctggtaactcagtgagacaactcttgtcactgccccaggcctgcctttctactagcatcccctctacattgacagttctatgctttggccaactaaatgaactttacatcctcttgcaggttcagaatttgatagagcgttgtctacagctctacatgaacaaaggagaagttgttagaactctttctactcgtgctagaatagaacctggcttcactactttagtatggcagaaacttgaagaagaaaactccgagttctttagggcttactatatacggttgaagttgaaaaggcagatcatcttgttcaatcatttattgcaacaccagtacaatttgatgaaatatccagcacctccgaatattccattggctccaatacaaaatggaattcatcatatgccagttagcaatttaccaatggggtatccagtacttcagcagcctatcatgcctgctcccggccagcctcacatggatccaatggcctgcggtctgtccagtggtcatgtggttaatggaatacctgcaccaggtggttatcatcccatgcgcatgaactccggaaatgacatggttttggacaatggagcgcctgaagcaccacatgctggtgctaccggtagtgctatgtcatctgagatggctgtgagtccctcgtcggcggcttcaagcaaccatgctccttttacgccgtcagatataccaggcatgaccatggatgtatcggccctagactcggcatttgggtgtgatgtggggaatcctgaatctctgcaattgggaccagatgggtcgtcaagagactctattagatccttagggcagctctggaatttcagcctctctgatctaacagcggatttgacgagtttgggagcagatctggacgtgctggagaactacactggcacccctttcctgccatcggattcggacattttgcttgattccccagaccaagatgatatagtcgagtattttgctgacgccatcaacgggtctccgtcagacgaagagaaaccgtagtttttccggggttgcatggcatggcatgcattcaggttcatcatcaggcagggctgtcatctcatctcatgtagtgtaaagcagccaatctaactgtgtattcggctcgcgcgcggtgatccggtaatcgggcctctgccactaaaaagaattttgtagcggttaattgaaatcctaattctttggaataagtagctgggactggaatgtccagagagtagcggtcgttgttggcttagggattgctgctggtggatgcaaacctcacagctagctggtgactctgaaaccacaggaactccttttctttttttctttttacttgtatctgtatttgctgctacataagtaaacagaagtggggtgtacctagttttctggttttt

SEQ ID NO: 121064 - DNA, 240 bp, Zea mays
  Clone ID: MRT4577_41890C.1
gaatggaaattatgcgaagtctatcgaatttctttcggagtagatctcgatcgacgcatgcatttgctatgccaaattgtatcctcgtcgtgtgttgagcagcggcgtgctgttgtacgtacgtctgcctctgttccatgtttcgggattttccatagcaaatgcatgcgtcgatcgagatctactccgaaagaaattatgcgaagtctatcgaatcccacgcgtccgcccacgcgtccg

SEQ ID NO: 121065 - DNA, 574 bp, Zea mays
  Clone ID: MRT4577_41891C.1
acccccgcgatgggtccctccagccggccgggaccgcatctcctagccccagctagtagatcattggacacatatcgaaacagctctctagctagctagcgcgctcctcgtctaacctggcttccggcatggcttccaagcagatcggagtcttgacctgcttcattgccatcaccgctctcgccttccgtccctgcgcatccgccgtgcccatggacggcggctggtcgaacggcggcgccacctggtacggccccgccaagggcgctggatccgacggtggcgcgtgtgggtaccagggtgccgacgaccaacctccgttctcgtcaatgatcaccgccggcagccaatccatcttccaggacggtaagggctgcggcacctgctaccaggtgaagtgcaccgcacacgagtcgtgctccggcagcccggcgacagtggtcatcaccgacctgtgccccgacgctacgtgccaggcggagcccgtccacttcgacctgagcgggacgccgctcggagcccatgcgcaaacccggccagtcccacatgctccgaaacgccgggcgcctaaaaa

SEQ ID NO: 121066 - DNA, 529 bp, Zea mays
  unsure (1)..(529): unsure at all n locations
  Clone ID: MRT4577_41892C.1
gcatcttctagcccagctagatcattggacacatatcgaaacagctctagctagcgcgctcgtcgtctaacctggcttccggcatggcttccaagcagatcggagtcttgacctgcttcattgccatcaccgctctcgccttccgtccctgcgcatccgccgtgcccatggacggtggctggtcgaacggcggcgccacctggtacggcccagccaagggcgctggatccgacgggggtgcgtgtgggcaccagggagccgacgaacaaccgccggccacgccaacgagcaccgaccgcagccaaggaanggaccaggacagacagggcagcgccacttgttattaggccagcgaccccggaaggngtgcatgtcttggctgatctagccaacgggggctgagacaactccctcaacatggtgttccaaggtgacaggtccagcgaatccaccctccacgtgatgagagaccttccacccgcagccgagtcggctgtcgccgccacggacaggagagctggttctggca

SEQ ID NO: 121067 - DNA, 841 bp, Zea mays
  Clone ID: MRT4577_41893C.1
taccctcgaggcctgccgggaccccgcatctcctatccccagctagatattggactctatcgaaacagctctagctagcgcgctcgtcgtctaacctggcttctggcatggcttccaagcagatcggagtcttgacctgcttcattgccatcaccgctctcgccttccgtccctgcgcatccgccgtgcccatggacggcggctggtcgaacggcggcgccacctggtacggccccgccaagggcgctttatcctacggtggtgcgtgtgggtaccagggtgccgtcgaccaacctccgttctcgtcaatgatcaccgccggcagccaatccatcttccaggacggcaagggctgcggcacctgctaccaggtgaagtgcaccggccacgagtcgtgctccggcagcccggtgacagtggtcatcaccgacctgtgccccggcgctgcgtgccaggtggagcccgtgcactttgacctgagcgggacggcgttcggtgccatggcgaagcccggccaggccgaccagctccggaacgccggccgcctacaagtccagtacactcgggtggcgtgcaactggaacggcttggacatcgccttcagggtggacgccggctcaaacgccaactacctggccatggccatcgagtacgagtccggggacggggacctgcgcgccgtggagctgaagcagagcggcgccggcggcgtgggcgcccatgcaacgctccctgggggcgctgtgtggcagtacaagtccggctccccaatctgcagggccccctgtctgtcccgctcactcgggctccggcagggtccctcgtcgcagcacgtcatccc

SEQ ID NO: 121068 - DNA, 218 bp, Zea mays
  Clone ID: MRT4577_41894C.1
tttccttttgccggagaggaaggccgccgccggcgccatgctcagggtcgtcggtaggcgcatgacgaccgggctcgcctggcgccccgccgaggacgacggcgccaggggcccgctcgccgggggcgtgctccccggcgacgaccaaatctttggtgagccccaaaggccgcgctgcgccgtggatccccagaacttcgccgatgcgaggggcctgt

SEQ ID NO: 121069 - DNA, 2228 bp, Zea mays
  Clone ID: MRT4577_41895C.1
ccggccggggccttatcccgccgttttgtagtggcttcgtctttagcttgggcctcgcttccacttcgtagctgcctacgcgctcgcgactcgcctggtcgcttccggttgaagggccgggccgcaatggacgaagaggtcggcgccgccgggcggcagcaggttcagtggaaaagttactgcagtactctctccctcctagcgttccagagcttcggcgtggtgtatggagacttgagcacatcgcctttgtatgtctacagaaactcactgtctgggagactgaacggttaccttgatgagacaaccatctttgggttgttttctctggtgttttggaccttcacacttgttccgttgctgaagtatgtcataattgtcttgagcgcggatgatagtggggaaggtggagcttttgctttgtactcacttctttgcaggcatgcaaaattcagtctgctgccaaaccagcaagcagcagatgaagagctgtcaacttattaccatccaggcactgatcgagctgtggtttcctctccattcaaaaggtttctggagaagcacaggaagctgcggacctgtttacttctttttgtactggttggtgcctgcatggtcataggtgatggtttgtttacaccagccacatatctactgtcagctctagctagcgcgctcgtcgtctaacctggcttccggcatggcttccaagcagatcggagtcttgacctgcttcattgccatcaccgctctcgccttccgtccctgcgcatccgccgtgcccatggacggcggctggtcgaacggcggcgccacctggtacggccccgccaagggcgctggatccgacggtggtgcgtgtgggtaccagggtgccgtcgaccaacctccgttctcgtcaatgatcaccgccggcagccaatccatcttccaggacggcaagggctgcggcacctgctaccaggtgaagtgcaccggacacgagtcgtgctccggcagcccggtgacagtggtcatcaccgacctgtgccccggcgctgcgtgccaggcggagcccgtccacttcgacctgagcgggacggcgttcggtgccatggcgaagcccggccaggccgaccagctccggaacgccggccgcctgcaagtccagtacactcgggtggcgtgcaactggaacggcttggacatcgccttcagggtggacgccggctcaaacgccaactacctggccatggccatcgagtacgagtccggggacggggacctgcgtgccgtggagctgaagcagagcggcgcggcggcgtgggcgcccatgcaacgctcctggggcgctgtgtggcagtacaagtccggctccaccaatctgcaggcccccctgtctgtccgcctcacctcgggctccggcaggggtcctcgtcgccagcaacgtcatccccgccggatggcagcccggcagaacctaccgctccgtcgtcaacttcggaggaaaccatgcataacgagtgatattaagatgtcgatcgtgtgcagatgtctccatccaacaataagatgcatgcatatatgatctgtgtggccagctacctgctagatcatctcacttcctgagtgtgctgatgctcagccaataatgaaccattccatctcgatcggaaattcaacatatataataatgcaagcaccggaaaaaaaaaaaaaaaaaaaaaaaaaaaaaaaaaaaaaaaataaaaaaaaaaaaaaaaaaaaaaaaaaaaaagtactctgcgttgttacctacctggccatggccatcgagtacgagtccggggacggggacctgcgcgccgtggagctgaagcagaacggcgcggcggcgtgggcgcccatgcaacgctcctggggcgctgtgtggcagtacaagtccggctccaccaatctgcaggcccccctgtctgtccgcctcacctcgggctccggcagggtcctcgtcgccagcaacgtcatccccgccggatggcagcccggcagaacctaccgctccgtcgtcaacttcggaggaaaccatgcataacgagtggtattaagatatcgatcgtctgcagatgtctccatccaacaataagatgcatgcatatatgatctgtgtggccagctagctgctagatcatctcacttcctgagtgtgctgatgctcagccaataaagaatcattccatctgtatcagaaaaaaaaaaaaaaaaaagcggcc

SEQ ID NO: 121070 - DNA, 259 bp, Zea mays
  unsure (1)..(259): unsure at all n locations
  Clone ID: MRT4577_41896C.1
attctaccctaacatgtagctcttgcacatgttacaacctgattcttttagcgtggtagtcccaacatgagcgttgtgataacctcattctatgtgatgtgcagtcccattaacataggattagatgaagtagatagtctggtaataggagactcagnatctcgtggtagtttacactgggggaaaatggtacatccagttactgcgtacagatggatctcatcacggccctgcttatcgcgtttgagccgagcgtaag

SEQ ID NO: 121071 - DNA, 103 bp, Zea mays
  Clone ID: MRT4577_41897C.1
agcaacgggcattaagatcatgtagggctacttgcaccagggccacctgctgatcaccgtgggcatcccgctgtcttacaacgagtccttcgccgcagcatcg

SEQ ID NO: 121072 - DNA, 677 bp, Zea mays
  Clone ID: MRT4577_41898C.1
gaggtcctggccgccaaaaaaaaaaaaaaaaaaaaaaaaaaaaaaaaaaaaaaaaaaaaaaaaaaaaaaaaaaaaaaaaaaaaaaaaaaaaaaaaaaaaaaaaaaaaccctcctcccttactgcccccttgaaaacaaaacccgggggagcttgggttttggcctccccgcccccccctcctgaagcttttaaacgttcgaggaggaggaggggaggttccccccccccccccccaaaccatggggtccaccaaggggcagggtattatgacccaacccataaaccttattttccgtttcctccaaaacaaagcccatccaaatttggttttttaagcaaaaggacctccggattggggggcccattatcggattcgatgagaacatgaacttggccctcgaaaatgctggggaaatcaacggcaaaaaaaacccttgggggaccctgggccggatactcctaaaaggggacaacaaaactttgatgaaaaacaagggcaagggaaagtttttatggcaggaaccatgtttggggcccccgttgaatatttttggcccgttggactccatccattcaaacttacatggatcatggcattggggattaagggaaaagttgtacctgctgttaatgacccggataaaattatgctagaagctggccacttggggggaac

SEQ ID NO: 121073 - DNA, 297 bp, Zea mays
  Clone ID: MRT4577_41899C.1
aaataatttttcttttttaatttttacattgggggggatttcatttccattgggtttttaccaaccaaccacactcagaggatccattccaaagaaaaacacacgaggcccaacaaaaaagaaccatacccaaaacccccaaaaaacaaaggaatcatccacacggagcaaaacacggtacgctaatgaaaaaagaagagatgcgcacacacactcaaaaactggaacaggaaaaaccctttctaggaccaccctataacaggcagacgggtaagccgagcagggagacattgacac

SEQ ID NO: 121074 - DNA, 467 bp, Zea mays
  Clone ID: MRT4577_4189C.1
ccccaaccgggtcttcaaatattgggggggataaacagggcataaagttacagggtgaacagccaaccttacctaacttcccaacatccgaaacaactaactttaaaaaaaaaacgggggggaagagggacaaaaactactctggctggcttatcaggatacggataaatcctggggactacaggggggatcccactacagctacaactaaaagagctcgaactcgagggcggcgccattcagccggaattccaaacattggccttccttttttttggggggcgggagggctgctgcaatataaaggtttttgggggtctttgggggggcagtccaccggataaaggcccagtttaggccttcgaaaaagggaggccgttaaatttaaggggtttcttttgaggagccgagccggtactttggttttttaaaaagcagccctttgataaaatctggggcggggaaac

SEQ ID NO: 121075 - DNA, 105 bp, Zea mays
  Clone ID: MRT4577_418C.1
ttctggcgaaaggggctttccttcctcacaaactacatgggtctggcaaccaactctacaagcacctttggttcaaggcggaactgggaaggtccttggcttggc

SEQ ID NO: 121076 - DNA, 157 bp, Zea mays
  Clone ID: MRT4577_41900C.1
aacacgcgttcaatattagggtcaaaaattaataaaatagctaaccactgcaacgggacgtgcaaattccgaatatcagctgtaatgcaactacacaggtcaactacaccgattctgactttaccgtggataatatactggatataactgactctgt

SEQ ID NO: 121077 - DNA, 798 bp, Zea mays
  Clone ID: MRT4577_41901C.1
aattcggcacgagggggagctcgtccccatcgaccttgatatgctccagttcgtcggggagtcactaaagattctgcgaaatgagattgatggaaaagctgctttgctaggatttgtgggggccccatggacaattgcaacttacattgttgaaggggggatgaccaacacgtacacaaatataaagagcatgtgccatacagctccagatgtcttgaagggtcttctctctcaccttgcacaagccatatctgactatatcatttaccaagttaactcgagggcccagtgtatacagatatttgattcatggggtggacagcttccacctcatgtgtgggagcagtggtcaaaaccatatatcaaacaggtgactcttccttacttttcttgctttcatgtattaccaacttcatggtgttgctatgtatctgcactgtcttatggtataacactgatgactcccactgaataaagctcagtatctgctaagaagtactctcattatgcttacactgaaatgcttctgatataattaatagcatcaatcccctgcagtatctggtaccgcattacaagacttgttatggttacaaattatgactgcaagtcccttataacctagggcgaaagtggaatatagaaaaagctaatctctcaatataaccagtagctggtgtttacatcagcaacatgttctcagttgacatggatttggaattttggatagtgtataattatgtgattttggtttgcatatattcaagaactgcactagcacagtgcatataacttact

SEQ ID NO: 121078 - DNA, 759 bp, Zea mays
  Clone ID: MRT4577_41902C.1
ctacctgctcctcctcttcctgccttcttccccttctccacgcaagtctgtagcacgtaacacaccgatggccgcaccaaatcacagcccgcaccttttttttctctctctggcagcgttcagcacaagtggtgattggggtctattcttctcgacgtagcggcttcccttttctctccggtgatggcgtgcgcaagggggcgcggcggcaacaagccctataatgccagggcaacggcaggtcctgaaatatctcaaccgaatcccctcagttggccgaactcatcggtcccacgtcgagagttctgcggtggggaagaggaacaggagctacggcggtcccacacggatggagcagggctggcatgcggggcccggcccaccagtcagccaaacaaatgcggccagcggaggaatgagcgatggcccacatgccagtgtctgatgtccatgccgtggaggatggcgcaggtgttgagtggccgacacggtggatcccaaagaccagtggtcggacccaggatggtaacgcggatggaagatgggccacgcgggagaagggctaaatgggccgagtgggattgggtccagacaacgtttcttttttttcttctttatttttctcctttcttctttattttgaaatccaaatttttggatttcaaattttgtgatgaatttgtactcaactatttgaaggtatgattcaaacatgccatggtgaaatgaatttatttctcgtaaaaaaaaaaaaaaaaa

SEQ ID NO: 121079 - DNA, 333 bp, Zea mays
  unsure (1)..(333): unsure at all n locations
  Clone ID: MRT4577_41903C.1
gagaaaaatcaacttgaaagtgaccttcatgatgatacaataaattgtctaaacgcaacactattgaaatggagggatacattcgccctcttgacgtagtcataatttgtgttgcagaccagcattctgatggtgttgcagatgatcatcccagcgattccttattctctccaacataccatcatcacaaggaggtctacgtggcggtgtctataggtctcgatgtcaagcctggttccactgttaagtgtgagcctggatatggttttatgctgcacctttcccaggctgctcttgnggnntcgnngantagtgggtatgcgctcttgcctt

SEQ ID NO: 121080 - DNA, 284 bp, Zea mays
  Clone ID: MRT4577_41904C.1
ctcatacctaacttgtttttgggaaaacgtttatcccttttgcattcagtgtgcctactgacgaagagtattttcttgccgaggtaaacaatctcctcatcatctaagtgttctccatctggaagatgaacacacccttcctctaatacctctttctccacaacaccctttaatacacctccatcacttataatttcttgccccaccgctcctttccgtcgcggaaagaccactccgttcacaagatgacaattcgcttcgcacacctcttttaacaagcccaa

SEQ ID NO: 121081 - DNA, 210 bp, Zea mays
  Clone ID: MRT4577_41905C.1
acactctccaaagaacttgacctaccttatgggttccatatttttcttcttaaatgtgcatcaatcatgccttgcccccaacctttaaatatattcttagacctggtaaatgcactcagacttgcgtctttaggaatttttaactttctttcactacattggcacttaaatttgtttctttataaagctttttgaaggtcataaacaaag

SEQ ID NO: 121082 - DNA, 250 bp, Zea mays
  Clone ID: MRT4577_41906C.1
ggtgaactgcaatggccaattaaccagccattattatctagaacattctggggagacacccagcacctcgataaagcagcgctgggagtagtagagcactaatgtaccgaggctgagactagtctatggtaaacaagagaatccgcgtatattgacaatcggtgtgggtctgattgaacatatatgatgtcagaccctgcagggatacatatataactgtaaatactacttgatcgcaagagtcatgagc

SEQ ID NO: 121083 - DNA, 246 bp, Zea mays
  Clone ID: MRT4577_41907C.1
aaatatcgagattgcattcgtcgagaataaaagttttaacaggctccaaaaattggccttctgcgagattgaataaattccgaattcggcgaagtgtgaaggaataatcctggataatcagagacatacgcgagcgagaaagagaaatttttactgagtatccgagattaggatttatctcccgccataacacgaagctgacacctggggtgtcacagccttccccccttaaaaagaatctcgtcc

SEQ ID NO: 121084 - DNA, 432 bp, Zea mays
  Clone ID: MRT4577_41908C.1
gctttctctattcgatggaaaacgcatagggtggtggcgcttgcacgccctggcgactgcttgcggcggcggtgtcctgcgcgcccgctccaaccatcctccggggcaacggcgacgtctgctcgcctacgtgcctagacggtgaggcagcgacatcaggacgcccgtgcgcacgcgtgcctgcacggcggctgtgcgccctcacgccggcttgccgaacggcgtggcggtggtgccatcctgcggggcggcgtggtggtcgcatgcctattcgccgggcggcgtggcggtcgtgcccatgagtcggatccacgtggctgcgcgcacgcgctactgagctgcaaggcgatggcgcccgcacgcaactctggcttggtagtggctgccagcccacaacaccagagaggcggtggtctattcctgcttcgtcgt

SEQ ID NO: 121085 - DNA, 427 bp, Zea mays
  unsure (1)..(427): unsure at all n locations
  Clone ID: MRT4577_41909C.1
cattgggtacctcgaggccggccgggaatggctcccatgcaagcactccgattccacgccagaggcgacatccgccttgacacaatccccatccctatatgtggtcgggacgaagtcaggctcaaggtggcgtattgcggaatctgcggcaccgacctccacgaatacctggctggccctatctttgtacctcctcaagggaccaaagaccctaatactggcgcagaactcccggtgactcttggacatgaattctgtggcaccatcngatgnnnaggtcgngnnagcncgnattgtcgacggctttatgatcggacagaaagtcgccgtgaacccggcaatggatgatcgacatcatggacaccaatcttgcgagcaatgcctagcgggatgcccagaacagatgcgaacattttaggtcttctat

SEQ ID NO: 121086 - DNA, 674 bp, Zea mays
  Clone ID: MRT4577_4190C.1
aattcggcacgaggaaatgctattcatcatgtgcctagaaggaatgatattcatgctcctaggaaaatagcaaatgaaccttctacaatttattgtgctttgaatgcttcatttgcaatttgtagaaaggatagaaaagtaattgctagaaaattaggggcaaaatgcaagggtaataaaacatgcatttgggtccctaaggaaattgtgactaaccttgtaggacccaacaagagttgggtacctaagacccaagcccaaatttgccttgcaggtttatgcatccgggggttcaagctggattatcgacagcggatgcacaaaccatatgacgggggagaagaagatgttcacctcctacgtcaagaataaggattcccaagattcaatcatatttggtgatgggaaccaaggcaaggtgaaaggtttaggcaagattgcaatatcaaatgagcattctatctctaatgtgtttttagttgagagtcttggatataatttactatctgttagtcaattatgtaatatgggatataattgtctatttacaaatgtagatgtgtctgtctatagaagatgtgatggttcactagcttttaagggtgtactagacggcaaactttatttggttgattttgcaaaagaagaggtcagtctagagtcgccctgcaggc

SEQ ID NO: 121087 - DNA, 478 bp, Zea mays
  Clone ID: MRT4577_41910C.1
aaacggataatagcagcactattataccaacattaacgtacttagttcgataacacacgcatccagccccattacattgcaggctagcaaaagtaaaccacacaaaataaaccgagacgttcagacacgataaccagaatagctacgctaacaactcgctcttcagccgggacacagggtaccccaggcttagtcgacctcctccatcttgctctcgccggcgtcgtcctccagagggggcatgtcagtgtcagcctccggggcctcgtcctcgtcaatgctcaggcccagcttgagcatgcggtggatgcggctgccgaaggtgttggggtcgtcgaggctgaagccggaggtgagcagcgccgtctcgaacagcagcatgacaaggtccttgacagacttgtcgttcttgtcagcctccgcgcgcttgcgcagctcctccatgatggcgttctccgggttgatctccatcgtcttc

SEQ ID NO: 121088 - DNA, 851 bp, Zea mays
  Clone ID: MRT4577_41911C.1
gggtacctcgaggccggcccgccgcatctcctagccccagctagatctttggacacatatcgaaacagctctagctagcgcgctcgtcgtctaacctggcttccggcatggcttccaagcagatcggagtcttgacctgcttcattgccatcaccgctctcgccttccgtccctgcgcatccgccgtgcccatggacggtggctggtcgaacggcggcgccacctggtacggcccagccaagggcgctggatccgacggtggtgcgtgtgggtaccagggtgccgtcgaccagcctccgttctcgtcaatgatcaccgccggcagccaatccatcttccaggacggcaagggctgcggcacctgctaccaggtgaagtgcaccggccacgagtcgtgctccggcagcccggtgacagtggtcatcaccgacctgtgccccgacgctactgtgccaggtggagcccgtccacttcgacctgagcgggacggcgttcggtgccatggcgaagcccggccaggccgacaagctccgaaacgccggccgcctacaagtccagtacactcgggtggcgtgcaactggaacggcttggacatcgccttcagggtggacgccggctcaaacgccaactacctggccatggccatcgagtacgagtccggggacggggacctgcgcgccgtggagctgaagcagagcggcgcggcggcgtgggcgcccatgcaacgctcctggggcgctgtgcggcagtacaagtccggttccaccaatctgcacgcccccctgtttgtccgccttccctcggcctccggtagggtccttgtcgccagccaccgtcatccccgctgtat

SEQ ID NO: 121089 - DNA, 624 bp, Zea mays
  unsure (1)..(624): unsure at all n locations
  Clone ID: MRT4577_41912C.1
gccggccgggccgggaccccgcatctcctagccccagctagatcattggacacatatcgaaacagctctagctagcgcgctcgtcgtctaacctggcttccggcatggcttccaagcagatcggagtcttgacctgcttcattgccatcaccgctctcgccttccgtccctgcgcatccgccgtgcccatgggacggtggctggtcgaacggcggcgccacctgggacggcccagccaagggcgctggatccgacggnggggcgggggggaaccagggggccgacgaccagcccccgggcncgncaaagaacaccgccggcagccaaaccagcgaccaggacggcaacggcggcggcaccggcaaccaggagaagggcaccggacacgcgncgcgccccggcagcccggggacagagggcaacaccgaccggggccccggcgccgcgggccaggaggagcccgagcacaangaccggagcgggacgacgnacggggccagggcgaaacccggccaggccgaccagcnccggaacgccgaccgccggcaagaccagaacaaacaggagacgagcaaccgcaacagcacggacaccgcccccagggaggacgccggcncaaacgcc

SEQ ID NO: 121090 - DNA, 1997 bp, Zea mays
  Clone ID: MRT4577_41913C.1
gctgtgctctttgcacgagtaccaaatgcaagaagatagcatgtacagtaaatactctctctaggctaccgaatcttacggaacgcttttcactaaacaagagtaccaaatgcaagaagatagtatgtacagtacatactctgtctgaactctgaacaccttattccagcagaaagctagttgttgaactagggaagggaagacactgccatgcaatgggatgtgaagtgtgtacatatatgcctatatggtcgcccatgaaacattattggctaagctgcagcgttacatgcgaggagcctttctactccttgggcctcttgacaatgaggaccgggcatttgcagttctgcgcgcagtggttgctgacgctgcccaagaacgccctctggatgaagccgtaaccatggctgcccatgacgagcaggtccgcggccatcttgttggcggcgtcgcagatgacgtcccgcgggtccccgctctccaccatcgtctccaccttgacgtgcgggtggtccgcgcagacgcgcttggccttgtcgaccgccgccgccgagaccgcgttggcgtgcctctcgacgctcgccagcacgtccgaggtcatcatgtaccctgcgctgtccatggcggcgtagaccgggcgcgggcggcgggcgtggacgagcaccagcgtgtcgcctcctgccggggagacgacgttggcgaggcaccagttgagcgcgtgcaggctctcctcgccctcgtccacggccaccatgatgcggcgcccggcaccggcggcggcgacggcggcagtttccatgcaggacgcactggatcgatcggtgaacgattgttgcttgcaagggggtgagaacagagaagaggatagaacaatcaattggatgctactgactgacaattgaggagagcagtccgctttaaaggagagaggacaaagccgtcgtgctgcagcaaagctcttgtgcttcacggctgctgcggcgccatgatgggctatccccgtcaccctgcgactctgccctgggtttgccgtcacgtatccggcatcaacgatcctccgttcccatcttccttatccagatggcggcgccggccaactccaccaccttctccggcgacgtgtgggcggagctccgcctggccgacgcccgcgacgtgccgcacatccaccgcctcatacaccatatggccgagttcgagctgctcaccgacctcttcgccgccaccgaagagctcctcacgtccacgctcttcccatcgccgacgccgcctcccttcacctccttcacagccctcgtccttgacctatcccccacccccatcctcccggactcctcttccaccatcgcctcccgccgcctcgacctctccgcgtccccgctcgcagacccggaggccgccaccttcgcctccccgcgcggcggcgggcgcgtcacggccgggttcgtgatctgcttccccaactactccaccttcctctccaagcccgggctgtacgttgaggacatcttcgtgcgcgcaccctggcgccgccgcggccttggccggatgatgctgtctgccgtcgccggcagggccgccgagctcgggatgggccgggtggagtggtgcgtgctcgactggaacaagaacgccatcgacttctacgaggggatgggcgccgatgtgctcccgcagtggcgcatctgccggctcgccggcgcagcgcttgacaaatacaaggtcagccagaaggaggccgccggtgggaaggctgcagagtaggagggcctggaaattcgcttattgagagtgcctgccaataataaaggtggtggatttgcttgcgctgcttagctctggcatggtttagaactagatgattagtgattcagtgcatttgatcagctcattagggcgagatgggcaatcgggacttgttgtggtataaaccttgctgcattatgctagactgtcttctgatttgatgcgaaaaaaaaaaaaaaaaagcggcc

SEQ ID NO: 121091 - DNA, 688 bp, Zea mays
  Clone ID: MRT4577_41914C.1
ttgggaccctcgaggccggccgggaccccgcatctcctagccccagctagatctttggacacatatcgaaacagctctagctagcgcgctcgtcgtctaacctggcttccggcatggcttccaagcagatcggagtcttgacctgcttcattgccatcaccgctctcgccttccgtccctgcgcatccgccgtgcccatggacggtggctggtcgaacggcggcgccacctggtacggcccagccaagggcgctggatccgacggtggtgcgtgtgggtaccagggtgccgtcgaccagcatccgttctcgtcaatgatcaccgccggcagccaatccatcttccaggacggcaagggctgcggcacctgctaccaggtgaagtgcaccggccacgagtcgtgctccggcagcccggtgacagtggtcatcaccgacctgtgccccgacgctacgtgccaagtggagcccgtgcacttcgacctgaacgggacgacatacggcgccttggcgaagcccggccaggacgacaagctcagaaacgacggtcgccaacaagtccagaacactcgggtggcgagcaaatggaacgatttggacatcgcctacaagcaggacgccgggacaaacgccaactacctgggcatgagaatcgaatacgagtccggggacggagacctgcgcgctga

SEQ ID NO: 121092 - DNA, 777 bp, Zea mays
  unsure (1)..(777): unsure at all n locations
  Clone ID: MRT4577_41915C.1
cattgggtacctcgaggccggccgggaccccgcatctcctagccccagctagatctttggacacatatcgaaacagctctagctagcgcgctcgtcgtctaacctggcttccggcatggcttccaagcagatcggagtcttgacctgcttcattgccatcaccgctctcgccttccgtccctgcgcatccgccgtgccccatggacggtggctggtcgaacgcacgcgtccgctgataaaaccattgagaaggggaagctgcaaatcgatgttaaatatttcttcttctacgtgcactcggaaacgcgcgacatctgtggagagacttcctgtccagcaactggtgacttcgttctatctcatcagcagacgttaccaggattcactccaccgggctcgtacacgatctacatgaagatacttggtgacgaaaacgaggaactgagctgcatctcgttcgggttcagcattgggttcgtcgcctccagctgaacgcgtccgagctgagcaccacaagtagcccatggatgatgtaattatgtaaaaccactctgtatcctataactcccagccccaatgtcgaggtccatgtacgctttgtgggtgtcgcgctactgtcttgtgtcgttgtgttcaactaagacgttttatccagagttgaacatcacaataaaaacagagtctgatatcatgtaatgaaagtctgcgttcttggtgaaaaaaaaaaaanaaaaaaaaaaggaaaaaaaaaaanaaaaaaaaaaaaaaagggccggc

SEQ ID NO: 121093 - DNA, 1163 bp, Zea mays
  Clone ID: MRT4577_41916C.1
ggatgcgcacaatgaaagaagacttcattatgctttgtctgcaacagttttgcaagcactgccaccatcctatcctatctggcaaaagttgggtttgcactagctgtaaaaatttccatctatgtgacaagtgtcatgcagaggagcagaatacagcacagaaggacaggcatccggccaccacaaaacagaagcatgcattcgaaagaatggaggtacaacctcttccagagactgatgatggagatccgacaatggaaagtaagtattttgacagcaggatcgatttcttgaagcactgccaagacaatcaattccagtttgataccatccggcgggcaaagcactctacaatgatgattctgtattacctacacaattcaacctgctctgcttgccatcgtgccgtggaccaatgcttggtgtggcggtgcctagagtgcctaggctgcaccttttgtggtcaatgctataaacaaaatggtcaaggcttgcatattcatgaattaaggcagattgacactagagaaacttcacagaagcacactctacaggactacattgatggccttgtgcatgcatcgaggtgctatgatccacgtaactgcacccatccactctgtttaaccctgaagaaactgttcgcccatggtgcacgatgccatgtccgtgcctgcaatagcggcggttgcaaaaagtgtctctttatgtggaaactcctgttccgccactcaaaagattgcaacgacggagactgcgcggttcctagatgcagggatgtaaaggcattcatagctgaaaagatgaagcttaaaatctagtaatggaccccctcccccttctcccccttccttaaccagtcaaattcgttgatgaagatgcaataaactgcggttggccattgctggtggatggaactgcaaggtaaataatgtggtgacttactgcttctggtgtggttgcatgtgctccatgccacagaggatcacccaaccgaagcttacataggcaatctgacattggtttttagtgcccgtacataccttgtacatatagtttttctctccaacacaaataggggtttgttttaatttcttcatcgtcaaagttttgttctccataatgtctgcctcatttttgttcaaaaaaaaaaataaataaaa

SEQ ID NO: 121094 - DNA, 287 bp, Zea mays
  Clone ID: MRT4577_41917C.1
aagctcggaattcggctcgaggacaattccaacccctcatgacacacccctaccacagcgaacccagggggggctttttaacaccggggggggaccacacccaaccccgtgaacaacttaccaccacaacgtaatcctgaccaaacaaccggttttctcacgaattatcatcagctcttcgcgctcccaccacatgactgaccccgatccccataaaaaccatcacactcacttcaaacccaaacactgccaccccactgcacccccgagaacactagatatcacta

SEQ ID NO: 121095 - DNA, 1495 bp, Zea mays
  Clone ID: MRT4577_41918C.1
agccgcccacccagcggcccccccacaccggcccacccgcccatgccatcccacacagcgccccagcagcgttgcatgggcgaccacgccgccgcgacgctttgcttcagttccgcggcgcgcaggtccccgtagccggacgtaggggtacctcgaggccggccagggattaatgggtggcttgtggctaaaactgttttttagaaccatccatgatggccaataatagctaccattgggtacctcgaggccggccgggaccccgcatctcctagccccagctagtagatcattggacacatatcgaaacagctctctagctagcgcgctcgtcgtctaacctggcttccggcatggcttccaagcagatcggagtcttgacctgcttcattgccatcaccgctctcgccttccgtccctgcgcatccgccgtgcccatggacggcggctggtcgaacggcggcgccacctggtacggccccgccaagggcgctggatccgacggtggtgcgtgtgggtaccagggtgccgtcgaccaacctccgttctcgtcaatgatcaccgccggcagccaatccatcttccaggacggcaagggctgcggcacctgctaccaggtgaagtgcaccggacacgagtcgtgctccggcagcccggtgacagtggtcatcaccgacctgtgccccgacgctacgtgccaggtggagcccgtccacttcgacctgagcgggacggcgttcggtgccatggcgaagcccggccaggccgacaagctccgaaacgccggccgcctacaagtccagtacactcgggtggcgtgcaactggaacggcttggacatcgcccttcagggtggacgccggctcaaacgccaactacctggccatggccatcgagtacgagtccggggacggggacctgcgcgccgtggagctgaagcagagcggcgcggcggcgtgggcgcccatgcaacgctccctggggcgctgtgtggcagtacaagtccggctccaccaatctgcaggcccccctgtctgtccgcctcacctcgggctccggcagggtcctcgtcgccagcaacgtcatccccgccggatggcagcccggcagaacctaccgctccgtcgtcaacttcggaggaaaccatgcataacgagtggtattaaggatgtcgtctgcagatgtctccatccaacaataagatgcatgcatatatgatctgtgtggccagctagctgctagaccatctcactccctgagtctgctgatgctcagccaataatgaatcattccatctcgatcggaaattcaacatatataataatgcaagcaccggaaataaaattctactgtgttctgtgaaaaaaaaaaaaaaaaaaaagcggccaaaaaaaaaaaactcgcatgtcagtgctgtttgcatgctctagttccggggacggggacctgcgcgccgtggaactaagcagagcggcgcggcggcgtgggcgaacca

SEQ ID NO: 121096 - DNA, 817 bp, Zea mays
  Clone ID: MRT4577_41919C.1
cctcgaggccggccgggaccccgcatctcctagccccagctagatctttggacacatatcgaaacagctctagctagcgcgctcgtcgtctaacctggccttccggcatggccttccaagcagatcggagtcttgacctgcttcattgccatcaccgctctcgccttccgtccctgcgcatccgccgtgcccatgggacggtggctggtcgaacggcggcgccacctggtacggcccagccaagggcgctggatccgacggtggtgcgtgtgggtaccagggtgccgtcgaccagcctccgttctcgtcaatgatcaccgccggcagccaatccatcttccaggacggcaacggctgcggcacctgctaccaggtgaagtgcaccggacacgcgtcgtgctccggcagcccggtgacagtggtcatcaccgacctgtgccccggcgctgcgtgccaggtggagcccgtgcactttgacctgagcgggacggcgttcggtgccatggccgaagcccggccaggccgaccagctccggaacgccggccgcctgcaagtccagtacattcgggtggcgtgcaactggaacggcttggacatcgccttcagggtggacgccggctcaaacgccaactacctggccatggccatcgagtacgagtccggggacggggacctgcgcgccgtggaactgaagcatagcggcgcggcggcgtgggcgcccatgcaacgctcctggggcgctgtgtggcagtacaagtccggctccaccaatctgcaggcccccctgtctgtccgcctcacctcgggctccggcaa

SEQ ID NO: 121097 - DNA, 825 bp, Zea mays
  unsure (1)..(825): unsure at all n locations
  Clone ID: MRT4577_4191C.1
accctcgattccaaagacataccgacgccagctctctctagctaccttgtgtccaaagtgccaaacgccccttaaccacctgctttatcttcccccgttcaccccgtgctcgcgcgcgcgcgcgctctctctctctctctctctccctccctgtctccctctccccctctcggagtctcggtcgtggcgacgacgactgggcaggccgacgagtccatcaggaaaagtgttgctcctagcctcctacagctagttctttttatgattaagctccaatgaaggattctcaggcagttgaattatgttacttaaagacttgttctacaggatattcagagcacaacagagttgcagtcatcagcacagggtactaatgaagtgcaaagtcagcaaccaaacccgatgaccactgatgctcctgcaggaaattcgggctccttgtctatagctagtaatgacagtaagaaggtgtctcgcgaagacattgaacttgttcagaatttaatagagcgttgtcttcagctatacatgaacaaaggagaagttgttagaactctttctactcgtgctagaatagaacctggcttcactactttagtatggcagaaacttgaagaagagaactccgagttctttagggcttactatatccggttgaaattgaaacggcagatcatcttgttcaatcatttattgcaacaccagtacaatttgatgaaatatccagcacctcncaatgttccattggctccaatancaaatggaattcatcatatgccagttagcaatttaccatggggtatccagtacttccgcagcctatca

SEQ ID NO: 121098 - DNA, 746 bp, Zea mays
  Clone ID: MRT4577_41920C.1
ccggccgggctggcgttgagcccgatgacctgatgctcactgcttgtttggctgcttcccgcaagaagaagggtattgatgccatcgacaagggtttcctcaaggatctcaagttctacccccgcgccaagggtgttctgtccaagtacaaggttctcgacttccacccctttgaccccgactccaagaaggtccaggatgttgtcgagtcccctcaaggcgagcgtatcatctgtgtcaagccggccgggctttttgttctcaagaccgtcgaggaggaccaccccatccctgaggaagtcgattcggcgtacaaaaactgtgtggctgagtttgctacccgtggcttccgatctcttggtgttgctcgcaagcgaggtgagggtgcttgggagattctcggaatcatgccctgctctgacccccctcgtcacgacactgcccgaactatcaacgaagccaagcgccttggtctctccatcaagatgcttactggtgacgctgtcggtattgcccgtgagacttctcgtcagctcggcctcggtaccaacgtttacaacgctgagcgccttggtcttggcggtggtggtgacatgcccggttctgaggtttacgatttccttgaggctgccgatgctttcgctgaggctttcccccagcacaagtacaacgtccttgagattctccagcagcgcggttaccttgttgccatgacttgccgatggtgtcaacgatgatccgtctct

SEQ ID NO: 121099 - DNA, 468 bp, Zea mays
  unsure (1)..(468): unsure at all n locations
  Clone ID: MRT4577_41921C.1
nnnnnnnnnnnnnnnnnnttttatttatactgtagtagtttctggtgacgaaaatagtctaacatgcatgttacatgtaatacagtatccataaaaatgggagcaacaattatttatacaacgaaattgagcaatgaaatgcagcttcgcagaattgttatgttgttgagtaatacatagtcaacaaaggattattattattactacatataatattgcaacacctacatctgccgccaaacataatttcctccagctatgcaacaggagaaaattaaagcgggaaggaagaaaccaaccccacatggagggatgggagcttcatgagagcgaactgaaactttccactggatccgattcctctagcatcaccgctgcctggaagcagtcggcagcgtcagagatcctcccatcagacctgtgcacttttcctagggaaagccaagccatccggtttgtgggctcgac

SEQ ID NO: 121100 - DNA, 824 bp, Zea mays
  unsure (1)..(824): unsure at all n locations
  Clone ID: MRT4577_41922C.1
gggaccctcgaggccggncggggataccataccctagaacccgggccgccgccgccgcaggtcctcactggcactgctcgccgcgcgttgtagtggagacgtctaacctcctcgcaagcttctcgtctccggtaaccatggaccgttgtccgtatttgatacatagcccactttcctcgtgccaagcaagtccgcgacctagtcgccgccggccggaacaagaagaccgagcgcactgcatacctcaagctcctcctcaagctgtaccgcttcaacgccgtgatcctcaagcggtacttcattagcaagaccaaccgccctgcctctctcgctccaccgtctcatcagcttcatggaaggggggaggtctcgcttcgatttccattcagattttgtttgttgaatgtgttttccagttatgtgtcaaattgctgtgatcgtaggaaacgtgactgacgacaagagggtctacgaagtatctgcagtgaaggtggctgcgtgggcacggattctgagcgcgggtgacgagtgcctcgcctttgaccattgtccattgtcaggttgatggtcatctattgatgtacgctctattttttgtatctgaatgtgcagaattaatagttttatggaaaaggcaaacatctttcatattaaaatgaactcttgagacattcacattttccttgttatctctcaatgatgagatcaaagcagacgggcggtcagaaccctgatgttgtgtgagtgtctgcatttttatgcattcctcttatgggatgcatcagagagtgaagaacaggcatttcacttgcatccatatttgc

SEQ ID NO: 121101 - DNA, 513 bp, Zea mays
  Clone ID: MRT4577_41923C.1
actcctaagggcgattgggatcatcgaggccggccgggttagcgcagcagctctttctttgtatggattgtttcattagttgtcaacttacaaagcactctgcttgtttggttatgagcagaacagaaaacgtggggggtgggaatggtttctcgatggtaaccacagtttggccaatggtttggtacatttcaggttccagctgaagtaacattaaaatccggtgcgacttgttttctgtacatggtgactgggttggggtgggttgtttttttgttgttgaatgttagtatagattggcatggttacggtttggatttcagtccactagcggggctagacgcaatcctaagtccccttccagtccagtccaccacagcacaccgtagccattgccttcctcaccttatgccttacatctgctggagcaggagtgcaaatccgtcagcattggactgttttactcatctataggatctgattttggtcggtcgcactctgcggagatgcaca

SEQ ID NO: 121102 - DNA, 173 bp, Zea mays
  Clone ID: MRT4577_41924C.1
gtgtctccaacaactgcaccctcatgaataccaatgaagatgaactctgcatacccaaccacggctacgaagactggccgaaagtgcctctacactatcacaaccattgcgcggtatgacaaccaaagtgaaccactataaaaaacggccagaccagcttacatctcactatc

SEQ ID NO: 121103 - DNA, 891 bp, Zea mays
  Clone ID: MRT4577_41925C.1
ccaggttcgtgcgcttcgtgagcacgcgagaggtgctcgagttgacgagcacctatgatttacagatgtcacagctggaaggggctaggaagatatatgcgcagggaggtactgaaaaccctacctaaggtggaactgctgaaaatgttacaggctcagcagcggcggtggcagcagatattacaaagaaagaacttcttagggcaattgatgtgcgtctaagttcccttaaacaagatctggccgcagcttgttctcgagcatcctctgctgggttcaatcctacaagtgtatctgagcttattctttttgctaaccattttggtgccagtcggctgagcgaagcatgcacaaagttcatgtcactttgccagcggcgtcctgacatcagtcctcaaactgcacagccagcagtttcatcacactggaaggtctttgacgatgggaatgtccgtggttcttcgagttcagacatgtctatagatgaaccactagttgatcccagtgaatccaagaacaaatctacagtcagtggaagtggctctcaggtccacagactaagcaacatccaaggtttagaatctgctgcagcacagcaacccaagccaaccatccaacaagcagtagataaacaagaagcagaaacagatgcgtctcctgcaccttctaaaggagagctttcaaggcggctgagtgtgaaggacaggataaacatgtttgagagccagaaaaaggagcagactccaagttctggtaacagcaactctgccagtactggtagagtggttccagggaaaggtgagcaccgcagggttccttctggcgcctccatggagaagttaggtagaaggtgggagcagtgttagcgacatgagtattgatctcagcaac

SEQ ID NO: 121104 - DNA, 307 bp, Zea mays
  Clone ID: MRT4577_41926C.1
ccggccagcaaccagataccagaaaagatatagaatgtacttatccaacaccctgaaaagaatggtttctctccattcgattaccgagcaagatgtatactctgcagtcccagatacgatccagagcattccagaattcatattacgcagatgcaaagccatacaccgattctgttggcaaaataagggtttgctcgagtttagataccccttctgtttctagggcactcgaattgggttacacgataccatagtttctgctaatagatacgtatcaccgaagaaaaaaaaaaaaaaaaaagcggcc

SEQ ID NO: 121105 - DNA, 529 bp, Zea mays
  Clone ID: MRT4577_41927C.1
cccgacgcgttacctagatctattgccgcaccccagatctccaggagggactcgttcgttcagctaactacactgcacgcaatggccaccacggcgaccgaggcggcgccgccgcaggagcagcaggccaacggcaacggcgagaagaagacgcggcactccgaggtcggacacaagagcctgctcaagagcgacgacctctaccagtacatcctggacacgagtgccgtacccgtggcagccggacagtatgaacgagctccgcgagatcggcgtatacaccggatactccctcctcaccacggcgctcgtcctcccggaggacgccacgatcttggtcatgcacatctaccgtgagaaccacgagctgggcctgccctgcatccagaccgtcggggttgcccccaagatcgacttccgggagggtcccgcgctcaccgtcctcgacgatctcatcgcggaggacaataaccacgggccccccgacttcattttcccggaccccgacaaggacaactacctcaactac

SEQ ID NO: 121106 - DNA, 544 bp, Zea mays
  Clone ID: MRT4577_41928C.1
ttcttctaaatcaactcagcgtaattattcattttgcacttttggcagggaacgatccggccagcacactaccatgttctgtttgacgaaaacaaattcactgccgatgcactgcaaacgttgacctacaaactgtgctacacgtaaacagtttctttaccacttgcttgtgattcttaacaaaactggtgcatttttaccgttcgaattatggccaccatacttacctggtcggtgatctggctttcttttaggtatgcgcgatgcactcgatcagtctctataggtcagtagctggtctgcaagttactttacatatactgtgaaagtttactgggtgttatcctccatgttctctatggtggtaccttttctgttcatggaagaccgaattcagttgcactggggtccttgttgcataatacagttccccccgccgtactacgcacacctggcgggcctttccgtgcgcgccactacatgggacgatgaccttctccgaccagggggtcgtctttcagttggcgagctctcgcatgaaaga

SEQ ID NO: 121107 - DNA, 240 bp, Zea mays
  Clone ID: MRT4577_41929C.1
ggcgtcacatgctcgagacagttagatcggcattcggatcgactgaactccacgatctctaccaaaggcagcagctcagggagctggacatgctgaactcaaccatgctgtgatgacagacctcataatgggggtatctactccatcagcaacggtggcatgacgcgtagcgaagacaggcccagtacagcaaccaactatgctcccatatatgcgccacgtcagtcatgggaaacgcca

SEQ ID NO: 121108 - DNA, 670 bp, Zea mays
  unsure (1)..(670): unsure at all n locations
  Clone ID: MRT4577_4192C.1
cactccgtcctgtacagcacaacctcctcttacggccaccttcgtgtgttcgactgtgtctactatcccaacactaccatttccgctccctataagctatctcctcgctccactcgctgcctcttccttgactactcccctgaccgcagggggtatctgaaagggaattaggcttacacctagttcctatataattttggtggttgaattgcccaacacaaatctttggactaactagtttgttctagtttctaagttatacaggtgtcaaaggttcacaacatagccaataaaatgaccaagtgttgggttcaacaaaagggcaaagagccaaccgtaggccctctggtctgggcgcaccggactgtccggtgtgccaccggacagtgtccggtgcaccaccggacagtgtccggtgcaccaggggactccagctcgaactcgccaccttcgggaatttccaggggctctcgcgctataattcaccggactgtccggtgtacaccggacagtgtccggtgcgccatggagaagcggcctcaggaactcttcagcttcgggaaaagccacggctcgtccgctataattcaccggaccatgtccggtgtgcaccggactgtnnncgtgtgactncagcacaacggctatcccgcgccacgggctacctgca

SEQ ID NO: 121109 - DNA, 354 bp, Zea mays
  Clone ID: MRT4577_41930C.1
ctactataggcagagcagacccggccgcaaccaccgttaaggaatttgcaggacatcccactctcgcgagctggagtaattacgaacaggcccggaccaatcgcgcttcaaaacagttgctcagactgaatggccaatggaacccgccctgtatcggtgcattaagcgctacgggtgccatggttacgcacagcttgaccgctactatagctagcgttctagcgcccgactcttttacctttgttgtcttcctttttcgaaaacttagttgtttaaccctacaaagctctacatgcaaggctacctttagggttaccattatgagctttactgctccaacaatcaaaaaaacta

SEQ ID NO: 121110 - DNA, 175 bp, Zea mays
  Clone ID: MRT4577_41931C.1
cacagcccaaacccgggggagaaaaaaaaaattaggctgggagggcccccctccccagttcagcccctataaaaattcaaccgaggtccaatctaatcccgggggcaacccagctgagtcaaactaactgaacagtatgcaaggatgttaaccgctgaacccaaggaattcgggg

SEQ ID NO: 121111 - DNA, 438 bp, Zea mays
  Clone ID: MRT4577_41932C.1
tttgggctgctttatgtgcttgtggaagcggctgttgtatccctcgaggcccctagccgattcagtaacttcctcggatatcggtctttaagtagcggttattacgcgcatacggacgttaagtactgcccactaggggaagttaacgtagcattctcggacgctcaccgtacctacatagactcctatagcgtctgagcgcccgtggcgcgtctcccgcggaacgcacttcaacgctttacctacactttacatcgtccctacctatctcgactcaaactcgcctagacaggcgcccacaaggcttaggacctaagaagggcgacccccccccgaaacggtcatccactacaggattagtcggcataacagtacctgaataatatcgtgaccgacccccgccttcaagacgccacctaacgcatgccgatcattcgt

SEQ ID NO: 121112 - DNA, 342 bp, Zea mays
  Clone ID: MRT4577_41933C.1
ataaccaaaccgactatggctgacattttgacgggaagcatcgacggcgggacacgtatgatcgcgctggcgctgcatgccggccgtccggcgacagacctgagctgccatggcctttgctgccaggctagcctgggactccacacgactactgcggactagcctaagtggtgcacggttatccgttgtcatctcgggtctaacatacagttacaaggcgaccactctggacatcccacgtagtcaacgatgcctccatcgcatgagcgtatgaataggtccatacggttatgcttggacactgcgagcgcatggcgaatatggtcaacgacataatgcact

SEQ ID NO: 121113 - DNA, 601 bp, Zea mays
  Clone ID: MRT4577_41934C.1
ggtacccctcgagtgtccggccgggaaaaaaaaaaaaaaaaaaaaaaaaaaaggagaaaaaaaaaaaaaaaaaaaaaaaaaaaaaaaaaaaaaaaaaaccaggtccaaaaaaaaaaaaggattaagaaagaagggaatcctctcctacgcggaagcgaaaagattcgtcgcctaagccgcctttttgttaaaatctgggggggagcctcgccgggggcctgcgccccggggggccgccgatccaaaatgccttcgtgcgtgcagggatgctgttgttgctcgtccctgcgccttttcccccgggacgacgcgctttggtccccctccgcctgcgcgcaccgcctgaagccttggtcttggggggcccaatcccccacctggtcctccataaggttttgtccccgcccgttccccaccctgatttacctgtttttacccttccctcctccatttttacatctccccgtggctgctttgctcctgctgccacaaaagtattcgccttcaatcgttgctcgggcctgtcatttcgtgccgaacgccgacttgtttgccgttttcgctgccggcttctgttggatcggatttgtctggatcgatt

SEQ ID NO: 121114 - DNA, 303 bp, Zea mays
  Clone ID: MRT4577_41935C.1
cccacacgcgcgatgtccgctcattcatcacataccatccttctatttttaccatcaatcataacacatcttacaactgtagcttttaaatcatatcttctacattaattatctaacttcaaaaaccatcaaccaattactttcatttaactcttccatttcattactataactacatcttccatcaaacacactacttttcacctaccctcaacaacaaattcatttaacccaacttacatctatatactatcctgcttatttacaacaacatcaactactaccatacaaacatctattttt

SEQ ID NO: 121115 - DNA, 394 bp, Zea mays
  Clone ID: MRT4577_41936C.1
gctgcaccatctgcgaaaagatcagcggcctcggctgtttctcagacccaacattacgtgatgctaaatgctccttaagtgcctcttgaccaccacttcacgctcaagtgtgcatcatactacatgatatcaccgcgaaagttcaattcagatcacctcttgctgtacgcattgacacactcttgaatgaacatgatgtgggggctacctataaaacatgccgtcaaagctgtcattgaaagtctcgctaccatggcccatctgatagaacaagacgcccttactcgggacttcgtggaatctgacgatgccagtgtggatatctacgatctcaatcgagtgcctgtactgatcaacgaccacgttgacgttgctatggcatgctactcatata

SEQ ID NO: 121116 - DNA, 200 bp, Zea mays
  Clone ID: MRT4577_41937C.1
catgaactgatctggtccggactaaggtcaggggatagccatgcagctgctatatgggaggcagtggagggagcacagcgccccttgggtggtgtgagcagaaatgtaattctatcctgctggggaaaccaaaagtttggctacattgccctatctttttttaatgaatttctttatttgggggcatcacgaggtgtgga

SEQ ID NO: 121117 - DNA, 353 bp, Zea mays
  Clone ID: MRT4577_41938C.1
gggccaaccaaaccccccaaaggggaaaaaaatataagggggttaaccaaaagggccaaacctttttttacattaaagccccccaaaaaacaaaaggggggctaaaaaaaaaataagggaaccaaaaaccccaagccaaaaaaaaaccttagacacccaaggaaaaccctggggaatttaaagggaaaacaaatccttgggggcctactagagacgaaaacaaatccaacgggcacagttttaaaaaacccgtggggacaaatccaacccccccagttttaacaaacccctttttcccaagggggggcggccggcccggtgaggaaaaaaaaaaaaggggaaaacccctttgg

SEQ ID NO: 121118 - DNA, 251 bp, Zea mays
  Clone ID: MRT4577_41939C.1
tttgtttgggggaacacgcacgtgtcattgggtatttatgggacttgcccacgccctatcagcattttccatcttacgaacaactaaagcatcccacttactaaacagcgtgctacttacgtacatagaacccacgcaatgccaaatatacctacgcgaccgacttttcaaaaaaggctcattcttggttcccaagttttttttgcgcgattctgtagacgttccttggtggcttcatataccccgtttta

SEQ ID NO: 121119 - DNA, 261 bp, Zea mays
  Clone ID: MRT4577_4193C.1
gggacgggggacggacaaaaggatgcccgccctttttttgttacaaaaaagaaataaccccggcagaagccttttttccacgcaaaaggaacaaaaaaagggggaaacccgaaaaccatacctgggcaaaatgaacgggggttttttttccttccccaaaaaccaaaaaaaccttgaaaatcctttcgaacaagggacaaaaacccgggttcacccgctttaagactctaaaaagaaccttaaacccccgtaaccgggaaa

SEQ ID NO: 121120 - DNA, 307 bp, Zea mays
  Clone ID: MRT4577_41940C.1
cacacactcgccaaggagctcacacataacacaaaaatggcgagaaccttgttgtggctcgcgctcttgtgcgccgccttggcgttttgcacccgtgcagcaggcctcctgctcgagctcacccacgtcgacgccaagcagaactgcatcaccgatgatcgcatgctccgcgccacggagcgcacccaccgccggctggcgtccatgtgcgatgcgagctcgcccgtccactgggccgagtcgcagtacatctcggagtacctcatctgctacccgctgcagcaggcggaggtcatcatctgcaccg

SEQ ID NO: 121121 - DNA, 254 bp, Zea mays
  Clone ID: MRT4577_41941C.1
atgctatggtatgtgaatgttgatctctcagcactccgtacacctgcttgccacactgttctggccactgtgtcggggtctagattgggactgacttgagagtgtttcaggtctgttcagttgggtgttctggggccatgcagtctgattcagttcagcgtttcctttatcgtacctgctcaatgaatctatcaccagatccgaaagagtgatcgcttcttcctaaaaaaaaaaaaaaaaaaaaaaaaaaaaaa

SEQ ID NO: 121122 - DNA, 709 bp, Zea mays
  unsure (1)..(709): unsure at all n locations
  Clone ID: MRT4577_41942C.1
gggtacctcgnagccggccgggaaccctagttgcctgcctctcctcctccagagctcgtcgccaccggncaccgccaccctcgatcacgccgtccgtcgaattaaggtcagcatggtgagggtcagtgtgctcaacgatgcggttcaagtccattgttccaacgtttaaaaaattcggcaaaaaggcgggccttgtattagggccgtctccccaagggtcttcttcaaaattccttggagggttttttggagcccccccggtttttttttgggaaatttcccaaacaccttttttaacccccccccttttggggaaaaaaaatggggggccccaccccccccgggggggggggttaaaaaaaagggggggggggtatacacccccccccccccttttttttttttattcgggggggggaaaaaaaaaattttttgggggggggggtttttcctggggagttttccccccccccccccccccagagggggttaaaaaaaaataaatttctctccccccccccaaataccttttctgggggtgtttttttttttcccccccccccccgaagggggggccccccccccccccccccttaaaaaaaaaaaagagggggggggggggggggnntcccccncccccccccccttcccttccttttcttaaaaattgggagagcacgagcgtaaaaaacaaccttttttttttttt

SEQ ID NO: 121123 - DNA, 539 bp, Zea mays
  Clone ID: MRT4577_41943C.1
cggccccggccccccccggaggtggtggcggcggcatcatcaggagcgccggcaataagggggggttggccccgacgcaacctttcctgttgccgtcctccccctcccctgacaacgtttggccgatccatggatatggatgaattgtcatccatgcttgcatgggggggtacgattcatatgaggctgcccccatgttgggccctcatggattggagtcccgcctgcaaaatttcccgttattagtcctttttttgaggttttccctgttgattttcacgcatgtatgtatgctgctacctacgtgtatgcatgcatcactatggttgttacgcctttgatcacaagacaactacgtagctaggatcgtcggagtgtgttgacgacgtttggtatgtgcatgcgcaatgcctcatcacatcaagtgtgtaataatattagtttgcaggtataattatgcatttgattaaaatacacgagccaaagagctaattggctgaaagccgaacatccggatataggagtggccttacaatgat

SEQ ID NO: 121124 - DNA, 2508 bp, Zea mays
  Clone ID: MRT4577_41944C.1
cgaggcccggccgggccgacacgactctcggcaacggatatctcggctctcgcatcgatgaagaacgtagcaaaatgcgatacctggtgtgaattgcagaatcccgcgaaccatcgagtttttgaacgcaagttgcgcccgaagccttctggcggagggcacgtctgcctgggcgtcacgccaaaagaagaaaaaaaaaactctttctcgcttgctcactcgcgtcgacgactgggctaccggcgcctccaccctccgcctggtgtccttcgccgtcgacgagcgcacaccagggtacagtacgtattgctcgtgatttgtgtaactacggagcaagctgcatacagcacaagatagaagatgggtatccttgagaggatcaaggagattgaggccgagatggctcggactcagaaaaataaagcaacagaatatcatcttggacaactgaaggcaaaactagcaaagttgaggacacaactattagagcctccaaagggttccagcggaggtggagatggttttgaagtcacaaagtttgggcatggtcgtgttgcacttattggatttcccagtgttggaaagtcaactcttttaacgatgttgactgggacacattctgaagctgcatcatatgagttcacaacgcttacttgcattcctggaattgttcattacaatgataccaaaatccagcttcttgatcttcctggtatcattgaaggagcttctgaaggcaaggggcgtggtaggcaggttattgctgttgcaaagtcatcagatcttgtgctgatggttctggatgcctcaaagagtgaaggacatcgtcaaatattaactagagaactggaagctgttggactccgtcttaacaaaaggcctccccagatatacttcaagaggaagaagacgggtgggatttctttcaataccactgttcctttgactcatattgatgagaagctgtgctatcagattctgcacgagtacaaaattcacaatgctgaggtgttattccgtgaagatgctactgtggatgatctcattgacgttatcgaagggaaccgaaagtacataaagtgcgtctacgtatataacaagatcgatgttgttggtatcgatgacgttgataatcttgctcggcaaccaaattcactagtgatcagctgcaatttgaagctgaacttggacagactacttgcgagaatgtgggaggagatgggcctagtgagggtgtatacaaagccacagggccagcagcctgatttcacagaccccgttgttctttccaccgacagaggtggctgcacggtggaggacttctgcaatcatatccatagaagtttgctcaaggacgtgaagtatgtgctcgtatggggaaccagcgcaaggcactatccacagcattgcggcctcggccatggccttaacgacgaggatgtcgtccagatagtaaagaagaaggaaaaggaggagggtgggcgaggccggttcaagtcgcacacgaacgcacctgaccggatatctgatagggtgaagaaagccccactgaagacataataacgggttccctgagcgcgtcgtgatcagcttctccaaaccagatggacaacacaagctcggtgggagatcataaaatctggaactagctgagccgcggcgtgctacttgttttgtagtaccagaacagaaggggccaccgccatgtttggagtactccaccttccacaatacctacaccaatgcggcaccaccatgaacactgctgcgtcttgctcgtatgatgtgggcttatcactgtgtgttacctgctatatatgatatgataaatacttgccaactcaaaaaaaaaaaaaaaaaatagtagcagcagcctagcctttgttgtgggaaacatttgtgggtaccaacgcgagggcagtttgagaaaggtccgagcacacatgttcaataaatatcaaatatcagacatgtcttctccaatcaacaaggtctttggcaatgatgccaccccaaccatgcctgaagccccaaagcaaaacaacgaccgccgagcgtctgatgcctctgtcggatctgagtctttctacaatggacgccgaaggtcttcggcagcccagagatttggaaacctagaggctcttaagcgtcgtcaggatgaggagagcctggctcggagacaatccttccatgatgcatatggaaagcccggcatcatcggtacttggtggaacaacttcacccgtggacctcttcaacccactacacagtcgcagcaatcgaaaggcggatcatcataagtttttgcttgtttcagtgtgtgacatggcaacgagatgagatgagtgtttatgaagccaggggccagaaggcaaacatggtttgctcaaagagcagaagatcaaaaatgatgcgacatagcgttctcgcaaacatgtattataccagtatgatgtaaattcaaagacaaacaacatacaaatgaaaaaaaaaaaaaaaaaagcggcc

SEQ ID NO: 121125 - DNA, 308 bp, Zea mays
  Clone ID: MRT4577_41945C.1
gtggggggtggtgttaacactgacataaaatctttttaggccgtgggccctttatcttgagccctcacgagacaccacttctataattggcttgcatcgaaactgcggggagtcttttttttttttttttaacagacaagacgactcgcggggggggcggcggtaaccaaacatttaagggcgccatgcaaagtggggtggaggagtaaattgctcccacgcttgaccggagctcaatcgcgaccgcgttgaagatctactccgggctcaggttatggcttgacgggaggctggaatagccatggacg

SEQ ID NO: 121126 - DNA, 250 bp, Zea mays
  Clone ID: MRT4577_41946C.1
agctgtttgagttttggagaaggatggacactgcatggcaggaattgaaggtatcatcggcgagaaagtagtcgaaaaaggctggacaacttgttgtggtaaagttgtttcctatcgtgtcgaaagcagtgggaaagctgatgttgctgctacttgaggcagatctttccgttattaatatagtcttggcttcggtcgatgctccggtttctaccatagtaccttcatttccttcgagcggtagttcgga

SEQ ID NO: 121127 - DNA, 368 bp, Zea mays
  Clone ID: MRT4577_41947C.1
cccacgaagctgattcctaagcaaagaattttttttggaacttaaaggctgggccgggaacacaaacacttgaatcacactggccagggattcataactggggggggaacatgcccaactttagcaggatcaggttttcagggggggcctaatttaaatccagttccttcctgcttttcacaggggggttttgttttgacttaggggccaggacattcaagtcccatgccgggggagggtaaccgtaggggacccatgtccgttctcccttgccatccaccttgaccaggatggggtgtgtatcccccccaccccctggggggacggttcttcggacccgagcccaggctgctcgcccggggccttgg

SEQ ID NO: 121128 - DNA, 685 bp, Zea mays
  Clone ID: MRT4577_41948C.1
atatactccactccagtccccgcgctgcatccttccgcttcctctcgctccctctgctctctcgcggtcgcagtctcgcagatcccgatcgcgcaaggagccagcgtagagggtgatcgacgatggcgggcagcacgcgcgcagcgcacaaggcgttcctgctctgcaactacacgctgctgggtgcagcatcggcgtgcatcttcctcacgctctcgctccgcctcgccccgtccgcgtgcggcctgctcctcgtcttcctccacgcgctcaccgctgtcttcgccgccgcgggctgctcggctccttcaacgacggcggcgccggggccggccgcgcgcacgccgcgcacacagcgggggccgtgctcaccgccatcttccagggcgccgccgcgctgctcgccttcacccggaccgccgacttcctagccgagctgcggtcctacgtccgggaggaggacggcgaggtcattctcaagctcatcggcgggctcggcaccgccatcttcgtgctcgagtgggccgcgctagcgctcgcattcgcgctccggcttgacgatgatggcaacgaggagattgacggtgagcactgcaagagctgggcgtcagcgtaccatgtctgattctgcaatgtattcaattcatctcttagaaattgcaataaagtacattcagtgagccgg

SEQ ID NO: 121129 - DNA, 466 bp, Zea mays
  Clone ID: MRT4577_41949C.1
gccggccgggccgggatactccactccagtccccgcgctgcatccttccgcttcctctcgctccctctgctctctcgcggtcgcagtctcgcagatcccgatcgcgcaaggagccagcgtagagggtgatcgacgatggcgggcagcacgcgcgcagcgcacaaggcgttcctgctctgcaactacacgccgagcactgcaagagctgggcgtcagcgtaccatgtctgattctgctctgttcagacaccggagacgcgagagatacaggcacacaaaccataaatggggggaaattttctcgtctattatttacagctgtggatctattccgctgttgttactgtggtcatgaaccgaagtgcaaaggcaaatgttttgctttgcaatgtattcaattcatctcttagaaattgcaataaagtacattcagtgagccggaaaaaaaaaaaaaaaaaaggccccta

SEQ ID NO: 121130 - DNA, 211 bp, Zea mays
  Clone ID: MRT4577_4194C.1
aaagccaaaaaggggtgggttataccctttaattacccacccgggaaagttccctccttgttgggaaaaaccaaaccttaccccgcccaaattgccgggtctatttgagaagtgttttaccttcctttataaaagggatgggaaaatttccctttttttttaaccccaagctcgggccttttaattaatttttgggggttatttttttttt

SEQ ID NO: 121131 - DNA, 836 bp, Zea mays
  Clone ID: MRT4577_41950C.1
cggtcgcgtgggccgcgctgcatccttccgcttcctctcgctccctctgctctctcgcggtcgcagtctcgcagatcccgatcgcgcaaggagccagcgtagagggtgatcgacgatggcgggcagcacgcgcgcagcgcacaaggcgttcctgctctgcaactacacgctgctgggtgcagcatcggcgtgcatcttcctcacgctctcgctccgcctcgccccgtccgcgtgcggcctgctcctcgtcttcctccacgcgctcaccgctgtcttcgccgccgcgggctgctcgggctccttcaccgacggcggcgccggggccggccgcgcgcacgccgcgcacacagcgggggccgtgctcaccgccatcttccagggcgccgccgcgctgctcgccttcacccggaccgccgacttcctagccgagctgcggtcctacgtccgggaggaggacggcgaggtcattctcaagctcatcggcgggctcggcaccgccatcttcgtgctcgagtgggccgcgctagcgctcgcattcgcgctccggcttgacgatgatggcaacgaggagattgacggtgagcactgcaagagctgggcgtcagcgtaccatgtctgattctgctctgttcagacaccggagacgcgagagatacaggcacacaaaccagaaatggggggaaattttctcttctattatttacagctgtggatctattccgctgttgttacttgttactgtggtcatgaaccgaagtgcaaaggcaaatgttttgctttgcaatgtattcaattcatctcttagaaattgcaataaagtacattcagtgagccgt

SEQ ID NO: 121132 - DNA, 453 bp, Zea mays
  Clone ID: MRT4577_41951C.1
ctttcggttgccgccctataaacttgccggatgagcgtgtgcgcctctatttgcccacaatggagcttgtcaccctccctcagatcgtacctgtgtcatatccatacgatccgaaggtgcactttgctggtaggtcggatgcatggaaaagaactacccgcccgatagcgccgaatacatcccggctgctccgaatctccctgcccagctccgagtactcgtcgacaaaaaaaaaatagaccctgtcgtgacgagcataactgctaggataccggtggacttgatggaaatcctccacctaagggccaaactggagaccattttatgccctcagcacagcaacaggaagaagcaatcccgaaaaaggttggaggactaatggcccaaaaggccccactcatctcaaaggatcatgagcggggccactctgattccgctgactgggctctaagg

SEQ ID NO: 121133 - DNA, 750 bp, Zea mays
  unsure (1)..(750): unsure at all n locations
  Clone ID: MRT4577_41952C.1
ggatttccaacggagccttccggataggatttgtctcccctccctgcgcctctccgtttccgccatggctccggccgccgccttcctgtcggcgtgcgccgctggttccattccccgtgcgcccttcctgatcccgaggcctcttcttctcccaattccgctctcccctgcgcgctgggaccgctcccgcagctgcagcctctttggcgtaggcgccaacactcgccgcgcgccaacccttcgacggaacgcctccacggagacggtggttccctacgtgccgggctctggcaagtacatagcgccggactacctcgtgaagaaggtgtcagccgaggaggtgcaggagctggtgagggggcagaggaaggtgccgctcatcgttgacttctacgcgacctggtgcgggccctgtgttcagatggcgcaggacatcgagatgcttgcagttgagtatgaggacaatgccctgtttgtgaaggtggacacagatgatgaatatgaatttgcaaaagacatgcagaccaaaacanagatgccatacgcaccgaggggctaattcctatggatatgatcagaaacatcattgacaacgagttatgacagctgatagatcactgtattaggaacataggcaatgttttatctttgtagcagaaaatttttgtcatgaggctaagcattaccgctagggtgctagttgngtgcttgatgttttcttttgctccaatggtaggtttcatctgtgca

SEQ ID NO: 121134 - DNA, 429 bp, Zea mays
  Clone ID: MRT4577_41953C.1
agggggaaaaaatgatcacaaaccaagccccccccggggtacataaaaaccgcccaaaacaggacaaaactcccaacccaaccaactgggaaaggtggtgataactggccccaacccaaaaaaaccccccccccaaaataacgggcccctttaaaaaactttggtaaagcccttaactgccagaaaccctacagaccccaactgctattgccaactacatacactcggcaaacagtttactggccacaacctaacccgggttttgctaaccaggaacaaaggggaacttattggtaaacaaaaaaggggccctgggcacccacataaaaaccgcccaaaaacttgcggaaatccctttttttgacacgggaataacgggttaaaaaaacacccagacgagaaacaaacccaacatcaatgccttaaaaa

SEQ ID NO: 121135 - DNA, 172 bp, Zea mays
  unsure (1)..(172): unsure at all n locations
  Clone ID: MRT4577_41954C.1
aatgaaggtcatgcgatgaaagacctcgatggcgcggaacttttggattcaaccgagttgttagcgcatgtccgtgctgttcttgtcccccgngncttaggtggagtccttaacaaggataacgcaccagacgtgaacgccaaacttgtaatcgaagccgntaaccatccaa

SEQ ID NO: 121136 - DNA, 1016 bp, Zea mays
  Clone ID: MRT4577_41955C.1
cattgggtacctcgagcccgggcgcctcgtggccggccgggatttccacggagccttccggataggatttgtctcccctccactgcgcctctccgtttccgccatggctccggccgccgccttcctgtcggcgtgcgccgctggttccattccccgtgcgcccttcctgatcccgaggcctcttcttctcccaattccgctctcccctgcgcgctgggaccgctcccgcagctgcagcctctttggcgtaggcgccaacactcgccgcgcgccaacccttcgacggaacgcctccacggagacggtggttccctacgtgccgggctctggcaagtacatagcgccggactacctcgtgaagaaggtgtcagccgaggaggtgcaggagctggtgagggggcagaggaaggtgccgctcatcgttgacttctacgcgacctggtgcgggccctgtgttcagatggcgcaggacatcgagatgcttgcagttgagtatgaggacaatgccctgtttgtgaaggtggacacagatgatgaatatgaatttgcaaaagacatgcaggtaagagggcttccgaccctttacttcttcagtccagaccaaaacaaagatgccatacgcaccgaggggctaattcctatggatatgatcagaaacatcattgacaacgagttatgacagctgatagatcactgtattaggaacataggcaatgttttatctttgtagcagaaaattttttgtcatgaggctaagcattaccgctaggtgctagtttgtgtgcttgatgttttcttttgctccaatggtaggtttcatctgtgcaaatccattctgctgtttctgtatcgtgttgtttattctcatcaaactctaggttgtgtcgtgctgttgtcggttaggcctgtgtgaccattttcatccctcgaatgataagatggctttggctcagaaagaaccaaaaaaaatgatagaaccaatttgatcccgaaaaaaaaaaaaaaaaaaagcggcc

SEQ ID NO: 121137 - DNA, 400 bp, Zea mays
  Clone ID: MRT4577_41956C.1
gtataaatcttccattgattaatcttttgtgaagaccattcattatacttaactcatgatcagcattctactctagttacaacttacaaggcctttcattaggcagccctagatatatgtacaataatgaagggggttataaaattatttgagacctcacacagcacgattaacttcttcgagctacatgatcatttttttcctttctttccatcgtttgctcttaatagtcatagcaagtcccacgcacctctctagctcaaaataagtttgcatcaccatggtagtatatttcatcagccccaggggccctccataagacgatgaataggtaccggctcaaaatgccaaacacaaaaaattgaggggaggccatcatactcttgaaaaaaaatctctg

SEQ ID NO: 121138 - DNA, 322 bp, Zea mays
  unsure (1)..(322): unsure at all n locations
  Clone ID: MRT4577_41957C.1
ctttcttctccaccgcanaacctactcctagatcttcttaaaatcgccgggctgcccctcccctactnctccacctccctcttctaccacttccgctcctcatctcccccaacttaatctcgcccaactttcctttttttctctctacgctcctcactcaccttcccgtcgttgtactccctgcacaccacgactttctcccttactcccagcaacaacctcatttcttatatcccaagccccttactctccaatcttgaccgccccttcctttctccttctacttctttacatctcctttacaactccccttttttttttt

SEQ ID NO: 121139 - DNA, 280 bp, Zea mays
  unsure (1)..(280): unsure at all n locations
  Clone ID: MRT4577_41958C.1
acaatccaatttactaattattgaaattttacaagccaatttacttaattttggacccagtcccctgagggcaccccccaagccacccaanattgtttccgggggggggggggggctaaggaccaattccantgtattgcctcccgttgtgggggggaaaaggcgggatcccggccctctcgcgccctcgctccgggcccccgtcccggggtaaagtccggggggcccttggggcgggctcattccctccgntaggggtgcgcgggccgccccccccccc

SEQ ID NO: 121140 - DNA, 348 bp, Zea mays
  unsure (1)..(348): unsure at all n locations
  Clone ID: MRT4577_41959C.1
ccaactagattttgattagttaatttcaagtaggacagtatcccggngaaagaaattcatggagaaaataccgaaggctgggttaaaaaagaaaatatttggcgcagaattgtgccaaaggcagaagggaggaagaatacgttaagacgaagagggagaggcattgagcagtacctacggagggcgaatgggcaggaaaaacgatggtcgaaaaggagtgggaaataatagggtaggaaaaagaggagagacttgtacaaggggacattcgagtaggcaagagttttcggcgtgaatgggattcgctggttgaggggggatacgatagatagccgaggggagcttccc

SEQ ID NO: 121141 - DNA, 213 bp, Zea mays
  Clone ID: MRT4577_4195C.1
gcactacaatagattgatactagccgagacctacctgatgaccatgaggtgactcctgttatcaaccaggacttgctgacagcatgatattagacctaattactgatggccaagacagtggaacaagcaatttttattaactgggagaagaggacgatccgagtctggattcaagcttgcatgctaaacctaaacacaccacatgtgatggca

SEQ ID NO: 121142 - DNA, 169 bp, Zea mays
  Clone ID: MRT4577_41960C.1
tgtaggtgtacattgtgacaaagtgcatctgaccactaaggggcccccttggtgaccccagcacattcacagcagtgttaaaatggcctgcattttggagatgctggctggcctttcagtgcctcccaggaagacacatggccttcccctcttcagatgcctgaaggga

SEQ ID NO: 121143 - DNA, 306 bp, Zea mays
  Clone ID: MRT4577_41961C.1
ggtggagcataagttgtattttctaatgtggactatcatacgagagaggtgtcttaatctaaacagatacggcgcctaaacattcatgtacgtatgtctatgtcatgtgcacactggcacacacacaaaagtggcgtccggctgcagcaaacccgatgtacttcactacggctgaacgcacgcgcgaatacccagctgataacaaacaggtacactggcacagagggcagcctgattaggggttctgcgcagcatacccagagggacgcccttgctgcgctaccgttggggacagaaacattctgc

SEQ ID NO: 121144 - DNA, 939 bp, Zea mays
  Clone ID: MRT4577_41962C.1
agcaaatcttttttaacgtaatagcaggagctttgcctttcatttaagaagaatggaattgatccagttttaaggaaaaccaggcccaaaacctatacagagcacacaaacagcctagagaacggcaaccccacacacaaagcccaactagagttatcattgccaagctcgacacaagggataagcagctccgactccataagatgggctgacagacaacaggcggttggattgggacatcaacacggcgacaccataccaaactcagcacaacgacgacagagtaacacgccgaagcgaacaccaccaacacgccgaagcgaacaccaccaccacgcaaacaacacacccaacaaaacactacaccaccacaaactgggagaggaagagaaagaagccgtcgtgaactgcgccgtcgtcgccaacgctgtgccacgccaaaagccgcagcccgctgcaagcctcagcgacacctgcaactcctccaccatgggaaatcaccctcaagccacacgcacggtcgtcgatcgctcagcacacactcatctgccaaggacttagaaatctccgcccaccggcactcctctactgctgtgcgcgagcaacaccaccaaccaaccaccgccactacctgaccaagatgggcctcagatgcggcacctctaaggagggcacgacgccaatgacgccaccgtcgcacgtccaaggatggacaaggctcacactctcgagagccccatgcagtaggggacatgatgcctcccaatggtgcccccaacaggtagagcaacgccacaagggtgtcaccaccatcgctattgacatagacgtcagtgaagacttacgcccgactcaacgccacaagggtgtcaccaccatcgccattgacatagacgtcagtgaagacttacgcccgactcagcacctgcggacgctggg

SEQ ID NO: 121145 - DNA, 616 bp, Zea mays
  unsure (1)..(616): unsure at all n locations
  Clone ID: MRT4577_41963C.1
tactaccgaaggtcgtatcctagtaccgtccgctctataccttcacgcctccacggcagaacgtcctcgattctgtccgaggtcatcacctccgccacttcgaggacggtgaggaccgcaccaccatgctgtgcgctcctacccggctcgaatcgtcacgcgatccgcgagagagtaaacatggcaactcggaccgtccgtacttcctgtgcaatggtacctccggacctacactgaacgcggctattccacagcggtgcaaagaccatgcaggatcataagatactttgcacaagatatcacagaagcattggcatgatgcgtctgaaaggatgatcgatacagtgatgtttgctgacatggtgcgtgttgtgatgctagctctcgagtacttctttgataaagatgccacaatatgcctatccttcttgacaaaggtcctcatgggcccccgcgttccgtgccagactatgcgtctcanatggttattagctccgcctgagagcgctgcattgattgtgaactatgctgaccatatatgacgagcgcatgctagtacaattgaagctgaagaaagggaatatgctgacctgcgaatcccaaccaatgatatagt

SEQ ID NO: 121146 - DNA, 742 bp, Zea mays
  Clone ID: MRT4577_41964C.1
gtcttacatcccttgcttcccctcactgctctgctccccccctttcttcccctcgatgtcctatgtcccgcacaccattctgcgcccgttcggcgtaaaaccattcgccggcggtggctatcttaggcggcacgcacggccgtgtgtccgccgtgcgagctccgtcggtgcaacgaacgggaatgagctgggcggtggcaataagaggaggaggaagaggccggcggaggagtcgcggttggaggttctttatgacgacgggttcgggagcgtcaccgtgaaggactaccgggaggcggtgagggccatgcccagggacgacggcgggccgccgcggtggttctgccccgtggagtgcggccggccggaggtggacagggcgccgctgctgctcttcttgtcaggaatcgaaggtgttggaatggagctcattttgcaccacaaatccttgggcaaagtatttgaggtttgctgcttccatataccagtaaatgaccgcacaccatttgaaggtttattacaaattgtggaagaatatgtcaaacatgaggatgctttgtcgccaagcagaccaatatatataattggggatccttttggtggatgtcttgcaatttcagtggcagcttgcaatccagaaatcgacttggctcttacactagtcaattcagcaacatcatctgcaaaagctttccttgcagcagtattgcctcttttggaacaggggtggccaccttccatt

SEQ ID NO: 121147 - DNA, 221 bp, Zea mays
  Clone ID: MRT4577_41965C.1
gtccaaggacacgacaaaggattcactgttgggaagggctttttcatgactcccagaagatgttttagattatggatcatataccaggggggggggggtttgctgcgcagcttccttatcgtgcggctatccggcctgtcagccttttgcccgcagggtgggtggattcttacttaaaggcgttgcacgagtagcttcttcaatgaagattaaaggccatg

SEQ ID NO: 121148 - DNA, 556 bp, Zea mays
  Clone ID: MRT4577_41966C.1
ctttgatcatctctctttcatgtgctatgactaatgtggtgttcaagtgtatttcatgctaagtcatagattgaaagggaaatggagtcttcggcgaaaaaaagcttccactccactccatcgtaatatttatccttcgccatcactccacactgctctccattttggtataatcttcactcatatattgtttgccaaagggggagagaaagtaaaatggcttatatttcactcacaagtatccgtttttggcgattcatgccaaaggggagaaagtattagcccaaatcaaaaggaccgcaccaccactaatttcaaaaatgtagtctttcaatttgtattaaaagaagtttttcaattggtatcttatttttgatataatttcaaattgatatgacctctttcaaaattaatatctaaaaccctcttgaacactaagaggagaatttcatgaagggggagttttgtttagtcaaaggaaaagcatttgaaacaagggagaaaatttcaaatcttgaaaatgcttctcaaaatcttattcatatacctttgacta

SEQ ID NO: 121149 - DNA, 613 bp, Zea mays
  Clone ID: MRT4577_41967C.1
ccggccgggatatatgcgatcacggatcgatgctcatgcgctgggccgctggctcactatccaccaccgcgccgctccggaagagttcctcctcgtccggccattgcaactctgagggtcgatcaatcgatcgctcgtaaggcacgtgagcatactatgtatcatagtaggagattattcatagcgatctaattacacgcgatccaccgtcctcttttactgcatctgcatcctcggcggcctaacgttggcgccaactctgatcaccggcggtgccgtcgccgcccgctaaccccccaagaacatcgccgcgaccgcccttgaaaggtcccctaccacaaccgaaataacagaggcgcgcaagttgatcgatgttcatgttcaccggtctgtgacctgcgtgtcggctcgaccacacccgctggatcaacgcggatgcccatcactctgcaaggaccgtccgctgacccccacaaaccgctgatgacgcacgatcaagacctacacgagcccctacagcgagctcatcaaccccaacgacagccacggctgtgccatctatatgtactaccccatcctgacacgaggatcgctagaatcgacgctcttctcg

SEQ ID NO: 121150 - DNA, 435 bp, Zea mays
  Clone ID: MRT4577_41968C.1
ctcagttccacatattgttactcctcgtcttcagaggaggccgacgaggaatgagtgggggatgacggcgtactactcgtgctcctatgaaaggtcacggaaaggaagaattccagccatggaggacgaggcggacggccgccgacaatccttcgtgctgcgctccctcgtgcgcgcgggcctaaagcgcgaattcgccttacccatcgactcgcaggctcgcctttcgtcctcatacgcacccctgggccgcacccgccgctcataccgcatcctcaacccatcggccgcttcgaccccctccgtcgacggcgccggcgtctcgacatacttctcctcaacccccgacacaaagccaaaagccaagcgcccgggcccaccagatcctgccccttccactacctttcctcctacaccagactatgcccctgcccc

SEQ ID NO: 121151 - DNA, 152 bp, Zea mays
  unsure (1)..(152): unsure at all n locations
  Clone ID: MRT4577_41969C.1
canncaaccaacnagcngcaangaacncngcanacaaaaagcaacaacaacaacaaccaggcagccagcaancngcggccaacccccagcaaanacnnccaagcaaccaacggacagcaangaacncaccagcggagagacagcagcaacaa

SEQ ID NO: 121152 - DNA, 366 bp, Zea mays
  Clone ID: MRT4577_4196C.1
gggacccaggctttactggggccagatataattataccacgcacaacccaaaggagcggtctcaaaaacccacactctaatggtcgacgattatataatcctattacaaaccctgggaaattgaaagccatgggtcacttgggaaaaaagcattaaaggtcaacccaactccctttgaaaatttgaggttattgggcccacccaaaaccattatatcccacggaggcgaccaaacaaaatttggtaaaacaaggcaaaggcaaacccattactgaaggaaataaaaccattttgatcaaaaaacggtttaagtgaaagtcaaaccacccacccccagaggggtggcaccttgggtaaaggcaaaaa

SEQ ID NO: 121153 - DNA, 803 bp, Zea mays
  Clone ID: MRT4577_41970C.1
gccggccgggtccgggatctacccagatcaacctcagctgtgtgtgtcaccagttcacgatccgacgacacgttgaaaccctcaaccaatcaaaggaccattcttcccgtccgaccgtactccgccagagaggcagagacagtatggggctcaccggaaagcaactacggcttgctcagctgctacttgtagtcatgccagcgtttgtgcttttcggttacaatcaatcaggtgttggtggcctcctatcgcttcgtgattggaaccataatttccccgagattgatacaatcgatgctcagggtgctgaaaagagtcagaagtcaacaagacagggtgctgtggtggcatcgtttacaattggcgcactctttggagctctatcctgctcttggtctgcggaaaaatatggacatcgcaagattatctttacggccgccttcctgacacttgtgggagaaatcctccaatgcaccagctttcatgttgcgcaattcgttgttggaagaatcattctaggatggggcgttggaggcatgagcgcaacagttcctgtttggcaatcggaatgctcgacaaccgcaaaccgcggcaaacacgttgttctcgatggtgtctttatccttgcaggctacaggcttgaggcgtggattaaccttgggtttttcgagatcaaggacaacctacctctacaatggcggatcccgctcgctatcccgactctgatctcaatcgtgcccatggttgccgtctttacgattccggaatctccaaggtggctttgcaaacatctcgatatgaag

SEQ ID NO: 121154 - DNA, 164 bp, Zea mays
  Clone ID: MRT4577_41971C.1
gcgccattcgcacggggacagcgcagattacactaggggctctgctagctactggagcgagaagagatagagcacggctgtagatacatgtcatagcaggcactgaataaagcccggaagggctcttaccaaggtggtccccgacgatctgagatgctgtgtac

SEQ ID NO: 121155 - DNA, 161 bp, Zea mays
  unsure (1)..(161): unsure at all n locations
  Clone ID: MRT4577_41972C.1
tgagcacgggcagctggcggcgagcgcaggtgtgtggacgcgcgcggacgcgctagttgtacacacggcaggcatcggacggcgcggctcgtcgcatagcagcngtcgatgttgtactttccccggttgctgtaggtctcaggcaccagtcaccatcgggg

SEQ ID NO: 121156 - DNA, 643 bp, Zea mays
  Clone ID: MRT4577_41973C.1
gttcgtgattggcacagttgcaggtcgatcatgccagtgccattatttttttttttttttatccatccattatcatctctgttacgacagcacctaagcattggtgcaaattctgccatttgacgatgaagttacacgaaaaactttgccgaaagatgaacagagatacgcacaaccaaagacgatgaagttgccgtcgagacaggaaagagaaggtccaagaagattactattctctcaaatcggctaggctggaagccggattgcccctagtaggctctggctagtggctagctaatcgatcaaggggtcgtcgtcgtcgacaagcagcggcgccgacgggccctccagcaggatcgagtccagagagctcggcgcgttgctcaggccattgccgttgccgccgccgtgtcctgcgtcggcgtccgcatctgccgccgcgtcgaccatgcccccaacgcgcagctcgccggcggcgaggctgccggccaccaccgggtgtggtagaggctggtggggcggcgtcggcgggtactcctccttcacgtgccaccgctggggaaactggagcgcggctgtgggtcgcggagggtgcttctccacgggcagagggtgcttgctggtggtggtggtgggtggcttt

SEQ ID NO: 121157 - DNA, 291 bp, Zea mays
  unsure (1)..(291): unsure at all n locations
  Clone ID: MRT4577_41974C.1
tgagtttaacaagcaacattnaaagtggaatggaggncagcatcagggtatgaatgtccaccaatatattttccctccttatgctccttgctctttctgcatgtgttgctaacgcgacaattttcccttaatgcttacaagctcctatagctttccttctttccccataccttccatcaatgatagcttaattatgtgaaaacccatctcttcagtcctattagcgtcaacaagcaatcgcagcaagcaacatacctttatcacccttttagtttcaacaatcgccagccc

SEQ ID NO: 121158 - DNA, 578 bp, Zea mays
  Clone ID: MRT4577_41975C.1
taattcggcacgagggagagaggcaggcagctgcgtctgcgtcgtggccggcgcggcgctgcgctgcgcggaaaccaaatcctcagctccggtgttctctccaatctccatccatccatcctcctcgcggctcgcgccccgaaaaatggcgccaacccctccccagtctcccgcgcggcgctgccccagctatttccccctcccctgaattgaccccagccgcgcctcccaaaccctaacctaacccccgccccctggggccccggccatggcgtcactgcccaagccgccgccgccgccacgccccaagacgcggggcaactacaactgcggccgctgcggccagcccaagaagggccacgtctgcgtcggccccggccccggccccggcggcgctgcgtcgccctcctcctcgtccggggccggaggggagcacgggctgcgccgcgccctctccttcgacgaggccggcacgccgtcctcgccggagaagaagcccaaggtggaggacgtcgacgaggcggagctggacgaggaggccacggtggacgtgggcgcccgcgcggtgtcagggaggc

SEQ ID NO: 121159 - DNA, 154 bp, Zea mays
  Clone ID: MRT4577_41976C.1
cggacgcgtgggcagaagccaagtgttctgatgatatgttttttcaattgtgttttttgtaattggttcagcgagcacatacatgatttatgacattgcatgtgctatctatgataaaaaaaatcggatgatcatgtcgaatttgaatgagtat

SEQ ID NO: 121160 - DNA, 125 bp, Zea mays
  Clone ID: MRT4577_41977C.1
cgctctcctggggtagcacccacgcgctgttggacattgggcacgtggaagaccagtaagataggtcccggacctacccaatagagcacgtgttcgacatgcccatcatcggggccaccataatg

SEQ ID NO: 121161 - DNA, 493 bp, Zea mays
  Clone ID: MRT4577_41978C.1
cccagcagtgcggcagcagcttttcagcttgccgccgttgcacccgcagagctccccgccgtcctcggagacgacgaccccgccggtcgttagctcggtcactactacatcttttcagcgtgctaacgacggcgacgagctgtggcggacaggcacaggctacggctccggggtgcccgtggggcagtcgccgtcaacgccaccatcagtgcctccgccggtcgtttcggttcaaaaggcggggctgctggacgacatggtgccccatggtgtaaggcatggcaccccatgatggtggcaaaatatgacatatatatacctgtcggccgtaccagcaaaaggcggataaagtgatcaaccagctatagctagggttttctcctgctggattcatcagtagttagatttatctattactgtaccagacactgcatgcatataatatatactcagcttatctgttcagatttgcttatgttcagtgtcactctcc

SEQ ID NO: 121162 - DNA, 292 bp, Zea mays
  Clone ID: MRT4577_41979C.1
tttaagggggcggccctttttttttttttttttttttttttttttttttggccccaaaaagacccccacaagccggggtttcctttggattttttggcttgggggggtttattcattggaacggccacaccattgggtttaaacttggttccttccattccccattaccaaacccgggtttggttaacaacggccaaaaggaacccgggggacacaccttttttttttgaaggtgattgggtggtttaccccacactttccgggggggggcccaggaaaaaacacaccccgg

SEQ ID NO: 121163 - DNA, 1177 bp, Zea mays
  Clone ID: MRT4577_4197C.1
ctctcccctctctcccccaaggccccaacccacttgagcgagccctagagaaggcaaaagccatggcgtccttggttgttcgtgccgccggcgccgccgccgccgccgcccgtcttccctccctccgtcctcgccgcaacggcagcggggtgctctccggcttgagggtcggaacagggcactacggcgcgcggctcgcgcttgcttcgtccacagcttctcacaaagagttcaagatcgcctgccttactgtcgatgacagcagtttgggcccgggggatgaatatgagtctgacccccgcatgccaggcgaggatgagttcgaccatttctaccgtgttctcgccaagaagactgacaacctgctcagctgctacattccaatgccgcttgcactttctgaagaggagaaggccgtgcagaaggagttcaagctgatcgcgagcggatgcatcgacctcctggttggtgcgatgcgccgcacccccgcagagaaaaggcgcccactgttcttggtgtttggtgagctgtacccggtatttgagtttgtgaggtggactgccgaggcggggtgtgccaagtggtggatggcgctgcagatcatcgagaagctggagatcgtgcgcaagatggtgtcgagcgctttcggcggcgcccctgttgacagaagcatggtgttcgccaggaaggtggacctcaccggtgtcgacggcgaggcgctcgccggccacggcctcgggagcaacttatcagtggtgatcttcgtgctgatggacagcgtcttcagcaacgtcaagtcggacatcgatgccatggtctctgctgcttccactccttattagccatcgtcacctagctacctacgtgtctacacgatcgagatttgcagtcactagcctcaagtctccaagtgattggatctctgccacagtgctcttactactgccctagctcaagtcttgatgtgatcggccgggtgcctacaatggtgtccgttgtagctactagtatcaacctttgttgttcgttctagctattactagtatctactttgttatgttggatcatgcatgtgattgggttctctgctactgcccaaagtactatggtttcagttctacccagtacttcattgtgttgaatcagtcacattatatgatttctgatattagccagc

SEQ ID NO: 121164 - DNA, 1374 bp, Zea mays
  Clone ID: MRT4577_41980C.1
atgggcaagtacacagtcatcacatcttcagttgccccagcggctcgggcagcggtggctacgccgggtctcattctccggcttcatgatgtcgccgagcattccagcgtcgattcctccgtcggcgagcttctcgctgaggaggttcttccccaggcacgggcgaaggtgccagaagagcagcttgacgggcctttatctcatttgcttctttttttccttgtaatctgtgtccatctttccatggacgaggtggacaacggcattctcctggaggtagtctttgcccggagcgctagaggttgcactatttcctgctttgttccggctttttcggagattttcaaggaaggcttcttctccggtggatccgctatacgatgcagaatcccttctttgtctgccacggacgagatggttcgggccgcttggagaggcgtaacaccctacttcctggtgtggctctttatgtggtgggttacaggggagttctctagtatgaaggatgctagagaattgagtagatggctaatgagtgacctatcttttgatggggtgccccctaggccttatatactcggccgtggggcgttacatgaggccgaagaacagctacagctacgagccctgcgcctcaagaaccgcaacctccaaaaacagaaagacatcctcgaggccaagcgccaacgcgtcaccgtgcaagccaaggtgcgccagatgatacgagacgaggagcagagagcccgggaactcgagcaagagattgtgctcatgcagagcgaaggccagcatgatttgcagcacgacccacccctccaacagtgcacgccagtcggagacttattcataccccagcacgggcccttcatcgcgcacgccgcagctttccaaggcatcaattaccttgatgagcgaagccccctggctccgcaactccaagtgtcaccgtggcccgccaactttagggcagggacctaccccaagtacaagggcagcaccgacccgacacaatacatcatgagctaccaagtcgccgtcgcatcatccggaggggacgatgccacaatggccaagtattttatcatcgccctcgagggtccggccttaacctggtacaccagattgcccccattgtcaatcgactcctggaaaggactccgagaagtttctactcaacttccaaggatatcgacccgataccgatgctttggccaagctatcactctgcaaacagcaagagaaggaaaccctaagggagtactaccgcaagttcctgactctcaagtcacaattgccttcggtcgacgaccacatcgcgatacactacgccatcagtggtcttcgggctggcgtcctatacattcactgcattag

SEQ ID NO: 121165 - DNA, 2195 bp, Zea mays
  Clone ID: MRT4577_41981C.1
cgctccggttggcaattcggcacggcgaggctaggcacaccagtgacaaagagtatactcgcccgatcccgccgcgcgccgcagctagagcctagagctaggaggtcgatctgatcgcatcggccggggtctgccgccctgcccatggccggcgccgccggggacaggtcggaggaggacgtcggcaccgactggccgttcggtggcgtcgacgccttcacggagtactcatcctttttcgcggagcccggctggccgggcggcctagccggggagctcatcccggtgctggatctgcccgaggcagcagcaccgctgcccgcccaactgtccacggaggagccatcggaggagcctgcgcccgccaggtcgggggacgccggcgcgtcgtcgagctcgagcggggacggtgccgcgccggggaacggcgacggcgacgacgatcggaaggcggcgccggccgccgaggcagcgggtaggaaaccggcggcgaagaaggggcagaagcgggcgcggcagccgcggttcgcgttcatgaccaagaccgagctcgatcacctcgacgacggctatagatggaggaagtatggccagaaagctgtcaagaacagccctttcccaaggagttactacaggtgcaccaacagcaaatgcacagtgaagaagcgcgtggagaggtcctccgacgacccctccgtggtcatcaccacctacgagggccagcactgccacagcatcggtccattccagcgcggcggcggcgggggcgcagccgcggcgcggtaccacagcgcggcggccgtcgcgctggcggagcaaatgtattcgtcgtcgacgacgtcgtcgttcatcccagcagcgcggcagcagctcttcagcttgccgccgttgcacccgcagagctccccgccgtcctcggagacgacgccgccggtcgttagctcggtgactactacttcttttcagcgtgctaacgacggcgacgagctgtggcggacaggctacggctcgggggtgcccgtggcgcagtcgccgtcaacgccaccatcagtgcctccgccggccatttcggttcagaaggcggggctgctggacgacatggtgccccatggtgtaaggcatggcaccccatgatcgatggtggcaaaatatggtaattaaagaaactgagctaaatatgatactgacttgctgctttctatttggtgtgtacgacgtagtagggagtacgttgtataggagcaataataatggcacttcatgcatgctgccacacatatacgtatatatatgatcgtattcatgtctctgctggtacgtacacatgtggactcagtggcttaggatctttttcaacgacatatttcaattagtgcactacaaatactagatcgagtagttggcagactagagcacatttgtacatgtgtacagatctagcatatgcatatatatgcatgcatacatgtgatactcccaattaagtttagatttcttagggaatagttgtatgcgagttatttcatgtaccttattattattattatatcttctttatattgcatttccagctgccctggttagctttgacaaacagtcccccctctccacatgctcatgcatggctgaaagctactatagctactagctagggaatgctgaatgcaaaaatgcagcacatacataaatgtaacgccggccctatattcctttcaacgactagttggttttcgttggaatcctctaaaaaatcgttataaacaccaatcggaaaggaaagacgtacttgtgttttgcgttcatacttgtgcacatgtatatataggaccatttcctatcttatccttcagcgtatagagtgacttgacttgacttgacctggagtctgatcgatctaattcaggttctcacgttttttttcagacatatacctgtcggccgtaccagcaagaggcggataaagtgatcaaccagagctatagctagggttttctcctgctggattcatcagtagttagatttatctattactctaccagacactgcatgcatatatatactcagcttatctgttcagatttgcttatattcagtgtcactctccaacaatctccattgcacctacatgtggatgtgtagcagtacttgtatttcttgtcaaaaatcagagaggtatatctagaagcttcgcatgc

SEQ ID NO: 121166 - DNA, 139 bp, Zea mays
  Clone ID: MRT4577_41982C.1
aactcggagatcacctataatattttgaggattgacaaacagcaccaagggaagggcactaacttcagcctaacggcagagggtgccaagatagaatccctgcttgcgctacttgcgcttaatgctaacgcagcagatg

SEQ ID NO: 121167 - DNA, 265 bp, Zea mays
  Clone ID: MRT4577_41983C.1
tttttatattaccttgcttttctttctataaggggggttttgattaaaaaggccggacctctcccccaggcaatgaaaaatgagtgttgactggtgcactaaatgtaaacccacggggagtgtcctggagactctttcacaaaaaatatgctctgacagtacatttgtgatgcctctgcatgcataatatgacgcgaacgagcgcttgagaaaaacctcaaaaaacacgccggatgggcggcttccctgcagttgctccaccgtg

SEQ ID NO: 121168 - DNA, 564 bp, Zea mays
  unsure (1)..(564): unsure at all n locations
  Clone ID: MRT4577_41984C.1
accacttgcctgtacactcctcgttccgcgtgcgagcgaaccctgttcctgttcttgaatcttctgagcccagtccttgtagctagcagatagatcgctcaggcggaaagatcgagagaaggtcgccccaggatcgagatctagagcgagaaaggtttaagagggaaaggcgcggcaaggagtcgagagaatagaatgttcccttccgccagagaagcaggccagcaccggtgccgcgaacccaaatgatcggcctatgtgcgggcaaggcggcgactccggcggtctcgtcctcaccaccgaccccaagccccgcctccggtggacacccgagctccatgaccgcttcgtcgatgccgtcgcccagctcggaggcccggacaaggcaacgcccaagaccatcatgagggttatgggagtcaagggcctnaccctctaccacctcaagagtcaccttcagaaattcaggctagggaagcagcacaaggagttgggtgaccatacagcaatggagatgcaacgtatcgtggcctctttttcaggcatgatagccagaagcatgaa

SEQ ID NO: 121169 - DNA, 441 bp, Zea mays
  Clone ID: MRT4577_41985C.1
tgatcgcgctctcaggtgggggcactttttgggtgatgcaccgcgacatgtccgagcggaggttgttctcgatcaagggcgccgtcgccgggccgccgttgaacctctacttcctgcggtagatgcggctgacgtgcccgttgaactacagcccgtaggtgttcgtgatgctggacgccgtgacgactcgcgcgttcaacaacggctactaccggactctgcagcagattgaagggcctgctggcctacgaccaggtgctcttcgtcgaccgccgcttccacgccaccgtattccgatttgcgtcaaccagaccgcctatttggacgcctttgtctacaccattggacaatcttggccgcgtttgcgtatagacccttcgtcgcggactgtgaggtccgccggtatgcacaaggtcaactagtccaatttcagatgcatgc

SEQ ID NO: 121170 - DNA, 218 bp, Zea mays
  Clone ID: MRT4577_41986C.1
caaaatctggcagaatgccccaaaaaattggttttgatccacatgtccccggctaaatcccccccgaaccatcctaaggttcccccattaaacccggttcccgaccgggaaaatagacccaaatctaatcatcatagttttgggcccccataagtccatttttctaaccgccaaagttttgcccctaataaatcctaaactaggcccctccatcgggt

SEQ ID NO: 121171 - DNA, 132 bp, Zea mays
  unsure (1)..(132): unsure at all n locations
  Clone ID: MRT4577_41987C.1
cggagnattacggcgcagtggcaaggtaacgtgactgcggctgatacctgggtgtacgctgtacttgtctgtagaaggacagagccagttgcacgtgtgcacgtgtaaagttccgattcaattcgattagat

SEQ ID NO: 121172 - DNA, 247 bp, Zea mays
  Clone ID: MRT4577_41988C.1
tgtttttttttaatttttttttttttttttctcggaggcaatttaaccattccaaaccaacttatggataattgattctagaaagaaccaagacctgaaagcctaccaaatacagggtcctgaatgtaaccccacctaatggtaaagcaggaaggtacaacacccaggaaccccttgcacgctttagaaaaatcccgctcaagccatgtgaatggcttggtaggcatcctttggcgatacacatttt

SEQ ID NO: 121173 - DNA, 632 bp, Zea mays
  unsure (1)..(632): unsure at all n locations
  Clone ID: MRT4577_41989C.1
aattcggcacgaggcctccgcctgtgctccacctccccgtgtccgcgcatggaacacacccgcggatctcgcccacgatgcacgcctccaccgcgcatggatcccgcccgctcgcccggtctcggcacgctctcgcggtggtcctcgcccctctccaccacgctcgcgaggcctccgcccgcctcccccaccgcgacaggtaccctcgtcgccccgcctccgtccgacgcccctacctgcccccctccgccctgccaccgcaatacatgtccatgccatagacgctacgcctctgtcctcccctcgctcgcacatcccggtggtcctcgcccctctccgccacaacccagccccgtcgatggaaggcggccgagccctcacccatggatccgaggatctcctacccctctgcgtcggatcagcttctccctctgctcgagattgctgccatccgtccgctccccccgctcgttatggcgcccgcacggaacagcctnctcccttacccttgcccatcacatgccatggngagccaagccgcgatggaaagtggncgaggatccggcccatcgggccgggctcgcctctgctgcggcctgggaggagcgctaccgggtttttgatgcggcttg

SEQ ID NO: 121174 - DNA, 543 bp, Zea mays
  Clone ID: MRT4577_4198C.1
ggtaccgcggccccttctcgagacagttttttttttttttttttttttttttttttttttttttttttttttttttttcgcgggacccgatggattaatttttgttaaaaaaaaagccacggcggggcacccccacccaccagttctttaagggcagaatcgtaaacaaaaaagccgtccacctgttcacccaagacgactggccaaaactgacgccctataattttactgacgacattcgggccgggggcatattttgggaaagggggaccgcctagggattgacctttttacacggagggggttgttcttagtgggcgatggtgagcacacagatctggcagggccgcctaactcctgcagtgtccaactcccggggagaggaaatttgcgcataaagaactgttgcgcttcctcgctctctaactggatgtgctgggacctttggctgtggagagcgtcctcatcttactcctaggcgttcccgcggccgtccttagaaacaggggatagcgcttgatagaacgtgtcaggaaagggcca

SEQ ID NO: 121175 - DNA, 2071 bp, Zea mays
  Clone ID: MRT4577_41990C.1
acctttccgtgtcgatcggtctccattactactagctcgcgggcgcggcatccctcaaccgaaactgatggaggctgcggtctccagcgccggcgagtcggcgggcgagctgcttctccgcgcggcggcgctggtgccgtggacgcgctacttcctcgcggcgctagccctggccgccgtactcctgtacaggttcctggagctccacttgctcggcgacctcctccgcggcctccgcggcggccgcgtctcgcttaccttccaccctgagtctcaagtgtaccaccgggtcgcctccaagtgccgctcgctgcacggcaggtacctgacgacgccgtggttagcgagtcctcatttgcagacgctgttcctgagcatatctggcagaccaccttcattcacctatcggaggcagttgtacactgttcgtgatggcggtaccattgccttagattggttactagcttctgatcttgaagatggaaatattggcacttctgacggaaccatttctaaggatgattcaacaccccttcttgttgtgatacctggattaactagtgattctagtgctgcttatgtgaagcacttggtcttttctatggcaatcaaaggatggaatgttgttgtaagcaacccacaggggtcttggtggcatctccataacatctgattgcttttacaatgccgggtggacggcagatatgcgtgaagttgttagtttccttcatcaagagtatcctaaggctccactattcactgttgggacaagcataggtgccaatattgtggtcaagtatcttggagaagaaggtgaaaatacacctgtagctggtgctgcatctatttgttctccctgggatctgctggtgaccagcaaatttatttcacgcaagcttgtgcagcgatgttatgacagagctcttgcgtttggtctaaaggatatgcgaaactacatcaatcagtcttggcacgacttgcaaactgggaagctattacatcgtcacactctatccgggaattcgaccgccatgccacttgtgttgttgcaaaatacgagacaggggacacattctaccgcaagtgcagcagtgcaaattatatcggtaatgtgtcagttccactgctttgtatcagtgccttagatgaccccctctgcacaagggaggccattccctgggatgaatgcagggcaaacaaaaacattgtattggcaactacacctaatggcggacatcttgctttctttgaaggcctaactgctggaaagctttggtgggtacgacctgtttccgagttcctttgtgctctgcatgatggcccctacatgcatcggcagaaggcacaagagcacgatttgcactcatcgttggaatcatcaattgacaagagcccatatgtgaatttcatggaagatggaatggtagctgcattaacagatgatggtcctaacaacggtgactccttgcttaacgaggttcttggtgaaattgaacctaatgatagcgtggttgcccaacacgtaaaacagaaccaaaacaccagagctatacaaaatgagagtgacagttggttggatgataaaaacagctccgaagggaatgttcaagcccatggaggatctcaagaacagagagaagtgccatatgcgaataaaatcagtgatgccattggtcctgttaagaaatcaataaaccaactcagtcgatcccagggtaagtcaatctggttgcttgcttacattgctcttgtaacctcttggccgttgcttggggccctaggttttttcttcaggaaaaggttgagtaattctctgttatctaggaagctgaagaaatcgtgaacactgtgctaacacagatttatttggtatgtaagagcatgtacagtgatgtttaatatagaggctcttgagattatctaaagagagcatttgcaaaaaaaaaaaaaatgtggagctgtctctatgtgaagagacgcctttagctcgtaacctaagtagtaacatatgtcttcacttcacttgtacgaattcgtcgtatgttatatcgatatgatgctttacagtttc

SEQ ID NO: 121176 - DNA, 276 bp, Zea mays
  Clone ID: MRT4577_41991C.1
tgtggttttttttaaacaggaggactgttttttcacacggggaaccagaggacacatttacctgctgcttgactgcgtaaactactcgctcgccatattcgagttgacatgcgggctacatcatattccaaaatttcttggagcagacggcggcctgtaccgctgtgtacatggctccaccacaacctccgctgcatatatcattatcagtggatagagatcatactattttagtaacgtagcgactaacgccctctgctgtgcctgacaagagcg

SEQ ID NO: 121177 - DNA, 456 bp, Zea mays
  Clone ID: MRT4577_41992C.1
aagctaaccctagcctccctatctccacctccatcctccgcgcccccgctctgcacgccgccggtccctcaacaccatccatcctcgtccgccgtcagccgccgagtgcgtggccgcacccgtctactccgccgctccaagcctccgttatccgctggatctgcacctcatccgctccacggccgcgactcaagctcgaagacagttgaaggtaatttgcaagcagcagccatggcgtctcgtttttggggacagggagacagtgactccgaggaggaggtggacgagatcgagtcagaacaagggagtgatagcgagaaatcagaagccggtgatgggggacgcgatgggtccaagaaccgctatctgaacaaatatacacaagacagtgacgactctgatactgagagtcaccgcgtgattcgctcgttgaaggacaagcgcaatgatgagatg

SEQ ID NO: 121178 - DNA, 371 bp, Zea mays
  Clone ID: MRT4577_41993C.1
ggagccctttggtagacttacctgcacgtcccatctctctggatcatcgtcgtttgaatagatttcgtcgtcaatagcgataatatcagtttttcaggacatcgtatgctgctggaccgtcgatcttggaatgcaagtcatgccatggctctcttgggccgcgagcatcttcaacctgagagtaaattatcggcacatgaggatctaacaaaatcgcgacaagctttctgtctcctaataaaggaaaaacaaaatggaacgaagttccagaacaacaaggatggaattctttttgtgggcatttgcataaggttcttagtaaatcagtttgatcggaaatgtggaaaaactactctcaccgcaaaattggg

SEQ ID NO: 121179 - DNA, 260 bp, Zea mays
  Clone ID: MRT4577_41994C.1
atggttgcctgaaaaggctgcaaacgtttatcatcatacttataacctgctagtctatgacaacctacattacgtgctacgccctaacatgtcgtgccggctgtgccacctatcaaggaacatagcagatgatgaactgttgcggacgtaatataacattccagtatcaacttactcaatgtgacacacaccctataaggccacactcatcgacagtatctgctcactggacacctaaactcacgctgccacacaaagac

SEQ ID NO: 121180 - DNA, 405 bp, Zea mays
  Clone ID: MRT4577_41995C.1
aaaaaatatgaagcttttattacgtgaattttgttcggatgcaaatggaaataaaacttattgaccttgcagttttggcctaatgatttgagggaggttgaaaaaattactggataaaaaaaaaaactgtaaaaagcacactttttttaaacatttgcaaaaactggggtaaattggtttttcgaattctttttggttttcgggcgggtggccgccttgtcggtttttttggccgggttaatgtccttttgggtaaagaaaatcggttggtttgttaaaaaaaaaaacctcgcccaaattcttggagttatcctaaacttgttccttggagatgttaccctataaaaaggtatatatgcatgcctgccattaaccattccgactgtaaaggtgtatcccgccatt

SEQ ID NO: 121181 - DNA, 399 bp, Zea mays
  Clone ID: MRT4577_41996C.1
cggtcctgattcccggtcgacccctcgtccatgtcattgagtcgttgctggcgaaggtctatatcctcatccttggtggtggtatgatctagacattttacaaagcacagggatattctgttagaaaatctctcctctaatatgataaactaaagctcacaaacactcttattactaatcagatttctatttattcatttcttttgcttcctaatgatattctattctatgtcaaatgttcaaatccttttcaccataaaactctcaacttcataaataatattgtttacataatagtacttcatgtataccttatatcctactactcaaatataaatgtttaatcaacatcctatatcatcaactagatataattattccatacttttttttaatata

SEQ ID NO: 121182 - DNA, 1535 bp, Zea mays
  Clone ID: MRT4577_41997C.1
gccgtggcagtgcgagtccgccacgacctggtttggaagcccccccggccgtgtaaccgtatcggccgcctccggcaccaccaccaccttggtagccacccgccgccgtcccgtcaccaccaccaaccttggtagcagccgccgtccggtcatcaccaccaccttggtagccgccgccgaagcgcgccgcgggcgcgggcgcttaagcgatggctaaccgcacggaccccctcgcgaagagcatccatgggacgaacccacaaaacctggtggagaagatcgtgcgctccaagatctatcagagcacctactggaaggagcaatgcttcggcctcaccgcagagacgctagtcgacaaggccatggagctcgaccacaccggcggaacctacggcggcaaccgcaagcccacccctttcctctgcctcgcgctcaagatgctgcagatccaaccagacaaggacatcgtagtcgagttcatcaagaacgaggattacaagtatgttcgtgttctcggggccttctacctgcgtctcactggcacaattgctgacgtctaccagtatcttgagccgctctacaacgactaccgcaagatcaggcacaagctcagcgatggacagttcacacttacccatgttgatgagttcattgatgagttgctgaccaaggattactcctgtgatacagccatgcctcgcatccagaaaagatgggttcttgaagcgtctggaactctggaaccgagaagaagtgcacttgaggacgattttgaggaagaagaggaagacaaggaggaacagcctatggaaattgatgaaccgaatggtcgtgaaaatgataatcatcgtggaaggagccttgccagggaacgggatagggactgggaccatgacaggaaacatgaaaggcataacagggacaaagattatgatagagatcgggattatgatagggactatgggagagggcgggaaagacaccgagatagagatcgtgaaagagacagaaaccgggatagggatagagaccgtcaccgcctgcgagatgatgattacaatcgcaacagggatagggacagggagagggatggtagggaaagggagcgccgagacagagaccgtggcaggcacaggagccgctcaaggagcagagatcgacgggacagagaccgtgaagatggagagtaccgcaggaggcgtggtcgtggcagtgtaagtcctcgaggacgtggtgaagacggtggcccaagagaggaacctaagaggaagaaggaaaagaaagagaagggtgaaggaaatgctccggacccgaatgaccctgagatcatagaaatgaacaagctacgggcctcactggggttgaaaccactaaagtagtttacacgagtaatgttcaacttgacctgcatccaaccttttttgtgctggactttttcagcttgatgtaactaaacttttgtattgatgtggttatatattcatcagggcttccatttctgtctgcaaaaagaaaaaactcgagggggggcccgg

SEQ ID NO: 121183 - DNA, 370 bp, Zea mays
  Clone ID: MRT4577_41998C.1
aggggctaaaatttagttctttcaaatagagagctaaagtttgaatacaattactaatgtttagcacatacatacacaaagacatttaggccctgtttgggaacacagtttttccaaactgcagtttttcaaatactaaaatatactttagtcatgacattactacagtttacaatgcttcagttttcgaatacaacagtatccaatacatcaaggggtttgggaaaaactttggttgagaccaatcagccagagcgggacccagctggcgctctttttgcagagaaaaactttggctgagaccaaagtttccaaaaaaggcaacggagtaccagtggtccttcactaccgcccattttcaggagggaag

SEQ ID NO: 121184 - DNA, 399 bp, Zea mays
  Clone ID: MRT4577_41999C.1
cggggggactccacgcctcaactttactcaactacaaacgtgcaatcacaagtaacccaaacccactcgctcaccgacgacgcaacaatgggcaactccagctcaacccccgactcaacagacaacgacgcaggcaagaaaagcctctaccgacgctacgaagacaagaagcgcgggcccggcgtgactgacgaagacatcctcaaatacactggcaagacgcgcgaccagctcaatgcctgggccgagaccgcgcccggcgtggcagggaatcaacctgccggcaagctcgccattggagcggcatcaggtttcgcgggcgaaggagctgctggaggcctgggaggctggggagttgagggtactaggaagatgaagttcccaccgcagccaaagcct

SEQ ID NO: 121185 - DNA, 198 bp, Zea mays
  Clone ID: MRT4577_4199C.1
ctaagagaaaagagaagaacctcaatctctaggcgaataggaccagaagaaaccagaggcgacttcaggttcgtgggcgatgcttcgcgcgggagctaggcagctacttgccccgtggctgcggcggaatggtttggacactggcgccgacggtcaggtggccccggcccgcgctgctgaagaaaggacggcagacca

SEQ ID NO: 121186 - DNA, 510 bp, Zea mays
  Clone ID: MRT4577_419C.1
aaaagaggggccggggttcccagagagggttttttcccctttgggaccccacggaccccccccccggggacggggcccgccaaagggccccccattgctcttatcacccccgccccccaaattcacccctgacaaaggttctccctatagacctcaaaataccccccctgctttcctatcaggggggggccggaaaaaagacaagggctaggcaaatcccgggccctgctgcccgaaccccttggggccccccacccccaaccccgccccattggtgtgggggcccccctggtgggaccccttcccaaaggagaccccgggcccctcttaggggaccccgggcccttctaagggggggcgttcccttgggggccccggaccccacccggggaggccccccccatgttacccccccccgtgaaaaagccccggttctcacccgcccccggccggtggggcccgcccccaaagacccccccccccttgccggaaaggggcgccccccccccc

SEQ ID NO: 121187 - DNA, 148 bp, Zea mays
  Clone ID: MRT4577_41C.1
taaagattgtgacattgggttatatacacatatatgacgactcaatgtgtatataaaccaatgtcacaatctgtattacacattgagtcgtcatatatgtgaaatttgatcctggcacgtacatatgaggtgcatatggatttgtcct

SEQ ID NO: 121188 - DNA, 777 bp, Zea mays
  unsure (1)..(777): unsure at all n locations
  Clone ID: MRT4577_42000C.1
gccggccgggccgcgacggacactctcctactccgccctccccctgcgccccgcgcagcgcacgcccagcccagtccagccggaggagaccagatcaaagcgccaccgccacgccgtactctagctaatcccgccgccgcgccggggtcgcgaggaggaggatgaagcccaagagcctcccgttcatcgccttcgagcacaagcgggatgcatacggctttgctgtgcggccgcaacacctgcaacgttacaaggagtacgctggcatctacaaggaagaagaggaggagagatctgacaggtggaagaattttctggagaggcagcctgaatcatccggacaagatgctggtggtaatgctaaggatgatggttccgaatcactgcatgagaagacggtagttggaccacgaaagattgaaatatggacgccaattagaccgtccctgagcaacatcgagcagatgatgagcttgcgcatcgagaagaagcaatcctctgctagcaagcagcaagcaaaggatgtaatccatcctgtgaaagttgaggagggcaagttgtcagaggattcagacgacgagttctatgatgtagataaggttgatccgagccaagaagtgcagccgagcgatactgggaatgctgatgttggaagcaggagtcaagaagaaaattacatttcaaaggaangagtggagtgtctagtccatggtggactaccgatggctttgaggggagagctatgggcagctttttgttggtactggagctcgtagg

SEQ ID NO: 121189 - DNA, 456 bp, Zea mays
  Clone ID: MRT4577_42001C.1
ctcgaattccgttgctgtcgccgtgctgtcggcggcgggatagggttccagctctggcacccgcaccagcaggcgacggcggcggcggtgccgcacacgtcgcagatcttctcctccggcgccgtcgccacgggcgtcgtgctcggcttctcctcgcatgacggggccggcgggatcggcggcgcgggtggcgccggcgctggcggcggcagggccgggaccagctgccaggactgcggcaacaacgccaagaaggactgcacccacatgcgctgccgcacctgctgccggagccgcggcttcagctgccccacgcacgtcaagagcacctgggtccccgccgccaagcgccgggagcgccagcagcagctcgccgcgctcttccgcggcgccgccaatagcaacagcgccgccgccgccgccgctgcggccgcgagcaagcgcccgcgggagctc

SEQ ID NO: 121190 - DNA, 689 bp, Zea mays
  Clone ID: MRT4577_42002C.1
atttcctactcactggcgtacatccgggttgaatattgcactcgcatacgacgctatgcacttggccggtgtcgatgatgatcctcttcgataatagctgcaagaagcgcgcgcaggcggacgccggcgacgagagcataggccaagacggaacatcccggaggtcgtgggaaaaccggtggtatgcatcaccaggaaagcctcttcgacaatgaccatcccgggtacttcgaccggggccacctgcgatgcttacagaagctcccgaacaagttcaactggcccacttcctacatcgagcgcctatggtctatggcgcccgtcaaaaaggcaagggaagcctgaagggacaagggctcgcgcatctacctcacggagatcagctacttcaaggtcgcatcgccgaaggcgatgatgtcgtccaaggccatcactccactagtgaagctcatgtcctaggtcgacgataagaagatgaaagtgggcggcggatcctccgtgctcaccgtgaaagtctctgtcctgtattccactcctgtctccgagatatatatatgaagtaaccttgatgtcgtggctcacctatatgtggtaagaatagcgagattttagatccgttgctccttcctgtgtggacggtgctttcatatcagatatttcaagtgtattagagctaactgcggcaaaaa

SEQ ID NO: 121191 - DNA, 333 bp, Zea mays
  Clone ID: MRT4577_42003C.1
ccgacgcctgactccaaaccctttcgcctccgtcgacggctgatagctccagcgccctctgggacggctggccggatgtcgtcctgccgctacgagctatgcatctgcttcgtcgattcaacatgggtaagacacgctgtgtgccagttagctcgcgtgcttaagacccacacgaggcacctaactgggcctggactaaccctacaagatgagccatgctcggaacaagatgaatacaccttaccctggatcatgccactctctggcaatatgtgccaagaagagtggcatgatgagcacccaggctgtctacgatctactgatcaatgctca

SEQ ID NO: 121192 - DNA, 244 bp, Zea mays
  Clone ID: MRT4577_42004C.1
gttaaattaggggggaaaataaaagggaaatggtgggtgaaacaacagaaaacgttctctttatacacagattcatttgatcatgttggaacacgaactaactcataattcaggactaaacaatacaaacgcatccaatgacacaaaatctaaacaggggtaaagaactaataacacccacctgtaaagaatctaaaaaccggataatggcccccttctacactatacaataacacgggtccta

SEQ ID NO: 121193 - DNA, 154 bp, Zea mays
  unsure (1)..(154): unsure at all n locations
  Clone ID: MRT4577_42005C.1
cacgcatcaacttggtggacgcaccgcanctgagcctgtatagcacgagcgcccccntnagagggcgtaataaacggttgggtcgctgcggcctgatcaaatcaccacaaggcacacccagctcttgcctgcctccactgtccactccacccaa

SEQ ID NO: 121194 - DNA, 1252 bp, Zea mays
  Clone ID: MRT4577_42006C.1
ggccgcttttttttttttttttttgaataccatggtgttttgctttgttttactatatcccgcttgcgaggaatctccacaacttggagcctctcgcccttacaatttgatgttcacaaagaagcacataagtaaggctgggatgagcaacgcacacaagacacaaaatcagagcacaaacacgcacacaagtcgcaactcgagctcacaacacaacccaaagagttctctactcaaatggagctctagttgctatcacaaagaatcgaatgcgcggaattggagtcttggtgcttaggaatgcttagagaatgcttggtgtcttcctccatgcgcctaggggtcccttttatagccccaaggcagctaggagccgttgagagcattccaggaaggcaattcttgccttctgtcgcctggcgcaccggacagtccggtgcagatttctttcctattttggcgcagccgaccgttggagattagaagccgttggcgcaccggacactgtccggtgcacaccggacagtccggtgccccagcccgaaacagcctttggctgcacacagccactctccacttcctttctattcttcttctttctgtttcttacacttagataaatatattagtacacaaaaccaatgtactaagacttagaaacatacctttgttgtagatttgcactttgttcatccatgggcattgattcacattgaagcacttgtgttgacactcaatcaccaaaatacttagaaatggcccaagggcacatttccctttcagatacctcactcgtcaccttcgcacgaggcaactcacacttggttaagcggctcagttagccgacaggcgagtcctagtgctcgaaatgaggaaaaaacatggtattacaccaaaaatacctagatgttcaagctccgccttgagcggatgaacaagaagcacctcggtgcccgccagaagaaggcagctgaggcagagaaggaagacaagaagtgaagcagccaaactttgtagcctgttttgttctgttcagtcatagcgagatgctacttccatcaagtgcttgttccaagttttttttgggtgctggaaatagagaccagtcaaatattttggtgtcctactgtttgataccttgtatttgtttgcgaactcagctatctaatgggttaatgaattcttggcgacgcacgattctgccttaatgttttgaaaaaaaaaaaaaaaaaaaaaaaaaaaaaaaaagggc

SEQ ID NO: 121195 - DNA, 428 bp, Zea mays
  Clone ID: MRT4577_42007C.1
ccgcccaaaggggcttccgtttataaaaggaacggggtttatccccccccctaaataaaaaaaccaccccagcgggctttaaagcaaataatttccggggcccaagtcttttaagctttaataggaccggggtttttcccagaaaaggtggccctaaatggccccccccccttaaaaatgggaaaagcggggcccccctgcccctaaaaaagggaaaaacaaagccccccataacaatggggggggggagggaaaaccttcgtttaaaaaaaccctttgggggcttaaaggggtatcctggcggaaaataaatgttccccaaaaaaacccccccaccttttggcctttcagggggccccatgagggttccctcccagggaaacaaatcctacccagaagaccccgccctgcatgaggtgggagggccc

SEQ ID NO: 121196 - DNA, 382 bp, Zea mays
  Clone ID: MRT4577_42008C.1
gtgctcatggtgttccttctacttgttcttttttggacaccgcctgctcaccaagaatcgacaatatgatgttggtgaaaatatttggctccattactattttgtagttaagtaacttctcaggtaacaccttttgtttgggcgccgatgatgtcgcacacgtggccctaaattactcccatgcggaaaaactatatgtgtttaacatttcgcttgccatttcgcttgcagctcagccgagttagaagttgaggcaactatatgatggcagccacatgtgtcctcgtttttcaaattaacgaatctggttcttctttgaaaaacagaagctggactaaaaaggtttagctttatagctgctattaaaaaacaattttgtagt

SEQ ID NO: 121197 - DNA, 491 bp, Zea mays
  Clone ID: MRT4577_42009C.1
gccggccgggtccggagccagcttcccactcgcaccgcccgtccgcccagaactatctcgctcgtccgcgttcagctcagctactccaatttcgcaacaagttgcaagcaataaccgacctggccatctacccggacgagaacatcgccatcaccagctgcgccatggacggctacctcgaggaggggggggatcggtgcaagctggacattgtgagcggatgcacggaccccagctccgacatgttcgacccgctagccaccgtcgacgacggctcctgccccctcgagtctgattccgaggaatgatggtggagcttcatctcaatccgagggagggaggcagcagcagcaaacgtgatccacacatacatcatatacagatgtctgtcaagtttgtcatcatgtgatacatgaagcatacctgtatttagccagaataccacagtaaaaacgcattaatgagaaaaaaaaaaaaaaaaaaggccccta

SEQ ID NO: 121198 - DNA, 1775 bp, Zea mays
  Clone ID: MRT4577_4200C.1
tgggcagcaagaagatttccctcaaggccaaccaaccgactcccccgaccctcctgatcgatcgagggccccttgctctacgcagatgtcaccttccctctcgacgaagttgctcctgcctgctccaatgagccggtgcctctgacgacgaccccacgaagacggcgaacatacccgccacgatgcgggctgcgcagtacaactcctgctgcagggacgcgccgcattgggtacctcgaggccggccgggaaccagaaactagaaaggcgtgtacaccaagaagaagccggccaaccaaccgactcccccgaccctcctgatcgatcgagggccccttgttctagccagttgtccccttccctctcgccggcgttgctcctgcctgctccaatggccgctgcctctgccgccgcccccacgaagacggcgaacatccccgcgacgatgcgggccgtgcagtacgactcctgcggcgggggcgccgctggactcaagcatgtggaagttccggtcccttcggccaaaaagaacgagcttctgctgaagctggaggcagcaagcatcaacccagtggactggaaggtgcagaaaggcatgctgaggcctttcctgcctcgtaaattaccttttatcccagtgactgatgtggcaggagtcgtggctgatgttggtccaggaatcaatgggttccaagccggagatcaagttgttgctatgctcaactcatttaacggaggtgggcttgcggagtatgctgtggcatcagaaaatctgaccgtcaagaggcctcctgaggtatctgctgccgaaggcgcagggctgcccatcgccgccggcactgccctccaggcgctcaggaccatcggcgccaagttcgacggtactggaaagcccatgaacgttctggtcaccgcggcatcaggtggcgtcggcctctacgccgtgcagctcgcgaaacgggctggtctccacgtcactgccacctgcggcgcgcgtaacgtagagctggtgaagagcctgggcgccgacgaggtgcttgactacaggacgccggagggtgccaccctgcagagcccctcgggcaagaagtacgatggcgtcgtccactgcactgtcgggaccagctggtcgacgttcgagcctgtgctggccgccacggggaaggtgatcgacatcaccccgaacttgactgccatcctcaaatcggcgctgcacagtgtgaccttcgccaggaagcggctcgtgccactgctcctgtcgcccaacaaggcggacctagagttcctggtcgggctgctgaaggacggcaaactcaagacgctgatcgactcgaggttcccgctgagcgaggtgagcaaggcgtgggagaagagcatcgagggccatgccactggaaagatcattgtcgagatgggagactgatctgggatgcgtccattgccgatagagacttgcagtagcatccactaggctgttggacactacagggttaaagtcaacatatacgaagtagtactagtatctgagtttggtcgtcgtacaaattgttcgtgagtggtgagccagtttataggcttgtttttcttttgttttcagctataaacttgaacttcttgtacagtttagggttttatggggttgcatgatagatccgcaaagttgcattgtaattacatatttgggacttgggagttgctatatttctgcttgaaacttcagaaatgtttagacaacataactacttaagggcaaaaaaaaaaaaaaaaaagcggcc

SEQ ID NO: 121199 - DNA, 1130 bp, Zea mays
  unsure (1)..(1130): unsure at all n locations
  Clone ID: MRT4577_42010C.1
gcgcccgcagtgggtggctcgcccgagggggcttggggggctttttctgatctgcattttgtcgatgggtctgctcacgatccctgtttctaagattgtcattcaagagctggtaaaacatttaaagcagctcatttttgacaggaatggcagacggccattgctgcaactacttcaccctttttgctcacgctatctttctccggatgatctagcttgtctgaactacaatgtgccttctcttagttcaacagaggttgagacatcagagagtgctataggagttataacagaaaataaattagatgatgtgactgctcaagatcccaatggcttagaaggcaagcaaattgtgtttgagagcaagaaggatccattacaaaggcgacatgaactgttgataaaaagtgagcttgccgaggctctcgttcagtcatgcattgaaaatgttggagaattacttcgaacaaattttggcaaagaagtattgtatgagatggctgttggtggtaaagacaacgttctggatggcctcaccgataggatccacatgttgcacgatgcaatagcgtctgatgcggcccaaccgaagattgaagatatggaacatgcatttgaaaacttcttttccagccgtgtaatcagaagaatggtaatcgactgcccagcgtttgcagtcactctctggagaaaggctcttcagggcaagtgcaagatatgggctgaaggacacagttcgaaggtggttgcgggtttcctggagtcgccaagtacggaggtcaaggatcttgcaaaacctgagttgcagccactggttgatgctggcatccttaaagtgccagaccctaaggttgttcaaaaatgactcgtgcgcgggggcctttttgcgccagtaaatgactcaaggaccatcccttgtttaagggatacggataggttttttgaagctcgttctgccgataaaaattgttaagtcactcgttcgtgtgtacgccagtccgttgtacacttaccctggatatatggtgaatcggataacgttattttgttttaaactcggaatgctcctttttatctatatttttttggagatttgtgttanaaaaaaaaaaaaaaaaaaaaagggcggg

SEQ ID NO: 121200 - DNA, 877 bp, Zea mays
  Clone ID: MRT4577_42011C.1
ggccgaaccacgcgtccgcgagaacatcgccatcaccagctgccactcgcacctccggtccgcccagaactatctcgctcgtccgcgttcagctcagctactccaatttcgcaacaagttgcaagcaataaccgaccaaggacgacgaacgggtcgatggccacgctctcctcctgcagccgcctgagtagcggcaccggcgccgcggccatccaccggcagccggcccgtgctggagccgtcctcgtcgtcacctgcaggcggagctcctccgcgaccgtccgcgccgcagccgctgccacggcggcggcgccggctgccgtagagctgcagaacaaggggtaagtgtatatatagtggtgtaacaaataagctggctgctgctcttgtagctaattgatcgatgctgctgctgctgctgctggacgcgcgtgcgtgacctccgaccgacttgcaactgcaaagggtgtcgctgccgacgtgggcggagttcgagctcgggcgggcgccggtctactggaagaccagcagcggcctcccgccctcgccgggcgaggggctgaccctgttctacaacccggcggcgacgaagatggccccgaacgaggtgttcggcgtggcgttcaacggcggcttcaaccagcccatcatgtgcggcggagagccgaggcagatgacgctgcaggagcggggcaaagccgacccgcccatctacaccatcaggatacgcgtgccgcagcacgccgtaagcttgatcttctccttcaccaacggggccgagtgggacgggccgtacacgctcaagttcatggtccccaagccatggcagaacaagccgctgagcttcttcaacgagggcctggcggacgaactcaac

SEQ ID NO: 121201 - DNA, 765 bp, Zea mays
  unsure (1)..(765): unsure at all n locations
  Clone ID: MRT4577_42012C.1
cggccgcgtggggtgctataggagttataacangaaaataaattagatgatgtgattgctcaagatcccaatggcttagaaggcaagcaaattgtgtttgagagcaagaaggatccattacaaaggcgacatgaactgttgataaaaagtgagcttgccgaggctctcgttcagtcatgcattgaaaatgttggagaattacttcgaacaaattttggcaaagaagtattgtatgagatggctgttggtggtaaagacaacgttctggatggcctcaccgataggatccacatgttgcacgatgcaatagcgtctgatgcggcccaaccgaagactgaagatacggaacatgcatttgaaaacttcttttccagccgtgtaatcagaagaatggtaatcgactgcccagcttttgcagtcactctctggagaaaggctcttcagggcaagtgcaagatatgggctgaaggacacagttcgaaggtagttgcgggtttcctggagtcgccaagtacggaggtcaaggatcttgcaaaacctgagttgcagccgctggttgatgctggcatccttaaagtgccagaccctaaggttgttcaaaaatgactggaggaccatcccttgttaaaaattgttaagtcacggataggtttttttgaagctcgttctgccgataaaaattgttaagtcactcgttcgtgtgtacgccagtccgttgtacacttaccctggatatatggtgaatcggatacgttattttgtttt

SEQ ID NO: 121202 - DNA, 603 bp, Zea mays
  Clone ID: MRT4577_42013C.1
gacgccgccagagctcgctctcgcaccgaccgtcccagaaatatctcgtcgacgaccagttgagccgcgacaagctgcgagcaaccatcaacccaatcaaggacgacgacgcacggatcgatggccacgctctcctcctgcagccgcctgagtagcggcaccggcgccgcggctatccgccggcagccgaagccgacccgtgcaggagtcctcgtcaccagccggcggggctcctccgcgagcgttcgcacggccgccgccgctgccactgcggcgccggccgccgtagagcagcagaacacggggtaagtggcggcgtaacaaaaacaagttgtctgctgccatcgctcgctgctcttgtagttgtagctttgttttgctgacgagtctgctggacgcctggacgtgaacgcacggcttctgatcgacctccaactccaagcagggtgtcggtgtcgctgccgacgtgggcggagttcgagctcgggcgggcgccggtgtactggaagaccagcaacggcctgccgtcctccccgggcgaggggctgaccctgttctacaacccagggggcgagcaagatggccctgaacgacgtgttcggc

SEQ ID NO: 121203 - DNA, 178 bp, Zea mays
  Clone ID: MRT4577_42014C.1
agcaaaagcaacaaggctttagcacattcaagaaccacacctcctcccggagcctagaatcatttacacatgctgcggccgcaagtgcagatgcggctccagctgctcctgcggcaactgatgcaacggctgcggtatgtaccctgacatggagaccgtcgccaccagcagcgtcaag

SEQ ID NO: 121204 - DNA, 429 bp, Zea mays
  Clone ID: MRT4577_42015C.1
ctctcctcctgcagccgcctgagtagcggcaccggcgccgcggccatccaccggcagccggcccgtgctggagccgtcctcgtcgtcacctgcaggcggagctcctccgcgaccgtccgcgccgcagccgctgccacggcggcggcgccggctgccgtagagctgcagaacaagggaccgacttgcaactgcaaagggtgtcgctgccgacgtgggcggagttcgagctcgggcgggcgccggtctactggaagaccagcagcggcctcccgccctcgccgggcgaggggctgaccctgttctacaacccggcggcgacgaagatggccccgaacgaggtgttcggcgtggcgttcaacggcggcttcaaccagcccatcatgtgcggcggagagccgaggcaaatgacgctgcaggagcggggcaaag

SEQ ID NO: 121205 - DNA, 1725 bp, Zea mays
  Clone ID: MRT4577_42016C.1
aactcgtccgaacccgctcacaacttgagatgacaatctctactacttcataagaggacaaggagggcgtccaccggtgaacacggctccgccctcccccctcccggcagcaattaccgggccacactcagtctgctcgctctcgcaccgaccgtcccagaaatatctcgtcggcggtcagttgagctgcgagcaaccatcaaccaatcaaggacgacgacgcacggatcgatggccacgctctcctcctgcagccgcctgactagcggcaccggcgccgcggctatccgccggcaattgggtacctcgaggccggccgggagacaccaccagcagccagctcccactcgcaccgcccgtccgcccagaactatctcgctcgtccgcgttcagctcagctactccaatttcgcaacaagttgcaagcaataaccgaccaaggacgacgaacgggtcgatggccacgctctcctcctgcagccgcctgagtagcggcaccggcgccgcggccatccaccggcagccggcccgtgctggagccgtcctcgtcgtcacctgcaggcggagctcctccgcgaccgtccgcgccgcagccgctgccacggcggcggcgccggctgccgtagagctgcagaacaagggggtgtcgctgccgacgtgggcggagttcgagctcgggcgggcgccggtctactggaagaccagcagcggcctcccgccctcgccgggcgaggggctgaccctgttctacaacccggcggcgacgaagatggccccgaacgaggtgttcggcgtggcgttcaacggcggcttcaaccagcccatcatgtgcggcggagagccgaggcagatgacgctgcaggagcggggcaaagccgacccgcccatctacaccatcaggatacgcgtgccgcagcacgccgtaagcttgatcttctccttcaccaacggggccgagtgggacgggccgtacacgctcaagttcagggtccccaagccatggcagaacaagccgctgagcttcttcaacgagggcctggcggacgagctcaacagggagggcgcctgcgacctggccatctacccggacgagaacatcgccatcaccagctgcgccatggacggctacctcgacgaggggggggatcggtgcaagctggatatcgtgagcgggtgcacggaccccagctccgacatgttcgacccgctggccaccgtcgacgacggctcctgcccactcgagtctgattccgaggaatgaaggagcttcagttcgatccttttttttgtggggggcaaggaaacgtggtccatacatcttatcagtgcaagtttgtgatcatgtgatacatgaagcatatacgtgtacgtatttcaccagactacctgcaccggtgagcaagatgatctcctacttgcaccaccattagagcagtggatatgatctcatacttgcgcgttgcactagtagagttgtggatacttaggatccatcattgcaaactctgatacaaaccagtgtaagctgagctgcatggattgcagatctgtatacctacggctcatgcagctataccgtcctggattgtaccacacaatcaatattatcaaatgtaagatacgacttggagggaagcttataaagacttccccgtgaatggaagagcaatcggttcatgaaaaagaaaaatttaaaattaagggttttaaaattttaccggcccc

SEQ ID NO: 121206 - DNA, 1467 bp, Zea mays
  Clone ID: MRT4577_42017C.1
gtccgcgttcagctcagctactccaatttcgcaacaagttgcaagcaataaccgaccaaggacgacgaacgggtcgatggccacgctctcctcctgcagccgcctgagtagcggcaccggcgccgcggccatccaccggcagccggcccgtgctggagccgtcctcgtcgtcacctgcaggcggagctcctccgcgaccgtccgcgccgcagccgctgccacggcggcggcgccggctgccgtagagctgcagaacaaggggtaagtgtatatatagtggtgtaacaaataagctggctgctgctcttgtagctaattgatcgatgctgctgctgctgctgctggacgcgcgtgcgtgacctccgaccgacttgcaactgcaaagggtgtcgctgccgacgtgggcggagttcgagctcgggcgggcgccggtctactggaagaccagcagcggcctcccgccctcgccggtgagtcagtcggtcggtcgaaatgtcgagtccgtgtccatggatgatgcggattggatcggatcctgcttctgctagctagcgctggctgatacgcgcgtgcgtgggatggttggcagggcgaggggctgaccctgttctacaacccggcggcgacgaagatggccccgaacgaggtgttcggcgtggcgttcaacggcggcttcaaccagcccatcatgtgcggcggggagccgaggcagatgacgctgcaggagcggggcaaagccgacccgcccatctacaccatcaggatacgcgtgccgcagcacggtggagagacagacgtcctctttcatttcatctcatctcactagttacctctcgctgatttctctcgctgcgtgcgtgcagccgtaagcttgatcttctccttcaccaacggggccgagtgggacgggccgtacacgctcaagttcagggtccccaagccatggcagaacaagccgctgagcttcttcaacgaggtgagtgtctaccgtcttgggtgatgatggtgaccactgaccggtggtgcaggcgtgcagcgagctgagtactggtctgttgcagggcctggcggacgaactcaacagggagggcgcctgcgacctggccatctacccggacgagaacatcgccatcaccagctgcgccatggacggctacctcgaggaggggggggatcggtgcaagctggacatcgtgagcggatgcacggaccccagctccgacatgttcgacccgctggccaccgtcgacgacggctcctgccccctcgagtctgattccgaggaatgatgaaggagctccatctcaatccgagggagggaggcagcagcagcaaacgtgatccacacaaatgtctgtcaagtttgtcatcatgtgatacatgaagcatacctgtatttagccagaataccacagtaaaaacgcatcaatgagcaagatgatctggatacatggtatccatctttgc

SEQ ID NO: 121207 - DNA, 584 bp, Zea mays
  Clone ID: MRT4577_42018C.1
cattgggtacctcgaggccggccggggaatcgctccgcagcacagagaacgagcgaccgccggcatcgatcgatcgcccggaaatgacctctacgatggctggagtcggtaaggaggataacaagaccgcggagggcggggcccacatcaaccttaaggacgagggacaggatgacaatgaggtgatcttgcgcatacaagacgtccacccacgctgatagaaggtgatgaacagcctattgcgaccgccagtctgtggacatgaatgccattggattccttgcttgatggtcagactgcttcaccactcatgagacaccctgatgagctgcacatggaagacggatactagatcgacgccatgctgcatcagaccgtgagcatgggacctagcaccacctagaaacaacagctgcggagcctcgtgatgctctccgacctgcgtagtactaaaccaaacggaatgagactttttaaggaacttgtgatgctctgcctgcttgtgacattgatgatggacatccatagcctttatttagagcaatggattgaaactttggactgacctcagctcggatatctat

SEQ ID NO: 121208 - DNA, 755 bp, Zea mays
  Clone ID: MRT4577_42019C.1
aaaaattaaccttaattcataagtcttcacgatgccgtttcttcccattcttaccttcttttccctgaagggctgcggcgtgaggagatacaatgatggcgcaacatcaacaagcgatggaggatccatgaaccatcccacctccttcatctcggccaccaggtctaccatggtgtggatttgactctagctatggtgggtctaatggtcgtggctccagcgacggctagtctcaccctcctctacttggcgccattccttccacgaccatgacaatagtggagctcaagcagaggcattgtgcttggctcctcgtcggtggcgacgcctccaaatctgagcgggtcgttggtggcggcgactagatctgggtgacgacggagtaactcgatggtgaagaaaacccaatggcgacgatgaacaaaattagttgcggcgataacccaaccttgacgagcttggatccggacccgacgggtttagatccaggctcacaattttttttttatttttaaatggacctttacaagcggtctacgcataagagcctgcttgtaaaaatagtgtttgtacaaacggttcttgaccaccgcttgattaaaataagattttctcaagctcttaaatggtagcgcccatggacaccgtataaaaaaaatttgttttcgaccacttgtaaagacttcttttgtaatagtgtatactgggtgtggtatacacattttgataattgatattggcgtggtcagcattta

SEQ ID NO: 121209 - DNA, 704 bp, Zea mays
  Clone ID: MRT4577_4201C.1
ttcttgtcctttacaacccagagcggtccatccaacgttcgttttgttgagaactacgttatcacggatcaccagattcgctctcttccctctcgtcagcagtagaggcgcaagaagatgtagagaactcgtctcccttcccataagcacgacagaggaaacacacgagacactggatatagggttgtgcctctggcctctttctgatctctgtattatgagggggggtacaaattccttatatagagatgtgagacccctcttaacaattccaacttgaatatactaaaacacaagccaaactcactgacggctgatgatgggtatgcatagctttacacgggcacttgtgcggcctttgtattcttgagatttgcagagcaaggtttgcgcccaatcaaacgtcgtcatcgtaggggaaggaggtggcgcccaaccactcgtcgccgtaaatgaagttctcgacggcgaactgtgccgcctcgtcgtactccatttgccgcaccccagcccaacccacgcgggctcccgtgtcggcccccggcccgtcgttcccgtactcgccgaagtacacggtgtccccgcggccgggctcggcgccgggccactcggcccatcccttccggtccacgatctggcccaggtaggagtccatcacgacggggcgcgcgtacccgccccacggccggcccaagaacgtgcgc

SEQ ID NO: 121210 - DNA, 1125 bp, Zea mays
  Clone ID: MRT4577_42020C.1
cattgggtacctcgaggccggccgggggccgcctgctcatgccacacacgtccaaccgcacccagacacccatccttatatacgcgggcagcttaacgtgcgcggtgacgccgccagcagctcgctctcgcaccgaccgtcccagaaatatctcgtcgccggtcagttgagctgcgacaagctgcaagcaaccatcaacccaatcaaggacgacagcgcacggatcgatggccacgctctcctcctgcagccgcctgagtagcggcaccggcgccgcggctatccgccggcagccgaagccgacccgtgcaggagtcctgttcaccagccggcggggctcctccgcgagcattcacgcctccgccgctactgcggcgccggccgccgtagagcagcagaacacgggggtgtcggtgtcgctgccgacgtgggcggagttcgagctcgggcgggcgccggtgtactggaagaccagcaacggcctgccgtcctccccgggcgaggggctgaccctgttctacaacccggcggcgagcaagatggccccgaacgacgtgttcggcgtggcgttcaacggcggcttcaaccagcccatcatgtgcggcggcgagccgaggcagatgacgctgcaggtccgcgggaaagccgacccgcccatctacaccatcaggatacgcgtgccgcagcacgccacaagcttgatcttctccttcaccaacggggccgagtgggacgggccgtacaccctcaagttcagggtcccgaagccatggcagaagaagccgctgagcttcttcaacgagggcctggcggacgagctcaacagggagggcgcctgcgacctggccatctacccggacgagaacatcgccatcaccagctgcgccatggacggctacctcgaggtctgattccgaggaatgatgaaggagctccatctcaatccgagggagggaggcagcagcagcaaacgtgatccacacaaatgtctgtcaagtttgtcatcatgtgatacatgaagcatacctgtatttagccagaataccacagtaaaaacgcatcaatgagcaagatgatctggatacatggtatccatctttgcaaacaaaaaaaaaaaaaaaaaag

SEQ ID NO: 121211 - DNA, 263 bp, Zea mays
  unsure (1)..(263): unsure at all n locations
  Clone ID: MRT4577_42021C.1
tggctggccacccaatcgcgtcgttcgtcatctacctctccctcctacaacccaaggtaagctaaacagcttacacaggcttgctccgccatcaccgtatagagagagacagagacaggctagcgagggaacggagaggatgctcgccacgctgatcgtgnaagaagagctatatacccctgtacggcctactacacaacggaggagcgcccgaaccgctagaagcccccggcgccactggaccccccccgccgcccctgacc

SEQ ID NO: 121212 - DNA, 511 bp, Zea mays
  Clone ID: MRT4577_42022C.1
tcgcacgatctgacacacctgccccctcctttttagggagagaagcaacgaaatcccacagagcgtgctagcgggagcaaggagatagcacgctcgcgagcccgatgaggagctgccaacctgccggtcgacctactccattagccccagccccagggccccgccccagcaacgccaagggcggctctccatcccggccaggcttctgaggctatgaggattgtggtgctagggggtcaagctaccgaagaggagggcgtcagtcttaccaaaagtgaagccgtgctccacgcccaattggaaggaatatgactggcagcggcattttcgctgcctggatcaatggaaacactgtgaaggcatctgctaccgcgaagaccgcccgaacctcctcgcgcttggcgagcattactgtctgccacatctcgattggtgatgatggaaccgatcctaccaaaaagcccacattactagctaaagcgacacactacggtgagcttaccggcactct

SEQ ID NO: 121213 - DNA, 592 bp, Zea mays
  Clone ID: MRT4577_42023C.1
ccggccgggaacatcatagacatacgagggggaaggctcaattcatgtcctgatcatcgttacttaccttctagatgcatgggctgtccgcggcaggataaccttgcatggcagccagcgagctgtgcggcaagagccctgggcccgtcagactcaaggatgcatccagctgcttatacacggtgaccgtcaaaggcggccacccggtcgtcgtagacctgactaggccgattaactctctgtgcacaggaccctgctgctcccagaacaactacgggacgctcaacggctcgactatctgtcatcgaaagacacgaaaacatctggtggtgaataggctgctatctgcatgtcacgtgcgctccaagtgctagattccccctcctgaccctgacatcccatgtactgattgtcgtgctctccaccatattcctgcggtccatagcgaccaaggtgatgaacacgagtacagcggatattacagtagtgctgggccttgacaaccacggtaggaacaggtcacgcgcctgacgggatgacatcatcagagggcttcacttgttgcgttagatcccactggagcatgatcaga

SEQ ID NO: 121214 - DNA, 408 bp, Zea mays
  Clone ID: MRT4577_42024C.1
aactatcaccatttaacctgatagcttctgcctactctaactagccaccacggatgggattaaaccaattgttcgtactgtacccctctgtttattcgcagcatccaatactactgccatttagcgagctacctgcagcacgtcgtacttacttcttgacacatctacacctgctgcctttcaactagcagtttgcggctaaccgcgcaactctcttacaactactacaattgctgacctttgcccaacttgctttgacaaaccctgcagcctcctaccaacaacacatcattggcggtgccctctcttagattgactattagacgtaattcaataataaagtacttcgtatgatgtatgacaccaaccagaactaagacgttacatctgcagattcttcaagcaggt

SEQ ID NO: 121215 - DNA, 377 bp, Zea mays
  Clone ID: MRT4577_42025C.1
gtgatgtgtgtcaaagaggcaaaactgaacatcaaattctagctggactactgcacccgataaagatacctaaatggaagtgggaagaaatcggcatggatatcattgtcgggttgcctcgcacccagaaagggtatgattttatatgggtgattgagcataggctaaccaaagtagctcacttcattctggtcaagactacttacaagggatctctgttggcagagttatacatgactcggattgtgtgtttacacggtgtaccaaagaagatcgtttctgatcgaggctcacaaattacctcaagattttggagaagctttcatgaaaatgtggatacgaagttgagtttcagttcggtctatcaccctcaaact

SEQ ID NO: 121216 - DNA, 483 bp, Zea mays
  Clone ID: MRT4577_42026C.1
tacgtaagctcggaattcggctcgagcggttagcaacaccactctcctcgccttgagcagcgaccgagctgagagagatcgtttaaacgatggaccgaataccagcagcttcaggagcaacaagggctccgctgatcatactatgatgaaacactcatgctatttctggttcgcggtcgctctatgtgctcgtctctgaaagcatgggcgcatcggagtatctacagaccgccattggtactgtattgatctccatcgggacaaagaagacaggtgactcccatggttatcagataccaacagaatctatgctggcaattgtaactacatgtaatagtggaggcgtcatatcaagccttaggaaagcatcaaaagagactggggacaagcatactgatgcaacaacacatgcaggcagtgcaatccagtttgctgcatatacttggcagatagtcaagttacaaaaataatcataataaacac

SEQ ID NO: 121217 - DNA, 795 bp, Zea mays
  Clone ID: MRT4577_42027C.1
cctcgaggccggccgggcatggcctcccgccccacttcggcctcacgagctggacttcgtcttctccaccctcgtcgtcggctccatcctcaacttcgtcctcatgtacctcctcgcccccaccgccgccgcgtcgtccgccgcctccgcgctccccagccacatgttcgagcccggcgccttctcgctcggctcccgcgtcgccacgctcgtgtccaagggcgccaccttcgcggtggtcggcttcgcagccgggctcgcgggaaccgcgctctccaacggccttatggcgatgcggaagcgcatggacccggcgttcgagacgcccaacaagccgccgcccacgctgctcaacgcggccacctgggcgctccacatggccggcagcagcaacctgcggtaccagacgctgaatggggtcgagtacatgctcggcaaggtcgcaccggcgccggtgttcaaggcgtccgtcgttgttctccgctgcttgaacaacgtgcttggtggggtgtccttcgtgctgcttgctaggttgactggggcgcaaaaatcagataagccggcgacggtcgcggaagagaaggataggttgatagctgtgggcaatgctgcagcagatgccatcggtgaggcgagagatggagaggagggtaagtaagtggtagaggagaggaacagtaagatgatggtgcatcgtcccacgctcttttgcaagaaacctgtagagttggttggaatggaataaggagtgaggctcaacttctttacgaaaaaaaaaaaaaaaaaaggccccta

SEQ ID NO: 121218 - DNA, 550 bp, Zea mays
  Clone ID: MRT4577_42028C.1
cacataacagggcggtacaagccatgaaaagcttatcacatcagtgcaatgcagcgtacacgagaatacatgactcgggcaagaatcgcaaatccccgctgaaggttgagctcacaacaagtcctaaaagctccagctggagcggtaatgcaggataacatcacacatcagaaagagacaggtctttcgtgtgaagttcccatggactagcgccatctaaaccgaccactactagacatgtacctcctgcgtgatcctggtgtgtgccaaaaagggacatgggcatagtacagattgagtgcctgatttctcactggcaattcattcattgattgcggggatcgtttctcacttggcgcatcatgaccttgacgaactcctggaatttgatctgggcgcctgcgtgaacatcagccttacggatcatgtggtcgacctcatcgtgaggcagtttttggcctaggttggtcatgacatggaggggctcaccatccgatatgaaaccattctggtccttgtagaataaacgaaaggactccttaagctccta

SEQ ID NO: 121219 - DNA, 260 bp, Zea mays
  Clone ID: MRT4577_42029C.1
catctctgctactctacaacaccctaacactcaacaatcctatccttaactccatccaccatacctctcatcaatacaccttcaatacacaaaacccaactcttcaaccctctcatcttcaacaaacaacaccacctttccacatacctccatcaccctcattacaacaatcaccacacatatcaccgaagcatcaattaatatcaaaccattttccattaccctatacaacaactccagctacactccatcacccaaaa

SEQ ID NO: 121220 - DNA, 724 bp, Zea mays
  unsure (1)..(724): unsure at all n locations
  Clone ID: MRT4577_4202C.1
gtccaggaggtcagcctgctccctcggcatcgcgtgcgccgtcctgttnccgcccacgtgccgcctccgccgccggaaactgacgacgagccggccaacaacggctggtggctgaccgagttccctttgcccgtgcncaagatcgtcaacagtaagccgtccccgtccgtcctgctccaccacttaacttggttcactgacaattgtgtcgttcgatgggtggcatggcagaggagatcaacaacgcggagacgggcacgcgctccttcctcaagaacggcatctacatggcggacatcgggcccagcttcccggcgcacgcgtaccggctgcgcagcacggccttcgacctgctggcgctggaggacctgctgggcaaggacgcctccaactacgtcaacaagtacctccgcctcaagtccaccttcatgtactacgacttcgacaagctcatctccgccgccgaagacaagccgcccttcgtcgacctcgccaaccgcctcttcgacagcttcgagacgctccaggaggccgtcacagccaaggacgacgccaggatcggcgaccgctacgccgagacaaagctcatcctccaggagctcatggcgaagatggcctagcagaaccacaatttttcattcatatatcatgatgtgtaaatgaatacttgaaactcacaaggggtattgcagaattccccaaaaaaaaaaaaaaaaaagcggcc

SEQ ID NO: 121221 - DNA, 379 bp, Zea mays
  Clone ID: MRT4577_42030C.1
gaatttcttgcattcacaggtactggacacgctgcaggagatccaggagcgccatgatactgtgaaagagattgagaggaagcttcttgatctgcagcaggtaatgaatggccaaactcccaagattcaggtttcaaggactacacactcttactgcatgcaaaactctcctgaatgcagatcttcctggacttggctgtgttggttgaagctcaaggtgagatgctggacaacattgagacgcaggtatggtgattgatgctttgtcactcgattgctatttttcttgatacctgcaatcacctatttcgttaaacattaaaaaaaagggaaccagccatagaattgttatttttgacttttttctgacttttggtat

SEQ ID NO: 121222 - DNA, 718 bp, Zea mays
  Clone ID: MRT4577_42031C.1
cattgggtacctcgaggccggccgggcttcctcctcatccaggcagcacagctccctccccactcgaggctccgaggtcgccttttttttgttttgttttgttttcttggtaggagtaacaatagtttctggcagccttcttcctcctcgctctctacccgaggagagaggagaggagagaaatccggaggcaaagcttcagggtttgtataaagggattctagatctaatcgactaaccagagagaaaaaaaaacaaaaaataacgcgagaaagcatgagccacttcgccgccgccgccgtgaagagccccctcgccgtggccgcgcccgccgccggcgacgccaagagcccgctcttctgccccaagccgcggcgccccgcggcgcccctgcggtgccaccagggcggcgacgccggcatggatctgctcgacctcctcctgtcaaagggagaggagagcggcctgtcggcggcgtccccgctgttctgcggctcgccgccgcggcgggcgtcgaacccggtggtccacgacagccggttcggcgtggactgcccgcccctgcccgtgcccatgccggtggcggcggcggccgtgcaccggccgtcggcggcgccgcccatgtcgccgcgcggcggcaacgggtgcgcccgcgcccggttcgcgttccagcccgccgcggtccgcgtcgagggttttgactgcctcgaccgcggcc

SEQ ID NO: 121223 - DNA, 631 bp, Zea mays
  unsure (1)..(631): unsure at all n locations
  Clone ID: MRT4577_42032C.1
gcccagccgccgtccgtccgcgcttcactatccttcattccctcccctgtcagcgacgactgggtaggctaccgccgccgccctacgctaggtgcccatctcttcgccggcgaagagcgcccaccaagctccggccaagggcgtgatggcggctgtaggcagcttgaagccggggatggagactcttcatgtgcaggactacaaggacgcgcctccggccaaggccgcggtagagagcctccagccggcgatggagagtctgcatgtgcaggattacaaggacgctaacatgtcctatggagcctatggtggctggggggagtacccatacctgagccatgatggagcacagacaccaactgctggtacctatgctgacatgtactatggctatgctccatatggtgttgcaaccatggggcatgatggtcagatttatgggtcacagaattaccagtacccgtcgacatacaccaagcaacagaactctactgccaagctgtcatccaatggtataagtgagaaattgactccagcgccacaaacagatgtatctactatntggtgtggatgagggtgaaaggttgaaaaattcaaattcggtgctgaagacagaccggaatatgccagg

SEQ ID NO: 121224 - DNA, 666 bp, Zea mays
  unsure (1)..(666): unsure at all n locations
  Clone ID: MRT4577_42033C.1
gcttcgctgcgccgccgcctccgacttcttctcttcgtctccacgagcaaccgataatccgccggagctgagatgttgtcttatctggacctcctatctggcgacgagctcctgtcgcattcattcacctacaaggagctcgagaacggcgtcctgtgggaggtcaaggaaaagtgggtcaccctaggtcctgttgatgcatacattggtgtccatccatccgccgatggtgatgaggatgaaagcgttgatgacacagccgtgaaagagattgatattgttgacacattccgtctacatgagcaacctccttttgacaagagaatcatttgtctcttacataatgaatacatcaagaatctcactgctgcggtggagccagagaaagcatatgagttccaaaaggatgtctaggatgctaccaattttctccttagctagctgaacgaccttcaattttttgttgtagagagcatgaatgacgaggcgtccgtggcattcgcctattactaggatggtgccactanatccgaccttcctctatttctctcatgagcttaaggagatcaagtgctagattagttacgcatgtggcgtactatatatgatctattgttacagccacaactatagctgccctgactgaactgcactcatgctttttta

SEQ ID NO: 121225 - DNA, 2648 bp, Zea mays
  Clone ID: MRT4577_42034C.1
ccggctcgaggccggccgggctccctttctgctgcccagccgccgtccgtccgcgcttcactatccttcattccctcccctgtcagcgacgactgggtaggctaccgccgccgccctacgctaggtgcccatctcttcgccggcgaagagcgcccaccaagctccggccaagggcgtgatggcggctgtaggcagcttgaagccggggatggagactcttcatgtgcaggactacaaggacgcgcctccggccaaggccgcggtagagagcctccagccggcgatggagagtctgcatgtgcaggattacaaggacgcgcctccggccaagggcgtggccgccgccgccgtagggagcttgcagccgggggcggagaacctgcaggtgcaggactacaaggacggtaacatgtattatggtgcttacccggcttatgcctatggagcctatggtggctggggggagtacccatacctgagccatgatggagcacagacaccaactgctggtacctatgctgacatgtactatggctatgctccatatggtgttgcaaccatggggcatgatggtcagatttatgggtctcagaattaccagtacccgtcgacatacaccaagcaacagaactctactgccaagctgtcatccaatggtataagtgagaaattgactccagcgccgcaaacggatgtatctactattggtgtggatgaggtgaaaggtttgaaaaattcaaattcggtgctgaagacagaccggaacatgccaggttccaatggttcatatggccggtctagtgtgcgttctggcagctatcagaaccagactagttggtcacactatccatattatagtagtgagatgttctctgacaagcagcaaaagttcaccggcaaccacaattcgacttccaaccctaaaaccaaggggcagtcgaggaatcaaaacacgaggcagtatcctcatctcatgggtttgcaaacaccaacttcatcagtgtactcagctaatggaatttatgggtatgatgggagctatggacccggcctttggtatggatcgcacatgtataattctggattatatggtggatggaattcactgtatgatggaaagtacagaaccagaggaagaggtaacaatgggtattatgtttatggtaatggaagcatagatggctttaatgagctgaaaagagggccaagaagtggtatgtacaaaaaccagctggggcttgaagctactacccaagcaccagcaaaagagcaggatcttttgtttgctaatggttcacatcctgccatgaaggatcagtataatcaggctgactttgcggaaacatactcagacgctaaattcttcattattaaatcttacagtgaagatgatgttcacaagagcgttaagtacaatgtgtgggctagcactcccaatggtaataagaaacttgatgctgcctatcaagaggctaaagaaaaatcaagcgaaactcctgtttttcttcttttctctgtgaatgcaagtggccagtttgtcggccttgctgaaatggtgggtcgtgttgattttgaaaaaacagtagagcattggcaacaggacaaatggactggttgtttccctgtcaagtggcacattgtgaaggatgttccaaacagcttgctgaagcacatcattcttgagaacaatgaaaacaagccagtgacgaacagcagagatacacatgaggtgaagcttgagcaaggccttcaagtgcttaagattttcaaggatcatgtctgcaagacatccatactggatgacttcggcttttatgataatcgtgagaagatgatgcaagagaggaaagccaaacagcagcagtcgctgaaaaaggtcattgatgtgaagctgcccagcgtcaccgacatggagagaagtcctaaaggggagactggatcaacagaactcactggggttgggactgacgtcttgaacaaagagcgtttattaggcaaagcaggagagaaaaatggcgagaaaggaaatgatgtcgccccacaggacctgaaaacacaaactgagaagttggcgggtctaaatggctgttaatatttttcgttagctcaagccgttgacagtggtgtcggggtggaacctaaggctgtggtgggttgtttgaggaaattctgatgtcccattgagcttgtttcctatagttcataggagctagaggcttagctagttgcttgtgtttggtggtagtcatggtctgtgttctggcgtgtcaggtattttaggaatagaaggatgattaactgggttttgcaatgatggatcatgggttttgaggctgtatttttcgtttatttgcctttcctctctggattctagttcctctctctctctctctctagattctggacaagtgtagtgcttattttaagttggttggtttaagaacctgaaatgaacatgggaattctatcaagcatttacaaacttaaaaaaaaaaaaaaaaaaaaaaaaaaaaaaaaaaaaaaaaaaaaaaaaaaaaaaaaaaaaaaaaaaaaagggggctttcgatcgaaaaaaaaaaatattatatagtgaaaaataaaattaaattaatatggacgatgttttaaaaagtgtttaacttggaaaa

SEQ ID NO: 121226 - DNA, 500 bp, Zea mays
  Clone ID: MRT4577_42035C.1
tcacttgttcaaagggagttctgaagacatggctatggatcagtgcaccgatgatgtcaagtatgaagaggagtttatcgtgaactcccgggacaccaagctgttcacctgctcatggatgccgcacaattcagagcccaaagctttgatattcatctgccatgggattgcagcagagtgcagtgtatcaatgagagatactgcctcccgtttggtgcgcgccgggtacgccgtctacgggatagatcacgaggggcacggcaggtcgtctggccagagatgctacgtgccgaacttcagcgacgtcgttgccgactgctccagccatttcatgagcgtctgcgataagccggagaacagggggaagaagcggttcctgtacgggatctccatgggcgggagcatagcgcttctcctccacaggaaggagccggcctactgggacggcgccgttctgcttgctccaatgtgcaagatttctgatgacatgaggcctcatc

SEQ ID NO: 121227 - DNA, 315 bp, Zea mays
  unsure (1)..(315): unsure at all n locations
  Clone ID: MRT4577_42036C.1
gaaacaatnatagagaggcacagaggcgccatcatctcccttggtcttcacccacaagcctctaggggcctcacacgtcctcttctgctgtcatcttccctcgaccctcccctctctcctacctggtttgttcaagaaactttctttggacaatattggagtgcataggtacaggtttttctgctgcgggtgtggtgccaatgcggcggccggcggtcggtaacgcgacaaggacggggacttctttgtgtccgacagcaagttctataagggtgtcgaggccatatccctgtcaccgagggcttttcctgggct

SEQ ID NO: 121228 - DNA, 276 bp, Zea mays
  Clone ID: MRT4577_42037C.1
cgaattgtcgtaaggcctgagccctgcaggcgatgctgacgcccagcgctgaaggcatctactgcctctgctccgtcaccctaaaaactggggtgaccacccggcgatcctgccgctgtgacttcactactgatctcacccagcatccgttgcatgctgactggctgacccctgatgacgtcttcgtccgtacacctccgcgtcatcatggcccttccagcgccatctgcttcctctgtcgtacgagcccattctcgaacgatgaacctgattgcc

SEQ ID NO: 121229 - DNA, 182 bp, Zea mays
  Clone ID: MRT4577_42038C.1
gtatatccctgctgccatgcatcacaatcggtacaactcatgtgttatctgtgtgtgcctagccgatggccgatgttcatgttcgtataaagtgaacgaaacactacccgtgtcacgggacctgctgatgaacaagaaggttacgctgttcacacactggtcagtctatgaggctaccttgt

SEQ ID NO: 121230 - DNA, 467 bp, Zea mays
  unsure (1)..(467): unsure at all n locations
  Clone ID: MRT4577_42039C.1
nagcctagcagctgcccaactaccgcaccaacccctgtggcgtctccgctgccattccgccctactactgattcatgatatttgggaaatctcctctatccatccctctctatctatatatgtaataatgcagtaagacgacacacattatcgggtggggggggactaataatatatgcatcataataaagttttggttttaaaaaaaaaaaaaaaaaaaaaaaaaaaaaaaaaaaaaaaaaaaaaaaaaaaaaaaaaaacttaaaccaaaaaaaacccaaaaaacaaaatacaaaaaaaaaccaaaaaaataaaattcccttcaaccctcctcttaaagggcccattgggacatatagagaaattgtataacatttcaggggccgtttatatcacccctttgggcgcgaaaaaaccctggatttaccaaactaaatccgtttttaacacatccccttttgggaaaa

SEQ ID NO: 121231 - DNA, 929 bp, Zea mays
  Clone ID: MRT4577_4203C.1
cattgggtacctcgaggccggccggggtgccgccccgcccgcgctatccactcgtctctccgtccccatggccacttatctcaacgcaccgccggcagccaccacgacgactgcaagctgccgccatgccttctccggtggcagcctccgtctactccggccgagccgaccgacgctgcacgtgacgtgccaagccgccgtctcctcctcctcctcctcccagccgccgtcgtccccgtccaggaggtcagcctgcctcctcggcatcgcgtgcgccgtcctgctccgcccacgtgccgcctccgcggccgaaagtgacctcgagccggccaacaacggctggtggctgaccgagttccccttgcccgtgcccaagatcgtcaacaaggagatcaacaacgcggagacgggcacgcgctccttcctcaagaacggcatctacatggcggacatcgggcccagcttcgcggcgcacgcgtaccggctgcgcagcacggccttcgacctgctggcgctggaggacctgctgggcaaggacgcctccaactacgtcaacaagtacctccgcctcaagtccaccttcatgtactacgacttcgacaagctcatctccgccgccgaagacaagccgcccttcgtcgacctcgccaaccgcctcttcgacagcttcgagacgctccaggaggccgtcacagccaaggacgacgccaggatcggcgaccgctacgccgagacaaagctcatcctccaggagctcatggccaagatggcctagcagaaccacaatttcattcatatatgatgatgatgatgattatgatgtgtaaatgaatacttgaaactcacaagggatattgcagaattcccagagcagggaaatacaattatcatgtcaaaaaaaaaaaaaaaaaaacggccccccccccacc

SEQ ID NO: 121232 - DNA, 151 bp, Zea mays
  Clone ID: MRT4577_42040C.1
caggaaaagggctccaaggcccctacgatttttattaatggagcaccatcccatccaggaaacagagggagctccacgcctgactggacacacaccagcaccaccaacgttacctctcaaccgacgcaacacacactactaacagtccatt

SEQ ID NO: 121233 - DNA, 160 bp, Zea mays
  Clone ID: MRT4577_42041C.1
ctcgagccgccgtgaaacagccgtttgaatttggctgcgggtggagaacgtttgtcaggggatccggccaagaaggaggcccgcctgttacgatggtgtccatgagtttcaagcggaaccgcagtgaccggttctacagcacccggtgctgcggctgttg

SEQ ID NO: 121234 - DNA, 474 bp, Zea mays
  Clone ID: MRT4577_42042C.1
gcacgactaaccatccctaccgcttgggcatggaggccgaaagaggagagaaatcgaagggagggagagagagccgccgacgtagatccacgggtgcaccatcgtcatggccgaggcttcaccaagtctcgtaggtcatgatcgcgactttgtctggacggattacgttccggttagcccagaattgctcgccggagtcaatcctctaccgcggtaccccgcaccgctatgagcagttgtactacttcgcgaacttccggagaagaacaggtggtccaggaggagccgtacaacgaggagtacgatttgatccaggtggcgtctcccagtcaactttatgacgccatggatggacattagttcgttttatatttatcatttatttttgtaagactttcgctatgtaataattatttttatgatattgtgacatttatctctatacactctgttattatatgtggttgttctcgc

SEQ ID NO: 121235 - DNA, 284 bp, Zea mays
  Clone ID: MRT4577_42043C.1
ctggtaatcctgtaacagacagggcccagagatgaaatatttgaggagaacaaaaggtcgagatgcagatgtattaaaaagagaagcctcggaatagggtttcctgtggggcagggttataaaccttatttatcttttaggattattcctaaatgcatcttctttataaacttgactggctatatcagcaagataaattatattaaaaaaataagaattctgcaatgtgtaaggaactcttctgtctaaatcacagacacctcaactagcaagagttaaggaga

SEQ ID NO: 121236 - DNA, 517 bp, Zea mays
  unsure (1)..(517): unsure at all n locations
  Clone ID: MRT4577_42044C.1
cttttcctcctcttaggtcggcgccgccggcgtcgcatcccatccttcattccgtttccgtttcggtgccatgcgtaaggtgcacgaatcgttggcgcgcgacggtaaagtccgcgatgatatccccaagtgggcgaagcatgacaagaataacaactgccgagggcgctggcactacagaatgaagcacaaccgccgcttcatgaccggcgccatcggcttcgcttagaaacgctccaccaattcctccaagaagcaggcgtcgatgcagctcgtcaccggctcctcatccttcccgctctccggatgcttatgatcgttgatggtactgagtttctctgttcgcaagcaccatcatcaaccttactgaaggattcgcgctgttgtgtgtccatgtgctcttgatgaaacttgagattgtgtgaatttgagatatggcgcatatgagctgatgtatttattattatgcttattagntgctcctcatgaggtgtcttctttgtagcgctagtcctga

SEQ ID NO: 121237 - DNA, 305 bp, Zea mays
  Clone ID: MRT4577_42045C.1
gtggtccgcgtgcggcggtgagcgcattatcgttttcaccaccaaccacgtggagaagctggggccggcgctcatccggcggggccgtatggacaagcacatcaagatgtcctactgctgcatacaggccttcaagttcctggccaaggtgtacctcgacatggactaccactcgagcttcgactccgaggctgagctccagctggaggaggacatgacgcctgcggacataacctacaactggacgcccaaggcacatcgagaggacgccgactcgtgcctagtcaagctagtctaggcacttg

SEQ ID NO: 121238 - DNA, 444 bp, Zea mays
  Clone ID: MRT4577_42046C.1
ccggggacggaattattggggggtcgaggtgacttattggtcggccgcccgtcctttttttttttttttatgagtgatttttgttttgaatgtggaaacctgggccagattaaaggcgacacatgacgaagacagcgagccagtattgtaaacccaaagacattgaggggctgttgtgatagcgtagaacgtgctacaacatgttacgtacgaggtgtacgacgacgactactactaacggtgggacactagacgaagagatcactagtgggtgcatgatctacttgtttattatgggccagtctgatgacacaaacggagctaggacatttttgtttcgacgacgactgcatgcttttgatggccacgcttgcattcaaaacagctaccttcatttggttcatcgatcaattgatcttggagcagttacggaggggctgatgg

SEQ ID NO: 121239 - DNA, 519 bp, Zea mays
  unsure (1)..(519): unsure at all n locations
  Clone ID: MRT4577_42047C.1
aatcgagcatcgcagagataggcgtcttcgtactcgcctacctccgcggctcaaacctttcccccttctcccaattccctccgtacggccgccgctccatcccgtacgacgacaccatgagggatgtgcatttcgatccacataggccaggccgggatccagggcggaaacgcgtgctgggagctgcactgccttgatcatggcattcaggctgacggtcatatgcccggggacaagatcatttgggggaggggacgatgctgaaaacagcggcttcagggacactggccctgggaagatcctccccttccttatcgtcgtcttcctgagcttcacggactacgcgctggcggggaacctgctgccgatcctgaccttcttctctngggcgtgctgggcgtggcacgacagcatcacggagcagcatgtcgggtccgggtaccacggcctcaggggcggcgccttcacgctcgactggggcggcatctcggcgtaccacggcagcccgctggtggcgcc

SEQ ID NO: 121240 - DNA, 674 bp, Zea mays
  unsure (1)..(674): unsure at all n locations
  Clone ID: MRT4577_42048C.1
atttcagttcccaccaaacaaacacgcgatcggagtcggagggtttcggtttgaagtgtccaagccaaggccaggcccagggcagggggaccatgtccaagaccgtgtcgcgcattccgtcgagcaccctgacctccctcctcccgcgcgccctgaatccccacgtcgccgtcgtcgacctcatcaccacccacctgacggccgacgcggaacccaccaagaccctcgacctctccggcctgctcccctacctcggccaggacgagctcaccgccgtcgtgctccacgccggccactctcacccgcttcccaccctccgcttcctcatcgcactgccgccgccgctccagccgtcgcctccccacctcgccttcctcgcgcactccctcgccaccacccgcttcttctcccacgcgctcgacgcgctcacccacctccctccgcctccacccnaacccacgacgccctccccactctcctcctctcctaccagaccgcgccccacccctccctccccggcctcctcgtcaaggcgctcctccgccgcgcccgccttcgccacgcattccacgccggcctgcgcgcgtccgcttccggcttccctcccgacaccgtcgccttcaacgcgctcctcgtcgcgctctctcgcacggagcgtttccatgatctctggg

SEQ ID NO: 121241 - DNA, 681 bp, Zea mays
  Clone ID: MRT4577_42049C.1
aggcctctaccgccacgggcggcagcaaatagctgtttgactcagagcacgctcctgcgtagtgcgtgcgtactagtgcgctgccctgcgtccgcgcgggatggcattcgcattgctggtggtaccagcgagagtcgagagtgctggaagcactcgcagaccagccgcacgcggaggcggaggccgaggtcgagcaatgggaggaggatggccgcgtcccggcggggctttggcggctccgcgctttctcctccgagcgctgatgctctgctccctcctcgcgcagccgaatccgtcgcgtgccttcttcttcttctccggtgtgcgcaccagcgcgcacgtcccccagcaccgcggtgctggacgctacgagaaggtgcccatgaccgtctgcgtcccggaatactcgacgcggccggggccgctcgccctctctgcctcagccgcgaccacgcccgcgcccgcggcggtgctcgcgtcagactgcacactaaaacgggacgccgacgctgccgtcacaatggagaagacacgtgagcgacctcgtcgaccggccactgcgcgactgaccatggccgatcgggcggaccagagccgacttcatcagaagcagatgcgccgcgttgatcacgagaggagtcacggactcctccaccgtcctggctatggcctctcccggac

SEQ ID NO: 121242 - DNA, 468 bp, Zea mays
  Clone ID: MRT4577_4204C.1
ccaagcagctagctagcgggcacgcattaaggcaaacccctattggatggataggacggatggctcaaatggagatgctgtagcagatagccagtcaaagagactaaaggatggtagaaaggctcatagcattgcgtacagcacataacatgatatgtaccattctatgagttaaaccactgttaaaatcacttatatataaatacggccatctacttaatactggcatagatctagtaaaacatcatctttaccatgagtttgtgcagccacatggctcaactaactttgcatgttatgcttgtttgtccattgcgacgagatggattatactggagcataacgatacataggctgatttctttctgaaaaatgtacagcatggtcatgctcttgcatgcttcaggaactgcttgatatctgagctggtgaccttctgcttgttcacgggcatgatcttaccgatgg

SEQ ID NO: 121243 - DNA, 311 bp, Zea mays
  Clone ID: MRT4577_42050C.1
cggaccgtggggtcgtcatctaggtctaggcttcctcattcgaccgatctagtactactactactactccatcgattgacatgaatagttctcgatcatgccacttattaagtttattagctagcttgctcatcccttaattagctgccgacttttttagctagctatagatttcagtagctaatatactagcttgttggttctgattagagctgcaatatttcatgagtcgtcgtcgacgacgtaggtattacgtataggtacgtgatgctttgcgtctgcaatatttttgcatggcaatgcattactgc

SEQ ID NO: 121244 - DNA, 316 bp, Zea mays
  Clone ID: MRT4577_42051C.1
gccacacaaaacctcctttcaggggttgtctaaataggtgaacaagaaacaggcggggggggtgcttatgatccttaggagcattaatcatctgctgcaggatactattaggcttgtgacacttgaacttacagctgcgataaagcatctaataaactgtctgaggctacttgatagaccgctggttcatcaaacacatcatgaggagcgtaaagctgtgctcaaccgtcgcacaatgtataaaagtacacaggtacaagcatgcttaaatggtatcctccctcactagatgatgtttgacatgtcagactcacct

SEQ ID NO: 121245 - DNA, 2330 bp, Zea mays
  Clone ID: MRT4577_42052C.1
gccggccgggctgggtcgcacccctccatccttcactcctcgctggtccagccattaatgccaccacctgctatacatcactaccttcctcttccctcccgcagtctccgacctctctctttctttttctctctccctcgctttttctgctgtctatccccgcgccgcgcgaggttgctgccttggccttgctggttctttgcttgtgggatgagtggaaggaaggccggtcctcgctgcagaaagagggagaagacttcatctgcacgtgctgctgatgtgcattagaggatccgtgctgataatatacagctgacacccacaagatcgactggataagttcgagcctgacggcatcatgggttccggcgatttgagctcggagatggagaggacggttcttggcctgacgctgtgggtctggattgccatcggcgtggtcgcgcttctcgtggcaatcctgctgatgatctgcatttgggtggcgtcccgcctgaggaccaagagaaccatggacagcctgaggcagacgcagatccccatctactccaaggagatccccatcgaccgggtcggcgggcgcagcctggcacagacaatgcatgagcgcgagcagccgagcttgccgccgccggacaagtacgcgaaccgggagccggccggggcggctgtggggcacctggcactcagcaagtcctcggatcatgacaacatgagccaggggagctcggtttgcaatgctgaccgtgctggcactggcagcatgcactccggtgaggatgggagctcaggacctcggaggaaacccaactctcctgcggcgttcgtgtcagcttcgcccttggttggccttccggagttctcgcatcttggttggggtcactggtttactcagcgtgaccttgaacttgctaccaaccgcttctctaaggagaatgtgctcggggagggtggttatggagttgtgtaccgtggacgtctggtgaatggaactgaagtcgcaataaaaaagatctttaacaacatggggcaggcagaaaaagaattcagagtggaagttgaggctattggccatgtccgacataagaatttggttcggctgttgggatattgtgttgagggcgtaaacaggatgctagtatatgagttcgtgaacaatggtaatttagagcagtggcttcatggagctatgcatcagcgtggtgtttttagctgggaaaatcgcatgaaggttgtaacaggcactgcaaaagcgcttgcttaccttcatgaagctattgagccaaaagttgtacatcgagatataaaatcaagcaacatattgattgatgatgaatttaatggcaaagtatctgactttggattggctaaacttttgggatcagacaaaagccacattactactagagtgatgggaacatttggatatgttgcacctgaatatgctaatactggaatgttaaatgaaaagagtgacgtttacagttttggcgttctcttgttagaaactgtgacaggaaggaatcctgttgactacagccgatcttccaatgaggtcaatcttgttgaatggcttaaaacaatggtggccaatcggagggcagaggaagtggctgatccaagcttagaggctagacccagtatccgggctctcaagcgggctcttttggtggcactgaggtgtgttgatcctgactctgaaaagagacctaagatgggccaggttgttaggatgcttgagtcagaagaagtaccataccgggaggatcggagaaatcgtagaagtcgcactggaagcatggatattgagtccattgcagagggttccaactctgcggagtttggaaagaaggtagaaaggactggaagctctatatctgacagatctcaaccatgaggcctggaaatctaagctatatcaggaactgtctcagaaacgatgttaatcaccaaggtgattgctgtcctgataggggatgctggtaggtgacagaggcaaggcaggcccaggtattactgcctaagtattaggctttagttttcaggtgcagtagaagcattcttggatgaggaacctcctggtctcctcttatttgtataggtatatgttggtgcctgaggaattcctcttggtttgggtgtttaacatttgttcggttcttttatttcttgcattgttgccttcttaaatcagtttcacttctccctgatgaaatgctgaacatgaggttgtggacttgtggtcttagcgatacagaaaatcaatgtttttcactaggtgtgtgcccgtgcgttgcgacggaaccgtataataacacgataatttatgt

SEQ ID NO: 121246 - DNA, 796 bp, Zea mays
  Clone ID: MRT4577_42053C.1
attgggacctcgagccggccgggtctttctttttctctctccctcgctttttctgctgtctatccccgcgccgcgcgaggttgctgccttggccttgctggtactatctctgtcctgattcagagtttctagctgggactggggggaagtgcacgacgattcggtctctcagctccgcgggcttcttttttcctgtttcaggttctttgcttgtgggatgagtggaaggagggccggtcctcgctgcagaaagaggttcatgctttaaactgtcctctcgttttattccatcgagcgtcggtatcctgatgggattggggtcacgagaggacttggggaccttttcccctttctcctggctatagaattcagcatcctgtatgcatcgattaaagaagagggagcgcaatcttggccacatctaatctccctggctgtggcgcttgtaaggagcatagagcgttcgtagtttgtcttgatctcttgatttgcaggagcggcgaagtctccatttttttatccactgatttttagcctcgaacatgacgttctaactgcttggctctcgcgttctgcagggagaagacttcatctgcacgtgctgctgatgtgcattagaggatccgtgctgataatatacagctgacacccacaagatcgactggacaagttcgagcctgacggcaccatgggtttccggcgatttgagccccgagatggaaaggaacggtcttggcctgacgctgtgggtctggattgccatcggcgtggtcgcgcttctcgtggccatcctgct

SEQ ID NO: 121247 - DNA, 1111 bp, Zea mays
  Clone ID: MRT4577_42054C.1
cagaaaaagaattcagagtggaagttgaggctattggccatgtccgacataagaatttggttcggctgttgggatattgtgttgagggcgtaaacaggatgctagtatatgagttcgtgaacaatggtaatttagagcagtggcttcatgaagctattgagccaaaagttgtacatcgagatataaaatcaagcaacatattgattgatgatgaatttaatggcaaagtatctgactttggattggctaaacttttgggatcagacaaaagccacattactactagagtgatgggaacatttggatatgttgcacctgaatatgctaatactggaatgttaaatgaaaagagtgacgtttacagttttggcgttctcttgttagaaactgtgacaggaaggaatcctgttgactacagccgatcttccaatgaggtcaatcttgttgaatggcttaaaacaatggtggccaatcggagggcagaggaagtggctgatccaagcttagaggctagacccagtatccgggctctcaagcgggctcttttggtggcactgaggtgtgttgatcctgactctgaaaagagacctaagatgggccaggttgttaggatgcttgagtcagaagaagtaccataccgggaggatcggagaaatcgtagaagtcgcactggaagcatggatattgagtccattgcagagggttccaactctgcggagtttggaaagaaggtagaaaggactggaagctctatatctgacagatctcaaccatgaggcctggaaatctaagctatatcaggaactgtctcagaaacgatgttaatcaccaaggtgattgctgtcctgataggggatgctggtaggtgacagaggcaaggcaggcccaggtattactgcctaagtattaggctttagttttcaggtgcagtagaagcattcttggatgaggaacctcctggtctcctcttatttgtataggtatatgttggtgcctgaggaattcctcttggtttgggtgtttaacatttgttcggttcttttatttcttgcattgttgccttcttaaatcagtttaaaaaaaaaaaaggcggccgccgaataaaaagctc

SEQ ID NO: 121248 - DNA, 321 bp, Zea mays
  Clone ID: MRT4577_42055C.1
attgtatcgtggctatatagatgaaaggagaaggcattcagaagagggacgccacagcgtacatgcatgcatggtttcagatggccacttgggcaggccatgaagattaaagaaggaaatgacaatgcagtatatatatatccatcgaggcttcatctagaggccagcaggttcttgaaccactgcaccgagctcttggggtatctcttaaggttgtccttgtagtcgacgaagtagagcccgaacctggaggagtagccggccgtccactcccagttgtccagcagcgaccaggcgaagtagccacgcacgtcgcaggcg

SEQ ID NO: 121249 - DNA, 1940 bp, Zea mays
  Clone ID: MRT4577_42056C.1
cggagggtcactgtcatcggcccaaattattttccacggcgatgacgagtgcatcgctcgtccgttccttcctctctcctccccctcctccccccgctcccccccgactcccccttggcgcctggggcgcatggagcccaagctggtccagcaagaatacaagcagctgtagaccacgaaactctgcttcgatagcaggagcagcagagagagagacgcacgccggctatcagttcagttcttccgggcatctctcaactcaaggaggaggagagagagacgacttggctcttcttcctctccgtcacatgccggcacgtgctccaggaacaagtgtcgtccaccagatccaggctcggcatgttcgtgatcgaggacaagggcggcgccatcgcgctgatgctggcgtcgctcctgttcctgggctcgaggccggccgtgctcaccctgctggagcgccggggccgcctgccgcagcacacgtacctggactactccatcaccaacctcctcgcggccgtgctcatcgcgctcaccttcggccagctcggggacagcaggcgcggcatgcccaacttcttcacgcagctcggccaggacaactggccctctgtgctgttcgccatggccgggggcgtcgtgctcagcgtcggcaacctctccacccagtacgcttgggcctatgtgggcctctccgtcactgaggtcatcagctccagcatggtggtggtcataggcaccacgctgaactacttcctggacaaccgcatcaacagggcagagattctgttccctggtgtggcgtgcttcctcgtcgccgtcatccttggctccgctgtccattcctccaatgcagctgacaatgagcagaaactcggtgcctccacgaatgcctacaaactcgggacaagtggaactgtggaaccaagcaaacaagccgtagacagagatgctcccaaagacttggaggagagtggagcctctggaatccggcaacctgacaaagctgaggcaggcactgcagagtacctcattgagcttgaagaacggcgatcaattaaggtattcggttcaaacaccttcatcgggctggggatcgtcttcttcgcgggcgtgtgcttctcgctcttctccccggcgttcaacctggccactaacgaccagtggcacacgctcagggacggcgtgccgcacctggtggggtacaccgccttcttctacttctccatctcctgcttcgtcgtcggcgtcggcctcaacgtcctgttcctctaccgccccatggccggcgtgccccgctcctccctcggggcctacctcagggactgggacggccgccagtgggcgctcctcgccggcctgctctgcggcttcggcaacggcttccagttcatgggcggccaggccgcagggtacgccgccgctgacgctgtccaggccctgccgctcgtcagcaccttctggggcgtactgctcttcggggagtaccgcaagtcgtcgcggaagacctacgtcctgctcggcttcatgctcttcatgttcgtcgccgctgtcgccgtgctcatggcttcgtcaggtcacaggagcacagagtgaattgcaagtcttgttcgtcctctgcttgttgcaagcccttccacttgcgattgatccacggaaagatccatcgtcttcgtgaagcaggggaaatccattccttccagccattaatgagatcttcagaacaatggaatggagatgtacaaaaaaatggttgttgtatgattgatcaaatgtatagaactatttatattctttccaagacaattggctgataggataggaactgttccaggggtggaaaaaatctctatctttatgaacagggtaaaagcaatgttcagaaaaaaagtagtttgtgcctaaaaaaaaaaaataaaaagcggcccagtactcccgct

SEQ ID NO: 121250 - DNA, 2120 bp, Zea mays
  unsure (1)..(2120): unsure at all n locations
  Clone ID: MRT4577_42057C.1
aattcggcacgaggttttccacggcgatgacgagttgtgcatcgctcgtccgttccttcctctctcctcctcctcctcctttccctgctccctccaaactccaactaaacgccattggtgaatggatctcaaggaggtcaaactgatgcagagcaagttggacttttcagtcagtggcctggccttgcagatggctcccgcgaccgcgaggctggccgacgaggcaggggcttgttagtagtccagtcgctgctataaaatagagcggccatgaaccgtgttctcgcgtgtgcgtcttctctgctcacatgccgcgaggtgctccaggaacaagtgtcgtccaccagatccaggctcggcatgttcgtgatcgaggacaagggcggcgccatcgcgctgatgctggcgtcgctcctgttcctgggcacctggccggccgtgctcaccctgctggagcgccggggccggctgccgcagcacacgtacctggactactccatcaccaacctcctcgcggccgtgctcatcgcgctcaccttcggccagctcggggacagcaggcgcggcatgcccaacttcttcacgcagctcggccaggacaactggccctccgtgctgttcgccatggcgggaggcgtcgtgctcagcgtcggcaacctctccacccagtacgcttgggcctatgtgggcctctccgtcactgaggtcatcagctccagcatggtggtggtcataggcaccacgctgaactacttcctggacaaccgcatcaacagggcagagattctgttccctggtgtggcgtgcttcctcgtcgccgtcatccttggctccgctgtccattcctccaatgcagctgacaatgagcagaaactcggtgcctccacgaatgcctacaaactcgggacacgtggaaatgtggaaccaagcaaacaagctgtagacagaggtagtataacatgtgaaaactgctgctgatttgttgcagatttttttcccagtaacttatctagtttcaggtgttcattgtctatctgaagaagaaagaacaaatctaatttcagatgctcccaaagacttggaggagagtggagcctctggaatccggcaacctgacaaagctgaggcaggcactgcagagtacctcattgagcttgaagaacggcgatcaattaaggtattcggttcaaacaccttcatcgggctggggatcgtcttcttcgcgggcgtgtgcttctcgctcttctccccggcgttcaacctggccaccaacgaccagtggcacacgctcagggacggcgtgccgcacctggtggtgtacaccnnnnnnnnnnnnnnnnnnnnnnnnnncttcgtcgtcggcgtcggactcaacgtcctgttcctctaccgccccatnnnnnnnnnnnnnnnnnnnnnnntcggngcctacctcagggactgggacggccgccagtgggcgctcctcgccggcctgctctgcggcttcggcaacggcttccagttcatgggcggccaggcagcagggtacgccgccgctgacgctgtccaggccctgccgctcgtcagcaccttctggggcgtactgctcttcggggagtaccgcaagtcgtcgcggaagacctacgtcctgctcggcttcatgctcttcatgttcgtcgccgctgtcgccgtgctcatggcttcgtcaggtcacaggagcacagagtgaattgcaagtcgtgttcgtcctctgcttgcaagcccttcctcttgcgattgatccacggaaagatccatcgtcttcgtgaagcaggggaaatccattccttccagccattaatgagatcttcagaacaatggaatggagatgtacaaaaaaaatggttgttgtatgattgatcaaatgtatagaactatttatattctttccaagacaattggctgataggataggaactgttccaggggtggaaaaaatctctatctttatgaacagggtaaaagcaatgttcagaaaaaagtagtttgtgcctagtatgacagattcagaatggtatcagtactcccgctgttttggaatgttcaagagaaaactagtggatgctccaaatcctaaaaaaaaaaaaaaaaaagcggcc

SEQ ID NO: 121251 - DNA, 422 bp, Zea mays
  Clone ID: MRT4577_42058C.1
ccgggggggcaaaacaagggccagcaccccttaacccaaaaaaacatggtttaatttttgggggcccccgaaaaccttcagcaaaaacagaaaacttgcccggaaaaatccggggaaacccggaaccggacgaacccccgaaccgggccaaaggccttgaaaacaagaaaaaacccaaccctacggaagccgggcccatttaccccaacaagggggaaccccatgaccctccccggggggccgttcaaaggggcaaatcccaccaccctggggggccgtaacaagggggacccgagccgggacccaagctgggggaaaccagggccaaagcggttcccgggggaaaatggtaacccgcccaaattcccacacaaaaaacaacccggaagaaaaaagggaaaacccggggggccctaaggagg

SEQ ID NO: 121252 - DNA, 296 bp, Zea mays
  Clone ID: MRT4577_42059C.1
atttattttttgttttttcttttttttatgttttttggtatttggttgggtcttgttcaatacgtgccatgattctacggtaagcccctaaaaagaagcccaggattttcgtgataccagggctctgagagatccaactggcaagggataacacagggggccaaaaaaacactgggccggccccagcggcaaaaacacctgcaaaaacatgacaatatggataagggatgcccaatgagctcaaaacggtgaaaacatctacctgcaccagtgtcggaaaaaaatgcatgcatgtt

SEQ ID NO: 121253 - DNA, 206 bp, Zea mays
  Clone ID: MRT4577_4205C.1
aagatttgaaaccagacttggttcttctgggcccgtgggccaatatattttgggtggtgaaaatttacaagggagggtttaaatcacttttgatggacatgtgatgaatgggggggcttggcatctggagtctcgaggctattattccttatgccaagcaacccaaggaatagttggccacatggggccctatttcattaccggga

SEQ ID NO: 121254 - DNA, 219 bp, Zea mays
  Clone ID: MRT4577_42060C.1
tcttatcgtcaaacgaccgcaccaaccaatccggtttgccggcgatccggctcgtctcgtcgcgtctccggcgccggcagacacgggttacgcggtttcgtgatcggtgggcaggatgatgatgctgttcgattgttcgtgtttccgtaccctgttgttttttatttttttgtgtgttttgctctttttttttatatctttttattttttcttattttt

SEQ ID NO: 121255 - DNA, 813 bp, Zea mays
  unsure (1)..(813): unsure at all n locations
  Clone ID: MRT4577_42061C.1
cattgggtacctcgaagccggccgggcacgcaggtagtcttcaccgcgcggcggcctcatacccgcaggcagttttcaccgcgcggtggcctcatccccgccggcgagcctccactctcctccgccggtaagcctccaccgccccatcgatcgctcctcacccgccggtggcctccccctcggcggacatttcttggtgcatttggccccccccccctccaccaccagcgaaatttacccatcccgaatcgccccccaaaatcggtcctacaccgcaccagatcacatctcatgattccagtgagaattcgaaaaggaggaagcaatgacggaggtggcgctcctccggggcccgaccaacctcgcttccaccgtaagtcgcgcctccgcctcctccccctcctcaacgctgtgctatttagccaatgctgacagcgacgtgctcccaagaagcggcagccccgagcgcactgcgggatctgctaggagccggcgactccttgaactgcatgggcaagaggccgtggaggaggaagaggagcggtggtcgttcttggcactgctcttcgagctgttgcagaagtcgctgctcgggtgcaggacggtgggcggcggcggtgaaggcgaacacggcggcggcgngatggagattgggctgcccacggacgtgcaacatgtcgcgcacgtcacgtttgacaggttccatggattcctggggctgcccgttgaattcaagcccgaagtgcccctccgtgctcccagcgtgaggattttcgaaccagtgcnagatggggcacaggttggctcctgtca

SEQ ID NO: 121256 - DNA, 802 bp, Zea mays
  Clone ID: MRT4577_42062C.1
catccccgccggcgggcctccactcccctccgccggttagcctccaccgccccatcgatcgctcctcacccgtcggtggcctccccctcggcggacatttctgggtgcatttggcccccctccaccaccagcgaaatttacccatcccgaatcgccccccaaaatcggtcctacaccgcaccagatcacatctcatgattccagtgagaattcgaaaaggaggaagcaatgacggaggtggcgctcctccggggcccgaccaacctcgcttccaccgtaagccgcgcctccgtctcctccccctcctcaacgctgtgctatttagccaatgccgacagcgacgtgctcctaagaagcggtagccccgagcgcactgcgggatctgctaggagtcggcgactccttgaacagcgcgggcaagaggccgtggaggaggaagacgagcggtggtcgttcttggcgctgctcttcgagctgttgcagaagtcgctgctcgggtgcaggacggtgggcggcgacggtgaaggcgaacacggcggcggcgggatggagatcgggctgcccacggacgtgcaacatgtcgcgcacgtcacgttcgataggttccatggattcctggggctgcccgttgaattcaagcccgaagtgcccctccgtgctcccagcgtgaggtatgtctcttagtgtccatcgtcaattcagattatttttaagttcacgcttccagaaatctgactttatttttgcagaatttacttctggcataacatggaccttttttagctcccatttgaacttttac

SEQ ID NO: 121257 - DNA, 1231 bp, Zea mays
  Clone ID: MRT4577_42063C.1
attgggaccctcgaagccggccgggaccctatacacttcaggcaggcagtcttcaccgcgcggcggcctcatacccgcaggcagttttcaccgcgcggcggcctcatccccgccgacgagcctccactcccctccgccggtaagcctccaccgccccatcgatcgctcctcacctgccggtggcctccccctcggcggacatttcttggtgcatttggcccccctccaccaccagtgaaatttacccatcccgaatcgccccccaaaatcggtcctacaccgcaccagatcacatctcatgattccagtgagaattcgaaaaggaggaagcaatgacggaggtggcgctcctccggggcccgaccaacctcgcttccaccgtaagtcgcgcctccgcctcctccccctcctcaacgctgtgctatttagccaatgccgacagcgacgtgctcccaagaagcggcagccccgagcgcactgtggggtctgctaggagccggcgactccttgaacagcgcggacaagaggccgtggaggaggaagaggagcggtggtcgttcttggcgctactcttcgagctgttgcagaagtcgctgctcgggtgcaggacggtgggcggcggcgaaggcgaacacggcggctgcgggatggagattgggttgcccacggacgtgcagcacgtggcgcacgtcacgttcgataggttccacggattcctaggcctgcccgttgaattcgagcccgaagtgccccgccgtgctcccagtgccaggtatgtctcttctccctcatcaaattgctatcgagttcacgcttccagaaaatctggctttcttttcagagtttacttatgcaataacatggatggtgtttgctccaatttaaattttcgcttggatggtgtttgcacctttttttgctcccttcttataattccaaatatatgtggtgctttggctccaacagttgcagatagtaagtattagattctgttctgttagaaagttgtaaaatgtaaatgatgtttgcttgacacgggaggtggttaatagttgcattttgatggtatggttgtttcagtactatagttttgatctttatccttccccatatttaaactccactatgtgaacagtgcaaaacaatatttttggtgaccatatgggtgaactaactgctggacagtcttacaacctccatgctgctttgatctgaaataaactgttgaaaa

SEQ ID NO: 121258 - DNA, 244 bp, Zea mays
  Clone ID: MRT4577_42064C.1
aactggatgtcaaacatagtgtggtgtttaaactgactagtgagacagggcaggacattctagcttagctcagtgccctcctacaaatcacctacagaaaggctctgatccataggatcaagcactttctgactggtggggcccacaacttttatgttaagtctgatgaagcgttgattacatgccttacctttttaaaggagtttatgcacgccattgaatccaaatcagttggtgtacaaaa

SEQ ID NO: 121259 - DNA, 879 bp, Zea mays
  Clone ID: MRT4577_42065C.1
cctcgaggcggcgggagtcttcaccgcgcggcggcctcatacccgcaggcagttttcaccgcgcggtggcctcatccccgccggcgagcctccactctcctccgccggtaagcctccaccgccccatcgatcgctcctcacccgccggtggcctccccctcggcggacatttcttggtgcatttggccccccccccctccaccaccagcgaaatttacccatcccgaatcgccccccaaaatcggtcctacaccgcaccagatcacatctcatgattccagtgagaattcgaaaaggaggaagcaatgacggaggtggcgctcctccggggcccgaccaacctcgcttccaccaagcggcagccccgagcgcactgcgggatctgctaggagccggcgactccttgaacagcatgggcaagaggccgtggaggaggaagaggagcggtggtcgttcttggcactgctcttcgagctgttgcagaagtcgctgctcgggtgcaggacggtgggcggcggcggtgaaggcgaacacggcggcggcgggatggagattgggctgcccacggacgtgcaacatgtcgcgcacgtcacgtttgacaggttccatggattcctggggctgcccgttgaattcaagcccgaagtgcccctccgtgctcccagcgtgaggtatgactcttagtgtccatcgtcaatttagattaattttaagttcacgcttccagaaatctgactttatttttgcagaatttacttatgcaataacatgaacttttttagctccaatttgaactttaacttgagggtgtttgcagttttcttcttttaattccaagtatgtctggtgctttggtaattgatatgaacagttgataac

SEQ ID NO: 121260 - DNA, 411 bp, Zea mays
  Clone ID: MRT4577_42066C.1
aaaaacaggccgagtttttttaataataaaaatacctaatttttatatatacccacaagtggacaagtgggagggagagggaacaaaagccttggaaatcgatgggtcggtcggtcaatcgcgcgtgactggctaacataggactcatcccatactacaattattactactaaattaacacatgcatatgcctgcatctaatctgatttttgctttcacacaccatttgcatgcacttgcagcatggaccattggatgcatactgatactggcccattaatcctatatacacacatgtttgcattttttggataatcgaacggtcgtcctatatgttcaattgacctcctaaaattttaagtgtttcaacctgtcgggggccccctaaccgggggggtaacggtaggcggg

SEQ ID NO: 121261 - DNA, 134 bp, Zea mays
  Clone ID: MRT4577_42067C.1
ctttatcggagtgccatgggtctgagcctaggctcttatatcacttaagaatactatctgtagcacgccagtgtggtattatgagactagatcagacacatacagcatcaagtttgtagattccattcgtggag

SEQ ID NO: 121262 - DNA, 305 bp, Zea mays
  Clone ID: MRT4577_42068C.1
ccgggcccgaaattccggagtggaccacaccatcccggcatgcgaaggcaaatcttgagtatttggcgctctgcgactcataccaagtggctctgcccagggcggaggagaaagacgcgaactggaccccgcctgccagcagatacactagagcttccggtacctattaacgccggacaaggccaaggacgccgactcacctggacacctagaggcaccgacggctgatcctgccggaggcagccgggacaccgctgcagatgataactctgaggatcagcagcagaacacctatctcgagactg

SEQ ID NO: 121263 - DNA, 1455 bp, Zea mays
  Clone ID: MRT4577_42069C.1
gtttcctctgttcccccattccgtcgtgtcaccaccgccgccgccggagtgtgtcatcgccgattcgcctggtatggcagcaccgcccgggggagcggggatagtgtggcagacgccggccaacccgcccgagtcgcacgactacatcatccgcaacggtcggcgctacgtgaggccttactacttcgagttcatctcccatgtgaagaacagatgggctggaaagaccatcgttgacctcttcactgatgagttcaaagggcgttcccgcgattactatgttcatgcagtgaagtgtgggaggcttcaggttgatgggcaaatggttcacacagactatattgtgaaatcatcacaaaagataagccacttcttgcataggcacgagccacctgtcttggcgggtgatatttcaatacttaagaatgaagttgatgtcgtaactatttgcaaaccagcttctgttccagttcatccatgtggtcaataccgcaagaatactgtagttgggattctgcaggcagagcatgggttaacacccctatttccggtgcatcggttagatcgtttggtttcaggcctccttatatttgcaaaaaatgccgacagagctgaatgtttcaggcaacagattgaagctggtctgctgcaaaaagaatatgtggccaaggttgttggggtttttcctgatggtgagcaaaccgtcgatgccaatgtaaatttcaacgcacgggaaggaaggagtaccgtggagattagtggtggtgctggtgaagaaccaaatggaaaacaagcactcactaggtttcaaaggatttgcacggatgggactcacagtattgtcttgtgcaaacctgtgactggtcgaactcaccagataagggtgcatctaaagcaagctggttatccaatagctaatgatgagctgtacctatcggggaacttttgtccacgatcaacaaaaggaacaaatgccagtaaaaaaattgcaccatcagatccagacagtagtgctgctgatcatggcagcaaagatgcaggaacggatgtggagtttgatatcgaccccatgtgcacaaactgtccaaatcttgctccagtaggttatgatagagatgaggaaggactatggttgcattgtgtgcggtacactggtcctgattggagctacgaatgtccttatcctgattgggcgttccttggtagcgtgtcaacaaagaagatgaagtcatgatgtagttcatggtgattggtgaatagtaagcccataaaaaaactgaacaatcaaatagtattgttttggcgttacctatgactgggcttccgaggttttcattcaaatcaaacacattagatccggttttcctcggcttctcattcagccaattcacggttcaaaatccactccttaaaattcaacatacattatcgcatccagcctttttgattggttcc

SEQ ID NO: 121264 - DNA, 341 bp, Zea mays
  Clone ID: MRT4577_4206C.1
ttcactttgttcgagattcgtgattttgagtatagtggtgaatcacaagtttgtagaaagcaggagatggagaagttactgctagagcaggaagttatgaggacctcgcttttgcaatggtgctatgccagctacagtgaggttttcagtttctttttgcacttttgttcttatcacatcttattatttgtgctttttttttatacccttcttttattcttatttcttttttattctcttctttttatatttttttttttttccttcattctctttcttcgtgggttttatgttttattttttttattttctttcctctctttactcctcttcttttcttt

SEQ ID NO: 121265 - DNA, 349 bp, Zea mays
  Clone ID: MRT4577_42070C.1
aaacagtgaatggtagctttttttagtttacaaccggatagccagcaacccgtgcacacaggcgtgaccaggcaggaccgagcgaccgcaagtctggcccacttgcgagcacccactcccaaaaggggacataaacaggtcagtatgatgctacgctgaaggcagaggctgacttatccagtaccatactggagcgctcgaacgaactcttgtttgcggacttaaccgcggagcagaatagggagggaaaaaaacaggaggaagaataaagcacaggcttgaccaccgtattttagaggcgcatcccggtgaacacacaaggcgatagcctactgtcagccggagagga

SEQ ID NO: 121266 - DNA, 211 bp, Zea mays
  Clone ID: MRT4577_42071C.1
acatcgcactgccaggaaaaatctctagcaagctctcatgaatcaacagcacggacagctacgtcacataacttaatggaaaggatgggaaaaggaccatactgtacctcacaccatacctattcgtcattctgcggcatccattaccgactttgagcctgagcgggcaacatcgcaacgaccgtcgggggagagagattgcttgctttac

SEQ ID NO: 121267 - DNA, 668 bp, Zea mays
  Clone ID: MRT4577_42072C.1
gcggagagtttcctctgttcccccattccgtcgtgtcaccaccgccgccgccggagtgtgtcatcgccgattcgcctggtatggcagcaccgcccgggggagcggggatagtgtggcagacgccggccaacccgcccgagtcgcacgactacatcatccgcaacggtcggcgctacgtgaggccttactacttcgagttcatctcccatgtgaagaacagatgggctggaaagaccatcgttgacctcttcactgatgagttcaaagggcgttcccgcgattactattgaagtgtgggaggcttcaggttgatgggcaaatggttcacacagactatattgtgaaatcatcacaaaagataagccacttcttgcatagatacattatcctttacatgcttatatcataaaaatggcaagtgaatcaacaggcacgagccacctgtcttggcgggtgatatttcaatacttaagaatgaagttgatgtcgtaactatttgcaaaccagcttctgttccagttcatccatgtggtcaataccgcaagaatactgtagttgggattctgcaggcagaacatgggttaacacccctatttcttttgcagcggtgcatcggttagatcgtttggttcaggcctccttatatttgcaaaaatgccgacagagct

SEQ ID NO: 121268 - DNA, 2199 bp, Zea mays
  Clone ID: MRT4577_42073C.1
aattcggcacgaggcacgctcggcttggctgaagcggagagtttcctctgttcccccattccgtcgtgtcaccaccgccgccgccggagtgtgtcatcgccgattcgcctggtatggcagcaccgcccgggggagcggggatagtgtggcagacgccggccaacccgcccgagtcgcacgactacatcatccgcaacggtcggcgctacgtgaggccttactacttcgagttcatctcccatgtgaagaacagatgggctggaaagaccatcgttgacctcttcactgatgagttcaaagggcgttcccgcgattactatgttcatgcagtgaagtgtgggaggcttcaggttgatgggcaaatggttcacacagactatattgtgaaatcatcacaaaagataagccacttcttgcataggtcagttgctttgatcaattttgaaattattacccccactaaacaagtgttcgataatttcacttcataagttcaacatagattactccatacaaacaaatgttccaaagattaggagcagcataaatcttcacaattttctgcagatacattatcctttacatgcttatatcataaaaatggcaagtgaatcaacaggtaagtaacagatgttttggttaatgtctcaatttgctctttctattggaattatttttagaatatcaataaaatattagttatactgatgaactgttgttgattccttgacttctaagttaatgatgtcatttagtttaactttgtgtgccattttaccttcatgtagttctctagttaaccagatacttcctgtggcatgcagacaggaacctagaccctctgtgttctgacttaacaaaaataattcacatgtctttttctcatttacaaatttttagttcaagtctttttctaaaggtgtttttttcttccaggcacgagccacctgtcttggcgggtgatatttcaatacttaagaatgaagttgatgtcgtaactatttgcaaaccagcttctgttccagttcatccatgtggtcaataccgcaagaatactgtagttgggattctgcaggcagagcatgggttaacacccctatttcttttgcagcggtgcatcggttagatcgtttggtttcaggcctccttatatttgcaaaaaatgccgacagagctgaatgtttcaggcaacagattgaagctggtctgctgcaaaaagaatatgtggccaaggttgttggggtttttcctgatggtgagcaaaccgtcgatgccaatgtaaatttcaacgcacgggaaggaaggagtaccgtggagattagtggtggtgctggtgaagaaccaaatggaaaacaagcactcactaggtttcaaaggatttgcacggatgggactcacagtattgtcttgtgcaaacctgtgactggtcgaactcaccagataagggtgcatctaaagcaagctggttatccaatagctaatgatgagctgtacctatcggggaacttttgtccacgatcaacaaaaggaacaaatgccagtaaaaaaattgcaccatcagatccagacagtagtgctgctgatcatggcagcaaagatgcaggaacggatgtggagtttgatatcgaccccatgtgcacaaactgtccaaatcttgctccagtaggttatgatagagatgaggaaggactatggttgcattgtgtgcggtacactggtcctgattggagctacgaatgtccttatcctgattgggcgttccttggtagcgtgtcaacaaagaagatgaagtcatgatgtagttcatggtgattggtgaatagtaagcccataaaaaaactgaacaatcaaatagtattgttttggggttacctatgactgggcttccgaggttttcattcaaatcaaacacattagatccggttttcctcggcttctcattcagccaattcacggttcaaaatccactccttaaaattcaacataaaaaaaaaaaaaaaaaaaaaaaaaaaaaaaaaaaaaaaaaaaaaaaaaaaaaaaaaaaaaaaaaaaaaaaacctgaacatctctgaggaacattttatggatgggtgttgcttccagcctttatttggttcctttattttaactaaggggcggggggggggcgcttttgtatcaaactttattgtctgcgtaacccctgatttttcccctttt

SEQ ID NO: 121269 - DNA, 333 bp, Zea mays
  Clone ID: MRT4577_42074C.1
caagaataaggaaccttacttaaaaggaattgagtccccaagatgttcttaaacacaacacccgtttttgaccttaaaaaaccctgtcccccaccatggaatgcacgtcggccgggggcggggcatttccccaaaaaaaaaaagagcaacgccacacacccccgcccacatacggttcgttcaatccacccaaaaatcaacaccgaaaaacgatcgacggcccccaatctggacatacacgtgtacaggttttatttttttttccacgaatttcctcccctccctccttttttcctgggggttttttacttgacgttaaggggcaggggtttg

SEQ ID NO: 121270 - DNA, 176 bp, Zea mays
  Clone ID: MRT4577_42075C.1
ggccaagccttgttttctctgtgtggttcagctactttccatttggtattacacagtcaaatttacatttatctattcaaattgcattttattaaagattttcatgcacagtagattcaagttgctgtcgtgcactatctcctgtgcttttttgcattttgctgcctttaaaagga

SEQ ID NO: 121271 - DNA, 265 bp, Zea mays
  Clone ID: MRT4577_42076C.1
gagcccattagatggcggccgccctttcctatttttggggggggttaaatattcagggcgtgtgagaaaaaaccataaacatctgtcaaaatcctcataacgcccaacacatctttcggcaagaaataccgaaacatgatcccactaccacgataaccagagcgattgagaaaacaaaacctcacccccggtcaaaccgacaggcttacacatgaaaaaaacagttcacacaccaatctaccacataacacagcagtctaacacc

SEQ ID NO: 121272 - DNA, 143 bp, Zea mays
  Clone ID: MRT4577_42077C.1
cgaacttccactgagaccgatcaagagtcaatgaagtttgcttgttctctttttcaaggcatggaaacattacagacgatatttcaccccgattgaagttattatggttgtatccgatgatctggtggcatatttgcaggtgt

SEQ ID NO: 121273 - DNA, 971 bp, Zea mays
  Clone ID: MRT4577_42078C.1
aattcggcacgaggctccaaccttccccttcctcccctactatccgctctccggtccccacccacgaccgccgtgatgcggccgcggccctcccgcttcctccagctactccttgtcgttgtgatcgcctgcgccgttccgggggtgagatgctccgaccggcggtttccgcacctcgaccgcgtccgcgagctccaacgccgggagggctcgtcatcggccgagcaggaggccgctgcgaggggacttctggcgcgcctcctaccgtcacactctaccagctttgagttcagagtcatctccacctccacggagctatgtggtgggaagacatgtttcgtcatcaacaactacccgttgtttgatggagaagggactccagaaatattgatacttggagcaagtggggtggaaatttctgctggctttcattggtacttgaaacactattgtgcagcacatatatcttgggataaaaccggtggtgcacaactatcaaccattccgcgtcctgggtcactacctcgtgttcctgatggtggtgtactgattcaaagacccattgactggagctactaccagaatgcagttacatccagctattcttttgcttggtgggattgggaccgttgggagaaggaattgactggatggctcttcaaggaataaatttgcctcttgctttcactgggcaagagtctatatggcagaggatttttcagaggtacaacattagtaaatcagatctggatgatttctttggtggaccagcctttcttgcatggtctcgaatggctaatatgcatggatggggtggacctctccctcagacttggcttgatgaccaactagttcttcaaaagaaaatcctttctaggatgtactcttttggcatgttcccagttcttccagccttctctggcaacatcccagctgcattaaagtcaaagttcccttcagctaaagtcacc

SEQ ID NO: 121274 - DNA, 283 bp, Zea mays
  Clone ID: MRT4577_42079C.1
tatccatttggcacatagacacaaggaagattacactagtaaccatctttccagttcattcatatacttagaaacagtaaatacctttcctttccacttttatgctgtgttctttgaacatcatttgtgcagtctctgccctcaatgaggaccaaataaagatgatttttgtgcttagcagtttaaggtatatggctgcatatgcaaaactctttcccaattcagtcgctacttttacttctgccctttctatccatcgtcttcattttgtgtgtacagtgct

SEQ ID NO: 121275 - DNA, 351 bp, Zea mays
  Clone ID: MRT4577_4207C.1
gccacgcttgcggacacattagacgacatatttgaccatccactcgagcaccaggccggggcaatgtcacgcgcgatggcgcgcggcatggtctccgcgaacggcggcacgatcacgggctagaataacgtgtcgatctacttcaccatcgactgcaccgacccaatcatggacatcatcatggtcgtcaacttgctggagaagctcatgcaggaccgcatcaaggtcgctggcagcctggctgactacctcagcatctctgtcaccatgtctagcgagacgaccaacgttaccgtaacctttgacagaccgtacttcaagagctacatgaagaacttgtccaagaagtac

SEQ ID NO: 121276 - DNA, 448 bp, Zea mays
  Clone ID: MRT4577_42080C.1
ggaacgggccaagaccaaccaaacattttacatttacatcggccaacgaacgaacccaaaaaaaaatataaagaacgggcggggggaaaaacacttggtcacccttacgggggccctagatctacccaaacaacagaaggggaaccccacattccatttcattcaacaaaaattcaacgacattttccccggggatcccacccccctggaacctgaattttttttttcccgggcctttaaacgccccccatttttggatctggaggaaaccggcccaaaacggcaccggaaaccggaaaaccctgcctaaggccccatgggggggcccggggggggaaaactctccccctgcccgaaagaaaacaacccccccgggttgcactggaccctgggcgccccccaggcccacaacaacgggggggactgcttcttttccctgggggggaac

SEQ ID NO: 121277 - DNA, 257 bp, Zea mays
  Clone ID: MRT4577_42081C.1
cgtcggcgagcatgaaggggcacgaagatggccaagagtagcgtcgagacctacatgatcttcatctttaggtgctgaagcaggtgcatcccgacctcagcatatcctccaggccatgtccatcatgaactactttatctacgacatctttgataatctggccagcgaggccgccaagctgccgcggtgcaactggaaacccaccatctcgtaccgggagatccagacctacctgcgcctaatcctctcccgagagc

SEQ ID NO: 121278 - DNA, 530 bp, Zea mays
  Clone ID: MRT4577_42082C.1
ggggaaaaaaccccacccaaaaaatggataattccaagaaacccccccccggggggggggccccctgggcgagccccccccaaagggaaccaaaaaaagggcccccccaaccagggggtgccgcaaggccgggtccaaggaaaaccgggggggaaaggaaaaaaaatgggggccccgaaaaaaggaaaaaaggttcccccaaccccctggggggaccaaagggaacccaagtgcccccgggtccccgggcccccccccccccaggggcgaatcccaacccccggggggccggtccaaggggaccccacccgggacccaagctgggggaaaacagggccaaaggcgggtcccgggggaaaatgggtccccctccacaattccccccaacaacccgcccggaacccaaaagggaaaaccccgggggccctaagggggggcccacccccccaaaaaggcgggggccccccccgccgcctttcccaggggaaaaccggggggcccccccggtttatagagaacccccccccccc

SEQ ID NO: 121279 - DNA, 166 bp, Zea mays
  Clone ID: MRT4577_42083C.1
accactaccgcctacagtctccagcccaccgcggcaccgctgaagacaccccaaaacctatcccaatcggccgtgcctccgtccgaggctccggctgccggcgacccctcagatccgagaggcccggagcacctgcaggcgcctcagtggcatataggccccagtg

SEQ ID NO: 121280 - DNA, 373 bp, Zea mays
  Clone ID: MRT4577_42084C.1
gcttctttcccacgcgtacgcgcgcacgcaaggggcaaatttgtaggccattcgggacggttcgagcgcgtactgcgttccattccaccctaccttctccttcgtgtccgatactggccttcaactgcactagctcactgtctcggaccttctaccctagcggctacgactgggcgatcactgattcactgccgcccgcgccaggttggccagaactagcgtgcgccgccgccaagcatcgaagcgaccatggtggcggactattgcatccacttctgcccggacttacatgaaacaccagctaagcacatggaggcttctgggcagcgctcttggtcttggccttgggcatgccaggccttcccggaccaga

SEQ ID NO: 121281 - DNA, 269 bp, Zea mays
  Clone ID: MRT4577_42085C.1
ttttttttttttttttttgtataaaacttgttctttttatcatctatggtacaccattttgtcatataaaacattactagatgcttaacgttgtttcatctagcttgctttgattctgtggctgacatcatcaattcttccaaataccacaaaataacattacatggtaaccatgcactggtgtcaaattatccaagtgacctagaagccctttagatgccggaatcatgcttgcagttcatatcctcagagcaacaatttaacctttt

SEQ ID NO: 121282 - DNA, 215 bp, Zea mays
  Clone ID: MRT4577_42086C.1
ggcatgaaaaaaagaaatgccgcctaactttggtgcatgctttgcattacacaatccaccgagagatgtggatttcgcggggcacgggttttgcagcgttttccagctgttcattactggccattccaggaaggccccaaatttgtttgggatgacaaatttttacgttctgttcaacctgacacgttttaaccatctggaaagttttcttcaca

SEQ ID NO: 121283 - DNA, 326 bp, Zea mays
  Clone ID: MRT4577_42087C.1
cggctcgagctggcgctcggctcgttcgctggctgctacacttgatttgaggctccaaccctccctttttacgttttagctactcactcatgactcaacactgcgcacatatctgaactatgcattgcattcttactacagcaccggggaagaaaaataagccatctccaacagctggtctaggtgtggcaatagcagtacatcatacacacctttatcaccactctattgccatgcctatataaacagaggccacccgctttgatcattccggcccgataaagatttcgagaccaaaaccttcttgagctctaccaaaaaaccac

SEQ ID NO: 121284 - DNA, 426 bp, Zea mays
  Clone ID: MRT4577_42088C.1
ttaccaaacacgcatggcggatcgcactagcttggactactaacaacaatgagtacggaagatgtaagaacattcttgctctacgtgacctgcccgtgagcgcaacacatgctgtcattattacacactgctctcttgctaataaagccatggttgcacagtttatacgatccgttactacaatgggctgcatacaactagatgtgtatgctatcatgcaacatcaagcgcttgcagcgagcgtcttactacaaccaattgactggtagcaccatcaatcctcgcaacatataacaatacaagcaattacaacttatcagcagctgcagtttctacaagagctgagccacctatccatgttgaaccatgccgcctacttgcatgagcagttgcacgcatcctacccacttgctctggccaacgtag

SEQ ID NO: 121285 - DNA, 156 bp, Zea mays
  Clone ID: MRT4577_42089C.1
cagtttctctctaagcagaattcttgccttcatgagggagagagagagagacggggaatggtctcacagaggtaagaattgtaacctgcaaaaagaaactagtggcgctgaatatcgtaaggcagttttatcatggggatacaagattcatcttta

SEQ ID NO: 121286 - DNA, 236 bp, Zea mays
  Clone ID: MRT4577_4208C.1
aagaaccttaagctcatcgatgttgatgttccagatgctgatggccatgctggaatcacatttctgccactgttatcgatgaccaggccatctgtcaccttcacagatgagggaactgatgagctgacaaagaggatacagaatgccgtgacagaggtggtggatgccaaggctggtgctgggtctgctaccctgtccatggcctatgccgctgccagattcgttgagtcttctct

SEQ ID NO: 121287 - DNA, 879 bp, Zea mays
  Clone ID: MRT4577_42090C.1
agccaagcgagggagcgagtctaggcccgccgatcggcccggccatgagcgtcaagcagccaccgtcctcgtcgacggcggcggccttctacgcgacgctggcgcgcggactcgacgacctggaccgggcgctggcggcgtcctctcctccctcgtcgtcgttcctgtcgctgcccacgctccgggccgcgctggcgctgctccgcgccgcgcacgcgggcctggcccgcctcgtcgcgtcgctccacctcccgggtggcgcggcctggctggacgagtacatggacgaggcgtccaggctgtgcgacgcgtgccgcgcgctgcggctcggcgccgctgccgtcgaggggtacgccggaagcgccgcccagctcgcctcgctcctcatgcagggggcctcgtcgagcccccacctctcgagacaggtggcgcgtgcgatcagcgtgtgcaggcgcgaggccatggcggtgaaggaggagaaccgcgcgctggtggagacgcgcgcggatgcgctagcgctgcgcctgagcgagggcgtccccgccgacgccaagctgggcggcttcaacggcttccgcggcgtgctctgcgccacccggatgctgacctcgttcctgctgacgctgctctcgtggggcgtgctccactactggcccgcccccaacgcgggcgccggggactgcgccgcctacttcggcgccgcgttcgcgacggcgctgtcccgggcgcagcagcgcgcggcggcggaggccggcaggtccgtggcggcggccggcggcggcggcggcggcggcggcggggtgatgatgcacgagttccggcgcgcgcgggcggcggtggaggaggccaaggaggccgtggagcgcggcggcgacgtgg

SEQ ID NO: 121288 - DNA, 830 bp, Zea mays
  unsure (1)..(830): unsure at all n locations
  Clone ID: MRT4577_42091C.1
aaaaagaagcacaccggctgccgacgcgcaggtcagtacaatgagaggatcgatgttctgcggcggagatctccggtggtggatgttggccatcttcttcctctgcacactaattgctgccgcggaggagcgcgtcgtcacccatctccccggcttccagggaccactccccttccagctccgaactgggtacgtggaggtggacgaggacaatggcgtccgcctcttctattacttcaccctctccgagggctcctcagccgacgacccggtcatgctctggctcagcggcggccccggatgcacttccttcaccggcctcgtctatcagattggccctctcagtttcgaccttgacagctacatgggtggcctgcctaagctggtgtacagacctgagtcctggaccaagtggtttgacgagcacccagagttcttgtcaaatccactttacattggcggtgattcatacngctggtatgattgtgcctaccgtcacttctgaaattgctaagggttttaaaattgttggtagtaaacctacaatgaatctaaagggctgcctcgttggaaatccattcacagatcaatcaaactttgatgggccatcgaaaattccatttgctcataggatggctctcatatctgaccagatgtacaagtcatacaagaagagttgccgtggaggagacaacaggcaccaaagcatccagtgcagaaatagtcttgatgcccatagatgagtgtgtcaaggatatatcctgagtttcacgttcggggagccccgatgtgcttatgcaagccctcaccaatacaatggttctcagctg

SEQ ID NO: 121289 - DNA, 639 bp, Zea mays
  unsure (1)..(639): unsure at all n locations
  Clone ID: MRT4577_42092C.1
aattcggcacgaggcaaaacccccataccaacacacacttcgcttctcgctgcctccgcggcggcgcgccgctccgctccgagccctcttcctcctcctcctctgcccgttcggtcgagaatgttctactcgcatcagcttctcgcgcggaaggcgccgctcggccagatatggatggcggcgacgctccactcgaagatcaaccgcaaacggctcgacaagctcgacatcatcaaaatctgtgaggaaattttgaacccctcggtgcccatggctctgaggctctctggaatcctcatgggtggcgtggtgatcgtgtacgagaggaaggtgaagcttctctacactgatgtctctcggcttctgactgagatcaacgaggcatggcggatcaaaccggtcacagaccccaccgtcctccccaagggtaaaactcaagccaagtatgaagcagtaacactgccagagatcaatatggtnggtggaacagcccatgtttttctcagagcctgatggtgccaagttccgacgaatgggattggaagatctggatgaacagtatgttcaagtcaatcttgatgatgatgacttctctcatgctgatgatcgnnatcaagctaaagcagggaatataaccct

SEQ ID NO: 121290 - DNA, 1076 bp, Zea mays
  Clone ID: MRT4577_42093C.1
gctcgtgataaatgaatgaataatacatccctttattatactaattggtgaaggtaagagagaagcaaagcaagcaacaccggctgccgacgcgcaggtcagtacaatgagaggatcgatgttctgcggcggagatctccggtggtggatgttggccatcttcttcctctgcacactaattgctgccgcggaggagcgcgtcgtcacccatctccccggcttccagggaccactccccttccagctccgaactgggtacgtggaggtggacgaggacaatggcgtccgcctcttctactacttcaccctctccgagggctcctcagccgacgacccggtcatgctctggctcagcggcggccccggatgcacttccttcaccggcctcgtctatcagattggccctctcagtttcgaccttgacagctacatgggtggcctgcctaagctggtgtacagacctgagtcctggaccaaggtgagcaatatcatttttcttgattccccggttggagctggattttcatactctgtcaaagagcaaggatacaattcaagtgacacaaaagctgtcagccatattctggtctttctcaagaagtggtttgacgagcacccagagttcttgtcaaatccactttacattggcggtgattcatacgctggtatgattgtgcctaccgtcacttctgaaattgctaagggtttgaaaattgttggtagtaaacctacaatgaatctaaaggtttgaaaattatactgtcagcagcaaaaacatatagagggatactttgagttcccaaactgctatcctatttttggaggacagaattcccctgttaattttgcatacggtgttcagggctgcctcgttggaaatccattcacagatcaatcaaactttgatgggccatcgaaaattccatttgctcataggatggctctcatatctgaccaaatgtacaaggtaacaagggtagacttaattatagccattaaatattcttgttgtaacctgcatgattttctgtgtttgttgggtatgcactgaatattttaagactgactataagggc

SEQ ID NO: 121291 - DNA, 2090 bp, Zea mays
  Clone ID: MRT4577_42094C.1
cgagaagtggagttgaagctgactatgcattcattgaattcagtgacccccgtgatgctgatgatgcacagtacaacctagatggcagggacgtcgatggaagccgcattattgttgaatttgctaaaggggttcctcgtggttctggtggttcacgtgattacaacggaagaggacctccaccaggaacaggccgttgttttaactgtggagttgatggtcaccggcctcgtctatcagattggccctctcagtttcgaccttgacagctacatgggtggcctgcctaagctggtgtacagacctgagtcctggaccaaggtgagcaatatcatttttcttgattccccggttggagctggattttcatactctgtcaaagagcaaggatacaattcaagtgacacaaaagctgtcagccatattctggtctttctcaagaaggttctatccccctgctctagtttcaatcccatgtgcatctatatattgctactaaacataaactggaatatgcttgtcacaataataacttcaataagcaaagatgttgaattgtaagttgtgtttcgtgtctttctttctcaataactttgcagtggtttgacgagcacccagagttcttgtcaaatccactttacattggcggtgattcatacgctggtatgattgtgcctaccgtcacttctgaaattgctaagggtaacatcgctcctcaaccttcagtttttgtttcttttttccctgtcagtttttgttgccttttttctggtattatacatgcatatttccttttgcctcatcaacaatttgattttgtgtcatgatgcctttgccctttccaggtttgaaaattgttggtagtaaacctacaatgaatctaaaggtttgaaaattatactgtcagcagcaaaaacatatagagggatactttgagttcccaaactgctatcctatttttggaggacagaattcccctgttaattttgcatacggtgttcagggctgcctcgttggaaatccattcacagatcaatcaaactttgatgggccatcgaaaattccatttgctcataggatggctctcatatctgaccaaatgtacaagtcatacaagaagagttgccgtggaggagacaacaggcaccaaagcatccagtgcagaaatagtcttgatgccatagatgagtgtgtcaaggatatatctgagtttcacgttctggagccccgctgtgcttatgcaagccctcaccaatacaatgttctcaagctgaagacgagtttaggtgttcagaagatgcagcagctaccagacttcactgcagaagggcttcacttgtctgagatttctacagagtgcagaacaatgctatatacactgtctagaatatgggcaaacaatgccacagtgagggaggctcttgggattcacaagggaacagttcccctatggttaagatgcaacacggacataccgtatttgaaagatattaagagttcagtgaagtaccatttggatgtgaccaccaaaggatacaaaagtctagtttacagtggtgatcatgacatgggtgtaccttatattggcacacaatcctggattaagtcacttaatttctctattgtggatgactggagaccatggtatgttgatgggcaagttgcaggatatacagtgttgtactcaaataacctcacatttgcaacggtgaagggtgctgggcatactgctccagaatacatgccaaggcaatgccttgctatgctttcaaggtggcttgctggtgataccctttgattggcgcatagagatgcactgctacatagttgtatagactttatgtgtatgtaagtgagttacttgggactagttgtctggattgttgtgtctaggcttttcgtcgtttttccctttaataaaccgagcgattgtaatgttttcgggtctgttgtccctaataaaaatttggtcaattcttttgtacctacagtgaaatgcagaactctgcccttttaaaaaaaagaggttttattccaaaaaaaaggacgaaggccggacaggatacaggattacgtacgaggtcatgcgg

SEQ ID NO: 121292 - DNA, 716 bp, Zea mays
  Clone ID: MRT4577_42095C.1
ctcgaggccggccgggctctattcttgtgagagatgcttgatgatgttgccgtgtgacttcgctgctccaggactgacccttgtacactgccatccgagatgacatttgaaccatgtccctattgtataacactccaatggagaatctctctctgaatacccacctatagaatcaactgagactcctatggacacatggccacactagcctcttcacaatgccgcatgtacaggtctctgctgcccacaagatgcttaaccggactgaccacgactatcaacgatctccaatgcacttgaacaatattgcactcacgaaaactcccgatgcaacttctcttcttattaacacatatgtatttgcaatgctctattcctattgataaagactatacaatgctctcatgatctcaaagagacaccgatgaatgacagctgaattgatacgatcagactgtcccagcgctacacttcttatcacaaattttgattagcagagacagtggataatacgaatgtgtacggaatggttgatataagggacgtaacaacagatgcaatcggagcttccgatgcattacccccagtacaatgactttctgaagacacgtgattgatgtgccaactgatctacagactaatacgtgcgatgacgtgaatcatatcgattccctccatgagcaccgtgaacgtatctgttgaaaatctagatcttc

SEQ ID NO: 121293 - DNA, 823 bp, Zea mays
  Clone ID: MRT4577_42096C.1
ccggccatcctctcgaaagtttgagaatcaacacaatcatgagtcaaatgaaatacacaacagcgactgcgttcttcgaggcattatgggaggccggtatctcacacgtttttgttaatctggggtctgaccaccctggaataatggaagcgattgcacgaggaaagaaggacccgactggaagctttccaaaagtcgtcacgtgcccccatgagaccgttgcgctatcaatggctgacggctttgctcgacttaccggtaaacctcagtgcgtgattgtgcacgtagatgtcggtacccaatgcctcggtgctgctgtacacaatgcttccgttgcacgagtcccagtactgatattcgcgggtctctcacccttcacactcgaaggcgaaatgcgcggctcccgcacagaatacatccactggctccaagacgccccagaccaaaaacaaatagtccaacaattctgccgctatactggcgaaatcaagacgggcacaaacgtaaagcaaatggtgaaccgcgccctccaatttgcaacctctgatccaaaaggccccgtgtacctcaccgccggccgtgaagtcctcgagcaagaaattacgccttacaagctcgaccaaaccgtctggggccctgtatccccccaaccccttgcccaagacggcgtagcaaccatctccgatctcctagtaacagcgaaagagcccctcgtcataaccggatactcaggccgcaaccacgcctcaatgcgcgccctcgtcgccctcgcagacacggtccctggtcttcgcgtcatcgacgccctgggcagcgatgtctg

SEQ ID NO: 121294 - DNA, 236 bp, Zea mays
  Clone ID: MRT4577_42097C.1
atcgttacgttagtcgtcttcccgcactaagttgcttttcactttcgacaaatacctggccggaccgggatttaacagccaaagcgacagaagctagcggctgtggcaatggccatacatgtctttcaacttgtgcttgctccaccagtccacctgtcgaatggacgcgcctacatcgaccttttacggatcctcgcgcagttcgcaatggttcacttcttatacttactagcagc

SEQ ID NO: 121295 - DNA, 101 bp, Zea mays
  Clone ID: MRT4577_42098C.1
ctggctccgagggtggagttcccgcattctgcttgccaactagcgtcgacggggcgagactccttcgaacagtaggacctagcccaggcgctgaatgctgc

SEQ ID NO: 121296 - DNA, 249 bp, Zea mays
  Clone ID: MRT4577_42099C.1
gccgggctgcccctcagctaacgccgctcccgcatcctattgccctcgcgccaccgtcgccgccgctgcagcgtagccaccgccctgccgtcgcctgtggtagacaccaagccaccgacatggggcgtatgcaccgccgcggccaacggcatctccttcatcaccccctgccgacaccacacgaccccacagatatggaacaagaccgccaccaccgacgcggaaagaaatgaatataaaggatccgaa

SEQ ID NO: 121297 - DNA, 584 bp, Zea mays
  Clone ID: MRT4577_4209C.1
gacgaggccctctccttttgtttctctacaagtcgtttaagctcgccattctgttgaatcatactagatcaccatttccatgtccctacaatttcatgtagtgtcaggccaacagcttcggttttccctaccttaataaagaagacttcaatttccaaggcgtgttcccttcggagcagtcatgagacgtgctcatttgtgatttgagttatgatgcctgtatctttctggcaccacgttgccataatttcttttgtccactgtttcggcatctccacgggggaaaaaaattcatgggttctgtccaatggcaattattagagatcctgccatgttgctggcaattcgttatgcgatgagggaatgagcttagctgcccttcttttctgggggtgatttgattgccactgtaagtacctgccggcctactgcttctggagcaacacgaggtgtggtggaggtcgatggaagtgtcagtttgacacctcttttccatttcatgtagtaatcatgttctaccacttcatcatttgcctaaagtccaccacggcaccaccaactttccacccctcacattaggtttt

SEQ ID NO: 121298 - DNA, 242 bp, Zea mays
  Clone ID: MRT4577_420C.1
gtttgctttagttagccaccgattccagactacagagagcagcaggagctccgggatctcatgcatgatcctcgtcgacacactcaaggaaccctcctccggtttcatcgttggtgacagctgtgtcttcggagtggagctcaccaagctcaccactgctaaggtcaaggacgattcaggaacgctgcatgttcagaagagaaatggcttctgtagtgcccgggaggcctacacctgggtca

SEQ ID NO: 121299 - DNA, 236 bp, Zea mays
  Clone ID: MRT4577_42100C.1
cagaattacaaagtcgaagtgcgctgtggcctgtggactcttcccttcccaactccggcgaaaggagcaaaaacctttgcctgttggttgggtggcgtcggcattgaccaggccaccaaaaaaaatgtgggggcttccgggcttgagatccttccgggcttccatattgagttccggaccgagtacaaaggtcccgccgcttgcaacgaccggcttgggattgaccttttcatacc

SEQ ID NO: 121300 - DNA, 552 bp, Zea mays
  unsure (1)..(552): unsure at all n locations
  Clone ID: MRT4577_42101C.1
cccacgcgttcgcccacgcgtccgcccacgcgtccgcccacgcgtccgcaactaaagccattatttccatgaaaatttcgtggccgaaggcattcttagcagcttcgatcatcttaaagaaattcaaatcatgattccactgaatacccacataattctagcagtttgagctaaaaaggcagtcaaacaataagtggtaggttgactcttcacaattaagatcacagaggatgcacttgaaatcactgtcaacagtcagagaacctttccttctgagaaggttcttcgaattaattctatctctgaagacaagccatacaaagattttgattttcttacagactttggattgccagatccaattgaaaggaagggggcggttgaatggatttgaagcttaacttgtaaaatttggaggaactgaaattgccattacctaaagggtatatgccagctgtcttttaccttccttagagatngaatttggccatattctacaggaagcctgatatttttagtggcttgaaagagagaggagtatgaaaatatctt

SEQ ID NO: 121301 - DNA, 446 bp, Zea mays
  Clone ID: MRT4577_42102C.1
aatctgggaccacaaggggaggcatggctgcaacaagggggcgggccatgtatggcaaaccaccaggtcccaggggaacgcgcccgaagtaaccggggccccattaaaaaagggaggcacttggaatcccttctctcccactctttacaaaacgaggccccccccgacggggggatccatccccagggtaccagggggcggcttaaaaaaaaccaaaaacactgtcctgcttattgacggggccgaccaatggaggacttaaaaggacccctccaacgtgtcaaaaatggaactgaggaccgggccactcaaggggggggcccacattgtgacagggcccttgaccgggggggtgggctccacggggaacccgagggaaggcgaccatggttaggcacgcctgctagattttcaccagttttagcccctttttttttttaggggcg

SEQ ID NO: 121302 - DNA, 148 bp, Zea mays
  Clone ID: MRT4577_42103C.1
ttttccctccccccccgggatttttttgcgtgccccgaaacgccgtacggggagttttgacaaaccacgggcgcaagcgccatacttactgagcacgaacggcatctttacgggccccgaggagcaatatccgtgcacccaaatggtg

SEQ ID NO: 121303 - DNA, 686 bp, Zea mays
  Clone ID: MRT4577_42104C.1
cgggctctctcctttttgggatccttttccccgttcaatcctcctattgttttggcgccgagatcgaatcgctgggaggcccaatcgtcctcgggagcacgaaagctgtagttgtagctagtgttggcctgcgcaaccaatcgccaggaaacagcttggtagtataaccattgaagatggtcagtgggaggccgcatggtgaattggactcgtggttcaagagcctcatggtgacctccagcagcgagagggggcaggctgggagtggtggtccagcgtcaacattatcaggatggaaggaccttccgatggagctcctggtgcggataatatccacagttggagatgataggatggtcatcgtggcgtctggtgtttgcacaggctggcgtgacgcgctgggatggggggtcactaatctttcacttacatggtgcaaactgagcatgaataatttaatgatatctcttgcccacaagttcacgaagttgcaagttctcactctccggcaaaacaaacctcagcttgaagacagtgccgtagaggctgttgccaactactgccatgacctacgtgagttagacctcagcagaagcttcaggcttagtgaccgctccttgtatgcgctggcccatggatgcccacggcttacaagactgaacattagtggatgttccagtttcagc

SEQ ID NO: 121304 - DNA, 559 bp, Zea mays
  Clone ID: MRT4577_42105C.1
ggaaaaacaagggtatcaccgaccaagcattggccgagggaaatcctaacaaattattacgcgggccttctcttcccaaaatttaacccaagtgttggatgaaagaaaaactgcccgaccgaaaaacgaaggggagactgtaggaaccaaaaagtttttggggaacgagggccccccctactaagataccttccagtggttggagatgtaagactccccccccaacaagatggaggaagaaccccccccctaaaggaaatatttttttcttctccagggaaggaaaaaacttcaccacaccctggttgggaagggccgggaacaccccctgttcttggccgccataatatttcttcatttcaacaccgacggaaccgtacttcttttcgaaaaaaaggacccggggccgggcataggcacaaagaacgccagcaccagcaacggtgaaaaggaagttggcacccctccccttgaaaaggggcttgggcccctccttcgaaataatgtgctggaacgcctcccaagaggtcttgttcttgccacccccaacggaaggcat

SEQ ID NO: 121305 - DNA, 238 bp, Zea mays
  Clone ID: MRT4577_42106C.1
gtggaggagcagatccctggattcatcgcctgccgctgcacgtagtacattactgggtacccgcatggctgaccctgcgccatataacggtctccttgtggaccagatcggtttcggattgcacggccaggcgaaggctgctagagagagaaggtggcgaagacgtccacctcctcttatcagccgctgtggttctcccgcaccaaggcaccagactacctgcacggctcgctggtcc

SEQ ID NO: 121306 - DNA, 1836 bp, Zea mays
  Clone ID: MRT4577_42107C.1
aggagaggctagatagacgcgacggccggggccacgcgtccaggcgaggcgaggggaggcttcgcgaatcgaatcgcgcgataaaaaacctgcggcccgccgcccatcccgccatcctgatccgctcgctcccaaatcctactgccgtgcgcgtcccgctcctgcggctgcgccccccgcgaggagaaagccggttagccacagccccacacgcgcgcatcacgccacaaccacaccacacggcaccagcctcctccgtcgtcaccgcctcgggcctcggccgatcgatcgggtctggcggcggccacaagcgtcgctgtttaataaatagccctgagcggcctccccctgcccctcagttcagcctcggctggacatcgagtttgtaccgggaaacagcttggtagtataaccactgaagatggtcagtgggaggccgcatggtgaattggactcatggttcaagagcctcatggtgacctctagcagcgagagggggcaggctgggagtggtggtccagcgccaacattatcaggatggaaggaccttccgatggagctcctggtgcggataatatccacagttggagatgataggatggtcatcgtggcgtctggtgtttgcacaggctggcgtgacgcgctgggatggggggtcactaatctttcacttacatggtgcaaactgagcatgaataatttaatgatatctcttgcccacaagttcacgaagttgcaagttctcactctccggcaaaacaaacctcagcttgaagacagtgccgtagaggctgttgccaactactgccatgacctacgtgagttagacctcagcagaagcttcaggcttagtgaccgctccttgtatgcgctggcccatggatgcccacggcttacaagactgaacattagtggatgttccagtttcagcgacactgcgttgatttaccttacctgccgctgtaaaaacctcaagtgcctgaacttgtgtggatgcgtgaaggctgttactgacagagctttgcaggctattgctcagaactgtgggcagctgcagtctttgaacctaggctggtgtgatgatgttacagataagggagtgaccagcttagcgtcaggatgccctgatctcagagccgtagacttgtgcggttgtgttcttataacagatgagagtgtggttgctcttgccaacggatgtccgcacctgcgctcgctgggcctctacttctgccagaacatcacggaccgcgccatgtactccctcgcaaacagccgcgtgaagagcaagcgtgggaggtgggatgcagtgaaagacgggctcgcgaacctcaacatcagacagtgcaccgccctgacgcccccggcggtgcaggccgtctgcgactccttcccggcgctgcacacctgccccgagaggcactccctcatcatcagtggctgcctcagcctcacgtcagtccactgcgtctgcgccctccacccacaccgtgccgtgagagccctgatggccaaccatgcgtactaataagcatgttgggtggctttgcgctgatagttctcgtgaatggggacgcatgcctgggggtgatggcgtcgtccaggtgtagaggaagctccctgtgtacataaactcgaaagttggcggtgtgataagacactgctgtggtaggactttgtgtgataatcatggagtggcgaatttctagagtgacacagaaaaaatgtggtatctagtgaccttctgtgtaagggcggacgtgtttggatgttcatgcatttacattaatctgataccttaatctgaccaaaaaaaaaaaaaaaaaaggggcggcc

SEQ ID NO: 121307 - DNA, 517 bp, Zea mays
  Clone ID: MRT4577_42108C.1
ggaacgcagtggtctatttaataatcacattgtaccgtttaacaaccacggtacatttaaaaaaagggcacagaaggtacgaaaactgaaacatatgccacatctgtttatgcatacttaactctggggttacacacagagcgctaaattcttactcttcagccagagtccatacataattctcaaacaaaactgtggtttacatggaagccggcacgggatccaagctcaactgttcatgccttgaatatccatggatgaaggttgctttttcactgtgccacaccttctagggaacacagtagagcgatctccttattcccgatctccaacgagtcggttccatggatgacattccttgcgacttccacggagtaatcccaaccaatggtaccgggggctgcctactaagccctgttgaccccaaagatcctgcgggcaatctacattaattacttcccctaccacaccatgagaaccacgttgcctaaaatgatgtactgcaccaaccctttta

SEQ ID NO: 121308 - DNA, 2269 bp, Zea mays
  Clone ID: MRT4577_42109C.1
cggccgggatcccacgaggctcgctcccaatcctactgccgtgcgcgtcccgctcctgcggctgcgccccccgcgaggagaaagccggttagccacagccccacacgcgcgcatcacgccacaaccacaccacacgggaccagcctcctccgtcgtcaccgcctcgggcctcggccgatcgatcgagtctggcggcggacacaagcgtcgctgtttaataaatggccctgagcggccgccccctggcctcgctggacatcgagtttgtaccgggaaacagcttggtagtataaccactgaagatggtcagtgggaagccgcatgatgacgtggactcatagctcaagacccgcctggtcacctccctcacccagacgggggtgccggcgctctgtgcccccgccccccccctctccgcctgcccggaccctccctccgccatcatcgcgcggaccctcccccccattccgcccaatccgccggcccccgcgccccccggcgtgccgggaggcagctgaagcccgccccgggagactcattatcaggttgcacactgggcgtagaccctccgcgggtggggggtggcatgcctccggggtgatggcgccctcggttcaggggcctcatggtgacctctagcagcgagagggggcaggctgggagtggtggtccagcgccgacattaacaggatggaaggaccttccgatggagctcctggtgcggataatatccacagttggagatgataggatggtcatcgtggcatctggtggtggccccgggccgcgtggggagcggggatcttgggggacgtgcaggcacctgcgttaatataatccaatatttcggtgtttgcacaggctggcgtgacgcgctgggatggggggtcactaatctttcacttacatggtgcaaacagagcatgaataatttaatgatatctcttgcccacaagttcacgaagttgcaagttctcactctccggcaaaacaaacctcagcttgaagacagtgccgtagaggctgttgccaactactgccatgacctacgtgagttagacctcagcagaagcttcaggcttagtgaccgctccttgtatgcgctggcccatggatgcccacggcttacaagactgaacattagtggatgttccagtttcagcgacactgcgttgatttaccttacctgccgctgtaaaaacctcaagtgcctgaacttgtgtggatgcgtgaaggctgttactgacagagctttgcaggctattgctcagaactgtgggcagctgcagtctttgaacctaggctggtgtgatgatgttacagataagggagtgaccagcttagcgtcaggatgccctgatctcagagccgtagacttgtgcggttgtgttcttataacagatgagagtgtggttgctcttgccaacggatgtccgcacctgcgctcgctgggcctctacttctgccagaacatcacggaccgcgccatgtactccctcgcaaacagccgcgtgaagagcaagcgtgggaggtgggatgcagtgaaagacgggctcgcgaacctcaacatcagccagtgcaccgccctgacgcccccggcggtgcaggccgtctgcgactccttcccggcgctgcacacctgccccgagaggcactccctcatcatcagtggctgcctcagcctcacgtcagtccactgcgcctgcgccctccacccacaccgtgccgggagagccctgatggccaaccatgcgtactaataaacatgttggtggctttgcgctgatagttctcgcgaatggggacgcatgcctggggggtgatggcgtcgtccaggtgtagaggaagctccctgtgtacataaactcgaaacttggcggtgtgataaggcactgctgtggtaggactttgtgtgataatcatggagtggcgaatttctagagaatggcatgtactccagtgctacctggacattgaccagaaaaaatgtggtatctagttgccttctgtgtaagggcggacgtgttgggatgttcatgcattttcattaatctgataccttaatctgactaaaatctagattaagttacatatcaaatcattactttaatctcataacttaatctttatttagattcttgaattgagctgaaagatctaatgtgtacttattttatggactgcctaaatgttgatgccaaatgcctggctctgttgaaaattttgcataggagaaaataatgaaggcaaatgcacggctctgttggag

SEQ ID NO: 121309 - DNA, 298 bp, Zea mays
  Clone ID: MRT4577_4210C.1
caggactgggcttagctgtccagagccctgccggagggtgctgggggctgtccctctgcaggcactgtgttttcctcaggggctgtcctcagaacacccctcctgctccctggggctcctcagggagccatttcagctggagtctcaggtctcaaaaacaacttctccaggaggccaaaaaaagactgggttggcttctggtcctcatgatggcttttatcctcctgggacactttgggtatattcatgggcattgtttccatctgtcaattctacctgtgccacccctgccctgatt

SEQ ID NO: 121310 - DNA, 914 bp, Zea mays
  Clone ID: MRT4577_42110C.1
gtcgatcgctaggaggcccaatcgtcctcgggagcacgaagctgtagttgtagctagtgttggcctgcgcaaccaatcgccaggtccccgccctcttcgttctaagcgcggcgcttctccgcccggttgctcctcctacggagtcggctccgtcctactacaccgtctccccccaaaaaaaaattctggcttttctgggcgatgatggccttaccgcccgccgccgcctcttgcgttggctggaaactgcttggtagtataaccattgaagatggtcagtgggaggccgcatggtgaattggactcatggttcaagagcctcatggtgacctctagcagcgagagggggcaggctgggagtggtggtccagcgccaacattatcaggatggaaggaccttccgatggagctcctggtgcggataatatccacagttggagatgataggatggtcatcgtggcgtctggtgtttgcacaggctggcgtgacgcgctgggatgggggggtcactaatctttcacttacatggtgcaaactgagcatgaataatttaatgatatctcttgcccacaagttcacgaagttgcaagttctcactctccggcaaaacaaacctcagcttgaagacagtgccgtagaggctgttgccaactactgccatgacctacgtgagttagacctcagcagaagcttcaggcttagtgaccgctccttgtatgcgctggcccatggatgcccacggcttacaagactgaacattagtggatgttccagtttcagcgacactgcgttgatttaccttacctgccgctgtaaaaacctcaagtgcctgaacttgtgtggatgcgtgaaggctgttactgacagagctttgcaggctattgctcagaactgtgggcagctgcagtctttg

SEQ ID NO: 121311 - DNA, 450 bp, Zea mays
  Clone ID: MRT4577_42111C.1
ctctatctctattcattccccgcctcatccctagccagccgtcatagctagggtctgcggcgacgtcgccaccatgcgctaacagctatcaggacggtatgccccactcccagctcgctgtgctgatcgactgacgcaccctccacagccatctcgccaagctcatcttccagctgctgatcctgatgctggcggctccatgtttggaggcattcggcccaccattgatcaccgtctggccattggcaccgatagagccttggcacacatggcttcacatgctttactaggtgctcggcccattcagcatgatactgtagcctaacaagctgctgctgctgaccctgtcttaccactgatgaatgctgatgcttgcagcattcatcctaagggttaccaagattgcctcaacaactatggcagcgagatcagcaggcgacagttatacct

SEQ ID NO: 121312 - DNA, 411 bp, Zea mays
  Clone ID: MRT4577_42112C.1
gaggtatttttataatattttgttacttcttttgaaggagaacgaaacatcccttatccttttcaccataccattatctacccaatttgctgcctgagatagtacctataaccaacaggatgtacatataaccaacaggaaatcaaaatgaaacgcaccatcaatgggctttttttattgggaacccggagaaattccttaccaccaccaagaggaggagatccatgactatcaatggttgaaagctgatgttctttcacatttggaactgagaacgctgggcgttaaccagggagcgacattgagacttccagttttgcccctttctttctgggggctcttttcttcttttcccagggcattgaaacttccactgatacatgggccaaacaggaaacacataagtctgaa

SEQ ID NO: 121313 - DNA, 334 bp, Zea mays
  Clone ID: MRT4577_42113C.1
ggattccccacccaaaaatttgattggacggtttccaaattcggggcttaaaaagaccaaaggggtcctttacgggattacaacagggcccacaggggatcaaccccagcattttttggtttaaaaacatgcgggggccgaaaaattaaatagaaataaaaaattgggcgaaccctgaacactaaagccctggtgcggcggtgcttttatgttttccagccggagcaaaattattatcccctttttctttcccattatttacaactggggacccaaaggggggccgcccaaaatttggtggaaagctgggggaaaagcatttgccaatttgaaa

SEQ ID NO: 121314 - DNA, 179 bp, Zea mays
  Clone ID: MRT4577_42114C.1
acggccgcatcgaacttgtttcaaacccatccatccttttttcctgagcacgaccacatgggggcctcattgcccagatcaagaacccactcaatgcattcccaagcatccaaaggctacaggaccgggttgccctacacaatgaccatccggcactcctccaccaggacgaccgactt

SEQ ID NO: 121315 - DNA, 587 bp, Zea mays
  Clone ID: MRT4577_42115C.1
gtcgacccagcgtccgccctcctcggccgctcacaacacacaagcaacgccgcttctggatgcattaattcaaactccccacaatgcgaatatgccattttttgaataaaaggtacaaatatcagctcacatgttcctctgcctgtgctcatgtgaactggctatgttaagttcaggcacatgcccattctcgagttcagctttggacgttaggtaacagatgcctttactttatgttcattcgcttcacttatcatctgttaatgacctgaatgtccctcatacttgtcttgccagctctaacacatttgttgcttgtgtgttgtgagctacttagcgaatcaacaacacagaaactaatggggaaatggagcagtaataaaaggccatttactatttcctttaacaagtgaatcaaataacgaactataatttggaagaagaaaataaaggcttcaaccagtaaaaacaaagatggtttaatattttaaccatcaaaatgataagcttctgcatatggtactgatgatggttccacagaaagtagctcccattagcttttgcaaagttttgatatctgatatttt

SEQ ID NO: 121316 - DNA, 249 bp, Zea mays
  Clone ID: MRT4577_42116C.1
ccggtccatatattacatgggtcgacccgggcgtccgcccacgcgtacgatcatttgcagttcgaatgaataaattgttgcttactagaatgaatacgggcggaattggccattattctgtagtatcactgctcaccaatgggatataaaaaattaagtcagagtggtgatgaccaccctatcggcattatatgaagaagagactgattcaatggtctctgctgagaaaattcccgaaccccatcaata

SEQ ID NO: 121317 - DNA, 324 bp, Zea mays
  Clone ID: MRT4577_42117C.1
aggtgtcgaacaggggcccacatttattcatttttttactaataaaaaaaggtaaagggccccctcactccattactttttcacccccaagggaaaagggaaaacccctccttggttaaaaggaatttaacaaacagaaccaggttgggattaaacacaacccaaccagcaaatttcaaaaacaaattttttcccacccgctttatttgcatttaacggtcaaaaaaaaggccaaacaaaacaattaacgggaacacctgtcccattttggcgattataatataggaagaaccccccaacaattttttgtggcgccttttgggg

SEQ ID NO: 121318 - DNA, 374 bp, Zea mays
  Clone ID: MRT4577_42118C.1
gggcgggcataaacccttttttcaacaatccctaccggttctgatgcattacacaattttccctcgcactggtaatgttccgtggtgcctgattcacataattcggagtgaacaaggctctctacactggttatggtggtgttattatgaacacagatgcacagggcactgggtcaggctcaattcaataaatttgttggccctacccggcctgacgtttaggaactgagggtctcgaaccccttaggagccatacgcttgccttttgcattgatgcacttgctcaacttccatcccttttattcactacctgtttcctgattcttccatttcccatttcctggcatccccatgcatagactttttctaaaatt

SEQ ID NO: 121319 - DNA, 471 bp, Zea mays
  Clone ID: MRT4577_42119C.1
ttctagagtactctcgtcgtcgccgctcagttcgcctacatgaccggcggccgcttccccgacgcgtggaagggcttcaccgtgcgtgcgttcgacaacctcggccccttcgtcaagctgtcgctcgggtccgccgtcatgatctgcttggagttttggtactacaccacgcttctcggcctcgtgggtctcctcaaacatggcaaaactccaaatcgacatcatgtcagtctgcctcaacttcgagttcttgactgtaatggttgcgctgggcttcagcacagcaatcgggattagagtgtccaacgagctgggtgcaaacaggcccaaggaggcaaagtttgcagtgcttgtggcagtatcgacatccatcttcatgggagcagcctttatgtgcgccgccctcatctgcaggacgagcctgccaaagctcttcagctcctgacggaggtgaagcgcgcgcttccaagc

SEQ ID NO: 121320 - DNA, 184 bp, Zea mays
  Clone ID: MRT4577_4211C.1
aaaaaaattattggcatataacccaaagaaacttaatttacacaccatacgacaaaacgcccacatcagcaaggaacccttccacctcataatatacagccatgaaagcataaggggtcatttcaaactgcaaacttcccgcttgcatgtcataatgaaaatatatttagaatggcttaactgc

SEQ ID NO: 121321 - DNA, 396 bp, Zea mays
  Clone ID: MRT4577_42120C.1
gccggcctggtcctgaaattgaacggcagacagtaggatcatccattattgcttgtaggaacacagttgacggactactgagccaccgacagacaagatggccgactcatccgccagcctcctttggtctcggcgatgaatacctggatcagccgcctggagtaatccacaagattcacgggtggaacgcaagcggcgcttaggaaccgcgtgatgaaaattaactgggatagaatagatgggactctctgcctgatccttcgcctccactggctgtggatacatctgagggatctcggcgttgatctcatggcctgcaaggggcacgggagggctcatttttttaatgggaacagcctcgcagggctattattattcagcatcgggcataaggtg

SEQ ID NO: 121322 - DNA, 457 bp, Zea mays
  Clone ID: MRT4577_42121C.1
caatacaaccaaacaggttttacgctacgcaagaaatggagagcacccagagcaacagtgtgaggagccatttcatcctggtgcacggcctctgccatggggcttggtgctggtacaaagtggtcgcggcgctcgaggccgcggggcaccgcgtcacggcgatcgacctcgccgcttcgggtacccacccggcgcgcgttgacgaggtgcactcgttcgaggagtactcgcggccgctgctcgacgtggtggccgcggcgccggcgggtgacggcgagaggctgattctggtcgggcacagccacggcggcctcagcttggcgctagccatggagaggttccccggcaagatcgccgctgccgtgttcgcggccgccgcgatgccgagcgtcgggaagcacatgggcgtcaccaccgaggagttcatgcgaagaacatcatcgaagggactactcat

SEQ ID NO: 121323 - DNA, 429 bp, Zea mays
  Clone ID: MRT4577_42122C.1
aaaaaaaaaaaaaaaaaaaaaaaaaaaaaaaaaaaaaaaaaaaaaaaaaaacaaaagggagggacaaaaaaaaggggggtgccatctctccttcaccttccttaatattcatacctattttctttgtatttccactttaatttcaccgaaattcttttgccaccccacttactaccacatactttaacttttaccatccttaatcccttttttattacataccgtttttacacagttcgcctttccctttattttcccacacagattgcccttctaaactttccctgtacctttacttttaacttcttctattactttgtggcttcgtctcttttatcccctctccttttgtaccttaccctttttcctgcccccccttccctttttaatctctctctttttccacccctcctttatctttccaattcc

SEQ ID NO: 121324 - DNA, 263 bp, Zea mays
  Clone ID: MRT4577_42123C.1
cacaatgttggcactcttggttctggtgactgtggccctggcatctgctcatcatggtggtgagcatttgaaggcgagaaggtgttccgtgttaacgttgaagatgaaaatcacattaacataatccgcgagttggccagcacgacccagattgacttctggaagccagattctgtcacacaaatcaaacctcacagtacagttgacttccgtgttaaagcagaagatactgtcactgtggagaatgttctaaagcagaatga

SEQ ID NO: 121325 - DNA, 399 bp, Zea mays
  Clone ID: MRT4577_42124C.1
aggaaacgacaaacctccacatctacctcaacaaccacgagattacctccacgccagtcacctttatcagatgatatgctcctgtgctgacatctatatgcccaccgactcgaaccacacggagaacattcaggatcttgaccagcttaaccgcaagctcaaccagatcgatgatgaggtcgccatcttccatcatatgcaagccaaagtccacaaatacattcacgaacgtgacccatacttcatatcatctgatgctacaagatcatgtatacaccaggccttgacatgttggaaatatagattatgctttcaccccacaataagtgcatcatcatttccaagcatgttgaactatcaacaaggtgacaatcttgactgacaaatttttcatccaaa

SEQ ID NO: 121326 - DNA, 287 bp, Zea mays
  Clone ID: MRT4577_42125C.1
ctgacgactagttttacaagtttgtattaacatttactaaaagaatgttacttctatgaaataatttcattagaaaaatctgtcaatactattttttcatataaaccaaaccttagaggtttcacatgtcaatggtcaaaattcagatgctggatcgaactgatcctagcctttggtgtctgacaatccagaaagaacagaaaaactatgacaaacaagagttgataatgccatgtgttgttatatgttttgaatcctaaccttgtagtatccagttattagtactc

SEQ ID NO: 121327 - DNA, 656 bp, Zea mays
  Clone ID: MRT4577_42126C.1
gtaattttgcaaccatcaagctatgtgcagttattgttctttttacgagggcattgccaaagttccaatttacctggagagaacaatctagaatttgaagaaacagtctggttggatgacttaaaattatttaatcccatttttcatcaagtaaagtttgaacaatgaatgtctactctttcattacataaaattccagaaacatcaccattatagggattgggtgtgatgcagctgctacacaggatggttttacagttccatctttgacaaagctgtgactctgtaggcctggtgaatgttaggagaaccagcaatgacactgcaatgaactgtagttttttccacattaacaatgatgtcatataatcttgttttacatgagttcttccagccacccagagggcttcgttatgttagcaacttcaccctattatttgctaagtagcaaatatctcattgtctatatgggcatagaactcatagcatcttcagctggcttctctgcatcacacatattcatcattttctccatggttattaatttcagatgcatttttttttgagaatttgctaaatggtgctgcttgcactgggtccgggtaattatcattaaatctttgaaagttggataaactttatactccttgatctga

SEQ ID NO: 121328 - DNA, 136 bp, Zea mays
  Clone ID: MRT4577_42127C.1
cttctgctgggaaccatgaaccggttgcgctacacagctctttcagcgacttgctgtgccatgctgctgatgcttgccgaagtgtttttacgggtgctgttgaccggttgccgattgccatggtgatcgatccgag

SEQ ID NO: 121329 - DNA, 324 bp, Zea mays
  Clone ID: MRT4577_42128C.1
accggatggaaaaaaccacaggatgcagagagcaatatactgcttgcttctattgagaacatgcagtatgtagttacaataaatgtgcttcatgaggtgttttcagctttaggatttgtgcagaagagggctatttttgagaagaatggctttcacgcattgatccagtatacagacattgaaactgcgtatgcattaggagacgcactagaatggcacatcatctatgaaggtggttactgcaaacctgcacattacatatttacgccatactgagcttaatgttaacgctaacaatgaacgaggtagagattataccatggg

SEQ ID NO: 121330 - DNA, 370 bp, Zea mays
  Clone ID: MRT4577_42129C.1
tcacactaggatggatctcacatgcagtcataatctgctatactaccttcgagtagggacaatatcaatgcctggatagaccagaaatcataacacgctactaaccaagcagtaacaacaagaaccattagcaagcaagcattatgacttaaatggactaacacataaccaagtcacacatcatgctcacatcctctttactgataacaaatcaccactaccaatcgggtgcatcaactacaaccttccacgcacgtacaatcactatcgcgttacaaacaatcagtatcctaaacctaacctttcgaaccactttctaaacccaattcacacagcttatcgacgcttaaacaatcaaacacttcgacaa

SEQ ID NO: 121331 - DNA, 666 bp, Zea mays
  Clone ID: MRT4577_4212C.1
ggccgctttttttttttttttttttcgatccacatcacataaaccatcaacaagcaccacaacaaaatcattcgcaaaacctacacatgttattatgttttgcacatatttgcaaacactttacaaaaatcattcacaaaagtactaacgcttcaagtgattcgcaaaagccttcacaaaagcactccaacttcttgtatcctcttgttttaaggcacaagcttgtaggggttgtgatgttgccacttacttgatgctaacaagacatttccttcaccaaagccatcttcaacacttcgcccataaaaagatcaattctctttttcaattgcctgtcttcataaaggtgcgagggcgacctgaagtaccagcagcgtggcacgctccagatatgaaatcgaattcgacctataaatgggaccatggggtgggcgggcgcgtcgttaccgatctcctctagtgtggagaagttgcggcggccggtgggctttcccttgaactttcccctccccatggcggcggcgagcaaagggcgagcgaggctggtgcaggtagagagcgagctggaaggagcggagggcggaggggttctgcgtgggcggtgattgaaccgcagaatggggcggctgctgctcagcctgtcccggccggcctcgaggtacccaa

SEQ ID NO: 121332 - DNA, 881 bp, Zea mays
  unsure (1)..(881): unsure at all n locations
  Clone ID: MRT4577_42130C.1
ttgggtacctcgaggccggccgggagaatatgccgctgcgttgggacaacgagcaagatgctatgaggagttgtgccaagccagaatgtgtatctcgcgtgactcgatgcgcagagcgtccgaggcacctggatgaaatagcattaagtgcctcgcgagagaaagaactcgcaatatgtattnaggtctgtaggttcggactatgcctacgctcgaacacaccatgatctgtgcgaatgaacatagagtacaggtggtagtgatggagtgccgctgactctgtgctgaagtgtatatagttgcaagatcggatggcgctcctctcggcctttgaatacttgcgtgaactgacatcaatggtggtaagtcgaagtctgtgtacctcgctagacccgtatcctcgacgtggtctacgatgcatcatacaatgagcttgcgcatagacacaaacccttgtgaagagtgccattgtgcctactgatgctgccccattcaaggagtgatacctcactctctatggagatgacattggtacgaagaatatgacccctgctgcaaagaaggataatgctgaggtactagaggctgacgctgcatgtgatgaaactaagaagagcaaccatgtcacgaggaagcttgacaaacgcaaggagggacgctcccttgaccctcacattgatgagctatttggtagagcacggttgctggcatgcctttcttcccgtcctgtacagtgtggccgagctgatgagtacatccttgaggcgacagagcttgcattctacatgaatgagctacagaggtataatggtcatagcgctgtagcttagagcattctcatggattgtcttgcatcgagatgcgtgtcctgatgagtacac

SEQ ID NO: 121333 - DNA, 1639 bp, Zea mays
  unsure (1)..(1639): unsure at all n locations
  Clone ID: MRT4577_42131C.1
tggcatcctcgacctcgaggcgggccagggatccagctttgctttgtagttgtagcgctagcagcttaactggtctgagctgaggctagctagtcgtgcaggaagaggaaggaatataatggctgagcgggaggtcgtcgaaggcgggacgacgacgggaggcgggctgtggcggaggtatgcgccgcacgtccagatggtgctggcgcagctgtgctacacgctcatgtacttcatcaccgaggccgccttcaaccagggtctcaacccctacgtctacatcacctaccgccatctgctcgtcgccgtcctcatctggcccttcgcatactacctggagaaggggctgaggcctaaaatgacgctcatgctgttcgtggagatattcgtgctctcccttctcggggtgagcttaactctgaacatgtacttcacgagcctgaagtacacgtccccaacgttcgtcacttccgtggtgaacaccatcgcctcgatgacgttcgtcatcgccatcatcctcaggatggagatcgtggacgtgaagagcctacgcggggtcgccaaggtcgcagggaccgtggtgtcgttcgccggggtgaccaccatgactctgtacaaaggagcggccatcacgagcctctggaagtcgcctgttcagatcgccggcagcggcagcggcggcggaggcgtcgcccacgacagctgggtgaaagggtcagtcctcgcagtggccagctgcgtgtgctggtccatctggtacatcatgcaggcgtcgtctctgaagaggtaccccgcccagctctcgctgacggcgtggatgtgcacggtcgggggcatccagtcgaccgtgttcacgctgttcatgcagcacgagccggaggaatggcgcatcggcttcggcgtcaagttctggagcatcgtctactctggcctcgcctgcaacggcttcacggtgttcgtgcagctctggtgcaccgagaagaaaggccccgtcttcgtcaccatgttcaaccccctctccaccatcatggtcgccatcctggcctacttcatcttcggcgaaaacctatacgtcgggagcatcgtcggaggcggggttgtgattctgggcctctacatgctgctgtgggggaaggagaaagaccaggagcggggcacgggcaaagagcgggaacagctcgagacggactgcgagaagcaggcgaagaaggtcagcgactgtgtctacgaagcgcccaagacgacgaagtgactgccgccggccatgagcggcagacggctcaatcaagcgccatgccgtgctccagttcggttctatatttgtgatgtacagagtcaccgatccggtctcgcctcatcagctatgtatatatatgcacatgcaatgcggcaacagacagacgtctggctcagtctgtgaaaccgtgaacctgccctgaagctggagttttttggaaccgtaatatcaccaacactgggcttctgaaaatcggtatcccgaacaacgcaattggaattttagtattataatctttgaaaaaaaaaaacacncttctacacaaaaaaaaaccccccccccccaaacgacagcgcgcagcccccccgcctcggtattacttttttcaaaaacntaccnttt

SEQ ID NO: 121334 - DNA, 471 bp, Zea mays
  Clone ID: MRT4577_42132C.1
cgaggcggccgcttcgggagctcgtacaaggtggtggtgcccggcggcgcggcgctagcggtgaagcgggtgagggacgcggcggtggacgaggaggagttccggcggcggatggagcgggtcgggctcgccaagcacccggccgtgctaccgccgctggcgttctattgcgccatgcaggagaagttgctggtgtacgagtttcagagcaacggcagcctcaccaagcttctgcacggctccatagagagcagccaggcgccgctggattggccagcgcgcctccacatcgccgccaaggtcgccgacggcatggcgttcatgcacaccaccctgcgcggcgacggcggtaccaccaattcctcgtcaggcggcccaatcgcccacggcaacctcaaggcctccaacgtcctcttcacggccggcatggacccgtgcatcagcgagtacggtgtcaccgtgccgggcagg

SEQ ID NO: 121335 - DNA, 601 bp, Zea mays
  Clone ID: MRT4577_42133C.1
ggtgagcttaactctgaaatgtaccttcgcgggcctgagtacacgtccccaacgttcgtcacttccgtggtgaacaccatcgcctcgatgacgttcgtcatcgccatcatcctcaggtgacaaaaggccggaccggacgcgcgcgagatgcatgtcggttatagtttcagtctgttagttccgctagctgacggctgacgcccgtctttgcctgactggaggatggagatcgtggacgtgaagagcctacgcggggtcgccaaggtcgcagggaccgtggtgtcgttcgccggggtgaccaccatgactctgtacaaaggagcggccatcacgagcctctggaagtcgcctgttcagatcgccggcagcggcagcggcggcggaggcgtcgcccacgacagctgggtgaaagggtcagtcctcgcagtggccagctgcgtgtgctggtccatctggtacatcatgcaggtgtttaattaatcaattaacctctcagtcgacagactgtccacgcacgaaccaaacaatcagtcttccagctcttaagttaaaactgatccatgcatatgcgtatgacgggcattggcaggcgtcgtctctg

SEQ ID NO: 121336 - DNA, 317 bp, Zea mays
  Clone ID: MRT4577_42134C.1
acggcgatcctgagattgggatgcctctgaccattcatgagtccatgctggtgtctacatccttgctcattggacgtgttattaatgctaatcattaccttcaggccctttgcatctttgagtaccttaacgtgaacccgtaggtcgagataacgcatagctgatctcagaagataacagcgtagatgcactctgtagatacaaggcccctagactggctgctcgataagcttaagatggtaaaagggatatgatactgctgaaacgcaagtcacgcctatgacaatggcatagcaacgttctctgtaatgctcaat

SEQ ID NO: 121337 - DNA, 687 bp, Zea mays
  unsure (1)..(687): unsure at all n locations
  Clone ID: MRT4577_42135C.1
gggggcgcggggcgccgtaggcccctagctgcggtgatccgccgctctcgcagcaccgtcgcgctcgcctccgcccgcccgctcgtcgagtggacgcgcgctgcaccgcgactccagtcatggctagtgttaccgattctttcgtggcggatcttgatgagctattggagtataggacagagaagactatcctggagatgaaaacgcagagacagaaaacttggaagatgatgctaatgatagtgtccctgacctgaaatctcttgatcttgatagtgtctaaaaacatcagaaggcacaatggtataaagacataatgaagacatgatcacaatggcagaaacgacaactggtggggagcctctttctgaagataatttagtaaatactattgaagcatccgacagagctcttaaccttgatgccgacaaagaagatgatacttgaatttttgaagggcagaatgggatacgttgcacgaaaccttgccgccattgttggcagtgctgttgcctcgaaaccgagtcgtgctgccgtgttggtggtttgggagcactggccaaaatgcccgcttgtaatgtgctgcactgctgcttctcggtgcaaaaaagacaaatctgtctggattctctactgcgtcagtgcagtctcgtattggttatctagaacanactgaagtattattca

SEQ ID NO: 121338 - DNA, 1785 bp, Zea mays
  Clone ID: MRT4577_42136C.1
gcggtgatccgccgctctcgcagcaccgtcgcgctcgcctccgcccgcccgctcgtcgagtggacgcgcgctgcaccgcgactccagtcatggctagtgttaccgattctttcgtggcggatcttgatgagctattggagtataggacagagaagactatcctggagatgaaaacgcagagacagaaaacttggaagatgatgctaatgatagtgtccctgacctgaaatctcttgatcttgatagtgtctaaaaacatcagaaggcacaatggtataaagacataatgaagatgcacttgaaaggtgactccaatcaaggggccattctgcaagatcaagataccagcttgttgttgattgcaatgcttcatcagtagatattgacaatgagattactataatccacaatttcatacgtgacaagttcaagctaaaggaccctctactagaatcctgtgttcactatccgattgattatgcccgtgttgtctggaagattggaaatgacatggacttaacacttgatttgaaagttatttaccttctgcagacatgatcacaatggcagaaacgacaactggtggggagcctctttctgaagataatttagtaaatactattgaagcatccgacagagctcttaaccttgatgccgacaaagaagatgatacttgaatttttgaagggcagaatgggatacgttgcacgaaaccttgccgccattgttggcagtgctgttgcctcgaaaccgagtcgtgctgccgtgttggtggtttgggagcactggccaaaatgcccgcttgtaatgtgctgcactgctgcttctcggtgcaaaaaagacaaatctgtctggattctctactgcgtcagtgcagtctcgtattggttatctagaacaaactgaagtattatttgaaagcacacctccatctttaagatttcagtctagtagacttatagctgcaaagtcaacactagcaacaaggatcgattgtataaggctatcttcagcagtttactcattctcatctcttattttaacctacactctataaacagtgcattttacagtacaaaacagtgttttacatgttcatatgcacgatctgctggctatagcctaagagatgatccaactagaacggttgtgcagaacttgttagaagaaattagtaagaagattgaaaactggcaacaactaccacctgcaaggcttccaaagccaattccaattccagactttatgcctaaaaagaaacgaggggttgttggctccggaaaatgaaggaaagataatttatttgaaactttctcatgtccaaattgattaaaactattgtacttcatgtaaaagattgctatataatgcccattcacatgtctcatttgcattttgcaatttgttatattactcgagttccctggttgcattacctgtttggctgtttgtcttagttgcattttgcaacttactttgttatatcactctgagtgacccttcaatttcctcttacctttttgtatttgggaactcaattgtgaagatatgcacagaccaacacgatgaagcttgtgaatcggatgaagtttagcatgccagaggagagcacattgggtgatggcttagggaaaggttacggcttgcttgggcaggctggaagcgggaagctacgtgtgtcagctggtcaaagcaaactttctactaaaattgctaaaatgtaagcgatttatacgtgagtgacggtgttgaaatatataagtgaattgagtattttcttccgtc

SEQ ID NO: 121339 - DNA, 336 bp, Zea mays
  Clone ID: MRT4577_42137C.1
atgggagcgaatcgagatggcggcgtcggatgttgcgtcccgctgctaccatcacggcgtgggctggggcaccgacgaccacatggctcacgacgtcttcaacaattaccgcgaggaccgtcagtacaagatcgttctcgatcggttgactcagacgtctctcggcttgggcttcatgacgggcccacagtggaggcgatgcttaacggcatacatggcatgaacgccaacgcgcttgactgtcgcaacatgaccgggcacgatgaccagtcccgcggcggtcttagaggccgcagcggtaggttcggtggtggtcacggactcggctgctacggt

SEQ ID NO: 121340 - DNA, 842 bp, Zea mays
  Clone ID: MRT4577_42138C.1
tttccaagctcaggcgctcagctagctagcaagcagcagcagcacctctcaaacctttctttctgcctccccccgtctctttcgttcgctgccagacattctagccctctcgagtagctagctcgagcggtgcatgcatctgtagctacctagccgacatgggcaaagatgaggagggcgcgcgtgcgctgcttcgtgccctctctggtgttggcgagaggccggcccagcaggcgcgccttccgcgcatggcgggacagagacgaccaaggaacggaggtggcggtgatcgtccaatccgaggctgaaggagctagctaactggtggtgtggtggtggtgctggtgtgtgtagggtctaactcgatcggcgatttcggcggcggcatacatgggaaagccaggcatttttctcgcagtccaacaagtaccctttccgttagctttcctctccatgcatattgcagcattgcacggtacggtggtggtggttaatcaacagctagtcttagtttcaatgaatccatcgtcgtcgatctaagaacactactgtgtttttttgtttttggcattgttctcttatccctctcttaattaatttgggatcctttattattaggcgtagtaataataagttgaaggagctactgctaggttctttttgtagacccaaaatatatagtgggggcctggggtgtatgttatatctgcattttgctcgatcgaggtgcgatgatacgacttgctgctaaatcaaaggtttctcttcctgttctttttgtaagattattccaagtagtaatgcatatgttgtcgaaaaaaaaaaaaaaaaaagcggccctc

SEQ ID NO: 121341 - DNA, 394 bp, Zea mays
  unsure (1)..(394): unsure at all n locations
  Clone ID: MRT4577_42139C.1
cagcatataacctatatccaagtcatgcaccaagcgaaaagtganacattattttatgttcaataaaagaaaacagccnttttcaaagatatcaatcataaaacaagaacttatcacatgctctagaatatgaactaaaaagtgaacatgtcacaatatcatacataacagtatgcaacacacacaaattatatcatacaatgcataaacatgtaaatcaaaaagcatattatacatagaaaataacaaaacatataaaaccaaatatatctcaaactcatcatactcaccctatccctccctaatcccatgctcacccaacttacataacacacactaccactccccattttaaatgaaggaccaaaacctaacacacataaccaaatgctca

SEQ ID NO: 121342 - DNA, 474 bp, Zea mays
  Clone ID: MRT4577_4213C.1
gctgaattcgtgctgtcggcgcagcgccctaatctgcggttcagaaccgcccacgtgaacccctccgccctccgctccttccagctcgctctctacctgcaccagcctcgcccacccttcgctcgccaccgccatggggaggggaaagttcaagggaaagcccaccggccgccgcagcttctccacaccagaggagatcgacatgcaattgaaaaagagaattgatcttttttatgggcgaagtgttgaagatggctttggtgaaggaaatgtcttgttagcatcaagtaagtggcgacatcacaacccctacaagcttgtgccttaaaacaagaggatacaagaagttggagtgcttttgtgaaggcttttgtgaatcacttgaggcgttagtacttttgtgaatgattttgtaaagcgtttgcaaatatgtgcaaaacataataacatgtgtaggttttgcgaatgattttg

SEQ ID NO: 121343 - DNA, 476 bp, Zea mays
  Clone ID: MRT4577_42140C.1
cactggttgaatcattgagagacagggctgttaggcacatagcttgtggttcaaacttcacttcagctatctgtcaacataagtgggtttctggagctgagcagtcgcaatgtgcctcatgtcggcaaccatttgggttcaccaggaagaggcataattgccataattgtggtcttgtccattgtaatgcgtgcacctcacataaggtcctgagagcagcattggctcctaatcctgcaaaaccataccgtgtttgtgattcatgttttatgaaattgaacagtgcagcatactcaagtacaattaataagaagaaagaggttgtgcctcgccattctggtgaaagcaaccatgatgctaaattagctagagcaattgtgcccagcaatttggatatgattagaagtttggacagcaaggcagcaaaacaagggaagaaaactgatgcacttgcattccttcggactccccaaatg

SEQ ID NO: 121344 - DNA, 266 bp, Zea mays
  Clone ID: MRT4577_42141C.1
ttaagacacttcattttccccgaaaaccaccattatgagccttatccaaccccagctctcacgcctcccgcgagaacttcttcacaacctttcccgatgaattcaagatcccaattggagccgctctattagctctctccaaattcgatcgttccactgctatcaaggtccgagacaagctccccgaattcaccctcccagatgccgtagagaaggagcaatccagcgccgagctcctctcacgcggtcctctcgtgatagccttt

SEQ ID NO: 121345 - DNA, 430 bp, Zea mays
  Clone ID: MRT4577_42142C.1
catgcactgcccctacctagctcggaattcgggtcgcggacacaacctaagccatgtatttacatgcaaaaggggcaaatatgtgcggggggggatatattggctgcgttcgccttgcatctgccgggcccgtacctagatcttcgtcttaggtgaaccagctagggcaagaaatcgcacaggtgaggacaaagaggaacatgtaagccacgtgtaccctattaggatctgagaggggcaaaactttgtcacccatacgactctgagagtagtcacaaacatgcggatcagattgcaaggctgattaaggaagttggcgacgggactatcagcagtgtatggggggctataaataaacagaagggtgctattggagctgataagaaaatgaataaaaagtaacataattctgaggaatgcatggatttgc

SEQ ID NO: 121346 - DNA, 287 bp, Zea mays
  Clone ID: MRT4577_42143C.1
cgctctctcttgcaactccagcgctcctcactgccactgccagcaggtcgagctgcctccaaagcctgctttgctgctgcacctgcaagtctgcaaccgcgcacacagagagggcgacgacggtgagccgtgcgtacctggaccagaagctcgccctagccaatcgctgctcccaagaggcgaccttcggcgcagccaaagcggctgccgtggccactatcgcctccgcgatccccaccctgaccagcccgcgaatgctgccatggcccaaggccatcatgatcccc

SEQ ID NO: 121347 - DNA, 610 bp, Zea mays
  Clone ID: MRT4577_42144C.1
ccctcgagttttttttttttttttttttttttttttttttttttttttttttttttttttttttttttcccaaaacattaaattttgttttttttttatttggttttcttaaaccctgggaaaacaccccttccccccggcccaaacaacgggaaattttattcgcccttcctccttagcaggaaaaggatacccacagaaccttgttttcccccccccctaacagttttttaaatggccccgttcccgactccaaaccaaaacccaactggttcctttacataatggtttagggcccaatcttttaaacttgtaaacaaaaaacctccaaaaagaaagggggggcaaagtttattttgttgttgggccttttcggggaaggacctcaatattaggggggggcgggggggaacatgctcaccacctttggcgggggccaaaaaacccgttttcaataagttcgttgggaaccaacccgtcagggtcaaggccctccatttgagggaaggagtcttcaccctttggatttccccgaattgccaccggaagaaaaagttgaactgttgttcaccaatttaaacctgttgtttttcccgggggccatcctggc

SEQ ID NO: 121348 - DNA, 2887 bp, Zea mays
  Clone ID: MRT4577_42145C.1
cgcacgggtccccttctgcgtctttgcattgtcatcaacagcgcattacctggcgaagaggcagaaaaggcttcattcggcttcagtgcccgctgtgagcagtttgggtggttgccctctgtcagcgcaccggagcgctcatcctcagggtgttgtaaacggggtctcgtgcctctctcttgttctgcctgatggcgtccagcatgctgaagaggatgacagcacccctcctggaccacacactcaacagcagcgcaggaagagctggtgtggtagaggagacttccacccaactatccgcgcgcaagtgcaattatctctagggcctgccttcagagcacaggtctgtgagtgcagatggcgtggtcaccgggggtttcagttgcattcgtgttcccaaggaaaacctgctgcatgcgcgacatgtgtaccaagcctctgaccagacaacacatgagaaggctgaaggctttactcgtggattgcgactgtcgcgatcgtcattccgtacgctggtgtggctctgttctagggagaacactcacggcgggtggcagtggagcaagcgcagttgcggcaggttcgtgtcgcggataattgctatggccagcttaacaagatactcgccgtcttagatcaagataacattactgctgggtagcgatggagtggattcgcttggtgacatgatttttggaatggaagtggtggagacatccgtgtccaaggtcattcttttctggttcaggtcagataccagctgctgaaatcaagtggggaggtgcaaagcatgatccatctgatgaggatgacagcagaaggatgcaccctaggctgtcctttaaggctttcctcgaggttgtcaagatgaagagtttgccatggagtgactacgagatggatgctattcactcgttgcaacttattcttacaggtacactgaaccttgccttgaagcagcaccagtcatctggttgaaataaccagattggtgatctcaaacttgatgggctcgccgcactgcaggagatgcggaggggagctttacgcttcatggaaactagaaatgttctgagcctgatgaatggcgacattcgtcacctcagggaagctggcatgtcaaccttcatcctcactgctgaactcgctgctgctcctacagcagcacgacaatgaagccgtcactgcaaacaagtgccaaatgctgcccagctccctcagagttcattcggaaagcgacggtggttcgcggagaatgggaaatgctgcagcctgtaggatcaccgaatgcataagaaataagattgacttgtatggttgttagccaggcggggcatgaccatgttcatgggaagaccctatacttctgctcttttctgcctgaaattagtcatggacaaatttacccgggttgagggggactacagggccatcattcacaacccgaacccgctcattcctccgatatttggtgccgaccagttcggatggtgctctgagtggaacgcagccatgaccaagcttactgggtggcacagagatgaggtgatcgacaggatgctccttggcgaggttttcgacagcagcaatgcttcctgccttctgaagagcaaagacgctttcgtacgtctttgcattatcatcaacagcgcattagctggtgaagaggcagagaaggctccaatcggtttctttgaccgcgatggcaaatatattgagtgccttctgtcagtgaacagaaaagtgaatgcagatggcgtcgtcaccggagtgttctgtttcattcatgttcctagtgatgacctgcagcatgcgctacatgtgcagcaagcctctgagcagacagcactgagaaggctgaaggctttctcgtacatgcgacatgccatcgacaaacctctctcaggtatgctctattctagggaaacactcaagggcacaggcctggatgaagagcagatgaggcaggttcgtgtcgcggataattgccatcgccagctaaacaagatactcgccgacttagatcaagataacattactgacaagtcgagttgcttggatttggacatggctgagtttgtgctgcaagacgtggtggtgtctgctgtaagtcaagtactaataggttgccaggggaaaggcatcagagttgcttgcaacctgccggagagatccatgaagcaaaaggtttacggggatggtatacggctccagcagatcctctccgacttcttatttgtctcggtgaaattctctcctgctggtggctctgttgatatctcttccaaactgaccaagaacagcattggggaaaaccttcatctcatagacttcgaacttaggatcaagcaccaaggagcaggagtcccagcagaaatactgtcacagatgtatggggaggacaatagagaacagtcggaggagggcttgagcctccttgtttctagaaaccttctgaggctcatgaatggcgacattcgtcacctcagggaagctggcatgtcaaccttcatcctcactgctgaactcgctgctgctccttcagcagctggacattgaagacatcactgcaaacaagtgccaaatgtaacacagtcctcaagagtattatttctgcccttggtgccagctgcccagctccctcagagttcattcggaaagccacggtggttcgcggagaatgggaaatgctgcagcctgtaggatcaccgaatgcataagaaataagattgacttgtatggttgtttgttaggcggggaagttgtgcaggcatagtaagactccatacttctgctcttttctgcctgtaaccaactgttttctatcagttattaggctatctcatcagtttaattaaacaaaaaaaaaaaaaaaaaacccgcggcc

SEQ ID NO: 121349 - DNA, 723 bp, Zea mays
  unsure (1)..(723): unsure at all n locations
  Clone ID: MRT4577_42146C.1
tttatctctactactacttaagtgtctattgtaggcgtccaaaaggcggatggtgcacggttctgccggttccgcatcccgccagattgggacgaattcggcatcggctccaccaaaggctccacggatttggcatcagctccacagattttcggtacccatgctttgtttagccagtgattttgggaaatcattatccagtaattgtcaatttcggcgaggttttcattatcataagagaactgcatcttcttttcattatcataagggtttagggttgcctggctacggtcgatagtcatctatagccttgttttccgttttgcattctgtctggttgtgtatatatcttatgaacacgatttttggatgaacacattctatctgttttgctaggtttagaaatcatagaagtgccggtcaatgattttggcaaaccattatccaacaattgttgtaggattacgatcgatagtcatatgttttttctgttttgctaggtttctgaaatactgccaatagaaatcatagcagtgcattggacttaattaaagtatagaaatgaacctcatagcagtagcactaatggcattgctctctgtacatagnaaaacccnctaaccctcccacccacacaagntgcaattgccctcttaaatctattttttggtggaacaactaaattgacattgaagaagttttttggagtgtgcccgttctgca

SEQ ID NO: 121350 - DNA, 1551 bp, Zea mays
  unsure (1)..(1551): unsure at all n locations
  Clone ID: MRT4577_42147C.1
cagcagcaatgcttcctgccttctgaagagcaaagacgctttcgtacgtctttgcattatcatcaacagcgcattagctggtgaagaggcagagaaggctccaatcggtttctttgaccgcgatggcaaatatattgagtgccttctgtcagtgaacagaaaagtgaatgcagatggcgtcgtcaccggagtgttctgtttcattcatgttcctagtgatgacctccagcatgcgctacatgtgcagcaagcctctgagcagacagcactgagaaggctgaaggctttctcgtacatgcgacatgccatcgacaaacctctctcaggtatgctctattctagggaaacactcaagggcacaggcctggatgaagagcagatgaggcaggttcgcgtcgcggataattgccatcgccagctaaacaagatactcgccgacttagatcaagataacattactgacaagtcgagttgcttggatttggacatggctgagtttgtgctgcaggacgtggtggtgtctgctgtaagtcaagtactgataggttgccaggggaaaggcatcagagttgcttgcaacctgccggagagatccatgaagcaaaaggtttacggggatggtatacggctccagcagatcctctccgacttcttattcgtttcggtgaaattctctcctgctggtggctctgttgatatctcttccaaactgaccaagaacagcattggcgaaaaccttcatctcatagacttcgaacttaggatcaagcaccaaggagcaggagtcccagcagaaatactgtcacagatgtatggggaggacaatagagaacagtcggaggagggcttgagcctccttgtttctagaaaccttctgaggctcatgaatggcgacattcgtcacctcagggaagctggcatgtcaaccttcatcctcactgctgaactcgctgctgctccttcagcagctggacattgaagccgtcactgcaaacaagtgccaaatgctgcccagctccctcagagttcattcggaaagccacggtggttcgcggagaatgggaaatgctgcagcctgtaggatcaccgaatgcataagaaataagattgacttgtatggttgtttgttaggcggggaagttgtgcaggcatagtaagactccatacttctgctcttttctgcctgtaaccaactgttttctatcagttattaggctatctcatcagtttaattatacttatccctcatatttaaatttcactttgcaaacaatacaaaacagtgttttgatgaccatatggatgaactgcgaagacaatttttttaggctgtctctaatatttcatccatatggtcacccaaaatactattttgtacggtagactacactgttagtagtgtggagtttaaatatggggatgaataacctgttggagataaccttacctatcttcagcaaatcttctatcatatctcttattttaaaaaaaaaaaaaaaaaatttcactctacaaacagtatcatatacaactntgtaatgtcatatatag

SEQ ID NO: 121351 - DNA, 350 bp, Zea mays
  Clone ID: MRT4577_42148C.1
aacacccttaaataattcatccccgcgaagagccccccccctggggggttttttgggggttttccgcggtttttttaaaccccaagggaagcaaaaacaggggtccatggggccatggaaaaaccattccccccccaaaatttttgttcccccgcggggccactttaaaatttgagaaaaaaaagggaaaaaaaaggcggtacaatacaaagggccccaccaagagcaaccggggcttggggtcagactaaaaccatgcccacccccgacttgaacaaaaggttttaaatgtttcgacgggggtgggaaaccaaaaaaacaaggggggtctttaaggggtcccaaagggg

SEQ ID NO: 121352 - DNA, 411 bp, Zea mays
  unsure (1)..(411): unsure at all n locations
  Clone ID: MRT4577_42149C.1
ataaaaaataaataatactccatcgcggcgcggtgcaaaatatgatgaagctaactcatacagctgacacacatgatcgagtattccaagtttgcagacaaatacgttaagaacacacgacaagacacgacagattgaggtgtgatttngcgtgactaacaacatcataagaggcatgcagcaaaatagagtacgtacagctaacaagctgcagcagtacttcttttgttcaagatgatcctgaagctacttcactgcagcctacaggactctctcagatgagttacaaattttgttggcaagattaagaacattaataacatcatacacagctgcccacttcagtatatggaaatgctgctcgacctcatggtccttgttgatgagctgaccgagggtgggggacgcttg

SEQ ID NO: 121353 - DNA, 1260 bp, Zea mays
  Clone ID: MRT4577_4214C.1
ggccgcttttttttttttttttttctaataaatagatatacaaatttaattagtattgcacaataataaatccacatcacataaaccatgaacaagcaccacaacaaaatcattcacaaaacctacatatgttattatgttttgcacatatttgcaaacactttacaaaatcattcacaaaagtcctaacgcttcaagtgattcgcaaaagccttcacaaaagcactccagcttcttatgtatcctcgtgttttaaggcacaagcttgtaggggttgtgatgtcgccacttacttgatgctaacaagacatttccttcaccaaagccatcttcaacacttcgcccataaaaaagaacaattctctttttcaattgtctgtctgcaagacaagtgataattgcaataagtaacatgatatgttaaccagaaggtatgctagcaccagaaacgaccaaagaagatggtatgctatgaaagatattatgaagaagacattcgcccggctcaggaaggaatcgctcccctagttttcaatcaaattcacttactcgagcaatcgctgatggcgacgacgacatataagttctagtttacaacgaacaatttaaaattaagcaacaatgataatatattctgtagaaaataaatataaataagaatgttgagagatacgttaacaaaataagatgaatttaccattgctaacaaacactacaccaaaatagtgaacttccttggggcagtatgaatatgaattggagaaagctgttggctgtatttaatattatccaaagcaagtgatgaagaaatcaattttgaattataggagggcaaagggtcacggggaataaaagtagcactcatcatgtggatgaaactaattgaatggatattatagaccttcataaaggtgcgagggcgacctgaagtaccagcagatcgaaatcatccgatcaagcagtcgtctaggctcatcgtggcacactccagatatgaaatcgaattcgacctataaatgggaccatggggcgggcgggcgcgtcgttaccgatctcctctggtgtggagaagctgcggcggccggtgggctttcccttgaactttcccctccccatggcggtggcgagcgaagggtgggcgaggctggtgcaggtagagagcgagctggaaggagcggagggcggaggggttctacgtgggcggttcttgaaccgcagattagggctgctgctgctcagcctgcggagaatgaagagagt

SEQ ID NO: 121354 - DNA, 367 bp, Zea mays
  Clone ID: MRT4577_42150C.1
agcgggacatggtacattcaaaccgaccagaaaaaaaaaaagcggcatattaaaccttcgtccaggttctaaaggagaacaacagtttgactactgagggcgggacaatctctttgatctcttatacaaagccctacacaatgcgaacgcggacgccctagggcagcaatcctttatacgccccccaaaggcggatttacaacctgaccttggttccaactatgcccgaaagacgcggcctatgcctaacagtgagccctcggaccatccccatttttgcccccaggagcttgttttgaacagaccacttttggtgaaggaaccttccaatgattcaaaggggactcagcagaacctctttgagaat

SEQ ID NO: 121355 - DNA, 339 bp, Zea mays
  Clone ID: MRT4577_42151C.1
aataattaaattttttttttttttcccgaagcaagggcaatgtatattccagggtagaaacaacagtactgtgtaattacaaggaagggaacgacatatacagctctgagataccaacattgccaaaaatataagtaggctggtttggctaaatgctagctactcctaatggaaaaactgggtgaaataaccaccaaacctaatgtgcttattgagctagaaaaattctaaacaatttgaatgtacacccgcctgcttgccatcaaacttgccaatcattaggctgcatcgcttcttgtctcccaagaaattgttgaggaacaaccaatattgcaattt

SEQ ID NO: 121356 - DNA, 187 bp, Zea mays
  Clone ID: MRT4577_42152C.1
gagtcgccgcgctccttccccttcccaacgcgctctgtgcatatcaaatgcggatattgcgagtaccggcgaagtgcttgcttcactctcggtcatgttttccacggagtatcgacggcagatactggcatgccctttgtagaacaactggtggcccatgttagcagcgctcatgtacgtccttgga

SEQ ID NO: 121357 - DNA, 350 bp, Zea mays
  Clone ID: MRT4577_42153C.1
actcaccaagatctaacatattgcattctacccccggaggatgataaaatagctgggagcggcctagctactaacaggcaattgccttctgacatggatctcgacatcgctgatgcacagacacaaaggtctaatgcggtctggaaaaatcttaaaatcacagccatgtccttgtcccaagaactggcacagcaattgcccctggatatggaaccaactgttgctagtaggttgaaaggggattatagaactgccaagagaatcaacatgaagaacgttattccctatattgcgagtcacttctaaacggacaagatatggttgcaccccactcaccctaattaacggaa

SEQ ID NO: 121358 - DNA, 995 bp, Zea mays
  Clone ID: MRT4577_42154C.1
attggtacctcgaggcggctcggagacgctcgggccttccgttcgcaaacccttctcgctgccttctgcatccacgacgacgcctgcggcggcgctggcaaaatcccactgcgatggccaccaaatcccacgagaacaagaagcctactgcctccaagccgtctgtcaaccccaagtccccttcctccgacaagaaatccaagccgccgaagcccaccgaggagcagcgggagcaggtgccggcggtcaagaagccgaagaagcagaaggtgagggacgagatcgatgagatcttcagcgccgcaaaggcgggaaagaagcggaagccgccgcagcgggaggaggctgagacccatggggacgggaggaagaagcccaaggagagggccggggggagcagcagcaagaagaagaacaacaaggcgtcggggagtaagggcaagggtcgggtagctgctgctgacgacgacgaggaggaggagttcgaggagaagcggccgcgtcggcgcactgcggacggactcgccatatactcggccgatgagctcgggttcggcaaggccgacgccggtggcaccccgatgtgcccgttcgactgcgaatgctgcttctgagctctgagtttgtcggctgccgccttccctgccggaggtgatttgcacgaggctaattccagtgtagttgtacttgatgaattcggtggcgtgtccgcttacatctgtgctctgatgaaatggaaattttgatcctgaaattcagagtcaatgcttactgactggagcattaagaatttattatgttgacacatctagagcttgttgtttgttgatcagccgtagcttaaaacctagcgtttcagtgcaacacaaaaaaaaaaaaaaaaaaaaaaaaaaaaaaaaaaaaaaaaaaaaaaaaaaaaaaaaaaaaaaaaaaaaaagcagaggcagaacaaaatggggcggctgacacttgaggaagttgttcaccgggtaata

SEQ ID NO: 121359 - DNA, 218 bp, Zea mays
  Clone ID: MRT4577_42155C.1
tcgggctatggcggtggaggcccaaagcgggggtctactggcagctacggaccttgtccaaccaggccccttccctaccgcgatggcacgcgggcccggcgacaatggcttcgacccgctgggcctctcggacccagagggcaccgggggctccagcgagcccaagaggctggcccacggcgaggtgaacaaacggccgataccccatgcagggcgcg

SEQ ID NO: 121360 - DNA, 487 bp, Zea mays
  Clone ID: MRT4577_42156C.1
tgggtacctcgaggcgggtcgggcgccagacttgccgtactactgctcctgtactccagcaccagagcatgcgtgttgccacgcccacgactcgactcgccaccgcgtctctcgcgatcggagcagccatggccatggtcggccacgtcctcggcgcgcgtgaaggagaacaccgccgccgccaacagcgccgaatccgacgagctcggccgcttcaccgtcgacgagcacaacaagcgcgagaacgcgctgctggagttcgtacgcgtggtggaggtcaaggagtaggtggtggccggcacgctgcaccacctcacgcttgaggccatcaagacgggaaagaagaagatctacgcggccaaggtctgggtcaagccatagctcgacttcaagaatctccaggaattcatccacaaaggggaggtcaccaccggcaccaacgccgatctcagcgttcgcgccaaaaaagggtacctctcccgcctat

SEQ ID NO: 121361 - DNA, 588 bp, Zea mays
  Clone ID: MRT4577_42157C.1
ccaccccaaaaatagttttggtttttgcaaatttcctggaatatatcccaatccgtaccagctttacaacaccttgacgggctgtcccagtctccattggatgggcaggacaaaatggtttcattttccccgccccaacttgaaaggctggccttggccagcgggggtgccccaaaggtcccgcccgttcgccatgtccaccatggtccaaaaccctgttttaagggccgacccacccttgaaatgaaggggcaggggtcccctgggggaccccaagtcgtgggcgtgggcgtcaaactgggcggcctcagggttgaggcccctgatgaggaaaaacccgccaacgggggcggaaaggaaaatgaggatcacccgcagggggcacattttttttttggctgcctcctttgattcccgaccagggacccgaacacccattcgatcaatttgccggggacggggttaaggaagggcggcccctttgggctccggggggggcggttctggccacttggcgacggggagggaaaaaaacacaatggcggtttggtttgggttgggggagacccccctggttggggggggggg

SEQ ID NO: 121362 - DNA, 293 bp, Zea mays
  Clone ID: MRT4577_42158C.1
cgcccgcaggaccggcccggaattcattgcgcgacccaccccacgcgtccgctgaatgtgtcctccacaggcaacatttaaatgccgagcgataataggttgacgttgctgactactcacgctgaggtttacattcccgagaccggggaagaaattgcctaaggtaactaatcccctcagaggaaaatgctagtttctaagcacgatgatatggcttttgtggtaaaagaagaggctggattaagggcaatacggctgaggaaaactggaaccataatgatcaacaaggactt

SEQ ID NO: 121363 - DNA, 357 bp, Zea mays
  Clone ID: MRT4577_42159C.1
ccctcttcttttctgcagtccacccattctattccactgcccactcccagaatctacgcgaacgcacacgcaccctgactacatatcccccacatgcttaaggttttcccgtccccggccgccgcggtgccaacccagttttacgttgcgcccgcgacccctgctcccgtcgtcagggtggcggagcctcgcggcgtctactgaccggtcgatggccccgcgtgcaggtccgcgggcaaggtgaaggaacagctcattggggtcgctttccagcccttcgaggaaatcaacggggagctcgccctttcgccccagtcccccgacaagtgtctgttgcgccacatgttcttcgatgac

SEQ ID NO: 121364 - DNA, 574 bp, Zea mays
  Clone ID: MRT4577_4215C.1
ctcgaggccggccgggccgggatattacacctgactgacgacccgaaccgtgcatccgcattcccgaccgccaccatgaccgcccaacccgaagcagtctcagttccgctaaccctgtccgcgcatacgatcgagaggaagaagatggagatgacgtactacgactagcctttccccgtctcctcctcgccgcacaaaggcgtagctggtgagggacgtgtacccgccggtgcactacccgccggactgctacgccccgccggagtagggctaccctttgcagggctacacggcgcagtacgagttggcgcctcaacaggagcttaagagcaacgggccttccttcatgtatggatgcttggatggcctctgctgctgctgcctcctgtacgcctgcttctgaaagcgacaggttccgaccgacgaattcgacacggtgtccagtgaaattactagtctttctatgcgagggagatatcatagagagctggaactggcttgaggctgtgatgctatcgcgctattctagatttgtccgacgataatatgtctccctgaggttttatttctctct

SEQ ID NO: 121365 - DNA, 443 bp, Zea mays
  Clone ID: MRT4577_42160C.1
ccacgcgtccgaggccataaaaggttcttacaaaaggaacattaacatacatcccacatgtcctacagcggcaacccatgcatcacagacatcacacataagtttttctttatttggatgcattactagcactaagactctactaggtaccacatttacaggttccaaatgctatacctagtggacctgtcagagtcgtacgagtcattgtcactgggctcatacaattctggtgaggaaggggggtgaaaggattttgggccactgggttcacttgctccaatacttttatttcttcctccatcctctccttctctgggtctgaccttgctttgctctctagtgcatcctgctccatgaggtctacctcctttcagattgcaaggagagcattgagaaggtaatgctcgtcacccaaatgcatgaaagcctcttctagaaag

SEQ ID NO: 121366 - DNA, 438 bp, Zea mays
  Clone ID: MRT4577_42161C.1
ggtacctcgagccggccgggatcgttcccggagtttcaatgatcacacgaattctgcgcgtgtgaaactctcacccatgattacgaaccccggcctcttctggaagtgatccgagaaagaagctcggcaacttcaagcaactgctgctggggtcgtgggagcggacctcctcctacctatggcacgaccaaaagctgccagggcacccaacctgccatacctgcccatcctcgcgccgctgctcctcgcggaagcgtgcacaaccaggcgctggatcacctcgtcccgtctgcagaccccgtgcggtcggagacagtcacctgaaacgtcgcatccatgtctagcaggatgaccgtgatttcttattgtcactgacccgagtcctgctcagcagcatcctcctgtacctgggcatccacctacctgccgggaggccag

SEQ ID NO: 121367 - DNA, 479 bp, Zea mays
  Clone ID: MRT4577_42162C.1
ccggccgggattatccctctcacctcacttaacgcaatgtcgatcccgaacgaagctcttcaaaagttggtgcgggagatcgaaagccaggccttggtggcccagcagcagattggccttgcccgtacacaaatgacttcgaagcagcgcgaacagcgccttgtcaagctgactatgaatgagatgtctactcttccttctgacgcggtggtatacgaaggcgttggaaagatgtatgtaccccctcttctccccgaaacatgccctactggtctatccactgcagcacctggtccgatgtctgactgctgttgtaactttttctaggttcgtctcactgcctgtggactctcttcggcaaaagctcgagggccagacgcaaactctggaaggggaggtggacaagctcagccagcgattgctatatctggaaaccacacccaagaatagccgcgagcacattgaacagatgcttccca

SEQ ID NO: 121368 - DNA, 544 bp, Zea mays
  Clone ID: MRT4577_42163C.1
atctcctcctgccctcacgccgccgatcgtttccttctcgatgctctcttctccccaccactgctacagctcacgatcgcgatctccagaaacaagactgttcgcaatgccgagaccggtaccatgagtacgctagcatagagattctgtgaggcacgagactgcctcattaccaatgattcccgggagaacaagcagggatttccggaatgccttgagctactaatcgtactgaacaaccatgtccctcactaagggcaaccgcttcagcggctctttcagatgcctccatccctcgcccgtaagcatgagggtctgaatgcttggcgatgctcatcatggtgagcggccacaaagaccgggtatagatagcatgcatgcggaatcgctcaggtcgatgagctgtaactctacgctagggaacacgccgccgaaaaggcaacccgcttcccttgggtgtgaggctatcacgaagatgattccgcggcctcttgggcctgccattacgacgccagaactgtcactagcttggcgtcacccacgt

SEQ ID NO: 121369 - DNA, 579 bp, Zea mays
  Clone ID: MRT4577_42164C.1
aaaataaataaatggtgggtcctaaacggtttaactttcgaagttaaactaaaaggaaggcccctttacttgcttttttacagatccaaagagggctcaaatcaccctgaacttttacagagcacacaaggggggcagccccagcttttaaagctgggaaggtcagggccaaaacaaagagaaagattttagctaaagattttgccaccattgatactaaacagccctgcgatgagcccaaaaagcattagatgcgatcctgcaggctttgcattgagcacaaaaagcaaaagggggatcagttcgaaactttcatgggccttctttttaattccatggggaaggtcgacttttaatatgaaattgatgtaagggtcgatctaatgcactgggaaactgatgtatgtatcgaacactacgttaattatttcttgggtccctttggaatttttaggacgatgaacttgtttaaattgtgggacatgatcaagttgacatcatttttactgaaatgttggaaatctgcatgttgcattcctatcagaaggtgcttaaaatatgttgttatgaaaattgggt

SEQ ID NO: 121370 - DNA, 745 bp, Zea mays
  unsure (1)..(745): unsure at all n locations
  Clone ID: MRT4577_42165C.1
cattgggtacctcgaggccggccggggaaaaaatccagaccgcctcgcaagcctcgactgcccgccgtctgacattgccctttttgccatcaattctttctgattctttctgctcctgctgccccctgtgtccaaccacccccaacaaatatagtgcagtctgacccagcttcacaatgtcagcaaagtccatcctcgaggccgacggcaaggccatcctcaactaccacctcacccgcgccccggtcatcaagcccactcctctgcctgcccaggctacacacaaccctccccccaagcttgcatcgctgtacttccccgccgacgaggatgtcaagggcatcctcgaccaggcagaggctacatacccatggctgctgacccccggctccaagttcgttgcaaagccagatcagctcatcaagaggcgaggcaagagcggtctgctggccttgaacaagacctggcccgaggcgcgtgagtggatcgaggcgagggcaggaaaggagcagcgtgtcgagactgtcgatggtgtcctgagacagttcttggtcgagccctttgtcccccatccccaagacaccgagtactacatcaacatcaactccgtccgagagggcgactggatcctcttcacccacngaaggcggtgtcgacgtttggcgatgttgacgagaaggcagagaagcttctcatccccgtcgaccctcaggagtacccttncaaatgagagattgccgctact

SEQ ID NO: 121371 - DNA, 481 bp, Zea mays
  Clone ID: MRT4577_42166C.1
gagaaacttcagaaaattcaccaagagaaaaagagtacaacaactatcatcagggcatattttgatcttctggatctagattgcattgaatcttatacaagggctaactttagaaatatgctccactgatctttgtaaaactattgtaatatggcaaaacaccttcttctggaagtatatgcacatagagatttatcaactatttccttatgcaatggaaatctaagcccaactcttaagaagcttctgaagacaacaactttgtcttcccttcggctttggcactaaatcatcgcctcctagtcgaacctagccaatataaccaaattgattaagtacctcaatatgcccctctttgatctttgatttgccaaagtacacatgacttggctttgttggatggatgatggtgttgtcctcctcaatgtcaatatcgtcgctgtcctcagaaggacccacggcaacaacttctgtctagcag

SEQ ID NO: 121372 - DNA, 492 bp, Zea mays
  Clone ID: MRT4577_42167C.1
gggaccctcgaggctctggccgggtcccctccagccggcttctgctgcgctctccggctctttctgctctgtctgtcgaggcagctcttgcggtatacgccccatagcgtctccaccgcaacccgagcagggggagacgggaaacctgtatcggcccagcacgaggtcggccacaccacaggatcatcactggcaagggccctgcctgtgcgcagatcaacattggccacttcgatgcgaacggtccttgtgaaaggcactttacaaccattgctttctctccggttgccccgtctcactggccactcatacagcattccttgacaggctggggcataagaagtgctgttatcaagctgccagagtctacatctaagactccaataattgcgcacctccttcatcttgtgatgcatatctgccactatcttcaaaggctggatttcagctggacccttaaatacggagatgtagcttccttgttgggcccag

SEQ ID NO: 121373 - DNA, 537 bp, Zea mays
  Clone ID: MRT4577_42168C.1
gccacgttctacggcggcggcgatgcctccggcactatgggaggagcgtgcgggtatggcaacctgtacagcgcggggtaccgggaagaacaccgcggcgctgagcaccgcgctgttcaacaacgggcagagctgcggcgcgtgctttgagatccgctgcaccggcagcggcagctgcctgcctggtggttccgccgtcgtcacggccaccaacttctgcccgcccaactatgcgctccccaacaacgacggcgggtggtgcaacccgccgcagccgcacttcgacctcgccgagccggccttcacgcagatcgccgtcgccggcgccggcgtcgtgcctgtccaatacaggagggtggcgtgcaccaagcagggtggcatccggttcaccgtcaacggccactcctacttcgtcctgctgctcatcacgaacgtgggcggcgccggcgaactgacggcggtatcggtgaagggctcgcggacgggatggcagaccatgagccacaactggggcgccaacttgcagaacggcgcgct

SEQ ID NO: 121374 - DNA, 273 bp, Zea mays
  Clone ID: MRT4577_42169C.1
atgagtgaggaaaagaaaatgattgtggaaacgaaggtaactgaggagacgaagttgtttgaagaaaagagaactgtggatccttttatcgccgggtttgttgagtctatgtcaaaaacaaacacagagaagattactaaagagattctagaaggtttgtccgaagatactgatgatagtgatagttatgacgtggagagtggagacaaagattctgaagatcggccctggcgaccaagccatactgtcttcggaaaatcaactattaaatag

SEQ ID NO: 121375 - DNA, 361 bp, Zea mays
  Clone ID: MRT4577_4216C.1
aggtttagtagggctactagaaagaggagcttgggacagagctagcaagatatgaaccacgagcagaggttgtcccttgaaagaagcaccgaccgaacaggtatcgagatatgcatctggataggttgttttagctagctaggcatttgcttgtgattaatacttcttttcttaaggttaaggtagttagctaagcaagtatgtattcacggagaagcaatggtataggttgaggtttagaaagctaagtaaagtatttcaagtatgcatgcgtgataagtcaagcaaaacccggacggaagagatggatttttttatttgttagaggaaggtgtaatatgtgtatgtaataggactagaa

SEQ ID NO: 121376 - DNA, 355 bp, Zea mays
  Clone ID: MRT4577_42170C.1
tttggttttaatgaatcaaaaaaaagaaaaaaaaaaaaaaaaaaaaaaaaaaaaaaaaaaaaattataaaaaaaaaaaaaaaaaaaaataaagggtttgttcttttggcctgttccgcccttgggggcgaatttggggagatttccttgggggcggggggcgcggccgggcttgcggtgtatggggcccaattggccctttggggggggggtttgcggttgtctggtcgggggtttacaccgttgtgacggggggaatcttggggttcttgggtttgtggctttgtggccttgcgcctttccccttttggctttatggcgaatgggcctggagggttggccctttcccccttttt

SEQ ID NO: 121377 - DNA, 1039 bp, Zea mays
  Clone ID: MRT4577_42171C.1
gaatgtaacggtaccagcaagcagcaagcctctctccattttcttcgccggcggcaggtgcacacatcggggaatggcgacctacgaccatgccgccaccccgacaccgcagtctccgggcgtcggcggcgtacccttctcgtcctgcatcggcgacctcctccgcttcgtcctctcctcccacgccgccgcctaccccggtgacgacacggtcgctttccccctctcgccctcctactgcgcccgcctcctcaacgacggcgaactgttcgagaagctggaggcctgtattcagcagtgcctcgaggaggggcggctcccggggccgcccgcggtggttgggattccggctgaggaggaggggccggaggagagagggtggaagctgctgctgccggagaaaggcgctgagttgaagcggatgtacgatgctgttgagtttgagctgcatgttcaggaaccctacttcactcaactcagagccggagtcaagaaggttgaagggagattagcgactggtaactacaaccggattacacaaggttctttgctgctattcaataaatgcctcttgcttaacgttgaggcagttaggaagtacaattcattctctgagatgctgaaaggagagaaaatctcaaatgttcttcctggtatttcatcaattgtagaaggtgtgaaagtatataggaaattctatgcagaggaaaaggagaactcttatggagttttagcgatatcagtttcaaagccaacatctcaaccttacataaccatgaataatatccttgctggattggggtatgatggactgggtagactccttggtatggcgaaaacaactggaactgttccagacggactacctcctccaagatctgcactgctgtcatcttgtatgggactggttcaaccaaatttcattggattcttggagccctacaccccagaaggctatgctaagggatggaaacactagcaccagctgcctagtagatcttgatctgtattagcgactctatcagggttcatctgcata

SEQ ID NO: 121378 - DNA, 1028 bp, Zea mays
  unsure (1)..(1028): unsure at all n locations
  Clone ID: MRT4577_42172C.1
ggtaccctcccgggtcggccgggncatgccattgcggtattgccaacgtcgcttcgcccctgaatccctaattccgctaccgcgcatagggttttaggcttttagcacacaccggcggcgctgcataccaagggcttcccctccccgcgccgatgccgcgcaagcacgcgccggcgtttacgccggaggcagcctccgtctcctcgtcaggcggggctggccagccgcataacctccccgtgcttcaggcgaagatgaagcgtgacccggagggctacgaggaggagctccgccagctccaccgccacttcgagtcctcggtgttcctcttccagcagcaggcggcgctggctacaacctcgtcctcgggaggcggcggggaggtggccaaggagctcggggacctcgccctgttccttgctcacgtcgcgcctttctacccggatgacctcgccgatttgcccgaccagattggtggcttgctcgacaccaacgcgcgtgggctgccgccggggctcaggtctcacctcgtgcaggcgcttgtattgctggtgaatcggaagattgtcgatcttgaggacacaatggagttattcatggagcttcaagttattggagatcgagctgtaaaaaagctagcattttcgcatattgtacacagtatcaggaggatgaaccagaagcacaagaatgaatcgacaaatcgtaaactgcaaaacgtcctttttaaattcttacaggctgaagaagagtcacgagcaaagagagcatttactatcctttgtgatcttcaccgtcgaagggtctggtttgatgaacgcacaacaaatgcaatatgcgatgcttgtttccacccttcctctaggattatgatagctgctatttcatttcttcttggatatgaaaatgctccacaagaggatgatagcgacgcatcaagcagtgaagatgaagcagatcaaaacccacaaattctactcagtaaacaggacgtttataaggcaaatcacaagggtacgtctgctagt

SEQ ID NO: 121379 - DNA, 1967 bp, Zea mays
  Clone ID: MRT4577_42173C.1
ctcgctcgcggccggccggagcagcaagcctctctccattttcttcgccggcggcaggtgcacacatcggggaatggcgacctacgaccatgccgccaccccgacaccgcagtctccgggcgtcggcggcgtacccttctcgtcctgcatcggcgacctcctccgcttcgtcctctcctcccacgccgccgcctaccccggtgacgacacggtcgctttccccctctcgccctcctactgcgcccgcctcctcaacgacggcgaactgttcgagaagctggaggcctgtattcagcagtgcctcgaggaggggcggctcccggggccgcccgcggtggttgggattccggctgaggaggaggggccggaggagagagggtggaagctgctgctgccggagaaaggcgctgagttgaagcggatgtacgatgctgttgagtttgagctgcatgttcaggaaccctacttcactcaactcagagccggagtcaagaaggttgaagggagattagcgactggtaactacaaccggattacacaaggttctttgctgctattcaataaatgcctcttgcttaacgttgaggtaatattattttctaaatactaactctttcgggataatttattatgctttttacatcatcatctcttgttactgtttgcgtttgacattgatatttaacattctcttcaaaagaaattctaaatgttcttcctggtatttcatcaattgtagaaggtgtgaaagtatataggaaattctatgcagaggaaaaggagaactcttatggtagttttagcgatatcagtttcaaagccaacatctcaaccttacataaccatgaataatatccttgctggattggggtatgatgtacctggtatttcatcaattgtagaaggtgtgaaagtatactgttccagatgggactacctcctccaagatctgcactgctttcatcttgtatgggtttcaatcacccaaatgaaaccttacataaccatgaataatatccttgctggattggggtatgatggactgggtagactccttggtatggcgaaaacaactggaactgttccagatggactacctcctccaagatctgcactgctgtcatcttgtatgggactggttcaaccaaatgagtaggaaaggatggtggggcagctttaatgggagtggtaaagataaagtccaccttgatacgccggagtccagagttcgagacttctgtcgtgatctatttcattgttgtgttgcttgtcttcagattcaagcaagaaccaagctgcatctgaaaccattgagtctttgctgcgtgtgtgttgttggatgaatgttcatctgactcaaccctatggtcctgtttttgaaatccgcgtgcatgaaggttatggtgccagatagtctcaagatagttcaaagttcattggattcttggagccctacaccccagaaggctatgctaagggatggaaacactagcaccagctgcctagtagatcttgatctgtattagcgactctatcagggttcatctgcatatcttctgaaggcctacatgttctgttgaatcgaaagagacgatcatgtgttacgtcagctgcctgcctaagatcatgtgttgcatgaccactgttttatttctgaatatgttcttttttttttgcaaggcgtatatcgacaccaagtactgatatatgcgtctgaatatgttctacttttattcaaacacacccgccaagatcagttcatagttttgcacaaagacatgcaaatgcaattggacacaacccaaatagaaaggtattttttgtttcaatccaaactattcctctactgcgactaagtactgatgtcatttctggcatctgactaacaaaaagcatacaaccatgaatgtcgctgatgctagttattttgtggatttggccgtataaataatcaaataaattcgaag

SEQ ID NO: 121380 - DNA, 709 bp, Zea mays
  Clone ID: MRT4577_42174C.1
ctcttgcttaacgttgaggcagttaggaagtacaattcattctctgagagctgaaggagagaaaatctcaaatgttcttcctggtatttcatcaattgtagaaggtgtgaaagtatataggaaattctatgcagaggaaaaggagaactcttatggagttttagcgatatcagtttcaaagccaacatctcaaccttacataaccatgaataatatccttgctggattggggtatgatggactgggtagactccttggtatggcgaaaacaactggaactgttccagatggactacctcctccaagatctgcactgctgtcatcttgtatgggactggttcaaccaaatgagtaggaaaggatggtggggcagctttaatgggagtggtaaagataaagtccaccttgatacgccggagtccagagttcgagacttctgtcgtgatctatttcattgttgtgttgcttgtcttcagattcaagcaagaaccaagctgcatctgaaaccattgagtctttgctgcgtgtgtgttgttggatgaatgttcatctgactcaaccctatggtcctgtttttgaaatccgcgtgcatgaaggttatggtgccagatggtctcaagatggttcaaaggtatgagtttcatatttcttagattactaggtcagtgcccgtgcgttgcaacggaatcatataataccacgataactt

SEQ ID NO: 121381 - DNA, 526 bp, Zea mays
  Clone ID: MRT4577_42175C.1
gacagggacagacttttttattggaggggttgatgtatatatacaaaagttcccaaggggggggtcccttgggaataactgttacaaatggatggatagggggggatcactgcgcaatattttgaaaaacttttgtccgcgtttgttcgttttggggtttggggctgacaaccttttgaagctatttggtgcataatgggctggcaaaaacctggcactgtaagtttgagcaaaagttactgaaaaataatattgccaatgattttatgctgacgattttttttagcccaaggggcagccattgggatttaaacacccataaaaaaaaacttttttttttttcaacccataaacctatatgcaaagcatcccctggtcaaattatagaacaaagacctggaagcagactatttatgaacattgaatagtcttgatcgatgatccaattttaaatgcttccctgccatacttgccgagtcattttcagggggagccccgtccttctttatgtgcataggtttcgcca

SEQ ID NO: 121382 - DNA, 1514 bp, Zea mays
  Clone ID: MRT4577_42176C.1
cattgggtacctcgaggccggccggggctagtagtgctgcgcatatgcacacaaagggcaggaccgcaggagcacacacctcagtgcgccagcgttctgcacctcgctagctcgtcgtcttgcctgcgctgtcgtcgctgatccttgagatctgcagactccatggaggctgcagcagcgacgacggcggcggcgcttcttcctcccgctcggaaggtgttcatcctgcccctgcttctcctcctggctgcatcgtcgctggttccacgagcttcgtctgatggagcgcaatatgattatagagcttacactgagtgcaaacctcaccctgagccagctctgtacaacggtggcgtcctgcgctgggcgagcaaaataacggacttcagaacggaggacgaaggcaactactccccggcatttgtgctctacaacatgtcggcggcgactgcgtacagcttctcttgctgggtgaaaatcgacgggccagaaagcgcacatgtgaaggcgaagatactgaccgtggagaacgcagcgtcgcagtgcgtcggcaccgctatcgcgcgcaacgactgctggtcttttctcaagggtggctttactctcaactccacgtctcaaacctcggtgctctatttgcagactgcgagcccaaatgcttctacgatctcaatcagaagcccctccttgcagcccttctcacccgatcagtggaatcagcacagggaggagcgtatccaacagattcggaagcgtttcgtgaacctccatgtctccgacggcaacggcagccgcgtggtcggggcggacgtggccgtgcaccagatcaccagagacttccccttcggctccgccatcagcaagagcatcctcgggaacaggccgtaccaggactggttcaacgcgcggttcaacgcggcggtgttcgagaacgagctcaagtggtacgcgacggagccgtcgcctgggaaggaggagtacgcggcggcggaccagctgctgcggttcgtgcagtccaacgacgtgacggcgcgcgggcacaacatcttctgggaggaccccaggtacacgccggcgtgggtgaagaacctgacgggcccgcagctgcgcgccgcggtggcaggccgcgtccagagcctgctgtcgcggtacaagggcgacttcgtgcactgggacgtgagcaacgagatgctgcacttcggcttctacgaggaccggctgggcggcaacgccacggccgacttcttcagcacggccaggcgcgccgacccgctggccacgctcttcctcaacgacttcaacgtggtggaggcgtgcgacgacctcagctccagcgccgactcctacgtgtccaggcttcgccagctcgccgacgacgccggggtcaccttcgagggcatcgggctggagggccacttcgccaagcccaacgtcccctacgtgcgcgccgtgctcgacagctgggcacgctccgcctgcccgtctggctaccgaggtcgacgtcagcgccgcct

SEQ ID NO: 121383 - DNA, 455 bp, Zea mays
  Clone ID: MRT4577_42177C.1
tccagcgcggtggcggccgcccttttttttttttttttttttttttttattttttatttttttttttaatataatgttttttatttgttgttttgcttttccggccggctccgtatctctgacgtgttcgggccaccaccccagactcacgaacaattatcctactgacaaaacaaccaggggggaacacaggttagttttttcccaacaaatgacaaacattattggcttttcacacgcaacgctagaatagaggattatactcctatttattacgcaccagttatataaatatacccatgtgtggagtttggaatagaaagctaccaaaatctgtgataccgagatcgattcctgggcttgtataagcatgacttgttgacagccactttgttacaccacctttcacaaaagtatgtaaaaagttttgtattatcatccaatcccctccgcct

SEQ ID NO: 121384 - DNA, 313 bp, Zea mays
  Clone ID: MRT4577_42178C.1
gcgcatagctatttaccaaaatcattttctagcattgctaaacccatgagaccttaagtcacagtctcaatatagtctatgtcactcgctcccaagaggtctaccttccagagatcatccataagtccgctctacttaatctctcgactccgagaactgataacatactcagtcagtacaacctttataactgaaacatacaaaacgccttaatctacctctaaataatgcagatggtacattctatcaatgcactacacttaaccctatcctacccattttgttccctggcaccagtttaccatttaaacta

SEQ ID NO: 121385 - DNA, 287 bp, Zea mays
  Clone ID: MRT4577_42179C.1
attcggctcgagtcgcgagcgggccgcttcttttttttaattttttttttgacacttgggggtttttttagaccaaacagaggagctaatgaaatgtcagtctacaatgtaacaatcttcaccttccatgttgtgggtttgaattataaaacgggcatggacacaattaaacaaccattttttgttcatttaaaaatttaaaggtttccaatttttaaaagaaacccccccaaagcaaggtttgggggattcccctttaaagattttaggattaaacggggtttttt

SEQ ID NO: 121386 - DNA, 1212 bp, Zea mays
  Clone ID: MRT4577_4217C.1
aaaccatcaacaagccccacaacaaaatctttcgcaaaacctacacatgttattatgttttgcacatatttacaaacactttacaaaatcattcacaaaagtactaacgcttcaagggattcgcaaaagccttcacaaaagcactccaacttcttgtaacctcttgttttaaggcacaagcttgtaggggttgggatgcccccacttacttgatgctaacaagacatttccttcaccaaagccattttaaacacttcgcccataaaaaaaatcaattctttttttcaattgcatgtcttcataaaggggcgagggcgacctgaagtaccagcagctgcaattatttagaggataaagttatcaaaaacaagccaaatatggggggctaattatttaaacatatatccccaggtagaaattaatgaaaaaagaaagctaagtgtagcatttatttcctatatccagcctctaaagagctttatctaaggccaaatatagtgtgctaattgatttatcattgcgtctaatcttcacaaaaacccttttccgtgaagatctctgacagtgaaggagaaataaagctaaatctgaaccaagagcaaagtagcatcaagttatctcagtgcatcgttgcaggatgaataaaaagcaactaaacctttgaagcacaattatgtacccaaaccaaacggtacgtgcaaataggtgaatcattgagcctctaaatcgaactagctcagctactaaataaatggtttgagttctgctcgatcacgcaaaacccggtccagaactagctcacatcgaaatcatcagatcaagcagtcgtctaggctcaccgtggcacgctccagatatgaaatcgaattcgacctataaatgggaccatggggtgggcgggcgcgtcgttaccgatctcctctagtgtggagaagttgcggcggccggtgggctttcccttgaactttcccctccccatggcggcggcgagcaaagggcgagcgaggctggtgcaggtagagagcgagctggaaggagcggagggcggaggggttctgcgtgggcggtgattgaaccgcagaatggggcggctgctgctcagcctgtggagaatgaggagagttgaggggagagagaagagggaagggaggcggcgacggctgtggcggggagagaagccagggagcggccccggccggcctcgagggtccc

SEQ ID NO: 121387 - DNA, 294 bp, Zea mays
  Clone ID: MRT4577_42180C.1
agggctggttcctgaaaggatgtacagaggatccccagccgcctgcgaaacccaagccgccgcgtacgagcgtgcgttcgggccctcttctcccacctgttcgactccccatccccaggatgtcaacctcagtccctcaacgccatacctggacccaacgggtgaagaaagacgatgaggaggaggacccgctggaccagctgatctcccgctctggctgtgctgcctcccactttgcagtgcaggagtgcatggcccagcaccaggactggcggcaatgccagccacaggtgc

SEQ ID NO: 121388 - DNA, 724 bp, Zea mays
  unsure (1)..(724): unsure at all n locations
  Clone ID: MRT4577_42181C.1
ggtacagcctgcaggatctggtccggaattcccgggtcgacccacgcgtccgctttctggaaggttcgtggaggaggcggtcagggagaccgttactccacagcaagccggaatccgtgtccatccgtcctcctgaacccgcgcagacgccaccaaggtcgccatgccggagaacgtagcttcccgaagcggggcgcccaccgccgggcccggcagccgcgggaaaagcgcctaccaggaccgcgacaagccagcccagatccgcttcagcaatatttccgcggccaaagcggttgctgatgctattagaacaagccttggacctaaaggaatggacaaaatgattcaagatggaaaaggcgatgtgaccattacaaatgatggtgccaccattctgaaacaaatgcaggtattgcatccagcagccagaatgctggtggaattgtctaaagctcaagacatagaagcaggagatggcaccacgtcggttgtcatcattgctggctctcttttagactcctgtaccaaacttctgcagaaaggtatacatccaaccatcatttccgagtcattccagaaagctttggaaaaggggtccttgaaatccttactgacatgtctcgacctgtgcaactgagcgacagagaaactttgntaaatagcgcaactacttcattgaattcaaaggttgtctctcagtattcaagtctactctctccaatga

SEQ ID NO: 121389 - DNA, 393 bp, Zea mays
  Clone ID: MRT4577_42182C.1
gggtggggagcgatggcgaatgcggggacttaggagaggaggcaagatgaagggagagatgaagatgggcgcgagaggggacgcagaacaaggggaggaggagggtgcggagggagcgggagaaggaccagggaatagacttctctaggtaggagaagaatggggaggggatgataacgggggtcgagatgggggagtcagggcgctggctcgggatatcagggactggagaaggggcggcggcgatggtggcgcgcgagaatgctaagagggaggggctaatggagattcacgagttgcgggaggtggacaactccataccaaagaggaggaagcagcagcagccaggggccgacgggctaagcggggcagcaagggaggtgctggcggagg

SEQ ID NO: 121390 - DNA, 642 bp, Zea mays
  unsure (1)..(642): unsure at all n locations
  Clone ID: MRT4577_42183C.1
ggttgagctggtcaaatttgtgaacctgctgggacacccctggatatgtatctgctgttggctgacatttttctatgcaattcagcagtattcatggtgtaatctatagctgctggatgagtgctatttttggacaccagtgtctgaggtttacgttagtgttatttgtcaactatggttggaaggaccgaaggagatgtgataatgactagcatctcatgccactggtgactgatcatccagatacagggatgctacatgcctgagttggaattggtttttactactggctccttggctgtgctcagtgtttgtttgaatgatgaatgcaatgtgaatctagggtagtgatgctatagcaggacaattgtatgcctccaaggagtacattttgcttctgcctcctattaaagttggctgtatccataacagcattctatcataaagttgttcactagtttccacagatattgcttgcttgcatttctactggatgagaataaatcgtgttatcttgcgatttatctgactatatgctgagctgtatggatgctttcttttcaaggtcaacctgtggaatttattttcatgatttcttatgtcttgttgatcctggatcagnggtcactaattacatgactt

SEQ ID NO: 121391 - DNA, 573 bp, Zea mays
  Clone ID: MRT4577_42184C.1
acatgaacatacaaatatattaaagttactgcaactgctaccacatctacttattctgcaaaggcgcccaaacgcaaagggaaccggccccaggcgcacaaccacacactaaaaattgatagtgatttacagacttagtcgcctggccaatatctacatcctctttctatcaagctaaaggcaacggcttaggactgagacttgatggggatattacaccaacaacaggactaggctttcattctcctgtcccattcaggtaaatgcaatccctgtctgtgtcaacagctactacctcaacctatttgcattgctatgccttgttatcggtatagagggacatgtggatttggatcactcacactaacctgaatactcatactaactggaacaatctgaatcgctaggcttcatttccacttgagaatgacaatgcatatgctaccactctcgagcttgttaatatgataaatattaatcataaacctaacccttacctcagccatgggatattcctaatgctaaaagagaaaagcttaaaaacaacaacttcatatggctactgcgactgcc

SEQ ID NO: 121392 - DNA, 178 bp, Zea mays
  Clone ID: MRT4577_42185C.1
cgagcacagatccatcgatgggacaaggagctagagagactcggatagattgactgcacgttacaaactgctggagaacacaatagctaagtgtatctgatcatacctggcacacaatactgggcaatgcgctggtgactttgggttcaagatagggggcttgggacgaatttggaca

SEQ ID NO: 121393 - DNA, 836 bp, Zea mays
  Clone ID: MRT4577_42186C.1
gcacggctcgagggccggccgggggccgggctgttcggcctcatcccacagctcagcagcagcccagcccctcctccgtctccatttcttttgtccctctctctctctctctcggtgttaaaacgcggccgccgtacgcgcattgcctccttccttccgagcagtcgctggctcgcttcgattcttctccttctctcctcttgccggggcgttcttggaggggggctgtagctagcctagcagtgttcttggagctgctgccggtggaggtctgcaatggggaggagcggccatgcctgctccgttcttgggtcgctgctgctgctgctcctgctgctgccgggcccggccgctgcgcagaagggctcggcctggaagacgctgagtggcgatgctccagcagtcatagctaagggtggtttctcgggcctatttcccgactccagtgaccctgcttattcgtttgctgccagcaatcaggattcagcccagtggtgcgatgttcggttaaccaaggatggcgttggcatctgccttccagacataaaaatggataactgcacaaccatatccgatcttttcccaaagggaaagaagacctaccgtgtcaacggtgtgtccatgacggggtggttctctgtggactataacagcattgacctgaccaatgtaactttgctgcgagcaatcttgtctcgtactaataggtttgatggaagcttcacgctagttcaagttgaagttgcactgtcgcaatataaggcccctgcttggttgaatgttcagcatgacagtttctacagccagtttaatctgagcatgagaaactatatcct

SEQ ID NO: 121394 - DNA, 572 bp, Zea mays
  Clone ID: MRT4577_42187C.1
ggcgcccgcgcttgtgcccgcagtgaatatagaggggaaggacccgggcgccgcgcagcagcaggcgccagcgccggctgtggtgaggcccgagcggagggcgttggcgcggtggcgggtcatcgggagcgttggcggcggcagcttccgcagcagcagcgatggcgttctgctcatacttctacatgccgcggtcgctcacccggtgcttcaccacgccgcgccacacccggtcgccgtccgcctccggctgccggcgccccagcatcgtatccgactgcatcaagagggagagggacctggacgcctagaccgtcaagtgctggtcgttgctgtgggatcggcggtggcgcaagtccagccggcgggacccgggcgcgccgtccagcgagagcgagtccgccatccgcgccgcgtcggccgccatccttaaagcggccaagcactccactccgccggccaatatctgagccgtttcatttcgtctgctgccggatgcgttgctggcttccagttgcagctttgtgttctacgtctgtctgtccatatgctctgcgtgtgatgtgatatac

SEQ ID NO: 121395 - DNA, 483 bp, Zea mays
  Clone ID: MRT4577_42188C.1
gaccaccaagtctgacgagggaaatcttgttcccttttaccacacgcaaggagagataaggcactaccggggcagaaacaaggccccacgcttgactactggctgttcacgacagccaacagctctggaggaactgcgagtctgcatggaatataactgcgagccaccacgatgcaccactgccccaaaccctgctcctgtatccctatctgtcctcatgactcatgcatcgccctgcgctaccattctgactcattgaagatgtaagcggcgcacgtattgacatttctataatagagggcatctaaaccatacggacgttggagctttatatgtaatgctcttggcacttctctggggtgtgaatctggatactctatggactgtgcattggatgtgcacatgcactatcatcacctgtaatgttgctctatgaggatatccgataacagatactgcaacctttaggcttttgcaaacaaa

SEQ ID NO: 121396 - DNA, 1403 bp, Zea mays
  Clone ID: MRT4577_42189C.1
cattgggtacctcgaggccggccggattcctctcctcttctctccccgcgcccctccctctcccccaaaaccctaacccatcgtcgaccggtccccgctctcgtggcgccggcaagatgaccctcctcgcagccatcaccaaccccgccgccgactcccgctccggctccagcgagagggcccaccctatcgtgctcaccccgggtgtcacgccgccgccgccgccatcctccacgcttcccaccccaataccgtcttccacctggtcgctctccccagccgaccccaccctcgccaccgccgcttcctacctcgcggcctcgcttgcctcctgctcctccctcccgcagctccgcgcccttctcaccacctttatcaccactctgtcacaatccctcgcactcccaaccccgccggcggccctccccgccgccatccgcgctgtcgccccttacttccccgccgcaatcgcctcccttgtggcctccaaggcggtaagcctcgccgggcacgacatcctccttgctctcgcggaatcccgcctcctcccgcacccgccaccggaactcatctcgtcgctctgcgacaacgaccgggtcgaccttgtctgcgtcttgctccgccaggccgccgacatacgttcctccgagatcctcgccgcgctccgctgcttcctctcgccggcctccgataaggcttacgacgccatgatggacgtcaagtgccgatggaaggacgccgcggtgcttgctgtcaacaggtgtcgggagaagagcgccgtgaagaggaagaaagctgacgctgcggcgaggcacgcggcgctgctgctcatgatggggcacgatgggttcacctccccagaggtgtgcctgcattacctatttgcatcagggaatgtggattccgtggtgcttggagcggctctggctgaacttgatggcggggaggtagtcaggttgatgagatatctcaacaagtggattcggaagtactggagcttctcagaagcgcacacttgcccggaggctgtgggaaacctcagattggagcagtgtgacagcgtgccgtcgtttggagcagtggctagggcgctaggagtgctgctggataatcatttttcacatcttgtgttgaatgctgatgtgagggaggacttgagggctgcggacttgatggtgagggagctcgctgccgaagcagagtcttctgggccaatcctagacttgctgcataggtttcaactggataagtgagagattgatcttattctgtcgaaactatttactttttgtacttccaaagccgatgcatggaaatttttaactgttttattgcattgcagtgatgagatatgtgttgcagcattgggtattgaagtataatagtacattgttggttggaaa

SEQ ID NO: 121397 - DNA, 932 bp, Zea mays
  unsure (1)..(932): unsure at all n locations
  Clone ID: MRT4577_4218C.1
cgcgccttggtgtatctatgagcgtggtttgattggaacatacactgactggtgcgaggccttctctacttatccacgaacatacgatctgatacatggtaatggaatcttcagctcccatattcacaagtgtgggattatcgacatcctggttgagatggatcgcattctccggccagggggtgccgtcatagttcgggacagagccgacgtcgttctcagagtcaagaaggacgctgaccgtctacgatggcatagccgagttgtcgacactgaaaatgggcctctggatccagagaagctcctcattgtggacaattccctgccactcccagggagctgaataaaagtgagagcactagcaagaacctgcaggatcagagcaggcttctaggtgacggtctgctcatgtttcgagaaagagccggtggtctggtctgcgaccttactacctgttacagtatgtctttcggtttaagaagatctcactacatgtgcagaggtacagatgaagagtctacaggcgactgggatgtttattacatgtacaggtgttggagaaacaaaatgctacgtattacctttacagaggaagggttcaaggctattggctatcctacagcgagagattcagaattgcatgcaggtctacctacatatattgttgggactgtattagggtttgggtacattattggagacactgacgactccagtggatgccatttctgatgtgcatcctaatttctcatgctcgaacgactagctgtgcagttggaaccatccgatctcgattttctagaatatgtctacgttgagtgtaccttttttttttggtaatccgttcatgtacatttgtataggttgttgtatgtagatcttgtgagctgtgntgtttggccgctaagcaatctacggcttatattgtggtg

SEQ ID NO: 121398 - DNA, 315 bp, Zea mays
  Clone ID: MRT4577_42190C.1
ttatcaatcacccacaaaacccccctcctaaaaaaattattacactttattctacttgcattgtggctatttccaccaccattaactttcaattaaagagccctaaccatcttacaataccaactttaactctttataaccaactaacatcatctctcactgtaccaaatcttcctttcattcaaagtctatcattccatttactcttacaaataaatatccaccacatcacctttcactccccaaactttaagggacaacccaaatactcttaatccacattgttatctcctacttccttacctatcttataaa

SEQ ID NO: 121399 - DNA, 426 bp, Zea mays
  unsure (1)..(426): unsure at all n locations
  Clone ID: MRT4577_42191C.1
accttagtctcgctacgtagagtgcaataaaaaaagcagccgcaatggcgagcagcaccatggcccttctccacgcttcgccggcaaggcgtgaacgtgccgtcgtcgtccgcttcggcgaggcccgcgtgacgatgcgcaagacgggggaaggccaagccaggggggtcggagcccgggacggcccgaccggtctgacctggccactgtcgcagccaccactactgcgggcgagttcccgggcgatacgctggaaccggggctgtggggcccggagacttgcaagaccggagctgaggtgatccctcccgtggccatgctggcgcgctggtggtttccccgactgtcgccgacgggtaagttcggcgaggcggtggttaaggcggttcanatttagcgagggggctggatacctggacccgacct

SEQ ID NO: 121400 - DNA, 1270 bp, Zea mays
  Clone ID: MRT4577_42192C.1
ccctcgaggcctgccgggatgccacgcgaacgggaaaaatcgccccatcccctgactatcactggctcactgcccttccacctacaggttccaggttaagtttaagattgataaagattgccgtcctctccctgagagtagtctcaagcaagccatcaaggaaaattacaatgcaaagagcaaatttgatccagagctcaccacaaaacaagtccaaaggttacttttgctgtttaagcctgttagtgcacctcaatctgtttcaaataatcaccttggagaaaggcgccactatgaaaaacgaaggaagccacgccattttgaagaaaggcggcctattgaagcagcgcgtcggccacgatttgatgaggaaaggcgccctgcggttagacatgttccttttgaggatccatacagggcaccacgctatgctccagttcctgttgactctcagcatggccattctttggctagtgatcaccacagatattatcaaccagcacttacacctgagcctcggcagcttcctcttgttctagagcctcgatatgttccgccggccctagatcatcatcatgtgccagagcttcgacatgccccacctgcatattatcgcactttggctccatctggtgattcatactatcggtctgttgagaatctggtgcctgagcgatatgcagacagaaccatggctgacttgaccactagagatccaattattagggatcacacagcactaccaggggaggcacttgctcgagcagaccgcttggatgatctctaccgttctgatcgtgtggaggaactctaccgttctgatcgacttgttaaccgtgctgtggaccgccctcatccagcctattttacagctgcttatgagaccaaccctgcttatgctgaaacgagcattaggcctgtctctgcaagggtcaatggacccagtgcggcagtttcgtcactctattccttcagtggtggcccagtatatcggtaatgaatgatcatggctctgttgaaagccttagccagactaagaagacagggtattcgtctctttaactgcaactgttgtttgccttagcttctattcggtattttcttaaatatccttccctggttgaatgacattcgttatcaagacttgatggtctaaactgtcgaaattatgtactgtacttggcatgcttgaagctcacttcgttctgtgatggatcgatgcacgtattggtagcggatcgatgcacgtattggtagcatttgcttgttc

SEQ ID NO: 121401 - DNA, 454 bp, Zea mays
  Clone ID: MRT4577_42193C.1
gctaacaaacaaacctgtgcattgacacttcctttttgcaatataatctctgcatattgagaaatctgccattacaacagcgggagggaacactacagtcctctcaaacacatttctttttaaacaacagggtcgactcatggacagcatctgtcgatcatacatgatacatccaacaagaagaaacaccgagggggtcaaaagaaaatagcgctggctgaattacacattagtggcgcgggtataacccatactgtccgctcttaaggagacccgactacgatgcattgcccccccaagggagggggtgctccacacacaacatgaattaatctgcctgtggggtgcagctggcatacacaactaacattttaagaatgcataaacaacttactattcttgtgagaacgcggcttaatcctctaagccatccataatggcgcggacgcctcct

SEQ ID NO: 121402 - DNA, 681 bp, Zea mays
  Clone ID: MRT4577_42194C.1
ctggccgggatcgtaaccctaatcggacaaaatcgggctatcttcttcctatatatcccgttgccgctgcctcggccgtttcatgtccagcggccatggtgaagaagcccaacggtgtcgccaaggccacggcgacctctgctgacgcggcagcccagccatccaaggagaatccgtccacccctgggttggtcaaggcctcgaagtttaagaagagaaaggtcaaggccaaccgtgcgaagcaggcagtcgctgcagcagctattgacgaggtcgcccctgtaggtgcaggcactggtgatggcgatgcatctgcatcagcggctttaccgcaaccatccgatgttgccgaggcattacttgtggtgcaaacgccaaagtcaaccacttttgctgaggcatcacctgtggcacagacgcagaagccagccactgatgctgaaggattggtgcctgcaccaataccaaccactgctgtagcatcagcttcgttgccaaagccaaaaccagctcaagctaatgctgatgctgcagctgcaatttctgccagcaagggcaatggtgtgggtgctgataatagtaggggtgatggtgagatgaagaacaagaaagagagggccatgagtgacaaggggaaggaggttatggaggaaggaggaagtaagggaaagggtaagggta

SEQ ID NO: 121403 - DNA, 2262 bp, Zea mays
  Clone ID: MRT4577_42195C.1
aaaaaaaaaaaaaaaaaaaaaaaaaaaaaaaaaaaaaaaaaaaaaaaaaaaaaaaaaagggacctccatgccggccggggcaagtttatatttatgggcaacctcgaggccggccgggatgtccaggtaaaaggaaaaatcgccccatcccctgactatcactggctcactgcccttccacctacaggttccagcggccatggtgaagaagcccaacggtgtcgccaaggccacggcgacctctgctgacgcggcagcccagccatccaaggagaatccgtccacccctgggttggtcaaggcctcgaagtttaagaagagaaaggtcaaggccaaccgtgcgaagcaggcagtcgctgcagcagctattgacgaggtcgcccctgtaggtgcaggcactggtgatggcgatgcatctgcatcagcggctttaccgcaaccatccgatgttgccgaggcattacctgtggtgcaaacgccaaagtcaaccacttttgctgaggcatcacctgtggcacagacgcagaagccagccactgatgctgaaggattggtgcctgcaccaataccaaccactgctgtagcatcagcttcgtcgccaaagccaaaaccagctcaagctaatgctgatgctgcagctgcaatttctgccagcaagggcaatgggtgtgggtgctgataatagtaggggtgatggtgagatgaagaacaagaaagagagggccatgagtgacaaggggaaggaggttatggaggaatggaggaagtaagggaaagggtaagggtaagggggaagtaggtctgtgggtcaagaaggaagaaaggggtgaccgtaaggttgcagggtttatattcatgtgcaatgcaaagactaagaaggagtgctaccagaatcgcttgtttgggatgcctggtgggaagattgaaatggtcaagaagattaggccaggggtcaagctgttcctgtatgattttgacttgaagcttctgtatggcgtgtacaaggcagcatcacatggtgggctgaaccttgtccatgaagcatttaatgggaagttccctgcacaggttaagtttaagattgataaagattgccgtcctctccctgagagtagtctcaagcaagccatcaaggaaaattacaatgcaaagagcaaatttgatccagagctcaccacaaaacaagtccaaaggttacttttgctgtttaagcctgttagtgcacctcaatctgtttcaaataatcaccttggagaaaggcgccactatgaaaaacgaaggaagccacgtcattttgaagaaaggcggcctattgaagcagcgcgtcggccacggtttgatgaggaaaggcgccctgcggttagacatgttccttttgaggatccatacagggcaccacgctatgctccagttcctgttgactctcagcatggccattctttggctagtgatcaccacagatattatcaaccagcacttacacctgagcctcggcagcttcctcttgttctagagcctcgatatgttccgccggccctagatcatcatcatgtgccagagcttcgacatgccccacctgcatattatcgcactttggctccatctggtgattcatactatcggtctgttgagaatctggtgcctgagcgatatgcagacagaaccatggctgacttgaccactagagatccaattattagggatcacacagcactaccaggggaggcacttgctcgagcagaccgcttggatgatctctaccgttctgatcgtgtggaggaactctaccgttctgatcgacttgttaaccgtgctgtggaccgccctcatccagcctattttacagctgcttatgagaccaaccctgcttatgctgaaacgagcattaggcctgtctctgcaagggtcaatggacccagtgcggcagtttcgtcactctattccttcagtggtggcccagtatatcggtaatgaatgatcatggctctgttgaaagccttagccagactaagaagacagggtattcgtctctttaactgcaactgttgtttgccttagcttctattcggtattttcttaaatatccttccctggatgaatgacattcgttatcaagacttgatggtctaaactgtcgaaattatgtactgtacttggcgtgctttgaagctcacttcgttctgtgaatggatcgatgcacgtattggtagcaaaaaaaaaaaaaaaaaggcccctaaaaaaaaaaaaaaaaaagcggccgct

SEQ ID NO: 121404 - DNA, 296 bp, Zea mays
  Clone ID: MRT4577_42196C.1
aacacaaatgtcatgtctttaagtaaaataaaatatagcatacattttcagcactacatttcgcatggtatcaatatatttgtcaaaaccatcatcaatagtaaatctattttgaattgcatgctaacttcaataacatagaatttgcataatacatcatggagctaaaaacattaagtaaccatgatcgcttgtttgtgaaattgaacaagagtctgttgtatagcaaatctagaattcttttttcttcctcatttaggaaaagggagagaatattcataatcacaacatacatg

SEQ ID NO: 121405 - DNA, 246 bp, Zea mays
  Clone ID: MRT4577_42197C.1
caattgttcagtttgatgcggttcgtgtcccaacagtgcatagttcttggggtttgaaacgatgaagaagatccccccctttttttcttctcactttgatcaacgttagggggaacaagaaacaaagaaagaaagaaaggtatactgcagcagaaaaatgtttagacagcatctcttgctcaagtaactcatgcatggcatctgtactgtacatgcagctagcagtaaaatacagaatatctgcca

SEQ ID NO: 121406 - DNA, 400 bp, Zea mays
  Clone ID: MRT4577_42198C.1
cccacatctgtacacagttacaaagctaggcaatccacacttaagactcccatgctctacgcccctcgcgcttaccgctgccggcctgcagacttgcctcctacgacgaggggggggatcagacaattgctgccttgatcgcaatgcacaggccctccaagccgacccggggcgcggagcgcacccccaaggctgccgaaccggcaaccgcgagggcggcgctatcatccaaatctaggaatgcgacaaacagggcgtatcatcggcctacaaggatacagagggccccgacgcgctcttagtcgactataagccaaccaccgatgttcctcttccacggacagggcgcccaaaccgttggaatggaggcaaaagctaagagagttccaacagctaccaa

SEQ ID NO: 121407 - DNA, 379 bp, Zea mays
  Clone ID: MRT4577_42199C.1
gatgttatcggtttggggttttttatttacagttaaattaggggctagcccattatttcggatgcaatatataccgtgacaaaaaatgtggccgaacacatgggtgtaaaaaaaaaacgcacgctaagcttgcacatctgttttaaaactaccggactgtgaaacgtgacagaatgtgcccaaaccctgttgaccttgggaaaaattgtggagatcatattccatcgaatggaaccttcattgcgctatttgcccgtgggcaggcacaaggttggttctgaagggttgtatgagatcgggttggggaggggaccctaatcttgtcccagcctatgcctccaggagtcatctttactggggcgaaaatccggtgggggga

SEQ ID NO: 121408 - DNA, 405 bp, Zea mays
  Clone ID: MRT4577_4219C.1
ggaaaccccatgggtaatattcttaacaaagcacaaaaaaactaaaacttagggaattcgttacaggacgggagcaaataagttaaacacaaaaagacaacgggcccaaaaccagcagggatccaggggccaggggccccgttcacatttattctcagcaaaaacaagcagcaaagaggggcggggaccaaaggccatgggggacgacccacgatgggggggcaaaaatatctctctctacggggtcttgaacatgggggggatcagggcaacaacccggtggctgaacccccactcggtggcgaaccaaaaaacaagcttgaagaaggggtcgttcagggcaatcccggccttggcgtcaaaaatgctcgacctgctgtcaccggggaaggcgggggaaaccaa

SEQ ID NO: 121409 - DNA, 515 bp, Zea mays
  Clone ID: MRT4577_421C.1
atatacattcattctttttaacttaaaaaaaacaaaaaaaagaaataaacccaataataaatttgaaggggacggggggccaggggggaggaaaaagggcccgcggggcgggaaggggaggaaaagcaagcgggacccgaaggggggggccggggaaacgggaaaagggcgggggaaccgcccacccaaaaataggcacggggcccaacccaaagaaacgggcgcccccccccgaaacccgggccggggggggcaagccggcaatcccggcccggggccgggagggggaccacttggcccaaaagggggccgaggtgaagccggggggaaacagggacaaagccgcaaccgggggaaaatgggacccggtaacaaaaccacaaaaaccaggagcgggaaacaaaaggggtaaaccccggggggcccaaggggggaaccaacccccattaaggggggaaaccccacggccccctttccaaaaggaaaacccgaacgcccggggggaagaaggaagc

SEQ ID NO: 121410 - DNA, 444 bp, Zea mays
  Clone ID: MRT4577_42200C.1
tttcttaacccccgggcccagaccccaccttttgtttgttgtttaggagtgcctacccacaccccctgtgaacgaggacagatagaaattaactattgccaggtagaggaactacagaggcggatgcgggggggcatggcgaactgccatgacgggacgcacataagcctgggccaggtaccacagggtagcgcgcgacaccatacggggaggtcatatccaagaaggggatgacgccccgagcatgggaaggctaacatggtatgacgctggaacaaaagacatggagacaaaaactggtggcgcgaatggcgccatgagccatgaagaagaggacactaaggggtgaaaaggcgggtagaagaatgcaaaggagcacctagagcctatcaaggcataaaagacgacgcaagcatatgcagacctgaaaaagatggatggaga

SEQ ID NO: 121411 - DNA, 319 bp, Zea mays
  Clone ID: MRT4577_42201C.1
agaggacagcaactaaaagttatttttttttgtgttggttgttgatgctttgactggcatcgatactcaagatgtgtgacagatgttcggctttgaaaagcagtgtggaactagatgcctgggaggtaggatacatgaccaggttgctagatgtatatgttctcaacgggctgtcagtgcataatgtgatgctgctacatgaatcaaggtgtggaaaaacgtatgatgaaggaggaacaaaaacattgaacaacaatgggaaaccctaaaacgaaacaaggaaaatatagaaaaggggcgtgcctggtctagaggatcc

SEQ ID NO: 121412 - DNA, 339 bp, Zea mays
  Clone ID: MRT4577_42202C.1
attcggctcgagggatcaaagtgaccctttgttgtcacaccacaagaatggctagactgatgggggggctattaaagttagattgtgcgtccacacaaaggaaattgctttatttgaattcatcgaatcaaacaggcaaatgtagccacagcatgatgtcacgactgaaagcatcacagcttgattttccagacaaactttaaatgtgctacatgaaactggtcttgtatcctgaaccaacctacagagagagacacactgtttgattgtttgaaaaaaaacgagtctgttaatttagttcttgattaaacaatacgacctttttcagcatagtttttt

SEQ ID NO: 121413 - DNA, 283 bp, Zea mays
  Clone ID: MRT4577_42203C.1
cattattctatttttcctgggtaggatttcattccttttttcccccatttcattctgctctcctcctccctctttatggaaaaaaaatctcccgggaggctggtaaaaaatataagggggggaacttcccatgtagtcccccaataaaaacatgttgctcataaaaaaaaacccctgtggggggaaaaaagggggagaccttaagggggataattgataatgggggggcccgtaaaaaatagtctttccccccttatccccaaatgtaagaaaatcaagagtc

SEQ ID NO: 121414 - DNA, 273 bp, Zea mays
  unsure (1)..(273): unsure at all n locations
  Clone ID: MRT4577_42204C.1
tgatcatcgcttcaggactatgctactactgtaaatacccactaaaatgacctttttaacattgagattgctgctgcttttcttttttacccttacccttattaaaacctaaccagatctgctcatttctgtatatgagagcatacaatggatcacaaaatcattcttttgatgccttgctaacctaatgtgtaataatcacatcaattnttagattttgatcgaatataacagatcctattttatccggaactgctaactcaatggtagagt

SEQ ID NO: 121415 - DNA, 554 bp, Zea mays
  unsure (1)..(554): unsure at all n locations
  Clone ID: MRT4577_42205C.1
agagatctgggggggggggggggggggggtanactctgggcggcggcggcggcgtcataacctactcgtcgcacaggtagtaaaccagatcacctagggtagtcacctagtagtctaggggtgacttgcacaggtaaaaaaggcacgcgacgtactagccaacagcggtgaaaccgcaggagggtgggcgggcgtcccagctccgtaaggaggacatgcgtcggaactgaacgttcgcaagaaggactaagtttactacaattggagacaagagccgagtctgtgagagtcgatacccctcgacgtctagtcagttctctccgagtataacctcgaggtgccgaaggtaggccagtaggtacggtgtgccttccgtccaagactgcactccaagggtgactagcagtagaaccaccataaagtatatcagggcctaggactgtgcgacaaccttgcaaggtacgacagaaaggggtgacgttaggacctctctaaacgtaagagtgcggggggtcagattcttaatgaaggcgcagacgcctgcaacttctagg

SEQ ID NO: 121416 - DNA, 914 bp, Zea mays
  unsure (1)..(914): unsure at all n locations
  Clone ID: MRT4577_42206C.1
ccggccgggatgttaggctaaccacccagagcaacgacgcacggacgtccggccggggcgtaccagcagagcatcaccgccggcgcggcggcgcggcgctatattataagaagaacccaagtctttgagctggagtcgtccatcgcgacataccaacttaacctttcgtgacacagacagaccggccgtcgtcgtcaatgtcgaagctgcagaggtcgtcggtgtcgttccggcgtcagggctcgtcggggcgcatctgggacgacccactgcggggcctggacctcaaggggctgtcgtcgtcgacgacgacgacgacgacgacgccgaaggcggcgccgttgcaccccgacgccagccttctcgcgggggacccctcgccccgcgtggtgtcccgctcgctgctgatgcgccacgccggcgccggcgcctcatcggcaggaatcatagtggagagcccagaggtggtcgtggcttccgcgtccccggctgatgcggccagcgtcggcgtcaccggggcagacggcggcgagcgccaggagaggcccaagaagctgcggcggaggatctcgtccgcgttctgcgcctgcatggggcatcccccggcgtcgcacgcgcagcagtaggcaggctacggtgcgtactcaaatctaccagctgcgtgcggtccgtcgtggggtatggctgacgcgcggcctggggttctcgctctctttcttgctatgcaacaaacatttgtgatttgtgcttactgcttacgcgtgagaccctacttgttgtaagatttttctcccctcttttctgtggaggtcataggatgtatcaattgcatgagggcatggcttcattnntggggctgnnttgatgtggatctgatctgatacgctgtaaatggaaaagagtagccattacat

SEQ ID NO: 121417 - DNA, 264 bp, Zea mays
  Clone ID: MRT4577_42207C.1
atccggttcgagaaaaaagacgctccatacgtttagtgagtggtgtggcatggattccacagtccaggtattgtattgcattgacatgagagcactggccctttaactccacaccattacccttcgtactagatgagtgccgatagtgaactctaagtactggcacaatatcgaactttacatgtcactgcggagctgatgctgctggagctgacggaggagcctgtggatgccacattgctgtggaccacgcacgatactcat

SEQ ID NO: 121418 - DNA, 181 bp, Zea mays
  Clone ID: MRT4577_42208C.1
tcctctagagctggccgcccttctcctttttttttctatatctagcatctttcgtcgaggctaacagtggctaggacgtcagacaagggaaaacagcattcatctatatgacttggaccaagcactgcctccgccaggtataagtcttgactcttcctgaccattgcatgtttttttagtt

SEQ ID NO: 121419 - DNA, 123 bp, Zea mays
  Clone ID: MRT4577_42209C.1
tcgcgatctagaactagcgtacgcgtgggtcgcgagcggccgtcctttctgtggtttatattcgttcagattagatcagttcctgacttgggatcggcccacaaagtgcgccggtccagactt

SEQ ID NO: 121420 - DNA, 503 bp, Zea mays
  Clone ID: MRT4577_4220C.1
gatgaccggcgcatcgttagacttagaattcatcgtcgtcgataaaatctccatcaaagtctccatcatcaccctcttgctcaaaagtatcatgtggttcgtcttcgaacgtattcggttcttctaccacacaatcggcttcttgctgcaacatgacgagctgcaacgtgacgactgcaacgtgacgaactgtaggggaaaaatgaagggcgttgatcgttcggggcaccggctacggcggcggagaagaacgctagcaggacaatcgacagaggcgcggccgaggggcttgttggggcagccaccaacggcggcagtcgaccggggcgtcctagcgccggcgaacagcagcgtcggcggtggcttcgcgcggccagcgaacaggggcacgaggcgtatgcggagcagcaggtgaagcaaggagctcggcggcagcattcataggcagaagaagggaggaatataaagacgaatcagtgctccttgatggttaattgatgcgc

SEQ ID NO: 121421 - DNA, 148 bp, Zea mays
  Clone ID: MRT4577_42210C.1
gattgttcctactaccgtctttttcttcttgtttcggcaacggagtattggatataaatattcgggcaaagagatacattgacggcatgtttggcacttgctaggaaagcatggatgcacatgcattgacccattagagttggcattt

SEQ ID NO: 121422 - DNA, 974 bp, Zea mays
  Clone ID: MRT4577_42211C.1
cccagcgtccggccgtgcgtgtgtgttgctctttagatggtcaggtacgaaccagggtacgccttcgaggaactgaacccggttcagtggcggtgcagcggcacgcccagggtcctgataccagtggccaacggcagcgaggagatggaggtgctcgtgaccgtcgacgtgctgcgccgggccaaggcggacgtcgtggtcgcgtcggccgaggaggtcgtcgtcgcgcgccacggcaccaggatcgtcgccgacgcgctgctgcaggacgccgccggccagcagttcgacctcatcgtcgtaccgggtggcatgccgggcgtgaagacgacgctggcagacaaggtggagctcatggcgctgctgaaggagcatgcggcggcgggcagggcgtacggcgccattggcgccgccacggcgcaggtgctggagccgcacggcctcatccggggcagcatgaaggcgacgacgtgcgcgtccagggcggaccggcccagcgagtgcgggagcagggtggtggtggacgggaacctggccacgagcgggagcaccgggacggccatggagttcgcgctggccgtcgtggagaagctgctcggccccgaggcggcgcgggaggtggcggaagcgctgctcttcgtctgaccgtcaccggaccaggcaccacgtacggaatggagctgctgggccctgtcgcgcgtgtcgtcgaccgtggtgtccttcctcgcttgataagttgctgctgtttgttttggcttttcgtagcttctgctcaacaaaagctgctgcggactgccaaacactcagcttttcagccagcttctataaaattcgtttggataaaaatcattcaaatcaacataaatatataatcggttgagtcgtcacaatagtagtaatctgtcactttataaaaaaaaaaaaaaaaaaaaaaaaaaaaaaaaaaaaaaaaagggcggccctcgcgattgaat

SEQ ID NO: 121423 - DNA, 628 bp, Zea mays
  Clone ID: MRT4577_42212C.1
ggctctggcggcggcgtcctcggcgcggaactgggtgacgacgcagacgtcgcagcggacgcagaaggagtcgtccttgaggtgcctcgacttctccagcgcttccctccggatgaaggtgttgaagccccagtacgagccgggggcgttgaaccggttcacggggagggtcttggtgagggacggcaccggcttgccggcacggtcgagaaggccgacgctgagctgcgcgagcgcgggggtgcggttggcgggtgcgtcctcgagaacgaggtagagcgagatgtagtcggccgtctgcgcgcagtcgccgttggggaggtaagcgaggtgccaggagtggccgccgacgcggaacgagcaggacttgaggtggatgccggtggcgaggcccttggtgcgcgagtagccgtcgatcttgagcacgtgcgagccgacagcggtggtggcgatgatggaggacgatgaagacgaaacctggaccgtgggcgaggacatcgacatggttaccttcactcgtgagccgcccgcccgcccgcccgccggccggctgcatgcgttcacgccatgcgtacgccagatatagccaagggaccaccggggaaaaggagaacgagaacggaaaaac

SEQ ID NO: 121424 - DNA, 635 bp, Zea mays
  Clone ID: MRT4577_42213C.1
atccaacatatacaatccaccccatattagtagccaacacacataaaggggagaggagaaagttctactacttgcctgaaggagtgctgctgagtgtctagcctaaaggagaggtgttgctgcctcgccggcgtggagagctgctcgaagtacgcgacgcgttgatgctgctatcaagatccagcgtggaggaaatctggtgccgctatggagagttgctcctcctctgtaatgacagcgtttgtgctgctaatggaagcctggcgggtgggacaaaacatgagcgccggccacaccgacagcatcgatgctccctcttcctcgagaggaagccgctcaggcaggagctcgcgctgtagagcaggggattggagagggcggcgatgggagcacgggctggaccaacgacggcggtgggttgtcggagcgcgggctggacgagagtcggcgacgggagcgcgagcgggctggacgagaggcggcagtggattggacagggcgacggtagattggacagggcgacggtcagccggagcgcaggacggacacgcaacggcggcggtcagccggagcgggcgagccaaagagcaggacggacacgcagcggcggtcagccggagtgcgcggacgcgggg

SEQ ID NO: 121425 - DNA, 315 bp, Zea mays
  Clone ID: MRT4577_42214C.1
aaaggtctgaaaccccgtcctctacttttggatatatgagtacttggataactggatggttatgggacatcctttgtagaggtccactaagcatcctatattacacctcatgtatcaggaatagctaatggcacatagtcaatggaaggatcatatgttccctctttcccatgatatatgccctcttttatccgtaagtctaccttggccttctactctgccgctaaaagctctgcattctgcattgtcgacaggagagtgcttgctatatgactgcaacctatactggtggcggatcaccattctgaatagggc

SEQ ID NO: 121426 - DNA, 383 bp, Zea mays
  Clone ID: MRT4577_42215C.1
atggcaaaattcacatgacattgatagagcgttttttttggtttaagctgccaggccagtttgctgaaaggtgaaacccaaaacaagatcaacaattttcagcagatcaaagggtcaggcacaccagagttgcccatacagatttttttttttcaactagagaccagggccaagccccattctttaagggaggggggacttaacggggggggtgattcatattaaggaccttactaccaatctagtgctttttattcttgggggcctttggaaacttcgatagggacttttcatcgaagaaggggtaattctttcttaggtcgatcattgtctttttaccaaaagcattaacctcgtgcctatattgtttagacagaacaggt

SEQ ID NO: 121427 - DNA, 453 bp, Zea mays
  unsure (1)..(453): unsure at all n locations
  Clone ID: MRT4577_42216C.1
ggctggtacgggcatgacgagaaaacaaacaggaaaccacaaatagtagcttcatcgactctgactctagctctgacactttaatacacagaaatgactcagactctaggataagccaattatgccaaacaattcgcgaaaaggattctattctaccaaaaaactatttttcatgaaaagctagagctaaggctgtttttgataagccagagtcctaccaaaataacccttagctagaataatttatttctggctaccaaggcccctagccaggggcgccttgttggctacggctaatctaaggccgcgatggtggtgggaaaggtgaaacgcgcctcctcttccccttgnttgcgttatgagcctcaaacttttcccgccacataaattctgttctggaaaaaagagggaaatatcaggctacgccccatgtgcagcatctcacatgacaaa

SEQ ID NO: 121428 - DNA, 737 bp, Zea mays
  Clone ID: MRT4577_42218C.1
catctctaggtgtgcgacgcgacgcgatgctctcgcggcctcaagtctaagcacccccgacgacgtcggcgacctcaccgccggcgagccgatccacgccgccgccccatttcccacctgtgtcgtgcatgtgatctggcgccctctccggatcctcttcttccatgggattggggggcatgagaggcggcatcgggggagggggcgccggctcgggcgagaggtggcggtggatcctcttcctctcgctggtctccgtctccttcctcctctcgttcctcttcctcttcctccccgcctactcctccccgacacgcctccgcctccctgggctcaccaccgcccgcgccgccgccggagtccgccgcggccccgacgcgctcccctgcctcgcctacctcctcatcggcgcccggggcgacgggcaccgcctcctacgactcctcctcgcagtctaccacccacgcaaccgctacatccttcacctctccgccgacgcctcccacgaagagcgccgggaccttgctgctggggtcgccgccgcggcgcccgccgctgtctctttcgacaacgtcgctcttgtgggcacgcctaccgcggggacacccgtccgggtcgtcgggcctcgccggcacgttacgcgcggctgctgtcctgctccgcctccaccccgactgggactggttcctcaccctcaacgccgccgattatcccctcgtcacccaggaacgatttga

SEQ ID NO: 121429 - DNA, 859 bp, Zea mays
  unsure (1)..(859): unsure at all n locations
  Clone ID: MRT4577_42219C.1
cctcgaggccggccgggccgggatctctccaccatttccacactcagcttccaccgcactactaccaccacccaccaccaccacccaaaaaccacacacaatgtccggaatcactcaaggcgtcaaggacttcctcaagggaagccaccaggctgactccaccgaggtctgcaccgaggtcgccccggaggtcacccaggagcacatccgaccgcaggagcacgttgagacctccgaggccatcaaccgtgaacgacatgtcgagcaccaccagcaccgagtgcagccggtcgaggaccaccaggtcctgcccaccaagcacgtcgagtcgacggctgctcctatcgtccgggagcacaaggaggacatgctccccgagcaccaggccaagctccacgagcagcgaaccgccttcaaggacgagcaacacattggcgagactgagcgatcggccgcccacctcggcacccacgtcggcgagcacgagcaccaccacatccacgagaccatccaaccggtcatccagcgtgaaaccatccagcccaccaccgtccaccacaccacggccatccacgagaaggtccacgacgccccgatcgtccacgaggcgaccaccctcccgaccatctcgcactctgacttcctcaagcagcaggccgagaaggtcccccacagccaccaggacggcgaccacaagcaccagatcttcgagggcgcccccaagatcggcggncaccacaacaacaccacctccacccacnaccgcctagaaagttggctgtgagatgacgcantagtaagagatcgatatatattaggccacagttgccgatgtcgcatgtagcacgtagacttggaa

SEQ ID NO: 121430 - DNA, 442 bp, Zea mays
  Clone ID: MRT4577_4221C.1
cagagacaaacaagccctttgcatttgcatcactgtattcatcttacaaagttctataaaatggtgagtttacaaattcagcaaccagagtacatttgcaacgtaaattattttacattataaaaaggtgaagctgcgacgatggtacagaaagacgcgctccggcagtgctctgctttttcagatgaagctatgctttttcagatgaagctccaacttggatagacaacaggtaagaactcagagagacgcgctccggcagtgctctgctttttcagatgaagctccaacttggatagacaacaggtaagaactcagagagacgcgctccggcagtgctctgctttttcagatgaagctccaacttcacaatttctgctccaggggaagtatagttaccagtccaatctgcagccgcaggtttttctatggaagtacatat

SEQ ID NO: 121431 - DNA, 257 bp, Zea mays
  Clone ID: MRT4577_42220C.1
cccacgcgtccggggagttgatttatccgctgcagccatgagtaagttgcagtctgagtctgtcaaggatgccatctcccagattggtggggatgccaaggagaagaataggaaggtcactgagactggggaacttcaaattggtctgaagaattattatccacaaaaaggcaagcctttcaatggctctggtaaggtggcccatattcctcgtcccaagaataaagggtgcattcctggtgattcccaacattgtt

SEQ ID NO: 121432 - DNA, 419 bp, Zea mays
  Clone ID: MRT4577_42221C.1
accacgcgtctttctattgtccgaaaatgagtacgacaatgatgatgcatcattcgggtgcgcagaacggtagtcaatgtttctctttgtcaatggcatttcaaaatttctcttctcagaattaatgtagctagtatgggtatgggcaatgccgcacacttaaaactggtgctatagaccaccaggagctttgttttgtactcactccgtaccaaaatataattcgttttaaactaatcatatattcattaagtaacatatgaatgttgtattattatcattttaatgaatgtggacagaaaaaaaaagtggactagaaaggactatattttgagacggaaggagttacctttttggattttactgaaaactcatcgtacgacacaaaccttctaaacgcagctttttgtctttactgc

SEQ ID NO: 121433 - DNA, 491 bp, Zea mays
  Clone ID: MRT4577_42222C.1
cctacgtttccgcccacgcgtccgcccacgcgtccgggcacgcgttcgcccacgcgtccgagctgacctgcagaaggctgtagagaaagagtatgagatggctcttcaagacagagttatggaagaaacaaaggagaagaagaatgctgttgaagcttatgtgtatgacatgcttatcaggattttgtgacaagtacagtgattttgttacaccttttggacatggaaggtttgatcgtattactttttttttgtttaaaaatctgattatatatttgttttgtcgttttaaaggatccaaactttttctttttttttttttatatatttattttattaattttttttttatttaattatttttatattatttatttataattgttttttaattggataaatttatatttatctataataattgacttttagtatattttttttttttaatttggtttaatattataatgtttttatcgttttgtctttct

SEQ ID NO: 121434 - DNA, 432 bp, Zea mays
  Clone ID: MRT4577_42223C.1
tggctttggacctttgggctgatttatgtgcttggctgtctctgtctctagatgatcgggttgttgttgtccggcgtcgaggtccctgccggctctcctggtggtgatgagtatttattagtagcctcgcagaaacggtcgacggcgaggatacttagttctccgctcgtgataacggtattggaacggctaaggtcggccccgtcggggatgacgtattaagggtggcccctttcagtaccgccggttgcttctgttatatcggcgctacggcagggacgggatagaaggacgtacacgccggtgacgaggtatagcttaagagaggcacctctatgtctaagcatttgaccgagtatggcaccgcgagtaatcgggacgatacggagaaaactcggtactacatccctcataatgagtcctgcgccgtat

SEQ ID NO: 121435 - DNA, 843 bp, Zea mays
  unsure (1)..(843): unsure at all n locations
  Clone ID: MRT4577_42225C.1
atcgttgtttattccattctccgccgccgccgccgccgccgccgtcgcagtagccgcgctcgtttcgattcgtcgagtcctcccctgctgcaggtaaatgagggcggcgcggcagttggtgaacgtggtgatgcgcacaggcaccacctactcggtgagccgcatcaagcccgagaagaagctcttctacgcatccgtagaggaagcgcgaaccgcggcgccgcccatgaagaagattccggccatgtcgaggatgcccaagcccaatctcaggctcgaggcgtaccgcctggacgacatgcggctcgatttcctgcccctgtacggtcgcggcggcgacagcagcagcagcagcgagatcctctccgtggactcggcaggccacaccatcctctgcgacgcgagctctggctgcgtccagcctgcccccagcctcggcgagcccaagggggacagccccatctcgttcaccatcgctcgcgtcggcgcccccgcccccgccgccgtggctctgtacgtcatggacaggttccccaccggccgcagctcgtgcagcttcgagtccctcgcctacggcgagaacaactgctgggagtggagccggctcccgccgccgccctatgtcaacgacccggcctacgactgcaccgctatccactcctacacgctgctcaatgcaggctccaccatctgcatatcctcctccgggcgcagccccatcgggacctactgcttcgacacggctagccgcaagtgggagtagggctggccgctgggcgctgcccttctacggncgggccgagcatgtccctgagcttggcaacctctggntcggcatggctg

SEQ ID NO: 121436 - DNA, 485 bp, Zea mays
  Clone ID: MRT4577_42226C.1
cttccatcccagttctcccagccgccgccgccgccagtcctggccgccgcagtaaccgattcgattcgtcgagtcctcccctgctgcagggcaggtaaatgagggcggcgcggcagttcgtgaacgtggtgatgcgcacaggcaccacctactcggtgagccgcatcaagcctgaggagaagctcttctacgcatccgtggaggaagcgcgagccgcggcggcgcccaagaagaagattccggccctgtcgaggatgcccgcgcccaagctcaggctcgaggcgtacggcctggacgacatgcggctcgatttcctgcccttgtacgggcggggcggcggcggcggcggcggcgacagcagcagcgggatcctctccgtcgactcggcaggccacaccatcctctgcgacgcgagctcgggctgcgtccagcctgcccccagcctcggcgagcccaagggggacagccccatctcgttcaccatc

SEQ ID NO: 121437 - DNA, 191 bp, Zea mays
  Clone ID: MRT4577_42227C.1
gccaccccctttttttcaactggccttattttaaaaaaggcccccacctgaaaacacctttccaacacattaacaaattgaatgggcaatttaaccccccctttaacagggcattaaaggcgatgggcgggggggttacccccttcctaaccgtttcccattccaaatgcctatagcccccccccttttcc

SEQ ID NO: 121438 - DNA, 1390 bp, Zea mays
  Clone ID: MRT4577_42228C.1
gtcgacgcggggggccaggcgttccagttctactcggagggcgtgttcacgggcgactgcggtacggacctggaccacggcgtggcggcggtcggctacggcgtcggcgacgacggcacgccctactggatcgtcaagaactcctggggcacctcctggggcgagggtggctacatccggatgcagcgcggcgccggcaacggcggcctctgcggcatcgccatggaggcgtccttccccatcaagacctcgcccaaccctgcagacccgccgcgcaagccccgccgcgcgctcatcgccagggacacctcttcttcccagtgacacacacgaccacaactggcacgtaagtacacgttgccaggaatgacatgctatgctactagtgtttgctttgcttgaactattatcgattgggtttgtactagtgatgacagtttcatcgattgcgcggtcgatctccatcagagacagagacgatataatcatacactctccctactagaataaagtatagcagcgcgtgtgcgcaacagggtaagattaggcgtgtgatttgatttcaaagctgtgcttgtaacgtaatgtaatacggtgtggcatatgcaccgggatatggtatgtgtattgggaaaaaaaaaaaaatcaaacgtaaacacaaaaacaaaaataaaaataaataaaaacaaatcccgttccaggcagcagcagtgtagctaatcctgggggagaggcttccctgtttccgttgtccgtaaaagcaaaccaagcagcagttagcttcgggcctgattcccccctctgcacctccatggcttccgtgctgaagatcggaggaggaggagagcaggttaagagctgcagccctgcctcagcagcagcagcagcacagcccaggaacggagaaacccagacccagacgtgcgcaccttcttctgctgctacaacaccatcagatggcccagggaatggatcgcagaaaggagcagagagcgcacaccaaaaccaaaaccaaaacgggatcattgggcacagcaacggagtcactccagtgcatcctataccgttcttccctggcccgcctttcgtgtacccctggagtccagcatggaacggcattcccgccatggcagcggcggtgtgcgcagccccagcgacagccgaagcagaagcagcgatttcatcagaacacggcacagcgagcagcaccgtccagtggaacgtgccaccagcgatcgtgcccgtgctagccgccaggttctgcggcccgatcccagtcccggtaatcccgccgccttccgtctggccactgatcactcccccctggcccaacgcagcatggagcgcgccgtggctcgggcctagcgctagcgtgcccgcggggtcatct

SEQ ID NO: 121439 - DNA, 226 bp, Zea mays
  Clone ID: MRT4577_42229C.1
cccacgcgtccggcagcgtttagatgccatgccccgtggtattttcgttaataaaggatcaagtgcttctcttgttgcttcttgcaacagtagtgcaactgggaagttgtctgccaagattttggtggcacccagttcgtctcaagttggtgcaaagacttccaggactgctcaggttacaccgaaaagagcagcaggacctaccagtgtaaacaatgtgtcacac

SEQ ID NO: 121440 - DNA, 205 bp, Zea mays
  Clone ID: MRT4577_4222C.1
cgtcaccgacaacgcaattactgaagaatatcatccatgccgcccggatgtgctagctgcctagggcctcttgcttgttcgactcctctgagcaggcctacatctcctccctcgcgcttctcaagatgctcaagcacgcgaggcccggcgtgcccatgaaggccatgggtctcctgctcgcccagcccgtacagcctacacccac

SEQ ID NO: 121441 - DNA, 598 bp, Zea mays
  unsure (1)..(598): unsure at all n locations
  Clone ID: MRT4577_42230C.1
gagcccgacaggcccatggcgacgcccacgtccgccgtggccagcgccggcgcgtcgttcatgccgtccccgaccatcagcgtcggcccggccctcgccttgagatccccgaccagcgcgaccttgtccgccgggaggagctccgagtggacctcctccagggcgccgccgagctgccgctgcgcccgcgacgccgccgctttgctgtcccctgtcagcatgaccgacctgatgcccatcgatctcagctcacggatcgcctctgccgcgccggtcctacagtcgtccgtgagcgaaaacgccgccacgtggtcgccgtcgacgatcacatgcccgatcgacgcaccttgctggccttccatctccggacctgctcctgctgcgtagcaggaggaccttgccatgatccttgtgttcccaatgaagatttgccttccgtttatcgctccggatatgccctctccagggtagatacggaagtcagtgacgcttgtcggctcgggttggatggatttggactgagcgtactcgacgagtgcggttgccattgggtggcttgacttgctctcatgctcgacacccaatanagaagctggct

SEQ ID NO: 121442 - DNA, 592 bp, Zea mays
  Clone ID: MRT4577_42231C.1
aaaaaaaaaaaaaaaaaaaaaagggggggggggggggggaaaaaaaaaaaaaaaaaaaaaaaaaaaaaaaaaccccccccttcccccacttcccaacttacttatttaaattccccttaccaccttcttaacccccattgccaacccaattttttttcttttttttgcccctccttcctttttcaccagggggggctcccccccctttttttccccattcctcccaccattccctttttcaaaaaatacccccaaattttaattccccttttttccattcctccagcctacaaaagcccttcccaccaacctttttccgttctttacctttacccttccaacacccttttccctttttccaccacccttccttattaattctttttctccaaaaattcccagcccaacacctccaacaccgtttttttccaccatttaatcaattatttccaccaacccttcctttttaccttcaacaacaccatttttttcctttcattcacctacctgggttaaccccttttttttatttccagccccaacatttcctacctttcacccaatttttcggaaccccttttccctttttttt

SEQ ID NO: 121443 - DNA, 577 bp, Zea mays
  Clone ID: MRT4577_42232C.1
ggtgctcccagcgactggcctctcatgatgagtttagtgtgtttgagtttgaggactttgatgaggaaaaggagactttacttccaaaattgaaatttccatcgaaggtgaagaaagctaactctgcatctagagctatgaagggtcgttgcattgatcagaatgcagtccgtttgatgaggagcatgacatccacacgaagaaaaggtttaatagactgcatagcacagcaaactgcaaagcatgagtctaatagatgccctgcaagtgatcctctggacaaaaagaaaaggaagctggttcttcagtactaggtattactaagtttgggtgccgaaatcttgtattgctgtatatcctttccttttttgctactctttctctgtatatcttggttcagcaactctgctgttgtcaacttcccccctaatctaattttgtagtcataggctttagggtggctagattggtttcagccttgcggggtatatgtgaacttaagaattagttactctcttttaatatttctgcctcctgatgttttatcacatgccaatgtggctatgctatggtattg

SEQ ID NO: 121444 - DNA, 360 bp, Zea mays
  Clone ID: MRT4577_42233C.1
agcagtggtaacaacgcagagtactttttttttttttttttttttttttttattttttttttttttttttttttttttaaaaaaaactttttggtttttttgctctccatcccaaatttctttctattgcttcaaagaaaaaaccacaggggggttctctccaccatggcaaagcccctcttttccccccccgggggaggggcccccagggctacagccacagggggggggcacctatcctccccgagcccccggggggttgaaaggggccgcccccagaaaccgggctggttttccgccccccggcttttctgagagcgggggggggggcctttagtcccccccggccatttccccccc

SEQ ID NO: 121445 - DNA, 254 bp, Zea mays
  unsure (1)..(254): unsure at all n locations
  Clone ID: MRT4577_42234C.1
gaattcccgggcagaggtgtccaagatggcggagganaangcggctgcagtgtgctttctctgaggagccgtttcttctgacgcggcgcagcttcttcagctggcgggaggggaagccgcttcttctctttttctgcccgtggatactcttcttctcgcggcaccgcttgggctcttcgttgcccccattacccttattcttccttaccaacataacaaccaattccgggccctcgccttcttcgaccttggaa

SEQ ID NO: 121446 - DNA, 216 bp, Zea mays
  Clone ID: MRT4577_42235C.1
aacaggggaacgagcaggcatttttattcgaagcaaaagggggaggccaaaaaccccgtccacgatgatttcaggagggcccccatggcagggcgcgatcggtgggaaaccccacgttatggacttgatcacaggtagggcgaaccctttctaaaaagcagggtgtaccaatgggcccttggtaacacaaatggtgggggacaatttcccgttggg

SEQ ID NO: 121447 - DNA, 312 bp, Zea mays
  Clone ID: MRT4577_42236C.1
ggccggggtcgtctctacctccacttggccccgctcatcgcctcctccgacgaccaccgtccacagtctataaagacagtgacgatgcaaaagaaggcttatggtttttcccaatggaagggcgggaaggggctctttaaagtcaaaggaagtccttttcaagtctggcaggctgagatactccgctcttagatctacaagcttctcttctctgttgtgcttgtgaaaatctcaaaagtgtatgtgcgcgctaaatattatgtaggtgcgcccatgtcgcagatctatactatatgacaagatatcatccaa

SEQ ID NO: 121448 - DNA, 218 bp, Zea mays
  Clone ID: MRT4577_42237C.1
atgccagcgcggcatcaacgcccctgccactgcggcagcggaggaaggcccaagccgccgccatggggcgtgtggaccgccccgggaaggccatcgctcgccgggcttcctacggagacactcctacctggctcagaccgcggcctcgcgtgaggcatgatccgggcgcgagaggacaagcctccagaggggccctgctccggacaggggtatccccc

SEQ ID NO: 121449 - DNA, 392 bp, Zea mays
  Clone ID: MRT4577_42238C.1
cccacgcgtgcggacggggccggcgtgcttgtgatcataaaccaagtcgtgcctacgctgctgtcacccgttgatccacgcaaccatgtcgaggaggaagaccaatgagcccaaggaggacatcgtcacccttggacccactgcacgagaaggaaagaatgtatttgctgtctctcacatctttgcatacttcaatgacaccttgattcatatcactgatctgactaggagggaaactctggttcggatcacctgtggcatgaacgtgaaggctgaccgccatgagtcgtcactttacgctgctatacttgctgctcaagacgaagaacatggctgtaacgagctagtcattactgcactgcacattaagcttcgtgccaccggaggcaaca

SEQ ID NO: 121450 - DNA, 424 bp, Zea mays
  Clone ID: MRT4577_42239C.1
aaaaaaaaaagaaggctgggccgggccctttttttcgggatttcaaggagaaagtctgtaaatctaaaaatttgggcctaaacagcaaacccaaacaaatttgtagggggggcgaacagacgggacaaatcccaaaacgttttcctactacggccctacagcctttgttcgcatgatggagggatcgaaacccccctcatagggggggccctccgaccccgtcatggttggcaaactcgggcttgggacccaaaaggtagtggggggccagctgcttttttttgttgcccccaaaaaacccttccaggaccggggcccggccaaagcccatcccttcaagaggaagggtagcttagttctcctttggaccccctgaaatgggctcatctgcttccacctttggggccagcatcttttgtttctc

SEQ ID NO: 121451 - DNA, 382 bp, Zea mays
  Clone ID: MRT4577_4223C.1
agagacaaacaagccctttgcatttgcatcactgtattcatcttacaaagttctataaaatggtgagtttacaaattcagcaaccagagtacatttgcaacgtaaattattttacattataaaaaggtgaagctgcgacgatggtacagaaagacgcgctccggcagtgctctgctttttcagatgaagctagaactcaaagagacgcgctctggcagtgctctgctttttcagatgaagctccaacttggatagacaacaggtaagaactcagagagacgcgctccggcagtgctctgctttttcagatgaagctccaacttcgatagacaacaggtaagaactcgacaatttctgctccaggggaagtatagttaccagt

SEQ ID NO: 121452 - DNA, 421 bp, Zea mays
  Clone ID: MRT4577_42240C.1
ccgtgcgcgaccccgccacctccgcggttccgcgcgttcgcctcctcccgcgcgtcgccgccgccctcctcgccctcgcaaacgggatcaatcgcttccgccgccgcagcagcatgcgagcatgtggcggagaagcccgctacatgcacggccgacgagctgcactacgcgcccgtaccgggcaccgagtggcggctcgcgctatggcggtaccttccgccgcctgaggcgccaaagaggaatcacccgctgatgctgctgtctggagtggccacgaacgccattgggttcgacctgtcgcctggggtgagtgaggcagtgagctagttcataatgacgctattgtctactggtgtggtgtctccataaactaccctgcaaagagtgtgtagtatgtagttaaaaaaccaaaaaataatgg

SEQ ID NO: 121453 - DNA, 835 bp, Zea mays
  Clone ID: MRT4577_42241C.1
ctcttcctatccgaaaggatgggggcgacacacgcacaagggtctcaaccgccgaggccgatcgagcgaggcagaccgacaccatgtggctgccgcacgcgtccgacctccgcgccttcctcgcggctgctgccgtcgcgcatctctcctcctccagggcctcccgcgcctccccgtgcgcgaccccgccacctccgcggttccgcgcgttcgcctcctcccgcgcgtcgccgccgccctcctcgccctcgcaaacgggatcaatcgcttccgccgccgcagcagcatgcgagcatgtggcggagaagcccgctacatgcacggccgacgagctgcactacgcgcccgtaccgggcaccgagtggcggctcgcgctatggcggtaccttccgccgcctgaggcgccaaagaggaatcacccgctgatgctgctgtctggagtggccacgaacgccattgggttcgacctgtcgcctggggcatcatttgctcgtcatatgtccatgcaaggatttgatacatggattgttgaagtgcgtggtgctggcctaagcatgcgtgaatcagaactagctgcaactaacaccaagtctgacatcactcctgatcctaattttgatgaaagttctacaacaaaagcagtattgctgttcctgctgagtatgtccagttctcaacttttctgaagttccagtaataacagatagaacatgtaggaacaagtatatcgcggtcaatgcttgagtgagacattgagctagttcataatgacgctattgtctactggtgtggtgtctccataaactaccctgcaaagagtgtgtagtatgtagtt

SEQ ID NO: 121454 - DNA, 591 bp, Zea mays
  Clone ID: MRT4577_42242C.1
atcttcccacgccgtcgccaggaaaccagggtgcgcgcgccgcgcagcatgcacccctggccgtccagctcgacagcagccaagccgccacgcccaggcacgcaccgaccggcgcccaggccgatgccctgcccctgcgcgcccgcacaaccgaccgcctgacccgcgacaccgacgcgccaggagcagctgatgccgctttgtttaggtaattgagtttgttctttttaaagaccacttgcatcgctccatgcaatatctttctgcaaaatcagattctattatgctacatctgaagtagaagatgaactctcttgatgaagtagaggtgaggccacccttgtcgatttgaaagcattgctttggcccaaatttttattttgctatatggatgcacgtgttgatgtatatataagcaaatgtatcattttttgtgttctgcctctaaccattctgaacatgtaattttggattcttaatttatgtattggtgctacctggttatgttatcaattgctattatgagaggatatattgatgcttgacaattcaaatatttgttgctaacttgaaaaatggtattttacttct

SEQ ID NO: 121455 - DNA, 322 bp, Zea mays
  unsure (1)..(322): unsure at all n locations
  Clone ID: MRT4577_42243C.1
gggagggcacgcatcctgcatctcttccttccttctctcatcttctacatcatcaccaccatattanttcagacgagtgcgcctccaagtggggcggaggcttccattattcctgttaatgttagcgcccccaacgccttcatcttctgcttattgccattcagcaccgggagctccatcaacatggccaccgccccatcgttcccaaactccatcctacatcttcaattcggctcctccttccttgctttcaacattagtggactctctactactttaaacatcctctgcaactttcttgttagcgttttctttatcctca

SEQ ID NO: 121456 - DNA, 286 bp, Zea mays
  Clone ID: MRT4577_42244C.1
ccatgtaactttattgatcacgtaaacgggaggcacaattgcacaccggtaacaaaatccccgtggtggccctggctctctctaataaaaagaggacattgaacatgctcagatattacattgagagggtcactgctaatacacatgaaccaagtcctctagggatcacttccttgtttcttgatatatcatatcatatcctgggcgaaagataggggattatcccgacccttcgagggcaattcattacaaggggccggtgggtcaaacactggggggggggggg

SEQ ID NO: 121457 - DNA, 1322 bp, Zea mays
  Clone ID: MRT4577_42245C.1
cattgggtacctcgaggccggccgggaatcctccgtctccgtcgcctattcgcctctcccactctctgcccccgcctcccctccttctctccctcccccgcatgcctcaactgctcctctccggcgtcgtagccgtccctctcgctcccgtgacatccagatctgacttgggggcgcagctcagagtgccaatgcgccgcaacctccgttgcgcccgcacgtgccctagccagtcgccatggagctcatccccatcaagcccgaggtaggatctctcgtcgagattggataggagctccgaacgcgagccatagacggggagttgatgccaccgggcaatggatggtcgcatcctcaggacctccgcgtgcaacagcagcggctatcatttttctcatcgcctacttcaatagcctacagcattagcagtaccgtgctttttacttcacaagaaaaggttggccgaggtccctgctctagcacaaggatttctactgcaacgattgcaacacacacaggaacttttttgaaaccttcaagcttcaacgcttgaccctttgcattggtggcatagtgaatattgaactactggagagaatacaaaaacaatttacggatgataggtactacatatggcagatgaggcaactggccatggcatatatgttgcttcgacctgtgcagtttatggatgaagacgaagctgacctgcagatgtaaactttgttttctatggaccaggtcttgtatatccaaattgaacggattgttctaataaatatatcacaaaaagataaagtataatatttgtttttgtgcgttgttgcaatgaattttagtgagaatagagacaagtggtgttgtgtaatggcacttgtaaagagagacagtacacctagggttggtccattgatgatgaacctctgtgcaaactttgtcaaggactttgcaatggaaggcttgcagagtcaacataatattttgaagatctattatgtggtctagcttgtttctaggaatacagattaagaaccagtggtagagccctacggcagttgagtcttctttttgttactcacataagtcaacattttttgttgtttccattgaatagttaggactattttcagttattcaaaatcaaagaaagttgcaagttaattcatatatatgtaataaagtttcttggtaattatctataggcactttcaaatagaacgtgccaagtgctcacaatgcaagctcgattgttgcaagcttgtcaaacacattaaacccttacccttggaaaagcgagaagattacattagaaaggttgctcc

SEQ ID NO: 121458 - DNA, 140 bp, Zea mays
  Clone ID: MRT4577_42246C.1
gatgtcactgtgccgctcgtgtttaacaactgtcactgaacgtggcgataaagcccatgagtcgttacaccagactgtaaatccacctatgcgaggcacatacgctcactttctgcgagactgtgcgtacatagcgagtt

SEQ ID NO: 121459 - DNA, 167 bp, Zea mays
  Clone ID: MRT4577_42247C.1
gtcaatctcaatagcgagcggccgccgtctacagatggataatatgtaaataggtatgttcagccttaatatcagggaccatcgtgaaatcaacggaaatgaaatcgtaattacgcaagtactttcaatgagccaatgtacagaaataaggaggcaaaaatgtgcat

SEQ ID NO: 121460 - DNA, 327 bp, Zea mays
  Clone ID: MRT4577_42248C.1
ggaacaaaaaaagcccagttaaatttttcatttccaaagggtacacaaggattattcaggtaaatgactacttttggcacataccccggaaatgatgttttacaaaccatgccctggagctagaataccaaaacgagatggtaaaatggcaatagctttaaaaaataaacagcttttattcccacaagcttccaggtgctttgaaagtaaaaacacttggcaaataaaaactttacagtggcaaacttgataatttccacaaattcaggcttaaatgaggctccaccaacaaggaattcatcaacatttggttgaacttaaaatttt

SEQ ID NO: 121461 - DNA, 719 bp, Zea mays
  Clone ID: MRT4577_42249C.1
ggtggcgtacgcccacgtggtcggcaaccccgggtgcctcaccagcgagctcggctgcttcaccaccgtgccggccagcctgcgggggtgggcgcacccggccaaccggttcctgtgcgactggttctcggcgaacccgctgccgttcccgccgcggcgcctgctgctcatgtgctccatgcccacctgcggccgcccggagacgcggggcctcgagtaccgccgctgccccgtctgcggcatcgcgcgctactgctcccgctcctgccagtcgctgcactggaggatgggccacacgcgggagtgcgtccccacgcaccagtggctcatggaagccattgccaaccacgccgtcgtcaatgccgacgacggcgccaatgctgctgctatgcccgctgtcaacaataatagcgccactcaccacaacaatctcggtggtgctgctgctgatgctcctgctcctaagtagacatgcgtcgacgagccggcccgctagctattcaccagcgctagctactacacctctcctatcctatgttctcagttaactttctgtcagacagtagttttgttttccttcgtgtaatcgcctagatatatatatttccatttctaaaatatatacctgtgagttttctatatatgctactagttttagtttattatgcttggaaaaaaaaaaaaaaaaaaaaaaaaaaaaaaaaaaaaaaaaaaaaaaa

SEQ ID NO: 121462 - DNA, 304 bp, Zea mays
  Clone ID: MRT4577_4224C.1
ggaagaagggcctcctgtctcctctcagttcctgagtcctcgtccgtctctgctccctcctctctctacgtagcaagctggatagccttcctgtagcgcggcagagatgggtgccgctggctccagcacggctgccgcagcggcggcggtgctggtggtggtgctcgtgtcgctcgccgcggcggcggacatgtcggtcgtgtcctacggggagcgcacgacgaggaggcgcggcggatgtacgccgagtggatggcggcgacggccggacctacaacgccgtcggctaggaggagcgccggta

SEQ ID NO: 121463 - DNA, 311 bp, Zea mays
  Clone ID: MRT4577_42250C.1
tccatcggccgcctggtgccccatccattttttccgtaaccctaaccctagtcggcgagggccgccttcccggttactacatgtcgaacccgatgggctccaaaatgctccagttatttaactaccgcatgcggttgacgatccacgacggacgcgaacatcgtgggcgcgttcatggccttcgaccgacatatgaacctcggtccacgtgacagcgacgagtcatgtgcgcctcgccggctcatatgtctccgacactacgcctgtacgctaggtaagcggcacgctctgagtctcattcctagcgcaca

SEQ ID NO: 121464 - DNA, 438 bp, Zea mays
  Clone ID: MRT4577_42251C.1
tgggactcgtgggtcgacgcaacactctatagtgagtcgtactatttgtcactgaagtgttttcattcttcttcagtgcccgttctgtatcttttgttctgctgtcccttttcgttgttgttttttactctcactctcactctcactctctcacgcaatcgctctctcacacttgactacgtctgtgctctttcctttttgcccacttgtctgttttgagttgaacatttctgttctttttgtgaagttgcacctttttcttaattttccttatttctgagcaatgtctgcatctaaccattcgcgcaagaccggagtcgtcaagttcttcaacagccagaagggttttggttttatcagtccccacgacaaggcaccggataacccccagggaaactccgactagatctttgtccaccataccgccattcagaatga

SEQ ID NO: 121465 - DNA, 477 bp, Zea mays
  Clone ID: MRT4577_42252C.1
cagtcttgttaaaaaagttcttgagtctaaatcgaccgatgacggtcacgctccaaagaaggttatggagctccctaagtttttgactggttcaaacccatttgcattctctgcaggacccgttaatagtcagctcttagtctccgcaaaaatcaaatcaacgactcgcggctccccatttattacgtcagtgaacgggctggactaaataagaatagggggcttcatcaatcatcgcaggtaccacctacaaaaacatgttgtacaccggccttcgccactaaaaaccacactggcttacttcttgttgcaaaagcaaagaggcgccttatgcacatgactggtgacccctcaaacaagggtgctgcacctgccagttgaatagtggtcggtaaaggagacctggtcgtactcccgttccgacgctatgttttaccagtgaatttagccccggttcctgagcgcgtactagctctc

SEQ ID NO: 121466 - DNA, 364 bp, Zea mays
  Clone ID: MRT4577_42253C.1
cggacgcgtgggtattttatttattttttttttttttttattttttggggattggtgttttttttgttgtggttttaatttaagaaaccgcacccacaacggggtacaaaaaaggtaagaacaaagggcacttaaaggaagcttaaaagtgaaaaaaaacctacatagaaaaaaaaaaacatccaaaaccttgccgggctataaaaaaagccatgaaaaaaccctcctttgttccccaccccaccaaagggggggaaaaaaaaaaagagaaaacccctgcaatgaaaaaacaaaccgctaaagcgggtttaacaggaggagaagggtaccctttcccggccaatttgccaaacaagtaataaaa

SEQ ID NO: 121467 - DNA, 413 bp, Zea mays
  Clone ID: MRT4577_42254C.1
ccggccgggacggctcatccccaagtcacagcagacgcatcgatttctacctgcctttctctcgtccctggcgtcggtggtaggatggtggcttctactgcgaggatggtgaaggatgtgaacccccacgagtttgtcaaggactactccgcgcatctcaaacgctccggcaagatggagcttcctgagtgggttgaccttgtgaagactgcgaggttcaaggagctccctccttatgatcgtgactgtcagtacctccggcctgcatctgtagcactgaagatctaatcgacacaaggccttgatgctgctgactaccaagttcttgcgagacgctccgcgagttctttttttttaccccccccccccccctcaatgtccttgctggtggattgacgggtcgattcttggtc

SEQ ID NO: 121468 - DNA, 281 bp, Zea mays
  Clone ID: MRT4577_42255C.1
gcggtatcaacgcacatgctttgtgctttaatttactgagactagactcttgtactgggttcgagcaaaatattgccagtgtgtagtgttcgcatgaaattcgcaacctgatgtgtgcatttttctatccgttgcttcacagatcgtgttaattgttaggttcatgcttagaataaccctaattggtcaaaacatgcacacggcccttttccgatctgcgatgtcgccttctcagcattgtgttattttaagcatattgcactttgtcctatgtctaaaaa

SEQ ID NO: 121469 - DNA, 318 bp, Zea mays
  Clone ID: MRT4577_42256C.1
gttgttgggggacaaacccccgggggaaagggccaataatatggggaaggggcctagttctacgccccaaggagctgggttttataaaaaaaaggggggcccaagaaagcacaatgcccggggggacagaaactatatgggcacatttgtttttcatatgcaaacccccccccccgcggggttttgtattctaagccatgacagcctcccggtgggtttttgggggcgcattacccccaaaaaaccctttcccgggcctggtgaccgcccggggggtgggggaacctccttatgaaataattagcccccggggggggg

SEQ ID NO: 121470 - DNA, 1416 bp, Zea mays
  Clone ID: MRT4577_42257C.1
aattcggcacgaggaggagttggggccgcgcatcaatggcgtcacctctcgcatccagatctcacacctcgtcgtagctactaccttcgtctcactcctcctcgtccccttgctgtcgttcgttcgttccttctacctccatctccacttctccaccttggggttcttggcgcaccatccgagaaatgctgttctcctttttcggttttccattctacaagtgccagccttgccttgtctcggagtgttgacatctctacgtgctctggcccgccattaattccctcctccctcacactgctgctgctgctgcaccgagggcgcctagccagtcacgcacgaaatcccagcgttccaattcaaacacacccttccttcttggctgctcctctcgacgacgcgaccggagcggaggagtcatggtggcggagccgctggtgcacaaggtgctctccatggcgacgtcgtcgtcctcctcctccaagaaggcgcggccggcagcggcgagcgccacgacgtgcgccgcctcagagacgcctcgctctggaactggacctacgacaaggccgtgctcctgctcgcgcgcgccgcctgcgccatctacgcccgcatccgcctcgtgttcggcgaccccatgctggggctcgacctgctgctggccacgccacccagcgagtcgtcgaggcaatgcgaccagagccggcggctctccggtccaataacagcaaactcaggccccgtccgaagcgatctcagtgattgcggcaactcagggccggtttcgagagtcgatccggacatgtcgcggccagtgaatcttcggtcaggctgtggagcgagcccggggaagatgctcatggagtgcttgagcctgagcggctcggcgtcatggaatgatgggttcgaggacgagttcctggaagattccagccgcatcagcacgatcagatcagggatgctggtgccattcagcagcgagcaggggctgtcgacgacgacacgatgacgacaacgccaccatccaagagtggcaggattaccagaaaggcggcgcggttcgggcccaagagcacggtgacatcactggcgccgccgtccacagtcggcggctccgctctcgcgctgcactacgcgaacgtcgtcatcatcatcgagaagctgctccggtacccgcacctcgtcggcgaggaggcgcgggacgacctgtaccagatgctgccgtcgagcctgaaggcggcgctgcggaggagcctgaagacgcacgcgaagagcgtggcgatctacgacgcgttcctggcgcacgactggcgggaggcgctggagaagacgctggcgtggctggctccgatggcgcacgacacggtccggtggcaggccgagaggaacttcgagcagcagcagatcgtgatgaagggg

SEQ ID NO: 121471 - DNA, 632 bp, Zea mays
  Clone ID: MRT4577_42258C.1
gcaaaaagaacaggggtggactttggggataaaaaacaaaagaacccccatcattttattctactcgcatatatattacaacccccggaattcacattttgaaatcattagaggcccacgcccagggcttctccagttatgccattagaagtcctccttggggaactaaaactttgggttcgactggggggggaagattgctgaccacggccgtagctgtggcacaaggacaggctcacccctgtaaaaaaccccaacccggtggttcccatggttcactgcaacatggtagaaaacccttccccttttgggccccccgaagggcgttttgacccttgtcccaaacaagatgtccaccccttttttcgtatgcgggagcttttggagcatgacaatgagtgcaaaaggggcgttcccttcctggccacactctagcaggggttggggagttcaatgactccatccttgtccttttagccacctgttttatgacccctcggaaccattaaaaagatcccttttttctggggacccaataaaagtaggcccttttaatcaagaagggccttttcttggccttgccacggccctaaggctccgggcctgaaatatatcctccatgctgggggggg

SEQ ID NO: 121472 - DNA, 680 bp, Zea mays
  Clone ID: MRT4577_42259C.1
cggctcgagccggcgtcccaaagaccatcgataatgacatcgcggtgatcgacaagtcgttcggatttgacactgccgtggaggaggcccagagggccatcaacgctgctcatgtcgaggctgagagtgcagagaacggcatcggtgtcgtgaagctgatgggtcgcaacagcggatcatttcaagaagaagccccgtttcccgataactctcaagtacatcgacccgacttacatgatccgcgccgtcagttcaaacgcttccgacaacgtctactgcactctgctagcccacagcgcgctccatggcgccatggcggggtacaccggcttcatcgtcgctccggtcaatggcagacacgcctacatcccgttctataggatcaccgagaagcagaacaaggtggtgatcacggaccggatgtgggcgagggtgctgtgctcgacgaaccagccctgcttcctgagccacgaggacgtggagaacatgaagcacgacgacgacgagcaccacctgcacaacacgctgctcctggactcgccggaaaactcgtccaaatgaaatggggcacaagacttgttttgcttttttgggtgctggcgttgtagagattagcgaccgctatatgatagggttggataatgtgagcattttgtaataatataagcttcctgaagtaa

SEQ ID NO: 121473 - DNA, 442 bp, Zea mays
  Clone ID: MRT4577_4225C.1
gggaataatggcacgctgtaaggaaatttcctctctacctaaaaaatcacagggaaatcatacagaggccagaacatcggtacgcattgtataaactggaacatgcattactttttttagcccctatgcatgttgccctagctgggctaaacattgcacaacactgaaaataataatagaaacatttgtcgcccgttagttcatttttaaactaaaccagggcaaataaaaaagacttctgataataccaggccaacacattcaccacttgcgctctgctttctgaacgctccagcccttgttcttaggtgtacaaaagacacgggtactagttgagaacaacaattttctgtcttttattgggcttatttcctttcgctggacccatctccgcgtcatcaggacttttacatttattatctttgccagacatgacatgttt

SEQ ID NO: 121474 - DNA, 283 bp, Zea mays
  unsure (1)..(283): unsure at all n locations
  Clone ID: MRT4577_42260C.1
gggggggtttttttttttttttttttttttttttttttttttttttttttttttttttttttttttttttttttttttttttttttttttgggggggggcaattcatgcgtaaaattttggctttggggggcaaccgggcccattgtantttgggggggggtagggcccgcccctctgtcaattttcggttttggggccctcctcttttttttttttaaaaaaccccttgggcccttgcccaaggggacaggtgggagggctgaaccccctcgttgcgggtgg

SEQ ID NO: 121475 - DNA, 773 bp, Zea mays
  unsure (1)..(773): unsure at all n locations
  Clone ID: MRT4577_42261C.1
gcaggatcatttcagnaagaagcccggcgggggggggaccctcaatacatcgacccgacctacatgatccgcgccgtccggtcgaatgcttctgacaacgtctactgcactctgctggcccacagcgccctccatggcgccatggcggggtacaccggcttcacggtcgctccggtcacgggcaggcacgcctacatcccgttctatgtaagtcgaaggccgaatgcagttgagcacacagcttcttgaacatggcttgttctgaaaccttgatgggcaatcgatctcttgtttgcagaggatcaccgagaagcagaacaaggtggtgatcacggaccggatgtgggcgagggtgctgtgctcgacgaaccagccctgcttcctgagccatgaggacgtggagaacatgaagcacgacgacgacgagcaccaccacatgcacaacacgcagctcctggaaggcgggagctcgccggtgtccaaatgcaatggctcggcagcggcagtgtgaggggcacgagaatacgcaaggatatagatatatatagtattaagcatgtagctatggatgttttttttcctttttcttttgcttttttgggtgctggcgttgtagagagtatttggtaataataatataatgcttcgctgagattaaatctcacttttccctgttcgtaattggggggtgagactcttttaaggctcatatgggctgtcatattgaatttattacaaaaatcttcagagagccagagaggcttagaacatgt

SEQ ID NO: 121476 - DNA, 269 bp, Zea mays
  Clone ID: MRT4577_42262C.1
gagggaggactcagcgggcgctcgtcccgacgaggatagagacgacccgcgctccgcacactggagccagaggatcgctcgcgctacgattcggcgcgcaaccagcctggcgtccgcctgggcgggccgcagccacacgccatgcacttcggcgggctcggccgtatcctccgccccagctccgtcgcatatggcgaggtctaccctgcctcgctcagcgacgttgtcgtgcgccacgagttcaccacacgggacgtcgtcaacatcgc

SEQ ID NO: 121477 - DNA, 1159 bp, Zea mays
  Clone ID: MRT4577_42263C.1
gttctagatcgcgagccgacacctcctgcttatttttgcatcactgtgatggttataaacggcaagatcaacaacaacaacagcaacaacaacaacaacaacaacaacaacaacaacaacaacaacaacaacaacaacaacaacaacaacaagctttaaatccttctgatctgacgcatcgacaagtcgttcggatttgacactgccgtggaggaggcccagagggccatcaacgctgctcatgtcgaggctgagagtgcagagaacggcatcggtgtcgtgaagctgatgggtcgcaacagcggtttcattgccatgtacgctactctagctagccgcgacgtggactgttgcttaatcccggagtcgcccttctaccttgaagggaagggagggctccttgagtttgtcgagagacggctcaaggacaacggacacatggtcatcgtggtggccgagggtgctggacaggatctcatcgcgaaaagcatgaattccgtggacagccaggatgcttcgggaaataagctgcttctggatgttggcctctggctatcccagaagataaaggatcatttcaagaagaagccccgtttcccgataactctcaagtacatcgacccgacttacatgatccgcgccgtcagttcaaacgcttccgacaacgtctactgcactctgctagcccacagcgcgctccatggcgccatggcggggtacaccggcttcaccgtcgctccggtcaatggcagacacgcttacatcccgttctataggattaccgagaagcagaacaaggtggtgatcacggaccggatgtgggcgagggtgctgtgctcgacgaaccagccctgcttcctgagccacgaggacgtggagaacatgaagcacgacgacgacgagcaccacctgcacaacacgctgctcctggactcgccggagaactcgtccaaatgaaatggggcacaagacttgtttgcttttttgggtgctggcgttgtagagatttatatgatagggttggataatgtgagcattttgtaataatataagcttcctgaagtaagctcgttttggctgttcgtgtattaatttcggttgctcacgtgtattaatttcgtcagttgagagcaatgcatatacggatctgttgacgctt

SEQ ID NO: 121478 - DNA, 152 bp, Zea mays
  unsure (1)..(152): unsure at all n locations
  Clone ID: MRT4577_42264C.1
tnctggaagcttttgtcctgatatttttgccaagcgctttctaaccattaaggggcgtaacgcaaagaaagcacattcccggtacgaaatgccatcatggagtcatagtgataatcctaggtgagggacacttggagagtattttattcatt

SEQ ID NO: 121479 - DNA, 289 bp, Zea mays
  Clone ID: MRT4577_42265C.1
tccgggtatatttacatctggcgcttctaaaacaaaaccatatgttatcttctatacttaaacaactcaaaggggggggctttttattgaaattctacctcaaaccctacctaatcattctcctaaaacacaacaactattgttctacattacaaaccttgatcaaaaaaccacactattaacattttccactaattgaagctagcaactaatgcaatatgcacatcttctccaaggaccaacatatcatctgtttatccttccattacagcaaactgctgatctaaac

SEQ ID NO: 121480 - DNA, 716 bp, Zea mays
  unsure (1)..(716): unsure at all n locations
  Clone ID: MRT4577_42266C.1
tatggtcatcgtggtgncgaagggtgctggacaggatctcatcgcgaaaagcatgaattccgtggacacccaggatgcttcgggaaataagctgcttctggatgttggcctctggctatcccagaagataaaggatcatttcaagaagaagccccgtttcccaataaccctcaagtacatcgacccgacctacatgatccgcgctgtcagttcaaacgcttccgacaacgtctactgcactctgctagcccacagcgcgctccatggcgccatggcggggtacaccggcttcaccgtcgctccggtgaatggcagacacgcctacatcccgttctataggatcaccgagaagcagaacaaggtggtgatcacggaccggatgtgggcgagggtgctgtgctcgacgaaccagccctgcttcctgagccacgaggacgtggagaacatgaagcacgacgacgacgagcaccacctgcacaacacgctgctcctggactcgccggagaactcgtccaaatgcaatggggcggcagcggcagtgtgggggggggcacaagacttgttttgcttttttgggtgctggcgttgtagagattagcgaccactatatgatagggttggataatgtgagcatttggtaataatataagcttcctgaagtaagctcgttgttcgtgctcgttttggctgttaaaaaaaaaaaaaaaaaagcggcc

SEQ ID NO: 121481 - DNA, 262 bp, Zea mays
  Clone ID: MRT4577_42267C.1
acgcgagactcgcagctagctgacacggccgagaagcagcttgcattgcaggcgtattacggacccagcagcagctagcactagcagtccatcggagcgacgatggtgagaaggactgtgctggcggcgctgctggtggccgccgaactcgtcggcggcgcgcgggcgcagctcaaggaggggttctacgactacttctggccacatgcggagaagatcgtcaaggactacgtgaaagcgcacatgccccacgcgcccgacg

SEQ ID NO: 121482 - DNA, 402 bp, Zea mays
  Clone ID: MRT4577_42268C.1
gcaggatcatttcaagaagaaaccacgtttcccgataactctcaagtacatcgacccgacctacatgatccgcgccgtcagttcaaacgcttccgacaacgtctactgcactctgctagcccacagcgcgctccatggcgccatggcggggtacaccggcttcaccgtcgctccggtcaatggcagacacgcctacatcccgttctatgtaagtcgagagggtcttgcgcttgtgcagttgagcttcctggacatccggtcttggatcctggataaacccttctcttgttttgcagaggatcaccgagaaacagaacaaggtggtgatcacggaccggatgtgggcaagggtgctgtgctcgacgaaccagccctgcttcctgagccacgaggacgtggaga

SEQ ID NO: 121483 - DNA, 2363 bp, Zea mays
  Clone ID: MRT4577_42269C.1
cgcgaagcttctctcctcccgctgccccccttcggtcctcctcagttcgtcaccgtcgtcaacacgacgtttaacggcggcgcagagcgctaatccagcccaaacacgatatataacggtccgcgccttccgaagacgccaagaacagcctcaggttactcgcagaaaagatttattagctcgccgcgggggtcgaaccgagactcctagctgatcgcgcgcgcacaaggcgagcggacaagaaagcttgctttgtgctcaccggcggcacggaccccctgcgatggaagccgtcggcgtcactcctgcccccgtggcggcgccggagaagaagaagctgcttgacctcaaggaccccttccccgccgccgccaacggcggcgccaaggcgtccccggcgaggaagtgggcgatgaagaagaagctggtgggcggcgacgccggctacgtgctcgaggacgtgccgcacctcacggattacatgccccagctcccgacatacccgaatcctctccaagacaacccggcgtattcagtcgtcaagcagtatttcgtcaacccagacgacaccgtcacgcagaagattgttgttcataatgtctcgctgtgcttttcgttagctggggtggtgtgtccctggcccaatactgaatctcgcagggctactgtaccggcagtgcacgactggtcgcgcggcgggtgcggcacataagaccagtgccaggggcacccacttccggcgtgccgggccacggcagcgggtgtacttccagtccgatgaggtgaacgccgccattgtcacctgtggaggcctctgcccggggttgaacacggtcatccgcgagcttgtttgcggcttgtatgatatgtatggcgtctccagcgtcgttggcatagagggtggatacaagggtttctattctaaaaacactgttgcgttgacaccaaagtcggtgaacgacatccataagagaggcgggactgtcctcggaacctcaagaggagggcatgacactgccaaaatcgttgattgtcttcaggaccgtggcattaaccaggtctatattatcggaggcgacggcactcagaaaggcgcttctgtaatttatgaggaagtccggagacggggcctcaagtgctctgttgtcggtgtcccaaagactattgataacgacatcgcggtgattgacaagtcgtttggattcgacactgctgtggaggaggcccagagggccatcaatgctgctcatgtcgaggctgaaagtgcggagaacggcatcggtgtcgtgaagcttatgggccgcaacagcggttttatcgcgatgtacgcgactctagctagccgtgatgtggactgttgtttaatcccggagtcacccttctacctcgaagggaagggaggactcctcgagttcgtcgagaggcggctcaaggacaacggccacatggtcatcgtggtggccgagggtgctgggcaggacctcatcgcgagaagtatgaatttcgtggacacccaagacgcttctggaaacaagctgcttctggatgtcggcctttggctatcccagaagataaaggatcatttcaagaagaagcccagcttcccgataaccctcaagtacatcgacccgacctacatgatccgcgccgtccggtcgaatgcttctgacaacgtctactgcactctgctggcccacagcgccctccatggcgccatggcggggtacaccggcttcacggtcgctccggtcaacggcaggcacgcctacatcccgttctataggatcaccgagaagcagaacaaggtggtgatcacggaccggatgtgggcgagggtgctgtgctcgacgaaccagccctgcttcctgagccacgaggacgtggagaacatgaagcacgacgacgacgagcaccaccacatgcacaacacgcagctcctggaaggcgggagctcgccggtgtccaaatgcaatggctcggcagcggcagtgtgaggggcacgagaatacgcaaggatatagatatatatagtattaagcatgtagctatggatgttttttttccttttgcttttttgggtgctggcgttgtagagagtatttggtaataataatataatgcttcgctgagattaaatctcaaaaaaaaaaaaaaaaaaaaaaaaaaaaaaaaaagcggccttttaactcgggaataaaaaaaaatataaaacgggggggcggcgggggggggccacatttttttttcttgtaagaaaaaaaaaagggcttttcgctgttcgtaattggggggtgagactctttaaggctcatatgggctggcatattgaaattacaaaaattttaaagaggccgaggggcttt

SEQ ID NO: 121484 - DNA, 627 bp, Zea mays
  unsure (1)..(627): unsure at all n locations
  Clone ID: MRT4577_4226C.1
catggcccatggcggctcgtggggcgggggtgcggcgcantggctgttccttcctcccgcagcgcgcgccaggggcgccgtcccctggnagcggcgggcggcggtcgggcgcccgtggcnggtgcgcgcgttcgtacgagggccgggggtgggtcgtgtatggtcgaccaagggtggnnggatgatgactctgtgttgggggtgccgnganacnnngggaagccggctgccggtgtaccttttgttcggggttgccggggagggggcggcatacgttggtgaccgccaggtgtaatgacgggccgctcacgggacggggtaccgacgtccgtgccagggtcgggtntccatgggcgtgcgcgtaggactaagctctacccgcccgggagctgggtccaacctggggcaagggccgggcgcccccgccggctgcggcccccctgtctaggaagtttccgggcttcaccgggcccggggggcccccctttccggagcccccggggcccgggncccttttgctttttggccgcggccctttttgtttggggggggggggggggccctcgtttgggcgggtttccccggggggcttcttttttttgggggggggggggttccccggggggg

SEQ ID NO: 121485 - DNA, 287 bp, Zea mays
  Clone ID: MRT4577_42270C.1
attagtattagcgaactactgacgggctgtcaatgtggaaaacatggtcggagactagaacaaggcgaaggtccgaagtcattatcagaacacagatgcttacacgattgatgtcacacacacatcaccactgtccgaaacaaatactgtgtcatttaagacctatgggcgtctctccatgaacaatgtaacattgttgaataaccgtatgagtgcatactttccagtttaccagccagctctgcctgctagagcagttgttcctgatccacactatcatcatgcat

SEQ ID NO: 121486 - DNA, 286 bp, Zea mays
  Clone ID: MRT4577_42271C.1
gtcgcgatctatatttgctccatgattcgaaaggtggcgcgtcaggtttattacctacaggaggacctggatgttttgttgctgctgccaccatgatggccaccacaaaggacgccaagttgatgagtggactgctgaggaacacatgcaaggaaattaatggtgcattttcaaggagtgattctattaagaaatgcaccattgcatgtgtgttcacaatattacaggaatatcctctttaggtacagccaccaccgtggcaaacggggcctaacttttttgtttc

SEQ ID NO: 121487 - DNA, 796 bp, Zea mays
  Clone ID: MRT4577_42272C.1
cggccgctcaaaggggcgggtttcctgctccgctcccaccgaaacccctccaaactcctcccaccggaaaatcccccaaactttggctggccgaaaccatggacggagatcgacggttgccgccggctgccacgctcgcatcggcggcggcggtgcttggcaacaacgacctcctgcgcgagatcctcctccgcctcggcttccccacctgcctcgtccatgccgccctcgtctccaagcggtggctccaccacgcctccaacccggccttcctccgccacttccgtgagcgcaacccaccccgcgtcctcggcgttttcgcctgctaccccggaacaccgtacaagttcctgccgcttctacagcccccggagctcgccgccctctcacgccgtgcggcctcctccttcgacggcgccttcaccgccaacacataccagcgtgtcgtgcactgccggaacagccgcctcatcaccgtgttcttgcacgagggaacatacaggcactccctcctcgagccgctgctcgctggggagtccgaagcggtcctcccacagaccccgctgccccgccatctcccgcaggccggctcatacacaaggggtattctctcagactttcctgcccgaggatgggggccgcgacggcatcaccttggtgagtctgtggaaggtctggagagaagtccgtgcggaagtgtgcgtgctgggatctggcggatggggcgtccctacaaccgcgtgacagaggtagatctcccgtatgctgaaacccaacttatagaaatgctaccacc

SEQ ID NO: 121488 - DNA, 340 bp, Zea mays
  Clone ID: MRT4577_42273C.1
gtttttggaccgcggtacgcaccacggcaccacattagactgtgggcttgccactcgacgccacctgccgttgagctcccgatctgttccgtctctacttggctcgcagcggaagaggacgcaatgcggcgccccgatggcgcacacctgctcctggctccacgaggatcggggcgtcgagctgggcagtgcccacttttcagggtcgttgccggcccgcccgtgggcacttgcactacgcctatgtcaccagcgcacgcgctggacgcaccggtactgacagcccaccgactaggggctggggttcactccccatgccacaccaggagtaggtggatca

SEQ ID NO: 121489 - DNA, 251 bp, Zea mays
  Clone ID: MRT4577_42274C.1
gaagaaaaaggccttattggcaataccactatctgggatggagcagcattccatcgcggagccaataggagcaccgcacctgtctggcctcacgggagcacctaacactatgactttttacccaactcttcactgactgctatcatatccttaactactaatataacaagtcctagctcaatggctgtacatatcctaaacctgcagatttaaagaaattgtgatcagcacccagcaaattccaacccgcg

SEQ ID NO: 121490 - DNA, 183 bp, Zea mays
  unsure (1)..(183): unsure at all n locations
  Clone ID: MRT4577_42275C.1
ttgttgcagcgtacgcagctcgaatcagctcgacagcacttgtggcttgcttggttgtgagatgcgtcattccagagagcagcctggtggaggtggcangctcagccagctcttggtaggtcagagcagctggctcaggctccagctcgcctccagtggaagcccgagcgccctcagaaacga

SEQ ID NO: 121491 - DNA, 431 bp, Zea mays
  Clone ID: MRT4577_42276C.1
gtaccctcgggctgccggatacattacagcgcttagttgtgcgcccacagccaaattttctctccttaatcgcgggtaagctgcactgtgtgctgttcgcccgcaggagccggtagccaaggcggataagggggcggctggagagcttggctgcgcgtgcctcagcaagaacctgctgttgcggagcgaatggccgttctggagataaccctcgcccggatacctccttaggttgcgcagggggggcccgcacaccgcgagggcaccgccgcccccgtctatctcgccgccgtgcttgagtacctcgccgccgaggtgctggagctggccgggaacgcggcgaatgacaacaagaagacgcgcatcgtcccgcgacacttgctcccggcgattcgtaacgacgttgggctctggtggctgctgtctggcgt

SEQ ID NO: 121492 - DNA, 314 bp, Zea mays
  Clone ID: MRT4577_42277C.1
aaaaaccacccccaattttttttccggggtccccacacatactaaaagggggtttttaccattttaatgccttttttacaacacggaaaagtttttttcaggcaagtaaaaaaaaaggttaacaaaattcacttaagcttgtttataatacatccgaatccttgtgctccaatgaaaactttctactccaatcttattctgtttccgaactaaaagggtgcagttttttacaacggggggtttcccaaaaaagggggctttggggggccttcactcaaccatgaaattgagctttcctttttgacgatgcactt

SEQ ID NO: 121493 - DNA, 285 bp, Zea mays
  Clone ID: MRT4577_42278C.1
atgagttgttccatacattttagtttatgtttgagattgaaccaagaagtgagcattatgctggaggggtggactcgctttgccgtgcaggaatggaagagcgagcttatgagatcatacaggggatgccaatgagaccttccatttctgtctggggagcactacttggggggtgcaagatgcatgggaagacagagctaggaaggattgctgctgacaagttgtttgaacttgatcctcaagatttatgcaatcatgttttgctctctaacatgcttgcatctg

SEQ ID NO: 121494 - DNA, 246 bp, Zea mays
  Clone ID: MRT4577_42279C.1
tcatatatatatatagaatcaatgttagagtagcttcctaccataagcggcatgtggacgacaagccgccgtacgccgccttggacgacaccatgaccaccatcactaataatatggtgaaggagcaactctcatactacaccttcagcttcatctatcttccatagcataactaccgtgtatggaatgccatgccctacgtcatatacaactatacttgctagaagctgttcaccatcgttacca

SEQ ID NO: 121495 - DNA, 435 bp, Zea mays
  Clone ID: MRT4577_4227C.1
ggggggccaaacctggttaaaaaggggtaaaagtttaacttcaaaaaaaggggggggtttcaaaaaacaaaaaaatggaaagggggtcccggggctttatttttaaaggggggggggaaaaaacttagggctaatttgaaactctagaatggggcccaaactaaatgttttgggggaaattagggggtaacttaaactaatttacaccaaaatccaccttaaaaaatggggattggggaacaaaactaaaggcccgaaaaaaagccgggacaaaggcccctaggggtttaattttttggaaaaaaaaaaaaccaggggggtctccggggggaacttaaaaccttggaaaacctgcattggaaccatggactgggcattgtcctcaaaatcaaaaaaagggaggccggggttaacttaaaacaaccgaacttcccg

SEQ ID NO: 121496 - DNA, 393 bp, Zea mays
  Clone ID: MRT4577_42280C.1
gaacgggatcggcgcgctgtgctcgttcggcgtcgcggccgccaccctctgcgtgttcctcgtcggcggcaggcagcagcagcagcagcacaggcggcaggagcagcgggaggagacgatccagctgcagttctacggcgacgataagaggatccatcaggtggtgcagcagacgtcgaggctgaaccaggccatgtcgtccgtgatgggggcgggaggaggcgcgtccgcgagggccaacatatccttcggtgggttctacgatggattctgacggaaaagactggggaacagatgggtgtagctagtattagtatatactgccacgtatactgccgtaggcgcatgcgcacgtagcgcgtccgttggacgatgtaaataattggggggctc

SEQ ID NO: 121497 - DNA, 325 bp, Zea mays
  Clone ID: MRT4577_42281C.1
cacgcgtccgcgctctcaaagagctcgtctactaccgctccactttcttgaccactcgcaattgcatccgggaggagctgaatgcagagatcgacaccagatcccagccgtctgaagagggaagaatagacggtatgactgctgcgacgccgtcgctctgcaccgccgcgcgcgtgctgtgcccatgcacgtttctcgcgctgctgctctgcttacagctcctgcacacatcgcatgcttacaagctgcgcggcgtcgttggtggctacgacgacaagaaggtcccgctggccgttatcgcgccggctgacccctctcatgagct

SEQ ID NO: 121498 - DNA, 347 bp, Zea mays
  Clone ID: MRT4577_42282C.1
cccacgcgtccggcggctgcgcggtggtgttgagggccggtcctgggccgctgtccgatgtcgagcccggcctggatgaggactccatcgacgtgtaccgtaccaaccgcatcatccctgaggacttccagtacaggaagtattactgacactacacctatctcgaacgccaagacacgatcggcttctgggaggatgtcttcgaatgctaccatcaagctgatccttctgaactcttccaagcactcatcttctcagcatttcctcttgctatcatactgtgtatgatctgtcaaagtgcctgatgagtacctatacatctttaccgtcgacatgatcatagtcat

SEQ ID NO: 121499 - DNA, 438 bp, Zea mays
  unsure (1)..(438): unsure at all n locations
  Clone ID: MRT4577_42283C.1
cagcgcgtataccacacagcggctgctgggagcttcttcaattcttctacttaggagttgacatgggaccacacgcacagcattattacatggtgcatatctcccagagctgatgctggttctgctctgaacttctatccttcgtggggtggcgaacaacgcgctccacgaggaggctctngggtcatcataaagcagacacaccctttagagccctacacctacctggagctgaagatgcctaaccctgttgctgttgctgctgcgtgcgcgctatcttgctgctaatacccactcaaccgaaccggacgggacgctatccacggagctcaggcttgtcgactcctgcctgctgacgtattcgtcacaggtgctaccgagcctccccgcgggggctcaactcaggagctcccagccctgcttccccatctgttggac

SEQ ID NO: 121500 - DNA, 730 bp, Zea mays
  Clone ID: MRT4577_42284C.1
gggtaccctccgggtccggccgggagccctccgctcctgcgtcctccccttccactcgtatacaaccacccacctgagccgcacccacgctaaccgtacctcctccgaatccgccgaccgccggcgagcccctcctcctccacgacacgcgcttccccggctatcatggattcagatccatcatcacagaacccaacagatatgactgcatttgtccagaacctccttggacagatgcaaacaaggttcgagtccatgtcgcagaacattgtgtcaaagatagatgaaatgggaaccaagattgatgagctcgagcagagcatcaacgatctcaaagctgagatgggcactgagacgccggtcaagaagcctgatgagccaaagcctgctgactctgcctaacttgggtgtaacccagagattgttgtgtgaagatttgatgatggtacgtgatcgtatctgttttcatgagtcctggcagttatgtagacacgaacccatcgtatgaaagatgaatccatgtttgggctctccagacatcaacgcatgttcttagcttttctgtcatctttcggcaactatttatttgtttgactgttataagatgttatgcaacatctactccatttgaagtaattgtcttgtgtagagcagtctgctgctgcttgtttgctgataactcatggcggctgttgtctgttttgtccaaatgacatcgaacgtatgaggc

SEQ ID NO: 121501 - DNA, 170 bp, Zea mays
  Clone ID: MRT4577_42285C.1
accagtcttctttgaatggtggtgtacatttccgagcagctccttggcgaggtggccttactggccggatgtttttttacagctgaccacctgtgctacctgggtagctccgaccgagttgccgctgaccggcagtccgaaggcctaatggggcaagacatgaccgtcac

SEQ ID NO: 121502 - DNA, 669 bp, Zea mays
  Clone ID: MRT4577_42286C.1
acaaccccccacctgagccgcgccggccgggaccgtacctcctccgaatccgccgaccgccggcgagcccctcctcctccacgacacgcgcttccccggctatcatggattcagatccatcatcacagaacccaacagatatgactgcatttgtccagaacctccttggacagatgcaaacaaggttcgagtccatgtcgcagaacattgtgtcaaagatagatgaaatgggaaccaagattgatgagctcgagcagagcatcaacgatctcaaagctgagatgggcactgagacgccggtcaagaagcctgacgagccaaagcctgctgactctgcctaacttgggtgtaacccagagattgttgagtgaagatttgatgatggtgtgacaaatttcagcagtacgtgtatcttccgatgatcgtatctgttttcatgagtcctggcagttatgtagacacgaacccatcgtatgaaagatgaatccatagtttgggctctccagacatcaacgcatgttcttagcttttctgtcatctttcggcaactatttgtttgactgttataagatgttatgcaacatctactccatttgaagcaaaaaaaaaaaaaaaaaagcggcctaaaaaaaaaaaaaaaaaaaaaaaaaaaaaaaacccccccccccc

SEQ ID NO: 121503 - DNA, 1160 bp, Zea mays
  Clone ID: MRT4577_42287C.1
cattgggcacctcgaggaggcattgggtacctcgaggccggccgggagaacagaaccgaaacctcagacactctacatatatcctctgcgcgtgtatctcgtcgtacagagccgaaagctggagcttccaatggcgggagacaacgacctgaaggtgctcggcgtgtggacgagcccgttcgtgatccgggtccgcatcgtgctcaacctgaagggcctggcgtacgagtacgtggaggaggacctcagcaacaagagcgcgctcctcctggggtccaacccggtgcacaagagcgtgccggtgctcctccacgccgggcgcgccataaacgagtcccaggtcatcctgcagtacatcgacgaggtgtgggcggggacggggccggacgtgctgccggacgacccctacgagcgcgcggtggcgcggttctggggcgcgtacatcgacgacaaggtggagtcggcgtggctggggatgctgttcaggtgcgcgaacgaggaggagagggcggcggcggtggcgcgcgcccgcgaggcgctcgacgcgctggagggcgcgttccgggactgctccagggggaggccgttcttcggcggcgacgacatcgggttcgtggacgccgttctcggcgggtacctcggctggttcggggccgtcggcaggatcatcgggagcaggctcatcgacccggcccggacgccgctgctggccgcgtgggaggaccggttccgcgccgccgacgtggccaagggcgtcgtgcccgacgacctcgacaagatgctcgcgttcctgcagaccctgcgcgctatgaactacgccaagtgagagtgtttcgtcgcatgaacgtgtgccgtgccgtgcacgacctatgatcagttcatgtcgatacgtctatcactcagttttgcttcttccgtcaataatcggtgtgctgaatacatgtacaacagctgcctataattttgcttctttcttctaatacctccgtttttaatttgatagttcaactttataataacaaatgtcaaatttaaaaaaaaaatcggaaggagtatttttttaatacatccaagtccatccaataaaagtgctcgtggggctttctattaaaaaaaaaaaaaaaaaaaaaaaaaaaaaaaaaaaaaaaaaaaaaaaaaaa

SEQ ID NO: 121504 - DNA, 1022 bp, Zea mays
  Clone ID: MRT4577_42288C.1
aaaaaaaaaaacaaaaaaaaaaaaaaaaaaaaaaaaaaaaaaaaaaaaaaaaaaaaaaaaaaaaaaaaaaaaaaatccgaggggatcccgcctgacctggctgcctggctggtccggaccgatcggcccctcagagctttgcctgggccaacctttgacgcacgaggttccttcgaaaccctgcctggctcgccttttggtagcccacgcgaaccgggccgcttttcagccctccgctcctgcgtcctcgccttccactcgtatacaaccacccacctgagccgcacccacgctcaccgtacctcctccgaatccgccgaccgccggcgagcccctcctcctccacgacacgcgcttccccggctatcatggattcagatccatcatcacagaacccaacagatatgactgcatttgtccagaacctccttggacagatgcaaacaaggttcgagtccatgtcgcagaacattgtgtcaaagatagatgaaatgggaaccaagattgatgagctcgagcagagcatcaacgatctcaaagctgagatgggcactgagacgccggtcaagaagcctgatgagccaaagcctgctgactctgcctaacttgggtgtaacccagagattgttgtgtgaagatttgatgatggtgtgacaaatttcagcagtacgtgatcgtatctgttttcatgagtcctggcagttatgtagacacgaacccatcgtatgaaagatgaatccatgtttgggctctccagacatcaacgcatgttcttagcttttctgtcatctttcggcaactatttgtttgactgttataagatgttatgcaacatctactccatttgaagtaattgtcttgtgtagagcagtctgctgctgcttgtttgctgataactcatggcggctgttgtctgttttgtccaaatgacatcgaacgtacgagtcatatgagcttatgtcggttgtgcggtttattggcacaatctggcgctgcaaaaaaaaaaaaaaaaaaagccccta

SEQ ID NO: 121505 - DNA, 543 bp, Zea mays
  Clone ID: MRT4577_42289C.1
gacccacgcgtccgcccacgcgtccgagcagcgaaggtagccacaacatccactcgactgactactcgagagctaagaaactgttcaacaggtgatccagaacaagatgtgtccaaccaagaaggagatgagtgccgagtcgtcgggctcggcgagcagctggacttcggcctcgacctcgacctcgccggagcaccagaccgtgtggacgtcgccgccgaagcggcccgcggggcggaccaagttccgcgagacgcggcaccccgtgttccgtggcgtccggcgccgcggcagcgccgggcggtgggtgtgcgaggtgcgcgtgcccgggaggcgcgggtgcaggctctggctcggcacgttcgacgccgccgaggccgccgcgcgcgcgcacgacgccgccatgctcgccatcgccggcgcgagcgcgtgcctcaacttcgccgactccgcgtggctgctcgcggtccccgcctcgtacgccagccttgccgaggtccgccgtgcggtcgccgaggccgtggaggactttcagcgccgcga

SEQ ID NO: 121506 - DNA, 1261 bp, Zea mays
  Clone ID: MRT4577_4228C.1
atactgcggaccggccgccctttttttttttttttggtcacaacgtaaaacatgaatgggagactggcattatgataaagctcgtactcttggctttaatctgtaccgatttctactgtttctacagtgtttttgtctctatggattgcaactgcagcagttcaaacagccggctttaatccaaagcgatctaacacaaaatcagttgtaaccgtatgcaagaatgtcttgttcagttgtcctattaataaatctgaaaccattaatcttattgggggattgggaaatacagaaacagaattgaaattctactgttgttcagggaacttatgcagaaaaacgtaacaaagaaacatcatggtcatcagagattctgagctgtttgagaagagcccatctccatctgcaactaacatctggagcattgcttcctgtcccctgcaaactggcatccgtgctgaccattttaggatatcagctactcacatatgtaaagctttaggtttgatcacttttgtttcttttagcctggcaggctttcagtgcttggacgtatgcttggcagaccttccagttgcggtttgactcaatgaggcagtcctggagagatagatatattgtggcacactcgttaagctgctttacactcttgtcctcctcatctgcatctgtcacatgtagagggtgttgagatgcaggcagtggcacattgctaccattgcttgaggaggattccattgcaagcttggttttgttaggtggtggcaccttaatcaatctgttttggcctttcaattgccttcgaatgggttggaccttaataggaactgcacgacagaatttttaatcgaatcggaaggccaaaatccgctgtactcgtcaccgttcaactggaggaaccacaggattgccacgccaaagacgacgcggatttgagggcggcggaaggaggcgttcacgagccggggaggtgggccggggtgcggcaggcgcgtgcagccagatgggaactgcggcggggaggactgcaggccggcgcgtgcggccagatgggaacggcggcgggaagggcggcaaacagaggcagacgtgagccggggaggcgagctggggtgtggcggacgcgtgcggccaaacgggaacgacaacggtgagggcgtcggacgagagccagagaggcggcgcgagcgcttatcacggagtcgcgaagcgaagcaacgtcagtagggctggaccccggccggcctcgaggtacccaatg

SEQ ID NO: 121507 - DNA, 151 bp, Zea mays
  Clone ID: MRT4577_42290C.1
accagcgagatcagggaccagggctcctgcggatcatgctgggctttcggcgccgtcgaggccatgtccgaccgcatctgcgtcgcgtccaagggacgcgtcaaggcgcacctctccgccgaggacctggtgtcctgctgctactcctgcg

SEQ ID NO: 121508 - DNA, 820 bp, Zea mays
  Clone ID: MRT4577_42291C.1
gccggccgggtcgggatattactagtagcaggcctgcgtgtagtcgctgagtcaccagtttgcggtttgaagcagcctctccacatttgcggcggaaggcttgcctcagtttattctttctttggactccactcatgccggagcgtctggcactgggtctgtcccacacattcctggtagtagttgcttggtagtgatggactgttttttggtctgttcacataataactaacgccctgtttgactgagaagccggtgaaaaaacagcttatctgagaaactggtgaaaaacactttttgcttattgcctgcttttagttcattctgagaagtagctgaattgataatctgctgcaaaagcgcctgtttggtacagcttctatttaaaaatgtgaggctgtgaaataatctatgccaaacagggcctacgtaccaccacctatttgcttctcatttgataactatactaaataaaatctaaaatacatccatgcacttgtaatttgataactaaggcttgtcttggtttattccctttccaaacctcactcatgtggagctctatgcattgggtctgccgttaataagccttacagaatcttgctacactttttgatttattgatgtgggggactaatttaaatatttaacggaagggaattttgccacactttgtggcggtacaaaacagcagccatggctattaaggtgtcgcttaagcgccgctttaccgaagcgacacttaagaggtaagaagcgacacttaagaagtaatgcaagttcgtcgcgtggggcgttcttgttgccttgctttcccttg

SEQ ID NO: 121509 - DNA, 1276 bp, Zea mays
  Clone ID: MRT4577_42292C.1
gcacgaggggaatccctggctctaaacaagccctaaactttttacaagtgggcatattagcatataccatacagttttccataaaggaacagtcatacaatcacgacagcagaacgctctggagtcgaccgtggacttcgaaaattctcttcagcggcagcgctaaaccataaggcaatggcggcggcggcgaaagagcgtatgcgtgaccggcgcgggaggcttcatcgcgtcttggctcgtgaagctcctcctctcccgtggccagtacgtggtccgcggcaccgtgcgcgaccctggtgctagcaagaatgctcatctcaaggagttggagcgggctggggaaaggttgcagcttctccaggctgatttgttggactacagcagtgttgcatcagcaattgctggctgtgagggtgtcttccatgtagcttgccctgtcccttctggtcggtcctccaaccccgaggtggaggtcataggtcctgctgtagtaggaacaaccaatgtgttaaaggcttgctatgaggcaaaagttaagcgagttgtggtggtgtcttctgtttcagctgtattcagtaaccctaattggcctaaggacaaggtctttgatgaagactcttggtcagacgaggattattgcaggaagaatgaggattggtattatctttctaaaactctatccgaacgtgaagcttttgcttttgcagcaaaatcggggctggatgttgtaactatttgcccgtccttggtatttggacccttgatgcagtctatagtaaatacgagcagtaaagtactccttaattatttcaaaggagatcgtgagactgttgaaaacagactcagaaatatggtggatgttcgtgatgttgctgatgctcttgttctggcttacgaaaatccagaagcatctggacgatacatctgcagctcgcatccattaaaagtttctgatatgataaacatattgaagaccttatatccatcttacccttatcctaaacactttgtggaaacggatggcaacatcacctgcagttctgagaaacttcagaagctagggtggaccttcagggctatagaggaaaccctgcgtgatagtgttgaatcctacaaagcatttggcatccttaactgagcatccgactgggacagtgagacagcagttccaacagtccaatccctatctcgttcatataaaccgtgaaacagaacatgctgttcatgtacatttgcaataaaaaattgggaaatttgtagccctctactgaac

SEQ ID NO: 121510 - DNA, 665 bp, Zea mays
  unsure (1)..(665): unsure at all n locations
  Clone ID: MRT4577_42293C.1
gcgttcgccccgcgtccggcgctctggtcctgaagctgttcaaggagagcagcaacggcagcagcgccaatggttcttcagcagactcgtcctgtatcacgaccttgtacgggtgtttccagaactgcctggattccctgctggtgctgtctcgccaagcttccggtgcagacgagcttgcgggcgaagaagaatcgtcgtcaggcagcaaagagcaggcgttcagaaagatcggtctggaggcggacaaccttctctggctagctgagatcctgtcggagcggcacgcggtcgacgagctggcggccatctgggcgaggcagacggagctggccgcggagctgcaccccaggataccggtgatgcaccggcacctggtgagctgcgtgaccgcgaggctgctggtggcggtcgggagaggcgcggcgctgccgtccagggagacgtggcagtggctgctggacgtgtggctatcgccgctaatggacgactacaggtggctgcagcacgggtgtcgctggttcgaccgcgccgcggtggaggacggcatcgggcaggccgtgctaacgacgctgccgctggaggagcagcaggccgtgctgctggcgtggctgggcaggttcctcaggggccgagcgacnggtgccccacctgcagcggcgttc

SEQ ID NO: 121511 - DNA, 525 bp, Zea mays
  Clone ID: MRT4577_42294C.1
ggcctaattcggcacgaggcttcgtcccgtcctgccccccaccccatcctcgcctccggatctcgctccgccggccgcggccggacgaggcgcctgcgacccggtccgaccctccctccctccctccctccccctctcccgccgaccgcgcgtctgtcgggactcgggccggcttacttataccgctcgcattgccgggtgcctgctccatttgtccaccccactcgccgcgcgcgcggactccgtgccccgggcgggccactcgcagcttcgagctagctcggagcttctgaggacgaccacgaggaggagaggtacaggctactacagttctgggagatggcggccggcggggtggggcccgcgcagcaccaggcggcgaacggcgcctctggcagcgtcagcaacggtggcgctgccacgccgctgcacggctcgggcgccgacggctacgacagcgacggctacagcttcgcgcccccacgccgggaactttgtgcatgtgcatacctgctgagcttgctg

SEQ ID NO: 121512 - DNA, 435 bp, Zea mays
  Clone ID: MRT4577_42295C.1
gggggccaacggggggacagcccttggccattttattacacgggcaagggagaatatgccacatttccggcccggactaaaaatttagctgggcccaagggaaggggaaattaaaccccttttggaacccagcatgaacaggagccccccccccactacatactttttggaacgcaaaagccagccagccagccagccgccggccctttccatgatcggggcaggaaaaggacggggaaaaaagggaggaacggaggggtgtgcttaaaacccaaacgaaaaatccccctggggaaaccgaccccccagccgatcacctattggggggggggcggcctatcctactactacttactaggggaaaccccccactaactaactgccaacctgccatttggggagtcaaaaccaaataagtgccggggtaggggggaa

SEQ ID NO: 121513 - DNA, 531 bp, Zea mays
  Clone ID: MRT4577_42296C.1
ttcgggatctgcagcaaaaccgcgccccaccgcttccccgttccccaccccgaccgactgctccccctcccccgcatcagtgtcgaggcatcgccggggccgcaacatcgatgaggaaggccgtacccctgcccggatccgatggccaacatcaacctcccgcgctgcatcatcaaggagactcatggcatgttcacttagacaatgccgcgaatcactgcgtgctcctcgcaagagaagatgccgaacttcaacggtatgatccttgagcacgtgaagtcggccctatgaaggtgagagttataacgttgaacactatttacctgacgaatatgccacatggctgccccacaggttaggcttctgactgagatctatgatctgcgcatcgacaagattgcgaggagatgcctccacatactcaggggcaacgggagcctcagcatatccgatttgaacagtgcatcggaacatacacgttcaagtgagtgcgacagagccggaccgacgctcttgcgactatgtagaaaa

SEQ ID NO: 121514 - DNA, 328 bp, Zea mays
  unsure (1)..(328): unsure at all n locations
  Clone ID: MRT4577_42297C.1
ggaggaaatagctttttttttccgccctcgtttggtcccacccangaaagatcccgaaaagccgtgggtaaaaccccttttacaaactttaattcccgaccctttgcttgtgtgccttcccttngtggtcgccnttcaccgtttcttttttttgggtcccgtttttttttgttgttccctcctttgtttgtttggtcgtccttttctcctgtccgcccccctttttcttttgttcctgccaggtttttgtggtgtttgtttttgcccctctttttttttctttttgtccccctcttttttcttttttgtgtccttcttccccgttttt

SEQ ID NO: 121515 - DNA, 240 bp, Zea mays
  Clone ID: MRT4577_42298C.1
aaaaaacataaaaaaacacaaaaaaaaaattaaaaaaaaaacaaaatatataagggaagacctatatatgaattaaaaggagttattctatcgatgtcacaagcctatagaaaactgacaagtgtcagtcttgatctacgactccctgcgatcatactcctgtgactgctggttagtgtctaatgcagcctgtcaaacttcttgatgcccccactaatacaaggtcatgactctggaaaa

SEQ ID NO: 121516 - DNA, 351 bp, Zea mays
  Clone ID: MRT4577_42299C.1
tctcggatctgaattcccgactcgacgccactcttccgatggtatttttttatgatgtcatttttttgattctgtgtttccaaaccttgcgtgtagaatgctgttgcttatgtaccatatgagaaggttgcatttggtcggataaaatgccttagattaatgcaattgtagtttaaagttaaaagtgatgcattcatcaccttggacctgccgtactattttttaaagccagccaaacggcatataaaccgcatgtttacagaatttgaagacaaggtggaggactagaaaaattatataaatcaaaattataaattttgagaaaagtttttatttaaaaatcaacacctt

SEQ ID NO: 121517 - DNA, 1105 bp, Zea mays
  Clone ID: MRT4577_4229C.1
tctgacgttgcttcgcttcgcgactccgtgataagcgctcgcgccgcctctctcccgcccggccgacgccctcaccgttgtcgttcccgtttggccgcacgcgtccgccacaccccagctcgcctccccggctcacgtctgcctctgtttgccgcccttcccgccgccgttcccatctggccgcacgcgccggccacaccccagctcgcctccccgcccccggctcactgcggctcccgtctgcttccgtctgcagtcctccccgccgcagttcccatctggctgcacgcgcctgccgcaccccggcccacctccccggctcgtgaacgcctccttccgccgccctcaaatccgcgtcgtctttggcgtgacaatcctgtggttcctccagttgaacggtgacgagtacagcggattttggccttccgattcgattaaaaattctgtcgtgcagttcctattaaggtccaacccatttgaaggcaattgaaaggccaaaacagattgattaaggtgccaccacctaacaaaaccaagcttgcaatggaatcctcctcaagcaatggtagcaatgtgccactgcctgcatctcaacaccctctacatgtgacagatgcagatgaggaggacaagagtgtaaagcagcttaacgagtgtgccacaatatatctatctctccaggactgcctcattgagtcaaaccgcaactggaaggtctgccaagcatacgtccaagcactgaaagcctgccaggctaaaagaaacaaaagtgatcaaacctaaagctttacatatgtgagtagctgatatcctaaaatggtcagcacggatgccagtttgcaggggacaggaagcaatgctccagatgttagttgcagatggagatgggctcttctcaaacagctcagaatctctgatgaccatgatgtttctttgttacgtttttctgcataagttcactgaacaacagtagaatttcaattctgtttctgtatttcccaatcccccaataagattaatggtttcagatttattaataggacaactgaacaagacattcttgcatacggttacaactgagttcgtgtgagatccttttggatta

SEQ ID NO: 121518 - DNA, 440 bp, Zea mays
  Clone ID: MRT4577_422C.1
gccagtctctggggggggagggaaaccgtaaggccccgcaacaaggggggacagggggggggaaggaaaggcagccccaacggggaaaaaaagggggcatgatagaacccgcaggcccgggggcgcacaaggggaaaaaaacaaggccggacaaggcccaacaaagccccccgcggggggggccgacgctataacaacaaaccaagcttttgatcgggggccgcccccaaagacaaacgccgggctacaggggaaaaaagcacccgcgggggtgccgggagccgacctcccatacggggcccagggcccctggagcggatcgggcgaccccaaaaaggccaaaaggctcaaaaaaccggggggggccaacccgctggtaaagacccccaggaagcggaagggtaactgtagggtcaaaaaccaaaaagggttgggcccgg

SEQ ID NO: 121519 - DNA, 390 bp, Zea mays
  Clone ID: MRT4577_42300C.1
gatttaccattggacccgcacgtcacaatcttctctcttgactaggagcaagtctaattagagaaccccactgtcgcgagaccctaattgcagtagccgccgccgacgccgccgagtgaccggcaacggagatctaatatgggggcgtctggctccgagttctcgctgccgacggccgacgcgttcccagcagacagcatcgtcgtccacgagaccgacgaggtgcttgtgactcggctacctctctgaacttctgcacggctcccttcacacgacgccggtgtatcgttcgcaagtacctacgattacaaatcaaactatgactgtaaagaatatgatagaccaatactcctctcgaacgccggcggcgaaaacttcacaaggggagaa

SEQ ID NO: 121520 - DNA, 1391 bp, Zea mays
  Clone ID: MRT4577_42301C.1
cggctataaggcacttgtccggcacctttcagcgtgtgagactatgggatctgccggaaccatctgcacggataaaacgggaactttgactactaaccatatggtggtcgacaagatatgggcatccgaggtctcaaaatcggttaccgatagcagtagtttggaagatctggcttctgccgtttctccagccacattgagcctgcttctgcaaggaatttttgagaacaccagcgcagaggtagtcaatgagaaggatggcaagcagactgtcttgggaactccgacagagagggcaatgtttgagtttggcttgaaactggaaggtcttggtgctgaggataggacctgcaccaaggtcaaggtcgagccgttcaattcggttaagaagaagatggcggtgctggtctcgttgcacgatggcggctcgtaccgctggttcaccaaaggcgcgtcggagatcgttgtggagatgtgcgacatgatgatagatggcgatgggaacagcgtccccttgtcagaagctcagagaaagatcgtcttggatactatcaactcctttgcttcagatgctttgaggacactgtgcttggcgtataaggatgtggatggtctcgaggacgacgacgacgatgcagatagcccaacaagtggtttcactctaatctgcatttttggcatcaaagatcccttgcgcccaggagtcaaggacgctgtggaggcctgtaagtctgcggacgcgtggcggacgcgtgggccgacgcgtgggatcaatacagccaaagctatagccaaagagtgtgggatactaactgatggtgacctagcaatagaagggccagaattccgcagcaagagcccagaagagatgagggacataatacctaagattcgggtcatggctcgttctttaccgttggacaagcatacccttgtgacgaacttgcgaggtatgtttcgcgaggtggttgctgtgacaggtgacggcacgaatgatgctccagcgttgcatgaagcagatatcggccttgctatgggcatagcaggaacagaggttgccaaggagagtgctgatgtgatagtgcttgatgacaatttcacaactataataaatgtcgcgaggtggggtcgtgcggtttacataaacatccaaaagttcgtgcagttccagctgactgtcaacattgttgctttggtcatcaacttcgtctcagcatgcattacagggagcgctccgctcacagcggtgcaactgttgtgggtgaatatgattatggatacattaggggctctagctctagcaacggagcctccaaacgatgacatgatgaagagaccacctgtcgggcgaggggaaagcttcatcaccaaggtcatgtggagaaatatca

SEQ ID NO: 121521 - DNA, 611 bp, Zea mays
  unsure (1)..(611): unsure at all n locations
  Clone ID: MRT4577_42302C.1
cagcccaccaaccggtacatcagntacgccgcgctgcgcgccgaccaggtgccgtgcaacaagcgtgggcggtcctactacagcaactgcgcgtcgcagcaggccgccaacccttaccgccgcggctgctccgccatcacgcgctgcgcccgcaacatgaactgagcgcgcgcgcggcggccggcgggcgcgccgtcgagccggtcggtctgatctgcctctgccggccggcctggctgggcacgcagatagcctggctcgatcgcgcaccatgcattgacgacgtcgtcgcggccgtgccgccgttggacggagggccggacgacgacggcgacggaggaggaggaggaggaggcgctgacgaaattatatatatacacacaaaccctaccgccatttctgttgtcgttgtgcgtagcttctctctctacatatgcttatgtttatatatttatatatctatatccaaaacgagatatgtttgatcatcgatcgcgatctgtcatgtatgtcgtctactatctgttaatttgacaaaaagatgttgaaaaaaaaaaaaaaaaaaaaaaaaaaaaaaaaaaaaagggcggccctcgcgatctagaactagt

SEQ ID NO: 121522 - DNA, 347 bp, Zea mays
  Clone ID: MRT4577_42303C.1
cacacacactcttctccccccagttcggaccccggaggagccaagccatttcgtgcacctgctgctgtctccttcaccagtcaaccgcccgcctcggcgcgtcaccgcgcctggccgccgacccgccgcgcatcgctcaactgctcgtttgcaaagcccggaagcaggacgccgtcgtaaaccagagagacgtctcgcgccgcgccgcgctcgcgctcctcgccggcgtaacggtcgcccccagcgccaaaatgggtcccgccttcgcggcatactgataagcaggtaacttaccgagcatgcaatcggggcacgactctcatcaattcagcttgccttaattaacc

SEQ ID NO: 121523 - DNA, 255 bp, Zea mays
  Clone ID: MRT4577_42304C.1
cgggttgggtttttcatttttttggaaaacggaaaaatatggattttccataacgaagggcggcagctagcatcagaaatacaaattcaagctgttcgcctccgcaggacccacagaagtggaaacagggatgagtgtctcgccagacatgccggggctcagcagctaacgggaaggggccatcactccataacgcttttagaaaaaatgcaaaaacccccacaggatgggctattaaagaacatacaggggaga

SEQ ID NO: 121524 - DNA, 336 bp, Zea mays
  Clone ID: MRT4577_42305C.1
gttgttgggatcaacaaattgtctattatcaatacactataagtcacatcccaagtggcaaggtatgtacaggtacatttacggaaccaaattggccactgaatgacacccacctccaggcaaggggaaagtacttaacagttccaaggttcgttcagaacgactcaaggcattctgacaccaaccagcacccaaaacaaatttttctgtaacacgcgactggacaacaaacaagggtgctgctaggtaacccgccgtacattcactaatcaaaagggtgccactcggcccggtcctcgacagctgaaatcgggcaaaaggaagcacttctaaaaa

SEQ ID NO: 121525 - DNA, 587 bp, Zea mays
  unsure (1)..(587): unsure at all n locations
  Clone ID: MRT4577_42306C.1
aattcggcacgaggcattgtacgtaacgtncttccacaggattcgtcacgagtccactgcggaggctacaccaactacacggacgagctgtgcctcgaggggacggagcgacgcccgtgcctggttctcttttggctcgacggccaccgatgtccgtgccctacgagaagcgcgcgctggagtccacgctgcgctacttcccattgccgcgcgccagcagcagcagcagcaagcacgtgctacacgctgcacgtggcgcacccgcacccgctagctcggaccgggccaccttcctgcacggcagcttcgacagcggaaaccgggcctccggaggtcgatctctaccttggcgcctaccactggtgccccatcgtcatctacgactactccaaggtggacaccaggcgaggccgtcgtgctctgacgccgaccccgccctcagcgtgtgcctgtcgtgcacggtgacggagacggggacgcccttgatctccacggtggagctgcgggagctggacggctccctctactacgccgactacgagggggacgccttcctgctcctctccggccggatgaacttgggggcg

SEQ ID NO: 121526 - DNA, 845 bp, Zea mays
  Clone ID: MRT4577_42307C.1
ccggccgggacctcctgcaccccgacatccatcgatcgatcgatcgagctctagcaacaagaagaagaaggagaaggaggagatggggaggtccccgtgctgctgccacgacgccggcgtcaagaaaggcccgtggacggaggaggaggaccgcgccctggtggaccacatccagaggcacggcggccacgtcagcagctggcgcaacctgcccaaggccgccgggctcaaccgctgcggcaagagctgtcgcctccgctggaccaactacctccgccccgacatcaagcgcggcaacttcaccgacgacgaggagcgcctcatcatcggcctccatgcccagctcggcaacaggtggtcgacgatcgcgacgcacctggacgggcggacggacaacgagatcaagaactactggaacacgcacatccgcaagaagctgctgcgcatgggcgtcgaccccgtcacgcaccagcgcctgccccccgacgacctgctgctcgccgtctccgcctcccccacgacgacgatcctctcggcggcggcgagccagctgcggggcctcaacaccgctctcatgcaggtgcaagcgctgcagtttctgctgcaggccgtcagtggagttggaaacgacgttaacgccgccgccgctgctgctaatggtggtggtggtctcgtccctagcctcagcgcagccgcagataataacgccgttctgaacgcgagccgtagcgtcgttccaggcttccaggacctgcagctgacgacgatgaccagggcctcttctcgtgtctcacgcgaatcacgggtcagctgatcatcatcccagctacatcgcaactgatgat

SEQ ID NO: 121527 - DNA, 174 bp, Zea mays
  Clone ID: MRT4577_42308C.1
ggtacaggtggctctaagaaataagtccacagtgccagcctgatcctgccaatggagttaaacacgtcaatgttatgatatgttatgaatgttatgaagtttcctcagaaagaatacagtgaccaccaggtgatgttcacaattaaaacaatgaagatgtaaatgtgctaccaa

SEQ ID NO: 121528 - DNA, 455 bp, Zea mays
  Clone ID: MRT4577_42309C.1
taattaggttgacaaaagagaaggaggattatagaaatactattatgaatcttaagcaggaatttgaatcattaagatcgtcatatgaggagagatgtaagttgttagaatctaagaaggaagatgtagttaaacttgtcgcagacaaggaaatgaatgacaacatagttttgcaactcaggcaacaacttgaggcaacaaaaaagttccatgaggcagagacaaaagagaaggaggattatagaaatattaatatgaaacttaagcaggaattcgaatcattaagatcgtcatatgaggagagcagcaagttgttagaatctaagaaggaagatgtagttaaacttgttacagacaacgaaacgaatgacaacataattttgcaactcaggctagaacttgaggcaacaaaaaagttgcatgacgcagagactcagcaattagagaccaaagct

SEQ ID NO: 121529 - DNA, 650 bp, Zea mays
  unsure (1)..(650): unsure at all n locations
  Clone ID: MRT4577_4230C.1
gccgccagtgtgcgtgcaccacgcccatagcagaggtcccgaacgcggccttagcgtgttcttttcctaggtaccgaataatgagttgacatgccatcgcgtgttactcattattaacaaaaaaggaagcttccttttattatgaaaaagaatcaaacgcattgtttttttttttaaaaaaaaaaaaaacgggggggggggggntttttttttctttnttnnnncntttttttttttttggggttgggggggacggntgggggggggcgggcttgggcctnttttntttntggggttttttactntttttttttttttgtnttttttnnttttnnnnnttctttttgttttattatttggggttatnttttttngttttgttttttnaacattttaaaantttttttttttttantttttttttttttattttttttttttttttttttttttcttnttcttttttttccttnatnnttttttntttttttttnntttttctttttttttttntttttttttttccttttctcttttttttnttntcttttaaaattnnttttataatttatttttttttttttttttttttttattttttttttttttttaatttttttttttttttttttttttaatactaatttttt

SEQ ID NO: 121530 - DNA, 324 bp, Zea mays
  unsure (1)..(324): unsure at all n locations
  Clone ID: MRT4577_42310C.1
taggggcctttttttttttttttttttcttctttcntggagnannaaagnaatcgttggncacctgggggagtcgnnnactcnnnactcaacacacggccgctgcgcttgcgcggtcaaggtcccaggcaggcagcccacgcctcggcgggtcagcaggccagcatccgttcccgattgggacccgcacctgtgtcccgcggttacctcgccggcgtctggccacaaccgcaagaattatgacgccaagagaaccggcgattcacccgggcaacgaacgcaggcgtcgtgactaacggcggcaatcggacggngaaccaaaaag

SEQ ID NO: 121531 - DNA, 304 bp, Zea mays
  Clone ID: MRT4577_42311C.1
actaccatcaaaatctttcaattccaccacatactatattaccttttctacaactgctttcactctctttctaactattcttacattaacttttcttccactaaataccattattataaactactctacaaatatattcaacgatattcttatcttctttacatcttaaaacatcattattatctttataatcattaaactattctattacaccttatttactcatccaccaatattttctttcatctttcatcactattatattttcttcaccttcttataacatattaatctttcctttctc

SEQ ID NO: 121532 - DNA, 789 bp, Zea mays
  Clone ID: MRT4577_42312C.1
gcccgggcccgggactcacttcgataccacactactgattgacatccacctacctatcttgtaggctcactctgcgacccgttctccctcctgccactccactcgtctgtggtcgcatccgtggcataggagacatcgagacgacccaccaaggagagtttctcatcgcaacgcctgtctacttcttctccacataccagctccagaaagagtaaccttcagcttgtatctacacgatctgaaagaataatgacacatcgaaatgtagtccagatggtatagcccctctgcaacatgccacaaaggaagtgattcccctctgacttcaccttcggagccgccacttgcagcgtaacaaattgaacgcgcttggaatgaaaatgtaaagaggtaaagcaactgccatcacttctgccacaatcatcctaaaaagatactggacgcaaacaattcagacatcggagcgaactcataccatatgtacaaaacccacgaatgattgctctaggaaatgagcatggacgcatataggttctctatctcttggaccagaatactgccgaaggcaaccatagaatgagggattaacccgacatggcatcaagtactacagaaacctcatcaacttgctgctagaaaacggtatatagccatatgtaacaattttccactgcgatgtacctcaagcactagaagagaagtacggcgtattcctacataagagtcataagagcattgtagaacattacacatacttttgctaaggtgtgctttgataacttcggcgac

SEQ ID NO: 121533 - DNA, 267 bp, Zea mays
  Clone ID: MRT4577_42313C.1
gaagtgttaaatcttttaatagcaggaacgacagtggaaaccatggaggctagtacaagattaacagcgttcgtgcatattgcatgtacacatgataaggcttaagaaaaaaacttctctaaacactaattaattgcgacgaacctactttattaatttgaaccgactaacaagccatacgggagctttttgggccaccaaccattggtggcctaaacatctaaacaaattgcatattgaggacctacatacaagactctctttgag

SEQ ID NO: 121534 - DNA, 270 bp, Zea mays
  Clone ID: MRT4577_42314C.1
ttttgggggttttttttttttttttggggggttttttcccccccgccttttttttgtttttttctttcctcttcaggggtactggttttattatttctttctgggttcacaaaaaaatcatcttttaataccagggagaatgggcaaaacctcggtttcttaaaatatgggggctcggaattttttatttaaaggggagtgaaaaaggggaaggggttaaaaaaacattgtcttcccgagggcccccccattgaccggggggggagggtt

SEQ ID NO: 121535 - DNA, 303 bp, Zea mays
  Clone ID: MRT4577_42315C.1
gacgcctgcaggagcagttccgggatagacccacccgtccgaaactccgttacccgctcccggttgtgggtggcttaagaaccccctgaggcaagaaggtgaggcttgttaaccttaagggccaacaaggaaccaaaggccgttgcgggcttgacgtgtggcttaaccccggggcgaagcttggcttttttcgaaacggggccctggagcttgacacccggaaaggggtgctttataatgggggattggccctccccgtggtatccacttgaaaagttcggaccaaatccttaaaaaagttaa

SEQ ID NO: 121536 - DNA, 400 bp, Zea mays
  unsure (1)..(400): unsure at all n locations
  Clone ID: MRT4577_42316C.1
gacgcnnccgccccccacaggccccaggaggagcccganncagacgnnnggccggggaggggagagnnaagagagggangaccngcananccagggagggcagngcgggaaccagancggcnccaagnncngggagggggngngcgangagcacggcancgacccgacgggggggggcagggggacgncggacgngcagcnggagcgcgncaacgncaaccacaacgaggcnncgngnggnaggnncgngccgcgcgcggngcncanggaccnngagcccggcaccanggacgccgnccgcacgagccccnacggccaganncgccgcccagacaacngcggcngcggccaggccggcgccggcnccacccgggccaaggggcacnacaccgagggggcg

SEQ ID NO: 121537 - DNA, 330 bp, Zea mays
  Clone ID: MRT4577_42317C.1
aaaactgctatattcgcaaacggaggccaccacgggcgacttttccaggggcgggggtcaacaacaaaagatctcattccaactgcggcagggcggccaacaccagcaccttatgggcgccgacgacaaatcctactccaccatggatgctcaacatacggaggctcagatccagaaggccattctcaccctcgttacaaactttaataaacaggtccactccttatctcttgaatgcgttattagagcactggaaaaggacctggatttgaagaaatattcactagatgcacataaaaagtttataaaccaatttttatacaaagtttt

SEQ ID NO: 121538 - DNA, 700 bp, Zea mays
  Clone ID: MRT4577_42318C.1
ttcggggatctctaaattctccagagttggattggctttattaatttcggcaacacgactctctaaattttgttgtaccgcttgtaaatttttaatttcggcttcgatgctatcccgctttgcctgccgaatctctaactccccagcaattttttctgattggctccggcgttcttctaatcgagtgatatctttatcaattatttttttctgttcttgtaactcagaaagcgtattgttaatttttgttttgctaagctcctgttctgctaagagcaaaatttccctttctttttttgtcgctaaacttgctgttgccgccccgctgactcctgcggtaaatcccattattccagattgaagcggttgaatttttgcggctattcctactaatgcgacaattatccctgctgcaagaggaataacgttcgtcaaggtaggcgatgacaattgccgggggctgtccataatttaaaaaattgttgctatacaagggaacacgaacaataaagcaaaaaagtatggtttatttacctaaaataaatcgataatagggtaaaagtaaatgaccatctattacttcactgcttttggacgtaattgcatccttttttgtttaatatagaatcgtattattttaatcaaaaaaacaatccaagcaattcagtaaaggcaaagaacagtaattaagaactaggac

SEQ ID NO: 121539 - DNA, 681 bp, Zea mays
  Clone ID: MRT4577_42319C.1
atagaaaatatgcctgtatcctagttcctgatctccgaagaaaaactatctggacttgttggagatgacgggtgacgcatgcccggcatattggatcccgctgaggtctgtacagctattaggtggccaagatcgcggagaacttccgcgcgctgtgcacgatggacaaaggagcgggccactccgtctctccgctccaatactagggctccaccttccaccggagactgcccaagattgtgtggcactgcggggacttgacccgctcaaacggcacaagcggcaagtccatctacccggagaagcttcccgatgagaagttctcgtgcaggcactccggccccgctggagtctccatgagcagctccggaacctagagcaacgggtcccagttcgtcatctgaaccgtctcgatatcgttgagtaccactgctgaacagtccattgtccgacagagtctgtccagggacatgtcacgtagatcctgccatccagaaggtggcgacccgtgaaccgtccatctccagggcgcccaagacttgtgactgcggacagctgctctagagctctctgatctctcctgttagggctacctcactacgatatcttggactctatctgagtgctgtcctttgccacaggataatatcggaccgttctgagcgatgattgtcagctata

SEQ ID NO: 121540 - DNA, 459 bp, Zea mays
  Clone ID: MRT4577_4231C.1
ccggccgttagaggaagccaagagaagctctcttctttcttcctcctcctccacctctcgaattccgtctcttgtctctgtcctcctccatcggattccccgtgtcctatgagaggtgaacataggaggcgaagacaagatgagggatgcggagggactagaggttcccagcgaggacatgtcgctctcggatggctgcaggcatctgcttcttggccgctggatgccaaggtcctcacggtttcatagtggggatcttagtactgctcatcatggatgtgacaaactagggagatatttctgatcgtgactgttcagcttgggagcgatattgcagcctagacgctatatgtggagctatgctactgcgacgtgacacagattgctgcttgccttcatgacctccagaacgagattcatgtctgcggttgtgaaagctctgagtagtttatatcccag

SEQ ID NO: 121541 - DNA, 825 bp, Zea mays
  Clone ID: MRT4577_42320C.1
aattcggcacgaggatttctacccctgatgcaatggaaactggaatctacatctggacatggctagtatcggctgcgccttctttaggtcctcttgtgcttgcggaacttgttgatgcatggctgtggaccatagatacaaagcgtggattgtttgcatcagatatgaattactgtggcccagatgcaaaattgaggccgcatcttatcgctggtgagcctgaggcaccaccagaaaaggacccagtagaagcaataatagcccatagactctggcttggcttcttcattgatcggtttgaggtggttcggcatgacagcattgaacaacttctacttctaggtcgaatgttacaaggaacaatgaagtctccagctcatttttctcaccatcctgctgctactggcactttctttactgcgatgctccttggattgaagttttgctcatgccagtctcaatctaacttgcagaagtgtaatatggggcttcagttgttagaggacagggtataccgtgctgctttgggatggttttcttatgcgcctgagtggtatgaatctccaaacaaaacttatgctcagagagaagctcaatctgtgtcagtatttgttcattttctacaaaatgagcgcaccagtggtcctgtcgattcggtttcaaagttacagggacgtgaaggtgaacctagcatggcagatcacattcatcctgttttggggctgtgttgacaactacacaaatgcaaggggaaaagcgtaaacaggtacttctgacactttctcagaatgaggcagacagacttgaagtctgggcacaacccat

SEQ ID NO: 121542 - DNA, 135 bp, Zea mays
  Clone ID: MRT4577_42321C.1
aaagcgaaccaaaagaccgtataacctaaagcgcccgaaaccaaaacagaggccagcaaaaaatggaacccccgcggataaactcgggaagacaacacaaggctagcaactgattggccccgggagtccctgcat

SEQ ID NO: 121543 - DNA, 355 bp, Zea mays
  Clone ID: MRT4577_42322C.1
ggggaggggaaaaccattttggcgggttttttggcggaggggatttgacatggtctcatgggagggccgaaattggggaaaagaatttgcccatttaaaaaaggaaacccccttttgggggggggggcggatataaaacgaaggccccagtccccacccctttgggaaaaccccctggggctaaaagaaacccaatttttagaaaggggcctccttcttggggggggggagaaccaaacctcccttggggggggagaaacccgggaggggggcccccttggccatttggggggggtggggagaggaaccctcggagtgggggaacctgcggggggaaattttccgggggaagggg

SEQ ID NO: 121544 - DNA, 361 bp, Zea mays
  Clone ID: MRT4577_42324C.1
tctaggggctacccccagcctgcaggatttcggcacgagggcagatgaatgcaattatgctcaaccgcaatgacctgtcatcatctctctgaccaatggctctggtcgccctcggatggtgaccacaggtggcaagcctccggcctggtcaccgtgacccaagtgatcccgtcgcggctgcctgtacgcctggctgaagctgatcttccgggcgtacgctaatagaaacggcaaggccgagatctgtaacgcgtggggacgccctgtcttcgtaacctcgcggtgatcttcctgcagaagaagcctgcgccgcaggcacctgctattggaaggagtcgtccacgtcttcagctgatggccg

SEQ ID NO: 121545 - DNA, 316 bp, Zea mays
  unsure (1)..(316): unsure at all n locations
  Clone ID: MRT4577_42326C.1
ggccgcccctttttttttttttnnttgggggggggggggggtgtgttttgttttttgtttttgtgggtttnnttnnctnctngttgtngngcngnntntttccccctgggtgtntcggtgcccttgcccncgccncctcctgccttgnttccgngcctntntcccctcctccgngtcgttctgtgggtttgggggggtntnttnnnttgncnggtnngcttcttncctnntgggntggcgtgntctctccggtcnccgcttctngtcgctttgccgctgtgttgnttttccggtggcccttcccngggtcccccgg

SEQ ID NO: 121546 - DNA, 764 bp, Zea mays
  Clone ID: MRT4577_42327C.1
gcctgatgtcgccatgactcttgctgtggttgccctctttgccgatggcccgacagccatcagagacggtaaaacattctcagccctacaaccatgcctcttctacatcactacttgacaagactaaaaactattggctcgttggcagtggcttcgtggagagtaaaggagaccgagaggatggttgcgatccggacggagctaaccaaggtaaggctacatacttcacatgtctcacgtcgtctttccatagctcgctgcctcttagcggcttgcctgcggtcgctccatcctcggttgctgtctgtgttttccacagctgggagcatctgttgaggaagggccggactactgcatcatcacgccgccggagaagctgaacgtgacggcgatcgacacgtacgacgaccacaggatggccatggccttctcccttgccgcctgtgccgaggtccccgtcaccatccgggaccctgggtgcacccggaagaccttccccgactacttcgatgtgctgagcactttcgtcaagaattaataaagcgtgcgatactaccacgcagcttgattgaagtgataggcttgtgctgaggaaatacatttcttttgttctgttttttctctttcacgggattaagttttgagtctgtaacgttagttgtttgtagcaagtttctatttcggatcttaagtttgtgcactgtaagccaaatttcatttcaagagtggttcgttggaataataagaataataaattacgtttc

SEQ ID NO: 121547 - DNA, 241 bp, Zea mays
  Clone ID: MRT4577_42328C.1
aaaagacggaaggaagcagagaacagagaatatcacattaagaacaggctcaaggaaaaaaaggatgccaagcagagcgcgggggggaaaataaaagcggccgacaacgaggcaacaccgagacgaggctggcaagcagcaaagagagacaacacggcgcgcaaagaggagcagaagctgcgagcaaaaaagtggaagaagcacgaaacgaaaatccaaggcgcaaaaaaaacgaaccgga

SEQ ID NO: 121548 - DNA, 583 bp, Zea mays
  unsure (1)..(583): unsure at all n locations
  Clone ID: MRT4577_42329C.1
ttacttcaatgggctatcgaacactctagcttgtgcaaagcctacatagctacaacatagcgcttgcggcgaagcgtcttacaacaaccaattaaccaattgcaacaacaatccttggcacatctaaccatacaaaccatcgcaacacaacagcaacaacagttcctaccagcactgagccaactagatgtggtgaaccctgtcgcctacttgcaacatcttgctgcttgcatccaacccacttgctatgggaaacgaaactgcatacccaccacacacaacaacgcaacctagcaaaccatggtgcatactcttagccacgggaaaccctgccatttaaccacctacttgcattgaactctgcttnttatttgcgacaacaccaactaccattcagccttcttcctgctgtctaccccgagcaatttctcccattctaccaactggctgcattgagctctcctgcgtatttaccagcatgactactgctaccattcagncagctctctggtgtgagccctgttaccttctttgttcatcccctgttgctgtcgttctaccagtgcgttgctgcctaacgctg

SEQ ID NO: 121549 - DNA, 282 bp, Zea mays
  Clone ID: MRT4577_4232C.1
ccatgttatgctatgctagggaaccagagggccagataccttgcaatagagttgttcataacaaccaaaaacataatgaatggtctttatgagatctaactaacggtaaagtgtacagatgggccgatacaaaacgtatatagcattgtatgacagctgacagatagcaagagttgttggattgaaattaagaacaacgactatgtggtctcaaccggtaataattcaacattagagagtacaagcgacttaattgaaactccgaatgatggatataactat

SEQ ID NO: 121550 - DNA, 417 bp, Zea mays
  unsure (1)..(417): unsure at all n locations
  Clone ID: MRT4577_42330C.1
aattcggcacgaggcagtcattggagtctctccaaacccagcaaaaagaggttcagccttcattcaagttagtggagggaaagattattgagtactgctcaagtttaaatgtgttgaatgtgtgtccaccagcacaattcagtgccattggttctgacctttgttttccagcatcatgtccttgcatgactgcagttctgtgctatgaaaatggtgtgacagaaccgcttctctttgnacttgatgaaagcgggaagctttatactggcaaaaggctattgagcaacagctggagcagctgcacattatactgcaggggttatggagtcactgagacagctatgagccacttgcttgtgactactaagggagatcttctattgattggggatgaggatgagggcttacttagagaca

SEQ ID NO: 121551 - DNA, 561 bp, Zea mays
  Clone ID: MRT4577_42331C.1
gcgcgatatgccgcggggcctcgcccatacccctgctgcgtgctctgctccccagcacccaggggccgatggtgccccttctagcgcccgctcggcaaaccctagcttggccctgctccccccagtgcccggaggccaccacctgccctggcctgcgcgaggccggcggcgccgaccgccgccagttgacttacacaagcctccgactgccgacgcgtgtggaatgcgctgacatgatgtgtgaatcatctgaagctctgggtagagaaactcttagtatcgataggcttacctaccatggacacaatacaatctgatagcccttactgctgcatgtgccttttgtgccatgaaggaggcgaaccctactaaaccaagagcatgtgcgctgaagtactttagggaacttccttcccaagaagatgatgatcaagctctccctattgagaggcctctaggacacaagaatgggctacccaaatgatcccgagttcatcaacgagcgcatatttgaatgcctgcatccactatatggaaaggattgaaaacaagggttggctt

SEQ ID NO: 121552 - DNA, 495 bp, Zea mays
  Clone ID: MRT4577_42332C.1
ggcggaaacggcacttacttatcttggtagacaaaaaaaaggcttacatgatcctgggacttgaaccaagagcatacacaagcacatggatactcacacatataacaaactgatagaatacggatgctcgcttcatattctatgagagcagcgcatacatacggtctgccccacacaactgtgtgcgctggtgcacattttaaaacattggccacccaaacagggagggacaacgattctgcttgattatttagccgaagaatagatgttttttatcaaactccactgtgtcatactcacttggggtccttattcttctatctaggctggagaggagtctatatctacaagggtccacgtgattgaaatgattcacctgatattaaaatttatctcaacacacgacctattggatctagttgtggtcaggttaatgttggcagtgtccaagaacaggaacatcatagaaaacttttcgctcaagaaaatgctgta

SEQ ID NO: 121553 - DNA, 270 bp, Zea mays
  Clone ID: MRT4577_42333C.1
aaaaaaaaaaaatttataaaaaaaaaaaaaaaaaaaaaaaaaaaaaaaaaaacatcttctaagagtatttaaaagaagtttacttactcattcttacaacttcccacctcttttatagtcccacctaatttttctttactggccatttttttacattcccttttaatgggaaaaccctttcgttacccaacatattccctttccaacaacatttctcttttccatagctttcttaataattaagcttcttcccaaattatcctttttccc

SEQ ID NO: 121554 - DNA, 143 bp, Zea mays
  Clone ID: MRT4577_42334C.1
gatatgatgcttctctagctcatcagatcaaattagtactcgatcgataccaagttaattaagaacaactgaagaagttctctcagcaaagaggcgtcaggctggcgaaccggtggtggagcgtgcccggtcacttgggcctg

SEQ ID NO: 121555 - DNA, 241 bp, Zea mays
  Clone ID: MRT4577_42335C.1
ggaccgtggcggacgcgtgggcgcaccgtcgagttccgcgcgtgccaagcttctccaccgtggcggctgctcctcccagcgtgcatctcacatggcgccttggagtcccagctcggcctccttcctgcagccggttgtggttgcgcctcctgcagctcgtcgggcacgctcgccagcttccaaacacgatctcatcatcgtgtcatgcgtcacaagacatcccaagtcttgggtgaagacg

SEQ ID NO: 121556 - DNA, 391 bp, Zea mays
  unsure (1)..(391): unsure at all n locations
  Clone ID: MRT4577_42336C.1
gctcggagataagcaactccagtccaagcaggagcaacaggaagaagaggaggagagggataagaacagccagaaagagaggaggctcatcaatcgcgactaattctcgctgagacaagcaatcatcagacatgagaacccaagcgctgttcttcctcgcactcgcacttctcggcgccgtgctcgcgcagtccagcaacaggcaccaccaccactaccaccacgcccatgtccaaagcaaaggacagggagccggaggaggaggaggaggggagctggcgagccgggcgaaggcggcggcgcgcgcgtggccgtgctgtgacagctgcggcgggtgcnccngatcggcgccgccgcggtgcctgtgcctggccgcggcgccccgcggttc

SEQ ID NO: 121557 - DNA, 850 bp, Zea mays
  Clone ID: MRT4577_42337C.1
accaactacctaccaaagtgtgtaactgaatgaaagaaaacagaacacaagaagaagaagaaggacaccacaccacagacggacaacgtaagctcggattggttgctcgttcaccagattacagagtgggggggtgtctttacagttacagtctacacaaacacaaacaaacaaaaatcctaatccacggctggcttcaaaggctccagacgccatgattcgccggcgggcgggcgagcgggtgggtgggtgggcaaaaaggttgctgggtcaataataccaagctgcaagcagaaaccagtcgtcggctggctcggctgccccgcgcggtcggtcagtgcgccgcggcggcggcggcggcggtgcagcggcgctggcagaagttggggacgcggtccatgcactggtacaccggcgggtcggcgctgaggctggacttgacgcagtccctgcaggccgggtggcacccgcggggcgccgcgtccaggcactggcaccgcggcggctccgatctggtgcacccgccgcagctgtcacagcacggccacgcgcgcgccgccgccttcgcccggctcgccagctcccctcctcctcctccggctccctgccctttgccttggacatgggcgtggtggtagtggtggtggtgcctgttgctggactgcgcgagcacggcgccgagaagtgcgagtgcgaggaagaacagcgcctgggttctcatgtctgatgattgcttgtctctgcgactgcgagaattagtcgcgattgatgagcctcctctcctctttctggttgttcttgtccctctcctctcttcgactcttcctgttgttattgctactgcttggac

SEQ ID NO: 121558 - DNA, 475 bp, Zea mays
  Clone ID: MRT4577_42339C.1
atgaagaacgtttcctatctttatcgatcaccaccctacacctgcgcatatgcgtactacatgaccaacacaccgtcaagtcaatcaaacccaaaccaaggtgactcgagcctacaggctcgccccggaccaggcatgggcgcgtgaaaccatagtcctttacaccctgagagttaaaccatttttttaacctaaacatataactacacgcctaataggagcacgctgactgattcgatcaatgctcgacctctcgtgaacaaacaacctttggaccatcaccaagcctaatgagagatcaagcatctaacatgaaaccttgaatttctgatacgacatctgccactatggaggtgatcaaagagactacacacttttcatggtatggaacaccgcccacaactacaaatctatttatccgcaaccacatagctgcttaaattattataccgggagcctgaacggacacatgcca

SEQ ID NO: 121559 - DNA, 1445 bp, Zea mays
  Clone ID: MRT4577_4233C.1
attgggaccctcgaggccggccggggaaaggtacgcaattctgaaggagaaagaaaccatatctgaaagacaaagcgcggacggaccgttggagcatccaattcgtgagctttggcgtctgtgtatttttaatcgggagctgtaggctgtagctagctagagaggtttagagcagcaccaaatggcgagcaaggtggtggacctccggtcagacacggtcaccaagccctccgaggccatgcgggccgccatggccgccgccgacgtcgacgacgacgtcctgggcgcggacccgaccgcgcatcgcttcgaggcggagatggccgcggtcatgggcaaggaagccgcgctgttcgtgccgtcgggcaccatgggcaacctcatctccgtcctcgtgcactgcgacgtcaggggcagcgaggccatcctcggcgacaactcgcacatccacgtctacgagaacggcggcatctccaccatcggcggcgtgcaccccaggaccgtgaagaacaaccccgacggcaccatggatatcgacaagatcgttgccgccatcaggcatcctgatctccattacccgacgaccagattgatctgcttggagaacacacatgggaatactggtggaaagtgtttatctgtagaatacactgacaaggttggtgaaattgccaagagccatggcttgaagcttcatatcgatggagctcgcatcttcaatgcgtctgtggcacttggagttcctgtagatagactcgtgaaagctgctgattcagtttcggtatgcctatcgaaagggttaggcgcacccgtcggatcagtgattgttggttcgaaggccttcattgacaaggccagaattctccggaagaccctaggcggtggaatgagacaggtgggagttctttgtgctgctgctcatgttgccgttcgtgacactgtgggaaagcttgcggatgaccacaggaaggctaaagctttggcagagggactgaagaaaatcgagcagattacagtggattcagcttcggtcgagaccaatatggtattctttgaggtcatggatccaagaatatcacctgacaaactgtgtcaagtcttggaacaggacaacgtgcttgcactgccagccaattcaaaaagtattaggttcgtcatccattaccagatttcagacgctgatgttgggtacgcattggcatgtgtcgagaaagcaatcaaagagctactggaaggcagtactgagttggggcattcgataaacggagctaccaaaagctcgtatgggcactagatcactcggattctgccaacctgatgcatcgacacatggtacccagctgcttgttagctgctctgcttgtctgtgaccaacgcctagctgttgtagtctcgcctttcccgaataattgttgctgttcagtctctgtttggatcaaaaaaaa

SEQ ID NO: 121560 - DNA, 480 bp, Zea mays
  Clone ID: MRT4577_42340C.1
gctttgtttttttttttttttttttttttttttttttttttttttttttttttttttttttttttttaattgagcccctttttttcggggataaataattcaatattggggcgaggggggaacacagctcaactcccccaaactccctgaatcggggggggctgggggttattcagcagggaacacaccccccctggcaaacaatcaccaccaaccaaggggtccacgctcccccaccccccatccaatccaataccaatcctgccttcctcgaatccagcacaggcgggcagagctgctcaactcaacagctggggtccagcctgcccccggggaagggggcgacccgggcccgggggacccactgcgtgatgagcctccccccgggcttgggcccccacgggttcaccaggatgcacggggggatgtagtccaagttggggagcgggaccacgtgcgcgggcgggccccaaccgtagt

SEQ ID NO: 121561 - DNA, 433 bp, Zea mays
  Clone ID: MRT4577_42341C.1
cccgtagatgagccccgggattatgagcagcaggacgagagggaacgaaaccagcgttagcctcttcggcaagtaggtggcctcggctctcgcatcgacgaagaccgtagagtgcatcaggaacagagggacctgttccagatttcatgccaatcatgctgttatttctcctcgaacgatgatccaacactgaattacattcaggtcttgtttggctacatatagtattcaacgtatcgctcttctgtttttacacattcgtttttctggatgctgggtaatcttattgtagtctgtttaatttttcaagccaggaaagagtgggtgtacgtctagatagatcattcaagtcatgttgttcggttattttaattccatgtgtattggaatgtactgaaatggattggaataaattttaacttgctatgggttt

SEQ ID NO: 121562 - DNA, 153 bp, Zea mays
  unsure (1)..(153): unsure at all n locations
  Clone ID: MRT4577_42342C.1
gncttttatcctcatttcaattgcnttctgattgcntcanataaacttatactccgaaaaagcaaacccatatgaatgtggcttcgacccaacaagttctgnacgccttcctttttcaataaaatttttcttagtagccattacatttctact

SEQ ID NO: 121563 - DNA, 271 bp, Zea mays
  Clone ID: MRT4577_42343C.1
ttttttttttttttttttttttttttttttttttttttttttttttttttttataaaccgaggggcactttttaataaagaccataatgggaaatgaaacttaaagcattcctcggtacagggggtaaacaaaacctgctctttaaagcgtggccttcctacaaattattttgcataaagggtaaacttttcccaaggaaaaaaaagacctatttcgcctttttaaagagttcctttcatcaaaagggtgacggttcaaaattttccggtt

SEQ ID NO: 121564 - DNA, 202 bp, Zea mays
  Clone ID: MRT4577_42344C.1
gggatggctacttatccgactacgtgatcggagtccgagccgcgaggttctccggggttcggtttcgtgggtgagcggatcgagatggcggggtcggacgttgatataccattcattcttacgtaggctcgcatgcgccacggacgaccactatatgacaacgaatttaaaacctacggcgaggtgcttaaaaccaagatta

SEQ ID NO: 121565 - DNA, 139 bp, Zea mays
  Clone ID: MRT4577_42345C.1
cgcgcatgcgtccgcatacgcgtcagctcaagccccgaccccgtcgcggatcgtcacgggtgccggcctcggcttccccgtcggttccttgccactcgtctggctctcctcactgcctcaccctctgcaacatcttctt

SEQ ID NO: 121566 - DNA, 395 bp, Zea mays
  unsure (1)..(395): unsure at all n locations
  Clone ID: MRT4577_42346C.1
ctcggcgccgaggcatgctgttgccgtgagtgagcaagggatctttccggcgatcttggaggcggcgagcctggtgccgcatgctggctgtccggccggccggaggctagctagctctcgcctctcgaccgagaagtgaagtgaagtgaagcgaggcaagtgctgtccagtagtagtggtggtcgcgaacactatttatagcgccccggcccccgcccccgcgtgcggcgctctcttctctctcacaggaccacggctcgcgcgcgcgggcaccgactncaaaataaatagatctcatctcatcttcttcttgctgataaggtggttgggtgcttacttaacttgcttggcagatggacctggtggcggacccggacaggccggacttcgacaac

SEQ ID NO: 121567 - DNA, 246 bp, Zea mays
  Clone ID: MRT4577_42347C.1
atggcgaatgcacaaggggtagtcttaccggcagtggtggagactgctgggtcgcccacggtgacctgcgatccgaggtggaaggattgctccagcgagcaaatccccacaccggagaaggtcccaaagtcaggcaatcaacgcgcgagctcccgtggttccgatgaggtctcaccggcacgccgaagccaagctattgcccacgcagagatggccaccggcgagcaggcaagacaccaagtttga

SEQ ID NO: 121568 - DNA, 390 bp, Zea mays
  Clone ID: MRT4577_42348C.1
ttcaagctttgcattataatgtattcttcttttatgctcaagaaaacccagttcctacttacagagactggccgattgtttattgtttggacacatagttggttcatctttgccttgtggtctgtccaccttgtttgctttgtgatttcaacaaatagttagtactttcattctttagtttattgtaagcacaagctcatacgttatgcatccttccatttcatcaggggaaagaaacttctgatccagaaaatggtaggcagtgtcccttctttgatgagctgcatgccgtcttcacagaccgtgcaagagatatgcaacgacaactccttgagtctgaatctggggcttctgtcaaaaggaaactgaagcaacctggtggtgaccggt

SEQ ID NO: 121569 - DNA, 915 bp, Zea mays
  Clone ID: MRT4577_42349C.1
atggtgatatcttgtatcatcaagggatttctggtccacaatgttctggttgacacaggcaatgcaacgggcatcatatttgcaaaggctttcagacagatgccaaggaagcaaaggcttcagaagatgtttgaggataaagctgaaggtgctcggaacgaagtaaaaagacttctcagtgctggtgttatcagagaagtaacatatccagaatggctagctaacactgttatggtgaagaaggctaatgatcgtaacaaagcatgtccaaaggacgagttcccattaccaagaatagactcccttgtagatgtagcagcttcttcggagctcatgagtctattggactgctactcaggctatcatcaaatttggatgaagaaggaagatgagccaaaggccagcttcataactcctagtggcacttattgctaccttcggatgcctgaggagatcaagaatgctggaggaagcttcagtagaatgacagccaaggtccttcattctcaaataggcaggaatgtgctgacttatgttgatgatatcatagtaaagagcacaaagcaagagaatcacattgccgacttgcaagaaacatttgccaatttcaagcaacctggtttgaaattaaatccagaaaagtgcgtttttgaagtaaagaagggcaagtttcttggctgtctggtatcaacgaagggaatcgaagctaaccccaataagatcgaagctatccttcagatggagcctccaaatacaaaaaagggggcccaacggctggcaggaagattagcatcattaaatagattcatatccagatcagcagaaagaaatatgccgttctttgaaatactgaagtcagccgaagtttttcagttgggtccggtgaaagagctggagtgcccgatctttcggtga

SEQ ID NO: 121570 - DNA, 800 bp, Zea mays
  Clone ID: MRT4577_4234C.1
ccggccgggacaacatcccactctaccaaatcatttacttctttttgaacccaaccatccatccaaatcatcccatccccaataccaacaaccaaactacacttgtatcacatcaccgccaccatgcagatcttcgtcaagaccttgaccggcaagactattaccctcgaggttgagtcatctgatactatcgacaacgtcaagtccaagattcaggacaaggagggcatccctcctgatcagcagcgattgattttcgccggcaagcagctcgaggatggccgcaccctctccgattacaacattcagaaggagtcgactctccacctcgtcctccgccttcgtggcggtatgcaaatcttcgtcaagaccctcacaggcaagaccatcaccctcgaggtcgagtcatccgacaccatcgacaatgtgaagtccaagatccaggacaaggagggcatccctcctgatcagcagcgattgattttcgccggcaagcagctcgaggatggccgcaccctctccgactacaacatccagaaggagtcgactctccacctcgtcctccgccttcgtggtggtatgcaaattttcgtcaagaccttgaccggcaagaccatcacccttgaggtcgagtcatccgacactatcgacaacgtcaagtccaagatccaggacaaggagggtatccctcctgatcagcagcgattgattttcgccggcagcagcttcgaggacggtcgaaccctctccgactacaacatccagaagggaatcaccctttcacctggtccttcgtcttc

SEQ ID NO: 121571 - DNA, 524 bp, Zea mays
  Clone ID: MRT4577_42350C.1
tcgagccggccgggatctcatcacacgtcgccggcgtgatgcaccctgccgtcggtgcggccgcctccctctccgcctcccgtccccaaggccaatagtgttcaagtgaacacatggccggaccagatctaactcaacccactgtcgtgcataggctcgatgagccatatccacctgctcatcgatctcctcagcaggcgcaccggccccgacgatgtgcgcctattgcgctactaaggcaaggagagttacggcgactaccttcctgatgcatagcctgtgggtccccacagagctgagcccagggggattgaatatggcagacacgaacaccccgcactgcgcggatcatcctgctgaggaacgaggcgtcagcttcatgagagatagcttgatgggaggtgtctgaactgacgcctctcagcttgctccgggtcgaatgggatgagaccttctgcttctttgagaccatcattgggtacttagcccagagaggctttcaaacccgccccaggatatagtgg

SEQ ID NO: 121572 - DNA, 328 bp, Zea mays
  Clone ID: MRT4577_42351C.1
cctttgaggtgccgggggggtttttgacaaaacttctttctacgtctcagaacgacggagacaactgacggaactacagggccacggagacaagcgcccaggacggacgatggcggcgatgtaacccgcatggcacctatgctccacgtagaggatggccatgcccttgaagatgatgacgacccccaatacgatgacgaagtacacgaccgagtggtggtaggagaaccagacacccggaacttgaggacctagttctgtctcaggaagagcgcgatgacatgctaagtgccaagagcgaatactgtgagaccgctgggcctgggga

SEQ ID NO: 121573 - DNA, 414 bp, Zea mays
  Clone ID: MRT4577_42352C.1
ctagatccatcatcttcttcctgcttatatatataatataatatactttattgtctttaatttcttttttcttcatcattagtattattatctgtttattctcccaatacaaaatcacatgcgcaagatatgctgtggcccttcggccgtcgtcatcttctcacagtattattatcaattataataataataataactataatgatgtgattcacgagatatatagatgtggatggagatctaccaacctattcaacgctttcattccagttgaccaattaaattagtggcttggtccatcaccgacatgtttactaataatacggaagaacataatcttttttaaccaggcaaaaggatcacaaattattactgcaccccaatatacagtccaatactagcacggcattcact

SEQ ID NO: 121574 - DNA, 221 bp, Zea mays
  Clone ID: MRT4577_42353C.1
aaacccccatatccgggggggacttttttagaccatcatccattttatcctgaaaactatgtaggccattcttttttcctcatttatctctattgtaccagatcttttcgttctaggctgaaaccggaaatttctcttttgaagtctgcccaactccaacagctcatagacagtgtccacacaagatgggggttagtgatactcttaatacttgaacactc

SEQ ID NO: 121575 - DNA, 168 bp, Zea mays
  Clone ID: MRT4577_42354C.1
gcctttattactggcgccgcccggcctctacggggggggggggcctccagggcacggggcgaggatgttccattgcatcaagccctgcgctggccagctaccttttgggttagactgaactgaccatgttgccctatacacaacaatgggcagttccagattgatgct

SEQ ID NO: 121576 - DNA, 503 bp, Zea mays
  unsure (1)..(503): unsure at all n locations
  Clone ID: MRT4577_42355C.1
ggccgggggcccctttccaaaggagagggnacagcgccaccccttctgctcccgccgtatctcgtagtgaagcacaagcgcggggggtaggagcaggaagtcgccgccttcgctcctcgggctcaccaccatagttactcctcaccgcgctgccaaccgcaagagcgaggacaatttctctgttatcaaaggactaatgcccgactattaggacgaagactattgactaagacaaatggcaggaaggatatcgcataggagagccaattgatggaatagcatattacccatgatgaataaggaaggtctggacgagacgacaacgataacgcccaatccattggtatgatcccggagacttcagcatgcacacggaataagaagagaggtgattcctcgaatagcctggtggttgataaacgtaacccgtaaaaagatacagagcggccagattagaaccgcacgaaaatgatgagaatgtacctaaccctgggagaagaagc

SEQ ID NO: 121577 - DNA, 463 bp, Zea mays
  Clone ID: MRT4577_42356C.1
ggtcgagaataacgggtcgacgcacgcgtccggaaaaaagagaaggagaaaaaggaaaaagaagaaaaggaaaagaaagaggagaaaaaacctgaaccgaattttgaaatattgagtaaccctgctcgtgtaatgaaaaatcaacttaaagtcatctcgcttgtcgattccggaagttacgttccgctcaaagatgtttccatcggcggcatcgtcatggttcgtcatgtcaaggccggatctgaagatgaacaacttgtggagccagttgctgcatttggtcccaaagctgatgacgaaaaggagcctgacccaccagagccatttgaatacaccgaagaataaaatccaacattaaattcaattatatattttttttctacttttttttctctcactaataataatacattggatttattcgtttagaaaaaaaatctatgtctaatttaatatatactta

SEQ ID NO: 121578 - DNA, 439 bp, Zea mays
  Clone ID: MRT4577_42357C.1
ggaagggatcagctgatcactagattccattgaagggtcaagggacacaactttgccacgtacaacactggagaccgcaaagtgctaggcatggcaaatgcagatcatttgaatcgtcaaaggctcaaagctgggcccgacaaacgcagatcaagatcgagcgaggccgacgagagtatcaaggggcacttaaacatcacaagaactatgtgataacagctcctgctgccgcgaggatcaatgctgcagtaggaataccacgggaactggggacctcagtgcctgaacgaaccattgatccagctgggggaaggggaaccgcctcctttggcttggacatcaattcagggacagcagctggggaaatttctggcccggttgttgattgcggcatgaaatgcaatcccggcagcacctttaaatcacggcaggcgtcaac

SEQ ID NO: 121579 - DNA, 399 bp, Zea mays
  Clone ID: MRT4577_42358C.1
ctcgagcctaatcggctcgagccgcccgccggcaagcgaaagctaagcgagcctatcgagccatggagaaggcgatctatcggtagcgggtcctcctggcgcaccttctcccctcctcctctaccatctcctcgcagcctcagcttgcgtgcctacaggacgccaatatgcaaggccaagcgaggaggcttcaaggacacctacccagaggacctcctcactgttgttctcatggttcccttcccttcaaggtcaaccaccagtgttcatctgggctacaggcagtagccgatgtcgcagctgctataaaggctggttactatgacatagggattggtgctggtttggaatccatgtccataaattccattgctagggaaagacaagttaacccaaaaa

SEQ ID NO: 121580 - DNA, 237 bp, Zea mays
  Clone ID: MRT4577_42359C.1
cccacgcgtccagcattccttattaaaggatgatgatgatccgattgttgctacaaattattccttcttactccatacaggcctaccattcatccatggctcggtgatgctgcattgtgtggaagtggattggttcgttctgtgctttgctgctatagaggtttcattctttcatctgtcttcgacaccaatgtagcgttccattccatcccatcgatctgttactgctgatgactg

SEQ ID NO: 121581 - DNA, 369 bp, Zea mays
  Clone ID: MRT4577_4235C.1
catctttcgaatcccaaggaggaggccagagaggagagagcgtgtggtacactggtactagactagacagacgttgccgttgctggttgttgttattaacgccggcccctgcattcctatgctcatcgttcttccggagctcctccgtccgtaaggcaccgccgccgcgtctcggctggaccgacaggccgaccgatccctctcctactgctactactactgcgggtcggattcggatactatcacggccaggtcggctgattagaacagactgccgggggtggggaggcccgcgccatgcgtacgagacatggggagcctgcgcgcgctcacggacatcaagaacctggtcggggttgccccgaaccc

SEQ ID NO: 121582 - DNA, 407 bp, Zea mays
  Clone ID: MRT4577_42360C.1
gggcacgccaccacacgggcacaaatatttttatgcaaccatttccccctcaaaagccaaatccagctttgagttcgacaatccataaacaacgccacacttggcacgttcagctgcttttcttggcaaaaaaccccccgaggcccccgaggtttaaccccccgccgtttccgctttcgtcgccgccggtagccttcttgccgccggtcgtcttggcccgggaggcggtggccggcgcggcccccaccttgttgaggagcgggtccgtttccaccaactggtccttcttgaaaataaaacccaaaatggtttctccgaggcccttctcctccttggccggggccgggcccccccttctggcagggggcggtacgaccaacacggaccggtgcgcggacgccttggtt

SEQ ID NO: 121583 - DNA, 455 bp, Zea mays
  Clone ID: MRT4577_42361C.1
gcgggtcctcctggcgcacctcctccccttcccctccgccacctcctcacagcctcagctggcggcgtctgcgtgcgcggccggggatagcgccgcctaccagaggtcctcctccttcggggacgatgtcatcacataagcacattctagaaagcacaggattgtcttctgcccccatgggaattacttctgaaaatgttgcccatcgatatggtgtaaccagacaagagcaagatcaggccacctctgagtctcataggagagctgctgcagccacgacctctggaaaattcaaagatgaaatcgtcctcgtgccaacaaaagctagaatttctttctctctctttgcctaatccgtatttgataaaccaatcaaactgtgtaggcaaattcagtcaagtttagtgaatggtcctggagctgttcttctcatgaaaagatctggtgcttctaaa

SEQ ID NO: 121584 - DNA, 790 bp, Zea mays
  Clone ID: MRT4577_42362C.1
gcgtacaacgatcccttctccctcttcagatccattcctctcccagccccaggcctcgctcgcctcccccgttgggacggagagagctcggaagggcagggagccatgggttcctgggtccttcttgctgtggttctcgggtccttggtgggagctgcgcgcggctccgagccgtggtcgaacggcacgcaggtctactccaccaatgccaactccggcagcggcagcaacggcgccttcgtcgccctcactctcatccagtccgcggccgccaagggagccgtatgcttggatggaagtttaccgggttaccacctacaccggggatctggatcagggtcaaacaattggcttgtcaatctggagggtggaggatggtgcaatgatgttaaaagctgtgtgttccgcaagggcagtcggcgtgggtcatcgaaccacatggagaggcaactccagtttacaggcataatgagtaacaggcctgaagaaaatcctgatttctacaactggaacagagtgaaggttcggtattgtgatggtggatccttcaccggtgatggggctgacgcggcttcaggcctttatttccgaggtcagcgtatttggcaggctgctatcgatgacttgatggcccaaggaatgcgttctgctagtcaggcccttctttcgggatgctctgctgggggtgcttctgccatacttcactgtgatgagtttccgtggaatgtttccatcaaataccagagtcaagtgcctcgctgatgctggaatgttccttgactctgtcgat

SEQ ID NO: 121585 - DNA, 847 bp, Zea mays
  Clone ID: MRT4577_42363C.1
ttgggtacctcgaggccggccgggaaccgctagtgttcatctaggctacaggcagtagccgatgtcgtagctgctataaagctctcaatccatgtggattgagtgggattaattaggtttaaatcccaaggattggtgctggtttggaatccatgtccataaattccattgctagggaaggacaagttaacccaaaaataagcacattctagaaagcacaggattgtcttctgcccccatgggaattacttctgaaaatgttgcccatcgatatggtgtaaccagacaagagcaagatcaggccacctctgagtctcataggagagctgctgcagccacgacctctggaaaattcaaggatgagatcgtccccgtgccaacaaaggcaattccagtcaagtgagtgatggtgctggagctgttcttctcatgaaaagatctgtggctctgaagaaagggctgcccattcttggtgttttcaggtgcccggcgcgtggctactcttctaaatgaaatgaagcgccggggcagagactgcagatttggtgttgtcaccatgtgtatcggatctagaatgggggcagcagctatgttcgagctgtgttcggcccggctggaggtatcgaccatcactcaacactgtaacccgatggtgatcggcgaccgtgagcttccatgttattgcgttctgatacttgagacttttattatgactatgtatgagatattgtctcttattagtactggatgatgagatgtgtcttattatgactatggatgagacttttgtgatgtaattgatgagacttttgtgatgaaaaaaaaaaaaaaagcggcctcgagctca

SEQ ID NO: 121586 - DNA, 1472 bp, Zea mays
  Clone ID: MRT4577_42364C.1
ccggccgggacctttctcaccccatctctctcgcctctgtttgttccttggagccgcccccgccgcccacgccaccggtcgcccctgccccgaccccttccgccgcggtcgcgaccgcccccgaccccagccctgcccgacgcttccgtttccttggataaccacaacgctcgcccgcccgccggcaagcgaaagcaaagcgagccaacctagccatggagaaggcgatctatcggtagcgggtcctcctggcgcaccttctcccctcctcctctaccatctcctcgcagcctcagcttgcggcgtcgacgtgcgcggccggggatagcgccgcctaccagaggtcctcctccttcggggacgatgtcgtcgctgcctacaggacgccaatatgcaaggccaagcgaggaggcttcaaggacacctacccagaggacctcctcactgttgttctcatggttcccttcccttcaaggtcaaccaccagtgttcatctgggctacaggcagtagccgatgtcgcagctgctataaaggctggttactatgacatagggattggtgctggtttggaatccatgtccataaattccattgctagggaaggacaagttaacccaaaaataagcgcattccagaaagcacaggattgtcttctgcccatgggaattacttctgaaaatgttgcccatcgatatggtgtaactagacaagagcaagatcaggccgcctctgagtctcataggagagctgctgcagccatggcctctagaaaactcaaggatgagatcgtccccgtgccaacaaagatcgttgatcctaaaactggagaggagaaggaagttgtgatatcagttgatgatgggattaggccagggaccacaacatctggattggcgaaactcaaaccagttttagaaaagcatgggactacaactgcaggcaattccagtcaagtgagtgatggtgctggagctgttcttctcatgaaaagatctgtggctctaaagaaagggctgcccattcttggtgttttcaggtgcccggtgcgtggctactcttctaaatgaaatgaagcgtcggggcaaagactgcagatttggtgttgtcaccatgtgtatcggatctagaatggggacagcagctgtgttcgagctgtgttcggcccggctggaggtatcgaccatcactcgtcactgtaacccgatggtgatcggtgatcgtgagcttccatgttattgcattctgatacttgagacttttattatgactatgtatgagatattgtctcttattagtactggatgatgagatgtgtcttattatgactatggatgagacttttgtgatgtaattgatgagacttttgtgatgtaattgatgagactatgtatttaaatattgttatgtgattgtgtgtgagatgttttatgtgaaaatatgttgtgctatatagctgttgatatatttgtt

SEQ ID NO: 121587 - DNA, 300 bp, Zea mays
  Clone ID: MRT4577_42365C.1
ataatgacaagaggagtgcgtccttcattccaaatgactcgttggtttaactacatagaagaaaatgatgaggtctttattgctagatttggtctgataggacacgctgtggaagatatatccttgtgtccggttcaaggacgtcaaggtttccggtgtatctctgcttgcccttatcaaggagaataaaagagaaccctaggatcttaaatttcttcttctaccaaaatcatgaagcggcgagtattaatgattttgctttacataattcacaaaaatgttagtcttctatgtttacag

SEQ ID NO: 121588 - DNA, 1446 bp, Zea mays
  Clone ID: MRT4577_42366C.1
ccgccgcccacgccaccggtcgcccctgccccgaccccttccgccgcggtcgcgaccgcccccgaccccagccctgcccgacgcttccgtttccttggataaccacaacgctcgcccgcccgccggcaagcgaaagcaaagcgagccaacctagccatggagaaggcgatctatcggtagcgggtcctcctggcgcaccttctcccctcctcctctaccatctcctcgcagcctcagcttgcggcgtcggcgtgcgcggccggggatagcgccgcctaccagaggtcctcctccttcggggacgatgtcatcactgcctacaggaccccaatatgcaaggccaagcgaggaggcttcaaggacacctacctagaggacctcctcactgttgttctcaaggttcccttcccttcaaggtcaaccgccagtgttcatctaggctacaggcagtagccgatgtcgtagctgctataaaggttggttactatgacataggtacatagtatctgaatatacatgctactttcgctcttgtgctttagtttggctgctgaatcgctgctctcccggcttgttcggttagctctcaatccatgtggattgagtgggattaattaggtttaaatcccaagtaagtcaaatttcttcacaattttttccaatcccgtccaatccataggtaacgggattaaccgaacaaggcctaaacagggattggtgctggtttggaatccatgtccataaattccattgctagggaaggacaagttaacccaaaaataagcacattctagaaagcacaggattgtcttctgcccccatgggaattacttctgaaaatgttgcccatcgatatggtgtaaccagacaagagcaagatcaggccacctctgagtctcataggagagctgctgcagccacgacctctggaaaattcaaggatgagatcgtccccgtgccaacaaaggcaattccagtcaagtgagtgatggtgctggagctgttcttctcatgaaaagatctgtggctctgaagaaagggctgcccattcttggtgttttcaggtgcccggcgcgtggctactcttctaaatgaaatgaagcgccggggcagagactgcagatttggtgttgtcaccatgtgtatcggatctagaatgggggcagcagctatgttcgagctgtgttcggcccggctggaggtatcgaccatcactcaacactgtaacccgatggtgatcggcgaccgtgagcttccatgttattgcgttctgatacttgagacttttattatgactatgtatgagatattgtctcttattagtactggatgatgagatgtgtcttattatgactatggatgagacttttgtgatgtaattgatgagacttttgtgatgtaattgatgagactatggatttaaatattgttatgtgattgtgtgtg

SEQ ID NO: 121589 - DNA, 575 bp, Zea mays
  unsure (1)..(575): unsure at all n locations
  Clone ID: MRT4577_42367C.1
gggggggggggggggggggtcctattgccgccttgggggggtcttgtttaccgtcgggagagcttgngactttggctgtatctgacgtttcggtggctcctaatgtttgctggacactccggcagacttggttgataacatgggacactgttgggtatcgtctgggtctacatgagggcctgtgccntcacctagctcatctcccctccggctgagtggattggaagaagccccgctcctggatgtgaattcagtccacattgtctcctcctttgcgacctggctggcaggaacacattctgagggctgattccgcgccgcttgcgtcggactctctcaatcttcataggcttgatctctggtgcgatgcctgcgtcttcactacacgcgcctccgtatctgagaatgtgtccttcgtatgatccgtgactgcgaaagcttatttatccctctggtgtggggatcacactgtccctcttcaactgattgggcttctcgctcccaatttgcctaatggcgtatctgggaggggtaccatgggtgctttgactatacatnccaaacctgctttcgcc

SEQ ID NO: 121590 - DNA, 537 bp, Zea mays
  Clone ID: MRT4577_42368C.1
cctcgaggccggccgggattgacccgccgcctctacgcctttcagtatccggaagaccggaagcttcttcctcctcgcctctgacatggccggcggcaacctattcggtcgagcgctgagctacgttgtcaacgagttcttcgtccagggcctcgccaacaaccgtgcattccagaggcttgctgtgaagaccaacaagactcttgagagcctatcgtctaaagctaaggaaatgagggaggagctatcggaacaattgaaggatgctcgaggccagaaagatcacttcaagcagtgaagctgatccccagagctgattcaacgagacgaatctatgaatggcatttgaagggatttcttgatgtcgttcaaaggacggaaccgttgtataaagtttatctctacttagattagtagatagattggtagacacagcactttctgctgcccctttttcataaattcatatatctcaatctctactttattaaataaaaaactacctcagtttcgaaaaaaaaaaaaaaaaaagcggcc

SEQ ID NO: 121591 - DNA, 254 bp, Zea mays
  unsure (1)..(254): unsure at all n locations
  Clone ID: MRT4577_42369C.1
ccaaatctcaacccagnaacaaaaagngccacctccaccactgnaagccgaaggggggtgaggtccctgggcacgaagtacggtcggctgagggaacaggcgaaagacatggactccaggcaccccgagaatgaaacatgccggtanctggtacctgggaacctacgagagcggngactaattatgattcaaagatagaaatcccctttggggtagaagggggataaactatactacctttttaagattacccc

SEQ ID NO: 121592 - DNA, 631 bp, Zea mays
  Clone ID: MRT4577_4236C.1
caacaccgccgagctctcccccggaaaaccggaaaacgcctcctggtctccgaccccggaggcacgccacctcgaaggaatcccccctctcccattcgtcgtcgtccacctccgcgctactggacagatccatccgtgctcggatcgcttccttctgttgttcagcgtgtggcccttcaatggagtcatcataccttcctgctactactgagtcaattgcaatggctcaggaggctaaggatgcttcggagtcaatttcgatcctttaccgtgtgattcaagacccatcttcttctgcagatgcactgagaacaaaagaacttgcaattactaaccttacaaattacctcactgaagagagcagagctgaggagctgcgaaaccttttgacccagctcaggccgtttttctcactgattcccaaggccaagactgcaaaaattgtccgtggaatcattgatgctgtttccaagattcctggaacatctgatctccagatctcgctgtgcaaagagatggtggaatggacccgtgcagagaagcgtacgttccttaggcagcgtgtggaagcaaggttagcggcacttctgctagagaatcaggagtacactgaagccctgactctccttac

SEQ ID NO: 121593 - DNA, 559 bp, Zea mays
  Clone ID: MRT4577_42370C.1
ggtcccctcgaggccggccgggaccattgacccgccgcctctacgcccctccagtctcctatgtcatggccggcggcaaactattcggtcgagcgctgaactacgttgtcaaccagttcctcgtcgagggcctcgccaacaaccgtgcattccagaggtttgctgtgaagaccaacaagactcttgagagcctatcgtctaaagctaaggaaatgaggcaggagttatcggaacaattgaaggatgctcgtggccagaaagatcacttcaagcagtgaagctgatccccaaagctgattcaacgagacgaatctagctatgagttttttctagttctcgtccgggtcctatttatgaaatgacatttgaagggaattcttgatgtcgttcaatggacggaaccgtcgtataaactttatctgtacttagattagtagatagattggtagacacacagcactttctgctgcccctttttcataaatatacatatatctcaaatctatactgtgttaaagcaaaactacctcagttgaaaaaaaaaaaaaaaaaagcggcc

SEQ ID NO: 121594 - DNA, 339 bp, Zea mays
  Clone ID: MRT4577_42371C.1
cgagacggccgcccggagcaggttctgaccggaggtgcgctcgagcgtgcgctatgtggtgttccactacagccctcctactaaaataccgtcccactttttcctccgccatctaggcacaaattatcccgaactaccttctcgagacaggctgctcagatcgaggcgctaaagagggtggcgtttcttggagaatggactgttgccggaaaacaatgcccgcatgccttagcccacattacgctaagacctgttctggcggtctccttcaaaccggattgccgctcacgcgtggatcttgcgggcccaatccggcctttcgccaagcttgttacaatt

SEQ ID NO: 121595 - DNA, 620 bp, Zea mays
  Clone ID: MRT4577_42372C.1
ataaagtcttacatctcgcggccggccgggccggattgacccgccgcctctacgcccctccagtctcctctgtcatggccggcggcaaactattcggtcgagcgctgagctacgttgtcaaccagttcctcgtcgagggcctcgccaacaaccgtgcagtccagaggtttgctgtgaagaccaacaagactcttgagagcctatcgtctaaagccaaggaaatgagggaggagttatcggaacaattcaaggatgctcgtggccagaaagatcacttcaagcagtgaagccgatccccaaagttgattcaacgacacgaatctagctatgagttttttctagttctcgtccgggtcctatttatgaatggcatttgaagggatttcttggtgtcgttcaatggacggatccgttgtataaagtttatctgcacttagattagtagatatattggtagacacatcactttctgctgcccctttttcataaatacatatatctcgatctctactgtattagcaaaactacctcagtttctaccgttttaaaaaaaaaaaaaaaaaaaaaaaaaaaaaaaaaaaaaaaaacgaaaaaaaaaaaaaaaaaaggcccctagggcc

SEQ ID NO: 121596 - DNA, 615 bp, Zea mays
  Clone ID: MRT4577_42373C.1
cattgggaccctcgaggccggccgcgattgacccgccgcctctacgcctttcagtatccggaagaccggaagcttcttcctcctcgcctctgacatggccggcggcaacctattcggtcgagcgctgagctacgttgtcaacgagttcttcgtccagggcctcgccaacaaccgtgcagtccagaggtttgctgtgaagaccaacaagactcttgagagcctatcgtctaaagccaaggaaatgagggaggagttatcggaacaattcaaggatgctcgtggccagaaagatcacttcaagcagtgaagccgatccccaaagttgattcaacgacacgaatctagctatgagttttttctagttctcgtccgggtcctatttatgaatggcatttgaagggatttcttggtgtcgttcaatggacggatccgttgtataaagtttatctgcacttagattagtagatatattggtagacacatcactttctgctgcccctttttcataaatacatatatctcgatctctactgtattagcaaaactacctcagtttctaccgttttcgtgctaaaaaaaaaaaaaaaaaaaaccggcggcctaccccctcacagt

SEQ ID NO: 121597 - DNA, 354 bp, Zea mays
  Clone ID: MRT4577_42374C.1
cacgacactatcttgcttcggcttataacatccataccgtgattataccatgtcgtgctgcgccccacaccatactacaaccacttccatgataccaattgctttaccaactcagatcacctccatcgaacattccctcttataacatatcccataaaccccatcatcaccttgcatgatgaaatacttttgatctcaagactgctcaacaaaccctcttatcagattgatatatatccaaatcgcttcatgacgacttactacctgaggataatccaaatattgtttttcatcacaagcctaatgataatccttctgtagctaaagacatctactttattaatattatcaata

SEQ ID NO: 121598 - DNA, 342 bp, Zea mays
  Clone ID: MRT4577_42375C.1
atttcgctctctgccccccatcaacggacgactaccttccgttccactgcctgattaatacctctgggcatccacatcgcggtcgctcgctcgatacgataccagcgaccacacacaagcccagacaccatgtggttatcatctcactgcactgaccaagattctaccagtttcatgaggacttcgacctcttcgattacgacggtgacatttgcatcacgatctatcgagattggaactgatctgccatcaatgtccctgaacccaactgaggatgtactgcaaggcatggacaatgacgttgatgccgatggtgatggcaccatcgacttccccaagatc

SEQ ID NO: 121599 - DNA, 2027 bp, Zea mays
  Clone ID: MRT4577_42376C.1
agatagaatgtagttcattccacatcacagaatagaacattgttctttgaaacttttaaccatgaaataaattttctatcacccggggggaaacgacgggcggattattctgttggcttttcttgcaggtaaccgaaaaatccatgttgggcacgctcatttaagctgaaagtagtcaaaccgcacgcacatttcaacggattccaaaagatacaagctgcggcaatgaagccgcttggtcttcagcagagtagaccgacaccaaccggattcactaacaaggtgtacttaaaaaatactcttaactttatcagcccaaccagaccaatattttcaagctctcctcaacaaccgtgcacatcttcagacgcagcaacaaccaacaaatttggcatttcctcacgcaacacaaccgagcaatactacaattcaagtaacaaatgccacccctcctttgctgtgaagtgacccatcagataactccagcacgaacaggcataagacctaacataagtaaggataccaaagccacccaaagtgctccagatcagaactggagatcacaaagggcctaaatagggccataagcagcttattcagatgcagttcaccttacaagatgcttcactggctgaagttcatctctgagtatctcctaggtttgttctggcgctgatcaagctcctcatttccaatatcatttcgaggaggagatttagaccctctattagtactaggttccctggatggaactgatgatgatgtctgtcctggagacctggagtaaaaactcggatcaagagttatatatggtggatatgatgctccaaaagcaccagcagcaccagccaataatggcaaccatgccatttcattgtttcccattcccatctgctgttgagatacatagccagggagggccataccaacagtaggaactccaagaccaccaggatgctgacccccaaattgcatcactggcagcaaagctggagtgccaggaaaattttgatctccctgggaaagaccagcagccccaataacttgggcaccaccatacatcaatgaatccattccagtttcctggctattggcttttaccactgcagaagctgtctttgaattgttcagactagggtatgaaccattctcgccactttctgttgatttaacagatagatgctgagctgctggtaatgaattgttagtccgatggctcaattgctgagttggaattcttgctgcagactgattctgcacttgcattgacttctggtgcatcactggtccatgactttgtggatgtgtagaaatccttgacgtttggtgaagcgatgaagtaggctgattatttgaagatattccaatgtttgaattgccccctgaagcccggacaatagtggattggctaggatttaccgatgatgatgtaaatcctgaattcagtgacgccgttggcacccttccaggggatgacctaacaggaccatcagcatgaaacctatcacgcccaccataatccatggctgttctccctctaaccattgaaccagattgtaatattgagttatcatccatcttcatggaagatggaggaatcttattagaacctcctgtttgtatgtctctcctctgagttgctaccggaaaatcttgactagctgcaccagagggataaaatggaggggatgcagaattcaggcttgagctgatgacattctttttgggaggagcagcctcttgttgtgcatgtgaaacttgaccagaatttctggctgctgcagcatttggaacaggctctcgaaatctagctgcttgctttcgttgggatccaacaacctctctgctgttccttgcaacagcttcataaagtcgaggtcccctccctctcactacctttggggggcggttttgggtgttgctctctctctctctctctctctctctctctctctctctctctctctctctctctctctctctctctctctctctccctcgtgccgaattccgagcattacgtacgc

SEQ ID NO: 121600 - DNA, 527 bp, Zea mays
  unsure (1)..(527): unsure at all n locations
  Clone ID: MRT4577_42377C.1
cggaattcccggctcgacccacgcgtccggttttttcagtagaagtagaagatggagcagctagtgagcatgggtttctccagcgatttggccgccgaggctttaacggccaccggcggagattccatccagaaagccaccgactggattctctcccaccgttcttcccctcaatccacggccacgttacagcccaaactcgaccgcttcctgggggtgcatcccaaagccctagcccccgccatgggtgacgattccagcaagcgccccaatcccaaaacccaaatccacgtcgcggctgatgattccaacaagcgtcacaagctctcatcatccagccaccgccaacaccagccattgtcggagcgtatgcgtcctcgcactctagatgacgttgtaggtcaagaccatctcctctctcccagctctctcctacgttccgccgtggaatccaatcgcctcccttccattgtcttctngggtcctcctggcactggaaagacctcaatcgcaaagtctctcatcaa

SEQ ID NO: 121601 - DNA, 178 bp, Zea mays
  Clone ID: MRT4577_42378C.1
ggggggccgttttaaaattgggggttcccccggcttgcaggattttgccccggggggccacgctgctagtggcactggagcgggtaccgggcacaatgcgagccggtggcggcttcagcatctgctgggccacgacccgcttccaggggacgctggcgcagtgctgcactacgagcag

SEQ ID NO: 121602 - DNA, 204 bp, Zea mays
  Clone ID: MRT4577_42379C.1
cgcgtacggcacgcattactactcactcactcactcaattcgaatgccagctcagctctgctcagctggggacacgttacacccacatgcctgccgacacatcaccgccgatatcacagcaaagcggtatccaggtccgtcgtctacagcggcggcagccatgaacaaagacaagcaccacgagcactagcaccaccctactca

SEQ ID NO: 121603 - DNA, 357 bp, Zea mays
  Clone ID: MRT4577_4237C.1
cggctcgaggggagagcaggaccgggtctttccattggaacttggattacggctgaaaaggtttgtttatttatatgtgtcatcaaattcaagtctttaatttgattcattaatctttgctctgttaagagggacaaaacagacattttaaccttctgtataaaaaatctcaggcatctgggtgatacttccgaactaatcattgtcaagaatgccggtcatgccataaatcgcgaaaagccagcagaactttgcagactgataaagcactacatcgttgatccctcagtcaaatgtcgagatgaccgtaagggatcttggaagaatgcgataaagaggtttgttgggtcgagcctg

SEQ ID NO: 121604 - DNA, 309 bp, Zea mays
  Clone ID: MRT4577_42380C.1
gggggggaaacccccgtttttttattggggtggtttataattccaaaaaaccccctccctggtttttggaacaacgggaaaactggcacagggggggtttggttcaaaaaccccctttctgaattttgcaaccggggaaaaactggcccaaggttgtgggccctgtttccttgtggccaaaaggggccattcgtaagaatcccattttttcttttgggggaagggcacaagggggaaggcctgtgactttcctggaacctacattccaacgggtttgaatcccttgggggcccgcaaagatcaaagatt

SEQ ID NO: 121605 - DNA, 428 bp, Zea mays
  Clone ID: MRT4577_42381C.1
gctacacagtcggctgactaatcaggactagtcccgatgagacggccttatcgaggtggatagcacgatcagcatggacgactcgatcagggcagactaggttacgacttaatcgtcctgctcgctgactaatcacgattagtccggcgactaggtgccatgtccgactagcttgagccagacttgggcctgtacaaaaatgtgtcctctgacatatgggctggccgactactatctcatgtacacagtagaaagaagctctactgtcactgtgccgtacagtacaagcacagattactgttagaagccgtaaatcagtaagccgacgcttatgtcgtctatgacccggtgatactcagctcacgttggcctcagctgcggcgactgtctgctcttgctgaagtgctccgatgcgctcgactatgatc

SEQ ID NO: 121606 - DNA, 225 bp, Zea mays
  Clone ID: MRT4577_42382C.1
tgatggtgcccgggcaccacgtccactggatgtgccagagtagtcgacccgctgatagccaacatcacctccgtgtaatgagccacccctgccgccactctgaggattaggggagaaagctggagcctcagtaactggagtgggggcaggagaggcttgcttctctgttattgggggtgcaggtttggaaggaactgcaggtgctaatggccgacgttctttcat

SEQ ID NO: 121607 - DNA, 793 bp, Zea mays
  Clone ID: MRT4577_42383C.1
aattccagtcccgaatccaatccgccattgcacagccggaccagtgccactcgaaccccacgtaccctctctatcccaaccctagcgcggcggcggcgtcgatggcgtcgatcccgtctaacgacgtctccgagaacggccacggcaacggaaacggcccatccccgccgcgcggcaagcgcccccgcgcagcgttgatctcggtcgcccagatccgcgacgagttcgcgcaccacgaccccgcagttgcccgcgtcaacaacggcagcttcggctgctgcccggcctccgtgctcgaagcgcaggcgcgctggcagcgcctcttcctcgctcagcccgacgccttctacttcgacggccttcagccggggctccgccgctcccgcgcagccgtcgcggcccttgtcaacgctggggacgtctccgagatttccctcgtcgacaacgctaccaccgctgctgcaatcgtgctgcagcatgccgcctggagctttgccgaggggcacttcgctcgtggcgacgctgtgctcatgctccattacgcctacggagcagtcaagaaatctatccaggcctacgttgcccgcgcgggcgccactggtcgtcgaggtacccctcccgtttcccgtcacctcccctgacgccattatcgcggagttccatgctgcgctcgctgttgccaaggccggtggtcgtaaggtccggcttgctgtcattgatcacatcacctccatgcccagtgttctcattccagtcaaggagctagttgccatttgtcgccaagagggcgtcg

SEQ ID NO: 121608 - DNA, 372 bp, Zea mays
  unsure (1)..(372): unsure at all n locations
  Clone ID: MRT4577_42384C.1
cttttatcctttataatcnacnanctttttattttcatcaacacaccccaaatattccgcacgttttcttaaaaaagagaaacaacttttcttatcatttatttnttttaaatctttatcataatcattaacataactctttcctattttaaattgtcatccactcacaattttacacaacatactatctctaaacatatatcttataatccttcttttcctaactatttaactaacttcacattaattatcttactctcactttcaactttacattcatcaaaacaatctttccatctattataaataaataaacaactctctattatacctcttatcttaattattcaccaattaatttaattttcacca

SEQ ID NO: 121609 - DNA, 197 bp, Zea mays
  unsure (1)..(197): unsure at all n locations
  Clone ID: MRT4577_42385C.1
tcgcttgttctacaaacgcctaaatgtggtgcttgaagaaaagtgggagagggtcgagaatccttatattncctaagtgttggaggtatttagtatcaaaggcttgtttatgtgtcgttttttttgtctttatttatattttattcattattttatttattttctttattttttcttatattttattatttatatat

SEQ ID NO: 121610 - DNA, 544 bp, Zea mays
  Clone ID: MRT4577_42386C.1
cctcgaggccggccgggccgggatcccatagactacagcacgcactgtagcaccacttcctgcgctgctgctcatcacacaccgtaccactaatactccatcgccacaatgcttcccaagggtgcgttcttccttgccctcagcctcctcttcactgccgacgcgcatggctgcaaaccctactgcctggtgccagccgtcccaacgccgccagtaagcgacgacgcacagccacgggcgctgctcgatcgacgcactaaagttcacggcgtgcaccaacacgatgtgcctcgtgaatgccctgctgatccacagctatgagaaatgctgcccgctgtctgtaggcaactgatggacctcgactccgcactgcgactctgcaccgcccttcaggtcaaagacctcggaatccacctcgacgtgcccctatagactcaacctcatcctcgacaaatgagccaggatatgcccaaaagactttacttgcccaaactaattgagctgaatatgcagattgagccagcatgccaggaatgtacccctt

SEQ ID NO: 121611 - DNA, 2055 bp, Zea mays
  Clone ID: MRT4577_42387C.1
aggccggccgggccggataagcatgccgccctcggcagcagccggcggcgcggcagcagcagcccgcaggcatgcaacagctgcagcggcacggggagaaaaaggtgggcaaaagcgggcacgaaaccgaagcgctcgccgacccacccaccgcaccgctctcccatcccacccaaatcgccgaccgataggagagaactcgagctgaggagagagagggcagcaggcggcggcgcggagtaacacgcggaggggaatgcgcagcccgtgtgagcctctcgcccccgcgaaaccccaccgattctgattccgccggcgaaatcgggcgcctcgcggctcggccggctaagcggtggacggcggcgccgaggggttcgttcgatacggtgagggtgaggccgtgaggagcagcagccacggcgacggggatgatgaagggagggggcgggaaggagacgctcaccgcctccttcctccgcttcctcctcctgctcctcctccccctcaccgccctctacttcttctacacgctgcacctcctcctcacctcggcgtcgtcggccgcctccaactgcgcgcctgacgccgtctcggtctcccggatgtctgccaacctcacggcggtggcggagaagcagctgcccccttccaccgtggctgggtccacgtcgacaacgctgcagcacgtagtgttcggcatcgcggcgtcgtcgcggttctgggacaagcgtaaggagtacatcaagcgcggctggaccgcgaggtgcgcgagtccaacatgtccacggcgtgcacggggctcctggccatcaggatctcgtctgacacgtccgccttcccctacacgcaccgccgcggcaaccgctccgccatccgcatctctcgcatcatctttgagacgttccgcctcggcctccctggcgtgcgctggttcgtcatgggcgacgacgacaccgtcttcttcccggacaacctcctcaccgtgctcaacaagttcgaccaccgccagccctactacatcggctccctctccgagagccacctgcagaacatctacttttcctacgggatggcatacggcggtggcggcttcgccatcagccggccgctggccgaggcgctcgtgcggatcgacgaccggatccaggcgtgcatggcggagctgggcgtgctgctcaccaagcacctggggttccaccagtacgacgtgtacggcgacctcctcggcctcctcgcgtcccacccggtggcgccgatcgtgatgcttcaccacctcgacgtagtgaagccgctgttcccggacgcgaggtcgcgcccctcggcggtgcggcggctgttcgacgggccggtgaagctggacacggcggggctgatgcagcagtccatctgctacgacagcgcgaaccgctggacggtgtccgtggcgtgggggttcacggtgctggtggcgaggggcataatgtcgcctcgggagatggagatgccggcgcgcacgttcctcaactggtaccgccgcgccgactacacggcgtacgccttcaacacgaggccgctggcgcgcagcccgtgccagaagccggcggtgtactacctgtcgtcggcgcgacgcgaggccttgcgcggcggggagacgacggtgacgcgatacgagcggtggcgccatccgaacgagacgcggcccgcgtgccggtgggacataaccgacccggacgcgcatctcgatcacatcatcgtgctcaagaagcctgaccccgggctctgggaaaggtctccgaggcgaaattgctgcagagtggtgtcttggcccaaggatgggaagagcggggagaagacgatgaccatcgatgtaggcgtatgcagggaaggcgagttcagccaagtagcaggagcatgagcttttattagagatagatgaagataggaagatttcaaattcttttcttcttcctttttcttgtacgaatccgttcctcttggagagtatgaacttgtctcgtttcaaaaaaaaaaaaaaaaaaaaaaaaaaaaaaaaaaaaaaaaaaaaaaaacgaggtc

SEQ ID NO: 121612 - DNA, 223 bp, Zea mays
  Clone ID: MRT4577_42388C.1
gggggggacaactcatacactgaagggcctattacaaacctacaaatattaagtgtaggaaaatagggtatataataggttatgctttaaaccgggggttgcctttaattttacacttaaatagagattgctccgggatgtactctcttggcgggcccccaaaaaataagaaaatacttttttgggttgttaaccaaataaatcatgtggctggtgccacata

SEQ ID NO: 121613 - DNA, 287 bp, Zea mays
  Clone ID: MRT4577_42389C.1
cactttttcaagaaccgcctaatgtaccggactgccggcggttccatgcgcaaccttcccaagggggcagggccgcacaaaaacaacaacgcgtccgccactttccactttcttcagaaggtcaaggccggtctgcccgtcgacccgctcgtctgcgcggcagccaatactaacggcaccgtgctcaacttctgctctgccatgttcagcttaaacctcacggagcataataaacacctcaaggaaaagctcgttcccatagcgggggaccagccctcaaatgggtc

SEQ ID NO: 121614 - DNA, 691 bp, Zea mays
  unsure (1)..(691): unsure at all n locations
  Clone ID: MRT4577_4238C.1
caaccatggnagttcatacaanagnaaacanttagtttcagaggtcgccagaaataacttcaacaccatctgtatatacccagggacatttcgcgagattcttctagacaaggttggatttaggtcggtggagttgcttgnccgaaaaattagtgggcaccgtcagtggtttcgatcgtccaatagaagtttaccacaagtgatgaaactggattaaggattgtggcatgcctgcccaattgcacactcacctgaccaaattattgtgttgagctttgaaatgctcactgcctgactaggtacaagtacaacaatgaagcaagtatggtgctggacttgcgtttgtaaaacagaatatcagatggcgaaggatcaagatggaataaaaggtggtaggatgttgtgttctctaaatggaagtgctgggaattttgttaatgggtctgttcttgtataaaatggataatggataccgtaccctgaaagggaaagagtccttcatgagtatcattttgcctgctatggatatcatgatttctcttgctgattgtttgcccctcccccttttcaaaactgtaagttttggcttttgaaacataattttccagttgatgcctggcttatttttcaaaaaaaaaaaaaaaaaaaaaaaaaaaaaaaaaaaaaaaaaaaaaaaaaaaaaaggagaaaa

SEQ ID NO: 121615 - DNA, 703 bp, Zea mays
  unsure (1)..(703): unsure at all n locations
  Clone ID: MRT4577_42390C.1
ccgtccgnaatgtgtcgcctcgggagatggagatgccggcgcgcacgttcctcaactggtaccggcgcgccgactacacggcgtacgcgttcaacacgaggcccctggcgcgcagcccgtgccagaagcccgccgtgtactacctgtcgtcggcgcggcgtgcggccttgcgtggcggggtgaccacggagacgcggtacgaccggtggcgccacccgaacgagacgcggcccgcgtgccggtgggacataaccgacccggacgcgcatctcgatcacatcgtcgtgctcaagaagcctgaccccgggctctgggacaggtctccaaggcgaaattgctgccgagtggtgtcttcgcccaaggatggcaagaacggggagaagacgatgaccatcgatgtaggcgtatgcagagaaggcgagttcagccaagtagccggagcgtgaactttcatatagagatagatgaagataggaagcttcaaattcttttcttttcttgcgcgaatccattcttcttgtagggcatgaactagtcgaaacacctctctttgcgcctcacgggcgtctagctgtaactgcagttcacaaaacgccagaaggccaggactagaagttttggccgggcgttccggcatggtgacggcagtcaacccgccgccctacgcgcaactagcgacggctacggtgcctagattttgggt

SEQ ID NO: 121616 - DNA, 1916 bp, Zea mays
  Clone ID: MRT4577_42391C.1
acgatacagttttgttgattccgtgctttaaaagagtttggttacatgtacagcaatgctagcctgtttgtgcatcggccagttgtctgtcctctctaaacgtaaacggcaatgcatcatgctcatgcgttgcagtttatggatgcaagtcgcaagataagaaaaaggaatgatgtggcacaaaagattaccctttcccagagcccggggtcaggcttcttgagcacgatgatgtgatcgagatgcgcgtccgggtcggttatgtcccaccggcacgcgggccgcgtctcgttcggatggcgccaccgctcgtatcgcgtcaccgtcgtctccccgccgcgcaaggcctcgcgtcgcgccgacgataggtagtacaccgccggcttctggcacgggctgcgcgccagcggcctcgtgttgaaggcgtacgctgtgtagtcggcgcggcggtaccagttgaggaacgtgcgcgccggcatctccatctcccgaggcgacattatgcccctcaccaccagcaccgtgaacccccatgccacggacaccgtccagcggttcgcgctgtcgtagcagatggactgctgcatcagccccgccgtgtccagcttcaccggcccgtcgaacagccgccgcaccgccgaggggcgcgacctcgcgtccgggaacagcggcttcacgacgtcgaggtggtgaagcgtcacgatcggcgccaccgggtgggacgcgaggaggccgaggaggtcgccgtacacgtcgtactggtggaaccccgggtgcttggtgagcggcacgcccagctccgccatgcacgcctggatccggtcgtcgctgccgtacagcgccgggtaccggcggaggcagccatcctgcatccgcgcgagcgcctcggccagcggccggctgatggcgaagccgccgccgccgtacgccatcccgtaggagaagtagatgttctgcaggtggctctcggagagggagccgatgtagtagggctggcggtggtcgaacttgttgagcacggtgaggaggttgtccgggaagaagacggtgtcgtcgtcgcccatgacgaaccagcgcacgccggggaggccgaggcggaacgtctcggagacgatgcgggagatgcggatggcggagcggtggccgcggcggtgcgtgtaggggaaggcggacgtgtcggacgagatcctgatggccgggagccccgtgcgcgccgtggacatgttggactcgcgcaccttgcggtccagccacacgtagccccgcatggcgccgcgcgggcgccaccacaccttgatgtactccttacgcttgtcccagaaccgcgacgacgccgcgatgccgaacactacgtgctgcagcgttgtcgacgtggacccagccacggtggaagggggcagctgcttctccgccaccgccgtgaggttggcagacatccgggagaccgagacggcgtcaggcgcgcagttggaggcggccgacgacgccgaggtgaggaggaggtgcagcgtgtagaagaagtagagggcggtgagggggaggagaagcaggaggaggaagcggaggaaggaggcgctgagcgtttccttcccgccccctcccttcatcatccccgtcgccgtggctgctgctcctcacgacctcaccctcgccgtgtcgaacgaacccctcggcgccgccgtccaccgctcagccggccgagccgcgaggcgcccgatttcgccggcggaatcagaatcggtggggtttcacgggggcgagaggctcacacgggctgcacattcccctccgcgtgttactccgcgccgccgcctactgccctctctctcctcagctcgagttctctcctatcggtcggcgatttgggtgggatgggacttgggagagcggtgcggtgggtgggtcagagagcgctt

SEQ ID NO: 121617 - DNA, 318 bp, Zea mays
  Clone ID: MRT4577_42392C.1
gccggcacactggacccagtgcttcaactctcggcaagcagtttcgggcctcaagttgaaattttggagtccgaagtggtacatccttgtacccggagttcgtagcacatattacgcaggctcgcgagctctagacacacacagaccgatacagcacatgtggatatgaataggggcggtggcgccgaggatctaaaacatatcctgatgcagagctctagtctggggtgtccgaagcatcacagcgggagcgggtacgaagagagaagaggacgaggccgaggacattgttttgtcctaagaagtgccgcgcagcca

SEQ ID NO: 121618 - DNA, 719 bp, Zea mays
  Clone ID: MRT4577_42393C.1
cattgggtacctcgaggccggccgggagctatagctttcactcgattgttctgccacacagacacatcctgatcgaccatgggtcccatcagtgaagggggcgtactacccgacagctagctcgggtggttcgacgaaaacgacctgctggaggaagaatacgaccacttgttcgacgacgacaagaaggacatcgacttcgccgtcgccgaggacttcaactccaacagcagaagagagcatgtgcacaggcttaatcacagtaggatgaggtactacaaggaggagaaggagcacaagatcctgcttatcctcggtaacgacggcttcatcatgaacgggggcttcaaaatctaccacaagaacaaggacaagaaggacctcgacgacggatatgggaagaacatcacggaggtcgaccttgacgtcgatgtcgccgacgacggtgtgtacgtgtgcctcgaagaggctcgataataatgagcggacgacatgacggccaccgagggcaacatcgagaaaagcgccaacatctctatctctgaccgtaatgacatcctgaacgcgatttagatagctaagtaacggatcagactagcacgcacttgtctatgaatgaactgcatgcgtgcgaagtctaatgcggcgcaatagtgaggaacgtctccggactcgagcagctgcatgcttgatccgagtgataatgttagactgattga

SEQ ID NO: 121619 - DNA, 445 bp, Zea mays
  Clone ID: MRT4577_42394C.1
aaggcgggggggtgggaagttaatttggatcattggacccaaagaaaaggggggttacaggccaggaccataatcttgtaaaaataaaaaaattggttacagattttagctttttatggaaggaacttttactggggtttaaaaaggtaaaaaaggggaacaaaaatccatacccccggggtttttaaccccatgggacgggcttgaaaaagcaaagggggggccttggggggagccttcttagggaatttaaaaccccgacgggagaagctggggtcctggacgagccattaagggaacagcccgttgaaaaaggggggggaaggcctcctccatgttaagtttgtcgggggtttgccctgcgggaaattccaagtaaaacgcgtgcaccaggggggggctggggagggggaccatccgaagcccccagggggggcgggggaaa

SEQ ID NO: 121620 - DNA, 455 bp, Zea mays
  Clone ID: MRT4577_42395C.1
gcccgccgcttcccattcttcctgcgcgctgaggcaatgggacgagcccttggcgacgcgaaacgctaacgctgggcttggcggccgggaagcagagacgcccaccattatcttgaaccatgacttagaggggcctacccataataccggacacggtagttgcctgccactgggtcttcaaccaatccctatgcccacacttgggaacaaccccaatctatgcatctaagctgaaccactatacaggcccgggaataaggagggtgaaactaacctggatgacaaccgtctaactccagatcacgtaaactatacaggtgggaacaatccaacacttgatagaaattgcttcacaaggataagaccagtgcaccgtgccaagcatcaataatcaacatagctatgaacgcttacgcgccacctgcaaattatgcatggggtgactactatcacac

SEQ ID NO: 121621 - DNA, 217 bp, Zea mays
  Clone ID: MRT4577_42396C.1
gggttgggagccaaaaacattttccatttaccggaaaaaataaaaaaacaccccttactggatcccaacaaccggagcctaaaaccaacaacgtaccccatttgatgcacaaacccagctggaatgcatctcacaaaaaaactcaaaggcccgggacctataccaccctgttaagctacagaatcccatgtttttccttaacaaaaaaaaacactgg

SEQ ID NO: 121622 - DNA, 464 bp, Zea mays
  unsure (1)..(464): unsure at all n locations
  Clone ID: MRT4577_42397C.1
gggaaaaacangggaccgaaacccctctaaaaacnctcgaataattttcaccacacgacccacaacagaccgaaattttttttattaatcacacaattacactccatggaaacatattcaactttaatttccttaattttcattacaccttaaaaatataaattcaatactaaaaagaaaatgttgaaattgattaaaactcaaatcaacttttacaaaacatatgtgttaaaaaaatatatttacaataactttttaaaacattccaaataccttttgatgtacacaataaaaaatataaatttctttcttacataaaattacacttaatttttctcctggtgcattcacaaaatcctctttagacaattaaatattactatcattcacaccacctggaattttatcttcaacaaaaacaaccttttttggaaaccctacaattatcattaaaataattttct

SEQ ID NO: 121623 - DNA, 1851 bp, Zea mays
  Clone ID: MRT4577_42398C.1
gtcttgaaaacgcctttcccaggagatcagacgagtagatctgatcttattggctcaaaaaagctaatgaagtgcatgatcctactgatgcaattgttcaagctgtcaaaatatggatcgccgcagactcccagacatatctaacgagagatcacccccattccttatggatcctgctggcagaaagtgatttgtttgacatgtttggttctgaatttcatcatttgtgtcacaatgtggataatgatcttacctggaaagctgcaaaacctgagaattcaaatagagatgtacctgaatcctctgttcgtcttggttcctcttcatctttcaattcagtggatgacaagttcccttattctgggatcttctcactaaccgataccgaccaacttttggatgcggttgtctccaatgtcaatcctggtggcaagcagatctctggtgacagtacttcttgcaagacttcagcggcagatattcctaccacttcgtattgtcgcttaaaagaaccaaagcagtccgaatcatcttcacctttgctaatcaagaatgagttagccgtttcaaattttgtcaaacagtcatctttccaagaaaaggcagaggatggctgtctttctcaaaataatgcaatacagaagtctcagatacgcctctggatagagaacggacagaacatgaaatgtgaaagtgcctcagcctcaaacagtaagggcgttgatatgtcaagcaaggcaagtcgaaagaggtctcgaccaggagagaatcctaagccacgaccaaaggaccgccagcttattcaggatcgtataaaggagctccgggaactcgtacctaatggggcaaagtgtagtattgatgcattactggagaagaccattaagcacatgcttttcttgcaaagtgtgacaaagcatgcagataacctcaaggactcaaacaaatctgatattcttggtggtgagaatggtccactcaaagactacttcgaaggtggtgcaacttgggccttggatgttggtagtcgatctatgacgtgtccaatcattgttgaggatcttgatcggcctcgtcagatgcttgtggagatgctttgtgaggatagaggtatcttcttggagatagctgactttattaaaggactcggattaaccatcttaaggggcgtcatggaagcacgcaaaaataaaatctgggcacggttcactgttgaggccaacaggggatgtgactagaatggaaatcttcctttccctaatgcgcttgctggaaccgagttatgatggcggtggagcaggagagaatcctaataacaacataaaaatgccccttggaattgtgcagtatcccgttatccctgtgtcaggtcatcttaggtgagccagctgcccagccagcacaaagatcacaggacaggaggcatctttgaaatgctaagagcgggaggtcgacccacttctgccatgactagcattatcaacccaggacgagcgggaatctcgtggcatgcagtgcatcgtccctgcagtgtgcattcggaaagcctaacagtagaggggaatggagacatggatagttggttcggcgggtgatcattagacgatcgatgttttgactgtataatcttaactgttgctgatgcttttgccttttgttcttctgcatattagtgaattttgttatgttcttctgctgaatggaaattctgagttgaattgtagaccttgttcagttgtttctggtactagctcgaagtcggagctctctttttcttaccgttcctgtgtgattactaatgagaaactagttttactgtttacagttaaggttctctttgtttgttctccc

SEQ ID NO: 121624 - DNA, 294 bp, Zea mays
  Clone ID: MRT4577_42399C.1
acgctgacgcgtgggcggacgcctggtacctggagtgccaattactcctatgtatgtataagggatattattagagatgtgcttgagaagcagggagctgacttctcagtctgccttatgtctttgacatgtcatcgtagagtacaccagagtgggtgtaatagatgaagccttatgcttgaccaaatacccttgtccattttaaaagtgcctgcactatgctggtcgctagtcgcatgtttatcatcatgcggcaacatgtgggagacttgatgcttcatggtatatataata

SEQ ID NO: 121625 - DNA, 245 bp, Zea mays
  Clone ID: MRT4577_4239C.1
gttttactaacaacaagtatggattaattacaatgatgttactgtaattgcatggggtctaaaagatgcgactttttaactaaacacagtgtttacgacgttctacgattaggtgctaaaaaaattttcggtagtcgtgatacacatcaagatttggcttcggtatatagttacacatatcgtgatgtttatattgttatagtctgttcaagccttactgatcgttttctggtttagacttctgc

SEQ ID NO: 121626 - DNA, 762 bp, Zea mays
  unsure (1)..(762): unsure at all n locations
  Clone ID: MRT4577_423C.1
gggtacctcgaggccggccgggccgggttcctccactaccttcgccttgtcagacctaccgagaacaaagaaacagtaaaccaactcagggtcgtaccgcgccggntcggcttgccgtcatctatgcatcaccgctggacgcgtccgctgcacgtcgcgcgtcgccgaaccccacattcgctcgcaagattgcccgttctcatcggagggggctgtctcacgttgctactataacaaggtcccgaactacgtgtgactcgcctaccgctacagcaaatcctaacgtgttctgaacatccttccagagggtaaagagcctttggactgctctggacatgcttaatgcgttgctgattctgatggattcacacgagccattgaggagaactccccaagtccttctctggacaaccctccagaatatggatcatcgtcatcctgaatcttcccagactttgtactaccacttgaacattcacgatgctaatgcacggatgcaagaacgtacttctgtactgcattgcaggctctgaatgatcatcgtccagatcatgctccctacatacatgcctataacgaggcaacctctgatcataacctggagccatagctttatcccctacttatcgcgctgcagcattatcatggcctgcccttttccaaaagacctacccgatgaccgtgcctactgcaatgctctttgcagaccttcctcttatgtcagactacttcatccgaagattgccagattgcagctatgct

SEQ ID NO: 121627 - DNA, 288 bp, Zea mays
  Clone ID: MRT4577_42400C.1
ctgttggagagggacaaacaagaaaaccggctggaccttaccagctgacgccgtggtccactagcgccttcctcttccgtcgctcggcttgttcaaccgccttctacagataggctaccccacggtttcaagggctttttcataactactaaatgtaagaatagcatttcttatccaacaactcattaagagttttattaagtcttagattttgtgttcctttatgatataaagctattatctgcttgttgaacattaaatctagttttttcttttaattataaatat

SEQ ID NO: 121628 - DNA, 416 bp, Zea mays
  Clone ID: MRT4577_42401C.1
gaggtgcaatattatcacaggtacgagtgtttcacataccagtcatgtttccttctttctttggatcatttgtacatgcaacatgtactttttctaaagggtttgacatagagaacatcttgtttgactgcgagaattagtggctgcggctgatgccacaacttattatgttgtagtaagtactataaatggacaacgataagggtattaggtgaagaataaatggttgtaggttgctgcgatctactctcataagttactatagcattactgtacaattgtacatacaacaagagcagctgaaagtagctacaatgaatgcagacagtatctagaaaatttaaaactattttgatagccccttttttgcacaactagcagatcatattccattcttgactagcagcacaactagc

SEQ ID NO: 121629 - DNA, 443 bp, Zea mays
  unsure (1)..(443): unsure at all n locations
  Clone ID: MRT4577_42402C.1
aggtngacggaatcgacaagctttcaggatctttcaagttagggggaaacttgtttatcaagactgtactacagccttctgtgagtgcaatagtgtcaggatcagtgagttttttcttcttggacaagaggtctttcataaatttcctataattagaaatttgtaccagagcacccactaaaggaatgttgatctgcagttgttccagtgtatgcaaaaactactgatactatttataattttcattcctcttgaatctttgtggaaaaggtatagataaaagtacatttggttgaggcgatacttttggttgcatccacaatttcgagggtcgaatataaagcatgtgaacggcagttggcggtacttctttgtctggtacatctacaagctcttcagcattcgccttcccatcagggtttatgtcaccaatatctggggat

SEQ ID NO: 121630 - DNA, 606 bp, Zea mays
  Clone ID: MRT4577_42403C.1
ccggccggggatcggacggttgccatttcacagatccttagggtttcctctccgctcgcagcacagcccgccggtaaaaggccaggggctacctggacggctggtcctggtggctggtgccttccattgtgagacgtgaagctaagccggcggcggcggattccttcgtacccaattcgtctacgctatgttaggtttccttcatttgattttgctttctcgtttgtcgctgtcattcgcccttctttcttgcctctcgttgcgtaatccttggagcagtgatgagatcttttcagtaatgatctttgagacgtgattatcgatctctatattgctacgttcttgctgagctcctagcgccaggcgcacatgcttttagttctatttgggttcagggtttaatctggttttcagcgtgtcattaccgaatcgttctggattcacaaacggcgaaatttacttgcctgcgttattcctggagccgttccatcctatccactacaacacagtttgaatatatgtgctaaggtcatgtatgcaccttaattttaatatgaatacatgtgtttagggtttaagaaaaaaaaaaaaaaaaaacccgcggcc

SEQ ID NO: 121631 - DNA, 779 bp, Zea mays
  Clone ID: MRT4577_42404C.1
ccggccgggacaaagcacatctagcttagttggtagagtgcaaggcttttatccttgtggtcatgggttcgagccccacgatgggtgattaattaatatttttgacacccacgtgaccggctcgaccccacgccgccctccctccctgcctggcatgcgtccgatcgcgccatgtctccctctcctcccgcgcctctatttctacagccccgccggcgctacccgccgcccgcgctctccatccatccccgtcccccgcgatcgccgagctcgacctcctccagcacacgtcccgcggcagcatccgtcagagaagccagctagcgcttcgatccccgatccgtgtcgtagacgacagcggggccccccagccggttgtttctcgcagctcggcggcggccatggacgacgacgcctcctcgtctccggcggcttcgtacatcagattggtgcagcatctgatcgagaagtgcatctgctacaagctgaacaaggaggagtgcatggagacgttggagaagcacgccaagatcatgcccgtcgtcacgtccaccgtgtggaaggagctagagaaggagaacagggagttcttcgagacgtacaagaaggatcggggaggaggaggaggaggccccaggaacctgctgctcacaagagccggcgctggagcagaagaagcactcaccatctgatggagtacaggcacataatcgcgttgtcgtggagaaggagatgaggaagcaggacccaccatcggatcggcgtcggctgatgacagg

SEQ ID NO: 121632 - DNA, 1180 bp, Zea mays
  Clone ID: MRT4577_42405C.1
ttgggtacctcgaggccggccggggacccatgccgccctccctccctgcctggcatgcgcccgatcgcgccatgtctccctctcctcccgcgcctctatttctacagccccgccggcgctacccgccgcccgcgctctccatccatccccgtcccccgcgatcgccgagctcgacctcctccagcacacgtcccgcggcagcatccgtcagagaagccagctagcgcttcgatccccgatccgtgtcgtagacgacagcggggccccccgccggccggttgtttctcgcagctcggccggcggcggtcatggacgacgacgcctcctcgtctccggcggcttcgtacatcagactgggtctgtgcgtattattgcgcacgcatgtctgatatccaggtgcagcatctgatcgagaagtgcatctgctacaagctgaacaaggaggagtgcatggagacgttggagaagcacgccaagatcatgcccgtcgtcacgtccaccgtgtggaaggagctagagaaggagaacagggagttcttcgagacgtacaagaaggatcggggaggaggaggaggaggccccaggaacctgcaggaagcggcggctgctggtcaccatcctcctccgcgtctccaagtccaacagagctgctgctcacaagagccggcgctggagcagaagaagcacccaccatctgatggagtacaggaacataatcgcgtcgtcgtggagaaggagaagaggaagcaggacccaccatcggcgtcggcgtcggctgatggacaggaacagcgcgtcgtggagaagaaggagaagaggaaggacccgccgtctgatggacaggaacggcgcgtcatggcgaaggagaacagccggaaggatccttccgcttcttccaagagatcagacaaggacaacgactagagctctcgctcgctcgatcagccgtgccgctcctgtggctacgatcgaatgtggtcgatgcaggaggtacggtacatctatcgatcgagagagagctgctctctctagctagctatctatatatcagcatcggtcgccagtgtgattatgtgcgtaggaggctgcatggccatgtgtattatgggtagacagattgattaaacctagtatgatctagatctcaggacgatacaaaaaaaaaaaaaaaaaagcggcc

SEQ ID NO: 121633 - DNA, 311 bp, Zea mays
  Clone ID: MRT4577_42406C.1
cactcaaagtcaaacgtgaatgcttcatctgcgagcctaacaactggtggatatgcttcagcgctttctacaggtgaggcgagcacatgagaagcatacagtagtgacgaaggtggacaagggtcttcatcacatgcagtgcctatcaagtctgatgcagtactatagctagagcttgatatcactccatattctagaatgctaatgaattgtgaagcagctgagctagtgctagatatcacgagacatgtcatactatcagagacctcagatcaaattccggtcattgacaagcttcagtatcagagatg

SEQ ID NO: 121634 - DNA, 453 bp, Zea mays
  Clone ID: MRT4577_42407C.1
tggcttggaacctttgggctgatttatgtgcttgggggtggttaataaggatgagtgacggtgattaaggctactcgtccttccgcgtctgtacgttcgtcttctgttgctgttccctttgcgctcgtctcgtggtagtaggcgaagaagggtggtggtggaggtggaggtggaggtagcgccagtggaagtggaggtggtaattcgaactttcgggagcgtctgtttaagcgtgggctgtggcgtcttaagatgtagcataggaaggttcgttctattccacgcaataagcgtcgtgttaagcgttctcgtgcgttattggggcctcatggtaataagggtgttcgttttcgtcataataatcggaaaattaaggaaggagggtttaagcgttttcagaagacttattgtagtctttgcttgttaccgcttttctcctcttgaactcggaat

SEQ ID NO: 121635 - DNA, 127 bp, Zea mays
  Clone ID: MRT4577_42408C.1
ttgcggtagacatttcgagattcctccggcaaccgggatacacagaggggcttcagaagacagaaccctagtgggggtgaagacgtgaagtcagaatggagaaaagcccatgctggcgtagagaccg

SEQ ID NO: 121636 - DNA, 184 bp, Zea mays
  Clone ID: MRT4577_42409C.1
cccactcttatctatggatgagaacctcctcgacttgaactctttgcacagatagagcacaggagctctccgtgtgcacagctgaagaatacaatgactcactcctcaccatctctcgcgaatctcttgatctagaccgtgctgactgtggggtacgaatcatcttaggatgaattttgtttac

SEQ ID NO: 121637 - DNA, 525 bp, Zea mays
  Clone ID: MRT4577_4240C.1
gccgtcgctgagtgcgaactccggcgtgtccttccccccccccctctctctctctctctctctctctctctctctctctctgctaatctgagttcctcgttgagaagaggaaccgaggggcgcggcagcgactccgcccgtgatggtcgcccgccgcgctctgtggcggacgcggacatgcacagctcctccccctcctcctccgccgtcgcgtattcttcctcgtctccatcacacctctccccagcagacggcttcctctgcgtgaaggagggggtcgacgagatgatcaagcacgtcgccaatgagccctccctcgggctctacttcgtccagcagcacgctcaggcatccatgcccatcctccttgacgtcaagggcaaggttacagaaaagactcgtgagataacattacacactgaagatatagaggattctatttgtgctgtgaggcccatggctgagtttggacttccaattgctgatgatatgataaaggacataaataaatctctaaagataatg

SEQ ID NO: 121638 - DNA, 359 bp, Zea mays
  Clone ID: MRT4577_42410C.1
acatgaacttctgtccattactgatagagagccaactgctaaagcgtattagcattgatctgtatacttacctgacagtatgatacttacaaccacaattaaacataaaattaacttttactccaccaaataactggaaaagaatgcctaggaacctaatacaaatgctataagaaacaattttctttgaacaaacacatgttaatatatgtagcagctacaaagaattgctaaaacaaggtgacaaaacaatgtccactactgcaactataccctgacgaaatgaagagcaagcttatccggctatagatcttcctgtaggagtttgttcaacagagcagtcaggagtgcatcccttt

SEQ ID NO: 121639 - DNA, 583 bp, Zea mays
  Clone ID: MRT4577_42411C.1
ttttatccgtgctgtttgagacctccgagcgcgagggatgccccagaaccctgagcaccgcatccgcccagcgggcaaccgcccgactgctgttctagatataggggggcgacgaggaggaactagcatgtagagaaggacactgacgtccaaggacgccaaagcgatgcgatcaaccccccagaggacgcagggggccatgccactctcacccatggaaggatgaaaaccctgccttaagaaagggaataaaagccagggactctaagtctccaaataaatgatgacaacgagaggagacgaatggacgacaagaaaaaaggctaccaattcttctctttcagtgaaccacggacacgatggcgtcggcagtaataacgatagggagaaagactatagctaatattgcgtggatgcaacacatactgatgactacagggcaaaaaggagaactcagaagccataaacacatctcttccttcatcaggatgacgatgaacacccaaatggtgagagagcaaaacctcataaacatggcagcattacatcatatgatgacacctccaagtgccacgagagatct

SEQ ID NO: 121640 - DNA, 413 bp, Zea mays
  Clone ID: MRT4577_42412C.1
gaaatggccaggtatttaacttcaggcctgaagaactgggtgtttgttgatgtcaacatgcaggtaacggatttcaacaaagggatttccttacggacactggagtgtacaaaatgataaccgatagtactgcacccctagacaagctgggacggacccgtaagattttacagacattgcctctgaccattcatcctgttttaataaaccaggattgtccagtctcagtttagtgccatgaactacgactacaactaatccttgccacccattgcttcagacaaataggatcgaagaaagcctggccggaaatctcctggataactctatccacaacctagttttcagcgtgagaagtatactccgtctcactacccaatctatacatgactttctgggcaacagcaatgaca

SEQ ID NO: 121641 - DNA, 399 bp, Zea mays
  Clone ID: MRT4577_42413C.1
tcgcgggccgacacaagcctctacagtggttcctgctatgaattatatggtttctcacatttcttactaggcgactttgggttctagttatattccaggacctgccggagaggatcaagctgctgcaggaagagatcgggcagtagcaggaggaggcgccgggcatgctcagcgttttccgggacctcaaccccgacgagatggtggccaggaacaccccaagtccgacgtggtgcggaaggagggcggcgacacccgggtggagatctactgtgccgcgtgcacttcaacggtgatggctcgtgggatgtgattagggatggtaatggaattgtctcttcacaatttctttgagcccttaattaattttagttcaaaaatgaatagaaatagaacctg

SEQ ID NO: 121642 - DNA, 702 bp, Zea mays
  Clone ID: MRT4577_42414C.1
ccctcgagttcggccgggatccatctactagagccttcgtcgcagagaccttgcgggccatcgccattgcagagagagagagagagagagagagagggagccgccgcacccagaattcgccgacgccgccggagattttatctcgccgccgttccacacacaccgcgacgtggacagccagcaccactgttattcttgaaccacggtactgtaccgtcatgggcatgttgatgaacaacgacgacagcagcagcatgcatccacggccgcaggtccttgcttccctgcccttgctggtctacgaatacaaggatcatcccaatgccacaacaaggatgctcatatatagcctacccgagcggagcattgtctacacgcacaacagcagtaggccccagatgatgatgatggagggtaacttatccttcagcacccctcaaggatggctggtcatccttggacaagcgtcagaggcctcgatctggcatccgctcaccggagagaccatcacgctcccaccaatacacggcgaccaccgtatccccgatagctgcaagtgtctgctcacccgcagctccgtcgcccacccagactgcgccgtcgtgcttctcgacgtcaccgatcctctcatgtggttctgcccggtgaatggcggggccgacaggatgtgggtgcagcacgcctacgacattggcgaccact

SEQ ID NO: 121643 - DNA, 2413 bp, Zea mays
  Clone ID: MRT4577_42415C.1
cccttccctcgtggccggacctgacctgacctcgcgtcgtcactgtcgctcgcgagacttcgccggattggaatcagatacgacacgacggcgacgatttcagccgccgactccgtcgagctccgctaatccgtggctcggcccagcatcaggtcgctccggtggcctgattcgacgcccgatcaggatggcgttgaagaaggccaagtcgtagtcacgcctgcaattaatgctagagaatcaaggtgtccaggaagaatatgcacctttgagtctgcccatggtctgtgacactgtacatccatccatagacttgaggcagtgatcaggttttgttcagtgcaagaactcgccatgggcagtgcctgctcaaggaacagaggccaagtggtccatgaggatcaactgtacagcgtcaagttctccaagagcggcagcttcaaatggctgctgcacacgctgtcacgcagcagctctgatgtgctccggaaggcgcagggaccgggcccaggtcgccgcccgtcactggtggaactttgcgtggccagagtccgtgaggacataagtaggtattcagatttctccatgctgcctagggatcttagccagcagatattcaatgaactggtgcggtgtagctacatcaccgaggagttgctgggagcttttcgcgactgtgctttgcaggatatttgtctggatgagtaccctggagtgaaggatgcttggatggaagtaatcgcttctcaagggcagtccttgctatctgttgacatctcttgctctgatgtgactgatagtggattgaatcttctcaaagattgctcaaatatgcaaagtctggcatgcaattactgtgatcgaatttctgaacatggacttaaaacagtgtcaggcctctcaaacttgacatcgctcagcattaagaaatgtgctgctgttactgctgaaggagcaaaagcctttgcaaacttagttaatttggtaaacttagacctcgagcgttgtccaaagattaatggtgggcttatacatttaaaaggcttgaaaaaactggaaaaactgaatctgagatactgtaatggcataacagattcagacatgaaatatttgtcagatctcacgaatttgagagagctacagctctcttcctgcaaaatatctgcttttggtgtttcttatctgagaggtttgcacaagctaggtcatctaaacctggagggctgtgcagttactgcagtttgtttggaggttatatctgagcttgcttcgttggtcttgttgaatctgagtcggtgtggcatatgcgatgaaggctgtgagaacttgaaaggtcttacaaaattgaaggctctaagtttagggttcaaccaaattacagatgcatgtttaattcatttaaaagatttggtcaacttggagtgcttgaacttggactcatgtaagattggtgatgagggtctatttcacctaaaaggcctcatacagctaaaaaacctggagctttcagacactgaagttggaagcaatggacttcgtcatctctctggttgatttaaaacgcctgcagaaatgtctgcgtaatttgcagagcatcaatctctctttcacattggttactgacattggtttgaagaagatctctggcttgagttcactgaagtctcttaatcttgacaatcgccaaatcacagatactggtttagcgtctcttacaggtctcactggattgacacacctcgacctatttggagctcgcataactgattctggcatgaactgcttcagatttttcaagaatattcagtccctggaggtctgcggtgggttgattacggatgctggcgtgaagaacatcaaggacctgaaagctctgacgttgctcaacctatctcaaaacggcaagctcacggacaaaaccctggagctgatctccggcctgactgcgctggtgtcgttgaacgtgtccaactcccgggtctccaactcgggcctccaccacctgaaaccgctgcagaacctgcgctccctatccctggagtcctgcagggtgacggcaagcgagatggataagctccggctggtcgccctccccaacctgatcagtgtgcggccggagtgatacgaccgccagcgctcccacagcgacctgtaactgtggagcaagtggcgcctggctagagcaggccgccttgtacatacttttgcaagaacgaggtgtctgtacatattgttcgtcgtgtcgtgtcagtgtgcctgatggcaacgggctaatacgtccgtgccaacgtgtgcatggtatcccacggaccctgtgatggtaaggagcacttgtaaatatgccgtgcttcctctccatgtggggtgctgctgtataaatagattggtgcattgctaaatacctctgcttggt

SEQ ID NO: 121644 - DNA, 648 bp, Zea mays
  Clone ID: MRT4577_42416C.1
cttagtcagcagatattcaatgagctggtggaatgtggatgcctcacggaggcatcgcttggggctttccgtgattgcgatttgcaggatatttgtctgggagactaccctggagttactgaagtctcttaatcttgacaatcgccaaatcacagatactggtttatcgtctcttacaggtctcactggattgacacacctcgacctatttggagctcgcataactgattctggcatgagctgcttcagatttttcaagaatattcagtccctggaggtctgcggcgggttgattacggatgctggcgtgaagaacatcaaggacctgaaagctctgacgttactcaacctgtctctgcaaacttagctcacagacaaaaccttggacctgatctctgtccagacattaatggtgtccttatacatttaaaaggcttgaaaaaactggaaaaactgaatctgagatactgtaatggcatcacagattcaaacatgaaatatttgtcagatctcacgaatttgagagagctacagctctcttcctgcaaaatatctgctttcggggtttcttatctgaaaggtttgcacaagctatggtatctaaacctgtagggctgtgcacttactgtagtttgtttggaggttata

SEQ ID NO: 121645 - DNA, 1406 bp, Zea mays
  Clone ID: MRT4577_42417C.1
tccactaaaatttactggatgaacttatggtgcaccacctcatatagactatgatacctcatattgtgtttgctacaagttgcacgcttgccacctgcgttaagtcgcttaggtaggagaaggtcatgcttgtcatgcaggtaccgtaaatctcattgacaacacccgatcgatcagttctcataaaattttacgtacatgcatagtatgtagtatgtacaacgatattgtgtttgctaattttcttatatatatattttttaagatatcagatgacttttatacttttatttctaaaatcttatatgattgtacgatctttttatttgaccatattatatttggcaaatttatttttttacatgctgatgtgtccatgtgttgcacttatttttttttcaaaaaatgaagctggaccgcttatcactggaatcctagctacgccagtgttatttcgaattccctattttaaattgttattgcactagggtggcctgttatactagaatgattttaacttgttacaaatataccgtggtccacattttgtgaaagttcttaagttgtctgtttctgcaggtctgcgtaatttgcagagcatcaatctctctttcacattggttactgacattggtttgaagaagatctctggcttgagttcactgaagtctcttaatcttgacaatcgccaaatcacagatactggtttatcgtctcttacaggtctcactggattgacacacctcgacctatttggagctcgcataactgattctggcatgagctgcttcagatttttcaagaatattcagtccctggaggtctgcggtgggttgattacggatgctggcgtgaagaacatcaaggacctgaaagctctgacgttgctcaacctatctcaaaacggcaagctcacggacaaaaccctggagctgatctccggcctgactgcgctggtgtcgttgaacgtgtccaactcccgggtctccaactcgggcctccaccacctgaaaccgctgcagaacctgcgctccctatccctggagtcctgcagggtgacggcaagcgagatggataagctccggctggtcgccctccccaaccttatcagtgtgcggccggagtgatacgaccgccagcgctcccacagcgacctgtaactgtggagcaagtggcgcctggctagagcaggccgccttgtacatacttttgcaaaaacgaggtgtctgtacatattgttcgtcgtgtcgtgtcgtgtcagtgtgcctgatggcaacgggctaatacgtccgtgccaacgtgtgcatggtatcccacggaccctgtggtagtaaggagcagttgtaaatatgccgtgcttcctctccatgtggggtgctgctgtataaatagattggtgcattgct

SEQ ID NO: 121646 - DNA, 233 bp, Zea mays
  Clone ID: MRT4577_42418C.1
cacttccccactgcccactaatgatctcatcgacacgacacgagcaccacggccggcgccggccgacttcctccataaagatctcccgtgcgcccgaatcagctcttaatttcgtacttatgcgctgagcatcacataggtcccgatatgcccgcctcggcgcctcctcctgcccagtccgcggcatcgtgccctcctcctcctcccgctatctcctgcccctccggaagatg

SEQ ID NO: 121647 - DNA, 3007 bp, Zea mays
  Clone ID: MRT4577_42419C.1
tccactaaaatttactggatgaacttatggtgcaccacctcatatagactatgatacctcatattgtgtttgctacaagttgcacgcttgccacctgcgttaagtcgcttaggtaggagaaggtcatgcttgtcatgcaggtaccgtaaatctcattgacaacacccgatcgatcagttctcataaaattttacgtacatgcatagtatgtagtatgtacaacgatattgtgtttgctaattttcttatatatatattttttaagatatcagatgacttttatacttttatttctaaaatcttatatgattgtacgatctttttatttgaccatattatatttggcaaatttatttttttacatgctgatgtgtccatgtgttgcacttatttttttttcaaaaaatgaagctggaccgcttatcactggaatcctagctacgccagtgttatttcgaattccctattttaaattgttattgcactagggtggcctgttatactagaatgattttaacttgttacaaatataccgtggtccacattttgtgaaagttcttaagttgtctgtttctgcgggtctcgtactcgtcgctctctccccgttctggttttcgtctaatctagattggatgggatgatgattcgaggcgttagcttattttagctgtaatcccagactaaaccctggctcgttggttcggcggcctcccggtgagaatcgcatctccaatcaggatggagacgaagaaagtggagtctgtccctggtcataatcacgcggggagtggatgataagatcataaaaatcagacaatcatcggtcacaactcatactgttgtgtctttttaacccctgagccaccgaggccaggagtgattgattggtttaagctcagcgcacccagagtctgtgacattcatgggtagtgcctgttcgaggaagaggggccagctggtccaagaggatgatctctacagtgcgaggttctccaagagcggcagcttcaagtggctgctgcatacgctgccccgcagcaactctgctgatgtgcagcggagagcacagggcccagctccaaaccggtgcccgtcgcttgtggagctgtgcgtggccaaagtctgcaaggacataaatatgtattctgatttatccctgctgcccagagatcttagtcagcagatattcaatgagctggtggaatgtggatgcctcacggaggcatcgcttggggctttccgtgattgcgatttgcaggatatttgtctgggagactaccctggagttactgatgcttggatggaagtagtggcttctcaagggcagtccttgctatctgttgacctctcttgctcggatgtcactgatagtggattcaatcttcttaaagattgctcaagcatgcaaagtttggcatgtgattattgtgatcaaatctcagaacatggacttaagacattatcaggcttttcaaacttgacatcactgagcattaagaaatgtgctgctgttactgctgaaggagcaaaagcctttgcaaacttagttaatttggtaaacttagacctcgagcgttgtccaaagattaatggtgggcttatacatttaaaaggcttgaaaaaactggaaaaactgaatctgagatactgtaatggcatcacagattcagacatgaaatatttgtcagatctcacgaatttgagagagctacagctctcttcctgcaaaatatctgcttttggtgtttcttatctgagaggtttgcacaagctaggtcatctaaacctggagggctgtgcagttactgcagtttgtttggaggttatatctgagcttgcttcgttggtcttgttgaatctgagtcggtgtggcatatgcgatgaaggctgtgagaacttgaaaggtcttacaaaattgaaggctctaagtttagggttcaaccaaattacagatgcatgtttaattcatttaaaagatttggtcaacttggagtgcttgaacttggactcatgtaagattggtgatgagggtctatttcacctaaaaggcctcatacagctaaaaaacctggagctttcagacactgaagttggaagcaatggacttcgtcatctttctggtctgcgtaatttgcagagcatcaatctctctttcacattggttactgacattggtttgaagaagatctctggcttgagttcactgaagtctcttaatcttgacaatcgccaaatcacagatactggtttagcgtctcttacaggtctcactggattgacacacctcgacctatttggagctcgcataactgattctggcatgagctgcttcagatttttcaagaatattcagtccctggaggtctgcggtgggttgattacggatgctggcgtgaagaacatcaaggacctgaaagctctgacgttgctcaacctatctcaaaacggcaagctcacggacaaaaccctggagctgatctccggcctgactgcgctagtgtcgttgaacgtgtccaactcccgggtctccaactcgggcctccaccacctgaaaccgctgcagaacctgcgctccctatccctggagtcctgcagggtgacggcaagcgagatggataagctccggctggtcgccctccccaaccttatcagtgtgcggccggagtgatacgaccgccagcgctcccacagcgacctgtaactgtggagcaagtggcgcctggctagagcaggccgccttgtacatacttttgcaaaaacgaggtgtctgtacatattgttcgtcgtgtcgtgtcgtgtcagtgtgcctgatggcaacgggctaatacgtccgtgccaacgtgtgcatggtatcccacggaccctgtggtagtaaggagcagttgtaaatatgccgtgcttcctctccatgtggggtgctgctgtataaatagattggtgcattgctaaatacctctgcttggtaacatcgtggtatcggtgctaggtgcccatgttttttttatat

SEQ ID NO: 121648 - DNA, 1212 bp, Zea mays
  Clone ID: MRT4577_4241C.1
atgtctgctcttgttagccttcaagaattatccataacagattttgatcaggcccttaaggatgtcattcctgaagatatgctgttggaaccgactgatggtgatatgatggatgtttgctctgacattccagacgtgggattagaggtatcccaggcagtatatcgcgcatcgtcgaccttggaaggcagtcttctgtatcaagaggttggtcatgattgcccgactcccatggaggtgactgaggatccttcagccttagaggtggctgttgcagaaaacccagcccccaagggtggtgctggcggttacccagcccccgagggtgtcgccggtaatgatccaactcgggtgggtagcgcaggctgcaacccagcccccgagggtgttgccggtagtgatccggctctggcgagtagtgcgagctacaacctagcccccgagggtgtccaaggagtcgccttggaggccagcgagtcggatgccaaaattctgatatctgctagtggaactgaatcaacccctgacgatgctcttcagattgttctagttgatcttccttcgtcgagctacaacacagcttctcatgacttgggattgccctcattattttctaatcttcagatatggcccgacggttctctgagcttgaggagaaacatcttcaacatcaagccgattcaacccgacggtactccgagcttgaggagaagtattcctaagcttgactctgaaagggtggctgacgaggaggagaaacgagcacttgcagcttctcgtgataatctggataagttgtatcgtgatgccagcaattcgttaaccatcttggaaaggagccaccacttcactatgatagatctggatcatcatcgtcgtgaactgcaagtatcccaggatgagattctgcggcttagacagttggtgtcaagcaaggactccatcgtcaaggatctgcgtgcctccaagagatcagtcgcccaggagctagaggccgctcgactggctacccaagttgtagaggacaactgcgccactctgaaagcccagtgtgacaaggctatggacaaggccatccacgcaaggcggatcctgatgagaaggcccagtgtagttgttcctgatgacattattgctgatgtcaaggctgcacctgatgcctcgagtcgcccttcctccttgattccccctgcgaaagacattgccaaatag

SEQ ID NO: 121649 - DNA, 359 bp, Zea mays
  Clone ID: MRT4577_42420C.1
gttacaacgctgacccatgaggggaaccggggtgtgatttttgaggcatattcgtcaatgcacttctatgcagcggcgctggatgtccataatctagcgttaaaagggcacctcaagtattcgcattgccagatgagactgggacagctcgggcacaagcacaaggcactggacaagatgagcatgttcaaatcgttgtcggacaatggccaagaaagtgcatatactatgtgacatcacgcccacagaatattttggaggaggttctagcaagcgtggtgacggggccttaccagcttagctaaaccagcaggaatggacaactccgttcaaaggggcagttcgaaaataacaggtat

SEQ ID NO: 121650 - DNA, 808 bp, Zea mays
  unsure (1)..(808): unsure at all n locations
  Clone ID: MRT4577_42421C.1
cctcgaggccggccggggaaagaactccgatacccatgtagacctagccgatgtacacctgctatcccccgagactgagacgaccaagacgaccccgccgacgtggagtctatgaagctggactgcaagacgctggacgcccaagtggagcgcgcggacgtagagctcttcgacaaaggcttcgacttctaaatcgaccccgtcgacgtaaacaccgtcgcccaagagtaggacgacttagtcgacctcaacgatttagactacatgccggatgtcgtcgactaagaagaatccctcttcgaggccgacgcgatcgaccgatacttcgacagcaaatacgcggggcaggaagcggacctgctacactcgaaggcggccggggtgtaactggaggagtgcgtggaggcgttagtactacaattcgatgcgtacgataccacgctggtgttacagttggtagtgatgacgctcctgcgagggatgcaagaattgtgggcgatgcagaagcacgaggagaacttctgatgagtgttctaagaggcgaggcgtacctgtaccgctactagtacctctccgtgtgagatgtcatcctcgccgacgcgctacacgagtgataactgaatctacgctcagatgagtgctaacggcgtgtgtgttctggcgcgccggcacgttaaggtatggtgtctagtgagcgtcggccgcatgcggttacangaagacagtagccgtattgtgcgtgtatgtaatggcattgcaactatattgggtgtaaaatcataataaatgtggaaaaaatgccaagaaa

SEQ ID NO: 121651 - DNA, 545 bp, Zea mays
  Clone ID: MRT4577_42422C.1
atgagacaacatttgtattatgacgattggaaaaataatgttatacaacaaattaaaacataggtttcaaagcaatccattttacacctatttgtaggaaagtgcaagttcaattttttttggattaaatttaaaagcttaggcttctttctataattgttcttaacctctctatactttctaagattttattcaaatcccatttcaatttctctctattatctttcttattatcacattctttctcatttttatttgattatttatattcatctatcttctcttatatttttcgtatctacttccattttcatataatattatttttcttatttattataatttttattcactttatcttcttttttttctttttattattttttacttattcttcttctcttcctaattatttctaatatttattaatatctttctttttcttcttttctttttatataatactacatttctctttatcactcaattatttatatcattttttaattttcttaatattcatttacttttattttatcatttat

SEQ ID NO: 121652 - DNA, 157 bp, Zea mays
  Clone ID: MRT4577_42423C.1
tggcacgcgtagtaacctacgtatgctggtcattcggctcggcgtgtctttggtcaatgtgttagcagcactgatgctgcagaagcactacaaggattaaatcgatcactcagtgaaaagccagcagttcggctttgatgggtccgcagcccatggc

SEQ ID NO: 121653 - DNA, 684 bp, Zea mays
  unsure (1)..(684): unsure at all n locations
  Clone ID: MRT4577_42424C.1
ccgggnaaaacgggaaggagaccggagacgagaccgccggagatggagccgagatctgcaatctacagatccggcgccctccttctcctcgccgccatccttgcggaggtcgtcatccccgcatccgccatcggagacaagtgcgccgcctgcaaggccgttgctgcggagctagagattggaatttcgagtgtaagtgaatcaataacttctcttccagttgcctttaatttaggctttgtttggttacatccagataatcagtacccctacgttcttttttatttgtgacggtttagttcaaaaatgaactagcggacgacaaatattcgagaacggaggtagtattcgttaaactttagctaccttgaaaccaattgtctaaataatgaactagataaactttagctagactcctgatttctttaacttattatctttttttaacctcagctaatgagttcattatctagagaaccaaacaccccaatgctacctaatactntcagctaactggggcggaaccaaacacggcattagtgattcttagtttccaaccattttttggcaacgctgattacggttttatttctattaaatagtacctttattatacttctcagtacngaagtactttttttacaattgacaaagcaatcattccataatcttagcagcatatta

SEQ ID NO: 121654 - DNA, 283 bp, Zea mays
  unsure (1)..(283): unsure at all n locations
  Clone ID: MRT4577_42425C.1
gctcccgaccggaagcgcaaagcncaaaancaaanccgagaanncgaacaacgnnnannacaacacccgaaaaagaaanacaagaggggcacnngnannacgcanccnnananaggcnngacngaaagaancagnanancaaangaagaaacaancnggggaggcgccgcaacaangaaaaccnncngcnanccaaacaancngacgagaacnnaaananggnccangncagcnncgagaaccaaaccacnacaacnacanncngcngnnacacgngcccagc

SEQ ID NO: 121655 - DNA, 621 bp, Zea mays
  Clone ID: MRT4577_42426C.1
caaaagagatcgaattcggcacgacgataaggacctagacttgcgaaagtgcaacccactacatttgcgcgctgttcttgaggacgaaagatttgctaaggccaaattgttcttttacatgcttcttatccattttctaaggaagcatcctatcttgcatctgtttactcccaggtttaccttgattttggcttggcgattccaaaacttagtgttcatggaatgacatcgtccctgaaagagcttctggagctagctcccataaagaaggtcatgttcagtacagatgggtatgcttttccagagacatattacctaggtgcaaaaagggcacgggatgttgtttaccgtgtcctatctgctgcatgtgaagatggtgaccttagcattcaggaagctatcgaagctattgaggacatctttagaagaaatgcattgaatttgtacaagttaaatgttgtcaatggatcaataagtcatgggactgccagcgtgggtaagagcgtgtcggcgtctgctgtcggccaggttgtcctcgttgttcggttggcctggcccgatccttctggtcatcgtaggtcccccgccctgccagcgcggcgggtgcctgcgcccataaag

SEQ ID NO: 121656 - DNA, 382 bp, Zea mays
  Clone ID: MRT4577_42427C.1
catcattctgcagaacaagatatgttgaagacgggcaagcggggcttttttcattttcttccccatcctgcccataagacggtccgaccaacgccacaagacagcaacaaactctttgtacggaaaaagccacaactcgatcttattgaccacgacctctacaaagagctaagattataatactacgataagctacgcttctctttgcaacgcactcgtattttctgacgcaaaagcaattaaggagaacagtgccaaactgggtgctggggaggatctccatgcactctctgctgctgttctcactatgagaccaatgaaaaagctgattgacccatctcccgatcatactgtactaggaaaaaatactccttattcaaaa

SEQ ID NO: 121657 - DNA, 359 bp, Zea mays
  Clone ID: MRT4577_42428C.1
gcgtccgcccacgagtccgcggacgcgtgggcaagttcgaattaacagtggaatccgatcccaaaagatttgaagatatattcggacttcggaaattagagctgcgcaaataagcatggaagacttttgtgcagtttgctcaaagaggctggaatgggtggcctataggtcatgccggcatcgccaactgtgctccacaagcatcgtccgcctccgtttcgtgatgggcgacaacaagtgttgcaactgcaagaacgtctgcccatcctccttgtcaccagagccacgggtaaatccactagagtgatcacggatttctccgtgtgacccgctggggtaaatgagggcaaagctgggga

SEQ ID NO: 121658 - DNA, 501 bp, Zea mays
  unsure (1)..(501): unsure at all n locations
  Clone ID: MRT4577_42429C.1
attcgcacgagcacaggggggggggggcgacacccctgaggagaaatacacaccaccaagccctgcaagcatcatgaagaacagtcaccaagggcagcgcggccaccgcgccacaggccatgaccaccactacggcaacccagtaggtggcgaaaaacacggcaccgggggggggaggcacggaactttttttatcggcgcaatgggccatctggcctaacacggcgccgctggcatgggtcgcgggcagttccancctgagagggaggagcacataacccgctgcatactccatcgcttcaggaggtccaactccaggtgggcggatgacaaccgcatgggcgcgaagaggaanaacgggatcaacgagaagatcaaagacaaccttgccggaggcgacaatgacgaccagcacgccacgtgcactaccggaagcacctatgggcattaggtacacaccgagaacgcctacgggctaaatggacacaccggaggaaccta

SEQ ID NO: 121659 - DNA, 309 bp, Zea mays
  Clone ID: MRT4577_4242C.1
gggttattaatttttttgttttttggaataaaccaactgactttgtttgacttcaaagatccaaagacaaggtgtttacaatttccaatcaaatccgcttcaatgggattaaccatttttaagaggggttatcttttggttttaggaaaccccttgggaggaaagctttgtatttttttaaaacacccatttaattccgggcctaaaggttcacaaaaggatagagggagcattgccaaattataccaagtggggcaaacgggggctaggttctcgttttatttaaaaaacatttactatgccccttta

SEQ ID NO: 121660 - DNA, 137 bp, Zea mays
  Clone ID: MRT4577_42430C.1
catggactatgctgagaccgctagcaagccatattctctgagatgcagtccgaaccaacatagtaaacgcttggactccgacatgccattaccatgttcatacaccgtagcgactagctctcttaaatgtaagtaga

SEQ ID NO: 121661 - DNA, 722 bp, Zea mays
  Clone ID: MRT4577_42431C.1
atcgccgcggggaggtacgtgttcccggcgtccacgctcgggtacgcgcgcggcgtgcgccgccggctatggcgccgaaagcgcgcctggcagcgtacaacgtgtgctgggtgggcggctgcttcgactccgacatcctcgccgccttcgacgccgccgtcgccgacggcgtcgatgtggtctctctcagcgtcggtggcgttgtcgtgccgtactacctggacgccattgccattggggcgttcggcgccaccgaagccggtatcgtcgtctctgcttcggccggcaacggtggtcccggcgggctcacggtgaccaatgtggcgccctggatggccaccgtcggggctggctccatggaccgcgcgttcccggctaacgtgcggctcggcgacgggcaggtgctcgacggcgtgagcgtgtacgggggacccgcgctcgagtccggcaagctgtacgaactggtgtacgctggggcgagcggcgggggtgcctcgtccgcgtccgacggctactcggcgtcgatgtgcctggacggctcgctggacccagccgcggtgcgcggcaagatcgtggtgtgcgaccgcggcgtgaactcgcgcgccgccaagggcgacgtggtccgccgcgcggggggcgtcgggatggtgttagctaacggggcgttcgacggcgagggccttgtcgccgactgccacgtcctgccggcgaccgccgtcggc

SEQ ID NO: 121662 - DNA, 294 bp, Zea mays
  unsure (1)..(294): unsure at all n locations
  Clone ID: MRT4577_42432C.1
ggttnnccagcttcccgagggaaaggccggcggggctttatttttattcctgggagcaaacagagtacaaacagtgggggctttcggcgacaataatgacccaatggggggttggaacataggggaggaatcccttaaacaatcaatttgccaaaaacaggcggggttccttatgggtgcagtgcaggcgtgcacccggcaacctttacataaaagcagcccgcccatcggcagatgagtcgattaggccggaggctggccaaaaaaaaacttccgggtctttggcaatttttt

SEQ ID NO: 121663 - DNA, 1183 bp, Zea mays
  Clone ID: MRT4577_42433C.1
tttcgccctattccgtgttcaagggcttaaacattattgtgtgcaggccattcaagttgatctggttgcaagttcacttaattcctcgcactgttatattttgcaagacaacggtttgttccttacttggttaggaggcctgtcttcaccaagcgatcataatatacttgacatgatcatgagcaagttgtgtccaatggaacagtccttgctagtcagagaaggctctgaaccagatcacttctggaaagctttgggaggacgatcggagtactcgaaagaaaagcgtgtgaaaggttggcctgcagatccacatctgtatgcttgtagatttgaacaaggtttactcaaggtcaaggaggtattcagcttctgtaaggatgacctggcaactgaagagacgttgattctggactgcaatgaagaaatctacgtctgggttggcctacactcagatattacatccaaggagcaagctctcaatgttggcaagatgttccttaaggatgctgttcacggtggaaggtcaatggaaacgacagtgtatgctgtcacagaaggggacgagcctggatttttcaccagcttcttcgactgggacaattcgaagcaatcatatatggttggcaactcatttgagaggaagctcgccgtcctgaaaggggtctccccaaaactagagacaccggacagaagcctgcgcaggccgtctaggaggcccggggtatcgtcggagccgaccacgccggagcaccagcaaccgaccgcgagaagggccttcggctccacgtctgccgggcggtttgccagggagcgctctccggctgttgcaccgccaacgttgtcgccatctcccaaaagccgctcgtcgtcgtcgacgcccaccacggtggcacgacggctctttcctgcctcggtgcacgcatcggaggctgtgcacgtggtctccacggcgacagctcgacgacggtgagaggagaggtggctgtgtatgcatgcgtaatcgtgcacgattgaaatcatgtagagttgtactagacgatggatttatatgtccggcctacgtacgtgtctgtatacagaatttacctctcaaactgtcaaaccccgaaagtttcttgttttggagaacttgggagtgtgaatagtcgctactcgctactaataaatacgactgtcgttc

SEQ ID NO: 121664 - DNA, 570 bp, Zea mays
  Clone ID: MRT4577_42434C.1
gaaaattggggaacttgcatagccaatagcctcagggccaaaattacaatgctaaaggcaggcaagctctccgttctaaaggccgagagatcagatcttctcggcaaattctagatggagcctcagttctaataaaatgaccaatgccaccgaatgtccaaatgctggaatataacttacaaaaccagcaaaccgatggctgcggtggtgaaaactgcaacaattgacattattgatcagctaccctggctcgcggagcacagcgccggattcaggggtagtggacgtcaactggtgcagccagcacaaccatctcagccatgaatatgtcatcgttgaaggaagatgatgagccagccgagctgaggggggacacagttgttgtgatgttctcttcctcttcagtaaggacttcctgatccctgcagttcctactgcagaatgccttctcaccacgataaatgcaggagtcattgccatccagcttcttcttgcaagagacgcaggagctcaagaactcctcgccaggctcgccgtcatcgaagcacttgaccagccagtaagactctg

SEQ ID NO: 121665 - DNA, 717 bp, Zea mays
  Clone ID: MRT4577_42435C.1
ccggccaaagaacccgagtccctaaagcgatgcttccatttcctcaaccagacaagccgtagttttgccgccgtcattctcgagttgcacccagatcttttagtgcccgtcacactgttctacctaatcctgcgtggtctcgataccattgaggatgacatgaccattcccttggccaagaaggagcctctcctacgcaacttccaggacatcttggaacagggtggctggacatttacggaaaatggccccaacgagaaggacaggcagcttctggtcgagttcaacgtggtcattgaagaattcaaaaagatcaagcccgcctacaaggatatcatcaaggacatcactacgcgcatgggcaacggaatggcagactacgccaacaacgctgagttcaatgctggagtcaagacggtcaaagaatacgagctgtactgccactatgtcgcgggtctggttggtgagggatgcacacgtctcttcgttgaggctggactggcaaatgccgccctgctcaagaggccagaactcatggagtccatgggccagttcctccagcaggtcaacatcactcgtgacatcagggaggacttcgatgacggcccgcgattctggcccaaggagatctggtctaagcacgtggaccactttgaggaacctgttcagccggaaacaaggagaaagcactgaacgctagtttcggaatgattctga

SEQ ID NO: 121666 - DNA, 499 bp, Zea mays
  Clone ID: MRT4577_42436C.1
cgagctcatcaacatagtaagcacaatatagtcccaacagtggcagccaccaatatttctaccatccttgatgctccttcggtcttcccgcactcgctgctatcgcgaccattttcacgtaatggtctaaaactcctatatcttcccttattaccccggagctctcactatagggccgttcggtatttgaaaacctaattcttaaatgctacatgatgcaataggcaatcgcagctggcatcttacctttatcaccattgttcatcgaagaatcatcagccctattacaataattaactgtggtgaaattatagtgacatacataagggcacaacaattacaacaatttgagctagaaaccttgctggctaaactcagcatcaaaagtttcgtcaattcaaccaaatagggtcattgaactatgcttcttatttgcaacaacaataaatattattaaggaaactaccagatgactgagacgagtaatttcttccattaa

SEQ ID NO: 121667 - DNA, 353 bp, Zea mays
  Clone ID: MRT4577_42437C.1
ggaactaactcaaacatattaattcatctgggtttcgaacctgcaaatatgtgaagaacacactcaaaccctgtccattggaaccctaccctggcctgaatactaaaagggcgcctttgtaccgttaccacgtgggtcgaacaatagcagcatcaattaatgcatcatatcagtcaggcgttggcctccacgtcggcgtcgccctttttgacgggctggaaccgggcgtgctggtacaggacggaatgcaactcgacgggggtggcggacagggacttgatgatgctcccgaacccggggcgcggagacaacaggggcccgcccggcggcggtttgggcaggctctgcccctt

SEQ ID NO: 121668 - DNA, 552 bp, Zea mays
  unsure (1)..(552): unsure at all n locations
  Clone ID: MRT4577_42438C.1
ctccagccattcttatcttgcacgcagaagccttatcctccatcttgtcctggagttctgcgctgggatcttcagcatgctactcgttttccctcgctagcaccacgtctagctcacctcggcagtcacgcccagaccttcagccatggcgctcgtcgaacctcctctcagcgctgctcttccctgccggtgttcgccgcgcgctcagcttcccctcgtccatgccgcggcatcctgctcgctctccctcccatggagtcttgccgagctcgcgtagccgcccatccctctgattccccatctcgccgcgcccctatccatctcgccgcggctgctgctttggtgttgcccctgcgcgcgccctcctcggtctctgctcatccggcgatgttgagtctgtgcgcgtgccgctcgtccctcctatggccgctttgagatatactgtcgaccctccagcgtggtctcctctcgcgaatcgcgcttaaaaatttcgccgtacgccatgataagcttgccgtagaacctggctagccgctgcatgtgcttgtgncc

SEQ ID NO: 121669 - DNA, 618 bp, Zea mays
  Clone ID: MRT4577_42439C.1
aattccaacgtctcgcatcttccactgtgactgactcccgaccgatctccgccggagcctgcacgacgccgtcgccgatgtggttcgccggccgggcgagcgccaccgcgccgctccccctcctcctgctgctcctggtcgccggcgctgccgccaccgaccagatcttcaccacctcaggtgtgcctttcgggaagaactcgcgcgagccgaggtaccgcgtggagttccatccagtcgattcgccctaccacccggagaatggccaggagtctgaaccaatgaaggaccacgaggggagacaatacacctgctacctaccagtggaagaaaccaagaccatgaagtcgattgtcccacagaatgcaaccaatgttataatagaaagcgaacggaaagttaagccaaaggagccagatgaactgctggaggttctcaaagaccagtgcttctacaggcatgaaggttggtggtcttatgagttctgctattatggaaaaatacgacaggttcatgtagaaaatgagaaggttatccaagagtatgttctaggtgaatatgaacctgatgcaaccgatgcttaccatgacaatcacacctccgagtctgctgatgagg

SEQ ID NO: 121670 - DNA, 496 bp, Zea mays
  Clone ID: MRT4577_4243C.1
tgggtacccttcgggccggccgtgaaactctacatccggccgcctttacagtgggggaccggcgcgctgggcaggttgacggaggtaggagggagccttgagtatgattgggatccagtaccactcccacacagacatactggacccaagcagtggactgttgagccaggtggagcctcacgagggaggctcactaagattgattgagtctgggtcactgtccggttctagaacccacgaaacctttggcgccagctacattaatgaatccgacatctcctgctaagaggggaaggtgtgtcttggcgctgttccgcttgctgtctcactggctggcctcactggcgacggtcgcgttctctagcgctttctgctcactcagaggatgaaacactgcttattacacgatgcggcgataaccgactacagaatatggctgcaaatcgccaacaaagggccaggaaccacacaaaggccatggtagaggccctattgc

SEQ ID NO: 121671 - DNA, 223 bp, Zea mays
  Clone ID: MRT4577_42440C.1
tcgcccacgcgttcgcggacgcgtgggtgcagtcctaggacccgctctgcacgctgcgtgaggtctttgagggcgtgcaccggcgtatcagctttaaagtgaaaatgaatgtcttgacgtacctctttaactcgatggatagtacaaggacaccttttacaaccttcatcggagttgtcttcgagcacgccaacgacagggccattatatttttcagctttca

SEQ ID NO: 121672 - DNA, 629 bp, Zea mays
  unsure (1)..(629): unsure at all n locations
  Clone ID: MRT4577_42441C.1
ggctggggggggggtttancagcaaactgtttttcttgaaaaagaaatagactacagacttacagggcaatagtttacccatatgagttcactaacatgatgtgtgattttgacagaaggataacagggcaactggaacatcacactggatatcggtacaaggtaataatggaacctctgtaaagaatcttgaagaagcccatttctggcatcagcatcttcaagcttcctttgcagctctcctatttccccctgagattcagctagttgtttcatgattgcatcattttgctgcctttcagatctcaacgaagtttccagtgctgccatattttcttcatgtctctgtaaagaatcttgaagaagcccatttctggcatcagcatcttcaagcttcctttgcagctctcctatttccccctgagattcagctagttgtttcatgattgcatcattttgctgcctttcagatctcaacgaagtttccagtgctgccatattttcttcatgtctctgtaaagaatcttgaagaagcccatatctggcatcagcatcttcaagcttcctttgcagctctcctatttccccctgagattcagctagttgtttcatgattgcatcattttgct

SEQ ID NO: 121673 - DNA, 549 bp, Zea mays
  unsure (1)..(549): unsure at all n locations
  Clone ID: MRT4577_42442C.1
tccaccagcaagtttgtattgtcatctccacgtcactagaacacagtgataggtgggctttaagctttgacattctcgatggtggacctttccttgctagcataacgaatgatcgccttgctaacctccttgccagtccccgcggggctctcctcttcacgtttatgtgttgacctgtcctcggcaagaccgttgtgccactgaaagctaagggcatgtttgtttcagcttatagattatataatctggattataatctaaattatataatctagactacaatctagatatattataatctacatgtagttgtttgatagtttagattatacaaatgtagattattcacaaagacaacaatactcttgtttgtttatttgaggtgagaaaagaatgattgtatatattgtaatttctatttacataaccatgnggtagtgagtcttttgccaaaataatctcaaataagctactcttacagagattatcataatctaggctttagattatataatctgaacccataatctagttgtttgtttgcctact

SEQ ID NO: 121674 - DNA, 286 bp, Zea mays
  unsure (1)..(286): unsure at all n locations
  Clone ID: MRT4577_42443C.1
cgcccacgagggccgccggtcgtcgtacgtccaagctacatatatatacggggggcaaaaatgagcggcgccagacgagctccagccctcgcggcggcgctgctgctgctggtggcggcggctctggcgtcgccgccggcctctgccgccgcgacgctgcagtgcgcgcaggtggcgcagctcatggcgccctgcacgccctacctgacggncgcgcccgggatgacgccctacggcgtctgctgcaacagcctggccgcgctcagccagctcgccgccgcgcgcg

SEQ ID NO: 121675 - DNA, 660 bp, Zea mays
  Clone ID: MRT4577_42444C.1
ctcctgctggaattttaacatttaacagaaatagcatgagcggtgttctcaactgatgctgacaatcagacccaagtgggtatctgtgtgttgcaaagtgagcatgaaatggccacatacaataaatgcctgggtgaatttgacctcatggacattccacccgccccaagaggcttgcctcagattgaggttacattcgacatcgatgccaatggaatcgtgactgtctcaaccaaagataaggctacgaggaaggatcagaccgatcttcgggtgggctgtctgaggctgacatctagaagatggtgcaagaagctgaactgcgtgcctagaagaatcaggaacggaaaagccctcatcaactaatctaattcttttgtccattattttgctgagaagtccatccctcgataagtgttcccttcatgagtttataacaccaactccaacatgctcactcacctcttttcagtctgttcaaagcattgcttgccaattaacagagtaacgatttattatctgcaaatttaaatcatgttagattcatctaatctaattcgtttgtccattattttgctgagaagtccatccctcgataagtgttcccttcatgagtttaaacaccaactccaacatactcgctcaaaaaaaaaaaaaaaa

SEQ ID NO: 121676 - DNA, 847 bp, Zea mays
  unsure (1)..(847): unsure at all n locations
  Clone ID: MRT4577_42445C.1
ccgctcgtaggcccggccgggtctccaaaattgagacctcggtctgtcagctatgacaatacccggcggcgagcaacggatcctccctgtcccggccgtgctcttcatccgccgcccgggcgcgcctttcggcaacgcgatgcacgagcgcttccgcgtgctggagctgccctcgccggcctcgggcgagcaggcagcggctttcctcgccgccgccgcggcagagccggacccgcctcgcgccgcggtcgtcatgggaggcggcgccgtccgcgcggacgcggcgttcctcgacgccgtcccctcggtccgctgcctcgtcagcacggccgcgggcgttgaccacatcgacctcgccgagtgcgcgcgccgcggcgtcgccgtcgccaactctgggacagtctacgccgccgacgtcgcagaccacgccgtcggcatgctcatcgacgtgcttcgccgcgtgtcggcggcggggcggttcgtacggcgcgggctatggccgctgcaggagggcgagtaccctctcggctccaagctagggggcaagcgtgtgggcatcatcggattggggaacattggttcgctggttgcaaagaggctggaagctttcggctgtgtcatctgctacaattccagaagacgcatggactcagtctcctacagatacttctccaacgttcagcgtcttgcttccgaatcacacgtgctcgttgtcgcatgcgcactgaacaaagagacacgccacattgtgaatgaggatgtcctggaggccctgcggaacgatggggtcgacataaacatcggccgaggcgctagcatcgacgaagcggncttaatcagcgcgctg

SEQ ID NO: 121677 - DNA, 290 bp, Zea mays
  Clone ID: MRT4577_42446C.1
atcgaggatcctgagaagttcacggtcctgggcaacgagatggactgcgtactaacccataaatttgtgagtcgagttacactgcaacagtgcacgctgactagcagcaagtgagccggctcgtgtgggcaatggcctggcccgcaactagcactacagctcgccttcgtgcagtgcagtttctatttaaggttcctttgtaccctaggtaccactactaaactgggggatattatgaagggccttgagcatctggattctgcctaataaaaaacatttattttcattgc

SEQ ID NO: 121678 - DNA, 1129 bp, Zea mays
  Clone ID: MRT4577_42447C.1
aacggggagtgccttccaaggcgaccgccccctctcgcgctccatacgtccatccgtcggcccagagccacaagataacgcagccaagaacaagagacaccgccgagcgagcgaggcggggagaagcaggtccaggaccaggagaaaggaaaggaagcccagctctctctagcctggagccgagaagccgagggagcgagggagcagcaaggcatggaggagcccgttccggctgatccccccaggattttctggaagtcaaggagatcagccaatggccggagcctgcaacaagagcctgacaaagacgctaccgaggaaactaacgagcaggctcaagaggaacccatgaagaccgacgacgcaacggatacagcagcagcagcagcagcagctacagctgagccgtacccgaaagctaacctatccgagaagcggaaggctctcttcgagcctctcgagccgatcaacggcaagcgcggcgctgccgagacgctgctcccaccgccggactttgagcccgcgtcgtaccccaaggggtggctggtgggcaagaaacgcaagctcgtcaacgtagacgtcgtggagagcatgcggaggattgcgatccaggaaatgaacagaaaggaccgtgagatcaatgggctgaacgagcagctagaggaagactcccgcgtgctggagcttctgcagaagcagctggctgacgagcgcaggaagcggacagagatcgagaaggagaactccatgctccatgagcaggtcaccatgctgatgaacatgctcgacgagaacgagggtttcgacgaggacggagaggccccgccgcccgattccttcgattaagcgttgttacagtactatatccgttttctttttccgtcagtgtgaaatcatacgtctctaggtgctggtttcagagtatccgagagatatgtgctagctgtgtagtaggatttcattggtgatcgtattccattacattacatggctttggcttctgtagataaagggtgcattgcatgtctgttgtaccgtactgtacctactccttttctaggcttcaaaagtgtatgtgagaaactagcaacatgttatatttgaatcgaagtgtatgtacatgttacgt

SEQ ID NO: 121679 - DNA, 441 bp, Zea mays
  unsure (1)..(441): unsure at all n locations
  Clone ID: MRT4577_42448C.1
cccacgcgtccggtccaggaccaggataaaggaaaaggaagcccagctctctctagcctggagccgagaagccgagggggcgaaggagcagcaaggcatggaggagcccgttccggctgatccccccaggattttctggaagtcaaggagttcaggttcaggaccgtgagatcaatgggctgaacgagcagctagaggaagactcccgcgtgctggagcttctgcagaagcagctggctgacgagcgcaggaagcggacagagatcgagaaggagaactccatgctccatgagcaggtcaccatgctgatgaacatgctcgacgagaacgagggtttcgacgaggacggagaggccccgccgcccgattccttcgattaagcgttgttacagtactatantccgtttctttttcccgtcagtgtgaaatcatacgtctcta

SEQ ID NO: 121680 - DNA, 1326 bp, Zea mays
  Clone ID: MRT4577_42449C.1
cattgggtacctcgaggccggccggggacgagccttccaagaggaccaacggggagtgccttccaaggcgaccgccccctctcgcgctccatacgtccatccgtcggcccagagccacaagataacgcagccaagaacaagagacaccgccgagcgagcgaggcggggagaagcaggtccaggaccaggagaaaggaaaggaagcccagctctctctagcctggagccgagaagccgagggagcgagggagcagcaaggcatggaggagcccgttccggctgatccccccaggattttctggaagtcaaggagatcagccaatggccggagcctgcaacaagagcctgacaaagacgctaccgaggaaactaacgagcaggctcaagaggaacccatgaagaccgacgacgcaacggatacagcagcagcagcagcagcagctacagctgagccgtacccgaaagctaacctatccgagaagcggaaggctctcttcgagcctctcgagccgatcaacggcaagcgcggcgctgccgagacgctgctcccaccgccggactttgagcccgcgtcgtaccccaaggggtggctggtgggcaagaaacgcaagctcgtcaacgtagacgtcgtggagagcatgcggaggatcgcgatccaggaaatgaacagaaaggttcatgcgtaatcacatctttctagtggtcaggcaatgctgtttcttcactcgatcgtaaatgcatcgatgtgttcagtccaaccgtgagatcaatgggctgaacgagcagctagaggaagactcccgcgtgctggagcttctgcagaagcagctggctgacgagcgcaggaagcgggcagagatcgagaaggagaactccatgctccatgagcaggtcaccatgctgatgaacatgctcgacgagaacgagggtttcgacgaggacggagaggccccgccgcccgattccttcgattaagcgttgttacagtactatatccgttttctttttccgtcagtgtgaaatcatacgtctctaggtgctggtttcagagtatccgagagatatgtgctagctgtgtagtaggatttcattggtgatcgtattccattacattacatggctttggcttctgtagataaagggtgcattgcatgtctgttgtaccgtactgtacctactccttttctaggcttcaaaagtgtatgtgagaaactagcaacatgttatatttgaatcgaagtgtatgtacatgttacggaaaaaaaaaaaaaaaaaagcgggcaaaaaaagttttgttgctgaacatgcatgcgtgcatcaacgctg

SEQ ID NO: 121681 - DNA, 361 bp, Zea mays
  unsure (1)..(361): unsure at all n locations
  Clone ID: MRT4577_4244C.1
gcggggtgtggggggttttttttacatcaactcttccgtggtgatgtgaattaatctacccgtgactggggctacataactgagaccagtgatcagtctacaaatggggggtgagagagtctatatttntgtgctcaacaaatgtgcatgggaaacaggggggggggtacatcccagatttcacctctggggtcctctgggttggggatatgtgcttnggatatggggctncgccgggggggtggagggggggggctncatttgcgggggcactggtcgggtgagacttgcgcaggaggagatcccgcgctaccaacggggcgatacagggttncggggtctgtagctgcgccactggtta

SEQ ID NO: 121682 - DNA, 432 bp, Zea mays
  Clone ID: MRT4577_42450C.1
gggaacaacttcccctcccccaaaaagaaaagggaaaagggacttcccgggacgggggggggggaaaaccccccccgtccccggaaaccaaaaacttaaccggaccattaaatggggaggaacaacgggcggggtttaaaaagggcagggacctaacaaacccgagctgaaaactcccccttactaggaattcctggtgaaaaaccaaaaatggcaaggatctatccccaaaacaaaaaaatttccaaaaaaaacccgggcctgggggcaaagggtaaaaacccgggggaaacaaaaagggagggggcgggcggcccaaaaaatttaagggcataaaaaacctgttatggcctaaaacttccggggccaaaacggccatagcccctttaaaaagctaactccggggggagggcccccaataactagttaaaa

SEQ ID NO: 121683 - DNA, 457 bp, Zea mays
  Clone ID: MRT4577_42451C.1
cccacgcgtgcgtacagagtggtgtgtaggaagatctgataataactcagaaagagagatggatctaactaggacatctcgtgcaacagcttagaaagatgcctgctgacaaatatcaaagactgaactcatacctcatgaacttggatgatagcattgaacatgatcaatctcgtgaataggactgtaactctgacctaattacttccgaacaaggagatgcgtgaccaaattggtcttaccaaacgctctggatttgttaatatctcaactcgtgaagaaacatactaagctttaaccgaaaagaatggcaaaatagatatctggaaaaccattgtatgtggcatctgctcagtgcattgaagataggacagcgatgttgcaagcacagttttctcatatgcaccctgctgtaccaatgacacccactcttaccctacgccttgcaatggactct

SEQ ID NO: 121684 - DNA, 130 bp, Zea mays
  Clone ID: MRT4577_42452C.1
gaattctgctggtgggcctttacgacccctttttttagaaacccggggaggatctctcttgcaggggaccttaagatctcacagctttttaccctctagcaactgcacatatactaagtatatggtgtgg

SEQ ID NO: 121685 - DNA, 272 bp, Zea mays
  Clone ID: MRT4577_42453C.1
ggttgggtaaatatttttttttttaaacctctaaacactcggaaatcagataaactttgcaggccaccgaaggagccatcagtccccgtttattaaacctataaataaaggggcccggtcaaggcccaccccaaccaatggccctaaccctaaggccaaaaaaaaggcgggaccataggggagcctggggcttttcggaaaatgggggaaaacccaaaacccccataacccattcggaagggggggaccccgggctaaaagaggaaaatttt

SEQ ID NO: 121686 - DNA, 478 bp, Zea mays
  Clone ID: MRT4577_42454C.1
atataaagagatcgattggtgacatgacatggacctattctacacggtttagacgtaaaggccggcaacgtgctttctctgtccgccttaggcgaggactgaatgacaacacgaagaacggcgaacaatgccaagcaagcggaggagtccggaagcccgagggactgaccggaccgcgtgctgtacctactcccaactgccgacaagccaccaagctacctgaccggcgattgcccgagggagtacaggtggaacaccgttgtgctgtcggccgacccgtagacattcgacaagatccgtatgctgtacgtgatccactcccgctgggccatgctgggtgcgctagtttgcgcattccctgaggtgctggcacgacacgagcatgagataggcaaagtcgggtggctcaaggtctgctcccagatcttgaatgatggcgacctggactacctgagtatccccagcctcatgcacactc

SEQ ID NO: 121687 - DNA, 293 bp, Zea mays
  Clone ID: MRT4577_42455C.1
gctagcatttcctgccaatccatcccgcctgcaaacccgaactccaattcgcccctcatcgatggcgccctatgccgagttgaatcccgcggctaataagccggcggatgaagtacccgctgccgagatagcgccggccgggaagatgcccaaggcggattagcgtgtcccaacaggctaattcgccagcaaggagggctggcagggtaataggggccaggataagggctagtattacggggagacctacaagttctacattttcaaagagcttgagcaggggcacccaggca

SEQ ID NO: 121688 - DNA, 231 bp, Zea mays
  Clone ID: MRT4577_42456C.1
gtacgtaagctcggaattcggctcgagctagccagagagagagatagagacccgtcggctatgcgtcgctgtaggagatcgtttggggcaatctcgccaacttatgattctaaaagaacatgttaacaaagcaagagacactaaacaagacctgctactagcgggggctaaggcacccgaaagatcaaggactgtctaagccaccgtgtaagagcaggaaaggggtgaaag

SEQ ID NO: 121689 - DNA, 2244 bp, Zea mays
  Clone ID: MRT4577_42457C.1
tgtacctgcgcctcaagcatcaaactttggtgttccaacaacacagcaaaatgtcacaaatgcaccgcaggctgcctctaatccggagaatgctcagggaaataattttaatcctgtgcagcatggttcaatgggtactgcattgcaacagggaagcactggtcccatgcagggtgcattgaatgcacagcatcagtccaatagtaacatgatatccaacaatgcaatgagtacaatgcagactaataccaatgccatgcaagcaaacgtgaattcattgcagcagctaaagcaacatcaggagcatcagatgatgcaaaatcagcaaatgaagcagcgtcagcagatgctgcagcagatgcagcaaaagaaaatacttcaacaacagctcccaatacaacaactacagaaacaacagcagcaagggccgattcaggttcaacaacttcattctggaaatgatgtgaatgagctaaaggtcaggcaaggagctgcaatcaaatctggaatgtatcaaccgctgaaccagcgtaactattatcagcagataaaacggggggatgtctttccaatttcttctccgcaaaacctccaagcatcgtccccacaaatttcacactattctcatgttgatcagcacagtctgttgcaatctcaagtgaaaaccgggacaccgttgcattcagctaactcaccatttgtcccatctccatctcctcctgttgccccatcaccggtcccactggattcagataaaccactctccaacctatcttcactcactagtgctgggcaggctggacatcagcaaacatcccttgcacctctaacacaatctatagctgttaacacaccaggtatatcagcgtcacccttgcttgcagaattcacaagtgctgatggaggtcaggttagcgtaccaactcaagttccaacaaaatcaagcgcagcagaaaggcctctcgatcgcttgcttaaagcattgagaacaacacagcctgagtcccttagtgctgcagttagcgatattggatctgtcgtgagtatgattgacaggattgctggatcagcgcctggtaatggttccagagctgctgtgggtgaagatcttgtcgctatgacaaagtgccgcttgcaagccaggaacttcataacccatgatgggagtggtgcatcaaagagaatgaagcgggacacaggtgctatgcctcttaatgtgtcatccgctggaagtttgaatgacagcttgaagcaatcatatactgttggcactccagagctacaatcaactgcaacctcacgtgtcaagtgtcaaagggctgaggtaaaccatgttctgttagaggagattcaggagataaacaaacagcttatagatacagagctccatgtctctgaggatgatgctgagtccttcactacatctgatatggccgaagggacagtcattaaatgcacattcactgctgttgctgttagccccagcttgaaatccatgtttgcttcagcgcagatgagtccaattttgccgttgaggttgcttgttcctggtagctacccaaaatgctccccggtgcttctagacaagtttcctgatgaacaatgcaggaactcggatgacctgtctacgaaggccaagtcaaagttcagtgtgttgctccggggtctagctgagcccatgtcattgcgagaaatcgcaaggacgtgggatgcttgcgcccggaaagtgattgcagagtatgcccagcaaactggaggaggcagtttcagctcgagctatggttgctgggaaagctgcgttggcgcttcataagtttattgtatctattactccgtagtatatttattattctttattacactaagcatttatgtgttgagcaaaagaaaataacagtttatcttccttttggtatcgagtcactgttagcttgataaataagatcgtgtacagtacagtgtatggagcaagcttgggtgcttcagcccggttaatatttactatcttgtatgcttggcctcctcaaaaaaaaaaaaaaaaaaaaaaaaaaaaaaaaaaaaaaaaaaaaaaaaaaaaaaaaaaaaaaaaaaaaaaaaaaaaaaaaaaaaaaaaaaaaaaaaggggaaggcgcttaaaaggaacaaagtttactcccccgtgcatgccacataataaatttaatatagtgtaacctaaaacaaaataattggccaaggttttaaaacgtaaaaactgggaaaacc

SEQ ID NO: 121690 - DNA, 279 bp, Zea mays
  Clone ID: MRT4577_42458C.1
gcagctactcttctcagctatctcagagtcatgcagaatgggggcccaagaggagaaaaaaaaattcttatcagcaaagaatgaggggctacggagcgatttgagggaacacagttctgaagatctacaggcacagactctttggcagataagataaaagaacccaacgtgcttactacaaatagcagacaggggtgtcgcccttcatgtacaggtcaattttccagagagctggctccgattggaggaagttctgagacatgctgtagccaattttga

SEQ ID NO: 121691 - DNA, 337 bp, Zea mays
  Clone ID: MRT4577_42459C.1
atagaatgttgtggaatcagcgcggccagtttcctagaaagagcataataagatgtttagaaaagaaaaaaaaatgggaagggtatgcgggaatttgccatggaatatacttttttgtattttactgcactttgtggcccgatactatgaaccacctttaaaagacccacagcttgcatgaatccaggcgatatgtcaagtcacattcctttaagctataggctctcacctttgaacttcatgtgcttgaacaaagctcataccctctcaacgtcacttttaacaagacccactaaccatgccattgacgcgacaacctttactctcacggaggaag

SEQ ID NO: 121692 - DNA, 859 bp, Zea mays
  unsure (1)..(859): unsure at all n locations
  Clone ID: MRT4577_4245C.1
gggtacctcgaggccggccgggccgggtcttaatgccggagcttaccaccgagggatgcatggcgtgaccatggctgtgaggcgagaaggaagaagacatgtgtgccgttcggtccatgttcgacggtcctgattatgggagcaaacggtttcagattgattcatttgggccattagatgcgagctgaacgatccacgttagacctctgttcataacctttgaccatcgatccaaatctgatggcctggttcgctcaccccacagatcttgtgcgcccacggtcgtgtagcccatcatgtggccggactctatcaatgagatcacagcatgtcgcctataatccgtaaaatattattttactcaatatatttgcgttatagatccatttcaaccgttacaagtgcgttaagtttgtaataatatcatctacgtgttagaaacattatttgtcatgaaacgtttttgattgattgattgattaattaattaattattcatccgatgattattaaaatggcgatttagttaaaactaagtcatagtttaaatttgtgcttttataaatacctgttaatgtggttaatgcctactctaatgttttttaaacttatttagtataaacatgatatattttagtggattctcgtgtgttgcgctcggaatcgtcacgctgttcgcgcatgttgccgcgcatcgttcacacgtattacgtgctgtccgagcctgatattanattgtttcgtcatattattcatgtcagataattaatntacttgcttagttgtcagccattaaaataacaattcaatcgactcacatttataatttaaatttatatttataaatgcatgttacatg

SEQ ID NO: 121693 - DNA, 254 bp, Zea mays
  Clone ID: MRT4577_42460C.1
acttcacattataaaccatttcattaaggagagcttttttttcaacacgggagacatcaacatactgcttcctatatccaacttcctaaacattataacataaatctataaccatttacaatctcttcaataactatcatcaaccataactcctcaaccttacatatctttcgaaaatataaaatgtaatattttctaaaaccataatttcgtacattcaatcaattttcaaatcaataacttattctttctcc

SEQ ID NO: 121694 - DNA, 3443 bp, Zea mays
  Clone ID: MRT4577_42461C.1
gtcaacacagatgcaatcttcacagcagcccatgatgcaaatgtcatctggtcttcagcctgggcagactgccattccacaaactcagtccatgacgatgcattcagctacacaaagtggtattcaacaaaacccattgaattcagtacaacaatctgtgcaaccattactccatcagcctacacaatctgtagtgaggcagcagcaacatccacagtccatgcaccagcagtcttctctgcagcaaactcagccaactcaacagcccaacattcctttgcaacaacaacaaccacaattaatgaaccagcagtcaaatttacagcaaaatcagttaatgaatcaacagagtgcaaagttcgagacgcaacagcaacaaaggctgccagttcagtcaaataatcttttgaatatgcagcaaacacagcagattcgcaaagtgctctctgagtatgcccagcagccacgaggaggcagtttccaaggaaatatgtcaagtctacatcagcagcagcatcagcaaaatcagcagcagcagcagcttctcggaactgggccaaatgcccgtatgtcgagtttaatacagcaaaaatcagtgtgtctgctggaagctccatccttttgctattgggtcaatgttggctttataacctcggtctgtgtacagccaagtgtatccatctcagcaacttatgatgtcgcagttccagtctcagcctaatcaaatgcagcaacaattgggaatgcaacaaaggctccaaacttcagctggcatgctcttacaacaaaataacattgatcaaaagcaatatgttcaggcacagaggggccttcaagaagcacccagtacatctgtggattccactgctcaaactggtcatccaggcataggtgatttgcaagaggagttatatcaaatgattaagagtttaaaggaccaatactttgtggaattgaatgaattgtacaataaggtatctatcaagatacaacagattgacaaccaaatgcctgctcaaaagtcagcagagcagtatgaaaagatgaagggctttaaaggaatgctggagcgcactttgcatttcctgcaagttaacaagagcaacattcatccaggtttgagggaaaaaatccccatttacgagaggcaaattctcagtatcctaagttcacaaagaaggaaacctgtgcaggcacctgggcagcaaacgtttcagcaatctagtgggcaagctcctagctctaacatttcacagcaacttcagacttcccaaggtttgcagcagcatgatagtcatactagtcagatgcctcaagcaagtttaccaagtatgaacacaggagtacaaacctctggagcacctgcgcctcaaggaacaaactttggtgttccaacaacacagcaaaatgtcacaaatgcaccacaggctggctctaatttggagaatgctcagggaaataattttaatcatgtgcagcatggttcaatgggtgctgctttgcaacaggaaaggactggtcccatgcagggtgcattgaatgcacagcagcagtccagtagcaacatgatatccaacaatgcaatgagtacaatgcagactaataacaatgcaaatgcgaattcattgcagcagttaaagcagcaacgtcaggagcatcaaatgatgcaaagtcagcaaatgaagcagcgccagcagatgatgcaacagatacaacaaaagcaaacgcttcaaccgcagctcccaatacagcaactaaagaaacaacagcagcaagggcagatgcagtttccacagcttcattctggaaatgatgtgaatgagctaaaggttaggcaaggagctgcaatcaaatctggaatgtatcaacagctgagccagcgtaactattatcagcagataaaacagggtggtgtctttccaatttcttctccgcaaaccctccaaacatcgtccccacaaatttcacaccattctcctcaggttgatcagcacagtctgttgcaatctcaagtcaaaaccgggacaccattgcattcagctaactcaccatttgtcccatctccatcccctcctgtggccccatcaccgatgccaatggattcggataaaccactatccaacttatcttcagttactagtgctgggcaggctggacatcagcaaacatctcttgcacctcaaacacaatctatagccgttaacacaccaggtatatcagcgtcacccttgcttgcagaattcacaagtgctgatggaagtccggccaatgtaccaactcaagttccagccaaatcaagcgcagcagaaaggcctctggaccgtttgcttaaagcattgcgaacaacacagcgtgagtccctaagtgctgcagtcagcgatattggatctgtcgtgagtatgattgacaggattgctggatcagcgcctggtaatggttctagagctgctgtaggagaagatcttgtcgctatgacaaagtgccgcttgcaagccaggaacttcataactcatgacgggagtggtgcatcaaagaaaatgaagcgggacacgagtgctatgcctcttaatgtgtcatcagctggaagcgtgaatgatagcttgaagcaatcatatggtgttggtactccagagctacaatcaactgcaacctcacgtgtcaagtggcaaagggctgaggtaaaccatgctctgatggaggagattcaggagataaaccaacagcttatagatacagagctccatgtctctgaggatgatgctgagtccttcactacatctgaggggggcaaagggacggtcattagatgcacattcactgctgttgctgtttgccccagcttgaaatccgtgtttgcgtcagcgcagatgagtccaattttgccgttgaggttgcttgttcctgctagctacccgaaatgctccccggtgcttctagacaagtttcctgatgaacaatgcaggaactcagacgacctgtctaccaaggccaagacaaagttcagcgtattgctccggggtctagctgagcccatgtcactgcgagaaatcgcaaggacatgggatgcttgcgctcgcaaagtgatcacagagtatgcccagcaaaccggaggaggcagtttcagctcgagctatggttgctgggaaagctgcgtaggcgcttgttaattgcttatattgtatctattattattattataagtatttatgtgtcgagtaaaatagaaaaaaaaacagtgtgtctgctgtatactccatccttttgctattgggtcaatgttggcttgataaatatggtcgtgtacagtacagtgtatgcgtcagtccggttagtatcatgtatgctttgcctctatttacagaacttggttttataactttttttcgtcaccttttatatctaaatattttttaataaaaaattttttcaaaaaaaaaaaaaaa

SEQ ID NO: 121695 - DNA, 262 bp, Zea mays
  unsure (1)..(262): unsure at all n locations
  Clone ID: MRT4577_42462C.1
cccagcgtctcgtcgtgctcctcccttcccctcgccgctgcgcccatgtcctgaaccgacccccttccccttcgctgcgtcgccgcctccaacccgctcgtagccaccgcctccttcctacagcaccacctctcccgtttggcttcccacctgaacgtcccgcgccccgccctcgccgccgcggctgcgcgcactccgggcccccagggcgcctncctatctntcgctctcgcgcccgatgaggtcgngcgcgctcttaccg

SEQ ID NO: 121696 - DNA, 444 bp, Zea mays
  unsure (1)..(444): unsure at all n locations
  Clone ID: MRT4577_42463C.1
agncaaaacatattcattagtcgcaagttaatgactacgtggcgcattcctatcgcctgaccaattgccacaccaagggtcacaaggagcaccatcgcataaggtccagacggatggcatcaaaatgtggctgatcagattttttctctctccttagaggcacgaaccacacaacagggagtgggtctatctttctctctcttcttcaatcttgggaaaaaaacagagaacggcatggggagaaggagaggggatcggccatagggctttaccggcggagggcaggatcatcttgccgcggagccactggctgtttcactggggctgcttgccaccactccgagcgccattgttgtttgcccagaacagagggaaaaggagtcgatcctgctaagaatgatcagagatggagagtggcattgaccaggacttgtacaccacaca

SEQ ID NO: 121697 - DNA, 234 bp, Zea mays
  Clone ID: MRT4577_42464C.1
cctcccactcttcctttccgtttctgctttgattctaggactacgtgccgcgcgtactttctaacttgtcaggccttgatatttgttgaactagcgcctcatcctccaccttcaccactaactctccgaagaccatgcctagatccaatggcaactattctcctcttcttacttctcatcactcacctctttacctcaatactactgccttcttctaagctaattgctctcacc

SEQ ID NO: 121698 - DNA, 522 bp, Zea mays
  Clone ID: MRT4577_42465C.1
gtaccggcgcccccccctcgagtttttttttttttttttttttttttttttttttttttttttttttttttttttttttttttttttttttttttttttttttttttttttgggaaaaaaaaaaaaaaaggattcccaaaaaatttttggggaataccccccggggcgcaaaaatttaaaaggacccggggacccttggggaccggaaaaaaaaaaaccttgtttttccgacaaacaccccagggccaaaggggattaaaagattttttagaccccccgggggttgccaaaaggggacgtttccagtcaccgggccttttgggggtgttttccaacccgaaccccgaagggttgcggggcccctaaaaaaacccaaggggacccatgtaaaattatggccgcagccaaaaaaaacctttttttttcgggggcccttttataaaccagggttttcttttaaacccccgcccggtttggttttttttggggggggggccccttttaaccccaaggggggcccgg

SEQ ID NO: 121699 - DNA, 315 bp, Zea mays
  Clone ID: MRT4577_42466C.1
ggaaaacccggggcgagcgacgcgtgcgcggacgcttgtgccacccacttctctttcataacaacgcctgaggcgccctctctccgcctctactaaaaagcccaggtcgtcttctatccctatgtcggcgagccatgggacactttatttggtatgaaaggatcaatgtccaatcatgattattatcacgagcactataaggaggactgaagacgactatgatcatggatgattctgctgatgacatgttacactaacagctatgggttatggattacgatgcgcgggataatgattatggacaacccaaagaca

SEQ ID NO: 121700 - DNA, 280 bp, Zea mays
  Clone ID: MRT4577_42467C.1
gtcactcataaacatgagtggcagtgtcagagtgagcaatgacctgaatgaacaatcgggatgaaaagaataaagaacataataaataaaaataaaaaaatagataaaacaaataaaataacataaaagataaaaaaactgactaaagcttacgtagttactaaatacctataataaaattatagattcaatatataaaaaaggcggaccattaaacatatatcaattatacgtgcgttcgcatgcaacttcatacgtctataattggtgaagcaaaatc

SEQ ID NO: 121701 - DNA, 424 bp, Zea mays
  unsure (1)..(424): unsure at all n locations
  Clone ID: MRT4577_42468C.1
acaagcagagcagagcagagcagcgtcgtgcgtccgagaagaagacgactcacaagagcagaacgagcaccgatcgatggcagtgatggccggggcggcgtccatggaggtggagcagggacctcccgggcttccggttccatcccaccgaggaggagctcctcggcttctacctctcccgcgtggtccacggcaagcagctccacttcgacatcatcggcagcctcaacatctaccgctgcctcccaaggaggacatggtgatctgcaagatctacaggaaggccacgccactgaaggagctcgagcagagggcctctgccatggaggagatgcagacgcgcatcggcggggctagagcaacatccctggtccaggccgncggctccaccggcgacgactacctgtcgtccgacgacacaagc

SEQ ID NO: 121702 - DNA, 1319 bp, Zea mays
  Clone ID: MRT4577_42469C.1
agaaaatgaaccttgactagtttattatgactttcatgtcagaggccccgtaccaacatcacgcagaaataaaaagagcatatacgagtactcaactcttcttctacttccaacttgctcgtgcagtatatctacaaccgaattcacatctaagctagcatcgcggctcgccgttgcagagctgaaccgcatttcggtgatacagttcaccacttcttccaagttgcgcgtgcaccttcctcacttcagagttcagacttcagtatagcaggtgggctaagggagagaagaagaggtggtcctgccacgggctgcgcagctgaaacgggtcctgcatctgcgtccagtcggcgactccgaggtgcgttggcacctgcagggtgggcaggtcaccgtgcctcaccgccgggccggcaacgctcgcggcatgcagtagggaggacgacgtcgacgctaccgtgaccgtcgtggcgtccgcggcctccgtcttggcctccctgggcgcgccgtagctgtcgcccgacagcgcgggggaggacgaggactgggaactgcaggaagcttgtgtcgtccgacgacaggtagtcgtcgccggtggagccgtcggcctggaccagggatgttgctctagccccgccgatgcgcgtctgcatctcctccatggcagaggccctctgctcgagctccttcagtggcgtggccttcctgtagatcttgcagatcaccatgtcctccttgggaggcggcggcggagcggcgcggccggcggcggagtggtcgggtaggcggtactcgttcatgacccagtccgtcttggtgccgcgcggggcgcgcccctggtagaagacgagcgtcttcttgagcccgatcacccgcttggcgtcgccggagctccggatggccctgtccgaccccgtggccttccagaacccgcgctccgtcgtccggttcggccgcccgccgctgccgccttgcggtcgcgcggcacgaagaagtaccactccctctcgccgatcttcgccatcgcaggaaggtcccaggggtcgtagcggtagatgttgaggctgccgatgatgtcgaagtggagctgcttgccgtggaccacgcgggagaggtagaagccgaggagctcctcctcggtgggatggaaccggaagcccgggaggtcctgctccacctccatggacgccgccccggccatcactgccatcgatcggtgctcgttctgctctcgtgagtcgtcttcttctcggacgcacgacgctgctctgctctgctctgcttgttgccccacgcgtccgcccacgcgtccgcgaaca

SEQ ID NO: 121703 - DNA, 1184 bp, Zea mays
  Clone ID: MRT4577_4246C.1
ggaggccatcttcgtcgacccggccctccgcgggaagtactgcgtctgcttcgacccgctggatggctcctccaacatcgactgtggtgtctcaatcggaacggtgtgtcactgtcactcccggtggtgtttcaaaccttcttaccatcgagatatatatacacgcgcgcgctgctatattcggatctgctctctgcagatctttgggatttacatggtcaaagacaaggacaacgtgaccttggaggatgtgctgcagcctggaacaaacatgcttgctgctggctactgcatgtacgggagttcctgcacgcttgtgctgagcactgggaacggagtcaatggcttcactctggatccttcccttggagagttcattttgactcatccaaatatcaagataccaaggaaagggaagatctattcggtcaacgaagggaacgccaaaaactgggatgtgcccacagccaaattcgtgaagaaatgcaagtatcctgaggatggttcaccgcctagatccttgagatatatcggaagtatggttgctgatgtccatcgcaccttactatacgggggcatatttttgtacccagcagaccagaagagtccaaacgggaaactacgcgttctgtatgaagtcttcccgatgtcattcctgatggaacaagctggaggccaggctttcacaggcaaacaacgggcgcttgaacttgctcccgctaaacttcacgacagatccccagtgttcctcgggagctacgatgacgttgaggagatcaaagcactgtacgcttcaatgtcaaacagcggttgacctttctgcctgaggaaacgagcgagatcaaaagcaccgtacgcttcagagtcaactgcttgatctttatagattgtaataaaataataaaagagtttgtaaaaaaaaacaacaacactgcttgatctttctgcatgaggataaaaagcgcatagtttccccggttggatatatccatcagatatttattatgttgttgccttctacacaaatttaacgtgctttcgtgatcttaatgtgcaactttggattcatgtacggagggagtttatgtgaagacatataacttggtgcaaaaaaaaaaaaaaaaaaaaaaaaaaaaaggggggccccccaattaggggcctcgtcccccgggatttattccggg

SEQ ID NO: 121704 - DNA, 286 bp, Zea mays
  Clone ID: MRT4577_42470C.1
ccggctcgacccactcgtgcgacgcaaccttcacctacaccagaaaaatcttcagttcttttgtccgcgtcagagaagccgggccgatgggggggctccgcaaaggccgcaagggtctgggcaacggcggcactaaacatcacccgaaggggcttcttgacaacatccagggcatcaccaagcctgcgattcggaagctgtcttagatgggtggcctgaatcgcatctcggggctcatctacgaggagacccccggcgttctctaaatctttctcgataacctcat

SEQ ID NO: 121705 - DNA, 418 bp, Zea mays
  unsure (1)..(418): unsure at all n locations
  Clone ID: MRT4577_42471C.1
ggaacacaaaaatttttccttgccgaaggaacccggggacgggaagaaattaacataaggggacaaacgggaaccagggggcgctcacgggcatccaaacacctaaatatccccagggggggccggggggggggggcccctccaccccctaatttggcgggcacaaaggggggggcaaaggcccatgcgttgttgttgacggggtcggcaagggggtcggaaaggttctcaagcgggcccttgccggggacaagggcctggacaaaaaacccgaacatggaaaacagggggggggggccgttcttgagctccttcaccttgagccccggaaaggcctaaaggtcnccggggaggccgagcgggtcaaaactgccgccgggggaaagagggtcaacaacctctccgagcggcccgccgg

SEQ ID NO: 121706 - DNA, 1047 bp, Zea mays
  Clone ID: MRT4577_42472C.1
attgggtacctcgaggccggccgggccatttatttgagtgttactctaaccgggtccttccatggttattagcttctggtggtgtcaatgaacttgcattgagctttgcactgcatctattggatgagactgaggatttgactgtgttagatagaatcagctcacagggcctccttgactcactaatgactgggatgaagcttttagttggagtatgtacagaggagcaacaatcacttattgttcagaaagcacatagcacaatatcttcaatgctctcactcccaatggaattgatgacagaccgtcttttgcctgtagatgagttagttcctttacattctgtttcagaaacagctctcatcagtatgttttcgtcgattataataggccttcggcctcaaacacctgtaccagatatgatggtgatgattaaactctttactgtcttcctactaaatgggaaaatgccagctgcttatgcattagcttctattttcaataaatatctacataatccagagttttctcatgagaatcagatggataaaatacttgatgatattcttgagaggtgtttctcaactgtattagccaacagctgctcaaagacatctcaatcttgtgctggcacttcagatgttaatttctcagatgtttcgtctagaaacaagctttctaagattaatatcttgtctagcttggcttggattggcaaaggattacttatgagaggagacgagaaagtgaaggacatttcaatgtttcttcttaagatcctatgctcagatgagattttgtctacagttccatgccaccaggaagaaccttatggcggtgattcatcagatacttctcttgcaatatctgcagctagtgcattccatgtgatgatgagtgattcaaaaatgtgtctaaataaaaaatttcatgcaagaataaaaccattatacaagcagcgtttcttctcaataatgatgccgatcttcctctccaaaattagagaaacaactgtggtcacgacaaaattggcactataccgagctt

SEQ ID NO: 121707 - DNA, 340 bp, Zea mays
  Clone ID: MRT4577_42473C.1
ggcacggggattgatgcttatgggggcttaaaaactagcttttaaaactcacaacctctgaaccggaccaagggactcccaatacaaatggggcgctcatggggtactcactataccatacttctattcaaatcaagtggaaactcaaccatagattaaaaatctaagctaactggaaaagggttccggttgaacctttggcaaaacaccgagctcggctaactttattacaaaggcgacactgaacacacggaaggtgcaccctgaatggaacgagttcatacacgccgtggttaacttgccgctccaatgtaatggcatttaagcataaccatacccc

SEQ ID NO: 121708 - DNA, 242 bp, Zea mays
  Clone ID: MRT4577_42474C.1
aaaaacaattaaaccggctcggtttaaacattattggaaaaaataccctttttcagggttcctctttttgatttaacagggggagaattaccaaaggggattccacctgataatttctggtcccacgggttttttttgcaaattgggaaaaaaaaatttatcttatggcattcatctatcctatcatcaaaagctttgggttggtactttgggatgtaagataactatttttggtggggggg

SEQ ID NO: 121709 - DNA, 413 bp, Zea mays
  unsure (1)..(413): unsure at all n locations
  Clone ID: MRT4577_42476C.1
cccattcctagaaaaaaaacaaagaacaagctttttttattaaataaaaaaaaaaaaaaaaaaaaaaaaaaaaaaaaaaaaaaaaaaaaaaccctaaaaaaaaaaaaaaaaaaaaaaaaaattttttttctttggccgcaacccccctagggggggggtttgcagatttccctccccctgggggccgttcgggcttggtttgagggggcccaattccccctttagggggtnnttttacaattcattggcccgggttttcaaccggggggattggaaaaaccctgggtgccccccccttaatccctttgaggacggggcccttttcnccggttggggttttggcgaaaggcccccccccngcccccctttcaaaaanttgnccccctgatgggctatggcccccccctttaccg

SEQ ID NO: 121710 - DNA, 169 bp, Zea mays
  Clone ID: MRT4577_42477C.1
gccggccgggccggggtaccgccgcctacagcatcaagctcctctaacaaaccctactcataccccgccgaggccgcagccgcagacgcgactatgccaggcaagtagaaataacaaccgtgtcgcccaaattggaacgctctcacgtgatatgaggtcttacgtccgc

SEQ ID NO: 121711 - DNA, 311 bp, Zea mays
  Clone ID: MRT4577_42478C.1
tcgagcggccgcccgggcaggtacaagctttttttttttttttttttttttttttttttttttttttttttttttttttttttttaacaaaaacaaagccggaccccctttatttatttatttattggtccggatgaacgatccgagacatgcattcattttttgggggggcttattattcagccatgagctagctacaagctcatcccacatgcactatgcttttcgaagttactgggggggcatcgttccgccgccgaaaatccgggggcattcggggaccccgttgatgggggccaggttgcactcgg

SEQ ID NO: 121712 - DNA, 396 bp, Zea mays
  unsure (1)..(396): unsure at all n locations
  Clone ID: MRT4577_42479C.1
tatanttttttttttttttttttttttttttgaganttttttaaaatttttctgggggtacaaacattatagagaactccaacaggggccgtgcaggcaatggtccacagaggtagactgcattactatagcagtagttgcaagcatgcattatttgcctggtaaaaaagctaatgcttggtttaacaaccttgctcgccagatttatacacaaaagacaccattttgcttttggaggggattacggaccttcccccacagtcatgacttatgagccatagatgagaccacactctgggcgcccactgctgggtgggactcccagtggcgggtgacccaatgacttggcttgaagtaacattagccccccaagatggcctggcttccaaaaccatt

SEQ ID NO: 121713 - DNA, 311 bp, Zea mays
  Clone ID: MRT4577_4247C.1
tctttcacctacgccacggcctcggatatgattaactcatttatcgggtggcgcacgctctctagatcgtgtccaaacttccagtctgaaacacttaagctcagactttcaactgcccaaaccccaggtgacggtttgtccgacggcctaaacactccttcttctgaatacacataccacaatcgcgcttagacaacacatcatcgcaactacggtgctcctgccatattgacccatgcactgatgttactcatccgtacgaatgctaagcgttcatacactcttgccattgttcatttaatacagactgt

SEQ ID NO: 121714 - DNA, 1009 bp, Zea mays
  Clone ID: MRT4577_42480C.1
ctagatcgcgagggccgcccttttttttttttttttttttttttttgggttgaaaccaatcattgtcgtgaaaacaatttacaatcccagtctagtgaggcgaccgcacacaacacttagaccacgaaatatgggctcagctcaatgaagtcttcttattaagtctctaccaatgggatgattggaacgacatcgtggacgtacgatcaaatttgtcaaaaccatcgttatgaacctcccctcaaggaagctgtgatgttcgccaccgaaagctaacagaaaagctaatagagagagatctcacgtaacgccaccatttcgggggaatgtaaagcaggtcaccttcctccaatacgcagtacacgaactcaagagctgcaggcttcgggtactctttggtctaaacatactactaactcacctcactagtattgcttagcatgctttctgtgttagggtataggcccacagatgtagaagcaggatagagtctaacatacttccttcccaaaacctgagcaaaaaggttgtgatgtgggtcatgatgcaaaggagttattgtcccatgagggccgaaccaagcattaagtgactggagtttgccaccaccagctgaacagtactcaggaatagcaatatcttcgtggagctcctttatctggtcaaacaattgatgctgcgcaatatatgccaagtttgcagaatcacttgaccacatcctctcaagaaattgagaaaatgtgataagctcctgtttcaactcagtacatgcataattttttccaacctgaacaggaatagtccgatctcccgctacactctctaggtactttatgtccttccactttttccttgcaggccaacccaccagtcatggagttaaagatcaagcccagcaggatgtatgagaactccagtagcatgacttatgtttttatggatctttacctctgaatcagcctttggaacatcagcacttgcaccaaaccgtgcgtccgcccacgcgagc

SEQ ID NO: 121715 - DNA, 370 bp, Zea mays
  Clone ID: MRT4577_42481C.1
ataagaggtttttgtttaagttaaagaacaccgaaacccgccaaggccgggggacaagatgaatatactgaacaccaaagcagcaagggaagcgacgccctccataacggatacaatacacacactgggccattggcaattccaacatgctcatagcaaccagctacaacggggggaacactatgcaatgcacagccaagcccaagggctttatagatttaaggttgaagagtgggagtcgcagcaccgcgtgggagggggcccatccgagaggaccaagccggagctgtgcttgccgtgaactctgaaccggccttagcactaggaggaggcgcttccgccgctgtgccgggagctgatgctgctccag

SEQ ID NO: 121716 - DNA, 756 bp, Zea mays
  unsure (1)..(756): unsure at all n locations
  Clone ID: MRT4577_42482C.1
ttgggaccctcgaggccggccgggaatccagctaggcgggcagtcgggcagacgagcgagccgagagtgagacaaccatggcgtctctggccctccgccccgtcatcccggccaccaccgcttcatccaggaccctcacgatcgccgttggctcccgctcccgccacgctgccacactccaccgtggctttcgctcgcggcgcctcatcacctgcaaggcggagccgagcggcggcaacagcaccctcgagctgggcgcaggggccgcagggctggcatcgagcgcggtcgtggcgtggtccctcgtcgtggcgggtctagtcgggtggtcggtcaccaccaaggtgcgcactggctcgggcctcccggctggcccctacgggctcctcggcgccgctgagggcgttgcctacctcaccatcgcggccattgccgtcgtcttcggcctgcagttcttccagcaggggtccatcccgggtccgctgccatcggagcagtgttttggctgactgtgtattactcattcggttggatgtctgttgccgagtgtgccctgctatatacacataactttctattattttagttagagatttaagtttctgtaattccttctccaaggatggcaaaggctctcttttggatacaaagcagcctgcctcgaggaatcgaaggatttcctgtttttgttttccaaataaatataaatataagagaaccgttgattatactaaaaaaaaaaaaaaaaaagcggnc

SEQ ID NO: 121717 - DNA, 574 bp, Zea mays
  Clone ID: MRT4577_42483C.1
cacgcgtccaaccaagcgtccggatctcttgaagagctaagctgggagacactagaacttcttgtggtacctcatatattcaggtatccaagctctgtgctaccgattaattgctgaaaactgaacttgggttcatgttaaatattcccaaggaaatataattgggcaacggtgtgtgtatatgttcagattcagaaagtgaggacaatatagcgtttgcagcagtggtcgtcgccctgtgcagggagggcctgctgatcagagatcaagagggaaagcagaagacacgttgtgccgggaggaaacacacgacgaagtagagacttagaagcaataagctaaatatttagacaactttaattcgagcactccaagaggtgtctcaaacaactggttaattcgttttatgaccaaaagaggaaaaatggccatctaatagttttgtaaaacaactccctaacgataagcacttgcttaatctccccctcaactcgccaacatgtgtgtgccttctgcgcttgctatttgcttgggtagttttgtaaaacaactccctaaagataagcacttgcat

SEQ ID NO: 121718 - DNA, 667 bp, Zea mays
  Clone ID: MRT4577_42484C.1
cagattcatcgggcgagcaaagacaccagaaatgagatggccattcccattttcagaggggaagatgtttgttctcactatccaagctggagtcgaaggataccatatcaatgtgggaggccgccacgttgcctcatttcctcataggatgggattcgccctcgaagacgcaacaggtttagccgtgacagggggcatagatgttcactctgtgtacgcaacagcgcttccaaaggcacatcctagcttttctctccagcaagtcttggaaatgtctgaaaggtggaaggctcgccctgtgccagaggaaccaatccatcttttcatcggcatcctctccgccacaaaccatttcgccgagcgcatggctattaggaaaacttggatgcagtttccggctatccaatcggggaatgcggttgctcggttctttgttgcgctgagccacagaaaggagataaatgcagcactgaagaaggaagcagagtattttggagacatagtcattctgccgttcatcaacggccatgagctagtggttctgaaaacggttgcgatatgtcaatacggggtgcactctgtcacttatgattacatcatgtcgtgcgacgatgacatctacgtgcaaaaaaatatagtaatgcaccaaatcagtacctacaacaaa

SEQ ID NO: 121719 - DNA, 944 bp, Zea mays
  Clone ID: MRT4577_42485C.1
attgggtacctcgacgccggcccacgcatagacacggtagcagtagcgggcgctcgaatctcaccggccccatctctaggctctagctccatcactcggagaagataagacccagagtgtcgcctggtccatctccaatccagcaaggcgggcagacgagccgagagtgagacaaccatggcgtctctggccctccgccccgtcatcccggccaccaccgcttcatccaggaccctcacgatcgtcgttggctcccgctcctgccacgctgccacactccaccgtggctttcgctcgcggcgcctcatcacctgcaaggcggagccgagcggcggcaacagcaccctcgagctgggcgcaggggccgcagggctggcatcgagcgcggtcgtggcgtggtccctctacacgctgaacacgacggggtgcggcctgcctccaggccccggcggcgccctcggcgccgcggagggggtcagctacctcgtcgtggcgggtctagtcgggtggtcggtcaccaccaaggtgcgcactggctcgggcctcccggctggcccctacgggctcctcggcgccgctgagggcgttgcctacctcaccatcgcggccattgccgtcgtcttcggcctgcagttcttccagcaggggtccatcccgggtccgctgccatcggagcagtgttttggctgactgtgtattactcattcggttggatgtctgttgccgagtgtgccctgctatatacacataacttttattattaagtaaatttctagcattttagttagagatttaagtttctgtaattccttctccaagattggcaaaggcctctcttttggatacaaagcagcctgactcgaggaatcgaaggatttcctgtttttgttttccaaataaatataaatataagagaaccgttaattaaaaaaaaaaaaaaaaaa

SEQ ID NO: 121720 - DNA, 573 bp, Zea mays
  unsure (1)..(573): unsure at all n locations
  Clone ID: MRT4577_42486C.1
ccggccggggtgttccacacccccgcatggctcggacgcgccttccccaacgtcgccttctagcctaagccagtgggcaagggggaccgcaaggaggtgtaggtgggcatggccgtagacgccaccaactgatcaacttagctttcggcgccagcggccgagcgtgggctgtcgatctagccacgtcgtcacgagatccgataatttatgactatcttctcaagctctgcaagtttctggatgatttcaggtttggttctatcagtgtgcctaccttcatcatttgttggtttaatttccacagattcacccaaaatcctggatcctgaagcctaggattaccgcattgcttcttgtcgtgacactgtggtcagacgccgtggtaacctgtatatgaatttcttgaatgcaagtgagaatgccaatagtatgtatcattggtcgttgtcaaagaatttgttagattgagatcgataatatacgtggtatttgtttttaaaaaannaaaaanaaaaaaaaaaaaaaaaaaaaaaaaaaaaaaaaaacccccaaaaaaaaaaaaaatttgcggcc

SEQ ID NO: 121721 - DNA, 397 bp, Zea mays
  Clone ID: MRT4577_42488C.1
cgagaccaatgggcaaaggctaaacgcatcatagtctccacaagagaatatagtgttgccaaatattgctcgggaggagacatgaacacgcacaaacttcaagtcctacaagaagaggatgcacttgccctcttcctaaagaaggtgtttaacaaccacactgaaaatacaaatttaggtactgatatgttggatcaagcagcactaatcattaagaagtgtcatggacttccccttgcaatatctacaataggtggattcctagctaataagcccaaaactgctactgaatggaggaaggtcaatgatcgcatcagggctgaattggacatgaatccggaacttaggagtataaagacagttcttatgaggagctatgacggtttaccataccatc

SEQ ID NO: 121722 - DNA, 354 bp, Zea mays
  Clone ID: MRT4577_42489C.1
gtgacaaatcaaatctaccatgcgacgacaggcgatgcgagcatgacaaataccctttacctcgtccttgccgccgaggccggggcgtcccgggcccggatcgtggtgcttgccagccctggtgtgtccatgagaattatgtcaggggtgggcggccgctcagcgcatagcccatccgtacatcccgctcgcaccgagggggcagggggttttaatgatcaatccgggaaagccagcacgcgcgacgcgccggcggtgggacagctgcttcttgggcggcgacgaccgcgggggggggggccgccccccccacgagccggcagccgaggacttctttcttctgcacagaccctc

SEQ ID NO: 121723 - DNA, 316 bp, Zea mays
  Clone ID: MRT4577_4248C.1
cacccccacacgcctctccagactgagcaggtcgcccgcttccagaaatacctcggcatccgaactgcgcacccatcccccgactaaatcgtggccagcaccttccgcctacactagaccgctgccctcaggcgccacgccaccacgctcaacttcaccccgtgcaagaccaaggtcatgcacctccagcactgttcagaggaccatccctcactctcctaccagatcctcaactcaccgatggacatccacccttttctaagccgaagcactgccacgtgcctctccattcaccactacacagagacccgaccag

SEQ ID NO: 121724 - DNA, 252 bp, Zea mays
  unsure (1)..(252): unsure at all n locations
  Clone ID: MRT4577_42490C.1
agaaccgaacctgaccatgtcgntgatccgncgcagcaacgtgttcgatcccttctcccttgacctctgggacccttttgagggcttccccttnggctccaacagggggggggggggggggacnctnnttcccncnnaccanctnntaaaccgtgggcttagatggcgcgcggattgactggaaggagactntagaggggcacgtgtttaaggtcgacgtaccggggctgaagaaggaggaggttaaggtgg

SEQ ID NO: 121725 - DNA, 233 bp, Zea mays
  Clone ID: MRT4577_42491C.1
cattctgtgctcgccgcgctgtccgtgccggggtgggcgcgctagctaaactgtatcccccgcacatatctagaagctggggttggaagacagttatactgcttccttgcatctaattccatacaacttttattccggcaaaaataggtccatacttacacatattccttgtaattggagggaaggggttaactcattcatttcacacatgatgggaaacaaaggatgaagct

SEQ ID NO: 121726 - DNA, 375 bp, Zea mays
  Clone ID: MRT4577_42492C.1
attagcttgtttttttcttcatgcaagaaaacaaagggcggaacccggaaacccctaaacacatatacctaatccggacggaaaacaaaggcagcaaaaaaacattctccccgggggggggtgaaaaaaaaccccacgataaaaatttttcaaaagcaaccgaagggggaaagacccgcccaaaaaaaaaccccaatcttgggcccaaaaaaaaaaaaaagtcccaaaaaaaaaaagaccaactcctgggggaaaagcaaaccccggttaaaaacggaacactaaccctggtggaaaaaaaaaaaaagaaaaccccggagaaaaagggcaattggccaacgggaacccggggacttgggggggagggggggcccc

SEQ ID NO: 121727 - DNA, 414 bp, Zea mays
  Clone ID: MRT4577_42493C.1
aaagggaacggatgcgacactgtacatttctaatttacggcgcgcgtaaaacatcttaatttacgacactgtacatttctaatttactgtgcccggtggatcagtggatgcctggatggtgctgtcctctcctcccttgcgaggagatcccggcgcggctctcgtgctctggcgaggtctcgactcgatggttcctccccggctcctggcgttccggctggcaaaccacttggtcatcttgctccttcaggcgcaccttttaaatcatgaagttgtcatggccctaaggtcctcaaccgggatttggctatgaacaaattgggggaacgagattgaaacttgccgaagtgagtattgacaacttcaatcgatgggagatgcagctgggtaccaagagcatccgctaatgaacta

SEQ ID NO: 121728 - DNA, 265 bp, Zea mays
  Clone ID: MRT4577_42494C.1
atattttttccttatctcattggcttcatatggttatacatgattaacatgaacaatggttaaccatcttattagcttatatcacatgctaactctgccttgtactaagaagttgagatcttttatgacttatgggccttatataggttccaaaggaatagtgagtttgtttctatccaaagagttttacagctctctcaccggtagggttatctaacttacaagctaaccacgataatccatcatataaagttaatttaggatt

SEQ ID NO: 121729 - DNA, 224 bp, Zea mays
  Clone ID: MRT4577_42495C.1
attcttaggagcttttcttattgggcgccggattaaagccaggcacaatcaaggacatagccggacgcggtggggaacaagccaaaagaaacctacaacgcgccaacaaacgagccggaaaacaagggtgccaaagaggggacaagtctaaagagagagcaagacccacaagactgggcaaaaccaccaaccctggccagacaatggaatggaagaaaccccgt

SEQ ID NO: 121730 - DNA, 462 bp, Zea mays
  Clone ID: MRT4577_42496C.1
tccgttgcttaacctgtccaaaaaatgtgacactacaaaagtggagctggaaaatcaagtagtcacgggcagccaaagcaatatctgtgatagtgacgctgagacctgttacacctatgacagaaacaagtgctacacaaacagggtcaaacttagttaccgtggtcagaccaaaatggtggagacagctctgaccccggattcctgctatcctgactaacgcaagtcatgctggctgcacaactgcttatcttgaagggctctccattttgattgcaggtagttaatgtatttactcctgatgaatttgaaaccatgattttttttgggtggggataatataaaattaactaccccacccctaccactggcaaataattgaaatagtaacactgttaatgtttttaaggtaaatttctagcatttaaaaaaatagatgaggggagaaaataaaattcaaaa

SEQ ID NO: 121731 - DNA, 380 bp, Zea mays
  unsure (1)..(380): unsure at all n locations
  Clone ID: MRT4577_42497C.1
gnnccgcgaggggccgccctnnnnnnnnnnnnnnnnnnnnnnnnnnnnnnnnnnnnnnnncaggncaggcgggcccnaattgggcccaacggganccacaagggaggacgccccggagggaacggcacaaaggaagcccacgggggggcggacagcaggggaaaggccccccggggcccaaagcaggagacgggaaagggaacaaagggaaaacggccccggagaaaaccaggggggcccagcaagggggagggangggggggccacggcaaagccgaggaggaccaccaccccccggggaggccccagggcnaaacagcagccagaagaccccggagcccgggggccaccaaccacaaccacgggancgggcacaaaca

SEQ ID NO: 121732 - DNA, 1620 bp, Zea mays
  Clone ID: MRT4577_42498C.1
aataaatacctcaatatatatttacatgtggcaactcaccccccccaacgcaggacaaccggctagtctatgattaagtttgtggcgtgagactggtttatacggttataccacttcatcacaaagagctgagcttgagtgatatagatgccactctctctcaagtctcaactccatagccccaaatcaacaagggctaccaattatcagctgtaagtttctaaaactcagaattagttacgacaccacttactcacaatcactccgcaccacacatactaagccataaagactccaacaaagttcagttcaatgggtgtccttagagcttataccacttctcacacagcaggtcgagctggacaggaaagaagaggcccatgatctcgatatcaggaagcatcacataagagttttcactttccagcttgcttatgtcaaaaaacacatacatcctagatagtaaaggtgcggagggaagtaatagatctgagcacgttattttgtgctatgaagctacagtgtcgtaaatcgaaaagggaataaccgcaattttttttgattgtgtcggaaaacatatatctgctagcacttgcagctcaaaaccaagcatggcaatcgacaactacaggctatggctttgcaacgatgtggaaccagacaatgcaattctcagggctgcaaccgttgcgcttcagaaaccgtgctgatccgcacggcgaaattccttgaaacaagctgaaagactcattttctaagtgcgttcatcctgtccctcaggtaatacagcttagctctcctgactttcttcctgtccaataccttgatttctttgatgtttggcgagtaaagtggaaagacagactcgactccgacaccagccactaatctacgcaatctgaaggttgtattgatcccggcgttgcgccttcctatcacaatccccttcagcgtcgactcacgccgtttgttctcaggaacttgcaatctcatctgaatgatgcatccaggctgcacatcaggaatctccctttccgagcggaccttttcgaccgcctctttgtttaggatattcataatgtgcctggcggtcttgtcgggcctcttgaacttgatgcgcggggggtgctcaaccgcaggggaggtggaatcgtccgaatcagaagcgacctcggccgcactccccaccgtcgacagacccctcatcgcgacgataacttgtgcgcagagaccaaaaccggaggtggccgcggcaggaacgaggccatcacgcgaaacggcccggctctgcacacgtacgggttgaactaccccgatcggacgtgtgaactcgtaaggcggcctgaggagtttgacggccacggatggctgcgtcgcacccggaccagccgcggcaagctccaggagcctcgccgccgctccacggcttccggctcggcagacattccggaccaaacattgcatcctggttggtgctcgtctccggcgaagagaccacaagcctcagcgtctggcttagggcggcggcggggtctggagccctggagtgccacgcggaggcgagggttgccagcggacggcaagggtcgttgggcgcggaagcgtccgcggacgcgtggg

SEQ ID NO: 121733 - DNA, 219 bp, Zea mays
  Clone ID: MRT4577_42499C.1
tgcagcccgcgccgagggtgtccatcccggggcgcgcagctcgactggaggtacttcatctagcgaacgtcactggctgcgctcccaacaagctctccaagattaaggttgtgaggttatcgattgcacaagtgatgacagagatatcccataagccgaaagctgcacagaggtaagcatatatggagcaactgttctgggctctcgatccctggccca

SEQ ID NO: 121734 - DNA, 1138 bp, Zea mays
  Clone ID: MRT4577_4249C.1
ggcgctgaagtgcagaatttaattcaacgcctccgtgtgatggagcagaaccagcagcagatgatggcacttttggcaattgttgtccagaatccagacttcctgaaccagctcgtgcagcagcagcgcaggagtaactggtggaatgatgatggtaacaggaaaagaaggttccaagctctggaacatggtcctgtagatgaccaagagacttctggtggaggcgcacaaattattcaatatcgtcctcctgttcctgaaacttccaatcagccaataccagcaaatgaagctttctattcaacccctgcacaaccagcttcaagccctgcacttgagatgcccatggatgtagagatgacttcaaacaatgttaatacctttgattcaactggcaatgattttactgacacctctgctctatgtgaatgggatgacatggatatatttggtgatgaacttgagcacattcttcaacagccagagcaggactttcaagtggaccctcctttaacagttgaggattatggttatgatcatccacggttagagcaggactgtcagatggaagcacaacagaattgcaaaaatcctcaatatgctgatgtcataactgaagcatgagcggtggtcccccagaatgttgtccagtaacattagtggatagagatttgtgatgaacagaatcttgagactggcaggttagccaccattgggaacctgaagaccgtcgggattgctcagaattcagtatactaatactaatactaaaaaaaaaaatatacagtaacacatgttgactatacatgatttcgttttccttactcgctcgaccaaaggcagccgtacaatgtttttacttttgtccaggtgggagcatctaggtctttaaatggtttcggtgattaatggtgatcctagattattatgatttgcctctaacaattgaagattacggttaacagcgtccatggttaaagcaggactgccagttaaaagcgcaacaaaattgcaaaaatccccaatatgctgatgtcaaaactgaagcatgagcggtggtacaaaaaattttgtccaataacgtaagtggataaaggtgctttgcaattaaaaagccctttgcgctgtgttcttttcc

SEQ ID NO: 121735 - DNA, 600 bp, Zea mays
  Clone ID: MRT4577_424C.1
ggccgctttttttttttttgttttagtggtcatgctttttgtttccaccacactcgtcgctcttaatgtgtctcttcaaggaattattacaaaacatgttgcagaatggcccacgtttattattacaatttgtttaatatgcccagattttccacttggccttgacaacacgggggaatttaaagaggctggaaattacttttgctttgggaaaacagacgcttccaattcggcttttccatccaaaactgacaaaacccccccatccggaagctgttttttgtggcgcactttcacggggaaagaaaaaaaaccctctagcccaggttttggatgccgggggccatccccttcatggggaggaagagcgggttttccaggccgggggggtactcgcttgacgggtttaaattgaccagcccggtggagttgttgtttttggggaactccttggacagcgggggttggggcgaaaccttaaagtgggggccccttatccgttttaaggaggacgcctggaacaccttaacggtggcaataaagggtttgaccaataccatcccctgcttaaagaaaggaacggcttcaataataatcttt

SEQ ID NO: 121736 - DNA, 206 bp, Zea mays
  unsure (1)..(206): unsure at all n locations
  Clone ID: MRT4577_42500C.1
aacatccattcttttggcaagctgtgttcttcggcgctgtttccagtgctgaattcatgctccgttctgcccactggaatgaannaaaatgtgtgttccctaccatgctaactgtaggtgcttgtggtgccttactgcctcccgtccatgcacaccccatggggtgtactgtttttgttatataccgcctcgctgaagctgtcaac

SEQ ID NO: 121737 - DNA, 310 bp, Zea mays
  Clone ID: MRT4577_42501C.1
cttgggatgcattttacaaagctgttgacccaagtgggattgaggagggccttcaaagtctgcgtgtaggtggtgtgccaccaaggtttctgattatagatgagggtttgcaagaaactggtgactaaatcaaggaagtgttttaagccctccttgtgcatactgtgtttgtgcttaggctggcttttcttaaagtgtttcattatttcattggttatatctatgtgtttcttttaatccttgttttttcttttatatatttttatgtgtattacttcgttatgcatcttgttttatttttttttttatt

SEQ ID NO: 121738 - DNA, 206 bp, Zea mays
  Clone ID: MRT4577_42502C.1
gggggcgacccacgcgtccacccacgcgtcctgctttctgcttccttcaaggcttctactgccacctcgggtgcaagggtattattttatcacgcatcattgtaaggtctatctcgatacaactcatagtgcctactctactctacatatatttttatatgctcgcttttttcgtaattaacaatgcaatatgtcttatctcaatt

SEQ ID NO: 121739 - DNA, 352 bp, Zea mays
  Clone ID: MRT4577_42503C.1
cgccatttctttggaaacctctgcgccatgagagccaaggtgagcggttcctggtagtaagcttgggaggttggtgtgaaacctctgcgccatgagagccaagtggaggaagaagcgaatgcgcaggctgaagcgcaaaagaagaaagatgaggcagaggtccaagtaaaccgctagcttgttgcaccgtggaggccacaggagcagaaacatggaatgccagacgctggggatgctggtacaagttgtgggactgcatgctactgtctagagcttgtctcaatggatctagaacttcatcgccctctgatcgccgatcacctctgagacccaccttgctcataaacaaaat

SEQ ID NO: 121740 - DNA, 355 bp, Zea mays
  Clone ID: MRT4577_42504C.1
cgagggctataattgttatgatcttatttcagatctgtttattatgcctgttcagggggatggtgagcctcgtacaaactgtaacaacggtcattacactgatttagagacattcgaacaatcaaaatgatctgcattgtatttacacaaccaccttcggatggagaaacgcgggctctcatcactatgcataccgaacatccaaaggctgatccacacttaatcaactccataactggcagaaagaggtggactggttgcacttcgaacaccaaatgatgctcaaatgcatgtactagctaatatcggagacggagaactacctgcagctcataactaaaatgattgaatggga

SEQ ID NO: 121741 - DNA, 410 bp, Zea mays
  Clone ID: MRT4577_42505C.1
gagatccaccgtttcaacaaggggcagcaggatgcgctgctgccgttcgtcgagtcggggctcgtgaccttcatcggcgcgacgaccgagaacccgagtttcgaagtcaactcggcattgctgtcgcgtgcgcaggtgtacgtgctgaagtcgctggacgacgacgagatgcgccagttgctgaagcgcgcgcaggaaatcgcgctcgacggcctcgcgttcgacgacaaggcgatcgatacgctggtcggctatgcggacggcgatgcgcggcgcttcctgaacctgctcgagcaggcgcaaacggcggcctcgtcggccggcgtcgcgacgatcgacgccgagttcgtcagcagcgcgatgacgctgaacgcgcggcgctttgacaagggcggagacaacttttacga

SEQ ID NO: 121742 - DNA, 233 bp, Zea mays
  Clone ID: MRT4577_42506C.1
tcggataaccggcacagggagcgatgacagagtctcgagagcaagggagcgcagtgacgtcatcggattccaaggtttctcgagcggctgctatggcgaccagagcgacgtcgaaatgactgcagctgagctcctgtcttccggcggcaaggtcatcagcgactaggcacaggccacggcggaattgtacatcaagatgatggactgagtgtagctagaggagctcgctcgca

SEQ ID NO: 121743 - DNA, 1512 bp, Zea mays
  unsure (1)..(1512): unsure at all n locations
  Clone ID: MRT4577_42507C.1
aaaaaaaatcaacctcgaggccggccgggacttccaaactgcaacgaaaacccacgtctaaaacaggtggcccaccaacgattcacttccccgatcccagggggcggcgatcggaattcgcaacttctcccacgcggcgaacacggcagagatgatgagctcccgggccggatccatcctcctccgccacgccggctcccgtctcttcaccgcagcggcgatctctccggcggcggcctcgaggccactgctcgccggcggcaatggtgttccggcagtcatgctacggcttatgtccacgtcctcccccgccgctcccacggaggcgaaggacgaggcagccaaggcctccaaggtgggaggagacaagaaggcggtggtgatcaacagctactgggggatcgagcaaaacaacaagctagcgcgggacgacggcaccgagtggaagtggacttgctttaggccatgggagacgtacacggcggacacgtccattgacctcaccagacaccatgagcccaagacgctgatggataaggtcgcatactggaccgtcaagtcgctgcgcttccccacggacatcttcttccagaggcggtatggctgccgggcgatgatgctggaaaccgtggctgcggtgcctgggatggtgggcggcatgctgctccacctgcgctcactccgccgcttcgagcagagcggcggctggatccgcgctttgctggaggaggccgagaacgaggcgcatgcacctcatgaccttcatggaggtggcgaagccgaggtggtacgagcgcgcgctcgttatcaccgtccagggcgtcttcttcaacgcatacttcctcggctacctcttgtccccgaagttcgcgcaccgcgtcgtcggctacctggaggaggaggccatccactcgtacaccgagtacctcaaggatctggaggccggcaagatcgagaacgtccccgccccggccatcgccatcgactactggcgcctccccgctaacgccacgctcaaggacgtagtcaccgtcgtccgcgccgacgaggctcaccaccgcgacgtcaaccactttgcatcggacatccattgccagggaatgcagctgaagcagtcccctgcgccgatcggataccactgaggatgtttgtgctcttcttaattttgcatcgctaataagcaattgtctttaagggaaggaaaggatgcttattgagttacgagtactgctacggcgattaggatattttccaaccagttgtttgagagtgaaacctattatatgtacgcatgttacatgtacatatctctaagtgcgagaggtgcttttctggcgtttatcacttcttcctggagttcctttgttcttcatgtcagctgaattgggctcgctaatatcgaatgtacaatttttgcataatccctatcttgattgtagataaaaaaaaaaaaaaaaggagggcggccgcgaggagtgtgctcgacgaccaaggattatnttccggaccggt

SEQ ID NO: 121744 - DNA, 218 bp, Zea mays
  Clone ID: MRT4577_42508C.1
cattgctgacaaggtgcactatgattatgaattttttgagatggagtacctgatgaagatgtcttacacaaggataatatgattgacttcctctcgcagacgcaccaacgcatgctatataaagcacgcagtactcgcacaggagaattatgggttcttcgcggaacctcggaaatggcttccccaggttcctggcctggcggcctgctcatgggcgt

SEQ ID NO: 121745 - DNA, 2346 bp, Zea mays
  Clone ID: MRT4577_42509C.1
gccggccgggccgggaaactgggcgctgcccaactccctgcccaagctgctggattaaaccccccttgtcgtcgcttcggttcaagcgaggaagagagagagagcgagagttgtacaaggggcgccggcggccgcattgtagagtacgtcgagcttgttcactgccgtcgcggcctcaaagcaagccacatcatcgatggcggacgcagctcacgtcttcctgctggtagcggtggccgccgcgctcgccggccgctcagacggcgcgtggtgcgtgtgccgcccggagctggcggacagcgcgctgcagaaggcgctggactacgcgtgcggcgccggcgccgactgcaagcccatcctgcagagcggcgcctgcttcgccccggacaccgtcaaggcccactgctcctacgccgtcaacagcttctaccagcgcaacagccagaacccgcaggcctgcgtcttctccggcaccgccacgctcagcaacagcgacccgagcggcaatggctgcacgtaccctgcgaccccaaggtcgggaggtctggcgccttgttaatgggaaatgggtcgcgtgctcatgttcttggtgttggtacggtcattctgaagtttacttcgggaaagacggtgccattgaagagcgtgcagcatgtgccctctatcaagaagaatctcgttagcgcgtctatgctatgtcgagatggatacaaagttgttcttgagtctaataaatgtgttgtgtctaaacatggtatttttgttggtaaaggatatgactgcggaggcttgttccgcttatcactgcatgatgtgtgtaataaactcgtgaattctgttcatttttctgatgagtcggatttatagcattcacgtttttgtcatgcaagctttggctgtcttatgcggttagcaaatataaatctaattcctaaaaaaaaaaaaaaaaaaaaaaaaaaaaaaaaaaaaaagggccgtttcacttccccgatcccagggggcggcgatgcggaattcgcaacttctcccacgcggcgaacacggcagagatgatgagctcccgggccggatccatcctcctccgccacgccggctcccgtctcttcaccgcagcggcgatctctccggcggcggcctcgaggccactgctcgccggcggcaatggtgttccggcagtcatgctacggctgatgtccacctcctcccccgccgctcccacggaggcgaaggacgaggcagccaaggcctccaaggtgggaggggacaagaaggcggtggtgatcaacagctactgggggatcgagcaaaacaacaagctagcgcgggacgacggcaccgagtggaagtggacttgctttaggccatgggagacgtacacggcggacacgtccattgacctcaccagacaccatgagcccaagacgctgatggataaggtcgcatactggaccgtcaagtcgctgcgcttccccacggacatcttcttccagaggcggtatggctgccgggcgatgatgctggaaaccgtggcagcggtgcctgggatggtgggcggcatgctgctccacctgcgctcactccgccgcttcgagcagagcggcggctggatccgcgctttgctggaggaggccgagaacgagcgcatgcacctcatgaccttcatggaggtggcgaagccgaggtggtacgagcgcgcgctcgttatcaccgtccagggcgtcttcttcaacgcatacttcctcggctacctcttgtccccgaagttcgcgcaccgcgtcgtcggctacctggaggaggaggccatccactcgtacaccgagtacctcaaggatctggaggccggcaagatcgagaacgtccccgccccggccatcgccatcgactactggcgcctccccgctaacgccacgctcaaggacgtcgtcaccgtcgtgcgcgccgacgaggctcaccaccgcgacgtcaaccactttgcatcggacatacattgccaggggatgcagctgaagcagtctcctgcgccgattgggtaccactgatgcagtgatgctgtttgtgctctgctgagttttgcgtcggtaataagcaaatgagtgtcttgccttcaagggaaagaaagaattgagttacgatacggcgattaggaggatattttccaaccagttgtttgagagtgaaacctattatatgtacgtctccaccgtcttctttatcagagcaatctatgtacatatctctaaagttcgagaggtgcttttttggcgtctatcacttcttcctaaagttcctttgtttttcatgtcagctgaattgggctcgctaatctcgaatgtacaatttctgcat

SEQ ID NO: 121746 - DNA, 2047 bp, Zea mays
  Clone ID: MRT4577_4250C.1
taccggccgggaaaaaaggaaatcgaaggagattgaacgaagcagcccaaccaaattcccctcgccgcctcgtcccttcgcgacatttctagtcccgtcgtcgcctcaatctcgaagcctctccggcgcagccgcctcatcatcgatccgaaggcctccaaccaaacatcctctagggtttccgcatcgtccgtcgcgatgggcttcacgaagcggtcgccccagcatcccgcctccccagccggcggcgaggtcggcgcccagacggcagggaaggtcacaccagtgccggcggcgccggagtcggcgcccgtggcggtggtgccgaggcctccagacgtggcgcccttcctgaccaaggtctacgacatggtctccgacccggccaccgacgcggtcatctcctggagcgccggcggcggcagtttcgtgatctgggactcgcacgctttcgagcgcgacctgctgccgcggcacttcaagcacaatcacttcaccagcttcatacgccagctcaacacctacggatttcataaagttgatccagatagatgggaatgggccaatgaaggctttgttaagggccaaaaacatcttttgaagaccatcaagagaaagaagaaatcctctcaggatgtacctagtgatctgcagtcggtgcctgtcaaaactgcacctggcactgagaatatcgagataggaaaatatggaggccttgaaaaggaggttgagacacttaagagggacaaggcccttctaatgcagcagcttgtagatctacggcagtaccagcaatcatctagcgctgaagtgcagaatttaattcaacgcctccgtgtgatggagcagaaccagcagcagatgatggcacttttggcaattgttgtccagaatccagacttcctgaaccagctcgtgcagcagcagcgcaggagtaactggtggaatgatgatggtaacaggaaaagaaggttccaagctctggaacatggtcctgtagatgaccaagagacttctggtggaggcgcacaaattattcaatatcgtcctcctgttcctgaaacttccaatcagccaataccagcaaatgaagctttctattcaacccctgcacaaccagcttcaagccctgcacttgagatgcccatggatgtagagatgacttcaaacaatgttgatacctttgattcaactggcaatgattttactgacacctctgctctatgtgaatgggatgacatggatatatttggtgacgaacttgagcacattcttcaacagccagagcaggactttcaagtggaccctcctttaacagttgaggattatggttatgatcatccacggttagagcaggactgtcagatggaagcacaacagaattgcaaaaatcctcaatatgttgcctgtgtcttgaagcaaagggaaagccatgcatctgatgtccattagtactgatcagtttgagctgatgtcataactgaagcatgagccgtggtcccccagaatgttgtccagtaacattagtggatagagatttgtgatgaacagaatcttgagactggcaggttagccaccattgggaacctgaagaccgtcgggattgctcagaattcagtatactaatactaaaaaaaaaatatacagtaacacatgttgactatacatgatttcgttttccttactcgctcgaccaaaggcagccgtacaatatttttacttttgtccaggtgggagcatctaggtctttaaatggtttcggtgattaatggtgatcctagattattatgatttgcagagactataacttaggttatgatagcagtgattgattatgcgtgggttttgtttttgtctcacgtctcattgtcctagctacgcccataacacaaggtatcattcctcatgttgtatataatatcatcgtggatgaatgaaacacttttggacttttttttttgcgtacgagattcttaggcaccgtttgtttttggtcagaatgacttcactgagccttccatagaagacaatattcataactggggaa

SEQ ID NO: 121747 - DNA, 478 bp, Zea mays
  Clone ID: MRT4577_42510C.1
ggccgcttttttttttttttttttcttttttcttttttttttttttttttttttttttttttttttttttttttttttttttttttttggaggaaaaaaaaacccggatccataccctatttcattttaagaaaacaatccccgaggagggggtccagttcgatcgtacactggggttctccatggggggacaaagctttccaaagacacggggtcataagggttgcaaaaaaaaaaaagggcaaagacatgtagcactgatctggggtctaaacaagaggcaacgggttccccaaagaatcgcccaaaaaaaggttcacgagaacaacatgttttactttggcccaacaattttttttttgagcgactcgatgtcgtgggggagcttttttctgttttccttgaaaaaaaggtagcggtaaataaaccatccgggggagccggggccgacaagctccatgattttggggagcaaagg

SEQ ID NO: 121748 - DNA, 431 bp, Zea mays
  Clone ID: MRT4577_42511C.1
cggacgcgtgggatcatgcgtgcccatactgccagcctctccctccatagatgacctcaacaacgaggaaaacctggctcgacattgaagtataggagcaccttgaggcgagggttggatttcaactcgttcttggaagacgaagaaagagcgctcgtaccgacaccggcttcagatggtgagctcacgggcacaggagggctcagcaccaccactggcatgcggacaggggggcgcgacgtcgcaagctccagcatgggccgcgatagggctgggcctggactcgccaccgcgagcctcgacatggtgagcactgggcgcggcctcaccaccgcgagcactacgcgcgacagagcacgaagtcggaatagtagcgttgtgtgcaacattggctctttgtccgcagggcgcggcaatggcgccacgatcgc

SEQ ID NO: 121749 - DNA, 134 bp, Zea mays
  Clone ID: MRT4577_42512C.1
atctagcatcctctcgagcgaccgaggtctagtgagctctacgcccagctattttatgactgactgtagcctacagtcgtacgagtgcaggttatggtccggcgttttataccttgtcgtcgtcctgactatag

SEQ ID NO: 121750 - DNA, 301 bp, Zea mays
  unsure (1)..(301): unsure at all n locations
  Clone ID: MRT4577_42513C.1
tttcttttttagccaacacacacataatacgcgccgcctccttttcattccatctcagccgatataataatacccnttctctccaccaagcttttcgtgatccttctcctgctcttttgttacaccgccacgcaacgccctccttttactatggtgtcacctaagaagaacaagtcccacagcttccacttcaacgcacctagctctagttacgccaactgctcaaacttctgcctgacctaatatttcacactctgcttcttcaaagtcctacaccaccgcttcttctgcaccaattact

SEQ ID NO: 121751 - DNA, 421 bp, Zea mays
  Clone ID: MRT4577_42514C.1
aaaaaacaaccggccctccattggtgctaaaaaggggaagcaaaagttgatgtggggggggggggggagggggaatgtacctacatatgggttcaactgcaaccaaaacacaatgggaaaaccagagaagaagcggttgatctggacacccttccgttacaactgggggacgatggggcccacgtagccgaccccgacaatgaaaaaccccacaaactggaaaaagaggtagatgaaaaaatggcccctcccgtacccaagatcgtaccacccccaagaaaaaaggaaggctgccaccccgagctccgggacgggcaacctttcccaaatcctaaaaaactggttcctgagccccgttttgttagccgatttcattttaatggcgctgccgagctttgccgtcaccacccactcgttggcc

SEQ ID NO: 121752 - DNA, 210 bp, Zea mays
  Clone ID: MRT4577_42515C.1
taaatgtattggaagcagaaaaccaacggagggtcattcttagattgaaggccgtgaccaaaaatctcaccaaaacagtgaggacagctattaaagagatcatgaatatggtcgttatggttatgattcgtattatgaaagaagcaagaaagatagtatcttgataatacactattcatgtgacaacaaacgttaaaagagtacattaat

SEQ ID NO: 121753 - DNA, 177 bp, Zea mays
  Clone ID: MRT4577_42516C.1
tcccggcccgcccacgccgaccccccaaatggaaaatggaattccaagggagggccgccgcaagggaattaattggggtgctcactaggacaaatccacttccccttaatcttcgcagcttcagcctggttatcatggctagaggttggctgcccttgtgccaaaacccctttggtt

SEQ ID NO: 121754 - DNA, 772 bp, Zea mays
  unsure (1)..(772): unsure at all n locations
  Clone ID: MRT4577_42517C.1
ccggccgggaagtctcttcctctcttctctaaaccggcgaccaggagaacttctcctgtcgacgggtagctcggcgtgggggcataaccctgccggcaaccacgggtcaaggctacgatctacgtagccgaggtcctcctaccttgggcaataccgcccttgacaacctctgtcctataagttttgattccttgatctcaatggttgactttttatatctccaagaatatttgggttttacacaaatatttttggccacaaaacaaaattcttttttctttgtgaagatattcactacatcgtacaggtccctacgaccttatcttcaatgggaagtccatctctggtgattattctttgaaaggacagatgaatgaaggcaaaaacatggagcagggcaactggacagttaagggagactaaagttccatttccagtcttctgtctcattcagtggcacataagcatgtagcatttgcaaatttaaagtataaatcttatgtcactccaaaggacgaggctaaagttaagaccgatgatgttggtcgtatacttctaacttatcgaaagcgtgcaaggtctgttgccatgtatggatttatgattggttgctctgttttttgtccataattagttgatatggtgaatcgaggacaaatgagtaataacacaaacttagacatattcttatcatgtacctttgtgtaattgggtgctcaatgtaccagattctaaagaaacttcattgatatatatgnggtcttttttatgg

SEQ ID NO: 121755 - DNA, 161 bp, Zea mays
  Clone ID: MRT4577_42518C.1
aatggggacccctcaggccggccggcatcgctgtaggaaatgagatccgatgagctgcggtgagaccttcactgctgcaggaggagtagccctatcagtgcacaacagagacgagtacatccctgcctctgctgaccctggtatggccactgcttatgata

SEQ ID NO: 121756 - DNA, 1265 bp, Zea mays
  Clone ID: MRT4577_42519C.1
atacctggtgctggaaaagaagtctgaacggaggagcagagctcgatcgatcaccaaactaattaacaatggcgtccgcagcaagaagcactgggtctctcccggtggctaacgtccaggcgctcgcggaggcttgcaatgacgacgggggcgacgtccaggtgcccgagagatatctcagcaaggatcccagcagcgcggaggaggtcgtcgtcgtagccggcgacgacagcgcctgcagggcgattcctgtcatcgatctccgtaggttgctcgatccggagtcatcggaggaggagaccgccaagctggcgtctgcctgcctcgactggggcttcttccagctcatcaaccatggaattccggacgaggtgaccggaaacctgatgaaggacgtggctgcgttcttcaggcagccgctggacgccaagaaggaatgcgcgcagcaggccgacagcctcgaaggatacgggcaggccttcgtggtgtcagaggaccagaagctggactgggcggacatgctcttcctcatcgtgcagccgagggaggccagggacacgcgcttctggccgacgcgccccgcatccttcggggactccgtggactcctactccctggaagcttcgaggctagcgtaccgcctgctggagctcatggccaggggcgtcggggccgacccggcgtcgctaagacgcgtgttcgaggggcagacgcagggcatgcgggtgaactactacccgccgtgccggcgggcggcggaccgggtgctgggcctgtcgccgcacaccgacgcgtccggcctgacgctgctgctgcaggccagcaacggcgtgcagggcctgcaggtcaggaaggacggcaggtggttcgccgtggacgccatcgacggcgccctcgtcgtcaacgtcggcgactttcttgagatcctgagtaatggaaaattcaccagcgttgagcacagggccgtggtacacccaaccagagagagaatgtcggcggcgctgttcctgtaccctcgccagaacatgagggttggtccattgccggagttcgtgaatggcggtgaagagcggtatggatcaacggattatgaggaatttatgaagcattactttgcaacgaagcttgacggaaggaagcacctagacagattgaagttggagtagtaggcagtagctatctctaccgtatctatctcgctggagagacattgagacaaataaataaattttctatgcgatatataataaatggcgaccacggcc

SEQ ID NO: 121757 - DNA, 275 bp, Zea mays
  unsure (1)..(275): unsure at all n locations
  Clone ID: MRT4577_4251C.1
gggacagagttccccattcaccgaaaaagaacncaggggaagacagacggggcctggaggcacatttttcaccggcgatggaactgctgaactcaaggtattgccagtgagaagatcagagcccacacctaaggaacatatacgcgctacattacctttctctcatggatttcatgagggagatcgtacgaacacgcataatgagtacatgatgcgtactgagaacattactttttttgaaacatgccccacatttggcacaaatgacacgaaat

SEQ ID NO: 121758 - DNA, 1090 bp, Zea mays
  Clone ID: MRT4577_42520C.1
cggacgcgtggcgtgcctcgtggcggccgggctccggcttcggttctccgtagcgactgcgttgcaatcaggtcgtcgtacgtaggtaggtgttagccacatacgcatcaggaagctaacgagaagatcagatcggaggtaacggcaatggcaatggccaaggccaccatcctcgccaccttcgcggccgtggcagctctggcggcggtgcagctcgccgcggcggcggaccaccccgtgggaggcgacggctcctgggacgccagcggcaccaccggctacgacgcctggtccgccaagcagacgttcaagcagggcgacaccttgtcgttcaagttcgcgccgtcgcacgacgtgacggaggtgagcaaggccggctacgacgcctgctccggcagcaaccccgtgaagtcctacaccggcggcagcgcctccgtgaagctgtcggccccagggaagcgctacttcatctgcagcgtgcccggccactgcgccgcgggtatgaagctggaggtcaccgtcgccgccgccgcggtcgccgccgcgccggcccccgccaagacgaccaagccccggcaccagaggagcgtctccccgaccccggccccggcccccgcggctgcgccgtccaccgacgagatgcccaccgtgtcctcgcccaccgcggcgccggcgcccaagtcctctgacgcctccacgcttggagccaaggctgtcgtggggctcgccgtcgccacgatgctcaccttcttggccatgtgagggcgagtcgtgctgcgtgacgcgcatgatttttgcagataaatgtattatatacatacatatatactccagcgattcattattgcattgcattgcattgtcgtcagtgcggcgcacccaccgacggttgttgctgacaagagttcatttaattgccggccttttttttattcgattgttaattatactgctacgatgtacttactacttgaattattagtgtatttgttgtcactgttgatcatccaataaatttatcattattattcttccaaaaaaaaaaaaaaaaaaaaaaaaaaaaaaaaaaaaccgctcgagccgaattccg

SEQ ID NO: 121759 - DNA, 695 bp, Zea mays
  unsure (1)..(695): unsure at all n locations
  Clone ID: MRT4577_42521C.1
aaattcggcacgaggctgttttgggtttgttaatggcatatatttctatcattggacaagttcctgtctgacggccatattgaaatctctaaatagggtattttagttgggtgtgtcataattcacgttcagcagcatcgtgaagcaaaggaattgtaaagcaggcttcctggtgtagtgcaaatactatgtgattgctgctacttcagattttcattggctgattacagtactgcagacaggcagagtccttatggtgttcagttcatggaaacattaggaagacagcttgtacagcatggttcaagtaaatgtaatattagcaaagatttgagtatgatggttgctaagtgctaaccttaattgtgcaaatatctacagccgagtgcaatttggcagcaagggcctgtcatttagacattgataaacttcaaagttattctgcatttagtttaacaaactttgactttacttttntctcttggttgtgttcaatctctaacattttcctgttcagcttatttcatggatattgccttacatcttagttcctctattttttgtctctggcctcaacttggtctctttacttctaaaaagacaggattagttcctttacttgtataggtagatatggntaaagtccgtccacccatagccaataatggaatatatatcacagaaaataccagtga

SEQ ID NO: 121760 - DNA, 973 bp, Zea mays
  Clone ID: MRT4577_42522C.1
cctcgaggccggccgggccgggacataaaacaacaagcttcggttctccgtagcgactgcgttgcaatcaggtcgtcgtacgtacgtaggtgttagccacatacgcatcaggaagctaacgagaagatcagatcggaggtaacggcaatggcaatggccaaggccaccatcctcgccaccttcgcggccgtggcagctctggcggcggtgcagctcgccgcggcggcggaccaccccgtgggaggcgacggctcctgggacgccagcggcaccaccggctacgacgcctggtccgccaagcagacgttcaagcagggcgacaccttgtgtaagttggctctctcttctgtcttcttctccagcgcaacaaacatgctgtcagtcacaactcacaacaaactccaagtagagagaactgacgacgccgctgccgcttcggctcttgtgcacgctggatctctgccgccgcagcgttcaagttcgcgccgtcgcacgacgtgacggaggtgagcaaggccggctaccacgcctgctccggcagcaaccccgtgaagtcctacaccggcggcagcgcctccgtgaagctgtcggccccagggaagcgctacttcatctgcagcgtgcccggccactgcgccgcgggtatgaagctggaggtcaccgtcgccgccgccgcggtcaccgccgcgccggcccccgccaagacgaccaagccccggcaccagaggagcgtctccccgaccccggcccctgccgcggctccggctgcgccgtccaccgacgagatgcccaccgtgtcctcgcccaccgcggcgccggcgcccaagtcctctgacgcctccacgcttggagccaatgctgtcgtggggctcgccgtcgccacgatgctcaccttcttggccatgtgagggcgagtcgtgctgcgtgacgcgcatgatctttgcagataattgtattatatacatacatatat

SEQ ID NO: 121761 - DNA, 229 bp, Zea mays
  Clone ID: MRT4577_42523C.1
tcttttttagactatgtcacccgactcgtcagacgtgagccagcagttcgaaaccaaggatcgatccatgagctttcggaaggcgaggcgcgcgcgcagcgtctaggtgctggtgccggttccgtccatggattgggctcgaggatccgcgtttctgcctagcgtgctgatcgcaggatccttgtttgcgttttcagattactaagaggggaccaataagcttggggcc

SEQ ID NO: 121762 - DNA, 377 bp, Zea mays
  Clone ID: MRT4577_42524C.1
caatactctttgactgtggatacctctatttggtaccgctgctactatttcgtgtcgcatagctaacccgacgagctacccttctgtgaggaaccgcacattgccccccgtatcactgatactcagcaattttactcaatggagccatattcaagcaggctaccgttgcgtgtgctgaggatgacccgtaaccttgcgttattaggatagaacccagacgcttgggcaccagaaccgctgcatctagctcacagagcctattgcgcatctgcaatagttcacttgcccatacatagacaggtagcagacagagggcgcgcgctagatatggtgcccaacgctgctagctgcaagaggactgttggatggcaccgagc

SEQ ID NO: 121763 - DNA, 762 bp, Zea mays
  unsure (1)..(762): unsure at all n locations
  Clone ID: MRT4577_42525C.1
ggtctcctcctggcaaagtggcatggcctacccgcgaacaagttttccccgcagaggcctcccgagatgcctccttaatagtgccttncccatcctcctactcccccccactaacctctcttcactccaaggccgggtggttcttttcaagttactggttggagagagaccccaacattcttttcaaaccccattaacaggggactcccaagccagtggccaaattccggcaagccaagggccaactcttttacgccttttttaatncaagccccctttggttttccctctcccaaaccagaaccggttcactccccttacttaacaaggcaaggtttaacctttttgggtggcattttggtttgggcacaaaaaaattcaagggcacaaacaaacttccaaaaactttgtggctagcaaaaccctggcttgcccaattcttcagcaacagcaagtttcttttcatttcaaccaactggcttgcattgaactctgttggttatttgcaacaacaactaccatttcaccaacagctgctgccttacccccagcaattactttcctttcaaccaactggcagcattgaactctgctgctttatttacaacaacagcagctaccaacattcagccagctagctgatgtgagccctgctgcctttttgacacacaacagttgttgtcgttctatcgcacgctgcgcctaacgctggcaccctttttacaactgcaacaattgctgccattcaaccaacttgctttg

SEQ ID NO: 121764 - DNA, 258 bp, Zea mays
  Clone ID: MRT4577_42526C.1
atcccactggaaatgaacccatccgcgcgtcctccgtctagcaaagtctcaccctcatggccaagatcaagatcgggatcaatgggttcggctggatcggacggctggtggccagggtggccctacacagcgactacgcttagctcgtctccgtatacgacccctgcatgagcaccgattacatgacctacatgttcaagtatgacactgcgcacggacagcggaagcaccatgaggtcaaggtgaacgactccaaga

SEQ ID NO: 121765 - DNA, 459 bp, Zea mays
  unsure (1)..(459): unsure at all n locations
  Clone ID: MRT4577_42527C.1
gacgggggggaggacgnccgggncggacggcgacacggcggcggacacgcacaggcgcgagaagcgccggcagncgaaccgcgagncggcgcggcggncccggcnccggaagcagcagcaccnggacgagcnggngcaggaggnggcgcgccggcgggccgacaacgcgcgcgnggcggcccgcgccgccgacancgcgacccagaacacccgcgncgagcaagagaacaccgagcnccgggcccgcgccgccgagcncggcgaccgccgccgcaccgacaacgaggagcaccgacncgacgaggagnncagcggcgncgccaaggacanccaggaggagangccggcggacgacccgcngcagcgncccagggaggagcccaacccggcggccgccangcccaacggcgccccgcacaagcgccacaacggangangggcnccaccaaccacaccacc

SEQ ID NO: 121766 - DNA, 429 bp, Zea mays
  Clone ID: MRT4577_42528C.1
agctcggaattcggctcgaggggagcggccattttaatgtaattaacagaccgataaacagacggccgggtttattaaaaaaatggggcggacaaacacgcaagctgcacaaacgactatgcaatagaaagcatacatgattgctgcagtctacgcctacaaagatgaggagcgagacatcactcttggagatgataatttgtgaagatggcacccactaggggagaaaaggattgcgcacgctctaaacatataggatgcggtacttaatcacatatatggtgggggttaatcggatgagataccactgcgagctcaagtacagctactattgaaggaagcaatcttattacaaagatttggccattacgaaaactatacatgaataaatgggcatgaatttgctacttcaaagatagacatcaataa

SEQ ID NO: 121767 - DNA, 407 bp, Zea mays
  Clone ID: MRT4577_42529C.1
tggctcgaccgacgcatgcgtgcacacaggggtcagcattcacaaccatactacgccaatcgcactcgcaacgacctagcagcattggctaccaggtatattataccattcttgcgtctcgttgcccttttagtgagcgcgataaatgcctacattatctcacattgctcactcagctcctacagccattattgcacagatacttcaacaacttacttcaatgacctactagcatccacacgcgctagcctacaggctactacttgcacttgcctcgagcgccttacaatagccagtcgtatatttgcagcaacaattgttgcaacatataacgctacaaccgatggagacgcatcagctacctctgcacaacctggcatctctgagccacctagctgcgtagtatc

SEQ ID NO: 121768 - DNA, 133 bp, Zea mays
  Clone ID: MRT4577_4252C.1
cccgcctgcatccccccttcaggtgctgccgagaatgacgtcggtggcagatgaccacgcgcttgaagaagaaccgtatgaagcgcggacatctggtcggcgtacacggctcagatgtgagaagcacaggaga

SEQ ID NO: 121769 - DNA, 824 bp, Zea mays
  Clone ID: MRT4577_42530C.1
attgaaaaactatttatgaccaacatgatgttttcaaaaactttatatataaatataccattagaataatatatatatatatatatagtgagagataataggggcctctaaattagttttcgcctagggcccctaaaagctaggaccggccctgcacactcctacgttcgggggagacacttgatctttccccttctgcctcggttagttctggccgactcagtcgcgcgccgtccccgtgtggttggttgctggtcatggattcatggttgttttggttttggaatcccaggcctcggcgtcgccggtgctggagaggatgatccacagggcgcgccgcgggtggggcgccgccgactgcacagtcgctgtcttcggcgtcccctccgacgccgtcctcgccttcctccacctactctactcatccagggtggcgcccggaacggaggaggagctggtggccgcgcacgggccgcagctgctggcgctggcgcacgcgtaccgcgtcgggtggctgaagcgcgccgccgaggccgccgtgtcggcgcggctgaccgcggaccgcgccgtggacatgctcaagctggccaggctctgcgacgcgccgctgctgtacgcgcggtgcgcgcgcctggccgccaaggacttcgccgccgtcgaggcgaccgatgggtggcgcttcgcgcggcgccacgacccggcgctggagctggagctcctccagctgctggagggcgcggaccagcggcgggcgcggtgggcgcgggcgcgggcgtcgcaggaggcgtaccggcagctcggcgaggccatgggctccctcgact

SEQ ID NO: 121770 - DNA, 226 bp, Zea mays
  unsure (1)..(226): unsure at all n locations
  Clone ID: MRT4577_42531C.1
cgccgagcctagggtttagggnctttaactaaccgaccagngggcatgaaggtggaggtcatgcccaagcccaaacagggggtgctggaggcgcagnagagggaggaggncatggagatgagcgacctggacctgtggaagcacgagaagccgacaaggatntgaccgttgaccccgtagttaccgacgacgacgacagggtgggaggaagnggngntagtgccga

SEQ ID NO: 121771 - DNA, 172 bp, Zea mays
  Clone ID: MRT4577_42532C.1
ttctctatgtattttcgaactggtaatcccaagatgtctacttatacacacgcagactttgaatccatacataggatatagatttgctcaaagtacactctaactaatttgttctacttttaaaggtccttgaggtcttaagtacattattcacaaagctaccataaactat

SEQ ID NO: 121772 - DNA, 371 bp, Zea mays
  Clone ID: MRT4577_42533C.1
atgtatgacaggctggaggatactggggcacgaagcagccacaaaacataccgcaaaattgcaggtagctttacagctcttattgacaattggaaaacaagaactgtgcatcacatgcacaatcaggaatagtttcttagttggcactggctaggtcctaatcctactgaatcaggatctcctccgctgcaccccgacagctctgaggctttccaacgcacgaggacgggcagcagctccacttaactctttattgtatgaattttacttgaacaacttcattctcttagtgttccttgaaataaattcttcaatgatatgctcatattcaatcttgtccaataatcgtttctcgaatttcgaaaaagttc

SEQ ID NO: 121773 - DNA, 712 bp, Zea mays
  Clone ID: MRT4577_42534C.1
gccggccgggctcgggacttcacattcacatcaccggttgactccactcctgcatgcaactcaaatactccacccgagagtccgtaccaactcacatcacacctcaccttccactccataacaaaaagccacaacgcaatcccgatagtcctgctccctcggttcctcctcctgtggaagattggccgccggtcgggggtcgtgagacgagatcgagatgatatcgcgaaacgatgaatacacagagctgaccgacgatagatcgcctctgaacatgcccatgttcctggatcacaccccatcgacctcgctgcaaatcttcgactcggagcagcgcctctcgcgattaatcgtttacgttgctcatcttcaccgagccgctgctgtccttccacttcatctccaacaacaacccgtatgtcatgaagctccaggtcctggctgctgatgctgtgcaaaaactggtcgtcgtgcgtgccacctggccgcgtgaatcgcaacatgtcgtcgagaatcgagatccacaccgctgttactgggccatctggctcttatgcgagtaaaagctgtacaacacgcctgtagaagtgaatccctttgctgatcgccatgcacgtaacctacaatctgtaactgatctgcgcatgtatgcgaactctatctgcatcagtctgcacacatatgatgctggacatcttagatgtccgaggag

SEQ ID NO: 121774 - DNA, 354 bp, Zea mays
  unsure (1)..(354): unsure at all n locations
  Clone ID: MRT4577_42535C.1
gcttggaggtcaccttcttctcgttgacggcgtagtcctggtcggggagaagaaggtgatcttcatgctcctccagacgtctcggccggccacgagtggggctcattttgccgtatggtgttggcgcatgagctcatctatcaggtcttacacgcttcctattccttcttgctcttgtttgttgtttctctcctttctgtggtggggcgttattttcttggttggctgnggttcctgcactcccttctcgacatgctggtcccattcgtccctttcttccttttcaccgcccccggtcgtcctgcccgcggaacgtcctcttgtccccgttcctattctgcggccctgtcttct

SEQ ID NO: 121775 - DNA, 267 bp, Zea mays
  Clone ID: MRT4577_42536C.1
ttccacgtcccggggtccgcggcgcggatgcgaccgtcggcggcggaggtagcgcggactgccgcggagcttgccgcgtccgggactctcttcatggggggcccagaccgctggcctctcggtgtccgggcgcacttcggaggggattctgccggtttacccgccctctgcctgtctgccggtcgggtcgccccgcccgaagcgccgggcagcttccacgtccagtttcgacagaccggggctaggacaccaccagtgcacctatgc

SEQ ID NO: 121776 - DNA, 545 bp, Zea mays
  unsure (1)..(545): unsure at all n locations
  Clone ID: MRT4577_42537C.1
cccggaattaggggccccaggaaaaacagtaagtatgggggggggccaaatttggtttggccagggaaaacggaaaaaggggaaagggaaagcatcctacggaaaacaaactggacaaccaaaagcttaggggggggttatcccccccctaaaaaattttttaaaaccaaacaaacccgaaaaacaaaaaacgattttttttggcccatcctttaaaaaaaaaaaggggacggggacccaaaagggccccaaaaaaagggtgggggccccaacttaaccatttttgtttggccatgggccgggcaaaattttggcttccacaaaaaaagcctttttttttgtttccttgaaacccccattttttttcctgcctgggnggggggtcccaaaccaccaaaaaaacggggccggcccaccacgggacccgggggtccccccccaaaacaagggggggcaagggctggaaccctgcctgcaccaaaacggggccttggcccaaatgaaatcttgccatccaacccccttgaaagcggctaaagcgggtt

SEQ ID NO: 121777 - DNA, 374 bp, Zea mays
  Clone ID: MRT4577_42538C.1
cgtccgcccacgcgttcggatgtttccgcgcaggtcatcacaatacgtgacctgctgcggttcaagacctgggtcacatctgttgctgggcaggtggaggtccgttcgctgcagcagcagcgaaaattgcgcgaggctgggaacaatgagtacggaccggtggagatggccctccggcggctgttcaccgcggtggctgacgacaggaaccatgagatgaatcccgttgtcactgagttggagaagaacatcgccaattataaggcgaatattgtgaaggtaaggcgcacgcgcgccagaagggaagaggagattgatgctgagttcccgttcgtggctcaccacagggagccccccatttgatcagatcaggg

SEQ ID NO: 121778 - DNA, 258 bp, Zea mays
  unsure (1)..(258): unsure at all n locations
  Clone ID: MRT4577_42539C.1
cntgtcggtcctactggtttaaaaactttgtaacaagcatcacaacagtttttacctgtgcgtgcaaaagcgatgcatgaaatcaacgcatagctcaccatggaggctgttgatgcctaacatttgtgcttaacttaaaatgcaacgtcttacanncccnatgcaccaatttatcttgaaaatattgaaaccagtgctgctgttcctgagccaantcatgattgattggaggtatgtgtatcctaagcccagatccga

SEQ ID NO: 121779 - DNA, 410 bp, Zea mays
  Clone ID: MRT4577_4253C.1
gtccgcaatttcaccttcgatcgcgcagccgctgccgccgccgctactcgccgcacctcgcttcatttcgtgtcgccaagatttgactcgcactaacaccgcaggtattgttggcaaatatggaaccaggtatggtgctctcttgcgtcagcagatcaggacgatggaggtatctcatcattccaagtacctttgcgagttctgtgggaagtttgctgtgaagatgaaagcagttggaatttgggggtgcaaggactgtgggaatgtcaaagctggtggtgcttacaccatgaacactgctactgcagtcaccttcatgagcacgatatgccgcctgagggatcacacctaagcatgacgatagctctttatagtactggggtttcatgtagttgctcttgtcaggcatg

SEQ ID NO: 121780 - DNA, 497 bp, Zea mays
  Clone ID: MRT4577_42540C.1
ccccaaagttaaattgtctagagccaagaatgcgatcctctgtgtggtgaccaaactcagcaagtcactgacctcgccgtgaccagaacacctagatgaggtggtatttaaagaagtctactccagtgcctattcatcaagtggatggagctatctaactgggtattgggtacgaaggttctagagcctcttctctgcaacaaaggcaagccccggtgcatgcaacccctttcttgtgtttttaaaattatttttgcacactttaagtctagtgaatgtgcattaggtttataggagttgcttggaaaccctttgatgcattggctaccttgaaatccattctttttatagatacttctggtgaagtatcaaaatatgatttacaaaaaaatgcttagccctacttataagcagatagagtttggcctttgcacttatgcctagctcaggtttatcctggggaaggatggcttctacctgcaagaatatttttcatt

SEQ ID NO: 121781 - DNA, 374 bp, Zea mays
  Clone ID: MRT4577_42541C.1
ccggcctgggaaacctgcgtccgatgctcgccatcctccaccgtctgcccactctctacgtcaccgtaatcataatagacaaaggggaccttatcataaactggatctgaagctgcctctcaccgcgccctgaccacacttcgtctggtcttcaattgaatgttacatcgtcacacatgtactcaaggccagacccctgaccccagcataaccggagaacccctgcaaaaggatatttccaatgtacttcaacttctgcataaacactgtgctgctaaacgtgagatcgcgatacataccagtctccttcatgaagacaatcaaatctatcactccatgaaccacagttattctgcagtgcctaggccgaatca

SEQ ID NO: 121782 - DNA, 674 bp, Zea mays
  Clone ID: MRT4577_42543C.1
cattgggtacctcgaggccggccgggaaccaacccacaacttccatccacgcaccgacaacgatatcccgaaactacaattgagaagcaagagcagcagtcgatcgccaatggcttcccgcgtcctccgccccgccttccgggctatcaacatcaccgcccgcggtttccagaccagcgcggcactgagacaagagaggccgcttgttgcaccggttagaaggcctgtcggcgctttcaggggaggactcttcggtttcctcctcggcactgccaccgccggcgctggcatgtactactacgttgtcgacgagtaccgtgtgagcaaccagctgcttaccgaggatatctacgccctgcagagtgccgtgcagaggatagaaggttacgtcaggacgcttgaggagaaggtcggcgagaagaggcgctgagcgaacacctatcgacgaccgggtttcaggggattgccgaattcacaatgcacgtatcgggataacgaataaggggatgatcagcgcgctgatccagtggttgcatgcccctctccgatcgagaggtatcaataccaactgggtcagcggaaggatcatgcgaagggaaggatcatctttgctgcgagaactttcttataccaattcatctcaatctcagaaaaaaaaaaaaaaaaaagcggcc

SEQ ID NO: 121783 - DNA, 284 bp, Zea mays
  Clone ID: MRT4577_42544C.1
gggggtgttttttttttttttttggggggagtcaacctcctcaggccattccattacccttactctgaaacaatctgtctaaacgactaaaattaaccacttgaacaacgcacgggctctgcaaaaaaaaatggcatagctgctggttcatcacggggggcgacatggtgtaaataacattgggcataattgatctgagctgcgcgctgggcaatgtgtggggtgaggtaacacggcgctgataaggcgtcgggtggcgctgcgggggggtgggcgttggggcg

SEQ ID NO: 121784 - DNA, 582 bp, Zea mays
  Clone ID: MRT4577_42545C.1
ggtagcgcaggtcatggcatgactggctgtcatccccatgcaagccaccataggaggaacccaccgcaggcctgggagagggcgccggctgtagatccaatgcattgaccacccagtaaaggacagaatccacacccccaagaccgtacgcggcacgaaacacatcggtcccaggggaccttagctcccggccgcgcgacccgggcctgaagaccgtgagcaccatctgcaaagcacaatttaaaattgtaaaaaacgtgaacaatctctatgctattaaccatgcaaagagcaaacccctgatacatggagcaccgaataaccatctgtggttgtgacccataaatatatttcctctactgtccaagactatatgaactgggctctctatcatgcgtcacacacccacgtacgccctatactctgttttggctcgatctcctcttgcttgacgtattccgctgcgttgctaccttgtgccctaatactggacgtggacaccatggcttcagcacgatgcgaactaatatgagcggatctatgctccaatgctggggtcgcttacacgatggtgtgcaccct

SEQ ID NO: 121785 - DNA, 179 bp, Zea mays
  Clone ID: MRT4577_42546C.1
tgtcacgcgtacgggcccttccacgggtcgggcgattggactatgaccacacacgcgaccacgcaccatttgggagagggaaaggaatggagcctgccttttattccagctgagagcgatgctcatgcaaccggcggagggtacgtgcgctatggactagacgccaccctgttgcacgg

SEQ ID NO: 121786 - DNA, 821 bp, Zea mays
  unsure (1)..(821): unsure at all n locations
  Clone ID: MRT4577_42547C.1
tgtatctcaggacatgtcagacgattaccacctgtgtccgataaatcgtcactcaaagttgtgtgtagaaaatggtcgtgtatgttgaaatgtgaacgatagccccattggggacgtgtgttccatggcacgtttaaggtttctntgcttgtacgtttttcaggtattttttgtgaagtttcaatgctccagcgcaagctttcttagcatctaagttcccatttacatcgttcaatatcctgataagatcatccagtcctctggcttcttgtaacagattttctctattctccttgaggacacttgcaaccatgaagactgatggtgccaggctagtgggttgagtacaggatgagcgcaaccggtagtgtgtatatcacgttctttgtactcaagaattttgtacagacagaaggcggtgcggatagcatgccttgcatacataagaatttcaatacaggttgaaaacttgaaatcaacacaccttgcgacaaaaaaaaaaaaaaaaaaaaaaaaaaaaaaaaaaaaaaaaaaaaaaaaaaaaaaaaaaaaaaaaaaaaaaaaaaaaaaaaaaaaaaaaaaaaaataaaaataaaatagagaaaattatatataaaaaatggatactcaatgtttaaacactggatattgaaaatacctcttatttatcttaaaattatcatttcttttaccaaaaatttaccctatatccatacttatgtactatttataagaccctttaaaattcaaatttcatctaaatatatattcacttttacacataattttacttacacattttataagtaacattttctgta

SEQ ID NO: 121787 - DNA, 459 bp, Zea mays
  Clone ID: MRT4577_42548C.1
aaaaaaaaaaaaaaatttaaaaaaattcactcccacccctatctttttttcagccgccaccagcaggcagcagcttctccctcgcgcgtgtcttcttcctcacggcggctgcagcagggagccgtgctcccctccatggcgagcagcaagccggcgcccctctccattttcccctgctccatggcgcccttcctctctctgctgaccctggacgcctcccttctcaagttcaagtgagcgcagggcagcagcacctccattccccgcggatccatggcgctcggcagcagggtgtctccatggtcgaccagcaacctagggggtcgagctccccagcgtttccccctgctatccatggcgcgggcgagctccctcctcggctgcttccggcccaactggatgcccttgctgccggcgagcagccaagctcccatgggcgccaccccctgcagcttcccc

SEQ ID NO: 121788 - DNA, 334 bp, Zea mays
  Clone ID: MRT4577_42549C.1
cacccagacaggtgtcctcacggacggagccggagatgcaaccagctactggatcgtctctctcccctgtgcagtctgcactcggcgccaccgtgacctcgctttgatcgctgcctgcaggatgagcatatgccgccactccttcgacaccccgctgtaccggatcaacgtaccggacctccgagtaggcaccctggagggggtgctcgcgctcagcgatgacctcgtcaagtcaaacgtgttcagcgagggcggtttgcacaagatccggaggtagatagaagacctagagcgcgccggcagggccgacagcgtgggccttaccgttggtggg

SEQ ID NO: 121789 - DNA, 488 bp, Zea mays
  Clone ID: MRT4577_4254C.1
tctgttaactgaatctgaatatggtgaaccccagataaatgtttgatctagtgctgattactccgtttggttgaataactagctgaatcatgaatatatcttttcaactccgaaattgtcttcagaaacatctgatatatacagttatacacacaaagcaaatggctcaatttttctattttccagacagtgccccccccttgtgtattgtacatacaactgtcctttcctttgatgctactgtcagttaacgtaaaactctttaggtgtttgtggatcagagtctgttccagaagcacaccatggatcccgtaaatcttataccacctgcgttcaatattgtttgacattttagacacccaaattggcctgcgattagttatattttttgctgtaagaatgccaagcggtaaatggctggagtgaagtcatactatcaattgtatttctgctgtaaataaaaaaatgtcaattgatgatgaccggac

SEQ ID NO: 121790 - DNA, 348 bp, Zea mays
  Clone ID: MRT4577_42550C.1
acccacacgtccgctcacgcgtctgcccacgcgtccgcccactcgtctgcgaggcgtggctggtccgagtcgcatcaccgccgtacaacggcgatggcaagcataaccagaatcacgctgccgagtgcggctcgtgcagacgggccctgagcgcgtagcagtatcgctgcgtgacgtgcgcctcggagttgcacccccgctgcctggtgccggaggtacaacagtgccgcagcgccagcgagggctatgccgggcgcgcgggttccgcgggcagtagctgctgcttcgggctggtagacgacctgacgcgccgcttgggaacgccaggcaccggtcgtcaatagcgtg

SEQ ID NO: 121791 - DNA, 610 bp, Zea mays
  Clone ID: MRT4577_42551C.1
cctctctctactctctcccctgctgcttgccggtacttgtcgtgtctgctcccatcgtcgcgtgcctctgcccatggccgttgccttctccctactcgtggtcgtgctcgcaagttctctctgggcgcgccgctgtggaatccccatcgatgtccctcctgtcctaactagaccgtgccgagcctgcgtacgtcgtcgtttcactacgtccggcgtcgtgccttttgtgccggtcgtcgatctccaattcgccacggcgtcgagctctttcgacattgtcctagcccgttgtcgttgtcctagccttggaagctgacggtttcagcacttctctgaccgtgcccttattcgtggagctcgccggcttcccggtgtgctgtcgcggatgccattgctcagctcttatgctttgtcgaactcatctgcctctcttccaactcgccccaaccacgccattaaatcgcttattctgtcttagacgtgatcgccctttcactacagcttggactggtcgcgaggacatgctcctcggtcgacctcgccatcgaatggacactcctgttgccttgcaagctgccaggtcgtaagacgctgctctaagctcaccata

SEQ ID NO: 121792 - DNA, 471 bp, Zea mays
  Clone ID: MRT4577_42552C.1
aaaataaaaaaaatgttttttaataaattgttaaaaacaaaaaaaaaaatgtaagggattggattgcataaaacggggaaaggaaaaaaaacgaaagggatacccaattcttgaaataaaaaaacaaataaagtgaaccaagccgcaaatataatttagggaaagggagggggacaagccgcccatcgtaggttgggtttgtgggggagaaaaaaatgacacccaagtttgagttggttgttcaaaaccaaaaaaagaaaaaggctggtggtggattgcttgctgaattaaggggggaaccacctgacaaaaagggtgggaaaatggttggggaaaaaactggcaaaaacctggaaaaaattggggggaaaaaaacaaaaaaataacgggggggattaaacgcccccgaagaaaaggaaaaaaacaagggcaaaactggcgccaaaaaaaataaagacaaattttccaaaa

SEQ ID NO: 121793 - DNA, 339 bp, Zea mays
  Clone ID: MRT4577_42553C.1
ccaccccccaaaaaatttggcgttggcggggttttccccttatccctccgaacttttggtaaattggttgtccctcgaaaattagggttgggttcccaacaaacccccgctttagatttcacttttgcccaaaagggttacccttggagggaagaaaaaaactttttgccgcctttaatttttcccagtccaatcccccacccttggcccgggaggggaagacccaaatttccggttgttttggattagcccccgaaacgagtaattttcggttgccgttgttgaacttgttttaagttttgggttaacaaactgccctttaactttgggcctttgttc

SEQ ID NO: 121794 - DNA, 224 bp, Zea mays
  Clone ID: MRT4577_42554C.1
ataactcaaggagacacttgacgtggatgcactactcatagctactgtaagggcacccgttgggcaaaagacttgggtgggaaattatcaatgtcgttacacatcaaggttttgatcctgttgatgatcggatgcaagttattgatgcaactggcaatgtcggcatactaaacctgtaatctctaatttatatacgatcggacatgccaatggtaagctcatgc

SEQ ID NO: 121795 - DNA, 582 bp, Zea mays
  Clone ID: MRT4577_42555C.1
aattcggcacgaggcacaccacgcggtccgcgatggcaggccaccaccgcgcccgccgagtaaacggcacgcgcgcgcccccgcgccggccgtcggcggaaaaaatcacgcggagccggagccaccccgaaaagccacgcacgtcgccaacaaccgttctacgcgtccagcccctgctgtgcgcctgcgtctggctcgccctgctgctggcgtgcctcccgcgccacgccgcggcgcatgacgccgaggcgcggctgctgctgcagatcaagagcgcgtggggcgacccggcgccgctcgcgtcgtggagcaacgcgaccgcggcggcgccgctcgcgcagtgcagctgggcctacgtggtctgcgacggggccgggcgggtcagctcgctcaacctcaccaacgtcacgctggccggccgcaccatccccgacgccatcggcgggctcacggccctcacggtgctcgacctgtccacaccagcgtgggcagcggctttcctgcgtccctctacaactgcgccgccatcgcgcgcctcgacctctcccacaaccaggtcgccgggggacctcccgggcgaca

SEQ ID NO: 121796 - DNA, 326 bp, Zea mays
  Clone ID: MRT4577_42556C.1
cttctcttacgcaaagcacacgtgcgggctatatgggagctgaacgtatgcctagacactgcgttaataacggtatcagctggaattcatgccacctacgcaaggttcgacttgagcctggtggcaaacggctggtcggtaaaacctccgcaaacaaagagtgtatggacgcatttaacaagcattgtcatgccaaaagccgcctgtagtatgagatgaggtagtacaatgagatggtggtgatgcacatgaaacataggagctttagacaaccaacacatgaattgcctgattaacaggatggtctagacacaacagcggtctat

SEQ ID NO: 121797 - DNA, 281 bp, Zea mays
  unsure (1)..(281): unsure at all n locations
  Clone ID: MRT4577_42557C.1
tcctanacntcgggnnngnnctanattacggancatttctcnactcagaaacctgaaacatacgggattatncncctgcttgcaactatggcaacagccttcanaggctatgtncctgcccgtgaggaccaaatatacatgtctgaggggccagcagtgaattacaaacttgactatccggncatgcccatancattggagacagancctagttncaatgaatgctngaggaggctactcantagnacagtccccacccttcagaggattctttaaccttt

SEQ ID NO: 121798 - DNA, 241 bp, Zea mays
  Clone ID: MRT4577_42558C.1
gacaagcgctagcgtaaacgcggtttgcacactaaccgcaaccactttcaatagcggggctcttgattgcttgaacatgcagggctgctgtatcagagaatgaacacatacgatcgtgacgaatgaacacattaagctcgcgtaccaaggtggatttcatcaacagagaaagctggataatactagctgacagcgtgatgccctgaacacagtggagactgtgtggccttacgaaattgat

SEQ ID NO: 121799 - DNA, 806 bp, Zea mays
  unsure (1)..(806): unsure at all n locations
  Clone ID: MRT4577_4255C.1
gggaccctcgaggccggccgggccgggcatttcgtttcctcccgttcgtcgaagccccggcggagaggcgaggtgagctttctcggagaggggacctcgcgccaccagccgcccgagcttcccgcgccatggatcccatcatgaagctactcgaggacgacgaggatgagagtctgcactcgggtgccgacgtcgaggccttcacggcggcgctgaaccgcgaggtggaggccagcgccagcgccagcaccagcaccagcgttcccgccggctcctcgtcccagcccacggatcacggtgctggacttttacctcaggaacacaagtcactattaaaccatgatcctggtcagtggcaagatcctgtaaagaatgaaattgtaaaccaggagagccagcaacaggaacagacacatgcatttagaaatgatcacccgtcaagacctgaaatggtttctcaaggttctaataactgtccccttcccactaatacaccaaaagaatgtgatttactgaaggcaaaacaagaacctggaagtacatctcaacaaggtattgttgctcagcagcagcctatgcagcaaatgaagagtgaacaaacaccaattgtcagtcagcagcagtcgatgcagcaaatgaagaatcaacaaacaccagtcacaaaccaaacaaatagcgcaactacaacagcaanagccccagttgttacatttcacatggtaattccccattntgagtcgctatctcgacaagccggggacatagaagtgcagtccattttcgcccagtgcggaaaatgagtcagc

SEQ ID NO: 121800 - DNA, 677 bp, Zea mays
  Clone ID: MRT4577_42560C.1
ccgggcacgcgtccggccaccggacgaacacacagatcgctacagcccgcatgaccaacctctccgccatggcagcgagccaatcctacgtgatccgattcgacggccacttcgacgagccgtcgccgagctccgcgggcgccgagccgccgggcccgcagccgccgttcgcagggaggatgatctcgctcgagcgggagcaccaagtcattgtcgccgccctgctgcacgtcgtctccgggtacgccacgccgccgccgcaggtcttcacgccgccgccggcagcggcgcgctgccaggtgtgcgggatggagcggtgcctcggctgcgagttcttcgccgccggggagggcgcattgggcggcggcgcggagaaggcagccgcgacaggaggcgcggcggcgctggcggcggggcaaaggaggcggaggaagaagaagaacaagtaccgcggcgtgcggcagcggccgtgggggaagtgggcggcggagatccgcgacccgcgccgcgcggtgcgcaagtggctgggcacgttcgacaccgccgaggaggccgccagggcctacgaccaggccgccatcgagttccgcggcccgcgcgccaagctcaacttcccgttccccgagcagccgccgacggggcacgacgagcccatcagcagcaacggcgacgcgagc

SEQ ID NO: 121801 - DNA, 310 bp, Zea mays
  Clone ID: MRT4577_42561C.1
gctagatagtgtattctaaaaattattccttttttactgtcacgtctgatgcatcagcgcatgatcgtgttctacataaggccaagccgccatcattaacgcttcttctgactcaaacttagaaagtcggtcacaagtctcttgactttatcatctatacttacatatttatcatatcaactacaacattctactctcaatgttgacagctgactgtgtgttaaccataacttacttctactacgtatgattatctagtaaccatagctccatcaatgaattttattatgatccaaatacaccttcattt

SEQ ID NO: 121802 - DNA, 656 bp, Zea mays
  unsure (1)..(656): unsure at all n locations
  Clone ID: MRT4577_42562C.1
caggccccaacggccaacccatcttcttcactgttcaacggcctggtatacttcgccagccgccagccgccggccgccggccgccgcattgcccatccacagcggcagtgcaatcgattgtcttccttctactggtatccggcactttcgtttgtgttcatgtgcctcaagtaatattgctgtcaacatggtcaagggatccacaggccaccacagcaaccccatcgctccagtcccgtttgaggcgtttcataacggatcatggcatggagccaattctataatgatacgggatggtggtttgcttgtaaaatttgtctcctctggatacgcagtcgcagtccagcatgatattgatgggtcctatctgcgcgttcgttctagaaaggcaacttgctcggattgctcacatgttctcaagccaggcgccgatgtttgtgtatggcaagcagtttacagaggagaaacaaaagattctgtactgttgtgctgccgtgatgcaaggctcatcaaaatcaagagaaaccatcaatcggaccggtgcctatgcttgtttgccgttattttctacaaagaccagtgcccaggcagcaaaaaaaaatgatatccggtacaatanctgnacgtagtgacgatagacgacatctgcatcttgc

SEQ ID NO: 121803 - DNA, 249 bp, Zea mays
  Clone ID: MRT4577_42563C.1
ctcctcttcgtcctcgtagcacagctagcgcctgctccccttcggctgtgatcatgtcttgcagcatcgtcaagtgcaactgctgctccagctgctcgttcgtcgactcatgcaactgcatgtgccctgacgtggagaccgccgccgccagcagcatcaagaccatggtcctctctgcgccgaccaccaaggccagcgccggcggcttcgatgctgccacctagggcggcggctgcgactgcgacacct

SEQ ID NO: 121804 - DNA, 234 bp, Zea mays
  Clone ID: MRT4577_42564C.1
tccaagttgaagctaaatccatatgcaaagaccatgctccggaacaccattcttcgctaggccatgaatcacaagctccgggtggataacgtagctgctgcagcagcggcactacatgccaggtcagatgacaaggcggcggttgcaggcacgaagcctgtggtaggtaagaaaagatagaaggctgctgttggtgttaagaagtagtagaagcctctggtgcgaaaaaatgca

SEQ ID NO: 121805 - DNA, 436 bp, Zea mays
  unsure (1)..(436): unsure at all n locations
  Clone ID: MRT4577_42565C.1
tacctaagcttggatctctctacacggccgcccgttttttgtttttaaaaccatttttttttttttttttttttttttttttcaaccttaaaatctcacttcttatttctattttgccccttacatatatccaaaaaacttttttatttaattacctctcataaccattttaaataaatgccccggcgtgtgatatatctttcctactgaccccttccttctatcaaatctagtttnacaaanggcaacactttttctatttccaaaaaggtttcaacattaaccccaaactgcttgtataaaggcatcaacttttgctttttcaaaaaagaaacaccgttttctgcagctagctggctaaatggaacatatattttctcctccaaataaacacccgggttcatttccccccattggttaaatggaaaaagttttt

SEQ ID NO: 121806 - DNA, 419 bp, Zea mays
  Clone ID: MRT4577_42566C.1
cccatgttgatattgttcacctagcaacacattgtatgcataaatgtattaatgagcgggatactgtctgccggttgattgtgtatacatgttctgatgtcattctagtaatgaactaatttagagagccagtttcccttctcaccctgtgctcattctacaactttagtatattggccaaggtaccctgacattgtttggcacctatctctttattaattgttctttaggctggtgattttttctattcagatcaaagaactggtggatcacattcaaatgggattggaggcaaatcaattttggtccaactttactggaaagccctcttttggaacatgagatgtcaactgatccatcaaaaccatgtgtagcttggtttattgggtggccctcgttccaaagaaaaaggtaatggc

SEQ ID NO: 121807 - DNA, 323 bp, Zea mays
  Clone ID: MRT4577_42567C.1
ctgtttttttcgacccccggatcgctcagagatcgcatcagatacagtagaccactgggggccggcgacccctttccagggcattacagccaacatccggtgacccaacaatggaaggagtgggccttggccttgcgcttcaaacacgggcggcgggctttggcttcggccctcgcctgagccgtctacagtcacccatccggagggttagagttcctaaacctgcttgagctgcggttttcatgaaggctcccgggtccaagaccaaagtaccgctccctgcgaagaaatcatccggaggtcatgaaaacttgcgtaactac

SEQ ID NO: 121808 - DNA, 158 bp, Zea mays
  Clone ID: MRT4577_42568C.1
accacgcgggcgctgatcatcgacctcgccggcgagcccgcgaggcgccgagggtacgtcttcttctccgaggtccagttcatcccggccgaggaccacgccgccatcgacgggctacggaaggagcacagcagcggcaggttaagggacagcgtgca

SEQ ID NO: 121809 - DNA, 486 bp, Zea mays
  Clone ID: MRT4577_42569C.1
atggcgaggttcgagaataaaatgggacatccatccaagtgtcatcactggtggcaagttgttcgccacgagcccaagtggtcagcaaagcatgatcctggtagtggatctaatgggaatacgaataagagaacccgacttggagtctccggtgaatgtagttctggaggcactgaagacattgagaaggaagtgccccgaccattaggttgtgatagggcaaaggcggaagcgcgaaatacaaagacgaaggggaaagggaaggaagccacaaccagcagattagtgaaggccaagtgtttgaagcaacggaacatcctaaagggtcgatcaaccagggatatggacccagctaaaagacatatccatgccaaggccgtaaagatggtcgaaaaagaacttagtctgacagatgacgaagaaaaggatccgaaagtgaaacgtgaagaggagggagatgaggatgagacggatgactccgattag

SEQ ID NO: 121810 - DNA, 643 bp, Zea mays
  Clone ID: MRT4577_4256C.1
aaagattgtgcctagggcgatcgttgtagtcgtccggagtttccctctaggggaagcacgctgctgaactggaacagctgcagaagagaccgacaggacaggcagaggatctgcgcgtgcctgcccttctgctacgtagcagatctacaagaacaacatacactatgagccaatgcacacggatccaacgaagagatgagcaggaatcgacgcaagagaaattaggatccgaagaaaggaacggaccacggcgacggagtcgaggaggagaaaggcgcttgcgccgagtaccaggcggagggaaagaggaagagacgagtgaaggtgctccatatatgtagtaaaataaaaagcagcggcatggacgctatggcgaaggacagaagcacagcgagccggcgctgttggaaaagcagtggcgacgggacgggtgcggagcacgcatcgaggcaaggcagggcgcagatttgtgggattttagaatccggtgactaaccctcacctaaccctatgcgcacaggcaccgcggagcacgactgcgtacttcgagatccacagaagaggcacagaagaggagagcactggcctggctaacggcgaagcgccggccgcaacccacgcgccgtccttggccggcgtcact

SEQ ID NO: 121811 - DNA, 347 bp, Zea mays
  unsure (1)..(347): unsure at all n locations
  Clone ID: MRT4577_42570C.1
cttccggggcctttaatcattttttgggttattgggctgaccaatttggggggaaaaatggggcgggccattttttggtgggcctgggccaaaaatttgtcaaaaggttaactttttttgaaaaattccgggaagctgtggcttggttcgttggaaaatggcaacaatgtcaaaataatccttattgtggaaggacatattttaattggcttaatggaccccaaatttatttggctccaaaaaaaaaaaaaaaaaagngtaatcaaaaaagaaaaaaaaaaaataaaaaaaaaaaagattcacttgataaatatttaaaaaaaaaaataaacgagagctttgccatg

SEQ ID NO: 121812 - DNA, 848 bp, Zea mays
  unsure (1)..(848): unsure at all n locations
  Clone ID: MRT4577_42571C.1
attcccttcaagctccagatcgtttctagctaaatacaaatcgactacagttacatagatctctgctcctcccactgaaatattccttgtacttgatggccttctgtcttctccattctcgctggtcgttcctctcccggccctttggttcccgaagttctaatggcatggggaaccacgtgtagggcgttgtagagcacagccctctatatatgcttagtacaagcaccaaatccgcacctcaaactactcaacgtgtacgagctctctgcctcaccgcgcgcttttctaatcccgccgccgctagctgcctcgctgctggtttgttgccttctactacgtacctcgccacgcctgcctcggccccccctacatgatgcagttcacgcacactgcgccaccgccgccgcctctgcaccctaacggacatgctggagggctagggctcgggctgttccttgacgtcggcgcgcccagggccgcacgcccctggccggggagcttcccgacgcctgcgtccaagatctcgctcggcaacctcaacagcaccagctgcatggagcagctgctggtgcactgcgccaacgccatcgaggccaacgacgccacgctcacgcagcagatcctgtgggtgctcaacaacatcgcgccgccggacggggactccaaccagcgcctcacggccgcgttcctctgcgcgctcgtcgcgcgcgcgtccgggaccggcncggtgcaaggggttcaccgccgccgtcgccgncgnncgtcgagtcggncgcgctcacgtgaccggcttcacggccgtcgagctcgccagcttcgtcgacctccgccctggcaccgcttcg

SEQ ID NO: 121813 - DNA, 286 bp, Zea mays
  Clone ID: MRT4577_42572C.1
aaaaggatcaaacccatttttttcatttttgatggggacaaccattacaaaacaaatcccatttttaaaaataaaacgactaacaaactcgggcctccaaacaattattgcacaacaaaatacagtccaatggtccacaaaaacaaaaagaatgtaactagtaaaaaaaacacccacatgtcaaacaaaataaatttgaagtgaaagatctaacatttttatggaacaaaaaagagagacccaaagctcctacttttgtggctggaaatttccatgccaggcccaa

SEQ ID NO: 121814 - DNA, 544 bp, Zea mays
  unsure (1)..(544): unsure at all n locations
  Clone ID: MRT4577_42573C.1
tcctcttagagcggccgcccttttttttttntttttttttttttttttttttttttttttttggaacaacaattttttattttttcttttttcttgcagatcacatcatatatatacacacacacctcaaaacatccaaaattacaaatagacttaaccatccaatatcatcatttgcatacaaattccaactgcacaaatcgaaatcaaaccgaaaattttcaaaaggaaaacgaaaaaggtcaaaaccagataatccgagagccttttgtaacgtgcgtgcgtttaattacaaggaacagtccgtcgcttgagaaaacttgctactcatcatcaccggccttcttcgatgacagagcccaggaactgcgacgaggcgtgcgaggccgacctcggcgccacgcccgactgcccactgacgttgctgctcatgaagctgctggtgttgccgcccttgatctgccactcggtgatgtagctgggtttgttcgccacctggcccaccttcacgtcttccgccagaatcgacacggcccgtgacatg

SEQ ID NO: 121815 - DNA, 698 bp, Zea mays
  unsure (1)..(698): unsure at all n locations
  Clone ID: MRT4577_42574C.1
aaaccattcccgactccntcgcccttcgcgctacggcatagcgcatcgccagacggcacagcgtactgatatatcatctatcaccttcaattatgaatcatggcgatggccaatgtcaaagcgcaggctgacgtcccaactccaagaaagacgacaatcaccaataacgggtaccgcacctacaagctatatgcgatttgcgcaatgaccactgacgacatctcttacctcttccccgcacgagacaggacaagagtccacagaagactaaacacgtggcccttgtcgctaatctgcacactgcgaaaggggatgctccaggctcctgctggtcagaagcctgagacacacatcacacatctctgaaccttgatcattgtaccagagatgatagtgatgattgctacagcctacaaagcttcgaccttcaagcaatctgagatgaaatcagagatcattaccctgtacattgctgcatcctccatctcctacaaaacgaccaagcgcccgagatccgggatacccgcctctcactcctcattcctcattcatgagatgtgactcggcactctactctctaaaaacactatacgttgtgcgattccccattccaaatccagaattcaaagttagacattgatccatgtatggtgggnaagtaggaaagatatgcatatctcatatcggatgcgaaaaac

SEQ ID NO: 121816 - DNA, 234 bp, Zea mays
  Clone ID: MRT4577_42577C.1
gttagtttaaaaataaatagagatatagttcgattcaattcttaaattttatagtggaaaatttagagctcattataatgcccagttttgcttgcacggaacagtaaaagttcgagcactcattgctggtttctgagagttgtgtgatttgttacaaaataacatattacaaagttatatgtgatatagtgaacaatgacatattacaaagttatatgtgataaaagggagcgc

SEQ ID NO: 121817 - DNA, 437 bp, Zea mays
  Clone ID: MRT4577_42578C.1
cccacgcgtccggaaaagttctggtgtcgtacgcagtctcacacatcatcagggttggtctgatcaggccgtcgcaccatcccaatcgatgtctacatctcagccttccattctgtcatcggagaccttgtctatgaaagaggaaacttcgttgacacctgggtctacatttggaaccgtaaagcccgagtcactgaacccttaccagggcagagaagagaactcactgcaagcgagcagcagctgcagcagtgactgtacgccattgagttctaacatcataagtgagatctcgaagctcagattgaactgaagatcactgatcaagcaactcctgtctgaaatctctaccagatttactccctaccagccacaaggctaggtagctgacgagttcccacacctggacatgatcaacgacctgctggatgacgagc

SEQ ID NO: 121818 - DNA, 124 bp, Zea mays
  unsure (1)..(124): unsure at all n locations
  Clone ID: MRT4577_42579C.1
gtgaagccaaggagcaacaacttgaggattcnaancaagatgagnagaangatgncanancgctgcaaaacttggtnctcaatnnagctnccnctgncgaaagtggtgcttncaatataaggac

SEQ ID NO: 121819 - DNA, 157 bp, Zea mays
  Clone ID: MRT4577_4257C.1
cctacgtcgaagctccgagctcggtcgcgagctgctagtcttggatatctcatccgattctgcgatgacaagcctctcgagacgtctcatcatgagcatacgcctccagaccacgagccaggcacgtgtcgccgttgtgcgcgcacaggtgctgcgt

SEQ ID NO: 121820 - DNA, 278 bp, Zea mays
  Clone ID: MRT4577_42580C.1
ggagaagccgagagccgaacgaagagaccgagcccccgccgcccgcggcgtctgttcctttcgtgccgcttcgtggtggcaccgtcttcccaccaacacctacctctaccacctatatcaacaccacctgtccacctatccatgaaatactactagactacaccgcatcatcagtgacaacctcagctacatccgacagtctatacccaactacactctgcaccagcgccttataccactcctgcactgttctaacgctgcttcacatgattaagacg

SEQ ID NO: 121821 - DNA, 188 bp, Zea mays
  Clone ID: MRT4577_42581C.1
gagtcgtttagtatatatatagatcaatcatatcatcgttgacataaatatgttacagcaatgcaatcggatcaccaaagaggagaccactcgactgaccaaactgcccaaatgagagagtttttaactgaggacttgttcttctcttacacaacacaatacctatttggagcagctcggccccttat

SEQ ID NO: 121822 - DNA, 482 bp, Zea mays
  Clone ID: MRT4577_42582C.1
aaacccaaccaaaaaggccccccccacaataaaaaaacaaaaaccgggggggaaagggagtttaatgttttatcaggcccccccccaaggggggggattaaaaacaccagggttaccttaacagggaccggtaaaaaaacgggaaattacggaaccataaccccaaaaaaaaaagaaaagggggctaaaggttacccccccaaccaacccccgggtaaaaaaaaaaaacattttttggaaacagggtcccaaaaggggcccccgacggactagggcccaaccaccggaaaaaaacccccctggggggggaattttaaccaaacggcccccgggcctaaagccttccccaacgggggaccctcaccccgggaaacatggggggggggaaaaccccaatattctgcccaacgaaaaaaaaaggaagggcgaaccaacgggcccaaggctaaggcccattggaaaaatttcatccaacccccggg

SEQ ID NO: 121823 - DNA, 259 bp, Zea mays
  Clone ID: MRT4577_42583C.1
ctgcctgccaaccaggtgcagatccctcgggacagatcccagtataagcacatgggctagaggccgttaggcaggcaccccctattcctgctcccccaactggatcaggtagaacaacaaaagcacttttccatcttgtacacgagatacaccacgctagctacaatcaaacaggcctgggtatctgaggcttgcttggcttgtgtccatgcttaaacccacggaagggggagactctttcggattgtagggtgactgg

SEQ ID NO: 121824 - DNA, 486 bp, Zea mays
  unsure (1)..(486): unsure at all n locations
  Clone ID: MRT4577_42584C.1
aagagaggcgagccgaggaggcgncaccgaagcccncgncggcggcccngcgccnccnggcggcggcggccgngccggcgcnggcgcgcgcggaccngacgcacgacaaccgcgnngaagaacaggggggggggggggcagaaccngngcagccacgacgngacgcaaacacaggagccgcgggccaacagcccgccgcggngcgcgggcaccnacacgnggcacccgcgcagccacgccgagnnccccgngngccggnggacggggcgccngcgcgcgcccgacgccggccagggggagnnccacgncggcgncgacggcggcgccnncaacccggcccccaacgcgcagccgggccagcgcgncccggncgccggcaccccgcacggcncgccgcngcagggccgcngccccggcggcggcggcgccagccagggccgcggcgccgngcaccaggggccctgcggcgacngccgcaacggccag

SEQ ID NO: 121825 - DNA, 824 bp, Zea mays
  Clone ID: MRT4577_42585C.1
cctcgaggccggccgggccgggatgtcgcaactcctcctcctaatcctactgacgagaactggatcgcaccgcgagctccatagacaacaccgccggtcaatcgcaccgagaccaatcatactcagcacccctgactgcatgctccgaggtggatgcctgtccatcggccgctgcatatggacactgagcggccgcataactaccctggcgataatgatcttactagcgctgggcacaacgacatcgaccattgactcgcaataaccgcatctgggatccatcaacgtcggcaatccggctttctccatgctcacctgccatggacgatggcggcgcgctcaccccagccataggccagtgtcgcgaactacaatacggtccaggcatccaccagctaccgctgccaggcgtgaacacgctgcacgcgcagggcgacaagctacaaatgccacaaagactggccgggaagcgcgtcgaccgtgaccacgagactggggcaccacgggtcagacacggggtgcgcctgggaatcgggcagccacacgagatactcgctgatccgcgtgagaacatactgtacatgcagaccgaaggtcagtacctgaataacctgcacgataccgacttctgtcgtgaacagacccgcgctggtcagcaccaggacaacatcgagagcacctacttcaacatgatcttcgcgtcagtgcactgtcctcgtctcgcagctccccaagttcaactccatgtctggcgtatccctcggcgccggcgtgatgtcgctcagctactgcgacatcgcgtggggcgcgtcgtgcacaagggg

SEQ ID NO: 121826 - DNA, 228 bp, Zea mays
  Clone ID: MRT4577_42586C.1
acccacgcgtccggagcattcataatcacaccaatcgaagcgcactaacatcaacctaacaacaatttctaccaagatattggccctccttgcgcttcttgctctttttgcaagcgcaacaaatgcgtacattattccataattctcacttgcttttacttccattatttcacagtttctaacaccacatactttaacggccttcgaacacacagctgttcaagccta

SEQ ID NO: 121827 - DNA, 824 bp, Zea mays
  unsure (1)..(824): unsure at all n locations
  Clone ID: MRT4577_42587C.1
attgggatcctcgaggccggccgggaacttatcgaaatccaatcgacctgcgacaacgtcgatatcatgcgcttctcaatcgcatcgtcacttctcttcctgacgagtgcagctagcgctgcctcgtcttggggcttcaaagatggctccgttaccgtcgcctccaagcaaggacacgccgctactgccaaattcagcaaccaggagccagtcaaggatactcttattctaggaaaggcagataccatcaaagtctcattgactacgaccgaaggcagcgaagcgaagcgacctcaccaggcctttatcgtcattacagaatcgaccggcatcgaggtcgccctccctctcgacgtaaagtcctctggaaaggccgtggcttctatttcgcacaaggacatctctgtcccgttgctcctctccgaggaacccctcaaggtcaancctcgtgttgggctccttcggctcgtccagccccctcatctctcccgttttcaacattcagatctatcatgtacccaacactccccttcccgcgtttgagcgtcccatgcgatacggacgtcgagaggagatccaccacgtctttaaggttggcgagacgagccctcctaagatcatatctattgtattcgtgaccgccatcgtgtgcacgtttcctctgcttcttgtcgggtggagtaagctcggtgctaacctcgaccacctgcctaaggcttttcaaactgcccctatctcacacngctctctttgtcggctccatcatcgccatttgagggatcattttttctctactaacgtcagtggacctttttcagttgctg

SEQ ID NO: 121828 - DNA, 224 bp, Zea mays
  Clone ID: MRT4577_42588C.1
gattatgtaatatgttactagtttattattgctgcaaggttgaatatttgaatttatttgaagaaaatcatatagtgatttatctttgttgtattgttgaatagtcaagttcatagcaaaaatagttgcataaagatattattctcaataaaacaattagctaaaacaaccaaatgataggaaggtcattgcagcctcaaaattcacttttctagagttggatg

SEQ ID NO: 121829 - DNA, 239 bp, Zea mays
  Clone ID: MRT4577_42589C.1
aaaataaaactgcagtatttgagaaaactgtagaatttttccaaaaccggaaaaaaactttgtttccaaacaccacctttccctttaacgctacaagggaaaaagcggccaagcgaatggctttttttttataaaagggttcccgggtggcaattggcgttggcacggacattggtcccaccacagggaataaacacgaccttctttcatggggcgaaagggactcgagcccaatttcg

SEQ ID NO: 121830 - DNA, 256 bp, Zea mays
  unsure (1)..(256): unsure at all n locations
  Clone ID: MRT4577_4258C.1
tcgggactcttgtnctaccacccgcgaccgcagggagagaaaggggaagcccggcgtcgacccgggccccagcaaccagcaaatcgggacctatgatctgggcaatccatccatggcggaggaatcaagccgacccttgccaaagtttggtgaatgggatgtaaacgatccggcttccgtagacggatttactgtgatattccacaaacgcccgagatgagaagaaaggtgggaatggtcaagacacacacttacc

SEQ ID NO: 121831 - DNA, 275 bp, Zea mays
  Clone ID: MRT4577_42590C.1
atcaagaattcactaggccataccagagcaagaacatggatataaaagtgggtggctatgctaattatctagaagagtcgacattatattatctggatccccaaggaggtgtgtcagggctagtctgagtgctgacataatctcttggtatgaagatggatacttcggtttggacttaccagtacgactgtctcagtctccagatgatgttcctttccgtccacttgtctaagtcatgccccaccttgcgcaatagacgcgatcgcgtatacctc

SEQ ID NO: 121832 - DNA, 837 bp, Zea mays
  unsure (1)..(837): unsure at all n locations
  Clone ID: MRT4577_42591C.1
ctgtcggtttgttggcctggcctggtatgcgcatttgttcctttagataaaaaagacggtggagatcatactgaagggtagaggtttgggtgattcatggatgttctttagctgtttggatgatatcttaagtttgggattggaattgttggtcatgcctgcatggttgaggattcataagcgtcttgaggcgtgactggactgtttagatatattctcctctttgatttctccatgtgagcagtttggtttctgttctgagtattatttggattttttggttgttctccagcatttgagcataggcttgcccggactacttttgggctcaataattggaatggtgcagagctctaggagattcttcgtgattcgatcttgtcaaacttctctatgttaataacttctaacattccaaacattgatctttcttgtcagtaactcttagttctatgcagatatgacatacaatgaggacaattcaaaccaatgtgcataacttcactaaaccaggcttatccccatctcccttgctatatttgttcacacgttttcgatgttgaacagctttctccaaaatggttaggcatcatggtcttttgttcattgcaggtgtacttgacaattttacagaagtctgatgtcatgctgcgtgaaaatttgtttggagaccctctgacttcacattttttatttagttagctagaaaaccacttagttgttaagtttgagtattcaactgatccgcagaggtgaagagttctanaagcttgtttggcaactttcgttctggatagaggagtcttctacaccacaaacttatacctatgctgcatc

SEQ ID NO: 121833 - DNA, 789 bp, Zea mays
  Clone ID: MRT4577_42592C.1
ctctctaaaccctagaaacttaggcaccgcccgccgccgccgctgctcccaggacagcagccaaggaagacgaaaccaagcctccgccatgccgaaatccaagcgcaatcgctcagtcaccctgtcaaagaccaagaagaagccggggctagagcggaagggcaaggtggtcacggagatcaaagacgcgattgagcgccacagcagcgcctatgtcttcacctacaacaacatgaggaaccagaagctcaaggacctcagggaccaactcaagtcctctagccggatattccttgctggaaagaaggtcatgcagatagcattggggcggtcacctgctgatgaagctaagacaggcctgcataaactctccaagttccttcaaggtgcttctggattgttatttacaaatctcccaagggatgatgtcgagagattattccgagaatttgaggcgaatgattttgcgaggacaggaagtattgcgactcaaacgatcatgtagtatgtgaagaaggaaagcccctttcaccagaagcagcacacactctgcgcgtgcttgggacgaagatggcgacgttccgactgtaccttgtctgccgctggtcgtccgatgactttgaagtgtacaaggaaggcttggcgcacctgggaggtgaggaagctgacgagtcttcttaaggttgttggattatcatggtggcgtgcttgttgtctagctgtgttcagacggttttgtgccatgcctttgtacccttaattcgacaggaatctcaaacatatgatctg

SEQ ID NO: 121834 - DNA, 680 bp, Zea mays
  unsure (1)..(680): unsure at all n locations
  Clone ID: MRT4577_42593C.1
gagcttatctagtcggcggccgccccgcgtgctgcggcgacacgctgcactgccgctccagctgccgcgcgagcgccgcggcggaaccggagccgccgccgccgaaccttgtcttggacgagccgctgctgctggccggcgcctcctcgtggccggcacctgacgcgtagtgcacaggagagtacttaccggagtgcacggagctcatgtcatcgtcgttgtcgcttaaagcgtaccagtcatgatctttggtccaagcactgccacatgggccagagaagcctccgaaggcatatggccccaccccgcagtgagaaccatgggaggatgcgggggacgaggagaggtagtagaagggaggaggccgctcctcgtcgtcgtagtcgccgccgcgtgacgcgtacgtgtactcgtgctgctgcgctcgccccggcagcagcctgccgatctcctgttggatcatggcggcgatctccgacgcgtggcggtccgtgatgtccagctccttcaccatctcctgcgccacctccgccgccgtgtcgctcgccatgtcgaacgggaagtagatgttggcaatggtgacggcactggtaccgtgccagcagcagcancancatggtggtggtggtggaggaggaaaggtccagcagcagctcggcggcggacgggcggttggccgc

SEQ ID NO: 121835 - DNA, 836 bp, Zea mays
  Clone ID: MRT4577_42594C.1
ggccgctcgaggatcgctctctaaaccctagaaacttaggcacagccgccgccgccgctgctcccaggacagcagccaaggaagaggaagccaagcctccgccatgccgaaatccaagcgcaatcgctcagtcaccttgtcaaagaccaagaagaagccggggctagagcgtaagggcaaggtggtcacggagatcaaagacgcgattgagcgccacagcagcgcctatgtcttcacctacaacaatatgaggaatcagaagctcaaggacctcagggaccaactcaagtcctctagccggatattccttgctggaaagaaggtcatgcagatagcattggggcggtcacctgctgatgaagctaagacaggcctgcataaactctccaagttccttcaaggtgcttctggattgttatttacaaatctcccaagggatgatgtcgagagattattccgagaatttgaggcgaatgattttgcgaggacaggaagtattgcgactcaaacggttgagctaaaggaaggccctctggaacagttttcacatgaaatggaaccctttctgcgcaaacaaggactgccagttcgtctaaacaaaggtgttgttgaattggttgcagatcatgtagtatgtgaagaaggaaagcccctttcaccagaagcagcacacactctgcgcgtgcttgggaggaagatggcgacgttccgactgtaccttgtctgccgctggtcgtccgatgactttgaagtgtacaaggaaggcttggcgcacctgggaggtgaggaagctgacgagtcttcttaaggttgttggatcatggttgtgtgcttgt

SEQ ID NO: 121836 - DNA, 333 bp, Zea mays
  Clone ID: MRT4577_42595C.1
caaacaagcacccaaatttttgggccgttttttaaaaataattaaagactttgggggttttagctttccatgggagacaaatttaatttccctgtaaagttccgggggaatgtgctgggaaaactttgggggtttacatatgggaaatggacgggggacgttaaacccaagcgggagcaggttacacaactgggggcattttttttgggatgggcgcaaatttacaatgctgggacaaaagggatccccccatggggtttttaacttccaggtgggggagatcgcaagtttttttcaccttcaggtgggggagatcgtaaaggaaagacatgt

SEQ ID NO: 121837 - DNA, 1978 bp, Zea mays
  Clone ID: MRT4577_42596C.1
ccttcgtctcggcgactggggaaagggacggccggaaagaaaaaatcgaggaagaccgggagagtcacttcgggagcggtacataggttgggtgactggctgactgctgcgcgaaaagagagggagagagagctagcgtggactgaagggagggcgcagcaaggacgagccccgctcgcccggggatggccacagcgagagccgttgccgcagcggcggcggcgctggcggccgtggtgctggtggcgctcctggcgccggccgtgcgtggggtcgaccgcagcgagttcccgccagggttcctcttcggcgccgcgacgtcggcgtaccagattgaaggcgcgtacctggaggacggcaagggtctctgcaactgggatgtgttcacccacacacacagtggaggggtgatggacggacgcaccggagacgtagccgacgaccactaccatcgctacgtgggagatctggagatcctgcagtcgctgggagtcaacgcctacagattctccatctcatgggcgagggttctaccaagaggccgggttggtggcgtcaatgcaggcggggtagctttctacaaccgcctgatcgatgcgctcctgcagaaaggaatacagccattcgtcactctgaaccatttcgacatgccgcgcgagctggaggtccggtacggtggctggctggacgctgggatccgggaggagtacgagcactacgcggacgtctgcttcggggcgttcggcgaccgggtgcggctctggacgaccttcaacgagcccaacctgctggtcaagttccagtacatgctgggcgcgtacccgcccagccgctgctccccgccgttcggcagctgcgggagcggcgactcgcgccgggagccgtacgccgcggcgcacaacatcatcatgtcccacgccggcgccgtccgcgcctacagggagaagtaccaggcgacgcagggcggctccgtcgggatcgtggccgccatgaaatggtacgagccgctgacgaactccacggacgacatcctgggcgcgcggcgcgcgcaggtttcgagacggactgtttctggagccgatattcttggcgattaccccggagcgatgcgggagatcctgggatcggacctgccgaccttcaccgcggaggagaaggcgctgctgctgcggtacaaggcggacttcatcgggctgaaccactacacggcgatctacgccagggactgcctgcgctccccgtgcaacctcgggtcgtacgaagggaacgccttcgtctcggcgaccggggaaagggacgacggggtcaagatcgggggagatactgcgctggcaggtttcttcgacgtcccagaggccatagagctggctatccagtacgtgaacgggaggtacaagggcacgcctgtgtatattactgagaacggttactcgcagtggagtgatgccagcagggaggagctgatcaacgatgtgaggagaaagaactacctgcagggctacatcacgtatctatccaaagcagtcaggaacggagcaaacgtgcggggctacttcgtgtggacgctgctggacaacttcgagtgggcgttcggttacaggttgaagtacgggctgtaccacgtcgacttcgacacacaggagaggacgccccggatgtctgcgaggtggtaccagggcttcctcacggcccgcaccagccagcgcgacgaagcagcgcaggcacggagagcagactcgtgatgaaccattcccacttccaccgatatatatcatcgaacgccttgctagacagccgagggtctcatgactcgtgctcatttccgtcctcgcggtatattggaataactgtggctgtggtgtcctaatgtctgtatatgcatatatcatatattttgacctcaaaagaggtttagatcaaaaaaaaaaaaaaaaacaaaaaaaaaaaaaaaaaaaaaaaaaaaaacaaaaaaacacac

SEQ ID NO: 121838 - DNA, 475 bp, Zea mays
  Clone ID: MRT4577_42597C.1
gccgcccgggcagggacaagcttttttttttttttttttttttttttttagccttttttttttttttttttttttctttttttttctttgaatttaaaaatagagccctaatacttagttaccgagaggccccccctttcagcgtgcagaactttattatggcgggggaaaccataaaaaattttaaaaacggccccaccaatggggggcggacccaaaaaggggggaagaatcgtcaaacctttttcgccaacatgccatcaattgctgttgttcaaaaaaggcaaccaagttctcccccttttttgggaacaaccgccacaattggtgccgtggccaaaaggcattaatgtttcccccaacttggggggaaaatggagacaaatgtgtgcgaccccacaaacaacaatgtttgccacctctttcctaagggatggcaaaaactgttgttgcaataaaaaggcataagggctcc

SEQ ID NO: 121839 - DNA, 570 bp, Zea mays
  Clone ID: MRT4577_42598C.1
ccggccgggctccgtcgctggttcctctctccctacttccctacgtctcctctctcttgcgctcagcttctgggcggatctcctggccatgtgccccagcgccggtcgcccctctctgctcgccctccagctcgccatggcagccgtgccctgctcctagatcccttgcctcccccatggccgagcgccctctccagccgccggtgctcgcctagcccatctcccatggcgcccagcccggtttccagcgccatcctccaccaacgcgcacctctggccgctccagctcatctccctcgccgtggagctcgttgtgcgcgcccctgctcccggctcctccatggccgcacccctagcactcctcgacgtcggcgtcttctccctctcctcgccatggtgctgagccgtgcccctggtggtttgctcgccgaacctccagcttcctcgcgctcggcttcctggtattccagctcgccgtcgcgtcattcaccatcgagcccgtcgttctcctctgtgctcgcagcccatcacggcatccctagtctatcgtgccgcgctctggtcgtcgat

SEQ ID NO: 121840 - DNA, 2463 bp, Zea mays
  Clone ID: MRT4577_42599C.1
atgtcgccaccaactattgttgatttggccaagatgatcgaggacctggccaacacagtgacgaacctgcagacgaccgtggtcgcgctgcagaagcagaagtcatcctcttcgttgactaccagcaggggcaacgatggccaacaccacagcaatcgtccttcgcggttccagaaactggatttcccccgctacgacggtacgtccgatccattgatcttcatcaaccgctgtgaatcgtacttctatcagcagcggatcatggaggagaagaagatccagtcggatgaaggtaccccgtcatggcgtcgattcaaggagttgttgaacctgcgctatgggccgccgctgcgttctgcaccgctagccgaactggccgcatgccggcgcactagcacagtcgccgaatatcaagatcggttccaggcgctcctacctcacgccgggccactcgagcagtcgcagcaggtggctcggtgtcttgggccccatcgtctgggacctcggtcggcgccggatgacgttccagcactagggacgcgccatctcctggaagggcatggcatcctccagcgcgacaaccctgggcgccacggcagcgggagagccctcctcgacaagctcctggactcctttggggacatcttcgacgcgcccaccaggatgccccccaagcgtgcgcacgaccaccgcatcaccctcaaggcaggcgtgcagccggtggtcgtccgcccgtaccgctatccgacggcccacaaggatgagctggagcggcagtgcgctgccatgatcgagcagggcattgtccgccgcagcgactcaccgttttcatcgccggtcctcgtcatcaagaagctcgacgggtcatggcgcttcggcgtcgactaccaagccctgaacgcgctcactgtcaaggacgtgttccccataccgcttcggcaacaacagctcttcatcaagcgcgccaagtgcgccttcggcgccccctccgtcgcctacctcggccatgtcatatctgaggcaggcgtcgccatgaatcctgccaaggacgatgcagcaaccgctgcgttcacggcattcaaggccgcagtcatcacgaccctcgtcctcgctatgccggacttctccaagctcttcgtcatcgaacgcgacgcgtcgtcgcacgatttcggcgtcgtgctcgtccaggacggccaccaggtcgccaacttcagccgtcccatcgccccccgacaccacaccctcgccgcttacgagtggggactcatcggcctcatccacgcggttcggcattggaggtcgtacttatgggggcggcgctttgtcgtcaagaccgaccactacagcctcaagtacctcctcgatcagcgcctggccacgataccccagaaccactgggtcggcaaactcttggggttcgatttttctgtggagtacaggtcaggcgcaacgaacaccgtcattgacgccctctcccgccgcaacaatgtcgatggcgagttgctggcaatctcggcaccccgctttgacttcatcgctcgcttacggcacgcccaggccactgatccggccctggtcgccatccataacgaggtccacgtcggcacacgcatggcgtcgtgggcagtggtcgacgatatggtcacctacgacggacgcttgtgcataccgcccgcagcaccactcctgcaggagatcctggcagccgtccacaacaacgaacacgagggcgtccaccgcacgctacaccgcctccaacgcgacttccattttcccaacatgtgtcgtttggtgcaggacttcgtgtgcacgtgcgcgacttgtcagaggtacaagtcgaaacacctgcacccggtcggcttgctgcaaccgttgccagtgcccgccatcgtctgggcagacattggcatggacttcgtggaggcgttgtcccgggtacacgggaagacggtcatcctcttcgtcgtcgaccgcttcagcaagtactgccacttcatcccgttggcgcactcgtacatcgtcgagtccgtggtgcaagcattcttcaccgacatcgttcgtctccatggcattccgcagtccatcgtgtccgatcgcgacccggtgttcacatcggcattctggcgcgagctcatgcgcctcatgggcacgaagatgcacatgtcctccgccttccatcccaagacggacgaccagacgaaagctgctaaccgcgtcatcgtcatgtacctgcgctgcttcacaagtgatcgtcctcgacagtggcttcgttggctgccatgggctgagtacatctacaatacgtcctaccaatcatcattacacgagacgtcgttctgggtggtctacagccacgatccgccctccatccgttcctacgagcccgtgagactcgggtggcagcggtggccaaggaaatggaagatcgtgaggccttcctcactgacgtccgctatcgcctag

SEQ ID NO: 121841 - DNA, 339 bp, Zea mays
  Clone ID: MRT4577_4259C.1
atgttgctccctctaatagaagtatctcaccacttcgtcacgctcacgtccgatccgtccacatgtgatacgccgatagatggaatcatccatgtccatgtcggcggccgccacagtcgtcttacagatatccgtgacgaccagcgtcatgttgcgcatctcactgtccttgatcaggtgcactttacggatgatcgcgctatgcctccgctggacgtacatcatcgctaccacagactcagcagtcatgtcaacaacgctctcgaactacgcacggtgcctatcagcggcagttatccagtactagagccggaattccagaatcgtgatcacgatagt

SEQ ID NO: 121842 - DNA, 590 bp, Zea mays
  Clone ID: MRT4577_425C.1
tgcagatggtggagtggcctgagtccatgtggctggacgacgacgtggtgcccggcctggccacgacgccgtgggagttcgaggacgacaaccccttcctcgcctaccagaggaacaacgctctgttcgatcaccagctggaggcatggaacaacgacggcagggtcgagctgttctgaggcgctgagatgatctacttcttcctcgatcgtcattagattagatgtagttaattaatacgtcatccccggcctacgatcgagcagttcgcgttgcacagaccagagcactcacggccgttgaaaataagcaagagaaagagatgaaagtggttgcacgcccggtttcttggttttctaaaacctttggccgggccgaccacaacttgcaaaggaacagttggagagaaaaaaaaatgttcgttagcaatctaccagtgctgtttggcattggagaacccttccgtggattgtttattggacaatgcaagacccctctacgtacgttgaaaatgggaataataaagccaggccactttgtaccgaatgtctaatttctactagaaatcaaggcgttccggtggttctcag

SEQ ID NO: 121843 - DNA, 626 bp, Zea mays
  Clone ID: MRT4577_42600C.1
gccggccgggcctggcaaaaaaaaaaaaaaaaaaaaaaaaaaaaataaaaaagaacaaaaaaaaaaaaaaaaaaaaaaaaaaaattaaaaaaaaaaaaaaaaaaaaaaaaaaaaaaaaaaaaaaaaaaaaaaaagaaaaaaaaaaaaaaaaaaaaaaaaagaaaaaaaaaagaaagaaaaacctcccccccccccgggggtttttgaaaatgggggtttcccccgccgaaaaaccaaaaacggcgggtgcacccccgggggggggtttacttgccccctccggtgtttctccccccggggggccccccccccccgacaaaaaacgggccacggggggtttaaaaccccccgggggttttttttcccccgccgggttgttgttaccccattgaaattaccccacccaaggggattccccaaccacactttgccagtggcaaacagggtgaattcaaacccacgcattttgttgggaaccgggggttttttaacccccccgattatgggacaccgattttagtttcgggggaataatttttttcggacgggaacaccctattggtgaaaaaagaagtattcgatgggggagagttgttggaaaaacctggggtgtggggaaccccccc

SEQ ID NO: 121844 - DNA, 113 bp, Zea mays
  Clone ID: MRT4577_42601C.1
aaggttgaaccaagcgttcggcttcaaccttcaagggcctcaaccttcctggcggcctaactccttttgaggacgcggatccgtccggttagacaaagccgtccgcacccatg

SEQ ID NO: 121845 - DNA, 250 bp, Zea mays
  unsure (1)..(250): unsure at all n locations
  Clone ID: MRT4577_42602C.1
ggacgaganggtacaggttagggactttggctcgtctcctcagatatcatctaaagccaatggtatccacgaataatctgattccgaataacgacaggagtgagctatggacgcactggagttgcacaaatgaatctccctgcagaagctatggctttcggtactagcgaccaaacttggaggccagaatctgtagcacgggactcatatgcctaatctggatggcgaacggtacgaatgtgatagcgag

SEQ ID NO: 121846 - DNA, 2367 bp, Zea mays
  Clone ID: MRT4577_42603C.1
acgctccacctccgccccacacgcgcaagcggcggcaccagtccaccattctcctctcgatccgggatccaaatcggccgcctcatcgcgaccctctgtctccatccgctccggcgtgccacccacgcaggctaacgtctgggctcccctccttatcgccgggctccgcatcgccaatagtctgatggcgccgcagttgcagggctgcaactggatctcctcctggccgcggctccggcagatgtccccttggccgccgcgctcctccgaatcgccgcggtggagcttcctgcgtctcgcgacgcgccgacgcccctgcgcaggcgcggtccgcgccgtcgcgagcgcgggcgcggtgggaaccgagctcctggagatggaggagcaggccgaggacgtggacgagagggagaggctcaggcggacgcggatctcactggcgaacaagggtaacacgccatggaacaagggcaggaagcatagcccagagacgctgcagcgaatccgtgagaggaccaggatcgcaatgcaggaccccaaggtgaagtcatgttaagaaaaagttggtgaatctgggtcatgcacagagtgaggagacacgggtaaggatatcagtgggggtgaggcgaggttggagtttgcgtctacaaagactaatggtccaggatggttgctttgtggaatggagggacatggtagctgatgcggctagaaagggttttgctggtggagtttcccttgaatggaattcatataaaatattgagtgagcagatgcggcatgattggttggagaatcttcagaaaaggcgatcaatgccaaggccaagaggtaatagacgagcaccaaaaactcctgagcagaggagaaaaattgcagaagccattgctgcaaagtggttggatcaagaatatcgtgaacgagtttgtagtggaattgctagctatcatggatcatcttctgcaactaaaacaccgagaaagccaagacctgctggagaaccaggtgtaaagaaacagacgacaaggaaaaaacctatgcaagccaaacctgtaattttagaggatgctcatggaaaaagtgcagctcttaagagaaagaaaagcgcaactccctacaaagatccgatggcagttgaaaaattggagatgatatcaaagattcgagctcaaaggacagcacaggaaatagaaaagaaagaagctattaggagggccaggacactgattgcagaagcagaaaaggctgctgatgctctggaaactgctgcagcgatgaacccttttgcccaagcatcacttatagaggctagaaagcttgttacagaggcaagagtatcacttgaatgtgttgatgatgaagagcctcaagaaactgcttccaatgatgtgtcagggagctcagtgttactgaacttgcacgatcaccgtcatggactggagatgcagaatggaagtaatttgttgaagcaagagaataaacctgccaatgggatggaatttcctccaagcagtgtcaatggccttgctttccatcttgatgtttctgaactcagcggaacaaagcaactatatcagaggatagagaattccatggaaagggcttttcttctcccttcggcttcgtcaaagcttaaaagtgcgaacggagattatggaataatagatctacatgtgaggcagtcgatggtcgatgacacggcaaagcataaaggcatcacagctgaaacttgtcctccagggacactagagctagaagaagatcctcccagtcccaggtctgcagaaaaggctggaaccagggaagattaccctgggggaaaaccggaagaagacgcaccctcatcggaagaaaaggctaggatgaggtgggtacgtgggaggttggtcaaggtaaaaacaaacggacctggggatttagaaatctagtattaggcagcaaatctggcctagataccgttgacaggcaatcgagtttgctcacttccatttagccaccattttgtatgccattcgcatgatttggtgtttacgacctgcacctgctcgatgggaggaaccaagtataaaatgtactagcgttgacaggagtggcgtggtcctggggaactttactgatttgcagtctacagtgaacgtgcaggagcgagcacattacgatcaccctgttttcctcttctccgcgggcattgtagttgtggtaggtaataggagctggatctttttacttttttcttgtaaggccttgttagattagcttgtaattcatgtggattgagtgtgatttggtgggtttaaattccaagtaggtcaaactccttaattttttctaatcacattcaatccatgggtaacgggattaagttgt

SEQ ID NO: 121847 - DNA, 303 bp, Zea mays
  Clone ID: MRT4577_42604C.1
cggacgcgtgggcaagggaaggtcgaggcacgagagcgctagcggcggagctagcgagcacccggcgtcgggcgacggtggcgccatgggtggttggtactccgccattgcggccaccaggctgaagatgctgcgccgcggatgccggggtgccgctgccgtcctccccgtcgccagccacgacagcgtcaccggcaaggagaggaagaggaagtgcaggaagcacgcctctatcctgggcgactccggcaccgtcgacccggacttctcgcggcggtaccggctcggcgcggagcttgggcg

SEQ ID NO: 121848 - DNA, 377 bp, Zea mays
  unsure (1)..(377): unsure at all n locations
  Clone ID: MRT4577_42606C.1
gcaaagacaaatccttagaattattgtatatgcctnctcgccataatcagtgcaaaagcgtactcaagccagcgaatagatgagttgaacaataagagagcaacaagaaaaggattccttttttttatgatgacagaagaaggaatgcaacccaacatgacgttcatcatgtcacctcttccttatttaagggatgtttagtagcagatggaacgatcaaaagaactcaaatgccaatcatccatggagaaggatgtggtcatgtcatgtgagagcgacatttgctgcagcacaaaaatgatccgagcgggaccaaacatattctaggcagaatcgtatcaccaccagcaccgaagcttggatagcgcctggatata

SEQ ID NO: 121849 - DNA, 224 bp, Zea mays
  Clone ID: MRT4577_42607C.1
atgtgtcacggcacataatagagtaacaccatgtaattgtaaacatgacaaacgccatacacaaaatgcagtaatgcaagagttgatcatgttcttaccaaattataatgtatatgtactatgccataaccattctacttatggaagggaagtttaaactaccttgtatacatattaattttaaagggcttgacatattatggagtaacacagaaggaaacttt

SEQ ID NO: 121850 - DNA, 515 bp, Zea mays
  unsure (1)..(515): unsure at all n locations
  Clone ID: MRT4577_42608C.1
gcgggggtggggggttttttttttttttttttttttttttttttttttttttttttttttttttaggaaaacaggtttgggtatatattcaatcactgggccaatcgttacaggggacatattttctctttcttgcccaaaaagaacaaaaatgcggggggggggacgatgccctacgattacctgccccaacccaaggccaacagaaccgaccccaaacatgcgtgggggggagcccgagtcaaaccaaaccagggctccatcctttattcttggccccccccaagcccaaagcagacagtaaaaaaaaggggacatccatgcatgccggaaaccaaacaacccaacaggatcaacaattgcaggggctgcactttcagctgtcaccccaacttcagccgggggggggcttnccaaactcgccccccgccttaaactgggccccctttttttttttaagggcaacccccaggaccacggggggggggctggcctaagccccccccccctttttt

SEQ ID NO: 121851 - DNA, 387 bp, Zea mays
  Clone ID: MRT4577_42609C.1
cattgttgtcaattttttttattctttgtttttcccttaaccttaaagggggcgggggggggttcatttttattattagaaaaccccccaggacccggcgggaccccagtttctactacttaaccgaaacacgtcaacacctcaagtacaccccaaacgaaaaagggggggtcggaaccccccaaaaaaataaaaagccactctgacaacacccgcggggagccctcttccttttcttcccccaaccaatccttttcggtgaccctttaaaggcaaaaccaaaaggggaaaacctcccccccaggaaccagccccaacaaataaaaaagcagggtttttggttgaatttaaacctcaacccctgggcttctgctttagcttttggcg

SEQ ID NO: 121852 - DNA, 330 bp, Zea mays
  Clone ID: MRT4577_4260C.1
tgggctaggcccaataaccttggcctactaatacaactcccaaccctgagttagggtttcccacatttagattttagagatacatggcataatgttgccaatagtcagtttagagtcaaggaagatttcgtcctaagattttgcattattgtaagctttctatcttacttggtagaaaattgtattaccgattgtgttcgtaagttgggcacttatcttattatgcaccatatggctaaaccacatttcgtatcatggaataggttagcacaatgttcgcaactttggagagcattgcacagagtgatcctgaaactgctgagattgtgt

SEQ ID NO: 121853 - DNA, 413 bp, Zea mays
  Clone ID: MRT4577_42610C.1
agtcgacatcgtcctcgtgaaggacggtctacgtgagattgtcctcttgtcgagatcctcacgtcccggtcctcaccacgggtggccacggggtgtgacatgatactaggagatgtaacggagcaaagaattctgagaggagccaaagatgaggataagggatactgaagatcctcgtcgagctggacaaggatctcaagtctgctctgtgcgatttggaagacgtcctggatgttattgaatatcgctgaatcgagaagaaagtcatcggtggtgacaaaaagttgatcagcactactatttgcatctgggcgctgcaagctattggcgattggatcacctactggaagcgtagctcgttcgggcaaaagctgttgcagtgcgcgcgcccagaaccagtatcagaagctcag

SEQ ID NO: 121854 - DNA, 768 bp, Zea mays
  unsure (1)..(768): unsure at all n locations
  Clone ID: MRT4577_42611C.1
ctacgtgatgaatccttaactaagtgattgacatgatttttggatattatgcatgcgtgacatacatggttttgctgttaatgtataaagtgcatgcgtgcaaataggtggtttggtattgatacaacatactcgtggcagtagtgttgcttgcattgacgtttgagtcaaagtcgcgaacttgtgttcggacttgatcacacataaatgttgatgtgcggtgttggttgaaacgaaacgtggccagtgtagatggatacggttagggctagtttgggagtcaaaaaactggagggtgttggaaagactaaaatctatttcttatttaaaattgaataagngagtgggttttagcccctccaacccttccgtttcgtgactctcaaactagccttcaccggagttcgattggttgaagatattgtgcgggacatttcgaataaatatcggtgtatatgaacaattgcgtgcgttggaggcatgtttaaaatgtctaaaggggaaaataaaataaaagaaaaaaagaaaggagaaaaaaggtgaaaaaatgtctccagtcgcccttgtggccggctcatcgcagtagattttgagaaagnnggatgttcttatcgtgttcgtgtgatcatgcatgtttgatccagaagtccatgtctctcaataggtatttggtttttgtttgttcagatataatagcattaattattgagagatgtacctgcatttaaatagttattaagacatgtatgtgcgcattgaaaagaacta

SEQ ID NO: 121855 - DNA, 256 bp, Zea mays
  unsure (1)..(256): unsure at all n locations
  Clone ID: MRT4577_42612C.1
gagcccacccacgcgtcctacatatcctggcaagtttcgctcagggggtacttgaatttgagacaggaggtatctccatccaagtactatgtcgcggagcatctttattatgaaaaacgagtactacctgcttgggtaaacgtgctttacattttcagcttccacttatcaccattggaatgaatagtagngaacaattcttctgatgctcgggctaaaaaaacaagaaaactgaaaccaaccccccaagtggcag

SEQ ID NO: 121856 - DNA, 355 bp, Zea mays
  Clone ID: MRT4577_42613C.1
ggctaaccctttccatcaggtctgtcatttagcaataataataatggggacaaaaatgcttttttgttaccaatcacacttaccccaagcattacagattgcatcaagccatccacgttcaaaccagatgccacaccgccaaacctacaggacttgagcatcagtgttcaacttctctgcgatgctgattttgagcccctgtgattgcttgacaggttttcccacgcaagggttttctgaatttttgcatttaaaagcttaatcaaagcaacccgttacaattttggcaccgtatcaataaaatcaagtatgaaccttccaaatctgttgtggtgtgccacgcttttctttcaca

SEQ ID NO: 121857 - DNA, 1184 bp, Zea mays
  unsure (1)..(1184): unsure at all n locations
  Clone ID: MRT4577_42614C.1
ttgggtacctcgaggccggccgggatttgagtacttctcgtttctcttcagcttcatcagccatggtggttcccgtgatcgacttctccaagctggacggcgctgagaggaccgagactctggcgcagatcgccaatggctgcgaggaatggggattcttccagcttgtgaaccatggcatcccgctggagcttcttgagcgcgtcaagaaggtgtgctccgactgctaccgcctccgggaggccgggttcaaggcgtcggagccagtgcgcacgttggaggcgctcgtcgacgcggagcggcgcggcgaggaggtggcgcctgtggatgacctggactgggaggacatattcttcatccacgacggctgccagtggccgtccgacccgtcggcgttcaaggagaccatgcgcgagtaccgcgccgagctgaggaagctcgccgagcgcgtcatggaggccatggacgagaaccttggcctcaccaagggcaccatcaaggatgccttctccgccggcggccgacacgagcccttcttcggcaccaaggtcagccactacccgccgtgcccgcgcccggacctcatcacgggcctgcgcacgcacaccgacngctggcggcgtcatcctgctgttccaggacgacaaggtcggtggcctggaggtgctcaaggacggcgagtgggccgacgtacagccgctcgagggcgccatcgtcgtcaacaccggcgaccagatcgaggtgctcagcaacgggcggtaccgcagcgcctggcaccgcgtgctgcccatgcgcgacggcaatcgccgctccatcgcatccttctacaacccggccaacgaagccaccatctcgccggcggcggtgcaggccagcggcgcgtatcccaagtacttgttcggcgattacatggacgtgtacgtcaagcagaagttccaggccaaggagcctaggttcgaagccgtcaagacgggggcgccaaagtcatctccagcggcataaataaatagggaaaacaattattgaatgcattattaaaaggtagtaataagtttgttaagtattaactagctagttgccctctttgctctctatatatatatatactaggtgtatgctcgtacgttgttacggcgccaacatgttatgataaaataaattaatatacaaaaacattaatcatc

SEQ ID NO: 121858 - DNA, 820 bp, Zea mays
  Clone ID: MRT4577_42615C.1
agccctgttcccaggtccgtcgtctcatgctccggtccacgcacccgctcagccccagcaggagcagcggaggtagctcggctccggcgtctagctccggcgaggcgatggtggggggcgcgccgagcggggcgaagctgctgcagatcctgaacgtgcgggtggtgggcaccggcgagcgcgtggtggtgctgtcgcacggcttcggcacggaccagtcggcgtggagccgcgtgctgccgtacctcatccgcgagcaccgcgtggtgctctacaacctcgtctgcgccggcagcgtcaacccggaccacttcgacttccgccgctacaacaacctggacgcctacgtggacgacctgctcgccatcctcgacgcgctccgcatcccgcgctgcgccctcgtcggccactccgtctccgccatgatcggcatcctcgcctccatccgccgccccgacctcttcgccaagctcgtcctcatcggcgcctcgcctaggttcttgaacgacagcgactaccacggcgggttcgagctggaggagatccagcaggtgttccaggcgatgtcggccaactacgaggcgtgggccaaggggtacgcgccgctggcggtgggcgcggacgtgccggcggcggtgcaggagttcagccggacgctgttcaacatgcggccggacatctcgctccacgtctgccagagcgtgttcaagacggacctccgcggcgtgctgggcatggtgcaggcgccgtgcgtggtggtgcagaccacccgcgacgtctccgtgccggtcaacgtcgccgcctacctcaaggccccctc

SEQ ID NO: 121859 - DNA, 1393 bp, Zea mays
  unsure (1)..(1393): unsure at all n locations
  Clone ID: MRT4577_42616C.1
gggaccctcgaggctggccggggccagaagcttcatacacctagaggtagccatgacaggacccaaaaaaaggtccagtccaggtccgtaccagctgcgacgacgcttgtcagtaggtaggttgagctagctgcttgttgatcactgctatatatacgggtgccatggatccatgccttctccatcctcaagtcatcagctagctagccttccctacagcaactgcttacatacaacacttccatcttcccgagctcgtcttcgatcaattcccaagtcaaataataatataacaacaatggtggttcccgtcatcgacttctccaagctggacggcgctgagagggccgaaaccctggcgcagatcgccaatggctgcgaggagtggggattcttccagctcgtgaaccacggcatcccgctggagcttcttgagcgcgtcaagaaggtgagctccgactgctaccgcctccgggaggccgggttcaaggcgtcggagccggtgcgcacgctggaggcgctcgtcgacgcggagcggcgcggcgaggttgtggcgccggtggatgacctggactgggaggacatcttctacatccacgacggatgccagtggccgtccgagccgccggcgttcaaggagaccatgcgcgagtaccgcgccgagctgaggaaccgcagtggcggcgcgattcagagtagcgacaacggcgacgcatggtccctcgcgccgcccgccatcgtcgccagcgaccttttccccgattgtacctgcaccagttagagttggagaagaccaacccccaccgtcttgggacccggtaccatcgccgagagctggacggcgctgagagggccgaaaccctggcgcagatcgccaatggctgcgaggagtggggattcttccagctcgtgaaccacggcatcccgctggagctgctcgagcgcgtcaagaaggtgtgctccgacagctaccgcctccgggaggccgggttcaaggcgtcggagccggtgcgcacactggaggcgctcgtcgacgcggagcggcgcggtgaggtggtggcgccggtggacgacctggactgggaggacatcttctacatccacgacggatgccagtggccgtccgacccgccggcgttcaaggagaccatgcgcgagtaccgcgccgagctgaggaagctcgccgagcgagtcatggagaccatggacgagaacctcggcctcgccaggggcaccatcaaggacgccttcaccggcggcagccagcacgagcccttcttcggcaccaaggtcagccactacccgccgtgcccacgcccgnacctcatcacgggcctgcgcgcgcacaccgacgccggcggcgtcatcctcctgttccaggacgacaaggtcg

SEQ ID NO: 121860 - DNA, 1943 bp, Zea mays
  Clone ID: MRT4577_42617C.1
actccaatatcactgcaccacttctgctaatcccttgttcttgtgcctccgatccggagctctcaccattgtcatcgtcaatcgatcaatataaagcgagccaattaccccaaggagctaccgcttgcgacggtatggcgatcccggtgattgacttctccaagctggacggccctgagagggccgagaccatggcggccctcgctgccgggttcgagcacgtggggttcttccagctggtgaacaccggcatctcgacggacctgctggagcgggtgaagaaggtgtgcagcgactcctacaagctgcgggacgaggcgttcaaggactccacgcaaggcgctcacagagctcgtggacacggaggcaggagatcgaggacgggaggcctcgcagcgaaggtaggccgcgccaggtgcaacggaaagggactgttatcaggtcgcggccggcacgatcccttcttcggcaccaaggtcagccactacccgccgtgcccacgcccggacatcatcacgggcctgcgcgcgcacaccgacgccggcggcgtcactccttcctgttccaggacgacaaggtcggtggcctggaggtgctcaaggacggcgagtggaccgacgtacagccgctcgagggcgccatcgtcgtcaacaccggcgaccagatcgaggtgctcagcaacgggctgtaccgcagcgcttggcaccgcgtgctgcccatgcgcgacggcaatcgccgctccatcgcatccttctacaacccagccaacgaagccaccatctcgccggcggcggtgcaggccagcggcggtgacgcgtatcccaagtacttgttcggcgattacatggacgtgtacgtcaagcagaagttccaggccaaggagcctaggttcgaagccgtcaagacgggggcgccaaagtcatctccagcggcataaataaacaaggaaaacaattattgaatgcattattaaaaggtagtaataagtttgttaagtattaactagctagttgccctctttgctatatatatatataaaaaacgtgagtttcagtgcgaggcgcccaggttagaagccgtcaaggttgcaacgcccaagttatctccagcgacataaataaatggaggggaccaattattaaatgcattataatttatttgttgaataaaacagccggagaaataatgataatgtaaagtatatatgataaacaccggttaggatttaaggtgtttaactttagttgcatggtataatatgatatattgtgtagcaataagataattaaatattcataagtttctagatcgaggtgctgagcaatggccggtacaagagcgcatggcaccgcatcctggcgacccgcgacggcaaccggcgctccatcgcctccttctacaacccagcgcgcctggccaccatcgctccggcgatccccgccgcaggggtcggcgacgacgactacccgagcttcgtgttcggcaactacatggaggtgtacgtcaagcagaagttccagcctaaggcgcccagatttgaagccatggccacgacgacgaccaagtgatgacctagcagcgactcagcgagagcctaaataaatattaattcacagtcgtcaagttaatcttgtggttatacggtacgggcggggcttgtacttatgtaggttgctaagtcttaagtgtgtagtttaattaacgtgtgtgtggaatgtacgcgtcatacaaatgtgttggtgtgtgccctgccgcaagattgcggtgagcggtggatctatggtcaacgggtgcctaaatgatttgtgcttttgtagcataaaatggcacatctcctctgcttttgttacatctccaccttttctttttgcacttttcacctcaagtaaaacatgtggcggctttcactaagtacaaagaagctctacagagctatttctatt

SEQ ID NO: 121861 - DNA, 2123 bp, Zea mays
  unsure (1)..(2123): unsure at all n locations
  Clone ID: MRT4577_42618C.1
cattgggtacctcgaggcctctgaacagcgaagcacccatggccctcgccaccacagccgtctccctccaccttttcctcacccggcccgcctccgtgctccgcgtaggccgcggcctcccatgcctcctcctccgagccacttcgtccacctccgcctccccggacttcaacatcaccttcgcggagcccgcgccgtccaaaaaggccccgtccgcgcagccgctggtcccgtggatcgtccgcggggaggacggcaagccccgcctcagcacctccccgccgccggacgtaatccaggccatcgcgctcgcggaggcggaggccaagaaggccgccaagaaggaaaccctcaagggccagaatggcgcagttgccgccgccgccgcggctgcttccaatgccagcgtcaagggcaaggaaaggaagcccgccccgaccgtgccgcccaagttctccaaggcagccaggaggttttacaatgagaatatcaaggagcgggagccgcaacggctcgccaaggtccttgccgccgcaggagtggcatcaagaaggaccagtgaggagctcatcttccaagggaaggtgactgtcaatggttcagtctgtacttctcctcagaccaaagttgacatctcaaaggattctatctacgttaacgggaaccgcatttcccaagaagttgcctccaaagctngtatttgctgttaaatcctcaagtcatcagctagctagccttccctacagcaactgcatacatacaaccgggaaaaaaaaaaaaaaaaaaaaaaaaaaaaagggtaccccgtgatcgacttcattgggtccctcgaggccggccgggatcctcaagtcatcagctagctagccttccctacagcaactgcttacatacaacacttccatcttcccgagctcgtcttcgatcaattcccaagtcaaataataatataacaacaatggtggttcccgtcatcgacttctccaagctggacggcgctgagagggccgaaaccctggcgcagatcgccaatggctgcgaggagtggggattcttccagctcgtgaaccacggcatcccgctggagctgctcgagcgcgtcaagaaggtgtgctccgactgctaccgcctccgggaggccgggttcaaggcgtcggagccggtgcgcacgctggaggcgctcgtcgacgcggagcggcgcggcgaggttgtggcgccggtggacgacctggactgggaggacatcttctacatccacgacggatgccagtggccgtccgacccgccggcgttcaaggagaccatgcgcgagtaccgcgccgagctgaggaagctcgccgagcgcgtcatggaggccatggacgagaacctcggcctcgccaggggcaccatcaaggacgccttctccggcggcggccggcacgagcccttcttcggcaccaaggtcagccactacccgccgtgcccgcgcccggacctcatcacgggcctgcgcgcgcacaccgacgccggcggcgtcatcctgctgttccaggacgacagggtcggcggcctggaggtgctcaaggacggccagtggaccgacgtgcagccgctcgcgggcgccatcgtcgtcaacactggcgaccagattgaggtgctcagcaacgggcgctaccgcagccgaggtgctcagcaacgggcgctaccgcagcgcctggcaccgcgtgctgcccatgcgcgacggcaaccgccgctccatcgcttccttctacaacccggccaacgaggccaccatctcgccggcggcggtgcaggccagcggcggcgacgcataccccaagtacgtgttcggcgactacatggacgtgtacgccaagcacaagttccaggccaaggagcccaggttcgaagccgtcaaggttgcagcgcccaagtcatctccagcggcataaataaatggaggggaccaattattaaatacattataatttatttgttgaataaaacagccggagaaataatgataatgtaaagtatatatgataaacaccggttaggattcaaggtgtttaactttagttgcatggtataattgatatattgttgtagcaataagtttattaagtattcataagtgttct

SEQ ID NO: 121862 - DNA, 796 bp, Zea mays
  unsure (1)..(796): unsure at all n locations
  Clone ID: MRT4577_42619C.1
cattgggaccctcgaggccggccgggacatgatcagctgcatgcaactaagctttcactgaagcaagcaaacaaacacctaaagatctgctatttgagtatttcttgtttctcttcagcttcatcagccatggtggttcccgtgatcgacttctccaagctggacggcgctgagaggaccgagactctggcgcagatcgccaatggctgcgaggaatggggattcttccagcttgtgaaccatggcatcccgctggagcttcttgagcgcgtcaagaaggtgtgctccgactgctaccgcctccgagaggccgggttcaaggcgtcggagccagtgcgcacgttggaggcgctcgtcgacgcggagcggcgcggcgaggaggtggcgcctgtggatgacctggactgggaggacatattcttcatccacgacggctgccagtggccgtccgacccgtcggcgttcaaggagaccatgcgcgagtaccgcgccgagctgaggaagctcgccgagcgcgtcatggaggccatggacgagaaccttggcctcaccaagggcaccatcaaggatgccttctccgccggcggccggcacgagcccttcttcggcaccaaggtcagccactacccgccgtgcccgcgcccggacctcatcacgggcctgcgcgcgcacaccgacgctggcggagtcatcctgctgttccaggatgacagagtcgtgggncctggaggtgctcaaggacggncagtgggatcgacgtgcagnccgctcgcgggcgccatcgtcatcaacaccg

SEQ ID NO: 121863 - DNA, 206 bp, Zea mays
  unsure (1)..(206): unsure at all n locations
  Clone ID: MRT4577_4261C.1
ccaagcaactaatgcaacccgttccttctangagaacctgagaaagaagcatgaggccccaagtgctgctcttctcactggcccttttcgccgtcctcgtagctatgccactgggcaaatctcaccatgaggatgaggaggaacggcttcaactctaatccatcacgaggcggttgccatgctgctaccagtgcggcatttgcacc

SEQ ID NO: 121864 - DNA, 358 bp, Zea mays
  Clone ID: MRT4577_42620C.1
cttatttgtgggcgcacgcgagaccgcgaaccccgggggaatcgttgggccgggcggggacgcccgccagacaccgcacaacaaaaggggccacggccccaacacaccgggaagaccagggacaagacaacgcgcccttcgccatgcccagaaccacctacgcactgaaggcgcacgagcaccaccgatacaaagacgtgttcgcggacaacttaccagtcgggccgaccaagcgctccgactacaccggcgcgcagcgcaacaacaagcagacagccacggaacccgacaagcgccgcacacttaaacaccaccgactaagaggggcggcaacacaccagcctccagggccccgaca

SEQ ID NO: 121865 - DNA, 1305 bp, Zea mays
  Clone ID: MRT4577_42621C.1
attgggtacctcgaggccggccgggatcctcaagtcatcagctagctagccttccctacagcaactgcttacatacaacacttccatcttcccgagctcgtcttcgatcaattcccaagtcaaataataatataacaacaatggtggttcccgtcatcgacttctccaagctggacggcgctgagagggccgaaaccctggcgcagatcgccaatggctgcgaggagtggggattcttccagctcgtgaaccacggcatcccgctggagcttcttgagcgcgtcaagaaggtgagctccgactgctaccgcctccgggaggccgggttcaaggcgtcggagccggtgcgcacgctggaggcgctcgtcgacgcggagcggcgcggcgaggttgtggcgccggtggatgacctggactgggaggacatcttctacatccacgacggatgccagtggccgtccgagccgccggcgttcaaggagaccatgcgcgagtaccgcgccgagctgaggaagctcgccgagcgcgtcatggagggcatggacgagaacctcggcctcgccaggggcaccatcaaggacgccttctccagcggcggccggcacgagcccttcttcggcaccaaggtcagccactacccgccgtgcccgcgcccggacctcatcacgggcctgcgcgcgcacaccgacgccggcggcgtcatcctgctgttccaggacgacagggtcggcggcctggaggtgctcaaggacggccagtggaccgacgtgcagccgctcgcgggcgccatcgtcgtcaacactggcgaccagattgaggtgctcagcaacgggcgctaccgcagcgcctggcaccgcgtgctgcccatgcgcgacggcaaccgccgctccatcgcttccttctacaacccggccaacgaggccaccatctcgccggcggcggtgcaggccagcggcggcgacgcataccccaagtacgtgttcggcgactacatggacgtgtacgccaagcacaagttccaggccaaggagcccaggttcgaagccgtcaaggttgcagcgcccaagtcatctccagcggcataaataaatggaggggaccaattattaaatgcattataatttatttgttgaataaaacagccggagaaataatgataatgtaaagtatatatgataaacaccggttaggatttaaggtgtttaactttagttgcatggtataatatgatatattgttgtagcaataagtttattaagtatacaaaagtgatctaacaaaaaaaaaaaaaaaaaatttgcggcc

SEQ ID NO: 121866 - DNA, 870 bp, Zea mays
  Clone ID: MRT4577_42622C.1
gccggagccagttgcgcatatatgcactgctagtgtagctaggtggagcaaacttgcttgcacactcggtcagggagtggcctggcacggcagagaatcgagtcgaatcgactcgactcgacaatggcgaagctgcacaggctcatctccgccgtccctcaggcctggcgcggcgggagccgcggccgccgcagccgtgatcatggtgactagccacgagaccaccagcttgttcggcatagagatggaagccaagtactcctacactccatcattcgtcttcttcgtggtggctttcgctgtaaccttcgcctacagcctgctcgccgtcctcgtgcgcccggggaccaccgcctccagattagtgctcctaagcgacgtgacggtagggatgcttctgacgggcgccgtggcggccaccggcgccatctctcaggtggggaagagcggcaacgagcacgccgggtggctgcccatctgcgcgcaggtgcaggcctactgcggccacgtgatgggggcgctcatcgccggcttcgtctcgctgctcctctacttcctcatcatcatgtactccctccacgcggtcgccgaacccctgtgctcctgccattagaacacggccaaacgcgcacactattcgttcgattatattcactaggtcatcgacgatgatccaatggtcggtccccagtgatacgttgttttccgtctcactactatatatatctgccgcactgttgagtcgatcaagggtcatttggtgctacaacactttactagcagctagctagtcgacaccactttggtgagctaactgctaatatagtaatatacatcgacctaccatcacttaaacaattcttttagaac

SEQ ID NO: 121867 - DNA, 262 bp, Zea mays
  unsure (1)..(262): unsure at all n locations
  Clone ID: MRT4577_42623C.1
aaaagggggggcggggttttttccgttcacaagtggcctcagccgggatttgggttgctggggctggccgcttgggttgtctggggtttcccgtccccgggggggggcgcattggccgccaggtaagttgttcttgtccctagtagcaaacccccagaaaattaagccccgggcccccccgagggacccgttgtcacttgggcgcctccgcctccgccttcggcttgggggggggttngattttgggggggatcccaggggc

SEQ ID NO: 121868 - DNA, 428 bp, Zea mays
  Clone ID: MRT4577_42624C.1
aacgaaagacctggggcgaagtttttacacaggctggtggccccacaggatttgagcctcgggacattacaaaaggtatataatactagctagcaaaacaaaaggcacggggggatggacggaaacttggttgattaagaagcaacgggggggggggggggtgcaacaaccggggcctttaaaaggaggaaggaaaggccccccatggaaaaataaaaaaaagggcccctgctgggggggaaaaaacaccccaagttggcgcccaccacgcactggcacccgacgccgtaccggttggaaaacccctgtgttcctcggaaccgaccggaggcaaggatccatcagggggtcaaccccaacaccaaagggccccaagaaagaaacgggatcccatccctcaattaaaaatgtgacaccaggaccggggc

SEQ ID NO: 121869 - DNA, 288 bp, Zea mays
  unsure (1)..(288): unsure at all n locations
  Clone ID: MRT4577_42625C.1
tgagtccaagaagggactatatgacacgcttgttctacttgtggacttcaacagactctacccttagataattcaggaattcaacatatgctagaccactgtcgagcgttcttatgagggcagtgcacctaattttgtcagcatgaaaagttactgcaggactgccctgngcgttgacgagtccatttttagggcggtgccggcncnatcgttccgggatcggcagctttatcggggggcgagggatcacggcagcggcggcggcgaacaccgaccgaccgacccaac

SEQ ID NO: 121870 - DNA, 511 bp, Zea mays
  unsure (1)..(511): unsure at all n locations
  Clone ID: MRT4577_42626C.1
cggccgccagagagcaggaatttttccggagcgnggncgcggcgcggcgggcaggnacgcggggacccanaagancgggagcacncagaaacacaccnagcgaagcgcacgagcaacgaccgaacaacaagggcgnccaagagcagaacccnccgcgcgccccnggcccgncncgggagcgcaacaaaggcgnccangaggggggggcacactttggtggtttccacnannccacagnnccncccnccagnnacggcagggggcnncaagcacccagcggggcaagccnacaggccacaacaagcgcnggcggcgagcgncnnagaacaaccaagggcccaangacaacaacaagccggggcacancnaaccacacaaaccagcgcaacgcaacaacaacaagcacggagccaccgagccggggggaaccccgaggccnacnngcaacancagaggccggcangcaacccacnngcnncggcaaacgcgggggcgcaccaacaacaacaac

SEQ ID NO: 121871 - DNA, 314 bp, Zea mays
  Clone ID: MRT4577_42627C.1
gctataggcttagaacagaggggtacgatggtattaataggtatattcgtgcaagggggccagaagaacaaggatacacatgctaagagcgccagtaaacgacataggctgatgggtgccaacgtgagttggacagtcaaacagatgtcgtgtgttgtccatacactgctacagaaactatgaaataggcagactttgaataagtgagcatgtggatcgaaacataactacatcggtttatttgtcaaggaccggtagatacatatttataatatcgtatacatggggccgaaagaagtatatatcggcaattg

SEQ ID NO: 121872 - DNA, 578 bp, Zea mays
  unsure (1)..(578): unsure at all n locations
  Clone ID: MRT4577_42628C.1
ataaaaaacaaattaagcgaaaagtaaaacaaaaatctggacaatgaggncgaggaagaaagaaggtacttcaagcaacaaaaagatcacaatgtncagtctccaagaatctccacctgcctcctagatcacaacctgatgcatcatgttcacttatcaggttttgtacaagtggacgctgaggttagagcaatgtcctgtatataaactaaaatccagaagagcgccacagctggttactgctatggccatgcacgctgcactgtcgcgttcattgtttatgtttcgttgttctttcccttgagtatgacgccaccttgatagcccggggtagaattacctgcctatatttatcgtccttgtggtctgcaagaatcatgacgttattacttaggcacttattcatcttactatctggaaaaaaaaaaaaaaaaaaaaaaaaaaaaaaaaaaaaaaaaaaaaaaaataaaaaaaaataaaaaaaaaaaaaaaagtgcctctgggcgcgaccccactatgggggaaatttgtgaaaatacataacactggnggggcgctctagaatgtgtttatagggg

SEQ ID NO: 121873 - DNA, 206 bp, Zea mays
  Clone ID: MRT4577_42629C.1
ctcgagcctattttatttcatataaacaagaggttgtaagccaacatgtcctggatccgcacgaggtccttcagcaacagctccttttacaggttcgacttcgtcgtttacagcacatcgttgaactgcatgttggaggtgcgcaaagccagccactgagcgtccataatctctaaggctatgcattataggatgtagaacacgta

SEQ ID NO: 121874 - DNA, 354 bp, Zea mays
  Clone ID: MRT4577_4262C.1
gcctcgcccaacgtcgaggcggatgttaaactttttcgacgactacagaacgaagacagaagaagggcgggctgaccaagaaggaggagggggagcccacccacaaacgacgacggccaccataagacaacggccaagagggacaatccagggacacatagaacagcgccacccaagccaccatacaacacggagtggaaatgacagacaaggggcaccgcaaaaccgacgccggacccaaacaccattaccacgagacccacagctacttggcccaacgggaacagagggcgcacggaaaccgcagactcaagaacaacaacgagctacctaccgagctacagacgacacacg

SEQ ID NO: 121875 - DNA, 1510 bp, Zea mays
  unsure (1)..(1510): unsure at all n locations
  Clone ID: MRT4577_42630C.1
gctcgcccagggggcggatgcaggcccagctctagccctggcaaagtgcgcgcaatctcctctgccgcatccgatattccgatctcgatcccgcgacgcggtgtctccggtcagcgccgccgccttctccctcgccggccgccactgcatcgccgcagtcgccatgaattatatcattggagcattcaagccaccttgtgacatctcgatcacattctctgatgcgaggactaggaagcaggtttcggttaagaaggacaatgggaagacaacgatggtccctgttttccagagcctcgaaactatatctggagaagtatcaatagcaccagttccaggtaaaaggattgaacacacgggtgtcaaaattgagttgctaggccaaatagagctctattttgaccgagggaacttctatgacttcacttcgttagtacgtgagttagatattcctggtgaaatctatgaaaggaagacgtttccatttgaattttcaactgttgaaatgccatatgagtcttacaatgggacgaatgtcagactcaggtacattttgaaggtgacaattggcagaaactatgttgggaatattgtggaatatcgggatttctgtgtgagaaactactcacctgtccctacaatcaataacagcattaagatggaagtaggaattgaggattgcttacatattgagtttgaatacagcaaaagcaagtaccatctcaatgatgtgattattgggaagatatatttccttcttgtcagaataaagataaaaaatatggaactggaaattaggcgtagggaatcaacaggatcaggctctaacacatatgttgaaactgagactcttgcaaagtttgagttgatggatggtgctcctgtgagaggtgaatctattccagtgaggctgttcctgacaccctatgagttgaccccgacttaccgcaacataaacaacaaattcagcgtcaagtattacctgaatctggtccttgtggacgaggaagatcggaggtacttcaagcagcaagagatcacaatgtaccgtctccaagaatctccccctgcctcctagatcccaacctgttgcatcatgttcacttctcaggttttgtacaagtggacgctgaggttagagcaatgtcctgtatataaactaaaatccagaagagcgccacagctggttactgctatggccatgcacgctgcactgtcgtgttcattgtttatgtttcgttgttctttcccttgagtatgacgccaccttgatagcccggggtagaattacctgcctatatttatcgtccttgtggtctgcaagaatcatgacgttattacttaggcacttattcatcttactatctggaagtgatgtgatttgttttggtaagtcgaacgatatagatttatctgtgtttcatgcgaaaaaaaaaaaaaaaaagttgtcgatcaattcattagcttttcccaaaaaaaaaaaaaaaaaaaaaaaaaaaaaaantnaaga

SEQ ID NO: 121876 - DNA, 641 bp, Zea mays
  Clone ID: MRT4577_42631C.1
acgtgcaggaaaacggctacggggcgctcttcaacgactccatccatgaccacgagagagccgagtacttgagtgcctacatgggcagcgcactcgctgcactcaggaacggagccaacgtgaaggggtacttcgtctggtcgttcctggacgtgtttgagctgctggcgggctactactcgcgatacggcctctaccatgtcgattttcaggacccggagctgccgaggacgccaaaactctctgcgctgtggtacagcaagttcttgaagaatgaaatcgacataatagagaacgttgtcagcgatactgacgatgcgcgctcgcatgctgctgaacaatgagttagtttgctagcaagcagcaggcagcagcacacgacatatcacatatgcatgtcgtagtagcggaggaaaagaatgtttcttatccattctttttttttcacaagtccacagaagctcagaattttcagcagttggtcaggcccggaattcagtgttcgtgaatcgtagccataggcaccctctttggctgtagccctgtagtatgcgctacgtacggcaacagttgtcatgagtcactctgtcgctactgacacaataagtaatacagaaaggaactattacttctgcagttgc

SEQ ID NO: 121877 - DNA, 2258 bp, Zea mays
  Clone ID: MRT4577_42632C.1
aaatacccctatataaagtgggtatatgagcactcgggccgggctctcatccatccagagaagctagagtccaggtctcactcgcgaccgagagccacagagaaatggggggccctggtcgtccctggcgccggcacgtcttcctcgtcgtgtcgctgcagcttctccttgtggcgccatggcaggacgagacggccgctcgagctctcaatttcaccaggcaggatttccccagggccttcgtctttggtgccggcacgtcagcttaccagtacgaaggggcaaccgatgaagacggaaggagcccaagcatatgggacaactttactcatgcaggtaggatgccggacaagagcactggcgacctaggggcggacggctaccacaaatacaagggagacgtgcagctgatgagtgacactggcctggaggcctaccgcttctccatttcttggtccaggcttattccaagaggaagaggagccatcaaccccaagggcctcgagtattacaacaacctcatcaatgagctagtaaaacgaggaattgagatacacgtgaccctgtcccacctggattaccctcagatcctggaggacgagtaccacggctggctgagccccaggatggtggacgacttcgaggcgtacgcggacgtgtgcttccgcgagttcggcgaccgggtgaggcactggaccaccatggacgagccgaacgtcaactccatcgccgcctacgacaacggcgccttcccccccggccgctgctccccgccgttcgggttcggcactaactgcaccgccggcggcaactccagcgtcgagccctacgtcgtcacccacaactgcatcctggcgcacgccgccgtcgccgccctctacacccgcagctaccgtgccgaacagcagggcgtcgtcggcatcaacatctacaccttctggaactaccccttctcccccgcccccgccgacgtccaggccacgcagcgctcgctcgacttcatgatcggctggatggtcaacccgttggtgtatggagactaccctcaagtgatgaagaggatagtcgggtcccgccttcccaggttcaccaagcggcagtcggagatggtccgcgggacggcggatttcattggcataaaccactacacctccgtgtacgtcagtgatcgccccaacgacgcagcagccgacaccacggggccccgggactacaatgctgatctgtcggctaccttcagattttctcgcgatgatccagccactggccagttcgtcccaatcaacatgccaagcgacccgcagggactgcaatgcatgctcgagtatctcagccaaacctacaacaacatccccgtctacgtgcaggaaaacggctacggggcgctcttcaacgactccatccatgaccacgagagagccgagtacttgagtgcctacatgggcagcgcactcgctgcactcaggaacggagccaacgtgaaagggtacttcgtctggtcgttcttggacgtgtttgagttgttggctggctactactcgcgatacggcctctaccatgtcgatttccaggacccggagctgccgaggacgccaaaactctctgcgctgtggtacggcaagttcttgaagagtgaaatcgacgacataatagagaacgttgtcgtcagcgctactgacgacgcgcgctcgcatgctgctgaacaatgagttagattgctagcgagcagcagcacacgacatgcatgtcgtagtagcggaggaaaagaatgttgtttcttatccattctttcttttttcacaagtccacagaagctcagaattttcagcagttcgtcaggctcggaattcagtgttcgtgaatcgtagccatagccaccctctttaatttggctgtagtagccctgtagtatgcgctacgtacggcaacagttgtcatgagtcactctctgtcgctactgacacaataaataatacagaaaggaactgcttttgcacgtcgacgtaaagcctgccccgcgagatctgtggcgaagtcgtgccaaagtcttttcgtgcatatacctggacagacacgcgcccagactagagagagcaacaaatcatgcctttgtagatcccagcggccaggctgaaaagaaagccacctatcacgattgtgtagacgagattccctccacacggtattgcctgccttatgtatatagcgcgaatgccatatttaccttcgtaatttatagccgaggcggatccctttct

SEQ ID NO: 121878 - DNA, 184 bp, Zea mays
  unsure (1)..(184): unsure at all n locations
  Clone ID: MRT4577_42633C.1
tttnnnnnnnnnnnnttttttttttttttttggccacaaagaaatatattaaacccaaacccaacatttaacccataactggctaggcactagattaggcaaaggaacaagttcagaaaggtgtgacacaaggggtttacaaaagaaaaggcaccttatagctgggggccttcgggtttttttt

SEQ ID NO: 121879 - DNA, 383 bp, Zea mays
  Clone ID: MRT4577_42634C.1
ggaaacccgggccgacccacgcgttcggtccctctggtcccacataaacatttcttttttaccgaaccacctgacgagctagggccagagcttgggagctgggacctgacacagccaccccggaatagcacgcacgatcggcaccctgccatgattaaagctaccagcgtgcctgatgcattttttctctgatgaagaaccatcgatcgattataaagcatcatttgtccattttgaccaattagtttccaggtcaaaaccaggcgattactttccagagtccagacccattcaaagctctccgccgtcctccttgctcctactcgggctacgacgctgcgccggtaggcacgaagcgttcgacgagtctctgcgcttcgacc

SEQ ID NO: 121880 - DNA, 337 bp, Zea mays
  Clone ID: MRT4577_42635C.1
atctatatttttttcttttttttaatctcttttttttatgaaggggtaatggggactttaccattgcctgcagcttgccaacaaaaaaattgttaatcttacaacttgacattttacaataaaacattaacaaacacacacctgtaacccacctgcctttaataatcttgttatactgccactatggacataaaaaaaaccacttcacttcctgcacattttatttgataccctcttccccacctaaattacttaaggtcccttaagtttcaattttgtttccaacgtctaccccatctcatttacgcaacctactgttgttggtcaattaataact

SEQ ID NO: 121881 - DNA, 298 bp, Zea mays
  Clone ID: MRT4577_42636C.1
gggaacaaaagggggaaaaaaaaaaacaacctccctggggaccacaggatacaatttttggggcacgacaaaaacaatgaaccgggaactggtttgggctaggtaaacatttgggccatggtttgacctcgttttgacacgttttgaaccttttggggcacattataaagggaaaattttttctatgctttcgaaagagaaaattcagacccatactggaaaccaaattggtccatcgctcgggggcccaagggtggaccggttttaggggcttttaaaacacttgccgggcaaacaa

SEQ ID NO: 121882 - DNA, 1029 bp, Zea mays
  Clone ID: MRT4577_42637C.1
gaaactagggtgggggagccctgagcaggggaggaaaaataaactagtggccaaaccctagcccgccgagctcccgcgtgcgctctccgccgcccgcctactcctctctgtccgcgatgcgccgggcgaagccgcagcagccctcgccgtcgcccgagatccggtaccgcggcgtgcggaggcggccgtcggggcgctacgccgccgagatccgggacccggccaagaagaccccgatctggctcggcaccttcgactccgccgaggccgccgcgcgcgcctacgacgccgccgcccgatccctccgtgggcccaccgcccgcaccaacttccccggcgccgcggcttccgcgccgcggcacagggcccgctccgcctccgcctccgccgccgccgcagcccccgcggcggtgccggccacgtctagccacagcagcaccgtcgagtcgtggagcggcggcgcgccccgcgtcgccgccccgccgcggagcgccgccgcgcccatggaggaggacgacgacgaggactgccacagctactgcggatcctcgtcgtccgtgctctgcgaagacgcccgcggggacgacgacgacgacgcggcggcgtcccacgcgcccctgccgttcgatctgaacctgccgccgccgatcgacgcggctgctgaggccgatcagatgggtgcccgctacgacacgctactccacctctagctcgcgacgacggccaggaattagaggaaggaatcgagaccgtctgtccttcttcggctgctgatccggtggtgttctatcgctagatggataattcttgcctttttcccccttcttttcttctgctactttttttgttttcttctcttaccaccacgatgatgatgattcgatattatgtgaataattcagttatgtccatgtaagctgtgaggaaggaaatctgagcttttccttatcttcctatggtgtttctgctggtgctgctctttcatttgttggaaagataatggaagaaatcaagagaaattatttacac

SEQ ID NO: 121883 - DNA, 147 bp, Zea mays
  Clone ID: MRT4577_42638C.1
aaaaaaaaaaaaaaaaaaaaaaaaaaaaaaaaaggtttgccgttccagaaggatcctatcttacatttcgggtgcaggcaacattaacctctacttcattggatggcctttgttgaatacactggccgtgagacaccacctctcgaa

SEQ ID NO: 121884 - DNA, 564 bp, Zea mays
  Clone ID: MRT4577_42639C.1
atctactgaacgaggtgcaacatgtaaggtaaggccactcaggtaactagtgtccactgaactgtgcctgactttgacgcccaatctgccggaggagacgcgcctgtcgccgggacaggacggagaggacagcacgaggaagccggcgcacgccgacgtcatcgatgccctcctggggctgagcacccagatgcactcaaagcgctctccagcgaggtgccctacatgcaccatccgtggcgagcatttcgctggcgatgggtctctcagcagcgcctgcgaaccagatgtcaacgtctgctgagaagatcacagacgacctcgacaagatgcttgtttgctgcccgccagccaacgagtggtgctacattgactgtatgatgaatagatggccaagatctacgtggcagcgatcagcattttgtcggtcacatgttggccggacacatggccactactgatgatcccccatcgactaaattctctcaggtctgcgcatttcaagtgtgatctagtaataagacgtgccgatctcctggatgtaccgatgtgatacaccaatct

SEQ ID NO: 121885 - DNA, 492 bp, Zea mays
  Clone ID: MRT4577_4263C.1
aggagggaagaacccccctggatctttttttttgcattaatttacaggaactggcacacaaattccaataacggcgtacggaaaatttttagtccagttcccccatcgatttattttagtttacaggaacccaaaaattcccataacaccttactgaggaaacatgttttgtatccctggggaaaaaaaaaaaaaaactgccttgaaaaaattttgacgacttgcacatactccgttggaaattcctgtgcactggactaaaaccagccccccaaaaacacaaccaggaagccttttaaagggctttgtgaattcccctgttgggtaggttcaaggaaaaaacctgcctgcacttctaaaggtaaccaccctgaccctcaagcttttttgtattttccaataacacctcttggatgtaagttgcaattgctttgcaccctttttttggaaggcccattacattttaaaaagtttaaattgggaattttgcat

SEQ ID NO: 121886 - DNA, 773 bp, Zea mays
  Clone ID: MRT4577_42640C.1
caaatatttcgcgctctgcccgccccgcccatccaccccagctccacttcttccccgcacaccacagtcacacgcgcagtgctagacgacgaacaccagagggcaggcagaggatgatggcgtccgttctcgccgtctgtctcgacgcgttgtggtcgtcgctgcttctcctcctcctggtggcgacggcgtcgcaggccctcaacgtcggcgacctgctcgggacagcagcgccatcggggagccagggctgtagccggacgtgcgagtcgtcgttctgcatagatgactacctcaacacgcggtgcaacgagaacctgctgagctgcctcgacggggtgagcccggcggggccgacgttcccggggaacgagtgcgacgtcggccagacggcgtccgtcatacgtggggtcatcgagtcggcggtgctcgcgggcaagatccttcacaagcgcgacgacggccagtagccggcgtcctgggctcctcctggcagtggcaggacatgcaggagcgggccgacctgagtcagtgaggctagctcgcggttggtacagacagtataaagccgcttgtgctggatttcaaggtcatgaatggccggaccacctgttggagttcgtttacgtattaggtttagttcatttactttaaaaaaataaattttagaataaatgtcaaagatccgctcatgaatctgaattcgtcttgtgcaacaaatttaaaactcaatccattaaactcaagtcagatttgtttgttttaaaaaaaaa

SEQ ID NO: 121887 - DNA, 573 bp, Zea mays
  Clone ID: MRT4577_42641C.1
tcgcagccgcgtactaagctggaccctagacggcgcctttttttttttttttttttttttttttttttttttttttttttttttttttttttttttttttttttttttttttataaaattataccccggtttcgagggggaaacgtctcttaacatttacgtcatttggggaaaaaaagggaaacctatcattccgctaaaaccaaatttccaaatgggaacaagggaagaatcctagaacaatacaaccccccaattgcaatcatcagggggggggggcaactgcccctgccagtaccttgggcagcacatgagccaggatcccaaccgggcaaaaaagcaggcacagggagacaaagggcctggtctcaacgttgttcctgaggccggcggggaacacctgccttgccccaaaaagggccactgttaggagggggaaccacgcgggaggggaagggaattttgttcggaaacatcctcacaaagccccccaacttagggagccagtacttgctaacaaacatggcgcccagggggtcgggggtccaagacaggtaaaacaggtaggcgtaa

SEQ ID NO: 121888 - DNA, 975 bp, Zea mays
  Clone ID: MRT4577_42642C.1
gacagaataaaagccgcttacattgggaccctcgaggccggccgggcgaccggtaagagaccaaaatatttcgcgctctgccagccagcctatccactccagctccacttcttccccgcacaccacagtcacacgcgcagtgctagacgacgaacaccagagggcaggcagaggatgatggcgtccgttctcgccgtctcccggtggtcgtcgctgcttctcctcctcctggtggcgacggcgtcgcaggccctcaacgtcggcgacctgctcgggacagcagcgccttcggtaaggaccgtaccagagcgcggaagcgagccgagtctgagctttctgggagccagggctgtagccggacgtgccagtcgtcgttctgcatagtcccgccgctgctgaggtacggcaagtactgcgggatcctgtacagcggctgcccaagcgagaagccctgcgacgcgctggacgcctgctgcatggtccacgaccactgcgtcgacacccacaacaatgactacctgaacacgcggtgcaacgagaacctgctgagctgcctcgacggggtgagcccggcggggccgacgttcccggggaacgagtgcgacgtcggccagacggcgtccgtcatacgtggggtcatcgagtcggcggtgctcgcgggcaagatacttcacaagcgcgacgacggccagtagccggcgtcctggcagtggcaggaccggagcgggccgacctgagtcagtgaggctagctcgcggttggtacagacagtataaagccgcttgtgctggatttcaaggtcatgaatgccggaccacctgttggagttcgtttacgtattaggtttagttcatttacttaaaaaataaattttagaataaatgtcaaagattcgctcatgaatctgacttcgtcttgtgcaacaaatttaaaactcattccattaaaccgaaaaaaaaaaaaaaaaaagcggcc

SEQ ID NO: 121889 - DNA, 430 bp, Zea mays
  Clone ID: MRT4577_42643C.1
tttttcgcactttgtgtgacaggaaaatggaagtcatgcgactaacaggggcgggtacgacgagaacctggtgaacggacagattgcgcagcaattgacagggactcatctggttgccatctttctgtgagctcttgatgttgaacctctacgagtcatgcacgcaacatgtttcatactgttgttagtcttggtcatgggctcattgcacttgatgggctatgttgtcctttcagaaacatcagttatctggtatgacttaggttacaataggcatgtgttatgtcttgtagtttggacgctgaacatttttccctcctaatgcaaattacacaaagcccttgaatcttcactaagtttcttcacgttctttttggttgttttctgcaatcataccatgactttagcatacagatccatcacctcttta

SEQ ID NO: 121890 - DNA, 868 bp, Zea mays
  Clone ID: MRT4577_42644C.1
ccggccgggacaccacagtcacacgcgcagtgctagacgacgaacaccagagggcaggcagatgatgatggcgtccgttctcgccgtctcccggtggacgacgctgcttctccccctcctcctcctcctcctcctcctcctggtggcgacggcgtcgcaggccctcaacgtcggcgacctgctcgggacagtttttccttaggggagccagggctgtagccggacgtgcgagtcgtcgttctgcatagtcccgccgctgctgaggtacggcaagtactgcgggatcctgtacagcggctgcccaggcgagaagccctgcgacgcgctggacgcctgctgcatggtccacgaccactgcgtcgacacccacaacaatgactacctcaacacgcggtgcaacgagaacctgctgagctgcctcgacggggtgagcccggcggggccgacgttcccggggaacgagtgcgacgtcggccagacggcgtccgtcatacgtggggtcatcgagtcggcggtgctcgcgggcaagatccttcacaagcgcgacgacggccagaagccggcgtcctggcctcctgcagtggcaggacaggacaggagcgggccgacttgagtcagtgaggctagctcgcggttggtactttgtacacacagtataaagccgcttgtgctggatttcaaggtcatgaacggccggaccaccagttggagttcgtttacgaattaggtttagttcgtttacttaaaaaataaattttagaataaatgtcaaagatttgctcatgaatctgcaacaaatttaaactcaatccattaaactcaagtcagatttttgttttaaaaatacagcacaacaggctaaaaacag

SEQ ID NO: 121891 - DNA, 497 bp, Zea mays
  Clone ID: MRT4577_42645C.1
ggacgcggggcaaatatttcgcgctctgccagccagcctatccactccagctccacttcttccccgcacaccacagtcacacgcgcagtgctagacgacgaacaccagagggcaggcagaggatgatggcgtccgttctcgccgtctcccggtggtcgtcgctgcttctcctcctcctggtgacgacggcgtcgcaggccctcaacgtcggcgacctgctcgggacagcagcgccttcggggagccagggctgtagccggacgtgcgagtcgtcgttctgcatagtcccgccgctgctgaggtacggcaagtactgcgggatcctgtacagcggctgcccaggcgagaagccctgcgacgcgctggacgcctgctgcatggtccacgaccactgcgtcgacacccacaacaatgactacctcaacacgcggtgcaacgagaacctgctgagctgcctcgacggggtgagcccggcggggccgacgttcccggggaac

SEQ ID NO: 121892 - DNA, 369 bp, Zea mays
  Clone ID: MRT4577_42646C.1
agtactgctccctcttccttctcccacgggggggaaatcaatcaacggggggggctgattaatcctaaccgctccagaaaatgctacgttgatccagcgccatcctttatggtggcctcaactaccaggcgcggtgtatcgccgacatactcgcgtactcccactcaaccacctttctccccagcaccctcagccttaaggaggagaactaggtgcacctaatccggctttagcctagccagagccagcttcttttctatggtcttttttaccaccccaaccagattatggaccttaaataatgcccctcccatcacaagcttttctccacagtctatacgtattgtgagggctatagtgccttaaatt

SEQ ID NO: 121893 - DNA, 433 bp, Zea mays
  Clone ID: MRT4577_42647C.1
gggttgtttttttgcatataaaaaaagtatgggtgcacagaaatcgccgtcaagcagacatgcggtgagatcagacttggccgcggggagcaagagcgatgtatatgatgactagcatcagttctaaaatggttttgaaacacggacacaggtgggggagggaccagagcaccatgcatggcccatggatgagatgattaggatcatggcggtcatggcgatgggaagggatcggagaacgggcttaaccaggagcaggacacacgtatgtatgggaggggcggtggtattctgggtgaaggccgggcgataaattaggggctgcagttatggacgaacattccctccttggcctgggcggcctggccgttggaggagtacttgccgagctgggccagggagtgggccttggcgcgcagaaggagcgggtcct

SEQ ID NO: 121894 - DNA, 247 bp, Zea mays
  Clone ID: MRT4577_42648C.1
ttaaaacaaaaatctgataattacactcaatacaaatactaaaaaaaactggggtctaccaatgaaactacgcttataataatgacacataatacttataatgcatacaataatatatctcacactataaaggatccaaccttaactactcttacattcaacttcctaattctgatataagctaacctaattctaattccctgccccatcatttaaaacatcttcactgttaaaacccttcctttac

SEQ ID NO: 121895 - DNA, 1064 bp, Zea mays
  Clone ID: MRT4577_42649C.1
ccccggccgccgtctctctgaccggccggaagcggcccaagccagaaactcctattcacgatgggtagagttattcgcaaccagcgtaagggtcgtggatccatcttcacggccaacacgcgcctgaacaaggctcctgccaagtttagaaacctcgattatgccgagcgccacggctaccttcgaggtgtcgtccgcgagatcgtccacgatgctggtcgtggtgcccctctcgccaaggtcgtcttccgtcacccctaccgattcaagcaggttaccgagaccttcatcgccaacgaaggcatgtacaccggccagttcatctacgccggaaagaaggctgccctgaccgtcggcaacgtcctccccctcggtgagatgcctgagggtaccgtcgtctccaacgtcgaggagaagatcggtgaccgtggtactctgggccgaacctccggcaactacatcaccattgtcggccacaaccctgatgagggcaagacccgcatcaagctcccctctggcgccaagaaggtcgtccactccggatcccgaggaatgatcggtatcgtcgctggtggtggccgaactgacaagcccctcctcaaggcttctcgtgccaagcacaagttcgctgtcaagcgtaacagctggcccaagactcgtggtgttgccatgaaccccgtcgaccatcctcacggtggtggtaaccatcaacatattggtaaggcttctaccatctcccgatacgccgcccagggtcaaaaggccggtctcattgccgcgcggaggacaggtctgctccgtggtactcagaagacaaaggactagagtggtttctgtgatgtggtggcgtttttcaacgacaggaacgacgatgatgcggtcggttattctctccatacctctctgtgcgggtggccgggcgttataacgaaatggaaacttgtcggcaagctaggcttttccctactgtggcttgcatgcatgataggttctttagggaatgtgattccgataaaaatgcatctggtctgtacttttacaaaaaaaaaaaaaaaaaagcggcc

SEQ ID NO: 121896 - DNA, 379 bp, Zea mays
  Clone ID: MRT4577_4264C.1
ctcccttggattgaagggagctctaacaaacccatctccagcccacaaggccacaggctagatctgaccgaccgtccatgcatggcttccctgtgcatgtttaccatcagcagcaccccacatgttccaagcagaagggggactggaaggacgtcacgctcatgagcttctccttcgccgtgtacgtgtacatctctcagaagctcgtgtgcacgtactgcgcttggctctctatgattaaccactgacttggtgctgtaatcatctataccgttgctgatcttcaaggtagaaaagatcgttgctgttagttgcatatggatgctgtacctgtagtatatttagatccaaatccaataaagcctcaatttccattgat

SEQ ID NO: 121897 - DNA, 471 bp, Zea mays
  Clone ID: MRT4577_42650C.1
actcgagctcgagccctagcactgtgctgaaacacatgcctgagatctgagtcacgtgcgcggacgattcgttcgggtggagcggagacgagaggaactggggcataccgaaggccttcttctgcggatgggtaaacctctgctacacatctgcggcgtcgatgatgacgcctttctgacacagcatgacatgcaactgaacaatgctattctcgctgaggagaagcacttgcctatgtatgactagttggttagcaagagcaatgctgaatatattgccggacgagctacgcataactctatcagggatgcccaatgacatgcttgaaactcctgatgcaacaagttacatgggatgcatcggaaaggacaagtctggcgatgaaatgagtattaacgctcaacctgcacgagtcactgctcattcctacgaggatgagactgctcttactggcacatgtgctgtatgtg

SEQ ID NO: 121898 - DNA, 671 bp, Zea mays
  Clone ID: MRT4577_42651C.1
cattgggtacctcgaggccggccggagattcggcggatgcgacacttcgtgcatcgatattgctcattgctgcgggctctcctctgctccgtgcgcctgcccatgcgcaaagatgcgcgaggtacctgcctagaggtcgagacacgagcatctcgacgacctcaagatgaacaaatctgcgcgctgtgatggagccaatcttccgcccgacatcgagctacaggcatgttgcgaaccacaacgacagatggatcctacccatataccactctgtgatatccaacgaccacaatcctcacctacatgctcttccgtatgctggctgctgttgaatgaggcgtattctgcatgagcaccatcatgacctgatccatggcccactttcatgatctcccaaatgatcatgacatcgctccacctgctgccttctcggaatgccagctgagctcatacttgagtggcgtgaccctacgttctttttgtgggaggacgatgtcagacaaattcgaggactgaagatcactcatacttcaagcatccccacttgctctaggtgcattcttgactgaggcacgtcgacaatccgcacaatgcttatccgacgattcctctgtgttcttggcaagcagcgcccgtctgttcgtgccatccttaacgtatctgatatctct

SEQ ID NO: 121899 - DNA, 314 bp, Zea mays
  Clone ID: MRT4577_42652C.1
ccggaatcgttccggtttatcaaaatttttttaaatttgagaagcattttggctcggaattgttccgggcccccaattcgttacaaacaaacaggggctaaaggggttaataagccccccaaaggtaacgttccccattggggaagcaccgatgagtagtcccggggaaccgaccgggcccatgacgggaacaattaacctccgtttcaaaaccgattggttcggccctcccttgttccgcccaggcaatagggtgttttccccggaaaccatcgggggggggcccttttttggctgcaacagccttttttttt

SEQ ID NO: 121900 - DNA, 322 bp, Zea mays
  Clone ID: MRT4577_42653C.1
gatgcccgtgttctcagccaacgccgaggcagcgcagcagggggcatcgacacccgcgcatatcctagaagtacgccacctgacgtctcgctgcgcgcagcggacgcgcgcgcgcatcgtcccatacgttctgacccctctcgaaggccgtcttgaggagctcgcgacccatgtgaactctcatcggctgtcagaacccgtatcttcgatcgaccactcgcacactctttctcgtgctcgacggcaggatggccagaggtggtatacgctgcgtgcgacggtgcatgccggggggcactgctttgcggcggagctagggaac

SEQ ID NO: 121901 - DNA, 240 bp, Zea mays
  Clone ID: MRT4577_42654C.1
aaataaatttttttttttttttttttttttggggggggtttttttaatgttagggtgttaccacaacggaccacgacaagcatctttgaaaggggcaacagggcgtgcccatacgaaggtgattctttatcagactgggccgggtgggcaggagtcttgttttcggttcaagactttgggaagaaatggtcccgaatcataatgggggctctccaacacaaaggacttgagcatttccat

SEQ ID NO: 121902 - DNA, 580 bp, Zea mays
  Clone ID: MRT4577_42656C.1
tttttttttttttttttttttttttttttttttttttttttttttttttttttttttttttttttttttttttttttttttttttttttttttttttttttttttttttttttgggggttttagcaacccaaaaccaaaccgggccaaattaaaacaaccccaaaacgttttgaaacgggtccctgggggggggggttgttttgggccttaaacgggaaaggggcccccaagttcctttggggaccttaaaactaaagggccgccaaaacaaaatgggccgggccaaggtttccccccctaaaatgtgcaaaataaaaaaattcaatcaccttaacaaattgccgggggggggggagcaatcccctttggggggaaaacctttaaaaacgggtattttttttaaaaaaaccaaatttgaatttagggggcgaaaaaacttccgggaaaactgtttgaaacccaaaatttgcaaactgcacaaattggaaaaagggaaatttcggggcaactcttattttcttttacaaaaaaaaaattgtggtttcggtccttaggccccggaattagtgtcctttgtcc

SEQ ID NO: 121903 - DNA, 343 bp, Zea mays
  Clone ID: MRT4577_42657C.1
atactgataaagctcaaggaagaggatgccatactatgttcggatcgaatcatacaacaacaaatgaaacgaacacacaatccaataactacgccagggggacgctctcaaagcggactgcttcaacatagtcccctacgaccagaaacacgactcccgggtcaagaaagccgacggcgcaaaaaaaaatcgagacgaagcgatatctttctctcttcaactcctagatccacacaaaggaccactcaaaaacgaccactcacacgttggcgtacatggacacaagatacctgcacacaaaatagcatctttgggcgcgtacacgcacttgccgacctccggg

SEQ ID NO: 121904 - DNA, 455 bp, Zea mays
  Clone ID: MRT4577_42658C.1
tccagcgtccgcggccgcgtgggcgggcgcgtgggttgttgcgctaggctttgaagagatctctgttgggaatgcgacaccagtgtggtgttacatggtgaaacagggtcttatcatcgaccctgttttgtctttctggtttaaccgacatgcttctgaaggagaacgtggtgagaggggggggggtggaatggattctagccacttccagggcgatcacacatttgtcccatgcactcggaagggatactggcagttcaacatgggtgatgtcctgcttggtggaaaggcctctggggtttgtgccggtggctgggcactcttcgttgattctggaacttccttgcttgttggtcccaccggccttatttctggactcacagcaaacattggtgcttgtgctgtatttcgcctcgagttccagaatggtggttcttaatattggcaggggggcc

SEQ ID NO: 121905 - DNA, 288 bp, Zea mays
  Clone ID: MRT4577_42659C.1
ggaaaaatcctgtgttttttgagggaatgaaacctttccaacaggacggcatgctttaatcctttcttgaaatccggtttttgacatcaggattttcaatcctttgaagctcctttggaaaaacttctgcccaaacaagctttaaaaatcaaaagagtttttctccggcatgaaaagaacccaaattttccatctaatggagctccatttaaccgtgaacacttacgggttaccttgcttgcaacatcatatgagtttgcccaatccaattttttctaaccagtaaca

SEQ ID NO: 121906 - DNA, 1047 bp, Zea mays
  Clone ID: MRT4577_4265C.1
ccggccgggaggacgccacgaggcgaacaaccaactgcttccttctgcgccgccgcctacaacgaccacttcacgtgacttacctcttctccgcctcaagtgttcacggctccatcctctctagagtctaagcccatctcgcgaagccgctaacgccgaaaacgaccctacatatggaggcgaagaagtcgggtcccgccgctgccggagccgcggcgccgccgccggctaacgggtacttcagcaccgtcttctccgcgtcgcctgcggggagcgcaaatgacgcaaagcaggccgacctgtacacgatgctgaacaagcagagctccagagggcagaatggcagtggcattacagatggcaaatcacacggccgccctacttacaaggatggaaaacatgcttatccaaatgactcgtcagaatccccttactttggctcgtccgtgcattacggtggtcgggaattctacagcagcacgttacagaagcagccagccaatgaaccccagacaaaatacaaggaggacaagtcggatggctctgctactagaggtgattggtggcaaggttcactttattactgaacaatctgctgggaactctcctttttttgtgaacaaggaataaaaaaggggtggagctgagcttggtttgtcataatagtgttggaactgttgatgcgagccgttaggcatggaccgaaagtaatagctgtaatccggtcggtggaggcagtatttagatgcatcatcacacctggacagacgtggatgtaggctgcgtccttttgtgttcctgttttcgctaagtgtgttcttgtggttttagatgtgcagccgtgcagtgctgaacttactaatgaactggtaggtcagcctgaagtagttttgataaaagcagttgccaaagagtctgcagctcgcaggatcacctgctatatgtgcgtgttcctgctatctttcggaaagatttgggttgtacataatctgtccttacccttcttttttaaaaaaaaattatgttcctactattcttacttaaaaa

SEQ ID NO: 121907 - DNA, 465 bp, Zea mays
  Clone ID: MRT4577_42660C.1
cagcatataccccccaccccccctcgcggcagctcgccgctccatgggtgcggcgcgtccgcggcgctggaagctcccgttccaccgcaccaccagcgcgccgtgctcgccctcgtccaggtcgtcggcgccgccaccgggccccgcctcgcccgcgcgctccgaggcttgggtggcccagccggtgcccgaggcgttcctgtgcccgatctccggcgcgctcatggccgaccccgtcatactgccgtcggggaacacctacgagcgggcctgcctccaggcctgcgctgagctcgcgttcctgcctccgggcgccgaggccgggggcctccgcaccgtcatccctaacgccgcgctcaaggcggccatcggcacctggtgcgcgcgctccggacgggcggggccgccgccgccgccgctctctgccgaggcggcgaggcaggccgtgctgcgcgctatgcctcc

SEQ ID NO: 121908 - DNA, 439 bp, Zea mays
  unsure (1)..(439): unsure at all n locations
  Clone ID: MRT4577_42661C.1
aaaattgntagtattgtttacgtggggagggggggggtgtgtattatttatgtaagaaaaangnatttgnggaaaggtggggattttataagngannagttntananttaagtagattttaggagtggtttaggtgggntaatttatattgtannttatnngaatgggggggagggggtgaaatgtaaaaaaaaaaaagataaaaaaaattagggggggggggttatngnagggttagaaattttaaaaataaaaaaaataaaaagattaaattattatagtattaaaagtaaggaggagattgtttgttntangtttnagaaggtttttgagtaggaggtatnaanagagaatttaaggagngaattngggatatngaaagngagangtggtgnttggtgggtgaggttnnnaatgattgaaagggangaggtggtgg

SEQ ID NO: 121909 - DNA, 682 bp, Zea mays
  Clone ID: MRT4577_42662C.1
ggccgcttttttttttttttttttggtttttttttttttttttttttttttttttttttttttttttttttttttttttttttttttttttaaaaaaaatccccccccgactggggggggttaaaggcccaaaacaattaaaacaacggaaattaaaagcacccaaacattggggggggcaaaaagttgaaacaccaaaagtggccttcccctaagccatatcctggccccgttaataatccaggggggtaaaaggccccccaaacaaaatttttgggagcccccccccccccccttggggggctccgggcctgaaagggggaacccctgagggttttccatgaaagcacattggcgcccaaaaggggggcgggggaaaaggtaaccccatgctttttgaaaaggtaacccaccgcgggggaaaccttccaaagggggccccgaggcagggggggaaacaaagggggctaaatttgaaactgcaggccgccttggaaccaatccatccaaggggggcccaggatgtcgaggggccctgccgtttgtttttaaaaccagtcgttgcccttggggggcccgacgtacacatgggacaaaaaggggttaaggcaaaattggacggcctggaccccgcagatggtaaagctgaaaagcacaaaccccaccctttcccaccaattgg

SEQ ID NO: 121910 - DNA, 389 bp, Zea mays
  unsure (1)..(389): unsure at all n locations
  Clone ID: MRT4577_42663C.1
gtgtgccacataattacacctttatttgtcttcaaaacaaatattcataaactgcgggccaggcaattacaccttcctgcggctaccaaacagaatgggcataaactccaggcccggattttttaacgccgggcgataacgccaggattggaaaaaacattatgtcccacattttaattggcggggggttggacaataataaaaccacgcttttttggaacccatatttaggggggggggcgccaaatttataaaaacaccactggtttggacccggcacttcggggttcctggcgcaaactaaaaaaaccacataggggaactgattctcaaaggacaagcacctgcttttagactaaaaaaacaannaaagggcaaatgcaacataa

SEQ ID NO: 121911 - DNA, 2541 bp, Zea mays
  Clone ID: MRT4577_42665C.1
atgtggagcagggacgcggccacagcagatgccacgaggtcgggaatgggcccagcgccggcagcgcgagcgatctccccctctttccgcagcggcggacccactcccacggcatcacatgcggatctccccctctacgtatccgatgatggttctgctatgctcacatttgaatcacttgcggagactgcagaatttgctagaaagtgggtgccattttgcaagaagtacaccattgagccacgagctcctgaattctacttctcacagaaaattgactacttgaaggacaagatacacccatcttttgtcaaggagcgtagggctatgaagagggactatgaagagtacaaggtgaggattaatgctttggttgccaaggctcaaaagacacccgatgaaggctggatcatgcaagacggtacaccatggccttggaacaatcctcgcgaccaccctggcatgcatgatccaggtagtttccttcttacgagtgaaatatcaggatgtgatatctgtgctcatactgagcaacttctttattgcatgatggttttccttggtgagactggtgcacgggactttgatggaaatgaacttcctcggttagtgtatgtgtcaagagagaaaagaccaggctaccaacaccacaagaaggcaggggctatgaatgctctggtccgagtgtctgctgttctgacaaatgctccttacattcttaatcttgactgcgatcactatgttaacaacagcaaagcagttcgtgaagcaatgtgcttcatgatggaccctactgttggcagagatgtctgctacgtacaatttccccagaggttcgatggcattgatcgatatgccaacaggaacgttgtgttctttgacgcactttatggttatggacctccatcactgcctgcacttccgaagtctacgatttgttcgtggtgttgctgctgctgccccaagaaaaaggtcgaaagaagtgagagggagatccacagagactctcggcgagaagaccttgagtctgccatttttaaccttcgcgaaatcgacaactacgatgagtacgagaggtccatgctcatctctcagatgagcttcgagaagtcttttgggctgtcctcggtctttattgaatcaactcttatggagaatgggggcgttcctgaatctgcaaacccatctaccctaattaaagaagccattcatgtcattagctgtggatacgaagagaaaactgagtggggaaaagagattggctggatctatggctcagttacagaggatattctgactgggtttaagatgcactgccgcggctggagatccatctactgcatgccggtgaggcctgcattcaagggatcagccccgatcaacctttccgaccgtcttcaccaagttctccggtgggctctcggttctgtcgagatcttcttcagtcggcactgcccgctgtggtacggatacggcggcggccgtctgagatggctccagaggctgtcctacatcaacaccatcgtgtacccgttcacttcactccctctcgttgcctactgttgcctgcctgccatttgcctgctcacaggaaagttcattatacctacgctgtccaacgctgcaacgatatggtttcttggcctcttcatgtccatcatcgtgacgagcgtgttggagctgcggtggagtggcatcgggatcgaggactggtggcgcaacgagcagttctgggtcatcggaggcgtgtccgcgcacctgttcgccgtgttccagggtatcctcaagatgattgccgggctggacaccaacttcacggtcacggcaaaggccacggacgacactgagttcggggagctgtacctgttcaagtggacgacggtgctgatcccgcccacaagcatcctggtgctgaacctggtgggcgtggtggctgggttctcggccgcgctcaacagcggctacgagtcctggggcccgctcttcggtaaggtgttcttcgccatgtgggtgatcatgcacctgtacccgttcctcaagggtctcatgggccgccagaaccgcacgccgaccatcgtggtgctctggtccgtcctcctcgcctccgtcttctccctcctgtgggtcaagatcgacccattcgttggaggaaccgagaccgtcaacaccaacaactgcaacacgatcatctgctgattcaccatcggtcagctgctgtcgtgccgcggcggacgtgtttctggtgttgcaaacgtgggttgcctgcctgatgcgggtctcctctgtctatctcgcatctgggcttttgccccaggatctgaagcgggtggtgtaggttagctttatgtttgcgtccaagtgttgattgatgttgtctgtgttatgaaaagttttggtggtgaaacctgaaatgttaaaactcggctcaattgtgagaaggcactgttttttaagtgtgtgtaaataataggaacgtgggaaaaaggaactgagaatcatttgcctaccaaaaggtgaaaccaattacatcagtggatcttg

SEQ ID NO: 121912 - DNA, 995 bp, Zea mays
  Clone ID: MRT4577_42666C.1
gggtttcacagcgacgcttccccaccaccaccgtcgtggagatgcagaccctcgtgccctccactacggcttcttctgcaagggctatggcaccgagatcggtgagacgttgtgcccggagatcttgtgcgaggagagcgccatccacaaggctcgttccacccaccaccgttggccggtcgtgcaattctctgtagctgtatgagcatttggagcctcatccctggacaagggggcgatttattcattggagtaaactgcatttaggttgcacaagattcagttttgcttagaccatcagacatgtcattcagtccagtgagttattattttctgtaacatgtatttttctttatgcacattgtgtattacgacataattaagcatcataaacaaatatattttagagtagaaagaagaatgcactccattatgttttaaacattgacttttatgtttacctcattgcaaccttttcaggcacttcctatatttcttgacataatgtttcatcatgttcttggtgtaatattgtcattgtcatttgttcttgtctttggagagggatcatgtctgggctcacactggggctcatgtcgctcggcctcgtcgagctggtgatcctccaatgtagcgacataggcatctcaagagaccattaatattatgaagaggtcgatggaagaaaataacaacctccaactattaaacttcaatcgagaacaagtgcctccagcttatgtctgcttgaccactatatgatctacaaccttatggctactatagaagatagttatagtagctctgaatgtgaagttatacgatcattttcaattatccttaatatttatcactttgagtttaagttataagattggctttggattttaagttaaaggatttgaagatatatgtattgaagttatatgcttctttaatgaatgaaatatttgtgttcaacaggagagagactgcaaatttgtctgatgcaaaaa

SEQ ID NO: 121913 - DNA, 2431 bp, Zea mays
  unsure (1)..(2431): unsure at all n locations
  Clone ID: MRT4577_42667C.1
aacctaacgcttccanaccagaacactcccctttcccctcctctcctagggtttcacagtgacgcttcctcaccaccgccgtcgcagagatgcagtccctcgtgcccttcagtacggcttcgtccgcaaggcctatggcgtccggaccggcgagacgctgtgcccggggatctcgtgcgaggagagcgccatccacaaggtatacgacatcctcgccgcgtagctgctcctcaccaccgtcgtatcctccctcactgtagtgtctcaagcctacgaagcagcctcgctccacctgccgccgttgactggtccaccccttctgtaatccttactgtttcacgctcgctccgcaggctcgctccacccaccaccggtggtcggtatgtacccagatttctttggattcttcggttggtttgctggtgtgctcaaatttgggtggctaagcaggtggttgggcgagacatcttgccacccaccatgtttatgtttgtgatttattcgtgtttttttcctcccattaggtcgacgatggtagccataatctataccaatatataatanatcatataacatagcggttgttgttgaataattgcgcttaataatgagtttgagcggcaagccttgattttttggtacttcttggttttaaatgttaggttgtgcaattctctatcctctcattgaaatacgcctttccttttcttatctcctagacatccaggctccccagaagcctcctatcctttcctgacacaccgtccccccatgttcttgcaccgaccgcgcttcagctcggtgcccaggcggaccgacgtcggccaccccccggtgccccagttctttgacgcctatccgcagctcgcagctccgcatacacccaggtcccagacctcgccgtgaccgcgccaccggatactgttaagcggtcgaagccatcaaacacctgcgtccaactattcggatgcaagagagtcccagggtccctgggcttgccatacttgacaactaggtgatcgaaaaccctatggtttctacagacacttgttttactagggctgaatgtgaagttgtctgcccgctttcacgtgtccttacattttctcttagctgtatgagcatttggagccacatcgctggacaagggggagatttattcattggagtaaactgcatttaggttgctcaagattcagttttgcttggaccttcaaaaattttatctgtcattattatcagcaggaggtgcatgtcaacataggtacgtacattctattccttttcgacaaaggttgttgtaggtatgttcttctatttattaaaaagaaaattatatttttcatttgctatattagtcttagcctaacctctagcaacttgttcatttgctaatacaggagggacaatctaaaagtattgtgcaagatatagagcatgcactcatcatatctaagtgatcggagtgatattgattagcttattagatggatattggcccagtttatctttcatttttttctatagctgttagaattttactttgctcagttcatactataaataatatgagactcttgttttgtggtccaagtgtttagcgcttagggtgccttggaagtacgctagcttgttgtcatgaagaagtcattcaagttccttccagtgagttattagttcttatgtatatttctgtaacatgtaattttacaatctttatgcacattggaggtgtatttacgacataattaagcatcataaacaaatatattttagagtagaaagaaggacaatgcactccattatgttttaaacattgacttttatgtttacctcattgcaaccttttcaggcacttcctatatttcttgacataatgtttcatcatgttcttggtgtaatattgtcattgtcatttgttcttgtctttggagaggtattcatctgatgtcaaaatttactatccggtcattatgtgatttaactgatagtgattgtgtgggcatctcttgcttcctcatgctcttcttagggatcatgtctgggctcacactggggctcatgtcgctcggcctcgtcgagctggtgatcctccaatgtagcgacataggcatctcaagagaccattaatattatgaagaggtcgatggaagaaaataacaacctccaactattaaacttcaatcgagaacaagtgcctccagcttatgtctgcttgaccactatatgatctacaaccttatggctactatagaagatagttatagtagctctgaatgtgaagttatacgatcattttcaattatccttaatatttatcactttgagtttaagttataagattggctttggattttaagttaaaggatttgaagatatatgtattgaagttatatgcttctttaatgaatgaaatatttgtgttcaacag

SEQ ID NO: 121914 - DNA, 1299 bp, Zea mays
  Clone ID: MRT4577_42668C.1
cattgggtacctcgaggccggccgggggccatcccaacccactcacagtctcacgctactatcgctatctagagctccggccgtcacagacacgagctagagctagagctgcagggaagaagaagaaggaggaggaggagaagatgagggcgtccgcgctggtctgcttcgtggcggtgtcggcgtgcatagcgtgcatcgcgcatggcggcaacttctaccaggacacggagatgacctgggggcaggggcgcggcaaggtggtggacggcgggcgcgggctggacctgagcctggacagggcctccgggtccgggttccagtccaaggacgagtacctgttcggcaagatcgagatgcagatgaagctggtgcctggcaactcggcgggcaccgtgacgaccttgtacctgtcgtcgcagggcgacgcgcacgacgagatcgacctggagttcctgggcaacgtgtcgggcgagccctacacgctgcacacgaacgtgttcacgcgcgggcgggggcagcgggagcagcagttccgcctctggttcgaccccaccgccgacttccacacctactccgtggtgtggaacccgcggcacgtcatcttcgcggtggacggcacgccggtgagggacttcgccaaccgcgaggcccgcggggtggcgttcccgcggacgcagcccatgcgggtgtacgccagcctctggaacgccgacgactgggccacgcagggcggccgcgtcaaggcggactgggcgcgggcgccgttcgtcgcctcgttccgcgggttcagcgccgacgcctgcgtctggtccggcggcaggtcgcagtgccccgtcggcaccatggaggaggcgggaggaggcggcggcggcggcggctggtggaaccagcagctcagcgacgccagctaccgccgcatgcgctgggtgcagaggaagttcatgatctacaactactgcaccgacgccaagcggttcccgcagggccggggcgtgcccgccgagtgcaggctccggcgataaaggtggctggatgagcgaacgcgaagccacctgcgtgcgtgcacgacgatcgatcccctcgtcgtcgttcacttcagaccagagatcggtggtctggcgaataatgtttggttttttttttttttgccatgggcgatggcaatgtaaatgtagcacgtgacgcacgtcgcagtgatattctttcatctgttttctgcaacaccggatgtgtacaagtttggagcagtaaaaaaaaaaaaaaaaaagggcggacgcccgcgatctagaactagtc

SEQ ID NO: 121915 - DNA, 442 bp, Zea mays
  Clone ID: MRT4577_42669C.1
aatctgcccttgccgccgccactgcccgatccacgtgtgcagactgctccctcctcctatgcgctcctaatgcacagcacgaagcagacctcgcgcaagtcgaccggcatcaacgcgccgcgcaagcagttggccaccaaggcggcgcgcaagtcgtacccggtcacgggcggcgtgaacaagccgcaccgcttccgccccgtcaccgtcgcgctccgcgagatccgcaagtaccagaagagcacagatctgctcatccgcatgcatccctaccagcgcctcgttcgagagatcgcgcaggacttcaagacggacctgcggttacagtcctctgccgcggcggctctacaggacgcctctgatgcatacctggtggcgctcttcgaggacaccaacctctgcgccattcacgccaagagggtcaccatcatgcccaaagaca

SEQ ID NO: 121916 - DNA, 339 bp, Zea mays
  Clone ID: MRT4577_4266C.1
tcctctctttcgttatagatcgcgagcggaccctgggtgtcttacttattatttttccttttggagaacaaaacaccagcacgggaaaccctgcattattgctgtacagctgtactgtttaacatgcttatgaatgagccatcatatatcctgtgctctcccgctgttagaccatatgactgatgacaaactagggtaccatgatcaggtgtgacaatgataaggggacagtttaatgcttcttgcgagagaatgtggagaacaggggcttactttttcgccttaacattaggcgagcctctgcaactggtagtgctagaggcgccttgttattacata

SEQ ID NO: 121917 - DNA, 572 bp, Zea mays
  Clone ID: MRT4577_42670C.1
cctgctgcagcgcctcagccagctccccgacgccgacaatgtcaccattgccttcccagatgatggggcgtggaagcgcttcccaagtcgttggccaacttcccagtggttgtctgtgcgaaggtccgtgaaggcgacaagaggatagtccgcattaaagaagggaaccctgaagggcgacatgtcgttattgttgatgatttagtgcaatctggtggaactcttagagagtgccagaaagttctggctgctcatggtgctacaaaagtcagcgcctatgttactcatgctgtgttccccaatcagtcatatgaacgcttcatgactgctaattctgctgggccaggtgaccagtttgcttacttctggatcacggattcgtgccctcagacagtgaaggccatcagccaacaacctccatttgaggtgttgagccttgctagctcgattgctgatgcccttcagatatgaacatggactgtgaaatgggctgctcctgaatgtagagcttacattcccagctccagcgaaacaaataatgtggagcgagttctagttatctaattgtgtct

SEQ ID NO: 121918 - DNA, 965 bp, Zea mays
  Clone ID: MRT4577_42671C.1
cctcgaggccggccgggtttattgatacaagaaggtaccattttaatggttaattgctaccacaaatgtgtttagattttacataatactctctctgtcccaaaatataatttgttttagactacagatacattcattaatcaacatatgaatgtagttgggatgtaactatgtatgtctacattcattattattcattcgaatgtgaacagaaaaaagagggctagtaaagaactatattttgggacagatggagtagattactatactatggagctacatccggatatactcaacaataccaattttgtgtggccaatccctatacctttgtttttattgatatggagtcctggaattctctgttggaatcgacctcaagtgatctgtgtatgaggggatagtctatcattttaacatacatttaactgctgtacaaactcttgatacatttaactgttggacagacccttgatttttgtttatctctaatctttgttgaagagatagatgctatggcgtagtcttgttttctttgacactgcggatcaggtttcactgaatcttgcttagctttctagtttgtatatgtcggcttattgggtcattacattgtctgtccttatcaagtgatctaaactggatcatgactagtgagttttgagtttggagctgcaatttactaccgtcttatatctcacaaggtttcagaaaacataaattgctgcttatataagtttccatttattgtgttgcagggaatgtgcttgcaaacctttgcattttgttttgtaccttatagtacctattagtggcaccaactttccaaccatttctgatgcatatatttcatatttattgtacagggttgatcctcaggatatcgtcatggcatgtgattagcttcttctgaaccgacttgttatttttacttaaagtttggttgcaaattagttctgtggcag

SEQ ID NO: 121919 - DNA, 602 bp, Zea mays
  Clone ID: MRT4577_42672C.1
gcggcgggaagaaaatatttacataacctcgcccgcgccgcctcccccacgagacgtcttcttgctctcgcttccggtgacgcccgccacttcctccccgacaagatgactaaacgcaccatgaacgcaagtatcgttgcgcaactatggcaccatctatggcgccatcttacgtaaccagatcgagaacatggaggactcccaccactccaaatacttctgcgagttctgtggcaattttgacgcgaacaggaaagcagttggtatctgtggatgcaaggactgcgcgaaggttaaggccgaggtcgcctacacaatgaaccctgctagtgcggctcactgtgatacatacaatccgtggcctgcgggagcagaccgaaccatgattgcgtccagcttgaaaaggagtacctgtatttttgtatgtcatccaagaaccgtgaaccattttgcctttttaactagatgaacaacaaatgcctatctatctgtactgaccactttgaactcatggattgtcatgctacattgatggtatgcactatgcaatgaatcaaaagacaaaacaaatttcctctcctccacctccatcttttgttccc

SEQ ID NO: 121920 - DNA, 214 bp, Zea mays
  Clone ID: MRT4577_42673C.1
tagcgtccgctgagagtagcttagttagtaaagcgagtttatgttagctcgatttgaatgacaaccttctacataattgcccctgttgtttctacactaatctatgcggagagggagctacggcagtagagatgagctgatgtatgtcgatttgatcttaaccaaacctctgttttaagcttcggcgggggaggaaaaaaaaaaattttggagg

SEQ ID NO: 121921 - DNA, 289 bp, Zea mays
  unsure (1)..(289): unsure at all n locations
  Clone ID: MRT4577_42674C.1
aattcggcacgaggtatatgcctgcattcccattcccaaccaggtctggtctggtctgctccggtccggtcttctctcccgaccccgacctggcctcctccctcccctctccagcagagctctccctccccctccccctgaggtgaggtggctgaagtcgggggacatggttggtgggggcggttcctaanattcctcttcttccccccaacccctcctacnccttttgctgcgccgcncctgcacggccgttccctgcgccgccgtctctcagtttcaggtccgcttc

SEQ ID NO: 121922 - DNA, 317 bp, Zea mays
  Clone ID: MRT4577_42675C.1
gaactggcacgccgcactgtaggctgatgaaacaccctctatcccgaatgccagccagggaggaggagctcaaaaagagcatgcaacagcgatgctgcgttggcgctctactctatgtcactatacgggaccaaggtccatgacgtgtaggaacattcagaacggaccggcgccgaccgcagctaccactcggtggataacatgctcccagtgtaggcgggggaacacggtgactgcggcgacgagcatcatacagtcgcaccggggaggcacggctcatggagaacaataaacacgagggcattgatgctgataag

SEQ ID NO: 121923 - DNA, 716 bp, Zea mays
  Clone ID: MRT4577_42676C.1
aattcggcacgaggaaacttaaaaggagagagaggagcttagcgggcgctgtctctctcgctcgctcgtggcctggttgctgcgtgcgtgcccaattgcaggaaagccacaaagtctcgtgttcctgggggcagccggcagggatctcctctcctctcctctcgtctggctcttttaacccaagaggcgaggagtagtacggagcagcatgaggctgtcgtcacctccattgccgtccctgcgctcttccgtccccgccgtcctcctccacctcctcctcctcctgctgctgctgtcctcatgcccgtccccggcaaacggaagggccgcgccgtcgtctccgggcgctacggcgcctgtcgccaggcacgttcgcgccgccggcgccaatggcaccgcccccgtcgctccggcggtgccggcgccgcctcctgtcgtgatcatcgtggagcgccaccgtcatttccaccgtgagctagtcatcgcctccatcctcgcctcaatcgccatcgtcgcgattatcctctccacgctctacgcgtggatcctgtggcggcggtcccgccggctgcctcgcggcaagagcgcagacactgcgagggggatcatgctggcgccgatcctgagcaagttcaactcgctcaagacgagcaggaaggggctcgtggcgatgatcgagtacccgtcgctggaggcagcgacaggggggttcagtg

SEQ ID NO: 121924 - DNA, 713 bp, Zea mays
  Clone ID: MRT4577_42677C.1
aaacttaaaaggagagagaggagcttagcgggcgctgtctctctcgctcgctcgtggcctggttgctgcgtgcgtgcccaattgcaggaaagccacaaagtctcgtgttcctgggggcagggatctcctctcctctcctctggctctttaaccggagaggcgaggagtagtacggagcagcatgaggctgctgtcacctccattgccgtccctgcgctcttccgtcccggccgtcctcctccacctcctcctcctgctgctgctgctgtcctcatgcccctccccggcaaacggaagggccgcgccgtcgtctccgggcgctacggcgcctgtcaccaggcacgttcgcgccgccggcgccaatggcaccgcccccgtcgctccggcggtgccggcgccgcctcctgtcgtgatcatcgtggagcgccaccgtcatttccaccgtgagctagtcatcgcctccatcctcgcctcaatcgccatcgtcgcgattatcctctccacgctctacgcgtggatcctgtggcggcggtcccgccggctgccccgcggcaagagcgcagacaccgcgagggggatcatgctggcgccgatcctgagcaagttcaactcgctcaagacgagcaggaaggggctcgtggcgatgatcgagtaccattccctggaggcggcgacagggggggttcagtgagagcaacgtgctcggcgtaggc

SEQ ID NO: 121925 - DNA, 616 bp, Zea mays
  Clone ID: MRT4577_42678C.1
gccggccgttccgggaccgtacccttctcccttcttcgtaccatcggcgtgtgtgcgagacaagagcagccaggcaccagcagtgcagcgactgttgcgttccgactccattgtgagatccatcggggtctaggtagcttaggctttatttagtagctgctactcggtcttctcatggcgtacatcgtgctgctgatgtcggagctgctcgctggcgagagcggcgacagcgtgctggaggtcgagtgctacatggccggtcaccacagcttgcggaaggcgttccagtgcgacgtgaccagtaagcatgacgactaacaacggtcggccgccgctccggaatgacgcgatgagtgcagcaatattgagagaggactcgttcgacgtatctcgcggtgtccagcggagcgctcgacgacctcatgatggcatgatgagcttactgtgcacgcccgtcatgcagcaccagccagcaaactttgcagaactttgctttcttactgattcattctattcgccaatacaatgcatgtaaaattttattttattatgccgcctcccctgtgctcttgtacacgatgtctagctgacgaggcagatgttcgactaggctaag

SEQ ID NO: 121926 - DNA, 1053 bp, Zea mays
  Clone ID: MRT4577_42679C.1
atgtgttcgtcgagtttggacattgatatgatcgacgacgaggtaccacatgtgaaggagtctctttctttaaatcttaggttggttgagaattcctcctacttcactcttagaactgatgcactcaactgtaatggtttctccacacaccgaaaatgcactagtgccctacacatgcttacctacgacaacattgctgactccattggtgagtacatcaaaatggggaaaaagttccaccttagaatgcctcgaaatattgtagagttagcagaatcgaacaatgacattaacatgctcaaccagtccctgttattcaataatgtgcccaagagtgatgctttgaatgtgaacttcatggtacaaccaagggtactaccttggacaatgcaaatgtgtagattccacgactggtatatgaagaagtcagccattggtaaaaacgtaacttcggtttacacaaatgatagctcgaagatacttcgaaggataagacaaacgaagcttaaggccctccaaaagtttacttctacttacgaagcttgcttcgagtgcttcgttgtctttgaaccagccttagccagcacaaagcaaggggtttctttgttacaaatggtcgaagagctatctgccctcggactgtctctagtaccatcttcggatgtctcggagctgaaggttaaagatttgtctatgacggtagaggtcgctgctccccaatccaaagttgttgtagatctatctgaggatagcgatgatatagacactgaagaggataatactatcattcgtcctataaagccaagtggtgatgatttagtgccaaagccaaaagaagatgaagttgttgtcttccgaagctttctaaaagctggacttagattcccatggcataagatgatagtcgctattttgaaaaggtttaatatctaccttcatgagcttactccaaacgctatagtgcggctaggaatctttatctgtgttgttcaaggccaaggcattgaacccaatgtccaagccttctgccagatttatgaactgtacttttag

SEQ ID NO: 121927 - DNA, 770 bp, Zea mays
  Clone ID: MRT4577_4267C.1
cgagctcgagtcaaattctgattagcgctgaaatgaacacagaacactgatggtacattggtatatggtttcatcatgcacactgatgcttttttttttttttttttaacaatggaaattgaggctttattggatttggatctaaatatactacaggtacagcatccatatgcaactaacagcaacgatcttttctaccttgaagatcagcaacggtatagatgattacagcaccaagtcagtggttaatcatagagagccaagcgcagtacgtgcacacgagcttctgagagatgtacacgtacacggcgaaggagaagctcatgagcgtgacgtccttccagtcccccttctgcttggggctcaggctctcccgcgctgccatcccggccttcaccacgtcgccgcgcagcctctcggccgtggcagcccaccacggggtcgtcttctcctcaccacctcctcccccgccgccgccgcttgccggcggcccggacgggaggtgactttggcagacgaggtaggatctcggcctagacgacacggcgtcgctacatcgtcgcctgcagccctgcggaacatgtggggtgctgctgatggtaaacatgcacagggaagccatgcatggacggtcggtcagatctagcctgtggccttgtgggctggagatgggtttgtccatcctttcagggagaagagaaccgctgagtacctgcagcaggagaacgcctccccggtgttcccggccaggccggcctcgagggtcccaa

SEQ ID NO: 121928 - DNA, 359 bp, Zea mays
  Clone ID: MRT4577_42680C.1
agggcaaccgttgaattgacacccgcgatttattacgttaggttttttagaacgagggggctgggtaaattggttgcaaactaatccaggggcgggagattatagcgccccacaatcgtagtccgccatggggaccagggttttggacaggaaccgaaacaggaacctgtccctgacgaacctgaccacggggttgttgctttgctggatgaaacccaccacctaggcgggggggattagctggattctttgcccaccggttttgccggcgggtttttttttaggggcggcgggaagacaccgcccttattccgcttatgggccagcagggcgaagggcttttccaagcaccgggccag

SEQ ID NO: 121929 - DNA, 410 bp, Zea mays
  unsure (1)..(410): unsure at all n locations
  Clone ID: MRT4577_42681C.1
cagctctttgtcntagagagacaggtcaccttgcaggcctgcttgcaggaaatgaatccagcagccaactcaaatccccctagggctcaggcactgagggcctggggacagtgacgcataaaggtgggagacagatggagggtaccctatttacaactgagtcagccaagccactgatgggaatatacagatttaggtgctaaaccgtttattttccacggatgagtcacaatctgaagaatcaaacttccatcctgaaaatctatatgtttcaaaaccacttgccatcctgttagattgccagttcctgggaccaggcctcagactgtgaagtatatatcctccagcattcagtccagggggagccacggaaaccatgttcttgcttaagccattaaagtcagagatga

SEQ ID NO: 121930 - DNA, 364 bp, Zea mays
  Clone ID: MRT4577_42682C.1
ggtaggggggattcgcttatggttcttaaaatcttaaagttatacatgaacaggtggtacctattgtaattggttacatacctcttttggccctcacatgagtttgagacaacaagaattccatggtctaggggggctaaaatagggaaactcggtggtctctcttttggcccctcaatagggggggattccttttttttggacttcttcggaagggtggaactaaacatgttagctgggtttgggaaatttaactggctggtccatcatggaagctgaaaagttcgattttgattccttggttactggattctggcctcctggcgtgaaccatttgtactggctttctatttgtttggcataa

SEQ ID NO: 121931 - DNA, 262 bp, Zea mays
  Clone ID: MRT4577_42683C.1
actagttctagatcgcaggcgtccacggattggcgagttgatttatgattttttctagttggttaatgaatggattagctagatggattagtcgcgatgatgttgtgattatattaagtgttgtttcgattctatttggttgtggaaatacttgaattagaacttgctattgatgctaaaaaaaaaaaaaaaaaaaaaaaaaaaaaaaaaaggagcatcaaatacatatatgtctatttacaacctggatttttatttttgc

SEQ ID NO: 121932 - DNA, 222 bp, Zea mays
  Clone ID: MRT4577_42684C.1
gcgacgcgttagcggactcgtgaggttacgcgttgcttttgacggatgtgattaccagtgggaagacgatcgtgtaccacaccctggtttatcactccatgctttctttgacgcttcactcaatttatgctgagaatgcctaccacgagccgctctctgtggatgtgatcaccaacagtgccttctagccatctttcatgatggtcaagtgcgacccacgcc

SEQ ID NO: 121933 - DNA, 363 bp, Zea mays
  unsure (1)..(363): unsure at all n locations
  Clone ID: MRT4577_42685C.1
gggcncttgnctnttctncnggnttnttgtggntttggnccatcctttgttggngttttatcncccttttttttctannnnnnngggttgggggtcgnntttatactgcnnaatatcnnnnttntcctatctgcctgtccnncnnnnnntntggggcgggggtgctacatactcgaatacacctcnggttcnngggttttccgttttccgatctcttgtgagnggggtggnttctaggttcgccgatcctgggggttnnnngganggggnttngatccccantntgattcttangaggaacgtttgntnntggttttntntgctnttttttttgtgttcttagttttatttattttntttgat

SEQ ID NO: 121934 - DNA, 330 bp, Zea mays
  Clone ID: MRT4577_42686C.1
ctctacacggcgcctttttttttttttttaacctgtgaaaagcaaataccacaccacagtgctttacttaccatcctaaaaccatacgcttgctacactttctgaagacaaattcttttttttcttgacggtgaaaaataaggtgcgatgtatggtgaacagccatttctgaagccactaggcttccatttcctgaactcccttcttaacttacccttacataccttgcggcctccagaatgctagcttgcacctccattaatcgcaaaatattttgaactcttgcgccttgaacaatcacctgcatcaccatatcaaacaaccctcctt

SEQ ID NO: 121935 - DNA, 762 bp, Zea mays
  unsure (1)..(762): unsure at all n locations
  Clone ID: MRT4577_42687C.1
taaaggtgtcccataatgtgaggtaaaaaaagatttgaaattaaaagccagataaaaatacgaattcgaatcgaggttttctcaaaatggctcaagagactaaaaaaattcctgaatcagccattactatttggtggaaatgattctacaaggtcctagcacgttcttatccatcccaaatgatttcaataacttattcaataccagtacatcgcttgtcgctgcagccaaacacccaaaccaataggagtagcacaatccaacaaataagttcatgagttaaaacattacaaccataaaataagttcctaactaacaagctggagagtctagtatttcataagttcaaatataacaatcataaatatgtctcgactccggtcaaacaagtttccccaaaaatctacaagtccacaaaagtccatgtcacaaacaatcaaacatgatataggaaataattaagtttcctaaaaaaaatctacaagttcataaaaagtccagatcatttcctaaaagaatgacattatancgttttatattctctgacaaagcgctccgtgcctctcacaggtaggccggngcagcagcaggctcaactctttcaatggcttctgtttgcctacaacntcgtagtgtttctatacgcttgaaatacaaactaaactctacaagccatttacttgacagctatttttcagtctaatcgatgggcgcctncgatgctacacgtacgcacagcagtatgcatgctggccactgcct

SEQ ID NO: 121936 - DNA, 807 bp, Zea mays
  unsure (1)..(807): unsure at all n locations
  Clone ID: MRT4577_42688C.1
ttgaattcggcacgaggcaagtttaagtctgattttggtggaaatgttgtgtccctggagcgtgttcaaccatccttggatcatgtaccacatcggtaaccaaaaagctaaagcccacttagaggtatctgttagcagaggctggtgacaccctatttgctacatttattggcacaaagcaggacaaagatattattgctgatgtgaacatattccaagggaccttatttcatgaagatactgctcatgatttagctcctgatgttgaccctgaacaaaatgatacccaaaagggtgaggaaagccatgggaaatcttaccgagaaacatcaaagaagctaagaaaaccaaaacctgcagtgcaccgaggtttcttggctcgtgctaatggaattccagcactggacctatacaatcttgcacagaaaagaaacaggaaacttgttctttgtggacactcacttggtggggcggtaggtacccgtagataatatacattatctcattatttgctcatacatcttcaatacaactgcaggttgctgcattggctactcttgcaattttgagagttattgctaccacttcatctgaagaggataacaggcttcatgtgaagtgcatcaccttctctcagccacctgttgggaatgctgctttaagagattatgttcacaaaagatgatggcaggactacttcaaatcctattgtattccagaagacttggtaccacgcattctatctncagcttattttcaccactacaatgcccagacacctgaagcatcttttacaataaaactgat

SEQ ID NO: 121937 - DNA, 344 bp, Zea mays
  Clone ID: MRT4577_42689C.1
atgactatattcatacaacaattgcccgaaaaaagaagggccccccggccctgaaaagcccccaaagagactagcgggaaaggagaaaccaccccccaaaacgccgcggaaaaccaaccaattgccggaaaaaaaaacccccgccaagaacaaagagggcgggaaaaaacccccccccacacggggggctttccgaacccagcgaccccaaaaaaaaccccccccccctcaaaaaaaagggcccatgaccgaagcaacggcccccgaccggtctggagggccccttgcccctcactgtaccggccacgactacgcccccagaacgggaaaaaaaacccgggaaa

SEQ ID NO: 121938 - DNA, 534 bp, Zea mays
  Clone ID: MRT4577_4268C.1
atggatcgacccaagggcaaccatctagctacgactggaggagtaccttacccgatgccgaaacatctctgtcctcgcccccgtcttcctacagggggcgacaatgaggccattaaagccaaagagtcggaggcccggcgacaggtggcactgacggtctcgccagcggaggcaaccacctctgcggtggggaacctcaccatcggtggggaccacctcagcaccaacgacagcagccacctgcgcaccagtgtcgtaccggcgaatggcggccaccccagcgtgcgcaaagaggtcctcgcttccgtcctcactgcgggagtgaggacaagaccatccaagaacatgggcgccgcccctgcggcgtacaacgtcttgtacgaccccccggtgcagctggcggcgcgggagaagccgtggatgtggccgacctgcgcacggcgcgaccgtcgcccatgcggtggacagacagccacgccccgaccaagcagcaggaggcagcgccggaggcggcaccaaagctattcaggctga

SEQ ID NO: 121939 - DNA, 429 bp, Zea mays
  Clone ID: MRT4577_42690C.1
ggggggcaaaaaatttgaaggaaaatacaattgaaaacctaccaggaatttgcccatacgtaaaaaactggtgaaaaaaaagatttacacatttggacaggcaaaaaaaaaagttttgagcattttaagaccttgaaaggagaaaaacccaggccatgtaaaaaaaaaaaaatcggcctaaaaaattggttgcaaaaaaaaaacaaccgagcaaagccaccagtagcccgtcctaaaaaataaccagcaattttttgaaacttacttttatgggaccgaccattcacaaaaaggaggggcgaattttttaaaaggcgcttaaaacaaggggtgttttttttaaaaaaaaactgcttttcgcttttgaagtttttgcttcaaatttggctggcggaaaaatgcatccttggtaatgccaaaaaactttgg

SEQ ID NO: 121940 - DNA, 374 bp, Zea mays
  Clone ID: MRT4577_42691C.1
gtgggatagtatcatataaagagtatcgtgctggacgtagtaggacgactgttatgcactataagtgtggctctgacgagcagatcaaagaggagctcgactcataacgtgactactaacgtgcttgatacagtacgatcacgcaggtctatagatccacagcttcatggaagggacgatgtcattgcgcaattgtaccatgcttatctggtggcaggaagcctgcttcctgatgcaagagtgggacaactttatggtgcacatatagtgagccatgacagaccacactaggagtacaatgtacttatggatttgatccaggccagcggatctgtattcaaacctggagagtggtcattccatcctgagaacac

SEQ ID NO: 121941 - DNA, 747 bp, Zea mays
  Clone ID: MRT4577_42692C.1
ctcgaggccggccgggccggggtaaccccatagacatcaacgggaaagccttaagcctgagaaccctcgtcgccgcgcgttgcatactggtccaccaccgcagccggactcgacgacgcaggacccacagctccaccggcctcactgccagcttgcctcgccaaatcgccaggatcacgacgccccacctgcgaccgccggcggacccaggacggtgtgccgtgatttctcctccgccattaccgagaagaaatagttccgctgcttgggctaatccctctgcgtaggcattcggggaatggattcgccgaagtcgccatgggggaaacaccctaccgccgtcgttcggacgtccgtgaaggagccaggggtgttcgcccaaccgtgttgtgcgtcttcgcgaacttgtggtggccggagatcactacggcggcggaaatctcttggatgaagggctcgggaatcgtcaaatccagtgccggtgcatcttcgcgcgaggtttcgaggatccgaagaattaccctggtaattggaatctcaagtgccaggtggttcaagtggagtatcatatcaaggagttcgattcgatctaggtggcgtctcccagttgactttctggcgccaaggatggattttagatcctgctatatttatcttttattttgtaagacttctgctatgtaataagtactctgattattgtgacatttatctcgaaaaaaaaaaaaaaaaaaggcccctagggcc

SEQ ID NO: 121942 - DNA, 198 bp, Zea mays
  Clone ID: MRT4577_42693C.1
aaccacaaacataattcgctttaatttctccatggtacactgataacagcgttcaagtaacttataacattgctggcgaaaaaataaccatccaacaaaaataccaaatactatcaaagcatgcatgaagtaggttccacaatagcataacattaagttgtatttgctcaacagtaacttcttaactaaatttttttt

SEQ ID NO: 121943 - DNA, 427 bp, Zea mays
  Clone ID: MRT4577_42694C.1
cccacgcgtacgcggacgcgagggcggagctgagcgtgcaccagagccagcatggtagtgtggtcgcgctctcaccacactgtctacgactacatgagacaacaccgaccgcttgcccgtgcagcacgccaagagtctcgttcgctgagctgatgaccgacctacgtctatccgagcatggcatgggcatggatctcggacggcggagtgaaaatggaactgcttgtttctttcgctggagcagggaggtctgagtacatgcgtctgaagcaatgggggatgtctgtctgtagctctgttcatcgttattgtacgtagcattgttggcgacccatgcgtgggcgaactcggggaggagtctcttgccgaaacaagtgaatgagagggattgtgggaactaagaaccatgctgcgctccgcttaacag

SEQ ID NO: 121944 - DNA, 344 bp, Zea mays
  Clone ID: MRT4577_42695C.1
cagatccaccgggtccaattttaatggtgtggtggatgtaaatattcacaactccagttccaacctaacgcaaacacctttgttcttatcgacaaagttaaacaaaaatgcatgctgcacgactagattagggttaaatagccataacacaaacactgaccgtcgcataagatcacactacttgtgcgggaccccaccttactcgtcatactaatcatcatcttttgtaccatcccaggtgatgtgtttgttgatccttttaactagactgaccttcctctgtttggatttcaagttcttgtggccaaccctgctgctctctattggagtgtgcttgatttact

SEQ ID NO: 121945 - DNA, 737 bp, Zea mays
  Clone ID: MRT4577_42696C.1
gcccgggagttccatacatacatcaacaccccacatactcctatacacttcaaagatttgcaggctcgcatcaaggatggatgacttcactttccccactctccatgcaggagtgcagcttcttccatcagcattcccgcaccagctcggccttggtggctccccttcgccgtggttcctcgccgctgctgccgaggaggaggaagaggaggaggagaagatggacatgctgtgggaggacttcaacgaggagctcgcgagcgtgccgccgctgtgcccgctgagccctgtgatcaacaagggagggctggcgatgaaggaggcggccggctggctcgacgacgacgagatgattgtccttgatctggagaagcacggcaagcatatgcaccctcaggacggcagggtggtccggcgccggaagtggagcctgatgctgatgctcaggctcgtcaagaagctgttaatggtcaagaagtacaggaacccgagaactgcacccatctgatctcgtcctcgtcacatgggcttaggttgctacccacctccaagaaatcaatggcggatgagatgagtgatacagaacagagtagtatgtctatttgatgcttctctgtcatcaggatgtttttcctcctcaaagtagtgttttcctggctatcgatagtactactactatcctaactacctgtgatttgactctgaattcgatacattgtttatttgtcagcgtttaa

SEQ ID NO: 121946 - DNA, 344 bp, Zea mays
  unsure (1)..(344): unsure at all n locations
  Clone ID: MRT4577_42697C.1
catccgcctgcacgacgcgtacgccacgctcgcggaccccgacgagcgcgcgcgctacgaccgcgccgtggccgtggccgcgccggtccggagcggcagctgggccgtgccgtgagggtccgggtcggggttccggtcgcggtggtgggagaccgaccagtgctggttgtagcagtgtaggaccatggncacgtagctgtggggtgctgcacgcctgngcgcgttcttccgtttgagcgcggngggcggtggggttgtgggacgggggagcgcgggttgttggtgtggtgcgtggttccggggccngttgggttgtgagttgacggggatggtgttggagatgg

SEQ ID NO: 121947 - DNA, 255 bp, Zea mays
  Clone ID: MRT4577_42698C.1
aactcaatgggatggcgcattgattggtatcaattacagctataaacatggaatccaaactcaataaaaaaaaaaaatgctcaaaagtctttagacatcccatgaaacaaattcctactataattctagccatcaagatgtcctaagccagaacacattaacataaccgcaatttgacttatgagacaaccaaaaaaaccgactagataatattcacccctgcatccagaactccgaataaaaaacaagactccc

SEQ ID NO: 121948 - DNA, 755 bp, Zea mays
  Clone ID: MRT4577_42699C.1
caggccggccgggtgcgttctgcatcggccggactccgcaccaacgcgtgttcgaggattgaaagctgttgcggttactagcttcctgacttaatgcttacgcccctcctggtggacgctgatgcgtcgctgcctacgccgcctccgtaggtatatccccccgatgagcatctcgcgggcgacaaatcctgcgtcgccgcgccggccgaaggccataacaccgcggaagctacaggatgtctgcgccgtactcgtaggttccaggccccatgagaggactcccagcgcccgagcgtggacggagaggccgacgccgccgccggggctgtgcagataatcgatgggtcctcctggaatgtccatcccgcagtttcctgggataacgctgctcttaacggtgtagctgcactgcatgtctgatcttgacacgcctgctccctgctctcgttcctgactctgcagggatttctgacgagagaacgcttgtagctccaggttgagctgcgcagaaggaacgcgatgtcacaactgctgctcaggatatttctcgtaatatcgaagtgaccaacagccaggttgatgtcgctattggacaatgtggtgagacactgggaacttgctatcagatcgagtgctgagatccaaatcaccaaggacatcgaagcggagctctatgtactgtctcctacgattgcactatttggaacacctgctactgttgatacagctgaccatcttattaagagtgtcatatc

SEQ ID NO: 121949 - DNA, 785 bp, Zea mays
  Clone ID: MRT4577_4269C.1
caatccgaaaatcttcatcaatttattcgcattaattaactgctgagacaggtacacagtaagtgaatggacaatcatgtaaaatcagcaaggcaaatagcagcacaaatatctccattacatcactgagatatctaattatctatggctttgttgctagcagaacatgtcatggaacatacatgggcagttttgaaagttttgatgatcgtctgtaatgacagtagcagacggagcaatgaacaactgttgttctttgctcatttgcaaagcttgagcttcttgaagaaagaagaaacctgcgactttgggcagggtgctgtagctatgcatgttgggatgttctcaggctgctctatccacagcttgtgccggacaccagctgctgccagcttctcagccaggttattcagctgtgtctctcctttcacctccagtgttaccttgtgcattcggtcgaggttgtcgggcgcgcagtaggcggcggtgtccgggtggtccctgtgcgcccacacggcggccacggcggcgtggcagccctgcgccacgacgctccccagcggccacgcgtccgccagatcgcgccgcaggaccacgtactggaccagcacgtccacggcctccttcgcgccctcctcgccagtggcggccgcagcagcgtccggagcggaggaggcggcggcagcgttcatgctggctccctgcgtgatctggcggagggagaccctggtgcttgccgggaggagcaaggcggcgttcgggagtgtggcggctacaggtagcga

SEQ ID NO: 121950 - DNA, 185 bp, Zea mays
  Clone ID: MRT4577_426C.1
tttatttaggaaaaaaggggaccctggtttctttttggggatccagcaaacccatatatttgccccttctattcctttaaacggtttttacccaaaccaattatatcaaattttattgaaaaatccatgctctttgattacaacttggacattaattcgcaaatattttaaaagacctaaacaaa

SEQ ID NO: 121951 - DNA, 1055 bp, Zea mays
  Clone ID: MRT4577_42700C.1
gccggccgggctgcgaaatgcgtccatggcttcggtaactgacgctccttcaagcctagtagcaactgccccactacacacaatccacgttgcgcataccgtagcgaccctcctcgtcggggcttcgccgtagtgcctcgccgaagcaccttgccagccacgccatgcccactgccgtgcgcagggagccgcgccgcgaccgggcgtcgtcgaacgcaggagaccccccccccccccccccgctggttcgcagctcccgtccgtcgcgcgtcattgaacacccgtgtgctggaacttccccaagccaagttggtcacgcgctggagcgggcttcgccatctctcccaccgtgctacgtcgcaagaccgcgatccatttccgagcttcgaggaatcgacagtcaagcttcggcgaccaaaagatcgaactcttcgagttctacgaggctgaagatcctgagcatctgtttggtgaaggcaagtgtcctctgacccattatgtcctacttactttgtaattcattatcccacatgccatgatcaacctaatgattgactagttttttgtttatcctgtccttagttatcctttgggaattagcttttatgatcaataccatgctagtgctttacattaatcaatgaacataatgagaatactttatgatacgatgatgttattctggatatgatgatgaacttgtggcactaaaggggactcagactgtttctcgagcacctcttcgtaaggacctgttcattcgatgatcatccgggaaaacagttcaaccatgagggtggtatgggacgcccctagcggattagttagaggaacttgaggtgtagtcggcttcgccattgtgctgtcaatggggtccaagcacagtacatgctctgccgaggctcggtgccgaggttcgttcgttttgcttttgtcagtcacccctcctgcggggagaggtactgtgcttatcaaactggagaaacctaacgggtggctatgacctctagggaatctttgtaaaggctacgtagtgatatcctgccagaccacta

SEQ ID NO: 121952 - DNA, 229 bp, Zea mays
  Clone ID: MRT4577_42701C.1
ggcgcgtactccatcgaggccacgtgtcacgcgccgaagctggaggaagtgtacgccgaaatcttccgtgttctgaaaccgggggcgctctatgtttcctacgagtgggtgacgacggataagtaccgaggcgatgaccctgaacacgtggaggtcattcaggggattgagaggggggacgcgttgcctggccttagaaactacaccgacatagccgagacggcgcgta

SEQ ID NO: 121953 - DNA, 1537 bp, Zea mays
  Clone ID: MRT4577_42702C.1
ccagtacactcgatccccatggtcggcccgatggtattggtgacgctgacgccccagtacttccccggccgggccggggacgaccggtccaccgcgcatcgaacccccacttgtgccgattctgctgatccctcgccgacaacggccggcgaatcgacaccatggccgctgcgcgccggggccgtggcgacggcgccaacggcgtcgtccgtccccgcccccgcgaccgcggcgggagcatggcggggcgcgtggccgtcctcgccttctgtgtcgcagggatctggtccgcctacatctaccagggcgtcctccaggagactctatcgacgaagcggttcgggccggatgcgcggcggttcgagcacctcgcgttcctcaacttcgcgcagaacgtcatctgcttcgtctggtccttcataatgattaagctgtggtcgggcgggagtagctccaatggcagcgcaccgatatggaagtactggggcgtcagcgtcaccaataccatcgggccgaccatggggatcgaggctctcaagtacatcagctacccggctcaggtgttagcaaaatcttctaagatgattcctgtaatgttgatgggaactcttctctatggtgtgaagtacacacttccagagtatttatgcacctttcttgttgccggcggtgtgtcctcctttgcgttgttgaagacaagctccaagacaattaagaagcttgccaaccctaatgcacctcttggttacacattgtgcttcctcaacttagcttttgatggatatactaactcgacccaagatttaataaagtcaaggtacccaaaaacaaacccatgggatataatgcttggcatgaacctctgggggaccatatataatgctgtaattatgtttgttgcgccattactattcagtaactggccatatgcaaatggttttgaggcattgagattttgccaggagaacccagaggtggcctgggacattttcctattctgcctatgtggcgccgtggggcagaacttcatcttcttaaccatcagccggtttggctctcttactaacacaacaatcactaccacccgtaaattcatgagcattgtggtttcatccgtcatcagtggcaatccattatctttgaagcaatggggtagtgttgtgatggtcttcttaggcctctctatccaaatatatctcaaatggaagagaaagaaaggcagagagcacaaggagtaagcttgattcttcaaccttttctgatttgtaacttcaattggacagatctcttgtgaggttgaccaggataacgttaatgcagtctgtttgaaattaggaacttttacatggattattatgagtgataccaagtgtgaggctgagctattggtaacagctctaatttatgttctagagggaggattcatgtgtttcacttaaatgttgatctcgtggatttgtcttatgctactagaagaaaatacccacctaaacaatataaggaatataccaatagtctttaagggcttgtttgtttc

SEQ ID NO: 121954 - DNA, 341 bp, Zea mays
  Clone ID: MRT4577_42703C.1
cctgctagttccggtccggtcttcccgggcccatcttgtgccgtcttccactgcccccgagtccaaggtcttctatctcaagatgggtctcaagcagtttgaggctgccatcacatatcttggtcattttattcttaagctgtttgttacccatcttgtgctgtttttcactgttctctagttcatggttttttctcttctgattttcgtgtatcccttcagattccttgttttgtttaagactgtagttctctgataggtctctttttttaacattatgttgtttcaccttgttgttcagcactttctttctctttgtttttccctgttttttttttttt

SEQ ID NO: 121955 - DNA, 343 bp, Zea mays
  Clone ID: MRT4577_42704C.1
tccacacgagatttcttttctcttttagctcatcttatgacacctgcgttatcggtgaacttataaaccggcccagccaaactccccacctgacaatgtcttcctccctgatcggcccttctaagccgtaccttttatccaaaatgaggttctgttccccgcttccgacccaccgaataagtaaaataacttttaaagtactgttatttcacttgcacctctaagctctcacttattctacacctttcaagtcatttcacatattccaactatagttcagctcaacattttcttttttttcacttattttccctaacccctttccctttgctttggtttctct

SEQ ID NO: 121956 - DNA, 1659 bp, Zea mays
  Clone ID: MRT4577_42705C.1
cggacgcgtgggcggaccgtgggtgtacattcaacgtgtgtagtgtgtgagtttagacactggggtagtggggtgaggcaataaaaaccctatcccagtaaacgccgcggcttcttccgctaccaccttcatccatcctggcgtcggtgtcttgccctgccccagcgccgccgctccttcccccaccccgaagcgccgcctcttctgcctccgtcgacggtggtggtgctcctgatccccgccgttgaactggccataggagagcaaagaggaaggggaggccacgagggcgccagtagatatattcatcttcatctcggcttgcgatatttttgaattttctattccgtattgaaggcgtcgatggccttgtccgccctaatcagcaccctcctcgccgccgccatctggtgcgccgcttacctcgccgctgccatctcctccgccttctgattcccactccccactccccaaccctaacctcccccctgtagcacaccccacctccagctttgtaggtcctactatacttgcaacctctcccgccgactcgcttcgatctacccgccctcgcgtcaccatggggtacgcgcagctcgtcatcggccccgctgggagcggcaagtcaacttattgctccagtttatacgaccattgccagaccgtgggaaggacaattcatattgtcaatcttgatccagctgctgagcacttcgactatcctgtggatatggatatcagagagctgatttcattggatgatgttatggaggagattgggttggggccaaatggcggtctcatctactgcatggagcatcttgaagacagcttggatgattggtttgatgaacagctagagaactacttagatgatgattatcttgtgtttgattgccctggccagattgaactcttcacacatgttccagttctgcggaactttgtcgagcacctgaaacgaaaaaatttcaacgtttgcgctgtttaccttcttgattcacagtttgtcagcgatgtaacaaaatacatcagtggttgcatggcttctctatctgctatgattcagcttgaacttcctcatatcaacatcctttcaaagatggatctggtctccaacaaaaaagatgtagaagagctctaggtacctggacccgaatgcacaggttcttctttcacagctgaatcggcagatggcacctcggtttggcaagttgaacaagtgtttagctgaactggttgatgattacagcatggttaatttcattccacttgatttgagaaaggaaagcagcatacaatatgtgctatcttctatcgacacatgtatccagtatggggaagatgcagacgtgaaggtcagggacttcgaagaagacgaagactaaccactggcactggatgctgtgggaggtgcaaactggttgctagcagtcgtgtagtgcggagtgagactttgggactgtgtatggtggcgcaggcatgcaaaaacgtcgtaggatgctgatgacagctatgtggtctatgtaagacgaactaaagcagatactccatttggcaagtcctagtaaaacgtgtgcgcgccttgatggtcctgttctccctcaatgctccgttggttttttatcaaaatcaattcaacggttgccgtatttatag

SEQ ID NO: 121957 - DNA, 690 bp, Zea mays
  unsure (1)..(690): unsure at all n locations
  Clone ID: MRT4577_42706C.1
aattcggcacgaggctcaccccgcgtcctgccggcggacgcaccccgcccggcatcctgcgaccttccttcaacggcgcaatccatgcgcaattcccgctcccaccgtatcggcctcgctcgcgcaatccatgtggcctaaccttcaatcaaggctccgggcaaggtttccatcgttggcgaagcaccaacctccatccttctccacgctctcctggaagactatcatccatggtttacggagaaatcacgcctccccagacgtccacccggggctacaccatgaccccgccccctctcccacaccgccggccagcctccatcgtcgatggaagggcgcgatctccgcaatccgcaggccccttcccccacaaatgccgccatggatggcgggtgcagcggatttcgcctccatcccgcttggccccctccgcgcacagccagccgcatgcccgcgccatggcggatccgcctccccctccgccaacgagcatgcgccagcacccgatcctcgctcgctcagccatgccctcgcttcggtcccctccgcgcacgcgccaaaccaccgttcccccgcccgctccactgatccccatccccctcagatcctccctgcanatcaaatccccatgcccgcagcgcctcgcctcggctgctctacctctatcccgcgacccgcgagattggaatc

SEQ ID NO: 121958 - DNA, 870 bp, Zea mays
  Clone ID: MRT4577_42707C.1
cgggttgaatttttctgttagcttatagtgctgttaccttgcccaaaagaatgtttgacagttctgcaaaatgttatgactgactgtgttatgtttaacagatttcacgtaaatggactcatcatttgaccactctattgttctttctatttggcatttggtcattgtgggaaggcttcaaggaagatggagattcggaagaattggctgaagttgaagcagagctggatgctgcctttaagagtaataaaggtgaatctaaaaataaatttaaggcgaatgatgatatgaagaaacagcaaagaccatttctcatgcagttcttctcaccaatttttctgaaggcattttctattacattctttggtgagtggggtgacaagagccagattgctacaattggcttggctgctgatgaaaacccgttcggtgttgtcctgggtggaatcatagcgcaagcactctgcactactgctgccgttcttggtggaaagagcctagcgtcccagatatctgagaagatggttgaactgtcaagcggagtgctcttcctgctcttcggtatcatgtccttactctctggaccagaaggaggatttacatgaatgatggcaacgaaagccatccatccatggcgaacaggatggtgatttaacagtttagccgacacgctgtaaacatttcagtcgcccttcaaaaattactacatgttacagaagtctgtagcgattgtatatttgtattctgtcgtgcccagcacgtgaaattttgttatcgcaattacatgcgttaacaaagctttgttcgtgaacctattcaggcaattaatatgggggcttatagcaataaaaaaaaaaaaaaaaaagcggc

SEQ ID NO: 121959 - DNA, 591 bp, Zea mays
  Clone ID: MRT4577_42709C.1
gcccgcccccgcctccccctccgtagccgccgccctgggagcagtcccttgccatgtggccctcctcgccgcacttgaagcaggggattgcggagggcggttggggattgcggcgggcgggcgtgggagaggcgggggcagtctacattaggctcttaatagttgtagagatatgtggcacaccagccacgtactataagacagtggctacatgaagggcataacaaatagtagtaattaagctcaatggacaaagtaactgcaaaaatgactaaatttcccaattacagcatatatggttaagcatcagcatcccacgagcttattcaacataatacgccgtctagatgacggctcgccggcaatatagagtattaattgggagatagtgacgaacctaaagattgcgaggctaacttgcaggtagttgaccgccttggtcctcgtgatgtactttgccgcattcccttccttcttcttacccgcagggcggtagtgcttcggcattcgtggcggcagcgcaggtcgttccccgtgctggaaaagggaggggaaaagagaggaggagaggggaaaaggcggtagcgcttg

SEQ ID NO: 121960 - DNA, 402 bp, Zea mays
  Clone ID: MRT4577_4270C.1
ttttcaacaggcattcatatggatctctgacggagggttatattactcgtgagagttttctgctaattgatgcggacattacactgcactaaaccaatatgttggatgttggctggctattcgagactactggataaccgcaatgaggctctagagtgcatgctaacatagcatatttagtatgcctaacatctccaaattgatcgtatgtctgtatgtctgtatctttatttctatctatctaaacagtggactaaatctatcagaacctgaacacgagtggttgtacctgtactgcgctatctacattcacctgttaccttcttggccgtgcgaatgatgattgacagccagcacttggagctggagagctacatggcactgggacatgcaacaagagtt

SEQ ID NO: 121961 - DNA, 2124 bp, Zea mays
  Clone ID: MRT4577_42711C.1
atttattaattaagggagagttctggacaatactactgtccttcaatgagtgacattttggttttgtcttaagtaaaagcattttatgtttgaccaagtttatatagaagattatcaatatttatagcaccaaatagatttactatgaaaatatatttcatgatgaatctaatgattttatgactggcgtcatggtgccagggccagcgtggctgaacgtcaagccaccgtggcgggtgctgcacaaggcttcggtttgctccggtttcttgagattagttgttggcttttgttaggggatttggttgttgcatcttaggtcaagtctgttaggctttggggtacaagtacgtggagtattcatttgaaaagaattaagcaaggctgcagtgccttccatctccgtcccttgctcgcaagcacggctccaccacatgatcgggggttcaagcttgatcaccgatcaccaactgctacctcctgcgctatctgctataccctggctcctatcaaatgatatttatttggcatacattttagtcaaatttaggttgcttgacttaggacaaaaccaaaatgacactcttgcgggccacaggtactatcttctagttgctacctttttttttgatctgtgcacctgttgtttgtgggtgggtgggttagagcatctcctagagtacccaataatttcttccccaaaccattgagttttccaagctgccaaaaagtattgggaggatcaaagaagggtttctcgaatagtttccaaaaaccactcctggaaaataaaaaaaattgactcatggggaactttcttggcgatgcgtggatttttttttgtgggagattgcgcgtgcatccaggccgtggccatgattttccagaggttaatcatgattttaccactgaagagaagtagtatattccttaaagcatattagtattagaaaaaaactagtacatatctatccttgtgccttgatggctcccttttgccatctccacatctcttcgttccatttccccatgtccagttctcgcatctcttctgtgtatatgactatatgagcccatcagccgccggtgtgaggaatggcacggccgcagggttgcgccaaagggaaggatgcatggtgccacgtctgggacggcttttgggaggacgaagctccgctatgcgatgcggccaggtggagcggatccggcatggtgaggagtgggagcatggccgggtggaacagctttgtagcttgcacgatggtgccacatgattgggagctgtgattaggagttgttgtagatgtgttttttccaatcttgcgaaaaattctagataggggtgttttgggaactcttggagatgctcatcctgatatgaaaaggctgtcaaataattggtgttttgttttgtgtatctcatttcttagaaggatggcaactaccgtgttgatgctcatagtaccccaaccatgttgaattccctcatgtacaagctttgctattacagattcgtcgaaactgatggtaagggctttgatagagtgagaagatatgaaatagggaagaaacattttaaacttagccattgggtacaggttttcacaactcaccattggctggttcggatttacaaactgaaacctcagaagaacagagtcagagggaaacttaaatttaaatctagtttaaaagcaagttttatgcgtaaaactggtggaaagaagaacccatggaaatagagactacaaaggcagggtgctggagtcactagtcagcacagttactatcctgagaaaaccatgaattcatcaaaaggagttagattaaaagcatatcattggtgtgttctttgttattgtcatggagcagattataggggtgcttcatgtttttttttgacatttgatctccttaatggcattataggggtctgatgaaagttgtggtaggttctcgagtgaggctttatccccattttaaacaaaatggactttgtttataggaacctgactgagcgcctggccgtttggaaacatctttaaaggttgtttggtttgaagaatatggtagcctatcttttcttttaggctaccttttggaatgaaagattttttttcctcc

SEQ ID NO: 121962 - DNA, 475 bp, Zea mays
  unsure (1)..(475): unsure at all n locations
  Clone ID: MRT4577_42712C.1
gggccaaaaccaaaaacccaccggcnccanncattccagcctnnccttanccccgcgccctccggggttcgccatggcaaccgtgttcctccgttccctcgccatggccatggccgacaccgcgctcccgccctcccacaagctcctccctacggtttccctgccgctcctcccctcgtccacccgcgccgcgccgctcctcctctgcgccagccgccgcctgttttttttgccccgcgnggccncanccgacgccgncgagacgaacagggaangggncgacccccacgaggaggaggcnggagaagcccccgacgaggagggnggggangnngaggaagaagagaaggccncaggcgacgagggngagggggagnacgccgnggnggagccgnccgaggaggcaaaggncnacgnngggaaccnccccaacgacagcgaaagcgagggacgcgcgcagcgcggcgaccaggcc

SEQ ID NO: 121963 - DNA, 292 bp, Zea mays
  Clone ID: MRT4577_42715C.1
ctgaagaaatcaccccttctaccgaagatatccccagggcctttgagcatatcgagaatgaagttgacgcctttgatgaagttataactgggcacagagatttatgtggtctggtggcttcactcagcacagctgcaacattcatgaaggccgggtgcaatcacgtgagagctgtcaacaagccgaacttcaatcttccatcatcggatttggttgacgttccgaccgaggcccgaagtataggaaataggtttattacccaaatttaggcaaagggcgggcacgaattggt

SEQ ID NO: 121964 - DNA, 223 bp, Zea mays
  unsure (1)..(223): unsure at all n locations
  Clone ID: MRT4577_42716C.1
cattgggtacctcgtagccggccggggttagatatacctccagtgatcatcatttntgcttaccctaaagcgttactttgactatgacatgaaaactccggtttgcaggtgggaagctaaccaaattcttagagtcaaggtggncaagatatattncagtgcagctagaaatgagcaaactccttatatgncagaaattccggatatacccaaagtgcttacc

SEQ ID NO: 121965 - DNA, 402 bp, Zea mays
  Clone ID: MRT4577_42717C.1
ggcacgagtggtgacgcaatcaaaagggcacgagtggtgacgcaatcaaaagcaacaagcaacagtggcagcgatgatgaacataaccgctctcagaagctgtcttcccgtcgcccgctcagaaggcccatcaatgccctgggtgtttttgcttctccgcctggacctcgtccaccccagccgttctcagctcacatgagatctcaatcaatgcttgatgtgacagagacagactcagccgccatggtcacttccagggacaagcgcatgaagaagtagcaaaagctgaatagtatcaccgacaatcacacgaagaactagcaagagctgaatgtggttagtcctgctttagcaatcacacgaagaactagcaagagctgaatgtggttagtcctgctttag

SEQ ID NO: 121966 - DNA, 295 bp, Zea mays
  Clone ID: MRT4577_42718C.1
gtcctacggttctcgatgcgtccgacctcccatcattgtcggtgacatctctcgacctcagcccatgaccgtcaaggagtccaagtacgccgtctcggtctccaagaagcccatgaagggtatgcttactggacccgtcacctgccttcgatggtctttcccccgtgacgacgtccaccagtccgtccaggctgagcagcttgcccttgccctccgtgacgaggtcgtcgacctcgagaaggccggcatcgacgtcatccaggtcgacgagcccgctctccgtgagggtcttccc

SEQ ID NO: 121967 - DNA, 400 bp, Zea mays
  Clone ID: MRT4577_42719C.1
ccggccgggccgggactgcctatgatcctcttcaactccactcacctgctgggttcgtctcactcctgtctgacattgatcacatagaaggacatgaattcatcatgcagagacgtccagaagaataacgcacttcgacgcagtcgtcgcagcttcggtgtgatccaacatctacctagcgctcgagcgtgagaccgtccgttgcaactggtgcatgacgatcaagaagcgcccctggaaagcctagagggacgatcagaggcataactgtgtggcgcagcgcctgtgaatagccaatgtgtcttcatagacttgtcaatggcgagactgggtgcaaacagtgtaccggccagaactttgagtactggaaaagaggtgacaagaacggtgcataaaaagt

SEQ ID NO: 121968 - DNA, 502 bp, Zea mays
  unsure (1)..(502): unsure at all n locations
  Clone ID: MRT4577_4271C.1
cccagcgtccgcccagcgtccgcccagcgtccgtacaccagcatttgttacaacgaaaagaagcagtgtgttcaatgcgatctgattatgagtcctatngaaaaaaaaaaaaaaaaaaaaaaaaaaaaaaaaaaaaaaaaaaaaaaaaaaaaaaaaaaaaaaaaaaaaaaaaaaaaaaaaaaaaaaaaaaaaaaaaaaaaaaaaaaaaaaaaaaaaaaaaaaaagggggggccctttttaaaaaaaccaaattttactaccgggggattggaagaaaaaattttttttatagggcacccaaaaaaaaataaatgggccgggttttaaaaacgggggaagggaaaaaacctgggggtacccaaattaaatggctttgaaaaaaatccctttttcgcaaggggggtaaaaaacaaaaaggccccaaccaaccccctttccaaaaatttgcccaccctaaagggaaaagggaacccccctttaaccgccaattaaagccgggggg

SEQ ID NO: 121969 - DNA, 415 bp, Zea mays
  Clone ID: MRT4577_42720C.1
tttgatatctccaagaaatgtggatttattcagtgcagtatccagcagctcttcaaatgaccttgaacaaggtgcaaatgtcaggtccaataatgccgagaggttaacattaccagtccaagggccactaaggaaattgttcgctgacatgttatgtcaccagaatatttacttacccgttacatcattgcaagaggcaaatgataacaggaaggaagtcagggttgaatccagtcaagaaactgttagtaatggtttccataggccaaagacaggagagtctgtgatttccattgaaaatggggagtccataaatgatgcccagacacaagaaattactcaagcaataatgccaactggttcttctgtaagtgataaagatgcagaatcacctgttattggagacaatggggca

SEQ ID NO: 121970 - DNA, 209 bp, Zea mays
  Clone ID: MRT4577_42721C.1
ctgagctatcacttctccgtgaggcctgagcccctcaccgctgtgatctagagcggcccacgtcgcctcggggatcactctcactaccgaggcccacccatttagtactatatatatatctctaggatcgatcatcactacattggcaagctcctccgtcctgaggagcctactgtccctcctcgtctacatcgtcgccggcgtgcccg

SEQ ID NO: 121971 - DNA, 301 bp, Zea mays
  Clone ID: MRT4577_42722C.1
gggattgggaaggaatggggggggcgacccacgcgtgcgctcatgatctaacgcgagggcttcatattttgaaaaccatgctgaaagaggggtgcggatccatgttctcgcgtgccaatacttaattttttgtcatggtaaattatggctccacaccacccttgtagtacagctatcgtaccttttcctttctgcaccttgaagagatgtaataatacgggtattcttacttggaaatgcaataatgtctttcttccaaattggataagctacctgttctgctttttaaaataatattctt

SEQ ID NO: 121972 - DNA, 432 bp, Zea mays
  Clone ID: MRT4577_42723C.1
gaccgcacgcgtccggacggctggtcctgcacctactactactatcttgtcaacgcaggtgttacgagatacgcggggtaatgactcggacgcaatctgccgtatcggtcgccgagtacccctgcttgctgctgctgccagcctgggccacgacctaccactccgtcatcacctcttcaaagctagctccgacatctgcactgcctgtcctactcccatcggacgacgtacaggccctgcgccttctgctgtatcaccttcaggaacctcaagatcatccgcaacaccattcgacgacaggaacgccaaactgcaactgcctcaagaacatcaccaggaacgtcagccatctcaacgccggcaacgccggcagcatccacttcaagtgcggcgtcagcatgcgatacaccatcatcaccttcacccactgct

SEQ ID NO: 121973 - DNA, 245 bp, Zea mays
  Clone ID: MRT4577_42724C.1
ctcgggtcccttcctcacttttccggcaggcgtgggggtgttcaaattcaagcccagctggctgattcgcgcgctggccaaacctaggtttcttagggtggtcctggccaccccgggggccttcttgttccccaggagcggccccccggcccacatttggctctcaggtgtgaagctcccccaaccgcgcagtgtgggtccaaggtcccgcgccccttggaaaggccccgcgccgttgtgtagct

SEQ ID NO: 121974 - DNA, 263 bp, Zea mays
  Clone ID: MRT4577_42725C.1
agcagtttaaaagattctttttactacaatcttacaaaagttatacagttaatactatactatatatgaaatggaatggaatggaatgcaatggcatgagttctcatgcattatttttttggaagatgaccatgcagaagaatgccacgcaccggaatattacaccattggcaacaagaaccactatgcagaggattctgtctgtgatgtcgtagccactattcaacagtgagcctcagtgtgttatgagccagactccggaa

SEQ ID NO: 121975 - DNA, 753 bp, Zea mays
  Clone ID: MRT4577_42726C.1
atgtcgggagctcacgccaagaaggagatggtgactggcgagaagcccgccacaagccacgggaaagctccatcgggagagtccggcaacaagaagagggaggaatcacctccccgtgtcaagttgcaccggagtggcgacaagaagaaaatgaagaaagtggtctactacgagaccaattcttcatcgccttccacctccaacttcgacacgccgtccgtcacttctaagcgccatgagcgcaagaagtttagctccaaacaaatcatcgagcgagacgccacctccacacccgaggtgcaacccgtcaccttcaaagcgatggaggagaagaaggaagagtcttcatcgagtaggcttcccatcgacacctccaagatcgataatgaggagatggcgctcatcatcaagagcttccgtcaaatcctcaaacaacggaaggggagagactacaagccccgttccaagaaggtttgctacaagtgtggtaagcccggtcactttatagcaaaatgtcctatttctagtgatagtgacaggggcgacgacaagagagggaagaaggagaagaagaggtactataagaagaaggacggtgatgcccatatttgtcgggagtgggactccaacgagagctccaccgactcctcctccgacgaggacgccgccaacatcgccgtcaacaagggtctcctcttccgcaacgtcggccacaagtgcctcatggcaaaggaaggcaaaaagaagccttaa

SEQ ID NO: 121976 - DNA, 424 bp, Zea mays
  unsure (1)..(424): unsure at all n locations
  Clone ID: MRT4577_42727C.1
gtcagttcgtacttaccctcacaacaaagctaatcccccactgacttggcgtcagttcgtacttaccctcacaacaaagctaatcccccactgacttggctcaacccgcaggattgccagcagtgagttcattttgacctttctcctcgcaattatatanccacttgagggccaaagattggcttggtcagagatcctgtcggttgttaccaggaatttccttgaatctctgagcagctatcagcttcccaatgcaggtattccaaaacccattgaattctaaatttgtaantagaatgtcaactctttcacaaggaaagggaagaaataatggaaggataaaatgttaattcagagcttacagcggtccagatcattcttggtttactcgctagggatttccttgaatctccactgccaccgg

SEQ ID NO: 121977 - DNA, 346 bp, Zea mays
  unsure (1)..(346): unsure at all n locations
  Clone ID: MRT4577_42728C.1
tccgcactccacgcaccatcctcctctctctttcgtcgccgccccctaagatgcgctatcacgtgcgcctcttcccctaaaccccgccgtcggcgttcacctgaagttcccgccgcgccgccttccctcgttgctgcttactcgtctgcacctttcnctcccttctcccgctccgacaagctgctcctacttgcccactgtactctcaacccggcgcgacccggtgcttctcacgcacatcgcgacnccctcttcgatttccgggcctgnaggactccatcgncgctcnctcnncggacgactcgnccttccgtctctcgatctcataccgccgtcgcggctccct

SEQ ID NO: 121978 - DNA, 433 bp, Zea mays
  Clone ID: MRT4577_42729C.1
ggggttgaacggcgggatgtcggccggcgcgggcggcggcgggtgccgccaccgcgggagcgggccggcgaggaggagcgtctggaggagcggcccggccgacaccacggcctccaccagccgccccttctccggcagccgccgcgcgagcgcgatgtggcagctccgcgtcgtcggcgtccggcgcggtctcgttcatgacgaccgcagccgcagttgctgaggctgaggcagagcatcctcttttctcctgccgacaggacgcttgctgctgcgtggaggctcggagcaggcgccacagccgccgccgccgcctgggcctggtggtgcctgtggtgcttgtgcgtgtggctctggcgccggggctcgtcccgctcggcggtctctgtcgtctcgtgcgccgcgtgccgcgcggcctttgtctcctcgcgcc

SEQ ID NO: 121979 - DNA, 279 bp, Zea mays
  Clone ID: MRT4577_4272C.1
agaggagaggttaacgtatatgtcctcacaaaaaagaaacagggagccgtagatgcacgatcctacctataccactggcatgaagcgaaacggtgactagtacagatctgagacatgcatattgccgtatgctgtgtctatggacaagttgctgccaccggggactaatagacgagccaggtgtggtacatacgatttacaaaagcgaagggacctccggtgcaaaaaaaactatggagacgtgaggaccgtacgaaagtttctgcaaggggcttatgt

SEQ ID NO: 121980 - DNA, 415 bp, Zea mays
  unsure (1)..(415): unsure at all n locations
  Clone ID: MRT4577_42730C.1
agaggcaggcagactgagccattcaagtatttaagaaacatggtgcttcgacaggtattctgttcagtcatacttctgttaggattccttttccttaatgctatcctgccttttccaatgatttcaagtttttaacttgggtccaggatcgtggtactaatgggatcaacatgtcaacctggatttgctgtcaccaaagattgctttcccgggtagatttgatgcaaaggttacttgttttattggttcggatggccaagcttgtggaaattgctcatttagtttggcaaccctaggattactattttcccaaaggaaattagtttggtgattagggatcccgaggggatccatgatcacaaaatcagccctaaggaaaataaaaatatcttgggaaaaataaaaatatcttgng

SEQ ID NO: 121981 - DNA, 798 bp, Zea mays
  unsure (1)..(798): unsure at all n locations
  Clone ID: MRT4577_42731C.1
ctcttatccgcgcctcgcatagatacacttgtctgccctgacacacgcctctcaccacgagtgggatcgatcctcccgcgtaccaagccaccgaccaacatggcagcgtctctccaagccgcggccacgctgatgccggccaagatcggcggccgggcctcctccgcgcggccgtcgtcgcacgtcgcccgggcgttcggcgttgacgctggcgccaggatcacctgctccctgcagtccgacatcagggaggtcgcaagcaagtgcgccgacgccgccaagatggccggcttcgccctcgccacctctgccctcctcgtctccggcgcgagcgcggagggggcgcccaagaggctgaccttcgacgagatccagagcaagacctacatggaggtgaagggtaccggcaccgcgaaccagtgcccgaccatcgacggcggcgtcgactccttccccttcaaggccggcaagtacgagatgaagaagttctgcctggagcccacctccttcaccgtcaaggccgagggcatccagaagaacgagccgccggccttccagaaaaccaagctcatgacccgtctcacctacacccttgacgagatggaaggcccgctcgaggtcggcgccgacggcaccctcaagttcgaggagaangacggcatcgactacgcggccgtcaccgtgcagctccccggaggcgagcgagtgcccttcctcttcaccgtcaagcagctcgtcgctaccggcaagcccgagagcttcagcgggcccttcctcgtgccagctacaggggttcgt

SEQ ID NO: 121982 - DNA, 214 bp, Zea mays
  Clone ID: MRT4577_42732C.1
ttttttttttttttaataaattttttttttttgtttgggtgaagaattactaacggtagcaatactttctttttttggccaaggcggaaaacccaaattctaattttattgattgaggaggacatgggaacacaaagcctatgaacatgtgttatcaacacgatctgaatacctgggggagatacgaccgatatttttttgtttgtctgacatt

SEQ ID NO: 121983 - DNA, 546 bp, Zea mays
  Clone ID: MRT4577_42733C.1
cggaattcggctcgagggaggagctaacttgccaattgccattgcactgcgcgcgcgcgcctcgcatccgccgccagcaggtgccaccgccatctctgctctctctctctctctcaagcaacgcccgccatggcgaccatagccacgatggccctgctgaagcccgccaggatcgtggcgcggtcggcgccgccgtccaccagcggcagcgtctcgctgcgcgtcccggcgcgggccaagaaggccgcggtgtccgcgtccgtgtcgtccgcgctggcgggcgccttcttctcggcgctggcgtcgtcggacgcggcgctggcggcgcagcgcgtggcggacgtggcggcggcggccgactccgggagcgacaaccgcgggcagctgctgctcttcgtggtggcgcccgccatcgggtgggtgctctacaacatcctgcagccggcgctgaaccagctcaaccgcatgcgcagccaggccgtggtcgccggcctgggcctcggcgccgccgccgccgggatggcggccgccgactagtgagctcga

SEQ ID NO: 121984 - DNA, 554 bp, Zea mays
  Clone ID: MRT4577_42734C.1
cgctttcgggaggagctagcttgccaattgccattgcactgcgcgcgcgcacctcacatccgccgccagcaggtgccaccgccatctctgctttctctctctctctctctctctctctctctctctctcaagcaacgcccgcctgcccgcccgccatggcgaccatagccacgatggccctgctgaagcccgccaggatcgtggcgcggtcggcgccgccgtccaccagcggcagcgtctcgctgcgcgtcccggcgcgggccaagaaggccgcggtgtccgtgtccgtgtcgtccgcgctggcgggcgccttcttctcggcgctggcgtcgtcggacgcggcgctggcggcgcagcgcgtggcggacgtcgcggcggcggccgacgccgggagcgacaaccgcgggcagctgctgctcttcgtggtggcgcccgccatcgggtgggtgctctacaacatcctgcagccggcgctgaaccagctcaaccgcatgcgcagccaggccgtggtcgccggcctgggcctcggcgccgccgccgccgggatggcggcc

SEQ ID NO: 121985 - DNA, 249 bp, Zea mays
  Clone ID: MRT4577_42735C.1
tgtaggatattcctggactgactgatcctacagtgagtcgctgcctgggccacagaagagctagcagaatccgcaaacttttcaattgctctaaagaagatgatgtccgccagtatgttgtaaggaaggccttaaataaagatggtaagaaacctaggaagaaagcacccaagattcagcgtcttgttactccacgtgtcctggagcacaaacggcggcgtattgctctgatatgcgcgtaccaagatt

SEQ ID NO: 121986 - DNA, 282 bp, Zea mays
  Clone ID: MRT4577_42736C.1
aagagatctataatgggatctggggacggcaatttcctcaaggtgcttctcaaaaacttcgatgtgcttgctgggcctgtcattagtcttgtttatcctctatatgcttcaattagggctattgagatcaagtctcctattgatgatcagcagtggctcacttactgggttctctactccttgatcaccctctttgaacttacttttgctaaagtccttgagtggattccaatatggccctatgcaaagctgattgtcatctgctggttggtccttccttac

SEQ ID NO: 121987 - DNA, 287 bp, Zea mays
  Clone ID: MRT4577_42737C.1
ttattccatggtttcttttgcataacttcacttgtctatttgattaattctctatcctctttatctctatctttcctcttcccatccttcatttttattcaaacccatcaagatatataaataactacctatatataaattataaatacactaaaaatctctcaatttatacattattgaatacataaaatactgctcaacatacaaacatattattttatatactataaaatacttctaaatatattttataattttaaacttttatttaacataaacccttatct

SEQ ID NO: 121988 - DNA, 387 bp, Zea mays
  Clone ID: MRT4577_42738C.1
gcccgacccacgcgaccgaaagcctcttccgcctccataaccacctattttctccccaaccaacatatctccaacatggctctttctaaagatacaaagtcccctcacttcctaatcttcttattattcacgtcccaacctccattaaactccctctttttcaccactaccactgaacctccatctattatatgctctacatcaatacaacattccccttctgcaccttcaacactcataaatacaacaatatccatttgaagtgaacaaacactaattcaactcgctttacaattccaaatcattttaaaccttctttccttcttcctatgctaaatctaacatacatttctttgtatcactttaaacccttttcacctaaaataa

SEQ ID NO: 121989 - DNA, 786 bp, Zea mays
  Clone ID: MRT4577_42739C.1
ccggccgggacgtcactcctcattcttatctgttgacgcatccttctcaatcctgtcggtcttctcctgtacggctctgctgcctgagatattttccatcacgcatacatgcgctagcctctggccatggcgttcaagttctgctcggctcctccggccaggctgccgcgctcacctccgtgagatattccagcgccgcccgtgcttggagaagaagatcctgccgcccgaccgcttttcctcagatgtttgtcgccggtcgccgccatccctgttctttttatatgcgcggcagcagcacccagggagccggactccaccgttttcttctccagccgcgcatctctgctctactcccacaagctcgtcctccgctcggcctcacccacccgctcctccatctccgccccttgctggctgtgaacgacgctggtattcaggatggcatgggtaaagctactcaagggggcgcgggagaatcaccagcaggaggcgagggcgacgctgttccagcagctcaggcgcggcctgcggaccacaaggcccaacaagaggaggtgcacaggccttgagtgggtgaattagacctatgactatgtatcgtggctccactatatatgggttgttcgtagacagggagagggtgtttttttggctgtaagaactcaggcggcggcggcgatccgaggtgatcgtcttccgaatcggaccgtactttccacaccaccataatcaagcgtgtgctccgtcttaatcgaaaaaaaaaaaaaaaaaagcggcccggcc

SEQ ID NO: 121990 - DNA, 224 bp, Zea mays
  Clone ID: MRT4577_4273C.1
ctggaacacgcacatgaggcgcaagctcctactccgcggcatggacccgtatacgcaccgcccgatcgccagcgcgaccgaggggcagcagcattaccatctgcaggagccgtataagccaccggacggaggcggtccagctggccatccgcacaagaaccacttggaggtggacgtgatctcaaaatcgccggactaggcctacagtcgtggcatctacgaca

SEQ ID NO: 121991 - DNA, 752 bp, Zea mays
  Clone ID: MRT4577_42740C.1
cctgtacggctctgctgcctgagatattttccatcacgcatacatgcgctagcctctggccatggcgttcaagttctgctcggctcctccggccaggttcatctccctgctcccttgactcttccagacctccttcccctgatctttttcctgtaaatatccagccactagccgttcctatctccaaatttcaacctcatcatcttcaggctgccgcgctcacctccgtgagatattccagcgccgcccgtgcttggagaagaagatcctgccgcccgaccgcttttccttagatgtttgtcgccgccgtctctgttctttttatatgcgcggcagcagcacccagggagccggactccaccgttttcttctccagccgcgcatctctgctctactcccacaagctcgtcctccgctcggcctcacccacccgctcctccatctccgccccttgctggcgatggcaccggcagcagcctctggatcctgctgcttctcctctgctagctcacggtcttccccatggcgcttggctgctcggccctgccacctcccatggcgcgcgcctgctcctggcgctcggcctcctgcgcatctccaatggcgcgggtccttctctcccctacacgctctgccctccgtctgttgcgtgctgagcgcccagccagagctcccatggccgccgtgccctgcgcgccttggtccctgttcgcttctgatatgcgcgcctagctagcgtccctgcgcgcgca

SEQ ID NO: 121992 - DNA, 1054 bp, Zea mays
  Clone ID: MRT4577_42741C.1
agcactagtttcttcattttgattttcatgcagaattttttctgcgtcaggtaacgcagcagaggcctttccttccttttacttccttttctttttcttcagcttaggtgctccagcatcttcagtaacaactgaactttcatatacgactgcaggactgctactttccatttgcttctttttgctcttcttctttagcttcagtggagcatcatatttactgtctgacagtgattccaccacagcatctgccgtatcatggttactcttaacattggcatgcttatttttcttcttctgcttcaccaatgaaattttctttctccttggcaattctttttcttctttaacgccatgcccggcagcgggttcgctatcgacggcacattccaacactctgtccttcttcctcttcagctgcttcctcttcaccccaagcgccaatttcttgtcctccttcgcttcccgcgaacccttcttgtctttggatttccccatagcaacagactagtaaccaatacgaaggaaagcagccaaacgggtagctccgcagagatctccgtccgtgacttgccccaggctgtggcggcgtcggagaggggtgtcggcttcggctgtcgccaatcggcgtcggggaactccgatgattgttttagggtttgggccttggcaattggtattgggccttccagagtccagacagatgaacccaaataaaggtggttcccacgtttcagtgacttgcaaaggtggcgcgtggacccgacctgccagtttttagtgactaggctttgcgccttctaaaaccctagcttcagaacgaactaaaacccgcgatctgaagcgactagtcgaaggcggcggcggcggcgatggggagcgaccaggagacggagaagaagaagaccccggtggcactaatgcccatcgcgaagcccctcgcaggaaagaagctctgcaagcggaccctcaagctcgtgcgacgaggttcgtgagacttccttcctcgccctcgccctcgcccaattagattacgtgtttgttctatttggtc

SEQ ID NO: 121993 - DNA, 240 bp, Zea mays
  Clone ID: MRT4577_42742C.1
gtatttttttttttttttttttttttttttttttttttttttttttcagtgtaaatggtaacaatcaatctaaatgcagctgtgtttgctagctttttttttattccttttgaatattaaaatttgaactttggtggtttctgatttttttgccccaacctttttaccaaatgttaatacacacccggcttttattaatggggcatttttacccaatttccatttcccatcgccttaaaa

SEQ ID NO: 121994 - DNA, 346 bp, Zea mays
  Clone ID: MRT4577_42743C.1
cacgttccttcggtaaattatgcactaaatactgtacctgatccttttatgggaaaagggggtcattaaccacattcaaattctactccacctgatcgagaaacattcatacgacctcaatatgagctctagcacttactccagcctagctcgcctattgattctgatcacgctacccactctcgataacatccctgatacgctcctcaaccctatagctctaatactcaactcggcatcttcgagtacattggagactccaatgtcaatgacactcaacatactaatctagccatccacgatatgcccagctttgacccttatcgcgcactgacacttggccaac

SEQ ID NO: 121995 - DNA, 860 bp, Zea mays
  Clone ID: MRT4577_42744C.1
ggccggccgggccgggaatcatcggagttccccgacgccgattggcgacagccgaagccgaacccctctccgacgccgccacagcctggggcaagtcacggacggagatctctgcggagctacccgtttggctgctttccttcgtattggttactagtctgttgctatggggaaatccaaagacaagaagggttcgcgggaagcgaaggaggacaagaaattggcgcttggggtgaagaggaagcagctgaagaggaagaaggacagagtgttggaatgtgccgtcgatagcgaacccgctgccgggcatggcgttaaagaaggtgattacatggatttcttatccttttcctcccatttgtttatatttgtgtttcagaaaccagaatcagtagttttatttttatcccagagtagttctatcttgtgcccagaactgaacttttatttatttcattgcatcttaagttgttcgctgcgccctaggtacaacaatcaagttttttccctcttttttgggcaatgaaaatgcagaaccggcctagaagtgtctaagacaatgttttctatcttcgtcattgaatgccagaaaaagaattgccaaggagaaagaaaattccattggtgaagcagaagaagaaaaataagcatgccaatgttaagagtaatcatgatacggcagatgctgtggtggaatcactgtcagacagtaaatatgatgctccactgaagctaaagaagaagagcaaaaagaagcaaatggaaagtagcagtcctgcagtcgtatataaaagttcagttgttactgaagatgctgcagcacctaagcctgagaaaaagaaaacgaacgtaaagggagg

SEQ ID NO: 121996 - DNA, 564 bp, Zea mays
  Clone ID: MRT4577_42745C.1
taggggccttttttttttttttttttctttttttttttttttttttttttttttttttttttttttttttttttttttttttttttttttttttttttttcaccaaagggaaaaaaaaacgggacttggccaacgaggggccctggttttgccccctgcaaaacaaggggggggaccacaatctgtccggcatagggggaaaaaaaaaaaaaaaaattccgggggacccgggaaaaatgaacaaaccccgggaccacccaaaattcaagcccgggcccccgggaaaaatcagcgagagcctttatgcggccatggaaaaggaaacccccccgggcaaaaacaaccttggggatccctttccccaagaaagacttggcaaccccccccccgatcttttgggctatttccaccgggggcccacctgaaaattcaaattccttggaaaaaaatttgggcatggttgaaactgaacccaaagaccttgttttggggcccccaagacttgagccgcccaatgtttgtttgagggaaaaaacccccccccccccccccccggggggcccc

SEQ ID NO: 121997 - DNA, 299 bp, Zea mays
  Clone ID: MRT4577_42746C.1
gggcgcggggggggggtatttccaaaccaaaggaccagatcttttgtccaacaaaagcccctaaggggcaaggggaaaggaaaccttccctcaccggtggaaaaaaaataaaaccattagggagggcaattaaaaaggctttgaaaaaaggggacccgatcgggggcaaaaaagtctaaacccctaaacgggttttaacactttgctaaaatttgcccaggggagaaaccctggtcaaaaagccatctttaattttctttttatcatgggggagctaaaaattaccctcgggccgaatt

SEQ ID NO: 121998 - DNA, 269 bp, Zea mays
  Clone ID: MRT4577_42747C.1
attcggctcgaggtcagcgactgactggtagtagtaaccagaccaatgggcggcgggggtaaccctgacttaggcggaggttagcctgtgcccaacgagcagcactagctgtatctctatcttggagacaactgggctgacgaacatggtgtcctacgccgccctcccccccttcattgtattctcgcgcccccaggttccggccactttttatggaaccgatcaacggcagcagatttgaacatctccatggacagaccaccaattgc

SEQ ID NO: 121999 - DNA, 323 bp, Zea mays
  unsure (1)..(323): unsure at all n locations
  Clone ID: MRT4577_42748C.1
gaatggnaagggtcgactccacgcgatccgtaccaacttttgacacagtcgagcagcgcacgtctttttcgagatctgagaagaattgatgagcgagcgcgcgaaccaatcaaagaggaggccgtactacctctctttcaacctcgtcccgcgcgcctgtttgaacggagtggtaccatatcaaacagtacatttccgtgcacatcgagcaaggcgatgtccaggtcggcaacgcatgctgcgaactttactgtctagaacaccgattacatgctaatcatcaacgacagggacataagaccgctcacatcacaatgatgcct

SEQ ID NO: 122000 - DNA, 681 bp, Zea mays
  unsure (1)..(681): unsure at all n locations
  Clone ID: MRT4577_42749C.1
ctcgnagccggccgggaggagaattgacgaacgacactggactctgtcattttcagcgtactagaagtggaacactgagcgtgaaggagcgaacgaattaattgaactacgatcctgcgctagatagggataccaggcatgaccacaacgtctgtcttgatcactcattagagagacgacggaagacatacaccatcgatagggatctcgtgaccgctgctccagtcctccttacttgcccctaagcctgaatggcgcccaaccaggcaggtccgcgctcccaaggaacctatacctttcatgcgacccctacattccgcctacgatgatgagcctcgctgagacagtcatacacatccggcttccgcccgggcgacatccatgcacgatgtacgagtctaacgcgagcggtcgaatacctcctagcccgcgcactcgcgctggagaacactcaggtcaacgatcaccggttgcgaacactacatggcactgacgccggcctgcaccaggatcttctccaagatctcctcttcgaggacacgctataccactcccgcgtcgatgtcctactaatcctggatattctgcatgaccaggctctcctggcacgtatcattgcacaaaatgtgcttgtccaactagccggatacaacaatcatgtccgccgccaccggctgcacc

SEQ ID NO: 122001 - DNA, 849 bp, Zea mays
  unsure (1)..(849): unsure at all n locations
  Clone ID: MRT4577_4274C.1
ccggccgggaacatccagaacgcgacgcttggtacaggattttcttttgggaagcctttgttagataccaattcataaagactatccacttctggcttctctgcacgtgcctctatcgttagaatcccgccacacgtcgtcttcgaaatgtcgtcaccagtcttcagcaatgtcgaaacgtacaagcccgccacattccgtgaggagtctggttatgcttcagccgagtcgagccaggacggtctgcaagagatcttcttcactagacctcacttgaagtttatcaatgcccagctggctaagctcgagcctcaggacatcctccgatggtgcattacatctctacctgggcttttccagactactgctttgggtctcactggcttagtcactgtggacatgctctcaaagctcgacggacccctgaagcacaacattgatctgattttcttggacactctttaccacttcgatgagacatacgctttggttgaccgtgtccgaagacgatatggaaccccggtccatgtttacaagcctgctggttgcgacaacgtcaacgactttaccgccaagcacggagataaactgtgggagaccaacgatgagctctatgactatgtcgccaaggtcgagcctgcggagcgtgcctactctgagcttcaagtcaaggctgtcttgacaggtcgtcgccgcagccagngtggaaagcgtggcgacctggacattgtcgaggttgacgaggctggacttatcaagatcaaccccttggccaactggacatttgctcaagntaggaatacgttgatgcaaacgacgtgccttacaacgagctctcaacagggttac

SEQ ID NO: 122002 - DNA, 426 bp, Zea mays
  Clone ID: MRT4577_42750C.1
gtctggtaaacacgaatgtaaagcattgtaccattatactaaacatgaattatgagaggttgatacttaagtgctaaagcaattcgttaacctagatgtgccatcctaacagattgaaagaagagatctatcaggtgatcaacaaaggcagaatacgactaaaaaccaatggtgttgcggctgtggtagatccccatatagtggagctataaagcttacaatttgcaggctcgccttagagaagtagagcttgactgcacctggtcaaagctaaagcttgacctgagcttgcactagaaaagctaaatgaaggccgacggaaaggaccatatgactatggcaggcttaatggttgaaatctcaagatgacttactgaatatttgagcaaactggagctgacggaaataagcactctgacagtaata

SEQ ID NO: 122003 - DNA, 491 bp, Zea mays
  Clone ID: MRT4577_42751C.1
cacttaaggaatgcagaggaacttcacatcactatgcagttcaagctccctttatgctctgatatatttgcatgcaagatatcacacatagattggaccacatccatccatcctcctacctaagcagtgacaccttttttgttcgttcttcgaattatgctagtggatactaattcctttcgactaatgaagatgctaccccagtcttcccattcattcccagtggatccttttattgaacgaaccagtcacctcgttttggaggccagtgattcctcaaagcgccgccaaggttccgaagatgtcatttgattacaacacaaatagtctgaaaaagtttttcacgtttagctattatgcttagatcgacaacctgcgatccatatgcaaatagaggtcactaagttgttttaaactgagtgatagtgaccaattagctcatgctcattctcctgcattgctgtagatcaagttgaagttgatggatataa

SEQ ID NO: 122004 - DNA, 367 bp, Zea mays
  Clone ID: MRT4577_42752C.1
gaatctcaaggggaacggtgcttcaaattaaagcaatttaactttaggggctgtgacattgccctgggttaggacccaaacttactaagggcaatctgaatggccacccaaacgtgacttatcgttgtggattaattaggctggtgcgttgcccacccaccaccatatccagtaccccaagggaaggactgacctaaagccacgccttgactcttgtttaaagcacttatgcctcaactctgtacgtactcatgaactgagttagcgcacatgggacactggggtccacccgctatttccgcaccgttccatgcaggcgtacaaactttccctattgtgaggcctattaaaggttggagctaacatg

SEQ ID NO: 122005 - DNA, 1806 bp, Zea mays
  Clone ID: MRT4577_42753C.1
cattgggtacctcgaggccggccgggcttcctcgtccgttccggcgtcctctctcccccaccccatgccaacgcccaccccgccgtctccgtccccgtctccctcttctggaacttgccctctgctccggatcggcgcgggccgtcgttttgccatggcatttccatcttgggcgactctgttcttcgccgggatgatggtggtgttggcagcggtggaagcggatcgggaagctggaggagggagcgtctgcttcgaccggatgttcggtttcggggactcgctcacggatactggcaacttcctgctctccgtgcctgacgacttcccggaccccgcgcggaacctcccctacggccagaccttcttcggccgcccctccggccgctattccgacggccgcaacctgctcgacttcttcgcagaggcatttgggttgccatatgtgccaccttacctaggcagtggggacttccagaatggcgcaaactttgcagtcggcggcgcaactgctctcaatggctcgttcttccgtgagcgcggtgtggagcctacatggacgcctcactcccttgatgagcagatgcaatggttcaagaagcttctcccattcattgcaccatctgagacagagctaaatgaaataatgtccaagtcacttttgtttgtgggagagattggcggaaatgattagggcccattaatcaggagggattggtctgttgatgagctacatgaaatggttccagaagcttgttgacatccattgcaccgtcgggcatcaggatcttataaatcttggagcaaagaagttagttgttccagggcaggtcgacgcggccgcggtcccattatatcttgaatctttcagagccaagaagaggattactatgaggaacaaacaggctgcaccacgcgtccgaatgaatttgctgagtaccataataggatgcttcaggaggagttggagaaactcaggaatcttcaccctgatgtaaccatcatttatgctgattattacggtgctgcattgaacatattccgtgccccactcaagtttggcttcacagtcccactgaatgcgtgctgcggaagtgacgctccgtacaactgttccccttcaatactgtgcgggcgtcctggatctacagtgtgccctgacccatcaaaatacatctcatgggatggcctacacttcactgaggcgagttacaaagttgtcattcaaggagtactaggggggtatgccaagcctcccctttcagaaacctgcaagggtgcggaattcaaagtttctcagcttcaccaatgtacagataatccaacaaacactgtatcatacgatgctttgagctcttttatttgatctgctcgtaaaagaagtgcatttagagttacagtgggcagcatagatgatgttgcaggaccgaacatcttggacactttctcaaagccgagaagagatccatcgatgtagggtcattcagttctacaatccacttcgctgctgggaggatgagaaaaatgggaggggagtttgtagtgctgaaatttgcgattgcttagtgcactactttgctctgctatgttttccttagcagcttactactgcaggctgtagaagggacaacgaaagttgacagtctctgcaggtggttatactactatataggaacctgatcttttaaatcagctcctgagggcaatgtatgcagtacttgatatggtctcaattgccttttaaaggatacaagcatatatacattgtagcctcattgattcaaaaaaaaaaaaaaaaaagcggcc

SEQ ID NO: 122006 - DNA, 319 bp, Zea mays
  unsure (1)..(319): unsure at all n locations
  Clone ID: MRT4577_42754C.1
aggatacncagttgctgcaactggccttctccatcttcgatgcagatgctgatggacacatcagtttgcaggaacttgaaagcattctaaacatctgtgggtcaaaaggtgaatagagatgagctcttgaaatctgtggaggcagctcaccaagaggtgcagcagcagcagatcaaggttgatgccagcaaggacaacggtattgactggaatacatttcaccaggttatgagcaggcccatcgaagaggaagaagtcaaaactgtatggaagatcctggacagtgagaagaagggtcacatttctgtggtggacatct

SEQ ID NO: 122007 - DNA, 533 bp, Zea mays
  Clone ID: MRT4577_42755C.1
gggaccctcgaggttggccggggaccctgagccggacactgttggcttactagtctcgtgcgctccgcccgggctgccgactcgtacaagatgcaaagacgcgcgacgacaaatggattgggcccgatccgggctccgtggcggctaagcactccgactagttcttcaaggatcactgctccgtatagggttcctggctcatctacctatgatgcgtgttacaacgaccggttatgggcagacgacgccttcatcatgagatcattggcttggtaaccagttgcctcactcacggacgacgacaacgacatacctccgcgggttctataacatgtggtggaggagccactagattttatggcactctgaagacagggcgaggttactatgctgcgcaaacgcacgtagcacgtggctacacatacaccagtcaaaaatgctaccaagcctgaaggtaaagccattggtgctacaagggcatatacatggatcgacatggacactgatgtatcgcttgaaaaagctaggagcat

SEQ ID NO: 122008 - DNA, 1777 bp, Zea mays
  Clone ID: MRT4577_42756C.1
cattgggtacctcgagcctcgagggttcctgggccgttccggcgtcctctctcccccagacccccaccccatgccaacgcccaccccgccgtctccgtccccgtctccctcttctggaacttgccctctgctccggatcggcgcgggccgtcgttttgccatggcatttccatcttgggcgactctgttcttcgccgggatgatggtggtgttggcagcggtggaagcggaagcggaagctggaggagggagcgtctgcttcgaccggatgttcggtttcggggactcgctcacggataccggcaacttcctgctctccgtgcctgacgacttcccggaccccgcgcggaacctcccctacggccagaccttcttcgggcgtccctccggccgctattccgacggccgcaacctgctcgacttcttcgcagaggcatttgggttgccatatgtgccaccttacctaggcagtggggacttccagaatggcgcaaactttgcagtcggcggcgcaactgctctcaatggctcgttcttccgtgagcgcggtgtggagcctacatggacgcctcactcccttgatgagcagatgcaatggttcaagaagcttctcccattcattgcaccatctgagacagagctaaatgaaataatgtccaagtcacttttgtttgtgggagagagtggcggaaatgattagccgggtttaatcgttagggagaaatctgttgatgagctacatgaaattgttcctaatgttgttggcgccataagctcgggcatcacggaccttataaatcttggagcaaagaagttagttgttccagggaacttcccaatagggtgtgtcccattatatcttgcaatctttcagagccaaaaggagggttactatgaggaacaaacaggctgcattaagtggctcaatgaatttgctgagtaccataataggatgcttcaggaggagttggagaaactcaggaatcttcaccctgatgtaaccatcatttatgctgattattacggtgctgcattgaacatattccgtgccccactcaagtttggcttcacagtcccactgaatgcgtgctgcggaagtgacgctccgtacaactgttccccttcaatactgtgcgggcgtcctggatctacagtgtgccctgacccatcaaaatacatctcatgggatggtctacacttcaccgaggcgagttacaaagttgtcatccaaggagtactaggggggtacgccaaacctcctctttcagaagcctgcaagggtgcggagttcaaagtttctcaacttcaccaacgtacagataatccaacaaacaccgtatcatacgatgccttgagctcttttatttgatctgatgagctcaagtacttttagatttgtgctggtaaaaaaagtgcagtttagagttacagtgggcagtgtagatgctgcaggaccgggtatcttggacacttctcagagcggagaagagatccatcgatctagagtcatgtagttctacaatcaacttggctgctgggaggaggtaaaaaaaggtggggattttgtagtgtggaaatttgcaatcaccgaagggatacaggtggtcatactgctatataggaacctagatctatgattctgcttctgagggcaatgtatgcagatatgggctcagttgccttttaacagatacatgcatatatacagtgtaaatttgttgattcacattaaccaggataataaccgttgtcgaaaaaaaaaaaaaaaaaagcggcc

SEQ ID NO: 122009 - DNA, 254 bp, Zea mays
  Clone ID: MRT4577_42757C.1
attttgagcattctgagacacaccaagcgatgtcagtagcaatgatataacaacaatggctaccatgatattagccctcgttgcgctcagcaccctttttgtgagtgcaacagatgcgttcattattgcacaatgctcacttgctcctagtgccattagtgcacagttcctcctaccagttacttcaatgggcttggtacacctagctgtgtatgcctacatgctagaacaagcgcttgcggcgagcgtgttac

SEQ ID NO: 122010 - DNA, 1877 bp, Zea mays
  unsure (1)..(1877): unsure at all n locations
  Clone ID: MRT4577_42758C.1
cattgggtacctcgaggccggccgggcggctgtccgtccccctcctcccccaccccatgtcaacggccaccgcgccgtctccgtccccgtcctcttctccctcgtctggaactcgccctctgctccggatcggcgcggcccgtcgtttcgccatggcatttccgccatgggcggctctgctctttgcgggggttctggtggtggtgttggcggcggcgggagcggaagcgggaggagggagcgtctgcttcgaccggatgttcagcttcggagactcgctcacggataccggcaacttcctgctctccgtgcccgacgacttcccggaccccgcgcggaaccttccctacggccagaccttcttcggccgcccctccggccgttactccgacggccgcaacctgctcgacttcttcgcggaggcatttgggctgccgtatgtgccaccatacctaggcggcggggacttccagaatggtgcaaactttgcggtcggcggggcaactgccctcaatggctcgttcttccgtgaacgcggcgtggagcctacatggacacctcactcccttgatgagcagatgcaatggttcaagaagcttctcacatccattgcaccgttggagacagagcaaaacaaaataatttccaagtcacttttctttgtgggagaggtcggtggaaatgattacaaccatttaatcgttagggataaatctgttgatgagctacatgaagttgttcctaatgttgttggtgccataagctcggccatcacggatcttataaatcttggagcaaagaagttagttgttccagggaacttcccaatagggtgcgtcccattatatcttgcaatctttcagagccaaaaagaggattactatgaggaacaaacaggctgcattaagtggctcaatgattttgctgagtaccataataagatgcttcaggaggagttggagaaactcaggaatcttcaccctgatgtgaccatcatttatgctgattactatggtgctgcattgaacatattccgtgccccactccagtttggtttcacagtcccattgaatgcgtgttgtggaagtgatgccccatacaactgttccccttcaatattgtgcgggcgtcctggatctacagtgtgtcctgacccatcaaaatacatctcatgggacggcttacacttcactgaggcgagttacaaagttgtcattcaaggagtacttggggggtatgccaagcctcccctttcagaaacctgcaagggtgcggaattcaaagtttctcagcttcaccaatgtacagataatccaacaaacactgtgtcatacgatgctttgagctcttttatttgatctgctcgtaaaagaagtgcatttagagttacagtgggcagcatagatgatgttgcaggaccgaacatcttggacactttctcaaagccgagaagagatccatcgatgtagggtcattcagttctacaatctacaatccacttggctgctgggaggaggagaaaaaatgggaggggagtttgtagtgcagaaatttgcgattgcttagtgcactactttgctctgctatgtttttcttagcagcttactgctgcaggctgtagaagggacaacgaaagttgacagtctctgcaggtggtcatactactatataggaacctagatcttttaaatcagctcctgagggaaatgtatgcagtacttgatatggtctcaattgccttttaacggatacaagcatatatacattgtagcttcattgattcaaattgtctcgcttgatttataatgtaaaagtattgttcgaaataaaaaaaaatctaggatgtgaaaaaaaaaaaaaaaaaagcggccnaaaaa

SEQ ID NO: 122011 - DNA, 361 bp, Zea mays
  Clone ID: MRT4577_42759C.1
gatgtactctagtcggcggccgcccttcggttgtgggcgtgcagactggcccgcaggagccgactcccccggggcgccacgccggcccagatgatgatgaagcggctgccctgtacaagctaatgaagagggagcacaaagacgggacacctatcccactccaagccctgctccatccccaaggggctgtgggaggccaccagacgccaaatcacataagctaaaggcggagccatcgcggatgccgaacaacacactggcctcctaccgaacgctactcaccatggtctctgccacgtggaggacgacgagcactcgcccgaggacctgaacgctatatggtactactccgcgccaaaaa

SEQ ID NO: 122012 - DNA, 293 bp, Zea mays
  Clone ID: MRT4577_4275C.1
aaaagcttaataagacgctggatttaacgcaggcggggatgttaaattaaaataagtcaacacaaactttttatattgactaatacatgcggatagctaattcttaatgactctaccagctttctaaaaagaaaaatgaagttactggagacaaaaaaatatacactcttggcacggttttaacaagcacatgaatagattttttaaaaaataatggttggaactattttttttcactttaaaaaaaaactgaacttcgattttataaaataaagtgtttttacaagccttat

SEQ ID NO: 122013 - DNA, 165 bp, Zea mays
  Clone ID: MRT4577_42760C.1
cttggaccattcaatcctgactagaaggttttcttggctggcaacttgcttgctggtgaggtatgatggcgatgcaatcggcaaatcaaggagacgggggatacctacgatgctagtcaagtgcactgagttgcaaaaagcactctgatatataatgccaatgtt

SEQ ID NO: 122014 - DNA, 733 bp, Zea mays
  Clone ID: MRT4577_42761C.1
gggctagctcatcgcagtgcttttggtcgacgacggggagtggctgccgtgattggtaggatgatgggggagcgggcattgccggagagcctctcctatatacttggagacgtggcgaagggaaggacggcagaggacagggaggtaggcgatgaccgggatcgtctcgtctgtggcctgtggcctgtggcctggggggtggatgggtggtgagcgagcgacgaagaaaaatcttttcggttgcttgttcaaaaggaacccttttgacattggatatttatccgcttgctgtggtggttttggcgtggtgcctctttctccttcagctgcgaatgcgacttgcgaggttcctgtgtacacactacacagccagcaggtcaaattgtacaggagatatacatacaacaataatcacgaatccacctcatgcttcttcggttagaagaagtgaattgaaaaaggatcggatgagattaaattcaaaaataaacagaaaaagatttaagcctcaattcccttcgttctacctatatacaaccgaacgaaacctcacctcgattcaacatgcttcacgcaccagaaaaaaatgaaaaaaaaaattaaaggagtggatattacaaggcctgattacgtgcagtctggcattaacaatgccgtgacggcatttaggctgcggtactgctgcctcaaagctagaatctaaaccgctggctgtctgtcaagtgtcaaccgc

SEQ ID NO: 122015 - DNA, 146 bp, Zea mays
  Clone ID: MRT4577_42762C.1
agaataagaataagacggggttgtgctactgctgcatcaggctacacatatataattgggcggaaaataaatagggctatattcgtcagaacgacatgcctagtggaaccaagggcataaatacacctactctggctggaaattaa

SEQ ID NO: 122016 - DNA, 306 bp, Zea mays
  Clone ID: MRT4577_42763C.1
cggtctcacgcacgcgtttcggctcgcgctaggcccccccctcgccatccttgacggttcgaatcctttcctcttaatgacacacgtgctttcgtgttgtgacaaaagcatctagcaattcaaatgctttcgattgttcgatcctagtatgcaagtaggacctcgtatccattctaccgctgttttgtgaacttttatttgtattggccacaccagttccaaaaggtggctttgggtcatccgtactcttctccaatgtaccacatgccgtactaatttgttgttgtcttctctttgcagtccctg

SEQ ID NO: 122017 - DNA, 321 bp, Zea mays
  Clone ID: MRT4577_42764C.1
cttttaggcggctacgatccgatttgtacgcctcaactagacctcactcgtacgccgccgccccctccaccgccgtcgtgcgagagggaggagggagctctggacctccgtggggcgtggaggagtgggacgacgcacgcggaggcagccccggtcagttgctgctgtatccgtccaggatcgggggaattccaggagacctgaaggaaagttgagtgctacatagctgagtaccacaggtgatagattgatggctggcgctttggctgaggacaatgctggggatggtagatcctcatcaactgaagagatgtcaagtga

SEQ ID NO: 122018 - DNA, 263 bp, Zea mays
  Clone ID: MRT4577_42765C.1
ttaacggcgccttggtattttattgttaccaagagctgggcgacaaaagtatcttagcatcactctcacagaaaacatggcacaatggctgtttactccagtgacggactcaactgatagggaggcattttttagggtgcttctgaagatggcacctgacgagcggaatttccggggtcaccgagctattcggatcaggaccagcgtaatgttaccactgtggttacgaacctgtaggctcaggcgtgtgcacaattcggatg

SEQ ID NO: 122019 - DNA, 268 bp, Zea mays
  Clone ID: MRT4577_42766C.1
ggaatccccgggcccccccacacattcgactaaacaacccatctcgtaggctgtttacatggacaactcattggggtttttgtttatcatcaggcgtccctgggctcatcctctcacttcggccgctacgtacgtgaacacggcatggactcccagtcccattgcctgcccagctcctggatgctaccttccgcacacacctgtcaaaaattctcacttgttcttcaaaaaccatacttgtggcatatttccataccttttgccctct

SEQ ID NO: 122020 - DNA, 1218 bp, Zea mays
  unsure (1)..(1218): unsure at all n locations
  Clone ID: MRT4577_42767C.1
gccggccgggtctgggaatccgcgaccctccgacagtgctgttttccgttagaggcttctcgtcttccccggctcaggcaacctccagctgcagcggcggcgatgggggtgaagaacctctgggacatccttgactcctgcaagaagaagctcccgctccagcacctccagaacaagaaggtgtgcgtggatctttcctgctggctcgtgcagttctgcagcgccaaccgctccccggccttcctcagggacaaggtgtacctcaagaacctcttccaccgcatccgagccctcatcgccctcaactgcagcctcattttcgtctcagatggggcgattccttcagtcaaattggctacttataggcgccgactgggattaaatgctgctgaggctactcgagaggaggccaactcacaacctctgacttctttgcgtcggaacaagagctcagagttctcacgcatgatcaaagaagccaagcatctcgggttggcccttggcatcccttgcttggatggcatggaagaagccgaagcacagtgtgcattgcttaatttttcttccttgtgtgatggctgttttacatcggataattcggcacgagggtttggtgcaaagacagtttatagagatgttttcataggagagggtggttatgtaatttgctatgaaatggaagacattcagaataagcttggtttcggcaggaactcactgatatcacttgcagtccttcttggtagtgactattctaatggagtccatggctttggcccagaagcagcatgccgccttgttaagtctttaggggatgacaccgttcttggtcaaattttgtccgatggagttaaacctgcaagaaaatgtaaaggaaaaggcagtggcgccaatgcagggacggttggtggaacgtgcccaaaagctagtacctgtgaggttgggattaaccaagattctggtagtcaatttcgtgacataataaatgcatatctggagccaaaatgtcattcaccagattcagaagctgtgcagagggcatgcagccagcggccatttcttcgttcacaactccatcagatatgcgagcaatactttgcgtggagccctgtgaaaactgatgaatatatccttccaaagattgctgagagagaacttcgaagattntcaatctccgctccacgtcttcagatctaggaatganaccttcgctgaatg

SEQ ID NO: 122021 - DNA, 348 bp, Zea mays
  unsure (1)..(348): unsure at all n locations
  Clone ID: MRT4577_42768C.1
cggaattcccgggtcgaccccgggtccgccanaatgngggttgtactcgaagggggggtcggggacaatcacatttttgaagaactttcattccataaatctacagatctttgtgtatcaagtaaagagatgtcaggaagaggaaagggaggaaaaggattgggaaagggaggagcgaagaggtcaggaaggttctgagggataacagggggggggggaccaagcctgctattcgtcgtcttgctcgtagaggtggtgtcaagcgtatcagtggtctcatctacgaagagaccagaggtgtcctcaagatcttcctcaagaatgttatccgtgacgccggtacgtaac

SEQ ID NO: 122022 - DNA, 191 bp, Zea mays
  Clone ID: MRT4577_42769C.1
cactcatccacagctcgcagccgtattccaggggggggtcctctctcgtcggtgcggtggcccacacgaagcaaacagcaaggaagtcgaccggcggcaaggcccccccgaagcaactggccactaaagctgcgcgcaagtcggccccggccaccggcggcgtgaagaaaccccaccggtttcgccccggc

SEQ ID NO: 122023 - DNA, 359 bp, Zea mays
  Clone ID: MRT4577_4276C.1
ggccgcgggttttttttttttttttttctggggttttttttttttttttttttttttttttttttgtattagatacagattcattgagattgacctaagattttgctgctaaacgccgatacagggaaaagagaaacagaacctgaacctggtaaacgaaatgatccattttaagcactctttttttgggggggggcctttgatcgactgccataagacttgaaggtaatcttgctggattgttgcttgcgcttatcgggtcgctttttctcgatccgtccactggaaggcttcttcacagagtccacatccattgtggcctcttcttgggcatcctcgctggggtgggggggccgccc

SEQ ID NO: 122024 - DNA, 873 bp, Zea mays
  Clone ID: MRT4577_42770C.1
ccggccgggaaaaaaagcgatcccgaaagctggcccccatctcccaatccatctcctctctacccgccatgtctgcagctcgagccttcagcaccgctttccgggccggtgcgccccgcgccccaattgctgcccgctacgccgctactcgaagctacgccgccgccgctccatctggctctgccatcaagcccccggttgccctcttcagcgttgacggaacctacgcgagcgctctgtacaccgcggctgcaaagaccaacgccctcgagcccacggccaagtctctgtcgaacctccagggtgtcttccagaaggatgccaagctcaacgagatcctccatgcgccttctctgtctgtgtcggataagcagcagattgtccaggagctccagaagcacattggcagcgctgacaaggagggcatcgtcaagaacctgctcaacactctcgccgagaacaaccgattgagcgtgttgaagggtgttgttgagaagtttgacgtactcatgggtgcgcaccgtggtgaggtcgaacttaccgttaccagcgctgcgccccttgacaaccggacaatcagccgccttgagactgccatcaagaactcgcaatacgtaaccagcggccagacgcttaaggttgtgcccaaggtcaacccagagatccgtggtggacttattgtcgagattgccgaccgcacgattgacttgtctgtcgccaacaagatggccaagatgaacaagctcctcaccgaggctttgtaagctgataagagtgtgtctgtgcatacgatgaatggacagtgagggaagggagatgtgtactttagatgagtctcggaaaaagagcaatttattaccgtcgaccacctcg

SEQ ID NO: 122025 - DNA, 1666 bp, Zea mays
  unsure (1)..(1666): unsure at all n locations
  Clone ID: MRT4577_42771C.1
cccacgcgtccgcccacgcggcccagggcggtgagggtcaccatcagggtgcaccacgtagagcactttggcaggttggcaatgcacgggctgggaagcatccgttcaagtatgtgtacatgtggcatgccaaccacggatacttgggcaggaagaggccggttgcagccggaatggagcactacggatcaatgctcgagaggcccgtgcgcatcgccctggggttccaaaagcacgagcgctgccacaccctgacatgcgtgacggccaacgggctgggcctcgtgaaccctgacagggtgttcagtttttacgacgagctccactcgtacctcgcgtctgccgggatcgacggggtgaaggtggacgtgcagaacgtccccacgcgtctgggcgccggccatggcgggagggtgatgctggcgaggaagtaccagcaggctctggaagcgtctgtcgccaggaacttccccgacaatggcatcatatcgtgcatgagccacagcacggacaacttgtacagctcgaaacggagcgcggtgattagagcctctgacgatttctggccgagagaccccgcttcccataccatacacgtcgcgtccgtcgcttataacaccgtctttcttggggagttcatgcagccagactgggacatgttccatactgttcatcccatggctgagtaccatgctgcggctcgagcggttggtggctgtgccatatatgtcagcgacaagcctgggagccatgacttcaatctgctcaagaagctcgtgcttcccgacggatcgatcctgcgcgcaaagctccccgggaggccaaccagagactgcctcttctctgaccccgcaagggacggcaaaagcgttctcaagatatggaacctgaacgaacactccggcgtcgttggcgccttcaactgccaaggcgccggctggtgccgggtagccaagaagaacctcatccacgaccagcagcccggaacggtgagcggcgtcatccgggcgcaggacgtggagcaccttggaagggtggctgatcacggctggaacggcgacgtggtcgtgtatttgcacgtgggaggggaggtggtgtacctgccgaagaacgccttgctgcctgtgacgctgagatcgcgcgagtatgaggtgttcaccgtcgtccctctcaagcacctgccaaacggtgcctcctttgcggcgatcggccttctcggcatgttcaactccggtggcgcggtgagggagctgagattcggtggtgaggatgccgacgtcgagctcagagtgcggggctcgggcacggtcggagcttattcctcgaccaagccaacgtgtgtcgccgtcgattccaaggcggttggtttctcctacgatgccacctgtggcctcatcagcttcgagctcggcattcccgaccaagaaatgtacttgtggacggttacagtagggtattgaagttacaactgagaattgagatagattttctaatgcgtcagagaacgcccggtggtgtaggtattctgatttattcagtgttgtactttctattgttagttatatatattctgtacacatcccgggattttatgacaaatctagataagggggggtccttagattttaggagcccagaacgacctcttaaatgtgntttttggtgg

SEQ ID NO: 122026 - DNA, 395 bp, Zea mays
  Clone ID: MRT4577_42772C.1
gctttttcaaccatcaggagtcgcaccggaatgaggacgtgcatctgcggtctgtcagatccaactacttcaaccttacgagactcaacacgcgatagcagctgggatcggacctttatcaccgttggttgtgcaacaatgatcagccctactacaacaggtacctttggagcattcattgggacagaacataagggcacagcaactacaacagattgtgctagcaaaccttgctgcctactctcagcaacagcagtttcttccattcaaccaactaggttcatagcactctgtttattatttgcagcagcagcatctacacattcatgcagctacctgctgcctactcggagcctattgttccattcaaccaactaggagcattgaactctgct

SEQ ID NO: 122027 - DNA, 319 bp, Zea mays
  Clone ID: MRT4577_42773C.1
ggtgcttctgttaaggttacaaaggcgttttgtccggattgccattcactgtccggcatttggcggggaatgaaagtaacagaaaaaccacggaactaaccccgggggggctggcaagagaacaaggactagccccgggtggcgctatcgggggccccctggggacttgttaaagggggggtgggggaaaaaaaacccccagggcacgggggggggcccccccgggttcctaaaagggcccccgggtacaggcgctaaaagcctggcaaaaaaaaaccgggaagaaaaaaaaccgggggggggcaccccccccgcgggc

SEQ ID NO: 122028 - DNA, 606 bp, Zea mays
  unsure (1)..(606): unsure at all n locations
  Clone ID: MRT4577_42774C.1
ttacaaataaaaaacaatattaacaagggcttctatttaaaatttcgttctcggcatgttcaactccggtggcgcggtgagggagctgagattcggtggtgaggatgccgacgtcgagctcagagtgcggggctcgggcacggtcggagcttattcctcgaccaagccaacgtgtgtcgccgtcgattccaaggcggttggtttctcctacgatgccacctgtggcctcatcagcttcgagctcggcattcccgaccaagaaatgtacttgtggacggttacagtagggtattgaagttacaactgagaattgagatagattttctaatgcgtcagagaacgcccggtggtgtaggtattctgatttattcagtgttgtactttctattgttagttatatatattctgtacacatcccgggattttatgacaaatctagataagtggcggtccttagattttaggagcccagaacgaaattttaaatagaagcccttgttaatattgtatattgattttacaaataaaaatcgaatgtgatcaattaaaaatcaaaaaaaaaaaaaaaagattgaagctggcgcaaatgccattgncgcaggttct

SEQ ID NO: 122029 - DNA, 398 bp, Zea mays
  Clone ID: MRT4577_42775C.1
gctcggaattcggctcgagcatgcagccagactgggacatgttccatagtgttcatcccatggctgagtaccatgctgcggctcgagcggttggtggctgtgccatatatgtcagcgacaagcctgggagccatgacttcaatctgctcaagaagctcgtgcttcccgacggatcgatcctgcgcgcaaagctccccgggaggccaaccagagactgcctcttctctgaccccgcaagggacggcaaaaggttagattcgcagctctctacgatggctggtctgttcttgttcactaaaagccgtctgctagctgaatcccgtttgatgctcttttcacagcgttctcaagatatggaacctgaacgaacactccggcgtcgttggcgccttcaactg

SEQ ID NO: 122030 - DNA, 332 bp, Zea mays
  Clone ID: MRT4577_42776C.1
gagctcacaaactatagtggcccgattttcaagcatactccattgaacctgagggtgtagttttccaacgactacgggttctacacctccggcctctcttccgacccggagacattttcgcgcaaccggcatctggacgtgatccactcccggttgtcgattctgcgctctctgggctgcgtgttccccgagatcctctccaagaacagcgtcaagttctgctagacaatgtggttcaaggccttctcgcaaatcttctcttaaggctggctatactacctgctgaacaccaacctggttcactcacacatcatccttaccatctattcttt

SEQ ID NO: 122031 - DNA, 692 bp, Zea mays
  Clone ID: MRT4577_42777C.1
attttggaaatactttttcacaacaaaaatgactagttagcatccatttcttcattgatttatcacccttcattccaagatggtgctgggttcgaaaggtagaacagaagttctcctcagggccacctgactgatgtactccgatgttgtatggtacatatcatatatatgtatacccaccaataaaggcgaggaaatagcatactgatatatagggaataaagatcgagaggaggactaagtatctggcagtcagacatttgatgttactgagtgtgaaggtcggagaagagtatgcacagcgggggcagtagcatcatcaccgcagggacgaagtggaaagatcagcggcggtggcagcaccaatgacagccacaggaggatcactgtcgctgccagcaacatcatcagtactcctttgctcatcgtcgacgccaccgccctgccctccccaatggctccccggctcctgtctttttttctaggttttcatgtttgttgtgaggaagttgttgtaccatgtgtgagagaaagaaaacgttgtaccctacggagctgggaagctatatatgggccagatgggggccttttggaatcagcaggccagatggggtgttttggcatgtgtgactgctggaatgggcatgttcgatccttttctgctccccagttccagtaaagagactgcactg

SEQ ID NO: 122032 - DNA, 398 bp, Zea mays
  Clone ID: MRT4577_42778C.1
gccctttctttttttcttatttttttattattttttggggtttttttttagtgtggttttttttttttttttttttttttttttggccaaacggaacaacaacatccggaaactttaacaggcagaattcccctaaagcttgcccttacaagaagctataaacccggggccaaaaacattacactggcccttttggtatgggaaccctccctttggcccttgagaaacagaacactgggcttttaataacccaccctgttcattgccaaaaaattttaaacaacagccgactgtcctcaccacctaagctgcttctctcctttttttttcaaaaaaaaaattaaaaccccccgcaaccatgccaattttatccaaaagggacccccatacatgccccg

SEQ ID NO: 122033 - DNA, 189 bp, Zea mays
  Clone ID: MRT4577_42779C.1
ctagttctagatcgcgagcggacgactttttttttattattttctatagagggacattttaatcaatatagtgattattttctaataatcacatgtcttattgagtgcaccattatcgagtacatcttatattaagtctaaaagttggcatctataatcttgtgttgctagattgacaattcaggtttg

SEQ ID NO: 122034 - DNA, 504 bp, Zea mays
  Clone ID: MRT4577_4277C.1
cagtggttgacggattgcctgaccttctactaccaaatatacactttgccacactcagacctcataccttcaagcctggtgttcagaagcgctcgaggtatttcacgccgtcctcaagccgcgccctcaaagtccaagattcataggtgcaactatctgtacaagtactgatccagctttatatgtatctcataatcactacactcaaacggcaagtttcttcatgacccgaactccgccatactatgaaaaccctcgtccttgtttccgaagtcgactaatccataagtgcaattactagtttcatgaaaccatatcttacgcaccacaatgctgttatgacacccatggacatttaattgcataccatggttaacctattaaaacaaggacattctgatcaaccactccttcgataagggtcacctttaccagagcgacgcatatgcaatcaaatcctaccccatgggactggaaagcacaaaacaactcctcaatcacctg

SEQ ID NO: 122035 - DNA, 473 bp, Zea mays
  Clone ID: MRT4577_42780C.1
ggtaaagaggcacaacggccgctctggccggccgggccggggccttcaacaagttcaagttcatcgtccgatcccatcccgggcccgcatttgttcttccgaccagcatcccatcccatcccatcccctccccaccccgtcgaggaggatgcacaaggcgacgtcgctgtcggagctgggcttccactccggcggcgcgtcgtcgggcttcttccggcccgtggccgacggctgcccgccgcccaccccgacctcctccgccgccccgcaccgccgcctcaccaaggtctccgtcatcggcgacgacaacgtgagcatggccatcatacagaccaccctcacccaaaatctgcccgacgaaatcacaactcgtaaacagactcccagacaaagctccgccacaaggcgctcgacctgcaggacgaggccgccttcctcccgcgcgtccgcatcgcctccgaccccgacgccgc

SEQ ID NO: 122036 - DNA, 385 bp, Zea mays
  Clone ID: MRT4577_42781C.1
ctcaccatacatgatgcagcaaggcgaaggtgaggtgcctttgtgattggtatcgcggttccagcttcatcatagtggaggcactacatggagattttggctgaatatttattcagctgccatgcttttctgccatgttgggaaatcagcaagtttcattgttctcaagcaatcagcgctctcctttggaatctcaatagtggtgttagagctcaagtggcgatacatgcgaaatgtacttgtacagtacctcgtcgatcatatgaactgaaaggaaccaaacatgtaggagattttttcattagggtcattatagtggtgccgccgaggcattgctgtgttatctcgttttcaggctaaaaggcatgacctataatgttagcct

SEQ ID NO: 122037 - DNA, 684 bp, Zea mays
  Clone ID: MRT4577_42782C.1
actgtagtggatgacgggagacagtccattcactggctagccgcacgcgcaccgccgccgtcgttgtagaggtgagcaggaggcaacagccgtcccaatgaccgtcgcggtgcccctcctgctatctataactgctagtctccctcagtggcccaccacaagcgcagaagcacaacacttcgcctcgtcagatcgacagggaagagagcagaagcgaaccggctcgtccgcccgttgcctatcgccatggccgacgtggaggtgtgcgtgaaggccgctgggcacgctcgccgctcggcgttcccatcgttctagatgttttggcgggagtggtgtcgctcaccagctgctgccagaggagctcgtcaacgacacgccatgggagtcgtactcgtcggagctggcccgacggaggcacgccatcggtgctgctgaggccgggttgtaggagacgctccaccgggggtggtgacgctcacccgctggtgtagctcgtcggcatggctggaggagctccatggaggggccgcgtgccgcgatgcgcgatgatgctcgagggaggaggaagccgcatggcagacgggcggcttcttctggaggcaatagtgctcaacttttctgctatgcaacgctctgcttgctggagcgtcgaattccaacccagctgtgttcagctatcaaaag

SEQ ID NO: 122038 - DNA, 575 bp, Zea mays
  Clone ID: MRT4577_42783C.1
ccggccgggccggggttttctctggagacttcatagtggtcttgctagttcgagatagaggaaggaaagagacgacgtgacgaaggtccgctcttaacacgacgagcccgattgcgcagcgagaaccccgttgcttggagagcagacggcgcgcattacccggcccgagaccccggacctggggaaggaggacgcgcatgtcgccgactctctctcctcgggggcactcgcgcccctgtgatcgggatgcgacactccgctcgagcccctagccagctgcccgataggtgccggtgtgttcatcggttcccagctctgacagaaactcgtgggcgagacgcgccaagtcgacgtcgacgctcacgtatgatgccataagatccgccacctcagcgaccccgcaccgtagcagcatcgtgaggcgcagtctccttcacaccaggtcatacaacaagaacagtagtgccggttccgcgctctcatcagaatggacgatgctgagcagtcaaccagctcagatatgctgcacgcgctgagcacgagaacactcgcgcccctcgacgccatctacagca

SEQ ID NO: 122039 - DNA, 317 bp, Zea mays
  Clone ID: MRT4577_42784C.1
agaaaatagtttctgaattttaaacttgctggattcatgcagccagctttgcaggttatcagagatcaaagattgtaataataattttgtaaattgtaagcaaaaagttatttttatattatatacagtctaattgttcatcctaattgttcctgttttcatctagtcagagattcagtaagtgccttggaacaatattgaattctcttagcttgtgtgtgtttctttaatatttgaactcaagtgggattagaagactatcaaaatacatgtatgtttcaggatatttgacctgtcattaaaaaaaacaaacagtt

SEQ ID NO: 122040 - DNA, 498 bp, Zea mays
  Clone ID: MRT4577_42785C.1
gcctgtgattctgtgaaccaggctgactttttatacaacttgacaactgactgatcttgttcacaacatccttgtacaactactattatccagaggcacagggtgcaaacgatcatacttgcttcttgtccatatatactgagaaagaggcattcagaccaatggtttatttctttaatattttactggcacaccagccagctactactcagtctaaaaaagcagattgctgaaaagagaacatttatacctctgacgaaataaatgggtacccagagtatgcaacaaccggatcaaggatgtaaaacgggactctgttgtacttgttaaagggagctgtgaccctccaacctgcgaggcagggcaagactagccaagaacaagcgcccgaacgcgaacaaatcaccatacccagaggagatcgcgcgaattccattctgcctgacaaatccggcggtaacaatgaacgttgccctgaaagcgtcccttatccttcga

SEQ ID NO: 122041 - DNA, 600 bp, Zea mays
  Clone ID: MRT4577_42786C.1
ggtcccggaactctcccgggttcgaaccacgccgtccgcggcgcggcctcatccccgtgggcgagcctccactcccctccgccgggtgttgtgtgaagttcaggtagaaacgggtgcgaagaactgcccatttctggagatggatagggagcacgacaacatcgtcaactgcaccacccctaacttcactagagatgaacatcacgaaaccagtggtggtgaaacttgtggaatatgaatacttgagaagctttataacctcatactggtgtatcgtcctgaaggttatgatcacttactcttgatgataggcctgtctattgtgttaccagtcacgacacatattcctgggtttcaagttaactacttcatcaaggtctccaatatattctatgggcctatagtcttgcacctattgctggattcatttctttataatatgacatctcaaaggcacatggaatggatccggccattcttgacaatcattcttagttggtggcattatgtactacattgtacataacaacacctcaagtcccccaacccctggctaatttttagactcctgtttcaagcgtttatgtgttgcctatatac

SEQ ID NO: 122042 - DNA, 517 bp, Zea mays
  Clone ID: MRT4577_42787C.1
cattctcagcgacacattccgtctcatcctccccagctcggtttttgggccattctaagccaccatgcctgcctccatcgccttcggtcggttcgatgactccttcagcttggcctctttcaaggcctacatcgccgagttcatctccaccctcatcttcgtcttcgccggcgtcggctctgccatcgcctactccaaggtgagcggcggcgcgccgcttgacccatccgggctgatcgccgtggcgatctgccacgggttcgggctgttcgtcgcggtcgccgtcggcgccaacatctccggcggccatgtgaactctgccgtcaccttcggcctcgccctcggcggccagatcaccatcctcaccggcatcttctactgggttgcccagctcctcggcgccatcgtcggcgccttcctcgtccagttctgcaccggcgtggcgacccctacacacgggctttccggcgggggcgccttcgagggcgtcgtgatggagatcatcgtcaccttcggg

SEQ ID NO: 122043 - DNA, 643 bp, Zea mays
  unsure (1)..(643): unsure at all n locations
  Clone ID: MRT4577_42788C.1
gctcgncgtctacatacccgtcgccgcgtggtccggttgacagttcccgcgctcgcgctctgctgccgccgccgtcttcaagcatgttagggtgttgtgtgaagttcaggtagaacgggtgcgagaactgcccatttctggagatggatagggagcacgacaacatcgtcaactgcaccacccctaacttcactagagatgaacatcacgaaaccagtggtggtgaaacttgtggaatatgaatacttgagaagctttataacctcatactggtgtatcgtcctgaaaggttttgatcacttactcttgatgatagtgactggaatctatgaaaaagttatgttatgtttctttgtcggtcgaccatgatctatccacatgctttctgtggacttgattggcctgtctattgtgttaccagtcacgacacatattcctgggtttcaagttaactacttcatcaaggtctccaatatattctatgggcctatagtcttgcacctattgctggattcatttctttataatatgacatctcaaaggcacatggaatggatccggccattcttgacaatcatttttagttggtggcattttgtactacattgtacataacaacacctcgagtcccccaaccctggct

SEQ ID NO: 122044 - DNA, 299 bp, Zea mays
  Clone ID: MRT4577_42789C.1
tgctttttatgcattgtagaccaagctacccacggagcaattgataagatacccccggagtacacgaggtgaaccctgagacaacgctgctctggggagccattgcacacgctgtgcacggcagactcggggtggaccattatgagagaaccgctagtggcaggcataactaggaggagggtgaacagattggagacgattaagatgcacctggagctctcagcctggaattggactaggttgaacttgcagctccagcactaataggtacaacaatagcagtgaaggatggtcatgct

SEQ ID NO: 122045 - DNA, 350 bp, Zea mays
  Clone ID: MRT4577_4278C.1
ctagtttagcctttttaaaacttttgtattaagctgcaaaaagaaggaacaatcttcctagctagctttccatattcagccataaagggccgacgagtaacataccattcagatctaatcatatcaactatagaaagctcccctatgtcttctgcgggagggggtgttcaaaggaaaaaggcacactcaaattatttttctaacctgcacttgaataaaagcctgaaggctcccgtatacactgcaaacttccatcccacactcttatacggaacacgctctataaaggaaccacccgagtgaacaggatttgggcaaaacaccccaccatgcctacgccctattgaaga

SEQ ID NO: 122046 - DNA, 135 bp, Zea mays
  unsure (1)..(135): unsure at all n locations
  Clone ID: MRT4577_42790C.1
tgaatgtttaatactatatcacattacggcaggatgatggaaagcatattgtgaatacacaagggacaaattgcttaaaatggtggnaatnatgcaggttgnaatacagacaggtaatattataaggaaagactt

SEQ ID NO: 122047 - DNA, 677 bp, Zea mays
  Clone ID: MRT4577_42791C.1
acagttcacaaagcgcaacacaacacaacacaacacagagacacacaagagcagctagcagcaagagacgagcgcagcagataaggtagcgacctcccacctgtaaacaggttcgtgccttctgtaaagaaaatctttggttcaccagctctcctggctgcacgtacctagctcaagctcgagggcaccggccatgtcgcccgtgcacgtcccggagctcagcagcggcgggtcggggtcggggtcggggtcgctcaccctgaaccccgtgcagcgcgcgctcacccggctgtcgtcgtcgtcggccctcacgcccaggtcgcccccgccgtcctacgggagcatcgtcaccgtgctcagcatcgacggcggcggcgtccgcggcatcatccccggaaccatcctcgccttcctcgaagagaagctccaggagctcgatgggccggacgtgaggatcgcggattacttcgacgtgatcgccgggaccagcaccgggggcctggtgacggccatgctcacggcgcccgacgccaaaggacgcccgctcttcgccgccaaggacatcaacaacttctacctggagcactgcccaaagatcttccctgccgtctacggagggcctctgggcttgctcaggagcatgagggggccccagtacgacggccggtacctccact

SEQ ID NO: 122048 - DNA, 832 bp, Zea mays
  Clone ID: MRT4577_42792C.1
gcgaaccagacatttgtttgcaagccaattgcttcaacattcgcagaacctcaacttaatccagaggagttcaataaagagcctttccaagaacccacaactaccactttccaggatgctcattgaagattctggtagctccaaagatttgaagaatctcttcacttcaacatctgaccaaccatttttggcccctcccaataatttggtgccaatgaagcattcagggtctgtaacgataaaggcgagttttaaagaagatattgtgaggttccgtttctcatgctcaggcagtgttattgtattgaaagaggaggtagcgaaaaggctaaggatggatgttggcacgtttgatatcaagtatctagatgatgcccatgaatgggtaaagttggcgtgtaattcagacttggaagaatgcatggagatctcacggctttcgggtagccatgtcatcaggttatctgttagcgatattgcgacacactttggcagttcttgtggaagctccggttgatatgcctgtcagccttttcctctgatcaatgggtactcgaaagtgcttgtaccatgagttcagttccacttgtagagttgtacttttgttgctagttagcattactgcattatcgggagcattagttgcttcattgtgtttgataaatgtatcattgtatttttccgcaaaatacatgtaattgtgcagaatgcacttgtagtcaactttgtatatgttatgtgcaggaaattctatttcaagttataaactagatagttgttgtaaaaaaaaagcggcccagtatattgcattggaaatgaagcggattttcct

SEQ ID NO: 122049 - DNA, 272 bp, Zea mays
  Clone ID: MRT4577_42793C.1
gaataaacatttttttttggaataaccatttatatgtccattgccaagctataggcaagtggcagagacggagcacattgccagagacagtgaacattgctccctaataagaccgattttacagatgacgcctattttaaatgctgactcctattagaaacacgagcctagacttgacatgtgtcatcactttggacgtgggttcggaagttgctgatcgattgtgaaattcggtggccttctttgtatccgctgactcccttggcctcccg

SEQ ID NO: 122050 - DNA, 969 bp, Zea mays
  Clone ID: MRT4577_42794C.1
gcacgagggcgaggtgccccccgccgcggcgcagtgggcggcgtcctgggagctggacgattgggaattcgcagactgcggggacgttgccccggcggctgtggtggcggagagggaggcgacggcagcggccgcgaagcccaggctggtcttcgcgccgccgtcgagggaggaggccgaggaggctacgactgagctcagggacgccataggcagggcttatttcaacgagtcaccagttgaggttgttaaggaacaagataaagagtttaataaactggcaactgatgccataattccttctatgcctggacatgtggttcaagcttttacattgctgaaatcaagcacagaggctcagagtgttgtcgcctcccttgcatcagatagaaatgtctgggatgcagtattgaagaatgagaaggttatggaattttataagactcaccagacaactccagttcagacattccctgaggaagcagccacagcagagtcgcctgggaagtttgaagatgccacctctgaaaatgcatccaacagcgaactccccacgggctcaggcgcaagtttcgcagatttcgtggacaatgcgaagaagaaagtgatggatgtggtccacaatataaccgactttttcagggacttgttcaatgactcagccgaggcccagaccggagcaggcccttcagctgagaagggcttttctgcaacagagatggctgtgggaggatccttcatggctctgaccatagcggtcatcctagttgttctgttcaagagggcatgatagctcaagagtcatgggtaccttctgggacccatcgtgctttaaatctgtcgaaaattactcgtctgtcgtatggtcaataattccgaatgcaatgtatagcttgtccgtttctttggaaacagtacaataaaggatttatctaaagtatgcgtatcctaaaaaaaaaaaaaaaaaaa

SEQ ID NO: 122051 - DNA, 670 bp, Zea mays
  unsure (1)..(670): unsure at all n locations
  Clone ID: MRT4577_42795C.1
ccggccgggcaagcacggaggctcagagtgttgtcgcctcccttgcatcagatagaaatgtctgggatgcagtattgaagaacgagaaggttatggagttttataagactcaccagacaactctagttcagacatcccctaacgaagccgtcacagtagagttgccggggaagctggaagatgctgcctctgaaaacacatccagcggcgaactccccgctggctcaggcctgagtttctccgatttcgtggacaatgcgaagaagacagtgatggacgtggtccataacataaccgacttcttcaaggacttgttcgacgactcagccaagacccagactggggcaggcccttcagcagctgagaagggcccttctacggcagatatggctgtcggcggatccttcatggctctggccatagcggtcatcctagttgttatgttcaagagggcatgatatagccatgagtatcttctgggatccacggtgctttaaatctgtcgaaaattactcgtctatcgtttggtcaagaactcctgactgtaatgtaatgtacagcttgtgtccttgtccttggaaacagcacactaaaaggctatctatgatatacaacggtgtgtatcttggcttctccaaaaaaaaaaaaaaaacccgcgnccgcgggtttt

SEQ ID NO: 122052 - DNA, 827 bp, Zea mays
  Clone ID: MRT4577_42796C.1
gttgaggttgttaaggaacaagataaagagtttaataaactggcaactgatgccatgattccttctatgcctggacatgtggttcaagcttttacgttgctgaaatcaagcacggaggctcagagtgttgtcgcctcccttgcatcagatagaaatgtctgggatgcagtattgaagaacgagaaggttatggagttttataagactcaccagacaagtacctcatgagactttagacagttaaacttatcgtattcatcgtctctaccaacttgtatgaccattgttgatgtcctctgctatgacacatctctagttcagacatcccctaacgaagccgtcacagtagagttgccggggaagctggaagatgctgcctctgaaaacacatccagcggcgaactccccgctggctcaggcccgagtttctccgatttcgtggacaatgcgaagaagacagtgatggacgtggtccataacataaccgacttcttcaaggacttgttcgacgactcagccaagacccagactggggcaggcccttcagcagctgagaagggcccttctacggcagagatggctgtcggcggatccttcatggctctggccatagcggtcatcctagttgttctgttcaagagggcatgatatagccatgagtatcttctgggatccatggtgctttaaatctgtcgaaaattactcgtctatcgtttggtcaagaactcctgactgtaatgtaatgtacagcttgtgtccttgtccttggaaacagtacactaaaaggctatctatggtgtatacaacggtgtgtatcttggtttctc

SEQ ID NO: 122053 - DNA, 569 bp, Zea mays
  Clone ID: MRT4577_42797C.1
aaaaaaaaggagaaaggggcctttttagttttttttagggttgggggaaaatggaaaggcatactttttacatagtcccatacaaaacctcaaaggggcccaaagcgggaaaggggaaacccccccctttttattttgggccaataaaaccctgaaaattgggggcttgggggggggggccaaattccccttttgaaatcacacaaacttaaaacccgcccttcccggggcgggcccaaaaaaatatctgcccgggggccccccttgttttaaaaaaaaccaaaagcccaggttttttccggccaatttaacgtgggccccaattatccgttggggggggctcccaatcgcctccccccccccttttttaaaaggggggtaagcctaaaaaggcctgggaacctgggggggagggctcccccgaaaaaaaccccatttcaccccctaaaaaaagggggggtgttttatttttggggccccccgtttaaccccaagggggttttggggttctttgaccaaaaccccacggatgaggcctttgctcaggtacttgggggccggaaacttgg

SEQ ID NO: 122054 - DNA, 443 bp, Zea mays
  Clone ID: MRT4577_42798C.1
ccggccgggaacacgcctcctccagtccttcttcgtaagccttcaaaccgacgaatttgagcaactgcacccagagcgcgatccattgccggggaagaagcaacttgttgcgagcctcctctatggcgagctccgaccatggttccaccaccgcccccaagggcgtgccgacagctacggcctgtcggtgcggaggcaggtccagaccctacgtcttgtacttgtaagcgcatctcgggggcttaggctacgtctctggccgccgcgacgatgcagacgaccagcagctgggtgtgggtgacggcggcgcgctgccgcagcaagtggttcttgacaaccaggtgggggtcccgtgctcgtccctggccaccacaccatatgcttggaccggtccgactaccactccgacggttggtttatggccggggacgtgcgcacggacg

SEQ ID NO: 122055 - DNA, 197 bp, Zea mays
  Clone ID: MRT4577_42799C.1
acgcagctacagacgcgtgctagctccagccggttcacagtgccgacggtggcctcttcgaccgacgtgagaacgccgatcaagagggcaggggcgatcgggcgcgttgacgtggatgactactgaccagactatggccacatggactggatcgtggatgagggcgagcagagcatgctcctagcagacgccgctgg

SEQ ID NO: 122056 - DNA, 816 bp, Zea mays
  unsure (1)..(816): unsure at all n locations
  Clone ID: MRT4577_4279C.1
ccggccgggacacgactctcggcaacggatatctcggctctcgcatcgatgaagaacgtagcaaaatgcgatacctggtgtgaattgcagaatctacccgcgaggtcgagaacgtcgatggtttcctcatttggtttgacaacttcttcaccacagcccgaagcgacccggtcccccctgctgagacaacaccagatacctgggacaaaaaggatcagggtggcgtcgccttcacaaccggaccctctggcactgtcactcactggaagcaaggtcttctgatcgctcctcctgaggccaacccgtccaagaaatgccccaagagcctttcaggtgaaattgtgtttacagctgctgacgacaatgcccgagcgctggtcctccgggcatcttggaccgattctgaaggtgactccagacagcattcatggcagctaaaataggtgcctccttgtcagcttggtcgtacacacatgagtccttgngggcaggggttttacctttagtgttgactttatccatgccacagtcatagatgcggtacattcaaaccctgcagcagaaggtttacaatactcaggaagccctcgccgagaatgaagccctgacgatgttagtgagactttgtttatgggacctagtacgtactgaggcaaggatgataagaggtgtctgcttcctttgcgcaatatggatccagtaccatgcaaacagaccacctgcagccctagncagcgtgaacgatggaacattgtacatgcctcattttcatgtcagcgatagcctagcatatcatgcatcacgcagtgttgactc

SEQ ID NO: 122057 - DNA, 675 bp, Zea mays
  Clone ID: MRT4577_427C.1
cagcttcttgagctcctaagtgctgggcagagcagggttgttgactggaacatggtgaagaaaggggaggatgaggaggagaagaagctgaatgcaacatacataatcagtgttgctaggaagctaggttgcactgtcttcttgctacctgaagacataatggaggtgaacccaaagatgatcctcaccctgacagcaagcatcatgtactggagcctgcagaatcaagggccatacaagagttcaggaccacaggatgctcttctagaggaagaggaaggcgaggaggaggaagaagaagaagaagaggaggaagaggaggaggaggatttcgaaggaggtgtcgaagatggtgtctctgaaacgaccacttgataagaattgtcacgcttgactagccattgccggtaaagtcactggtctattaggggcatatatatttctaaatgctgaggcctgaggcagagaagaaaatctaagggggtgcaaagaagaaatttttgggtgacatagttaattttattctttgaatgccaaagacaaaatagcagcagttaaaatttgcttagctggaaacagtgcgcacaattgcgccgccaaatctagtaatcttgtaagctaacactgtatgaaaacgtgagataataccaacatattttgctagactgataaaaa

SEQ ID NO: 122058 - DNA, 414 bp, Zea mays
  Clone ID: MRT4577_42800C.1
taatgatacagaaagtaacactgcagcaacgattgacactacaatttcacatatgcagactgagttctcttcaattaataatatgtatgccttgttaaatggaggtcaagatggactcgggactgtaaatacacacggtaatgtttctgaacagcatcctggaatgggaaatcatcaatgtagagcaatggattcagtaagaactgaagcaatgggttcagtaagaacagatagtataggaagttttgagaagaccataagcataaataaggatgagagcagaataatttctgatatgttatcatcagagtttaatccatgggatgattcatattcgactgctaacaattttgttaggatgcttagggaatctgaaaataatgatgtccacttcgctgtgccttcatggaaatc

SEQ ID NO: 122059 - DNA, 198 bp, Zea mays
  Clone ID: MRT4577_42801C.1
ccttttcttaaaatgcaaagtggacgttccggcacgaatctgcgagttacttggtcagattctacatattgatcattgtgcactggaatgaagctttttaacggaatagttacactatgtagaatatgctgactgtgaatagagacatgcaagggtatataggatagaaaagcaggctgtcgatgacgggtacctgga

SEQ ID NO: 122060 - DNA, 301 bp, Zea mays
  Clone ID: MRT4577_42802C.1
cccacgcatccgctgactcttacattaagcttaattacgacaacatactggggtcatttgggcaattcttagaccgaactccagccgacaaaacctttaaaacgtacctctaatagctcactctttactctgaaataaacaaaataaactactcacactatacactatcacaaccttcaatcctattatcattctacaactaactatcctttttgtctaacatatatacaattcaatcgacgcttcataacacaattttgaattaccataacattaatccttcccaacttaataatctttc

SEQ ID NO: 122061 - DNA, 321 bp, Zea mays
  unsure (1)..(321): unsure at all n locations
  Clone ID: MRT4577_42803C.1
agcccgatcttgcatcagctagctaactaagcaagtaagctaacctagccctatggtacgagccgaccgtcgtgctgatcncanaccacnacccatgccctcaccaacaactngactggttagatcgccttccctttcgccgcgccccgcctttttctgttcccgcctgaatgacctgcacacccttgcccccaaagtcgccttccacgttgttcccaacgcccacccccttgaaggccaaggccgcctcttcagcctcaagcaattcaacttcacctcagccattccgttcggcttcgtgaaggaaaagctcgagttcct

SEQ ID NO: 122062 - DNA, 508 bp, Zea mays
  Clone ID: MRT4577_42804C.1
tttcctgtagggcctcatgctcttgatgacgctgatccgcaggctcatacggacctcctcgactccgcagcgaacattataatctacagaaggagtatcacagctacatatctcaagggtgtttgccatgcaaagcggctttgcaagagaccaaaactgaaacttggcgacactgagactgcagatagcactggaagctaccgagatgcctgtgaaggaacagttggagaaattcactctaatacaaccacctatgctactggcaacagcattagggagttatggtgcttatcttactgagagctgtgataacagagaggattatagcgacactagcaccaaagatagcctcaaggactagcatcggtagtcgcttcaagtgctagctgaatcaggcccgaatgtgaacgcttttgaaacgatccctacaaagtggtagctcaggcatatgctgaacttctctagggatgtaacattaatatcccttcatggctttcctgcaactcaa

SEQ ID NO: 122063 - DNA, 311 bp, Zea mays
  Clone ID: MRT4577_42805C.1
tttttgtttatttttttacttatcgtgcgggggcttttatttagaccctttgaaccgtgggctcatccaaagctaaaaaaagattttgggggagacccaagctccaacggcaaagacactagctgttcacaaagagagggaatattatattgtgttgacaagccaattaggcattcaaaccctggaccggcgtttggtatttaactcccctaaagacttacaggagggtgcttcacactccacagatgtggatggacatttttttgagtgagcccttggcctttgaaggtgttttaatgcagttacaacct

SEQ ID NO: 122064 - DNA, 430 bp, Zea mays
  Clone ID: MRT4577_42806C.1
gtatcgacatatcactagcaggcataccgacggatttggagcagctctcatctttagcggacatggccaagaaaggaatccagtatgtcgtggtggatgccttcacggcccagccgttcaagggcaacccggccgcggtgtgcttcctggaggacgacgcggccgcccccgcgggagacgggcggtggatgcagtccgtcgccgtcgagttcaacctctcccagacggccttcttctcccgtgactcgtcctgcgcggccgatgccgccacgccgcggttccacctccgctggttcacccgcgtcacggaggtcgcgctctgcgggcacgcgacgctggccaccgcccacttcctcttcacgtctgtcctcgcggagcgccatggcgtggttgagttcgtgaccaagtccggggtcctgaccgccaagaa

SEQ ID NO: 122065 - DNA, 559 bp, Zea mays
  Clone ID: MRT4577_42807C.1
cccaagggttttcattaacattttttttttgggggggtgggatacagggggcgtttccaaggccgcccacaaggggggggacctttttactttttttttatggggggggggggaccaaactttttttggcttctacgacgggggtgctacgggggggcttttggttcccattaattcccatggggggatacgtacccgttttctttttaggggggggccttgacggggtcagggcgggccatgggctttggtttttgatcgggggggggggagcaccgggaggcgccatggtacccgggggtggagcagccccaccgggagggggggggggcgccgccgccgccgccgccgggacccgggggggcgccgccgccgggccagttttggacctccaccttttttttttttttggccgccttggcttgcttgttagcgggggcggcaaggaagggggcggcaagcaggaactttagcccggggggggccttggaccccatgatgttggtttttggggggattttgggtttttttttttttttgaactgtaactgggtggggc

SEQ ID NO: 122066 - DNA, 629 bp, Zea mays
  Clone ID: MRT4577_42808C.1
aattcggcacgaggtcgcggtcgtcgttttctgtctcctctctgctctctggaccgcgcgactcggaccgcgcacggcgcccgcgtccctacggcgcgctccaccgtcggcagccggttcccctcggcgagctccaccgccggcgcccgcgtccctacggcgcgctccaccacgccgcccgggctccccgcggcgagctccaccgccggcggccggcggccggttcccctcggcgagctacaacggcttatccttcggcaaccctcggcaatctgttcccctcagctaatctcgacgagctccagtatccctgacgcggcaccagcggcggctaggctacagcggcgccacttccctcggccattgccagtttgccgctgcaagtctacaaattcaagtcttcccaggcggcgtcctcccagtcccaggcggctgcaggcgcactgcggcacacacagtcgcgcaccagccagtcccagacagcaggtggcaggcgcgcagccaccagccaggcgggctagccagtgccaggcggccagccgcgaagtgatggaaggtactaccatttgtattgagattgatggggaggccatctgtcttgacgtggctgagataatgaacaaggagct

SEQ ID NO: 122067 - DNA, 888 bp, Zea mays
  Clone ID: MRT4577_42809C.1
ggccgggaaaaaaaaaaaaaaaaggacatattatgttggagacaggctatcgccccccaattcgcaacacaatcgtcctccgccaccctccattaaccctagcggcagcagcgctcgtttgatccccgcggcggtccggcgtccgggtaggggagcgaggatgacggagtccctggtgcggaacaagccggggatggccagcatcaaggagatgccggtgctgcaggacgggccgccgccgggcggtttcgcgcccgtgcgctacgcgcgccggattcccacctcgggccccagcgccactgccatcttcctcacggccttcggcgccttcgcgtatggcatgtaccaggtcggtcaggggaacaaggtgcgccgggcactcaaagaagagaaaattgctgctcgtagtgctatactgccgatgctccaagctgaagaggatgaaagatttgtcaaagagtggaagaagtatcttgaggaggaggcgaggattatgaaagatgttccagggtggaaggttggcgagagtgtgtacaattccgggaaatggatgcccccggccaccggtgagctccgccctgaggtgtggtaagggcctgttgtaggcattgagaatgcaatcatgtcatgagggcatgaataaggctatcagacatgggcatccttctttgttcactaaggatcagctgttcaaatacctgtatctattttactcttatgaaatctggctggttaataatatgaagccgacgctttgcctcatctatgctcgtgcattgatgtaacgtgtccttgtttgatattaagaaactactatggaatataagaaagaaaacagcctgcttcttgccaaaaaaaaaaaaaaaaattgcggcccaaaattttttt

SEQ ID NO: 122068 - DNA, 122 bp, Zea mays
  Clone ID: MRT4577_4280C.1
gctcgaggtgagtgaagttctgtggcatgttttttataactaaattggatttgatgcaattaccataatatccctgtattctcatggttgggatgttactaggattcaagtctgtgatgaaa

SEQ ID NO: 122069 - DNA, 1015 bp, Zea mays
  Clone ID: MRT4577_42810C.1
gctcgttctctggctcgcggtcgtcgttttctgtctcctctctgctctctggaccgcgcgactcggaccgcgcacggcgcccgcgtccctacggcgcgctccaccgtcggcagccggttcccctcggcgagctccaccgccggcgcccgcgtccctacggcgcgctccaccacgccgcccgggctccccgcggcgagctccaccgccggcggccggcggccggttcccctcggcgagctacaacggcttatccttcggcaaccctcggcaatctgttcccctcagctaacctcgacgagctccagtatccctgacgcggcaccagcggcggctaggctacagcggcgccactcccctcggccattgccagtttgccgctgcaagtctacaaattcaagtcttcccaggcggcgtcctcccagtcccaggcggccagtcgcgaagtgatggaaggtactaccatttctattgagattgatggggaggccatctgtcttgacagtgtcggagataatgaacaagaagctgcggagaatggagaaatgcaccaaacaatttacactgatgaaaatggggaacaagtacccttgggtccgcaagaacaggggagggaggaagatctggcaggaaatggagaagaggatagggaccataattctatcattccaagccgtgaggagttgactgaagaattaagaaataaagttgcatatagtgaggaagaagcttacaggttgtactgtgactatgggcaccgcatgggctttagtgttcgaaaaggaaagcagtactactttactggaaccaaaaccatccgtactaaagattattactgctcaaaagaaggcttgaaggatgatgaacagcttactgaagcaaactttaataagccggagaccagaactaattgcaaagcgatggtccgttttagggttgattctgaaggtcaatggcgagttattcaaataattcctgaacacaatcatgagctagttcgaccggaaaaaatacactt

SEQ ID NO: 122070 - DNA, 2059 bp, Zea mays
  Clone ID: MRT4577_42812C.1
ggacagacttaagcaatggacttatgtttctcttttcttttatttatctaatattaacaattgaacaagcaaactgatccttttacaggtacttatatgtgctaaggcatgacactaattgtgctgctatacaagtttcacctgaaatgctcatctccttgtcatgccttatgttgcagcagtttattagtacttgtgtgattttccatctgttacgtctaattgtgctgctatccagtccgctcctgaaatgctcatctccttgtcatgccttattgcttttgcagtgattgttagtacttatgtgattttccatctgttgcgtctaattgtgctgctatccaagtttctcctgaaatgctcctccttgtcatgccttattgctttgcagtgtttattagtacttgtgtggtttccatctgttacgtgtttgtgttttagtatcaccagccttaagtgctaatgattacccattagttgatatgatttccatgccggtgctgtatatacttttatctcttcggtcttagcttcatgggtgtgaaattacgtttgccgcctcaccagcttgccaaatctctacctgtgcagcggcgggcccccacgctcggctccacctccgccgcctccgcccccggctgcctcctccgaggagcgcctctggttcgggctccgaggaggaggaggaggaggaggaggaggaggaggaggaggcgcgatgcccgcccgtcgccagacctcgcctaccccgcgcccgcaacacggtccccctaccctagcgacaggacctcgggacgggcgagtcaattctctcaccgaggtcctggtgcccgaggggattcgcgatcccatcccaattcacaacgcatcgtcgtctcccacaacacgctccactaaccctagcgacagcctcggctcgtttgatccccgcggggagctctagttccgccaagcgtgcgtaccggcgtccggatccgggaccgaagatgacggagtccctggtgcggaacaagccggggatggccagcatcaaggagatgccggtggtgcaggacgggccgccgccgggcggtttcgcgcccgtgcgcttcgcccgccggatccccacctcggggcccagcgccaccgccatcttcctcaccaccttcggtgctttcgcatatggcatgtaccaggtcggccaggggaacaaggtccgccgggcgctcaaagaagagaaaattgctgctcgcagtgctatactgccgatgctccaagcagaagaggatgaaagatttgtcaaagagtggaagaagtatcttgaggaggaggcgaggatcatgaaagatgttccagggtggaaggtcggcgagagcgtgtacaactctgggaaatggatgcccccggctactggtgagctccgccctgaggtttggtaagggcctgttgcaggcactgaatgccatcatgtcacgggggcacggataaggcttcatttttcattaaggatcagctgtttaaagacctgtatttgttgtacttgaaatctggctggttaataattggacatgtaaagacgacgtttacattgatgtaacgtgttcttgtctgctattgcttcccagcctctggtgtttcttcatgtaagtcagtctgaacatgaatccttgttattgaagaaagtatgaaatataagcagacacgcgcgtagcgcggtggcggcgcctcctgtcatggattttccattcccaaaaaaaaaaaaaaatcagctgtttaaagatttaatatggaacctgatgttgcaccggggattttccccggagggagccgagcggtcagtatagtttccagagcggagtttgtgtgggtagtgtttaatatgtggtcagtataggtgcccaaagctgtgagtagtgtgtgcgtgttctcgggtagtttcgagtatgcgatcagtatgtgtctctatgagttacttgatacgccactgctcatatatgagtgttactctgtttgttaagaaaaaaaagtggaatctaaaaaaaaaaaagaagaaaaaaaagaaaaaatggtgggacaagaa

SEQ ID NO: 122071 - DNA, 342 bp, Zea mays
  Clone ID: MRT4577_42813C.1
gaccacgcgtcctcacagacatacagtgaccctacctatcggctgagttccacgaagagcacggcaaccatagggaagggttgattcataaacttcaccggcgacccatactactacttctgactgtagttcaacgagtgcattatcctcttccaccagccctccaactgcagcctactccgctaatactatctcgagatcctccaccactccaatgaattccatcccacgaacatgatctacaaatatgatcaacttcagatcataacttcttctcttaatgccaacgaataaacttatgctaccccttctgctgcatcacaccattagtcttcctgtcta

SEQ ID NO: 122072 - DNA, 769 bp, Zea mays
  Clone ID: MRT4577_42814C.1
gccgggaacaaacaaacatgtacaaaaggctcacgctgttgacgtgaacgagccatcgtcagggcacatgcatacggacgacgcaacggacggggaattctccgctcctcccgctttttctgcccgatctgcccctcgtacgtaccgccagtcgcccactcaccgccacgcccccgccacgcacaaaaaaaaaacaatcaataggtccagtccagagaagagaacgccggagggtcaaacgcccggcagctgtaactttcctccgaccacccccggccagcagctaggcggcggccggcgtgctggggtcaaacgtcatagcaaaaaaaaaaaaaaaaacaaaaaaaagcgcgcgaatcatacgtgaccggctgcttcattaaacaactccaaaaattaccgccccgccaggccgccaccgggccactcgctgcctgtgtgtcacctcctctcctctcctcctcgcgcgactgctcccgctttgaccgctcgcaaagctttagcgtagcgagagtagaggtgggatttggtcttcggaaggcgaaaaggaggcgacgtgtaaacaaaccaactttcccgtttaccggggcgcggtaactttaccgcctcgacaagacaccagtccttatccgcagcagacagcctggcagcggacaacttgacgcgagccataaacttttaattattatacttctactactagtaaaataaataaataaaacgcgcctgtgactcaaaaccgttccaaacttatgacaagcttatcaac

SEQ ID NO: 122073 - DNA, 348 bp, Zea mays
  Clone ID: MRT4577_42815C.1
gggaacaaaggcaaccttctacaattgcaccatcgaaggcggccagggtgctctgtacgaccagacgggtctgcactacttcaaggcttgtgccatcaagggaaccatcgacttcatcttcggatctgccaagtcattttatgaggaatgcaaaatcgtttcggtgttgaaggaggcattggtattgccattggcaccaccggagcaggaccgctctagaaatcccatcgaaatcgccccaggcaagagcgggttggcattcaagacttgcacaatcgagggggaaggagaaaaaatttacttgggtagggtgggcacgcctgtgatatactcctacactaatatagg

SEQ ID NO: 122074 - DNA, 2569 bp, Zea mays
  Clone ID: MRT4577_42816C.1
tgcaattttaggccataccaatatgtcattgagttgcttggcacactgctactgaggaaaaagaccaggtcaaccacttagcctagctttagctccaccaatgcttacaaaagttagaaatatacagctcattgatttatgtatccatgccaaaaaaaatttgtaactaaaaatataattatacaaggttcgccacaccatcatcatgtgccacggtatgaacagaaaaataatatacaatggataaaagcaccaaacgttatggtcaaatgaacttaaccaaaagcaggcataagtgtttggatgcaaagagaaggattagagaaatggtatatcctatttttctgatattccaatactctcgaaaaggttgaatatccaaacttcccacttgcttttactatttcatgattattgcaaactaaggctgccaaacttaaaggacttctgatctcacatgtatccattagaatccacagaaactacagtggaaatcattgttagttgatctattgccacatcctgatctattcagcagtagttcaggtttagggtaagattgggagtgatttggtagtatccctaatttaggcacaccagggcttctattgaatgaactgcatgcgtcaagaaaattttgtttcttatcttgtgacctatgcatgttttatttgctgcccaactctgtcacccttgtcatggattaaatccaaaagtactatgtgcttggttgctcgccaactatagactaagatgtgacaggacatgtacagaacaatgagaggtacagaccgatcatgtgtagcagcagcaggtacaatagtaacacatattgtctgttgctagaatgatcttagtagcttgtctttctcagatctgaccgtactattgatttaatcaggttgtgcaattatttatcggataatttgtgtgtcgtcgcaacgcacggactattctattatatttctggacctacaattggatgttgatattatgctcctgccataaagtccaatgtatcatgctaactgtacactgatctgtaacaggtgctcgaccgactcgagagtttgtcgacgcttgaagaaggacctaatgtgagcttttacacacttgatgaacagcttgagctcttgagcaaggtgttgaatgcaggggatgacatgattggtgttgagttcttagaagaagattatggtggcaagattcgatgtcgcagtcacccagatgtcattgcttgttcttgattcacgacgagatgtatgcggttaggttgaaatccctcgagaacaatggggcgcacggtgctctcagatcaagaagaagatggcgacgatagcacgagcatagatggcggcgagcgggcgcggacgacagcacaacggtcgcgcgagctgtggccagatgggttattttcatcttggtgcaggataactgacgaccccaaccccaagaggtggtgcacgacgacgcgagcacgtatggaggtgtgggggcacggatggcgatgcagtggctaggatggttgacaaccctaagaggcggcgcaggtgcgcaaggacaacgaccaggcttgcacgcgacgacgcgagcacaattggcggtgcaatgggcgcgatggctggcgatgcttctgacggggccaacattatttctttaagagaaaatataaatagagaacaacacatgaataggggaaactagtgatgtggtggcatgctctgccagtgcaaatttcactccacctataattgttgtcgctcctgacgagggaagaatgtgcgccttcaaaggaaggtgaacttaagagtaaaagcagctaatgagttatagtttaacaaggatggctcagctatcaagaagctccaggtcaatccctgttttgttccaatgcttgaaagtgattgtcttcattttgttggttgtgacaaaagtcaaaaccggatggagatcccttctatgtaggtgtttagttgtggagcagattgcgggttttgaatttcttttccaaatgtcgtcttcgcgcccaccgcggaggggtggtgatcgaagagatagtggcagaggcgtcccttgtgggctctgctcctatctcgtggtatggagcctttaacttatgagatgagataggagtctgtgttcttatcccagtataaggtctacaatggcataatgcttgtaccatctgtttttattgtaacttattattatcatgtactgcatgtgactagaaactttgtgttagcctttattgctttctaccttatggcacctgtagtagtgaactgatgatattcttgtggactctaaagctttgtttgcccagaatggtaattttcgtattctatttcataggataaaaaaaaaaaaaaaaaaaaaaaaaaaaaaaaaaaaaaaaaaaaaaaaaaaaaaaaaaaaaaaaaaaaaaaattacccccgtcaggttttgttctaagttaatcataaggaaaaaatggggcttctttgtgctgcaaaaaaaaaaaaaaaaaaaaaaaaaaaaaaaaaaaaaaaaatttacccccgtcaggttttgttctaagttaatcac

SEQ ID NO: 122075 - DNA, 167 bp, Zea mays
  Clone ID: MRT4577_42817C.1
tcttcttagagcacgagctcaccaccgcgagggcagagtgatctcactccaccgacacgaacatctctaaccacacctagccgaccgctacatacattgccccgctgctccccttgttccttaaaaaagccatcatagcttcactacttagtaacgccctttaaatc

SEQ ID NO: 122076 - DNA, 471 bp, Zea mays
  unsure (1)..(471): unsure at all n locations
  Clone ID: MRT4577_42818C.1
gtttatactgcaattggcaactggaggggggggggggggctttgttgctgctggttccgcaactggtcaaacttgaaccagcagcaaaattggccgccgggacttgatgcacgagtgaacattgttcgcctcaataattgagcaggaaagtggaaattacgcatacttatgacaacggggagtaggggcggctaaggtcgagtggacataaaaggctgattagatatttagatgtggtgcggtgcgcacatggagttctactatgtctgagcagagtagtgatatttatttttctcgcaaccagagaaggcaactgtctaagttactatttgtttgggctttttttagtttctgtccaccananaaaaaaaaaaaaaaaaaaaaaaaaccanaaaaaaaaaaaaaaaaaaaaaaaaaaaaaaaaaaaaaaaaaaaaagaaaaaaaaaaaaaaaaaaaaaaaaaagggggcg

SEQ ID NO: 122077 - DNA, 273 bp, Zea mays
  Clone ID: MRT4577_42819C.1
acccactcatccatacgtctcctactacatttccccatctttcccatcttgaccactacaaataatatattgctacgatcaattactcaatcagaacttcccctactctttcaacaaattcatatccttattcaacccatacccatccttacaatctacaacccccttagttcttacttcatcacctttacatacttcatcctgctatctaaaaacactactcaatcatctcttattctaccattctaagttaccaactccaacataatacac

SEQ ID NO: 122078 - DNA, 125 bp, Zea mays
  Clone ID: MRT4577_4281C.1
gagcggagacgatacgagaagcacggaatacagctcgaggtcaggacatcctatcttttagacagcttcatactggtacgaagataggcattcagtgtgcgagaacagtggaatctattttcaag

SEQ ID NO: 122079 - DNA, 270 bp, Zea mays
  Clone ID: MRT4577_42820C.1
aactctcgccgccgcagtgggagcgtacaagccaaccgaccccgccctctaggcaatccaacgccgacgttccaccaccacctgaagagcgagatggagatgaagaggatcctctcatccgtcctagtcgctatcgtcgtctcgggcatcggagtgctggccttcaccgaggccgccgtcgagggcgccccaactgcctccgagtcgagcgtcgaggctcccgctggcactggcgctggcgctatcgctggagcctccgtcgtggagccc

SEQ ID NO: 122080 - DNA, 951 bp, Zea mays
  Clone ID: MRT4577_42821C.1
gcctatttttaccaaaaatccggccagtttggcttaattaatgatgtccacgccatggctaacccaattttgctctggttttccaccggggccatggcattactaacaggcactgttatttggcaaaaaatacgtcaattttcctcccagaccatcaatgcacctttgcgggggataaccctttatattgaggtcaattacgccgtcaatctactgccttggttgggcattagtcgttgcacttttttttaccactacctacccgcctacgcctttagtattttagccctcgctttaatcctagaaactttactggacagtccccggcacagtcataacgtcattgcttgggcagttttaaccctagtggcgatagccttttggtattggttgcctgttttcttgggattaccattgactcctaggggctttgccctgcggatgctatttcccagttggatttgaagcaaagacaatccttccaaataaaatcggcacggtctcagattcaggccgaaatggattgactgggacagttggcttcaccccgatggcttcttggaagtacggactggggggtatattgaaaagttggggttgatggctccccagactaatttttcagcaactaccattttgagcactcccagggaaaattctatgttagatctcagcggcaagcacgcctttgttaccggcatcgccaataatcgctccattgcctggggcattgcccaacaactacaccaggccggggctgaaattggcgttagttatcttccagatgagaaaggcagatttgaaaagaaagtgcgggagttgaccgagcctttgcatcctaccctcgtcttgccgggggacgtacaggacgatgcccaggtggatgccctgttccatagcgttaaggaaaaatggggcaaactcgatatttgatccccggtaccggctcgg

SEQ ID NO: 122081 - DNA, 174 bp, Zea mays
  Clone ID: MRT4577_42822C.1
gggatagctagatccgggtctcgcgtccacgttcacagcatgcgattctccggtggcaatgagtcctcattttctcacatacctgcagcgtgcactcccgaaacctagatctcggcatacgatgctggaatagcttctgccacatccacttcgcagacagaggagactgtgatc

SEQ ID NO: 122082 - DNA, 236 bp, Zea mays
  Clone ID: MRT4577_42823C.1
ccttgctacttgggcctttctagaaacgatgctcaggacaaacagcggcccaggctgcacaggaagaagatggagcgccaggcgcacagcgtagggaccagcagattccgtccacgcgcaccaaggccacgaacacgacgagctagcccaggacaaacactgcgtactccaacatccccagtgcaccggtaagcgcaccgaacatgagcccctccagactgtacttgtcgaaagaa

SEQ ID NO: 122083 - DNA, 824 bp, Zea mays
  unsure (1)..(824): unsure at all n locations
  Clone ID: MRT4577_42824C.1
gtaccctcgnaggcnncggccgggattcctcacacccacacaaaccgcacctcatccctgttgacccgacggtggcgctcatctcctccccgacggtggcgctcatctcctccccgacggttctccccatcgacctgctggcttcccttcgtcttccccgacactgatcctcatcactcatgtctgctgaagttgccggaggaaacccttatttcttctcgtgctacttctggttcatatactgcataaaattccgagatttcacttgatacaagtggaacactaggagttttgtgcgaatacttcctaccatgtgaatcagttgtagctggtgaatttggcaagactcaagttctctcatctggtttcagaaaacatctgtcggttgattgcttggtctcctgtttcctttgagtcttgccaaccaaagttttctctcagcatcagttgtggtctacgaactctttctgtgacttgaccaacatctctttttgtcctgtcaatcttgcaacactcccttccaaagacttgtctagaggctggattgccttgctctctgctggcgctgcagcctcctttagtcttccaagttttctctcggcagcagttgtgatatacgaactctttctgtgacttgaccaacatctcttttggtcctgtcaatcttgcaacactcccttccaaagacttgtctagagcttttgtcttgagatctttcatcagtgctaaaggcaaaagaggtcttagggcgatggcgcaaactagcctgcctcctggatttcgtttccacccaactgatgttgagcttgtttcctactatttga

SEQ ID NO: 122084 - DNA, 666 bp, Zea mays
  Clone ID: MRT4577_42825C.1
cgttgctagtagtcggcgtcgccatcggggtcaccaggtggctgaggaggaaagcgaaggaaaccaccgctacagaatcaccagcagcgaagctatcatcgcagtcgtcgcagggcggccacaggcaggtagcagcagtagcagcgcatgcgcatgcgcatggcagtggcacggaggcgagcggcaggtggtcgggcctgtacaggttcaccagggaggagatcgagagggccgtcgactacgcgagcagcaggatctacctcggctccggcagcgcggggcaggtgtaccagggggtgctccccagcgggcagctcgtcgccgtcaagcacatccacaggacggccatgtccgggtccttcaccagggaggtggagcagctgtgcaaggtcaggcaccccaacctggtgtgcctcttcggctactgcgacgaggagggcgaccagtacctggtgtacgagtactgcgccaatgggaaccttgcccagaacctactcaggagtgactccgtgctcccatgggaaacaagggtgaagatcctgagggactgcgcatccgtcctgaggttcctccacacgcaccctgacggatgcatcgtccacagagacatcaagctcaccaacatcctgctgacagagaaaaagtgccgaagctgtccgacttcgg

SEQ ID NO: 122085 - DNA, 3048 bp, Zea mays
  Clone ID: MRT4577_42826C.1
cattgggggcgctcccggttggccgggccgggacacccacacccacacccacccacacaaccgcacctcgcacccattgaccagacggcggcgctcatctcctcccccacggttctccccatcggcctgctggcttctccccggcttccccgatactgatcctcatcactcatgtctgctgaagttgctggaggacacccttatttcctctcgtgctacttctggttcatatactgcataaaattccgagattttacttgatacaagtggaacactcagagttttgtgcgaatacttcctaccatgtgaatcagttgtagctggtgaatttggcaagactcaatttctctcatctgagttcagaaacgtttgcttggtctcctgcttcccttgagtcttgccaaccatagttttctctcatctctttctgtgacttgaccaacatctcttttggtcctgtcagtctcgcaatactcccttccaaagacttgtctagaggttggattgccctgctctctgctggcactgcagcctgctgaagtctttacttgctgcattctgtgctcacttttgaaagctgctctcttctgctctgcgttgttgatttctgcactcaagcttctcttgcctgtgcactcaagcttctctcttcctgggcaactagtgatctccttgaagcatttcagcttttacctagagatctttctgttgttgctgaaggcaagagaggctttagggtgatggcgcaaactagcctgcctcctggttttcgtttccacccaaccgatgttgagctcgtttcctactacttgaagaggaagatcatgggaaagaaacatatcgtggatgctatagcagaggttgatctgtacaagtttcctccctgggatctatgtgaaaagtcctctcttcgaagtaaagatcttgaatggttctttttttgtcctcgtgacaagaagtatcctaacgggtctaggacaaatcgtgccacaccaaatggttactggaagactagtggaaaggatagaataattatgcttaactcccgcaccgttgggatgaagaaaacattgatatttcatgaaggcaaggcccctaagggcgacagaactgattgggtgatgtatgaatacagaatggaagatgaggatttggtttctgctggtttctcaaaggatgcttatgtactctgcaaaattttcaagaaaagtggccttggtccaagaatcggagagcaatatggggctccatttaatgaagacgaatgggataatgcagaagtcgaaacttctctgtttcctttgacttgttcagaagtgaatccaacagagggacaacgtgctcagcctactgtcctggctggtgctcttctggaacccgaaccacctctacataattcatcttctacatgtgctggagaggaatcatcatttggtcatgccactgctgaggacttaacttttagctatactgttgctagctctgctatccaagatacacctgctcggatgtcaggagacggtgtggtttctgtgaacaacatatccaatgtggccaatgacatgcgtagtcctcgtgactgtgatgaatttctatcggagttgtctagatttatgaatgattctcctctgcgtaacactcctcttggagagtgctctggtcttcctccgatgtctgaagctgaggctcatgcttttgaagtcaactcttttggcctctacaatgaattatcagagcttgttgagttaggaggcgcggataacaacttaaacaccagcaatgtggaaactacagattacctcatgttgccacctgacagagaactgtcggctaatgattacatggaactaaacgatctccttgctcctgacccaagcttccccagtgaattttctgctcaggacaatcaatatatgcagcatcctcttgctcagtacaatggacattatgatctgtcaggtccttcggagccaacaatgcctagcattttcgatgtttttcctcccaataatggagtcctcgcaacagatgatccagccaactacttggacccagccatgcagttccctttctcatgattggttaccatttgtcatggaggtacggatgtttatacctgctctttttgtgcttgaacttgtctggactgcttcggtgttgcaacttgcagctcgctgttgctacaactctatccaccctgaacgtcaaggacgtcattgatgtcatgcctgggcccatgaaatcgtctgttgctcttctgaaccaagccgaccttggctggtatttcttggaagcacggtgcttggaacaatctgcatcgactgctgtatgctcccaactggttgagctaacggccaatctcggctcactctgctgaggagatcatagcctgtaaatctttgattatgctgttacttgtgtgtatcgcaacctgcctgattaccattgtcttgtgtttgagttttgacaatatgcaaaccataataatgtcgtaatatggaactcgtttatcatgtttattccatactcccgttatgtgagcttttggatggtctttctagaaggtgcacaaggccaaccggccaaaagaaaggacatcaagtgccaccaccggtagaagacggagccgaacttgcttgactgcatcgacgagcgcgcttcgtgacatgatggctttctcaagaaatataaaggccggagggagaatttgagtgtccacctaaattttaagaatttagtaggtgtcttattttgttttttgtctggtggtctatatttagctacgaggggttgaatagggacgtagagagtatcctttttttgtttaaagtgcggtctgggcctgccacgcgttcgaatattatgggaatcagcaagtagtaagtaaatattggactgccaactgcttctgaaacttttacttcctgtttgatccttgatataaatgttttatcctaaaaaaaaaaaaaaaaaaaaaaaaaaaaaaaaaaaaaaaaaaaaaaaaaaaaaaaaaaaaaaaaaaaaaaaaactcggagaggggcccgtac

SEQ ID NO: 122086 - DNA, 819 bp, Zea mays
  unsure (1)..(819): unsure at all n locations
  Clone ID: MRT4577_42827C.1
ccggccggngaaacccacacaaaccgcacctcatccctgttgacccgacggtggcgctcatctcctccccgacggtggcgctcatctcctccccgacggttctccccatcgacctgctggcttcccttcgtcttccccgacactgatcctcatcactcatgtctgctgaagttgccggaggaaacccttatttcttctcgtgctacttctggttcatatactgcataaaattccgagatttcacttgatacaagtggaacactaggagttttgtgcgaatacttcctaccatgtgaatcagttgtagctggtgaatttggcaagactcaagttctctcatctggtttcagaaaacatctgtcggttgattgcttggtctcctgtttcctttgagtcttgccaaccaaagttttctctcagcatcagttgtggtctacgaactctttctgtgacttgaccaacatctctttttgtcctgtcaatcttgcaacactcccttccaaagacttgtctagaggctggattgccttgctctctgctggcgctgcagcctcctttagtcttccaagttttctctcggcagcagttgtgatatacgaactctttctgtgacttgaccaacatctcttttggtcctgtcaatcttgcaacactcccttccaaagacttgtctagaggttggattgccctgctctctgctggcgctgcagcctcctttagtcttcccttgctgcattctgtgctctgcattctgtgacttgactagttgctgctctattctgcatttcagcttttgtcttgagatctttcatcagtgct

SEQ ID NO: 122087 - DNA, 793 bp, Zea mays
  unsure (1)..(793): unsure at all n locations
  Clone ID: MRT4577_42828C.1
ccnggccgggggccgggcgtgccgattccttccctgcatcaccgtgcccctacctctccccacgcgcggcatgaacacgcggcttcttccccaccaacgacgcccttcccaaaaccctcgacacgctgctctcgccgagatcccgcactgaacacgctcggcttccttcccggctgccgagatgcctcctacgcgcggctttttccccaccaacagcgccctttctcccccacacgctgcggcagccgagatgaacgcgctgccgtcaccgagatcccgcgtcgattcgattcacctgtggtgctcgcgacgaagggaattgcgatctccttctccttcccgatgacgaatacgacggagatcgaggaggcgctgcacagctacgatctcttccccggcctcttccttgctagcgttgtcaggaggggttctatcttctgtcgtgccttattaaaagatgtaaatgaaacatggtacataacttcaagaaacaaaaaacaaagaaaatgagaaagattggtgatattggatcaattcagtttgcatgcagagattgaaaattggtggcgtgtctgcatcagctcagtttgcatgcagcgattgtatccccatatcgagcggtactccttgggctaacaacagcagggaaacgtctggacacctgcttccaaacagcaggggaagggaaaaactgtcctgggaaacaaagtggaattgaaaagccaattaaatccatgtcggggctttccttccctaggctattagccacttgatgccaaacaaacccaagatc

SEQ ID NO: 122088 - DNA, 726 bp, Zea mays
  Clone ID: MRT4577_42829C.1
tcccggccgggccgggacagaggcaggaacaggcagagctagtgcgctctctccagatctttctcttagtttcctcacacaacgacgacgagcccatgtccgccgcggtgacggcgccgccctgccacagccggccgtctcctctcaaccccagctcgagggccacgccgtcgccgagcagcaatggcggcaagcccaacgcggtctccacgacacggaggcacctcgccaacctcgaccgcctcctcgtcaagccgccaccgctgccgctcccgctcccggctcagcccaggaaacagccaaccggggtacccgtaccaggcgacggggaggccagccccgatgaccgtagcggccacggtgggctcctcaacgcgctgaacctatccacgtttctgcccttcacgcggaaggcagccgtggacgagctgtccccgcgcagcctggcgtacatgcagcgcctcctcacgctctccccgcggctgtcgcccaagggctccatcgcgggcgagtggcggcggtaccacggcgagggtggctgggagggcctcctcgacccgctcgaccagaacctgcgccgcgagctccttcgctacggcgacttcgtgcaggccgcctacacggcgttccactccatgccgtcggcggcggaggcatcctccagcggtcagcaacgcaccctcgtgctgccggaccgcacctaccaccctacgcgcagcctgttcg

SEQ ID NO: 122089 - DNA, 325 bp, Zea mays
  Clone ID: MRT4577_4282C.1
acccccctagcagcataattcaccaaggtcctaccatcataagagggaaaaaaactgcggaatttcctactaaacagagggcaaaaaaaaaaaagaaggaggggcccctaaaaaaaaacgccacaaaagaacgaactggttcaatagacaaaaaaagaagggcgccaccctactgaaacacagcagaaaccacgtttgtgtgtgcacaggacaacagctaaaaaactaaacggggggccaaaaaaggcgcaagccaaagagccaccctcgccagaaaaaagaggtccgggggaccgttccacaacctaaaaaccagaaccaccgc

SEQ ID NO: 122090 - DNA, 643 bp, Zea mays
  Clone ID: MRT4577_42830C.1
actactcggcggccgcccttcccttctctcccctcccccccttttttctttttccccttttttaacaaaaagggggcctgggggtttttttctccgctaaccccctaaaaaaaaaaaaaactattttaaaaccaaaaaaaaaaaacagggggggttttgacccccccaaaaaaacacggggggggaataaccccccccaacccctccgggcccccaaaaacccccccccagatccttacaaaccccttgagaaacaaagaactaccataccttcttatggaaaaaaaacaagctggaggtcccccccgagaaaacccaccccggcgcgggccccccccaaaaaaaccccggggcgccccaaaaaaacacttcgacaccccgggggccctggaagaaacccacccccccgctgacttttggcccgaaaggcccggccaactggaacctgacccccgtgccggccaccacaaaaggcccccgcccggggggcgaaacccaccggaacacccccattagcccggaccagccctccctcctagcaatataaagcctaccgacccctccttgccccaaatatcttctttaaacggggcccaaaaaaaaaaaaaaggccgtcgtgaccccaaaatcaagggaaaacccc

SEQ ID NO: 122091 - DNA, 763 bp, Zea mays
  Clone ID: MRT4577_42831C.1
ctccgccgggcggcccacacccacccacacaaccgcacctcgcacccattgaccagacggcggcgctcatctcctcacccacggttctccccatcggcctgctggcttctccccggcttccccgatactgatcctcatcactcatgtctgctgaagttgctggaggacacccttatttcctctcgtgctacttctggttcatatactgcataaaattccgagattttacttgatacaagtggaacactcagagttttgtgcgaatacttcctaccatgtgaatcagttgtagctggtgaatttggcaagactcaatttctcccatttgagttcagaaacgtttgcttggtctcctgcttcccttgagtcttgccaacaatagttttctctcatctctttctgtgacttgaccaacatctcttttggtcctgtcagtctcgcaatactcccttccaaagacttgtctagaggttggattgccctgctctctgctggcactgcagcctgctgaagtctttacttgctgcattctgtgctcacacttttgaaagctgctctcttctgctctgcgttgttgatttctgcactcaagcttctctcttcctgggcaactagtgatctccttgaagcatttcagcttttacctagagatttttctgttgttgctgaaggcaagagaggctttagggtgatggcgcaaactagcctgcctcctggttttcgtttgcacccaactgatgttgagctcgttttctactacctg

SEQ ID NO: 122092 - DNA, 2869 bp, Zea mays
  Clone ID: MRT4577_42832C.1
gattcaaaaaaaaaaaaaaaaaaaaaaaaaaaacataaaaaacctcgaggccggccggggccgggattcctcacacccacacaaaccgcacctcatccctgttgacccgacggtggcgctcatctcctccccgacggtggcgctcatcttccccccgacggttctccccatcgacctgctggcttcccttcgtcttccccgacactgatcctcaccactcatgtctgctgaagttgccggaggaaacccttatttcctctcatgctacttctggttcatatactgcataaaattccgagatttcacttgatacaagtggaacactaggagttttgtgcaaatacttcctaccatgtgaatcagttgtagctggtgaatttggcaagactcaagtcctctcatctgggttcagaaaacatctgtcggttgattgcttggtctcctgtttcctttgagtcttgccaaccaaagttttctctcagcatcagttgtggtctacgaactctttctgtgacttgaccaacatctcttttggtcctgtcaatcttgcaacactcccttccaaagacttgtctagaggctggattgccctgctctctgctggcgctgcatcctcctttagtcttccaagttttctcttggcagcagttgtgatctacgaactctttctgtgacttgaccaacatctcttttggtcctgtcaatcttgcaacactcccttctaaagacttgtctagaggttggattgccctgctctctgctggcgctgcagcctcctttagtcttcccttgctgcattctgtgctcactttcgaaagctgctctgttctgctctgctttattgatttgtgcacttggattctcttgtcttaatcaagcttctctcttctgggtccccttttgtcttgagatccttcatcagtgctaaaggcaaaagaggtcttagggcgatggcgcaaactagcctgcctcctggacttcgtttctgatttgagattgtttcctactatttgaagaggaatatgggaaagaagcttattgtagacgctatatcagaggttgatctctacaagtttcctccctgggatctccctgaaaagtcctctcttcgaagcaaagatcttgaatggttcttcttttgtccttgtgacaagaagtaccctaatgggtctaggacaaaccgtgccacaccaaatggttactggaagactagtggaaaggatagaataattatgcttaactctcgcactgttggaatgaagaaaacattgatatttcatgaaggcaagccccctaagggtgatagaactgattgggtgatgtatgaatacaaaatggaagatgaatatttggtttctactggtttctcaaaggatacttatgtactctgcaaaattttcaagaaaagtggccttggtccaaggattggggagcaatatggggctccgtttgacgaagccgaatgggacaatgcagaagctgaaacctctatatttcctttgatgacctcttcagaagtagtgaacccaacagagggaccacacactcagcctgttgcccctgctggtgctcttcaggaacctctacataattcatctgctacttgtgttgtagagggatcgccatttgatcatgccactgcaaatacttgtgctgagggtgtaacatttggctatactgttgctagctctgctattgaagatatgcctgctcagctgtcaggagatggtgtggtttctatgaacaacatatccagtgaggtcaatgatatgtacagtcctcatgactgtgatgaatttctattggaggagatgtctagattcctgaatgatcctccaatgcgtaacactccttatggagagtgctctggtcttcctccaatgtctgaagctgaggctcatgcttttgaagtcaactcttttgacctctacaaagaattatcagggcttattgagttaggaggcatggacaataacttcaacaccagcaatgtggaaaccacagattaccttgtgctgccacctgacagagaattgtccactgatggttacatggaacttaatgatctccttgcttctgattcaagcttccccatcccagtgaatttcctgctcaggacaatcaatctatgcagtatcctctggctgagtacaatgtgcattatgatgtcgctactctgtcaggtcctttggaaccaacaatgcctagcattttcgacgattttcctcccaataatggaccccatgtcacagatgaggaagacgactacttggacccgaccatccctttcccgtgattggtcgaataatatgcctgcccttttttgtgtccttacatgtttggactgttccgatgttgcaacttgcagttctttgctactacaactctatccaccttggatgtcgcgatattgttgatgcaatgcctgggctcatgtcagctgagagctgaccttggcagcttggctgtctgctgaccttggctggaagcacggtttttggatgaatctgcatcgactaccacatgcaagttccaactggttgagctgaccgcctatcttgtatcgctctgctcaatatcggtaggacttggcatgtaaatctttgattatgtctatgctgagtatcaataagacttggcgtgtaagtctttgattatgatattacctgtctgtattgcaacctgcatgattgccaccattttaagcaatttgtcatttgtgtattcacaatatgcaaaccattattattgttgtaatgtgatattgaatgtttaatactatattttaccctgaaaaaaaaaaaaaaaaaaaaaaaaaaaaaaaaaaaaaaaaaaaaaaaaaaaaaaaaaaaaaaaaaaaaaaaaaaaa

SEQ ID NO: 122093 - DNA, 3489 bp, Zea mays
  unsure (1)..(3489): unsure at all n locations
  Clone ID: MRT4577_42833C.1
gtgcggcgctcaggcggcggtgccggccggggccgggattcctcacacccacacaaaccgcacctcatccccgttgacccgacggtggcgctcatctcctccccgacggttctccccatcggcctgctggcttcccttcgtcttctccgacactgatcctcatcactcatgtctgctgaagttgccggaggaaacccttatttcctctcgtgctacttctggttcatatactgcataaaattccgagatttcacttgatacaagtggaacactaggagttttgtgcaaatacttcctaccatgtgaatcagttgtagctagtgaatttggcaagactcaagttctctcatctgggttcagaaaacatctgtcggttgattgcttggtctcctttttcctttgagtcttgccaaccaaagttttctctcagcatcagttgtggtctacgaactctttctgtgacttgaccaacatctcttttggtcctgtcaatcttgcaacactcccttccaaagacttgtctagaggctggattgccctgctctctgctggcgctgcatcctcctttagtcttccaagttttctctcggcagcagttgtgatctacgaactctttttgtgacttgatcaacatctcttttagtcctgtcaatctcgcaacactcccttccaaagacttgtctagaggttggattgccctgctctctgctggcgctgcagcctcctttagtcttcccttgctgcattctgtgctcactttcaaaagctgctctgttctgctctgctttgttgattggtgcacttggattctcttgtctgtgtaatcaagcttctctcttctggggcacaactagtcaccccattgaagcatttcagcttttgtcttgagatctttctatcagtgctaaaggcaaaagaggtcttagggcgatggcgcaaactagcctgcctcctggatttcgtttccacccaactgatgttgagcttgtttcctactatttgaagaggaagattatgggaaagaagcttattgtagacgctatatcagaggttgatctctacaagtttcctccctgngatctccctgaaatgtcctctccttcgaagcccccaatgcctagcattttcgatgtttttcctccccaatggggtcctcttaacagatggtccagcaacttcttgggcccagccatgcagttccctttttcatgattgggcagcttttgtcatggagctccctgttgttacaactctatcccccctgaacgtcaaggacgtcatttatgtcatgcctgggcccctgaaattttttgttgcttttttgaaccaaaccgcccttgggtggtatttttggaaacccacgcgtccgaaagatcttgaatggttctttttttgtcctcgtgacaagaagtatcctaacgggtctaggacaaatcgtgccacaccaaatggttactggaagactagtggaaaggatagaataattatgcttaactcccgcaccgttgggatgaagaaaacattgatatttcatgaaggcaaggcccctaagggcgacagaactgattgggtgatgtatgaatacagaatggaagatgaggatttggtttctgctggtttctcaaaggatgcttatgtactctgcaaaattttcaagaaaagtggccttggtccaagaatcggagagcaatatggggctccatttaatgaagacgaatgggataatgcagaagtcgaaacttctctgtttcctttgacttgttcagaagtgaatccaacagagggacaacgtgctcagcctactgtcctggctggtgctcttctggaacccgaaccacctctacataattcatcttctacatgtgctggagaggaatcatcatttggtcatgccactgctgaggacttaacttttagccatagtgttgctagctctgctatccaagatacacctgctcggatgtcaggagacggtgtggtttctgtgaacaacatatccaatgtggccaatgacatgcgtagtcctcgtgactgtgatgaatttctatcggagttgtctagatttatgaatgattctcctctgcgtaacactcctcttggagagtgctctggtcttcctccgatgtctgaagctgaggctcatgcttttgaagtcaactcttttggcctctacaatgaattatcagagcttgttgggttaggatgcgcggataacaacttaaacaccagcaatgtggaaactacggattatctcatgttgccacctgacagagaactgtcggctaatgattacatggaactaaacgatctccttgctcctgacccaagcttccccagtgaattttctgctcaggacaatcaatatatgcagcatcctcttgctcagtacaatggacattatgatctgtcaggtccttcggagccaacaatgcctagcattttcgatgtttttcctcccaataatggagtcctcttaacagatgatccagccaactacttggacccagccatgcagttccctttctcatgattggtcagcttttgtcatggagctcgctgttgctacaactctatccaccctgaacgtcaaggacgtcattgatgtcatgcctgggcccatgaaatcttctgttgctcttctgaaccaagccgaccttggctggtattcttggaagcacggtgcttggaacaatctgcatcgactgctgtatgctcccaactggttgagctaacggccaatctcggctcactctgctgaggagatcatagcctgtaaatctttgattatgctattacttgtgtgtgtcgcaacctgcctgattaccattgtcttgtgtttcgagttttgacaatatgcaaaccataataatgtcgtaatatggaactcgtttatcatgtttattccatcctcccgttatgtgagcttttggatggtcgatgctttctaagctgtgacgttctcttctgtgttatgtggatttccttaaaacagggctagttttcaactattttgtggtctctgttttaacagtggctttcaaaagtgccctcgaattcattgactcaggattgataagtagacctgctcgtcatagagttgcacaaggccaactcggccaaaagaaaggacatcaagtgccaccaccggtagagaagacggctgcatcgacgagcgcgccgcgtgacatgatggctttctcaagaaatataaaggccggaaggagaatttgagtgtccacctaaattctatgaatttagtagatgccttattttgttttttttgtctggtgatcgatatttagctatgaggggttgaatagggacgtagagagtaaccttttttttgtttaaagtgcggtccgggcctgccacccgttcgaatattatgggaatcaggaagtaagtaaatattggactgccaactgcttccgaaacttttacgtccattcttgaaattgaattacattctaataataataatttatgtgt

SEQ ID NO: 122094 - DNA, 309 bp, Zea mays
  Clone ID: MRT4577_42834C.1
tcgagcggccgcccgggcaggtgtggcattgaaattgggctcacagtcactgaaccagtttgatattttgtagtcatatacagctgggagcaacagaagttaggtgtcgatcatcatcatcccatttggttcctgttacaagggatcacattggaaggtcatcacatgattgacattgtctgtaagttggtacaatccgtttgcatgtaaaactcagctgcggagtgtggtgttctctttggatgaaataaaaagaaagagcattacgaaagcaaaaaaaaaaaaaaaaaaaaaaaaaaaaaaaagctt

SEQ ID NO: 122095 - DNA, 306 bp, Zea mays
  Clone ID: MRT4577_42835C.1
ggcggggaccggcgatagcgccatagaggggggagaagagcgttaccatagagctcatctcatcgtatgcgcactatcagggtaggacgaggactcgtaaaaacgaattgtcgatcaaatcaatagaaggaaggatcccttacctgacttgaatttcatgcgggggggagagtatttttttctctaagcctacccatacttgcctataatgactgcgacgattttctccattttgcgcattcctattctattggggcgggtgtggctatgatgtacatgatgtaagtggatgcgctgggggggggg

SEQ ID NO: 122096 - DNA, 393 bp, Zea mays
  Clone ID: MRT4577_42836C.1
gggaagggaagacctggtccttggccccaggttcccccaatggtttccccccgggccccaatttgggcgaaattcccgccctgggaaaatcccttgggggaaaacaaacgggtttttcccttgcccccggggttggggttagacccaacccaaagcgggcgggctccaaaactgggcttgtttcccccctcgggggggggacttgcttaaaaacggggggcattttttacttgggcattataaccttcacaaactcctcgtagttgatttggccctcaccgcccacgtggggtttacgggtcattttgtccacctcctcgtccggcagctttttccctagggggggcatgacatggggaaactcaacagcgggaatgaaacccttctggtcct

SEQ ID NO: 122097 - DNA, 390 bp, Zea mays
  unsure (1)..(390): unsure at all n locations
  Clone ID: MRT4577_42837C.1
cgtactatttttgacctctaaacggcacgcccgggggggggggggttttagaaaatttttttggtttttttttttttttttttttttttttttttttttcagcccaaaagatgacgggccctgggatattgatattaaaggcaaaaattaagtcagttccaaaattacacttattatcgggggccagccgggggttactttctttttccccaaccgggaaaccagaggggaaccgacacaaccccaaagaaccaaaacccaaaaagggggaaaacccaaaaccaaacaaaggcagccaaaccgcaaaagaaggancacgccacagcagcacccaaaggcccaaaacccacaaagggacccaaaaaaaaaaaaaaccccccgcccaagggc

SEQ ID NO: 122098 - DNA, 287 bp, Zea mays
  Clone ID: MRT4577_42838C.1
attggaaaagtcgtaatacaatgccaaagcgaaacttggtagaaattggtcgagttgccttaatcaactacggccccaatgctggcaaatcatgtgtcatcttagatgtccttgatcaatcacgagccttggttgatggtcctcaacaaaagactggtgttgcccgacaaaccatccccttccgacaattatcattaacaaaagtcaagctcgatattgctcgatccatcggtgtttccagcttagtcaaggcttatgatacccaaaagattggcgaactctctcca

SEQ ID NO: 122099 - DNA, 262 bp, Zea mays
  Clone ID: MRT4577_42839C.1
aagtaggtggccggaccgtggtggcatcgcgaattcaactccgcatctgaattggcattcggcagcgcgccaactgcataggacgagatggcgctcataacaatcggtattgctagccatgcggtcatcgggcagaaccttgccgtcaacattcctcagtgtgggtgtctcagctgtatgtacaacaagataagctcacatgtggactagaccgtgctccgtgccaaggcagaacgaaaccttcccgtccatccacttccat

SEQ ID NO: 122100 - DNA, 535 bp, Zea mays
  Clone ID: MRT4577_4283C.1
cagtacaagaacagctcgtcggccggttgctccgctagctcagctcagtcgatcagctacgcctacctcggttcttgctcacaatagccgcctccatggttccacatcagcgagcctagcaagttgctgtacttctaccactagtccccggcctcaggactcaaggagagaggcgtccccaccgcggctgggcgtgggtagtgcaactgctgcgaatctgcaagtaccaccgcatgcagcagctgccgtcaggccaggctcacatgatcggatcgcccgtccgcgagatctgatccgtgtgtgtgtgtgtgtgtgtgtgtgtgtgtgtgtgtgtgtgtgtgtgtgtgtgtggagctgatcaggaattcggcggcagctagctggttggttggctgatcgatcgaggggacagaaaagaggatcgagatgatgctcgaggatttggcggacattcagcagcagcagcagctgcctcagctgcccctggccgtcgaccaagaacattgtcacatcttcacccccgcctccggccgac

SEQ ID NO: 122101 - DNA, 341 bp, Zea mays
  unsure (1)..(341): unsure at all n locations
  Clone ID: MRT4577_42840C.1
aactccgctctcgccgcaatggaggagccggcggcggcctctgccctggaggcgcgcggcgacctgcgctcggcgcttcccttcctccccgtcgtcctccgcggcggcgcactcttctggccgccggcggcgcaggagtcgctccgggcgctcgcgctcggccccgacgtcagccgcgacacctagagggacagcagcgccaacccgcgtagggagggacgnctacancccaaccaacaagaacccccaacacaaaacaaaaaaaccnagcacgaaacacaaacaaagaaccagagaaaacaaacagagnaccaagcagaaccaaaggacagaacaaccaa

SEQ ID NO: 122102 - DNA, 330 bp, Zea mays
  Clone ID: MRT4577_42841C.1
gagctctcaatacggcggccgcccttcctttttttttttttgtttttttttttttttttttctgttttaggcagactttaagcaccatgttaaaatggggccaaaagattcgccgccttttcccccccaggagcaagcggaaacaacccgggcctaaaaacagggttagtacagaaaaaccaaattttcaccgaacactcaggggcccctaccagggaacaaacaaacggccgaagcctttaaagcacaccttgaggtccacactggagcccccccccccaaatacccaagattgggtggggtcccagatttccgccgaagcccatgggg

SEQ ID NO: 122103 - DNA, 1990 bp, Zea mays
  Clone ID: MRT4577_42842C.1
gtacccttcgagggccggccggggattaaacaaaagcagttgtctcgataccaaaaccgcgtatctcaccccgcctccttttcttcgcgtcccccgcctcgatccgatcggggacgggtcgaggggcaggggaatgtcgtcgtcgtctgcgtcatcttcggcggcggcgcaccaccagcagcattaccggcggcagacaggagggagcggtctcgtgccgctcgccgcgctcatcaaggaggaggcccgcacggagcgccaatccatagccggcggcgaaagcaggatctccgcgcgcgacgatgacgcggcaggagtaggaagctccggcgtaggaggggaggcggcggaggcggcggtggagtcgcggctggagcgcccgctgctgcgctatgggtgcgccgctcagtgcaaaaagggcgaggacttctttttgctcagaacggactgtcttcgtcccgccatctccgtctcctcctcggcctccccgcaccccatcttcgccgtattcgctatacttgatggccataatggtaacgcagccgcaatatacacaagggacaatttgctcaaccatgtccttagtgctatgccacgggggctgtccagggaggagtggttgcacatgttgccccgagcactggttgcagggtttgttaagacggacaaggagttccagagcaaagggcaaacttctggcaccaccgctacatttgtgataattgatgggtggactatcactgttgcctctgttggtgattctcgctgtattttagatgctcagggtggggctgtttctttgcttactgtggatcacagactagaagaaaatgttgaggagagggagcgcgttacagcaagtggaggtgaagttggaagactcagtgttgttggtggagcagagattggtccgctacgatgctggcctggaggtctatgcttatcaagatccattggagatatcgatgttggcgaatttattgtccctgttccatatgtgaagcaagtgaagttgtcaaatgctggaggaagacttattattgcttcagatggcatttgggatgcattatcctcagaagccgctgctaagtcttgcagaggtttgcctgctgagcttgccgcaaagcaagttgttaaggaggcactcaggacaagagggctaaaggatgatacaacttgcattgttgttgacataatcccacctggtcaaacaatacggcctctgtctcctcctaaaaagacgagcaagctgaagtcttttatttttagaaagaaagcgaaggacccttctcagaagttgactaaacagcattcagctgttggtatcgttgaagagatatttgaagaaggttcagcgatgctatcagaaaggttaggtcctgatttggatggcaggagaacctcaagcctgtttacatgtgccatctgccagttagacctggagccaagtgaaggcatttcggtgcatgctggatcgatcttctcttcgacctccaggccatgggaaggcccattcctctgctcggactgccgtgagaagaaggatgccatggaaggcaaacggcccagtggcgtcaaggttctgtagtatacagcaaccgatccttgtagctgcccgaaaaatcccacccttcttatttccttttctcgtgaggaccctttcaaagttttacaatttgtttcctttaaattcggatgattttaggatgcgtcttattttgcgaggaaatagccaactatgtaagtagctgttggcaaaaggaaatgtgaagcgagcgaatagggcatcccttcatttttctttctctcttccattcggaatggatgaatagggttgccttcaatttttgttctcttccattcggaatggacagacagtaactcagctcacgagtaatgacagctaacatattctttatttgtaactatcggtgcattgggcaatggctcgtgtactgcgtaaaaaaaaaaaaaaaaaactcgagcccgg

SEQ ID NO: 122104 - DNA, 346 bp, Zea mays
  Clone ID: MRT4577_42843C.1
agcaggggtaacaacgcagagtacttttttttttttttttttttttttttttggcggttttttttttttgcctttatattaacctattcatggactggttcatcactgttgaaagtccccgtcctgttccgcacacgcccgaggatctatgtggtcccatcggctgcgtgtgcgtgggggggtgtccccgccccacttgcagagggggagcacgttcgcccgcgtggggaactggccgccactggggaggccgtggctgctgtgggtgcggccggggcccacaccgtgccttctgccattgggggggcgggcggggggcgcgccgccgcccccctcgcccccggcc

SEQ ID NO: 122105 - DNA, 520 bp, Zea mays
  unsure (1)..(520): unsure at all n locations
  Clone ID: MRT4577_42844C.1
gcacgaggcccacgccatcagatcggaggagttggtaaacgaaggacgtccaaactgtcatgcagatcgccgaccctcgcagtcgcgtctcgcgtgaccgccggagccacctgtgccttgcgtggcaaccgctagagggcctcgctgctgtgcgcgcatggggagccaccgccgccacacgagcctctggttcacgcctcaggtaaccgccaccgaccagtgagggggcgtcggcgctcacgccaccggggtcgtcgtcgtcgctcgtgcctcaaggaaccattatcactcgcgcgagcgcttcgtcactcgtgcatcgggataggggcgtcaaaaaataaagcctatcgacctaggacatcttttatagacgacgagatctggtgcggttgaaccggatgacctggtctggtttgggcttcctctagttattaaaaacacagttctttaaatatataaactaatagngtatatataaagattggnggggccaaaaaaaaaaaaaaaaaaaaaaaaaaaa

SEQ ID NO: 122106 - DNA, 231 bp, Zea mays
  unsure (1)..(231): unsure at all n locations
  Clone ID: MRT4577_42845C.1
gtatccccncccncgtntngnncccccnctcgcgtcncagaaggggggggggccgccgccgctgctcgcccgggggctgggcgtcgtccgaatactcccccgcgaacggcggcatggggngtatgcgcagtcgcgggaagggtatctcgtcccccgcgctgccggagaagaggacgcctcctacctgcatgaagatctccgtttccgccccgggggagatgacccccccgg

SEQ ID NO: 122107 - DNA, 250 bp, Zea mays
  Clone ID: MRT4577_42846C.1
gtccagggttcaagggacccttcggacaaccatccggcaaaaccccaagggccgggggaactcccctgggctcaatcggctcctcctccaagaatggctcaacaacgggtgccaagcctccaatcccctggaagaatccgccgccggggaagttccaaaaaaaggattctccggcaacgggttcaacctggtccgggtcaaaaacaaccaaatccgcaaattcaacgttaaaggcaagttcccccggaaa

SEQ ID NO: 122108 - DNA, 284 bp, Zea mays
  Clone ID: MRT4577_42847C.1
ctcaatttgactaacaaaacatagaacatgtgtgcaagagtaaaacttttttgttttttttaagatcttttgaataggtacaagctgctggtactttattccccataataaactgctcaatcattggaaccctttttcaacctgtaatgcaacattaaccggtttaatttaccaaagggaacaattaaattttaacaagtgaagtttttgaaaagtaaaagccatgattaaaagggccatgggtctggacaagtagaatgcatggtgaatgtcagtttgtttca

SEQ ID NO: 122109 - DNA, 253 bp, Zea mays
  Clone ID: MRT4577_42848C.1
cttgggacacatgcttatatatttcagcaacttctagaggaaaaagcaagcacaccatctttgtgttcaaaatgtgtcattcaacaagaacaatatccagttgtcaaagataaggagatagtcagcagtttatgtaagactgtgggggagcaaagctaccacccttctgaggaaaatatgacatttggtcgacaccaacttttgaaggatgatttgaagaaagcagctataagtgcaagtgatatatcagaat

SEQ ID NO: 122110 - DNA, 320 bp, Zea mays
  Clone ID: MRT4577_42849C.1
acatgatggcccgcaacaggtgatctctttggatcaatagcgttggcaccagctccctagctctcgtgacagggcttggcaaaacacaggaccactcagctgaacactcctatcatttatcttcttcaatgcatgggcacactgttcgacaattctgtgatagagggatcacacaaacaccctgtgactttattcacaactgtctgcacttggccaacactattgcatgcaattaccggattatggtcggccatggtttcaagaggtacaacacctaattgttcatgctttggagtgtattcaaatccaaaggcatttgg

SEQ ID NO: 122111 - DNA, 1321 bp, Zea mays
  Clone ID: MRT4577_4284C.1
cattgggaccctcgaggccggccgggatcctgaaacgccaatccgataaaaagcgcgcaccggcgtggcgcgcttcgcccccaggagccccgatcatctcccgctcccttccttcctcctcatcctcctcatggctctgtcgtccgccggctcgttcgtggcctgcagcctccggccaagcggagctagcatccatgccccgaggtcgacgccgcacctgaagccgggtgctgcggcggcgtcgttcacgaggacgccgcagcgccgggcgaacgcgaccaagggcggcgtgtccaccgtgtgcgagccgctgggccccgacaggccgatctggttccccggcagctcccctccgccgtggctggacggaagccttccaggagactttggatttgaccctctcggactaggttcggagccggagctgctgcggtggttcgcgcaggcggagctgatgcacgggcggtgggcgatgctggcggcggcgggcatccttatcccggacctgctggcgcggtggggcttcatcgacgcggggttctcgtggttcgacgccgggtcccgcgagtacttcgcggacccctggacgctgttcgtgtcgcagatggcgctgatggggtgggcggaggggcggcggtgggcggactacctgaggcccgggtgcgtggacatcgagccgcgcttcccgaaccgcaagaacccggtgcccgacgtggggtaccccggcgggctgtggttcgactgggccaactggggccgcgggtccccggagcccgtgatggtgctgcgcaccaaggagatcaagaacgggcggctcgccatgctcgccttcgtcggcttctggttccaggccgtgtacacgggccagggccccatcgacaacctgctcgcgcacctcgccgaccccggccactgcaacatcttctcggcgttcacgtcccactgatccgatgttgcttcggagctggcggagagactgcgaagaattaaaaaaaagggcatcctgttgagggagaaagaacttcgcttggtcggtatcattttggccctgctggacatgtcaacattttgtttgtagtacctgcgtagaaatgtcaaaccacctgtacaaacgtacaaataccaccccagggatcgcgatgatgctagccagcagtccagcacacactagcttgtcctgaagatccatgcaacaccgtatacgagacaattgtatttttgggactacaaacagtgtgctttgcaataatgtcattccaaacaattagctcacagaaatggaaaaataaagatcttataattgattaagatgccatttagt

SEQ ID NO: 122112 - DNA, 637 bp, Zea mays
  Clone ID: MRT4577_42850C.1
ccgaaaaaaaaaaaaaaaagtagaaatggtgagcacgaactgccgcgatagatcgattattccagggtggttgtcgctcggtgatcctgacgtagatcctgcggtttgccttggtcggatcgtctgatcgttcggtgattgtgtggttttttttatgtcgcaggcgctgccgaatcagcagggcgtggattaccccagcttcaagctcgtcatcgttggcgacggtggaactggtgattctctctggccttccatatgcctcgaatgttgttgttattattattattattcgtatccggatgttgggagatacagtttctggtgcccgcgccacgtttattgccgtgatttcttagagatctggcggactgggtactgatccgtggttgaggcagcagatattttgcccggtgggattgtgggaaggcatatggatatgggattggtagggggggcgtggttggttttgtgggcactggattctacacggagggccgttagctattcgtgtgctgatttgggggtttttagccatctttgaaacgcagtaataggaaaacataggaataaaatgctctaacatcttgaatcctatggattgagaaagcacataaaactgccagagcaagtttaaacg

SEQ ID NO: 122113 - DNA, 1164 bp, Zea mays
  Clone ID: MRT4577_42851C.1
cattgggaccctcgaggccggccgggactgtcagtgccagaacgaaaaaaggacaaaccccaggcgtgccccgtattttctcccttccccactctaaggcgcgatggcccctagatcggatcacgccggcggcagcgccgccgctccggtggccacgcaggcccacttcgactccatggatcccctcttccacgtcctccgcgtgctaccattctccttccttcggccgccgcgcacccgcctgaggctgccgtcgaacctggcgcttccctcacccatgaccgtcttctccctcatcctactcacctacttcgcggtcgtctccggcctcgtctacgacgtcatcgttgagccccccggcatcggcagcgcccaggaccccggcaccggcgccgtccgcccagtcgtcttcctcccagggcgcgtcaacggccagtacatcatcgaggggctctcctccgggttcatgttcgtccttggcggcgttggcatcatcctcctcgaccttgcggtcgaccgcaccaggccccggagcctccgcgcctcgtttggaagcgccggcgcagtcgccgttctcatcgcctacgccatggccatgctcttcctccgcatcaagatccccggctacctttggtgaggctgataaaatcttgcctgttaactagaccagatccgttgcaagatctcgctacatctaaaattctaatagatctgcgtgctgtggagcgtggactagcttactcctcttttagttatgtcaattaatgttacatcgcaccatgttgtataatatctactcagagttgctaggtgaggatatcattatgcaacggtagtagacaaagttcttagtattgagtttcatggcgtgtgtggaatcacactatttatatcaacatggtgtagttgattatatcaatataatttgtcattttgtactccatccgttcttttttatttctcgtgttttagttcaaaaatgaactagcgggcgacaaatatttgagaacggaggtagtattaagtaacattccctgtatctccattggccattggattttcttggacatattggtgtgattgaaagaatgacagcatgtagttccagattgtctgaacgtgagatgtattttgttgatacatagattttatatctgtttgccc

SEQ ID NO: 122114 - DNA, 1067 bp, Zea mays
  Clone ID: MRT4577_42852C.1
atcatacgagccggccgggaaacccaatttatccaaacccatttccctcgctcccatcccgtcccgccccatgtctcttccgcttccgcccgaccccgcgcgccgcggaccagcagccatgtcgctgctcctccgggggagggagggggacccccagggaccccctggaggccggccgggaaaaagcccaaaccccaggcgtcgctctgtatttttctctcctcactcaacgcggcgatgccccctagatcggatcacgccgccggcagcggcgccgcggcggcggccacgcaggcccacttcgactccatcgatccactcttccatgtgctccgcgtgctacccttctccttcctcctgccgccgcgcacccgcctgaggctgccgtcgaacctggcgcttccctctcccatgaccgtcttctccctcatcctgctcacctactttgcggtcgtctccggactcgtgtacgacgtcatcgttgagccccctggcatcggcagcgcccaggaccccggcactggcgccgtccgccccgtcgtcttccttccagggcgcgtcaacggccagtacatcatcgagggactctcctccgggttcatgttcctccttggcggcattggcatcatcctcctcgacctcgccgtcgaccgcacgaggccccggagcctccgcgtctcgtttggaagcgccggcgcagtcgccgttgtcatcgcctacgccatggccatgctcttcctccgcatcaagatccccggctacctctggtgaggttgataaatcttgcctgttaactagaccagatccgtcgcgagatctcgctgcatctaaatagacctgcgtgctgtgcagtgtggactgtgctctttcaattttgtcaattaatgttccatcacacaatttgtatggtatcaactcggaactactgggtgaggattatcattttgcaatgataccaaacaaggctttacttggtattgagtttcagggattgcatggaatcccactatttatgttaacaaaaaaaaaaaaaaaaaagcggcctaaaaaaaaaaaaaaaaaaaaaa

SEQ ID NO: 122115 - DNA, 339 bp, Zea mays
  unsure (1)..(339): unsure at all n locations
  Clone ID: MRT4577_42853C.1
tcgcgatctagcggacgcgagggtttttttttttttggttttttttggttttttttttttttttttttttttannaaaagcatgtgtgggtttcattggtggtccataaaaaaaattaagggtaatcccctcaccgtttcaacgaagggcctnctttatctcgtggccacaaaaagttcccgggggcagggggaaaaaaaatattttcacacgccacccccacccggggcccgggggaaaaaaaaaaagggcccccggggccacaaaaaaagcgccctcaccaaaaattttttatgggcagcatccttcgtcaccagccagaaagaacatttcttcttg

SEQ ID NO: 122116 - DNA, 333 bp, Zea mays
  Clone ID: MRT4577_42854C.1
gtgtactccctggactacgctagaacaaggttggctaatgacgcggaggctgccaagggaggaggtgaaaggcagttcaatgggcttgtcgatgtctaccgcaagacactcaagtctgatggtattgctgctgggattacaaaaaaaaaaaaaaaaaaaaaaaaaaacaaaaaaaaaaaaaaaaaaaaaaaaaaaaaataccaaaagcaaaatacaatacaaaaaaccactgtactgtaacatcaactacgcaactcaccaagcacaaatttgcgtgctcaactactccagtttgaaaaatcccaacaagaatgatatcggcgccttatatga

SEQ ID NO: 122117 - DNA, 114 bp, Zea mays
  Clone ID: MRT4577_42855C.1
tcgacccacgcagtggcgtagtccgttaggccatccctagccttatcccgattcttagctgtgcagctgatggtaggcagactgagaccaggcgcgaagatactactggcgttc

SEQ ID NO: 122118 - DNA, 336 bp, Zea mays
  Clone ID: MRT4577_42856C.1
gaagatcgtcagatgttccgtgagtgttgtatgcgatacgtcgttgattcatcaaagtgttggtagtgccatgtgaaatgcacgtgaagcgttgaacatttagggtctgtctcgtcaaccgtagattcctggaaatatagattttagctgtgagctgtgagaaagctactgtgtgagctgacgttcgtgcgaaaactgaacattgattggtccaaacaattgacaactatcgattctataaaatcatgccatgatgacaacttgacaggagggacactgacctgtcctcttaaataagcccattcgacaatgggtaatcaccgtcgacggggctgt

SEQ ID NO: 122119 - DNA, 1639 bp, Zea mays
  Clone ID: MRT4577_42857C.1
aggccggccgggccgggatcgccggctcggccgggaccaccggcgcctcgtctcttcccgtctccccagtccccactctcgtccccgctccctccaaagtccaaaccctaccaccccacttccccaccaccactacatggcggcggcgctcgcctcctcccgctactgctggagccgcccgtcgctgccgccccaaccgacccgcggccgccgctccgtcactagctgcgcgctctccggacgagagaaaagaaactcctttagctggagagagtgtgcaatttctgttgcattgtcagttggactaatcactggtgcaccaacgtttggaccaccggcctatgcttcttctcttgaacctgttcttccagatgtgtctgttcttatctctggacctcccattaaagatccaggtgctttattgagatatgctttaccaatagataataaagctattcgtgaagttcaaaagccgctggaggatatcactgacagcctcaaggttgctggtgttagagccttggattcagttgaaagaaatgtcagacaagcatcgaaagcactgaacaatgggagaagcttaattcttgctggccttgctgaaccaaaaagagcaaatggagaagagttgttgaataagttggctgttggatttgaggagcttcaaagaattgtggaagacagaaatagggatgcagtagctccaaagcagaaagagcttctccagtatgttggaactgtagaagaagacatggtcgatggctttccctttgaaataccagaagagtacagcaacatgcctcttctcaaaggaagagctactgtggatatgaaggttaagattaaggacaatcccaacatggaagactgtgtatttaggatagttctggatggatataatgctcctgtgactgctgggaacttcgtagatcttgtcaaacggaaattctatgatggcatggaaatccaaagagctgatggctttgttgttcaaactggagatccagaggggccagctgagggctttatcgatcccagcaccggcaaaatccgtacggtacctcttgaaattatggttgatggtgataaggcgcctgtatatggtgaaacacttgaagaacttggtcgctacaaggctcaaacaaaactccctttcaacgcttttggaacaatggctatggcaagagaagaatttgatgacaattctgcttctagccaagtattttggctcttgaaagagagtgagctaacaccaagcaatgccaatatattggacgggcggtacgcagtatttggatatgtaactgagaatgaggactacttggcggacgtcaaagttggagatgtcatcgaatcaatccaagtcgtctcaggcttggacaaccttgtcaacccaagctacaagattgtaggataacgtgttttgtatcagagtttcttgtccgtgggtctctgtcctcaagtcgatgtaaagtgctatatagtatcttactcccatatccttctcgctcgttaacgaggatttgtgtcacgcggaattcgatagtaattgaaagtacagagtcattgattggttaaaaaataaaaaaaaaaaaaggcggccaaaaaaagaagggcggccgcatcagagaggatacaa

SEQ ID NO: 122120 - DNA, 383 bp, Zea mays
  Clone ID: MRT4577_42858C.1
cctgttcaatatcaagccaaacaattgctctggccctctagaagccgggtgacccagcaacgactccactgcctatccaccacccttacgttagacttttcaaatgctcttacaaacttactgggtggcaaaacgaaaatgacgatgctcaaaggtatcgccaatgactcctaccattaaacccctccgggcatgcaaacataggcgtcacacctttgcgccatcatcctcttgagacagttaaacctggccacattcccccttggggttatccttattaacgaattccccccctttattctaggccaccacatgaaccattaacccgaaaataccaacctcaacctccaggaaaaccacctctccctatagggcagtctttt

SEQ ID NO: 122121 - DNA, 270 bp, Zea mays
  Clone ID: MRT4577_42859C.1
cctttgtttttttttttgtgttttttatgtttttttagcatcaatagcgggtcgtaattcaagtatattcacaaccgaatagaaccgaaacaactgcttaatcgaatgcacaacatcatcttgactaattcgtatagctaatccatttaggcaccaactggaaaaaatcataaggtcactcgccaactccggggacgcctgcgatgtagaactagtctcgagccgaattccccgcttacatacgtcatgaatgccagagctaggtttttt

SEQ ID NO: 122122 - DNA, 571 bp, Zea mays
  Clone ID: MRT4577_4285C.1
aaaaaaaacaaagtttttttttcttaaaaatttggttaaaaaaaaaaaaaaaggggggggggcccccccctctgggggggggggttttaacgggggttctttttttaaaaaaaaaagaagggaatttggaaagtttttaaacaggggaaactttgtaaaaaagcggcaaaaaaaacccaagctgggttttgaaaaaaagggaaaagggtttttccttaaaaaaaaaaaaattttttaattcccaaggttttaacaaaacccggggggggcgaaagggtttaaccttaaatttcaaatttccttggaagggggaaaaggaaaaaaatttgggcccttgttcttccgcttttttaacaaaaatttcctggaccctttcaattttggccccggggaagggttcccgggtttttttgttaacccatttgaggttaaaaaaagaaacctttgaagctttgttaaccccctccccaaaagggggttttttgttttggcccttgaaaaaaaaaccctccggggggtaaaactccaaattggcctccaaatgggggcacctaaggtccgtttcccaaaa

SEQ ID NO: 122123 - DNA, 217 bp, Zea mays
  Clone ID: MRT4577_42860C.1
gcatggatggtgtatatatattatcatttgaatgaacatagacaaaaaaatggtctataaaaagctatattttgaaacataaaaaatatgtttttttaacatacaaaaagaaaaaaggcgaaagctttcaccatttcatgataaattaacgctaaactgctaacgaataaacaaatgtaggcttagatcatcagcaccaaaaaaatggaggtctttc

SEQ ID NO: 122124 - DNA, 179 bp, Zea mays
  Clone ID: MRT4577_42861C.1
aattctttctggctttgccggattctctgtttttaaaattcccaaatttggcttggaaataggacttttcattttccaaacatttattccgattttagggcaaacttgcagaaattttagaggacgcatcattgcacaaaaaatctgaaacttggtctgttttcttcttatgtgctgct

SEQ ID NO: 122125 - DNA, 329 bp, Zea mays
  Clone ID: MRT4577_42862C.1
agctcggaattcggctcgagggcacccaactacaaacacttttacttttaaaaacactaacagctactacgagggctgtcataccgtctagtagcacccgccccctcacatactgatcctgactgaccagcgccaccaagccacggcagaacaggctgtataccttgacgtgctaatatctatcagacctggaaacgcgccactccctgcagaaacccatgcgcttggtacaaaccactcattaactgaaaacatcacatgaagggaggatgcacactaaacatgcattcatgcatgccgtcctatattagagatggaaactcattgaa

SEQ ID NO: 122126 - DNA, 1902 bp, Zea mays
  Clone ID: MRT4577_42863C.1
ggaaaggtgggatgccttgtgttccggccggggaaatcctggggtcccctccctgtgctctactgctcttgcgccttgctagcttgcttgcttccctgctccctccctcctcctcctcgtcgcctcttctctggttcttcctggtgtttgccggagcgaggctaggcgcaaggggagggagctgcgctcagccagagctcatcggcgctacgcaagcgcgctgcctggtgtgctgcattgccgaactatcaggggaaaacactgaaataatggaaatcagcttattgcataatgaatctgatgcaggaagcaccagtttgctaccgctgccattgttgtcatatggtccaagatcaatggttccaatacaagtaccaccatcatcagactttgagagtatcctgtcaccagagccaatctacagtgatcttcagttgaaagagatgaactacaatgcagcagcaatggatgaaagcactgagttccttcacttgattcttagtggcaatgatgaaggatacaatagcacaactgaattacaagtttgggatgttgtggacttctatgtctcagaaaacttttctgctctccaatttgatagtttgatgggttttacaaatgaagttagtacttcctacaatgattgtatgaatttagttgacatggtagagcggcccgtggctcgtctgtctctagatgatacaccaaaactcagtaacagtgatgatgcggttctggcagacaatgtcacaatggaccctgatgaaacatccttataccttcagacaaaaccaacagattcagaaacagaaagtagttctgccgcaggagatgttgaaactgaatatctagatctaaagctactttctagatgtatgcctgatttaatggatgttgactcgcccaattgcttaccgaaaacaccagtgaaaaaaaagcatgtgactcttgtgcttgatttggacgagactcttgtacattcaacattggatcagtgcgacagtgctgattttaccctagaagttttcttcaatatgaaaaatcacacagtgtatgtgagaaaaaggccttacctgaaagtgtttcttgagaaggttgctcagatgtttgagcttgtcattttcacagctagtcagagaatctatgctgagcaacttatagataaacttgatcctgatggaaaatatatctcacggcgtatttatcgtgaatcttgtatattctctgacggttgctatacaaaggatctgacaatcttggggatcgacttggcgaaagttgcaatagttgacaatactccacaggttttccagttgcaagtggataacggcataccaattaagagctggtttgatgaccccgcagaccaggaattaatcgagttactcccgttcctggagagcctcgtggactcagatgacgtgaggccaataatttcgaaggccttccatgacaaacctgagtagaaatagtcctggagagctggagaggttcactggaattaatccagtgaacctctcgctgaagttagcttcgctccacacggtgcaggccattcttgggaagttaggtataggatcaagattcaccatttatgttatgttagctgttacaaatagcaagcataaactgcggtcgtcgatgaaaatggcttgtgtgtgtatgtcccttcggtgttccgtgtcacagatcattgtacagagacgaacaatagtgctgaataaagtgatctgagtgcaattttgctccaaaaaaaaaaaaaaaaaaaaaaaaaaaaacgaggagatttcggcgagctgctgaaaacgcggaactgttctgggttttgttcctgcgtgaaatcccagtgccgaaggaccatctctgtggttccatgactctaaactcgacagagatggtcgg

SEQ ID NO: 122127 - DNA, 259 bp, Zea mays
  Clone ID: MRT4577_42864C.1
cttggctagaagatcttctccaggaaaagaaatccattataggacatatatcgctgtgaagggatcatatatattcatgattcataccaagttcatacattacaggcagtgagggaggtctatgaagtcaagccagctcggaaatggcctgagacagagtctctgcatgaacaagatagctggcacatgccgcaatctggatatcaaaggactgcaagattcttttagaggtcgcaagagctgataatagagtatctgt

SEQ ID NO: 122128 - DNA, 142 bp, Zea mays
  Clone ID: MRT4577_42865C.1
aactcacaaaggggtgttatttaaagacaaaccaggggttacataaacccatagcccgaacacccaccgggcgttataacacaaagagagacactttacgggagagcgcgcgcgcttcagataaagacagaagtacacaact

SEQ ID NO: 122129 - DNA, 840 bp, Zea mays
  Clone ID: MRT4577_42866C.1
gggtacctcgaggccggccgggatcgagctgtcccctccctgtgctctactgctcttgcgccttgctagcttgcttgcttccctgctccctccctcctcctcctcgtcgcctcttctctggttcttcctggtgtttgccggagcgaggctaggcgcaaggggagggagctgcgctcagccagagctcatcggcgctacgcaagcgcgctgcctggaagagagaaatgtccatttacagttgagaattgacccatttgtggcttgtaaaggtagaactggaagcatatttattgtgtcaaagtggaaaagggaatgttctagttaatgtgttcaaatgatgtgtgctgcattgccgaactatcaggggaaaacactgaaataatggaaatcagcttattgcataatgaatctgatgcaggaagcaccagtttgctaccgctgccattgttgtcatatggtccaagatcaatggttccaatacaagtaccaccatcatcagactttgagagtatcctgtcaccagagccaatctacagtgatcttcagttgaaagagatgaactacaatgcagcagcaatggatgaaagcactgagttccttcacttgattcttagtggcaatgatgaaggatacaatagcacaactgaattacaagtttgggatgttgtggacttctatgtctcagaaaacttttctgctctccaatttgatagtttgatgggttttacaaatgaagttagtacttcctacatgattgtatgaatttagttgatatggtagagcggcccgtggctcgtctgtctctagatgatacaccaaaacccagtaacagtgatgatg

SEQ ID NO: 122130 - DNA, 947 bp, Zea mays
  Clone ID: MRT4577_42867C.1
ccggccggggagctgtccctgcctgtgttcttgcctcttgccgccttgctagcttgcttgcctccctgctccctcctcctccctcttcctcgtcgcttctctgattcttcctggcctttgccggagcaaggctaggcgcgaggagagggtgctgtgctcagccagaggtcatcggcgctacgcgagcgcactgcctgtttggccttttcctactggaactgcagtactttgaacatgctttttgcaaatacttgcactaaggatgaataaaatgttaagcaacgactgtttagggacacaggagcctcatacattttgcaagaccactgaaacactggaacattcacaccctcaagaggttatacacttgataaaacggtggcggggtcaacgctaataagtcatcaaaatgtgtgctgcactgccggagtatcaggggaaaacgctgaaatcatggaaatcaccttattgcatgatgaatctgatgcaggaagcaccagtttgctaccgccattgttgtcatatggtccaagatcaatggttccaatacaagtaccatcgtcatcagaccttgagagtatcctgtcaccagatccagtctgcagtgatcttcagttgaaagagataaactacaatgctgcagcaatggatgaaagcactgagctccttcacttgattcttggtggcaatgatgaaggatacaataccacaactgaattacaagtttgggatgttctggacttctatgtctcagaaaacttctcggctctccaatttgatagtttgatgggttttacaaatgaagttagtacttcctacaatgattgtatgaatttagttgacatggtagagtggcccgtggctcgtctgtctctagatgatacaccaaaactcagtaacagtgatgatgcggttctggcagacaatgtcacaacggaccctgatga

SEQ ID NO: 122131 - DNA, 741 bp, Zea mays
  unsure (1)..(741): unsure at all n locations
  Clone ID: MRT4577_42868C.1
gccggccgggctgcagtcactctcccccgtcacctcaaaaatctatccaaccccaccggtccaccaccgccagccacctctccctcgctctcactcaggtcccccgcaacacgacgagaggcagcaggaccggaaggcgccatggccaccacccgcgacgtctccgccgcctccgcggccgccatgttccacgtgtaccagcccatgccgatgccatccacggcggcggcccccgcgaaggcgggcaagaaggagggcggcaaggaccggcacagcaaggtgaacgggcgcgggcggcgcgtgcggatgccgatcgtgtgcgcggcgcgcgtgttccagctgacccgcgagctggggctcaagtcggacgggcagaccatcgagtggctgctccgccaggccgagccctccatcgtggccgccacgggctccggcaccaccccggccgtcttcgtctcctcctccgcgccgtccacgtcctcctcctcccactcccactcccactaccagcaccagcagcagcagcaggccaccgtcgtcgtcctgggcaagcgcccgcgcgaggaaggcggcgagnccgcggcggcgtccgtgccggcgttctgggcggcggcgccgcggacgacggcggcagcggacgccagctggggcttctcgccgctggaggnccagcaggcggcggcggggtacgtgcccatggcacaggcgcagcagcagcagcagcaacaccaccacctcaac

SEQ ID NO: 122132 - DNA, 389 bp, Zea mays
  Clone ID: MRT4577_42869C.1
ccttcttttttttttggtgggttttttttgttcttgggggtggcaacctagagcacattattatacgatgccctggcaggcttcatgcgttaatacttcagccccataagtttcggggtccacgaataaaatacaaaaacgcgacatgtgtggccggatatgcatgcacgaggaaaatccgaaaagccaacacagtcccacaactaatttggcctctctagatccttttgtggagtcttctccatattgagctgcacggcaggccgattggctgacttgtactacaagaacaagttgttctgtggggtcatgccaacgcaggccctcatgaagttctccagcatcgtcctctgttttgccagaggattcacacaccggggtgtccggcg

SEQ ID NO: 122133 - DNA, 213 bp, Zea mays
  Clone ID: MRT4577_4286C.1
cacacgccggtcaatacaaaaaggacgcgcgtgcaaaggatgccagcggacgcgggactactttatagtgcaccaggcaaaaagtgcctttggagcaaagactgggagggccggcacaaaagaacctgcctctataacgttggacaaaagaaataaggggacacaggtgccggactccaacacgaagggccaaaccaacggtagctataacgg

SEQ ID NO: 122134 - DNA, 249 bp, Zea mays
  Clone ID: MRT4577_42870C.1
tcgggaatgctccttacaggttccaggtttccagccaggcgccgcggcgccgcccagcttcatagctcctacctgagcggatgcgctgttgcactgctgcacttggtcttcacgtgcagctcctccctgtgcggctgtgctgctgcacgcttgcactacttcttcacgtgtcgccctccataacacaggcaggctagcaacaagcgccggacagcgacaagctggatggatgcgcacgcactgtccctg

SEQ ID NO: 122135 - DNA, 499 bp, Zea mays
  Clone ID: MRT4577_42871C.1
tcgtatcgagggcggggacaccaggttccatcttatccacagcggctactgctacttcatcagcggcgcgccgggacactgcgacgcggggcagcggatgaccttgcgcgccatggtgccgcagcagcaggacggcggcaacaatcccgccgccccggccagggcgcccgccgcgatgtcgccaggtggtgaggacgacgaaggcgggacgttcgagcctcccggcgctcgttcttccacgccagggtccgatgccgggtcgaggccgccgccgcacgtggcggcaggcgccgatgggaataagaccagcgccgctgggtctatgcacgacgcgtcatcgcccccgtcgcttcgtgggcatcgcgtacttggggatgctctggctgcgttgctgatggtcttgcccggctgagatgccatggtcgtgtatgcatatcgggcacgcatggaacaactaatatatatatattttatatgaaatagactttatatgcaacat

SEQ ID NO: 122136 - DNA, 136 bp, Zea mays
  Clone ID: MRT4577_42872C.1
ggtgggcgtcttcgtcgctctcgagcttgacgcgtccaaccagcacggagactggatgcagctcgaccggtaccaggagtacaagtacctgctttacatcgcgtcgctggcgctactctactagctggcgcatgcg

SEQ ID NO: 122137 - DNA, 1807 bp, Zea mays
  Clone ID: MRT4577_42873C.1
tcggccgggacaaccggacatcccaatcgaatcagatgagaagctggaggctgctctacgatctccttcggcgcctgctcaaacccaccgatactcccggccaaatccgcccggcatcacacctttccacaaaatccggccaggctgcggcgcaatccgctgccgccgacccaacccgcgcggtgtcgctcctggccgagcgggactggttcgctcggatcaactcagagttcgccgccccactccggcagctgggcccgcgcttcgtcgtccgcgcgctgcagcacgccgccggcgagccgctcctctgcgtgcgcctctacgtctgggcatcgaggttcggtcagcacttcgcgcgggaccggtccgtgcggcgcgcgctcggggacgccctgttgcggcgcgggcccgtggtgctctccgcggcactggtcgccgacgtacggagctgtggctgcgaggtctcggaggagctgctgtgcgcgctggtggagagctggggcaggctcgggctggcgcactacgcgcacgaggtgttcgtgcaagtgccgcgcctgggactgcggcccagcacggccatttacaatgctgtgatcgccgcatcggtgagggcaggcgcggtggacgccgcgtacctcaggttccagcagatgcctgcggacgggtgtcggccggactgcttcacgtacaataccctggtgcacggagtctgccgacgcgggatcgtcgacgaggcgctaaggctggtgaagcaaatggagcgggcagggatcaggccgaatgttgtcacatacaccatgttggtcgatgggttctgcaatgctagcagagttgaagaagctgtttgtgtgttggagaggatgaaggagaagggagtgtcagcaactgaggctacatacaggtctctggttcatggtgcatttcgttgccttgaaaaagaaagggcatacaggatgctgagtgagtggattgagagtgatcctactctgcattcaattgcatatcatactttgctgtattgcctctcgaagaatgatatggacaaagaggcagttgaacttgcgaagaagatgagcaaaaggggatatctccttggcagcacaacattcagcattgtgatcccttgcgctgtgaaagtcttggagtcaagtgatctgtgtgagttggtagatgatttcatcaagaaaggggggaatctgggatttgatatgtatattatgattattaaatcctttctgaggtgcaaggatatctcaaaggcaaataagtattttagtcagatggtttcagatgggcttttgtctagtgtggaatcttacaacattgtgatagattgctttgccaaggcaggtgaagtggaaagagcactggagaccatcaaagttatgcaagagtcaggtttctctcctaatcttgtgacttttaacacattgataaatggatatttgaaactaggcaatgtacatgatgcaaaagcatttcttaaaatggtcatggaacatggtttaatgccagatgtcattacttttacttcccttattgacgggctatgtcatacccatcagctggatgatgccttcaattgcttcagtgagatgtctgagtggggtgtcaggccgaatgtccagacgtacaatgttctaatacatggactttgttcagctgggcatgttagcaaggccattgaacttcttaataagatgaaaatggatggcattacacctgatgcatattccttcaatgcacctattttgagtttttgcaggatgagaaaaaaaaaaaaaaaaaagcggccttttaatgacat

SEQ ID NO: 122138 - DNA, 199 bp, Zea mays
  Clone ID: MRT4577_42874C.1
gagcctctgaggtgctgctcctcctcctcctcttgcttcttggttactggattgcagatcgatgttctacatccgttcgtgctcttgtccatagataaataagataaaatgtgcttaaatttgtgttctttcttctctcggaagagttgttgctgaaattatacttttgaagtgatcaatcacaagtcaatttgttctc

SEQ ID NO: 122139 - DNA, 379 bp, Zea mays
  Clone ID: MRT4577_42875C.1
caacgtaattttcacgttaagtagccaacgaaacaccgttaaaccaagaaggggcaaaggctattttcatagtttttgttaacctcgggcgggaccttctatagggcatttttttaatattctaaaagacccttaaaagaaagcaatgaaaatgaaaagaaaaagaaaaacaaagaaaaatggggggggcctttgcaagcctgcccttatttgtatacaacacgtgtgcagctatatgcatattcttcaacaaactcactgaagggaagtacttttccctttagctagccactggctcatgtttacctttgttcaagctttgtgcatgtttcccaagcaaacatacttgatctttaaatatttatccatcccatatttg

SEQ ID NO: 122140 - DNA, 455 bp, Zea mays
  Clone ID: MRT4577_42876C.1
ctcgaggccggccgggccgggattctatctatggcctatagctaactagctcggcccggcgatagaggccgccatggcgtccatcatcgtcatcgccgccgtgctcgtcctggacgtcctcgccttcgtgctcgccatcggcgccgagcgccggcggagctacgtgaactacgtgagcgtggacctcgctcgcctcggcgctggacgcggccccacgtagaggcgtctagttctggcgacggcgcagagagcgctgggaggataaataagcagggcgagtacatcaagacgtggaggcggcggtggttcgtgctgaagtaggagaggcttttctggctcaaggaccctgagtttttttgttttccccccccccccccaggaatccccaacggcacctaggttacagcccacgacgccaaaaaacaaaaaaaaccccacctcgcctgctagatctc

SEQ ID NO: 122141 - DNA, 504 bp, Zea mays
  Clone ID: MRT4577_42877C.1
ctgtatcgaaccacctaaaaaagaaagaagagaaactactatgagtggtggtactttaaacaagaactaagttaacgtgcaccagcatagcacaaggagccaatgtatttcaagaatgctaacttaattgattggcacgtgtttaatcaccaaaggctcagtgaaaagcctgaaaaggaagagctgaatcttatgcaagcaaaccaccaatatagataccatggatggttaacaagaagatcagtacgagcctttgtcagcaaaagagcaggaagagaaagaacagtaattaacaacacggtttagcatcatatacaacgagagacttgaacacattcattcgcacatgtaacaaatatgttggcaatgatataaaaagtatatccttttgatatgtagggttagatagaagacgaagttcagcgctttgctaaagttatcaatgagagatacactgaactgagggattatgatagaatgataaaaaaaaaaaaaaaggcaaaa

SEQ ID NO: 122142 - DNA, 550 bp, Zea mays
  Clone ID: MRT4577_42878C.1
cccaactataaaactaactccattaacataatggggaaaccaaaaggcgggggatccccaaactttggggacaatatttaaaaaaacccaaaccaaacagggttaataaggggggaggtagatgcataggatataaaaaactaccctgtctaactaaaactaactaaaaccgaaattaacgctaaaactgaagcttttatgtttaaatttcgtattaattacaagatccaactttaacgatctatggttttaaagttatctggggcttgcaggggggattgccataaaacgggggcccaccctgaggggagcggtacgggtgctaaatcccaacgggagcgggggaaccaccctccaagggacgacgttccgcgcgctcaccccgaagtaggggaatttcagcacgagccctactaatttggattaaggcatggcccacctccgtattaaacccgggggttaggttaactgggctggaaaaactaggattgccctcaccgaccggggaaacaatcaccccttctgggctgccaaaagggcggggggggta

SEQ ID NO: 122143 - DNA, 465 bp, Zea mays
  unsure (1)..(465): unsure at all n locations
  Clone ID: MRT4577_42879C.1
agcagtggtaacaacgcagagtacgcgggggttgtggttcttgtnaaaaaaaaaaaaaaaagaggaaaaaaaaaaaaaaaaaaaaaaaaaaaaaaaaaaaaaaaaaaaaaaaaaagaaaaaaaaaaaatntgggggggnaaaaagggttaagggggaagtntggaaagattaagggggatgttgggggatatagaataaatttaaaggggttaaagggtgntataaaaggggggggggaatttattgggagtggttttaaaattnagggagggggaaaaaaaaggggttaaaaaggtaaaangnttgggagaaaaaantnatttgggtaggtggggaaataggtatgaggggntgggggattggnttttagaaaaggagggaaggntgtatggaaaaggggggggnnttgtaaggggaaataaagngnggtggggggggggattaagnggagggggaggggtaga

SEQ ID NO: 122144 - DNA, 648 bp, Zea mays
  Clone ID: MRT4577_4287C.1
tgggacctcgagccggccgggacacggtacagaaccgggttcgtttctcgggtggtgcagcaaaccccattcctccgccggacgtcggagtggcccgcgatgtagaaggccgtggagctgtccctcccgccggcgccgccagaggaggcggatcttgaggaggatgtccagggacaccatctcggcccggacgagtcgctcctcgccagatctgcggactgcgacctcgtcgaggcgggagaggaggaagcgcgggagcgcgcgctggatctcgaggcactgcaggcgcacgcggaggaggaggtcatggcggatgatgaccatgcggctgccggcgccgccaataaggtcaactgtctccccgcagacgtgcgcaagttctgtacgtcaccgacccgggaggggcagaggcaggacagaggcttagacgtccgactgctcatctcacgacctagaggtacatgaacatgagatggaacagctacggacctatatctggaggtaggtgcgatagatgtgtctcaacgaggtcttccgggtcaagtgcaatctaggacgacgagcacattctatagcaacgaggtgtagtgcgctggatgtgcgactggtccagcattgtacagctacggctcgatgcagtcatgatca

SEQ ID NO: 122145 - DNA, 537 bp, Zea mays
  Clone ID: MRT4577_42880C.1
ccaccaccagcgccatcagcagggagaagatcgccggagccatgacaaggggcggggagagcgacatgaagtgcttctaccgacagtagaagacgcacgccgacactgatgccgccgctactaccaagcccactggtggcgtctccaagaaggcggcggagcaccaccacaagaaggacgagctcaacaccaacgtccacccaaacccagatcacggcgctggtaaccgccgtaggcggaggcggagcagcgagagagggcgggccagaagttcgacatggacacgcactacgggacatgcttcgacgtaaccctcgcccagaggcggcgccaggccgacgaacagccctgcctataggagggtctcgtctaggctactggcgagatggacattcctttcccgagtttttccgacatgctccatcagaggttagaactaggtctgtgacgaagatgcggtgtgagatgcatccgttctgctatccgctaccgtattttgtggcagcagtggcacccgtagtagtaccatctgtgcct

SEQ ID NO: 122146 - DNA, 302 bp, Zea mays
  Clone ID: MRT4577_42881C.1
atttcattgtctgttatgaaagttttttttttgtggctaacaacatttggaagatggtcaaaattctggctgggcaaaagaaatatttttgccacaaaaaaacaatccggccaaatgctaaacagctctatcccttattcatgaagaagggaaatatgtcatgggatgcatttgcctcacaggtgcgaacaatccataaaggatatattggagagcccatggaaatcacaccatgaagaggcgaattttatgcaaaccctgccgcctgtatatgtgaaaagacccacagaaactcagcaata

SEQ ID NO: 122147 - DNA, 1059 bp, Zea mays
  Clone ID: MRT4577_42882C.1
ggccgggacatccaaacactgtaacaacttgtgtagtacttaatccctcgcacctcatgaatcccaacttcaacagtgtgtggagcgctcccgagatcaatatgatgaactcactcatcactagtcacatcgccaacaacacctacacaaacaacaaccagcatgttgtggcaagtcgtagtgccattgtgaaccacaataactttgggatgccaacggaggtcgttccacccgtggacaacatggacatgatgcaaggctatctaatggatgatacggatgccatgaggcttgttcagggacaacaacatatgccaaatgttgttcctaatcaaaggaggcatgcagtgaagttttggactacagatgagcacaggaatttccttcgtggtctagaagtgtttggccgtggtaaatggaagaacatctccaagtacttcgtccccacaaggacaccagtgcagatctctagccatgcacagaagtatttccgcaggcaggagtgcaccacagagaaacaacgctttagcatcaacgatgttggcctctacgacacacagccatgggtgcggcagaacaactcttctagcagctgggaggcgctcaccttcactgctggccgtgcgtacaatagtacaaactactgtgcctttaacagcctcccgtatgccagcagccaggcaagtaacaaccaggtagctacatggattacagatcagcaggcaactgcaagttcttctatagctcctccagcgacggaggagagccagatatataaccgataatatatataatggtcatcagcagctgggagaggctttcttcatatataatcaataggtagatagatatggacaacgtccattgactagtttaatttctatctatatgttttgtatccaatgatgcatgtaaaacctagttggttgttaaaggtcattagtaccatactatatatgggctagaaacagtttcattgaaatttgcccctgagcaatacaatgaaattttaccaatgtgttatttatatattaatgtgtctaaaaaaaaaaaaaaaaa

SEQ ID NO: 122148 - DNA, 540 bp, Zea mays
  Clone ID: MRT4577_42883C.1
tgcgtggggaagttcgtgtgctgccgcgccaagaacgcgggatacgaggactacaagttcccggaccccatcccggagttcgccgagcaggagacgagcaagttcagggagcacatggcgtggcggctggagcagaagaaagaggactacttcggggaccatgtcgaggagatcgttgacgtctgcaccgaggcacgtacgcaattcctgaaattccaagcgcttagttgttggtttaattcctagtaatggcgagcgagtgctcttgcttttagtgtatggattgaatctagtcgggagttggaaccacaaagttcgcttgcacgaattagcattgaaacgaacgaatgtgtttggggaattagtgaggaccttttgaggaggtctcttggattaatcgtggaacgaggcgtgaaaagccagtgtatcgtctcttgaaggatgcaaagtgtttgtccgtgacaattcggaactgcttatacttttgtgctgtgtgtgtgtgtgtatatatatatatatatatatattgccagtttaggg

SEQ ID NO: 122149 - DNA, 839 bp, Zea mays
  unsure (1)..(839): unsure at all n locations
  Clone ID: MRT4577_42884C.1
atcccacncgctagcggtagcgtcctggggagtggtactactaccatcccattccataccgccaccagtggaagccgctgtaccgctaccacgccactcccccactcctcactaccactccgcggcggctccacgggctgcattgtggctctggtttgagcgagggagggagagctcgggaggagcgtgatctgaggaaggcggacgggaggggcgcgagatggccggaggtgggggagtaggcggcggcgggggacagaagcaggatgatctggcgccgcaccccgtgaaggaccagctgcccggggtatcctactgcatcacgagtccaccaccgtggccggaggccattctccttggctttcagcattatctggtcatgctgggaactactgttatcatacctactgcacttgttccacaaatgggaggaaacaatgaggacaaggcagttgttatccagacattgctatttgtggccggaatcaacacccttctacagagtttctttggtacccgattgcctgcagtgattggtggatcttacacctttgttctacccaccatttcgatcatacttgcaggacgctacacgaacgaacctgatccacacactaaattcctcaaaatcatgcgtggaacacaaggtgctctgatcgttgcttctgcactacagatcatagttggcttcagtggcctttggcgtaatgttgccagatatctcagtccactatcagctgctcctttgatagcgctagttggctttggactgtatgagctgggttttccatcggttgctaaatggttgaaattggcctgcctggactgatcctcctggt

SEQ ID NO: 122150 - DNA, 1136 bp, Zea mays
  Clone ID: MRT4577_42885C.1
tccggaaaaatttgtcactttgtcagggcttcggggacagccaaagaagacggacggacccagtgaggcgagcacgggcgctcaccggcgatggcgacgagggcatgggtggccgcggcggtggccttgaaccctcaactgctgcctctccgctcctgctcgcccacgaagtcggtctccccagcgcagcgctcggcgtcgatggggctccggctgcgcagcggccggccgtgcctggggaagttcgtgtgccgccgcgccaagaacgcgggatacgaggactacaagttcccggaccccatcccggagttcgccgagcaggagacgagcaagttcagggagcacatggcgtggcggctggagcagaagaaagaggactacttcggggaccatgtcgaggagatcgttgacgtctgcaccgagatcatggggacattcctggagaacgattaccgtggaccagggacgctcctggttcacccgttcctggacatgaagggcgagatcaaggagagggggctccccggcgcacctcaggcggcacgggcggcgatagcatgggccgaaaagaacgtggacaaggactggaaggcctggactggggaatactagcactagaagaggtatcaataaagattttgccatttgaattggcatgagaagagagtaaaaactaaagaggatgtttctatgttttaccactgagcttgtatggtttagcactgtgttcctgctctattattctcagttagatcagaggttgcagcttgccagactggcatatacaaatcttgctaaaaaatgagcttagggcacgtacgcaattcctgaaattccaagcgcatagttgttggtttaattcctagtaatggcgagcgagtgctcttgcttttagtgtatggattgaatcgagtcgggagttggaaccccaaagttcgcttgcccgaattagcattgaaacgaacgaatgtgcaccagtagaagacattttgccccctacatagacagtgaagcttgcaaattgtatgatgctagactgctaggcatgtagattcaggcaactgttttgtaagctaatgccttaggctgactccaacggggagaagccattttggccatgcatttggttttttggg

SEQ ID NO: 122151 - DNA, 2444 bp, Zea mays
  unsure (1)..(2444): unsure at all n locations
  Clone ID: MRT4577_42886C.1
tttgcccctgacgcggctacgacgtcgctcctccggtcccttcgatccggtggggtccgtttctttcaagcgcggcctcgctggccgcctcgtggcagtgaccgtcgaaccctctataaatcccgtgccccgagcacccttcctcgatcacacaacccaaagcagccacagcagcctccttcctcctctcactctcgctcgcgctgcgctcgctacctcgcttcgcattccattcgaggagagcggtgagaggggaggaaaggcaagatgttcatcgagagcttccgcgtcgagagcccccacgtgcggtacggcccgacggagatcgagtcggagtaccggtacgacacgacggagctggtacacgagggcaaggacggcgcctcacgctgggtcgtccgccccaagtccgtcaagtacaacttccggaccagaaccgccgtccccaagctcggggtgatgcttgtggggtggggaggcaacaacgggtccacgctgacggctggggtcattgccaacagggaggggatctcatgggcgaccaaggacaaggtgcagcaagccaactactacggctccctcacccaggcctccaccatcagagtcggcagctacaacggggaggagatctatgcgccgttcaagagcctccttcccatggtgaacccagacgacattgtgttcggaggctgggacattagcaacatgaacctggccgactccatgaccagggccaaggtgctggatattgacctgcagaagcagctcaggccctacatggagtccatggtgccacttcccggtatctatgatccggacttcatcgcggctaaccagggctctcgcgccaacagtgtcatcaagggcaccaagaaagaacaggtggagcagatcatcaaggatatcagggagtttaagaagaagaacaaagtggacaagatagttgtgttgtggactgcaaacactgaaaggtatagcaatgtgtgcgctggtctcaacgacacgatggagaatctactggcatctgtggacaagaacgaggcggaggtatcaccatcaacactatatgccattgcctgtgtcatggagggggtgccgttcatcaatgggagcccccagaacacctttgtgcctgggctgattgatcttgctataaaaaacaactgcttgattggtggtgacgacttcaagagtggacagaccaagatgaaatctgtcttggtcgatttccttgttggtgctggaataaagcccacctcaatcgtgagctacaaccacttgggaaacaacgatggcatgaacctgtctgcccctcaaacattcaggtccaaggagatctccaagagcaacgtggtggatgacatggtctcgagcaatgccatcctctatgagcccggcgagcatcccgatcatgtcgttgtcatcaagtatgtgccgtacgtgggagacagcaagagggctatggacgagtacacctcagagatcttcatgggcggcaagaacaccatcgtgctgcacaacacctgtgaggactcgctcctcgccgcacctatcatccttgatctggtgctcttggctgagctcagcaccaggatccagctgaaagctgagggagaggacaaattccactccttccacccggtggccaccatcctgagctacctcaccaaggcacccctggttccccctggcacaccggtggtgaacgctctggccaagcagagggcgatgctggagaacatcatgagggcctgcgttgggctggccccagagaacaacatgatcctggagtacaagtgagccaagtggcgtgccctgcagcgcgaggttagctgctggaagggaactagaaaggcgagattagctgtgggattgtgttgggcttgtcgtgttttcttttgcgttctttcctagtcattgctgttgcgcttttgtatttgtcggacccgtaactaccagggctctgctattagcggcacggagcctgtaattgtattgtatgataatgtgatcgagggtgctacttcccctcggcattcctaaaaaaaaaaaaaaaaaaaaaaaaaaaaaaaaaaaaaaaaaaaaaaaaaaaaaaaaaaaaaaaaaaaaaaaaaaaaaaaaaaaaaaaaaaaaaaaaaaaaaaaaaaaaaaaaaaaaaaaaaaaaaaaaaacccccccaaaaaaaaaaaaaaaaaaaaaaaaaaaannnnccnnnncnaaacccccccaaaggggaaaaccccaaaaaaaccccaaacaggggggcccccggggcgccccaaaaaggggccccccccccccctaggggggggnaaaaaaaaaacgcggggccggngttataacccggggggggggggaaaaaccgggggcccccccaattatgggttttgagaaaaccccccttttttccgggtggggaaaaagaaaaaagccccccccaaaac

SEQ ID NO: 122152 - DNA, 1100 bp, Zea mays
  Clone ID: MRT4577_42887C.1
cccgggctttgtccggcctgcggggacagccaaagaagacggacggacccagtgaggcgagcacgggcgctcaccggcgatggcgacgagggcatgggtggccgcggcggtggccttgaaccctcaactgctgcctctccgctcctgctcgcccacgaagtcggtctccccagcgcagcgctcggcgtcgatggggctccggctgcgcagcggccggccgtgcctggggaagttcgtgtgccgccgcgccaagaacgcgggatacgaggactacaagttcccggaccccatcccggagttcgccgagcaggagacgagcaagttcagggagcacatggcgtggcggctggagcagaagaaagaggactacttcggggaccatgtcgaggagatcgttgacgtctgcaccgagcagatcttggggacattcctggagaacgattaccgtggaccagggacgctcctggttcacccgttcctggacatgaagggcgagatcaaggagagggggctccccggcgcacctcaggcggcacgggcggcgatagcatgggccgaaaagaacgtggacaaggactggaaggcctggactggggaatactagcactagaagaggtatcaataaagattttgcttctgttgtttgactgtgcacttgaggtggagagaactccagactggtcgttcccagcagctagctattgtggcacaaaattttgtccgcttcaaatgttgctctgtctgtcgtcatgcatttcacttgtatttacagctgagctaataactggactgctacagactgatgcagcagctgctgataggcaacgtccaaaaaaagagtagccagcacgaccatagcggcagtgagcctgtgctgctcggatgaggtgctgtcctcgcactcctcctcgcctaccccggccaaaaggaggaagaggtatcaataaagattttgccatttgaattggcatgagaagagagtaaaaactaaagaggatgtttctatgttttacctcctcctgctgctgggatgtactgtatggtttagcactgtgttcctgctctattattctcagttagatcagaggttgcagcttgcc

SEQ ID NO: 122153 - DNA, 329 bp, Zea mays
  Clone ID: MRT4577_42888C.1
attcggctcgaggactctctcggtctttgtcaccagaggcgacagcacaatcgcggacatttgtttcagagaagcacgcgctccaagcccaggtaactgctcacctgatgagggctgcgggggatcaggatgcgcatcagatggcttcgaccgccaaaacaggaagtttagcgacgattgcagggagcaaggtattagatccaacaccttggaatctgaggcccaggttctttatgccccctgacgaatctgatgaaatggctagataacgcaaatggccactcccgtgtttggatggtgcttcgtccccgtgacacaaggtccttaaa

SEQ ID NO: 122154 - DNA, 351 bp, Zea mays
  unsure (1)..(351): unsure at all n locations
  Clone ID: MRT4577_42889C.1
agcttgccgatacgacatctttctttgagccgtgaaacaacacaccttgggggagttggtggctgaaacccggatgctcacatacgactcgggggatcacacgggggcagcggggaacacgcctcaaaaccatctgcggggggtgaaacacgtnccagtgaagcggcgagctcaagggggcttgggtcctcaccacagagggagggcccccacaccggctgaacaagtggggagcccgggacttcggggacagaagccttcggcacctctcctctgggttacgaggccgggaattagggggctaaaccctgagctcccaatccaggagctattgagctgagcagcccttac

SEQ ID NO: 122155 - DNA, 374 bp, Zea mays
  Clone ID: MRT4577_4288C.1
gcgtcaaacaaccggcccctctcttttttggataaacaaaagcatatcccgtgaggggataaggacgtccttatgggggggggccaaacgggaaaaaactgcactgatacccgcaacacaccacactgttaaattggcctggagctttaattaccatctccgtggccttccaacacatacttaccctggaccttgtatttgcacatctttttttgggcgcagtcattgaaaatttcctcgccaccgaaaactgaaaaatagtctcctgggacaaagcccttgttgtgctggatggtgggctcaccggggaagaataccttcccacccggagccttaagcggtgggtattcgccagggttgaccccaactggccc

SEQ ID NO: 122156 - DNA, 429 bp, Zea mays
  Clone ID: MRT4577_42890C.1
aacaccaatctggagttttattccaacaggaaattgaacacattggtcgctacataggggggtccctcccggccctaaataaaaatccataccccccgggaaactaaactaggataaaaaaggttgcacacaccccgccaaaccattatttaccagcaacgttgatgtcccgggggaggggggggggccccacaaacgcgggggggccttggacaccatggggcttcgacccctgggccagggggtggaccaccattccagggaccccgccgccgcctttgccctggcggtggcggacgtacccgacgggccacgggggggcccagacccccgcaaccccgagggggcccgacgcggggggcccccacccgatgagcccctcggccagggcaaaggggtttagcaccgggctgaaaataacaggggggg

SEQ ID NO: 122157 - DNA, 350 bp, Zea mays
  Clone ID: MRT4577_42891C.1
tttttcccgtatattttcacaatcgaagctcatgggggaagtcgtttactcttgcggtggaacagtccaacttggtatggagcaggctatcgtatctgaacggctggtccagggaccaagggcatgtgagcttactggcagatctaccagaggtcgtttaaaggggggcagaagaggataagttttaggagacttgaccattgcagccatctggaaggagaatagagaattgcagaattgccggccaagactagtggtagcaacggcaagaggtggcgttagaataaaagaaggtctcacctaggggataacttcaccctgatgcaggctattgggtgataggctgattt

SEQ ID NO: 122158 - DNA, 362 bp, Zea mays
  Clone ID: MRT4577_42892C.1
ggataagggaaaagagaaagaacgtaatgaggagcatgaacggcgtcctggtggcgaacgagagagggaacaccatgacagagaaaaagaacaagtcagggagaaggacaaatctgaaaaagatagggaccatgataaagagaaggagaaagagaaagaaagagaaaggcagcaggcagagcgtattgataaggttaagcacgaggatgactctcttgctggtggaggtcgcactccaatggatgtaagtacaactgctcaggagatatctaacactgatgttactgttttggaaagacacagttcaaaagtttttgcttgtgcatggagcccatctggttctcttctagcttctgggtcag

SEQ ID NO: 122159 - DNA, 384 bp, Zea mays
  Clone ID: MRT4577_42893C.1
tcctctatagcgcgcgccctctctattttttttttaacatttgtttattttttttttttttcagctttctttgatgtcacaacttggccaacaacaaggagcaacaacgccggcgtcccggctggattttttaacaaagacatatttttttgggaagaaacaaaaggggttttttttctctacaaaaggcagggccaaaaaatttccacgacccagggggggcacaacctggactggtacatatttggcatataccatgttaaatggataaaatatgggcttgacggggaatggaaattataggcatcgtttgaactcaaaaatggcaaaccatgcatagtcctcctggatttaatgagtagctccctcttctccttggttgct

SEQ ID NO: 122160 - DNA, 409 bp, Zea mays
  Clone ID: MRT4577_42894C.1
tcaatgacgttttgttacataccaggataaaacaatacatcgaataaagatgaacgactatagtgaaatgtcaagggtaatatagaatctgtgtcaatgcatttctgttacatgacagtgtaaaacaatatatctcgaatacagatgagcggctatagatgtccctgaggtctagaccatgtcaaggaaatcagaattaccgtattgaattctgagcttcaatatgggccatccaccgaccagcatcgtaaggatgggcagcaacacagacaggacgcagatcgcaatggccagccaaggaagacgatcttccaggactgtgtacaaaccagtcgcaaacgctagggtggttgccatgtatgcgaaccacatgaacttcgtcgtgacggacctgtagtgcagcaagaac

SEQ ID NO: 122161 - DNA, 219 bp, Zea mays
  Clone ID: MRT4577_42895C.1
atggtggaactcgacggcggtgggctcccgcttttcgtctctggtggcggctggaagaagggggcaaaaaggggggagcacgaggagggatcgggtctgattttgaagaccgggcggtgcagaatcgtgggtcgcgaggacctcgcgcggctcaatagtcgtgctgttgaggatgaacgtgggaaagggactgacggcaagggcccacagccagagtaa

SEQ ID NO: 122162 - DNA, 216 bp, Zea mays
  Clone ID: MRT4577_42896C.1
agttaataagggggcaggttccataagatgagaagcgggagccgagtcttcctccaattgacgaatacctttcctgtgctgaacagagacgtaagtccttgcctggcagaacgagccagacattcaggtcccctgcccttaagttagcatgaggaatgtacctaccagtttacctttacatgttcatatatcacatatagtattaccgaatgtagt

SEQ ID NO: 122163 - DNA, 611 bp, Zea mays
  Clone ID: MRT4577_42897C.1
caactcgccctttcgaacggccgcccgggcaggtacaagcttttttttttttttttttttttttttaatacaaaggtacccgctgactaactacctacaactagaacactcgattaacggcgaagagtaaccgaacgccccccaccaccaggggcggcagccccagcaatgaccggggagaaccaacgaaacagaaaggaaaaagtaaagggaaaaaggacgtttggaaaaaaaaaaaaaggacggaacccccctcccggccagggccgaagacagcaaacacacagaaaggcggccgcccctgcccccatcgggaagaggcccccctccccccaggggggccacaaataacagaccggtgggcgataaaaaaaaaactggggggggaaaaaccctggccaaccaaaaaaaaaagcagcacaaacaaaatcccccttccggcgggttggccaaaaaaaaaaaacccagcgccggtccccccacacacccacccccgaagaaaaaaagaacaaacccccccccttgaaataaagcaccccccgcggggggggtgggggcaacgagaagggtacacttattagtggccaaccgaaaaccccctcctttttttt

SEQ ID NO: 122164 - DNA, 929 bp, Zea mays
  unsure (1)..(929): unsure at all n locations
  Clone ID: MRT4577_42898C.1
ccggccgggccgacggtgccattgacccccttagtatcaatcgctgcaatataaactcctacagtatagatccagatcacgccacgccgtcgggcaagaccagctcctctcgcctcccggcacttccgcttgccctcggtcaaggtcaaccaatcgccatggacgccgcgtcctcgtccgcggcgccgctgcgccttgtgatcttcccgtggctcgggttcggccacctgctcccgtacctggagctcgcggagcggctggcgctgcggggccaccgcgtgtccttcgtctccacgccgggcaacgtcgcccgcctcccgccgctgcgccccgccgccgcgccgcgcgtcgacatcgtggcgctcccgctcccgcgcgtcgacggcctccccgacggcgccgagtccaccaacagcgtcccccacgacaagttcgagctgctgttcaaggccttcgacggcctcgccgcgcccttcgcggagttcttgggcgggtgctgcgccgacgagggcaggaggcctgactgggtcatcctcgactccttccactactgggccgccaccgccgccgtcgagcacaaggtgccgtgcgtgatgttgctcccgagcgccgcgtgcctggccgtgggcagggaacggcagtcctcgagcggtaagccggccgctgcaccccgttacgagtcggagcagaacaaacagtattccgccaaggatggcgcatccggtgtgtccatcgccgagcgctacttcttgacacgcgagaggtgcacgatcatggccatacgaagcagccacgagtgggagccggagttcctgccgctggtggcgccgctcgtcggcaagccggttctgcccctcggactgcttccgncgtcacccgacggatgggcgtggcgccagcgccaacgcgaacggngagcacgccaccgt

SEQ ID NO: 122165 - DNA, 234 bp, Zea mays
  Clone ID: MRT4577_42899C.1
gtgtttaactttaagaagattgctgcctgggggttttatcgaaggttgctggagctacatcaaaaccaaccctgaggtgctgattgctggattcggacgtaagggccatgctgtgagagatatacccggcgtacgtatcaaggtcgtgaaagactatggtgtattcctccattcccttttcaaggtgaagaaagagaagccgacatcttaaaactctgtattggttttggagat

SEQ ID NO: 122166 - DNA, 197 bp, Zea mays
  Clone ID: MRT4577_4289C.1
tccaagccaacaagcaagaccgcttctgcttgagatccgaaacctttcttggaacgcaaaatgaactctacccgacgtaccgtgagccgttgatggtgacggtggtgatggtcatgtttaagttccactctgttagtgttcgtttgactaggttttttttgtttctttttgttattagtgtttttttttgttagggg

SEQ ID NO: 122167 - DNA, 306 bp, Zea mays
  Clone ID: MRT4577_428C.1
ttttatctcgccttcgccgcaatcgttacattgctgtcgtacataacctttgggatcaaggggaatctggcgaagaggatgcttctaaataccggccatcccctattggattcgcatgcgcactgtcaataccatgaggtgcaactcctagcgcaggtactggcgcctaactaggcttggtttattgagcgttggtatttgggcgccttttgttttcgaaggcttgggtctaaaagctattttatggtttataattgtctgttgttttgtaagctatcataggtattctgttagtgctttattaag

SEQ ID NO: 122168 - DNA, 1943 bp, Zea mays
  Clone ID: MRT4577_42900C.1
ggccgggccgggaattccacgccgtcgggcaagaccagctcctctcgcctcccggcacttccgcttgccctcggtcaaggtcaaccaatcgccaattcgccatggacgccgcgtcctcgtccgcggcgccgctgcgccttgtgatcttcccgtggctcgggttcggccacctgctcccgtacctggagctcgcggagcggctggcgctgcggggccaccgcgtgtccttcgtctccacgccgggcaacgtcgcccgcctcccgccgctgcgccccgccgccgcgccgcgcgtcgacatcgtggcgctcccgctcccgcgcgtcgacggcctccccgacggcgccgagtccaccaacagcgtcccccacgacaagttcgagctgctgttcaaggccttcgacggcctcgccgcgcccttcgcggagttcttgggcgggtgctgcgccgacgagggcaggaggcctgactgggtcgtcctcgactccttccactactgggccgccaccgccgccgtcgagcacaaggttcgtccgcagtccgcagttccgcacaccaaacgaaaactggttactagcgttgtttgttttttctgagaacatatcaatgcacatgaaattttagtgcacattaaatcatcaccactcattttagatttaatgtatgtagttgtttgatatatttgctaagaacactctccgacgtggtggatgtagtgatagaaagtgttatttgtaaattacaatgataaccagagacgttagatctaatatggataattgtgatttaatatatatgtgcaacatgtgtacaaagattagcttggcttgtcaccaggtgccatgcgcgatgctgctcccgagcgccgcgtgcctggccgtgggcagggaacggcagtcctcgagcggcaagccggccgctgcaccccgttacgagtcggagcagaacaaacagtattccgccaaggatggcgcatccggtgtgtccatcgccgagcgctacttcttgacacgcgagaggtgcacgatcatggccatacgaagcagccacgagtgggaaccggagttcctgccgctggtggcgccgctcgtcggcaagccggttctgcccctcggcctgcttccgccgtcacccgacggagggcgtggcgccagcgccaacgcgaacggggagcacgccaccgtacggtggctggacgcgcaaccaccgagctcggtgctgtacgtggcgctggggagcgaggtgccgctgcgcgcggagcaggtgcacgagctggcgctggggctggagctcgccgggacgggcttcctctgggctttgcggaaccctagcggcgtccccgacgcggacgtccttccggccgggttccaagaacgcacccgcggccgtgggctggtgaccacggggtgggttcctcagcccagcgtactggcgcacgccgccgtgggcgggttcttgacgcactgcggacggaactcgctcatcgaagggctcctgtacggccgccctctcgtcatgctgcccatcttcggggaccagggcccgaacgcgcgcctcatggagggaaagaaggtggggttgcaggtgcccagggatgagcacgacggctctttcgaccgccatggcgtggccggcgcggcccgggccgtcatgctagaggaggaaaccaggggtgtctttgtcgcaaatgctctcaaggtgcaagcgattgtagctgataaggaacttcaagacaggtacgtggatgaatttatacagcaactactaataagagggaggccatgccctgcctccagctgagactgccgtgcagggtttgtaactttcccacttaataaaacggctagcttccaaactctgttatccgaggcgaccatggattgggataatttgccacaataagaggccatgtataatgtattgttatatatttgtctggttcaaaa

SEQ ID NO: 122169 - DNA, 183 bp, Zea mays
  unsure (1)..(183): unsure at all n locations
  Clone ID: MRT4577_42901C.1
cncaataccagacgctcctcntcgtctganccgtnctaatcacagcagtccgacttntgccnattctccnagtnnnagctgctggcatcactatactantaacaganngnaacctcaanaccacnttcttcgaccccgccggaggaggagacnccattctatagcaanacctattctgntntt

SEQ ID NO: 122170 - DNA, 533 bp, Zea mays
  Clone ID: MRT4577_42902C.1
cataaaataagtattagggttgtttaatcaaggaaggaaatgcatcaactgtttgatcacacaactcctatcacttaatgcattattcaaggtgataaaactttttaaatcaaaaggaggtggcaaatgcagcggggctttcctggataactagattagtgttgttagatgatgtccgcttgacgaccatcttttgtcttgacattcatcagattattcatctttaggttcgtccgactgacgatgtcgtcttgcggagatgtccatacctagcaccatcttgaggtcaacttggctcgtctacctcatcacacgatcaattaacgtacctcatgggatgcacgatgcacatgtatgagcacgagtataaatagtacaagatagataatctaaactaaaaaggatgaaacacttataaccaagcatattttatacaatataccaattacaactttagaactaaaagacctaaagtgtttatacgcattacttatcaatcagatcctagattttggttgaaacaaatatatcga

SEQ ID NO: 122171 - DNA, 310 bp, Zea mays
  Clone ID: MRT4577_42903C.1
attgatctagctagctaccttgaatcttgatccgtccatacacttgttctttttcatggcgaattaattaaagaacttcggcacaaacatattctcatctccatgaatattcattggcaattctctggctttcttttccttctcttttgatatataacatctaacatgcttgtgtgcatatgtgtagcagcagcaaggtcagcagccgagggcgaatgggggagctgatgcaccgttgctgcccctgggtccggcggcagctacatcggcggctccggagcaaggtgggttgcctagaagctcatcaatg

SEQ ID NO: 122172 - DNA, 408 bp, Zea mays
  Clone ID: MRT4577_42904C.1
attcggctcgagggggtgggaagagactatttcattttcttgcacttcccgctgaaggtagttaagttgcttatccggtatgcgctgaggggcagggcatggaagctcactcttgagcccaggatcctttttacgagcaagacgaatttcggcgcgctaaaaagggagctcaagggggcgcatgccgagaggactcttcagtgcctccaggcgccagctgcatacattttcacgagcaagacgagattcaaagagctgaaccacctgacggaagaggcccgcaggagagccaacttggcgaggttgctagatgagaccaccctgaaggggaggatggattcagtggggaagcagatcgttttggacatccagaccatccagcaaaactacactgggtggctgactgac

SEQ ID NO: 122173 - DNA, 353 bp, Zea mays
  Clone ID: MRT4577_42905C.1
agaatgaatgatccttaaaattatccttctgcataagcgtaaaccggagtttttgggaataaagcttctaaagacgcatgcctatacaaatacagcatcactcatttgttgtgtatgctgtgtatacactataactagctttgcacgttattgattaataacacacacatattaaactaattctatttagctcaatgccttcacatgcccattcctcaagttcgcatcttttaaaggaagcaacgcatgttttaatattctgaatcaatctgggcgaatgtgctgaactcctaaccaatatgcataatccaaacctttattaactttgcgatccactcgccgataaaatctga

SEQ ID NO: 122174 - DNA, 176 bp, Zea mays
  Clone ID: MRT4577_42906C.1
cgcatcagtcactctctcgacttcggtcatccactctttaccaactactacacgctgtgcctcaaaaagccttcgcttttctaaatcgcctttttcaaatcacctgaacggttctatcttccatttcacccaccaacatttcaaaattcctttcaccgttgttaccggtgcccttt

SEQ ID NO: 122175 - DNA, 444 bp, Zea mays
  Clone ID: MRT4577_42907C.1
cccttgcactcctttcgctctgtgtcaatacaacagactgcaattgattgattgccacgaatgctcacctcgttgctaatgccattgttccacagttactagccatcagttgcatcaatgggctttgaacaccctatcgagcaagtcctatacgtctacaacaagcgctagcggcgagcgtgttacaacaaccggttgcccaattacaacaacaatccttggcacatgtaaccatacaaaccatcgcaacgcaacaacagcaacagtttgtgcccgcactgagccaactagccgcggagaaccctgcctcctacttgcaacaacaacttgttgcgtacaaccccctagctctggcatacactgctgcatacagcaacaactacagttgcaacagaagctgccagctcttatataactagccatagtgaaccctgccacatacct

SEQ ID NO: 122176 - DNA, 795 bp, Zea mays
  unsure (1)..(795): unsure at all n locations
  Clone ID: MRT4577_42908C.1
cattgggtacctcgaggccggccgggatcgtccactctcttttacacgccctaataattcaacagcataaccgacgaaatgggtgacgccaacatcacaacgagtgcctggaggctggtcgaggtcggccgcgtcgtcctcttcaacgagggtgtctacgagggccgtctcgccaccgttgtcgagatcattgaccacaagcgcgtccttgtcgatggtcccaccaaggaggcccccgtcccccgtcaggaggttgccctcgccaagctctccctcacccccatcgtcatccccaagctgccccgcgccaccggtgttggacacgttgcgaagaagtgggaggagcacaaggtccagcagaagttcgacgagagcgcctgggccaagaagcgcgctgcgatgcagaagaggaggcagttgaacgactttgagaggttcaaggtcatgaagctgaggaagcaggctcgctacgaggtccagaagaccttcgccaagatccgcgccagcgcaaaggcatagatggtcacgatgttgtcgggagacacggcgtagtggaggtcgctgcatgctggtgctgggggaagcatgatgtgcatcttctgagcatcacgaatgcgacctatggcattctaaaattcaagacctggatcgggtgcattatttcaatgattcgcaaggtgcaattcggatgggaaggttaaacacgctcttgcatgcatccacatgtagcanaagagtccaatcccacagttcatgaacccagaaaaaaaaaaaaaaaaagcggccctcgagctc

SEQ ID NO: 122177 - DNA, 112 bp, Zea mays
  Clone ID: MRT4577_42909C.1
cccgtccgagcttccgcccgacgtcgtctctgtagtgcccgtggtcctcatcttggtgaagcaatgcactgtgatgggaccttaaggcggttcagaaggcccgttaccaagt

SEQ ID NO: 122178 - DNA, 207 bp, Zea mays
  unsure (1)..(207): unsure at all n locations
  Clone ID: MRT4577_4290C.1
actcgnantccgngnagcctcctctctctgcccctccccctgttccccctctcctccccttcgtcggcacccaagtcttcggccaaatccgggggggctcgcctcttaatctatggtcctctaccatggatctagtcatccccccgcgggggccctatgatagcggcgctctccggctcctagcacggaggggcggcttgggggact

SEQ ID NO: 122179 - DNA, 477 bp, Zea mays
  Clone ID: MRT4577_42910C.1
ggccgcttttttttttttttttttgcgactttattttttattaggagcagaagcatcctttgacacatttattaactcatgaaaatggtgaagccaaacatagtgccaacgaaacagggcgcagactgacaccatgcgaagcgaggcacgtcccactagagcctgggctagccggcacgcagtgtattccaacgattgtacccggggacagtactacgaactgctcgcacgcgctctacgatccttacccgtccctcccaagcaaaactagcagtaccagccctgtagaccgggagcagccatgcctggtcctgtggctggagaagcttgggctccatctagcagaccttctgataggccagcctcttgctcatgacgctcccgaggatgagcacggcaggcctttgcctgcccactgcgaggatcagacacacgagcccctaaacggggagacatccctgacagcgcatgacgaac

SEQ ID NO: 122180 - DNA, 1541 bp, Zea mays
  Clone ID: MRT4577_42911C.1
gttactagctagcttatattgcatatctcctccccagctcctccgtcctcgctagctcgtcttcttcttcttcctctcatcttttgcttgtcctccattattccatcgatctcctattcctgtgccgaccgaggccgccatcgtcaaagagaaacacagagcgggtcggggactccctcgggggaggctgctagtgctagctagctcgaccatatacagtttgtgggcgcggccggccgggcaagctgctaaggtaccagcataccacccatccatggctttcctggtggagcggtgcggcgagatggtggtgtcgatggagagcccgcacgcgaagccggtgccggcgccgtttctgaccaagaagtaccagctggtggacgacccctgcaccgaccacatcgtgtcgtggggcgacgacgacaccaccttcgtcgtgtggcgcccgcccgagttcgcccgcgacctcctcccaaactacttcaagcacaacaacttctccagcttcgtcaggcagctcaacacctatggcttcaggaagctagtgggcggacaggtgggagttcgccaacgagttcttcaggaagggcgccaagcacctcctcgcagagatccaccggaggaagtcgtcgcagccgctgccgacgccgctgccgccgcaccagccctaccaccaccaccaccaccacctccaccaccacctcagcccgttctccccgccgccgctggcacagccggtgccgtcgtaccaccaccacttccaagaagagcccatcgccaccgccaccgcgccgcacggcggtgctcaagccgccgccggcggcggcaacaatgaaggcagcggcgccggcgccggcgccggcggggactttctggccgcgctgtcggaggacaaccggcagctgcggcggcgcaactcgctgctgctgtcggagctggcgcacatgaagaagctctacaacgacatcatctacttcctgcagaaccacgtggccccggtgacgagcccctcgtcggcggcgcacgcgtccctgcccagcgccggcggcggcggcgccgcggcgtcctcctgcaggctaatggagctggacccggcggactccccatccccgccgcggcggccggaggcggacgacggcacggacacggacacggtgaagctgttcggcgtggccctgcagggcaagaagaagaagcgggcgcaccaggaggatggggacgacggcaaccatgagcagggaagcagcgacgtctagccgccggccggcttgcattgctagctctctcgttcgtgtacatacagagatcagatcagagagtagtagtttgcctcgctagctagctaggctaggctttggtaattttcttctgagtgcgtactgaaattaatgtgcaagagcgaagtgtttgtctgagtaaaactaacaacaatctacggatgcgtgcatggaagctaagctatagatgcagaggcttgcaccaccttctcaattcgcaatcgcaacaagttcttcctcgccgcggatgggaatacggaatgg

SEQ ID NO: 122181 - DNA, 594 bp, Zea mays
  Clone ID: MRT4577_42912C.1
ccggccgggcacgcgcaccaacaaacaaaacaagcctaccataaaaagagaatctttcaaagatggcgtccaagaagatggtcctcgccgtggcggcactgctgctagtcacgctcgcactgcaggtcgcccctcctgcgatcgccatggactgcaaggccgggtgtgccgagatcaagaactccccactcggcataagcatcgaggagtgtctgaagaggtgcgaggggatcgccactgagcagggacctagggacccttacaaggataacaaacttgatatcccataaacacttatgacttgctgatatatttgtgcctatccaatcatttgtgatagatcaatgcatctttgtgttaaaaatggatagatcaatacatgtgtatatatgctccctccgttcttttttatttgtcatcgtttagttcagaaatgaactagcgtgcgacaaatattagagaacggaggtagtactatgcaagcctacccatgaaatctggttcccctattggcgtctaacagtttattttgtattccacgatataagaaatacaaagacatgcacgaaaaaaaaaaaaaaaaaagcggccgcc

SEQ ID NO: 122182 - DNA, 129 bp, Zea mays
  unsure (1)..(129): unsure at all n locations
  Clone ID: MRT4577_42913C.1
tgactaattaatctaattttgggcatcccaacggtttcgcacaaactggngcaactcactgttgnaacacccctaaataccaggggnatagagcctttanaactatcttagttatnnttcagtaaacct

SEQ ID NO: 122183 - DNA, 292 bp, Zea mays
  Clone ID: MRT4577_42914C.1
ttttcctcttttttctcttttcttttttttttttttttggggggaaacccaaacttttattgaattggtttgcaaaactcaaaccaggcgggttttgtaaaaagtttcccgctgacttcccttgggaaaccacttttgttcccccccgttttaaacaagattggaaccgctccatttaaggtttatatcccgtttgggcagagaccgggggccaccaagggcttttttaaggacctttaattttttttccccaaacccttttgggaaaaaagggagcccaaaggctttttgg

SEQ ID NO: 122184 - DNA, 269 bp, Zea mays
  unsure (1)..(269): unsure at all n locations
  Clone ID: MRT4577_42915C.1
acgccaccaagccggggcgcaccanaggcgacaccggccccaaccgggagcgggacgccacccagggcaagacccgcacccacgacaacgaccggcgacggcaacgcgaggagcggcacacacccagcgcgaccgcacgcgccgagcgcacgacggacagggcggagaaggcgaggcacgccgaggcgcccgagaagggcggcgagaagcagcggggcaacgcgcgcgacgacgaggacccccacaggcagggcaccaaggacgaggag

SEQ ID NO: 122185 - DNA, 292 bp, Zea mays
  Clone ID: MRT4577_42916C.1
ctgattctcaagatacaaaaggcttcagactttttggatctggtgtttctagtgatgtgcagaccagctatgctgcaagaatcatggcaatatctgtgcttccctttatcattgttcagataccccaaatttttaggctccattctggccatcgtttgacagtcctgcttgggcttattgctgcagctctacttgtgctcgcttattgcctgtatcaggtctttcagccatgggtccagagaaggaggttagaatatgcaggactaaagcacgtcatgtctggactctacga

SEQ ID NO: 122186 - DNA, 349 bp, Zea mays
  Clone ID: MRT4577_42917C.1
attcttcttgagcttgctttttcaacgaactttttttctcgatctcaccgacaccgaggaagaaggggtcaattttaaacgagcttggggttgtgatcgcgtgccacagcaaggctgagttcgactcccacatgaccaaggcccaggaagccggcaagctggtggtcatcgacttcactgccgcctggtgcggtccatgccgcgccatcgccccattgttcgtcgaacactccaagaagttcatttaggtcttttttctgaaggtggacgtggactaagtgaaggaagtcaccgtggcctacgaggtctaggctatgcctacctttcacttcgtcaagaacggcaagac

SEQ ID NO: 122187 - DNA, 393 bp, Zea mays
  unsure (1)..(393): unsure at all n locations
  Clone ID: MRT4577_42918C.1
ccgggnncgacccacgcggccggcgaatatttgggaggaacgaaacccgcaagagcacccncacaaaagnncncgnnggccaggcgcagnangaggnaacnggnggnaccanncncnncaagggngaggaccnggnngacanggagccagaggacagancncnagcaggccnnnncaagagnnnccaagcaccnanggagagggcgggagncagcaannncgannnncngcncaaggcngngaangcncgcagagaaaggagnggncnaccagcannggggccccnngaggggnacncagnngnancgcccaaaggggangccnngaaganggacccaaagnnccnngaacgcaangngaaagaagggggnagcggnggngaaaggaagccga

SEQ ID NO: 122188 - DNA, 173 bp, Zea mays
  unsure (1)..(173): unsure at all n locations
  Clone ID: MRT4577_42919C.1
gcgaattcggccttagctttgtggagaattaggtattggctaattctggagcactctatagggagagattggangatactggaggcctttactagtggatacgagctctataccaagttttgtttaatatagtnatagttgttttatgtgtnaaattgttatangattataat

SEQ ID NO: 122189 - DNA, 298 bp, Zea mays
  unsure (1)..(298): unsure at all n locations
  Clone ID: MRT4577_4291C.1
tgtacaagcagaacatgccagataggaggcgagcgaccagcagctggctaggtggctatttgaagagctactcaaaaaggtgcaaggtgatcttcactcttataaagatcagcaccgcgagatggtccagccagaggcacccctggtgcatcgcagctcctggtagatgacaggcttctgatgcagcccataacctggagaggtgagctacattagcaaccacatgacgagacatggcgagagcngcatgctgtgctcgaacaatattgggctgtcatggctaacatcgacagggtat

SEQ ID NO: 122190 - DNA, 489 bp, Zea mays
  Clone ID: MRT4577_42920C.1
actacaagacagcctggcggctcagagactctctctctctgtcaccgatcaccccgagtccgaggtatcgtcaattcgcccaaccccatggctcgccggtccagctcgtctggacctaccgccggtctcatcgtctctcacatacgcattccgccatcaccgccatacaagatcgccaacatcggcgtagggagctctactgcctcgagcatgcctactgggcggaagtcttcaccaccgtcgagaagacacattgacggcgaggacgacgtcctctccgccgtatctggtgacactgctgctccaaatgctgctcgctcgcagctgctggtggtgctcgttgaatgctgcggcctcgactgtcgaggagatgaaggcataccgccaggtcgtacctgcatgacgacatgatcttcagcctgatcgactgaggagaccccctcacccgtgcattatacaactttgcttgtgatgtcgaagactagcgtg

SEQ ID NO: 122191 - DNA, 255 bp, Zea mays
  unsure (1)..(255): unsure at all n locations
  Clone ID: MRT4577_42921C.1
ccggtcgccccgctccgcccacgcgtncgggacctgggcggcgcgtggcgaccgtggttgggcggaccttgtgtggtccgtcggctttggctgccctgttccttcttgcgtggtgctgcccgccgtggctctttcttcttgctgctcctctctccgaggggggggggctgttttttttgggatgttgcgttccttgtcgcccttcttgtccgccgtcctttctttggggcttctccttgttcgtgttggtctgct

SEQ ID NO: 122192 - DNA, 859 bp, Zea mays
  Clone ID: MRT4577_42922C.1
tgggacctcgaggcggcgggagtcttcttacggtaaagacacagcctgtctaccgccgtattctattctatctacggaagaactcgagctgcatactgatgggatcaagaaagggtctttttctgggaaccgctgaaaatactgacgtgatgaggagcagatggcatctctgtagctgcgctgcaatgtatctacatcaatatggcaatgcttgtctggacacgaatgctacatctacatgtaaatgcagagttgcaggagatgagctcgccagacagtccatcacactgcaggcttgattgcatcttcacaggacgtggacttgtgggcacatgctccacgggcaacggttcggcatcctcctggcgttcttgtggctggcagcagccgcgaggatctgtgtggagccctgggctgggctcgttgcaagatatgccagcctctcatcttcagactggaggaggaggagggggttccctctccaggctttttccatgatgttacagcattcagagtgcatgttacgctcacggccctatcagcacatgctgtgggcagccggtgatgataggatcagatgctcatatctcctgcggttttctgtctaccgcatttggattggatgggattggatttggacccccctgtactgtacttcctccttgctcccctgctgcttggcgctttgtccatgtgcctggttggaattgctactatacttttttggagggcaatagtttcaccggaacatgtagcgtggacgtgtggtaataacaattgaattgatgccttttactgtctgagaaaaaaaaaaaaaaaaaaaaaaaaaaaaaactcgaggaggggccgcgggtaccca

SEQ ID NO: 122193 - DNA, 416 bp, Zea mays
  unsure (1)..(416): unsure at all n locations
  Clone ID: MRT4577_42923C.1
acacagtgcttaaaattgcacggatcagggagataagccattacatggtacatttgagacttccatatacccgttacaataaatcaaagtgcgaaaaagaaacgcacataacgcggccttcacaggcagccacctgggggttgacgttaacccacacctagagctcgtacaaatttcggaactcctgggagaagccttacacagatacattttaatctaaacagtgcttgcaaagatgacaaccttcacgaaactactgctgctcaagggctactcccgcgaattgcaccgcctctgggaccgaatcgtgctctggggatttgggagaatgatcttgagtaggtggaacgacaactcatcatggcgagtctgaggcctcactgctgatggactatggatgnggggttgacatacag

SEQ ID NO: 122194 - DNA, 120 bp, Zea mays
  Clone ID: MRT4577_42924C.1
tccagatatatgccgaaaaaaaatatgcgttttctgtgggcgtgtatcttgtctgaattttgacgcttctgttcggatgtgcaccactaaacaaatgacgggaagaaatattgcaaaatt

SEQ ID NO: 122195 - DNA, 864 bp, Zea mays
  Clone ID: MRT4577_42925C.1
aaaacaagacgggttcgtcacatcgcttgcgcctctctctctcggggacaactgcttcacccctgccgccgccgccgccctacgcttggtgcctaggtcttcatcggatcgttcaccgggcacaagcatcacccagcagactgggatcgcttctcccccgccgaccaagccgtgcctcccctgttgccggcgtcgcccctcccccaccagtgaaactcgcggtctctctccaccgcacgcgcctcgtgtagttgtggccgcgtgcaccccctgtagccccgacgatgggtcctactgctccatccggtttgcttccggcaacaagatcaacaacaagcgagcgaggtagtgaaaagctgcagctgtgatctctggaggtgctcttcctactctttctggtattttgatggtggcttgatggccagtaatatgcagtcttctgctgcctcagcctccaagacctcccatgatgggttctagcgctcagccacaaaatcttggaccaccaatgcctatgcagtttaggccagtgatgccttcgcagcatcctcctcagttcatgccaccagcagcacagcagttccgtcctgttggtgagcctatggcgggggctaacgttggcatgccagggcaaatgccacattttccacaacctgggcagcacatgcctcactcaaatcaagttccacctgtatcacaaggggttcccatggtatatcagccagctagaccaatgtcatcagcacctatgcaacaacagcaacaaactgcgtatgcttggggccattttgcccaccatgggtgcttctatgcaacccctgacctatacatatcaaccaacattcgatccctcctgtagcgcaa

SEQ ID NO: 122196 - DNA, 318 bp, Zea mays
  Clone ID: MRT4577_42926C.1
aaaataaatttaaaacaatttaatgggtattttgctgtccaaattcaggtgaaggggggcgaaaacaaactttccaaaagaatgaaaaaacactctggtggtaaactgaccaaaaaatacctgaattttaaaaaaaaaaaaaattaaactttggtgggaaataaagcccaaagtaaaaataaaatcaggctgcaagctgcatttgctttaacatcctaatgtgaataccttcaaaacaattaaaaaccttatttttgaaaactgaacaaccttttctggagaaaaccctttccttttggaaaaaaaaaaaacgagttg

SEQ ID NO: 122197 - DNA, 1031 bp, Zea mays
  Clone ID: MRT4577_42927C.1
taaagaagtcccgggatctggaaagattcctatgacaacttcatggacattagaggaattccaaactgctactctggaggatgatgctcttaaaggaatatcaaccatcaacatcaagcttatctatgatgatcagcttgaaaggctcaaggaaaaagagcaaaaggaggctaagaagcgccagcgtttgggtgaaaatttttcagatcttttgtattccatcaaggaaatatcagcttcttcaacatgggatgattctaaacagcttttcgaggatagccaagagttcagggccttggacagtgagacttatgctagagagctttttgaagagtgcgttgtccacctgaaagaaaggttaaaagagaaagaacgtttgagggaggaagaaaaggcaaaaagagagaaagagcgtgaggagaaagagaagaagaaagagaaagagaaagaaaggaaggagaaagaacgcaaagaaaaagaaagagaccaccgggaggagagagaaaaggagaaagggaaggatcgatcaaggagagatgaaatggagtttgatggtgctgatttgaacacccatggtgcaaaagataagaaaagagataaagataaagaaaagaaacataagagacgtcaccatgacacagatgatgtaagctctgagagggatgataaagacgatgctaagaagtctcggaggcatagcagtgatcgcaagaaatctaggaagcatgcacatggctcagattcagatagtgaaaaccggcccaaaagacataaaaaggaccgagatagtagtagaagaaatggagcacatgagctggaagatggtgaacttggagaggatggggagatctattagtctttctgtttgctaccgagattgtcagtaattacttccccttgtcatgttttccattgctcctattttttttacttttgacttgttattagtgctttggcttaacaatcactagtgttatagttatttagttccatacattctgaaatattttcttaaatatctacatttcttc

SEQ ID NO: 122198 - DNA, 3956 bp, Zea mays
  Clone ID: MRT4577_42928C.1
gacaactgcttcacccctgccgtcgccgccgccctacgcttggtgcctaggtgttcatcggatcgttcaccgggcacaagcatcacccagcagggtttcttgccctatctgtttaagactgggatcgacccacgcttggttttatcgcagccgaacgggtttactaaattcggcaggaagaccgttcgcttgcgtgtctcctctttgcccgatctgtgactcccccgccatcgatgccaagtttgccccgttgccggcgtcacccctcccctcgacggtgaagctcatagcttccctccaccgccggtgtcgcttctcccccgccgaccaagccgtgcctgtcgccggcgtcgcccctcccccaccagtgaaactcgcggtctctccaccgcacgcgcctcgtgtagttgtggctgcgtgcaccccctgtagccccggcgataggtcctactgctccatccggtttgcttccggcaacaagatcaacaacaagcgagcgaggtagtgaaaagctgcagctgtgatctctggaggtgctcttcctactctttctggtattttgatggtggcttgatggccagtaatatgcaggcttctgggctgcctcagcctccaagacctcccatgatgggttctagcgctcagccacaaaatcttggaccaccaatgcctatgcagtttaggccagtgatgccttcgcagcatcctcctcagttcatgccaccagcagcacagcagttccgtcctgttggtgagcctatggcgggggctaacgttggcatgccagggcaaatgccacattttccacaacctgggcagcacttgcctcactcgaatcgagatcatcctgtatggagagatgtactggagtttgatggtgctgatttgaacacccatggtgcaaaagataagaagagacatactgcgtatgatagggaacataagagacgtcaccatgacacagatgatgtaagctctgagagggatgataaagacgatgctaagaagtctcggaggcatagcagtgatcgcaagaaatctaggaagcatgcacatggctcagattcagatagggaaaaccactgcagggcaaaaaagacatactactataatagtagaagaaatggcaaatgagctggaagatggtgaacttggagaggatggggagatctattagtctttctgtttgctaccgagattgtcaagttgggagaaaccagttgagttgatgacacctttggagagggctgatgcctcaactgaatggaaagaatttactacaccagaaggacggaagtactatttcaacaaagtgaccaagcaatcaaaatggactattcctgacgagttaaaggttgcacgtgaattggcagagaacacatcaaatcaacaacctgatcgagaatcaggaatagctactagtgctcttgtcagatctgctgcctttgaaccttctactgcacctgctaatcagtcgtcatctgctgttggtataattgcttccagcacacatgatggatcatcaaactctgttctttctggtgctcccctgccgcacaatgtggagaatacttccagttctattgttggcatgcaaaatggtggttcgagtactgctgttgttcctgttgcagcaagcacagaagttccattagttgcaacagatgcagggtccagcagaaacaacgatgaaaattcatctctgaccactggggctgacgcagaggatggtacatccgctgaagatttggtggaggccaaaaagaccatgccagttgcagggaagattaatgtcactccagtggaggagaaaacaagtgaagaagaacctgtagtctatgccactaagatggaagcaaaaaatgcgttcaagtccctgcttgagtcggtaaatgtggagtctgattggacatgggatcagactatgagagtcatcataaatgacaaaagatatggtgctttgaaaactcttggagagagaaagcaagctttcaatgagtacttgaaccagcgcaaaaagtttgaagccgaagaaaaacgtatcaaacagaggaaagcacgtgatgatttccttgcaatgttggaagaaagcaaggagcttacatcatcaacaagatggagcaaagcaatacttatgtttgaagatgatgaaagattcaaagcagttgagcgtccaagggagcgtgaagatttatttgagaactatcttgtggaactgcataagaaggaaaaagccaaggctgctgaagaacacaaaagatatgtagcagaatacagagcttttctagaatcatgtgacttcatcaaggcaagcactcagtggagaaaagttcaggaacgcctggaggacgatgaacgttattcccgacttgagaagtttgatcggttggatatttttcaagagtacattcgacacctagagaaagaagaggaagagcagaagcgggtacaaaaggatcaagtgagaagacaagagaggaaaaaccgtgatgggtttcgtaaaatgctggaagaacatgttgctgatggcacacttaatgcaagaactcggtggcgtgattactgtgcacagataaaagattcacagtcctacttggctgtagcatcaaacacatctggctctacaccgaaagagttatttgatgacgtgatcgaggaacttggcaaacagtatcaagaagacaagacccaaattaaagaagtggtgaaatctggaaagattcctatgacaacttcatggacattagaggaattccaaactgctactctggaggatgatgctcttaaaggaatatcaaccatcaacatcaagcttgtatatgacgatcagcttgaaaggctcaaggaaaaagagcaaaaggaggctaagaagcgccagcgcttgggtgaaaatttttcagatcttttgtattccatcaaggaaatatcagcttcttcaacatgggatgattctaaacagcttttcgaggatagccaagagttcagggccttggacagtgagacttatgctagagagctttttgaagagtgcgttgtccacctgaaagaaaggttaaaagagaaagaacgtttgagggaggaagaaaaggcaaaaagagagaaagagcgtgaggagaaagagaagaagaaagagaaagagaaagaaaggaaggagaaagaacgcaaatgaagagtgcgttgtccacctgaaagaaaggttaaaagagaaagaacgtttgagggaggaagaaaggcaaaaagagagaaagagcgtgaggagaaagagaagaagaaagagaaagagaaagaaaggaaggagaaagaacgcaaagaaaaagaaagagaccaccgggaggagagagaaaaggagaaagggaaggatcgatcaaggagagatgaaatggagtttgatggtgctgatttgaacacccatggtacaaaagataagaaaagagataaagaaaaagaaaagaaacataagagacgtcaccatgacacagatgatgtaagctctgagagggatgataaagacgatgctaagaagtctcggaggcatagcagcagtgatcgcaagaaatctaggaagcatgcacatggctcagattcagatagtgaaaaccggcacaaaagacataaaaaggaccgagatagtagtagaagaaatggagcacatgagctggaagatggtgaacttggagaggatggggagatctattagtctttctgtttgctaccgagattgtcagtaattacttccccttgtcatgttctccattgctcttatttttcttacttttgacttgttattagtgctttggcgtaacaatcactagtgttatagttatttagttccatacattctgaaatattttcttaaatatctacatttcttcaataccaattgtcgtttatttaaaaaaaaaaaaaaaaaaaaaaaaaaaaaaaaaaaaaaaaactcgagaaggggcgccggtacc

SEQ ID NO: 122199 - DNA, 1288 bp, Zea mays
  unsure (1)..(1288): unsure at all n locations
  Clone ID: MRT4577_42929C.1
aattcggcacgaggctctcctctctctctcggggacaactgcttcacccctgccgccgccgccgccctacgcttggtgcctaggtcttcatcggatcgttcaccgagcacaagcatcacccagcagggtttctcggcacgacggtttaagactgggatcgcttctcccccgccgaccaagccgtgcctcccctgttgccggcgtcgcccctcccccaccagtgaaactcgcggtctctctccaccgcacgcacctcgtgtagttgtcgccgcgtgcaccccctgtagccccggcgttgggtcctactgctccatccggtttgcttccggcaacaagatcaacaacaagcgagcgaggtagtgaaaagctgcagctgtgatctctggaggtgctcttcctactctttgctggtattttgatggtggcttgatggccagtaatatgcaggcttctgggctgcctcagcctcccagacctcccatgatgggttctagcgctcagccacaaaatcttggaccaccaatgcctatgcagtttaggccagtgatgccttcgcagcatcctcctcagttcgtgccaccagcagcacagcagttccgtcctgttggtgagcctatggcgggggctaacgttggcatgccagggcaaatgccacattttccacaacctgggcagcacttgcctcactcaaatcaagttccacctgtatcacaaggggttcccatggtatatcagccagctagaccaatgtcatcagcacctatgcaacaacagcaacaaactgcgtatgctgggggccatttgcccaccatgggtgctcctatgcaacccctgacctatacatatcaaccaacatcgatccctcctgtagcgcaaccctggagtacaggcccaggacagagtgtacatcatgtgcctcctctagtgccgtctgggcaccagccggtgtcagctccaacgactttgcctcctgtcaacttgtctgaacctagctcttcagactggcaggaacacactgcagccgagggaaaaaagtactactataataagaagacaaggcaatcaagttgggagaaaccagttgagttgatgacacctttggagagggctgatgcctcaactgaatggaaagaatttactacaccagaaggacggaagtactatttcaacaaagtgaccaagcaatcaaaatggactattcctgacgagttaaaggttgcacgtgaattggcagagaacacatcanatcaacaacctgatcgagaatcaggaatagctactagtgctc

SEQ ID NO: 122200 - DNA, 323 bp, Zea mays
  unsure (1)..(323): unsure at all n locations
  Clone ID: MRT4577_4292C.1
ctcttcacctccaccctatatacactttttttttctttatttttccccctccncttttccagggggggggggggggggggggggcttttcttattccctacaaatgataatcacataagtagactcaaccaaacaaaacttttttcttcaactcacatttcctcaccccaacctacttcaccatttttttttaccaaaaacaaacacatctctttccttccccctcaattttaaccatatccccttatacaaacccctttttccccaactctcccttttttcaaaaaatacctttttccctttcccataaaaattatctttta

SEQ ID NO: 122201 - DNA, 305 bp, Zea mays
  unsure (1)..(305): unsure at all n locations
  Clone ID: MRT4577_42930C.1
acgccttcgganaaaaaaaaaaacttgataattttacgtcaagcccacacttnaagggggtgtttttggacgggcgtctgggaggtccaaactacccgaccctctcaaaaaacagcgtagaccatcttaaggggaaacttaaattaaaaccaagggtcaggcgcgttcgatcagagcaacgagcaacacacagacgtaaccgaacgacaaaagatgtacatgcacgcacacgtccataaactgagtaatcgtaaaaacgacagcaccgatcaaaaatctcacaaataccgaagtttcactgggaa

SEQ ID NO: 122202 - DNA, 517 bp, Zea mays
  unsure (1)..(517): unsure at all n locations
  Clone ID: MRT4577_42931C.1
cattgggtacctcgnagccggccgggatgactttcgccgtcgtcgcggggaccgggtccgggtccgggtccggcgggcactgcgaggccgccccggccttcactggcgccctggccgtcgtggagtagtttagccgaacttgtcgtcctgtgcagcagatcgagtacatagcggagtcgggcgacgcttccgtcgccgaacttgtcgtcccgtcagtgtccatagcttgtcaaggctccttccttcctgttgttccttgagaagggcgagcttttcaagtgttttctctttttttttccttcgtcttgcgccataggagagagagagagagagaaccctgtgactacgaaacgggggtttagcgttggatgcgcggcgtggatccggatccaacggagcggccgatgaactttactctcgtccgtttggcagccatggaaatggacggaaattgcatgcaaaaaaaaaaaaaaaaaaaaaaaaaaaaaaaaagaaaaaaaaaaaaaaaaaagcggcc

SEQ ID NO: 122203 - DNA, 715 bp, Zea mays
  unsure (1)..(715): unsure at all n locations
  Clone ID: MRT4577_42932C.1
acctcgagccggccggccttcctggcgccctggccgtcgtggagtagtttagccgaacttgtcgtcctgtgcagcagagtacatagcggagtcgggcgacgcttccgtcgccgaacttgtcgtcccgtcagtgtccatagcttgtcaaggcttcttccttcctgttgttccttgagaagggcgagcttttcaagtgttttctcttttttttttccttcgtcttgcgccataggagagagagagagagagaaccctgtgcctacgaaacgggggtttagcgttggatgcgcggatccaacggagcggccgaactctcgtccgtttggcagccatggaaatggacggaaattgcatgcatgctggatgatggcgagcaatcgcggcgtccggccggtccgtccgtgtgtgactggcagtggcagatgacgcgacgcgtcagacaaatccagaatcagatgcgagtagacaaatgcagagggcatcgcctttttcgatgtctcactgtgctgtgcagggcacaggacaggaggagttcttccacttccagtcacacacacacacactttaaaaaccccgtgacgntattactactactattgctgcaaaagagggctaggttaagcaagtgtcgcgtgcatggcagtccggaatgtctcgccgaaacccagctattcctggcgggtttcaatcaaattccatcggatcgcccctgcaa

SEQ ID NO: 122204 - DNA, 416 bp, Zea mays
  Clone ID: MRT4577_42933C.1
aaacaaaggaggcaaaaaaaagagggcgccgacagggggtgtaggtacacacaggggtaacaacacgggacaaaacaaaagggtagcccgaggaaagaaaacaacccaaggaataaaaaagagccagggctaaaaacggattaaagacacagaccccaaaaggggaatgaccgaaaacgcttgaccaaacgcccccgacaaactggatgggccagtcaacaagaaacaaacggcgagcaacatctgcaatgaggaccaggaaaaaaactcccctaagaacccaatgaaacgcgaggagcaaaggaatcccaaaaaaaaaaggctaaggaagccgaaccgccatagaaccgtactaaaaccaaaaatgccagaccctaaactaaaggaaccgaaccggaccgagaccaggcccagga

SEQ ID NO: 122205 - DNA, 445 bp, Zea mays
  Clone ID: MRT4577_42934C.1
tttcgagaggcgacccgagggcaagaagtgggggcggtgctgcggtggcttgccatggttataaaaagtaacggatcgcgactaggatagaaagcacaaggcctgccgctttcactcttttattcccattccacacacactaactccgtcgttgcgtttggctaccgtacgtcgttgttcgtgcgcgctgcctgccttagcaggctgctccgtctctgcgcctactactttgtcttcgagttcgtgccttcttgtgtctatcgtcgatctctcgagacgtctttgtgcctacctttctactatttctactcgcgctccattcttctttacatgtatcggatttgcgccattcgactttcatgatgtttcattttttttatttttttgttattaacttgttcatattatctttcttattttttattttattttttttataatttta

SEQ ID NO: 122206 - DNA, 402 bp, Zea mays
  Clone ID: MRT4577_42935C.1
ttgtcgcgtgggcggacgcgtgggataaaaaaaaaaaaaaaaaaaaaaaaaaaaaaaaaaaaaaaaaaaaaaaaaaaaaaaaaaaaaaaaaatataaaaaaaaaaaaaaataaaaaaaaaaaaaaaaaaaaaaaaaataagggttgtgtcgttttaaagttttcaattttacttccccgtgtttttaaggttttggtttttttttagtgttccttattttaatttaattggccttgtttttaaaactcttttattgggaaaaccttgtttttacccattttattcgttttgcaccttttccccttttcgcaatttgggttattatcgaaaaggccctctctttttgccttttcaaccgtttgggtgttttgtttgggaattgggacccccttttttttgcct

SEQ ID NO: 122207 - DNA, 387 bp, Zea mays
  Clone ID: MRT4577_42936C.1
gccccgcctgcgttcttgactgaaaggcgcgccagctccaccaccagctgaagatcgggcaaaacacggcaaagggcccaagagccacgcaaccgacgaagagaccgaaaagagccacacacaaccgaaagacaaaggactgacacagagagaagaggaagcaacacaacaccagcaagaggccgacggtaacgagacagaggccgaaacgtcagctcggcaccatcagaaggaagctgacaaaagcacgggaggccaggagacctgcgaagaaactcgggagaactcacccgaagcacagggccaacagaagaaacagaccacattgtggcagccaaaggctcgtgaacaccgacggatacccgagaatgccaaggcacgacaaaa

SEQ ID NO: 122208 - DNA, 287 bp, Zea mays
  Clone ID: MRT4577_42937C.1
cagacacatgggcggccgcatgggtcatccactacgtcctatccacggcatcatcgctcaccagcactggaggtctccgagtattcatggcgccttgaccatcggcccgatcatcagcagccatcacaatcgccagccagatagtcgcacaacagcattcacaaagaccctttgatgcctaacaccatacagtcgagtctttcgcccttgtcactccacgactagcatactccctactgagaagattaagcctcagaccccagactactgcattcatccaggaggat

SEQ ID NO: 122209 - DNA, 207 bp, Zea mays
  Clone ID: MRT4577_42938C.1
gggcactaggtcggatttacgccgcccgctgccccggcgtcagatcaggatgccatctgcaagaatactggtcttcagttcaagtatgtgacctggcagttgcaagctgctctggcaaacctgccacatagctgttttgagatatcagatgaagttcaagaagaggttgacttagtgcgagctcagcttagaagagaaatggaaaag

SEQ ID NO: 122210 - DNA, 965 bp, Zea mays
  unsure (1)..(965): unsure at all n locations
  Clone ID: MRT4577_42939C.1
attgtcgttgngagttatatgcacgaacagagatgaaaggatcgccaaccataatcgtggtagtggtgaacgatgtccacacttgtacttctagtggtaggaagaagactaccactccttctagtgcttgggtggctgcaaaagctcttcctatccttatgaagaaaccccaaatgggtgctaaggagttgcagactattttgcaggacagattcacatgtgctatttcatatgacactatttggaaggggaaggagaaagcattgagagagttgttcgagagttgggaggagagctttcagctcttgttttcctggaaggaagcagtcttgcagaagtcacctgacagtgtaatagagattgacctccgagttgaagatgacaaacttttttttcagcaagttcttctgtgcatttggtccatgcatttctgggtttaaagaaggttgtagaccgtatcttagtgtcgactctactgctttaaatggtatatgggacggtcacttggcttctgctacaagtgtagatggcctgaattggatgtacccagtggcatttggtttttttagttctgaaactgaagagaactggacttggtttatgactaaattgcaccaagcagtaggagatcttccagttcttgctatctgttctgatgcgtgcaatggtttgacaaatgctgtgaagtcagtttttcctaatgctgaaaaaagagtgtgtttcaggcatctaatgaacaactatgtgaagagttatacgggctcagaatacatgtatccagcagctagggcatacaggagagatgtgtttgagcatcacattggtaaagtgagctgtgatcctgttatagccaggtggctagatcaatatcatgatttattatggtaccgaagtggtttcaacacagctattaagtgtgactatatcacaaacaacatcgctggaggtgttcaataattggatta

SEQ ID NO: 122211 - DNA, 349 bp, Zea mays
  Clone ID: MRT4577_4293C.1
acggtcgctgctgaactaactgaaccgcatgcgcatctgccagaccgtggtcgccggcctgggcatcggcgccgccgccgtcaacgcgatgtccttcctgtacgaacccttcaccattcgcaagaacgatctcaagcccatcgtcgccgctgtcctcagccacttataccgagcactaccgcatcaaataccttgggcccttctccatcgagctacccgatctaccttaccggcaagttcccctgctactaactctgtgacaccgacgggctgtccgtcgaccccctgaccttagccaagaaccgcgagcatgaagtgatccacttccgctgtgccatgctctgctcgc

SEQ ID NO: 122212 - DNA, 623 bp, Zea mays
  Clone ID: MRT4577_42940C.1
cattgggtacctcgaggccggccgggaaggccggaagggggactgggggagggaaaataataactgaggaagcgggcggtgcctgcctgggtgcgcgtcgtcgccagacgcgggcgcaatgccgcgcctccgcctccctctggtcctcctcctccccatagccctcaccatcatcctcctcatcctgttcccattttccccaagcccgcgctcgcccccgcctcagccactcccctgcggcgccgcgctctccgatgcggcggacggccggtgggtgccgaccccatcgcccgcaccgccgccactatattctccgtcctgccccttccaccgcaatgcctggaactgcctccgcaacggcaggccccagctcgcggcgctctcctgggcgcccgcccgctgcggcggcgccgtcgtgccgagggtcgacgccgcggggttcctggccgctgccagggggcgacggattgggctcgtgggggactcgctgtctgagaacctcgttgtcgcgctcctctgcgcgctccgctcggcggacgacggcgcccgcaagtggaagcggcgtggcgcgtggcgcggaggctacttccccaaggaggacgtcgtcggcgctaaccaccggg

SEQ ID NO: 122213 - DNA, 298 bp, Zea mays
  Clone ID: MRT4577_42941C.1
gacctgaaaaattgtttagatttaaatcagtttggaaaggtttggcctacacctgcctagagtacctcagctataaggataattctaacctactctgtcggctacaagtggcttggagggaagttctctatgtcaaacggacctccgccccgacaattcatatataactgaatatctagcacaaagacatgaaagtagcaatctctgccaagtgcatttatccacccagcagacaaaccggaaaacaagcgcgtttctccgaagggttcaagttctcaaccacaataggcagttatat

SEQ ID NO: 122214 - DNA, 248 bp, Zea mays
  Clone ID: MRT4577_42942C.1
cttctaatacagactcactgatatggctgcgagcgaccccatgacctgcggcctgccaacgagcgatacctgcgcatggagtccctgatgatgatatcttcgacggggtatgtgtgcttgcacattgacccttaccacagcgaccaggccgcggatgtcctgtgcaacttctttgacaaatgcaaggtagatcccagctactgggacatgatcttacaacgctgacctgaacaaaatctatgagaaga

SEQ ID NO: 122215 - DNA, 654 bp, Zea mays
  unsure (1)..(654): unsure at all n locations
  Clone ID: MRT4577_42943C.1
ggccgcttttttttttttttttttgttgaaaatagattcattcaagcatgcacgtagcatactaccaatactcgtaaagcgccataatcagtcacctctgtctattcgatgcgaatatgtgagagttggaaagcgccaaatttcatcatgatatcagtcatgaaaccttaaagaccgtcgcaaaccacctccctctaattgtacagatcctcatcctcgccagcgttgccgaacgtgttctgctcattcgatgcctgctcgccatcagggaagcggaagaagctcgaaccacccgagttcttcatcgactgtgcaaatgcctcgtagcggcggatctcaacatcggtgactgagcgacgagcagagcgcatagccntcctcgaagtgagcncttggtgatgctcggggacagcgtcctnctccttcttccatcatgtcaacgtcctcgccatttgcggctgctgccttgcgacgctcaatgtcgtgagcaatcgactgcttgatagcaagcttgacagcacgctgtgtaacgaagccaagatcagcaccagagaagcccgtgggtgttggaggcaatgaagtcgagttcgatgtcggatgcgacaggggtcttgcggagctgngccttcagaatgctaacacgagaagcctggt

SEQ ID NO: 122216 - DNA, 431 bp, Zea mays
  Clone ID: MRT4577_42944C.1
attcggctcgagcggcgtcatgacgagaatttttctggcctctcccagggaactgccccggggtacactgcgatgattaacccgatcatccggatcaaggggctgcacctgacctccgatgaggacctcactggcgggtactatacatgaggcggaaagagcatcatcctccactgaaactaattgcagagccccccatacaagggtagcgtccgaatctgggtacctagtctaccagaagctagaggagaaaggcctcgactaaagcctgaagctcataaatctgaggtggacagtgcattccccagggattgagatttagccaggttaagggcctggcgacgccaagggccaagccatgatggtgtccaacctaacccaaatcaacgccctaggctaaccgcaaaaaaatgccaaacccttggaaatgg

SEQ ID NO: 122217 - DNA, 242 bp, Zea mays
  Clone ID: MRT4577_42945C.1
acccgggggcgggcagtccaacacttgcctactccacgttgtggcgtcccaacggacgagggttgtaatcaacccctctcaagcggtccaaagacccacttgaataccacagtgttttgctttgtttagggggtggggggggggaggaatctccacaacttggagtctctcgcccttacactttgatgttcacaaagaagcacggagtaagggagggatgagcaatgcacacaagacacaaa

SEQ ID NO: 122218 - DNA, 373 bp, Zea mays
  Clone ID: MRT4577_42946C.1
tcggtctgcagcaacagctagtcagcgacgtgccgtccgccgtcggcgcgtcagcattccctttccgcctgttctccgcggaggcgcgccggaacactaagagcggtcgaggcaagcggagcgccgccaagcccatcaagtcctcggccccacctcgacctccctactcctctttcgtcatatgcggcggcgtcgcggccaccacgttcacgcggattccacttcgcgatgcgcctgagtgcacccaggtcacgctcgaacgattacccaccggcccgggcaacccgggggcgcccgctctcacgctcgggagtgtgcaacggctggagaacgaggagttcgatgttgggtggaggcccaactctgtcgcgcg

SEQ ID NO: 122219 - DNA, 268 bp, Zea mays
  Clone ID: MRT4577_42947C.1
cggtactcttgccattgctctatcactgactcgtttcgctttgttgttttgctttgtcgagcgttatacctctttcaaaggcaagctttaaattatccactcaatttagggataacatttaaaactatacgtgaccataaagccaaaaaaattgattaaacctgaaaaatgacgtattggtgcatttttttcatagactgcttttccctctttagacattacaaaaatacgactctttaataataggctgttaatcccaactggaata

SEQ ID NO: 122220 - DNA, 262 bp, Zea mays
  Clone ID: MRT4577_42948C.1
gacaaaggttttgactatcctagccctgcagatcccgacagcgtgtatcgagagcatgtcttttgccacgcccagcactacccaactgtagtgccacacctgactcataactaccccttccatagtcaacgcacactgaagagtgccacaccttattaaccttttggttattacgatactgctacattactttaaaactagagagtgcttgtcaccaatctattgtccctgcatatagatactgatgctcattgctttactt

SEQ ID NO: 122221 - DNA, 275 bp, Zea mays
  Clone ID: MRT4577_42949C.1
ctcagtcttcaccaacatctctccgaaacttcttctttcctaccaacaattcacaatggcaatccaatccgttcaagtgcgacctcagaaggctaccaacgccgacgaaattgagacttatatcgagtctctgattggccgaaccgtttctaccacagcctctatggtgcctgttttctctttccagacaacagaagtgaatgtgcagaagatcaaggagaagttcggtgaccagatcatcgttgacattgtttaaaatcacatacagaattcgg

SEQ ID NO: 122222 - DNA, 245 bp, Zea mays
  Clone ID: MRT4577_4294C.1
cgaacccgtagtcgccgccgtcaaaccacaccgcgcttctttttggcggggagcgggcaacgattttgatcggcggtcctcagacctcatcccaacccggcccggggtggaaaaaaccaaactggcggtggcggttccgcttcccctggggcaccgggagggttttggggcgcggccgtggcagtggctgaagaccgtcttcttcatcgtggcgatgctggcgtccctgttagtcgtgggccccc

SEQ ID NO: 122223 - DNA, 514 bp, Zea mays
  Clone ID: MRT4577_42950C.1
tgggagcgattgacaataaccaactgtgcaatggcaacaacaacagtagaccacaattaacaatccaagagataacaacgaacgagtaataacagaggtctacagaaaactgatgcagctatgcatgaggaaccctgcaagctcacttggaagactagacgatcgcatgcaacacactggctgtggcaaacgcattgagcaaaccagtaacaaaaacagataccacagagtactgactacgctgacataaatacccatggacaaccctgctgcatacagacaataacaacagctgctttcatgtatgccggtgcttgtgttcaaattacactacacacctggaagaacaataggcggaacagatcgagcaaggtcagactcaactacatgcggtaaatcctgttgcctacgtgaaacagcagatgatatgcaaccaactgcaagatggataactatgactgccaaactacaacagggacaacagtgaagtaaatgataaggaagggttaaccta

SEQ ID NO: 122224 - DNA, 568 bp, Zea mays
  Clone ID: MRT4577_42951C.1
ccacgcgcccgctttctgcattgggtgatgtcatttcagctcttgctacaaaaaacagccatataccctacagaaattctaaattgacacacttgctgcaagattctctaggaggagactcaaaagcattgatgtttgtgcaaattagcccatccgataatgatgtttcggaaacattgagttcactaaacttcgctagccgtgttcggcgtattgaattgggaccagcaaagaaacatgttgatactgctgaacttcaaaagaccaaacagacgcttgaaagagctaagcaagaactcaggcttaaggatgattctttgagaaagctagaagaaaacttacaaaatttggagagcaaagccaaagggaaagagcaactttgcaaaaacttgcaagagaaggtgaaagagctcgagggtcagttagattccaaggcacagtgtcaaataacatcagagaaacagcaacggcagctttctggaaaactaaaagagaaggaagaaatgtgtaatgtacttcagcagaagattgcggacttagaatgcaagcttagacaaccacaacaatc

SEQ ID NO: 122225 - DNA, 185 bp, Zea mays
  Clone ID: MRT4577_42952C.1
tatgcttctagatggacgatttatacccgaggggtggttccggcgccaacggtgttcctacaaaatgggtagcgagagaaagtggtctgcccatagctgagtacaactcttacacatgcaccggcagtcaggtgactattggccccttccacctgttgaatgtatagtacccaattctccggccg

SEQ ID NO: 122226 - DNA, 2465 bp, Zea mays
  Clone ID: MRT4577_42953C.1
cgccccgcttcactgcatgcatccgctggtggaaccaggcccaacctgcctggggacgtgcccgggcttggcttcgttggtggtcgtgtggatccctgcgttagctgcgcaggttgccccatgtccgcaccctccgacctaaatctcgctcatgtcgtccggtgccatgcgactcgctgttgtgcgctcaggtgcccaacgcggcgtgatgagaccggcaacgtggctggaccggcgacgcggctgcgtggcagatacatgtgagcatgggcactgtcgccacctactcgaccaggggctgctcctccccatctcacgtggaactcctcccttggttgcttctcaaccgcatcagcgaggaaaacaagcacagaactatgcacacttgttctagcatgaatggaggtcgccaagatggatttggcaaacttcatggtggatactagagacgtacaccaagaagaaactcacgtaggctcagcacagcgtcgtttcgttgctgtcctacctcttcttcacctccgtgaatcccctgccttctcctgccgccccgtcgaagatccccaaaactaccgccgcgccgccgccgccaccatgcctctgtcacaccggaacctcctcctcttcattccctccgtcatcgttctcgttgtcacctccgccgccgccctatccgtctccaccccggttgagctcacagtcacctcgcatccgccggcctccgtccacctcccgcacgcgcgacccctccccggtggcggtaccgccgggccctactgcacgcgtgttctcctccaaggccgcccctcccgcatccgcgacccgtctcgcttcttccacgcgcttcgactccgcgccaacgccacccgcccccacggcctcgagctctgcttccacagaaatgccacagtggggccatgcaagtgcgccgcgtcccaatggcagaaaatgcccaagagcgggctctggatgcaggccatctcaccatacgactaccggattcttgatttccgaatgcctgctgacccttcgaggtctgttgtggtgtccactgaggaagaattcttgctccacagggtggtgttctttgtcgtaggattggtgctcatggtggtggcacacacattgagcgagtctgtagtgttctactatggtggagcaatgactattggcattttccttgtgatactgattatactctttcagggaatgaagcttttaccaactggtagaaagagttctcttgctatttttgcatactcctcagtcgttggcatgacgacatattttcttcactatttgtcgggtatgctgcgctcagttcttgtggaaattgggattgctgaagacatgcataatcctcttggaatattcgctctagtatgtgtcgtcttagctggagcctggtttggttactggggtgtccgtaaacttgtcctggcagaagatggatctgttgatgagggtgtggcttattttgttgagtgggctatcttgattgtttcagctgttatgatcctccagagttctctggactatctctttgcctttgcagctctaatcttctgtgtaatcatcaaagcgattgcaagaattgaaggaaagtcaaaagttttacactatatattcggtaattcatctcgttatggagatttctttgaagactattctagcatgaatcattgtcgcaaggtgttgctatggatagcttctattcaacgtttcacactacccaagagatgatggaattcacaaaagaggaatatgatgcattcaccagaagggaggcgaagcatcctatgaagcaactacaccaccccagagaggaggaaattctcaaaagaggaatacgaagcattcacgagagaggagacaaagaaagctatgaagcaactgttgtcctcaccggatttcaacaggtgggcgttggctaacgcggacagaatatctgtggctccaccaggaggaaactacagcagcagcaacagcaaccagcagcgacatcgtttcttgggactgttttaagctgcgcgcgtagtgtgctttcagcaataggagtgctccttgctcaatgatttcgtgcgtgatttgattagcaagggtaggataacatcagtgttccacattatgaagtggcagcaaatatgtagaatattgtagtttagtcgcatcttaggtccaaagttcaaacagcatctgtctcttgtaacattccattcagtgctaagttgagtgaatctcaacttgagttgtatatgacgcttgatcatcattaggataggatgaaagcattcaagtgtttctatgcctgcataggaactaggaagcaagctgtgtgtgcagtattttgggtttgtagtcgggtcatgcgttggatactatttctcatttatgtctctaaactaataatttgttcttgattgtttaatatgtatgaatgatatgatacatactattttgccttt

SEQ ID NO: 122227 - DNA, 924 bp, Zea mays
  Clone ID: MRT4577_42954C.1
gcgcgcaaaatgccacaccatgaatcacatccgaacaaagtatggctaacaaagaaacacaaacacatacacggagcagagcagcactccatcttgcctctgactacaatttctattacccacactacgagttcgccgagacgactcggacaccagaccgtccgctcgccacgctgccgctggcacgatgagcgctgctgcgcccacggtactggccgttaccatttccagagccggcgcgggaccggccactgagctcgggctggcactgcctctgcttgctcagttggtgcctgttcatcgggctgcagcggccgccgtgactgccggactgctcgacaacctcgtcgccggtgctccacgtccggtccgtggactcggccgaggtgggctcccaggagggcgtccacgggtggccggagacgctgttgctcccggccgactcctggggctcggtttccgcgtgggcgtcccgcgccggcagcaggtgcttccgcgcggcggcgctcggctcgacgaagccgtcgctgccgctgcctaccggcgcgttgacggagcctttgtcatcggcggagtggccaggctcgtgctcgtaggcgcggttctccgacgacgaggagttgaggtccgccacggcctcgacgatggagcaggccttggcgacgcacgccgggagcgagatggacggcgtcgccggcgtggcggaggtggactgctgatggtagttgtggatgtcttcgagcagctgtgtggcgtacgagccggggttttggtcgaagtcgcgcgaagcccgccgcgatcggcagcctggcgcggtccccgccgccatttgccgcaggcttagcagcgccatcagcgcgtctcccgggcggccggctggccctccggctcccggcgccggcgccgccgtctctgacgcttctg

SEQ ID NO: 122228 - DNA, 266 bp, Zea mays
  Clone ID: MRT4577_42955C.1
ggctattcttacacattccatatagtcattctgagggctgctgtgtggcagattcccagcacgggctggacacttgagctcccagcaaccctttatttttttatttttttaaacaccgtgggcaagctgatcaacagtttccagggcattatttattgatggcaaggagcttatcataatacaacaagcaattgagattctgtccatgagttattaattaaagactgaatgtgttcatgacagaattctgtttgttcaggcactga

SEQ ID NO: 122229 - DNA, 311 bp, Zea mays
  Clone ID: MRT4577_42957C.1
cccggggcggccgacgcgtacactctcccttctcgttcctcggatttttttttgtctctcctcctcaaccctgaccgggttccctagggcggacctgcgccgaaaattaaccaccactacgacatcagtccacacgctaagcatctagtgcatctaggtctacacggcacggtcactctacctgtacagatttcccctgccccccatcctcctcgtcgccggatgatcgcctacagctccgactcgatagggcgcgcatcgactccagccccctgggcccattcctaccagttgccgcgcaccatctatta

SEQ ID NO: 122230 - DNA, 678 bp, Zea mays
  Clone ID: MRT4577_42958C.1
ttttttttttttttttttttttttttttttttttttttttttttttttttttttttttttgggttttttttttttttttttttttttttttttttttttttttggacccaccgggggcttttcataaaaagcaagaggaccaaaaattggaacccgtccaccctttaaacgggggaggcagcccctggggaaaaccttccacgggcaaaattgttaaaaaaaaatcggcccggggacaatgggccacccggcccaaattttgcataatgcaaccgggggggggggcccccacccaaaggggacgggaaacaaatggcccagggcccaaaggcaaggcccccaaaatttttacccgggaaaaaaaacccccaggggaacgggtaaccctagggaggttggcccaaaaaggccctaagcaaaaagcttttacaacattttaacaaagggaaccaccggacaccgggaaatcccttgaaaaaaccccccggaaccacaggttacaggtccgggaattttactcatccaacagaatcacagggggaaacttcggcaggggtccaaaccaccttgcctcattaaaaaaccctggaaagcaaaaacattataaggaggggttttaaacaacctttggatgccttgcaccaaaaatggaaaagggggggccaatcttgagggggg

SEQ ID NO: 122231 - DNA, 216 bp, Zea mays
  Clone ID: MRT4577_42959C.1
ggggcgaaaaaaaattttttcccttccaaaaaggggccataaaaaatgggccccggcccttttaaccaggcccaggggtttaaacaaacccgccaatttcccaggtaggtgttttaacccccaagcccaaccgctgttatggggaggggttttagggctcggccccttaaaccacgcgggggggggggggccccccctttttttttataaaaaccc

SEQ ID NO: 122232 - DNA, 824 bp, Zea mays
  Clone ID: MRT4577_4295C.1
tccaccaaacaggaaggcagaagttagtaaccgagaggtcccagagtctttgctgcctacgaaggacgaaattccggagccggatcataattctccaccagagatcaacttccaactgtgcattcctgatactactcagaaatggcttgacctatccaagtcgctttccaatgcagttagacgacagagaaggcatgactatgatgtcataatgctgaaggaccccaagaagagactatggcctgtcgtttaccacgacagcctgttatttgtgggattcaccgcgggctggaaacatttcgtggcatcaaacgaccttcgggctggggatgtttgcgaacttgttaaggagccagacgatggtgagccggtgtactctgtccggatgtctgatcacaaaatttaaagccgccccggctttatctgtgcgcttctcttctgttagacctccaagaagcatggtgcagccgacttgcggaccttgtgaaaagcatgtgggtctgcccccccttttttttgctggaagtcatggagaaaccatgtgggtcaggcgtttctgcgtggatttttgacgatccacagcctataaaaacatagagcgacacagctgtagtagtactgtagaagtcgggcagtgtgggactgcaacatggattgtgatgtgttgtgtggttgggacttggaagtggtggtgtaaccatgtgctgtgatgttgcagccatgtgcgcgcggtggtcatggtcgattttgctctctgccgtttgaacattccgaccatgcctgaactggataaagatttcagtatataatagtgtactgttact

SEQ ID NO: 122233 - DNA, 765 bp, Zea mays
  Clone ID: MRT4577_42960C.1
atgtcgccaggtccggccgtcacctccctagccacgtgttttcttcctctgctcggagcgtcgccggctgtctcggctttccatcaccgggccaccctcctcccatctccttgctccttcccatggtgcgcagggcatccttccctcgacttcctccctgccttcttcaagtcagcgacgaacgcggttctagacaaccacatcgttgtccggcacctcgtctacgcttatctctgtgccacggtcgagctcgtcgcgtccctgtgcttgagttcatcgaccttcactcatctccccatggtcggacaacctcgtcggttgtccctgtccgagttcgcccttaactcccatggccaggtttctctagtggtcgtgccctgtgccagtcgtcccttcatacaccgagcccccaaccggacagttgctgggggctgcttgtgtgggaagctcttctgcctcgagatcgttaatggtcctgattggcacacctccaggttgctcgtgctcgccttcaatgcgggtggtgggaccggtgctccgtcccgatgccacgttggtgaggttccttttggaggacaaagtggaggctacgaccctagggggatagtgatcctccttgctaatggggagcctcggaccaagctttcgggccttggtggccggctaggcgtccagctcacttcagactgctctgttgaaggcgacaaccctctagccttttgcagccttttgcagggagctgaacaaagggagcgatgtgaatga

SEQ ID NO: 122234 - DNA, 286 bp, Zea mays
  unsure (1)..(286): unsure at all n locations
  Clone ID: MRT4577_42961C.1
ataatgtatagtaagtataataagtataggattagatgctaagataaatatttgtagtcccncgggaagacggtcaacgagaaaaaacgtgaggcgggaaaaagaaagaaaaatgttggcggcgaaaaatgaagggggaagaggggagggagaaaataatgagacggcaacgaaataatataaggaggcgctataagggggaaagggggggaaggggcgggtcactaagagggaggtagtgtaaggggcggcttaggaggaatggaaaggacgatggggagagggg

SEQ ID NO: 122235 - DNA, 388 bp, Zea mays
  Clone ID: MRT4577_42962C.1
actaagcttacatggtgcatgctgctgccatgtcacgacaccaaccaccaagtgggatgcgaacttcatcgaccagtatcttgatttgatggacatcacgagaggcataatctggcgcttccttggaccatggctacaccgaccacggaacaagctaaaagaactcgtgaaaggacccctactcctggaaaatactgtggtcgaagaggaggatctcaaaggagcccatcaccttaccgccctcgcagaaaggagcgttcgcgctcaagggaacgcagaagggagcgttcgcgttcaagggatcgaagggagcggtctcgctcaagggatcgaagggagcggtctcgctcaagggaacgccgaaaggagcggtctcgttcaagggacc

SEQ ID NO: 122236 - DNA, 423 bp, Zea mays
  Clone ID: MRT4577_42963C.1
gcacgtcaaaactatttgtagtacatacaaagagtctatagcattatttactcggtaccttctatgctaaactatgcttcttgattgctacataaataagataacgatcaaaaaggaaaaaaagcatgtcgggctcatcagcggctacgacgatggatatggagacgcctacaccgtggcagtatgagcaaggacatggggtcatggtcctaagcccctctacagtcatgaatagctccaccatgtgctgtgagccagttcagcgccttcctcgcggcatcattatgcgcaagttcattgatagcacacgggtgccaaactaactgcatgccgttgaactcaaccaggaaactgaagagatagctctcgatctgattcgtcttgaacggggggatactgtgcctggtccaggccaagtaatta

SEQ ID NO: 122237 - DNA, 2166 bp, Zea mays
  Clone ID: MRT4577_42964C.1
attctgttcgattcgagttcttataggggttcttgtggctgcgtgttttgaattttttcccactggttctggggtgccgagaaagggaatcgtggctgactcttgttgccgtcgtcgagccacctcgaggccggccggggagagctgatttttctcgcagcgggtagccctgtccctgacctgatcctgacccgtgcgggcgtgcggctcctcgcggacagctccagactccagagccgcctcttcgccctctcgccatcggcaggctacggtggctgcttccccgagcctgcaggtagaccaccttgtgttgattcctcgagtcttcacctggtgcttccgtttgcagcttcatttttaactaagtctgtaatttattggctgtttatctgagtgacactacactctctgttttttcttattagatgtcacaagccaaggaagtgaggtacactgcacggtctattacacctcctgctgatagaaatggcacttcaaggtcgcctcctccaaagagacgcagcccttcaaggtcacctccaccaaagagtgcttcacggtccccacgtccaaggagtccaaagagacgcagcacttcaaggtctcctcctaggagacgtggtagatcaaggtcaagggataggagtcggtccaggagcccagatgatagaaatccagggaataacctttatgtaactggattgtctactcgtgtaacggaagatgatcttgagaagttctttagtaaagaaggaaaggttaagaactgtcatgttgttcttgatcctaggacaaaagaatcccgtggctttgccttcgtgactatggatactcttgaaggtgcaagacgctccatcaagtatctgcaccgcactgtacttgaaggtcgcctggtcactgtatagaagtttaacatggtgctgggctgcctctacgtcaacctggttggtccaggctgcgcagtctccaaccatggttgtctccaaagatgtgcagctgacgtgatggtgcttatcaccacaccctcagagctcatcaccacttgccgtcttcacctcgctcaccgacaatgcatacatgctacatcaacacgacggctgtcgccatagagcgatcttggagtcttgttgtgcatcgcgtcaccaccatcgccaccgcaacttctaccacaaccgccatcgtcaacatcacgctcgtgatccaacaggctctacgatttgtctgcttcgactaagcttacatggtgcatgctgctgccatgtcacgacaccaaccaccaagtctgatgcgaacttcatcgaccagtatcttgatttgatggacatcacgagaggcataatctggcgcttccttggaccatggctacaccgaccacggaacaagtgcacaaaagtcatctttggtttagttggcatgcaacgtaaagtttaatctacctatatcacaagattttgatcaagagttgacaagcttaatggaccatgactatttttcaccaaaagggcaaaggctaaaagaactcgtgaaaggacccctactcctggaaaatactgtggtcgaagaggaggatctcaaaggagcccatcaccttaccgccctcgcagaagggagcgttcgcgctcaagggaacgcagaagggagcgttcgcgttcaagggatcgaagggagcggtctcgctcaagggatcgaagggagcggtctcgctcaagggaacgccgaagggagcggtctcgttcaagggaccgcagggagaggtctcgctcaagggaccgccggagggagcgctcacgctcaagggaccgcagaagggagcgctcacgctcaagggaccggaggggcagttcaccccatggcagaaggcatagagatcggtccaggtcacccaccagcaatgggaaccataaggcagactaggaagcgcttttatggacttgtcgttgattgcgtgaacaaaggaacttgtaacactacctataaactggtcagactgagacggttagcatggatttttagtagtgttgctgtattttgttgtttcatacaagtactctattctgttagctttcggatcgaaatgtcggatgatgatggttgttattgttctggaaatcgtagacatgtcctccagaatacctatgaaactatggcatactcgtgtgttgcttt

SEQ ID NO: 122238 - DNA, 2036 bp, Zea mays
  Clone ID: MRT4577_42965C.1
gaaatcgagcgggtagccctgtccctgacctgatcctgacccgtgcgggcgtgcggctcctcgcggacagctccagactccagagccgcctcttcgccctctcgccatcggcaggctacggtggctgcttccccgagcctgcaggtagaccaccttgtgttgattcctcgagtcttcacctggtgcttccgttcgcagcttcatttttaactaagatgtcacaagccaaggaagtgaggtacactgcacggtctattacacctcctgctgatagaaatggcacttcaaggtcgcctcctccaaagagacgcagcccttcaaggtcacctccacctaagagtgcttcacggtccccacgtccaaggagtccaaagagacgcagcacttcaaggtctcctcctaggagacgtggtagatcaaggtcaagggataggagtcggtccaggagcccagatgatagaaatccagggaataacctttatgtaactggattgtctactcgtgtaacggaagatgatcttgagaagttctttagtaaagaaggaaaggttaagaactgtcatgttgttcttgatcctaggacaaaagaatcccgtggctttgccttcgtgactatggatactcttgaaggtgcaagacgctccatcaagtatctgcaccgcactgtacttgaaggtcgcctggtcactgtagagaagtttaacatggtgctgggctgcctctacgtcaacctggttggtccaggctgtgcagtctccaaccatggttgtctccaaaggatgtgcagctgacgtgatggtgcttatcaccacaccctcagagctcatcaccacttgccgtcttcacctcgctcaccgacaatgcatacatgctacatcaacacgacggctgtcgccatagagcgatcttggagtcttgttgtgcatcgcgtcaccaccatcgccaccgcaacttctaccacaaccgccatcgtcaacatcacgctcgtgatccaacaggctctacgatttgtctgcttcgactaagcttacatggtgcatgctgctgccatgtcacgacaccaaccaccaagtctgatgcgaacttcatcgaccagtatcttgatttgatggacatcacgagaggcataatctggcgcttccttggaccatggctacaccgaccacggaacaagtgcacaaaagtcatctttggtttagttggcatgcaacgctaaaagaactcgtgaaaggacccctactcctggaaaatactgtggtcgaagaggaggatctcaaaggagcccatcaccttaccgccctcgcagaagggagcgttcgcgctcaagggaacgcagaagggagcgttcgcgttcaagggatcgaagggagcggtctcgctcaagggatcgaagggagcggtctcgctcaagggaacgccgaagggagcggtctcgttcaagggaccgcagggagaggtctcgctcaagggaccgccggagggagcgctcacgctcaagggaccgcagaagggagcgctcacgctcaagggaccggaggggcagttcaccccatggcagaaggcatagagatcggtccaggtcacccaccagcaatgggaaccataaggcagactaggaagcgcttttatggacttgtcgttgattgcgtgaacaaaggaacttgtaacactacctataaactggtcagactgagacggttagcatggatttttagtagtgttgctgtattttgttgtttcatacaagtactctattctgttagctttcggatcgaaatgtcggatgatgatggttgttattgttccggaaatcgtagacatgtcctccagaataccactacctataaactggtcagactgagacggttagcatggatttttagtagtgttgctgtattttgttgtttcatacaagtactctattctgttagctttcggatcgaaatgtcggatgatgatggttgttattgttccggaaatcgtagacatgtcctcccgggtacctatgaaattttttcataaaagtgtgtttgctt

SEQ ID NO: 122239 - DNA, 429 bp, Zea mays
  Clone ID: MRT4577_42966C.1
gctgccggctaggtcccatggacggcgcgattactccatcataggcgcctatgacgctgatcactctactcgcgccccgcgcctgatcacaggatagtcgatcgcgagacctgccgcgactggcacgccaccacgagtcaccgcctacctgctcgacactctcaagcgttgtcctcaccgccacatgactcttggcccgatatgaaaacctccgggaggcaccttaatatcgcagacccgggctacgtgaccgaatgtcgacccttggagaagtgacagatgaagccgtcgacgttcttggatgccaactacccgaggagcgggctctccccgtgtgagaaaaacagcaagtccttgacatgagcacttatacagatgtcacacctacgcctccaagttcttcgcaaagatcatgcatcgtgagaagcc

SEQ ID NO: 122240 - DNA, 459 bp, Zea mays
  Clone ID: MRT4577_42967C.1
atgatgatggcgtgtgccctcgccgtcgcccagccagcagcatctctcgcgccgccatccggcaagaggaccctctccggcggccgccccccgcggctgccacctcccaggctttcaggcaagctaataaggagccgcgctgtcgttgccaaggctgcgcaggacgggtcggaatcgtccgggaccgggagcatagtgaaatacgtcacgagctctttcagcaccgcggaagacattttcgccctagctggtataggctttgccgcagtagctgcattatgggcttcggtcaacctcattgagatcatcgacaagctcccggtccttcctcttctctttgaactagtcgggatattggttgcatggcttttcatctacaacaatctcctcttcaagccaaaaaggaaagaatttctagagaacatcaaaagctcaggatctcgaatcctggggcagtaa

SEQ ID NO: 122241 - DNA, 1020 bp, Zea mays
  Clone ID: MRT4577_42968C.1
aattcggcacgaggcgatgctgcgtgagtggacgagagggctccggctacatctgctgcgcccgccgcagcaagacgcgccggccggcaggggcagctctagtcttcgtcgcgtggttccacccccacacgcatcacccaccgcgcgccgcctcgtgcgtgcctctcaactccgtctcgttctgcagcggctctcgccggtggtctggcagcagcagccatgatgatggcgtgtgccctcgccgtcgcccagccagcagcatctctcgcgccgccatccggcaagaggaccctctccggcggccgccccccgcggctgccacctcccaggctttcaggtaaacttgccttcgccacaccgtgctgcgtgcgtggtgcaggcaagctaataaggagccgcgctgccgttgccaaggctgcgcaggacggctcggaatcgtccgggagcatagtgaaatacgtcacgagctctttcagcaccgcggaagacatttttgccctagctggtataggctttgccgcagtagctgcattatgggcttcggtcaacctcattgagatcatcgacaagctcccggtccttcctcttctctttgaactagtcgggatattggttgcatggcttttcatctacaacaatctcctcttcaagccaaaaaggaaagaatttctagagaacatcaaaagctcaggatctcgaatcctggggcagtaacctttgtaggcgacagttgacagcaagcactctgtcatgggttctctgcaagcatgccgaatgtaattatgcaatgtaactgtatgcaagctatgggtgttaccattttttattgtataagcatcaccaattttctgtacaggttagtgtgattaaaatcgttctcctagtaccagaacttggacttgtacgagcctaataagaacatacgcccgaatccttcctgtaccggttaactaggcgaaaatcgggctccttggccctgcacctgcacctgtccccgcaactgaatgcttcgctattgaa

SEQ ID NO: 122242 - DNA, 359 bp, Zea mays
  Clone ID: MRT4577_42969C.1
cttctatcagtaccatcaatcatcattcatcttagtagtataggcaccaaatcaagaggtgcgacatcaattatctaactccaaaaaccatgaagctggtgcttgtggttcttgctttcattgctttagtatcaagtgtttcttgtccacaaacaggcggttgcagctgtggtcacaccaaagccttgacaagaacattttccacccacctatatccacaaaacacaacataaccaccccaacttcccagtgatgaaccaaaaaaaaggttaatcacccaaaactacacacagagtatgtaaacacacacacgagacacaacacacacagacacacactatggagcacacactacacat

SEQ ID NO: 122243 - DNA, 300 bp, Zea mays
  Clone ID: MRT4577_4296C.1
aattcggcacgaggcgcgcgccccattggctcgtgtcgtgcacgcacaccgctcgcccgccccccgcttccttggcaaagcctcgcctcccggctttccacgcgcggcatcaagctcctcatcggtgcagttcgcacttcgcagcgggcgggcgggacacgacactccacacacacacacacagagcgacacagattgcagctcggcacgttggaggcaggcagggatggagccgatgggcagggacggcggtggaggccacgggaggggctggaaggggaagggcgagagctcggactg

SEQ ID NO: 122244 - DNA, 193 bp, Zea mays
  Clone ID: MRT4577_42970C.1
ctacccgcaaccatgcggaggacgtggaaccggcacaccaaggctgataatcggagcactgaacttactggtcgtgcggctaagaaccgcaaggcgaaccggcacaacctcaggcaacaaacggaagcagcaacagcggcttccgctcccgccgttccccccgggcaagctggccatcatcggggccctccac

SEQ ID NO: 122245 - DNA, 1044 bp, Zea mays
  Clone ID: MRT4577_42971C.1
gcaacatcctcaaaacgctgaagaagctcaagccggaactctgcgccgacgccatgggcacgctcatctaccagtccgacatgcgcgcgcaggatcccgtcggtggctgctaccgcctcgtcctcagtctggagcgccagctcgagatcgatactgccgagctcaccgccgtgctccaccacttggcgttctgccgccaggctaccacgacaaccaccgtgatggcaccgcaacagcaaggcggtggcatggctgacctcgacgtcacgtcctccaaccagccgcttctccccaacgagcagcaagaagtcgttgacgcactctacgtgaatcacgaagctcacaccgccatccttcaaaccgacgaggtcgtccaccgccacggtggaggccacagccccaccgatgatcatcacggtgagcagcaacagcagcagctcttcgactacttctattacgatgccaccgccagcgacgatgcaagtagcaagcctaccatagacatcaacctcgacaacatgcaacaattcgattttgacgatagttgtgccgccgccgagaaagtggatctggctccggcagctggggatggggaaataaggcatcatcagcacctcgacatgaattgccagattgaccacaaagattatttcgagataaaggcggcgtcactcgtcgacgcctttgacatccggcaggacctgcagccggtggcagacgtgaacgccgaggttgacattgacatcaagacggtggatatgaatgctagcattggcgtcgacatgaaggcgatggacatgaacgccaacgtagacgtcaatggcgacctgcagggggatgatgccgctgtcaacgtctccacctgtgaagctgaagcagcaaaaatggcagccgagtcatcccattgcaggctagggttaggattttcttcgttctgatcaatcgtctttccatttctcgcatgcatagggatgccaatgcctggaccaataattctttttttatgatagagaaactagattttttttggtcaaccaaaagacc

SEQ ID NO: 122246 - DNA, 228 bp, Zea mays
  Clone ID: MRT4577_42972C.1
cttttcctcctctgctctctctccatcctctgcctcctcttcctccacctggcacatcgtgggttcctgtggatcctcttaaataacatatctctcagcatatttcaaatatcatattttcatccttatccaattacatgaggatcgttttagtctgagattaatgggtgcttcatctttacattacaagaatcttgttttcaaggttggttctacattgaattatct

SEQ ID NO: 122247 - DNA, 257 bp, Zea mays
  Clone ID: MRT4577_42973C.1
cgcacgcttccgaacccaacaccctttcattaacgtgatccacatatcggaccgggctatctaagacgctgatcgacatactgaacccatcgaacaagcccggaggatcaccacacatcacaatgatggatgcacataatttcatggtctagttacctcaccttatcctcacggctctccatgctatacacaacgatatcttgatcactgacccgatatacagtatcaccatcaataatccttacagactaaacatt

SEQ ID NO: 122248 - DNA, 349 bp, Zea mays
  unsure (1)..(349): unsure at all n locations
  Clone ID: MRT4577_42974C.1
cccacgcgtccgcccacgcgtccgatcatttcttcggtataattgcaattgtacaatatattgtgataccttgtattttacttgatcaattgacaattatacttcactatgtatacagatgaaattttagattttacgtgatatatcaatatgtaattgatgggcctatgaaattctgagaattcagagaagtgttgatttgttgccggacacatcactcagccattgaattgttgccggacttgcttcttttgtttccttgttgaattctgttatatatggcagggattaaccgaatgaatattttgaggcanggattaaaccatagagggattaaacccccaaggga

SEQ ID NO: 122249 - DNA, 297 bp, Zea mays
  Clone ID: MRT4577_42975C.1
ggaaatacccccctacaccttgcctgtgagcagggctgcctggccagcgtgggagtcctgactcagtcctgcaccaccccgcacctccactccatcctgaaggctaccaactacaatggccacacgtgtctacacttagcctctatccatggctacctgggcatcgtggagcttttggtgtccttgggtgctgatgtcaatgctcaggagccctgtaatggccggactgcccttcacctcgcagtggacctgcaaaatcctgacctggtgtcactcctgttgaagtgtggggctgat

SEQ ID NO: 122250 - DNA, 142 bp, Zea mays
  Clone ID: MRT4577_42976C.1
cgctgctccaacagcccaaattaagctttctacgacgtcttaacgcaaacctcgcagtataaagtattacagcacagcaagcaagcatgcctaaagaaaaaatgacaacactacttgcctacggacaacaaaatcttccagc

SEQ ID NO: 122251 - DNA, 164 bp, Zea mays
  Clone ID: MRT4577_42977C.1
tctcggccgctcgacgtagcccagcgctcgtgctcctcgcctgccgcgtgctcgcgccgcagcgccaccatgtaagttcaacatggtgtaagccgtgctaccgggtcgccagaagaagctggaaaatggatgacgaccaggaaacttcgtgcctttgtatgact

SEQ ID NO: 122252 - DNA, 111 bp, Zea mays
  Clone ID: MRT4577_42978C.1
gcgtattacggcggattgcactcgtactgcactcggattcacgcgtacgcgcgcgtacgcacgcgtctgtcgcgcggtattgcgcgcaatgcatactataacgccgctagc

SEQ ID NO: 122253 - DNA, 371 bp, Zea mays
  Clone ID: MRT4577_42979C.1
taaaaaagaaaccggccgaggattacaagcaaaaaaaaaaaattgaaaacaaaaaactaaaaaaaaaaaaaaaaaaaaaaatagaaaaaaaaaatagaaataagctaaaggcgttgagccccccgggggccaaccccccttggggcgtattcgtgggtgggggttccacccgcgcgcgggcggtcgctggccgcattttggagggcccaaaacccccccaaatggggcgggttcccgatttaaggcctttcggtttacaccccttgtggggaaagacccgggccccccccccttaacccccttttcccaactcccccttttaaacgcagggcccctccccgaagggccccccccaaaacccctttcataaa

SEQ ID NO: 122254 - DNA, 329 bp, Zea mays
  Clone ID: MRT4577_4297C.1
ggtaccctgggttcgccggctgccccgctcgtcgccctcaattcgttccgtccagcaaggaagaatcgagcagccaagagaggaaaaggctcgtacgaagcagaccgcgcaagtccaccggagcaaggccccgcgcaagcagctcgccaccaaggcgggaggaagtctgcgccgacgaccgcgggtgaaaaccccacagtcaggcccgggacggggctctgccagatccgagtccgaagagcacggctgtgatccggaagtgccttcaggctggtcggagacgtcagacttagacggattgggtcagaccacccgcctgccctcagaag

SEQ ID NO: 122255 - DNA, 682 bp, Zea mays
  unsure (1)..(682): unsure at all n locations
  Clone ID: MRT4577_42980C.1
cattgggtacctcgaggccggccggggaagccctaaccccttctcgaccgttgccccctctcgtcggcgccggcaaggcggcaagaattcaagatgaccctcctcgcagctatcactaaccccgccaccggctccagcgagaaggcccatcctatcgtgatcaccccgggtgccacgccgccgccgctgacatcctccgcgctccccacctcaatcccgccctccgcctggtcgctctcccccgccgaccccgccatcgccaccgccgcctcctacctcgcagcctccctcgactcatgctcctccctcccgcgcctccgcatccttctcaccgacttcatcaccactctgtcccaatccctcgcactcccaaccccggcggcggccctccccgccgccatccgcgccgtcgcgccttacttccccgctgctatctcctcccttgtggcctccaaggcggcaagcctcgccgggcacgacatcctccttgctcttgcggaatcccgcctcctcccgcaacccgccaccggaactcatctcctcgctatgcaagaaggaccaggncgaccttgtctgcgccctacttcgccaggncgccgaaatccgctcctccgagatcctcggcgcgctccgctgcttcctctcgccggcctccgagaaggcctacangccatgatcgacg

SEQ ID NO: 122256 - DNA, 746 bp, Zea mays
  unsure (1)..(746): unsure at all n locations
  Clone ID: MRT4577_42981C.1
cctatngttattactggnaacagaacccatacagcattcacatatatccatcaattatcagatggatataacacaagcatataggacattcatggaagttcacacgaactaaaattgttcacagaagtccacacaaattgaaactggaacaagttcacagaactacaaggtggcgaccaatacaagttcacggaagtacaagaaactaattcatcctacattgcagcagtttccttagtgtcaacttctttttaagcatacaaacacctaaaccttcacttgggctcacttggctagatgtagcctaaacttcgttggtactgccttgcactgctaatgcctgccacccttcaactactactgcatgcatcacttgtgctgcttcaccttgtgtaacctgaacttcagtactcgacacagttgaggatggacatccacttattgaaaatagcacaagacgactacatggaaactatcatatactggttgtgatggttcttgtgatggttcctgtgaaggctcgtttgctccagcatctttttaggtcatttgccaatctccaccacactaagaggggacttcaacaaaacttcttccctccacctgaagaaatgaagcacatctgcaacttgatcagcgagatcagcaacagatgacacccattaaacaggactgacttgatctctggcatgggaaccccccctggacaaaccactcgcaagnatctgaacgctggtaactctcgt

SEQ ID NO: 122257 - DNA, 416 bp, Zea mays
  Clone ID: MRT4577_42982C.1
gatgaagctcttgccacttcgtctcgtctttatttggtcatcacttctgatacaacatctggtacaacattttcgatctgacttgaggacgtgaacacgtggcatagaaatcgaagaagcactcgaggtacaagacgagtaacagcaatttggtacagcatttgatgaagctcttgccacttccttcgtctcgtctttatttggtcatcacttctgatacaacatctggtacaacattttcgatcttccactcctccacgaggaccttcttcagcctcccgcagcccgagacgacggtcgccaccccggagctggtgatccccccgcagtagaccatctggcaggactccagctgcaggcaccctcgcacaaggtggcccaagccgaccttggtgacctcagggcagtgggagagc

SEQ ID NO: 122258 - DNA, 292 bp, Zea mays
  Clone ID: MRT4577_42983C.1
ggtggagcacgtaaaggtggacgacaggtgggagcacagcatctacaaactgatggtgagctcggagctggcattctgtgcacacaagataggttgggacgctggaccgccagtgcgagcgccttgccagtgtcatggccaataacatggcgaccagtgacatcagtgtgatcactaacgcggatgggaggaagagcatgctgaagctggccaagaggatgatgatgagcttctgaagcggagtgactgcatgtgcgacgcaccaaacgactacactgaccagcacaggctc

SEQ ID NO: 122259 - DNA, 906 bp, Zea mays
  unsure (1)..(906): unsure at all n locations
  Clone ID: MRT4577_42984C.1
gtgacgacgccttgtgccacatagctcaaggctgcaagaactgaacagaactttctattcggcgtggttatgaggttggagacagggcattggtgtctatcgccgagaactgtaaatcgctcagagagttaacgctccagttctgtgagagggtatccgatgcagggctatctgcaatcgcggaaaactgccctctgcataggctaaacttgtgcgggtgccacctaatcaccgataccgggctgacggcagttgccagaggatgccctgatctagtcttcctggatatgagcgttcttcggatcgtaggtgacatagcgcttgcggagataggcgacggctgtccgaagctgagagagatcgcgctctcccactgccctgaggtcaccaacgtcggcctgggccaccttgtgcgagggtgcctgcagctggagtcctgccagatggtctactgccggcggatcaccagctccggggtggcgaccgtcgtctcgggctgcgggaggctgaagaaggtcctcgtggaggagtggaaggtgagcgagaggacccggcggagggcggggcccgtcctgtcgttcctctgcaccgggctctagtaagtagggttggcaagaaagggcaatgaatctgggcagcgtcagacttgctctttggatgaacagagcttgtcttgcgctgtgtgctgtgttgtgtcgtataccataggtccatagcatcgttcgttgcctcaaacaaaaggtgttgtgtgaactgttttaatttactcacaatgtgttgcacagatcgaaaatgttgtaccagatgttgtatcagaagtgatgaccaaataaagacgtgacgaaggaagtggcaagagcttcatcataaaaaaanatanaaaaatatcctacttnnaaatcctat

SEQ ID NO: 122260 - DNA, 161 bp, Zea mays
  Clone ID: MRT4577_42985C.1
tcgggggggatgcgcatcgcgcacttcgtggtcgaagagccgatggtgatcgggcaccagtgcgcagggcgcggtcgaggaggtgcgcgcccgggtgacccacctctacgtgggcaacctggtggggctcgtacccgggcgtcagctgctggcactgctca

SEQ ID NO: 122261 - DNA, 409 bp, Zea mays
  Clone ID: MRT4577_42986C.1
tcgcgtgggcttttattttaccacaagacaacatggatggaccaagatgcggcgcgaaactacaatacatgagagcaacacagaagtgcagtgggtgttccctgacccaaactgctgtatatgcgtacacacatgggcacaccatgcatatcttttagaacaaatgcacactggaactatgcagtgggaagttctttacctcaggcacacgatgaataaactgatctatatgtggccaagaaggaagctttcaggtttcacaaatgattattggctcgacggctgcataactgatatgtctaatgcggtacattggatcgaatagcattgaagaatataagaggatacaaactgtaccagtcactaattcttgatatcgtatcgataggaatctgacactgtagagttc

SEQ ID NO: 122262 - DNA, 363 bp, Zea mays
  Clone ID: MRT4577_42987C.1
caatgagacgctgggaatgctgtgcaatcttggaggtcatcgcagtcagccaagatcggctgggtgtccaaggacagaaagtgagcaagtacggcaacgatctcgaggtgcagagatactatcttacagcagctaccaaaccgatcgcccatcgcaagcagcacgcgtctcgctcgggcacgaattaatcctggtcgatcccatggcgcgtttggtccattgcaggtatgggcagggcagctctcggggcacaggaaggcggcgctgctgctcaaccggggggccacgcgctccgcgtccatcaccgcggcatggccggacgtgggcatccgtcgcggcgtcgccgtgcaggcgagggacgtc

SEQ ID NO: 122263 - DNA, 446 bp, Zea mays
  unsure (1)..(446): unsure at all n locations
  Clone ID: MRT4577_42988C.1
caacagcgtagtgtattgtatttccggagtagtggttggggagagtagtattgatccgcattgtcgacggaggatgctgttgtggctgatgtcccggtgaccgatgtgccatcggatgtcccggcggcccatgtggccgatgcgcccaaggcgaataatgcgcccaaggagaatatggcgcctaaggagaagaagccgtccgcggcgattaatccggcggcgcaccctccctacgctgagatgattgtagatgcgatcgctgccctcatggagaggaaggggtcgagctcggtggccatcatgctgtacgtcgaggggattcacggcggcntgctccccaccatcttccgcatgctgctcaccgtgcagctgatgatgctcgctgccgccggcntgcttgcgagggtgatgttctccttcntgctgccggcctccgtcgcccttcc

SEQ ID NO: 122264 - DNA, 367 bp, Zea mays
  Clone ID: MRT4577_42989C.1
tcgtttctacaagcggctctccggcgagctacccaaccggttctgcgcgccgccggtgatgaactacatcttcgtgcggagtaacccgctctctggggaaatatagaacaagctctgcttctgcggcggaaaagacctactaaacctctgcctgatcacctcctacggagctgctctgttcgcactgcttggcatcgagaacataatctacgtcaatgtagcctccggcgcctttgtaggcgacatgcccagcattgtgacctgcggcaccagattctcacgcttggtctggtcccgcgaccggatcacggggcccatgcccgccagcgctgtgaatcgcacgagcctgaggcttttggatctgggg

SEQ ID NO: 122265 - DNA, 660 bp, Zea mays
  Clone ID: MRT4577_4298C.1
gtaaacccataaacggtaaggacaatagtaacagtacactagtgttatatactgaaatcttttatccagttcaggcatggtcggaatgttccgaggatcaaacggcagcagagagcaagagcgaccatgaccaccgcgcgcacatggctgcaacatcacagcacatggttacaccaccacttccaagtcccaaccactgataaatgtcacacaacacatcacaattcatgttgcagtcccacactgcctgacttctacagtactacagctgtgtcgctctatgtttttataggctgtggatcgtcaaaaatccacgcagaaacgcctgagcccacatggttcctccatgacttccagcaaaaaccgggggggcaagtcggctgcaccatgcttcctggaggtctaagcgaagagaagcacatagatgaagtcggggcggctttaaattttatgaccacatatcctgacagagtacaccgactcaccatcgtctggctcgttaacaagctcgcagacgtccccagcccgaaggtcgtttgctgccacgaaatgtttccagccagcggtgaatcccacaaataacaggctgtcgtggtaaacgacaggccatagtctcttcttggggtccttcagcattataacatcatagtcataccttct

SEQ ID NO: 122266 - DNA, 303 bp, Zea mays
  unsure (1)..(303): unsure at all n locations
  Clone ID: MRT4577_42990C.1
aattcgnacgaggctactcccggtgccctacctttggggtgcttcacccgacgctggccgcctttctctccacaccggcgcccagctcggagcgccgagtatgtagttgcgcatgcctctggatccgctcgaccccccagagaagccctcgtggcggtgtggactcactatattgtgtgcctgacctggagcagcaggcgatgaaggagcacgccccaataggcgaggggggcatgggttggccggcccgggtgtctatgtgaatagggtgactggtatgagatatggttgtccctgggctgc

SEQ ID NO: 122267 - DNA, 423 bp, Zea mays
  Clone ID: MRT4577_42991C.1
ggcatcaccacgtagagtctataatagagtgcaaaaataagcacacgttctcccttaaagtaacaatcttcgtgaacgaattatacggagatggttcgattatctccaaggaatgaattgattacataaaaatcttatccctgcgaaccataatggggggaaaatgaatagaaaagacacgtgcacatatattaaattggagacagaaaaaaggctgatacacctaaatcctacgagtagcttaatgcttataggaagggacaggacacatttaatcctggcgatgtaggcaatctgagcgaaacatatgttggagctgaagggtacatgtgtgtgtatataaccaggatcatcatccattgcttgggctggacgaagatgtactggatcataatacctgtgcgacgctctttatgagccccg

SEQ ID NO: 122268 - DNA, 276 bp, Zea mays
  Clone ID: MRT4577_42992C.1
catcctcgtcttcttctgtctatccatggcgatttggcgtccccacctgtcccgcccccacccttctctggctacgtcctcgctttcccttcctcccagctgcctgcccccccttccctaccctagctacgcacgctaccagctgccccccatccatgccgtccaggaagctggtgcaggactccaaagggatcgcattgatctcttctcacctgccgcctgctgcatgcgctgcgcgttgccgcacaagatcagtgccatccctttggcattttc

SEQ ID NO: 122269 - DNA, 670 bp, Zea mays
  Clone ID: MRT4577_42993C.1
tccccatctttaaatattaatagagctcctgcagagatctggggggggggggggggggccagatcccccccacccgaggcggacgcccaccccgtttggacactcgcgggagaacgcatggacgtagacggtgttgctcatactagtcaacaagctctagtacgcaggcaggcggactcagtcgaactacgtgttaccacgattcctggacacgtaggcactcatcacccggggacgccaccgctaagttaggttagtaggacactccgccaacccatcaccaacatcccggtatcatcgcgccccgcccaccagactcctacccgatcaaaactcctaaatgaggcagacgacctacagaaataaggagaagaacgttacgaataggaagaagaaactactctcctcggctaactaggtgctgaaggaggacgcttcttcttctacagagaacatggagataatgaccctactgttccccactcgggtttatcttgctaccactatgaggactactacactcctagagttgcacatcttctaaataagaacttactagaagtagaacaacgtggtggtactgacgctcaagagtacaacctgtaagggaaaacgtgaaattacgttaacataaataatccccgttgacattaccattccccagagtctt

SEQ ID NO: 122270 - DNA, 1322 bp, Zea mays
  Clone ID: MRT4577_42994C.1
gattgggatcctcgaggccggccggggctccagttttcttatctcccccatcttcgtcgtcctcacagcgccggcgctccatcttccgttccttcccttactcgcgctcggcacgcaggcgacggcggcggcggcggcgctcaggctcgggctcgggctctcagcgacggcgtcagcggcttcccctcccgcctctcgctagtcgactcgcgccctcgcatccgttcctccgcacaccggccggtgaccctgcgtttcgttcttgttaactattcaagaagtaggaaatgatgagcaacttccaagccactacttgcaagcctcacagtaggatcattgtgaagaaacctatagcaagtcttggaagcacatgtcagtatccattatattcacatgctctcggattccacacgttgcaagagaaggtgtacccaaggctagttctcatttctgctagccacaaaaggcttacttctgtatgtgccttaagtggaaagggaagctctggcactgctgatgaccctttgatggaatctttgaagaaagctgtggctgatgcaaaaaagccccgttccatacaagacttactgaaggagcaggtggctaaactgagagaacaagcgtctggtggaggcagagggaatgggaatcgccgtggaggcagtggtggttctggtggcccagatgatgaatcgttcaaggaaacattggatgaagtagtgcaagttatcttagccactgttgctttcatacttgtgtacatccacataatcagaggggaggagctttaccgtcttgccagggactacaccagatatctcgtcaccggtaagaggactgcccgactgaagcgtgccatgcaaaggtggcgcaacttctcggagagcttcatgcagaaggcaggctcagaagacgaccaatatgagagaccagctgtgtcaaaacctgcatggtggcaacagcctcagaaatttgtgcattttgtggaggacctttgcaggggaaactggcgtccccatgctcaggagtcttagttgatggagtaccccccgacccattgcagaatgcatacttggctgtgattggagcaaggtcgcctgtcaggctgtcacctggggcaggttttttttttttgttatttatcggatatttgccactggtttcttaggagtatgtagaaagtcgctgaattgttggcaattttgcagttgatagaacctcgttttgagactctaacctgccaagtcgggtgtggaattgtttattaataagctgtttggtttgaggaatgatcaaaggactgcaaaaaaaactccaccacc

SEQ ID NO: 122271 - DNA, 379 bp, Zea mays
  Clone ID: MRT4577_42995C.1
gagaggaaacctgattaattggaaataaagagccacacccaagggcagggcaactcaaaaaacagaaccggccggggcgggcgcgcccaagggcgaaccccaacacacggggggccgggacaaagggagccgggcccggaaccaagcatgggggaacaatggccaaaacaggcccccggggaaaattggaacccccacacaagcccacccaaaaaacgagccggcaccaaaaagggaaaaggcgggggcgcccaaagagggagccaaccaacaaaaagggcggggcgcacacgggcccctgcccaggcgggaaaacaggcgggccagccaccagaaggaaacggccaacccccggggagagggcgcttgcgaatggggc

SEQ ID NO: 122272 - DNA, 1278 bp, Zea mays
  unsure (1)..(1278): unsure at all n locations
  Clone ID: MRT4577_42996C.1
atatcgctgcgataactaaagcagcctggctgtgcctacacgcttgccttatcttctcccgttcaccccgccgtgcgcgcgcgcccccgcggcgacaaccgggcgaccgccgccgacctacgccaggtgccaagccgttcctcagtcccatcacgaggccttcaacgagcccttcgccggcgacgagaaaatttgattctagttaactattcaagaagtaggagatgatgagctacttccaaaccactacttgcaagcctcaaagcagggtcgttgtgaacaaacctataccaggtcttgggagcacaagtcagcatccgttatattcacatgctctcagattccacaggctgcaacagaaggtgtacccaaggctacttctcgttgctgctagccacaaaaggcttactcctgtatgtgtcttaagtggaaagggaaatgctggcactgctgatgatcctttgatggaatctttgaagaaagctatggctgatgcaaaaaagcccaggtccatacaagacttgctgaaggagcaggtggctaaactcagagaacaagcatccggtggaggcggagggaatgggaatcgccgtggaggcagtggtggttctggtggcccagatgatgagtccttcaaggaagcattggatgaagtagtccaagttatcttagccactgttgctttcatacttgtgtacatccacataatcagaggggaggagctttaccgtcttgccagggactacaccagatatctcgtcactggtaagagaactgcccgactgaagcgttccatgcaaaagtggcacaacttctccgagagcttcatgcagaaggaaggctcagaagaggaccaatatgagaaacctacatggtggcaacagcctcagaaacttgtgcatcttatggaggagctttgcaggggaaactggcgtccccatgcccaggagtcgtagttgatggtgtaccatcacgcccctctttttttttttttgacccattgcagaatgcaaaataggaacgtgggctggtgcagtggagtaaggtcgcctggaccagtgttttcttttgttgttctttatcgggtatttgtctctggtttcttaaaagtatgtagagagtgagtgaattcgtggcatttttgcagttgatgggaccgtgttttgagactgtaacctgccaatcaagcgttggagataccccnnnnnnnnnnnnnnnnnnnnnnnnnnnnnnnnnnnnnnnnnnnnnnnnnnnnnnnnnnnnnnnnnnnnnnnnnnn

SEQ ID NO: 122273 - DNA, 2379 bp, Zea mays
  Clone ID: MRT4577_42997C.1
agttcggaatttggctctttcgttgatgggagtgccttctcttcatctcctcatgatcaacttgggaaaagcaactggaacctcaagaatttttcatggctccccaattctgttctaagacttcttcagacgccaattccaggagtgacagatccaatgctttatattgggatgctcttcagcatgtttgcgtggcacgtggaagaccattacttgtacagcatcaattaccatcactgtggggcatttaaaacatggtatgggataccaggcgatgcggctcctgggtttgaaagggttgctagccagtacgtatataacaaggacattttgattggtgatggagaggatgcagcatttgatgtcctactagggaaaacaacaatgttccctccaaatgtcttgctagatcacaatgttcctgtctataaagctgtacaaagacctggagaatttgttattacttttcctcgttcttaccatgcaggcttcagtcatggcttcaattgtggagaggctgttaattttgctattggcgattggtttcctcttggttctctggctagcaagcgctatgcacttctgaacagaactccattgcttgcacatgaggagctactttgtcgttctgctgtgcttctatcccaaaagctgttgaactgtgatccaagatccttggacaagttggaacatccatattcccagaattgtgtgaaatcctgctttgtgcggttgatacgattccagcgacgtgctcgtggccttcttgctaaaatgggttctgaaatatgctataagccaaagacatttccaaatctgtcctgtagcatttgtcggcgtgattgctatatcacacacgtgttgtgtagatgtaactttgatcctgtctgcctacatcatgaacaagaactgcggagctgcccttgtaagtccaatcgcgttgtctatgttagagaggacatactggagctagaggctctatcaagaaaatttgagcaggatgtcagctcgtataaggaaggaagttgcattagcccatgtaaggaggttgagatctctgatactactgatgaacaacttccaaatcttgggattactctggatttcgttaatagtaaagctggtagctcaggctttatgactgttgatggaggaaacagttcttctgcagtatcaattttgacatcttctgcgcatcatgaggcatataagcatacagaagcaagggcaataaatacatcaatgaccaaaggaacttacactatggatgagagttcatccggcatagatggtgcttgtaatgaacacggttcatgtaatgcttcagccatggaatgcagtgataattcggattcggagtgtgaaatcttccgagtcaagcgcaggtccacctcatttgacaaacctacttctgaagctaagacatcaaccttgtctgaacagcaggttctgaggcggctgaagaaggtacgtcctggagtacagcaggtcagtaagcgtccagaagaatctggtaatggttcagttcgctctacccatatgagcccgagctcaaatcatgcctcttcggatgatgaaatagacatggctcccctattcttgaggataaagcggcggcagttggaaacccaagatgctacatgtcctggtacgagaccgcagtcatatccgccttccagtggtggttctggagaagagtttgtggaaagaactagagatgctgcagtagaactccgtccaaaacgagtgaaaatccggctaccttctaatgccagtaggcagattgagcagcagcgcagttcagggcagagatttgctagggaggacaggttgccgcttggttttccacgtacattttagggaatcacaggtgctactaacctctacttgagcagacgaattctttgtttaggtacactgttaactacaaaacgtggtgacagaagggaggagtgggagggatcagttgcagactgactttagaattggcaggaaaggaagcggctatctaatcgattcttttgtgcagcagggcctccaatttgaggccactgggggcacgcttagaagatacacgtgataatattcttgttgctggaggttccgtgtcactgccgatagctctttgatgcctggctatcagtgacacagattaaagagaacctcgctaccttgatatgtccgctagtgtttagagcatgtagctagcttagctgttatctctctcactgtaccaacggcctttcccttgtaatttcctgtaaacaggcttagctgctacactatggctaactctattcttttgttggtttagccttaacgttaaattcaatgcatttcttttttggttaaaaagtaaaaaaaaaaaaaaaaaaaact

SEQ ID NO: 122274 - DNA, 415 bp, Zea mays
  unsure (1)..(415): unsure at all n locations
  Clone ID: MRT4577_42998C.1
ccggagaggccgncgaacccaaacccaaaccgcaggagaggacagaagcgggccgncaccagggcagccagcccagcaggcagggggagggagtcaagagggcgacggaggggaggaacgcgaaggaggagagccagcgcgcggcgggttttgngaagggggagaaggaccaccganacaaggtgaacaagaaagaccccgcggaggggggggagcgggaacccaaggtgggggggcccggggaagggcacgaggagcaggcggccgagctgcagggagacgactgccgagacgccggcgacgacttcgacatcgtcaccgaggacaactgccagaagaggaagacgacgggcatcggcagggcaccggcggcggcgaggacgagggccaagacccggcacgggacatcgaagca

SEQ ID NO: 122275 - DNA, 1616 bp, Zea mays
  Clone ID: MRT4577_42999C.1
tctggtcctccctgccgttggtcagttggtcatctccgccggctcaacctcaacgcgggtagcacgaccaccaccagtccaccaccacgcccacctccccctctctcctcctcttctatagtcaaaccacccccctccttccacaaaccttcgcagaaggggcacaccggcaaggacgcagctttttcccgtctccttctgggttctacacttctacttctttccccacctcgccttcgttccgcccgccaccaaatcgcgaggcagcggagccagcgacgccgttcctttcgttgtgcttccttgggttcttgctgccggccgccggcgatttggcgaggtccgtttgggcggcaggtagaggtaggtagaggcgatcgtttcttggcggctggtggaatggatagccacgccgctgtgtcgagttccgtcggatccggggatggcgccgcgcagcccaggaggaactccaggaagcccaagtattccaagtttacgcagcaggagcttccagcttgcaagccgattcttactccaaaatgggttatttcagtatttgttcttgttggtgtgatttttgtcccgatcggtattgtttcgctgcgagcttcacatcaagttgtcgagatcgttgatcggtatgatgacgcatgcatccctgctaatgtcactgagaagcttgcttacatccagaatgatagtataccaaaaacctgcacaagaaatctgacgattacaaaggatatgaaacaaccgatttttgtatattatcagctggataacttttaccagaatcataggaggtatgtcaagagccgtaacgacgcacaactaagagataaaagtaaggcgagtgacactaccaattgtgatcccgagaactaaacagtagatggaaagccatgagatgccttgcggtctaattgcatggagaatagtgaatgatacatataacttgggagtgatgccttccaaccgaactttcagaaaggacctcttaaaggtggaaaaacacttgatccaagtatcccgttgagtaagcaagaggacctcattgtttggatgcggactgcagcacttccgacattcagaaagctgtatggaaggatatatgttgatctcaaggaaaacgatacaatcacagtccagttggacaacaactacaacacctatagctttggtggcaagaagaagctggtgctttctaccgcaacctggctcgggggaaagaacgattttctgggccttgcgtacctcaccgtcggcggactctgcttcttcctggcattcgcgttcaccttgctatacttgataaagccaaggaaaatgggagataacagctacctgtcatggaacagacccccttcaggtcgctgatgatgtgctttggaagttaaatgcgatacacaggcagcaccaaacagattcagattatggtcggaatgtatcttgtaccacagagaaattttatccgtgctcgtcggtgtagaatatatacggcacccttgcacatattgtacattacatcgaaacacatagctttgttttctacaaaattgaatactcaaaagtttcagaagtggatgccagtagttccatgcttttttttcccttcc

SEQ ID NO: 122276 - DNA, 369 bp, Zea mays
  unsure (1)..(369): unsure at all n locations
  Clone ID: MRT4577_4299C.1
ggtggggtnatataggtatttggggggttataacaccggatgactacacactatagaagtacacaggtccatttttttttacagacggaccagtacgccaatgcagtgcactgggggacgctggtctcaaaatctcgggtgaagatcggggccaacatcttggcaaaacctacttagtacacatgggccggcggcctgtagattgcctaaaacctaatctgcgggggctagagatactgtcactactgaactacaagagcacatatgttggctaagggcgactggttggatagtatctcgttctagttgatctgggaggacgggaacttgtggagcacgaaggtctggtgcttgtccgacggaacactt

SEQ ID NO: 122277 - DNA, 1515 bp, Zea mays
  Clone ID: MRT4577_429C.1
gttctacacttcaaacatgcccatcattcttcactctgcgctgattaccaacctctattttatatcccaggtacacacctcatttctaatgctgcagtaagttatatcttctgtatgtgtgtgtgtaagtgctaatgtattttactgctatcacagcttctctacaggaagtacagtggaaacttccttgttaaccttcttgggaagtggaaggagtctgaatactctggccattctattcctgttggtggtcttgcttactatgtaactgccccatcaaggtgaaaatctagttccttcagtggggactggggaggccttctcgccatgatcatttttgttgtttttgttattcaataattaggtattcttttgactaacaatagcacattggaaaccacacagtttggctgatgtccttgcaaatccattccatgcactgttttatgtggtcttcatgctgtcagcctgtgctctgttctcaaagacatggattgaagtttctggttcatcagcaaaggatgttgctaagcagctcaaggaacaacaaatggtgatgccaggccatcgtgagtcgaacttgcagaaggaacttaaccgatacatccccactgccgctgcatttggtggtgtatgcattggcgcattgaccgtcctggctgatttcatgggtgcgattggttcaggaactggtatattgctcgctgtgacaatcatataccaatacttcgaaacctttgagaaggaaagggcgactgagcttggtttctttggtttttgattagtagctgtggaaccttaacttggctatagctgaattttcttgtaagtccctgtagtgcttagccagttgtaacttaaagagttctgtttaggttgccttcttgcggccacaatcatgtagcagaatgtgcgtgtgtttcaggttagcgtgggggtatgtgcatctgtccaaagagagtctgcaatttggcaaccggatattttgttatcaatttcagttacttcgaacaaaaaaaaaaaaaaaaagaaaaaaaaaaaaaaaaaaaaaaaaaaaaaaaaaaaaaaaaaaaatcaccaccactggggtcttcagaccattagctttatctactccagagcgcaaaaaaacccgatcgacaccatgagggtgttgctcgttgccctcgctctcctggctctcgttgcgagcgccacctccacgcataaaagcggcgggttgcggttgccagccaccgccgccggttcatttatcgccgccggtgcatttgccacctccggttcacctgccacctccggtgcatttcccaccgccggtccacctgccgccgccggtccacctgccaccgccggtccttgtgccgccgccggttcatctgccgccgccaccatgccactaccctactaaaccgccccggcctaggcctaatccccagccacacccatggcccgtgccaacagcccgaatccaacgccggtgccagctacaggggaacctggcgggcgttggcagaa

SEQ ID NO: 122278 - DNA, 124 bp, Zea mays
  Clone ID: MRT4577_42C.1
caagtacagacgcaacaaccgaacttaaagaaaaaacagggagggttttcgtgaagccagcgtggctgaaacccacccaagcagcgctggaaggcataggagacgagcgcccagagcgcctgcc

SEQ ID NO: 122279 - DNA, 1830 bp, Zea mays
  Clone ID: MRT4577_43000C.1
cattgggtacctcgaggccggccgggacttctttccccgcctcgccttcgttccgcccgccaccaaatcgcgaggcagcggagccagcgacgccgttcctttcgttgtgcttccttgggttcttgctgccggccgccggcgatttggcgaggtccgtttgggcggcaggtagaggtaggtagaggcgatcgtttcttggcggctggtggaatggatagccacgccgctgtgtcgagttccgtcggatccggggatggcgccgcgcagcccaggaggaactccaggaagcccaagtattccaagtttacgcagcaggagcttccagcttgcaagccgattcttactccaaaatgggttatttcagtatttgttcttgttggtgtgatttttgtccctatcggtattgtttcgctgcgagcttcacatcaagttgtcgagatcgttgatcggtacgatgacgcatgtgtccctgctaatgtaactgagaagcttgcttacatccagaatgatagtataccaaaaacctgcacaagaaatctgacgattacaaaggatatgaaacaaccgatttttgtgtattatcagctggataacttttaccagaatcataggaggtatgtcaagagccgtaacgacgcacaactaagagataaaagtaaggcgagtgaaactaccaattgtgatcccgaggccaaaacagtagatggaaagccaattgtgccttgcggtcttattgcatggagcctgttcaatgatacatataccctcatccacaacaataaaaccttgagagtggacaagaaagacatctcttggaagagtgacagagaccacaagtttgggagtgatgtcttccccacgaacttccagaaaggacctcttcaaggtggaaaaatacttaatccaaaaatcccgttgagtgaacaagaggaccttattgtttggatgcggactgcagcgcttccaacattcagaaagctgtatggtaggatatatgttgatctcaaggaaaacgatacaattacagttcagttggagaacaactacaacacctatagcttcagtggcaagaagaagctggtgctttctactgcaacctggattggtggaaagaacgattttctgggccttgcatatctcactgttggtggaatctgcttcgttttggcatttgcattcaccttgctatacttgataaaaccaaggaaaatgggagataacaactacttgtcatggaacagacccactttaggtcgctgatatggttttgaagttaaatgttacacggacaacaaattcatttatggttcagatgtatcttgtaccacatcgaatttttattcatgagcattggtgtagaatacatacagagtaggcatgtgtatacgtgcgacaactttggatccatccttgcacagattgtacattaaactgaaacaaatagttttatgttctccaaaattgtataatcagaagttaatgtcagtttcgatgctttgctcttcttctttaaaagaattaaatctaacctacatgactaaggtatgagatgaacttgagctcttcagaagtgatcagtcgtcgaaggtttgtcaggcgcgctgcaacaactacaaacttgcctctgctttgaactcataactttcatgccacacgcagcaagtaattgctgagatactggccctcagggtatgcggggtcgatagggtgatcacatgctgccccagcttgacgtaagaccgtaaccttacggccagccattgatgcggcaccctgaatggttttgaggaacatgccactttgggtcatagctccagaacaagagcatgt

SEQ ID NO: 122280 - DNA, 256 bp, Zea mays
  Clone ID: MRT4577_43001C.1
taactaaatacaaatgtaaaaaattaagatgataaaagtgtaaacaaaaaatataaatcgggaatacaaaaaaaaaagattgtggacaccgggcggcctttctatagcttccaatgtaagctccccttgccagctggttcataggctatgcaattgggtgactgaatgtagagctcgttgccataccttatacaatatcattcatggacaaacctgtgcgtaccccaagaaatctgccttaaaaaacatccccttt

SEQ ID NO: 122281 - DNA, 635 bp, Zea mays
  Clone ID: MRT4577_43002C.1
cggacgcgtgggcggacgcgtgggcggacgcgtgggcgcggcgatgctgcgccttcgcgcttgcggcggcacggcaccggcatcggtgcccgcgctcgtcaggtcccgcctctccaggagatcctcctccacagcctacgccgccgctaccgtcgcttccgcttcctcctcttcgggggggtggaagacctcgccgccgagcacagagagatcccacatgcgcacttaatatggaaagactgcttgaagcaaggatttcatctgctgttggtttgcggcgcagtttgggtctcccttcaactgacacaaatgcttatcgcctcatcaacagtgaaggggacagattatctggtctaatagtggacatctttgctgatgttgctgttattgcttcatctgctgcttgggttgagaaatataggcaagaaatacaatttcttgttagcacagttaatggcgtcagccatataaagtggaggccatcgacagatattttgaaagaagaaggattggatatatcagagcataaggagcctgcttcaccatgctcaactgttaaggtcatggagaatggcattatctacttagtctcattagaaggtcagaagacagggttttatgcagatcaacgcgaa

SEQ ID NO: 122282 - DNA, 3270 bp, Zea mays
  Clone ID: MRT4577_43003C.1
ccggccgggggatggtgtcaccacgacggccatcctcttgtataggaaaaccggccctctccttgtaaccttgggcaagaggagcagaaaggtcccagctttccgtgttcttctgcttctttccccgcctcgccttcgttccccccgtcaccagatctcgaggcagcggagtccggggacgccgttctttccgttgtgcttcctttgcctcttgctgccggcggccggtgattttcccgaggtctgtttgggcggcaggtagaggctattttcttggcggctggtgggatggatagccacgccgccgggtcgagctccggcgggtccggggatggcggcgcgcagcccaggaggagctccaggaagcccaagtattccaagtttactcagcaggagcttccagcttgcaagccgattcttactccaaaatgggttatttcagtattcgttcttgttggcgtgatttttgtcccgattggtattgtcatcgctgcaagcttcacgacaggttgtcgagatcgttgatcggtatgatgatgcatgtgtccctgctggtgtgactgacaagcttgcttacatccggaatgatagtataccaaaaagctgcacaaggaatctggcgattacaaaggatatgaagcagcccatagttgtatattatcagctggatgccttttaccagaatcataggaggtatgtcaagagtggtcatgatgcactgctgtgcgataaaagtaaagcgactgactttattaattggaaaaccttaggcccaaacgttacagcggtgaccgagggtagctaaaagctctgtttgaatggagccagagataacatagatatgagttatgtcttccccacgaacttccgaaaaggacgtcttcgaactggaactatacttaatccacaaatcccgcagatttggcaatggggtcttcctgatggaatttgaaaaacaacctcttcaacatggaaaaagacttatgccaagaatcccgttttgtaagcaagaggacccgattcattggcagcggactggaagacttcctacattcacaaagccttatgggaagggtatatgttgatgtcaacggaaaacgatacaatcacagtccagttggacaacaactacaacacctatagctttggtggcaagaagaagctggtgctttctaccgcaacctggctcgggggaaagaacgattttctgggccttgcgtacctcaccgtcggcggactctgcttcttcctggcactcgcgttcaccttgctatacttgataaagccaaggaaaatgggagataacagctacctgtcatggaacagacccccttcaggtcgctgatgatgtgctttggaagttaaatgcgatacacaggcagcaccaaacagatttagaatatgggcggaatgtatcttgtaccacaaaattaaactgaaacaaatagttttatgttctccaaaattgtataatcagaagttaatgtcagtttcgatgctttgctcttcttcgtaaaagaattaaatctaacctacatgactaaaggggtgtttggtttctagggactaatgtttagtcccttcattttgttccattttagtatataaattgacaaatatagaaactaaaatagagttttagtttctatatttgataattttgtaactaaagtggaataaaatgtagggactaaaaattagtctctagaaaccaaacaacccctaagctatgagatgaacttgagctcttcagaagcgatcagtcgtcgaaggtttgtcaggcgcgctgcaacaactacaaacttgcctctgctttgaactcataactttcatgccacacgcagcaagtaattgctgagatactggccctcagggtatgcggggtcgatagggtgatcacatgctgccccagcttgacgtaagaccgtaaccttacggccagccattgatgcggcaccctgaatggttttgaggaacatgccactttgggtcatagctccagaacaagagcatgtcatgagtaacccccctggcttcaccacttgcattgcaagtgcgttcaagcttctatacataccggatgcactttgtagcaccttctttcgtggcgccaactttggagggtcaaggattaccaagtcccatagctcattttctgagatagctcctttcatgaatgtagttgcatctccttttacaaatgagacttttccttggtttagctcattgagaacaatattctcattggcaaggtctagtgctgatcctgatgaatcaatgccaatgacattatcagcgccacccttagctgcattaagagcaaagccgccactgtagcagcaaaggtcaaggactctttgatcctttgaaagtaatgatatgatatagcggttttcgcgttgatctgcataaaaccctgtcttctgaccttctaatgagactaagtagataatgccattctccatgaccttaacagttgagcatggtgaagcaggctccttatgctctgatatatccaatccttcttctttcaaaatatctgtcgatggcctccactttatatggctgacgccattaactgtgctaacaagaaattgtatttcttgcctatatttctcaacccaagcagcagatgaagcaataacagcaacatcagcaaagatgtccactattagaccagataatctgtccccttcactgttgatgaggcgataagcatttgtgtcagttgaagggagacccaaactgcgccgcaaaccaacagcagatgaaatccttgcttcaagcagtctttccatattaagtgcgcatgtgggatctcttcttgcctcttcttctagctgcatcaaacgaacacaaaacatagacacagagttatagagaccccatccaataggtttctctgttccatcagctactagaacaatatcgccagatttcggaggaggtcgaccaattatcctatcaacagcaccgctatacaccattgggctcccatctcggaatatttgggtcttccccttctttaaaatgacctttgccaaacctctgtgctcggcggcgaggtcttccagggtggacgaagaggaggaagcggaagcgacggtagcggcggcgtaggctgtggaggaggatctcctggagaggcgggacctgacgagcgcgggcaccgatgccggtgccgtgccgccgcaagcgcgaaggcgcagcatcgccgcgtgcttgagttttcgcccagatggctgcagagtctcttgcttgcaggtggat

SEQ ID NO: 122283 - DNA, 114 bp, Zea mays
  Clone ID: MRT4577_43004C.1
gctgcaactgccactacttttgcatttaaaagaacaaaagaggcatgtatttttcacaaggcgtgcatgaggttgaaatcaagattttgaatggtattcatatgcaactaattc

SEQ ID NO: 122284 - DNA, 1004 bp, Zea mays
  Clone ID: MRT4577_43005C.1
gggtacctcgaggccggccggcaaccggccctctccttgtaaccttgggcaagaggagcagaaaggtcccagctttccgtgttcttctgcttctttccccgcctcgccttcgttccccccgtcaccagatctcgaggcagcggagtccggggacgccgttctttccgttgtgcttcctttgcctcttgttgccggcggccggtgattttcccgaggtccgtttgggcggcaggtagaggctattttcttggcggctggtgggatggatagccacgccgccgggtcgagctccggcgggtccggggatggcggcgcgcagcccaggaggagctccaggaaacccaagtattccaagtttactcagcaggagcttccagcttgcaagccgattcttactccaaaatgggttatttcagtattcgttcttgttggcgtgatttttgtcccgattggtattgtttcgctgcgagcttcacgacaggttgtcgagatcgttgatcgggatgatgatgcatgtgtccctgctggtgtgactgacaagcttgcttacatccggaatgatagtataccaaaaagctgcacaaggaatctgacgattacaaaggatatgaagcagccgatttttgtgtattatcagctggatgacttttaccagaaccataggaggtatgtcaagagccgtaatgatgcacagctaagagataaaagtaaggcgagtgactttaccaattgtgatcctgaggccaaaacggtagacggaaaaccaattgtgccttgtggtcttattgcatggagcctgttcaatgatacatataaactcattcacaacaatgtaaccttgagagtggagaataaggacatctcttggaagagtgacagagaccacaaattcgggagtgatgtctttccaacgaacttttaaaaaggagccagtggaccggtacaggttcgcctggagactgacagaatgctggtaatattttactccaggcagacttggctgt

SEQ ID NO: 122285 - DNA, 165 bp, Zea mays
  unsure (1)..(165): unsure at all n locations
  Clone ID: MRT4577_43006C.1
gtttggtggtattaatggagcttactacaccacttcaaaggctacgcgggctggtattagacggggtcactgttgaagaaagcagagggagncttatacaacaatcttaagaaggctacttcaatataatcattcaccaggtgctctgtactctaaagaatacat

SEQ ID NO: 122286 - DNA, 1366 bp, Zea mays
  unsure (1)..(1366): unsure at all n locations
  Clone ID: MRT4577_43007C.1
atcgtaatgatgcacagctaagagataaaagtaaagcgactgactttnaccaattgtgatcctgaggccaaaacggtagatggaaaaccaattgtgccttgtggtcttattgcatggagcctgttcaatgatacatataaactcattcacaacaatgtaaccttgagagtggagaagaaggacatctcttggaagagtgacagagaccacaaatttgggagtgatgtcttcccaacgaactttcagaaaggacctcttaaaggtggaaaaacacttgatccaagtatcccgttgagtaagcaagaggacctcattgtttggatgcggactgcagcacttccgacattcagaaagctgtatggaaggatatatgttgatctcaaggaaaacgatacaatcacagtccagttggacaacaactacaacacctatagctttggtggcaagaagaagctggtgctttctaccgcaacctggctcgggggaaagaacgattttctgggccttgcgtacctcaccgtcggcggactctgcttcttcttggcattcgcgttcaccttgctatacttgataaagccaaggaaaatgggagataacagctacctgtcatggaacagacccccttcaggtcgctgatgatgtgctttggaagttaaatgcgatacacaggcagcaccaaacagattcagattatggtcggaatgtatcttgtaccacagagaaattttatccgtgctcgtcggtgtagaatatatacggcacccttgcacatattgtacattacatcgaaacacatagcttttgttttctacaaaattgtatactcaaaagtctcagaagtggacgccagtagttccatgctttgtttttttgttccccttaataaaacagctaaggctgcccccatgctcaccttcacgaacagcccgccggcggccggggcctcctccgccagcgctgccgccggcttgttcttggccgccgcctgctgctggaagcagctcttcctgtacgacctcaccggcggccatcccaccagctgagccttggcggcaggaggcggcgcggcatcggtgtcggtctcgcagtcgcgcttcttgggcgcatcctcgggcccgctgctggcgacgacgtcgagcttcttgcctctgggcgtcgacggaggcggcggcggcgccttgttctgggactcctcggcctcctcctctcaggtgccgggcaggccaagaatgagctccctccccctcaggctgtcaangtggtggtgggccttgaatccgtagcccgctgccgatgctgcggcgacctcattggctgtcttcttgcttcttccgcacggcccgcgtgggcaataaaggcggtggtt

SEQ ID NO: 122287 - DNA, 241 bp, Zea mays
  Clone ID: MRT4577_43008C.1
gcggatcaatcatgcacgacgtgacgtacagcatcaggaattacggactacaagcgaccacatccaaaacacttgacgccgccactgcctcacaggtaaggccgccatggtctccggttcgggcgtgtgccgaagctcgatggtagacgcgcgccacccatgctgggccgtctcaccacgatcatagccaaggagactgctcaatgggacgaaggtggtcaacgacgctgcgagagatcta

SEQ ID NO: 122288 - DNA, 2083 bp, Zea mays
  Clone ID: MRT4577_43009C.1
cattgggacctcgagccggcgggaaaaaatatgaagcacatacaggagagaaaaaaaaagcaggacaattcgactcctccggtcctcccttccttggtcagttggtcatctccgccggctcaacctcaacgcgggtagcacgaccaccaccagtccaccaccacgcccacctccccctctctcctcctcttctatagtcaaaccacccccctccttgcacaaaccttcgcagaagaggcacaccggcaaggacgcagctttttcccgtctccttctgggttctacacttctacttctttccccgcctcgccttcgttccgcccgccaccaaatcgcgaggcagcggagccagcgacgccgttcctttcgttgtgcttccttgggttcttgctgccggccgccggcgatttggcgaggtccgtttgggcggcaggtagaggtaggtagaggcgatcgtttcttggcggctggtggaatggatagccacgccgctgtgtcgagttccgtcggatccggggatggcgccgcgcagcccaggaggaactccaggaagcccaagtattccaagtttacgcagcaggagcttccagcttgcaagccgattcttactccaaaatgggttatttcagtatttgttcttgttggtgtgatttttgtcccgatcggtattgtttcgctgcgagcttcacatcaagttgtcgagatcgttgatcggtatgatgacgcatgcatccctgctaatgtcactgagaagcttgcttacatccagaatgatagtataccaaaaacctgcacaagaaatctgacggtaatgaaattatctagatgtattcttctaacctgaaattttgggaatggaaaaactatagtagaaacaacattgactagcgacagtatacatgtcagttactttacaagtatgcatcttggcataagatcaaatgaataattggctgaaatatttgatcacatggtcttcagattacaaaggatatgaaacaaccgatttttgtatattatcagctggataacttttaccagaatcataggaggtatgtaacctttagccaatgctctctctctctcattgttttaaactttgtcagtgagaagtcttcttgctctttaagatgtatttttttcctacttaactgaaacattaatcacattcaggtatgtcaagagccgtaacgacgcacaactaagagataaaagtaaggcgagtgacactaccaattgtgatcccgaggccaaaacagtagatggaaagccaattgtgccttgcggtcttattgcatggagcctgttcaatgatacatataccctcatccacaacaataaaaccttgagagtggacaagaaagacatctcttggaagagtgacagagaccacaagtttgggagtgatgtcttccccacgaacttccagaaaggacctcttcaaggtggaaaaatacttaatccaaaaatcccgttgagtgaacaagaggaccttattgtttggatgcggactgcagcgcttccaacattcagaaagctgtatggtaggatacatgttgatctcaaggaaaacgatacaattacagttcagttggagaacaactacaacacctatagcttcagtggcaagaagaagctggtgctttctactgcaacctggattggtggaaagaacgattttctgggccttgcatatctcactgttggtggaatctgcttcgttttggcatttgcattcaccttgctatacttgataaaaccaaggaaaatgggagataacaactacttgtcatggaacagacccactttaggtcgctgatatggttttgaagttaaatgtttacacggacaacaaattcatttatggttcagatgtatcttgtaccacatcgaatttttattcatgagcattggtgtagaatacatacagagtaggcatgtgtatacgtgcgacaactttggatccatccttgcacagattgtacattaaactgaaacagatagctttatgttctccaaaattgtataatcagaagttaatgtcagtttcgatgaaaaaaaaaaaaaagcggcaggggcggcc

SEQ ID NO: 122289 - DNA, 428 bp, Zea mays
  Clone ID: MRT4577_4300C.1
gggacgcccccgggggccccggcgcagaatcccgggggagacaccacgcgcgcgcattgtccgtaccacctagcgcgagtaggacgcggggtgaattcaaagctggaagccggtactagccacatgcgcgccactgtcacactgacgcaaggaggcaagctgcagataggggcgggcgccaccacaaggcgcacactgaccttcaaggatctgaacctcgcgttagatcccaaggacgactagggtgagctataagtgctcacatggtgggctaccctctcgcacattgccgcaattcagatggccacttggcaggttcagaacgccatcaagggcagaacgacggactaccggtacaagacgaggagagcctacgctcattgtgccatgaagccgaggataaccaactggaacactgtgataaaaat

SEQ ID NO: 122290 - DNA, 514 bp, Zea mays
  unsure (1)..(514): unsure at all n locations
  Clone ID: MRT4577_43010C.1
ctgcatctagtgggctcactctgcgcgttctcattcaccgtccatggctatcgtaaaactatggctggccgacggatcagctatgctgtcccgagtggctgccaagattgctgcgctccaggaggcgggcgtgcctatgcatcgtctctcgcaggaccttgcgcgccggattcgcttcttgtcgcccctacttcagaacctagaagacagggacctggaccatgccttgatgctcgcacacacgctgtggggcgcgcgctacctcttcctggcagcttaggatcgctgctagatctaccatgtgcgcactgcagcctggcttgctgctctctcctgctacagtccaacccatgaatgagcaccatcctgaaccaaccaatcaggccatgcgaggggatgccgtgctacacgtttggtaactggcagcagagccattcactcggtcccgaatgcctatgcgcacaacaccancgacttgcctgaataagagctggagcaggacaatcttgcgtct

SEQ ID NO: 122291 - DNA, 466 bp, Zea mays
  unsure (1)..(466): unsure at all n locations
  Clone ID: MRT4577_43011C.1
ccgccgggccgcacccgcccaccgncccgggccccnnccccgncnaagcacnncggaccccngccgccgcgacgagcnacnacggccagcagcagccgcccgncagcgcgccgccggcgcaaggggancccgggaaggacgcgnacccgccgccgggcggcccgcccgcggngaanccnccgccggcgcagggcnacccaccgcagggcnacccgccgcagggcnacccnccgcagcaggggnacccgcagcaggganacccgccgcagnacccgcagccgccgccgccgccccgccagcagcagagcagcgggcccncnnncanggagggacgcccggccgcccnnngnngcngccgcccacnggaagccngcnncngagancnaagcngcgcacaacnngnnccagaaacaccacnncaaccngcacggnngananaaccggggangggccggggagcgaagaa

SEQ ID NO: 122292 - DNA, 837 bp, Zea mays
  Clone ID: MRT4577_43012C.1
ttttttttttttttttttgatacaatggtatatctatcaaacaggattatatggagctcatttggtacaatgatgtcaatacatcctacaaaaaaaacagtacatgagctgcgtagtggcaaccttttttttttccctcggactcccttctctgaaacattaacgcacacggaaaaaacttcgctactctagttctgccgtttgcttccaggttctccaaatgtttcgataagttaaccttggcggcgttaagatggcttgcactgtacagaagtcacaggaaactggaaaaggcgccggaatccaagccaaacggagctcaagcctacgaagcaggggtgcccgggtcatctgagctaggtccgttcctcgccttcctgggcctcccaacgggtctcttcaccggaacgtctcccagctctggctcttgttccgtcagcacaagtttactctgctcaatcaagcccatctccgatttgaccatggcatcgttgttctttcgacgctgaccccttgcaggcgaccttgttggagtcgccgtggtcttctgtacgttgggctgcctcctcctgcggttcttggagccattctgtacttgaatgcccgtcggcaggctgggtgcagcctcaatatcctccttcaacattagttttgagagagagcatgaatcgtcacaggcagcattctcttgcttcctgtgagataggtccatcatctgctgctcgaaaggaataaatgcattcaaaggctccaccttcaaagcaaagcctttcttcaggtcctcattagaacactgcggacgcgtgggcggaaggcttgggtggccccggaaatccg

SEQ ID NO: 122293 - DNA, 274 bp, Zea mays
  Clone ID: MRT4577_43013C.1
aagggcgggggggatttttgaagacaaacaacctatttttttcttccctaaaccggaacaagttgcttgttacaaaaaccaacaagattttttgttgcccacccggaccgcaaattttattactgttgcaggagcaccccaccacttcttaaaaaaaaaagacacacaccacttttttcgaacaagaaaacagacgcctgggtggaacccccaaatactgcccggggcctccagggggaccacctttttcttttgtgaggggtcttattactgg

SEQ ID NO: 122294 - DNA, 262 bp, Zea mays
  unsure (1)..(262): unsure at all n locations
  Clone ID: MRT4577_43014C.1
gtgaggagttgtgcaaggtttggggaaaggaaggctggcttggcgagagggcaggtttgctggctatgcgaccctttcgcanagaccaacaaagagtccttccccaactcccaactcaaccccttttggaactatgtgtggtggttggaagcctgtggcgcatccttgtcgctcgtgtccttctcatgcccggcgacgcgtgtttgtggtaacgccctgctgccatctcttttcttctctctgcgaggatttggactggcag

SEQ ID NO: 122295 - DNA, 348 bp, Zea mays
  Clone ID: MRT4577_43015C.1
ccatctcagtcaactacaagcttcaaatcttcaaatcttccaagttttcaaaaacttcaatcaatcaatcaacatgtctgacgccggccgcaaggatttctctaccaaggctaaggaggaaatcactcctgactcctccaagtccacccaggagaaggtcaaggagtccttcaccgacaccaccgaccgcctcgcccgcggtgtccagtccgatgacagcaagtctagcacccaggaggccttcgacaagacccagcgcagctacgacaaccatgctcacggcggtgccaccggctccattggtgacaagatcaaggacactcttggcttgggcaacaactagatgat

SEQ ID NO: 122296 - DNA, 423 bp, Zea mays
  Clone ID: MRT4577_43016C.1
cccccccccccccccaacattttttttttcctcggcttcgatttcccacaaattatgccaaaaaaaatcttttttttaaagcatcggtttacaaatgcttggggggaaccctaaagttttttttccaatcagaatagcctaccccaaagcccaatttttatgcccccaaacttttgggctggggggcccatccccccttggttaggggatgatcttttcactgggggcgcaacccgacaggccctttgggtgctgagaagaccggtttttcggccgtgtcaaacacccgcactgcctggcaaatccttttggccttttgttttcttaccacccctgcactgctggggaccggtcatgggaactgataaagaccccccctccccaatatattctttcgtgggggccccccccctagcccagggg

SEQ ID NO: 122297 - DNA, 452 bp, Zea mays
  unsure (1)..(452): unsure at all n locations
  Clone ID: MRT4577_43017C.1
tcatcatcgagaccagtgagcaacatgggggctaatctcaatgggctcctgttctagccctcgtcgtcgtcgttgctgcgctgggtggggccacgagcgccggcgacatcgcagtgtgctggggccataacgggggcgggggcggcctggcggacgcctgcnnctccgggctctacgcctacgtcaacatcgcgttcctcacaaccttcggcancgggcagaccccagtcctcaacctcgccgggcactgcgaccccggctctggctgctgcgccggcccgggcagcggcttccagacctgccagtcgctgggcgtcagggggctcctctcgctcggcggggccagcgggggctgcgggctgtgctccgccggcgacgccgacggcgtggccgactacctgtggggcaactttctgggcgggaggggctcttcccgcccgctcggggccgcc

SEQ ID NO: 122298 - DNA, 375 bp, Zea mays
  Clone ID: MRT4577_43018C.1
gtttgtcatctagtaactctatttagccatgaaactttgattaaaattattcacttgacttattccacaccaagcacttaataactttggaaattcataacttgataaccataactctgaatttagtgattcttgttcctacgatcacgttacgatgcgtagaatattatcatgcattctgttttgctgtttggtgtgatgttaatttctgttatcctatgcttgcttgcattgggacgagtggacgagcaagccatacaggatcccggtgttcatcaagtgaaactgctgagcacgagctcgtttaaagcaagttgtgcccttgatcacttctatttacccaataatggtcctttttatcattatgatctacat

SEQ ID NO: 122299 - DNA, 1039 bp, Zea mays
  Clone ID: MRT4577_43019C.1
ccgcccggctgcagccggcgctcgccgcgggcgcccgcggcctcgggacggcggcggaggtggccgcgaccgccaggtgggagcccatgggggcgcgggagtactacgactaccgccgggccatgtacggcgacatcacgcacaaggccatcctcgtcgacgccgccggcacgctgctggccccaaccgggcccatggcgcaggtgtacagaacgataggccagaagtatggggttgattactccgaggatgagattctgatgcggtatcgctgggcgtatgcgcagccttggggtagatcacgtctgaggtatgtcaatgatggaaggcccttctggcaatacatagtgagttcatctactggctgctcaaatctagagtactttgaggagctgtatcagtattacacaactgaaaaggcttggcatctctgcgatccagacgctggacgtgtttttgaggcattgaggaaggctggtgtcaaaacagctgtcgtgtccaattttgacactcgtcttcgaccacttttacaggcactgaaatgtgaccgctggtttgatgcagttgctgtgtctgctgaggtcgcagcagaaaagccaaaccctacaatattcttgaaggcctgcgagctgttacgagtgaaaccagaagaagtcgtgcatattggtgacgaccgtaggaatgacctatggggagctagggatgcaggctgtgatgcctggctttggggcagtgatgtttactccttcaaggaggttgcggagaggatcggggttgaggtataggaagaagtcgctctcctgagccgcaagaagactcgtccttgtacatagtgttagggcgtcctgtacatatttccaagggaaaataacaagagcggcttctcctgtgtgcgactgtgccaaggccttctgtagcaaatactgatgtacatctttgcgtttgaatgttcgttgcggctgtgacctgcagaatagacctttggagacccctgcagcatctttcacgtttcacatcctgaagcatcatcagcgtcacc

SEQ ID NO: 122300 - DNA, 406 bp, Zea mays
  Clone ID: MRT4577_4301C.1
ggtcgaccacctcacacttgcgtttcgatcggggcctccctctcaatgcacccaccataccgcgcgcctcgtgggttgggtgggtcggtgtcgcggtcccagcgcccttccgggccggggccccgcccctgcccggctctccgcggggggggggtgccagcccccgcggcgccagacctggcagccctcttaccccgtgccgctggcccccgcccggccaccctcccgccgcgtcttccgccaccgcctcgctgccctccgccatggcgccccgctcgcggtgcctgtcggtcgcccgcccgtcctgttccgccgctcgtcggttgcctttgtgccggtctcgtgatcttccgcgcgctcgttgactgtcaaggtcctgagctgtggtggctgtgggggcggttgg

SEQ ID NO: 122301 - DNA, 254 bp, Zea mays
  Clone ID: MRT4577_43020C.1
cggacgcgtgggcggacgcgtgggtgggcagcaacacagaatggatatttggcaccaggacaagtctaagaagggggacgataagaatactgcttctcaggaattctaggtttttttagagttaattgagtatgtgcgaggatgcatcttgtgtctggcagagtatgtttactttagggatgtaacaaagtggacttcttgttcactgtttgaagaatttgtctgcaaatccaagttcgagtaatttattcttc

SEQ ID NO: 122302 - DNA, 173 bp, Zea mays
  Clone ID: MRT4577_43022C.1
ccgggggaaaaaaaccgcccaatctttttttatagcactgatccgtggtttggacgttttggactgggtactcaacttcaggggggtcggtgggccccttccgccaatttgaattattggaccttggcacaacaattttaagcggaacgacaggtttgggggatggttttttt

SEQ ID NO: 122303 - DNA, 699 bp, Zea mays
  Clone ID: MRT4577_43024C.1
gacggagggagctcacgcgcgagcaaagcaaagcaaagcaaagcacaagcagcaatggggatctgctgcggcaaggccaaggcggcggcaggggagcccgacgacgacgagggcctgggcttcccatggatgcacgacgacctgttccacagccacctgtgggccagcgccggcgtctccgtgcacaccaagcagggatggaagggcgccaaccaggacgccatgaccgtctgccaggacttcgccggccagaaaggccacatcctctgcggagtgttcgatggccacggccctcgtggccgggaagtcgctcgccacgtccgcgacaccctcccggtggaactagccgccgctctgaagccgagaaccggggacgaagatccctccgcctcgagcgacgcttcgaagcctaaacctgacgaagatggctcaggcgagaatggagaagatggctcaggcaagaatggagatgcttcgagcaacgccgatttggattccttcgacaagtcaggaggtagcggctcgtccagcgacgttacgagcgacgagagccagcagcagcagctgctgctgtccacttggaagaacgtgttcgtgagggcttttgagcaggtggacgaggagctgaggcggctttcaggaatcgactgcatctgtagcggcacaactgcagtcgctgctgttaggcagggcgatcac

SEQ ID NO: 122304 - DNA, 233 bp, Zea mays
  Clone ID: MRT4577_43025C.1
attacttctaaccatcggccaaaccacaaagaaacatctttttcaagagtcagactcaaacaaccttccttatacattataaacagactactcactcctgactataatgacttaaaagatgacaaagcacataacaccaatctagaacaaatcattcttgtagacacatccaccggttttccaggagaccaagaccttcagacctaagacacccccaatgacaccaaccccac

SEQ ID NO: 122305 - DNA, 351 bp, Zea mays
  Clone ID: MRT4577_43026C.1
agtgcacgtacgcacgcactgggacactagcaacccataacagcgccactggccagggcgcgcgtcaagcttgcttagctagccgccatggccttcctctacgtcgtctgcgtgaagcccgtggtcatcaagggtctcgcctgctgctccatcttcggaaggaagctcgacgtcgccaggccgtagggccgcttcatgctcaagccacacacatccgtagtattggacaagtactgcgacaagagcgtctactttgacctcgaccacatcggcaacaccaacggacagtgcgacctctacggctttgacgcgctctagccctacgatccactacagagcaagttcttcgag

SEQ ID NO: 122306 - DNA, 472 bp, Zea mays
  Clone ID: MRT4577_43027C.1
aaacaaaagccttctggttttacttccatggttcacaggggcataaacaaaagggggggccctccaaaaccgctcaaattgcataatctaagggggggcattgggggggaaccccaaagttgaagggccccgcccccgctaaattttaaggacatgcccccccccaactaagggaaaacggggtaaaaaaccgggaaggggccagggccttcttattaaaaatttattacaaaatggggtacttttggccgggatgcccatcaagcagaaaaccacgggggggatccaaatgttcttttttcctgagggggtttcgctcccaaaaaatacctcaaaacacgggaatggccccctttcatttacaaaaacagccccctgatggcgctgaaattcagcgcccgccccgggaaaaacttgcctcctacttgcccataaaatacccgatgggcaacaaataggggcaggctcattt

SEQ ID NO: 122307 - DNA, 230 bp, Zea mays
  Clone ID: MRT4577_43028C.1
ccgccgggatctcttctctacataatcgccatgagcatctcaaacaaacaatcaaccatcaaccatcacaactaataaataaatcagaatgtgccgcttctcgagcctttggttctatgatggggggagagggaatgacacctcaaagagaccagccaacagcaacaattaccaacaacagcgactcaggtcgaggcaactaccactaggcgcagagagagaccatatca

SEQ ID NO: 122308 - DNA, 363 bp, Zea mays
  Clone ID: MRT4577_43029C.1
tttgtggccatattaaatggaggtataccgtggccatcagaaacaacaagccgtggcaggagcgcatggaggtcccggaacctctcgaccttcctccagcaaggttgatcgtccccaaggcacccaaaggaagcgtggtacacggaacttccagtgacattaccgcaacgacaagttcaagtgggaatgggacagctctgccaccaaccgccacgacttggacgtcgggagtacctgcaaatcctcaatgagcgagccccctggctgtgattgtcttttctagttctgggtttcgatgatttgacattatctcctgtttctcgtatctgcaacttcgccatgttttcattacgccatttcgaa

SEQ ID NO: 122309 - DNA, 243 bp, Zea mays
  Clone ID: MRT4577_4302C.1
gaagaatgttgctgtcaaggatttaaacctgggtttgggggcttcaacttcaaaggtgaaccttgccaaggaggttgccactttaacttccaaggtattaataataaacaaccttgggcaaatgggcaccggttttccccttgggttgaattgccaaacttccaaaatggttgtaaagttggttaacttaataacaaaaaccaacagggcttttgccaaggacttgaaaaaggacccaaagtt

SEQ ID NO: 122310 - DNA, 323 bp, Zea mays
  Clone ID: MRT4577_43030C.1
ggggcaattggggcttttggagccctacaagccggtaagacccacaacgtttaacaagccgaaaccacgggggggggggggcaaggggcaccgggggggaccgggccccaggggacccgggagggccccaaggccccgaaaggccggaaggggggcaaaggaccaaaaagccggggccggggggaaagcccgggaacccggggccggaggggccccggacccccacgtggggcggagggaaatgagggcgctttgtggccttccgcaaaacccggggattcccaaaaaccagccagacccgagagtcgcggtggggagacccg

SEQ ID NO: 122311 - DNA, 735 bp, Zea mays
  unsure (1)..(735): unsure at all n locations
  Clone ID: MRT4577_43031C.1
cctcgaggccggccgggactctaactaaagtccacctacacccagcatccatccgccgccgcgtatggcgtacccgccgccgtccagcaaggctgacgcgtatgtgcttctagctgcctaccagcatcctctagccaaggccgacgcgtaggtgccccctgctgcttacccgccggcagccaaggccgacacgaacccacctcccatcggcacctacccattcgcgccagggaagccgatgaaggggggcgaaccagtatggcctaccttgcggtgggtcccagcacgacagcgctctacgctccacctccaccgcagtacggcgaatacgggtaccccaccattaggccaccgcgcaccgtacgggtatggttacccatcgtagcaggccgccggttacgggtaccagcagcaggctatcaacttagggatggggctcggtggcgggcagctcggaggcgccgtcgggggcctcctgatcggcgacttgatctcggattcgtcagcatatgacgccaggttcaacgttggcggtggcttcgatttctagagtgctctgttggngtggtgatgtgatgcccacatntagagatggagaggtccttcattttggatttgctttttatgattttttcccttctaagatctatctaattgccaggaccaaatcaaaattatgcattacacccacatatatgggtattgatgctgaaaaaaaaaaaaaaaaaagcggcc

SEQ ID NO: 122312 - DNA, 321 bp, Zea mays
  Clone ID: MRT4577_43032C.1
tcatgacatactattgaataaatagtgcgggacacgaacagatacatagagttactcaatatatataactcagagtttcacagggtccttaatttactgaactgtgaatgcacgcattccttgaatgccatggcacctcacgccggggttgcatgcgcggttcatatcatgtttgcacgagccatgcattcgctggtcatccggctgagctcaccgtcaaacttccctagggggtggccgacgccgatacgtgcgacggggctggcggacgcagttacgtcctggactgcgagctgcacaatgaccttggcggggacggag

SEQ ID NO: 122313 - DNA, 719 bp, Zea mays
  unsure (1)..(719): unsure at all n locations
  Clone ID: MRT4577_43033C.1
ctccttagggcgattgggttcctcgaggccggccgggtatatctttgatgaggggtgactggtgagtgagagcgagaggaggtgggcggccagccggccaccaccacggcaccacctcgtctctcctccacgcgtctctgccgcccgggcgcaggcgacgtcgccacgatgacgacggttccatcgcgtttgtgcaggggagatgagcgagctggtgcgggcggcggctccggcagctgcggaggaggagaagaaggccgtcgcggctgtgactgtggtggcgaaaggaaaagagaaggcggaggtgacgccgaccgtggaggcctcatcggtcggcgacagggggaggttcgtggcctacccgtcgcgggtggcggagcacacggacgtggtggcggacgccgcgcgcttcagggcggcgctcgaggggctgcacacgcacatgggcaccaggctcaagtaaagcatttttccgacttccaatacgcacatgacctcgccgccggtgccgatccggttgccgcatttttaattcctctgttgcgttttcttctgcatctgatgcgatggtgccgttacagttgttactatccctgttgcttttaccatcatttcttgaattcaatgcgcgaaaattgcaacttggtataaatgcgtggtgggaaagagaagtttgtgggggcggtggcgattttagtagtaacgtgtgatgncaatgc

SEQ ID NO: 122314 - DNA, 444 bp, Zea mays
  Clone ID: MRT4577_43034C.1
agggtcccaggggggagaggctgtatactgggctaccagaggctttatcctacctggacggacctcgggcaccttgcagctgacacacactatactggctcacagccaaagtgtgactagtccaggcgatggaggagtgcattcatgctaccatgcacggtctgcccttgcaggactttctgctgaacagagggagaatatatgatccgagagaccagaccactctgaatgcgaatctcactaggacccacacgcgtagggtgggctgccgcatagggcaggatgctaccgtgctgagaagttctactacgaaaggggcactgtgagaattacgcctacctctgcgccgcgtagagtccaaggcacagactgacatggctcactgatgagcacgttcggaccaccttgcaggttcaatctctcaatgagccatgtctagctagg

SEQ ID NO: 122315 - DNA, 343 bp, Zea mays
  Clone ID: MRT4577_43035C.1
accccaaagattatccgcccagccgggggacccggaagaatgaaacacaggagttcgggttttgccacttcgtctcaatttccatgggtcaatccttcgatgacaagtttgtgttgcctcttttatttattatcccccctttaacggcagccggggttggaatttaaataaacaaattgggggttgcggcacattttttaccgttagaatgggaggaatttttctgctaaccttaagcccggctttggcggagccggtgcgcgaaacgacgttgctagggctggcatacaaggggggcccgaagtgagggccccgtggaaaatttggtgcccgacgccccagg

SEQ ID NO: 122316 - DNA, 326 bp, Zea mays
  Clone ID: MRT4577_43036C.1
tatctcacgaaggatcatgcattggcaaacgataacactgaacgacatgtcggattgtctcaagtgcactactgttataaacctcgtggtcgtggatgatgccatgacagacactacgagcgccaggaacatcatagagtactggagccagaacggcaacgaatggaagctgctggacgactggaactcacgcctctacacgtacggtaacatcgggatcataacaaccgttggcaacgtgacagacacggcagtgattaacctagacagacactgggaccccagctctggcagctgcatgcgtcatagcagcaacatacatacct

SEQ ID NO: 122317 - DNA, 597 bp, Zea mays
  unsure (1)..(597): unsure at all n locations
  Clone ID: MRT4577_43037C.1
cccccctacggttttttttttttttttttttttgnaaagtgagttgatttattatagtgtaaaatgagggggagggttgtgaattgagtggaaaattttgagagggtgcagtatgaggaaatattaaatagtggatagatttggggaattgaatagaaaggagaaggaaaagttagtttggaagtggggaaatacaaggtgtgtgcaagaaacggtgtgtattggaataagaatgtagaatgtttattgtgtaagtgaggcaagggggaaaagaatttttattgtgactaaataacgcaaaatccattgggacgggggggggatatattattaaaggtgaaacttgaaccttcagggtcccaagcaaagaccgagggaaaccagggtggggccaaaaaggaaaacatcgagaggggctgactgtagtgagcactctatgtgaaggggatgggcgggagggaatccaactagttcccgaggacccggccgcggttgtcgaggaagctctgcttcccggacaagtgggaaaccctgccgttgtctgggaaactgatcgggaaattgaggagggggcccgggaggtcctgtccaagcctg

SEQ ID NO: 122318 - DNA, 386 bp, Zea mays
  Clone ID: MRT4577_43038C.1
cccacgcgtccgagaggaggagatctcgtcctccgacgaggaggaggaccagatcgacaccgccggcttcgtatctggcgaggaaggggatgacgacgacgaggatgctgaggagccgtccgcggaggaagctgagggcgaggggcagcaggaggaggaggccgaccaggaagagatcgaagccgggactaccgtggctggagctgaggaccaggaggacgccagtgccgataccgccgatgaaggctacgacgagtgccagtccaccgaggacaacgagcctcatctcgagggacaaggacgatgactacgagactgatgcagtggatgggaagcgagagaaggcacggctaaaagaactacggaagatgaagaagcataaaatt

SEQ ID NO: 122319 - DNA, 1140 bp, Zea mays
  Clone ID: MRT4577_43039C.1
gccagctcgaagcgaacagcctacgtacggctctatacctctcgccctctgagtctcgcgcgggctgcaggccatccgagctccgccttccggcatccaccagacgtccttagaatacggtgcagcgagcagcaagtcgccgagcagccgagccaccgccgagcagccgagccgccgccgagcgccgagtcttctatgtttgcttctccggtgaaaggtgtttgctaggggaccatggaggagcacggagcggaagacctcctgtgcgaggcgatgggatctgcggcgcaggtcgtggtggtagaggattgcgtggaagcaccgggggccttcgtcctccacctcctcctcaagcgcgcgctcgccggctgcggctccgctgccttcctcgccctcgcgcagcccttctcccattacgatcgcgtcctgcgcaagatgggctgtaacctttccctgcataggaggaatgagaggcttcatttctttgaattgctaggattcccaggtggagcaagggaaggcaccattgctgatagctttgctctattgtacaatgaaattcaaagactggtggaggcaaacagggctggagaaaatgaaggccagttcaccatcgttatagacgacgcttccctgttggaagtcgtggcccttggttctgtaagcgatgtgctggatttcttgcactattgtttcacactcacgtctgagatgaattgcaagctagtgatcctcattcacgaggatatatacgcaaatgaggagaacatgggtctccttttacatctgcgctacattgcggatcttgtgattaaagcagcacctttaagcactggtttggctgctgatgttcatggacagctggcggttgtgaacaagggtacattcagcgagcaaagggcaaaagcacagaaagtttggaacttccatttcaaagtgaaagaaaacggtgctgacttcttctatccagggagtagacattagggaatacttgtatacagtagaaacaactctggttgtgataactgataaccagtgctgctattcttcgtgtaccttgtgctaagcacagtaaagttttgtccaatccttcatttcacctcgtgctcatcatttaacagaaaaaaaaaaaaaaaaaaa

SEQ ID NO: 122320 - DNA, 513 bp, Zea mays
  Clone ID: MRT4577_4303C.1
cacctgaacactgcattttattcctcatcataaacatgacatccaaactagacatatcgagcatgctgtacatccgcatttggcccgccaggtaccgtcaggatagcagatttctgcatggccaatgatttagtaatttacatgttagttgataatgtctgctggctgaagaatgtctggttttagatcttagtttttatgtctatatacaaatgtcaattattatatgaatctattaaaataatacaattgacatcattaattatataatgcaattgacatcattaattccattaaaacaacaaaaaaagacattgtgctaacttcttatataatgatagaaagtgcaaaaacctcatcataaaatagttttgttctaaaagtattttctttgccaaaatatttatataaactttcgaaagataatccagcggataaagcatatggaagataaatgcatgaatcaactaaaaacatatctataaattaatgagactacctatagcattgcct

SEQ ID NO: 122321 - DNA, 278 bp, Zea mays
  Clone ID: MRT4577_43040C.1
gtacctggtacgtcgcagctcatccatcttctcagccaccattcattgcactggtcgtcgtgacacagagtcgtgatggggaaagccctggtgttacacagcttcatcccattgcgtgacacagtcctttcgcggcctggacgtcctgtcagcacagggacagcgatgtcacgaccgcacacattcgcgatccggttgtcccactgggactctccttgtcacggcggactagactagcaagatgatggttctaaacccagagtgccagagctgcatgc

SEQ ID NO: 122322 - DNA, 463 bp, Zea mays
  Clone ID: MRT4577_43041C.1
tgtttgttttgttgtttctttttgttgtttgtggaccgaacagggagcccctttatgtaggcatgtctgaatatcacaaacgagctacagcaggtgtccagaattacccgtccgattgtactaaaacatacagagcgccggggcaagtccgaacgccgatccctagacgaacacagaagcccaccaccacacatcctaggaacccagcacggtagagcctggggcgagatacctgaagacgaggattgaacacccagcggaggcaaaggacaagggcgtgactactgctaggatgaacagcactacctggacggatagggtagctacaattatgactgactgactagctgctggggacaaagaagatgatgcgagtacgtaggcttacaagaggctgacgagatgccacgactcgcgcggcgcgagcactggcagcaacaagttgcgcatgaacgtgaggacg

SEQ ID NO: 122323 - DNA, 474 bp, Zea mays
  Clone ID: MRT4577_43042C.1
gggtacgggcagcaggaagcagcagcagcagcaggcgcgcgtcggcgtcgccgccgggtcgtcggcttcgccggcggacggcgccgcccaggtggaccggcgcgcggacgagttcatccggcggttctacgagcagctgcgcgcgcagaggagcgccgcgtccacccccgactgctacggctacggcgtgggcggggccagcccctacgccgcgcgcgcgccgcggcccgtcaccgccggcatcgcgtagggccgcagcagcagcactacttgcttcacgtgtggctcactgcgcgcggccccgggctgtcagtggggggtgtgtgagtgtgtcaaccaagctgcatgagccaccctcgcgttccctctcccgggttccgggcccggcgagttgtgcacccaactcgaaacagctaaaatcatgtgctcttattgtctcccataatcttgcttaatctactcagtatttctgtt

SEQ ID NO: 122324 - DNA, 269 bp, Zea mays
  Clone ID: MRT4577_43043C.1
ctacagagcgtgatgcgcacctgggagtatttgtgcgccagtaagtgactagctcagggcttcagggtacagacaggcgagagatgactgagttagatgagactagagggcgggctgtcggagccagaagtaagcttgccacgcagactaggtctagggggaccacatgggggcaggctgcatggaaaatatccgcagtgacccccaggcagaacagccacgctccaggccaggctgcccctactgccatgcggagagtgaacttgacc

SEQ ID NO: 122325 - DNA, 275 bp, Zea mays
  Clone ID: MRT4577_43044C.1
tcggtccttattcgtccaggggagcaaacaagcaagcaagttaaccggccaggagcttgattgaggcccgcgacttgaaacaaccggccatcggagccccggcttaagaggaggagccagctccagattgtgggtcttgtcggcggcaacaccgggccggccgagcacgttgtggccaacgcccgaggagagaccgagttcctgcgccggctgtaccggcacgcgccgggcgagcaccaatgtactttcacccttgttaagcacattaaggggcc

SEQ ID NO: 122326 - DNA, 650 bp, Zea mays
  Clone ID: MRT4577_43045C.1
acgcgagcgtccagcctgccacgcctgggctggtgcgcgcgcgggcccacctccccgctataaagcgggaccgccgcgcgcggcatcgtcaggagcaggaatctaccggacggaggatccgtagttccctccaaggtgtttctgaccagatctatttattactagtaccactactcagttcttcccctaccgtactctgtctcttctttcctttccaggcttactgttaggctcgagagccgatccacaaacggcgccgcgtgtgtcagggataagatgagctcagcaagaggcagagtggaggaggaggtgaggaaagagcaaggaaaggcacaatacggtggcacggtcggcagatctatcccggcctgccgccgtttccgcactaccatgcatgtcatcaggattgtgtctccatcggtggtggtctggtggacatcgatccctggagaatggcttgaacctttcatttgcgtgattctagcatagacatctgaatatctgatggttagtgaaaggctggataccatcatatatacgtgtcatatgccatttgaagtgtgccatactaaaattgtagtcccaggagtattatgctttggctgtaattaaactttaaatagtgttctgtacatatgtattacagtgcc

SEQ ID NO: 122327 - DNA, 919 bp, Zea mays
  Clone ID: MRT4577_43046C.1
attgggtccctcgaggccggccgggacctcgcaagcctagctagctgcctgcctcctcatattcctccactcaccgttgccatgccaaagctcccacacctctcatgcatgggcaggagggttcatggccacggcagcagcagccgccgcccacgttcgccgcgcatccacccgatcgatggggagcacgcacagcagagcagagcagcgcgcgcgcgcgaaccctaaggccttcggtcgacctgtatggatccgatcagccggagcgcgagcgtccagcctgccacgcctgggcgggcggggctggtgcgcgcgcgggcccacctccccgctataaagcgggaccgccggtggtggtctggtggacatcgatccctggagaatggcttgaacctttcatttgcgtgattctagcatagacatctgaatatctgatggttagtgaaaggctggataccatcatatatacgtgtcatatgccatttgaagtgtgccatactaaaattgtagtcccaggagtattatacactcttacgcgctccaccccacacaccctaacgctcacacacaaccaacatgtcttccgacggagaaacctacaagccttccgagcacggcggaaagagggaagacggtgaacccgacaagcgcgtttcgtccgagcacggtttcggcggagaccgcgaggctgcctccgagcaaggaaagaagggcggcaacgccgagaagtctcagcccgatgaggtctacaagccttccgagcacgacggtctcaagaagaacggcgagcccgacggccgcatgaagcagaaccaggagtaaaccgctaccaccttgtaccctttcgatctatgttgtatataccgcagttgatgaaagaaagcagtatcctcaaaaaaaaaaaaaaaaaaggccccta

SEQ ID NO: 122328 - DNA, 548 bp, Zea mays
  Clone ID: MRT4577_43047C.1
aaccatcgccgcgccgcccaatcctagccgccgccgccgccgccgccggcatggtcgccgccaaccgctctctcgtctccgtgaaggtcctatagggagacatgttaaccgacgcccccggaatcgctcttaccgcccgtcttcggggcgacgatccggcgcgacgtgggcaggttcacccacaagctgctgtgctgcaccaactgccagccctacgcagtatcccgccgcaccgggcaccaaacgtcggccgagtcctggggtaccgtgcgcgccgtgactcgtatcccccgcgtccccggaggggtcaccctccgcgacggtcatggagcgttcggcaacatgtgccgagctgggcgaatgttctcgaccatccaaaatctggtggaggcggaaccgccacgtccacatcaaccttggtcggatctgcgtcgtctccgggatcgccgcaaccgccggtccggacctcgtgcaggtatgcgtgcaccgccatcagagttgtcctcgagatagcctcttgatcatttccgactcctcggagatggttg

SEQ ID NO: 122329 - DNA, 878 bp, Zea mays
  unsure (1)..(878): unsure at all n locations
  Clone ID: MRT4577_43048C.1
caagggcagcctcgaggtcgaaagttaccccccggcccccgaccggaccaatctatcaccaccacgccgccctaggtcgtcgccggcaacaatgtccccttctgccatcttcgtcttcctcctcgtctctgcggtgcatatgctggagtgcatcctcgacctcaagaggaggaggggatccatttctgatgatcagctcagactgcgtgtagagatcacgcaacttctcaaggaggccagtgctttgtcaacgccctcgacgtttgcgcaagccgcaaaactgaagcggttggctggtgctaaagagaaggagctggcaaaaatgcaagatgtggacattagagggaaacagtctttatatgaaaaataccgaaaagttctgctggccgcaaaggttgtagtctatggtgtgctcgttctgtggttttggagtactccagtaactactgtccctaagcaccttctccagcccttcgggaggatgttttcctggagaggtgtagatgcttctacaggccgtgttgtggttggaattctcccatggctatttctgacctctcgtgtcagcaagctactgagcgagaaacttgcgcccatatttctgcatccttagctcctcctaacaactttagtttcgcatctgtttttgttctgcagttttgtgtgatctctcaatccatctacatttatgtggtttccaaagggattggtatttttgtaattgtataaagtaataacgagtggaatttacactaagagaccgtttggatcactcattttagagttattggaatatacttaatagagtggactatttagggcccatttaaaaaaaaaaaaaaaaaaaannaccccnanaaaaaaaaaaaaaagcggcc

SEQ ID NO: 122330 - DNA, 180 bp, Zea mays
  Clone ID: MRT4577_43049C.1
aatccacggggggggaactttattagcaattcgggtgcaggaaaccagcgccaattaggcagggcatacagctacccaaaggaaccaggattaaagccccaagtacacccctttgtaacacatggggtgggctaaactttaaagagcaaggtggtttacaaggcatagagggtcttgtca

SEQ ID NO: 122331 - DNA, 666 bp, Zea mays
  Clone ID: MRT4577_4304C.1
gcacgcgcgcggttccctcgggcgtgcaagcggtggagatatcgggggcgggcggcggtggtgccccgaggtgggtgacccacgccgacgctcccgaggcagcgggcaggcagcggtggttctcccctaagactgagtgatggcgacgctccagaggcgggcgggcaagcggcgacggcagtcccgagtcgaacgagtggcggcgtcgcaccctaggctcggtggtaacggtgattgtgcgaggcacgataggcttcggcagtgacggtggtggccatgggacacgcgggtagctccgacgggtgcgtgaggcgcggtcgtctccagcggtggtggccacatgaggcgtggttggctccggtgtccttcgatgaccaactccttcgatctgatggcctcggcggcggcgtcctccgatgacctcctccaattctttgtttatgcatgcggctgttggttgagcccatactaatttttcattaattatgatgtacggtgtaggtgtttatgcaactttatgtaacgatttatgttttgcatgatatcagccatctagcttttgtgtatttgctatgggaacgaaaataccattcaaaatttgtgtgcaaaaaggggcggaaaaaaaaaaaaaaaatataaaaaaaaaaaaactgggggggggcccgg

SEQ ID NO: 122332 - DNA, 151 bp, Zea mays
  Clone ID: MRT4577_43050C.1
gtgtgcccaggttttggtcttatgttttgacttaaaaataccacaatttatctagtgcgctgggcccataaacaacagcaacagcgcctccggcccacccggccaggccaaaacaggcgggggcccaaaaaagagccaagcgaggcaaccc

SEQ ID NO: 122333 - DNA, 312 bp, Zea mays
  Clone ID: MRT4577_43052C.1
agctcgtaattcggctcgagcgcgattgtcaccccccctggtacttgccacccccagcgaaaccaaaaaggggggtttttttattcctagtgctgttgatctttgacggcgcactacttgcaactcctactgaagcccaacaagaccaccagaggcctgcggagacagcttcggctcatcacgcgtacgccatttgtgcggtgcggatatgcacatatgctatcgcttaccatctagataagatcacaaagcacttcgtcattgcctactgaacattcgctatctatcagatccggcttcacaccgacgaag

SEQ ID NO: 122334 - DNA, 278 bp, Zea mays
  Clone ID: MRT4577_43053C.1
gggatatatatataggatcaaaatattttatcgggggccaaataatatttggttacaggagacgcaatcggatcaaccaaaatggatgtggacacacgttcatgagcacaaaaactggccccaaaaatggggggggggattggaaactgaaaaactttgtttttttttttttaaaaaacacaccacacaatacctttttttgggagccacctcggccccctttattattgtttaaccacccccacaagctggattgataataatcatttttatgggcg

SEQ ID NO: 122335 - DNA, 556 bp, Zea mays
  unsure (1)..(556): unsure at all n locations
  Clone ID: MRT4577_43054C.1
accgaccggacgcccctttggggccngccngcgacaaaggcccggccgagccgccgcggcgccgcccgggggggggccgngccgacagcagagngccgaccgacgagcgcccgcggcccgcgcgacgcgagagcccgcccacgacgccgcgggcaggcggccacgcgacggaggcgaccccnctcaaccagggggggaggggacaacccctttgggtgggtcttcccnannnnnnncgccnnnnacagccacaaaagagaggggggggggggannaacnccccccccccaacncnaacccccaacggcaaggcacgggccgcgaaggaaggcggagacaaaaaaaaaaagaagaagcagcaaccccgacgagccgncggagacngagcacgaggagccccacaaagggggagacgcnggcngaccaaccgaccacaaccccgagccgancgaagccggcaaggcgggagacgaagaagggaacccacacgccgcgacgaccagcggacaccggcggagcgacgccgganggaacagaagcgggggacagacaggca

SEQ ID NO: 122336 - DNA, 376 bp, Zea mays
  Clone ID: MRT4577_43055C.1
ggggtaaaaacccaccccatgggtttccaaattctcggtacagggggcattcctccctacatagccgggggggaacgatttttcaccctttggccccaagtaaaaaacagcagcgggcaagcggggtcctggccacacggaaacaaaacagggggttatgggggggaacaaaattggaacggggcccaactcctggggcgtccgggcggaacttaggggttgctccgggaggaccccagcttgggggggctggccctcaacacgtactgggggtaggcgggggcaatggcggccccaatcaggggacccacccaaaaaaaccattgggcgccccaggccttgtccttgttgtaaaagaccggggttcccaagctcc

SEQ ID NO: 122337 - DNA, 265 bp, Zea mays
  Clone ID: MRT4577_43056C.1
taaaaagtgaacgagtgttggattggttgattctggaagaagaatttttgggacgtgctcgagttaatttagccaaaaatgaacacgaacaagatgaacatgatgaaagaagtaaagttgatgattttagaggttctcctatgtcagtaggaaatttggaagaaattattgatgataatcatgctattgtttctacttcagttggttctgagcattatgttcccattttatcatttgttgataaacaacaattagaaccaaactg

SEQ ID NO: 122338 - DNA, 224 bp, Zea mays
  Clone ID: MRT4577_43057C.1
gtcttcctttcccaactcggtcgacgctttcgctactgctgcgcaggcctcctcctgggcggggtgattcgcctgcgatcccctcccttcttcgactatacaagcacaccccctcatcctcttcgtaccttcaccgacacctaatcctcttcctctccgagcccacacccaccgcgctctctccttcccgtgcaggctccgctaccctgttgccgcgttcacac

SEQ ID NO: 122339 - DNA, 255 bp, Zea mays
  Clone ID: MRT4577_43058C.1
aggttgggggaatggaagcagcgggttgtattctatgatgtcattcatgcatctacactctaaaagggtctgatgaacatactgcaaactcatgctgcattatatatatattaccggttccctaaaagggtaaataagggtttctccaatccccaagcataaagatagccatcctatcacattgcgacgatgagtgatgaacaatatacacaagcattactctggtgccaagaacatcattatattatatatata

SEQ ID NO: 122340 - DNA, 278 bp, Zea mays
  Clone ID: MRT4577_43059C.1
aagccccggaaggatgatgtggctgcggcatcgcggcctcgctatgtctgccattttcaattttcagagtctattgactgtaatcttgctgcttatatgtacctgtgcttatattcgatccttggcacccagcctcctggacagaaataaaactggattgttgggtatattttggaagtgtgccagaattggtgaacggaagagtccttatgttgcagtatgctgtatagtaatggccttcagcatcctcttcatacagtagctggggaaaatgccag

SEQ ID NO: 122341 - DNA, 147 bp, Zea mays
  unsure (1)..(147): unsure at all n locations
  Clone ID: MRT4577_4305C.1
ttattaaacaagattttacattctgcgggggccttcaaccattgatggactcaccaangttcatgagtattttatctatagatgatttttcagtatgccccacagtattaccggtttaataaatgatacattaccttttttatagtt

SEQ ID NO: 122342 - DNA, 488 bp, Zea mays
  Clone ID: MRT4577_43060C.1
catgggatatctgaactgacacaatggtggctaactggttttagcccaggaaacgcggctatggcagttcagtctcagccatacactcaacaaaaattcatgaacaaattaatgggcttacagttcagaatggtgtatgatagaggcaaggagaatatagcgactgatgcttttgttcaggatttgtggccgagagtgaccatttacattccatatgggaatgtgttctcagtgcagaaggacaagactagaagacttcctccattttgggtgggcaggagctcaacattcagcactaaattgattcgaagctttcatgattcaatggtgtgggagtgttctgtaagcgcagcggaagcatggtggatcggtctgcaaactatggtggagcagttcggagagcagtggtcagttactgagcaagagaaagaagagcagcaatacttgtttgctatccaggatcatcctcgactgtggaaaattggggg

SEQ ID NO: 122343 - DNA, 346 bp, Zea mays
  Clone ID: MRT4577_43061C.1
gtgcttgaaattccctcttacgtggacccggccgcaggcaccggagtcacaatcttggcgagcgatgcttttagctcggcgctctccatggcttgttctagtctttatttagtgagaacactgaactaggaatggacgaggactcagcatagatgaatactgcatagcgtatcagtggaattatgtcgaggactagctcaaagaacggtatgcttgaagtgtataattctctgactgacgtagtagagaggccgtttattgaggcctagagtgcaggatatcacccatgcatggccatgaggtatgagtcctaggctagacgcctcttcttgaagctagattatag

SEQ ID NO: 122344 - DNA, 440 bp, Zea mays
  Clone ID: MRT4577_43062C.1
actctattcttgttctatcttattcttttttttttttttcttccctgtttcttcttaaccccttcctattttttcggaaaaccaaccggtgtactccaggggggggcaacggaaccacaaaacccccgggcccacccaacgagggaggccaccaaaacaaacgggggaaaccgcgaacctacagcgtggtaaaacaaacagaaccgccgacccaactaaaacgaaagccaaaggggacatgggagaaagggagaaaccccaaaaaaaagggataacagggtaaacgagggtagggaaaaaaaacacccggggacggggaaaacatacacatttttaaaaaaaagggggggggggcggggcaacacagatgaggagggggggaaccccctggacgacgggggggggccgaaaacggaagggcaagggaatgggggaacccc

SEQ ID NO: 122345 - DNA, 414 bp, Zea mays
  Clone ID: MRT4577_43063C.1
cacaagactccattattctcctgcttcttcgtctcttcaattattttctctgaggcgtgggtgggattcaaccatggctaatgcaacatcaggaatggcagtccatgatgactgcaagctgaaatttatggaattgaagacgaaaaggacacaccgtttcatcatttacaagattgaggagctgcagaaacaagtgattgatgagaaaatcggtgaaccgggtcaaacccatgaggaccttgctgcaagtcttccagctgatgaatgccgctatgccattttcgattttgattttgtcagatctgagggtgtcccaaggagcaggatttttttcgtggcatggtctccggacacagcaagagtgagaagcaagatgatctatgcgagctccaaggacaggttcaagagagaact

SEQ ID NO: 122346 - DNA, 188 bp, Zea mays
  Clone ID: MRT4577_43064C.1
acgagatatcttatgcttctgcttcatactgcattttattcatagaaacaattcattctacgtggggtattttcaagcaaggtgtgaggtgtttttgttgcactattgctgcttgctttgcctttactagttcaagtatcaattctttataatagttttgagtttcatattattttttaggttttaaa

SEQ ID NO: 122347 - DNA, 461 bp, Zea mays
  unsure (1)..(461): unsure at all n locations
  Clone ID: MRT4577_43065C.1
gaccggaccgagaccagggccgggaggcctcgcgctcgaggcgggggccgccctaaaaggganggtttggggaaccaacgggccccgcccccgcccaggcaaacgcccaaaaaaaacagcagacaaaaaaccagggcgaagacaaaacaccaaaaggacaaagccgcggcaccaccgccaccacagccgccaaacccggagccaacaaacacgaagcagcagacagggacgaggcaacccagccacacacccaggcgacaaaaccacacaaacgggagcggcggcgccagacacctagcccgacctccgggcaggccaaaagaacacgcacagagagagagagagagctcagctccaccgaaaacgaggcagccgggacagcccgagcactgagacgccgcgccgccgaccccaggcaggaagaagcgccaaagggctcacgacgagcccaccgggaacag

SEQ ID NO: 122348 - DNA, 213 bp, Zea mays
  unsure (1)..(213): unsure at all n locations
  Clone ID: MRT4577_43066C.1
cctgtatcaccccacctcgtctcgtcgcctttcctcccaacccgcattcgcggcgcggncgcnttttttacataattacccgggccccccactaactttttacttaacccccctaccctcacttagctgttactgtttacacgttaaccaacatgtttggcagcttctttcctgggacgtttgctttccacgacaagcgcttctttaataaac

SEQ ID NO: 122349 - DNA, 322 bp, Zea mays
  Clone ID: MRT4577_43067C.1
acctcttcctctgcggaccacctccaaagctcttgacgcatcttgacactctcaccaagtcagccttcatgcatgatgtcgacattcggaacccaactgcattcgatcccttcaatgaggacaatgctggggactcacacgcggcagcatggtcgaatgactacgtacacactgcgcatcaagaaagcgcaatgctacacaatgacccctgactaccgtgccagacgattcgaagaacggagttcatgctacaccatacgatccctcagagatctcgacgaaagacttctgcttgcaatgactacaatggtaccagagaccc

SEQ ID NO: 122350 - DNA, 351 bp, Zea mays
  unsure (1)..(351): unsure at all n locations
  Clone ID: MRT4577_43068C.1
gggnaagtgggtccgccatgttccccggcggcgccgccgcttggctctggtagccgccgcccccgcccccaaccccgcccggcccagcgcctagccgagccccgggcccagcatggccgccccggagccggcccgggctgcaccgcccccacccccgccccggccgcccccttccgggggtgaccgcggccgggaagtgtgtcgctttgactgccccttccctggacctgggcctatgagcggcagattgattggaggcccatggctccggggtctgggatccgctgcttattggtctgcgggatcacctccactgggtgctgctcccgcgntgagggggaggaggcggcc

SEQ ID NO: 122351 - DNA, 402 bp, Zea mays
  Clone ID: MRT4577_43069C.1
ttttgggggtttttaaataatttttgggtttggacccaaaactcatagatacataacttataaattcaatggtcactataaccctaagacaatgttttgagcggcgaaaaaccaaatagatcttccagccgcacaccttaaattttataaaacaccgctcttttcaacgtaagagactcaggccttcggcaaccgtttgcacagcaaacccccagggcatgtacacacactatttacagatcgaggcgaagataccacacggtgtctttaacaagcgcccgaagtgcacgaccgcccaattgtctataaggaggaagttgccatgctgtcatggcacggccaccgactctttctttaggacctggacccacccgtcgaataccccggcaagcaagggggagc

SEQ ID NO: 122352 - DNA, 407 bp, Zea mays
  unsure (1)..(407): unsure at all n locations
  Clone ID: MRT4577_4306C.1
ggtcagnaagccaccaccgagccaacaggagatcggtgcgtggtttaaagctactgacgactggataactatgatctttctttctttatttttttttccagtagaatggcgccagaaacatggtagcaactagcaagcagatgacacggagctggaaaaatggctctggaagtgcagctgaagtgtctgtcttgctattcagtattcaccgacagaaaagggatcgaacagcggtagctggaaaaaaaaaacagctctggaagtacagcagaagcctagaacacaaagtttcagcgttgctgagcggtccatatcaactgaagcgaagtgaagtgatcgacaaagacagggcacagagaattgcagtgtatataataatataaggaacatacggtcagtttcgctgg

SEQ ID NO: 122353 - DNA, 680 bp, Zea mays
  Clone ID: MRT4577_43070C.1
attgggacctcgaggcggccccccgtcccctttccaccgggctccgagcacaaaaccctaaccttctcgctattaaagtcggcgtccagtccgtcggctgcagctacgccaccgaatccgcatctcctcgccggtcgcgcacgggcaaagcagcgatggcagcagcgacggcagttggcggacacgacagggtggaggctgcggcgtcgtccgcgggggctgtgctggccgtcgccgttgcctcgcagaggttgataggcctgctcgctcttgcggttcaaactgtaaattgtgtagcagaaatatataatgaagaccagcaggaaatatacaagttattatatggaagaatcaaatctgaaaatgtccctgaaattaaggctgggtcagatgatgatgatgacgatgaagacgatggtgatgatgatggtaacgatgatgacgacgatgaagatgatgacgaagatgaagatgaagaggatgacgacgatgaggaagaacagccaccttccaagaagaagaagtgatttgctctttcatggattcacctcagcttctccatgctgttagttgtgttgtttagatcatggaacagctttgggacaaatgttgcttgtcatggtattatagtgtagaaaaccttgacatctgatgttaaatcgttatcctactttctcctc

SEQ ID NO: 122354 - DNA, 230 bp, Zea mays
  Clone ID: MRT4577_43071C.1
ttggaaccagacgaagcccgcacgggtgcatttcgagctttccacgggctccaccaccgtggcgcgcgccagtcccggcaactacgaccgaacggtctgagaccggcttcgaaggccgcgcacacaccacaactcgaggaccgccaaggccatccggcagacagcgacggcggagcccccacgctcggggaggaatttgagcgggggaagcggctcccggaggactccct

SEQ ID NO: 122355 - DNA, 850 bp, Zea mays
  Clone ID: MRT4577_43072C.1
gtaccctccgggccggcccccccgtcccacgttcccaccggggctccgagcacaaaaccctaaccttctcgctattaaagtcggcgtccagtccgtcggctgctgctacgccaccgaatccgcatctcctcgccggtcgcgcacgggcaaagcagcgatggcagcagcgacggcagttggcggacacgacagggtggaggctgcggcgtcgtccgcgggggctgtgctggccgtcgccgttgcctcgcagaggttgataggcctgctcgctcttgcggttcaaactgtaaattgtgtagcagaaatatataatgaagaccagcaggaaatatacaagttattatatggaagaatcaaatctgaaaatgtccctgaaattaaggctgggtcagatgatgatgatgacgatgaagacgatgaagatgaagatgaagatgaagatgatgatgatgatgatgatgatgatgatgatgagggtggtgacgacgacgatgaagacgatgatgatgaagaggggggtgatgaagatgatgatcctgaggctaatggtgaaggggggagtgatgatgacgacgatgataacgatggtgatgatgatggtaacgatgatgacgacgatgaagatgatgacgaagatgaagatgaagaggatgacgacgatgaggaagaacagccaccttccaagaagaagaagtgatttgctctttcatggattcacctcagcttctccatgctgttagttgtgttgtttagatcatggaacagctttgggacaaatgttgcttgtcatggtattatagtgtaggaaaccttgacatctgatgttaaatccgtatcctactttctcctc

SEQ ID NO: 122356 - DNA, 773 bp, Zea mays
  Clone ID: MRT4577_43073C.1
cgggagccgacgacctgaaggtgctgggcctgtggacgagcccgttcgtgatccgggtccgcatcgtgctcaacctcaagggcctggcgtacgagtacgtggaggacgacctcggcaacaagagcgcgctcctgctcagctccaacccggtgcacaagaccgtgcccgtgctgctccacgcgggtcgccccgtaaacgagtcccagatcatcctgcagtacatcgacgaggtctgggcggggaccgggccggccgtgctgccgcgcgacccctatgagcgcgcggccgcgcggttctgggcggcctacatcgacgacaaggtgaagtccgcgtggctgggcatgctgttcgagtgcagggacgagggggagcgggcggaggcggtggcgcgggccggcgaggcgctcgggacgctggagggcgcgctcagggggaagcccttcttcggcggcgacggcgtcggcttcgtggacgccgtgctcggcgggtacctcggctggttcggggccgtcggcaggatcatcggccgcaggctgatcgacccgactaagacgccgctgctggccgcgtgggaggaccggttccgcgccgccgacgtggccaagggcgtcgtaccggacgacgtcgacaagatgctcgcgttcctggagaccctgctcgcgaactactactccaagtgactgtactgagagcgaactactgctccaagtgactaaataagaagggctgcttaattaataattacagtatataaaaaaaaaaaaaaaaaaaaa

SEQ ID NO: 122357 - DNA, 441 bp, Zea mays
  unsure (1)..(441): unsure at all n locations
  Clone ID: MRT4577_43074C.1
tgcagagctgcagtgagagcaagtgtgaggatcagatgaggcatccgtgaccaatgatcgagtagccatgttgatgtgagattaacgccctctttttcnctctcatagagctcctggtattccttattttttgttttttttaatacttggggnctgtttttctgtnntcnggaatttttttttttttttgctccccggtttttggactnnnngtnnnnccnttntntaaattnttttattttttttnnntattccnttttatttttttggtttttttttttttttttgtttttttntttgttnttgttaatttttttaaattttttttattntantatattttttttgtttttttttatatctctttnntnctttaaatatatttttgttatttatactttttatcttttattttgtatatttcctttcctttttttattt

SEQ ID NO: 122358 - DNA, 873 bp, Zea mays
  unsure (1)..(873): unsure at all n locations
  Clone ID: MRT4577_43075C.1
attgggacctcgagccggcgggatgcaccacctgaagactacggctctacttccactttaaaccctctcacaatggccggactagcaagacacgttgacacggaagagctcttgacaacgctcaaagaccatcctatgcacaaggctggtggacgtcattccgaaaaccgagcaacttcgcacatcaccccttactccagtcgatatgctgctggtaccgagctgtccaagttcaaaattccacaagatggtgcccctgcagatgttgttcaccagttactcaaagatgagcttgacctagatggacgacctagccttaaccttgcttcattcgtcggcacctacatggagagggagggcgagcagctcatgattgaaaacatatcaaagaatctgtcggatgctgatgagtacccagccatgatggacatgcatgctcgttgcgtttccattattgcccacatgtggggtgtgcaaaagggcgaaaaggccattggatccgccaccactggctctagtgaggccattcaccttggtgggctcgctatgaagcgtcgctggcaggaaaagagaatagccgagggcaaggacacttcgaagccgaacatcatcatgggtgccaatgctcaggtagccattggagaagtttgccaggtactttgaagtcgaggcccgtattctccccgtaagcgaggattcatcctaccgcctagatcccaagctagtcaaggagaatatcgacgaaacactattcggnagtttttgtcatcctcggctcccactacaccggacattatgagcctggtgaagagatttcggaaatcttggacgaattcgagaaagagactggagtcgaaattccaattcacgtcg

SEQ ID NO: 122359 - DNA, 454 bp, Zea mays
  unsure (1)..(454): unsure at all n locations
  Clone ID: MRT4577_43076C.1
ggccggccngggtcacgtacttactgcagagccgctccctactatccactaccccaaagtcctcaccgcctcgcctggctatcatctgcctttaacgtcgttggagccagctaaactcgccgtcgctcgatgcgtatggaggcctagctccccatcacagcccttaacatgcacaccgagagctagctcctcatcgccacaatcccgaggcgctgaacactaggcgacagcccctctatgaatgagtcaggggcgtacaagctaccgacaatccattcgaaggcgcgtatcaaggcagaatgacccggcagtatccagagaggactgatgcagtcaccgcccacctattttttttttccaccacccgcgcacgattcggaaccaaagcactggtatcgagtggatatacaaagaaaaaaaaaagaccctgatgcttgcctggatgcgtcccgat

SEQ ID NO: 122360 - DNA, 2820 bp, Zea mays
  Clone ID: MRT4577_43077C.1
aggaagagtcacagaatctctgcgcacctggtccaccggtctctgtcttttggttcgcttgcatgttgtttgcatgtagattttccattgccttctgtgtttttattatgaacaaaagccagtacaataacaaagttggtttccatttgaaatagctaaatataatcatgtgacattcatcacccgctcagttctttttttttcacgaaagccaaaacaccgaatttcatatccttgcctttttcttctcaaaatgtatctccgtattccctttaccagtacaaaaaagtatatagaatcaacgacttgacacaagccagtggcttagctccttgcctttttcttctcaaaatgtatctccgtattccctttaccagtacataaaaaatatagaatcaacgacttgacacaagccactgttggagtggcttagcattaatcttctccatttcatgggtggatttggagtggataagaggttgttcttcttaatccatcagcttgaccggtttattttccatctacgtacccttcttcctcctactagtactttttcactgtttctgtcaatttcccatcttttgtggtcggtgatcatggttagactgtacgaagtctcctttaagctcaagattcaactcaacaatctcttcatcgatcttgtgtgcctcaggattagatctctcttgtcatcaatatcacccattgaatatctctacagtacatctcctttaagctgaagattcaactcaacaatgtctccatcgatcttgtgtgcctcaggagtgagatctctcttgtcatcaatatcacccattgaagatatcttggtaaacaagaatacaaatgtagacactgcgatgcaattttctggttcaatgaacgcaataaatccatgacgagacacaataatcaggaaccaatatattcaaactgctgcaaaaatggcaaaatcagaataccaaaatataaagaacccccaacttttcttaatgaattaatacaccagaaaatggatacaagatgtaaacattttctacaaaagataagacaatataatagcatgtttgcatttacttccatggggggaaatattgataaaaaaattaatgatggtgagggaccatatgtgtttcgtgtcaatggccaaatacatcatcgaataggatcattactacctttaccagacaattgccctaaatttgcagaactatatatttttgatacaaagaatgaaattagtaatagaattagggctctaacaaatgaagaaccaggtgagcaagacatagatccagaaatagtgagagggctaaaaaaaatgctcgacgaatataatccattagtaaaaatattccgccaagctcgtgattttctcgaagaacacaaaggcatagatgtaagcattagaatagtaggcgctgacaaaactgatagaattcaatatgagatgccacatcaggaagaattagctatgctgattgtaggtgatttatcacttgagaactacaaacgagacatcattgttagcacacaccaaaatagccttcaaaggatatctattttccatccagcatatatgcctctacaatacccgctcctatttccatatggcgaacgaggctttcaactaggtattaaataccatggacaacacattagtcaaaacagagatgactccaaaagagatagagtaactttgcatgaatttttgaaatatcatgtgcactatagacctaatcagcctaatccctggttatgttatggccgattatcaaaacaagtagtagtagacggtcgagcaatggaggatgaagacaggcttgattatattgttagaaatcaatcaaaattacgatctgaatatgtacaaggtatttttgatgcagtagaaaaaggaatatatgacgccagtcgaataggcaaaaaggtgttattaccatctagccatgttggatcaaaacggtatatgatacaaaattaccatgatggcattgctatttgttgtgcctatgggccaccagatctttttattacatgcacttgtaaccctaaatggcctgagataacaacatgtttattactaggtgagcatccaaatgatagacctgatattattgttcgtgttttccacatgaaactacaacaacttttggatgacttacaatcaggaaaggtatttggcctcgtactggcacttctatattctatagaattccaaaaacgaggtctaccacatgtgcacacattaatttggttagacaagaaaggttgtgaaataactacagaaacaatagattcgtggatatctgctgaaataccagatcctgagttagatcctttgggatatgctcttgttgctgaacatatgatgcatggaccgtgcggagataaaaattggaattgtccatgcatgaaaaaaggcaaatgctccaaattttaccccaaagattttgaagaaaacactacattctctgaaaatggctttacaatatatcgaaggaggaacaatgggattttcatcagaagagaacaacacaacttagacaacaaatgggttgtgccacataatttaaaactattaaaaagataccaagctcatataaatgttgaatatgtaaacaagagtacagtcttgaaatatttatgcaaatatgtaaacaaaggacctgatagagcagagtttatattcaaaaaatccaaaaaggagaagaatcacatgtaaacaaagaagcagaaactatagatgagatacaagaatatctagactgcagatatatatgcgagcaagatgctctttggagattattaggatacgag

SEQ ID NO: 122361 - DNA, 418 bp, Zea mays
  unsure (1)..(418): unsure at all n locations
  Clone ID: MRT4577_43078C.1
ggacccagacggcgccggtcgaccacctcgggagtttatccatatnaaaaccaaggaaaacgcgggacgagagacaaggcgggacggcacacacaaaaaacaccgaaggcggaacaaacggaaaacaaacgagaaaacggcccaacggcgcaagagcaaccggggaacaccaacggaaacccaacaaccaccgggggggggcaacccccgccgcgcggaaaacccccccgggccgcgaancagacacncggacccccccggaaaagaaacggccacaagcgaaaaccncccacgggcgccccacaagcaaaaacccccgcgcggaaaaacaacgccggngggcaccaaaccaacaccccgaacaaacacggcccagccgcggagccccgaacgggaaaaaaaggccaccgaccgcagg

SEQ ID NO: 122362 - DNA, 286 bp, Zea mays
  Clone ID: MRT4577_43079C.1
ggagggaagagcctttggccgccaggctgagaaaatccaccagcctctctcggagctcactggtactgtgcatgagagcacaacgtgatttcccggcgatggtagtgacaaaggataaccgaactgcccgctactccaacactaaagtcgccggacatgattcaccggccccttccatcgctgagatggcagatcagccagcatgtaaaggcaccgaaccccggtacaaacgctggctatggttcgtcgggggaaatgaagctggactacgacggcacccagggcg

SEQ ID NO: 122363 - DNA, 293 bp, Zea mays
  unsure (1)..(293): unsure at all n locations
  Clone ID: MRT4577_4307C.1
gggcccgcggccctcagacccaaactcggaatccgcctcgagtcatacaatcacttaccaccctctcccagagggggggcatcttttactggtctgtaaaccnnccnngcccacaccaaaaccactacataagctaatataataccatccgctgccaatgtcccctgcagcagaaactgcagtttccccaactcaaggcaaagcacccggttcaaatccatctacaccacctgctcggcatctaccacaacaccaaagctatcagcatcacatgaactcgtcaagacatacaa

SEQ ID NO: 122364 - DNA, 1244 bp, Zea mays
  Clone ID: MRT4577_43080C.1
ctgcaggtaccggtccggaattaattcccgggtcgacgagctcactagtcggcggccgcccttttttttttttttttgatttttttttttagcaaaacatttgcatgtagattttccattgccttctgtgtttttattatgaacaaaagccagtacaataacaaagttggtttccatttgaaatagctaaatatattcatgtgacattcatcacctgttcatttctaattttttatcaatgaaagacaaaacacctccatatcattgcctttttcttctcgaaatgtatctccgcattccctttgccagtatagagacaacaacgactagacccaaccttttttcttgaagtggcttagcattaatcttctccatttcatggatggatttatagtagttaagagacttcttcttattcaatcagcttgaccggtttcctttccatctagcacacccttcttcatgttcactgtttctgtccatttcccatcttttgtgatcgatcatcatatttaaactgtacaaagtctgcttcaagctcaagattagattcaacaatctcttcatcaagcttatgtggctcaagagtgatatcccttatatatcgtcatcaatatcatccattgaagcactttgcaacatgaaattgtgtcttaatagtgaaagactgaagaaagggcctttaactcttatgaatgacgagataatccttgatgttgtagagcgaggtacctgggctctacatatgctcagatatgtaccctctcttctatttcaaaacacctctcttcttggtaaactagaatacaaatgtagacactgcgatgcaattttctggttcaatgaacgcaataaatccatgacgagacacaataatcaggaaccaatatattcgaactgctgcaaaaatggcaaaatcagaataccaaaatataaagatcccccaacttttcttaatgaattaatacaacgaaaaatggacacaagatgtaaacattttctacaaaaaataagacaatataatagcatgtttgcatttacatccatggggggaaatattgataaaaaataaatgatggtgagggaccatatgtgtttcgtgtcaatggccaaatacatcatcgaataggatcattactacccttaccagacaattgccccaaattgcagaactatatatttttgatacaaagaatgaaatgaaaatgaattaggcgaaacaaacccgccgcctcgaggtccca

SEQ ID NO: 122365 - DNA, 384 bp, Zea mays
  Clone ID: MRT4577_43081C.1
agcagtggtaacaacgcagagtacttttttttttttcttttttttttttttttggcaaatttattagtaagttttattttgtactttatagtatttttctccttctattctatttattcaaagtaggtattaaatcctccatttgaatgttggtttacttatgtcaccaaatgcacacacacaataaatcccagcatgatgcatgttttatttaagtgtcatttgttttaattacttattcatatttatagttattctcttgttataatgattagatggcacacaaaataaggagatcaactataatctcattgtatacgtttttgggtactacaatatctttaggaggagcctacccgcgtactctgcgttgttaccactgct

SEQ ID NO: 122366 - DNA, 534 bp, Zea mays
  Clone ID: MRT4577_43082C.1
gcgtacgccccattccgtatctatactcttctttatatcgccatggcaatcgcaaccatcgcgatccactactactagaccaaatgcatgactactagctccatgcatgtctgataggacgcttgatccatggctaaccaatctatagtatagaatgacaggggtgaggtactgcaggttgtaattagaccctcccgcacactgatagacggtgctgctaagctggaatggcagaatgcatgaataaagaaactgcaccagatactacaggcacagagcacccgacttacctggataggacgacatgcgcgactgaagcctgagaatacctgggcattggtaacgccaacaagggagggccttgcttacttgcagacgctatgctcaaacacaccaaccaccttcgggaacgtggagcatctaaaggcttcatgaacacgcaagactccacaggctacatctatgccagtgtgggactacaaccacaacgatgctgaacagccggctgatctgtgaccactcaacacggtcggc

SEQ ID NO: 122367 - DNA, 134 bp, Zea mays
  Clone ID: MRT4577_43083C.1
agggatattacctcatgctgataatttggcccacattggtggatttgcttctgggttgcttattggatttgtgctgctggaaagacctcaatttgggttgatggacacgcagcgagctacctcagactagtcaa

SEQ ID NO: 122368 - DNA, 271 bp, Zea mays
  unsure (1)..(271): unsure at all n locations
  Clone ID: MRT4577_43084C.1
gtatggatctgcaatgaagtaatagggttcaaaattcgccggtggtttgtaagtgtggttgctcagatcgaagcctatgcgtgtgagatccgtcccgctgnnggacgcccctgacgacgggagatgcgccacctgnntctggnggttgttgttgttttttgggtggttgtgtgtggtggttggtggggtggtttgtggttttttggggggttgtgggggtntttttttttttttttttttttggtggggtggtgtttttttttcttgggtg

SEQ ID NO: 122369 - DNA, 464 bp, Zea mays
  Clone ID: MRT4577_43085C.1
ttaactccttcacttaaggggaaccaaaggctggaggccttgagggcggctttttttttttttttttgtatggtgatgtgccaaattatctaagatagttgcatgcaatagcattattgggtccgagaaaactgtgccacagacatgtatcgttggagatcatcaaagtctcagaacaggagacaccacagaggtatgcagaccgcagcagtcgggagccatttacttccaacctaggtttgggaactgagctggatctttaatggctggagcagcagcatctgagccacgactgtatcccactccgtatcccgactctaatagacaacgatcccatcgggcccttccactgtcacggcctacagtggacctgatctgcttcagaggttattaggagctcagtgatgctgaccgacttgttgccgcactgatcatgctcaggaatgcacttcttcttatgcttg

SEQ ID NO: 122370 - DNA, 891 bp, Zea mays
  Clone ID: MRT4577_43086C.1
aaaccccccaccaactggcgcaaggtcctggacgcgccgcccagcaccgtcggcggcgcggggctggaccagcagtacgcgaacgtgatcgcgtccgcggaggagctgctgcggatggaggccgaggggcgccaggaggaggcctccgcggagcgcgccgagatgtacgagatgctcccggcgaagctccgcgcggcggtccggtcgaagctgcgggagtggtggcgcgacccgggcccgctggacgagggcctggcgcgcgggtggaaggacgcggtggaccgcatcatggcgtggctgggccccatggcgcgcgacacggtgcagtggcaggcggagcggaacatggaccggacgcgccggttcgacggcgcgccgcgcgtgtacgcgctgcagacgctgcggtgggcggacaaggacaaggccgaggcggccatcgtcgaggtgctcgtcgcgctgagctgcatctgttggtacgaggagcgccggcgaggctccgtccgtctcggttgaaccattcaacgcattctttcccctcgctcgatcagatcggtcgtggcgagtggccgtttcttcctcttctctcctgcgtttgtcaaatatttgatttgaagagttgattttttgggccggtagtagaagaattagaagttagaacggggtggtgatgcgttgaacgggttaggaaggaaggagacacagcagcagcagcaatacttgaaacgaaatcgatggttggtatgcgcgttggggtggctgtcagcggcgtgacgccgacacgtgggggcctcgcttcccactctcccgtcggtctcacgccagtgacagagtccggtgtacaacacagtgtcacgaggattgtgtaatatatataatacgattgattctttg

SEQ ID NO: 122371 - DNA, 534 bp, Zea mays
  Clone ID: MRT4577_43087C.1
tttttttttttttttttttttttttttttttttttttttttttttttttttttttttttttttttttttttttttttttttttggacaaaaaaacaaattaataatggggaaaaggggggcccaccaaaacacaaaacaacccctgggggggggggggggggaaaaaaaaaagaagaagggggggaaaaaaaaaaaaaatttttttaaaaaaaaccccccacaaaaaacaaaaacaaccagggggggaagcccggttatgccaacccggcaaaggggaaacaaccccggagcccgttaaacaaaaaacccccaactttggccccttgaaaaactggggcaaaaaggatttaaacacttttaaaacccaaaggggggggggggcttaaaggggggaaaaaagcttttgggagctttaattcccgaaccccaaaaaacccccctaagggaaagttctttgaaaagggttttaatttttcccaaacagggggggactttttggccaaaatttaaaaaaaaaaggggcgttggggccc

SEQ ID NO: 122372 - DNA, 387 bp, Zea mays
  Clone ID: MRT4577_43088C.1
ccgtaagctcggatcctgtatagcggccgccctctactctttcttttacacttcattttaccatgaaccaaatccaatggttttgtttgctctgtgtccatcatccggcgccccactatattgccctgtggtgatccctgaagctgtttttctgtgactcaataaccgggtttaggagtgtcatgatgttcacatatccagtcaaggaccacctccgcaccaggggtacacatggttgaaaacgttatcgtttacatcactctcatgacggatcacattgttccgaactaccattaccacatcaccataggcgtcctaggtgattcgtgaatggatgacagccttcccaaaaactaggaatgacgggcgcttgtcctggtccgagat

SEQ ID NO: 122373 - DNA, 786 bp, Zea mays
  Clone ID: MRT4577_43089C.1
ttcttcggacgcgtgggggagaccagggacttggatggacacatcctcttcatcgaggaggaccactacatcttccccaatgcgtaccggaatgctcagctgcttgtggatttgaagccgaagaagtgcccccagtgctacgctatcaatttggccccgtccgatgtcaagtcgagaggcgaaggttgggagagcttggttgccgagaagatgggtaacattggctatgccttcaatagaacagtgtggaggaagatccatgccaaggctaagcagttttgcgcgtttgacgagtacaattgggatataaccatgtgggcgacggtgtacccgtcgttcggagctcctgtttacagtctcaggggatctaggagaagcgctgcgcatttcggcaaatgcggtctgcaccaaggccagggttcgagcaatgtctgcgtggataatggttcaggagctgtggaattggaggatgccgataaggtccctaatatcaaagctgattggccagtccgcgtcattcagaggcaggaggggtatcaagctggtttcaaaggatggggtggttggggtgaccggcgtgatcgtgagctatgtttgagttttgcatacatgtaccatgttaaagatccatcgtcatcgtaactaggcacacggttttttggcataagtagagccgctgttgtaatattgtttggcatgtgccctttgatccatacacggtttgtgctataaatagctactgtagttgcccatcgtcaaaaaaaaaaaaaagtggttagagttttt

SEQ ID NO: 122374 - DNA, 332 bp, Zea mays
  Clone ID: MRT4577_4308C.1
gggggggcccgtctttaaaacttaggggtccccccggtcctgaaggatttcggcaggaggcgggaccagctccaggtcggtgaacgagtggccgactagtgatacgaggagcgcgcagctatggcagcgtcgctcggtctactgtggacacccaattccccctctacagggggttgttcccctcctgcggcctgtctattactctcgctcccatggccgaccaagcatactccctcctcgccctgcggctcctccgcctagcaggggatgaatcgctctacctgcctggcctgcctgccgaggttgaagacaaggtgcacgtgaagctggat

SEQ ID NO: 122375 - DNA, 195 bp, Zea mays
  unsure (1)..(195): unsure at all n locations
  Clone ID: MRT4577_43090C.1
gatgaagcaatggcaattgatgaaagaaggttgtcgcngtctaagtatcaggtgcatgattaaagtagccgtttgaactttgtggacgcatcactttatccaagaatatcataaattctgctggcaggactcatgaccctattaagaaactggactttgctcgtgagattattccccttgcttttcacctattga

SEQ ID NO: 122376 - DNA, 686 bp, Zea mays
  Clone ID: MRT4577_43091C.1
gggtaccgcggccctcctcgagtttttttttttttttttttttttttttttttttttttttttttttttttttttttttttttttttttttttttttttttttgggcaaaacgacggggaaaacatgtcctttccttgggggattcccgaaaacaagaacaaacgggaaaacagaggcccttttagttttacaacaaactttttggcgggccggggggaaaaccgttaacggggggaaaaccccaaacaggggccaaaatttaccttatcatatggaattggggaaaaacgacggggacccgaagcttaacccaccccctccattttgttttcgccgggggtttcccccaggggggggatttaagtttgggccccaaaaaactcgtcctcatgggggctcaaaccgagctttaacatgcgagggacccgggggccaaagggggggggggcatcccggctgaacccggggggaaggaaaactttttaaaacagaaacatcacaaaaacctgggcgggcttggcatttttggcaacccggggggccttacggggctaaaccatggggggggtccccggggggattcccaaaggcttttgggtggacagggcccccgacttggtaaagccccccagggccggggccttcaggaccccccccaggggggggggccccccttacccccccg

SEQ ID NO: 122377 - DNA, 332 bp, Zea mays
  unsure (1)..(332): unsure at all n locations
  Clone ID: MRT4577_43092C.1
tttttttttttttttttttnnnnnnnnnnnnnnnnnnnnnnnnnnnnnnnnnnnnnnnngatatttctgtactacaaggttggacgaaccaccagcgacgactcacgacacgcaaactggtttgttttcacgcgagccacgtgatcctttggagctggtctccctgcagttggggtcagagtttgacggttaatatcttaacagccagccccggttgcgtcgcgtatgcattgagcattgtggtcgctcctgcgctgcgtgtttctggataataaaagccccgccagcccccgcagcggagaaccgcgcaagtgggtcaactcgcaactgaa

SEQ ID NO: 122378 - DNA, 660 bp, Zea mays
  Clone ID: MRT4577_43093C.1
agacaagagagagaccaagacttggccggccggccggaggagatcgagaaggaggaggagacatggtgcgcgggaagctggaggtgctgctcgtctccgccaagggcctcgacgactccgatttcttcaatagcatggacccgtacgtgatcctcacctgccgcagccacgagcagaagagcaccgtcgcatcaggagcagggagcgagcctgagtggaatgagaccttcttcttcgccatctccggcgacgctccggagctcagggtcaagatcatggacagcgacgccctctcggccgacgacctcgtcggagaagcatgcatcccgctggaggcggtgcttcaggaaggcagcctgccgccggccgtgcaccgggtcgtcaaggacgaggagtaccgcggagagatcaagatcgcgctcaccttcaccccggcagaggaaaacgaggaggaggagagctacggcggctggaatcagtccacctgagaaaggctagcgagccagcaagatggtgctgtatgtctgtcataatggatagaaaggctttcgatctccttgatgtgtatgacagacagggcattcagaaaaaacgagtaaaaataggggaaatgtatcgatgcatgaagtactaatcaagcaattcaccgcatcattttgc

SEQ ID NO: 122379 - DNA, 276 bp, Zea mays
  Clone ID: MRT4577_43094C.1
aaaccgaaccagaatagcggattactgaaacagcgtgtttgggttatagagttaggctgcaagaggttttatcgcagttacctcgaggtgataacatatgggatggcaattggcgagactacgtgctcgtaggcgattactattagactgcacaatactatgtaacgctacgaagtctgtgtggttctgagcggcattgatgacattctgatgtatgttggttacacaagtgtatatatgcatagtcgtaatctatctatgatagactttgttgtt

SEQ ID NO: 122380 - DNA, 269 bp, Zea mays
  unsure (1)..(269): unsure at all n locations
  Clone ID: MRT4577_43095C.1
tccttcgccacctagtttaatcccttgcccaaggccgccccnaagaggcccaagggcggcgcttaaaagcccaagggcgcttccaaaaccaaaactaatacccccgccaaggcgaagcccgccacaaaacccaatcccgccgcgaagccgaaagccgtattgaatccgaaaacacccgccaagcccaaagccaagccagcttgcaaggcgaagcccaagaccgccggcgctaagccgaagccacttgcttaaaaagccggccgcccccc

SEQ ID NO: 122381 - DNA, 409 bp, Zea mays
  unsure (1)..(409): unsure at all n locations
  Clone ID: MRT4577_43096C.1
cctcgaggacggccggcgtagacatcacacaggagaggatgagtgatcccaagtacgcctacctcataccccgcggaaggttacatagcaggggtcgtaccagggcccgacggtgatgtcttccgcccccaccccggncgcgaggcccctacgcgttgccccgtagtgcgtctctgtctgccggtccgcggtcgccagcgacgccaggacgatccgcctcgtcgcctccagatccgcgcgggccaccagactcgtcgcccgcgccggcggagacgatgacttgccggtggccgggaacaaggcgtcagacttctaagccgaggccgggttcgagcaatagttcatcaacgagatgttttctgattacttcggaaacaaatacgtcgttctgttcttctaccccttggat

SEQ ID NO: 122382 - DNA, 125 bp, Zea mays
  Clone ID: MRT4577_43097C.1
tcggatgataccacaccaagcattatagatacacagtgtatcctttcttcatgattagagggcagcctcactgttttatggaacattattttcttcaaattacatcaccctcatctattttcatt

SEQ ID NO: 122383 - DNA, 525 bp, Zea mays
  Clone ID: MRT4577_43098C.1
aaaaaaaaaaaaaaaaaaaaaaaaaaaaaaaaaaaaaaaaaaaaaaaaaaaaaaaaaaaaaaaaaaaaaaaaaataaaacctaaaaacaaaaccacccttaagggccccataaaaaaaaaataaaaaacttttggccctcgcccgggcccccctttggggcgggatttttgcatttttcctcccccttggggcccttttaccctcccttttaggggccccattcccccttttaaaaccctgttttcccttaacttggccgctttttaccacatcccgctttggaaaaccccggggtttcccaattttacccccctgggggcccttcccctttttgccgcttggtgaattgggaaagggccccccccgtaccccctttccaaccggttcccccccttgtagggccaaaggacccccccctttcccgtgcatttacccctggggggggtggtgtttccccccacggttcctttttcttttccctggcccttttcccccccttcttttgtttttttccctttcttttt

SEQ ID NO: 122384 - DNA, 336 bp, Zea mays
  Clone ID: MRT4577_43099C.1
aattaaaaaaaaaatataccggaaaagtgctatcttcgactaaagtattcctctacccattaattcattcctgacccctacctgaatgcgatccaaatttccctatagatagccatttcacattttgaagaaataatgaggataaaatgttcatttatgaatttgaattatatgtccacttattatgcctattactgaaaccaaatgaaatgatatcgtaattcctaggggaatttcaattccacattatcaagaaataaggaggcaaaaatgttcatatattaattggtattatttgttttcttatttaagcctattcttaagccaaaagaaatt

SEQ ID NO: 122385 - DNA, 512 bp, Zea mays
  Clone ID: MRT4577_4309C.1
ggcactgtcttctaagctctggcactggcactgactgaactccttgccgcaacaggcgtacgactgctctgaactagagggggctggttctgttgccgatgccatggggagcgggtggatgcccccgccgcgtctgagaacaaagatcacatggatgctagtgccaatgaggaagatgacaagggtgatgacgatcgatgactctggcggaatttgtgcacatctgagaggagacgctgcaagcactacttgccttcaacgctgctgagacgtactggcttgttacaaggatctgcaagctctgtatccactttctaacatcgacctagacatcccaattcttgatccagcgtgtgttcttgacaaggtgtaaggaagacagacaatgctcttccgtatgagcgtgcctaaaatgtctggagcataaactagttacttaaacctgctaccagataaaggtactacagctgtcgtgtccaaataatgagcccagatgatctagttgcgtttag

SEQ ID NO: 122386 - DNA, 391 bp, Zea mays
  Clone ID: MRT4577_430C.1
cggtcgcgtgggatttttttggttactgtaccatgacaatcttcttcagtcagcctgatagatagatttgtgacaccaaaatcttgaattttcgcgtaagaacttactaattccgtttgtagcaaacctgtagccctatgatccagctataaaccgattatggtaaccatgctcaaacatcaatgggatcatcttcaaaatggccctagagttcatcctatgccactggataccataattcaggttttaggcagactgacaggccaactttggcgtgcagattctttaatttttggataacaaccaaagaagatatttgcaccaaagttactctcctacaatagctctagactttttatgtgtggccctagggcaaaatccttataatttt

SEQ ID NO: 122387 - DNA, 614 bp, Zea mays
  unsure (1)..(614): unsure at all n locations
  Clone ID: MRT4577_43100C.1
ttttttttttttttttttttcttgcagggccatatggttcgcttgcggaagcatagaaaacaacntccccgttacagaacacaatgtgtataggattacacattcctcatctctgtctcagacctctaaatgacaaacaaacaatctaaaaataaataaacaatggatcgtaaaacaggagcaaacagaggtcaatggggtgatatactgttgctggtggcattggagcccaaatcggagagaagtttactctagntcgtcacaagtgtattgaaccacantataccagcattttaaaagatgggnaccccctggaacgcggaggggnccctgacgacacaaccccaaggggggggggncctgacattcgggtggcagtctatcgaaaggggaannagctgtatgntacatggggtcggnccncgtcattcaaagtcttttaanncaatcgttatactcccgttactnngttgancgtgtaccaacccctaacagcctccgcctggggccaggntaaagaacggantgcggtgatggacacggcatcatgcggtcctgggcgaaaaggcntcttctgcatcgaaaggggaaaaaccnnagaggccctctagcaa

SEQ ID NO: 122388 - DNA, 437 bp, Zea mays
  Clone ID: MRT4577_43101C.1
cccacgcgtccgaaaaaaaaaataaataaaaaaaaaaaaataaaaatttaaaaaaaaaaaaaaaaaaaaatagggtggtggttttggtggatccctgttttctttctctttgcttgttacttctttgcgttttttattgcgtctttcttcttctattttattgcccgtccttttatcagtgttcttgactgggaaacccttgtctttgcctatctttttcgccttgttgtacattcccttttcgtctgctgtctttattgcgatctggtccttctcgattgcctttccctccctttgctcagcccgtatggtgtatgggactcgccctgtttctgtgcttttatcttctgtggtcgtggtggttctgcgcaggtttgccccgtttccttgtcatttccttattgtctgtatctttcgttttgttcccttcctttttc

SEQ ID NO: 122389 - DNA, 165 bp, Zea mays
  Clone ID: MRT4577_43102C.1
caaacctgattataattctacgtgcctgcggcctctctgagtgggcgaaatgtagaggactcttcatcatgatccacggctgatcgcgcgcgccagaggggcctcattggtgagatcatcagccgctttgaggagaagggcttctacctcatgaccttgatggtt

SEQ ID NO: 122390 - DNA, 213 bp, Zea mays
  Clone ID: MRT4577_43103C.1
acattcctacggcgtcttcacagcgccggcttctccccgctccgtctccctcccctctccttgctcggtcggtgccgtccgcttcttttttcctcgatggcggcgtgggtgccaccggtgagcgtgggttactgcaatcccgatgctcatttatgtgagtatgctgtgggtcgagagattgtgctccatgcttcgcggtccgcgagcccggtt

SEQ ID NO: 122391 - DNA, 438 bp, Zea mays
  Clone ID: MRT4577_43104C.1
ccttggcaagggcggggatggcgtctacgtgatcctggtaatgaagccggcacacgtgaacctcacctcttgcatctacacgtacgccgtgctggacacccaggtggacgaccaccccagcggggcgctggtcttccatgagacggacctccgcgccggctagaagatgaccgtccagtacgccagctccggcacgaccgcctccaagatcctcctgcggagcgagggcgcggccatcgcggtctactgactgatggggcccgtgaacctcgcccgcctgttgggggaccccgacttcctcgaggcggcggtgatggacccgacgcatctccactgttaggcgcccacggccaatggcgagaacaaggcgtgcgcctcgtcgctggagtgcatggtggacttgaccaccgccaggctctggaccatgcacgcgagggg

SEQ ID NO: 122392 - DNA, 272 bp, Zea mays
  Clone ID: MRT4577_43105C.1
catctctcaaaccatccgaccccacctcgccgttcactcccaagccagtccctgccggcagcgatggccccacgagcagacgggcgcagtcaaggcggcaggcgccgggagcactgcgacaagcgggcgcagtgcgccgcacggggcggagaaccgaccgttcgccgcacgggcctgggaatccgcagacagagagccgactgtatcgagtgcgtcagcgtggcggagacgccagactcagacgactcggtcagcttcgcggccggctgaga

SEQ ID NO: 122393 - DNA, 428 bp, Zea mays
  Clone ID: MRT4577_43106C.1
attccggcacgaggcacgaggactctctctctgcgtgggcctgggcctaccactgacctgagtagctagctctccagctgcgcgcgccatggccatccaatcaggtaccaggcatgcttctaagcgtattctgaccagcctgcttaagcctgggggcgaggaatacagcaagcctcttcagccttgcggcgataaatgagccaaagcagcgagaagcttccatacgctacacgtgctccaccaggaatcatctatccgcaatagcgatagcttgcaggctacctagagtgagactgagaaaatagttgattggaagaacacatatccaaagctggctcacataccttggaggccagacaggagcatcagtaagggacaacactggagacccaggagcctgcagaccttggagctatgcgagagatgat

SEQ ID NO: 122394 - DNA, 1145 bp, Zea mays
  Clone ID: MRT4577_43107C.1
atctttccgtcatttattatgaggcagtgtgttgtatcgtttcactttcccttgctttatgtgccctctcatacaagttgcaatttcttcaattaaaccaccatcatttctccctgttattttgtatcctgttatagatctgccaatataatcagggtatcagctggtggttatgtagacgaattaccaggaatataaatatacatatgtttatttatagacactagagattggcaaaatgtttgttggaatgtggaattaaatcagcaatgtgccttcatctacatgccatatttctacatgctacctagaaacatatagctgtgttctgcatatcctatgtccctcgcgagccatttatttgatgtcttcctaattttcaggatgatgaagaatctttgttgcaagcacgaggtgaagccgaaatgatgatcgtggaggcctatgcagctcttgtgctcgcctttctttcaacggaaagtatgaaggttcgaggagccatttctagttgccttccggacaacaacttaaaagttcttgtaccagtgctagagaaatttgtgtcatttcatctgcagctcaacatgatgacaagggaaacgcattcagctgtgactgaagtcatcgaaagatgtcggctatcatagaagtgggaagaggcgccctgtacagattagctgacctctttgcagccgaagcacacacaggtgttgctcatcacctggccagggcgcaacaaatggatgccagaggctggcctgcagtgggctttgggagctaacagtgattttattctttcttttgtccctagtttcttgttctccgcatcccccgaaatcacatgtttcattgtcgtaggaatagtccgtattatgaatgtacaataacaacataggccgtagggggaatgtagttgtgctgtttcagttcctgggctgtctgcctttcaggttgtatgctcgtgtcacatggaatcagtgaccgcatgcctaaatctgagttaagattgtatatcacataatagccgtgcaattcaactatgtagccctatgtacagaggcgccatatattgaagcatcttctggttgcaaaaaacatgaatgttgtataaatagtgtaactgaaggtatacaaatcttccaggc

SEQ ID NO: 122395 - DNA, 327 bp, Zea mays
  Clone ID: MRT4577_43108C.1
ccatctatagtcttttttcctgctcccttgcctccctttctggacatctcgcacctctgctggactgtgacaagaacacacctcacaccaccacctgccatacctaacgctactaacccatggccatcttcataaccacataactctggatcaaaaccatgccatgcccatgcaacccccacccctacaagcagcactaacatatctaccatatggcatagcctcttccatgcttccatcataacactgtcatgatgaaccgacctcccacatcacaacattggcctacttcagcggcagctgccaaccacccacgggccgagcgca

SEQ ID NO: 122396 - DNA, 582 bp, Zea mays
  unsure (1)..(582): unsure at all n locations
  Clone ID: MRT4577_43109C.1
aaaatacacccaacccaaccgtggctccgagggaagccttccttccttcttccctctgcccagtgatggatacatgacatccatcggcgcgcctgtctgcccacggattcacagatccatcggcgccgcatctgtggtttgtttttgcggcggtttctgtttctcagatctacaaatccttcacatgcatctaatctgtgaatgttgatgtttccgtcttggcttgcaataacggatctatccactatgcgcaggcagaaacaacggatctatccactatgcgcaggcaggcaggcagaaacaacggatctagcacgcctgatggcgagcgagttgagacgggaactttgttcttaattccgcttttactctttctctatataatatactatgtatgtttggaagatcttcatcgccccaagcggagcggagctgatccctttgcttgtttgtcgtcgattggttgatttgattgattgtcgtggtatcccatcccacagaaaaaacgagttataatttgctctgcgtgatttcagtatgctttgccatcccacagaanatcagatttgcaatctctgttta

SEQ ID NO: 122397 - DNA, 282 bp, Zea mays
  Clone ID: MRT4577_4310C.1
atttttttatttttttttttttttttttttttctcccttttttatcctccatttttttatttttttttttttttttttttttctcccttttttatcctcctttcgcaacacttatctactaaatggcgtctttttgtaggtcaatattcaacaccatacaacataacaggtctaattgtgtctgtcttataccttttgtggtatccatgggtcacataaaatgctaaatgaatggcgctacttcctccaccctgctatgaatcttacttcctccaccctgct

SEQ ID NO: 122398 - DNA, 2474 bp, Zea mays
  unsure (1)..(2474): unsure at all n locations
  Clone ID: MRT4577_43110C.1
gaaccatgcatttaatatctctgtctttctatttcaaacagtaccagggtgcggaaaaagcatcggtttccatctttctataaatccgacatatttcactttccatatttataaaaaattcttcatctttccgtcatttattatgaggcagtgtgttgtgtcgtttcactttcccttgctttatgtgtcccttctcatacaagttgcaatttcttcaatttaaccaccatcatatctccctgctattttgtatcctgttataaatctgccaatataatcagagtatcagctggtggttatgtcgatgtattaccaggaatataaatatacatatgtttatttatagacactagagattggcanaatgtttgttggaatttggaattaaatcagcaatgtgccttcatctacatggagcgtttcagcatattgtagggatttaaggaatgccttcagagtattagactttaaaagagtgggaaactagaggggaaaataagaattggtttgcggttgccctaccatttcaaattcaattaggggagtgggtgaatcctctacgccacgcgttcaccggaggatccgttcagaatgtgagaaacctgtgaagtatatcttcactttggtagtggaaggaaatgaatgtcccccctttctctgcatcacactcctagtacagtttctgaaaaagtagacccaaatcatattacagtttgcaatggagcatactcagccgctacaaaaggtttgaaatttttgaactctcttcgcaagtccaataaattaaagaaaaagagtccattactgaatcatcatcgcaagttcctggattgcttatctaccaaattcaatggtgctagtttgaagctcaatgtaagaaaggaccgttctaaagctaattcaaccagaggttcaagtggttggatttctataaaagcacgtacttctgattggaactccagagaaatggcaaaaaagcgacgtctatccagaaaatgcacaaactgctttgagtaatggtggtgatgatccatttgcatttgatgataccgatcaagaaccttcaaattgggatccatttggtccaaaaaggaaatcaccacagaagcgagcgaaacgatctaatggtgaactagtgctggatgattgtgacactgcagtaacgggaagtcctgaattatgtcaacctgaaggtattaatcagtcaggtgcaacttctgattctaaggctgcagatgagtccaaccttttagaacattgccttttggcatcagttaaggttcttatgaacttggcaaatgacaacccttctggttgcgaacaaattgcgtcatgtggtggaattaatacaatggcctccttgatcattaaacattttccctcatttgatttctccatggacagtaacaatcaaatgaaagaaagagtatcctctggtgatctgtcgtcttcccagaacagcaagtcactccaaatcaaaactaagcaattgcgagcctatgaacttgattttctggtcgccatattgggattgcttgtcaaccttgtggagaaggataaccttaatagggtacgacttgcgaatgcccgtgtttctgtcaatctatctcaaagtccagatactgaagaggtacagagggatgtcataccccttctctgttcaatattcttagcgagtcaaagtactggggaaactgctgaagctatatcaccggatgacgaagaatctttgttgcaaggagaacgcgaagccgaaatgatgatcgtggaggcctacgcagcacttgtgctcgcctttctttcaacggaaagtatgaaggttcgaggagccatttccagctgccttccggacaacaacttaaaagttcttgtaccagtgctagagaagtttgtgtcatttcacctgcagctcaacatgatgacaagggaaacacattcagctgtcaccgaagtcattgaaagatgcaggcagtcatagaagttggaagagggcgccctgtacagattaaccgacctctctgcagtgcagccgaagccacacacaggtgttgctcctcacctggccagggcgcaacgaattgattgatgccagaggctggcttgggagctaacagtgtttctattctttcttttgcccctcctgctgttctgatcctgtcatgtgcatctcctttagtttcttctccacacactcccccccggaaatcatgtagtccatattatgagtggaacaataacagtgtaggctatagggaatgtagttgtggtgcttcagttcttcgtctctgttttacatgttgtattttcgtgtcacatggaatcagtgaccacacatgcctcaatctgacaaattaagagtgtatatcacataatagtagtgtaatttaactatgtctctttttccgtataaagaacctattagttggaagcaaacccgtctctttcttccggttgcagccacaccccccccccat

SEQ ID NO: 122399 - DNA, 942 bp, Zea mays
  Clone ID: MRT4577_43111C.1
tcaaaatcccagatagcaaagaggtacagagggatgttatacccctgctctgttcaatattcttagcgagtcaaggtaccggggaaactgctgaagctatatcaccggatgatgaagaatctctgttgcaaggagaacgcgaagctgaaatgatgattgtggaggcctatgcagctcttgtgctcgcctttctttcaacggaaaggttcatagtgccttatttcataatcttttcttaattagttataattttaatgtgagccccaccccactgccgtcagcttatgaactgatgtttgctgccacagtatgaaggttcgaggagccatttctagttgccttccggacaacaacttgaaagttcttgtaccagtgctagagaaggctgtgtcatttcacctgcagctcaacatgatgacaagggaaacacattcagctgtcaccgaagtcattgaaagatgccggcagtcatagaagttggaagagggcgccctgtacagattaaccgacctctctgcagtgcagccgaagccacacacaggtgttgctcctcacctggccagggcgcaacgaattgatgccagaggctggcctgccggcgggcttgggagctaacagtgtttctattctttcttttgcccctgctgctgttctgatcctgtcatgtgtagtttcttctccacacaccccccggaaatcatgtagtccatattatgagtggaacaataacagtgtaggctatagggaatgtagttgtggtgcttcagttcttcgtctctgttttacatgttgtattttcgtgtcacatggaatcagtgaccacacatgcctcaacctgacaaattaagagtgtatatcacataatagtagtgtaatttaactatgtctctttccgtataaaggacctattagttggaaaaaaaaaaaaaaaaaaggccccta

SEQ ID NO: 122400 - DNA, 585 bp, Zea mays
  Clone ID: MRT4577_43112C.1
ggtcaaagttacaacgtcagacttatgataaattgagatggacttgtcttacgataggaggaagtaacaatatataatggtttgactattttctaaaaggaatgtaaatgaaagtgaattttcattccactggtgtactaggaaaatatctagccaccaggttctgtacaaaccctacaaatactattccaggtactctcatcgcctgtctctagagccatgccatgcttgaccaagtcataagccacttgtcactcttcctgggacagtactgaaaattttgtcaaagccggtgtacatccagaagggccagaacccagcttatctgaaaatcacggcattgatactcatgcccccaacacgtcctagatcagacatttgattcttactatctgagcaatgatatttcttcagctcagcatctcatgcagtttaatagtttaccaaccaatttaagtctgcactgatatggaaggataaaagcttaccgcatacctgaatgccctaacctggaggaaagggtattgcacatcatgatttcattgggtttgtttcatcttgaattggtgattagtgtcgtacttg

SEQ ID NO: 122401 - DNA, 472 bp, Zea mays
  Clone ID: MRT4577_43113C.1
caccacaccaacccgtgtggaacgcacctaggaggccgcctgactcggctcgattaaaatggggtttgtactctagagaatctggtggttagtgccaggaacccgctaagcccgactcttattacctggtaatgcagaagttccctaagctagctggagattgttaatataaggtgactaaccataatttggctcattgcaacttccacgctcactggctatttgaacctaatagatcaaaccctgtgctgtaaggagcgtgaagtctgctgctaatgggaatcacttatcgccacctgcgtgttagcaccctaaaactaagctgtctcacgagggcgtaccctagttaaggtggcgtatggggggccaaccaatccaacaatcagccaaatctgatccagaatgatgaaaagatctgatgtcgagacatcaaaaggcaacccagttattaacactagcgttgcacaagcca

SEQ ID NO: 122402 - DNA, 5521 bp, Zea mays
  Clone ID: MRT4577_43114C.1
gttggttactacaatgctggaacagtggagtttattgtggtcactctttctggagagttctacttcatggagatgaatactcgactccaggttgaacacccagtgacagagatgattgttggtcaagatcttgtggagtggcaaatacgtgttgcgaatggagaacgactaccattatctcaggagcaggttccattaaatggacatgcatttgaagcacggatatatgctgaaaatgttccaagagggtttctccctgcaacaggaaccttacatcactaccgaccagtcccttctgacccaactggtgaaatatggacataccctatgaccaattatattactagttacatttcagtgttgcacaattaacatattcttcctcagtaagagttgaaactggagtcgaagaaggagataccgtcagcatgcattatgatccaatgatagccaaacttgtagtatggggtgaaagtcgcacggctgcactagtcaagctaaagaagtgtttatcaacctttcagattgcaggtttgccaaccaatgttgatttcctccaagaactcgcaagccacagtgcctttgaaaaaggcctagttgacactcacttcattgaacgttataaagatgaccttttgagtatttctacaaagtcctcaaaagaatctcatggtgtagctgagcttggtgcaattttggctgctgcatgcatttgcaagaaggaacacattacatctaaagaatcactacgagccaacaagtcactatctgtatggtacaataatccacctttcaggatgcatcactttgctaggcatcccctggatcttgagttggaagagaatgatggattcagtgagaaacttcttaaactgttcattactcataagtttgatggaagctacttcatcgagacagaagatggcacttctggtttagatgtcaaagttgatcacaagggtgaccacgattttcgtgtggatgtttctggtctgcaaactgatgtgactctagcatcttattcaaagggaaacagcaaacacatacatgtctggcatgggaatcatcaccaccattacagacagactgtaagagctgagcatgcagttgaagatagctcccaacctagtcatgcttctgaagggaagtcgcatccaaaagggagtgttctggcaccgatggctggcttggttgtgaaagttttgcttgaagacggggctcaggtggacgcagggcagcctgtcatggttatggaagcaatgaagatggagcatgttgtgaaggcgcctcgtgccggatacgtgagtggcctgaaggttactgcaggccaacaagtttttgactccagtgtccttttcacaatcaaggacagctctgcaaactgagatggagcgatcactgccctagagtagttgcactgcaactgcatcaagcacccagcggatgctcgtccagatagagaagcgaaggaaataaactgctgggttcgtctgcgggcaatccaatccggcagggcaagcagacggcgcatggtgtttcccggcttgatgcgaatccatcatccgccgcaacaattccattgcgtagtgtacacgaacatgaaactgtaccacgctgagcaagaggaattcttgtttgatttgtgcaatgaaataagttgattccatcaacacaacaaaaatatagactcccgcctcctcctacaactccacctgcgccgccgcgggcgcgggatcccgggctgccccgtgcccgcgctacccctccacgccgcgcggctcctctcctcctcccctccaaccgcagctgcggcctcgtcgtcggcggcgggcggcgggggcatcgagaaggtgctggtggcgaaccggggcgagatcgcgtgccgggtcatgcgcaccgcgcgccgcctcggggtcgccaccgtggccgtgtacagcgacgccgaccgcggggcgctgcacgtgcgcgccgccgacgaggccgtcaggatcggcccgccgcccgcgcgggagagctacctcaacgccagggccatcatcgaggccgccctccgcaccggcgcccaggctatccacccgggatacggtttcctttcagagagtgctgatttcgcgcagctctgtgaagccgaggggctcaaattcattggaccaccagcatctgcaatccgagacatgggcgataagagtgcatccaagaggatcatgggtgctgctggcgtgccgctggttccagggtaccatggggctgaccaggacgttgagcccacccatggtgggtttgattaaaacaggataaccgattttatcaaacccacccatggtggagggggcaaggggatgagaatagtcgaaaggcctgatgaatttgtggattctgtactgagcgctcaacgggaagctgcagcatcgtttggtgtaaacacactattgattgagaagtatattactcaaccaagacacgtagaagtccaggtatttggcgaccaacatggaaatgcgatatacctttatgagagagactgcagtctacagagaaggcatcagaagatcatcgaggaagctccagctccaaatgtgccagctgagtttcggtctcatattggtggagctgctgtatctgcagcaaaggcagttggttactacaatgctggaacagtggagtttattgtggacactctttctggagagttctacttcatggagatgaatactcgactccaggttgaacacccagtgacagagatgattgttggtcaagatcttgtggagtggcaaatacgtgttgcgaatggagaacgactaccattatctcaggagcaggttccattaaatggacatgcatttgaagcacggatatatgctgaaaatgttccaagagggtttctccctgcaacaggaaccttacatcactaccgaccagtcccttctgacccaactgtaagagttgaaactggagtcgaagaaggagataccgtcagcatgcattatgatccaatgatagccaaacttgtagtatggggtgaaagtcgcacggctgcactagtcaagctaaagaagtgtttatcaacctttcagattgcaggtttgccaaccaatgttgatttcctccaagaactcgcaagccacagtgcctttgaaaaaggcctagttgacactcacttcattgaacgttataaagatgaccttttgagtatttctacaaagtcctcaaaagaatctcatggtgtagctgagcttggtgcaattttggctgctgcatgcatttgcaagaaggaacacattacatctaaagaatcactacgagccaacaagtcactatctgtatggtacaataatccacctttcaggatgcatcactttgctaggcatcccctggatcttgagttggaagagaatgatggattcagtgagaaacttcttaaactgttcattactcataagtttgatggaagctacttcatcgagacagaagatggcacttctggtttagatgtcaaagttgatcacaagggtgaccacgattttcgtgtggatgtttctggtctgcaaactgatgtgactctagcatcttattcaaagggaaacagcaaacacatacatgtctggcatgggaatcatcaccaccattacagacagactgtaagagctgagcatgcagttgaagatagctcccaacctagtcatgcttctgaagggaagtcgcatccaaaagggagtgttctggcaccgatggctggcttggttgtgaaagttttgcttgaagacggggctcaggtggacgcagggcagcctgtcatggttatggaagcaatgaagatggagcatgttgtgaaggcgcctcgtgccggatacgtgagtggcctgaaggttactgcaggccaacaagtttttgactccagtgtccttttcacaatcaaggacagctctgcaaactgagatggagcgatcactgccctagagtagttgcactgcaactgcatcaagcacccagcggatgctcgtccagatagagaagcgaaggaaataaactgctgggttcgtctgcgggcaatccaatccggcagggcaagcagacggcgcatggtgtttcccggcttgatgcgaatccatcatccgccgcaacaattccattgcgcagtgtacacgaacatggaactgtaccacgctgagcaagaggaattcttgtttgatttgtgcagtgaaataagttgatttcatcaccgttccatttctcatatgttaataattagtaataataatgaataattagtataatataatgagaaatgtgctcagtttaccaattttatggaatggatttgtaatgtatcacctcatctagaatcaattgcttctttgggactttgtgtgcagcacgagccaacatgtgaattggaactgcagagggtgcaaaccaaccacatacttgaaccatttgcagttccaattcacatgttggctcgtgctgcacacaaagtcccaaagaagcattggaggggtccaaggtggagaaagtggtggcgaccacttacttgtggccttgcaacttctaggatgaagaaatctgaagctgaagcagctgcaatgttaatgaggtttggaattgccagatgcagtgcaaagcccgaacatgtacagttccatgatctgatcaggctatatgctcgaaagctaggaggcacaagaacagctccggccatggtccagtcagtgtacctccaaggctcaatcaaacattcctctgagcacctgtgggcttcgtgcttcatggtttttggatttggttctgatcctctgttggtagaactgagaccatctgaactaatgttctatgttaaacagattgtcatgccacttgcaatacacacatttataacatactcccgctgtaatgcagcactagagctgcttcgcctgtgcactgatgcattagagagagcagctgagtccatgcttgctcatgctggcaaatggagagaaacatcattctcctgctttaggcaagctcattcagaagcccagtacacttatctttggcaggagctggctcttctgaaagcttctgtactggaaacaagggccaagctgatgctccggggtggacaatatgacattggagatgacttaataaggaaggccatatttatccgtacttctatctgtggcgagcaccatcctgacactgtttctgctcgagaaactctcagtaaactcacaaggcttcttacaactgttcagcttagttgattcttatagtttaggagttcacaatatattcttttcagtgtgccttttcatgaacgccgtacaaaatgcaccagatcttgaaataacaaagtaaatttgtcttataaaacaagacaaaaaaaaaatgcttgatggttctgtctttctatcattcttggttcatcaatgtgcaacattggattgaactactgtattccagttttctgggctatacttttgatggcacacagaaaataatactgagctaatgtgtatgtaagtttgcatacctc

SEQ ID NO: 122403 - DNA, 513 bp, Zea mays
  Clone ID: MRT4577_43115C.1
aattcggcacgagggcagacattcccctcggagcctcaggctctccgcattccccacacatcacctgccgtagcatcgctcccgggaattgcccaaaatgccccttgaccccgactcctcgtcgtcgccgccggcacaccgcgactggttcttcccgccggagccgacgctcctcggctgcttcatgtcccggacccccagtgcgcccttaccctgcacctaccgatgctgcaagccctactcaacctaccccctcgacgatcgtcgtccggctcctaccccacgctaccggtcccgctctgcagacccacaggcggagcagaaggagaagacgccgacgccgcctactactacgaccaggccgcgccggcgtgaccctcggtacgccgcaagggcgacgtgaatatgcccgtactggtgcttccgagcaagctgagagccctatggccgagccagtgcacggaaagaaccccataccgtactgagatcgctccactgctagcagaaagcgct

SEQ ID NO: 122404 - DNA, 383 bp, Zea mays
  Clone ID: MRT4577_43116C.1
gactgcacgcgcacgcgtgcttgagctctgtacctctagaccggctcgtcctttttttttttaattctgaaattacaccaaactcagggggggattacaacttagcatggggcactttctgtgaatattcttgacaaatacactctggactatcatctgttctaccttgtccatcttgaaactcgacataagatgttttctcactttttttacttctcgcttttttcacactaaatgagtcgtggcgctccaaaatttggtcctataactagaaaaccaccttttccacttcttagacttctttggagcatgtgcaaaccgagcattcacttatacttgtgctaacagaggttcccctgggccctgagccaatgagtcctccc

SEQ ID NO: 122405 - DNA, 2375 bp, Zea mays
  Clone ID: MRT4577_43117C.1
gggacggccgcgggaacagggagagagtcgcggactcgtctgaccagtcaccgcccttatccagcgggaccaacccaggcccacactgacgacgccccccatctcgcatctcgcgtactatttccacaattccaccgacccgtcgtcgcgccactccgtcttgctcaacaccagtcaccactgctctccaagcctccaccagcgtccagccgaaccatcgccaccgcaggatggcctcccgcctcctcctccacctccacctgcgccgccgcgggcgcgggatcccgggctgccccgtgcccgcgctacccctccacgccgcgcggctcctctcctcctccccaccaaccgcagctgcggcctcgtcgtcggcggcgggcggcgggggcatcgagaaggtgctggtggcgaaccggggcgagatcgcgtgccgggtcatgcgcaccgcgcgccgcctcggggtcgccaccgtggccgtgtacagcgacgccgaccgcggggcgctgcacgtgcgcgccgccgacgaggccgtcaggatcggcccgccgcccgcgcgggagagctacctcaacgccagggccatcatcgaggccgccctccgcaccggcgcccaggctatccacccgggatacggtttcctttcagagagtgctgatttcgcgcagctctgtgaagccgaggggctcaaattcattggaccaccagcatctgcaatccgagacatgggcgataagagtgcatccaagaggatcatgggtgctgctggcgtgccgctggttccagggtaccatggggctgaccaggacgttgagctgttgaaactcgaagcggataaaatcggttatcctgttttaatcaaacccacccatggtggagggggcaaggggatgagaatagtcgaaaggcctgatgaatttgtggattctgtactgagcgctcaacgggaagctgcagcatcgtttggtgtaaacacactattgattgagaagtatattactcaaccaagacacgtagaagtccaggtatttggcgaccaacatggaaatgcgatatacctttatgagagagactgcagtctacagagaaggcatcagaagatcatcgaggaagctccagctccaaatgtgccagctgagtttcggtctcatattggtggagctgctgtatctgcagcaaaggtgaatgtttctgaacattagtatatgcttaggagacaaatttgttgctctcagttcactattgttagttaagatcttttcattatctacctgccaattttttcgcaccaatatagaatgacaaatgtgcaagcaatttgcttcacatgactgccagttcaaagttatatgtattatctaatggatcattttagtagactttttttctaataatactcaacagttggcaagctacctatcatttttcatgctatctgtcataaaacaagtggttctttctttgttttctctgttgatatgtttttagcagttattctgtttaatccttctgtttcacatatagggtcatttattggattgtttgtgttgaaggcagttggttactacaatgctggaacagtggagtttattgtggacactctttctggagagttctacttcatggagatgaatactcgactccaggttgaacacccagtgacagagatgattgttggtcaagatcttgtggagtggcaaatacgtgttgcgaatggagaacgactaccattatctcaggagcaggttccattaaatggacatgcatttgaagcacggatatatgctgaaaatgttccaagagggtttctccctgcaacaggaaccttacatcactaccgaccagtcccttctgacccaactgagttgaaactggagtcgaagaaggagataccgtcagcatgcattatgatccaatgatagccaaacttgtagtatggggtgaaagtcgcacggctgcactagtcaagctaaagaagtgtttatcaacctttcaggtttgccaaccaatgttgatttcctccaagaactcgcaagccacagtgcctttgaaaaaggcctagttgacactcacttcattgaacgttataaagatgaccttttgagtatttctacaaagtcctcaaaagaatctcatggtgtagctgagcttggtgcaattttggctgctgcatgcatttgcaagaaggaacacattacatctaaagaatcactacgagccaacaattccattgcgcagtgtacacgaacatggaactgtaccacgctgagcaagaggaattcttgtttgatttgtgcagtgaaataagttgatttcatcaccgttccatttctcatatgttaataattagtaataataatgaataattagtataatat

SEQ ID NO: 122406 - DNA, 604 bp, Zea mays
  Clone ID: MRT4577_43118C.1
gcacgagcttgctcaacaccagtcaccactgctctccaagcctccaccagcgtccagccgaaccatcgccaccgcaggatggcctcccgcctcctcctccacctccacctgcgccgccgcgggcgcgggatcccgggctgccccgtgcccgcgctacccctccacgccgcgcggctcctctcctcctccccaccaaccgcagctgcggcctcgtcgtcggcggcgggcggcgggggcatcgagaaggtgctgggctggctcttctgaaagcttctgtactggaaacaagggccaagctgatgctccggggtggacaatatgacattggagatgacttaataaggaaggccatatttatccgtacttctatctgtggcgagcaccatcctgacactgtttctgctcgagaaactctcagtaaactcacaaggcttcttacaactgttcagcttagttgattcttatagtttaggagttcacaatatattcttttcagtgtgccttttcatgaacgccgtacaaaatgcaccagatcttgaaataacaaagtaaatttgtcttataaaaaaaaaaaaaaaaaactcgagactagttctcctcgtgc

SEQ ID NO: 122407 - DNA, 2255 bp, Zea mays
  Clone ID: MRT4577_43119C.1
cgaatgatggcaactggagagattgcatactccaagcaatcattctcttggccacaaaattaggcagaaggagcgtggttgatagggtgtaccggggaaaagggaggttggagaaggaggaattccctttcgctcgtaacaatgattttgtcggtaggaaaaaagagctttccgaattggaactcattttgtttggtgatgtcatgggagatggagaaagagaatattttgagctcacgacaaagcagaggagaaaaggccttgcagttaggcggtctgctaacaatcatgagcacatgaatactgatgacagcaaaggtaaggagcctgttatttggaaggagactgagaaagatattgagatgcagaggctgggtagtccattgtggcatgggcgtccactgagagtgaagaatggcgtaaggtgtggaaggaaaaaaagatctaggaagatactttatggtaagggtattgcttgcatatcaggggagcctggaattggcaagacagacttggttttggagtatgcatatagattctttcagagatacaagatggttctgtgggtcagaggggaaagccgatatattcgacagaactatttggctctgcggacttttctggaagttgacttaagtgtagatagtcacttgcatgaaaagggaagcgatcgatgctttgaagagcaagaagaggaagccattgccaaaattcgtcaagaattgatgcgtgacataccgttcttagtcataattgataatttggagagtgagaaggattggtgggataagagagtcataatggaccttctgccacactttggtggggagactcacttcatcataacaacacgtcttccacgagtgatgaacttggaaccaatgaagctttcttatttatctggtgctgaggcaatgactttaatgaagggaggtgtcaaggaccatccactggtggaaactgatgcactcaaaatcattgaggaaaagcttggaagattacctcttggcctaagtattgttggagctatactctcggagcttccaatcactccaactaggctacttgacacattgaatcgtacaccgctcatcaggaacttttcatggaatgatagagaagttctcagcttgaaaaatcatgaaatccttgtccgcctgctggatgtgtgcttatcaatatttgaccatgcagatggtcctaggagtctggcaactcggatggttcaagtatgtggttggtttgcaccctctgcagttccaattcacatgttggctcgtgctgcacacaaagtcccaaagaagcaatggaggggtccaaggtggagaaagtggtggcgaccacttacttgtggccttgcaacttctaggatgaagaaatctgaagctgaagcagctgcaatgttaatgaggtttggaattgccagatgcagtgcaaagcccgaacatgtacagttccatgatctgatcaggctatatgctcgaaagctaggaggcacaagaacagctccggccatggtccagtcagtgtacctccaaggctcaatcaaacattcctctgagcacctgtgggcttcgtgcttcatggtttttggatttggttctgatcctctgttggtagaactgagaccatctgaactaatgttctatgttaaacagattgtcatgccacttgcaatacacacatttataacatactcccgctgtaatgcagcactagagctgcttcgcctgtgcactgatgcattagagagagcagctgagtccatgcttgctcatgctggcaaatggagagaaacatcattctcctgctttaggcaagctcattcagaagcccagtacacttatctttggcaggagctggctcttctgaaagcttctgtactggaaacaagggccaagctgatgctccggggtggacaatatgacattggagatgacttaataaggaaggccatatttatccgtacttctatctgtggcgagcaccatcctgacactgtttctgctcgagaaactctcagtaaactcacaaggcttcttacaactgttcagcttagttgattcttatagtttaggagttcacaatatattcttttcagtgtgccttttcatgaacgccgtacaaaatgcaccagatcttgaaataacaaagtaaatttgtcttatatatcttgactgccttttgttgcttgatggttctgtctttctatcattcttggttcatcaatgtgcaacattggattgaactactgt

SEQ ID NO: 122408 - DNA, 117 bp, Zea mays
  Clone ID: MRT4577_4311C.1
agtccggacttccccgttaatttaagcctattaattagccgggggaaaggaacctaacaaggtttccggtggaaccggcagcggacccggagccagcccactttggaaatcgggcgg

SEQ ID NO: 122409 - DNA, 370 bp, Zea mays
  Clone ID: MRT4577_43120C.1
caggtatttggcgaccaacatggaaatgcgatatacctttatgagagagactgcagtctacagagaaggcatcagaagatcatcgaggaagctccagctccaaatgtgccagctgagtttcggtctcatattggtggagctgctgtatctgcagcaaagggtcatttattggattgtttgtgttgaaggcagttggttactacaatgctggaacagtggagtttattgtggacactctttctggagagttctacttcatggagatgaatactcgactccaggttgaacacccagtgacagagatgattgttggtcaaaatctttgggagtggcaaatacgtgttgcgaatggagaacgactaccattatc

SEQ ID NO: 122410 - DNA, 325 bp, Zea mays
  Clone ID: MRT4577_43121C.1
aagcctccacctttgtgctgtctcaaccatcgccaccgcaggatggcctcccgcctcctcctccacctccacctgcgccgccgcgggcgcgggatcccgggcagccccgtgcccgcgctacccctccacgccgcgcggctcctctcctcctcccctccaaccgcagctgcggcctcgtcgtcggcggcgggcggcgggggcatcgagaaggtgctggtggcgaaccggggcgagatcgcgtgccgggtcatgcgcaccgcgcgccgcctcggggtcgccaccgtggccgtgtacagcgacgccgaccgcggggcgctgcacgtgc

SEQ ID NO: 122411 - DNA, 589 bp, Zea mays
  Clone ID: MRT4577_43122C.1
gccggccgtgccgggattaccatcatacgcaatcctcgaggcacatcgacgtcgagggacgccgcgcatgctctccccctctgcctccaccattgccttactaccattaggggcactactgctcgtaagaggtgcggccgctgggcccgctcggttcggacctctcgtgtccagccacataacaccgcgacgaggtagaagttcctggagatctgcagccgctcacactcccccgcttaccacacaccaccagcgtgtttccctctccgcgcacgaggttcgagtacgtccgagaccagcattcgaagaggagatgtatctcctgtggcggactttaccacgaacacattgagaccttcgtcgcctcgcttaaatgtgccacccggcgtgatattatcctcgagcgatcaagcttgtctgcatgccttatgtaagattgtgtatgagaggacgtgccaagtcatcgtgcttgatatatgaaagtgccacacactgctctcctgtacggattctgacaataggatctgcgactgaatagaactttcttcactctaccatgcagcatgcgataacatgctgctagagtctg

SEQ ID NO: 122412 - DNA, 479 bp, Zea mays
  Clone ID: MRT4577_43123C.1
atcgcttcacaatcacccaccactccgactctcggccgctctctttctctaccccgatacatcttatgttggagattgcgcccagcagatggagcttgaatccagtgacatccttctcacgagcgatcgggactcgcttgttcgaaacgtacagggagcagatgaagatcagcatcgtcgaggacatccctgaggccatctacttattcggctcatggtgccgggcatgctactggctcacgcccaagcttaatgctgtataccaaaaactggcctgacagagcaagagatatgacgacgatttttttacgacctttctcaatgaggcagctgctaatgaatactttgcaaagatgccactgggtggctgtacatccctctgacagcgaagggcgggaggctgttgcagaccggctgatagtctatggtatgccacacctgagcatccttgatgcaaaaactgacgaagtttacactga

SEQ ID NO: 122413 - DNA, 326 bp, Zea mays
  Clone ID: MRT4577_43124C.1
tcttcacattcttgggagggggtgtttttttttttttttttaccggctcctatagcagggggacagccaaaacattccgacaactttttcaccaacaagaaagagaacgttgttcaccaacttccgaacaaacaaaacgagctgcttcctcactatttaccaccaaccaatcctgctataggacaaaccccaaaaaaacacttcattccccgtgttcccccccccctacaagtataacccaatcaagacaccaacaccccatgaactttgaacttttaataaaaaaacactgccaaaacaaggaaattcaagggttccccacacta

SEQ ID NO: 122414 - DNA, 766 bp, Zea mays
  Clone ID: MRT4577_43125C.1
tccggcctgatgaaggcgatggagggtagtgagtttggtgcaaactgtgcacccaccgtggtgacctatacgtgtttggtgaaatgcctctgcgggaaggggagggcggtcgaggctctcgctgtgctggataggatgacagagagacgggtgatgccaaaccgtgtttttatgcggacgctggttgaagggttttgcactgagcagagggttgtcgacgcgtatgatgtggtggagcgtgtaattggtgatgggagtgtttcgagtacacagtcctcccttgttcttcccgggtccgtgctcgaattccgttgctgtcgagaagctgaaggactggcacggatgatgatgacgaaaggggtgcagctgaccccactcgctggcagttgtatggtgagggaactgtgcataaggaagagatcgttggatgcttgctactggctgggagtgatagaggagaacggggtgctgtgtgactctgatgtgtatggtaccttgttgcttgggctgtgtgaggaaggccacattcatgaggcatcaacattgggaaggaaggttgtcgacagggggatcctcatagaattatcttgtgctgaccgtttagtggagttgctgaagcaatatggtgatgaggagcttgcgtcaaatatattgggattgagaaggcgccctgaagggttgtcgttttaaggattttgcgattctgttccatccttgtgaatgaagaatatcttgattagtcatgggatgcgccacgacagcaacg

SEQ ID NO: 122415 - DNA, 570 bp, Zea mays
  Clone ID: MRT4577_43126C.1
cccacgcgtccgcgtccgcgcgccctgtatcgtatgcgttgtggtcgtgcgcgtgcctctgctagctaagctaagcttgtgtgacttgcaccgtaccctagctaggagcgacgtcgacgaagggcatggcggcggcgacggggatgcagctggcgctgctgctgtgcttggttgtgctggtggcgtccccgcgggtggcgctgggcaactgccgcgacgactgcatggccgcctgcaacggctggcacgtcatgtgccagctctcctgtggcagcgcatgctacggagaagtcgggatcacaaccttaagtacgccggatgaatcatcagccagagcagaagcgcctgcatctgctgcaccagcaccacaacaagcacaagaacaagaagagggaggcggcgtgtccgggctcaagccatcaccggcccgtggatgaacgccagccagccagccagccaggcacagcaactcacttaaattaattacttgttccgtgtggtcggttggcccatactcatgattaatttaattatataatactctgagaaatgaaacaaaaattatatatc

SEQ ID NO: 122416 - DNA, 385 bp, Zea mays
  unsure (1)..(385): unsure at all n locations
  Clone ID: MRT4577_43127C.1
aacggccgcccttgtttgtttttttttttttttttttttttttttttttttttttttttttttaagcttggcaaacaatcagcctctattttattccatccttgggggggacaaataaataataaatattggtacactttgggattctgcgtctacacgggggggggggggggttaacatttcttgtctcaatcaaaaatcaagtctccgggggcgtaaaccttgtaaaaaacgggggcgctgaaataaagcccacccctgagggggaggaatgcctggaaggaccctacccactggacaaaatacccggtcccggtggtcctaactatgggggccaccggccctattccgtttgtttttccttgcnnagatcccnnntttttgg

SEQ ID NO: 122417 - DNA, 339 bp, Zea mays
  unsure (1)..(339): unsure at all n locations
  Clone ID: MRT4577_43128C.1
aaaaacaagaaaagaaggggggctcttacnaacgancagnaaacaaaacanggaacgccnccagncanccganannaacagncacnngcggagnccagganaaagngncngcttctttgtttttcacngcggaaaagttagncnncaaaacanngatnnngacaaaaaaacanngnncannataacaacatgtaanccttcctcaacaacacnnntacaggattgcaggaggtccggccatccaggacgactcgagnnnccccccgggaatgggaaacaagccncatggccctngccncggaagaagagaaaagcnagncggaccatatgaagcaacca

SEQ ID NO: 122418 - DNA, 294 bp, Zea mays
  Clone ID: MRT4577_4312C.1
actagcttacgatgctgacatatgagcggaggattgacagcctggttgtgtggctcaaccaactcaagtgctcctgtggagctgatgacgactatgaggacgaccagtaatgctaatcgccactgaaccaagggtatgtcagtccagtgatcaatatttgaatactgcattatgcgcggacctgctgtactgcaataggccttctgggttcaacctcagctaggtgaacaatgctgtttgtgatcttgtcgagctcgaactctgatagattactatgtacattgtaatgctgcg

SEQ ID NO: 122419 - DNA, 379 bp, Zea mays
  Clone ID: MRT4577_43130C.1
aagtgcttacctcgtgatacgcacagtcatcttccagcagtgtcatgcaagacttagagtctgctaaatctaggaggtctgtctgctggcgctgctcctatcacatattcttctaccgtgctcactgacactgtatgctgtgcacctctttaccagcagcacgatcatgagtcggatgaaagagatgtgcatcccagactatcgatccatatctgacctaactctcgactgcatgtggaatctgacctcgataatcgtcggtaaatcgaccatgataatcattcttacaacatccacatgtccagtgtttattgactcgcaacatcatgtgctgacatctacgatagctcatgctgacagaacttgctacctactctta

SEQ ID NO: 122420 - DNA, 250 bp, Zea mays
  Clone ID: MRT4577_43131C.1
aaagaaagctacttatacataaactgaaatattaaggagttcgtagcttctaggaagaaaaaaagaaaaatttaaaaaaaaaaggggcgtacgaataaatgggcggcacgatataaaagatccatgtttacctactcgtgcgtgcgatggtttagctatcctatattgtcacctcaattcaattcacattgtcgtgttttacaaattccggactgtgaaaacctctggcgtggctgaaaaaaatcccctt

SEQ ID NO: 122421 - DNA, 253 bp, Zea mays
  Clone ID: MRT4577_43132C.1
tgacgataaaatttggggaggctgttttagaggttcaattctctggccgccgttttacaaccttaagactttttaattcgttggacctaaacaaattaaacgtgtttgagtttatcccccttttgactggtaaaacatttgtgtaaaggacctaaacgaccgtgcttcccaaccctttttcaccctgtgtggtaaatgggaagcggcccttactggtggattttgccaacagtttgcggcgcttattggcaaa

SEQ ID NO: 122422 - DNA, 417 bp, Zea mays
  unsure (1)..(417): unsure at all n locations
  Clone ID: MRT4577_43133C.1
cgccgccagtgtgcntgaacctcgcccttaagcagtggtaacagcgcagagtactttttttttttttttttttttttttttttttaaattttttttttttttttttttttttttttttttttttttttttttttttttttttttgggggcaaggccccctctatggggataaccccaaaccgaccaaaggcggttcggccggggggccggcaatttttttgcaacaagacaagggccccacaacccctaacctggctgggtttttcccccctagggaagaggcaatcgggccccaccctagggggcctccgaaaaaaaacccggcgcgggtgtcccccacccggcgggctccttcggatttccggctcccagcttggcggccgccccccctggggggggggggggggggcccccggg

SEQ ID NO: 122423 - DNA, 295 bp, Zea mays
  Clone ID: MRT4577_43134C.1
gcagctagtacgccgccgcacctccgcccgccaccttcttcccggctccagcgatgtcgggggcgatcggtggcgccgaggtccacggcttccggtgcgcacggcgcagctcccgctgtcgcgggtgctcggtaggccgatccgggtagcgccagccgctgctgcccggccggtctgcgcgtccgctggtagcatacgctgcgtctccacgcctggtgagaaggatgcttctggagttaagctaacaagtgttgatataatcgaggaaaagagcaacttcctccggtaccctttg

SEQ ID NO: 122424 - DNA, 368 bp, Zea mays
  Clone ID: MRT4577_43135C.1
aaaaaaaaaaaaaaaaaaaaaaaaaaaaataaaaaaaaaaaaaaaaaaaaaagaaaaaaaggtaaaaaaaaaaaaaaaaaaaaaaaaaaaaaaaaaaaaaaaaaaaaaaaaaaaaaaaaaaataaaaaaaaaaaaaaaaaaaaaaaaaaaaaaaaaagggggggcttttttaaggtttcaaagtttacataccggtgatttcatattaaaatttttttaatggggtcctttaatttaaattaattgccctttttttaaaaactttgtacttggaaaaacctggggtttcccaaattaaaaccctttgaaaaaaatcccctttttgcaagtttgttaataaccaaaaggtccccaacaatttgcttttc

SEQ ID NO: 122425 - DNA, 338 bp, Zea mays
  unsure (1)..(338): unsure at all n locations
  Clone ID: MRT4577_43136C.1
tnttattgccccacggggaagaagaatttcacagggaacattagcattgactgtggccatattcccaagcaaaacataacatacgtacaccatggctatgttcttgatttagacacaattggctacgggctagtccaaacccgaaggtttccagccgtgtgtatgcaggcaccatcagaggacctgagcgctgttggggaagaagagctcccacaagagtacttaattgcacgtgtccgggacgccggggaggcacaagtgcgcgcagtaggtagagcttatggggaaggtgcgctgctcggacgtaggttgcacccactggtttttgaaggcctggg

SEQ ID NO: 122426 - DNA, 256 bp, Zea mays
  Clone ID: MRT4577_43137C.1
tttatcctgcacatttttttttctttcttggtggttttttataattattggggggttgtacacaaaaagcccacacagccaaatcggacaaaaatgacctaccaccgaatcaatgccacaagaaccaaaccacaacccaatctttagagaaacgccgcacctcccaaaaggaggcaacggctacaagaacagtaagtattatcgcaacatcaagacaaatgtttgttgaaccaacaagaaccaccaccaataggga

SEQ ID NO: 122427 - DNA, 521 bp, Zea mays
  Clone ID: MRT4577_43138C.1
aaaaaaaaaaaaaaaaaaaaaaaacaaaaaaaaaaaaaaaaaaaaaaaaaaatttataaaaaaaatacattataaaccaattatttataaattttcataaaactctttatccgataaaatctttttttctcttgggcccgtaccccccctttggggaatttttttaattttctttgcccctggggggcccttcggccttccttttaggggccccatttcccctttttgaagccccttttaaattccatcggccctcgtctttccaccttttttcgttgaagacccttggggttccccatttttttcttttctccaccattcctgcttttttaacctcccttattgcgctttagcccccccctggtgccctcttctaacgctcggcaggccctattggatatgtgaccccctccgacccggcccattaacccccgagggtgtgttttttcccccctccgggcccttttcctttccagcccccttttggcggcgccttttccttttttcccctgtgtttttta

SEQ ID NO: 122428 - DNA, 129 bp, Zea mays
  Clone ID: MRT4577_43139C.1
ccacattcataaaaagcaatttcaaacatattggcggggtaacacaatacttaccggagcccaagcacacggactcccagggcaccaaggttcttacttagttcacaattattttagatttgaggttat

SEQ ID NO: 122429 - DNA, 566 bp, Zea mays
  Clone ID: MRT4577_4313C.1
ttttacgaagctaagaggaagggagctaagcaaggcccagctcgccggcaatcttctagttcaaggagctttcctgggactagcagacttctaacaggtgaaactgtacagcctgacacaccacagccaccagaggaaattgttcacaacatctacttctggagtgatgggttcacagtagacgacggtccactcagaagtttcaacgacccagagcatgcagcctttttagagagcatcatgaagtctgaatgcccaactgagcttgcgccggctgatgggatgtctaaggtgaacgtaaatcttatccgtaaagaagaaaaatgtcctgagccagtcaagcgccctgccccatttcaaggaggggggagaattctcgcggcaccttctgaaaactctgctccttcgggtatctctcttgcggctgctgcttctagcactgcgaccactaccgcacccaagactatcacagtggacgattctttgccgtcaacctctctccagatcaggtttgccgacggcagccgtgtggttgggcgcttcaacacaagccacacgatcagtga

SEQ ID NO: 122430 - DNA, 328 bp, Zea mays
  Clone ID: MRT4577_43140C.1
cccaaaaaggctaaacgtttaaactcgtttttttcattttacaaggaagcaaatcccagttcccctaatccccccgggtattaccctaatccttccaacggggaattacctttttgacccccgggtgcaatagggggccagtaaaacggggggtgatttccacttccctgggagggaagttttaatgaggggctcctaggggtgctgttaaaggatcccgcctggggtgaaacttttttttgttgttcacccaaaaacttttgatcctaacgtgacattgcccagccttgggttaccagaagttcctttgacaaagccaatcgacctt

SEQ ID NO: 122431 - DNA, 457 bp, Zea mays
  Clone ID: MRT4577_43141C.1
tttttatatattatacaacacataattaaaaattcaaaaatacataacaaaaacatacgagggaataaaatattgtttggtgggggccctaatatatttaatttcaccggccgttctcatcctaggtacttgctttatccctgtccccccctaaactttattttcctcgcctggatattcacccctttttctgctggataaatttctgttttacccctttttttcgcctttccccacattttttcctcctcaatttgtctaataaaccaccccctttttgcgcacttttttctccacgtgttgttgtttcctcttaccatgttctctccccttttctagtgccttttttcccctctccttttgttttgtttccctcccctttttgccctcattcttttggctttccccttctaaccttttatttgtagttttcccttttttttttccataaattttt

SEQ ID NO: 122432 - DNA, 232 bp, Zea mays
  unsure (1)..(232): unsure at all n locations
  Clone ID: MRT4577_43142C.1
acggccgctcgcgagtaaatagtctattctaacgcgagcggcgtctgagatcagcttcgtcgcgtctgcgagtctagctcttcttgtgtccctaattcattcactggccgtgtttaccccnnccttttttggggggggggggccctctttncttttnccctttcctttttcctcttttctcctttttccccttttcttcctcttccctcttcttctctttcttctttcctcc

SEQ ID NO: 122433 - DNA, 752 bp, Zea mays
  Clone ID: MRT4577_43143C.1
accgcgtgcgtttcgcttctgcccctgctgtttctgtttcttggcgtccatcccctctttctctcgtggcgacgacggcgaccgtcacaccccccctatgtgctaggtgccagggtccgtcgggtccttcgctggcgacgagcaactaccaggcgacccagtggtgtgttcgggaacgtttccgcgggcgggcggcggcccccagtggcgaagatgatctgactaccgacgtacgcagcacgaggcgttcgttgccatcttcttctcctttgagtatatgatactagcaacatccacggtatcaacattcgtgaagtatatattctatgttagtgacatgctaatggaaggtcaatgggagaaaaaggcagtgtatacattttacttggagctcataagtgaccttgtgcacttgtcattatacatgctcttcttcatagttatcttcctgaactatggtgatcggcgaccgtgatcttccatgttattatgttctgatacttgagacttttattatgactatgtatgagatattgtctcttattagtactggttgatgagatgtgtcttattatgactatggatgagacttttgtgatgtaattgataagactatggatgagacttttgtgatgtaatcgatgagactatggatttaaatattgttatgtgattgtgtgtgaaatgttttgtgtgaaaatatgttgtgctatataaaaaaaaaaaaaaaaaaaaaaaaaacccccccccaa

SEQ ID NO: 122434 - DNA, 185 bp, Zea mays
  Clone ID: MRT4577_43144C.1
gtgtcttcctcacttgatcatgtggtggcctcttactgcgttattacctctatcgacgggggggggggggtaaaagaaacttcccaaatctcctcaatcagtaggagggcggaacggccctggaccaccccacaggggttgatgcggcacctgggcagttgctacctgcccgggccgcccctcaa

SEQ ID NO: 122435 - DNA, 429 bp, Zea mays
  Clone ID: MRT4577_43145C.1
atgaggaaaaatctcgaagctgctcaagccaggccgaagagttaccatgataaaagaagaaaacctctccagtttgaagtgggagatttcgtatatgtgaaagtatcgcccaccaaaggagtgcaaaggtttgtgatcaaaggcaagttagcccctcgctacattggaccttatgagatcgtggaagcatgtggacccatggcatacaaattgatgttacctccaaaaatgtctggcatccacaatgtattccatgtatcccaactgaagaaatgtgttcgattgccaaccaagatcatagcagaaccagaagtggagatagagccagatctatcgaaccaagattacccttccaaggttctggattgcaaagaaagattgacacagactaaatcgatcaaaatgtataagatccaatggagtaattga

SEQ ID NO: 122436 - DNA, 379 bp, Zea mays
  Clone ID: MRT4577_43146C.1
gcggccgggcctccctctcttttttttttttttttttttgttttaggacaagcgaaaacagccatccgccaacgagatattatcggacccgattgacatagatacgttgggtttcttttaggcgagtttttgacttacaacatcccaacatttgtagcataggtggcaacaagcactgagcgattgaagaagtcttgaaggctcatgagcaaaaccatcgttcagcactcacaacccatttctactggtagagaagaaacagcttactaccttgggtctatgatgctgggaaacagggtcgggttttggaggatgagtgggacggtaaacttggctacggtgtcttctaggggggcgggggcgggggactccccaatga

SEQ ID NO: 122437 - DNA, 720 bp, Zea mays
  Clone ID: MRT4577_43147C.1
ccggccggggctgtttctgtttcttggcgtccatcccctctttctctcgtggcgacgacggcgaccgtcacaccccccctatgtgctaggtgccagggtccgtcgggtccttcgctggcgacgagcaactaccaggcgacccagtggtgtgttcgggaacgtttccgcgggcgggcggcggcccccagtggcgaagatgatctgactaccgacgtacgcagcacgaggcgttcgttgccatcttcttctcctttgagtatatgatactagcaacatccacggtatcaacattcgtgaagtatatattctatgttagtgacatgctaatggaaggtcaatgggagaaaaaggcagtgtatacattttacttggagctcataagtgaccttgtgcacttgtcattatacatgctcttcttcatagttatcttcctgtaagatctcttattatggtagtttgatactataatgtaaagttgtaaactatggttattgattcgttatgtgataccaggaactatggtgatcggcgaccgtgatcttccatgttattatgttctgatacttgagacttttattatgactatgtatgagatattgtctcttattagtactggttgatgagatgtgtcttattatgactatggatgagacttttgtgatgtaattgataagactatggatgagacttttgtgatgtaatcgatgagactatggattt

SEQ ID NO: 122438 - DNA, 383 bp, Zea mays
  Clone ID: MRT4577_43148C.1
tagtcgcctatcttcgcgtcttaagcctaccaccgttcaccgaatgacactgacagggacgacgctgcatgcggtgcgacggcccatgatggagagcatcacgattcacattggacatggggtgatataggcggctaaagagtcctgtgagatgactgctcttgtaccagggttcaggcggaggggcaggtgcccgatgcacggaccatagggcgaggggaggaaacgtgcaacaccatcttgagcgaaacggcaccggagagaggcgttccgtgagcggaattggaggcacggtgatccgaagctaatggatgacgtgaggactgtcttgtacaacaagttgccaagatggtgagctaaagcgtcttgtggccatggaggag

SEQ ID NO: 122439 - DNA, 661 bp, Zea mays
  Clone ID: MRT4577_43149C.1
gccggccgggccgggataccaccactgatcacttctattattgagatcactactccatagaaagaacatactgtaccacacaatggaaggcgaagtattttgctctcttatgctcgtttgtctttgctgaaagcgactgctaccgataccattttgcgacagtggttgcaagctactatagcttccttatcttcccgcatacctcgcatcagcgacgtcttcatcatgtgaaaactcaattgtatcaaccctacaggatccaacatgcaatcgcaggaggaattttaactttatcaccctggttcctccaacaaccgtcagccctattacagaagtcactatttggacgcattcgttggcacaatacatctcaggcacaacaactacaactacttgtgctacgaaaccttgctggctactctcagctcagagaatcttccatcaaccaactggctgcattgaactctgctgcttataggcaacgacaactaccattcagccaactaggtgctgccaatgctcagcaatttgttacattcaaccaactgagagcattgaactctgctggttattgacaacaacaacaggtaccaccattcatccaggtatgtgatgtcagccctgctggcttcatgacacaacaacagttgatgtcgttcta

SEQ ID NO: 122440 - DNA, 290 bp, Zea mays
  Clone ID: MRT4577_4314C.1
tggtgtacatgggaggcaatccgagacctaaatgggtagattggctggagcggtgagttatctctatatgactacgagagtcaatgaagacaagaccgacatgcggggtatgacctcaatgaaacacagtgaggtgagaatgaccaatacattcgtgagtgccgcttgtggaatgataatggagatgtctgaagtgtaaggcgtcaactccttattggtagtcgtagcgggaagcccacagatactccaagagcaagtaacggttgatggaaagacacatctgaagaagg

SEQ ID NO: 122441 - DNA, 332 bp, Zea mays
  Clone ID: MRT4577_43150C.1
agtgaaagtttttgttactgagacctggtccctggtgaggtattcagaaaacctgcgggtttccaggctatttggttgggcacgtatcaaggaggaaaaccccgtttatgagggccgctcggcccaaagaacgatgcgggggacaagccgggtttacaacccacgcgtgggtgcgctctagagggttcaaacccccgtcgaatgcgtgccacccgtacctctttttggggggggctaaattaaatttcctggacgacgcggttcatccctgggaggggcaaaatcttgggggccccaacccaaacaccttgcatgaaaagcaggtcccccaa

SEQ ID NO: 122442 - DNA, 822 bp, Zea mays
  Clone ID: MRT4577_43151C.1
aggagcagctgatctcgctgcgcttcacacggccacgggtgagcggtgagcctaagcactgacgaagaggaggagcaaagcaacttggggctgggggcggcgagaagtcaaaggctcgcgatcccctaccctcgaggcgccttctcctccttccttccttcaatccttcctcgtctgctccgcctaccccgcacgtttcgctccctctcttttaacaacgcccaccaccgccgcagtcgagcagagcggcggcccctcctctccctccctctcccacggctgcagggccgcttctctacctccactccatctgtagagaattttctcctccccacttgcgggcgtctcgctgaactggttgcgccgccgccgtaccggttggggaggctgcgctccgtctccacagaaactgcttatcctctctgcgggcgcatcgatctgcgactgcgttggtaaagatggcctgctgctttctgtttggaaagaaagcgaaacaaaccactgaaggcgatgaagatctacatagcgtcaaggtattctcttacagcgagttgagaaaggctacgcaggatttcagcggcgcgaataagatcggcgagggcggtttcggttctgtcttcaggggagtgcttaaagatgggacagtggtagcggtgaaagttttatctgctacttcaaggcaaggcatccgcgagtttttgacagagcttacggcgatatccgacatcaagcatgagaatctggtcactctgatcggttgctgcgccgaaagctctcgcaggatccttgtctacaactacctcgagaacaacagccttgcgc

SEQ ID NO: 122443 - DNA, 361 bp, Zea mays
  Clone ID: MRT4577_43152C.1
aaaaagctaccaataaaattttctcttcaactgataatccgaaaaaactagttgttattccacatgctacgaacctacaattcgctatttttcttaaccatattcacacctaagattgattcgatctcttcttcttaatataacaaacactcaagatagcaagtgtgaaaccaatctctcatcctctacactacaaaagtattatatactctgtgacttcaaacaatgtccccaaatcttacaaaaatcttgccataccattttctgataatcattgcatacaactgttttgtctttgtcgtgtatcttttaaatgtaaataacttttacttttaaaactcacttattcttactgttcatc

SEQ ID NO: 122444 - DNA, 1855 bp, Zea mays
  Clone ID: MRT4577_43153C.1
agagcggcggcccctcctctccctccctctcccacggctgcagggccgcttctctacctccactccatctgtagagaattttctcctccccacttgcgggcgtctcgctgaactggttgcgccgccgccgtaccggttggggaggctgcgctccgtctccacaggtgattcttgcgctccctcatgtctgtagctttcctagattggattatcggtgctgctgaggtttctttttcttctcgggcggtttggcttcaccggcgccatgttccgacttccgacactgcgctagaggttggaaactgctcgctcatttttggcactcctaccacaatatggatcgggagggacctgagtctaagcgaagggcgtcggtgcgcggcgcggtgccgtacaatacaaaccgtgaagttttcgtctttcgtttcgttcactgcgtctgcgtctgcgtctgcgtctgccggcccgtcgaaactgcttttcctctctgcgggcgcatcgatctgcgactgcgttggtaaagatggcctgctgctttctgtttggaaagaaagcgaaacaaaccactgaaggcgacgaagatctacatagcgtcaaggtattctcttacagcgagttgagaaaggctacgcaggatttcagcggcgcgaataagattggcgagggcggtttcggttctgtcttcaggggagtgcttaaagatgggacagtggtggcggtgaaagttttatctgctacttcaaggcaaggcatccgcgagtttttgacagagcttacggcgatatccgacatcaagcatgagaatctggtcactctgatcggttgctgcgcccaaggctctcgcaggatccttgtctacaactacctggagaacaacagccttgcgcagacattgctaggatccaggcacagcaacatccggtcaactggcacgcccgcgccagaatcgctgcggcgttgcccgtgggctcgcgtttctccacgaggagatcccgccccccatcatccacagggacataaaggcgagcaacattcttctcgacaaggacctcacccccaagatctccgacttcgggctggcaaggctcctgccgcccaacgcgacccatgtcagcacccgagtggcaggaacattagggtacttggctcctgaatacgcgatccgaggccaagtgacgaagaagtccgatatctatagctatggggttcttcttttagagattgtaagtgggagatgcaacaccaacacgagattacctagcgaggaccagttcctccttgagaggacatgggcactctacgagcaaggacgtctagaggacatcgtggacatggacatcggcggcgaccgggacgtcgaggaggcgtgccggttcctgaagatcggcctgctgtgcacgcaagacgcgatggcgcgccgtcccaacatgaccaacgtcgtccggatgctctcgggggagaggaggatcagcgtagagaagatcactaggcccgccatgatctccgatttcgcggagctcaaggtcagcagcaaggagcgaaggccgggcgaggcacgctcgcccacgacggctcccaccacgaaatcgttcaccaccacggagccgttctcgtcgtcggagacgcccacgcagtcgtccatgtgaagtcgtgggcgtacgacgcatttttttttttggtttagtttgtatagtgtgtggacgtgttaggtgggcagggttacaggttttttttttgagtttcttgtttgttttgctgtgaggaaagatctcgtaggcctcttattgcatctttgatcatgtaaatatctgtaaacgaagatgatcaagataagctttgcacgccggttctcatt

SEQ ID NO: 122445 - DNA, 259 bp, Zea mays
  Clone ID: MRT4577_43154C.1
gcgcgcacttggattcggcgaccacgcgagcgcggaggatgcataggtgccgatctaaagacgacggccgccgcgggctcctcgccgacctcctcctgctcgagtaagcggctggaagggaaggtggcccttgtcactggcggcgccaccagcatcgctgaggccatcggccgccgttgcatggagcacggcgcacaggtctgcatcgctgaccatcaatatgagggagggcactagctgcccgaccctggggggaggt

SEQ ID NO: 122446 - DNA, 152 bp, Zea mays
  Clone ID: MRT4577_43155C.1
ctcatcctattctctccagatctcacatgcaactgacaattactgttttagtatcacaaccaccttaccacttaacatcacataacaatattaacataccaacatattccaaatttttcaatatcatttacataaacatattttacaaactt

SEQ ID NO: 122447 - DNA, 532 bp, Zea mays
  unsure (1)..(532): unsure at all n locations
  Clone ID: MRT4577_43156C.1
gcgttcggccaaatatgagttgccatagctaagtatgttgtgtgaatcttacttgggcaaccatgttactgtaaactccgtggcatctactgtagcattggcgtgatcgataccatgctatctcgcttaaatctgttagcctaaaatctgctgctgaaaacctttaccctgtgatccggaccgaggggttcgactatctaaaacacaactggccatccctgcagacagagatactgctacacagttgcgcgccatgtgcaggaacaatgtaacaccggggttaaaagacatatcgtatgggcacacctctcttacgggagacacaccagctgtacatgggtgaggccaagggttctgtataccccgatcctacgaagcactaacctttgtaatcaaactgtggtagtgtaaaatggacacagctatttgaatantaatctggtaccactctagcaaatcgcaataacatgactgaattgtgcttgtttcctcaccaaaaacagaaggttggaatgcaaaatattgcaccgaa

SEQ ID NO: 122448 - DNA, 458 bp, Zea mays
  Clone ID: MRT4577_43157C.1
gtccgctcccttgctgttgttaaagcaagatcaggaagtttcttttcttggtatcttaattttatgttactgctatagctcatgccagaatctcaggcggtcaggccataaatgttgttaagctgtctaaatgtgtgtaatgaaactgattggacaatgagcatgcccaagatgcattgtgctaaaatctcaggccgctagtataaccgagatgtcttatataatgtgcagttggacttgcttggcccagttctaatgtactttggcctgagaaactaaaacttgctctagtcagagtgaaaggtcaaattcatccttttaacgtttcatttattgaagtccaacttagaaaaaatagaaaccctgggaatatttatacatggaagctggttgcatattgaacataacttatacagtccacatataaacctttcttaccatggtgtccatgtttcaaa

SEQ ID NO: 122449 - DNA, 650 bp, Zea mays
  unsure (1)..(650): unsure at all n locations
  Clone ID: MRT4577_43158C.1
gttctctctagtcggcggccgccctcgatctatgaactagggccgcccttgttttttttttttttggcttttcaaaaaaaaaatccatgttggacacgctcatgcaagctgaaaattgtcacaaaccgcactcaacggattccaaaatatacaagcttcggcaatgaagccgcttggtcttagcagccactatatgcggacccgatacatcagagtacactgccaccaactggagtcactaacaggatgtactttaaaaaaaaaactcttaaactttatcaaccaacgcaaaccattattttcaagctctcttcagcaaccgtccacgtcttcagacgcagcaacaaatttgacatttccagacgcagcacaaccgagcaatactataattcaagtaacgaattccannnnntgctctgctgtgaagtgacccatcagataacactccacgaacaggcataagaccataaccagcttattcagatgcagttcaccttacaagatgcttcactggctgaagttcatctctgagtatcttctaggcttgttctggcgctcatcaagctcctcattcccaatatcattttgaggatattttgaccctctattagtactaggttccctggatggaactgatgatgatgtctgtc

SEQ ID NO: 122450 - DNA, 1442 bp, Zea mays
  unsure (1)..(1442): unsure at all n locations
  Clone ID: MRT4577_43159C.1
caagcatcaatatcaatatccttacatttaatacagncagagacatgctcacagttgatgttaagacattcattcagtttaattatcttagcctctaaatcatcattggcagacttaagacagttaattgaagaataacagtcagatagctccttagacaatatttcattctttttagtttccaaagcaagagcattttctacactaacaaatttatcatgctcttcataaataaggtcctctttcttttctaagagcatatccttcttattaagaacattaattaatttgttagttttatcaattttagttgtatcaagacccttgaacaatttactatagtcctcttcatcatcactagattcatactagatgaggtgtacttgggagtgtttctagaacatacatttctctcctttgccatcagggaagtgtgatgcttgttggggaagagagagtacttgtgagggcaatggtggcaagtccctcgtcgttagagtcgaaggaggagccatctgaatcccactccttgccaaaatgcgcctcacccttcttcttatagaacttcttttcaaccttctcccccttctccttttcctcgtcaacatcattttttggacaattttctacaaaaagtttggacttaccgcacttgaagcatgctttttttttttttttttttttttttttttttagcaaaaaaaaaaccatgttggacacgctcatgcaagctgaaaattgtcacaaaccgcactcaacggattccaaaatatacaagcttcggcaatgaagccgcttggtcttagcagccactatatgcggacccgatacatcagagtacactgccaccaactggagtcactaacaggatgtactttaaaaaaaaaaactcttaaactttatcaaccaacgcaaaccattattttcaagctctcttcagcaaccgtccacgtcttcagacgcagcaacaaatttgacatttccagacgcagcacaaccgagcaatactataattcaagtaacgaattccaccccctgctctgctgtgaagtgacccatcagataacactccacgaacaggcataagacctaacataattaagggtatcaaagccacccaaagtgctccagatcagaactggagatcacaaagggcctaaatagggccataaccagcttattcagatgcagttcaccttacaagatgcttcactggctgaagttcatctctgagtatcttctaggcttgttctggcgctcatcaagctcctcattcccaatatcattttgaggatattttgaccctctattagtactaggttccctggatggaactgatgatgatgtctgtcctgaagatctagagtaaaagctcggatcaagggctatataggcccacgcgtccgcccacgcgtccgcccacgcgtccgcggacgcgtgtg

SEQ ID NO: 122451 - DNA, 766 bp, Zea mays
  Clone ID: MRT4577_4315C.1
gccggccgggccttcgactctcccagtgccagcacaccagcactaccgccaacgcgttacacagacggtcctctgcgttacagagctcgacaagatgagcgtcggacagctgcacacaaggaggctcctgtcgcacgccgccgccgccgcggctgcctcgtcggcgggaccaccagcgacggaggtgcaggtgcctgccgcgcacgctcacgcagcagcgcccttcagctccctgaacacgatggtgatcacggcgctgtcgctgctcctgtgcggcctggtggtcgtgctcgcggtgcacgcggtcgtccggtgcgcgttccgcgtcacgcgccgcgtgtgctacggccaggacgagccccacggcggcggcggcggcgccgatgcgttggcggtcgcagcctccttctcctgccaggccggccccaggaggaagcgcgggccgcgaaccgggctgcccccgtggatactctactcccgcgaggtcgagctcactgggtgcggcgcggcagaatgcgccatctgcctcacggagttcgtgcggggtgaccgcgtacgcgcgctgccgcactgcaaccacggcttccacgtgcggtgcatcgaccgctggctcgccgcgcggcagacgtgccccacgtgcaggcgggcgccgttcgccgctaacccctcgctctcgctgccggacagcgcggaggcgccggagtccgtgcagcttcaggcgcgcgttgaatccggggccgggcagcaccagcacgagactcaatag

SEQ ID NO: 122452 - DNA, 223 bp, Zea mays
  Clone ID: MRT4577_43160C.1
aacaaagcagcttacttgagttcaattcatgcctggtgagccaggccacagcattggcgggtgttcgtgctctttttggcctcggaagctaataccgacatctggcgaacgcggaaacagacagggagggggtggtaccacccgagttgggactgcatcatcgtcagaaagagcttgggcagtagctgaggcatcgggatgctggtataccagaggcacacta

SEQ ID NO: 122453 - DNA, 417 bp, Zea mays
  Clone ID: MRT4577_43161C.1
atcaaagcataagacaatagtatatagtataactgtctaaacaatgattgctggtatacatttatatataaaccaataacatcatcatgtctaaaaatctggttaagctcaaggagacggtgtcggtgaaggagcagaagcaggagcgtcgtgtgcctcaccggagctctggagctgcgccatggcacggcgagggttggcacggtgtacctcgcacagctctgaaaaagctacgccctctccggcagcgaggttggcatagaggtcgacgatgttggggcatccccggaggcaggccgcggagcagacggcgccggcgacgcgcgggtcgaggagggagtcggaggagatgccgacgagtggcgcggtcgacgcctcacgcgcgcacgcacgcgttggtctccaccagttcccgac

SEQ ID NO: 122454 - DNA, 560 bp, Zea mays
  Clone ID: MRT4577_43162C.1
cagtctggcgcaccggacagtccggtgtgccagactgtgctgagtattggctgcacacaggcactctcttccaatctttttctttttctgtttctagcacttaggtaacttcattagtacccataacaaatgtactaagtctagaaacatacctggtttgttgattgcgtttcattcatcatttggcatataataacccacttaatatgtgttggacacttaatcaccaaaatatactagaaatggcctaagggcacatttcccttttaggttcgtggactaattttgaggggacttggcccaaatcggtttggtatcaatcttttcttttctctctttttttgttgatatttttatgtatcaattcaaatctggtttgaattttcaattcatgtttaaaggcgcaaacaaaatcccaacatgagatacaattgaagttttatttatttattttaggagaggataaagtgtagtctttgtcatgactcattttaatttatctatggtttgaaaaagaaatagtctgcaacctttcttttaatgttccaagttttaaattt

SEQ ID NO: 122455 - DNA, 304 bp, Zea mays
  Clone ID: MRT4577_43163C.1
aacaaacatactttatttttccaaaactcaagttttacaacataaaaagagtttttataattccaagtcatgttttactcaaagggcataacttattaccatagcggggagggggaacccttccaaagttcacacataaacctaactaattcttctttaagactgggagcttttttcagccccaggggcacctaaaaagctcctgattaccttattggggggaagagggtccagatcctacttttatacccagttgggggggtcctccacttgattagcagcccctggagtagactcctccttt

SEQ ID NO: 122456 - DNA, 261 bp, Zea mays
  Clone ID: MRT4577_43164C.1
attgtgttggcccataaattcccaccccggcttagttcagccgagacgttaatattaaactttgaagggaaaaaaaaacttaaaagaaaaaaaatcggcaagcaacactttcgttcctctgaacctcccttcaggtgaggggatataaacttggggatggttctgctcttttcccaagaccaaacccattggggggcatcctctcatgacaaaagctgttaatgatccggggggagtgttactttcacagtggtctggttc

SEQ ID NO: 122457 - DNA, 667 bp, Zea mays
  unsure (1)..(667): unsure at all n locations
  Clone ID: MRT4577_43165C.1
gagaactgccgatgaccgcgtcattcggagtcgcctatctcggggacctaaagagtggacccttcgacgtgcctctcgcattgctcaccgccggcgccgctacgcccgtttccagagcaccatgaggcgactgcatatgcgagacacatcgcgtctacccgctatccagtgcggaaacgcgtgctggtatctggaatgtctcaagcatggcatacaggctgatggatcgaatggcccgagactagaccattgtcggaggagaggacgctatcaacacatcttcgggagactggcgctggcaagcacgaccgccgtagctggatcttgatgacctgtgagaccactgccatcgatgatgtgaggactgggacctattgacagtcttgctcctgagagctatcattgtcaggaggatgaagccgacaacttcgctcggggtcactacaccattcggaaggagatgttgaccggtgccttgaccgcatcaggaagctggcacataattgcactggtcttcagggtcttcctctgtcttcagacgctggtgtgtgaaggaacgggctctggtgttggntctctcctcctggagcgcctggctgtggctatggcaagaaggccaagctcggnttccccgtgtacccatccccccaggcgttcacatccgggg

SEQ ID NO: 122458 - DNA, 161 bp, Zea mays
  Clone ID: MRT4577_43166C.1
gccggccgggtccgggactagcgtggcagtttcccatcgtctattgatgctgccgcggtgattccctgtcgtctcagccatgcaggcgccgaaaccttttcatccgtccgtcacaccgggcgccgcgctcaagggagccactaccgctacgcccaagtcga

SEQ ID NO: 122459 - DNA, 447 bp, Zea mays
  Clone ID: MRT4577_43167C.1
caactgcaacattgggcttcctagctacatctgtgcactgtgtgcctgactgcagaggacacgcgccagcggcaacaatggctaggatgataagtcgaccgtccacatctcctctcaaccctggtcatgatcgccatgggcgccggcgaaaagggcctgtcaccggccccgaaggcgcccactcaacacaccattactaatattcttgcgccctacaatgagtactccaaggtcaacgacatgctatccaatacaagcctagcgtacgacatgaaccgccgccagaccatcaccgcgctggccgtcgccaactccggcatgtgggggctcgacacactagctcctggataccattcgccacatcctatagctgcacgttctccttgactactactgcagcaataagctgaagaagctcgcccaaggctccaccgacttcctcctcca

SEQ ID NO: 122460 - DNA, 117 bp, Zea mays
  Clone ID: MRT4577_43168C.1
tttgtcatctgtgagctcactcgtacaggggcgggagtttttagacaaaggtttacgtggacaccaccgactctgagcaaacactggatgtgagcatccaactatcctctcacacca

SEQ ID NO: 122461 - DNA, 308 bp, Zea mays
  Clone ID: MRT4577_43169C.1
attgctggctactcagacgggggataagcacggattaaacatgggtgcaactcgcgattcggacaccgaacaaacaaagaaacggcataccgatggggagcactcatgcattagatcaaaacgatacttacaacccggtaacagtgaagttaacttttggagagccggatcgattacttttgattaacatgcaaagcatcagctgcactaggtggtgtggtcatcggagaccggcgggcggggtgccctcactccttcaacttatggatggcgttcatgtccacggacttagcgagggggcctttctt

SEQ ID NO: 122462 - DNA, 668 bp, Zea mays
  Clone ID: MRT4577_4316C.1
ccaggctagacctttgtttttatttcccaaaaaaaattaaaaaaattccggattggggggcagggtaaattaaaagactcgccgggcttgccccagcaaaaaaagggaaatcagggtttacttgctccttttatccccctgggattccgttaaaaacatttccttaagatgggccgactttgttaaagctcatcccccttaagtcccaggatgggccttttttcccccctttaaacttccttggggggacatttccagctcctaacatgttaacccttccttttcacagggggaaaagggaactgtttcctttatgccaccgacccctccttaccgtccagggccaccaactgtttgttacctaaatatttcccacggggctcaggtgtccccccgggggcgggcggtttatttcgacccataatccaccctttcccatttgagggatttcccaaaattgacccgcagaacccttcgcttgaatccccagacccaaacccttactgccgttttagcaggcttcgaagggttttagggccgaccaaggaccccctttgaccgggcgggctgttttagcacaccaaactccaaaagggccccctgggagcaggatcttatttgcagcgcctgacccccaaattttttgcggccaccaacattttttccta

SEQ ID NO: 122463 - DNA, 299 bp, Zea mays
  unsure (1)..(299): unsure at all n locations
  Clone ID: MRT4577_43170C.1
tncgtacagatcgaggatgagaattcaccgcagctgaattcacgaagtactgcgcagctgaaggtatacatcggcagcacactgcaccttacagcccgcaacaaaatggtgtcatcgagcgcagaaatggctcagtcgtagccactgcaaggagtatgctcaaggccaaaggtttgcccggctggttctggggtgaagctgtaagtaccactgtttatatgttgaacagataccctacgaagagcgtggaccgcatgaccccattctaagcattgcatgggaagaaaccagcagtgaaa

SEQ ID NO: 122464 - DNA, 171 bp, Zea mays
  Clone ID: MRT4577_43171C.1
ctctgcacgtgatccgctaccagctcgccgccgacgcgccctactacgacaacgagtggaacaacggcacctccttcttctacagggcggtgctacgcatctgtcgctccggcgaggacggggtcggcattctccgccaggactggctacgacccggggacaggtacccta

SEQ ID NO: 122465 - DNA, 433 bp, Zea mays
  Clone ID: MRT4577_43172C.1
aggacgcgctcccgtcgttcccgctttcgattgcggcggcggtcatgaacggtggctgcgggctcatcgtggacccagcctctggtctgccaaccgcgctgtcatcagctgcggcggcggcaacggccgtgtccggcggcagcaccacggagaaccccatcctcacggcgctgttcaaggagatggtacgcgcgatgctgagcgtcgtcggcagcggcggtggcaccacggcacttcaggggctggagccaccgccccctatcgcgggggtgccgatggaaggggagaagtggcggcagcagcggatccgggagctggaggtgtacctgcgtcggatggacctgctgcaggaccaggccagggcggcgctggaggaactcaggtccgcgccgcacgccgggggcatgaacacttgattgtcttgggttcagca

SEQ ID NO: 122466 - DNA, 280 bp, Zea mays
  Clone ID: MRT4577_43173C.1
gcgtccgaaaagaggctgtgggtgcaccggtttctcaccagcgatgtgatgctctggaagagacgaaagacgcttttgttcctcaaaaagaagacataaacgagctggacgcaccgagacaagatcaagatgaagacatggttatcattgatggtgagaatctgatggaatagactccagcagaagatccacctgtgaccgattatgaactcacgggtaaatcagaattccaagagcagcaagtggacgattacgagaagtgtttagcaaccctggatga

SEQ ID NO: 122467 - DNA, 183 bp, Zea mays
  Clone ID: MRT4577_43174C.1
tttgtcttgaaaacagcaccaacgggttctgaaaaacaagcactacctagttgaagaggaaacagtactaaagcacattgtgagatatgagagagacacttgcattctgataggccatattggccatgactctctggaggaagagctggggctttgcttaggggccacaaatccaagggtcgt

SEQ ID NO: 122468 - DNA, 390 bp, Zea mays
  Clone ID: MRT4577_43175C.1
gatctccgtaacacagcttgggatcaaactagcatggcatgaagcaccagtgcacacagtgcgggaggggcgccgaaatcagacccaatcatacctgcccgatccaaacaacactccccctctctatcccacgtgcctaaatgaaccaccctgtctggctaggcatggtctattgcccatttgatccatttgcaccacctgaatattttcagcttaagatgactgtatacacaaacaatgatgtgtatagcactgggccaaatcaaaacggagtcaccatgacagagagatcaaacatgttcacaacctgtgtgttctcttggactgtagccgatgggactacatctgatgcgaacatcttccaccaactgcagggcactagtgttcaag

SEQ ID NO: 122469 - DNA, 405 bp, Zea mays
  Clone ID: MRT4577_43176C.1
atgtcgggaggatccaccaagagggagatggaaaccggcgataaggccacaagccacgggaaggccccatcaagagagtccgacgccaaaggaagagaggaatcacctccccgcattaagtcacatcggagtggagacaagaaaaaggagatgaagaaagtggtctactacaagaccgattcttcgtccccctccacatccggctccgacgacgcgtccgtcacttttaagcgccatgagcgcaagaagtttagtaagacccctttacgctatccccgcatttctaaacgtgctcctttactttccattccattaggcaaaccactatattttgatggtgaggattattgtatgtggagtgacaaaatgaggcatcacctaacctcactccacgcaagcatatga

SEQ ID NO: 122470 - DNA, 597 bp, Zea mays
  unsure (1)..(597): unsure at all n locations
  Clone ID: MRT4577_43177C.1
aggtttgggtttacccttttgaggggccgttatggaagcccgcaaaaataaattctgggcccggttcgctgttgaggcccacaaaaatgtctctaggaagggaatcttcctttccctaatggggcatgctggaaccgagttgtggagcaggagagaattttaatagcaacataaaaatgcctcttgggattgtgcagtatcccataatccctgcgacaggtcatcttaggtgagccagccagcacaaagataacaggatgcagccttgaaatgctacgcgtggggggaggtccacccacttctgccatgactagcattgccaacccaggacgagctggaatctcgtgacatgcggtgcatcgtccctgcagtgtgcattcggaaagcctaacagtagacgggaacatcgacatggatagttggttcgccggatgatcgacgttttgactgtaatcttagtttatgtttgttgctgatgctttagccttttgttagtctgcatattagtgagtgaattttgttatgttctgctgctgaatggaaattctgagttgaattgtacccaaaaaaaaaaaaaaaaaaaaaaaaaaaaaaana

SEQ ID NO: 122471 - DNA, 2413 bp, Zea mays
  Clone ID: MRT4577_43178C.1
atggcaaataatagaagaaggaaaaatttcatcagatcgctggttcgtgacgacaggttactcaccagtcaggaagataaactgcatgaggcccaccatcatttcactgaagctattggtagaaggggtgagagacagagggccgttcggtggggtaacctaggctatagtccatttgacttatcagatttggatttcttgttcaatgaggatgagattaaaaatgtggttatggggatgcactctgaaaaggcgccgggtccagatggttttatcgggatcttctataagagttgttttgagctgattaaagatgatctatcaagtgcaattcatgatttctatcaccatagatgcaaaaacctaaacctcgttaacgaggcaaatatcgcgcttttacaaaaaagggagggtgctgacaggattgacatgtttaggccgatcagtctcatcaatagcttcatgaaaatattgaccaagattttagcaaacagacttgcaccaagaatgaatgagattgtctccactgcccaaaatgcgttcattcagaaacgttcaattcatgataattttctctacgtccaaaaagttattcagaaacttcataggaacaatcagccagccctttttgtcaaacttgacatatcaaaagcttttgattccatcaactgggcatatctgttagaggttctgagagctctaggtttttcccagaaatggaggaactggatcgcaacaatattagggtcttcctcttcaaaaatcatcatcaacggtcaacaaacaaatgcaattaagcacatgcgtggcgttcgtcagggtgacccgctatccccgttcctgtttattctagcaatggaccctctgcagaggatgattgatatggcggcagatgctgggctcttggggcgggttctgccaaataaggctaaactgcgttgttctctttatgcagatgatgcaggtgtgtttgttagagcagataaagaggatttgaaggttttgaaaaggattctggaagtttttgaaggatgttcagggctgaagatcaatttcaataaaaccgaaattttcccgattcgttacccccaaactctttggccagatctgatggaggttttccctggtaaatactctaaatttccagggaagtatcttggtctacctctacttttcaggaacgttaggagaattgatgttcaaccactaattgataaaattaataaaaggctagtaggatggaaaggcaggctactctcaaaggcaggtagggaaaccttggttaaagcagtgttgtctgctcagcctatctatcatctgacggtctttcaggcgcagaaatggttacttaatagaattgacaagttaagaagaagctttctttggaaagggaatagtccagaattttgcaatggaggtcattgcttgattaactggtccacaacttgcctaccaaagaataaggggggtctgggagttctagacctggagcgttttgcaagagcgctaaggctaagatggttgtggctaaggtggaagtttaaagaaaaagcatgggttggcatgcatttaccatgtgacaaggcggatgtagatctctttaacgcatcaacaattgtgactattggtaacgggaagatggcagatttctggggatctagttggattgaaggacaggcacaaaagaatattgcacctaagctatacaagaaagcaagaagaaagaacatctcggttttcaaggctcttcgaaacaattactggatgcagttctgcgcgcctttcactcgggaggaggaagcttagagaattcgtcttactttggttatcaatcagcagcacacaaggcctcaatgatcttgaagacaccatttcttggagatggtctgcagatggggaatacagttcaagtagcgcatacaaaattcagttcacaacgaacttctgtaaaattcacatcaaccccatttggaaagcaaaaactgaaccaaaatgtcgtttctttgcttggacattgttgcacaacaaaattttaacttcagacaatctgcaaaaacggggatggccttgcaatcaaaattgttctttttgtaatgtagctccggagacagcggcacacctatgtaaagattgtcccttcgccgaggaagtgtggagcatgatcttgacttgggctgatttgcgattcctggacggtatttctaagactggatctctgcacacgtggtggtttagactgaggatgctctgtagcaagcaatcaagaaaaagcttcgatggccttctaatttatttctggtggagcttatggttggaaagaaacaacagaatctttaagggtcagcagagaacgacagagcaagtggcgcaggtggtgaaagagctcgttggtggagttttagcttgtctgtag

SEQ ID NO: 122472 - DNA, 288 bp, Zea mays
  unsure (1)..(288): unsure at all n locations
  Clone ID: MRT4577_43179C.1
ccccnccncccccncccccaaaagggccttttttgagaaccaatggcccccaaanctttgttcaacacaacatcattcaaatcctttactggaattaaacaaaatgcttaacgaacagggccccaaaaactttcccaagaaaaattctttttttttgggccctcaaaacacaaaacacggggcccatttacctttcacataaaaagagtcggccttaaaccccttaaaaatggcccgacctttcttgtaggccgcctcacctttcggtccacaagataaaactttatc

SEQ ID NO: 122473 - DNA, 377 bp, Zea mays
  Clone ID: MRT4577_4317C.1
ctgttcttcttcttgctcaagctgtttcttttggtaagagcggccgtttaggcctacggaggaggtaccgcactgagtactcgttcatgctgccgtgatcgctgtggattgcctgaatgagggggttgtagattctgtaccaaggaaattaagattctgtcgtaataccgatttgcgatcagataggtccacaagactgcagcctgcacctgtgagcgtgatccagtcgggaccacaaagtttatacattgattatatggtggacttgtgtaattaagacagaggtgtgataccttagacgatcatatgagttgcacaagattttgccttgcccttttggtctgttttataacaatactcaggatactgttctattg

SEQ ID NO: 122474 - DNA, 328 bp, Zea mays
  Clone ID: MRT4577_43180C.1
cattcaagtgaattcctcacaacaacatcaaccatggcgacccgacatcagtattgtattgtattgtattagccacaaaactggagagcacagcaacgccctaaaatctacaaattacaaggatgacgccacaagcatgcatgccactgccaggcattcgcgattccgaggcaagctagctgtcacctgccctcctcgatgatggaggtgtagagcggcgacgggaccgcgggcgtcaggtccccgggctcagggctcgcctgggcgccgccgtggccgccggacgaagacgttggctgcgtctgcgtcgacgacgacccgacgtggc

SEQ ID NO: 122475 - DNA, 1538 bp, Zea mays
  Clone ID: MRT4577_43181C.1
agagtaaaatcataacatgaacattgagatcacaggtatgtcacattatgacatcttttgttcacagctgaagttacacaaaaaactggctggaaggtgtactagatgctaaccaaaacacatgcattacacaagcaacatatttttcataagtacataaattagtaagtgatacaattattgtttccgtgattgcatctagagcatatcaccataggcagaattaactctgcatcacagttttaccttgcgcagcatacactaccattcagagagcaagccttccatcgagcttgtcaacaatttcaactatagagggcctcttcttctgatcgatatccacacattttagcccagtttcaatgcatgcttttacttgctggaggctgtctgcatctagtgatgagtacttggatgccatgtgttcgtctgtccatgtttggcaaacctgatttataaagttccttgcacacatgtctttgtcattcggagagttcttctgcccagttgtgatctccatgattagtacgcctaagctgtatatgtcagaccgggttgagatctcccctctgtacagatattctggagccatataccctttggctcccacaacatttattgtgtttattcgggtttgttcttcaccaaagagccttgacaggccaaaatccgcaatttttggtaccatgttgtcatccaatagtatgttggcaggctgaagatccagatgaacaataggcctatccatccccttatgtaggaaatataaaccctgggcaaaatgcccttaattattttgaagcatgtggcccaattaggcctagaagatatatcaaaaatacacttgtcaaggctccccttgggggcgtattcgtagcagagcatgctctgaaccacatccacaagaatgtatcttccattgtgttctatcactttcttctgcagttcatgacagtagccatacaacctcactatgttctcatgctggatggccataaggttcccaacctcattcttgaactgtttttcggttgccactggggaattatctgagagcttcttcacagcaatggcttgcccgtcttgcaggaatcccttgtaaacagttccaaatccaccttgacccagttttctgtcagcagagaacccatccgtaatctctttcagaaaatccgatggtagttgcttcggtaaagtactcagaagaagactaggcttaccacctccgctggcgtcagtggccatttctgacgattcaagtagctgtacctggagaacactttaaggggtccaagctggagagacgctgaataagtgcagaaccacagaagctaaggatctgatattgcttgcgggacgcgggataaacgaatccaacgggaatacgggatctggatcgaaacgagaaaagtgagctgacttgactctacaagaaaggcgcaataggaagatgggtgctttttcagcgcgggtgaggacggtgttgctgcgaagctccaagcaggaggttcgatcagaattccccggccggcctcgag

SEQ ID NO: 122476 - DNA, 272 bp, Zea mays
  Clone ID: MRT4577_43182C.1
acccgtcaaccggggggttgatgactaggggtgctgctgcactcatggtcgggaagataagagtgacgtgacaggacacactagtccaggagaatccacccatgcgggctatcaaggggatagattgcgtcacaactggagagaccctctaattgttgcaaggcctgagcaccagcccgagcagatagtgctagcctccatgctggaaactcggacacatacacatagtgtcttgcttagctggtcaggaatacatgcatggagggtgtttc

SEQ ID NO: 122477 - DNA, 1522 bp, Zea mays
  unsure (1)..(1522): unsure at all n locations
  Clone ID: MRT4577_43183C.1
gcgccgcgccagcgagcgctcgtccccacgcggcccatatccccctgccggagccgcccttcgactccaccggctccctcgccgccagccgccgccgcacctcctctccacaagtccagatctcccattcacacacactcgcgcgcgcacagagacctccacgcgcagccaaagcatccacccatggcgcctctcctcctgctcttcctcctcggcggcctctgcgccctcttgtcgctcgccacttcctcacgcgccagcgccaagaagtgcgatgacgtcaagagcaacggcaattgcggggactccggcgaggaggcaagatgcagggacgactgcgcgccagaggagacgcagcagcaggggaagatgcaggcgcggcccgacccggagaaggacctgggcatcgtattctccacgttcgaccacgacggcgacgggttcatcacggcggtcgagctcgaggagtcgctgcgccgcctcggcatcgcagtgtccgccgacgaggccgcggccatggtcacgcgcgtcgacgctaacagcgacgggctcatcgacatccacgagttccgcgagctctacgactccatacccaagaagaggaagcaccagcaccccgccgccggcggtttcagcggggcagcaagggaggtgccggtggagggcgacgacgaagaggccgaggaggagagggacctgcgggaggcgttcgacgtgttcgacggcaacaaggacgggctcatctccgccgaggagctcggcaccgtgctgggctcgctcggcctgcgccgccagggcaacgcccggaccgccgtcgccgattgccgcgacatgatacgcctcgtcgacagcgacggcgacggcatggtcagcttcgaggagttcaagcgcatgatggccgtcgtcaaggcctaggctgctcttcttcctcctcgcagatcaaatcaagtaccaaacttgagtagcgttatttcgttcttggatcggaaaagattaacacaccaggagctcgtatttgtttatggggggtttgaaagctgaagtagctttttgatctgtgtttctcccctgttcttcaatcttgataacttgctctgcttttacactctgattctctcctactttttttagtccttggtactgttttcactgacatatattgatcagacatgtatgtaaatattacttcttgctcgctgtcaggtcagtctgtggaaaaaatgaacaactaaatgaatcaacgagtatgatttgttcattcggtgtttgtgtttgggacccttacctgttcaaacaattgtgtttaagatgatgtgcgtgccaccctttctgtgacccaactttcatagttgaaatattctcttcttggctgtaaggttgcctgttcatgaagtaaaactccaaagaaagttcttgtctttgtggacaagatttgccttttttttaccctgtgtttctgactaccangaaactgaagtgatcgtgtgagtttttcgtggcctgtgttcgtaccgggtccgga

SEQ ID NO: 122478 - DNA, 292 bp, Zea mays
  unsure (1)..(292): unsure at all n locations
  Clone ID: MRT4577_43184C.1
tccaaccaaaaccctattctgtccccccacacctggatccatnctgtccgagaccataacgacggctaggcttctatcctcgacctgcctcctcatttctatactaacacacttctccattagttcctcctctactcctctctccatctccctcatcccagatttccatgttcctcattctattatgtggatgcatttcacaacatccaatcctaattctcttgcaagactctacaacttttatcttatggcctgtttgcactctcaaatacaattctcttctcatgcttct

SEQ ID NO: 122479 - DNA, 275 bp, Zea mays
  Clone ID: MRT4577_43185C.1
ccttgacgggcagcccgggcagcgaccatgtttgacgtgacgcggctgccgtacgtagcgctcgatgtgctctgcgtgttgctggctggaatgccttttgcaattcttacttcaaggcataccctcttccaacgaggagtattctgtaatgatgaggtccatcacgtacccttagaaagaagacacgataccttatgcgttattaggtggaataatcattccattcaggattatcggtattatgcttggtagaaccatgtccgtatactgtaacc

SEQ ID NO: 122480 - DNA, 486 bp, Zea mays
  Clone ID: MRT4577_43186C.1
tggctcggaacctttgggctgatttatgtgcttgtttatgtgcttgtttatgtgcttgcttatccgcttgtttatgtgcttgcttatgtgcttcgttatgtccctggcatccgatcgtttcgatccgcatccacaagaagaatggaaaattcgtcgttacctaacacggaattggcgtaaccgtcggcccccctagcgaggacagtgccaaaccaggcgactcggacgcgaacgactaggaacccaccgaagtcataaaggagttaggttccattcctacggccgtaaaacccgacggtacctccgggtcaggtccctaggaaacactcgccgggaacgtaatattcgcgcggcacaatacggcaaaataaggctctactagcgatttcgcccctctcactcggcccaattgatacgtcggcgaaggagaaggcggcgaaaccgcgcccggcggaacggacctcagctatcataagggcgactata

SEQ ID NO: 122481 - DNA, 118 bp, Zea mays
  Clone ID: MRT4577_43187C.1
ctggctggagctttgaccctcatttttcaccgtattgctgcttttgtttgtaataatggctccagtcttctcaagagatgcatggatgagtttgttgcatatgattctaaactacctt

SEQ ID NO: 122482 - DNA, 354 bp, Zea mays
  Clone ID: MRT4577_43188C.1
ccaaaaaattccttttttaccggggaaagtttagcatttacctgctaaaaataacttttccgggggataaaaaggggggcttttgctccaatttaatctaccagtttgccaagtagcccctgaatccctcaagggcgaaacaaaacctttttggggtcaaaacagttttttccaagaagccgggttttttccctccttttatttgggaaaccttgttccggtaaagttaccaatgggcttatctggggaatggagcccttttaacgccgggtgaacttttaaatccccccttaacaatttttggcctacatccaaattaattaaaccccctttaatttttgggggtcctttttt

SEQ ID NO: 122483 - DNA, 185 bp, Zea mays
  Clone ID: MRT4577_43189C.1
gctctctctgttgttacccatcgaatgatgatggtgggtttcattcatatatatatcacaatcacggagtcaatacaaaccaatcaaacctacaatcatgcagtcggtaggtggatgtctgttgcccgcgcgtattaacctgcacggcggcagacccgatcggtcaagactcaagcagcggtgac

SEQ ID NO: 122484 - DNA, 446 bp, Zea mays
  Clone ID: MRT4577_4318C.1
atgctgtcgacggatatgcatagaagagatcagatatgcatagaagggagtaaaactaagatttgggtaaaaatcccctctcccgtattgtatttcaatttatacgtatatatttacggtgattgttttagcatattctagtatctgttttttcttatacttaaagaattgaattgtgtgatgatagatattttcatctggacacagagtaaagaattctcgactctcttgacttgacgaggctatataactagagaccattagaggagaactgaagactgagagcattctctgcttataatctttattcctctatattctaaattgcttttttcaatccccttgcacctggattcaattcgaatcccacaccatgtggtgttcttcctctatcgaataaacgttgtttcgcttgtctaatcatcagttcgatagggcattgaaag

SEQ ID NO: 122485 - DNA, 353 bp, Zea mays
  Clone ID: MRT4577_43190C.1
cggccgcgtcgactttttttttttttttttttttcctaaacgagcaagtcctcttggcattccaagatatcatccttctcgttaatggtttctatcaattcattgattttattcttttgctctttggtaaggtttacaaaaaacaaagttaaatcatcatcattatcgctagagctacccgcatcatcggaagtagtgtatttggggttatctctagaatgtaccttcttctttttgctatcattagccaggaagcacttatggccgacgtcggggaagagaaggcctttgttgacggcgatgttggcgacgtcctcgtcggaggaggagtcagtggaggtcgacgcggccgc

SEQ ID NO: 122486 - DNA, 641 bp, Zea mays
  Clone ID: MRT4577_43191C.1
gatcaacctccagacctgtacactcacgtcaccctggatttggggatagaccccggcgccctacctcccccatggcgaaggtcctcacgcccccttcgctcctataactcctacacgagccgttcgacacgaggaaaggaatatggtgctgctccgcttcatcatccaacccgggaccgccgctatgcctgatgactcattccaagactaagcaaccacccgaagagggagattccgctggaactcctccgaaaacaatgtgatgcaagacgcgcgccaatgagtctcacatcaaggtgcgagaacttcatgcacagcatgcgcgccctctacctcctcgacctattgatgaggaggaggccgacggggtctattatggattctctgcacgccaccggaacgacgctcaccggaggattggcctcgcgagcctcgagtggagagttcggagcgggacaaaggagagactgattagagagcaccttccctaaacgtgcattctatctaagaattacgtgatgcactgaacttcagtgtgttctttccgctaccacatgggatgagtaatatcatgtacagttacagagtgatccgtggatctacagataaacagaagcttccatggccttttcggcgtcacg

SEQ ID NO: 122487 - DNA, 393 bp, Zea mays
  Clone ID: MRT4577_43192C.1
tacagacacttgtgataaaaaaaaaaaaaaaaaaaaaaaaaaaaaaaaaaaaaaaaaaaaaaaaaaagggcggcggcccaaaagggttcaaaccatgatttagccttaaatggaagttattagcccttcaaaagtgtcacgaaatttcaattcacggccgttcttttaaaaacttcttaacgggaaaaaccttgcgtttaccaaacttaacccctttgaagaaaagccccctttcacaaccgggtgtaaatccaaaaaggcccgtacaattgacctttccaaacatttgccaaccctaaagggaaagtggaacccccctgttatcggagaatcattcacgccggttttggtggtaacccacaccttaacggcaatatttgcaacctcccaacc

SEQ ID NO: 122488 - DNA, 456 bp, Zea mays
  Clone ID: MRT4577_43193C.1
tcactcttacgcactactatcggtggagctctgtctccctgctatactcctggggacggtcgttcctgacatactgtgggacctgcggctggcattctcctccgggcctcagacatgacaagactgtggtgttgggtatgaaggaatatgtgcgtgtacaagactcggcgctgattcagtatggggcgcctgaccacagtgtgcacccacgctttctttttgtatatatctttgcgatgactggaccgacgagggtagtgtccattatctgtaacagccccttggttgttctatggagatgcgacgaatgctctagctaagcaggctggccttcgtgagctatgtatatatggacctcacactggggatgctgttcatgcgtggttcgccggggcttatttgcatttccttgggagttttgaaccttgcctggcccttgctttatctgctggtcca

SEQ ID NO: 122489 - DNA, 645 bp, Zea mays
  Clone ID: MRT4577_43194C.1
cgccgctcttcttcccctgcttgctctgggttcctccattcctctccagtctccatcacaggagcacgcgacgcgcgccacaggaaggaaggggaaaaacatggcggcggcgaacggggacgcgtgccgcagcgtcggcggggtgccgcgcccgacgaaccccatggtgacgccgctgctcaccgacctgtaccagttcaccatggcctacgcctactggaaggccggcaagcacctcgaccgcgcagtgttagccctgagccccagctcttccccactcttaactccccgcgcttcctttgtctcctcaatcctttccctcgatttggggtgtcaatttacacttaacctccactcgatttgtggtatcagtttacacttacctccaggctccagccctcgatttgtggtttgttaggccactgaggagggggtgataatctggtagacatgaccccgcctcgataaggcgtgactgggtagtgttctggaactattttgctacctgttttttttttgaaccgtgtgtgaggctgggctggctgtgacgattgagcacatttgaggctctgcttcgtagttttgtttcagtacgttataagattaggtttgcaatggggaaaccgtttttcgttaggccaagtg

SEQ ID NO: 122490 - DNA, 538 bp, Zea mays
  Clone ID: MRT4577_43195C.1
cgagtacaagctttttttttttttttttttcttttttttttttttttttttttttttttttatttttctttttgttcttttttatggttaaaccccaccacacgggcggccgaaagggggaaatccaacccacgggccgaccttggtagaggcaccgacctaggtgccacctgggggaaaatgatggccaaacacatttcccgcgaaaaacggagccccgatcaaaaatccaaaaaccagaggagccgaaagaataaactaaaaaacctggggggcctaaggagcactcccccctacataaatgggaaacccctcacgccccctttttaaatgaaaaaaccaacccccccagagaggttaataaattatccaacccccttccaaaggctgtttcaataatgggctcctttccgctttccggctaaaggaagcggtatcatcggacttaaggggggggggacgggtatccactcactcagggggggacccacggaaaaccacggaaccagggggccacccaaggaaaaacaccgaaaaa

SEQ ID NO: 122491 - DNA, 243 bp, Zea mays
  Clone ID: MRT4577_43196C.1
ggcgtggccccgccgccgggtccggcatcagggcgtggctggcctcctccaaactggacccgccgcccgtgccctcgcaccagtcgtccccgcctgagcaggagaagcgggagtgggtgttcgcgcaacagtcgtggtggacgacggcgtcctcgctccaggccaggctcgaggcggagttcgtgcagcaggcgtctggctaagaggtttttggagtttcagatgccgctgctgccacgacgc

SEQ ID NO: 122492 - DNA, 257 bp, Zea mays
  Clone ID: MRT4577_43197C.1
ccgccagtgtgctggattcgcccttagcagtggtaacaacgcagagtcgcggggtgacacctggttcgtgagatgggttgtaaacttgattggtttgttgtgcgtggctggaagagctgatagttatatattaggcttgactgtgccgcttgcttgtgaaaaaaattaatgctttgtgactcgcaagctgctactgttgcagtttttgcaacgacaaaactatgatatgaaagaacctttctgtgtcttccactgct

SEQ ID NO: 122493 - DNA, 218 bp, Zea mays
  Clone ID: MRT4577_43198C.1
gtatgatgtacactatcgggtggataagtatcgataaagatacagggtgcttggaagaaagtgcttagaattgttagatcaaaattaaaatgcaaaaagggggaggagggaggatgagcctctcgtgcataacgatcttcttgttcttgatcaccatgaggtaaaaccttgggaatacgcaaccgaattagtggtaattaaggaacaagcgaatggtc

SEQ ID NO: 122494 - DNA, 667 bp, Zea mays
  Clone ID: MRT4577_43199C.1
cattgggaccctcgaggccggccgcgaagactatcgcaccgtgcaccacccaccgctaactgtcggaggaatctctgcggaagatgcctccagaaggtgcagaagccgacgcccaccaccaacagcccagaccatgctcctccgccgcgaggaggtgatgctcctaccatctccttcggcacccgccgcccttcctttctcctcgggggatgcagtatggacccactctcgactgcgtttgccgacgccgcagttctctctctacgccgacatcgaataacctctccgccggctcctcctcccacatccctgaaggatacctcttcaccaatgtcgcatagaatgaaactctcaagaaacgaactaggtccgccgctccatgcgtgtgggagaaccgatggcgtgaaaggtccagctcttgactggcaagtatagaacaagaacctcctcgctgcaacggaactcaatgctgcatgggagcgctacggctcctgcctcaactcgccggcggatcaaacatcctcaagcacgatcgctgttagcatgggcatggagattctttgcctgacaaagctgggagtgctgtggccacccttaggctccctgactcagctggcgctcacaacgtggtcaccgtatgagactctaacttcaccctacaatgatg

SEQ ID NO: 122495 - DNA, 917 bp, Zea mays
  Clone ID: MRT4577_4319C.1
gcacgagcccggtcccggactctcgcccccggcctagaggatctcgttcccggccgtctgccgggccgtcctcacccgtcgccgtcgtccccctcccggtcccggcctcccggccttccaaatcgtcagcgcagggcgcacacgcttgcccgcgccgcccagccagcggcacacgcctgcccgcgccgcccagccgctctcccatagccgtcgcgccgtcccggccctccaagattcagattggtgttttgctggcaccatgtccagtccgtggagccctatgagtttggaggaagaggaagagatccaagagctcgatgccgaggagcagcaggacggtgagcagccgcagcagggtgatgggctgcagcaggggtccacagctgaagcaagggcacaacaaaccggaaagaaacgcgcaagatcagtggccaactcgtctactaagtctgaggcaaagataaaggtcgaggaaagtgcaccaggagctgcgacaggagtgattctgtctcttcgtgaaagtttacaggactgtaaacaaagccttgcatcctgccaggtggaacttgaagctgcaaaatcagaaattgagaagtggcattcagcatttcagagcattccagctgtaccttctggtaccagtccagatcctgtttcagtggtatcttacctcagtaacctgaagtcatcagaggaatcattgaaggagcagctggagaaagcaaagaagagggaggcagcttttatagtaacatttgcaaaccgagagcaggagattgcagaactgaagtctgcagttagagatttaaaaacacaattaaggccaccgtcaatgcagacaaggagattgttgcttgatccagcaattcatgaggaatttacacgcttaaaaatcttgtggaggagaaagagaaaaa

SEQ ID NO: 122496 - DNA, 2226 bp, Zea mays
  Clone ID: MRT4577_431C.1
cacggcgcggcgcctccgatttttttcacgggggagcgcccggggcgaggctataaaaaccgcgtctcctccacgccacctccgcaccgcagagagaggacagaggagcgagccatcatccccccccgagccgtgccaaccaagagccatccacccaccaccaccaccccggccgcttccttgtccctgcccctccgttggtctcctttgcccatctcatcctctctctctctctccctctctctctctctctggcggtcggcgtggctccgggggcgcgaagcgcgggctcggcggggcgactcgccggcggcgacctgcaggtttgggtatgagaggggtcacccacgcggcgcccaccacaagcgccccccgcccccgcggacgcctcatggacggcctcctcatcttcgtcttctacctctcgctgcccacccgtgccggccgcgaccactcgtcaatcgccgcctctaattgttagccgccgccggcacgccattgctcggcacgcctcccgagaagctcgatctgcggcctagccagccagcctcacgcgggatcaggatcgatggaccagccaccgaatggattcgccgccggaggttttttcacgcacattgatgggcaaaaccgttctcccccttctataattgtcattgggggagggatttcaggcatcgcagctgcacgtgctttgtcgactgcttcatttaatgtcacactcttggagtccagggaccgacttggtggccgtgtgcacactgactattctttcggttgcccaattgacatgggagcatcatggttgcatggtgtttgcaatgagaattctttggcaccactgattaggatgcttgggcttaggttatatcgcacaagcggtgataactctgttctgtatgaccatgatttggaaagttatgctctttttgataagcatggtcagcaagttccccaggagatagtaagcaaagttggagagacatttgagagaattcttaaggagactgtcatagtaagagatgagcatgcaaatgacatgcctctttttcaagccatagggatcgtgcttgacaggaatccgcatatgaagctgcagggcctggaatatgaagtactgcagtggtgcatatgtaggctggaggcatggttcgctactgacatggacaatatatctctgaaaacttgggatcaggaacatgtgcttaccggcggacatggtcttatggtgaatggctacgaccctgtcatcagagctctcgctcaaggtctagatattcacctgaaccacagggtcacaaagatcatacaacgctataacaaggttattgtctgtgtggaagatggggcgagttttgtcgcagacgctgctatagtaaccgtccctctcggggtactcaaggcaaacatcatcaagtttgagcctgagctaccgaaagagaagctctcggcgatcgccgaccttggcgtcggtatcgagaacaagatagctctcaagttcgacactgtgttttggcccgacgttgaagtgataggtagggtggccccgacgtcaaacgcctgtggctactttctcaaccttaacaaagccacaggaaacccggtcctggtgtgcatggtggccggaaggttcgcgtacgagatcgagaagctgtcggacgaagagtccgtgaacttcgtcatgtcccagctcaggaacatgctgccgcaggcaactgacccggttcagtatctggtctcgcgctggggtagtgaccccaactcacttggctcctactcgtgcgatctggtggggaaaccagctgacctgtatgaaaggttctgcgctccggtgggcagcctgttcttcgccggggaggctgcctgcattgaccactccggatcggtgcacggagcttactcgtcaggcatcgctgccgcagaggactgccgaaggcgtctgtcggcgcagctaggcatctcggccggcctgttccaggtcgggaaggctgccatgagggaggagatgacggctgaagccatggtccccttccagatatccaggctgtaagagagaatctattcgacaccgtctttgtgtcaccggtttgttgcttgctgtaattgtaaaatggtgtaagaccttgtttgttggaatattcgatggtggatgctgtttttcgtcaggtaaaaatggtgtaagaccttgtttgttgaaataatcaaagaaggaagctgtttttcgtc

SEQ ID NO: 122497 - DNA, 266 bp, Zea mays
  Clone ID: MRT4577_43200C.1
cggctcgagacgacgacgagctgctggtggaggacatggagatggtcggcgaggacgagctcttgttcctcaacatcgacgccgacgccgaagctgacgccggggcaccactggagcccatgccctcgctcttcgacgtcgtcgacgagcccttcctaaactccccttggctgacggccaccagcagcgccggcgagccagccacaggggcagccggcgccaggagctgacttctccaacagatagagacaatgatgtgccgtccg

SEQ ID NO: 122498 - DNA, 312 bp, Zea mays
  Clone ID: MRT4577_43201C.1
gtgaagcgatgggctgtaagtcatgtaggccgtgatgcgcaagctggatgaagggggcttattcaacttgtgacgcggactcgagctaaccctgggcgatgccatggagatggtcgacagcatgatggactggcgagatcgtctctgtgtcgtcatgtgcggggttttcatcgtctagaacgccatgtacttggcgcgccgggtcatggacaactggtaccactcgtacctggcctttcactgcgccgaagagttcgcccgtgcgcagggccttgagaccgtgagcaacagctaattcatgacagaggacaa

SEQ ID NO: 122499 - DNA, 246 bp, Zea mays
  Clone ID: MRT4577_43202C.1
gacacacacatgaatatatgtaatatagcaaatatagaggtccgactgtcctacaccaatgacagtgtcgataaagcaagactaatcaaccatctactgcgaatcaggcaagctcctcggcgaacccccaaatatgaggttcctcgccgcaccgaaacatgacccggtatgccgcgcttgggcgcgggcgggttgaggtttatcacccacgcgacgatgttgacctcttattcgagcgtgaagcac

SEQ ID NO: 122500 - DNA, 411 bp, Zea mays
  unsure (1)..(411): unsure at all n locations
  Clone ID: MRT4577_43203C.1
gtancagactacagnaacgcacaactctgccgactatcaacattgctgcataggaatatcacccttccatcttgttccacgccttaggggaggcaagccaatctctgaccagacccttattagaactatatgacctctgcggtgacgaccttgaccgcttcacaactggcacggcaagatccacaacaccgagaagcgtccctccttaccagagggatttccttgcttcttgaacacacacggaggacacatgcaccctcgccaggaagaatacatactggaactagtcgctcaattcgggcgtatcatggacctgctggtgctatatgctacgcaccactgagagcgcgacgaccgtctcgctcaacatgtactgtaccaacaccaccaccaatggcaaggcgaagatcc

SEQ ID NO: 122501 - DNA, 354 bp, Zea mays
  unsure (1)..(354): unsure at all n locations
  Clone ID: MRT4577_43204C.1
gctgtttatggaagagagtcagtctgcccgtgactgcgagtgactttgatgagcgaggtgtcaggtgacatcaccatgatgggagctggacatgcctatgctaacaacaccctgtacactggacaacacaacttaaccatgctgcagcaggagcaccatgacaagacccatagcttataacgacgcgttgctctatatgtttctctggcgaccagcctacaaggggataggtcgatcacgagaaccaatcggcccctagcttcctctgcgccgngcatgactacagcacccctgtcgacatggacataccagaaccgaagctgaacttgtgggccctgccgatgatgctgacca

SEQ ID NO: 122502 - DNA, 255 bp, Zea mays
  Clone ID: MRT4577_43205C.1
gggggaactatagaaaaattactgggatagaacccggggaaacgtaatttacacaccaaacgactaaaggctcacatcagcagggaagccaaccacgtcaaaactaagagccacaaaaacagaaggggccattccaatctctaaaattatcgctggcaagcaaaaaggaaaatacatgtaaaagggcttaactcgcaatcaaactcaataaacgcaaacctggtcacattcacagggaatatgccccagcaaatt

SEQ ID NO: 122503 - DNA, 246 bp, Zea mays
  Clone ID: MRT4577_43206C.1
cacaataaaaggggagatttcttttatggctggaactgctacttacaacacaattctttactacttgtgctaaccatctttttgctagtcgcaataaatgtaacctattttgcacccattgttataccaaaccatcttctttctgtaactattgtcgttcaagttatcattccacccacccttttaatccagtattatgctttcattttaccataactttttaattattttccatattaattatat

SEQ ID NO: 122504 - DNA, 415 bp, Zea mays
  Clone ID: MRT4577_43207C.1
ctttggtaattgcgctcttcaaatcggggttgctgcagggtctccagaagatggtaatgcacttaatgtggatgtacaaaagtttatccaaggctctctatacaaaagtgccatggaattcaagaaacaatcttatctggcaaatcttgctttgtatcctgggaggtctgaattgccgttcttgcctgctaacacacaggcactgatattgcagccaattggtgataaagggattgcaattgttggtggcgacactataagaggtttcactaatattgatcaggcttggatcgcaatgatcgcagacaagctggatgccacattgtctaagtcttcaaacgctggactgcttatttgatgctggttcaccatctcccgtctcctgagcacatcgtcgccctacaaatccacccct

SEQ ID NO: 122505 - DNA, 342 bp, Zea mays
  Clone ID: MRT4577_43208C.1
gatcctccctcaccttgagacctgcgttgccacggggcccatttaggttggggccgggagcaagtacagccgttcctgttcttgataaaacgagagaaggatggcagtgtttcacggagctgtcctattcttgcttctcctcctcgtcgcatcagaggtgggaaccatcgatgccaaaatgggactagccatgcccatgcatgccttgataatcgagaaagctaaacatcatgagacggagaagaaggaggagaaaagcacggggaacgaagagagtcaatgcttattgccgaggatccaatttgagggcttctgctttaacaagcacagatgctcctaggt

SEQ ID NO: 122506 - DNA, 391 bp, Zea mays
  Clone ID: MRT4577_43209C.1
atgcgtttgttcagataagcaaagcgtcagtgcgtatagaggatcgtttgtacagaacagtatgattattttcatttgtttttcgcttaaaacccaaatctttttgatgaggcctattttgtggggcataccccccgtgaaaggggggggctgcttacggcgttctgccctttttcaatacagaggacggttatgggggcattcccaaagtttcattaatcagagtacgggcggaaggcggagggaaaccccaaaggggtggggcctactactgggaatgtggaccggctactggaaaatacacacccatggcgggaatgttgtggccattaataaaggccatgggttgaaaaccttgggttcccacaacatgttgttattattaaataaa

SEQ ID NO: 122507 - DNA, 416 bp, Zea mays
  Clone ID: MRT4577_4320C.1
aaggtaaaaattatactttagttccttttagtcacacctttggtgactaaagaattaaagtttagctaatccactttagtcatcatgtttgcttcgttatatactaaaaatgactaaactttaatcacccaaaccaaacagaggctaacatacaactagcatatatatatacatgtctttaggtctagaggcagagcatcataactgatgttcacactactactttacacgtctcttccgacgtcgtaagacctgtgttgttgttaatcacgcctgttcgtccatggatgacggtgcgtgatcttccattccctccgcctcagactccatggcttctctgcttttaccccacaacacgctgtagagtcctgcaaccaggagcgcaccacctacggtgctgccaacgccatacaagg

SEQ ID NO: 122508 - DNA, 561 bp, Zea mays
  Clone ID: MRT4577_43210C.1
gagctatgtcagcatagtaaagcactatatagtaccaacagcggaagaacaacgtatgacaccctgaggatggtgcttggtcgttctgcatgtgctggttctgggaccatgcgccacctatgctcatacagctgctatagtgtggctgcttcccacggacctctgaccatctacggctgccggatgataaaacacatttgtttaaccttacaggatccaagaggctatcacagctggcatattagctttatcacgcttgtttgtcaaacaatgatcatgtgtattacaacagttatctgtggtgcatacattggcacaaaacatcagggcacaacaactacaacaacttgtgctagcaaaacttgttgcctagtctcaagaacagtagaatcttgcattcaatcaactaagctcattgaactctgattattattagcatcagcaacaactaccatgcatccagctacctgctgcctacccccagcgattccttacattcaaccatatagcaacattgaactctactgctgatttacagaagtaacaactactaacattcag

SEQ ID NO: 122509 - DNA, 370 bp, Zea mays
  Clone ID: MRT4577_43211C.1
tgaattgtgcgcctccatttaggaggaggcgcattgcaaggagagagtggggtacaaccattggtgaagagaagtcccacataaacattgaggtggttgaccatgtagacctgtaacgagacgaccaccacaagacaccttatctacaagctaggaagcaccgactaacatgcgatcgtacatgcagtgatggaggctcctgaaatgaacaagcgatagttgaaatactcctatgtgctcaacaagctcaatgctgagcacgagagaggtataaccaatgatatcactctgcataagtctaagaccaccaagtactactgcacggccatagataccactagacaccgcgacttcatcaagaacatgatca

SEQ ID NO: 122510 - DNA, 659 bp, Zea mays
  unsure (1)..(659): unsure at all n locations
  Clone ID: MRT4577_43212C.1
gccgcgtttgtgtattgtaacgtcgccgcatgtacgtgtacgtgtacgtgtactggaccgatgtccgaaatattttaatcgtttctcggcaacgagctcagggaaggtttttttggaccttcggcattccgaagcctttgtgttttttgcggatcgagctcattacgngaaaaataatctagcaccgcgaagggtctactgttgggggtcttcttctctgccaaaggccctcaagaaaaaacaccttcagcaaaatgatacaaaggatcgctgaagccacctttagccttattttagatcctcaaggcgaagactctgagaagagacgatagtgcaagatgttgaagcttaatagcttcggccagcccaagtgaagaaggaaaaatgactaataaggccttattggttttagttacttgtaaacaagtgttcaagggcacagatgtaattttactcgggctgcgtcctgtgcctataaatagatgaatagtacccctgtactgttcatgctggattgtaatcgctctcgcaccattctcgctcttcccccttttcgcaagccgaaggtaccattgtaatatgaatattgttgatgcttattcatgtttaatgaagataataataaatgaatcatcgatatataacaattattttcttcc

SEQ ID NO: 122511 - DNA, 137 bp, Zea mays
  Clone ID: MRT4577_43213C.1
tatatcatcatgaagatgtgttattggccaatggacacacatgttcctattatatcatcatgaagatgtgttattggccaatggacacacatgttcctatcatgagtgggtttatattaacaccaccaacaacaata

SEQ ID NO: 122512 - DNA, 434 bp, Zea mays
  Clone ID: MRT4577_43214C.1
tttttatttttttttttttttttttttttttttgttgttttttttttttttttcggggttttttttttttttttttttttcttttttttttttttttcaaaaaagttaaaaccccctttgtttcaaaataaaaaggcggtttttcttaaaccagcaaaattttttttttttaatgacaaattttttccaaagttttaaaaccctggggttgccggaaaaaaccccagggccggtaaaaaaattggcaaccggccctcccttgggccccttttttgaagacccccaccccgggggggggtatttcctcacaaaaaaattgggggatcaaaaaccatttgaattggccgggggggttatttttttgagttaaaaaaaagcggggtttggtcaaccgccctaaaattttttttggttttaaaaaaaaaagtcttttg

SEQ ID NO: 122513 - DNA, 219 bp, Zea mays
  Clone ID: MRT4577_43215C.1
aaattgggggtgttttttctggggagacgcaaaaacaatttttgctatatatatatcataaatcatccatcccaatttccaatctagttccaactgaacttatacactggctgatgtaaacccgtatgccagccacctaaactacacccttcttttaggaacagggataggaaaaaaacccctgcatggggggcaaatataaacctaaaattggataca

SEQ ID NO: 122514 - DNA, 223 bp, Zea mays
  Clone ID: MRT4577_43216C.1
gtcgcgctcgagctccagccgcgccgccgacctcgccatctgcccccccgaatcccgtatttccctccgtcgccttccgatctctcgctcctcgccatgtcggagacacagcgccgcgccggtgctcacgcggccggcgccgcatccagctccacgaaccagcgtgcctccaaggctgcgtcgtaccccgactcccttcgctcgacgccccgcccgacgcctc

SEQ ID NO: 122515 - DNA, 357 bp, Zea mays
  Clone ID: MRT4577_43217C.1
ggctgtgcaccagcgccaccgtgtcaattgcgctcatgagctacgtgcagtacgacgtgttctgggccctcggcttcggcgtgccgtccatggccatgctactcgcgctcgccatcttcctgctcggcacgaggacctacaggttctacggctcccgcggtggtgctgtttccaattccagcttcttttttattttttattattttatattatattttttatttatattatttatttatttattttttttttattttattttattttttttttttttttttatatttattggggggggggtttatttatttatttttttatttttttttttattttttattttttataatttttttt

SEQ ID NO: 122516 - DNA, 528 bp, Zea mays
  Clone ID: MRT4577_43218C.1
ggagggcagggcagggaaaaaccaaccccccgggtttcaaaaaaaaccttcaaccttgttgggggggggtttaaacaaaaccaaaacccttttggccctatttttttacccccaaccccgggtttttttttcccgaacccttgaaaattgggggacaaacccttggggggaccaaacccaaattgggggccccaatgggttgtaaaaaaggggggtttaattaacccaaaggggccccccttcccaaaaaatttttttgggcccgttttcccccccaattcgggggctggggctttttgggggaaaacccccccccccttgaccaaaaaaaccgaaatttttgccccccgaaacaaagggttttcaactggaacccccggttgggggaccttcccccggcccgggtcttttttaaggggggggtaaaaaagggaagggtttttgcccggttttccccttgccctcggaatcttttggaccaccctttcccccactttttttgggctcccaaacttttaaatcgaaaat

SEQ ID NO: 122517 - DNA, 2103 bp, Zea mays
  Clone ID: MRT4577_43219C.1
aagaaaaaatgggggaaatcggcttcctactccccgtccttatcgccagccgaaccgacattgttttctccccccttctcgccttctccttctccccctagtctagaggcgtttgctccccaatcccttcggcccgtccgcccgcccgctcgacgtgatcccaccggcagccatggatccatacaagcaccgcccgtctagtgggagcaactccagcttctggaccaccaactccggcgcccccgtctggaacaacaactctgccctcaccgtcggacagcgaggtccaatcctccttgaggattatcatctaatcgaaaagcttgctcagttcgacagagaacgtatccctgaacgtgttgtgcatgcacggggagccagtgccaagggtttctttgaggtcactcatgatgtctctcaccttacatgtgctgattttctccgtgctcctggggtccagacacctgttattgtccgtttctctacagttgtgcatgagcgtggaagccctgagaccttgagggatccacgtggttttgctgtcaagttctacaccagagagggtaactttgacctcgtgggtaacaacatgcctgtgtttttcatacgagatgggatgaaattccctgacatggtccacgctttcaagccgaatccaaagaccaatttgcaggagaactggagaatagtagatttcttctctcaccacccagagagcctacacatgttcaccttcctctttgacgatgttggcatcccactatacctacaccttgatcaacagggatggaaagcctcaccttgtgaaattccattggaagcctacttgtggtgtgaaatgcttgctcgacaatgaagctgtgactgttggaggcacctgccacagccatgcgacgaaggatctatatgattccatcgcagctgggaattaccctgaatggaagctctacatccagactattgatcttgaccatgaggataagtttgactttgacccgctcgatgtcaccaagacctggcctgaggatatcatcccgctgcagcccgttggacggatggtcctgaacaagaacgtcgacaacttctttgcagagaatgaacagattgctttctgcccagcgattattgttcctggaattcactattctgatgataagctgctccagacgagaatcttctcctatgctgatacccagaggcaccgccttggtccaaactatctgatgcttcctgtgaatgcaccaaaatgtgcccaccacaataaccaccatgatgggttcatgaacttcatgcacagggacgaagaggtgaactacttcccttcgaggtttgatcccgcccgtcacgcggagaaggtccccattcctccccgtgttctaacaggctgtcgtgagaagtgcatcattcagaaggagaacaacttcaagcaggctggcgagagatatcgttccttcgaccctgcaaggcaagaccggttcatccagcgatgggttgacgcactgacagaccctcgcgtgacccatgaacaccgtaccatttggatctcctactggtcccagtgcgacgccgctcttggccagaagctggcttctaggctgaacctgaagccgagcatgtaagatcgacgaggaagaaagcaggcaccggtggccaaggatgcaacgcaacatggagcgtgtgatgtttacaccaatataattgaataaacaggggatgtgcgcgtcgttgtacttatgctgatgctgatggtcggtggtcgattatatatactggaacttctggtgtatgctcttctcttctggggagacgtaatgtaacgaagaagaatgtgtcattgtggcctgtggtacaaaccctgctgtgtatgggcctgtctataagaaacagcgatgagctgtgacgttatgtttctgacagtttatttactaatgagcacatctttaatttactagaacgaagagaagttgaggaactgtcggacagatgcagcaaggatgctcattaaataatagaatcactcttgtttgcattcatgaaaactgtactaagggagtgtttgtttgaggaatcactctatctaagataaggtggtgcattatgagt

SEQ ID NO: 122518 - DNA, 1652 bp, Zea mays
  Clone ID: MRT4577_4321C.1
cattgggtacctcgaggccggccgggaactactcgttgtccttttcccgaacgccgagccctagcgtctagcgacgagcggcggcagcggcaccgcgcgcagcgcagctgcagcctgcaggccgcaggggcagacggcagttgtcaggcagggcagccgccactgcagcctggagcgcgtcaacgcggccaggcggcggtcagggccgggcgtcaggcggcagcagtggagcacgcagcccagcagctctaagttctattcagattggtgttttgctggtaccatgtccagtccgtggagccctctgagtattgaggaagacgaagagatacaagagcttggtgctgacgagcagcaggttggtgagcagctgcggcaaggtgatgggcagcagcaggagttgacagctgaagcaagagcacaagagaccgtaaagaaacgtgcaagatcagtgtccagttcatctactaatccatcaaattctcgtaaatctgagggaaagataaaggttgaggaaagtgcaccaggagctgcaacaggagtgattttgtctcttcgtgaaagtttacaggactgtaaacaaagccttgcatcctgccaggtggaactggaagctgcaaaatcagaaatcgagaagtggcattcagcatttcagagcattccagctgtaccttctggtaccattccaaatcctgtttcagtggtgtcttacctcagtaccctgaagtcatcagagggatcattgaaggagcagctggagaaagcaaagaaaagggaggcagcttttatagtaacatttgcaaaacgagagcaggagattgcagaactgaagtctgcagttagagatttaaaaacacaattaaggccaccgtcaatgcagacaaggagattattgctggatccagcaattcatgaggaatttacacgcttaaaaaatcttgtggaggagaaagagaaaaaaataaaggagctacaggacaatgttgctgctgtcaatttcactccatccagcaaactgggaaaaatgctgatggctaaatgcagaacattgcaagaggaaaacgaagagattggggcgatggcatcggaaggaaaaatccatgagctcgggatgaaaatcgccgttctgaagtcgcagaacaacgagctccggaatcaattcgatgttttgtataaacacatggacggcgtgacgaatgacgtagagagatcaaacgaactggtggccatcctgcaagaggagctagaagccaaggagttagaggtgactagactgaaggaggagacgctttcccagaaggaaggcactccagaagcaccggcaccggcaccagctccggtggaagagggagacggagctggaaacgatctgaagccggcttcagatccgctgcaagtgaagctggaaagttaaggggagacggaggggtggaaacgatcagacggtagtgtgtttgagactcccgatgtgcgggaagtcatagcatattaggccaatcttaactagtagaaccgttcgatttttataatattttatgttcattttagttctatctatatagttacaatataaaacatgctctctatctctcatctaagatgtgtacgcacctgtgccgcagttgaagttctccgactgatctcgttgcctt

SEQ ID NO: 122519 - DNA, 435 bp, Zea mays
  Clone ID: MRT4577_43222C.1
aggagatgaggtggagcgtccaggagatgcggggcgtgcaggagacgctgcagaacaaggagctggcggtgctgtccatgagcctcttcttcgcgtgcctggcgctcttcaagctggcgtgcgaccgcgtgttctgcctcttcgccggcaagggcagggaggaacccgacgcggaggagcacacaaggagcagtagggcgtggatgctcgtgctcgccagcagcagcttcaccaccctcatcgtcctgctctacaactgaagctttctagagtttcgcttgctagcacggagcaacgttcttttagccatgttcttgtccccgcatagctcattaactcccctctcaagtagatggggtaacgtatgtactcactatttcagaataaagatgaacacaggttccttgttcattgtaaaacaacctggaataatcc

SEQ ID NO: 122520 - DNA, 2086 bp, Zea mays
  unsure (1)..(2086): unsure at all n locations
  Clone ID: MRT4577_43223C.1
cccagatcatgcctggcaagtcgtgacgatggactttatttctgggctgcctgtgtcccacaagtacaattcggacgcgtgggcggacgcgtggttggacgcgtgggcacatttcctagcactagctcatccgttcacagctttaaccgtagctaagctttatctgtcagacatatataagttgcatggactgccatcgtcgattgtgtctgatcgggatcccatattcactagcaagttatggcaagaactgttcagattggctgggacaaagctgtgcatgagtagtgcctatcatccacagtctgatggtcagacagaaagggttaatcagtgtttggaagcttatctgagatgcttcgttcattcttgccccaaacagtggtattcttggctctcgctggctgaattttggtataacacttgctatcataccgctctgggtaaatctcctttcgaagtgttatacggtcatgctccttctcagcttggattagacaccgttgatcagtgttcggttcctgatttacaaacttggttgcttggtcaccaacagatgctacagcaagtaaagttccatcttcagcgtgctcaggacagaatgaagaaacaggctgataagggtcgagtggaacgtacttatactgtgggcgatcaagtttttctgaaacttcagcccttctgtcaacgatcagtggctgacagaccagtttctaaactggcatttcggttttttggtccctttgaggtgattgagcagatcaatcctgtggcctatgaactagcgttaccatctgggagtgctatccacccggtctttcatgtatcgcagttaaaatcggccaacggcgtgcgggttcctagcactgactctcttccagatatctttactgggttgcaggtgccggaggaagttctggagtccaggcttcttcgtaaagggggtaaggtgatttcgcagttgctcattaagtggtccaattggccggtgtcactgtcaacctgggaggatgaagaggccattaagcagaaatttccacaagcaccagcttggggtcaagctgtcgttaaagaagggggaaatgtcagcagagcagatcacatggaccatgcagaggagcggactcaagcagtgcaacagaaggcacagacagagggagtcaaggaagacaatcagagcccgcgcagccgtcgtgtaccaaagccaaataccaagtacatcggtgcagagtggcgcgtataggtatacggagttatacgtattgatgagggcaggtgtgccggtataaataatattgtaatcgtttctaaactcagtctggaacatgttattgccgagtcggcaagaaaggaatagataccagagaaattcctggcgtgaaccacgggtgttgttcacactcgctgtccctgcctgactcttaaaaagggcggcgtgtcaccgcctggttactcacagtcatagattcacgccgcggaacgcggattccaagaacccaagtgaatcgcggctcctcgagtccggcggtgccgtccggagaggtagagctagactgctagagcacagccccgccatggtcgcaacatttttagagcacagccccgccatggcggccgcggcgcgcgcgatcatctgcgagctggcgccgcagaagctgtcgtcgacggcgtcggggcccgcggcgccgaagaagcgtgacgccgggacgaaggtggtgctgcagccccgcctctgcacgctccggtcgtacggcgccggcagcggcgtggtgacgcggaggattctggccggggaggaggacggcagcggggccgccgactcgggcggctccgcggcgttgccgttcttcgcctcgctcgctgactacatcgagagctcccgcaagagccaggacttcgagaccatctccggccgcctcgccatggtggcgttcgcggcggcgatgaccgtgcagacgacgacgggcagctccctgctcaagaagctggacaccatgaagatcgaggacgcggcggntatgtgcgtggcggtggtcgacagcgccgcggcgttcgcatgggcctccagcgcgcgcaataggatcgg

SEQ ID NO: 122521 - DNA, 295 bp, Zea mays
  Clone ID: MRT4577_43224C.1
gataccaagacatattacctgcgaaaataactgcatcggcatccatgagatactattgacgtcttggagagagtgttatctctgctccggatgctttaccgaactcagctataggtgtcgaggcctatgaaaagcgccctgggatcacctgctcagtggctaatgcttgaacggaccttcatggccgtggttggcgaacagtatccactgcccagattgactccttaatggatgtcggacggggcacaaatgtgaacgagctatccagcaaggagcttgactgcatatggatgct

SEQ ID NO: 122522 - DNA, 121 bp, Zea mays
  Clone ID: MRT4577_43225C.1
cttgtattctcaatactatttgggggtgtttttaaatggttagtgtggcccaaaacaaccgtcgggtagcatgggccggatcactaattaagggatctttcgttgaaccacaagggttact

SEQ ID NO: 122523 - DNA, 1514 bp, Zea mays
  Clone ID: MRT4577_43226C.1
gggggaacaagaatcaaatggctggtggtcttttttaaaccaagcaacctttttttcgttgtggggaatttccgggcttccttccaaggttcccttaggggccccaaaaaccgggttccctgtggtggtcttgttagggccaccttccaaaaaggccgggaagggcttcttttcttaagtgggctcacaaaaaaggtcctccccaggggcctcaccattgccctggtacccctgacccaattttttttttttttttttttttttttttttttttttttttttttttttttttttttttttttttttttataaagggttacttgtaatttctagtattgattctatgagcttccttctctttagcttgaaccagttactataaatacttgacagcttcatctacttactatatatacttgacactatatacgtgctgtctatgactatgagtctatctactaatactattattctccatctgcgtatacatatgtgcatatttgtttacatgtcatcggaccagtcctgcagctcgccctcggagaagagcgcctcgacgatgttgtcgatgagggagtcgacgaaggcgttgcaccccagcgtgaacatctggccgatcctgttgcgcgctctggacgcccacgcgaacgccgcggcgcaggcgaccaccgccacacacacccccgcggcctcctcgatctccatcgtgtccagcttcttgaacagcgagctgcccgtcgtcgtctccacggccactgccgccgcgaacgccaccatggcgaggcggccggagatggtctcgaagtcctggctcttgcgggagctctcgatgtagttggcgagcgaggcgaagaacggtgacgccgaggacccgcccgagtcggcggccccgctcccgtcctcctccccggtcagaatcctccgcgtcacaacgccgctgccggcgccgtacgaccgcagcgtgcagagacggggctggagcaccacctttgtcccggcgtcacgtttcttcggcgccgtcgacgacaccttctgcggcgccagctcgcagatgatcgcgcgcgccgcggccgccatggctggcggggctagctgtgctctagtctaggctctatctctctggacggcaccgctggacttgaacgagttgggttccccacgcgtccggcaaaaaacaacttacaagggcaatccacgccgtcttcagtgccgccaccatgttcctgcttggggggacatcaccaaatgatagcatcttgagttggctctcctgcaggcgatcttcggagagtatataattctggggaatggtgtgtgccttgtcgaggcatgtgtcggagtgttttactgggaccgtaatcttccatgaaaaaaatgatataagccttcggtatgtaatcctgagttttcggtgtaattcaaaacgctggtcttgtgacaacatgtcgctagttttggctagcgacttttttgatcatggcttcaaaaacaaaacgaagggagtatattcatac

SEQ ID NO: 122524 - DNA, 4228 bp, Zea mays
  Clone ID: MRT4577_43227C.1
gaacgccccctgcaagcacgtgcgtggcagcgccagcaacgcgacgttgaaattttctaggtccgccactgggactcagggagggccggaggagtagagcagagcggaggccagaccagaggcgggtttcatctacttactatatatacactgtatatacgtgctctctatctacaaatactattattctctatatgcgtatacatatgtgcatatttgtttatatgtcatcggaccagtcctgcagctcgccctcggagaagagcgcctcgacgatgttgtcgatgagggagtcgacgaaggcgttgcaccccagcgtgaacatctggccgatcctgttgcgcgctctggacgcccacgcgaacgccgcggcgcaggcgaccaccgccacacacacccccgcggcctcctcgatctccaccgtgtccagcttcttgaacagcgagctgcccgtcgtcgtctccacggccactgccgccgcgaacgccaccatggcgaggcggccggagatggtctcgaagtcctggctcttgcgggagctctcgatgtagttggcgagcgaggcgaagaacggtgacgccgaggagccgcccgagtcggcggccccgctcccgtcctcctccccggccagaatcctccgcgtcacaacgccgctgccggcgccgtacgaccgcagcgtgcagagccggggctggagcaccaccttcgtcccggcgtcacgtttcttcggcgctgtcgacgacaccttctgcggcgccagctcgcagaggatcgcgcgcgccgcggcggccatggctggcggggctagctgtgctctaggctctatctctctggagtctggagtctggagtctggacggcaccgctggacttgaacgagttgggttccgaaaaggaggccgggccggccgcgcacggcaaccgggaccccggccgcagccggccggcgccaagaagaaaagcaagccggcgcggacggcggcggggagggacagggggcaagaggggaagaaagacgaacaacgaaagcccaaggaagaacgagtcggagagagagagcgagcgagcgagagtggtggtggtgtgtgcgcgagcgcaacagggagagggagagcgtatttcttcttcctcaccctcctcgaggaagagagagggcagctccggagccgcacgggcgcgagcgaggcaggcagtggctcctcccccctcctttcgatatcagctcatcgattcgtcctatcacacacatatcattaccgctcctcttcctctcctatgcttgtcctctaactcattggcagaagagaaaaaaaaagtccttgttgagttgttgtatcgggttctggtggtgactgttactggggtttccttgtccggttcttgattcgcgcaaggacagatttgccgtcctctcgggttccgccgtgcggtgctgaatcctccttccctgttcccttcccttaggtttggatcggggatagggatggaagtggacagaaagaagaatttgcagattggatccaaggggaaggaggttcagagcaagaatccgaggcgggaggagccgctggcatcgtcggaggtggacatggatgagccagacgctcctgagagcggtgacatgattgttgatggcaacaatggctgctccagagagagccccttgcagcccatggattccaagaattccaagggctgtgcggtcaagccaacatcggtgagctcagacttcggtgaggagctggacttggaccttggtggggagaagagtgagacgcagcaggagaggaagctctcaaggcaagaccgggttgagctttgccggtcgttccagcttgcagtgagctcccatgattgggagagcgccgaggggctggtaggaatggctgatgcacaagggctcaacgatgtgctgtgtgtggcagtggatgcgatttggttcttgagtgatagggatgagctgcttgctattgtggggttgatcaaaagggttgtgtctgagggcgcaaaagattttacccgtgctgcgctccggacatcattcctcgcatcgtgtgtatcagcatgtagggggcggtcgactagccttgctgatgcagtgagcttcatgggccagaaattgcatgaacgacttcaagaatcccaaggtgatgaggtattgaaagcagaagcaagtgcaaaggtgcacaggtttacagaatgggctctaaagtgtatcgggctgcattcacgtgttcgagagaacaggggcaaaggaaaccacgacactgtaattgaggttcagcttcagttgtctgctttcaagatatttcttgatcttgctgataatgagcttaccgggaaggattttacggaggcttttgatgctgcatgcttccctcttacactcttttcaaccaccttcgaccaaggatgggcatcaggaatatcagcagctgcagtacaaggccttttagagttgttggtagagggtggtgcagacaatgtgaaccaatgctttcttgaagctgcacgctatggcagcactgagctcgtgcggatcttacttcaggttgctcaaagaaacagcttggacattgatgtggacctagcccttggctttgccgcacactatgggaagatcgaaaccatgggatgcttggttgaagaaggtaatgctattggctttcttggccctttgatgcgtgctgctgaacgtgggtgcctccaagttgtggaatggtttgtcaaccacgggtgtcgagaaatggagctttgcctagcccttactgctgccacctctaatagccagattgcagttgctgcttatcttcttcctcttgtcccgcaacatgttcttgcccccctcagcattgagattatcaaggctgctggtgagaggactacgggttccctgcagggtgtggattttcttctccgctcggatttcctcaatgacccagctgccacatatgccgtggcagacagtattgcaagatgcaccgatgaagctgtggacgcaaagcttaggtctttcatgaatgagcactggagcgaggcagctttttgtgcgggattcgaatctgcacagcagcactttgttaatttcatgaggataatggaaaggggtgaatcaccaatccgcttaggggacctcccacttgagctggtgattgccatggcctacctgccgctctataaggaatgcatgaattccaatgggcgacttttgcctcaaaggcttagaggtcagcttgtggaggctgcaagcaggctcgaggaccggcaagtggaaagggatagccaaagcagagaactcttggccatcttggagcaccacataccacgattcatgatccaaacttgaaggtaagcgcaggcatccactctgaaccactgctgtcaatgcaagcaaaaaacaacttacaagggcaatccacgccgtcttcagtgccgccaccatgttcctgcttggggggacatcaccaaatgatagcatcttgagttggctctcctgcaggcgatcttcggagagtatataattctggggaatggtgtgtgccttgtcgaggcatgtgtcggagtgttttactgggaccgtaatcttccatgaaaaaaatgatataagccttcggtatgtaatcctgagttttcggtgtaattcaaaacgctggtcttgtgacaacatgtcgctagttttggctagcgacttttttgatcatggcttcaaaaacaaaacgaagggagtatattcatactgtgtggaggttgccttgatcgaaaaaaaaaacatggttctaatgaggtacaagtttgacttctttatgtgttgcacgcagagcacgatcggtttccgagcttgggtgaactgacgatcaagttttggtgaccccgagatcaagctcttcgagttctacaaggttgaagaccctgagcatctgtttggtgaagaccaaggatgggcatcaggaatatcagcacctgcagtacaagggcttttagagttgttggtagagggtggtgcagacaatgtgagccaatgctttcttgaagctacacgctatggaagcactgagcttgtgcggatcttacttcaggaatcatagtgtctatgcaccataagacgaaaaaggcgtggagacttctcagccatgagcagaatgggcagctattaacatttgcacccctatttgtacatcctccaaggatgctcttgcaaattgttaccattatataattcttgcagttgc

SEQ ID NO: 122525 - DNA, 549 bp, Zea mays
  Clone ID: MRT4577_43228C.1
accagaagaagcacgccgtggcggtggccgtggcgaccgcggcagcggccgactcggtggttgcctccgcgcacgccggctccgcggtggctctcctgtcctcccgcgccttgccgcgcttttcaccgtcgccgtgcctcttttatgacgcctcggccgtcatgatccaggccaccttcataggttatttggcgcgttcggctctgttcgcgctgtgggtcatcgtgaagctgcaagctctggtgcggtggcagctggttaggaggctgtccaactccacactccgctgcatgctggcgctcctggtggtgcattcccttctgttggcacagcgcatgctggccctccagctacacgaccacctccacccgacgccttctataccactccattcttcgcatcacccgaagcaccgacgctgctacgagatggtccggtcgtgcgaggacaacttccttatcgtggaagtggacgtggtctagcctttacagtggggctcggtggataatgacatttcttttattcccccttgtttggtcttccccggcg

SEQ ID NO: 122526 - DNA, 192 bp, Zea mays
  Clone ID: MRT4577_43229C.1
atttttttttttttttttttttttttttttttttttgacaaaagggcaatgccataccactaacataacatcaaaatcaggcaaatctgcagcactttcttccttttcttagggggaagggtagcaggggccagccaagggccattgggacctccaccacaggaatgggtcgccacttctgctgggagcttc

SEQ ID NO: 122527 - DNA, 336 bp, Zea mays
  Clone ID: MRT4577_4322C.1
caaaaacaatggggttggggccaatcccaaccccaacccaaaaattttcccagcgggggaacaagggggccaaataaaaggcttaacagcccccctaccaggggggcaaaaggggccaaattggggggacccaatggaaggatttggttccggcaaaacgggtcccccaaaaaaagggcaaaaaggggggttaaaaaaccacagggtttcgggcaggaaacccacgaaaaaaaggggggagggggccaacccaaagggggctaaaatggccctgaaccggggccaagggaaaaaactttgggggaaccccaactggaccaaacccccggttgggga

SEQ ID NO: 122528 - DNA, 376 bp, Zea mays
  Clone ID: MRT4577_43230C.1
agttctccaagttactattagctagctatagctcgaaacagctgaactgatgatgacgatggtaacctccgtcgtgtgtgctaagcatgtagcgtgctaggagatgatatattaaatataatcgagtagtagagccacccgctgtgtgacgctaaatttgtgtgcatggtttggtttgtgagttgggcccgtgcgtggctgtgtcatgtcgtggttaattagctatactagtcctgtctgtacatgcatggacatacctgatctctcggccattggtgtcggcgacgtgccattcggctaacaagacgacagctgcagcctgcagcaaaagctagaacattctacacatgcccccgtgtatgttatgctttgtagt

SEQ ID NO: 122529 - DNA, 2678 bp, Zea mays
  Clone ID: MRT4577_43231C.1
ccggggtctcctcagtaactgcacccacctccacacctacacccgagaggcggcggcggcagacacagacaccgtctctctcctccctttgtcgtcgtgtctctctgcatggaagcctccgccggctcgtcgccaccgcactcccaagagaacccgccggagcacggtggcgacatgggaggggcccccgcggaggagatcgaaggggaggcggcggatgacttcatgttcgctgaagacacgttcccctccctcccggacttcccttgcctttcgtcgccgtccagctccaccttctcgtccaactcctcgtcaaactcctccagcgcctacaccaacacggcaggaagagccggcggcgagccctccgagcctgcttcggccggagaagggtttgatgcgctcgatgacatcgaccagctcctcgacttcgcgtcgctttccatgccgtgggactccgagccgttcccgggggttagcatgatgctagagaacgccatgtcggcgccgccgcagccggtgggcgacggcatgagtgaagagaaagccgtgccggaagggaccacagggggagaggaggcctgcatggatgcgtcggagggggaggagctgccgcggttcttcatggagtggctcacgagcaaccgcgaaaacatctcggccgaggatctccgcgggatccgcctccgccgctccaccatcgaggccgccgccgcccggctcggcggcgggcgccagggcaccatgcagctgctcaagctcatcctcacctgggtgcagaaccaccacctccagaggaagcgcccgcgcgacgtgatggaggaggaggcgggcctgcacgtccagctccccagcccggtcgccaacccaccaggatacgagttccccgccggcggacaggacatggccgcgggcggcggcacatcttggatgccccaccagcaggcattcacgccgcctgctgcgtacggcggcgacgcggtgtacccgagcgcggcaggccaacagtactctttccaccagggccccagcacgagcagcgtggtcgtgaacagccaaccgttctccccgccgcctgtgggcgacatgcacggcgcgaacatggcctggccgcagcagtacgtgccgttcccaccgcctggggcttccacgggctcttaccctatgccgcagccgttctcccccggattcggcgggcagtacgccggcgccggcgctggccacctctcagtggccccccagcgcatggcaggcgtggaggcctcggcgaccaaggaggcccgcaagaagcgcatggcgagacagcggcgcctgtcctgcctgcagcagcagcgcagccagcagctgagcctgggccagatccagacctccgtccacctgcaggagccgtcccctcggtccacgcactccggcccggtcacgccgtcagcaggcggctggggattctggtcgccgagcagccagcagcaggtccagaacccgctctccaagtccaattcctcaagggcgccgccttcctcgctggaagcggcggcggcggctccacagacaaagcccgcgcctgctggtgctcggcaggacgacattcaccaccgcctcgcagcggcttcagataagcggcagggcgccaaggcggacaagaacctgcggttcctgctgcagaaggtgctgaagcagagcgacgtcgggagcctcggccgcatcgtgctccccaaaaaggaagcggaggttcacctgccggagctgaagacgagggatggcatctccatccccatggaggacatcggaacgtcgcgcgtgtggaacatgcggtacaggttttggcccaacaacaagagcagaatgtatctgctggagaacacaggggaatttgttcgttccaacgagcttcaggagggggatttcatagtgatctactccgatgtcaagtcgggcaaatatctgatacggggcgtgaaggtaaggcccccgccggcgcaagagcaaggcagtggttccagcgggggaggcaagcacaggcccctctgtccagcaggtccagggagagccgcagccgccggtgctcctgaagacgccgtcgtcgacggggtcagcggcgcctgcaaggggaggtctccggaaggcgtgcggcgggttcggcagcagggagccggcgccatgagccagatggcggtgagcatctgaaagagcagcagactccgccatatattgatcgatcgaccaatcgatcgttagttctccaagttactattagctagctatagctcgaaacagctgaactgatgatgacgatggtaacctccgtcgtgtgtgctaagcatgtagcgtgctaggagatgatatattaaatataatcgagtagtagagccacccgctgtgtgacgctaaatttgtgtgcatttggtttggtttgtgagttgggcccgtgcgtggctgtgtcatgtcgtggttaattagctatactagtcctgtctgtacatgcatggacatccctgtttcggcccttgggtggggggggcccttcggctaccaaggccagctgcggcctgccgcaaaagctagacccttttcccccgcttaaaaaaaaaaaaaaaaaaaaaaaaaaaaaaaaaagggcggccgccgactagtgagctcgtcgacccgggaattaattccggaccggtacctgcaggcgg

SEQ ID NO: 122530 - DNA, 506 bp, Zea mays
  Clone ID: MRT4577_43232C.1
cgggggcaccggcccaagaaaaaggaccacacaaaaaggaggcccgaaaaaccccgggcccgacggaacaaagggcggaaaaacccgggggggaaagccgaacaacagcgagggaaaaggaccaaccgcacccccaacggggaatacaacacagcacgaaccggagggcaaacaggaggcggcaagaggaaccagaccccccccggccaaagaaccacggaccgcacccaaacccaggggcccccagccccgaacccaagaaaaaggccccccccccccggccggggcagggacaaaccccggcccaaacggggcacgggtttgggccccgccgcggggggcccccccccgcgcccgcggcccaaggggggggccgccccggggggccaccgcccccggccccccccgggggggccccccggggcccccccccggggccggcgggggggccccccccggccggccgcggggcggggggcgcgcccgggccggcggccgcggggggc

SEQ ID NO: 122531 - DNA, 879 bp, Zea mays
  Clone ID: MRT4577_43233C.1
ccctcgaggccggccgggcacgagaaaagccaacgtgatcagagagggatatatagctagctagctagcatagcatggcgcttgtagccgacgacgacgccgagctcaaggccaaggccaaggccaaggccgaggtctactacggcgacgaggcctgtcagctgtgcgcgcagctcctgctgagggaagcaggcctccccaacggcctgctgccgctggaggacctgacggagtgcggctacgtccaggagaccgggtacgtgtggctgaagcagggcaggagggtcgaccacgtcttccggagcctcggacgcctcgtctcctacggcgccgagatcaccgggtacgccgagaagggccggatcaggaaggtgaaggggataaagaccagggagctcatgctgtgggtgcccgtcgaggagatcgccgctcttggcgacccggcggctggcgggaagcttgtctgcaagagcgttgctgggatcaccaggaccttccctgcgtctgccttccatgtccctgagaaggcggcggcggcggaggaggtgaaggtggactgtgccagggcgccgcccgccacaccggtgctcgtcctcatggacagatcaggagctccaccagttgttaagaacaactgatgcttgcgtgcttacgaacgaaagcgaaccatgcatgaccccccaaccaagttcatttcatcctttcatgcatgtactatgtatgtagctctacatatatatatattgctactactatcaagcatgtatgtcgccgttgtggagacacatctattgatctatacatgagcttgtggaagcagataggtctgcattaataaaaaaaaaaaaaaaaaaaaaaaaaaaaaaaaaaaaatcaaat

SEQ ID NO: 122532 - DNA, 362 bp, Zea mays
  Clone ID: MRT4577_43234C.1
ctcaagcttgcgttcactccatctctctgggacgactacgggcagggccggctactcccccacgtacgccaggcgccgtggccttctttggccttttggccggtgacgagaacctaccatactgggagctagcctctgagcatgtcgcggtccgcaatggacaatgatgctggtgttttcacggtgctgttgctgctcatgcagctggacggtctcgaagtgagcaatcacctatacgcactgtattagtctatgttcttgctcaagggagaaggttagctgacactgcaccccaccgtttcccttacatatacagatagatcacgagcacggcagatctgatctctgtgcacaccttagcg

SEQ ID NO: 122533 - DNA, 252 bp, Zea mays
  Clone ID: MRT4577_43235C.1
gccgaggccttcgccggctaagagcgccgtccggtacgagatcgaggtagacggccatgttctgatgcgcccggcttgccctacgccgagctgcctctcttgtggcgggcctctgccgcgccgcgagaagatcccttttcgcgaaagtttctacatgggcagctcctcccacgttcctttgcctgtgatgcatgtggtcacaacaggggtttcccaccttctgagtgtggagttggtgctgatacggatcca

SEQ ID NO: 122534 - DNA, 327 bp, Zea mays
  Clone ID: MRT4577_43236C.1
ttgtttggtgcctggtttgtgctcgacagcaggactaatccataccccatgtagacggatgccacgaggactgcaagggggaatgcccctgagcccgcttgatcgtcggagatcaaatccgcgccaagggcactgacgaactgattgctatggctacgacccagagtcgattggcctgtatacttggctagaagagaggaagacacatactgccaacatgtatgatacatgaaccatacggcggcgtataactattcggatgaagcagtcgacacctacctatacttacgctgccacacgatgctccgaattgcatgacacctctgc

SEQ ID NO: 122535 - DNA, 1854 bp, Zea mays
  Clone ID: MRT4577_43237C.1
aacttccaagaggaggggacaccgccgctccactctctgcagctcagcagcagcagcagcagcatctctgagagagcccagagagtaggcaactaggcatggagatcgagacggaagctccgggtagcgagaaggcgaggagctggagagctaatgcggcggcggcgcagcaagtctctaacacgacgaagcctgacggcggtgaccagccgatgaaggagcctgcatggaagaggttcctggctcatgttgggccagggtttatggtgtcattggcatacctggatcctggcaacttggagacggacctgcaagcaggagcgaaccaccgatacgagctcctctgggtgatcctcattggcctcatcttcgcgctcgtcatccagtcgctagctgctaatctcggagtggtgacagggaggcatctcgccgagatatgcaagagcgagtaccccaagttcgtgaggatttgcctgtggatcctcgcggaggtcgcggtgatcgccgccgatatcccggaagttatagggacagccttcgctttcaacctcttgttccacatccccgtgtgggtgggggtcctcatcaccggctccagcactcttctgctcctgggcctacagagatacggggtgcggaagctggagttcctgatctcgatgctggtgttcgtcatggcggcgtgcttcttcggggagctgagcttcgtgaagccgccggcggtggacgtggtcaaggggctcttcatccccaggctcaagggcgacggcgccaccgcggacgccattgcgctcctcggagctctcgtcatgccgcacaacctgttcctgcactccgcgctggtgctgtcgaggaagacgccgtcgtcggtgagggggatcaaggacgcgtgccggttcttcctctacgagagcggcttcgcgctgttcgtggcgctgctcatcaacatcgccgtcatctccgtctccggcaccgtctgcttctccggcaacctgtcgccggaggacgccgacaagtgcagcgacctctcgctcgactcttcctccttcctcctcaagaacgtgctgggcaggtcgagttcgatcgtgtacggcgtggcgctcttggcgtctgggcagagctccaccataacaggcacctactccggccagtacatcatgcagggttttctagacatcaggatgaagaagtggctgaggaacctgatgacacgctgcatcgccatcgcgcccagcctagtcgtctccatcatcggcggctccagtggcgccggccgtctcatcatcatcgcttcgatgatcctgtccttcgagctgccgttcgctctcatcccgctcctcaagttcagcagcagcagtagcaagatggggccccacaagaactccatctatatcatggtgttctcgtggctgctggggctgatgatcatcggcatcaacatgtacttcctgagcaccagcttcgtggggtggctcgtccacaactcgctccccaagtacgccaacgtgctcgtcggcctgctcgtcttccccctcatgctcgtctacgtcgtcgccgtcatctacctcaccttcaggaaggacaccgtcgtcaccttcgtcgccgactccgcccagctggccgtggtcgacgccgagaaggccaacaaggcgacggccgccggcgacgacgatgaccggcccgtgccgttccggcaggacctggcggacatccctctgccggagtagcgtagcgctacagattaattaaacactctccctgtcttcttcaagtataaaaatatatacacatatagcctttttttcttgaagttaatctttcgggggcgaaaaaaaaaaaaaaaaaaggccccta

SEQ ID NO: 122536 - DNA, 483 bp, Zea mays
  Clone ID: MRT4577_43238C.1
aaagcttaaacgcccttccattttttttaaaacgatcaaataaacgggggtccgccccaaagttgcatagcccaaaaaccttagccgttttcacattggaatcaacgatcttggggaaccaagaagaggggctttgggcattcccaaacacatggggctctaaaagacaggcggactaacggggggctaaacctaggaaacaagacgggggcgaaggccttttttccagggggcagcttaagttgtcatcgtcatcgacgggggaagccttggacaacccaccctttttggggaggaggggctgggggatgttgggcataacccccccgctcgcgatgggggcaccaccaagcagctgggtcagctcctcgtcgttgcccacggggagctggatgtgacccggcacaatgcgggtctttttgttatccctcgctgggttcccagcaagctccaggacctgttgaagcatcgcataaaaacaaa

SEQ ID NO: 122537 - DNA, 244 bp, Zea mays
  Clone ID: MRT4577_43239C.1
cacttttccgctccccacgttgaaccttgatcctcgtgctcccttcttgatctatctccgaggatccccttgtaggagagcctgccccggtgctcgctcgcacggacatgcttgttccggcctagaaggcagaaaaagggagatggggcatggcttcggacacaaggacccgggcaccacaagaagcaggatctagactctccaccaaggctaatgccgccaacgggaagggtggcggcggcgg

SEQ ID NO: 122538 - DNA, 1023 bp, Zea mays
  Clone ID: MRT4577_4323C.1
aaagcatataagcaacgaggttagttaggctgtttggttggtagcagaagcgatgtggcgcatgtaggtttcgtgtaccctttttacagatgctatttctgttctatcacaaaagaggggactgccacaacaccaaaggggagaagaacatgtgcgtggtcggagccatcaacaactacacggcggcgctgaaagactcatcaagtccttttgatccgacggagagcttgatgttcctggcgcacttcgtcggcgacgtccaccagcctctccactgcggccacaccgacgacctcggcggcagcaccatcgtcgtccactggtaccgaaggaagaccaacctgcaccacgtatgggacgtgaacgtcatcgagacggccatgaaggacttctacggcaacgaccagagcaccatgatacaggccatccagcagaacattacggaggaatgggctgatgaggagaagaagtgggaggcctgccgtagccggacaaagacctgcgctgacaagtacgctgcagagagcgcgaagctggcctgcacggcgtacgagggtgtcgaccaagactccaccttggaagatgactacttcttcgccgcgctgccggtggttcagaagaggatcgcccaaggaggcgtcaggctggccgcgatcctcaacaggatatttggtgggaacagcagatcaggcttcagagcagttgattgatcgatccatatccataccagtagtagatatcaaacgattggacatgtggaggagtgggtggggaggggcaggcatgatctgccatctgaattagaataataagaggtatcttgttgccgtctggcaatattgtaacttcagtgccactagctcacgaattttattatttcagaatcgaagcacttgtacgtactgtgcgatagaatagatgacgcggtcacacattggtattcgtatatgttcgcgtatctttcagatcgacgtgatgagaaatgtcttagaaagaaatttgaaggattcccattcatctgcc

SEQ ID NO: 122539 - DNA, 114 bp, Zea mays
  Clone ID: MRT4577_43240C.1
gccttggtttttttgaaatttctcatctgaatacttattgctaacattcatctttgcaacatatacagacaagaacattggtctagacactatagttgattgccgaccgtggtc

SEQ ID NO: 122540 - DNA, 395 bp, Zea mays
  Clone ID: MRT4577_43241C.1
cccacgcgtccgcccacgctttttacttcttaagtgccaagtttttcgtgttccatatgcttattatagaacaaatatcaaggagtacggacaagaagaaatttttagctcttttaggcttcaaggtccttggacttgaaacatacaccgaacgctggtcatgaatacaagcaaggtaatcatgatacgagcccattatgctgtgaatagtacactatcaaatccggtcagaattcaaatatgtctacattttgaattaaagagctcgaaaagggatttgttacttattatcaaataactgcaatcagaacgtgcttgacacataggtacggttctcaaaaaggtcatcatgtgtacagccttggttggtactttgtcgaatgtttacattacac

SEQ ID NO: 122541 - DNA, 209 bp, Zea mays
  Clone ID: MRT4577_43242C.1
gtgaaacaggatacactggacaagtcactaaccctttagccgtatgctctgagagggatcttactgattactttccctactttgctactctcgatgatatcgaacgtttccttatcatagcgatacggtgccactgcctatatcacatggacggaacactgcgccttggaaactgcagtatagttcacgtcctgctactctcagatgct

SEQ ID NO: 122542 - DNA, 416 bp, Zea mays
  Clone ID: MRT4577_43243C.1
cggacgcatgctcagactctttcgcattcgcgtgggtttatcaacctcggggctacaggaaccgtcactcctatcacaccaggctcctttcgtgcatgcgcaggcacaaaacatctacgcacaacaactacaacaacttgctctatgaaaccttgctgtctactctaagcagctgcactttcttgcattcaaccaacttgctgcataggactctgctgcttacttgcaacaacaactaccattcactcacatagctgctgcctaccggcaccaattcgttccattcaaccaactgacaccattgaactctgctgctcatttacaacagcaacagctaccaccattcacccagctagctgatctgagccctgttgcctacttgacacagcaacagttgatgccgatctacctgcacg

SEQ ID NO: 122543 - DNA, 310 bp, Zea mays
  Clone ID: MRT4577_43244C.1
aaaacacaaggcagaggtcacaacgctcacatattgcttttcattcacaggcaacacacacgggaacgctactcaatgttcgaagcttcacaccataacatgcgcatatgcacccacaatcgtacttggatcgcgggggcttgaccttggaatccattacgggagcctggcactgtaccagatttgaactattggaccatactaaaactaggcgaagttataacaaaaggtgccttctgtgctaaagctcgattctgtcacatttcaatgcttcttaagaatgtgcaatgatccagtgtgccgactcctt

SEQ ID NO: 122544 - DNA, 180 bp, Zea mays
  Clone ID: MRT4577_43245C.1
acgatcgcggtcaatactgcaggggcgcgaccatttggatttgttcgtgaccatatatgaaactggattcgctcacgtgaagacagtaacggcaaccatatgctaaatagactagcgagactagtcttggttcttctacagatcctcattcgaggcaggatcatggatgtgcacgatctc

SEQ ID NO: 122545 - DNA, 619 bp, Zea mays
  Clone ID: MRT4577_43246C.1
agccggccgggccggaatactttgacgacgcgtgggtggagcagacctggtgggcggacaactgcgactgcgtcgttgtccagcacgagcatccctcgcgcgacgtcgactacgacgatgaagatctggctgcgcccgtaaccccatgccaatccaaggacgacgagcaccaacgggaccaggcgagcggcgaccacgggacgactgcaagcctccccctctttctcgcctccactcgcccgacaccccccaacggcgagggagtgagagatcgacaacatctcagggcctggcagggcaactacattgcgttatggcggccatgaccgatctgtacgacgaggataagggctcattgctaaagagccagcagttgcgccctggcctccgcctcaagcccgccattgagatgtttaattattagatcttcatgcttattttgattatacactaccttggttaattttcgatcatctccatgggtacattttttcttagttgcttaaactagcactatttcgcacaaattgtattagtacaagatttgatgtaaaattctaggcaaaaatgtatacctgcaagggtggcaaaaaaaaaaaaaaaaaaggcccctagggcc

SEQ ID NO: 122546 - DNA, 247 bp, Zea mays
  unsure (1)..(247): unsure at all n locations
  Clone ID: MRT4577_43247C.1
ccacgccgcccgcaccgacgccagggaggaacccnaaccagagcacaggcccacggggacgacggcggacggcgagagcgccaccggcgacaggcgcccccccacggaccccacaccccagcacggcgacggccagccgcaacagaaggaaaaacaacccccagacccagagagcaggggagagggcccggccaccgaagaggaacagaggccccggccacgaacgagcagaggcggcggagccggc

SEQ ID NO: 122547 - DNA, 496 bp, Zea mays
  Clone ID: MRT4577_43248C.1
ccaccacgctttttaccgggcaccggcaggggggcggggggagcgcccaacaacgcccccaaccaggggctcagctacggcctcgccaacaaccctgcatacaagcaggccacgctgcgaagaccaacacgacccagaagagccaacccacaaacgccaatgaaacgaggcaccagcaatctcaacaatgggggggggcgccatggccatgaaagaccacttcaagcaccgaacctaagccccaaagccgactcaaccagacgaatgtagctatgagtatgctcaaccactcgcccggcaactattcatgaaacgacaaggaaaggaaactcaccacgtccatcaacgaacggaaccgccagataaactcaaacgggacttagaacaagagaccgacgggaagacacacagcactttctgctgacccttgttcataaatacataaatctcgagctctacggaaatagcaaaaccacctcagtcaactaccgagatt

SEQ ID NO: 122548 - DNA, 172 bp, Zea mays
  Clone ID: MRT4577_43249C.1
ggtacaacagtggcgcccatggctgtgtcgtattgggctcttcttttcgggggtgccatacacaccggccggtgggacgcctgccggaccaagctccgtggctcggtgggccgatccaccgcgcacagggccggaacgcgggtgctgtcgcggcgttgcacctgtggcctgc

SEQ ID NO: 122549 - DNA, 1375 bp, Zea mays
  Clone ID: MRT4577_4324C.1
ctcgaggccggccgggaaaaaaaaaaaaaagaggaacagagcagtagcatcaagagaccaagctggtggttgaggttagaagaggagctagagcgagagagtcccatcgcaacacacaaaaggaagaggaagaggaagaggaaggcgagaacgatgggcttgctcctgctgctccacgtcctcctcgtcgcggcggcggcgacagctcctgcggccgacgcatggggcaaggaggggcactacatggtgtgcaagatcgctgaggtaatagccgagagctttctgacgaaagaggcctcgacggcggtgaaggagctgctgccggggtgggccggcggcgagctcgcggagacgtgctcttgggcggacacgcagaggttccggtaccgctggtccagcccgctgcacttcgccgacacgccaggggactgcgagttcgactacgcccgggactgccacaacaccaaaggggagaagaacatgtgcgtggtcggagccatcaacaactacacggcggcgctgaaagactcatcaagtccatttgatccgacggagagcttgatgttcctggcgcacttcgtcggcgacgtccaccagcctctccactgcggccacaccgacgacctcggcggcaacaccatcgtcgtccactggtaccgaaggaagaccaacctgcaccacgtctgggacgtgaacgtcatcgagacggccatgaaggacttctacggcaacgatcagagcaccatgatacaggccatccagcagaacatcacggaggagtgggctgatgaggagaagaagtgggaggcctgccgtagccggacaaagacctgtgctgacaagtacgctgcagagagcgcgaagctggcctgcacggcgtacgagggtgtcgaccaagactccaccttggaagatgactacttcttcgccgcgctgccggtggttcagaagaggatcgcgcaagggggcgtcaggctggccgcgatcctcaacaggatatttggtgggaacagcagatcaggcttcagagcagttgattgatcgatccatatccataccagtagtagatatcaaacgattggacatgtggaggagtgggtggggaggggcagacgtgatctgccatctgaattagaataataagaggtatcttgttgccgtctggcaatattgtaacttcagtcttcagtaaccactagctcacgaattttattatttcagaatcgaagcacttgtacgtactgtgcaatagaatagatgacgcggtcacacattcgtattcatatatgttcgcgtatctttcagatcgacgtgatgagaaatgtcttagaaggatatttgaaggattcacattcatctgcaaaaaaaaaaaaaa

SEQ ID NO: 122550 - DNA, 368 bp, Zea mays
  Clone ID: MRT4577_43250C.1
agcaataaccatggttcgaaatcccatttgttcataatttcaacctttttaaaatgtgggagcgcacgacaacggtggaaatcatggacccatagaaattggttttttgtatagtagagatagagattagtcatcaccatgataaattcgaccaaatttgaagatgatttggtatttggcaacaacaacttttactactatttgagaaaccccaagtaaaattgaagctaaactacactaatgattattttaggcaaataaatcgagacaatgtatttcaatcataaattgaaggcaatagtagtgaatctaacctagaacattgttggagtcatgagcttcatcacattctataaaatttttaaaaa

SEQ ID NO: 122551 - DNA, 326 bp, Zea mays
  Clone ID: MRT4577_43252C.1
acgcgtccggaatataggagtcctcccagggtcgtccctccctagccagagctccgctgacgactcgaccgacagctggagggcggcggacagcctcgccggagagcggagctgctgccaagccgccaatcccatgggcgaggagagctctggcaagccaccggacaggagaacagaactcctccaacatgagccagagctaggtatggagtgctgactccttgacggacctatagaaatccttcagcgaagctgagtgaggcgccaccggagccaacacttgaccatcgcagggccgacatctgccatggacacatattggcaca

SEQ ID NO: 122552 - DNA, 253 bp, Zea mays
  Clone ID: MRT4577_43253C.1
tgcatgggcggaatgagtgtctcttgttccggcgatggccatcttggagttgcaataagagaccttctccacatttttcaggccctctggtccatcactgcagcctttctaccttttccaagtggatctcggatgttgttaagcatggtgacatcaggtgcatagtgtgtgctcgggcacgctaatggtcggaacggagggtgatgagtgcctacagcgtggatgatttcaccatgtaaatgctagccatgct

SEQ ID NO: 122553 - DNA, 309 bp, Zea mays
  Clone ID: MRT4577_43254C.1
tgtgcccaatggccggcgccaacttccgggtgtgggggcgcttttttagggccatctcccacctggaggctttcgctctatgcgctgacgagcttaagttcggggcggggcagttccggcgcctgcacagtaagcagctgtagcatacctttcgcttatactcgcattaatggcgcacctgggccttctgcttcatacaggccgcatggaggaggtacctcaagcggaaggctgccaagcactgtcgccggcaggaggagatggaagccaactcgatcggggttttcccgagcaggttcatgaccactc

SEQ ID NO: 122554 - DNA, 323 bp, Zea mays
  unsure (1)..(323): unsure at all n locations
  Clone ID: MRT4577_43255C.1
cgtcacgcgcaaacganactcaggaatctgggatcgagaacgagcccacgccctttcgggcggtccagggtgaccgaaggtcgtgatctggtgtggtgagggcggtgggccccgccatgccccggtattatgaggacaagccgaagggcggcgcgtgtgcgggcgtgaaggaggatctgggtgcatgtctgctgcagtcggcctgtgtgctccaggaaggaaagtccccacggcagtgcttgaaggaaggcaactgtagagctttgcagtactcgttttttgagtgtaagagatcaatgttggatgccagatcaagattcaga

SEQ ID NO: 122555 - DNA, 306 bp, Zea mays
  Clone ID: MRT4577_43256C.1
gactatggaccactcgaacgctttaagggccatgtaaactgtaatggtatgaacgtaggtagagattccagggatcacaagccttcacacaactgacatgagaactgttacgagcctgcatacgctgagtcagaactctatgtgacacgtgttctatatgatatgaaccgaaaggaggaaatgtctctgaggaaggcgtaccactaaacggatcagaccctgaaagacaatcacaacactcatgagaagttggcgcataaagttgatactatgacacaagctctggagtcacatgccaataaatct

SEQ ID NO: 122556 - DNA, 244 bp, Zea mays
  unsure (1)..(244): unsure at all n locations
  Clone ID: MRT4577_43257C.1
ttgtcaagtatgcccatgatgaggaagcagcctatgaccacgaagagtctgggggggaggagctccattgtaacctttccaccctggggagagcaatgattgactatcatgaggatcgagaccaacacctagccgacacctcaccttgagcactctcgccaacgagcaccacaagataggcatcaagtctgtaagagctctacaaccatggggggggggggatngaattatctaaccgcggaga

SEQ ID NO: 122557 - DNA, 284 bp, Zea mays
  Clone ID: MRT4577_43258C.1
ggggaccacaaactgttaaactttactggagggaagcccatctgagtttgtatttttgcccgtagtcccctgcaaagtccaaaaccttggatcccccggggggccccgaaagcccacaaagcaggggggggggttccctaataagctgtccaatactaggttttattacatgcagtattaacaggggccttccccttttttaccagggaaacccatggttgttgcacaaccttttttgggtggttaccctaggaaaaacacaccccccccccacattttttttt

SEQ ID NO: 122558 - DNA, 1213 bp, Zea mays
  Clone ID: MRT4577_43259C.1
ccggccgggcaatcacctgcttggccgcgcggaggggagggtttccccctttgacacagctgagctcccctccatcagcagccagctcctcgtcgcaaagcatcgcggactacacggcggacgcggagtggctggtgacgcggccccccgacgcggcgttcgactacgtggagggcttcgcgttcgtgaacagcgacgaccccgtgaacggctggccgtccgtgcccatccccggcggcgcccgcttcgacccgtccctcctccccgccggcgccggccccgtcctctactgcctggaggtggccctgtaccagtacgcgcaccggcccgacgacgacgacgaggaggaccaggcggcggtgaccgtgagccggatgatggcgccgctcaagcacgtgcggggcctggagttcgcggcggacgtcgggtacgtggacttcctgtcccgcgtgaaccgggtggaggaggaggcccggcgcaacggcagctgggacgcgccgcacccgtggctcaacctcttcgtctccgcgcgcgacatcgccgacttcgaccgcgccgtcatcaagggcatgctcgccgacggcatcgacgggcccatgctcgtctaccctatgctcaagagcaagtgggaccccaacacgtcggtggcgctgccggagggcgaggtcttctacctggtggcgctgctgcggttctgccggagcggcgggccggcggtggacgagctggtggcgcagaacggcgccatcctccgcgcctgccgcgccaacggctacgactacaaggcctacttcccgagctaccgcggcgaggccgactgggcgcgccacttcggcgccgccaggtggaggcgcttcgtggaccgcaagggcccggtacgacccgctggcgatcctcgcgccgggccagaagatcttccctcgggtcccggcgtccgtcgccgtgtagagcaaggggggaggaccagccagctgccagccaagacaggaggaggaggaggggaggctgatggatcgccgctgctgttgccggtaatgatggcgattacgctgctgatcctggtgatgatgatggacgatcgaggaagccgcagggccgggcaatgatggcgatagggccaccgttaggtgtgcatccgggggcacaaattaaagggattgctgtgtggagatctgcacgagtttttgctccatgcatgcttgccgttcgtgtc

SEQ ID NO: 122559 - DNA, 305 bp, Zea mays
  Clone ID: MRT4577_4325C.1
tcccacgcttcctcttactcttggtaaaatttattttaaaaaaaaaaaaaaaaaaaaaaaaagaaaaatttaaaaaagtagggagacaaaaaaaacaaaaaaaacgggcccccccctctaaataatccaaccttactaacccttccattcaacatattaccttctctatattttcaccaaaattcaattcactacccctctttttacaacatcttaactgtataaaccctgtcttacccaaacttaatcccctttaataacaaccccctttcaccagcttgcttattaacaaatagccccacacc

SEQ ID NO: 122560 - DNA, 131 bp, Zea mays
  Clone ID: MRT4577_43260C.1
cccacgcaaccgcccactcgtccgggggtgcgcgacgttctgggtccgtttactattaagaacaaactagggccacaccatatcgacagaaccttttccattaccagctgggagtacagcatcaaggactg

SEQ ID NO: 122561 - DNA, 263 bp, Zea mays
  Clone ID: MRT4577_43261C.1
cccaaccaaacccggacgacacgacaccaagtcgaggaggtcgagggcaccaatcatggccggcgtgaactccaacgtcgtcgggctcaaggccagcgggggggtggccgaaggcgagagggacggctcatcggcggcgaacagagtgcagctggacgcagccgaagagcgccgcgccgctgtagatcagcctggacgccgtcttcgacgtcacagccagcaccgggtcggccaacgccaggatcttcgatgagtacctcgag

SEQ ID NO: 122562 - DNA, 716 bp, Zea mays
  unsure (1)..(716): unsure at all n locations
  Clone ID: MRT4577_43262C.1
ataagagcaccgccgcgtctgattccagctgacggggacctgggacttcggcgaaagactcgaacttttcttgacttgccctgccgcctgcattgcgacgagaggaggtcctgttcttggagcatctgagccgactcgcgggcgtttctcggctcgttgcggtagttcaggttctggaagcatgaggttatggtgtatcttcctcttgcctctgctgtgtctgcttgcaggggttcgatcagaggattactcggatgtaactgtcattgttcgcggctctgagacgattgcttcgactagtggcgagtttgtttgcgccaccattgattggtggcctccagagaagtgtaactatgaccagtgcccatggggaagggcttctgtcttaaatttggacttgactaatcctttgttggctaaagctatccaagcctttagtccactacgaatcagagttggaggctccttacaagatcaagtgttatatggcacaccaaatttaggactgccgtgcgacccatttacaaaagtttcgagtggcctctttgagttttctcaaggatgcataaccttggaaagatgggatgatattaatgatctcttcctgaatactggtgcagttgntacatttgggtctcaacgcgctccaaggacgacatcagataaggaaaggtgtttgggggtgggtccctgggaattctagcaatgctcgagaa

SEQ ID NO: 122563 - DNA, 351 bp, Zea mays
  Clone ID: MRT4577_43263C.1
accacctgccaacgaacgccgcgcggcctacgctcctctcttccccagcacacgagagggagagggaagggagctttgtcacgagaggaccgacttctgccgctccgccgcaaagcctatatagataggctcccttcaccccctccctccctccctgctccgccgcacccttcccgagggaggcatcaccgtggacgcgcgcgcgctggtcaaatcgaggagggttcgggaaaccttggagaagggtggcggggacggcaggtactcgccatggccggggcggaggcggtggactccggcgagaagcgcctcattgtgctcggctatcatcaggagctctgtagggagatg

SEQ ID NO: 122564 - DNA, 1663 bp, Zea mays
  Clone ID: MRT4577_43264C.1
aaaaaaaaaaaaaaaaaaaaaaaaaaaaaaaaaaaaaaaaaaaaaaaaaaaaaaaaaaaaaaaaaaaggaaaatgcctcgaggccggccgggttaattaggggctagcagtagcagctgtggtcgtcctcgcttgcttgcttgctaccagggtttgtgtgagtgtgttagtgagagagaaccatggcgacgcagcggttcacggcggcgctggtggcctgcctcctcctgctcctggcgctgccggcgcgcgggcgcaacatcacggccatcctcgccgggtacaaggagtacaagctatacaaccagtacctgtcggagacgaaggtgtgcgacgagatcaactcgcggcagtcgacgtcgatgtccgtcctggtgctgtccaacgacgccatgacgacgctggcctccgacgccggcgactcgctccccgccatcaagaacgcgctgcgcctccactcggtgctcgactactacgaccgcaagaaggtgaagaagtacggcgacgagagcgccgccacgctgtaccaggccacgggcgacgccgccagcaccacggggaacgtcaaggtggtggaccaggaggacaagaactacggcttctcggccgccacgccgggcgccaggatctgcaccgtcaccaaggaggtggagacgcaccctttcaagttcgccatcctcgaggtcacggcgcccatcgagttcgacggcctcttcgacaccccctccaccgacaacctcacccgcctcctggagcgcgccggctgcaaggtcttcgcgtcgctggccgcctccacgggcgtgctcaagacgtacgaggccgccatggacaagggcctcaccctgttcgccgtcaacgacgacgccttccaggccaaggacgcgcccgacgtcaaggccatgtccaaggccaacctcaccaagctcctccagtaccacgccctgccttcctacaacaccaagacctcgctcaagtccgtcaagggcccgctccgcacgctggccgccaaggccgacgtcacggtggtcgccaagggcgacgacgtctcgctcgacaccggcaagagcaggtcccgcgtcgcgtccaccgtcgtcgacagcgtcccgttctgcctgctcaccatggacaccctcctggtgccgccggagctctacgtcggcgccccggaggcggcaccggcgccggcgccagcggacgcgccacaggggtccccgcccgcggcggacgccccgtcggtggccgcggaccacgccgaccacaagtccaagaagccgtcggcgtcgtccgccgtcgcgtggcgaccggccggcgcgctcgccgcggtggccgtgtgctccgtcgtgctggcctccctcttgtgatgcattgttgcttgacagctcctccgacctctgcttcctccgatccaagcagatacccgtttctctgtgatctctctcccccgccctgttccggtccttgcttcattgaatctgttggtgcattgccatttccacatgtaatttgagcaaacatgtacatttcccccttttttcatgatagtttcagaacacaatattctaagcagctgcgccattccatttcgcgcaacggctttctctcggatcctgagacccattcatgtagtgaaaggagaagtcaaacgagaagaacaaatctgaaa

SEQ ID NO: 122565 - DNA, 602 bp, Zea mays
  Clone ID: MRT4577_43265C.1
accaccagaacaaagcatttatctttcgccagctacagttgtagtatggccacacggccacacctcaacgagagagagagagagagtacgcaaaacttacaagagagagagccagaacaaggtcagagctcagctcagcttagcaagcgccttcccacacccacaggccacaacggcatggcatggcgccccatgcgccggcgtcgcatcccggccagcacaaaaaaaccacaccgccacagatccaatccaacttcgtgccctagcatacctacctggctacctacataattcctgtgcggcacgaggctgcacctgcacaagcaaatgaacggtgggcggggggagcgtcggcaggtcaccgacgacggtcgggtcaggtcacgccaggcgcttccgctcgacggccacgctcaggagccgcgccacgcccttggtccacaactcgtactcccgctggctgccgcactcgaactcgaccacccgccgctccgccgtgcgcaggccgaagtaccgccggtgcccgccgtcctccagcaggtgccgcccgggccacgccggcacgtccctgcacacctcgaccaccacacttttcttcttct

SEQ ID NO: 122566 - DNA, 955 bp, Zea mays
  Clone ID: MRT4577_43266C.1
ttcggctcgaccgcacacctccctcccgagtcccggccatgggacgcggcagtgacctgcttctgcgtcgtggtcgtcgtccgagcacggggaccgaacgcgagcagtagcagcatcccggagcgcaggagcatggcgatggacgacggcggcgacgacttcaccttcgccgccgcccagccgcctcctagtctagtatctgcaggaggcggcggtttcataggcccgccgctgctgtacccagtcttcggccggccgagatcccctccgcgggctgctccggagacggccaccgcgcgggtgccgctaggacggttcctgctggtggacagggatccgtcgcagccgccgccgcctgctcccgcggacgacgacgacggcgacctcgactcggtgccggcggagatgttctgcccgtggtcccgtgggtggtcgaccgcagccgcagcggcgtcctcccaggcgcggtgcaagaagagcggctccacggggtccgtgctccggtggcggccccggctcgccgtcgggcgcagccagagcgacggcaaggagaagttcgtcttcctgagcgcctcctccggcgggtccgggcgccggagccagaaggggctagtaggcagcgccgtggacgtggagggtggtgcccaccacgcctggaggcattacgccaacaacactagtgagggcggtggcgcgcggcgccagaggtcgttcctgccgtacaagcaggacctcgtcgggttgttcgccaacgccgccgtgttccgccggagctacctcccgttctgatgcaatccattctcagtacgtggcatgtactacgcgggtacagtgatacactcacgcacgcaagtagagtagcgattcagtgtaccgtgtgctatactgctgtactagcttatatacgcaaaaagaaactaagtaatataaataaaaaaagctggaatcgttttac

SEQ ID NO: 122567 - DNA, 579 bp, Zea mays
  unsure (1)..(579): unsure at all n locations
  Clone ID: MRT4577_43267C.1
cggtccgnattcccgggctccttgcttttccttgcactggttgcttatcctcctcccatcccagtacggtggcgcccaagtccgagcaagaagcccgcggcgtaagaagccggtggcggaggagcccgcggcgagagaagacgaccgccggggaagaagcccaagggcggagaagcgggtccccgcgggctagtccgccggtaaggagggcggtgagggcaagcgtggctaagaagaagggcatgaagagcgtggagacgtacaagatctacatcttttaggtgctgaagcaggtgcacccggacattggtattttgtccaaggccatgtccattatgaactccttcattaacgacattttctgaaaagctggccggcgaggccgccaagctcgcgcgcttcaacaagaagcctaccatcacgttccgcgagatcctgacctccgtgcgcctcgtgcttcccggtgagctcgccaagcacgctctctctgagggcaccaaggccgtcaccaagttcacctcctcctaggcttgcacgctcgccctttgtaggcatcttttgtgtttgatgttccccttg

SEQ ID NO: 122568 - DNA, 320 bp, Zea mays
  Clone ID: MRT4577_43268C.1
agcccacctaataaccattagcaactacaacgacaactagacggggacggccacaaaaagaatttgttgcttctcccaactcactaatcatctcatccacttgacctgcgtcatcatataccacctatgaccaggtgccagaagaagtacaatccacttatctatgagaacatgcgcaagaagaaaaagcccaacattaccaagaacaagcatggtgagaacaagaccaacctctactctcaagcctgatcttgccaagttcaacattacccatcttgaacatgatattgtccccctcatgaagaataaattcgataata

SEQ ID NO: 122569 - DNA, 742 bp, Zea mays
  Clone ID: MRT4577_43269C.1
aacctgttcaggctgctcgggttctgctccgaggggtcgaggcggctcctcgtctacgagcacatgccaagcggctctctggacaggcatctgttcgatcgggaccagcagccgggtgtcctgagctgggacgccaggtaccagatcgctctcggggtcgcgagggggctggactacctgcacgagaaatgcagggactgcatcatccactgtgacatcaagcccgagaacatcctcctggacgacgcgttcgtccccagagtcgccgacttcgggctcgccaagctcatgggtcgcgacttcagccgcgtgctcaccaccatgcggggcacggtggggtacctggcgcccgagtggatcgccggcacggccgtcaccaccaaggcggacgtgttcagctacggcatgatgctgttcgagatcatctcgggccggaggaatgtcggccagcgggcggacggcacggtggacttcttcccgtccacggccgtcaaccggctcctcgacggcgacgtgaggagcgcggtggacagccagctcggcggcaacgcggacgtggccgaggtggagcgggcctgcaaggtggcgtgctggtgcgtgcaggacgcggagagcttgcgcccgagtatggggatggtggtgcaggttctggaggggctggtcgacgtcaatgccccgcccgtcccgaggtcgctcatggtgctcgccgatccgtccaagtacgccgttgagttcttctcag

SEQ ID NO: 122570 - DNA, 373 bp, Zea mays
  Clone ID: MRT4577_4326C.1
gttctagatcgcgagcggccgccccgccgcagcccccgctgctgcactaccacggctcggcctctgtgcctggccctggcgacaagcgcgccaggaaagggtcggtgaagaggaggaagctctgggagctcaggttcggctgccggcacatcgtgtggcgcggctggaagcctgcgatcgtgaagggcctctgaggagagaattttgcaaacatgacaccgccgtgggaaggcttcaaatatttggcaccgccgtcgtggcaattgtaggcgtggcatccaaatctcccgacttttgcaaatttggcattgcggtcggttaatggtcattaggaactctctcgtttaaaaaaaacagataacaaatctaaaaa

SEQ ID NO: 122571 - DNA, 1300 bp, Zea mays
  Clone ID: MRT4577_43270C.1
cctcggtgactgacgcgtggacctcacctccgctttcccctcctcccaaataaaacccgaccgcagccgccggtcgtccaggaacgccgccgccgccatggccactgccggagccttccacgccggcggcttcctcctcctcccggtccgacgaagtctccgcgggcccagcccctcaccatggtcccacttccgcacccacttcatctcctccaagccgccgccctccacccctctcccgccgcccgtgccgccagctcgcctgtcccccgtgggttctgccttcgggcctcctagcagaaagaccggcgcggttggagccggggctggcgcgggtgtcgtcgggtggtaccttggcctcttggacgcgcggcccgtgctgaccaagagcgtcaccgccgctgtcatcttcaccgccgcggacgtctcctcccagatgctcacacttggtcctgaggattcacttgattttcttaggaccatgcgtatggctagttatgggtttctgatctcaggacctagcctccatctttggttcaattttatctcaaaattgttccccaaaaaagatgtagtgaacacattgaagaagatgtttatagggcaagcagtctatggaccaattattaactcagttttcttctcatacaatgcaggattacaaggcgagactgttgctgagattattgcaagattgaagagggatctagttcccaccatcaaaagcgggcttttatactggccaacttgtgatttcattactttcaagtttgttccagttcatttacagccgctagtgagcaattcattctcatttctgtggaccatctacataacatatatggccagcttaaagaaagcagatgtggaggtggccccgagtacctaggtgttgtcgagtgactcaacatggctgttatctgtcgattcttcgtacaaggcagacttcatgtatgcctcctggatcgcggatgttatcgaccggcgattttaggctttagagagatggattgcttacgatgcatccttcacttttggttagggcatagtgtccacagggattctacttgcttatgtttttggctgaagaccattttgtttggatgatcgaattatactaggttcattgggtgggtcttctacgacgtctttcttacggtcttttgatcctatggctaagaagtacatttacttcaactaaattttctgtatctagttatggagatgcaagtgaacctgttctttgccacaaacaataacagacccaatctatcctaaaaaaaaaaaaaaaaaagcggcc

SEQ ID NO: 122572 - DNA, 1854 bp, Zea mays
  Clone ID: MRT4577_43271C.1
ttgggtacctcgaggctggccggggcagtgttagatccgtccgcctgagccagagccagagcgaaggagtcaatctcacggcacgcgccatgtccgacgagtcgccgccgccagctccggcggccgagaagagtcagcccgccgagcaggcggcaggaggctggggcggatggggactctccatcttctcagagatctcccgcaacgcggtggaggttgctaagagtgccatcgccgacattcagcaaccgccggagcaggacacggtaccgggtagtggcgagaaggatcaagagaaggaaccggagggggaggaggaggaggaggagagacgcaaggcggctctggacaagttggagaaggccggtgaggactcaatcctgggccaggggctgaaggcctttgatagctcggtggagaccatcacgactggtacttggcaagctcttgggaccgcatggaggagtggttcactatttgttcaaaaattggaaaattcagcttcaagcttggccgaaaccattcagcaaggagaactgcctgcaaaagcatctgcgatagcaccgaccattttagagacagggaagtcatttacagcaaaaggaatggaagtgcttgaacgtgttggaaaggagacaatggagtttattgttgaagaaactggtatggaagttgataaaggcagtaccggtgaaggtgaccagcagacagaagaggaacagtttgaagaagtctcatttgacagatgcttctatatttatggggggcctgatcaattagaggagctggaagcattatcaagccactatgcattgttgtttaataggaaaaaggggaaacttaattctgaccagaaaacatattacgatggaaagcttaaagaaatagagcagatttttagtcttagcaccaatgctgatgaagatggaccagaatctgacaaagggaagaagactgaatcagctgacactgatactgacgctgagatgaagaagttatgtgaatctagtgttcgcaaggctgctaagatggctgcagggttcaccactgccttgggtgggctttctccaaacgagattatgaaacgaaccactagtaggcttgagaccattcactcagagggtgttcatagattatcggagatgtgctgccttgcagtttctcagcttctggtgctaggaaagtcagtaatatcttctgccaataaatcaaagaatgaggacggtgaaaatgatgttaagattgattggcccgaagatgccatttcaaaagccaaaataatcagatggaaggcgcaatccatctctgtggatatggaaaaggtgtctactagtttcgctacaggtatctcggatgtcgctgaagcttatgcggcagctatgcaaagtgctctcgccgacaagcaggacgacctcccaaatcagaagtctttacaggagaaggttaagtccatatccatccatctcaactccgatcagaccagcgctgtcagcaagctacaagatgccctgcggtacctggcctacgtcgtcgtatgcgcttcaatgccaagtgtgtgattgtggtgtgttccctgtctgagcatttgcctcaatcgttggccatctatgtacatttgcgtacacggggatcccttcaggcttcagggttgcagaattaggtacctcactaggacgtgttggttagttgtgatgttttgtactccattgctcttggaaagttgttgctctctttgtttttcctctgagaacaatctgatgtttaatatacatacaagtgaactgatgtgttcaatttaccgttgatggcttactgctcgaaaaaaaaaaaaaaaaaaaaaaaaaaaaaaaggac

SEQ ID NO: 122573 - DNA, 1043 bp, Zea mays
  Clone ID: MRT4577_43272C.1
cattgggaccctcgaggccggccggctcctactcttctctccctactccctacccggctctctccctcccccctctctctaaaaaaagtagcgctcggagaaccgagaggctggagaaataaaggcggaaagagggagggaaatctcactttgttggggattctttcctccgtttccgactcctttgttctcttaagtgttcttggttagtggaatggaagctcagcagccccatttatgcccccgagagcctcgtcgttcccctcgtgtgtaggtgtagcctttcactcggttggtggaagggcgaggcacagaagaacatcgataaagggtgtgtctattttttagctcttcgtgttcttgtaggaggaattcccgttcacatgatccgtgcctgtacctgacgggccttgtcgcgctctgctgcttcgctttcggggagaggaggactcgactcaaatcacttggtagcggagacgtcgccctttctagttcagtcgagagatatttctggcatggccggcgcaagcaaccatggatccctcaccgacgaatggttgccgccccctacaccaagcccaagaagtctcgtgtcaagctttctgaatgaagaattcagccccgggccattctctggtcttttcagtaaacatggcgccaatagaccccatgatcaatccgaaaagggcagaggagctctgaattcgagcgaggagttccctactcatgctgtcaaagacccatttcaaaagggtttctccctggagccaaatttgttcagtgctaatcatatatcaaactccaatggtggtttggcagagcgcagggctgcaagagcaggtttcagtgtcccgaaaattgatacttctcgagttggttcatcagcagttattcgatctcctgtgtcaattccacctggtctagtccaactacactactggagtctcctgtttttctttacattaaatggcacagcttctccaacactggcacgttgccatttttgacggctacgaatgataagtcgacataccaccagctac

SEQ ID NO: 122574 - DNA, 431 bp, Zea mays
  Clone ID: MRT4577_43273C.1
ctccgaaagcagtccgtacacaactaccctcccgtcctggcgaccgagaacacgggtcgccgccaccttcctctcctctttgcccactcaccatcccggacccttgtgcttacgtatgccctcgagaccaaccccggcctacccgcctcccttagcgccggtggaacaggtggcccacggatcaactcccggatacagggccgccgcgccagggccggcggctcccaccagccaaacacgaagacgagagtaacttgtggcaataacaccatcacatgggcatagagggctgcgcttatcttagacatgggctacctgaaggccctagagatgactatccctagcagccggcaccagacgactcctacaagaccatagttgtcgaaggaacaacagtagcacccagactttccagtgctacaggacccaca

SEQ ID NO: 122575 - DNA, 1584 bp, Zea mays
  Clone ID: MRT4577_43274C.1
atgtccgacgagtcgccgccgccagctccggcggccgagaagagtcagcccgccgagcaggcggcaggaggctggggcggatggggactctccatcttctcagagatctcccgcaacgcggtggaggttgctaagagtgccatcgccgacattcagcaaccgccggagcaggacacggtaccgggtagtggcgagaaggatcaagagaaggaaccggagggggaggaggaggaggaggagagacgcaaggcggctctggacaagttggagaaggccggtgaggactcaatcctgggccaggcaagtacctgccttgcaactctctcaatattgctggcatttctgggcttggtaatgccggtgataatggggctgaaggcctttgatagctcggtggagaccatcacgactggtacttggcaagctcttgggaccgcatggaggagtggttcactatttgttcaaaaattggaaaattcagcttcaagcttggccgaaaccattcagcaaggagaactgcctgcaaaagcatctgcgatagcaccgaccattttagagacagggaagtcatttacagcaaaaggaatggaagtgcttgaacgtgttggaaaggagacaatggagtttattgttgaagaaactggtatggaagttgataaaggcagtaccggtgaaggtgaccagcagacagaagaggaacagtttgaagaagtctcatttgacagatgcttctatatttatggggggcctgatcaattagaggagctggaagcattatcaagccactatgcattgttgtttaataggaaaaaggggaaacttaattctgaccagaaaacatattacgatggaaagcttaaagaaatagagcagatttttagtcttagcaccaatgctgatgaagatggaccagaatctgacaaagggaagaagactgaatcagctgacactgatactgacgctgagatgaagaagttatgtgaatatagtgttcgcaaggctgctaagatggctgcagggttcaccactgccttgggtgggctttctccaaacgagattatgaaacgaaccactagtaggcttgagaccattcactcagagggtgttcatagattatcggagatgtgctgccttgcagtttctcagcttctggtgctaggaaagtcagtaatatcttctgccaataaatcaaagaatgaggacggtgaaaatgatgttaagattgattggcccgaagatgccatttcaaaagccaaaataatcagatggaaggcgcaatccatctctgtggatatggaaaaggtgtctactagtttcgctacaggaggtgaatttcaattttcacaaacgccacctcatttgtccgtaggtatctcggatgtcgctgaagcttatgcggcagctatgcaaagtgctctcgccgacaagcaggacgacctcccaaatcagaagtctttacaggagaaggttaagtccatatccatccatctcaactccgatcagaccagcgctgtcagcaagctacaagatgccctgcggtacctggcctacgtcgtcgtatgcgcttcaatgccaagtgtgtga

SEQ ID NO: 122576 - DNA, 457 bp, Zea mays
  Clone ID: MRT4577_43275C.1
gcccagttcaaacccacggggctgccctcccctgcgctctcccctcgctgcccgggcccggagcgcagcgcggccgcgcagattcacgatgttgaaagcccttttcctaactatgctgactctggcgttggtcaagtcacaggacactgaagaaaccatcacgtacacgcaatgcacagatggatatgagtgggatcctgtaagacagcagtgcaaagatattgatgaatgtgacattgtcccagatgcttgcaaaggtggaatgaaatgtgtcaaccactatggaggatacctctgccttcctaaaacagcccagattattgtcaacaatgagcaacctcagcaagaaacaccagcagccgaaggtgcgggtgcagctgcaaatgcagccgcgacctctagtacaggcactgggggtgtagcagccactggcgtcgctgccagtggagtggtgcct

SEQ ID NO: 122577 - DNA, 284 bp, Zea mays
  Clone ID: MRT4577_43276C.1
agttgaaaaggaaaggactacagtaaaaggaaacaaggtaaatacttctgatgatatgcaaaacggaagcttaagtcccctgcccaaggctaaagcatgcagggcaccaagaaccagttcacttgctataaactcatgttctaatttccaacgttcaactggaggaaatgatgaatgggaagaagcaccgtacccaaataaagtgtcacctttggcgggcatgacgaatcgcaaacgttccacacattcaaatgcttcctcacctcctattgcctgggtagggc

SEQ ID NO: 122578 - DNA, 369 bp, Zea mays
  Clone ID: MRT4577_43277C.1
cccacgcgtccgcccacgcgtccggtcattcgtccgacctcgcgttcgtgcacactactagggactcatataatctggcgcatgctaacatcatatgcatggctagtcatactgaaaatgatcatgaggacgagatcaatcccgctcatgagctcttgcttgatcactccatgaaagagaaagacactgaccgaacagactactacggtctataccttgaaaaccagtgccgatttgctctgcaagtcatcgaagctgtcggctatgagatggacgccaacatatacaggattaagctatatgcattggcataatattcaaaggctggacactatgatccaaaagaattggcgctctacatgaggaatg

SEQ ID NO: 122579 - DNA, 367 bp, Zea mays
  Clone ID: MRT4577_43278C.1
gtggattaccattcacaccaagcgcagatcatgagctactagctaactacaacgggtaccaagattttatgcctacttgcgcttgttgcgctttgagctgatgcaacaaaggtcgctatatattgcacaatggtcagtggctccaagctgatgatgacacaactggctccaccagatagtgcattgggagcatgaacacccagatacgcaaggctatcgctacaactagcaattagctgcagcgtgttacaacaaccaatctccaatgcgcaacaacagtgcttggctcatctgacactacataccatcagaacgcagcaggcacgacatttgctaccagcactgaggcagctagccatggtgaacc

SEQ ID NO: 122580 - DNA, 333 bp, Zea mays
  Clone ID: MRT4577_43279C.1
ggaaaaaaaaacaggcgggccaggctttttagcagcgtcccaccccaccccaggtggaattcattttccatccaaaacccccttgggcccgccgggctacgaactttacattcaaaaacattggcccgcggggcaggggatcccagcagttcatttccattcccccgggggcggatcagctagctttctcaccttgccccggtttacgggcctggctggctagcccttggggaaaaccaatatcgggaaaataacccccgggagataggccaggaaggtgacccggaggcaaaccccaaattcccccttgcagcccaacttgaggaaaacccc

SEQ ID NO: 122581 - DNA, 584 bp, Zea mays
  Clone ID: MRT4577_4327C.1
gatgacaagtcctccatatgagagcgttaggttcaattggcattctttgaatgtactcctttatcttgtcaatcttacaagctcgaccgagaaggtctatgacacaagaataatgttcaatctgtggtagtataccatgatccggcatcatttcgaagtattctaaacctctttccaccaatccagcatgaatgcaggcagataggacaatgacaaaagtgacatggtctggactctctctgctgcgcagcatttcctcaaatatctcaatggctttccttccaagaccatgtcttgcataaccataaatcatagaattccatgaaaattcatttctctgagtcatagaattgaaaagcttagaggcataatccaccctaccacacttggagtacatatcaacaagagcactctcaaccacgacatctgattccaagtgtgacctaataccaaaagcgtgcaactccattccacgctccaatgctgccacagaagcacatgcattgagtataatggagaaagtgcaacaatccatgatttggccactgtgtatcataagccatacacaatccatagcctcctgt

SEQ ID NO: 122582 - DNA, 454 bp, Zea mays
  Clone ID: MRT4577_43280C.1
cgctgctcgagctgctgctgctgctgtgctctcacgcggccagcgcggcgcgcgcgcacgacttgcacctggagatggggaccacctccgtcgcgacggggcgcgccgtgccgtggagtgcgagctgcgcgactcgccgtgagagaccaacaacatcgcactaactggtacagcatcccctcggagtgccggggctacatgcgacactacatgtacggggacctgttcaggcaggactgcaccatggtagcacgtacatgccgccggctacatcataggggctatagctcacgcggtgaccggaaagatgggtgacgtgttctgacgtaacacaacaccaccctccacagcctctcctactacacccacacctgattatgagctgagacatacaaggccacctacttcgacgagcacctaacgaacgccacggcgccatcgctggcggaggagc

SEQ ID NO: 122583 - DNA, 432 bp, Zea mays
  Clone ID: MRT4577_43281C.1
aggggtagcacaaaacaaatgctgggaagattcccacagttattacaggccgagggggctcccgcacacacctgacacccccacgccttaagctttaacacacacacagcccaaaaaaaccccattcccggcaggggaacacaaaaacaaggggagcaaaacacctatggggtcggtttaaacttccaacccccaaaacaaggtcgaactggcaccttttttgggcttaaaaaccatccccccccccttgcctttttttcccccacaaaactcgttggggggggcaacgccccttgggggcaaccaaaaaaacttccgaaccgaaccgaacccccccccacaacgggaactttttcaactttaaccctttttaaaccaaaaccgccttttttttttcccccccctcttttctcggcccccctgggcctgctt

SEQ ID NO: 122584 - DNA, 415 bp, Zea mays
  unsure (1)..(415): unsure at all n locations
  Clone ID: MRT4577_43282C.1
aaattcaacaatttggacgaattgcgggaatcaggaacggggaaacagaaacatgggggggaacaatttgtacaacaacggggctcttgacttgggtgaaggagctgtttcgatgtaaaaaccgaacatatcacataaggaccacaaggggccgattcttgnaggcagggacacattccctatcccacagaattttagacacggaacatggctacagcaccacagagggaaatgaagaaaccttcttttctaagacctttttggggggaattgggggccctctcttggggggacttgggcttctttggtgccgccgctggggcggctttttcgccgcctttttgggcaagaacacccgatggatgttggggaggacccccccctgccccatggggaccccgggcaaaaactttcc

SEQ ID NO: 122585 - DNA, 488 bp, Zea mays
  Clone ID: MRT4577_43283C.1
tatattttttttttttttttttttttttttttgtttttttttattttttttgggtttttttttttttttttttttttttttttaatttcattccttgcccttgacatttaatattgacaaaaagaaatatttatttaggactaaaaaaccctttcccctttaaggcccctccattttctcccccaaaaaccaaacttttcccccggggggtttaaaactgggtcacccccataccaagggggccccttaaaaaagggaaaccattttcccccccccccgcgggtttttccccacccccttttttatccaccaacaaaaaggggctctttttaaaacaagaggccccccccttttcccaaaaatttttcccctttttaaaaaaaaagccccaatggttcacaaggccggccctaaaaaaaaaccccaaactttttgggggtcccaaaaatttttccgagatattcccggttttcccaaaatcttaaaaa

SEQ ID NO: 122586 - DNA, 269 bp, Zea mays
  Clone ID: MRT4577_43284C.1
atctaatactggaatacattacgattttattttacagctacgtgaacactgctgagggaagggatgataataatgacttgataatatgtacgattatgagttatttaataaaaaatatgttactatcctgataatattgatgccagacatatgcatgcatacataggttttgctatctatatgcaaaagcttggaacagggattgatataaatggacgatttcagatatattaatacaactttgtttaaaacaatggatttgccccaat

SEQ ID NO: 122587 - DNA, 746 bp, Zea mays
  Clone ID: MRT4577_43285C.1
atcgaaaaaaccctccgtctccaaaagagagcccaatcctaaattcccaatccctcaaaggaaggaggattcttcagcgtctcgcttgccggccccgaatcgcagtcgccgcccggatccgaggaaacaagtcgtcgtcttgctccaccgtccgcccgccgccatgagcttcatcttcggcaagaagaagactcctgctggtacctctccctccttgtggcgattcgttcggtcccacccgctccccgaccgtcccctcccgctgatgggcagccccgggagaaactgggcatattcctggtagctcttgttacccgatcgacaaattcctcgcctttctcggttcccccgccgacgagagagccaaagtccacgggccattctctgtttattttaattactagtactacttgaattactgtgctgatctcgttgtcccgggtttcttcggcccctgttattacaggaaacgtggaaatcataatactgttgtttcccagttttatccatgcactaggaaaaccccaggatttttcggctttttaggcatcactctgctctaatttggattggaagttattgctttgcttccccttctagccctgctgttctgaaaagttgaaatcgaccatggaatctaagttctgcccatttgtcttgctttagaaaccacatactaatccataacgctactgcgatggtgctgttgcccgttcacattgggcatgtccggctcttggtttaat

SEQ ID NO: 122588 - DNA, 152 bp, Zea mays
  Clone ID: MRT4577_43286C.1
ccacaaaggtgtcctgttggtcgtcctcgaatgagtttggttctaccacaaaatcagcttctaatatcgatttgcatatcgtacatacaaaaggaaccatacaccaaataaataaacatccaccattacataaacaatcacattccacacaa

SEQ ID NO: 122589 - DNA, 315 bp, Zea mays
  unsure (1)..(315): unsure at all n locations
  Clone ID: MRT4577_43287C.1
gagcatacnagtcggcggccgccctagcggccagcgggggcacctggagccacgtgtacgactagcgcaagaaggccacagaagcgacgcacaagaacaccagggaagaggacgagcgaggcagggagacgacggcgaccacgacgccgagaagaagatctggcacaggatctgcgcagccaacataccagggaacccgcagtcgttggcgcacagcgagacctccgaagcccagagctccgggggctgctgccacaagaaaggcagcgccatggcacccggcgcgcctggcagaaaggagacccaccaccaccg

SEQ ID NO: 122590 - DNA, 325 bp, Zea mays
  Clone ID: MRT4577_43288C.1
gagctcactagtcggcggtcgcccttacttttttttttttcctaacctggattgttggaggctagtggcccgggccgacaacgaggccggatatgtgagggggagactggagacggcgacgcggccaccaaatccaacgccgcgatgccgccagcggacgggcccaagaggtgcgccaaggtgaagacccttaggagggagtgctactggtacaacgaatatcggcaacgcccgaatccgacgatcacgatcccaagaccacgatacctcccgagctgcgacggtcaacaaggcgaactacctcttgcgtgaccaccaacaacta

SEQ ID NO: 122591 - DNA, 2145 bp, Zea mays
  Clone ID: MRT4577_43289C.1
ccggccgggccgggtggttagagtagagtgtggaactccgagccgccgctcccccgaccccgatctaccagcttcgtgtgtgagcaccgtgccgcggtgattcgattgcccgcgctcgcggtttccgtcgtcgtcgtcgttctctcatcgtacggcggccatcgctagctactgccgctggatggcggtaataaccaggcccgaggggtaggagcggtagttgtttaactgcggcgggcggaggcaagtggcgtgttccggtggactggcactctgacacggtcggttgctgtgcttcgcgtcgcatctaccgacccctcacccacatggaaagcgaggaggtgagctgcagctgcgacggagactgagcgagaagccccccctccctccctccttccttcgacgtcaagctccgccccactccatggattcgatctgggaggcgaggagctgaggccaggacagggggaggagctgctggggggcagggacaggatagcgcggctaagcggcaacggcggcagccatgagctggagacgaggcggaagcggaggcgatggcggggtctcgaggaggtgggccgtcctgctctgcgtcggcagcttctgcctcggcctgctcttcaccaacagaatgtggacgctgcctgaggcaagtgagattgctaggccgaatgcgaatgtggaggaaggcaccgtgccgattgccgcggagtgtggttctaaaaaggtccaagaaaagcaggattacagagatattttacaggttcaagatagccatcatgatgtacaaacactggataagacgatagcaagcctagagacagagctctcagctgcaagatcgctgcaagaatccctgctgaacggctcccctgtcgcggaagagtataaagtttctgaatcaatcgggaggcgaaagtaccttatggtgatagggatcaacaccgcattcagcagccgcaagaggagagactccatacgttacacctggatgccccaaggtgaaaagaggaaaaagcttgaagaagagaaggggatcattattcggttcgtcattggccacagtgctatatcaggtggaattgttgatagagcaatcgaagcagaggacaggaagcatggggatttcatgaggatagatcatgttgaagggtaccttgcattgtcaggcaaaaccaagacctactttgctacagctgtttcactatgggacgccgacttttatgttaaggttgacgatgatgtccatgtgaacatagcaacgctcggacagattctgtcgaaacatgcattgaagccgagagtgtacatcggatgcatgaaatctggacctgtcttatccgaaaagggcgtgagatattatgaacccgagcactggaaattcggcgaatcggggaacaagtacttccggcatgctaccggtcaattatacgctgtttcaaaggacctggcgacttatatatctataaacaagcatatccttcacaagtacataaacgaagacgtttcgttaggatcttggttcatcgggctagatgttgagcatatcgatgaccggagactttgctgtggcactccgcctgattgcgaatggaaagctcaggcggggaacgtctgcgccgcgtcgttcgactggaggtgcagcggcatatgcaactccgagggaaggatctgggaggtccacaataagtgcgctgaaggcgagaaggcgctgtggaacgccactttctagcacacacacaaaataaaaaaaggaagcagcagcagaagctgctatataatagatcaaaccattttggttgttgtttgtacattgtcccacggtttatttgtgtgtacgtaattcattgtaggtagctgcggggtttttttttttggttgttgttgtaacgggcgaaagcggaccaccattttaggtagtgtctgtcagccggtgccggtgaagatgatggagaaggatatggtgtgagcggtgatgcattcttttgtgcggtaaatgtgtggaggtggtcatcttgttgtgccgatctcctgtactgcatgtatggctgccgagatacgtgagaccgaaaaacactttcgtgccataaaagtagagctagtaaaaaaatctggtaattgctgtcaaaaaaaaaaaaaaaa

SEQ ID NO: 122592 - DNA, 308 bp, Zea mays
  unsure (1)..(308): unsure at all n locations
  Clone ID: MRT4577_4328C.1
tatgccaaactgtttcgcaaccgaaagattcagaaaaccctgcctgaagctattttattatgcggtatctgactatattatatgggcctggaggatctgcaaggagctgaccaatgtaggttttttttttaaagagggggtangaaaggcgactttgaggcgtaattaaaaaaaatatgcttgaagctaggtagagccacctaacttatttaaaaatatcctgccatataacaatggactgcataattgatatggggaggaaagcccctttctatatcacatacctctgtagacatctattggaactc

SEQ ID NO: 122593 - DNA, 540 bp, Zea mays
  Clone ID: MRT4577_43290C.1
aaggagcagaggaagaagaggctctggttgctcctgactatggcgcagttgcagaatatactgctccagggggtgagaactggggtggtgccgactggggaactggtgaagctgcagcgccgcctgctggcattccagctgctggtgcagactgggctgctgctccagctcctcctgttgatggtgtctgggatgctgccgctgctcctccagcagccaccggatgggaagaaggcgctgctcctgtcgcggctcctacccctaactggggttaaggagtaaatcagcctggttgatggttcatagtagtcatcatcagaactcgttggtagacactgcttgagtagtagctttgaactttttacgttttacgtgctacgagatgggaatcaattttgtgttgttgactctgctgagacggtgagtgaaccgggcccctttttgctatttctaatggatagctctgttttaagcgcattatgtgaattgtatgctcttcgttgcagcaattgtctctcctgcttctgtgttgttggatct

SEQ ID NO: 122594 - DNA, 410 bp, Zea mays
  Clone ID: MRT4577_43291C.1
aggcaaaaggcccaaaaaaacaaaattcaaaatctggggcgggcccgggccttctcgaaaacaaatcccctacgggctttaaccagccaaaagcgacagaaacttaggggagcaagaaccctaacaaattacagggggggcctcaccggggggcgcaaaaaacaaaccaccaccaaaaacggggggaaagccgacgggacaaaaaaacccccatcctacttggacaaaccccctggaaaaaacaacggatcaaccccccaaatgccacagggggggggaaccgcaacaacaaacacaaaaaaggttttggaaaaagagggggggggggaaatctccgggggtttttttgggccgggggatgatggaacaatgggaaaagggaatgtttccccccaggggaccccgacttt

SEQ ID NO: 122595 - DNA, 240 bp, Zea mays
  unsure (1)..(240): unsure at all n locations
  Clone ID: MRT4577_43292C.1
aataattctcgacccaaanccanccatccgcgggccctccgtacgggaggggggtcgccccatagccacaaacaagatcggtatcaatgggttcggcaggaacggaaggctggtggccagggtggccctgcagagtgaccatgtctagcatcgtcgcgggaacaaacccctcatcagaaccgactacatgacctacatgttcaagtaccacactggtcacggacagtggaagcaccatga

SEQ ID NO: 122596 - DNA, 376 bp, Zea mays
  unsure (1)..(376): unsure at all n locations
  Clone ID: MRT4577_43293C.1
ttacaacagnnnnnnctaccaccattcaaccagctagacactgtgagcgccagcgacctcttaacacaagatccagtggtggaaaggtaactgcacacgctgcttaacccatgtgatgagctacgagtggacagcaaggattttgaagtcaatgtactgatgaaaattattgatgctagcaccatccatagagtagtcactgttgacaagaacccagacgaccacccataccttatgaaattctaccaaagctgagcccccaaggctattctcgaaatgaactactgcaccggaccttatgattatttaaagacggcctactctgctgacgcggcggaattcaaggacaaggaaatcaagttccttattggtgaca

SEQ ID NO: 122597 - DNA, 446 bp, Zea mays
  Clone ID: MRT4577_43294C.1
cccacgcgtccgctcttcctctcttctctaaaccggcgaccaggagaacttctcctgtcgacgggtagctcggcgtgggggcataaccctgccggcaaccacgggtcaaggctacgatctacgtagccgaggtcctcctaccttgggcaataccgcccttgacatgagctgtccgtcaacttttctctgtagtgtgtgccacgggaggaggcatgggatgaggatacgggatgagagaagccgcaggtcatttaccatgcatattcagaaagtttgtttgtcgtggctttaaggagtgctcgctcgtcgggcctcacaacccaaatggagctactcacatccatgctgtagatgctgccgaatacacctactcacggaagtctcatgggccctcatcgagctgacgccagagcttgttagtactgcgtctgcgtcttacactgata

SEQ ID NO: 122598 - DNA, 291 bp, Zea mays
  Clone ID: MRT4577_43295C.1
gcgctgacgcattgtgcatgcatataagagctaaatgatactggcgcagaggagcaatgcccgggatggatgccttgcgtgctgcgacactactcgcaacactctttctggttcatgcggcagctgcccatcccccggcggttgctgcggacgccatgacaccgacagactataggcgactggtgctccctgacaccccgatgccccaagccatcctatacctattgaccacatctacagctgaggaacgctcaaggaaggacactcacctctaatggtttccaacgccca

SEQ ID NO: 122599 - DNA, 207 bp, Zea mays
  Clone ID: MRT4577_43296C.1
ggagcagaacacgcagcttacagcccgtcttgccaagaaagagggaggatcctgtagctgacttgagcacttggcggaccaccaacctctacaagcgaagcacggatgaaatgcgccaccattctacaatcgctcttatgttgagactgtttgacacaataacataagggccctgcctgagcccctcacctcagtcaggacccggca

SEQ ID NO: 122600 - DNA, 928 bp, Zea mays
  unsure (1)..(928): unsure at all n locations
  Clone ID: MRT4577_43297C.1
acagnaaaagaagaaaacttaggcgccggcagcaaatgcaagcactgctagctattcagcaacagcagcaacagtttggtcaagagggttctggcagtgacacaatggtgtctcaggcatactcccctaggaacaaaaatccggaatccttggggagttcaattgtcatagatgaaaacgcaaataaggttttttcgcctgagttggataccaaaactcgactatgcattcgagatagtttgcttcgtttggcccatagtgcagcagagagacaaattgatggtgataggagcagcactaacaagacaaataaagatgaagatgaagcttcagaagatgcatttactaggagaacaaggtctcccactaaggaagaagaaacaatcactaatccaactgatcgtatagtggcctatttgctgtttcatagacattgctcccaggttgcagcagcaacaaaagaagaaatcatatcctcaacccccttgacactagaacctgagctgaaggtaccattgggaactactatggtactatcagaagatcaactgctttcagaggatcaacgagatgagcaaaaaaatgtgttgcagccgtcacaataagatgctgattgatcaactgttcagaatcaatatgatagcaaaccccgtgatgatgacagtctgctgatcacctgtggctccggagatcccttgtgtaatatgtaaccatttcaacattgtagcattctttttttttcatcatgtaataacatctcagactgtatacgaacctacaattgtgtgtcgagccctaaaaagagcaaaccttggacatcgttatgattaaactcaatgtatgcactctctcatttctccgaagaaaataccctttttctcttgcgtgacaaaaaaaaaaaaaaaaaaaaactagttctagatcgcga

SEQ ID NO: 122601 - DNA, 519 bp, Zea mays
  Clone ID: MRT4577_43298C.1
ttttttttttttttttttttttttttttttttttttttttttttttttttttttttttttttttttttttttttttttttttttttttttttttttttttttttttttttttttttcctaaaacagtttccttggggtaaataaagggtttccccatttggggcctttttggttttccaaaaagaggggtaacccttgccccaacttttcctgttaggggggggtttgaagaccatccaaatgggggggccaatcctaaggtttgccagtttccaaaagggaacagtccaattcccttccccccaattaaagccgagggcaccccccccgggaaagatataacactttttgggggtaaccctttcccaaacaaaagggttaatttccccaaaaaaatttttttggggaaaatccccccccttttaaaagggaatggccttacccctggggttggggataaatttggaaaattttttgggggggacccccctggggggggggtccccttgggttcccagg

SEQ ID NO: 122602 - DNA, 860 bp, Zea mays
  Clone ID: MRT4577_43299C.1
aaattgacatggaatcctggcctgatcttccttccctgaatcctacacttgatagaaattatagtgatgacaacatagcatccacatatctggatttttgtgctgcaaccagtttacaagaagtgaccggaaattctacagagcaactagatggtaaatcagaagtgtttggtaatgatcaagaagaaaagagtaacagtttccttgattgcgactggggcaatattggagattttgatgattttgaccgtctatttagccatagtgactccatatttggtaatgagatagttgccaacgacagtgattttctttctgcatcttcgaatttgatggatactgctgtgctatcaatcccaattccggtttgtgaatatagaactttgaattttgctgtattttcgacattcttctcactgtgatttatttgtttctattaaaaagcatttaccttgaagaaaaaaaaaaaaaaaaaagcggccacccccttgacactagaacctgagctgaaggtaccattgggaactactatggtactatcagaagatcaactgctttcagaggatcaacgagatgagcaaaaaaatgcgttgcagccgtcacaataagaatcaatatgatagcaaaccccgtgatgatgacagtctgctgatcacctgtggctccggagatcccttgtgtaatatgtaaccatttcaacattgtagcattcttttttttttcatcatgtaataacatctcagactgtatacgaacctacaattgtgtgtcgagccctaaaaagagcaaaccttggacatcgttatgattaaactcaatgtatgcactctctcatttctccgaaaaaaatacccttttta

SEQ ID NO: 122603 - DNA, 398 bp, Zea mays
  Clone ID: MRT4577_4329C.1
aagacttgcgccgcgccaccatgaggggcatctccaccaccacgctttctacatgttgagcggctgtctcggctacgccgcgttcggcaacgccacgtggcggatgatcctgagccgcttcggcatctacaagcccttctggatcgtggacttcgacaacgcctgcatcgtcgtgcacctcgtcggcgggttccaagtcttctgccagccgctgttcgcagccgtcgatggcgccgtggcggagcggtacccccggtcgacgcgcgagtactgcgccgcgggcctcaacgtcttccagctcgtgtggtgcacggagttcgtggctgtcatcaagctggtggccgtgctcatgccccttattaacagaatccttggcatacttcgcaggattgccttct

SEQ ID NO: 122604 - DNA, 245 bp, Zea mays
  Clone ID: MRT4577_432C.1
cagaacacaaaagagcagagcacctaagcctgtctctgcctccctgtctacctgactggccagggcccaagacccccgctgctccactgcggggctgggcgggctgactccctgcttcctccaagctgctgcctcccctgcagccagggtctgggcagggtgcagccggtcctcgggggcacgcagcttccttcaagtacactgtgtgtgcttcccggacctgcggcgatgccacgggcctgcct

SEQ ID NO: 122605 - DNA, 2645 bp, Zea mays
  Clone ID: MRT4577_43300C.1
tgtctttttttatttttttttcttttttttttttttttttttttttttttttttttttttttttttttttttttttttttttttttttttttaatcataacgatgtccaaggtttgctctttttagggctcgacacacaattgtaggttcgtatacagtctgagatgttattacatgatgaaaaaaaaagaatgctacaatgttgaaatggttacatattacacaagggatctccggagccacaggtgatcagcagactgtcatcatcacggggtttgctatcatattgattctgaacagttgatcaatcagcatgtgtatgctcattagaaggacgacaatagattcataggctaattaaatgcaaataatcttactcaaattaagtaaagccttatcttctagcacatctcaccttattgtgacggctgcaacacatttttttgctcatctcgttgatcctctgaaagcagttgatcttctgatagtaccatagtagttcccaatggtaccttcagctcaggttctagtgtcaagggggttgaggatatgatttcttcttttgttgctgctgcaacctgggagcaatgtctatgaaacagcaaataggccactatacgatcagttggattagtgattgtttcttcttccttagtgggagacctgagatcataaaaatataaactgagccatgatggtaagtaagacatgatttgaggtcacgttgcatatcatcagttacctgagagtaatacagaaacacgttaacaaaaccatttttggtgtactctaccttgttctcctagtaaatgcatcttctgaagcttcatcttcatctttatttgtcttgttagtgctgctcctatcaccatcaatttgtctctctgttgcactatgggccaaacgaagtaaactatctcgaatgcatagtcgagttttggtatccaacttgtcaagagcatcttgtagttgataatatattttttcctctataaagggatcatctgaaattgcagaactcttgtgaaccgggccatggtatgtcggaatcatctcaggcgaaaaaatctcatttgtgttttcatctatgacaattgaactacctaaggaatccagatttttgttcctaagagagtatgcttgagacaccattggatcactgccagaaccctgttgaccaaactgttgctgctgtcgctgaatagctatcagcgcttgcatttgctgccggcgcctaagcttttctatcttttcttgtggtgtcattgacagtggtctcgatggtatgtcttgtgacatttctattgaacttgactgttttggggaatcttctgaagttcggcaacttgtgccagctgattttgtctgatagccatcagcttgaatgtttgacactaacggaatggtaggaaatggatatgcaggatacccatattcgggaaacataaactgattagcatgctgaacctttcctatcttcttgctatcctggaacagtgcatattgaggagtctgtacatgttgcataggagcttgcaaatttgatgatgaattctctaatttgctcggggagaagccacttgcactactggatattttacttttacctctttcctctggttttctgcgtgacctcgctggcctcttgtgtacttcgaccttattttcttgtttggtaatggtgacaccactggaaatttctttagtcagaaccaaagaaggcccacgatcagatgatggtcgtttattcaatggtagttgcggaattgggattgactgcacagcattatccatcaaattagaagatgctgaaagaaaatcattgtcgctggcaactatcccattaccaaatatggagtcactattgctaaataggcggtcaaaatcatcaaatctcccaatattgccccaatcacaatcaaggaaactgttactcttttcttcttgatcattaccaaacacttctgattcaccatctatttgccctgtagcatttcctgtcactttctgtaaactgggttcagcactgaaagccagatatgtggatgctatgttgtcatcactatagtttctgtcaagtgtaggattgagggaaggaaggtcaggccaggattccatgtcaatttgtgtggctgaaaaatgtgcacatgtctggtttgcagtctgcttttccatcacttgaagtccagtttgaacacctgtagaatgttcactgatgccagcaatactagccacctcttcctcattgttcttgaggtccctggcactaactattgtactatcttctacacctttaggatatggcacaatatggtccccactgtcattgaactcagcccatattgcatcccctgcctgctgctgctcgtcgttccaattaaacatcctgctcaggtggctgccgccgtcgcgggagccgcccccgaactcgaagtgcgctgtttcccaggtcccaacggtcgcatctccgaccccaggaaaagcacccgaactcgccggctcgcctatcgcgccgtcctcgaacctccagttgccttctgtggctctctccagtctccacccaccaagagtagtccagggatgggagtgcgtacccgctgcacattactaggcggctgcagtaggcgttcccggccggcctcgag

SEQ ID NO: 122606 - DNA, 331 bp, Zea mays
  Clone ID: MRT4577_43301C.1
aaaaaaaagcaacttttttccttttccatctaattttttttaaaacccccctcttttttagatttaccgggggggccctggttacctataaaaggggggcagggggtttggggacacccatgcgggccccttgggcccggccctgcaaaggtgggggaaccccccccaagacctgggccccccaatacaggcccgggaccatattttggttggggggtctgggcaaaccgggggggggggggccctggtttaaactggcaaatccttggcgactttgggggatggaccccccaaaactctggggggaaccctggacgggcatttgtttttg

SEQ ID NO: 122607 - DNA, 316 bp, Zea mays
  unsure (1)..(316): unsure at all n locations
  Clone ID: MRT4577_43302C.1
ctcaatcacgtccaatactaccaaacgcaaggggcagtgggcacaatattcgtgttggcaacnaacaacaccaacacaacaatttgccagaccaaacgcgccatctccaccaacaactatatacacaatcatctagtcaacctcgtcacggacaacaccacaggtctagcctcggccacgacgaccacctacatcccccgagacaacccgtgctgaatgaccggcatgaactacgctgcttgtgtcaaagcaaagacattccctacctgagacaaactatgacagccaccacaagtccattgctccccaaatccac

SEQ ID NO: 122608 - DNA, 322 bp, Zea mays
  Clone ID: MRT4577_43303C.1
gggagactcataccgtacttacaccaaggcattgcatgcaagagaaattgcccgactgaccctccaagggcaaactgtctgaccatatacgctctcggggaccggtgtcaccctctagctggatcgatccaaccgctcgtaaatttatgcctccatccaaactgcaacgaccgacgaatcctgcctctacatgaacaattaactagtctttatatgaaaggcctttgcttctccctaccctgcttggcatggaccggcaaccccccctgctttaaggagtgctcatatgattactgttaccctgcggcagggcacgcacttc

SEQ ID NO: 122609 - DNA, 602 bp, Zea mays
  Clone ID: MRT4577_43304C.1
ttgggtacctcgaagccggccgggccgggatactgagaaagcgttgagagagacatagatattctatatccaatcatcgaagggtggcaaaaatgaagtgaacaggagaggaggcgaccatacggctgcgaccgctgctcatgggacctctctggagggcgatggccatcgacctacatcgcactactccgagtctgatgtgtcctgcgccacgactgcctcgtgagaccttgagtctgacggctgcgctaccgggagaaagacctgtttctacatttgcatgcgtcactccggctagctccagaaaccatctggatacactaaattacatgataaatacttgtggtgatggagacctatcccttcctacacatgacttacatggatgctgcaagcgactgcgacttggtatctagtgagcttgatgttgtaatcgatgatgaataataagtatctcttgtgacgactatgtgcatatgtacaaggtcattgattaattacgctggtaattgcactctgccctacactaatcgatgatgtaaacaaatgtaatgctgctcttttgtgcggaaatatatgttggatgggcgctatgcacatca

SEQ ID NO: 122610 - DNA, 496 bp, Zea mays
  unsure (1)..(496): unsure at all n locations
  Clone ID: MRT4577_43305C.1
ccnntaaatcattttttttttttttttttttttttttttgtgtttttttggggttttccgggaattacccccaaaaaggggtggggcccaatttttttggtgggaaaaaaaaaaatccgccctttgggaaacattccttaagcatcatcagaaggaaaaacagaagccaaaaccggacgtaccctatttggtaattactatactaaaaaaaaaacaaaaaaaacatttattttccgggcggctgttttttaataaaagaaaaaagctgaacctttttggggaagttgcatgctgaaaatgtccaaacggagcaaatggcccagcgagcattttgttccggaattagcactggtacccgatactgaaagctaagtattgttctcaaacaagggctggggggactttcctgttcctcctaaaaacgaggtaaaggatcggaacttggaaaatcaccttgcccaaaaacccgaaaaaaccggaaaaaacttgagaaaag

SEQ ID NO: 122611 - DNA, 213 bp, Zea mays
  Clone ID: MRT4577_43306C.1
atggagcaattgactgaactagaaaaagagctagttggagaacacaatgagaaagggaatcctaagcgcaagtttgatggctctatttccattataggatcagttcacatggaagcaagtcaagcaaagggtcatgttaaaggggcattagtgattatacccctctttggtcttgcaattatgattttaccccttgttttttcaactttgtga

SEQ ID NO: 122612 - DNA, 242 bp, Zea mays
  Clone ID: MRT4577_43307C.1
atgctttttttttttggttggcacgccaccatgccggggtctactcatttgtgacaccgttctcaacctggagctggactccacccacggtagggaacgtaaacacacactaccccggcgacagaggccccatgatccaattgcaaataagcggctatacccccgggtgcacaacggtaattgatacccatggcggggggcgccagggagtatcgagaagcgttgcctgaacctgctgggca

SEQ ID NO: 122613 - DNA, 185 bp, Zea mays
  Clone ID: MRT4577_43308C.1
aaaaaaaaaaataaaaagataaagaagaaaagaacacaaaaataaaaaaaccagagggggcgtggccatctagaagagacgggcttccgttcccgtggctgcgacgtcgtccttgtcgtctgagagggccttaattgttattcactgcccgtggactaacatcgttggacgatgggaaacccgtg

SEQ ID NO: 122614 - DNA, 355 bp, Zea mays
  Clone ID: MRT4577_43309C.1
agatctctcatccgtacgacaaaagccaacaagtggggagaaatcactacatgtaaacccgatgccagcttgcaaaaaaatttattggtgagactctagctcggctagtatttggttgccatactgaacagcaaagtcccaactctaaagtgaaagaaaagctatcctgaaagaagaaactatctagctagatgggcacaaaaatggctatatcaactatccaaggacacaaaaacgggcgacatggtcccttctataaaccgtaactatacgtatcagacctacggccacgacacgtacaagcatccgttctatccaagaataccaaactccgggtcagttcccacggccgaag

SEQ ID NO: 122615 - DNA, 289 bp, Zea mays
  Clone ID: MRT4577_4330C.1
cagactgctgctgctgccgcagcctcggaccatggacccccatgagatggttgtcaagaatccatatgtccacctcagcatccctcgggctcacctgcgctctgactcggggcagcagtcagaggaggttccctcttcatcgtcctcctctgagacccagcctctgcctccaggagcctgtgccccagagccagtgggcctcttacacactgtggaagccccagggcccaaagctatcaagggcgccaagggtgagcagtgccagcagacctggcagtcaccctgcaat

SEQ ID NO: 122616 - DNA, 374 bp, Zea mays
  Clone ID: MRT4577_43310C.1
gtcaaggacacgcgcgggaccgcttacgtcgtctacgaggacatctacgaggccgtgagcgccgtcgaccacctctttggctacaacgttgtcaatcggtaggttatcgtgctctactaccagcccttcaagatgtctaagtagtcggatctcacgaagaaggatgacgagatcaccaggctccaggagaagtacggaatcgggtgcaagacgcccggcccggtctccagcgactgaacggtcagggtattgtctttgcaaactattgcatgatgaacagcatttaaaatgaacagattggttgcgctgtgctgtgttacattcagcgtctataattactgtggttggattcaagcttcataacaattgtgatg

SEQ ID NO: 122617 - DNA, 875 bp, Zea mays
  unsure (1)..(875): unsure at all n locations
  Clone ID: MRT4577_43311C.1
catgcataagtttgcttcatacctataaccataaaggagcatggtnagatatgttctcatgcatatgttcacatgaaaggattgttataaattaaagagagtagatgtggagacttttgggacctctccatccaatacctgttgcgagaagatgcagaataactatcaagaatatgtgaagctgaaagcacgagttgaggttttacaacactcgcaaaggaatcttcttggtgaagaactggctccacttagcccaagtgaacttgaccagcttgagagtcaagtagacaagaccttgaagcaaataagatcaagaaagactcaggtgttacttgatgaactttgcgacttaaagagaaaggaacaaatgctgcaagacgctaacagggttctgaaaaggaagctgcacgagtttgagacagaggctgcttctcccccacaattggcgtggcaaggcggaggcggcatgttgtcccatgaccctccacagccagaacactttttcgtggctctggagagcaacgcgcctctgcaacctacataccatactatggacatgaaccagcagccagagccagcgccgggcgactgctatcctcctgcgtggatggcttagccagcgctatggttccattgccttgagaagtgccgtgtccttcagagatcgctacgagtgctgctgcctgccatgcttactgaactgttcaaataagaaataaccacatggtcctatataggttgctgttgtctttatcttctgttgatcacgtccggctcagatgctttaacgctatgcaaaatggcttagcgatgcacgctggaatgggctgaactgcttgtgttttgggagtataaatcgcttgggcgcttggcac

SEQ ID NO: 122618 - DNA, 297 bp, Zea mays
  Clone ID: MRT4577_43312C.1
gcacatcacaacagcatccaccggcccattcttcctcatagccgactgttcaactcaatactgtccgcagtgcccacacgatcaacgcagcaacataatgcaccgaatctacatccccaagctagcaattcttctgctactctgcaccaaaacgtctcccgcctacctatcctctgcataaatccatgcgaacccacccaacaacctcgtgctcctcatgaaccgcaagaaccagacgagcacgctgcctgcgctgcgcaacatcacagtccatcgcctcatgcctcatgatctaca

SEQ ID NO: 122619 - DNA, 2467 bp, Zea mays
  Clone ID: MRT4577_43313C.1
cccacgcgtccgcccacgcgtccgcccacgcgtccgcccacgcgtccgcgtcgtcgggggaattgagtgtgagagctcgaaaaaacccaggggatcggccggaccagcagcgagcgagcgcgagctctgcgtgcgtgtgtgtgtctgctctagattagatcacctccatcgtcaataattgcaggcagatccatagtctgctggtggcgagacaaagcaacggatcgtcgtcgatccggagagcggaaagcgcgcagatcgcgacggccatggggcgcggcaaggtggtgctgcagcggatcgagaacaagatcagccgccaggtcaccttcgccaagcgccggaacggccttagaaataaaaaaaatcgaggtgtatacaatttaggaggcatttaactggtatttaaaacttagattgtgctgcaatttaccattcttgtaatttagtattaaaaggctattcctgttttctcctgaaattcggaatgccgcaccatgtttctatccaagtaactcctttatgcatgtcttcatttgggtttggcaacctatatatcagcgccatgcgccccggccggtcgtaacctagctaggagtagctagctaggactagctagctaggagcctaagcgcccagcccagtgggtggtagcctaccaagggtgaggaagaggagctgagctaggaccgcggagcgagatccaatctgcaccccacgaacgaaaagattcttccccgccggcgtcgctctctcatccgtcgacgtctcgctccttccttcctctctctctctctctctctctctctctctctctttctctctctcagccagcagcaagcatatagcccagcaccaccccatgcccaagggccctccctctccctcgtcgtcgggccaattgagtgtgagagctcgaaaaaacccaggggatcggccggaccagcagcgagcgagcgcgagctctgcgtgcgtgtgtgtgtctgctctagattagatcacctccatcgtcaataattgcaggcagatccatagtctgctggtggcgagacaaagcaacggatcgtcgtcgatccggagagcggaaagcgcgcagatcgcgacggccatggggcgcggcaaggtggtgctgcagcggatcgagaacaagatcagccgccaggtcaccttcgccaagcgccggaacggcctgctcaagaaggcgtacgagctctccatcctctgcgacgccgaggtcgcgctcgtcctcttctcccacgccggccgcctctaccagttctcatcctcctccgatctgcttaagactctagagcggtaccagaggcacatctatgcttcagctgatgctgcagtgccatctagcgatgagatgcagaataactatcaagaatatgtgaagctgaaagcacgagttgaggttttacaacactcacaaaggaatcttcttggtgaagaactggctccacttagcccaagtgaacttgaccagcttgagagtcaagtagacaagaccttgaagcaaataagatcaagaaagactcaggtgttacttgatgaactttgcgacttaaagagaaaggaacaaatgctgcaagacgctaacagggttctgaaaaggaagctgcacgagtttgaggcagaggctgcttctcccccgcaattggcgtggcaaggcggaggcggcatgttgtcccatgaccctccacagccagaacacttcttcgtggctctggagagcaacgcgcctctgcaacctacataccatactatggacatgaaccagcagccagagccagcgccgggcggctgctaccctcctgcgtggatggcttagccagcgctttggttccattgccttgagaagtgccgtgtccttcagagatcgctacgagtgcttttgcctggccccctttgctgcctgccatgcttaccgaactgttcaaataagaaataaccacatggtcctatataggttattgctgtctttatcttatgttgatcacggcctgctcagctgctttagcgccatgcaaaatggcttggcgatgcacgcttgaatgggtcgaactgcttatgttttgggagtataaatcgcttggaatgcattggcaaaaaaaaaaggcatgcctcttgcctccctctgtttttcaacacaaatggattagcctgcgctttggttccattcccttgacaagtgccgtgtccttcagagatcgctacgagtcctgctgctgcttttgcgaaccccccctttgctgcctgccatgcttaccgaactgttcaaataagaaataaccacatggtcctatataggttgctgttgtctttatcttctgttgatcacgtcctgctcagatgctttaaacgctatgcaaaatggcttagcgatgcatgctggaatgggctgaactgcttgtgttttgggagtataaatcgcttgggcgcttggcaataagtattattggca

SEQ ID NO: 122620 - DNA, 398 bp, Zea mays
  Clone ID: MRT4577_43314C.1
gccatgaccttgagcaggccaccatgctggcctctgactgcctaacaaccagatggtgtgattctctgtcgccatgtgatacgtgacggaacagtcgaggtagaggaggaggatgcacggccggcattctcctccttcctgttgcaccgccgtttattaatccctaacttttcatccctttctatcaggccatcctactagcctcaatattgctagtcgttgccgttgtggcgtagatctaacagtactattggtaataaatttgtaatacattgaggtcgatgataatatatatatatatattatatagtcgttgtgcactaatattttattaaatatttatgtgccgtcgtaatgacgggcactttactagtaacaaattaacacacgtctttgtg

SEQ ID NO: 122621 - DNA, 2113 bp, Zea mays
  Clone ID: MRT4577_43315C.1
acacctccatcgtcaataattgcaggcagatccatatagtctgctggtggcgagacaaagcaacggatcgtcgtcgatccggagagcggaaagcgcgcagatcgcggcggccatggggcgcgggaaggtggtgctgcagcggatcgagaacaagatcagccgccaggtcaccttcgccaagcgccggaacggccttcttgagcaggcccgagcgagatccaatctgcaccccacgaacgaaaagattcttccccgccggcgtcgctctctcatccgtcgacgtctcgctccttccttcctctctctctctcttctcttctctctctctctctctctttctctctctcagccagcagcaatcatatagcccagcaccaccacatgcccaagggccctccctctcgctcggggtcgagccaattgagtggcagcgccagaaaaacccagagcgcgagcagcgagcgcgagcgactcggcagcgagcgcgggctcctgtgtgcgtgtgtgtgtctgcgctagagggcgaagggcacggaccgccttcgtcaataattgcggtacgaacggggcaaatccgtcgtttaaagaggtcgctgatagcgcctgctggtggcgagagagagaaagcagcagaatcgctgagggatcgtcgatccggagaggcaaaaaagccgagagatcaggcagggcaccatggggcgcgggaaggtggtgctgcagcggatcgagaacaagatcagccggcaggtgaccttcgccaagcgccggaacggcctgctcaagaaggcgtacgagctctccatcctctgcgacgccgaggtcgcgctcgtcctcttctcccacgccggccgcctctaccagttctcatcctcctccaatctgcttaagactctagagcggtaccagaggtacatctatgcttcagccgatgctgcagtgccatctagcgatcagatgcagaataactatcaagaatatgtgaagctgaaggcacgagttgaggttttacagcactcacaaaggaatcttcttggtgaagatctggccctacttagcccaagtgaacttgaccagcttgagaatcaagtagacaagaccttgaagcaaataagatcaagaaagactcaagtgttacttgatgaactttgtgacttaaagagaaaggaacaaatgctgcaagatgcaaacagggttctgaaaaggaagctgggcgagtttgaggcagaggcggcttctcccccgcagttagcgtggcaaggcgaaggcggcatgttgtcccatgaccctccacagccagaacacttcttccaggctctggagagcaacccatgtctgcaacctacataccatacgatggacatgaaccagcagccagtgccagcgccgggcggctgctatcctgcatggatgtcttagccagtgcttcattccattgccttgagaagtgtcctgaccttcacagatccctacgagctttattactgcttttgcctgcccctttgctgcttgcggtgcttactgaactgtccaaatgaccacatggtcatatataggttattgctgtctttatcttatgttgatcacggcctgctcagctgctttagcgccatgcaaaatggcttgggcgatgcacgcttgaatgggtcgaactgcttatgttttgggagtataaatcacttagcaataaaaaaaaaaaaaaaaaaatacatgaaccagcagccagagccagcgccgggcggctgctaccctcctgcgtggatggcttagccagcgctttggttccattgccttgacaagtgccgtgtccttcagagatcgctacgagtcctgctgctgcttttgcgaaccccccctttgctgcctgccatgcttaccgaactgttcaaataagaaataaccacatggtcctatataggttgctgttgtctttatcttctgttgatcacgtcctgctcagatgctttaaacgctatgcaaaatggcttagcgatgcatgctggaatgggctgaactgcttgtgttttgggagtataaatcgcttgggcgcttggcaataagtattattggcatgcctccctctgtttttataaatcattaatgaaaaggattgggt

SEQ ID NO: 122622 - DNA, 271 bp, Zea mays
  Clone ID: MRT4577_43316C.1
tcttggcatgcttttgctgcccataatgatgatgaggttgatgatcttgataatgcattggctggacaaaatgatcaggcttacttcgcatcaaatgctgctgctcatgcctctaagaaatcctcaccacgtgtgaccagtgaagaagtccagaaagctgatgatgctctcgatggctctgaccaccgtcgtgggaccagcgttagtgctagaatggatgcacagcataagaagcataacatccccatccttcccatcactacaatcggtt

SEQ ID NO: 122623 - DNA, 279 bp, Zea mays
  Clone ID: MRT4577_43317C.1
ggggatacaagggaaaaaaaaaaaacaaaaaacaagctattttatttttagacaacaaaccacggccaacagggcgagggtacccaagttaaaccacacctacacacacaaacacgcctccacaatggacgcccccaaagacacataatcgaccgacgaaccccaaaaaaaccgtcagaaaaaaccctaaactcacccacctaaaaaaaccggcgggacatcccccttgacccacacggagaacccccgaaaaggccccaacaacaggcccttaccaac

SEQ ID NO: 122624 - DNA, 415 bp, Zea mays
  Clone ID: MRT4577_43318C.1
gaagtccccaaaaccctagcgacggcgccgaggttcccgcacgaccccatccatgaccgctgctgagccgccctacctgcgggcactgcccagagcttcgttcggatgaataccgccgtagcgggcgcttacacgaatactcgacactgcctgctacatgggagcgtcggtccgatggaccggatcggctcgtgaatgatctggctcaattgctttgagccgttcctgctgccatgtcgatacccgggcaaagacatcctggctgctcgccttgcggacccgattccggcacgtggtagagcgtactaccccttccgtgagggcttctcttagggggccgcctcgcaactatgagctggagatggtacgttgtcgtgtagatggatcacttgagcattgtgacccgcttggattt

SEQ ID NO: 122625 - DNA, 401 bp, Zea mays
  unsure (1)..(401): unsure at all n locations
  Clone ID: MRT4577_43319C.1
ctgcaggtaccggatctgtattctgttttacccacgcgactaaaactcgccgacacagccaancacggggggaagaacagaggaacaagccaagaaagccggggaacaggcngcnnccggggacgaggagcacgaagacaagggagccggagacggagccccgacggcggggacgggaaccccggcagcagcggcggcgacgaagcaggcggcggcggcggcaaagcgcaacaccccacgaaacggcggggaccgcccccagagcgcaaagcgggaccgaggggccgccccgaccatcggcggggacagggcccggccccgctaagagaacgcgggcggcgcggggagccacggcggacaggacgaggccgccatcgcggcgctgccgagggaggaggtgg

SEQ ID NO: 122626 - DNA, 366 bp, Zea mays
  Clone ID: MRT4577_4331C.1
caagtgtagtatctgttcttatcagttgaatatgtgatatgtggaccatgtgttcacttcgatattaaatttattttttgtgggggagggctcactacagtcaagtctaaattatttttttatcttgttttgttgatgggccttgaaatggtgtctgaaataaagtccgagcacgtcaatcacactcaagttgaaaatctgtttatcagttatagaaaatattatgcggtgatttatgtataaaaaaatatttgtagggctagtttgaacctctattttcgttttctatttttcccacagaaagaaaatgaattaatttagaaaataggttgccaaactagccctgtagaatatgaaattccatac

SEQ ID NO: 122627 - DNA, 302 bp, Zea mays
  Clone ID: MRT4577_43320C.1
ttgggcagacaggacatgcactacctgccgtcgttcaagaagttgcacgacttggaggcggagcctgcgttctgcgacgcggtcagtcatgcgtacgagtcctcgcgcgataatgcgaatgcccaaggttaataaggagtcaaggctcttgcggcatgtttttaatctacggggagtggagcgcagcactagagaggagagccgtactgattgcaatgatgctggagcagactcggagtaatgttcgactgcagctgtgagaataagcgaaatcggtagcggaataataagcaacaacgaac

SEQ ID NO: 122628 - DNA, 670 bp, Zea mays
  unsure (1)..(670): unsure at all n locations
  Clone ID: MRT4577_43321C.1
gcaggactcctcttcctccttccctyccctaaaaggtaaaaacatttggmgacagagamavarggagawcgaggggaaaccgagcaaccaagacgcagacgacgatggagcvagcngacgcgttgccgggtggcgctgctggacgcggacmgcsgcggcggcgagggcggcaagaagcagcagcacctcgcggcgcgggttttggaggagtcgaggaagctgtwggacaacgtggcgccggccatcttcagccgcstcgtcaccyacagcatgaacgtcatcacgcaggccttcgccggccacctcggcgacctcgagctcgccgccatctccatcgccaacaccgtcgtcgtyggcttyaacttcggcctcatgctgggcatggcgagcscccyggagacgctgttcgggcaggcgttcggcgcgaagaagttccacatgawgggcgtttacatdcagcggtcgtkgatcgtgctgttcatgttcccggtgctgctgctgcccatgtacttyttykckgaggacgttctgctgctgacggggcagccgccggagctggcggcgatggcggggaaggtgttcbttttgttyatcccbctkcacttctccttcgccttcctcttcccgctgcagccyttcctgcagttccaaaatgaggaactccgccaac

SEQ ID NO: 122629 - DNA, 102 bp, Zea mays
  Clone ID: MRT4577_43322C.1
gactggatcgctataggtctctcgtctggattgagcctgggacggagcacaccgccgcgacaaaggctgtataaacaaacaacccgacctagccgacggagc

SEQ ID NO: 122630 - DNA, 1166 bp, Zea mays
  Clone ID: MRT4577_43323C.1
gctccaacaagacacaccaaaacacctagctagcttaccgcacctgctgcttggggctgccaagtaagtagtaagctagagaagcaaagcaaagcaaagctccgatccaatccaatccatcgcaaggattatgtctctggtaaggctcctggactctggtgaggctgatggacacgctggcactcccttcgtgggtgcggaacccgttcagcatcttcggcacggcggtggccgcgacaccgtggctgtcgacagacacgtcggcgttcgccaacacgtacatcgagagccgggacacggcgggggcctacgtgttcagcgccgcgctcccgcccggcgtgaggaaggaggaggtcacggtggaggtggacgagggcaacgtgctcgtcatcaccggccagcgcagcgtgtccagggaggagcgcgtcggcgacaggtggcaccacgtcgagcgctgctgcgccagcttcctcggcaggttccacctccccgaagacgccgccgtcgacggcgtcagggccgccatggacgccggcatgctcaccgtcaccgtccccaaggtcggtgccgctgctgccgctatcgccgagaagcccaacgaggcgccgccgccggtggccgtcgaggcggccgacggcggccctgcctgctgatcttctgatgccgatcgacgccgagacggccggccggcacctccctgttccgatcctcgacgccggcgcggccccctggtgaatgaaccgtagcgtcccacgtcgtcgcccgtgcccgtgctgtctcaaagagtttgcttccgtggtttggtcttggccttgcgtacttttccgcgtgatatgatggatggagcggcctacatgcatgtagcaagggaaaaaaaaaaaagagtatgcctgcactgcatgcatggctgcaccatgcaatttcgtcctaaaatgtcttactgtgatttaggaaatgaaaaatcaagctaagctggaatcatatattactactaaaaaaaaaaaaaaaggggggccgcagaataatgagcccgtcaacccgggatccgttttcgtcttgttgggttgtgccgatttacaagaaccttttacttgccggtgatttttggaaatcgagaagttcatcatatttcctcccagaaaatctagaaataaacaattgcgagt

SEQ ID NO: 122631 - DNA, 451 bp, Zea mays
  Clone ID: MRT4577_43324C.1
ggacgcaggcacccagacccagcatgctattgaggtcgtccctcatgcgcgtcgcaccgcatcgaattgtacgatgcgaagctcactctgctcgcggccatggagaacaagtacccaaccgcgagcgccgagtacagcgaggccgccgagaaagccaggcgcaaggtccgcgccctcatcgccgagaagaggtgcgcgcccctcatgctccgcctcgagtggcactccgacgtggacgtacgacgcgtggtcgaggaccggtggcccctgcggtactatgaagcgcccgggggaactggttcacggtgccgacgcggggctggacatcgcggcgcggatgctcgagcccatcaaggaggagttccccaccctctcctatgccgatttctaccaacttgccggagatgtgggcgtcgaggtcaccggcgatgctgacatccccttccacccc

SEQ ID NO: 122632 - DNA, 181 bp, Zea mays
  Clone ID: MRT4577_43325C.1
cctcgaggccggccgggccgggattccgtcttgatcctctggtccgtggccattgcctcgtccatgctctccgctaccaccgtgccactccagcaggggggcggcctgttcgagctctccggcctcaggagatccgcgtcgctgccgatgcgccggaatgccaccttcgacgacttaatgt

SEQ ID NO: 122633 - DNA, 572 bp, Zea mays
  unsure (1)..(572): unsure at all n locations
  Clone ID: MRT4577_43326C.1
gtatgccatcttttttgttggtaagccatctctggnagatattctagcatgatttatatggacttgatcacttgagactaaaaggcttcattgttgttgcctgtgttgtcaattagtttgaactcaggtatattatatgagttcttccatgcttaacacctgatgggttagatagcacatttgttttttctcaacttaaacctgtctaatttaaaagtcttaattttccatcttcattggatatatcatcatgtgcaaggttccatgaataccttgaattcttttcccaaagggcattgagttttctgttcaactatggtatgagtagtacttaatcttattctttcaagtgatatattgatatgatagttcttgttaacctaggctaggaccaactttccacaaatgtttcatgctacccaattatggtggatttatttatatgatcgggaaataccattctttacctaccaccttttggtccgattgtttgtagaatttgcttgatttttgctttccatgctttctagttctttagtttcagtcgtattgttcactgggctcaacatgct

SEQ ID NO: 122634 - DNA, 568 bp, Zea mays
  Clone ID: MRT4577_43327C.1
tccccggatgccgctctctctcctggaccctattgggcaacggccaggcccttccccaggcgtttcctcctctctccccctcagctcgcatcccctctgctcgctcgcgcttaggtgagctcgcccctgcgtgctcctccctcctcccctgggcgccacgcccagctcccacgcgcgcccctctactcgctcgcgcccagcgcgtttccatggccaagcatgccatggctccctccgagctcgcccccgacctctgctccttcctctccgtagtcccagggtggcgcgccctactcgccctccgtgtctctctccctcgctggccggggtggcgaagctccccgggcagtgcgctcctctgctcgccggttctccttggcccagctcggccgaccatccctgctcgcccatggaagctgcgcccccgctccctgatttctccagctcggcttcctctccattttcctcagccgcgcctacttcctctgtccatccctggctgcgtgcggtgcttctccatggatgtgcccgctggttgctggcagttttgctctgcatcagcatggca

SEQ ID NO: 122635 - DNA, 651 bp, Zea mays
  Clone ID: MRT4577_43328C.1
aaacaaactagttatccattttagaaaacatgatacatgataaaataatgtgtcacacccgggttttagggggtccaaaacccaggtgcgaaataatcaccaaatgtgctaggatcaagtctcacacatatgatgacacatggcacagaaacgaatgtcacatctttactatataacaggagttctatacaaaataaataaataatttcattataaggagacaacggtccagcaacccaaagttgactgggagacgatggcctagacctctcacgaactcgccacagcatcctccatgcgcctcatcctgcggtacctgttcttgacctgggacttgagattccaggtaccaacttgctcttcagctgactcgtgacctcactgcgacggcggtggtgagtgcggtgctgcccacggcgagatgcgggcgtgaatgtcgctgagtggatgaacaggcgaacaggttggtcccgtgcggcagcgggagcgcgcggaggcgggtgccgacaggatctcggtggcagcagtgcgggcgagcaccgatggaaaggagcttgggcaccgctcaccgaagatcgaaatccacagcgccatggcgtggtcggtccgggtttgtgcgttatcctgatcccggccggcctcgatgaaccc

SEQ ID NO: 122636 - DNA, 216 bp, Zea mays
  Clone ID: MRT4577_43329C.1
aatttatttttattttttttttttaccatataccaaggtcttcgtattcaacaaccagacatattcatctgacacacaaacaactgggtgccgatgccgaccacggcttcaaggatctaccgaaccccatgcggtcgtctatgggacagggtttgctagatgagtgcatccaactgttatgaataaggcacccagtacataatgggaacggaagtc

SEQ ID NO: 122637 - DNA, 617 bp, Zea mays
  Clone ID: MRT4577_4332C.1
gccgggggagtcatagcatatatagaaaaccatggccaccgactcactcactccatgtccgtggctccaactgagctctcaagtgcaggggctctcggtcctttcatgttacaagcctggtatagaggtcgatgaagttaggagtggtgtagttggtggtggtcttgtcaggggagtcctgagggtgacccaaaatatcgaattccgccctgcgattgtcatgatagatgagactgtaaacatcaagagcacccaagtctacttaagggttgtgttactgtacgctgactctattgaactgcaatttgctgtcccaggagggcttatcggggcgggaacatccatgcacccaactctaacgcgcgctgacaggctgactgtccagcctcttggtgaagcaagctcactacctgatgtttacctttagcttgctatcaatttcttcctactccagttgctgttgtctgtgaggcccctccggtcagtgaaggctgggaatgtgtccatgctcaccaagggcgatatcctgatgctgaacataggggccctgtccacacgcgcccgtgtggtctctgtcaagaacaatcttgccaattttctgctcatcgcgcctgtct

SEQ ID NO: 122638 - DNA, 272 bp, Zea mays
  Clone ID: MRT4577_43330C.1
attcggctcgagcgctgctactgctttttttccagctgttgctaccaccacacgcgcggctggtctcgcaagctcatgaaggatcaccacgacgatgagcctccccgtcccctactcctctgctacactaagcctcgccagaacgacaatctgctgctccgttgcagtggtggcctacaaactggtgtaccactacacaaacatcaccatcacgcggtacatcatctcgagaacgcccaacggctacatggcgacgatgaccatgagcaact

SEQ ID NO: 122639 - DNA, 375 bp, Zea mays
  Clone ID: MRT4577_43331C.1
gtatcctccagaagcgtatggtcttgtccaaagttcatattttcatggtctcaatccttatgaagagttgatacatgctatatccactagagaagctatgatccgctcctctagaggtctgtcagaacctggaactttgttcaagaatttaatggccatcttgagggatgtagttatatgttatgatggaactgtgagaaacatttgtagcaattctatcattcaacttaagtatggggaagatgatgaaactgattcttcaagtgttgtacctcctggtgaacctgtgggtgtcttagccgccacagctatctcgaaccctgcatacaaggctgtcttggattcctcccaaagtaacaatgcttcatgggagtc

SEQ ID NO: 122640 - DNA, 291 bp, Zea mays
  Clone ID: MRT4577_43332C.1
tcgaccacgcgttcggggagccacgccctttacttcgttttgggctcccgggcgcgacaacacgggggggtgtacaccacatgtgcgggaagcactactgaggggtgatatggaccaaaagaagatgatcgtgcgcgtgatgtggtgccaaccacaaaatgcagttgggggaggacctgtagaatgatggactttacaagggggtgctcgtccaaggagtggcagccaccaaacactatttaagtgtggaaatcaagggaaggccccggtgtatgtataaccattatatat

SEQ ID NO: 122641 - DNA, 441 bp, Zea mays
  Clone ID: MRT4577_43333C.1
aaaaaaaaaacctccaaaattttatttaatgaaaacaaatttaaaagggcagcccccattgaatgaaagctacatgctgtaaatttaaaaaaaattttttggaaaaagttaaaaaaaaaattttatttttttgagaaacagcccaaatataagggaaactggaaaaaaatttttaattaaataaccaatttgggaaaaaaaagaagtttttcaaaattggggggaggattgcctgggttaatccttcctttaaacccaattaatgggggaaccctttagaattacctctgctttttaaaaaaaaggaaaaaactcattgggggttaacatttttccacaatgggaataattttaatttttatcaccttataaaccctccaaaaatttttaaagcccatttgctgttggcccaacaaaattggagccaccaaaacaactttt

SEQ ID NO: 122642 - DNA, 383 bp, Zea mays
  Clone ID: MRT4577_43334C.1
ttatggccgccctttattcttcctttttattgaaatattcgatgtctttacgtcaactgcatatctcatgtacaatagagctcctccttggcaggaaccatcagggctggtttcatgaacagctacaggctggttcctactttataaacaaccaccatttttcatccaagagatgggtcatctctttcagcacatctttatagagcaccatctgcttcacaagactgcaattgtcgatgatgacctcgagcgcaagagatagcaaatctcgttctgctgttgagcccgatcagaaatgaacatcatgggtattttctgcgacgagatccatcttcagatagatgggattgtggccactcactggaagcaccctcattagtctg

SEQ ID NO: 122643 - DNA, 653 bp, Zea mays
  Clone ID: MRT4577_43335C.1
ccgcgctcgccctctctggttttctactgctggtgatactcaccggactccccgccgccgccctcgccgccaacatgaccgaggcctgcgtcaaggccgccgtcggccaccccgacacgctcggcgactgtcccttctcccagagggtgctgctcactctggaggagaagaaggtgccctaccagatgaagctcatcgacgtcagcaacaagcccgattggttcctgaagatcaatccggagggcaaggtgcctgtgtataacggtggtgatggccaatggattgctgattctgatgtgatcactcaagtcattgaggagaagtacccaactccatcacttgtgacccctcctgagtatgcatcagtgggatcaaagatcttctccaccttcgtcacgttcttgaagagcaaggatgccagcgatggttcggagaaggcacttgttgacgagctgcaggcgctcgaagagcacctgaaggcccatggaccctatgtcaacggggcgaacgtctctgccgtcgatctcagcctggctccgaagctgtaccatctccaggtcgccctggagcacttcaagggctggaaggtccccgaaaccatgaccagcgtccatgcctacaccgaggctctcttcagccgcgagtcgttcgtc

SEQ ID NO: 122644 - DNA, 242 bp, Zea mays
  Clone ID: MRT4577_43336C.1
ggcccaaaacccgagtcgattttttgttgacggtttccaaattggaagcataaataaattttgaatttgctaccaaattttttcgcaaactggtcacaaaatgttcaggaatttttattttccaagaggccagcaaaaaaaatcaggcccttcacaaaacgaaaacaacggaataactgttgtttttttttttgacagctgcattttttggagcttaatcagtttaaaaaaaaacggccata

SEQ ID NO: 122645 - DNA, 376 bp, Zea mays
  Clone ID: MRT4577_43337C.1
cggtacaaatactcatagcatctgttattactgtttatatagatgggggaggtcttacactgacattatgctctcaccagatgagtaatatgaggaatgctgaccgttctacatgctgggagcagaacaccttattgctggaaccctaattgctgttctaggtgaaaagccatatcatggagcttgctagatgctgtggtccagttcttatccgagcacttgtatcgctaagacgagacgcatgttagaacaatgaccaacatgaacataggtgtggctcaaccctgtaacgaacagatctgtaaggagacctggagacacctaccatcagagatctgactgtctcccttgagaaactcgatccggaactcgatat

SEQ ID NO: 122646 - DNA, 342 bp, Zea mays
  Clone ID: MRT4577_43338C.1
attcatcacaccttccgtttttaatttagcttcaaggccgccctacacggggcatggtccaatctaactgagccaatggcactgaaccctatgtctcgcgaacatcactaacatagctcttcgccacatcatatcatatcacctttgctatcttggattctgacttatacgcgtccagacataatccgtcacactgaatcttcactccactttatcaccaaccaatctctattaccaaatttgtcaatcaacatctccactaatactatgaacaattactatcgctgtccttttatcactaactaaaaactaacctttctcaccacattctaaccccaactc

SEQ ID NO: 122647 - DNA, 660 bp, Zea mays
  unsure (1)..(660): unsure at all n locations
  Clone ID: MRT4577_43339C.1
acgggcacgtaggtccttgtggactatgctttgtgcgacaccacccgactacccgatctgacacagcgctgatcgcgaaacatgatcgtactcgaattgtctcgaccctctcacgcagcgcacccagnatcgcatgcgagatcccctgtcgcatgaagacaagcctacatacccgatctcctgtagcctatgaacataggcacttgttccaccggatgacgccaccgtatcacggagactatcgtggcttgcttgtatgcgagggtgttctgacgtcacacttgaacggggcggttacagcgcacctcgcacgctacctcgcataggggacgtgtgaagctgactcgatcatcgtactacctgctcctggcattgttccactcgtggcagtatgcgtggacttctctgggtcctgggacactcagctctgcgctggcccttccctctactacgaaccaggagaatgatctgcaagacctggggcgccaactgaatgaacgatctcacattatttgctctgagcttaatgacgatgctgcaaagaggaacctgacgtgccacttgagaagatgaatagatctgcgcgcgttgtgagggcgattgctcatacgcacgctattacgatgactggctcagtgactcactacgctcacccgatgg

SEQ ID NO: 122648 - DNA, 313 bp, Zea mays
  Clone ID: MRT4577_4333C.1
tttttggtttttttttttttttctgttggttaaaccgccatgtaattgtatggcaaggataaccttgattgtttttactcccacatgggaaaggcaatttcactcagaaaaagaatttagaatccacaacatgcaagtgctggacaggacgttccgggcagaatagatgggggggagtctagggcagccagtgtgcctgatttgaagaaagaaaattatggaaaagtccatgcatacgcgaggggaagagccacaaggtaccagcccaaccagaagaagacgactacggacacgttcgataccaggaccaatc

SEQ ID NO: 122649 - DNA, 1924 bp, Zea mays
  Clone ID: MRT4577_43340C.1
tcccgggctttcgactccggccgccagcccaccaatccacaatcccccacgattgaggcacccctcgccctcctccgctatttcccagccgaatcccacccatcccgaccaattctgtggtccgccgcgccctccatacccccgcccctgtggcgcactcatctctctcgccgcggcaaaatcgtttagccgtcccaatccgaccacttttctccgatcgagcatgagcatggggttctcctgcgcgggcgcgcgcctccacggtcgcaccggcgtcggcggcgccaaatgccgtcccggcgcggctctgctcgggcggcggggcagcgggttccgagcgaccgccaggaagtggggcagtttctggggaattcatgatttcatccctccgagtgcgtggcggagcatagatggcgccgcgatttccggcccggtcgtcgtcgtccccgaagcggcggacgctactgaggaggtggccgcggttgttcaacctgttgtgctcccggagaagcttgatgtcgatgatggtggaaatggcaagctccctcccgccggcggcggcggtggggacggcgagaatggcggcggtagcggcggcgggggtgacggtgacgaggaggaggatgagttcggacccatactcagcttcgaccaggtggtccaggaggcggagaagagaggggttagtctgcccagtttgcccacggacatggttgaggcggccaagagcgttgggattcagaaactgctgctgctgagatatctggacatgcaggcgtcggcttggcccttggggcctgcaattaggtcctgctcgcttctccggaataggatgctggttgatcctgcattcctcttcaaaattggcactgagatagtcatcgatacatgttgtgcgacatttgctgaggttcagaagagaggggaggagttttggtcagaatttgagttgtatgctgcagatatgttggtaggagtagttgttaatgtagctttagtcggcatgttagcgccatatgctcgatttggtagcagatctgcatcagaaggtctccttgggcgcgttaggcatgcttatgatgccctcccaagcagcgtttttgaagctgaaaggccaggatacaaattttctgtgcagcaacggataggaacatactttttcaagggaatattgtatggttctgttggattcttttgtggtcttgtgggacaagggattgctaatttgataatgacagccaaacggagtgttaagaagtcagatgatgatgtacctgttccacctcttctcaagacttctgctttgtggggtgcattccttgctgtttcttccaacacacggtaccagattattaatggattagagcgcctggttgaggcttcacctgttgggaagcgtgtcccggctgcttctttggcattcactgttggtgtgaggtttgccaataacgtgtacggagggatgcagtttgttgactgggcaagaatgagtggctgccaatgagttgcgagctttcatttctgtgtcactattcaccgcgatgctgtattgttgttgcttgctgtctgctacctgttattccacccaaattcgtcgaattttcatcatggcaaagtcaaagatgtggtataaatatcttggggggcaaaagatataaaaaataaatgtggaggtttctcggagaatgatgagtttagcattaggagtgcttagcgcagcatagaaccaggagaggttgaattgcttgttttgttgttgaagatgtcaccgtcttgatttggatagttgagtgtactagtacttgcttatactctattgaatttgctgttctcatattttgatatgttctgtggactactttggaagtccagcatcttgtaacttatttattattagtttttctggtactagcgtgtgtttcat

SEQ ID NO: 122650 - DNA, 880 bp, Zea mays
  unsure (1)..(880): unsure at all n locations
  Clone ID: MRT4577_43341C.1
atgctcatttggtacagatctgcatcagaaggtctccttgggcgcgttaggcatgcttatgatgccctcccaagcagcgnnnnngaagctgaaaggccaggatacaaattttctgtgcagcaacggataggaacatactgggacaagggaatattgtatggttctgttggattcttttgtggtcttgtgggacaagggattgctaatttgataatgacagccaaacggagtgttaagaagtcagatgatgatgtacctgttccacctcttctcaagacttctgctttgtggggtgcattccttgctgtttcttccaacacacggtaccagattattaatggattagagcgcctggttgaggcttcacctgttgggaagcgtgtcccggctgcttctttggcattcactgttggtgtgaggtttgccaataacgtgtacggagggatgcagtttgttgactgggcaagaatgagtggctgccaatgagttgcgagctttcatttccgtggtgaggtcttccttcttctatacatgcccccctctcccccccacaataaatgcagttctcttctcttgatgtagccaatggatagataacattatgccaataatgcagatgctttttattgcagtcactattcaccgcgatgctgtattgttgttgcttgctgtctgctacctgttatcccacccaaattcgtcgaattttcatcatggcaaagtcaaagatgtggtataaatatcttnnnnnnnnnnnnnnnnnnnnnnnnnnnnnnnnnntttctcggaggatggatgatttagcattaggagtgcatagggcaggatggacccaggagaggttgagctgcctgctttgttgatgaagatgtcgtccgtg

SEQ ID NO: 122651 - DNA, 345 bp, Zea mays
  Clone ID: MRT4577_43342C.1
atgaaaatatgagaacagcaaattcaatagagtataagcaagtactagtacactcaactatccaaatcaagacggggacatcttcaacaacaaaacaagcaattcaacctctcctggttctatgctgcgctaagcactcctaatgctaaactcatcattctccgagaaacctccacatttattttttatatcttttgccccccaaaatatttataccacatctttgactttgccatgatgaaaattcgacgaatttgggtggaataacaggtagcagacagcaagcaacaacaatacagcatcgcggtgaatagtgactgcaataaaaagcatcacagaaatgaa

SEQ ID NO: 122652 - DNA, 206 bp, Zea mays
  unsure (1)..(206): unsure at all n locations
  Clone ID: MRT4577_43343C.1
cctccacactccacagtggttcccctcgntactgatactaacatcataccaagcctccgccactgcagcagtcggattgtggggtaacccaagccacgagttcccagtcccagggcatgacaatgccaaaaattccgccaggtttgatgccgctgcagcgaccattcatggcaccaggggcagttatcccaatgggtggtgggtcc

SEQ ID NO: 122653 - DNA, 2055 bp, Zea mays
  Clone ID: MRT4577_43344C.1
gccggccgggttgggacaacggcaaacgattcgaaagttgaggggtcctttcctaaaaatccactccctctcttctcttgtcgccctctttttcttgtgctctgctcgtctggtcgcgagggagcccaagccttccgcttcctcaccccgctagtctcataccctagccagggggggatcgcacctcttccgacgatgtcgacccacgccgcctcccgccgctcctcctcctcgtccgcggtcgccaagcgccccgcgatagcggagggagctaccaaggcggcgggaccgggccccaccgccgcgcaggcgaagaagcgcaccgcgctcgtcaacatcaccaacgtcgccgctccgggggcgagggtcgccgccgttgggaaggtcgcgccaccggtcaccggcgcgaagttgaatccagctacctcaggtgcacccttaaagaagccatctttggcaaatgctcgcaccatccggggttctgctgcgaagtcggcttccatcaagccagctccaccagtatcacgccatgacagcagctcagagcagaagcataatgttcctgtgcctaccactgtccatgtgccaagtcgtgctcctgccttggtaccctacagcagtttcgtgtctcctggacgttcaggagattcagtttctactgatgagacgatgtcgacttgtgactccatgaaaagcccggacttcgagtacatagacaatgggggttgctcgatgctggcttcgttgcagcgacgggcggatgaacatctgcgtacatcagaggacagagacgttgaagaaaataagtggaagaaaaatggccctgccccaatggaaatcgacagcatctgtgaagttgacagtaacttcgaggatccacagttgtgcgccgctctggcttctgacatctacatgcatctgcgagaagctgagatgaagaaaagaccatcgactgatttcatggagacgattcaaaaggatgtcaaccctagcatgagggcaattttgatagactggctcgtggaagttgctgaagaatatcgtcttgctcctgataccttgtacctgacagtcaactacatcgaccgttatctttctggcaacgagatcaatcgccaaaggctgcaattacttggtgttgcttgcatgcttatagcggcaaaatacgaggagatatgtgcaccccaggttgaagaattctgctacataacagacaatacatacttcagagacgaggttctagaaatggaagcttctgtgctgaactacttgaagtttgaaatgacagcgcctacggcaaagtgtttcttgaggagatttgctcgttctgcacaggcgtgtgatgaggatcctgctctgcatctggagttcctggccaattacatcgctgagctatccctgctggagtacagtcttctgtcttaccctccatcactaatcgctgcctcagctattttcttggcgagatttgtactccagccaacgaagtatccttggaactccacgcttgctcactacacgcagtacaagccgtccgaattgagcgagtgtgtaaaggcactgcaccgcctttccagtgttggtcctgggagcaacctcccagcaatcagagaaaagtacagccagcacaaatacaaatttgtcgcgaagaagcagtgcccgccacaaatccctgccgaattcttcagggatgcggcatgctagacaatagaaagaagcccagcggttgcttacttgattgattcttctccctgatgtggccagttcctgtttgtggtcatgtatgttacaaatccagagagttcaatagcagcactccccggcatgcatatgtatctggaaccatgtttagctactacgctgatggaatctgcaagccaagtgcggctgtgccttgagatagatatatgtaacgaacagctagttcgaccttggtacagaaaagcattcttccagcgccctgtacgtatatgcagctgggtctgatctgttgtatgcctgaactgcacaacaacagatgaagaaccaaatcatgatgactaaccaatttaattt

SEQ ID NO: 122654 - DNA, 174 bp, Zea mays
  unsure (1)..(174): unsure at all n locations
  Clone ID: MRT4577_43345C.1
gaatttccggtttgacccacacgnttgatgacacggaaaccgacacagaggaggagagtttttaaaacacaatccgcggttattcactgcagcatgctctacatcttgcaagaacagtgactgcaacatgctctacatattgcaaaactgttcttgacagatggaggatcacaa

SEQ ID NO: 122655 - DNA, 318 bp, Zea mays
  Clone ID: MRT4577_43346C.1
cttgtttctggttcttttatgatgattgacgcaacaacaaaaatgcacttcatcgattatggcggctacctcgactgacataatgcctacctttgggtatgcttcttcttttctttaatctttcgcggttctatgtactaatggtcatcttgctaaattcacatgtgcacctttctattggcacctatacttttgtaccatttttctggattaatctactattaaaaatgccaaaatatataacgatccaaaaacgtgataggtttttttcggtagctagctttgttaatatgctggaaccaaatatttttaagaaac

SEQ ID NO: 122656 - DNA, 127 bp, Zea mays
  Clone ID: MRT4577_43347C.1
gccgggcgggagggacacgcttctctttcaaattcaggatgggcgtaactctgacgtgggctcgcattgtcgcgtgttacaataatcatcataactttctcccataaataaacttgcacctctgtta

SEQ ID NO: 122657 - DNA, 1360 bp, Zea mays
  Clone ID: MRT4577_43348C.1
ccaaaggtggcgactatttgctgattttctggagaatatggcttatgggctggagattctgactccagtgttccctcacctgtttgttccaattggggcggctgctggtgctggccgctcagcagcttctttgatacagtctgccaccagaagttgcttttacgctggatttgcagtacaaagaaactttgctgaggttattgcaaagggtgaagcgcaaggaatggttagcaaatttgttggcatagggcttggtattgcattggctaatcacattggctcatctgtaccattagctcttatttcgtttgctggaattactgcagttcacatgtattgcaacctcaagtcatatcaatcaattcagctgagaacactgaatccttaccgtgcaagcttggtgtttagtgaatatttgttaagtggacaagttccatcggtcaaagaagttaatgatgaagaacctcttttcttcaatttgtcacttggtgcttcacgaaaaagtaagattttgtcagcggaagcaaaagatgctgcagatagaatatgccggcggttacaaatgggttctaagcttagtgagataattgagagtaaagaagatgcttgtgcattgtttgatctttacaaaaatgagcaatatctgcttatggattacaaaggaaaattttgtattgtacttaaagagggatcttctcccgaagacatgctcaaatctttgttccatgttaactatctatattggttggaaaggtatatgggtttcaaaccaagtaatgttgcttcagaatgtagacctggtggaaggcttgaagtatccctggattatgcgcagagggaattcagccatgtcaaacatgatggttctgatggtggctgggttatggatggtctgattgcaaggcccttgcccgttagaatacgaataggagatggtacttcttaggtctttgctctattaactatcctcagagctacatctacatccgttgtacagtttgcttattaagttgctgatgtggttcgacaccatattcgaaaggcttgtaactcaagagtcctcaaataacctgatgctcgcctgcagtttttaccctgatattaggatggaagtggttacacctctgaaaaaaaaaaaaaaaaaaaaaaaaaaaaaaaaaaaaaaaattgacttttgaagcctgtaatagtgcaatagtgctcacaagattaagggcactcgggctgttatagagattcaagacagcagagcagatgaaggatttctaggtttgtcaatgctcactatgcgcaccttgtgtgctcgagatcaaaaaaaaaaaaaaaagggcggccgctcgcgatctagaaacccaggtcc

SEQ ID NO: 122658 - DNA, 706 bp, Zea mays
  Clone ID: MRT4577_43349C.1
cgttgctgtcggtaaggcttacaccttccgtgagctcctgaaagcatacattgaattaaacaattgaagtcagatgaactcctggtactacgagatcaaattgctatcatggcaagttgcgccctgtgaaaaagatgtcatctaatgttgacacaactggattacgaccaaataaggttcccccgaattcccgtgctgcccaaccagtcatgctaggtatgctaggtgtagaagaaccatcgaaatagcatcagaccattatattgttagaaaatggaagatgactcacaaacttctaagaaaatactgaaaactttgttttaaaaacaaaatacaaggaaaaaacctaagagaaacaaggtcccgtggacaaatatttcattttagaggccatctacaatcaaaaaaatacaaacgaaaaaatacatgagtttcaatttttccatatcaattcaagtaagaaacacttattatttatgatgctagttggccaatgtcataaaaacatacctcattagccagtccaaataatacatggtatgttgctctatctttaagcaacttgaccctctcctctttcgtcttcttcgcaatatcaattaccttccggttaaataaagatccttaacatatttattttcctatgcttgtatttattttattacacttggtaatcctgcatcaatgttctgtttatgacatgtat

SEQ ID NO: 122659 - DNA, 790 bp, Zea mays
  Clone ID: MRT4577_4334C.1
cctcgaggccggccgggccgggagcaggatagagagggagaggagcagaagatagcggagagggccagaggcgcagaaggcagtcgcggacaggaggaagaggaagaagaagcggcagcgagcgaggatgccgtgcctgaacgtgtcgaccaacgtgaacctggagggggtggacacctccgccatcctcgccgaagcctccaagtccgtcgccaacatcatcggcaagcccgaggcctacgtgatggttgttctcaagggttcggtgcctatggcatttggaggtacccaggagccagcagcttacggtgagctggtttccatcggaggcctgaaccctgatgtgaacaagaagcttagtgctggcatcgcttctatcctggagtcaaagctgtctgttcccaagtcacgcttctacctcaagttctatgactcgaagcgctcggacttcggttggaacggctccaccttctagacttgaggtctgcagctgaaataaaagaaattcgtggaatcatggtacctaatgcccatggctattgcctattaaggacaatgtcataagatgtgtcttaatcggtgctgaactgagaaacagtaactgttgtcgtggaactggaagtggggtgctggcgtgtcagagtgcttgcttcctacctagcatagcatgcctgtgctatcttgttattggtattggcttgatatcagtctatattatcatttattatggttggtccttcgggtttggtaactgtatcttcaaaccgtgtgttctctgttaacctagcgg

SEQ ID NO: 122660 - DNA, 291 bp, Zea mays
  Clone ID: MRT4577_43350C.1
aaaacaggaatggggaaactcccccaaattttgtttttttttctggggaaaggggggtaaaatttccaaaaaaattcccgtgggggggttgggccaaaataagggaaaactggtgggacaacaaacattttctgggtttttgggaaggaccaaatttgtaacccttttaaaccttcggggccaaaatttttcccgggaggttgttttttttccacttttcaaaagggaaaaaggggggggggggggttttattttaaaaaaaaaacttggttgtaatttttaaaattttgg

SEQ ID NO: 122661 - DNA, 646 bp, Zea mays
  Clone ID: MRT4577_43351C.1
ccccgcgtccgcccagcgtccgcccagcgtcctgtcctccacacacacccacacacgccacactgaggagccctgagccctccgcccttaaaccctagcgagcgagccagcgagaggtctcatccccaccaacaccacccatggagctccgcctctaccacctcgcgctgctgctcggcctcgtcgcctgggcggcggctgctgccacgggagccgaggcgcagccggtgtgcgacccctccatcatcgccacccagatcgcgctcttctgcatgccggacatgcccacggcgccctgctgcgagccgatcatcgcctccgtcgacctcggcggcggcgtcccctgcctctgccgcgtcgccgcccaaccgcagctcgtcctcgcccgcctcaacgccacccacctcctcgcgctctacgcttcctgcggaggacaacacaccgtgggcgctcacctcgctgccgcctgccaaggtccgtcacctcccgccaccgttcctgttatcgccccgccgccgcccgccgcgccccgcctcaagcagccaacacgcgaggcccctccccctccgccacaaagcgagaagccgtccccgtcgccccagcagcagcctggcgtcgccgtcgtccacggcaaggccatccccac

SEQ ID NO: 122662 - DNA, 261 bp, Zea mays
  Clone ID: MRT4577_43352C.1
ctatcaccattatatgtgggttctaaattgtatgagtgctgacccatatgcgagatacggatggtgtgatccaatacatactggaattagatcatgtgtcaatcatcactagacgtgagtttttctaactcttatgagttgtaagttcggatcgaatcaagaaaaaagtgggatgaaagaaactatgtatagttatttaggggggaggtggatacaaaaagtgggatgaaattttggctctttaatattaggtatagataa

SEQ ID NO: 122663 - DNA, 239 bp, Zea mays
  Clone ID: MRT4577_43353C.1
acatcatctacatttataaacaaacattcttcacctctgctcactatcatcactactctaaaccatccaatacttgataagtctccattacgcaaaatgagtcgacaatcaaacccgttcaacaatgcaaacttctgggattttgttcagcactttgaccccaaccaagcaactggccgcggagtagatcatcagactgagactccatttccctctttcatggccggtttcccctttgg

SEQ ID NO: 122664 - DNA, 492 bp, Zea mays
  Clone ID: MRT4577_43354C.1
ccggccggggatgacacttcctgcgtgtctccttcggcgtccctcgagactgtatgggaagctagtgaactcagagcgaatcgacgtgaatcgcgatctgatctcccctgcgcggagtggacactactaccatgaaagggatgagaagagtccaagcgcgcaaccacatgacaggacgggtccgcatctgctgcctgtttgacgagagggacgccactaccccctacgacaaaggaccggcctcggcgccgcatttcacgatcgaggatgcatgccgcctgcgcctgctactccgtggtcctgaggtcaccagtgtacactgtcgtttcgcaggtctctactgctcattgagtggcaaagagccaaagagtactcctcgcggctttttttgagagacaatcgagaccatgacgtgcaatcctatgatatttttttcattgtgattcaagagtatcgagttgtccgaacaaatgaacgaaaagatgtgcgtgc

SEQ ID NO: 122665 - DNA, 608 bp, Zea mays
  Clone ID: MRT4577_43355C.1
gccggccgggtcgggcaatccggctgcgacgaatctcgtctgggcagcccggccaccttttgcacataaggatgggctacgtgtgttgaacattagtggcgaagcgcccgattcactctgcttgggggcctggagttccatctgccttccagtcctctcagtgaagcgggcgcacatcagttgaagagaaaaaaaaaaagaaaaaaaaaaaaaaaaaaaaaatctcacaatcaaactctcaagccaacaataaacaccatcaatcctcttttcagcccacccacaccaaccaaccaactacccaaaaccaccatcaacatgaagggaaactgcggctgtgcttccggtgcctgcaactgcggcgccacctgcagctgtgatggatgccccggcaaataagccactgactccatgagtcgagtgcgcaaacacaagacctacgactccacagtcctcgtcaaggcaactcctgtgtcgcggcaatcaatgcagagaatgtagtagtcattagtattgtatgactaggaggacatgaggtcaaacggggatgagaccatgaatacaattacttttctatcatggaaaaaaaaaaaaaaaaaaggccccta

SEQ ID NO: 122666 - DNA, 662 bp, Zea mays
  Clone ID: MRT4577_43356C.1
tagcctgcttctcctgatctagatcaaggaggacctggcctgcctcggagatccaaacccagaattcttgagcttctcttctcctacaaattattagaaggtcgtgcttctcggcttccttctgtctccttagctttccccatttattgcaaccttctcaaatctcaagattccaactggtcaaggaagtgaagaagaagaagaagaagaagaagaagaacaaggagagaaggacatggatgccttaagttcgatgctcgacaaggcgaaagacaaggtgaaaagcaaccctgatgtgatggagaaagtcaattcggtcctcgacaaggtgaagaaccacccagaagtcatggagaaagttgctgaggttttacatctgggaaaacgtgaatccaaagagaaagagcccgaggccgaggacaaggcaaaagaaggcgagacctctgccgacaagacccaagactcaaacatcctagaccaggccgtggaagaaattcaggctgttgtagcagctgtgcagcagcaggaaacaaccggggatgaaactcaagttccagtcgaggctgctgccgaaactgacgctccagctcaagaagaaaaacgggaggtggagaaagacaaccccaagaaccgaatcgacttccttggattcttcgccatga

SEQ ID NO: 122667 - DNA, 106 bp, Zea mays
  Clone ID: MRT4577_43357C.1
gcctcacctgtgtcactaatcatcggcctgttcctcctgctcaattcagacacaggggattgtgtttgctcccgagctgtctacctgcactgcacgtttgagtccg

SEQ ID NO: 122668 - DNA, 389 bp, Zea mays
  Clone ID: MRT4577_43358C.1
tatttttatggcgacatatgtggtctaacgccagtggagctcggtgccttgagtgactgggagttacaagttctgccgctcgagtatgcgactgttggaaccataagaagagcacatcccgtcgaagtggattatggcaacatttcggctgatatgagggaagaagcttgtgtacctgtggatgaacctgagcttgagcctgctcatgagcctgctccggatgtcgacaattcaccatgaatagtaaaaacacaatgacatcagctcgggtgggtagatgaaatgagtggcggtgcactgcttataatgttgcagatgttgtcagaatctcaagatgatgaaaagccttgtatgctcatactaggtgcgtggatactcagaaagaatag

SEQ ID NO: 122669 - DNA, 884 bp, Zea mays
  Clone ID: MRT4577_43359C.1
cctcctccgtccttctcttcttccccccaccacgaacgccgcccagcttcttccccctcttccgattcctcgtctccggcttgcctgctcttcctctcgctccggctctcccccgctcccgcatcgcaggaagttatttattatatctagtcactgaccatgaaaacctccagcgaggttcccttttatcactcgttgcccgtaccaggagctcaagacagcctcaaggatcagatccactccaaggttatgggcacgataggcaatgtcatgaactccattgatcgaaaggcactgcctcagcaactggaaggggcatgggaaacagctggaaatgtcgttaactccattgagtcaaaactgtccgggcagaagtcgtttgattttgacggcggaaatgattttcttgatggatatgaatgtcctgatgattattgggactatgaacagcacaaggcacaaaagccagttaacattagaaacctgctgggtggcatagttgctatcattggccgcacttgcaaaaatgatggcattcaacaatcaaaggactctagtgtctcattcttggggtcaggtagtgatggagatacatccttgcatccgtctgtctatgcgccaagtgctcctcctttgctggatgaagaagccctgagttacatattttatagggttgttttggaggcagaaccaccagaatggctgcccgatagctatgctgactcgtgcatgcagtgttctgcttctttcactgccattactcgtggaaggcatcattgtcgattctgtggagggatattttgcaggcatgttcgaaaggcagatgtcttttgccagccaagtttcgtgagcgaaacccaccaagggtctgcgatgcatgctat

SEQ ID NO: 122670 - DNA, 931 bp, Zea mays
  Clone ID: MRT4577_4335C.1
gcccattattagcctaggcaggcagagcagcagacctcgaggccggccgagattcctttccctttccgttagcaggatagagagggagaggagcagaagatagcagagggccagaggcgcagaaggcagtcgcggacaggaggaagaggaagaagaagcggcagcgagcgaggatgccgtgcctgaacgtgtcgaccaacgtgaacctggagggggtggacacctccgccatcctcgccgaagcctccaagtccgtcgccaacatcatcggcaagcccgaggcctacgtgatggttgttctcaagggttcggtgcctatggcatttggaggtacccaggagccagcagcttacggtgagctggtttccatcggaggcctgaaccctgatgtgaacaagaagcttagtgctggcatcgcttctatcctggagtcaaagctgtctgttcccaagtcacgcttctacctcaagttctatgactcgaagcgctcggacttcggttggaacggctccaccttctagacttgaggtctgcagctgaaataaaagaaattcgtggaatcatggtacctaatgcccatggctattgcctattaaggacaatgtcataagatgtgtcttaatcggtgctgaactgagaaacagtaactgttgtcgtggaactggaagtggggtgctggcgtgtcagagtgcttgcttcctacctagcatagcatgcctgtgctatcttgttattggtattggcttgatatcagtctatattatcatttattatggttaaaaaaaaaaaaaaaaaaaaaaaaaaaaaaaaaaaaaaaaaaaaaccttcgggtttggtaactgtatcttcaaaccgtgtgttctctgttaacctagcggaaatctgccaaagctagtgttgtttttacaaaaaaaaaaaaaaaaaagcggcc

SEQ ID NO: 122671 - DNA, 414 bp, Zea mays
  unsure (1)..(414): unsure at all n locations
  Clone ID: MRT4577_43360C.1
cgtctctcacataattttacgtggccatgcctgtatttgagcgagttccagaaagaggcatcagatgctctaatatatcatnaagtgttagcaaccattatatggtttnntttgggagtgtctatgnntttagtganntcagccaggaagtaacccatgttatcnagaccctactagtcctttggaacataatatatacggttggataggatnagagatgtcaacctcaattcatgntgtaaatacaatatcnttttccttattgcttatatgcaaatatatgaaacccatcagctggccctgaatggaagctatatcggttattctaccttactgcaaaattgttttaagtggcagtatctaatatacaattgatgggtgcgatctaagtgtcattctttcccattgccggat

SEQ ID NO: 122672 - DNA, 229 bp, Zea mays
  Clone ID: MRT4577_43361C.1
cggctgtcgtccacaatgcccgcgccgctgatactacccacagtcgcgcgcgagctaggcagagctcctcgtcgccctctccgccgcccgcgcgctcccaaaaggacagcagctccacggccatctcctcaaggctggacacgtccccgccaccgcctcctcccacgcgctgctcgcgcaccacctccttacgttctacgcgcgctgcgcgctccctgacctctccctc

SEQ ID NO: 122673 - DNA, 504 bp, Zea mays
  Clone ID: MRT4577_43362C.1
ggcagtaaaacctggggggtttggtccctgtgacacacatagttcagacatttttgagaccgtagtgtaaacacatagttacagactaacaagcccaatttcacaccactagttcagaccatgccggtcagaatttttcccaagcacaaggttccaggcacataactgacccaatgaacaaggttctatttgaactaattgcaaacaggcttctctcatcctccattggcaaattgggattgggaacatactttatattttatgggtcatctccggaagcactacttggattatggcctttatttgccccttttacagtgattccctccatattttttctaacccatgaaaggctggcatgagctttatcaaaaaggttaccaagcctactgacatgaaaagggtcacattgaacttcattccaatcctccgcaatggcaaatacacctctaggtttgatcttcaacacaactaaccatcctaggttagtaggggcatttatat

SEQ ID NO: 122674 - DNA, 419 bp, Zea mays
  Clone ID: MRT4577_43363C.1
ttatattttttttttttttttttttttgggggtttttttgggctttttggcggacccaccccccccaacccccaccccgaagccaaccagctacccccatttccatataaaaaagaccttgggagaaggagggaaacatggggttaccgaggaaaccggaaaaaccgtcaaaattccacacacccacccaaccgaaaacctaaaagctaaaacccgggttcccgaaggaccaaacgaacgaacaaacaaaagcttagggccgaccccccccttgccaggcttgaaacctgtaaccccatctggcctaaggaaaaaaaaaaccggcaaaagaaacgcccaaagcccctttgcccccagggcggccctgggccctccccgttaaccagggaaacgccgaacaacctgaacccctttacccc

SEQ ID NO: 122675 - DNA, 259 bp, Zea mays
  unsure (1)..(259): unsure at all n locations
  Clone ID: MRT4577_43364C.1
tatatttactatctgcaaaactgaangtgttggtcaccaaagtcatttgggagaaagaaaacccgaagtacacaataacacctagtcacccaattcaaatcgcctaaaccccaaaatgccacagctgtaagatgtccaaagagagcctttcaagatatggagtgatgatactaaaacccttaccagatctcaagtcgatgctgaattgacacatattgcaaccatgactgctgaggaagcttcaatagcatccgatcca

SEQ ID NO: 122676 - DNA, 696 bp, Zea mays
  unsure (1)..(696): unsure at all n locations
  Clone ID: MRT4577_43365C.1
ggccctaggggccttttttttttttttttttggtctttgcctctttggcatgcacagattaaacaagaggcctcatctgaatggatttcatctaaacagacacggagaaacagaagcagtgaaacgcactcaagttgtcactactgtacatcttgttttcaatgaaaagaatggcggcgtcgctcaagcacgacgctggcagaggctccgaatccgatccgtcggacgggctctcaagcctccgcgttcgcggcggtgagcacggaggggtccagcggctgcgcgtggttgtggtcgttctcgtaggtgacgatcagcatggcggcgtcgctgcggcaccgctccacgtgcttcctcgccgggcagtccttcttgctgctgcacctgtagtatccccttgggtgaggagagcctttgatgggtttctgcccatacttcctccaagagtagttgtccgctggtatgtcggcgttcttgtcgctgatcgccggcaccctcaccaccctcttctccctcggnttcctgcacagatctccaccatccattggccagccatccaaacgccacgtacaacatgtcgcgttgcaaacttgcgagcaggaggaggatgcagagatggcggcagcggcactcactttttcttcgggcagtggcacctcacgccgctgctgtcctccgctctcttgncacacgcct

SEQ ID NO: 122677 - DNA, 928 bp, Zea mays
  Clone ID: MRT4577_43366C.1
ggtccggaattcccgggtcgacccacgcgtccgggcagttggaggagagggctcaaaccgcctgcctgctgccctgcaccccgcgcccaccccacttcttccacttccaccacctcctcccctccagtccccctctccacctgccccccgctccctggtccggcgcggagaaccagccagccagcccgtcgtcgctgtcgcccgccggatgaagcagtagccgcgcgtgacgccggatccaatccgcggccctcgccgcgcgcgcggtcatggacttcgacggcgccattggcgatcagggtgagctgtgggaatggcaaagtcaggagtatggtctgcagaaagatttgttagctgctccatgtagcagcttgtgggctgaagcacccaacaatatgggtgatgattggagcatgtttgatgagcaaacaccaattaaacattgtacagacttcgaatttcagttctgtgatataggagatatcatcgtcaaggagtttgaagaagggaaggaaactttgcaggcaaagcgcagacgcatgttgcagttctgtccagaaaatgttgagatgacacgttctatgactgaagaggggcttttggaaagtcttcaggagatggatttttcaggtaccaactgtttactgaactctgacgggactgatgaactgccagaagaatggctagtcgattgctcacaagacaccgagcctggttttccggcagaagaaatgaatagccctgctgctgccacggaaaaagatgttgatacgtctgcacatcagaatgcttcgcctagtcaacagtctatcgtagtcaacaacaatcgtgcacaggctagacctacaccgctgaaagctggcaagagcatcatccggggcaaagaaggcgaggacatcccgtggccttttcctttcgagctcatcaa

SEQ ID NO: 122678 - DNA, 135 bp, Zea mays
  Clone ID: MRT4577_43367C.1
cgccgccgtggtcgccttcgcgcctgggggcctcgctggtggcgcaccctttcttcgctcctcatccttcgggggccttcctgccgcctgggggcttcctctacctcttccgcgcgtccgaccagcctgtcccct

SEQ ID NO: 122679 - DNA, 893 bp, Zea mays
  Clone ID: MRT4577_43368C.1
gttttgtgtgtatagagctggggaagaaattgatgtgtacaagctccaacttcctgtttttaacatgtcatctctcaaagttctacatgaggatcatcgcacttatgcatcacatgcagatgtaaggcctaacaactgtaccaggactttttctaattcatctatcattgcatttctgcgagcaatcaaacattgaacctccctatattattatagaatgttgtcttttgggtacttgagctacccttcctgtacccccttaaagaaaaaggcataatatatggctaattccacatctatttgataatgaaatgaaacactattactgtcttttacctgatctcttttcctgctgctaatttgttattatgctattgatgcccttgtcagcatgtgtcggttgtcttatgttacaggttggcgttagtgaaagcacgtggcaggagctggaggaagaattgatcccatcatcatcaattgtcagaactaattggctggatactcagccaatgagaaaatacaaggattcctgtatttgtgtggctggaggtaatttgttttaaataaaaattcatagctatactcatcaatggtcaaaccactatctggaattgtctagcatacagctgagatgtggcacttatcaacttatcaatctagttcagaacaatatcttcttttggatgggtggacacttgtctttgagtgctatcttgcattatcgtctgttgctggataaggcatagactgtctgtttgggtcttttaaggtttgatcatccagtgcgatgcgattttcttagctacttatgttgtttaataaattaataatttgtttgggcaccgtccatctattgtccatcagtcccattggaattgtatgatttgcacacc

SEQ ID NO: 122680 - DNA, 712 bp, Zea mays
  Clone ID: MRT4577_43369C.1
ggccgccccttttttttttttttttttgaatgtaaagaacggtaaatattgatttagagaatgaaatttaagggacgcgcgcgttgctagaaacagctaccggataatcaacccattcaaatgacaagagtacaaaactattcgtcgacggcatcttggctgcttacaaatacactagcccctgtctaaccttgctacactgcacacctgacaacttcatgtcatcacgtgcttgttccttgcgtggacatgatgcatctgtgtactcggtgtctggaacgtcacgacaacgccgcccgtggcgacggcgcagcaccggcgtcgaagagtgcctccatctcctcgaggctcctccccttggtctcaggcaggcacgcgtagacgaacacccacgccgccgcggacatcgccgcgaagatgtagaaggtcccggccatgcccaccgcctcgtacatcgggatgaaggtcatccccacgatggcgctcatcacccggttgaccgccgtcccgacgccagtcccctgcgcgcgcagccgcagcggcaggatctccgacccgtacatccagatcacgggtccgaaccccagcgagaaggtcgccatgaacgccacggcggcggcgacgcacgtcgcggccgacgtcgcgcgtatggacaggccgaggaccagaagcgacgcggccatgccacccgcgctggtgagcagcatgccgg

SEQ ID NO: 122681 - DNA, 472 bp, Zea mays
  Clone ID: MRT4577_4336C.1
attgggtacctcgaggccggccgggaaagataataataaaggaatcccttcctacgctggaagcgaagagttcgtcgcctcagccgcctctctgctagatctgcggcgaagcctcggcggcggcctgcgccccggggcgccggcgatccaagatgtcttcgcgcgggcagggatgctgctgctgctcgtccctgcgccttctcccccgagacgacgcggtctcgtcgccctccgcctgcgagcaccgactgaagtcttgcatctttgagtgcgcccaaaccccacacctcgtcaatagcgcttgtcccccttctccatacgcacagatttcagctgatgactacgcggacctgcctgaaacatacctgctcctcttttgtgggttcggaatacaagtcgttatacaaagacatgaaatcaggaagtggaaaaggaaggcgatcgacagaaaaaaaaaaaaaaagaagggcgc

SEQ ID NO: 122682 - DNA, 367 bp, Zea mays
  Clone ID: MRT4577_43370C.1
ggaaagggggacgggggacattctattgattagaaaggggcccacggttccatcggctggacagctttttgataaagagggggaatgggggaccccggtttaaccggggggggggcatgggtttattcgcattattagtgccaggctgctgtgactactgggggggaaacctgggcaccagcctatttggggggaacccggacgaccttggatgcctgccaaggcgttaaccgggggggtacacaaccaaggggctggacaaacatttgggcgggagcacataatgttattgaaacgggaacattcaccactttaccgggaggccaccagtgactaacccttttttttactgacaggtctcccattt

SEQ ID NO: 122683 - DNA, 186 bp, Zea mays
  unsure (1)..(186): unsure at all n locations
  Clone ID: MRT4577_43371C.1
cctcancaccaccttcttcgaccccgccggaggaggagaccccattnctataccaaatnttncggtcaccctgaagttnatatncntatccnannacngcttcggaataatctcccatattggnacttactantccgnaanaaagtaacgantnggttactagntatggttgagncgcngcnnatc

SEQ ID NO: 122684 - DNA, 646 bp, Zea mays
  Clone ID: MRT4577_43372C.1
cattgggtacctcgaggccggccgggactctcaccccgcgatgtgtttcgtgcaactggtgcacgaagcacgatccatacaatctgcaacgtggccaagaaaacaacacgggaggagtgaatatctctgatatgatgacttcactgccccaattaacacttgcgctggcttcaggagcatcactgctaccgcatcctctccaacgtactggacaggtgcacgaatatgcatattttatagattgagatggctgaattgcagtaacatatgtgctggtaccatgtacatttgaaagcagccatgcctcactttatgtcatacaactaatggacggctgcacaaatatcgtggaagagacccgacgagctccaatcacgacaaccctaacaatatcttgccatggttgcatatgaataactgtcccctgattcttccactgctatacctgctcacttcgatgtaaaggctcgtcactcatcaaacatcggcatattctggattcctcggtgattattgaatggagaggtccataagacatcaaaccctatgacttacgggttcaatttcccgttgcagattgacaaggctgacgaccctctaacacttggacagaagtactccgtctgtctactataaggacacgtca

SEQ ID NO: 122685 - DNA, 275 bp, Zea mays
  unsure (1)..(275): unsure at all n locations
  Clone ID: MRT4577_43373C.1
agattctggtttcataatttttggagctaacctgagtaatccactgaatatgcttttgcctttactacaaacagttttccctcttgattatattcttataacaattattattatgtactttatttttacttcaatggttggaattcgaaatattggcatatggttcttttggattagattatatanaatcagaagaggtagaaccaggccccaagcactcctttttctctgcatgatacttctgcttattgtccttcacactagctacatgattt

SEQ ID NO: 122686 - DNA, 491 bp, Zea mays
  Clone ID: MRT4577_43374C.1
aggcccaaaaattttgttttataaaaaccccgggggggaaaaatgggagacatcaaagggttgttacatgggggccgactttttttcccgacctatacatgtttttgcatgccaactttaaaaaattaaaggggccccttaattttgcttgcacaacgatcattagccataaaccaattgacatgcatgcatggacaaacaactttgtattggcttttttatttttttatccggctccttttcctcctcctaaagggcctttttgatcacctccaccgggggcttggccattaacttaccggggggaatttttttctttggaggggctgatgggtttttcttcttaaaaaaagttttttccaaaagtttttcctcctcctccttgttctcgggctcgggaaaaaccgccgcctttggagggaacaacttattaaccttttgtttgggcttggaaatcgctggcaatttttgttcccccgccgttgccgccg

SEQ ID NO: 122687 - DNA, 798 bp, Zea mays
  Clone ID: MRT4577_43375C.1
cattgggtacctcgaggccggccgggaaccttcctcatgctatcatttccaatctgccggacgccatgggaccgttacagcgctggtgagagctgccggcagatatcctctgcaggatctgagaccgcgtcgacctcaagaggcaggtcagcgcgcggggcgtctgcacggggcggggctgcgtgcttccgacgccgccacccgctgctcctcgtggtatgtgacgacgagtcgcatgttgcccctacgctgcctccgctccccacgcagaggtcatttcaggtcaacgtcatcttctcggcaatgcgctgcattggctccagcaacaactggaacgcgctctccgacgtccacttgaacgacaggaccggcttcatgctcgtcaaccccatcgacgctgtggagatcactcctcccgccgctgatctacgagagacgctgggattgcaaggtcgtcttcaccccgagacccgccaaggatgacttcgccgccgcggcaatctgcgatatcgacagtgatcgcgtacgtaaccgccggcgtcaggaggtgggacgacttggaccccgtccgcctcgactgcgaggaccagatcaccgacggcgtatacaccgacaaaggcaaggtctattgcctcaccaagtgcggcgacgagcatgtgctccggcttcctgaaagccggcgccggaagtgtggcaacgctgatgaatcaggatcctcggagtcagagttctctgttctccagtcaccacagactaatgagtgcacaattacattccggccactgcgttggctacatc

SEQ ID NO: 122688 - DNA, 310 bp, Zea mays
  Clone ID: MRT4577_43376C.1
acgggggttctttttcatacattaggggataaaggagccattaaatccatattattgcaaaatttttagatctgaaccagcgaacacaaggcctaccaagaagcgtacccgcctaccgcctggatatacgaaacgacacgggataaaaatatacgcaggggcacctcctgaaatgtaactgagtcaaagggaacttatgcctacgcgctcaaacaaatgaccagccgcttcttggatagggagccggtgtactgggcggtgttatggcaggatgactcttatcggcgcccgcccccgagagggtggaggt

SEQ ID NO: 122689 - DNA, 539 bp, Zea mays
  Clone ID: MRT4577_43377C.1
gccggccgggtcgggctcgcttgccgctgctccgccgtcgccgcgccccgaccagcatcggcgaatacctcccgcgcactcaaccgctggttgtagttgaatgtaatcgattggtgttccctggcaccatctttgtctgagttccgattctggaattgcgggattggttggtcgggtccggtgagcacgctcggggcggcgccggccgatggcggagctggtggggccgcgcgtctacagttgctgcaactgccggaacaacgtctgcctccacgacgacatcctctccaaggcttttcaggtccaaactccgtgaatcacctttcctccacttccggacgtgtcgtttgttcacgagcgcttatcaattcagcaattacctgttgtgcttatctatatcctagctaggagttgctccgagaatcgacttcttgtgtaggtgcgatgctggatgcacgtttgttaattctggaggacccggtgcattgtactacttctgattccactataagaaactgattgaagcgtatttcttttta

SEQ ID NO: 122690 - DNA, 2011 bp, Zea mays
  Clone ID: MRT4577_43378C.1
tgcaaaaaaatccccggccgggagcaggctcttcttcctcccaatcccgaactccatcgcaaccgcaaccgcccgtcgcttcgtggccgcccactcaccacgcccgcctcgcccgccgcgggagggaacaagcgctcaggctgctttgtgggggcgccccgccgggagggcgaatcccggtggaggtgaaccctgtttgccagcagatctcgccgttgggaggccagagctgggcggcagaaagaaacgttgtgctcgagttcgaggtcctcgcggagatagccaaggcgagagggaagaccgtggcgcagagccgccaggagggaggaagacgtcgccgggacctactgctccgtgcctccagttggtacgcgtcccacgctccgtgcctctagccataggctacttcgtgggggcgccccgccgggagggaggaagccgccactgggagggactcgttgctccgtgcctccggttggtccgtgcctcgtgctctcgatgccttcagcgggtctgcgcccctactcgcactccagatccagaggcactgcaagctttcggcctgctgctcctatgtgagatccagtcgtcgacgtgatcttcttaacagtagtgtgtgagatccagacaccgacgcgatcttcttgacagcagcagcagtctcctccaggcaaggagcacaaccctctactatctataaatgttgccaccctttgcctatatgggttcttaacgtcgttatttcctatggtgtgccggggcaagtgtgcaactgaaacccaactccgccgctaagcctcaagcgaccgcggacgcagagccatggccgccacgaggagcacgacggcggtgccggagctggccctgccctccgggaacgcgaggccagtgccggtgattggcctggggacagcggtaatgttccagccgccggagactaccaaggacgcggtgcttgcggccatcgagctgggctaccgccacttcgacaccgcctccttgtacgggacggagaagccgctcggcgagggcgtcgcggaggcggtgcggcgcggcctcatcgagtctcgggaagaggtgttcgtcacgtccaagctgtggtgcacgcagtgccacccggacctcgtcgtcccctccctccggcagaccttggaaaacctgcagatggattacctggacctgtacctaatccacatgcccgtctgccagaagcccgggccgcctgtgttcccggccaggagagaggacgcccgcccgttcgacttcaagggcgtgtggcaggcgatggaggagtgccagcggctagggctcgctagggccatcggcgtcagcaacttcaggaccaagcacctcgacaagatgatgccttttgccaccatcacccctgcggtgaaccaggtggaggtgaacccggtttgccagcagctgaagctgagggggtactgcgccgagaagggcatccacgtccaggcgttctcgccgttgggaggccagagctgggcggcggaaagaaacgccgtgctcgagtccgaggtcctcgcggagatagccaaggcgagagggaagaccgtggcgcaggtgtcgttgagatgggtatttgagcaaggggtgagttttgtcgttaagacctacaaaaaggagaggcttaaggaaaacctcgagatcttcgactgggagttgactgacgaggacagggtcaagatcagccggatcccgcagaagaagctttctggcttcgcattcatgttcatgccggaaggtgagttcacatcggttgatgtctcggagatcaatcctatagaggagtaggcgctaaagaaatgccttgattttgtcaaggccaatttcgcttgatgtagtacctgtatatatttgaataaggcagcattgactgtccgttgttgtgctcaatccttttattacatccgaaatcctgtcatgtaaatcagtaaaaggacgaattttttgggaactccctctgtctctggttcataacttcatatacatattc

SEQ ID NO: 122691 - DNA, 677 bp, Zea mays
  Clone ID: MRT4577_43379C.1
atttgccggatgcaagtttcgggtttaacccctttcccctcgcttgccgctgctccgccgtcgccgcgccccgaccagcatcggcgaatacctcccgcgcactcaaccgatggtctcactacctacgactgttcccattcccgagctccgattcggggctcgacggttcctggcccctttgtttcttggataaccgatgcaatttttggttctggataggttgtagttgaatgtaatcgattggtgttccctggcaccatctttgtctgagttccgattctggaattgcgggattggttggtcgggtccggtgagcacgctcggggcggcgccggccgatggcggagctggtggggccgcgcgtctacagttgctgcaactgccggaacaacgtctgcctccacgacgacatcctctcaaaggcttttcaggtccaaactccgtgaatcacctttcctccacttccggacgtgtcgtttgttcactagcgcttatcaattcagcaattacctgttgtgcttatctatatcctagctaggagttgctccgagaatcgacttcttgtgtaggtgcgatgctggatgcacgtttgttaattctggaggacccggttgcattgtactacttctgattccactataagaaactgattgaagcgtatttccttttacatttgc

SEQ ID NO: 122692 - DNA, 101 bp, Zea mays
  Clone ID: MRT4577_4337C.1
agcgccgtatccatggcgacggcatccactacgctgctcgtctcgcttgccttcctcgcattcgcctggagggcgtcgagatagccggatgaagaggcgat

SEQ ID NO: 122693 - DNA, 969 bp, Zea mays
  Clone ID: MRT4577_43380C.1
ggccgggccgggatcgggactcccagcttttggcggcgtattctagtatacaccaaaaaagagaaaaagaaaagcaccgaaaaactagcaaaccctacctcctctcctcccctcccctcctcggcggcggaatgtccgaccgccgccgcgacaaggagaagccccgcgaccgcgacatcgaccgtcatcgcgaccgagaccgcgacatcgaccgtcatcgcgaccgagaccgcgaccgggaccgggacagggacagggatcgcgagcgagaccaccgccgcgagcgcgagcgcgagcggaagcgctcccgctcccggtccccgtcggcggatcgggaccgctcccaccgccgccactctcattcgcaccgaggccgtccttccccctctcccgacgccggccgccacaagcgccgccgcgaggcgtcccctgcctccgcggaccatcaccataaggaggataagaaggctgccgactctcacgcgacacccggcggaggggacatcgcggccgcggccgctgcggtgggtgacggcgacgtgaatgcggaggaactggagatgatgaagatgatgggcattcccgtcggtttcgactccaccaaggggaagcacgtgcccgacgccgacgtcagcggggtgcgtgccgtcaccaagcgccagccgcgccagtacatgaaccgccgcggcggattcaaccgccctctgccgcctgagcgcaaccgctaaggatgggaaaaggatcatgcgccaacacaaggatgtgctgatttctgggtagcagttactctgttactggacagtgtagtgagcatgtataaaccttgatggctatttaatttgcaaaacactgtagaatgatttcccgttcccttttgtcatcgtttattctgtgggcattccaggaaaacagaatttggtggatcattttgaaactgtggctttacagctttaacatgatgtttctggc

SEQ ID NO: 122694 - DNA, 248 bp, Zea mays
  Clone ID: MRT4577_43381C.1
acgcgtacgcacacgcttacataaaataatacaaaagaatttttgtcttttaccaaaaagaaaaacacggcgggcgtgtgtacattggaggcgtcggcgatccccccaataaacatacaaattacaccgaagctgaactagtctcatgataagcaaacgatgaaacccaatacgaactaatatcaagattgcgctgctctaaagccgccctcgaatctgccccgtcgtccaaaacctaatgggggaaa

SEQ ID NO: 122695 - DNA, 612 bp, Zea mays
  unsure (1)..(612): unsure at all n locations
  Clone ID: MRT4577_43382C.1
tcttctcgtccgacgaaacagggagttaaggagggtgatacggtgataatcggcgagatggaaatggtttggaacaacgaaactgatagagcacgcccgtcaaagacgatgaacacgcaagatgatgctgtccgttggcccgaatttggctagagcagcaatagttcttgaggctcttcgcacctgtagaggaagatgccagtgggttgacgtgcatgaagcaggatgcagatctttggcatggttgttttgagggtcagtgcgcgctctgtagcggggggccacgggttgggcggcgcggcacatgttgantagaagttgtaggggaagatgagcacgacgcttcgcgcgtcgatttattacacgcaccttgaccgtgagagttgaatttacaaaatcaaattgctcgtatgtaagtaacgtaccaggaaatggaaatatctttttttgcttcaaaaacttatatttttaatttcattgtatatacttttttgtctttccctttattttatcttaattctctcttccttccaattttacacatatattattttttattcattttactaaatatttaggcttatgtttttatgtaatatctggatatcttta

SEQ ID NO: 122696 - DNA, 300 bp, Zea mays
  Clone ID: MRT4577_43383C.1
cggacgcatgctatctaccataaaattttgagcattcaaaaacacacaacttgaatctgcacgtgcaactgggccaacaacaacaggctaccaaaacattatacctccttgccctcctttgccggacctgacacgcgaataaactactcattatatcacaaggcctactagatcatcacgacaggatctcacattttcattatagaagctcaagaattgctactccacaccctatacttcatgtcatcttgcttcaacaggctcctaattggactattctacaacaaccgtattgacgat

SEQ ID NO: 122697 - DNA, 317 bp, Zea mays
  Clone ID: MRT4577_43384C.1
tgaccttctataaaccgctaggtgacgtaggcgacatttcaaaactctgtctggtcggactgcacacccatgtccaagaactacccacccgagtgcgctgagtacacagcggctgtgaacgcggtcacgctcaggccttcagccccaatctgggacatgagctgctcaccgctcatgctctccctggagtgtcactgcgtgggcacgttctacttttcgttgaggacctagactacattttgaacgatgatacactagtccgaattgtctcacagcactaacgcggagctggacatctcgatgcggatgatcaagcg

SEQ ID NO: 122698 - DNA, 336 bp, Zea mays
  Clone ID: MRT4577_43385C.1
gtcaagtggatcgacaagtcgagttagacatggagcagatccagtactccaggaagtacgacgacgacacctatgaatacgggcacgaaaaccttccggccgaggtcgccaagctcctccccaacaacatgcttctatacgagaagcagtggccgttgatgggagtgcagaagagccgcaggtgggagcactactctatccaccagccagagccgcacataatgctgatacgccgcccgatcaactaccagtagcaagaggaggaagcggctgcctagcatgtgctggacaagtgaaacctctgctggcgaccatgaatgataaaaaccgattttt

SEQ ID NO: 122699 - DNA, 456 bp, Zea mays
  unsure (1)..(456): unsure at all n locations
  Clone ID: MRT4577_43386C.1
aaaaaaaaaaaaaaaaaaaaaaaaaaaaaaaaaaaaaaaaaaaaaaaaaaaaaaaaaaaaaaaaaaaaaaaaaaaaaaaaaaaaaaaaaaaaaaatccaaaaataaccattgaaaatttatccgagatatttaaggaaaaccctgaagggggcggcttggagtgctggaaaaatggaaaaaataaagggggggaataaaaccgggaaacctgggcaatggttcctgggttaaatttaaaaaagccccgggcggcccgggggggctggttgggtttgttatttgggatttccggcccctaagccccaccttttggtccccttaatggggggttattgggcccttggnnccacccccgcacaaactgggacccgggggaaaaaaggatgcggcccccgacccccccaacaaacagagcgggaagcctaaaggtggaaggcgcggggggcccaatgggg

SEQ ID NO: 122700 - DNA, 804 bp, Zea mays
  unsure (1)..(804): unsure at all n locations
  Clone ID: MRT4577_43387C.1
gctgcttgatgcatccctttcttctctagcctcgcaaagtcgcactctactgggcgctctcgctttctccttgagcggcgctgccgcgggcgcgtagtgcacatctctctctctcccccctctccccctcgccattaatttgctgcctgccatcccggtagcgcttcgctgcgcagcctgcgcctgaaggttcgatctttcactcccatgggcggtggacgcaactagtctttctttcttggtgtttcttggcgcctcgtgggaggtgagcgccgaggagcttcgagggaatgagggtgacgcggagggatgagcaccgggccgccgccgccgcgttcctgtacgcggtgacggttcttggggtgttggcgggcagcgccggcgtccgcgctttcgatgatggcacagcggtgtacattgtcaccatgaagcaggcgccggttttccacaggcgccttaacttggagaagttcgggagcagcagggttgctaatgctgccggccgcggcggcggcgggggaggaggaggagcaggagacaccccgaccaccagcgtcctcaggaagccgagacagggttcacccaaacctatgaattatggctcttatattgtccacctccaaaattcattattgaagaggactctaaggggagagcgttatataaagctgtacagctaccgctacttgattaatggttttgctgttgtcatcactcctctgcaggcagataagctatctaggagaaaagaagtagcaaatgtgatgctggattactnagttaggacagcaccaactcatacac

SEQ ID NO: 122701 - DNA, 378 bp, Zea mays
  Clone ID: MRT4577_43388C.1
tgggggggggttttttttacttaaacacaacaacagtgtatgacctttagaaaacgctgtccgccaccatgggatgcacgttggccgggggcaggggagttacacaaaagaagaaagaggaatgggacacacgcacgcacacatacgggggggggaatgcaaccaaaaatcaacagcggggaacgattgaggggacgcgatctggacatacacgtgtacaggttttattttttttttcacgtatttactgccgtaccttctgttgtacttggggttgtttacttgacgttgatggggaggggattggcgttccacttcttgaggcacttgagcattggggtgcaagagcttggcctgggtgatgccgacaaacacctt

SEQ ID NO: 122702 - DNA, 135 bp, Zea mays
  Clone ID: MRT4577_43389C.1
aagaaagtgcatcttccaaggatcctactgaccaactttcaaataataacgctactgctgctggctctgaggaggaccactcaagctgttcaactcacatccattatgtttaccatacatctgcttactaataat

SEQ ID NO: 122703 - DNA, 310 bp, Zea mays
  unsure (1)..(310): unsure at all n locations
  Clone ID: MRT4577_4338C.1
cactcatcgattttgggtaccagaatgctttgttgttgatgtgcagaatataagaaatgcacacgagttatcanaatacgcgtgttctaaaaattgtccgcactaatctacaggggtgggctggcctcttctgcatgcaaggctgaagtaaaagtataataacacacatgccggacgggtgaaatgttttgctggtcgatacactccacagaaggccttgattttattttgatggagagtgcctttttgggaaacgcaaaaacacacaaagtcgttgttgtaatggggcttgaaacggggagggtgttta

SEQ ID NO: 122704 - DNA, 450 bp, Zea mays
  Clone ID: MRT4577_43390C.1
ggaactttgggcggatttatgtgcttgtgtagacttttattcgtcttgttgttggttattgtgccgtcttttctggtagttgaggcggtagaagtattacgctcgttgtgcgagaggtctcctaagtagtaataccatccttagaatccgattaagtatattcattcgaaagggtgtcctgatgcgactattcttgctgttactttttccgtatctgtcgttcttagtacgcctacgaccgggtgcggagcccataatacgctctacggggccgggaagaaagagcgactccttatcggccaatcaccgccctcgtccggtacggaagctacattgctgagatcgtgaagcttctcctgtccgtaaaacaacatggttaaacaataacctgatcatacccctgtaactaaccctcgcccgcacccgcgggcgcgaagcggtagcaatccg

SEQ ID NO: 122705 - DNA, 692 bp, Zea mays
  Clone ID: MRT4577_43391C.1
ccgggatttagccgcgcgcacgctcaccagcagctgcccccttgctgtcgccgcctctctccgcgcgaccgatctaccgccgccgccaccatgaagatcatgttcgccatgacctccataaagggtgttgggcgccgcttctccaacatcgtctgcaagaaggccgacatcgacatgaacaagagggccggtgagctgacgcctgaagagctggagcgcctgatgacggtcgtggccaaccctaggcagttcaaggtgccggactggttcctcaacaggaagaaggattacaaggacggaaggttctcacaggtcgtttccaacgccctcgacatgaagctcagggacgacctcgagaggctcaagaagatcaggaaccaccgtggtctgcgtcactactggggcctccgtgtccgtggccagcacaccaagaccactggcaggcgtggaaaaactgttggtgtctccaagaagcgataagctacatatctatcgacaaatctcagatgtactagtgttggttcttgttcaaactgtcttgatgaagggtttctgttgggacagtttcctgaaattatgttttgccctaggataatcttgcagttatggaaccttgttatattgtatcctgcaatttgttttttgcaacttataagagtgattttatttgatgagtcttatgctgattctct

SEQ ID NO: 122706 - DNA, 472 bp, Zea mays
  Clone ID: MRT4577_43392C.1
aaccttagccgcgcggacgctcaccagcagctgcccccttgctgtcgccgcctctctccgcgcgaccgatctaccgccgccgccaccatgtcgctgatcgccggcgaggacttccaacaagagggccggtgagctgacgcctgaagagctggagcgcctgatgacggtcgtggccaaccctaggcagttcaaggtgccggactggttcctcagcgggaagaaggattacaaggacggaaggttctcacaggtcgtttccaacgccctcgacatgaagctcagggacgacctcgagaggctcaagaagatcaggaaccaccgtggtctgcgtcactactggggcctccgtgtccgtggccagcacaccaagaccactggcaggcgtggaaaaactgttggtgtgtccaagaagcgataagctacatatctatcgacaaatctgagatgtactagagctggctcttggtgaaac

SEQ ID NO: 122707 - DNA, 370 bp, Zea mays
  Clone ID: MRT4577_43393C.1
ttccctcctctagccactcatcctccctctctttgcctttaaccatgaactttaatatcaatcatctcgtcacaacttatatgactatctgactaacatccatgctcttactcatcaccatcttcccttcctatcatcaacacaactcaccatccacctcaccatcaaatcaaccttctatcgctatactctaatctcatcatacttgtcacacctcaccaatatctccataactatatcactccctcataacaagtattctctatattaaccttttcaccacaaaaatatcataccacacatatcaaccattctctctacctatatgcacatgaaactcaatctttcagctgatctctgaattccacat

SEQ ID NO: 122708 - DNA, 734 bp, Zea mays
  Clone ID: MRT4577_43394C.1
gcccaccagcacctgcccccctcgccgtcgccgcctcgcctcgcgcgaccgatccaccgccgcggccaccatgtcgctgatcgccggtgaggacttccagcatatcctgcgtctgctgaacactaacgtggatgggaagcagaagatcatgttcgccatgacctccatcaagggtgtggggcgccgcttctccaacatcgtctgcaagaaggccgacatcgacatgaacaagagggccggcgagctgactcctgaagagctggagcggctgatgacggtcgtggccaaccccaggcagttcaaggtgccggactggttcctcaacaggaagaaggactacaaggacggcaggttctcgcaggtcgtctccaacgccctcgacatgaagctcagggacgaccttgagaggctcaagaagatcaggaaccaccgtggtctgcgtcactactggggcctccgtgtccgtggccagcacactaagactactggcaggcgtggaaagactgttggtgtctccaagaagcgataagctagcagcggcttatggcaacagcagcagtgaacaagccttaccttccaacatatcttatgaaaggtttctgtttagacagtttcctgaaattatgttttgccctaggataatcttgcagttatggaaccttaatatattgtatcctgcaatgtgttttttccaacttctaagagtaattttattttgaatgagacttctgctg

SEQ ID NO: 122709 - DNA, 890 bp, Zea mays
  Clone ID: MRT4577_43395C.1
aaaaaaaagccgcgtggacgcacaccagcacctgccctcctcgccgtcgccgcctccctccgcgcgaccgatctaccctccgcctccaccatgtcgctgatcgccggggaggacttccagcatatcctgcgtttgctgaacaccaacgtggatgggaagcagaagatcatgttcgcaatgacctcaatcaagggtgtcgggcgccgcttctccaacatcgtctgcaagaaggccgacatcgacatgaacaagagggccggcgagctgacgcctgatgagctggagcgcctgatgacggtcgtggccaaccctaggcaattcaaggtgccggactggttcctcaacaggaagaaggattacaaggacggcaggttctcgcaggtcgtctccaacgcccttgatatgaagctcagggacgaccttgagaggctcaagaagatcaggaaccaccgtggtctgcgtcactactggggcctccgtgtccgtggccagcacaccaagactactggcaggcgtggaaagaccgttggtgtctccaagaagcgatgagctctatatcaccccgacaaatcttggccgcactaccatgtcggtttgtgtccaaacagtcctgatgaagggtttctgtttaggcagtttcctgaaatggtgttttgctctaggacaatatcgcggttattgaaccttaatatatcgtgtccctgggatgtggttttttttttttttgccactttataagtaatttcatttggatgagacttaattctggtttgactccttacattgttaactcttgacccgagaggagtgccttcccagtgcagttcattcacattgcctgtggtggaggataaggttcattttcatcgtttaaaaaaaaaaaaaaaaaa

SEQ ID NO: 122710 - DNA, 1256 bp, Zea mays
  Clone ID: MRT4577_43396C.1
cccacgcgtccgcccacgcgtccgccacaagcttcctcctccactttttttatctgctttttccccctcggctgttcctactcaggctgggcagcagagctagcagtggtccctggtgcttcaggcgaccggccatggtggagctggagcctagtgtgaagtcggagcatggtggaggagtcggcctggtcctgcctcctggcttcaggttccatcccacagacgaagaggtcatcaccagctacctcctgcacaagttcctgaaccctagcttcgcgccgcacgccatcggggaggtggacctcaacaagtgcgagccatgggatctcccaagcaaggcgaagatgggggagaattccaaggagtggtacttcttctgccacaaggacatgaaataccccacgggcacgcgcgcgaaccgcgccaccaaggagggctactggaaggccacaggcaaggacagggagatcttcaagccagctgcagggcgtgaccgtgaccgcgagctagtggggatgaggaagacgctggtgttctacatgggcagggctccgcgcggcaccaagaccaactgggtgatgcacgagttccgcctcgagggcaagtccaggcacacctgcaacgacctacgcttcaatcccaaggatgaatgggtcgtgtgcaaggtgcaccacaaaggggccgaagaggccagcgccgccaagaagtccgccggcgggggcggcgaggagcactactactccaccgcaacgcccaacgtcagctccgtcgaaggcggcgacgagttcctcgtcgactccctgctggattactccagctacttcaactgcttcgcaaccggtggcttgcctctgcccagcacgacggccaactcagccgcagcacctgcaacgaacgacgacgactcctcctggagcatgcttcgtcacgcgccggcagaccagcaagcaatggtggggagctacagcttgcaccaccaggcaatgaaggcgaaaactgtaggcggcgtcacctccccgagtttctccgctggtttgccgagctcgccggtggcggactacgtgggaaacgatgcttctggctaccatacaaacaactattaattaacgatggatgatgagccgctgccgaaaatatagtgatccaataggtggtgttaggctattcacacttactgtacagttttaaaacaatgtcacatcaaattttgtttatggaaccgtgtacactgagtttcaactagatgcaactctctc

SEQ ID NO: 122711 - DNA, 933 bp, Zea mays
  Clone ID: MRT4577_43397C.1
tcgtccacctcgaacacaaactcaggcaaggcaaaaggaacccgcaccatccgaggctcaagcagggaagtgatcatcatcatcatcagaagaagatgtgcccaaccaagaaggggatgaccggagagccgagctcgccatgcagctcggcatcagcctcgaccttaccggagcaccaccagacggtgtggacgtcgccgccgaagcggccagcggggcggaccaagttccgggagacgcggcacccggtgttccgcggcgtccggcgccggggcagcgccgggcggtgggtgtgcgaggtgcgcgtgccggggaggcgcggctgcaggctctggctcggcaccttcgacacggccgaggcggcggcccgcgcgcacgacgccgccatgctcgccctcgccggcgcgggcgcctgctgcctcaacttcgccgactcggcctggctcctcgcggtcccggcctcgtgcgccagcctcgccgaggtccgccacgcggtcgcggacgccgtggacgacttcctgcgccatcagctggtcccggaggacgacgccctcgcggccacgccgtcgtcgccttccagcgaagacggcaacacctctgatggcggggagtcatcctctgattcctctccgcccaccggggcctcgccgttcgaatttgatgtgttcaacgacatgagctgggacctgcactacgcgagcttggcgcagggattgcttgtggagccaccgtccgcggtcacggcgttcatggacgaaggcttcgccgatgtgccgctctggagctactagagactgaaaatttccgtttctttccttggcctctggcgcctaattttggcagtgtaaaacggttacttattttggtaatgagatcgatcaagtttgcgaaacatgaaaacagaaaaaaaaaaaaaaaaaacccacgcggccg

SEQ ID NO: 122712 - DNA, 1000 bp, Zea mays
  Clone ID: MRT4577_43398C.1
ccggcgatggcgcacgagagtcgagaggacgacgacgacgaggcgtataaatataatagcagcgtctaaataagatcctgtcaactgcacccgccattatcgatccatggtcgctcctgggattcatgttcatctgtgtaacgtgctcgcggtcatgtccgtctcgtgccggaattaatatttatatgcatgtatttgtgtttttctgcgttaaaaaaaaaaaaaaaaaaaatttttttttccgcgcggacgcccaccagcagctgccccttgctgtcgccgcctctctccgcgcgaccgatctaccgccgccgccaccatgtcgctgatcgccggcgaggacttccaacatattctgcgtctgctgaacaccaacgtggatgggaagcagaagatcatgttcgccatgacctccataaagggtgttgggcgccgcttctccaacatcgtctgcaagaaggccgacatcgacatgaacaagagggccggtgagctgacgcctgaagagctggagcgcctgatgacggtcgtggccaaccctaggcagttcaaggtgccggactggttcctcaacaggaagaaggattacaaggatggaaggttctcacaggtcgtgtccaacgccctcgacatgaagctcagggacgacctcgagaggctcaagaagatcaggaaccaccgtgggtctgcgtcactactggggccctccgtgttcgtggccagcacaccaagaccactggcaggcgtggaaaaactgttggtgtctccaagaagcgataagctacatatctatcgacaaatctcagatgtactagtgttggttcatgttcaaactgtcttgatgaagggtttctgttgggacagtttcctgaaattatgttttgccctaggataatcttgcagttatggaaccttattatattgtatcctgcaatttgtttttttgcaacttataagagtaattttatttgacgaaaaaaaaaaaaaaaaaaggccccta

SEQ ID NO: 122713 - DNA, 299 bp, Zea mays
  Clone ID: MRT4577_43399C.1
atttctgggcaacgccatacatctctcacataatacttttcattgaactatactcataacaactaaatagggcaccaccgccgatgggtctttggtacaacgctgctgggtttgtcaaactcacctacactgtggggcgggggttgttgcccttttacaacggtgccagcggttggcgctcagcctactgtggtacgacaacccctgcggttgtgtgccgacaggcccctggtctcacacccgctagctggcttagtggtatgagttgttgctgctgttaatatgctggggaggaaatg

SEQ ID NO: 122714 - DNA, 614 bp, Zea mays
  Clone ID: MRT4577_4339C.1
ggccgcttttttttttttttttttcttttttttttttttttttttttttttttttttttttttttttttttttttttttttttttttgggctcacaaaaaccaatatacaactcaacttaatacatattcaggaaaggttccattggtcgttaatttccaaacaaacaaaaaaaaatatttgggaattggggatgccggttttaaggaaaaataaataaaagcccccccctattttttggcacaaattggggggtttaagctacttcatacaaaaaaagcacattgggtaactttaccctaataattggtccaaacatgcttggggcgggaaacaaacttttgcttttctcgctttaaaaggttttgggggccccatacccaaccggaccagccaaaaacaaaaaaactgggggagggaaccagggaaaaagggccttaacaaaaaagcgggcatattcccttggcaaaaaaccggggggggggagcgcgaagcccccgaaaagggtgatggtgcctatcccaagccaggggggggggaaggggttctcgttggcccgcccttgccgaaactcctcctccgggggccccttcccccggggcccccgggcttgga

SEQ ID NO: 122715 - DNA, 393 bp, Zea mays
  Clone ID: MRT4577_433C.1
ctcatctaccatagcttctgtgctgctgaagacgccgctactagctcgaccaaatgcgttcttcgatgtaccgatggcgagaatgctgtacctttagcgacagactgacacctggctaatctagtctgcttggaggaatgtggacgctatcgacgagaaggaaggagtgcttgacgagtaagacgggatcgtgaagacgattcgcttcatgagctcatttgttttcatatgattgcagaactcgcaggtggcgtatgaatagcagacatgccagcctatcataacgaagaatgctatctataaccatgtgtatatacaggatcacacgctcagtcatgtctgaatacagctagatctacgtgatcaggtgcgtctaccacaatgagcatacct

SEQ ID NO: 122716 - DNA, 791 bp, Zea mays
  Clone ID: MRT4577_43400C.1
aaaaaaaaaaaaaaaatagccgcgcggacgcccaccagcagcttcccccttgctgtcgccgcctctctccgcgcgaccgatctaccgccgccgccaccatgtcgctgatcgccggcgaggacttccaacatattctgcgtctgctgaacaccaacgtggatgggaagcagaagatcatgttcgccatgacctccataaagggtgttgggcgccgcttctccaacatcgtctgcaagaaggccgacatcgacatgaacaagagggccggtgagctgacgcctgaagagctggagcgcctgatgacggtcgtggccaaccctaggcagttcaaggtgccggactggttcctcaacaggaagaaggattacaaggacggaaggttctcacaggtcgtttccaacgccctcgacatgaagctcagggacgacctcgagaggctcaagaagatcaggaaccaccgtggtctgcgtcactactggggcctccgtgtccgtggccagcacaccaagaccactggcaggcgtggaaaaactgttggtgtctccaagaagcgataagctacatatctatcgacaaatctcagatgtactagtgttggttcttgttcaaactgtcttgatgaagggtttctgttgggacagtttcctgaaattatgttttgccctaggataatcttgcagttatggaaccttgttatattgtatcctgcaatttgttttttgcaacttataagagtgattttatttgatgagtcttatgctgattctcgtaaagaaaaaaaaaaaaagcgg

SEQ ID NO: 122717 - DNA, 1023 bp, Zea mays
  Clone ID: MRT4577_43401C.1
ccggccgggtcgacacgactctcggcaacggatatctcggctctcgcatcgatgaagaacgtagcaaaatgcgatacctggtgtgaattgcagaatcccgcgaaccatcgagtttttgaacgcaagttgcgcccgaagccttctggcggagggcacgtctgcctgggcgtcacgccaaaagaaaaaaaaagccgcgtggacgcacaccagcacctgccctcctcgccgtcgccgcctccctccgcgcgaccgatctaccctccgccgccaccatgtcgctgatcgccggggaggacttccagcatatcctgcgtttgctgaacaccaacgtggatgggaagcagaagatcatgttcgccatgacctcaatcaagggtgtcgggcgccgcttctccaacatcgtctgcaagaaggccgacatcgacatgaacaagagggccggcgagctgacgcctgatgagctggagcgcctgatgacggtcgtggccaaccctaggcagttcaaggtgccggactggttcctcaacaggaagaaggattacaaggacggcaggttctcgcaggtcgtctccaacgcccttgatatgaagctcagggacgaccttgagaggctcaagaagatcaggaaccaccgtggtctgcgtcactactggggcctccgcgtccgtggccagcacaccaagactactggtaggcgtggaaagaccgttggtgtctccaagaagcgatgagctctatatcaccctgagaaatcttggccgcactaccgtgttggtttgtgtccaaacagtcctgatgaagggtttctgtttaggcagtttcctgaaatggtgttttgctctaggacaatctcgcggttattgaaccttaatatatcgtgtccctgggttgtgtttttttgacactttataagtaatttcatttggatgagacttaattctggtttgactcgttacattgttaactcgactccgagaggagtgccttcccagtgcagttcattcacattgcctgttgtggagg

SEQ ID NO: 122718 - DNA, 944 bp, Zea mays
  Clone ID: MRT4577_43402C.1
actccatagggcgattgggatcctcaaggccggccgggagccgcgtggacgcacaccagcacctgccctcctcgccgtcgccgcctccctccgcgcgaccgatctaccctccgccgccaccatgtcgctgatcgccggggaggacttccagcatatcctgcgtttgctgaacaccaacgtggatgggaagcagaagatcatgttcgccatgacctcaatcaagggtgtcgggcgccgcttctccaacatcgtctgcaagaaggccgacatcgacatgaacaagagggccggcgagctgacgcctgatgagctggagcgcctgatgacggtcgtggccaaccctaggcagttcaaggtgccggactggttcctcaacaggaagaaggattacaaggacggcaggttctcgcaggtcgtctccaacgcccttgatatgaagctcagggacgaccttgagaggctcaagaagatcaggaaccaccgtggtctgcgtcactactggggcctccgcgtccgtggccagcacaccaagactactggcaggcgtggaaagaccgttggtgtctccaagaagcgatgagctctatatcaccctgagaaatcttggccgcactaccgtgtcggtttgtgtccaaacagtcctgatgaagggtttctgtttaggcagtttcctgaaatggtgttttgctttaggacaatctcgtggttattgaaccttaatatatcgtgtccctgggatgtgttttttgacactttataagtaatttcatttggatgagacttattctgatttgagtccttacattgttaactcttgacccgagaggagtgccttcccagagcaattcattcacattgcctgtggtggaggataaggttcaatttcatcgtttcacgtttgcggtcttttgtgttaaaaaaaaaaaaaaaaaactcgagcccgg

SEQ ID NO: 122719 - DNA, 947 bp, Zea mays
  Clone ID: MRT4577_43403C.1
actcctatgggcgattgggtccctcgaggccggccggaaaaaattagccgcgcggacgcccaccagcagctgccccccttgctgtcgccgcctctccgcgcgaccgatctaccgccgccgccaccatgtcgctgatcgccggcgaggacttccaacatattctgcgtctgctgaacaccaacgtggatgggaagcagaagatcatgttcgccatgacctccataaagggtgttgggcgccgcttctccaacatcgtctgcaagaaggccgacatcgacatgaacaagagggccggtgagctgacgcctgaagagctggagcgcctgatgacggtcgtggcgaaccctaggcagttcaaggtgccggactggttcctcaacaggaagaaggattacaaggacggaaggttctcacaggtcgtctccaacgccctcgacatgaagctcagggacgacctcgagaggctcaagaagatcaggaaccaccgtggtctgcgtcactactggggcctccgtgtccgtggccagcacaccaagaccactggcaggcgtggaaaaactgttggtgtctccaagaagcgataagctacatatctatcgacaaatctcagatgtactagtgttggttcatgttcaaactgtcttgatgaagggtttctgttgggacagtttcctgaaattatgttttgccctaggataatcttgcagttatggaaccttattatattgtatcctgcaatttgtttttttgcaacttataagagtaattttatttgatgagtcttatgctgactgtctctctatgctgttggtattgttaaggctatctttagtggagcgtacacatggacgtgcaaaatactgttttgtaatatagactctactgtttatagagtagagtttgaaatattgtgtgagataagtattgaggttgggagtgttggagat

SEQ ID NO: 122720 - DNA, 387 bp, Zea mays
  Clone ID: MRT4577_43404C.1
cggacccggggggcgacccggaaaacccggaccggaaccggcaggcgaaccaggtgggcggagggggaggcgtataaaagctgggcgaaaacaaggccaaagggggtcccgggggaaaaaggttatccgctaaaaattccaaaaaaaaaacaacccggaagcaaaaagggaaaagccgggggggccaaaagagggagcaaacccaaaaaaaagggggggccccaacggccccctttccaaggggaaaaccgggcgggccagcgggataaaaaaaacggccaacgcccggggaaaagcggttcgcgtattggcccccaggggggtttttctcttccaccagggaaacgggaaaaaactggtggccccaaaccgccgggccctgaaaaa

SEQ ID NO: 122721 - DNA, 294 bp, Zea mays
  Clone ID: MRT4577_43405C.1
acgtaagctcggaattcggctcgagcaaaaacgattttgccgccctgatatttgcaccctgctaaccagaatattgataacacgtacagttgaactgctattacacgcgaccatatggcccactcactttgagacctcgaattccactgcatgtacattactgccttgcagaggatatatatatagtcttgcccaggagctgcataggcgtgctagttcaatctgcctgcatatagacatcttgccgtgtatatagccttgcgcagagctgccaaggcgcgatttagctgtgtg

SEQ ID NO: 122722 - DNA, 444 bp, Zea mays
  Clone ID: MRT4577_43406C.1
tttttttttttttttttttttttttttttttttttttttttggggtttttttttgtttaaagtttaaaacattacacttacattacattttatacttacggtacatttaatgaacctaactggaccttaaattttactattactaaactccaaattaacttaactatttccacaaattttgctgacggttaaaatgcacgaacaacaactttttggttaaatgccctttaaaactccagtttccttaaaggtcactttcatgaagggacattctccaatgggtgggcaaacagacaaagggccggttgaaatgggattcagaaattgatggaggttcccctttttcttctgaccttggtacttatccaacatgacgggattttttcttacctgggctaaaaaactttccttggttaaaatcagaactttttctttttccctttt

SEQ ID NO: 122723 - DNA, 354 bp, Zea mays
  Clone ID: MRT4577_43407C.1
tccacaccgctagctcagcaaaaaccaagccccgattcagcggctgcgggggctggcccacgactcttgtataacccacgcatccaccacactatgctgtgctgccactactccaaccaaatgctacactctcgcccttccgctatcaaagatggtgaaagacggcaggggccgcggcgcccatggaggtcatgcgtctcacgctcggcgacgccgacgatgactacaccgacagggtctgcgaggtctacgccattcccaagagcgcgactgctaacagcgaagaggccgactaccacgtcatccagacaaacatgcttgacatgctcaagcagaccgggaggccacaaatgg

SEQ ID NO: 122724 - DNA, 297 bp, Zea mays
  Clone ID: MRT4577_43408C.1
ccagtttcaagcatgaaaaatcgtcagtcagctctcaataacttgtcacttgtgtgcataagtatgggcgcaactgatttgtggtcatcagggttggacagttttaaattaccacacaccttgttgaacagtgtatactgtatagcggtttccctctcaagcagccatttcaaaacttgaataaggataaggtactcgtcgtaactgtatcgctatctttatctttataagagatacttggatatgcaccaaaatgcatgtacataacataccacatatgacagtaaataatgcatg

SEQ ID NO: 122725 - DNA, 471 bp, Zea mays
  Clone ID: MRT4577_43409C.1
ggaaaggggcctgggggcagaaaacccggccaatagcaagagaacaaaattctgataacaattttttttaaaaaaaatctacaactaggaatacgggtacaaatcgggaccagtttaaaccccggaccacaaggtacgggtaagggctacagttattttcggaaccttgtctgttcaaggaaggggggggttggagccttaaaaaagcatcaccggagaggggcggaaagacaaaaaactctcctcacgggggctccagggaaaaccaccgcgccttcagtcataagggggccaaaagcaccgggggggtcgggcataagaatttccattgggctttggttcctcaggtcctccagcaactcaatcatgcgcatgggggggcccccaagctggattttctccgcaatcagggtacggggtggggcaacgagggtctcccgcctctgcctttcgcttggggatatccccggc

SEQ ID NO: 122726 - DNA, 709 bp, Zea mays
  Clone ID: MRT4577_4340C.1
ggtaccggcgcttctcctcgagtttttttttttttttttttttttttttttttttttttttttttttttttttttttttttttttttttttaaaaaaaaaaggcgttaataaaagcttgaacaggcccccattatgacgataatcaatttgctttaggatagaagggggcggccggttgttttttgcctgtaaagagagttagccaacttgatccaggcccccgattaaatttacggggaaacaatacaacttttcgaacacaaaaggaaaagcggcccgtgcaaaaggacaaagcggcccatggagagagagctacccttcatgtgggtcgggggaggacaaaaaccatcgacgagaacggaaccgaaagagggcggggcgagctaatgggattttgatgatgggaggaggataagcttagtttgtttaaccccctagggctactagtcccctactacccagggaagcttaggttttgcaaagcccaccatacgggcgcggggagctaggacattttcatatgggagagctagccatttgatctcaaatctagggaggaaacaggcaggtgaaaggaaaaaaaaggtccacacacctttaaagcgaaaaaaaaagagagaggttaaaatataccctagctaattgagctcggttcccgggggccagccggtggaaaaaacaaatgggccgggggggcccggccccccc

SEQ ID NO: 122727 - DNA, 649 bp, Zea mays
  unsure (1)..(649): unsure at all n locations
  Clone ID: MRT4577_43410C.1
catactcctcacttagcataaccttatacatcctgaggccatcttcctcagctccatgctgtatatatgctcccaacatagcattccatgtaatgacattcttttctgacatgccatcaaagaactcacgagcttttgcaatgtttcctacttgagaatatgcagttatcatgcttgtccatgatacaatgtccttttcattcataaatctgaatatagcttcagcactctggagattgtcgcactttgcatacatggagatgagagaattggagacgactacagcttgaatctgcccacttttcagacaaagtgaatgtagttgcctcccaaggcacaaatccatcctgctgcagcagccacttataagagtagccaaagcgaactgatcaagtgtcatcaactcagctctcatctggttgaacaattcaacagattcagtgaaacacccatactgcaagaatcctgagatgagaactgtccaagccacattgttacggtcatgtaaagagttgaagacccccttagcttccttgaaacagccagttttgcatatagtcaacaagagcacttgccaacatatggatcaatgtgcggtagntctggatcacctgagcngaagtggttaccccacttaaagagtnnctag

SEQ ID NO: 122728 - DNA, 289 bp, Zea mays
  Clone ID: MRT4577_43411C.1
aaaaaacatttttttttctacaatttactattttaacccggcgggattaaaaaaaatgcttgccgcgcttaaaataaaaccccatttcatatctttatttttacttttaccacactaatcctaaatccaaacctaacttatttttcttaaatctattcattcctttatttcttattacctatccaaacattattcttctcatcccttatcccatctatcaaacactatcatctattattcacacctttacatctttttctttcatattatcattatttatttccttttt

SEQ ID NO: 122729 - DNA, 404 bp, Zea mays
  unsure (1)..(404): unsure at all n locations
  Clone ID: MRT4577_43412C.1
cnntttttctttttttttttgggggacctttctgcgatggtgggggggctccccaaaatagctgaggcccgcagcttttttctttggttcaaagcattacaacattagctgcaaaaccggaaacagccctgataagcaccacttattctgtgcagccaacacaaacgataagggcggggcagctcaagaatgagccacaccatgttgaagccatataaatgcatgattaagcccacccgacccccaaaagctttttactgaaaaaaaaggccgccttaggcagaaggtttctccgacttgagtggcttcaccacctcccaggtgaagtcagggccgtcccttccaaaatggcccttggcccccctcttgaggtagcccccctcccccccttttttgagggcaag

SEQ ID NO: 122730 - DNA, 1469 bp, Zea mays
  Clone ID: MRT4577_43413C.1
cattgggtacctcgaggccggccggaacgaacgctgctgtggcctgtgtctgtctgcgccgtctgtctgcgccgcgcctcgccttcctctcccgccgccgtcgtggtcgtggacgccatgggccgaggccgcaaccgcaagccccgcaacttcgccacgttccgcctctgcccgcgccccggggctgccgatgcctccgaacgcgtcttcgtacgcgtcgacgacaacccctactccgtccccgggttcgcagacgatgatggtctctcgtcctccaccgccgtcaggggagacggcggcgagcccgacccgtcctcctccacctcgaccgacgagggcgggtcccccctgcccgagcacgtccgccgagagatcatggagctcggcctccccgacgacggctacgactacctcgcccacctccgcgagctccgcccctccctctcctccaccggcggcgggggttcttcggccgtattcctccccagccgccgcctcgcacgctccggccttcccgtggacgtgaaggcgtacgacttcactagtaccccgcttggttccggggaggttgcggtggtcgcggctagtcgggctgaggaggctattgacctggatgtcaccaggctgcttgacgggagcgattcgacggccgttgagtcgggggatgaggatttggaggaggactttgttatccttgcgaatgagccagatgagaagcaggagagcgaggaagagaatgttgctggaagcaaggagaaagctctgcagctgcctggcgatcagtttgtttcgcttgctttcgaagaatatgcggacagtggagttggttgttgtgttcaagatgcaaagcatgaactgtcccaggaggttacagataaactgaaaccgcctcacagcgaaaccttcgatgctgataaaagatgcagggcacccacaccacaatatgttgctcaccggatactagagtcaaacgagcaaattgatgcgtcttctaatgccatctccgaacatgttcagtacgctgaaacatatgaagtcagcgaagaagaacaagcgattcttgctccagaaagtagcaaggggtctgcggttatgtactctactgccacggtttctggatcatatctcgatgttaaattgaagtttccaaaacattcccctggagaaacaagtatgaaaaaatccatcatcagaaaaggaatagagaagcttcctgcagggtattcacctcagaggaacactccgactggtgaaactaaacagggaccctacaaaggaacgagacaggaagggacagaaagctaggtaataaaactgatgcatgttaggtttctcatttcaactcttgaacattttagttcagtatatcaaacaatgttgctgcattgagataaaaaaaacacagtggctatactcctgttgatttatttatcaaacattttagttcagtatatcaaacattttagttc

SEQ ID NO: 122731 - DNA, 443 bp, Zea mays
  Clone ID: MRT4577_43414C.1
gaagagtttttttttttttttttttttattttaatttgttatttgtaacaggaaataaatagaataaataatatgaagcatgtatataaattaaggttatttgaaagttgattaattcaaccagaaattatgggagaaaaaaataaataaatcaactgtgagtggtgggctgctatcgcatgcgagggaacgcacgtcatgcatgtgtgtgagcatggcaaacgaaaagtctcttttttattggatgagcagcacggcttattgagtgtggtcaaatctctcagcccaatgcgccgcttagatccgtttccctcagcggcaggtaatgcataggattagcgcttggcgagctgtgagctgtggccggcaaactggttgcgcgcttatggcctgccgacgctcgatgccaagctgagacttcagcggaggaaccggatcggagg

SEQ ID NO: 122732 - DNA, 141 bp, Zea mays
  Clone ID: MRT4577_43415C.1
attgtggccatgaaggcagtgtctctgggcttcgacctggaccggggcgacgtgggtacggtgccctcgccagtggagttcatgggctacctctacttcgtgggcaccatcgtcttcgggccctggatatccttccacaca

SEQ ID NO: 122733 - DNA, 472 bp, Zea mays
  Clone ID: MRT4577_43416C.1
gccggccgggtcgggaataagacgtctgtttctccccagctccaagccggacgacgcagcgtagcagcagagagccagagatcatcatcgacgtcgagctcgccacccgcctcctccccagggggttcatctggcccgtcgccgcctaccgcgagctcatcaacggggacctcgtcgtcgacgacaaggacatcggctactactagctgcgcttgttcacctgcttgcactgtgcatatatattgctgctgccgagctgggcgcttggatagtacgtggggaaacatggatggcttttggtgtaggagctacatgctttgctagggctatctggtcatgtaggaaatggaagctctgctgtactttaagaaacttgatgaaacctttgtataactcaactgtacctctatctatcccttgtgtgtatttgagaacgatttcagagcaaaaaaaaaaaaaaaaaaggccccta

SEQ ID NO: 122734 - DNA, 601 bp, Zea mays
  Clone ID: MRT4577_43417C.1
agattttagtgatttagattcacttttgccacttaccaaacttgaaacactttcactactcaccaatcccatcacaacagatgctcactatcgcgaatacgttgcctataaatttccaaagttacgacttttggattttcgtaaaattcggcaaaaagatagacaagccgctgttgaactatttaaaagtagaaaaggaaaagaactgttgaaagagatagcaaagaaggccaaagcagcagccgataatccatctatagatacaaataattcaaaggtttcaaacacatcagctgaagatgtacagagaattcgagatgcaatcaagaatgcaacatcgttacatgaagttgaacggcttacacgaatattgcaatccggtcatattccagagaatctaaatgccgaaaatggaaatggtacctcacatgacgaacatgccatggagatgtaagactaaaactcatcgataagcaaaagctcttcgtaatgatttcataaacaattgcaatgaaaatacaaacttcattaatttttgtgcgaattcacaaagaacgatgtgacaaatatttaataaaacaataaattcattacacaattt

SEQ ID NO: 122735 - DNA, 1124 bp, Zea mays
  Clone ID: MRT4577_43418C.1
cgccgctcgaggcggccgggcccactcgtgcgccgcggccttatcccaaagttgcattgcatccatcgtgcctgatctccctcccaataagcacgtctgtttctccccagctccaagccggacgacgcagcgtagcagcagagagccagagaccagagatggccgccctcgccgccgcctccacggccgccttcgccgcgaagccgcgcgcgcgcctctccgtggcctgctccgccgccaccggcgacagcagcagcgtgtcgctcgcgtcctccgtgaagacgttctccgccgcgctggcgctgtcgtcggtgctgctgtcctcggccgccacctcccctccgcccgcggccgccgacatcgcggggctgaccccgtgcaaggagtccaaggcgttcgcgaagcgcgagaagaactcgatcaagaagctcaccgcgtcgctgaagaagtacgcgcccgacagcgcccccgcgctcgccatcaacgccaccatcgagaagaccaagcgccggttcgagaactacggcaagttcgggctgctgtgcggcgccgacggcctgccgcacctcatcgtcagcggcgaccagcggcactggggcgagttcgtcaccccgggcctgctcttcctctacatcgccggctggatcgggtgggtcggcaggagctacctcatcgccatcagcggcgagaagaagcccgccatgagggagatcatcatcgacgtcgagctcgccacccgcctcctccccagggggttcatctggcccgtcgccgcctaccgcgagctcatcaacggggacctcgtcgtcgacgacaaggacatcggctactactagctgcgcttgttcacctgcttgcactgtgcatatatattgctgctgccgagctgggcgcttggatagtacgtggggaaacatggatggcttttggtgtaggagctgcatgctttgctagggctatctggtcatgtaggaaatggaagctctgctgtactttaagaaacttgatgaaacctttgtataactcaactgtacctctatctatcccttgtgtgtatttgagaacgatttcagagcaaaaaaaaaaaaaaaaaaggcccctagaaaaaaaaaaaaaggccccta

SEQ ID NO: 122736 - DNA, 1257 bp, Zea mays
  Clone ID: MRT4577_43419C.1
cgcgtttctttccgatcccaaagctcccgcacaccctgcctgatccctcccaataagctccccagctccacgccggacgcagcagcagcagcagtagagatggccgccctcgccgcctcctccacggccgccttcgccgccaagccgcgcctcccacgcgcgcgcctcaccgtggcctgctccgccaccggcggcgacggcaacggcagcagcagcagcgtgtcgctcgcatcctccgtgaagacgttctcggccgcgctggctctgtcgtcggtgcttctctcctcggccgccacctcccctccccccgcggccgctgacatcgcggggctgaccccgtgcaaggagtccaaggcgttcgcgaagcgcgagaagaactcgatcaagaagctcaccgcgtcgctgaagaagtacgcgcccgacagcgcccccgcgctcgccatcaacgccaccatcgagaagaccaagcgccggttcgagaactacggcaagttcgggctgctgtgcggcgccgacggcctgccgcacctcatcgtcagcggcgaccagcggcactggggcgagttcgtcaccccgggcctgctcttcctctacatcgccggctggatcgggtgggtcggcaggagctacctcatcgccatcagcggcgagaagaagcccgccatgagggagatcatcatcgacgtcgagctcgccacccgcctcctccccagggggttcatctggcccgtcgccgcctaccgcgagctcatcaacggggacctcgtcgtcgacgacaaggacatcggctactactagctgcgcttgttcacctgcttgcactgtgcatatatattgctgctgccgagctgggcgcttggatagtacgtggggaaacatggatggcttttggtgtaggagctgcatgctttgctagggctatctggtcatgtaggaaatggaagctctgctgtactttaagaaacttgatgaaacctttgtataactcaactgtacctctatctatcccttgtgtgtatttgagaacgatttcagagcatgtctggttcgggcgtctattagggcttgttcatttagctcttaatccatgtggattgagtcggattgaatgggtttgaatcacaaacaagtcaaacttctttttaattttttccaatcccatccaatccatgtgtattgggaataaccgaacaagaccttagatggagcataaatttttttcaatcccaaaaaaaaaaaaaaaaaaggccccctaag

SEQ ID NO: 122737 - DNA, 374 bp, Zea mays
  Clone ID: MRT4577_4341C.1
aaacaaaaaacgggaagaagggcttccatttgctcccaaaggggcccctaacatccccacgggggggggggggccttttcccctttaaaaaacaacggggccgaacccttaccgggtaagggtttcaaaacccccaacccttaaaaggggaaaaaacaaccgggcaaaaaaaaaagggtcccccccgaaggggtatacaacacatccgaaaaaaaaacttggttaggggcaacccataaaaaaaaaaaaaccgggacccccaacagaaaaccaaattggggacgacccatgcgcccccaaaaaaggttggtgggccccacaacaattaacagttttaaacccccccccacccggggaggaaaacaaactttttg

SEQ ID NO: 122738 - DNA, 1105 bp, Zea mays
  unsure (1)..(1105): unsure at all n locations
  Clone ID: MRT4577_43420C.1
gccggccggtccgggaaaaagccctcctctcctctcccctctccctcgcggcctcgccttatccccttcgtcactcacctcgaccaccgccaagggaaagaagaagaaggggcccagctccgggaaccttcccgcagccctcgacgtcgagatcagggaggcgcaggagtacctcgacagcgaccagcaggaacctgttccagaaaactttccatttgaattaatcgacgaagagggtatgagcgtggttattttgagaagggactacaaggacgagaaggtcgaggttactgtcagcatgcctaatttagaaggaggccccgagtttggtgatgaggatggcgagggcgatggtgagagcgctgccaaggacgacggagaagcagaagaagatgacgagagtgccggggagagcagcatctctcttaaggtggtagtttccaaagactctggcccagagctcgagttcacatgcacagccttccgcgaggagatcaccatcgatgatatgctgatagtggagaaaacagacgacgacgacggagaagagaagttcccctacgagggccccgagttcaccgagctccctgtgaatgttcagaaaggcctgttcaagtacctggagcaaagaggggtaacgctgtcggctaccaactatatgcccgattacatggcgacctaaacaggctcaggagacatccgggggatgactaagatgaaggatttcgtggcccagttagcaacagcgtcgtgattagccaccattgtttggttaccctagccttagcatgtgttccacccttacaggaacactacgactaccccgaattggcccccccccccaaaaaacaaaaaagggggagcattgtatttgcttcaatgtatctgtatcagctggcaaaccagtagcaagtagatttccagtaatgttcccccccccccattaggtattccgatacgtatctggatgaatgttttggaattttggtgggtgggtgcgcccgtgcgatgaccctgtccttgtgctgaaaaaaaaaaaaaaaaaaaaaaaaaaaaaaaaaaaaaaaaaaaaaaaaaaaaaaaccccccgcccggccgtntagag

SEQ ID NO: 122739 - DNA, 1277 bp, Zea mays
  Clone ID: MRT4577_43421C.1
cattgggtacctcgaggccgggccgggaaaaccctcctctcctctcccctctccctcgcggcctcgccttatccccttcgtcactcacctcgaccaccgccatggccatggccttggcctccgcgaccgccgccgcactcttccgctccgccctgtccgcgccacacggcgccggcgcgcgcgtccggccgcagcgccggcagccgttcttggctccgctccacgcggcgaagggccccggctcggcgccggtggtgctggagggcaaggccaagggaaagaagaagaaggggcccagctccgggaaccttcccgcagccctcgacgtcgagatcagggaggcgcaggagtacctcgacagcgaccagcaggaacctgttccagaaaactttccatttgaattaatcgacgaagagggtatgagcgtggttattttgagaagggactacaaggacgagaaggtcgaggttactgtcagcatgcctaatttagaaggaggccccgagtttggtgatgaggatggcgagggcgatggtgagagcgctgccaaggacgacggagaagcagaagaagatgacgagagtgccggggagagcagcatctctcttaaggtggtagtttccaaagactctggcccagagctcgagttcacatgcacagccttccgcgaggagatcaccatcgatgatatgctgatagtggagaaaacagacgacgacgacggagaagagaagttcccctacgagggccccgagttcaccgagctccctgtgaatgttcagaaaggcctgttcaagtacctggagcaaagaggggtaacgctgtcggctaccaactatatgcacgattacatggtgactaagcaggctcaggagtacatccggtggatgactaagctgaaggatttcgtggcgcagtgaggaacagcgtcgtgattcggcagcattgtttggttagcctagccttagcatgtgttacagccttacaggaacactacgactacaccgaattggccacactccccaaaaaacaaaaaagggggagcattgtatctgcttcaatgtatctgtatcagctggcaaaacagtagcaagtagatttccagtaatgtttagtggtgggcattaggtattacgatacgtatctggatgaatgttttggaattctggtggctgttagaaataaatgcacaaaataggatcaatcacagagcgtgcgaccgtgcgatgagcctgtcattgtgcagaaatgagggcgctctaaatcttggttaaggc

SEQ ID NO: 122740 - DNA, 329 bp, Zea mays
  Clone ID: MRT4577_43422C.1
ctttttaacacgtggttatcctgcactgtcctccgggccaccagtaccttgtgatcatagccaagggcacggtcggaagactgtgggaagacaaagtacaccgggaatagggcgtacttgaaaactaccctgcagctggttggtgagtctggcccgctgagcaagcgtgagctgtggcgcgagcagtatgcgctgagccgtgtcaagcatgcatccagggagctgctcaccctgcatgagaagaacctacacccaatctttgagggtgaggcgctcctacgacgcatgaacagatatggttttcttggtgagggacagaacaagcttga

SEQ ID NO: 122741 - DNA, 270 bp, Zea mays
  Clone ID: MRT4577_43423C.1
ctcccaagtttccaatcccaaccaaaccccatggaggcagcatagcaagcttattggattaacatgtccatcgcaaacacaacacagcccttgcagagtgacaacaataacagagctcaaaaatgtaaatcccaatagttaagaaccctcggcccccaactttgtatggcgcagccaccaaaatagatccctaacaaaacgaacgagctagcatcacatgatccactctgctttccggtgtgaacaactccaccacaaaccgccatttgg

SEQ ID NO: 122742 - DNA, 824 bp, Zea mays
  Clone ID: MRT4577_43424C.1
cggcgggacccacgcgtccgcccacgcgtcggccccctcccgccgcggcgacgccttcccctccctccttcctccgtcccatgctccgccgctgacacgttggcccgacttaaccttacgatggccgccgcctccgccatcaccgccgtctccggcgttgtgcttccccaaaccttcctatcccaccggtcgccgccgccgcaggtcctagccgtggcctcctcattccgccggctctccttgtgcgcttcccctcgccggatcactcacataatcccccgcgctgatgcaagtgccgaagctggagaaccggagcctgtcactgcttcggctgaatccgaagaggaggtggccgaggggtctgtcgctgtggcggaggcggaggaaccgacgccgccgagcaagccgaaggttaagttcggcgaaataattgggcaacggcccaacaaaaggagattgtcgctctttaagggcataatcatcgcaaagcacaaagctggtgttcacaccacaatccgtgtcagaaggatcattgctggtgtaggagttgagattaccttcccagtgtactcacccaggatcaaggaaatcacggttatcaggcacaagaaagtgaggagagcaaagttgtactacctgaaagacaagcttccccgcttttcaacattcaagtgaaatcagatatgctgacagaacaacttttcccacaccatctcgatttctcttaaacctttttttcacttccctatcgatatcatcatatttcactgtaatctctgggtatcagatatgtaatatctacagctttatagcatacttggctt

SEQ ID NO: 122743 - DNA, 1323 bp, Zea mays
  Clone ID: MRT4577_43425C.1
ccgggcaaccaacaaatacaacataacacatcccttaacactttccattttcaaacatccaccaccacctccaccgcttctctctctcgggttcggatctccgatcgccgccgcaccgcgaaacgagtttccaaactcagaatccagatccctacttcaacaaacaaacaaacatgattgcgattccgtatttctcccacccacaaagagataggcggatagcgtctatacccggccgggaatcctcccgccgcggcgacgccttcccctccctccttcctccgtcccatgctccgccgctgacacgttggcccgacttaaccttacgatggccgccgccgcctccgccatcaccgccgtctccggcgttgtgcttccccaaaccttcctatcccaccggtcgccgccgccgcaggtcctagccgtggcctcctcattccaccggctctccttgtgcgcttcccatcgccgaatcactcacataatcccccgcgctgatgcaagtgccgaagctggagaaccggagcctgtcactacttcagctgaatccgaagaggaggtggccgaggggtctgtcgctgtggcggaggcggaggaaccgacgccgccgagcaagccgaaggttaagttcggcgaaataattgggattctgaataagcagttcattgaggaggctgagaaggtgaagactgtaccggatctgaggcctggcgatatcattgagcttaggatgcaacggcccaacaaaaggagattgtcgctctttaagggcataatcatcgcaaagcacaaagctggtgttcacaccacaatccgtgtcagaaggatcattgctggtgtaggagttgagattaccttcccagtgtactcacccaggatcaaggaaatcacggttatcaggcacaagaaagtcatggagagcaaagttgtactacctgaaagacaagcttccccgcttttcaacattcaagtgaaatcagatatgctgacagaacaacttttccaccaccatctcgatttctcttaaacctttttttcacttccctatcgatatcatcatatttcactgtaatctctgggtatcagatatgtaatatctacagctttatagcatacttggcttagcgcaatgttttgtttgttgtcagtgtacaaaattcatactagcaccttgttattatgaatttgcaaatacaaggttatgtaaaaaaaaaaaaaaaaaaaaaaaagaaaaaacgcgatctagaactagaaaaaaaaaaaaaaaaaaaaaaaaaactcttgtgcgtcgagtttgtgatgaatgattgttaggtcattctt

SEQ ID NO: 122744 - DNA, 207 bp, Zea mays
  unsure (1)..(207): unsure at all n locations
  Clone ID: MRT4577_43426C.1
nnataatttttttttttccaccaacaaatatggatgtcttatttaaacggcaggggcggattcacaatccaagtagagtagcaaagctgccaatgtccaatcctggaacataaggttctactcaaattattacctttaacgttcaagttctttcacacctactgttttccctatgctgatcctggcatactattttctgtttttacc

SEQ ID NO: 122745 - DNA, 419 bp, Zea mays
  unsure (1)..(419): unsure at all n locations
  Clone ID: MRT4577_43427C.1
ccggccggggcgacccggcggcgacctggtgcccgacacggcagcgacgacccactcgcctccacaccgctccgctcacctgttaccgtccgtcgccagcagcagatggcgggcgccgcgccggcacgcacgcacgcacgttcggtgcggcgactgacgggcacgggccccgacgtcgtcggcccgacgcgatatttttgacggggttttgatggggcggcacgtacgccgcaggccgtcgcagtcacaatctctttcgagtccctcatccctttttctttttttttccccgcggcagccatggtgacgccgctagcccacatccgatgcgggcaagaggatacggtcgccgcanaatccgctgacgaggacgccgcgcccgtgcttgtcgacgcgttacggaccgggctgcccgtcgt

SEQ ID NO: 122746 - DNA, 421 bp, Zea mays
  Clone ID: MRT4577_43428C.1
ttttttttttttttttttttttttttttttttttttttttttttttttttattgtggggtgtttatttaaaagcagggggcttagagacaaaaccgcaagagcaaaaaggaacagcttaaaacaaaaaggggggccccaaaaagaacagggggccgcaaaatacccaaggcccagggctggggacaagaccaaaaccagggacccgaaccaccgaaacttaaccttgacacacgaaccctaagccggacacaaaagcccaagaaaagcacttaaggaaaaaaaagccccacaatgaaaaacacctagacgagggaaaaaccccaaaacccgacaaaaaccggaaaaaaccacgtaatttgtcaaccaccaccttagataaaacccccttaatatgccctgccaaccaaattgaaccccccc

SEQ ID NO: 122747 - DNA, 467 bp, Zea mays
  Clone ID: MRT4577_43429C.1
tcttggacaacgagggcggacgcgagggtaatagggggagcatacagaaacacaccaagcgaagcgcactagcaacgacctaacaacaaaggcacccaagaaatgatagcctccttgcgctaaaagcccaatcagcgagagcaacaaacgcgcccattaaaccacaatgcccactcgcaacgagtgccactattccacagagccaccctccagatactccaatgggctacgaacacccagccgagcaagcctataggctacaacaagcgctcgcggagagcgcataagaacaaccaaatgcccaataacaacaacaatcctaggcacatataaccatacaaaccaacgtaacgcagcagcaacaagcactggacccaactagacgcggtgaaccctatcggctactagcaacaacagctgcttgcaaccaaaccaccagccttggcaaacgtagctgaaaccaacaa

SEQ ID NO: 122748 - DNA, 589 bp, Zea mays
  unsure (1)..(589): unsure at all n locations
  Clone ID: MRT4577_4342C.1
cacctaaactagtgccaaattgcttccgcattccctccctgcattcccctcctccgagtatccgacccatcggcggtcctctccctcgtggcgacggccgctccaccgccgctgccgagtgggtcttggccggcgacgaccgcccaccggatacagcagcaggctttatgctggaaacttctgcagaaaaacacacaacaataatggggcacgaccatatgtctcgtataaagatgcatatggcagaaggttcttttggtggtatgtctgccccatgcctcaatgtttccatagcttgtgatctcgcaaggacgcatctctattttggaattttaagaagacatgctgttacatattttatgttccactgagctggtgaattcagatgatgctgattttctgacacattccatgtgctactgttggttgatagatatcttttatcatgaattctggagctaatatatgttatgttggtgtaaccaattacttttactttgttggggtttgctatcagnttttttcctttggttggggntttggttcatatttatatcaattggattggggttgatacatttctaatata

SEQ ID NO: 122749 - DNA, 401 bp, Zea mays
  unsure (1)..(401): unsure at all n locations
  Clone ID: MRT4577_43430C.1
atantttttttttttttttttttttttttggggtctttttattttttttttttttttttttttattttaccctaaatataaatccttgccatttcaaaggttcattcaggtcattgctcacactgccacccagggggagggggaacactttgttactaatggccgctaaacgagggaactacctatagccctataggcagctagtcagcggctccattacattattactccaggacatagtttcctcagaaaaaaacacccccggaagttgttttgaaagggctggaacctggctgttgcaactgcaaaccgcacatcgccgtgagttgttgcgctacctgggccgttatcagccccccaagctgcccaattggttgttgttgcaggaaggactgcaagac

SEQ ID NO: 122750 - DNA, 394 bp, Zea mays
  unsure (1)..(394): unsure at all n locations
  Clone ID: MRT4577_43431C.1
nnnnnnatttttttttgnncttnnnggnnctggtgctgggcgtttacgccctggacggggcgctggccggcggctgcggcttctactacaaggatgccctcagcacgaccatcatattcctggaggcaaaaaaaaaaaaaagctgccgcgcactaagagcccaccccacgcggttactccaccccccaccacggcaatctctcaaaaagaaaaaaaaaaaccggtcctgcgatgccggcgacaaaaaaaaggacagaaaaaagccctttttcaccgtgaccacgctggagaaaaaaaaggtggccttcaaccccgcgccggaggggtccatggagcgggggcacctcctctatgccgtcaagtggggcaccgactacccccccaaatgcgcccc

SEQ ID NO: 122751 - DNA, 2079 bp, Zea mays
  Clone ID: MRT4577_43432C.1
gacgtagagaccgatgacttctacctgataacgctttactcacgacgcgtctaaccgcgcactccttttaaatgaccaccttgcggactccttgggcgtcacggcgaccgatgccgctgctgctgcgcggcgcctccctcctccgcctctgccagtgtaccagtgggctctcaagtgtgaaatttagttcaagagtaacggtactagtgaatctcaacgccatgagggacggaatgcgggccacatattcacgtagagctgcctctaagaacagtgaggtcaagaaagatgagcagccagtcacagagaaggttagtagagctgcctctaagaacagtgaggtcaagaaagatgagcagccactcacagagaaggaagatgctgctgaaactgatttggaggtggagcgagggaggagcagcagccctagccagctccaatcaatgactttcaaggagctcagggagctcacgaggaggaggggtatttctgtgaaaggtaccaagaaagatttagtatcagcactgatgaattctatggccgtggaagcaaatggtgaagggggaaagtcatccgttgagctggttagccccttggaagtacctttgaaaagaaaaggtggtgcttctgttgtggttgaacaaaaactagaaagttctgagatcatttctgaaacacctaacaagaaaagtagaacaaaacaaaaatcaagcaagaacaccactcgtgaggaaatttcggtgactaatgtcaagctaagtaagactgttgtccagaaggaaacagttgccggattaagtcctgatgatgattcagagccttggactatactcgtgcataagaaaccacaagccagctggattccatacaaccctaggactatgaggcctccacctctaagcaaggatacacgggctctgaagattatgtcatggaatgtcaatggattgaaagcattgctcaaatcaagaggcttctctgtgcagcagttagcacagagggaggactttgatgtgctttgcctccaagaaacaaaaatgcaggagaaggatattgaagttattaaggacactttgcttgatggctacacaaatagtttctggacttgcagtgtgtcaaagcttggctattctggcactgcaataatttcaagagtcaaaccactgtcgatcaagtatgggcttggtatatcagaccatgatactgaagggagggttgtgactgtagagtttgatgacttctacctgttaactgcttatgtaccaaactctggtgatggtctaaaaagattgacttacagggtcacagagtgggatccatcccttggtaactacatgaaagaattagagaaatcgaagcctgtcatactaactggtgatcttaattgtgcgcatcaggagattgatatacatgaccctgctggaaatcgtagaagtgcaggcttcacaaacgaggaaagagaatcatttgggaccaattttttgtccaaagggtttgttgatacgtttcggaaacagcatcctaatgttgttgcctatagttactgggggtacaggcataatgcccggaagacaaacaaaggttggcgcctggattactttcttgtgtccgaatcaatcacagaaaaagtgcatgattcatatattcttccggacatctctgccagtgatcacagtccccttggtctcgtgctgaagctgtaggctgtatcacacaggctatgccaaacattcagtctgaagcctgtgccatatttctcagacagcgatgtttattcctgatggtttctggttcgtgcagatccctggcaggaacaacgacttttgtcagactattagtgaaacaaggctttgtaacgcactgagcagatttgactattagtggacaacttactgttagcaaagctgcacctttgtagtgtaaatatgcggccatatcttgtgctgcacttgtgcagctcaatatgagcagcgggggaagctcattacctggttatggaattatgatactgaccttaacctattgaggtctttaaactatcaaaaaaaaaaaaatgccgccgatggcgtcagaaaaaaa

SEQ ID NO: 122752 - DNA, 534 bp, Zea mays
  Clone ID: MRT4577_43433C.1
ctaggctgaaacatagtacatgcttaccagtaagacaaatgttggccgcccattggcatggcttattaatttggtgacggaatcagccaggctgaactgccctgtcgtcgcctcaagattggcgcgttttgggccctgcataagcaaaaaaataactggagagagagacatagagagagagagagagaggagaatcttgagcagccttcataccttggggacatgtaatctgatgaggtgaatgaggatgatagccacggcatcaaacatggagctttgccctggtgtctccacccgcctgttagtttaaaacaacttgatacatgtactgataatacatacatatattactcttgctgttggctgaaggaaggagatgcttgttgctgttgctgcctggttggattattagggttcctgtgggcttggctgccattgccatgtgggcgtgccacgtgggcccgcatgccagggaggggagacggggcacagctgctgcaggtcaatggggaccctggaggagcgccagcatgc

SEQ ID NO: 122753 - DNA, 839 bp, Zea mays
  Clone ID: MRT4577_43434C.1
gctcggcgaccgatgccgctgctgctgcgcggcgcctccctcctccgcctctgccagtgtaccagtgggctctcaagtgtgaaatttagttcaagagtaacggtactagtgaatctcaacgccatgagggacggaatgcgggccacatattcacgtagagctgcctctaagaacagtgaggtcaagaaagatgagcagccagtcacagagaaggttagtagagctgcctctaagaacagtgaggtcaagaaagatgagcagccactcacagagaaggttagtatgtttccccttgtgcttatactctcggactgttgtagttttgtttcataccattctgtttgtatcctaggaagatgctgctgaaactgatttggaggtggagcgagggaggagcagcagccctagccagctccaatcaatgactgtcaaggagctcagggagctcacgaggaggaggggtatttctgtgaaaggtaccaagaaagatttagtatcagcactgatgaattctatggccgtggaagcaaatggtgaagggggaaagtcatccgttgagctggttagccccttggaagtacctttgaaaagaaaaggtggtgcttctgttgtggttgaacaaaaactagaaagttctgagatcatttctgaaacacctaacaagaaaagtagaacaaaacaaaaatcaagcaagaacaccactcgtgaggggatttcggtgactaatgtcaagctaagtaagactggtgtccagaaggaacagttgccggattaagtcctgatgatgattcagagccctggactatactcgtgcataagaaaccacagccagctggatt

SEQ ID NO: 122754 - DNA, 323 bp, Zea mays
  Clone ID: MRT4577_43435C.1
gtggtccctcaagaccttcccctaccttttgtggaaccagtgatgcctcaaagacagtgtcccctccacagctgggtgccaggggcaggggatcctcagtatagccggtgaaccctgataccaggagcctgggcctccctgaacccctggcttccagccatctcatcgccagcctcctcctggacctcttggcccccagccccttccccacacagccccagaagggtcccagagctgaccccactccaggacctaggcccagcccctcagcctcatctggagcccctgaagacaagtcccacccacctttctggcctcatctg

SEQ ID NO: 122755 - DNA, 154 bp, Zea mays
  Clone ID: MRT4577_43436C.1
cttactcccctccccgatacgccaacggtcggacacagctaccaagccgctggaaagatggcctgctgcttgggccttatctgagcgggcctgcttgcgctggtcttgacgtggcagcaggccagtggtctacgatcctagcgcttttcaggac

SEQ ID NO: 122756 - DNA, 858 bp, Zea mays
  Clone ID: MRT4577_43437C.1
aagaattagagaaatcgaagcctgtcatactaactggtgatcttaattgtgcgcatcaggagattgatatacatgaccctgctggaaatcgtagaagtgcaggcttcacaaacgaggaaagagaatcatttgggaccaattttttgtccaaagggtttgttgatacgtttcggaaacagcatcctaatgttgttgcctatagttactgggggtacaggcataatgcccggaagacaaacaaaggttggcgcctggattactttcttgtgtccgaatcaatcgcagaaaaagtgcatgattcatatattcttccggacatctctgccagtgatcacagtccccttggtctcgtgctgaagctgtaggctgtatcacacaggctatgccaaacattcagtctgaagcctgtgccatatttctcagacagcgatgtttattcctgatggtttctggttcgtgcagatccctggcaggaacaacgacttttgtcagactattagtgaaacaaggctttgtaacgcactgagcagatttgactattagtggacaacttactgttagcaaagctgcacctttgtagtgtaaatatgcggccatatgcagctcaatatgagcagcgggggaagctcattacctggttatggaattatgatactgaccttaacctattgaggtctttaaactatctgatcatgtgctgtgccgctgatggcgtcagaaaataactgtgccatgcaatttcacgcatagccgaaactgttcttggaaattaaaaaaaaaaaaaggcccctagggagcgtaacaattaatcagttatagtgtagctcaaaaaaaaaaaaaaaaaaggcccctagggcc

SEQ ID NO: 122757 - DNA, 455 bp, Zea mays
  Clone ID: MRT4577_43438C.1
gggggggccccctacgtgcctttctaagcacaaaaaaaaaaaaatctcccccaggttcccaactgataagcacaaaaaaggggggggaggccccggctcccaaccgttcgttaggacaaacgccaccaacaaacagggggcctctttgcctgaggaaagacccagcgcccaaaaataagccccctgggcgggttaaagaacccacggcacaaaagcatgccccaaggaatagtgaaaaaaaaaacgggaaagcacgcctgcaccaccatttggtggtcacgggcgtatactgcccccttctagaaacacttgggcgaaacagacgcgagccaaccactacaagcgggctttggggagaccaactgtaacccaggagctataattttccgtggaagtgggggaccgccccacccctaatatccgcctcgaacgatctggaggggaccccaacccct

SEQ ID NO: 122758 - DNA, 513 bp, Zea mays
  Clone ID: MRT4577_43439C.1
ctccctgttgcgcccgaggccgaactcgtgggagatcgtgactcatccttaccctggtggttggtacagtagccggagcggggcgaacagtgctgatttcctgtcagatcggtcagtaaaggggcgaagtgactgcggtcacttcaaccttgctgactgaggcgcgcgtgtcaggataaggtgtcaggcgatccccacattgtatgcgcatgcgatacggtcggttggtagggcgatccggccgaggtcgctgcccgacaaagtctgcccgagctgggcttcgggcgagccgagggtgtgtctgctgactgaggggaccctccggcgaggcgtgaatctgtctgggactgctgtccttacccaaggctgggctcggatgaggtcgcgtcccttggtagacgaggcatgcgctttatcagtcgcttatggtttgttctgaagatgttttccaacccggtcaaggagcattgggggtacccctaatttctggcccctacagttcccaaccatgtt

SEQ ID NO: 122759 - DNA, 822 bp, Zea mays
  Clone ID: MRT4577_4343C.1
gggattaccttataacgcactaacaaaaattcatctactgatgttcaaattgtagtgtcaatgcatgcgttgcaagttatggcagggctgcaacctgcaagagcagtgcgcagtgtcatctgaaagttctattctaatacttggatttggtaacatcaaatctgaactagaatactagatgaaggcaacacttggattagtattcgtctacttatgtgcagattatagtaccaaagtccactcgcattgcaggttgcgacttggaggcgcaatgggagtgtcatctgaaaggtcttttcctcattcgggtctggtaaaatcatctcaatattctaaggcaatacttggactatagttttatttttttttgcagcgcttcttccctcaagctggctgattctaattctgttggttttgctatttcttgtaagcactggattaacagcgactggccccattgatcatacggattcgtgaagacttgcgttgtgaccccgaaacaaattcttgaagcctcttcttggacagcgaatgaatggagttgacgactagaggtgttctgcttaattaattgcttgcccgtcgcgatggttactgtttctttcaggatgactcgttctggtgtgtaagatcaggtgatgtgcagctcccccttcctgtgcatgattagcccccctccttgagtgcaagtgtagacataggatgctatctgtttgtttggttacctcaatttaagctgaactgtacaatgctgatatagtttcctggttctaaaaaattctaaaaaaaaaaaaaaaaaaaaaaaaaaaaaaaaactcgggg

SEQ ID NO: 122760 - DNA, 1059 bp, Zea mays
  unsure (1)..(1059): unsure at all n locations
  Clone ID: MRT4577_43440C.1
gggaccctcgaggccggccggnnnnnnnnttttnnnnnnnnaaaaaaaaaaaaaaaaaaaaaaaaaaactcgacaacctccgactcacaacaacaccgtcgccatgggtagggtaattcgcaaccagcgtaagggtcgcggatccatcttcacggccaacacccgcctgaacaagaaccccgcccagttccgcacgctcgactacgctgagcgcaatggatacatccggggtgtcgtaaaggagatcgtccacgactctggtcgtggcgctcctcttgccagggtttccttccgcaacccatacaagttcaagcacgacaccgagaccttcatcgccaacgagggaatgtacaccggccagttcatctacgccggaaagaacgctgctctcaccatcggcaacgtccttcccctccactccgtccctgaaggtaccgtcctcaccaacgtcgaagacaagaacggtgaccgtggtgcgctcggccgtacctccggtaactacgttactgtcattggccacaaccccgatgagggcaagacccgtgtcaagctcccatccggtgccaagaaggttcttcccagctcatgccgtggtatggtcggtatcgtcgctggtggtggccgtacagacaagcctctcatgaaggcgtcgcgcgccaagcacaagttcgctgccaagcgcaacagctggcccaagactcgtggtgttgccatgaaccccgtcgaccatccccacggtggtggtaaccaccagcatatcggaaaggcctcgaccatctcgcgctacgccgctgccggtcaaaaggctggtctcattgccgcccgcaggacaggtctgctccgcggtacccagaagaccaaggattaagcggtctttgctgggtagtgtggtggcgtcggtttttgggatcaatgacaacaatgcgctcggttttgacctcatacttctatgcacagaggctggggcgtttatgtgaaactttctccggccgagctaggaagagaagtctgcgtgccaagagcatggcaggcccgggtgaatgtgatccccgaaaagca

SEQ ID NO: 122761 - DNA, 231 bp, Zea mays
  Clone ID: MRT4577_43441C.1
ccaaggaaagggggaaccacttacaattttggaaaataattggggaaacatggagtacaatttttgactcgttgggctttttacattttttgaaaaaatggagggtcccggttacattgactttttatatgatctctgttcccatttccaatgcgggctatttactaacactctattaaaaaaaaaaaaaaatttaaccctgaggggtttttttttttcacatttaccccc

SEQ ID NO: 122762 - DNA, 166 bp, Zea mays
  Clone ID: MRT4577_43442C.1
ggggctaaacggcacaaaccgaacgctgaatcaaacatggggacaccgtgctggacacccgcccgcttccccattttcgggaaagatttgaaaaaaaaagcggccaaaaatccaaagttcaatccccccagggggtttccccggaccctgaaaaaccccttttctt

SEQ ID NO: 122763 - DNA, 322 bp, Zea mays
  unsure (1)..(322): unsure at all n locations
  Clone ID: MRT4577_43443C.1
aaannnnnnagacggggnaattacaaaacctcagtggaacaaacacaatctcatacacaacattcagtattataagtttattagggtgtaaacaaaccactcacatcttattataccaatgatctgttactttgcgttctggctgtagattagtgcacctaacatctagatgccacaaatcagaaattttccaagctttttattgtgtccaacatttagtttttttactttagaacacaaaaatttttctaatctgttaccatccaatatcttttaaaattttattcaaagcccctttaatcgaaaagcatcaccagctttt

SEQ ID NO: 122764 - DNA, 371 bp, Zea mays
  unsure (1)..(371): unsure at all n locations
  Clone ID: MRT4577_43444C.1
cgaccttctcatccccagcggcacagtgcccgccggcccctccccagtgtcgctggctcgtcngctcatgctccatagaccccgcgcctccgcctccccgccactcgccggaggctgccgccatcgttatgccatggccgtcatcctctcctccgcggcgccaacaatactgactcgtgccacacgccctctgaggcagccgaagagcggcctccgcgggggcctcgcgcgcctctcaactgcgctcggcctcgcgcacgcgggcgccggcaccggcgccgcactcgccgcgccgatctactacgatgagatgctgcgcctatcgtccgactccgacagtgatgttagcaggttctcgctaccggagctcg

SEQ ID NO: 122765 - DNA, 403 bp, Zea mays
  Clone ID: MRT4577_43445C.1
ccacccaaaaggccccaaggccccaaaataataatcccccccgttctttttaaaccaaaaataaaaccggggggggtttttttgacccaaataaagcccaaaccccctaccaaccccctatttcccttaaaaaacaaaaaaataattgccttgtatgggaaagggggggctaaatttcccaaccataaaggatcctttgcaacccaaatctataagtgggaggaagcaaataacccccaggttcctgtttaatccgaccataaaaaacccgtttttttgcaggcccaaccatctttggaaaatcaaaccctgcaggctgggcaaaaagggttccagttatcaaatcaggataccccctctgaataaaacccgaagcaaacccaaaaacttcagtttttggggc

SEQ ID NO: 122766 - DNA, 371 bp, Zea mays
  Clone ID: MRT4577_43446C.1
aatcctcccttagcgcgcccgcgcgcaacaccactttgtgagggtgttcgtgattgttgatatccttgagggcagtcatgtgcagacttatgccatcaatacgtgcacggattgcattgctgaatgagcagccacatctgcgtgctcctagcgtccccatttgtaaggcacccacatcatcagcacttacctttgagacatgtagccgcgtgctactatgatgcatttccttaccgctctctcagatgcaatcttagacgcttagctgtggaagctgaaatgcaagctatggctggccacactcctcggaccaatggtagggatcatgtggctaggatcgacagtgatgcttcaagtacctccctcgtaag

SEQ ID NO: 122767 - DNA, 487 bp, Zea mays
  Clone ID: MRT4577_43447C.1
ccattggaagcctggtgcctgatccattaaaaagaccccacagcccaagggttagtacaaacaaaaaacaggggggcttacaaccaaaggaaaaaccgaagccggcgagacagaaggccagaacacaaaagctaagggcaaacatgggccacaagtagaaaatccgaaaagacagaatataaagaaaaaactggaattaatcctccacacacgtccatgcacgggaacaggaacctttcagcaaacatgagggggaattaatctaacccctaaaaaaggaggcaaagggctgctgctaaaaaaaaaaaaacctaaacctggttcaactccaaatcgaaagaaccaagtggagtctggagctccaaacccacaactccattctcggcccgaagccccgggataaatttaactggagccccttgggacaaaaggggaactgctgcaacaagggcaaaaaactttttggccccaaggacaagggcacggc

SEQ ID NO: 122768 - DNA, 191 bp, Zea mays
  Clone ID: MRT4577_43448C.1
atcattgttgttcaatgggacaaatgaggatttttttttttttgaaaaaaaaaaaacttagatttatcattcaaacgagccaaagtttacataaagcacactccaacctggttgcctaataacacccaatgtcgaatgaagatcactcggacagccttatttataacatgctaaacaacttaatccaaaac

SEQ ID NO: 122769 - DNA, 283 bp, Zea mays
  Clone ID: MRT4577_43449C.1
gactctctttatctcatcttatgctttcattatttcacattgctcacttgcttctagtttcattattccacagttcctcccaccagttacttcaatggccgggaaaaacccaactgagcaagcctatatgctacaacaaacaattgcggcgagggggggccacaaccaattgcccttttgctacaacaaaacaaggggcaccccacaatacggaccatcgcaacgcagcggcaacaacagatcctaccagcaactgagaaaaatagccatggtgaaccctggg

SEQ ID NO: 122770 - DNA, 527 bp, Zea mays
  Clone ID: MRT4577_4344C.1
gggattgaaatcgaggagaactgggacaaggttaagactatttttcttcctactgagaagccaacgacgtttgattaatgtgctcctttgattgcaatccatccattggaggtacttgttgctctcctccttagttctaacctcaatacctccatgttaactcatttctcgcattggaggcactccttatttgctgatcaggcacacaaaaaatttggtgacttcattaaaggagtatttgctgtcttccacatattttggaaatgtttatttgcctgctgtagtgaattaagaaattttcatgtcactatattttcttattttccatgtttataataattatgctccatctccatacggatttctcatttcttgagatgaatccgttcgccatggtcaacggggagccatatcctctggacatcagaggagaactagatgacacaacagccttcaaaaactttaagaagtgaatcagatttcccagagataccatttcttggtgtcattgttggatttactcttat

SEQ ID NO: 122771 - DNA, 178 bp, Zea mays
  Clone ID: MRT4577_43450C.1
atttataattatgaaaaaacgaggaaacctaagcacccagatacgaggaaaggcagaaaagaagagaggaagagcatggagggagcgcgaacataggcatagaatccaggagagggccaaggaggtgaaccttttagaacggcctggtcgaatgcaggggcagggcacgagacaacct

SEQ ID NO: 122772 - DNA, 309 bp, Zea mays
  Clone ID: MRT4577_43451C.1
gcggccgcccttttttttttttttttttttttttttttttttttttttttttttttttttttttttttggttttttggggggaacaaaacattttattcaaatccccggggggttttttttgttccaaatttccgaattccagtctctttccccacagcagggaggaagtaaaagctttttccacgactcattttacaaaacacgggggcgagcctttccccaaaaatccatgtgcgggggggtaaaccttatcctttcagggctaccccaagggccgaaacaagattacccccaaaggtggcagaacc

SEQ ID NO: 122773 - DNA, 529 bp, Zea mays
  Clone ID: MRT4577_43452C.1
cactcactatgtgaaagctggtcccctgcgggtccgggcccgagatttccgggtcgagccacacgcgtgttcactcgtgcgcccatggatcctattgctgcggcacgccgagcgctgggctggtgagctcccgttctactgcgtgcctcggacttatcgcggtgctacggtaatgctgaactggtacgggccctcgctgacgaagtggcgccgccatagtctatgacgatgtcgatctcctctacacacaagaccagacccatgctaccacaggggagctattaagggtgatctactgggatatcaagtacgggaggactcgtatgaccacgacaggcctgaggagattccaaagaagtttcgtttgatactcagggacgagatggcgacgaaagcagttgcccttatgagaacatatcagggtgagcaggttgaggctgccatgcacatgcacagccatgtcactgagcatgagcctgatcatgaccatgatggtgaggatgaggacactgcgggagatgacaacgac

SEQ ID NO: 122774 - DNA, 320 bp, Zea mays
  unsure (1)..(320): unsure at all n locations
  Clone ID: MRT4577_43453C.1
ccggaatnngggacgacccacgcgaacgcccacgcgttcgcccacgcgtgttttgacacttggttgtgtactaacttggcttctaaaaggggctgaaacctcaccggaggcggcagcggcgtctacgctagggtttcggcgtgaggatcgcctatgacgactgctttcagacgtcccttccgaggccgcggcgccatgccctccggcacccgctacctccgccgaggctccgccccaggctccaacgacgtcgtcaagcccctgttcaagaccgtctttaccaccgtcgaccaagatcacccccagacacacagagacac

SEQ ID NO: 122775 - DNA, 267 bp, Zea mays
  Clone ID: MRT4577_43454C.1
gtcgcaactgcgtagaggcttcgcgcctttctcagatactgaggaggcttgaacctgtgggtgggaggtgaagcggaacggtcccggcgggactgaatgcagtcgggaaggggaggacgggaagtctagccggcttggacccgccccactctgttacctgccagatgacgctgaggaaactgcttttcttctcgaggcctccgttgcctcgtctgtgcccgggcggtggtgcttacccggcggggtcgcagggaggtctcgtggcgg

SEQ ID NO: 122776 - DNA, 968 bp, Zea mays
  Clone ID: MRT4577_43455C.1
ccggggctcaccatccctatccccagccgtccgaccgcccagccgccctctgttttctttttaacgcgtgcgagcttctcttcttcgccagccgctcaccagccttgccgtcgagcgccccagctccttcctctccctctcgattctctgttgaccggtgccctgctcgaatttccgcccgccaagctcccagccgagctcttgcgctgggtttctctccctggtgtgctcgcctgtaccgcacgtccatcttcctgttcctggacgggcccatcctttcctcctctctctccttcgccattgctgactcgtcgaacctcgcgcgtccctgcgtcctcacatgccgcgcgccgtgctctgcctctccccaagctcctttcgctgctcgctcggatcttgccctggtcctgctggtcgcttctcccctacgcatcttcaagctcagccgccggtctctacttatggcgcgccctccatctccattttgctcggccgtgctccctaccgagctctctcatggcaccctgagcttctgcgcgagctcgccggtgaagctctagttcctgctcgattgccgttctctcctgcgcgccgcagattttccccgagctccctcgccgtggccctctgctcgattcgctatagcttatccgagctccccatggcgcccggatttccctactgcccgtccgcgcgttctgcttcctgcgcgcagctgcgagctccactctatcgctcggttcctgccaaagctcgcgtcgttcattgtgctgttgcgccatcgcctcggtctggccgagggccaggagctctcaatactcagctccctgttcatccataacgtgtcccgttttctttgtcttatcgtcgtcgttcagtcgcctcgccctcgcgtcgtccatcgttaggcacaatctgctctagctcgtggacgtcgtatcctggctctggtcgctagatgccgcacc

SEQ ID NO: 122777 - DNA, 317 bp, Zea mays
  Clone ID: MRT4577_43456C.1
ccttctttttttttttttttttaccgcagacaaacgcttttttatcggaaaaaaatagttttcaaaataccctttttgccggaaaaaggacaaaaacaaattttaggttttcggatccaaaaaccctttaaaaaacattttcccgtgctttaagttaaaaggggaaccacggcggtattaataattcgcaaccatgttattaaacccacctctctttattttgttaaaaaccccccaggagccctgggggaagccacccaaaggaatgcgctcaagctggagcatatacttttttgcttgctaggaattgactcccc

SEQ ID NO: 122778 - DNA, 1031 bp, Zea mays
  Clone ID: MRT4577_43457C.1
ttcgggacttccgaagcaaacaaagacagcgtggtttctctcatcaggaggagcatggccgaccataaggaggagcagtctgtgatggacaagatctccgagaagttccacggcggggactcctcgtcgtcgtctgactcggacgacgagaagaagaaggggtcttcctcggcgtcggcgacggaggccatgaaagccaagatctaccgcctcttcggccgcgagaggcccgtccactctgtcctcggcggcggcaagcccgccgatcttgtcctatggaggaacaagaagatctcaggcggggtactcgctggtgccacggccatctggctcctgttcgaggttatggagtaccatctcctcaccttggtgtgccactgtctcatcgtctcgctggccatcctgttcctgtggtccaacgcctccagtttcatcaacaagtccccaccaaacattcctgaggtgaaaatccctgaggatgtgtctgttaatgttgcactgacactgagatacgagatcaacaggggctttgctaccttgagggagattggacatggacacgatctaaagaaattcctaattgttatcgcaggtctctggctcctttcagttctcgggagctgttgcaacttcctgacactgttctatattgtctttgtggcactgtacactatacctgttctgtatgagaaatatgaggacaaggttgatgcttttggtgagaaggctatgattgaactgaagaagtattatgccattttcgatgagaagtgcctatcgaagattccaaagggcccccttaaggataagaagcactagattggtagtaagctttcaccatagttgcctggaagcttgaaatatattatgcgctctatcaatgtcatgtgaactttgtcatgtacctttaatattgatttggcgcctttcgcaagtgctaggttagtgaatgaagtgtgcacatttctgttcaaggtaatgatagtatttgatctagtttggtaaaaaaaaaaaaaaaaagcgccctcgag

SEQ ID NO: 122779 - DNA, 1614 bp, Zea mays
  Clone ID: MRT4577_43458C.1
cgattgggtacctcgaggccggccgggaccgcgcaggaacaaccaccaggcacagccaacaagcttgctagtgtgtggtttctctcatcaggtcaggaggagcatggccgaccataaggaggagcagtctgtgatggacaagatctccgagaagttccacggcggggactcctcgtcgtcgtctgactcggacgacgagaagaagaaggggtcttcttcggcgtcggcgacggaggccatgaaagccaagatctaccgtctcttcggccgcgagaggcccgtccactctgtcctcggcggcggcaagcccgccgatcttgtcctatggaggaacaagaagatctcaggcggggtactcgctggtgccacggccatctggctcctgttcgaggttatggagtaccatctcctcaccttggtgtgccactgtctcatcgtctcgctggccatcctgttcctgtggtccaacgcctccagtttcatcaacaagtccccaccaaacattcctgaggtgaaaatccctgaggatgtgtctgttaatgttgcactgacactgagatacgagatcaacaggggctttgctaccttgagggagattggacatggacacgatctaaagaaattcctaattgttatcgcaggtctctggctcttttcagttcttgggagctgttgcaacttcctgacactgttctatattgtctttgtggcactgtacactatacctgttctgtatgagaaatatgaggacaaggttgatgcttttggtgagaaggctatgatcgaactgaagaagtattatgccatcttcgatgagaagtgcctatcgaagattccaaagggcctcaaggataagaagcactagattggtagtaaggtacttgatatgaatcaacacccacgttaagtcacaccttccttgaaggatggtgcttggtcctggtctctagttgatagtatataatctgtatgggcaactctggtgtgactgacactttgatctgctgaaaattgttgatcttgtttttggtttcaactttcagcatacttgcctggaagcttgaaacatatcacgcgctctatcaatgtcatgtgaactttgccatacacctttattgttgacttggcgccttttgcacgagatcccccggggctttgctccctttagggagattggacatggccccgatttaaaaaaattcctaattgttatcgcaggtctctggctcttttcagtttttgggagctgttgcaacttcctgcccctgttttatattgtctttgtggccctgtcccctatacctgttttgtatgaaaaatatgaggccaaggtttatgcttttggttaaaaggctatgatcgaacttaaaaagttttatgcccttttcgatgaaaagtgcctatcgaagattccaaagggcctcaaggataaaaagccctagattggtagtaaggtcccttatatgaatccccccccccgttaagtccccccttcctttaaggatggggcttggtcctggtctctagttgatagtatataatctgtatgggccactttggtgtgactgcccctttgatctgctgaaaaatgttgtatcttgtttttggtttccc

SEQ ID NO: 122780 - DNA, 1918 bp, Zea mays
  unsure (1)..(1918): unsure at all n locations
  Clone ID: MRT4577_43459C.1
cattgggtgcctcgatcgaggcccgggtctttgggtgagcacaccgcgcagcaacgagaggggaacaagagccaacaaacaagcttgctactgtgatttctcgtccgagcagcggcggaggagagagatagagagagagagagagggagcatggccgaccacaaggaggagtctgtgccggagtctgtgatggacaagatcaccgagaagttccacggcggggactcgtcgtcgtcgtctgactcggacgacgagaagaaggggtcctcgtcggcgtcggcggcggaagccatgaaggccaagatctaccgcctcttcggccgcgagaggcccgtccactccgtcctcggcggcggcaagcctgccgatcttatcctatggaggaacaggaagatctctggcggggtacttgctggtgccacgaccatctggctcctattcgaggtcatggagtaccatttcctcaccttggtgtgccactgtctcatcctctcgctggccatcctcttcctgtggtccaatgcctccactttcatcaacaagtccccaccaaacattcctgaggtcaaaatccctgaggatgtggctgttaatgttgccctgtcactgagatatgagatcaacaggggctttgctaccttgagggagattgggcatggccgtgatctgaagaaattcctaattgttattgcaggtctctggcttctttcagttctcgggagctgctgcaacttcctgacactgttctatattgtctttgtggcactgtacactgtaccagttctgtatgagaaatatgaggacaaggttgatgcttttggtgagaaggctatgattgaaatgaagaagtattatgccattttcgatgagaagtgcctatcgaagattccaaagggcccccttaaggataagaagcactagattggtagtaaggtacttgctatgaatcaacatctacattatgtcactagctgtcacctctttctctgaaggatggtgcttggtcctggtctctagttgatagtatataatctgtatgggcaactttggtgtgactgagagtctgctgaaaactgttgatcttgtttttggtttcagctttcaccatagttgcctggaagcttgaaatatattatgcgctctatcaatgtcatgtgacctttgtcatgtaaacaaaaaaaaaaaaaaaaaagcggccgtggtccnacgcctccagtttcatcaacaagtccccaccaaacattcctgaggtgaaaatccctgaggatgtgtctgttaatgttgcactgacactgagatacgagatcaacaggggctttgctaccttgagggagattggacatggacacgatctaaagaaattcctaattgttatcgcaggtctctggctcttttcagttcttgggagctgttgcaacttcctgacactgttctatattgtctttgtggcactgtacactatacctgttctgtatgagaaatatgaggacaaggttgatgcttttggtgagaaggctatgatcgaactgaagaagtattatgccatcttcgatgagaagtgcctatcgaagattccaaagggcctcaaggataagaagcactagattggtagtaaggtacttgatatgaatcaacacccacgttaagtcacaccttccttgaaggatggtgcttggtcctggtctctagtttataatatataatctgtatgggcaactctggtgtgactgacactttgatctgctgaaaattgttgatcttgtttttggtttcgaaaaaaaaaaaaaaaaacctttcagcattacttgtttgttagcttttttttttttcacagaacacagtagaattttatttccggtgcttgcattattatatatgttgaatttccgcccgcgtactctgcgttgttaccactgct

SEQ ID NO: 122781 - DNA, 515 bp, Zea mays
  Clone ID: MRT4577_4345C.1
cgtccgcccgcaccaggcaaaacctacctacccgccgtctttcgtggccccgcatcggcgcccagacgcacaaggggggggagactatgacggagaagaccaacacttcctacggggagtacgaggacaccattgacaacgcgaacgccatgatccagcacaaggagggcatccacccggaccagcagcgggtcatcttcgccgacgagcacatcgaggacggcggcaccctcgacgactacaacattcataaggagtacaccctccacctggtgctccggctccagagcggcgccaagaagcgcatgaagaacacctacaccaaggccaacaagatcaagcacgagctcactaacgtgaatctctccgcgctgcagttctataaggtggacgacgccacatgcaaggcgacccgccttacgaggagtgccgcaacacagaggcggcgcggacgtactagtggtcaccacttgcagcgactctactgctgtacgagcggcctcacctatgtctac

SEQ ID NO: 122782 - DNA, 644 bp, Zea mays
  Clone ID: MRT4577_43460C.1
gagctatgacgtcgcatgcacgcgtacgtaagctcggaattcggctcgagcggcgaggaggcatggagccagacaaggccggggaggcagcgaaggagccgacggaaacggaggctggagactccgtggatccccgcgaactagtgtccagcgacgacgagatcgactactccgtcgagcctgatttctacgaccccgacctagatgacgtcgatgagcggtgggtgagcagacagaggaaaggccgcacatctgacgccgtgcttagctgccccgcctgtttcactaccctgtgcttggattgccagaggcatgagaagtacgtaaaccagtaccgtgcgatgttcgttcgcaactgcaagatcaagactgaccaggtcctgcgagagggcaagagcaagaggaagaaacgcagaggaggaagggctggtgatccagctgccgcatctgaaggcgaaagcaaggggcagtcctaccaccccgtctgctgcgaggtctgctcaaccgaggttggagtgttggacgaggacgaggagtggtacgttcgtagtcgtagaccccaccaccatatacgcaagcttctgcgctacgccatctgtctcttatcgctgatcagcctgtacatcggcatgatgcggttttga

SEQ ID NO: 122783 - DNA, 154 bp, Zea mays
  Clone ID: MRT4577_43461C.1
caccgttacataacctacagccgcctgtttactggctcggacatttaaactccatgagtcaaggtcaaccactcaaaccctttatttactgagaaggatgttgctgctttgactttataaccctgagatatcccagtcgttccctaccctaata

SEQ ID NO: 122784 - DNA, 1608 bp, Zea mays
  Clone ID: MRT4577_43462C.1
gtcgaagccgcacccccgtgtttaagtcaatttctccagcttgctagtgccgcgcaggaacaaccaccaggcacagccaacaagcttgctagtgtgtggtttctctcatcaggtcaggaggagcatggccgaccataaggaggagcagtctgtgatggacaagatctccgagaagttccacggcggggactcctcgtcgtcgtctgactcggacgacgagaagaagaaggggtcttcttcggcgtcggcgacggaggccatgaaagccaagatctaccgtctctccgggccgggcggggtctttgggtgagcacaccgcgcagcaacgagaggggcaaacaagcttgctactgtgatttctcgtccgagcagcggcggaggagagagagagagcatggccgaccacaaggaggagcctgtgccggagtctgtgatggacaagatcaccgagaagttccacggcggggactcgtcgtcgtcgtcgtctgactcggacgacgagaagaaggggtcctcgttggcgtcggcggcggaagccatgaaggccaagatctaccgccttttcggccgggagaggcccgtccactccgtcctcggcggcggcaagcctgccgatcttatcctatggaggaacaggaagatctctggcggggtacttgctggtgccacggccatctggctcctattcgaggtcatggagtaccatctcctcaccttggtgtgccactgtctcatcctctcgctggccatcctcttcctgtggtccaatgcctccactttcatcaacaagtccccaccgaacattcctgaggtcaaaatccctgaggatgtggctgttaatgttgccctgtcactgagatatgagatcaacaggggctttgctaccttaagggagattgggcatggccgtgatctgaagaaattcctaattgttattgcaggtctctggcttctttcagttctcgggagctgctgcaacttcctgacactgttctatattgtctttgtggcactgtacactgtaccagttctgtatgagaaatatgaggacaaggttgatgcttttggtgagaaggctatgactgaactgaagaagtattatgccattttcgatgagaagtgcctatcgaagattccaaagggcccccttaaggataagaagcactagattggtagtaaggtatttgctatgaatcaacatctacattatgtcactagctgtcacctctttctctgaaggatggtgcttggtcctggtctctagttgatagtatataatctgtatgggcaactttggtgtgactgacagtctgctgaaaactgttgatcttgtttttggtttcagctttcaccatagttgcctggaagcttgaaatatattatgcgctctatcaatgtcatgtgaactttgtcatgtacctttaatattgatttggcgcctttcgcaagtgctaggttagtgaatgaagtgtgcacatttctgttcaaggtaatgatagtatttgatctagtttgataaaaaaaaaaaaaaaaaagtttggcgccttttgcaagtacttatggcccccacctcagggccgccccctttaaaggatccaggtttcctta

SEQ ID NO: 122785 - DNA, 1027 bp, Zea mays
  Clone ID: MRT4577_43463C.1
ccgggccggcattgaatacctccgagccggccgggaagacgagagcaggaggacggagagcgccggcgaggaggcatggagccagacaaggccggggaggcagcgaaggagccgacggaaacggaggctggagactccgtggatccccgcgaactagtgtccagcgacgacgagatcgactactccgtcgagcctgatttctacgaccccgacctagatgacgtcgatgagcggtgggtgagcagacagaggaaaggccgcacatctgacgccgtgcttagctgccccgcctgtttcactaccctgtgcttggattgccagaggcatgagaagtacgtaaaccagtaccgtgcgatgttcgttcgcaactgcaagatcaagactgaccaggtcctgcgagagggcaagagcaagaggaagaaacgcagaggaggaagtgctggtgatccagctgctgcatctgaaggcgaaagcaaggggcagtcctaccaccccgtctgctgcgaggtctgctcaaccgaggttggagtgttggacgaggacgaggtgtaccacttctttaacgtgatccctagcaactcctgaatgccgtctgtaggagtagtacgttcgtagtcgtagaccccaccaccgtatacgcaagcttctgcgctacgccgtccgtctcttatcgctgatcagcctgtacatcgggtatgtatctttacggatgttttgtttctgcagcatgatgcggtttcgaaagggggtctccgcgagctctagctgtgatggctctttgttggtggccagcctgatctttgtcctgattggacgtgttcatgcttgctctagcagcaatgaatgattgttggatgaggtgtcaggtgtgtatgatgctgctaaacatatcccacatgggaacaaagctagcctgggcctggccgtgcctccagatcccaagacgagacaatggcgcgtgcgctctgattatgggtagattgatttgcctgccaattcaatacccggctagtcccggccccggcaa

SEQ ID NO: 122786 - DNA, 1448 bp, Zea mays
  Clone ID: MRT4577_43464C.1
gccggccggtccgggacgcatcaagaaggaacactgttaccatgttttagctataacattgctgaaacatatctctgatgcaagattgaagacagcttgagtttatcagatctcagatcagagaaacctgtggtttattggccaagctacatgctaagttccatatccaacacacacagcaacgctcgctcggcactgtcactagctagttgctctactagagggcgggtatagagctgcctgcaatccgccgctgagaagggaggatcggaagcgacgatgaggtcgtttgctcctgtctttctgtcggcggtcgtggcctggctggagctggcgggcaccgcgcagggcggcaacttctaccaggacacagagatgacctggggcgatggccgcggcaaggtagtggacggcgggcgcgggctggacctgacgctggaccgcacgtccggctccgggttccagtccaagagcgagtacctgttcggcaagatcgacatgcagatcaagctggtgccaggcaactccgctggcacggtcaccaccttctacctgtcgtcccagggcgacgcgcacgacgagatcgacttcgagttcctgggcaacgtgagcggggagccctacacgctgcacaccaacgtgttcacgcgcggacagggccagcgggagcagcagttccgcctctggttcgaccctaccactgccttccacacctactccatcctgtggaacccgcagcacgtgatcttcgcggtggacggcaccccggtgcgggacttcaagaaccacgaggcgcgcggggtggcgttcccgaggatgcagcccatgaggctgtacgccagcctgtggaacgccgacgactgggccacgcagggcgggcgcgtcaaggcggactggtccaaggcccccttcgtcgcctccttccgcggtttcagcgccgacgcctgcgtctgggacggcggcaggcagcgctgccctgagggcaccatggaggccgccgccgtcgcgggtgccggctccggccgcggctggtggaaccagcagctcagcgacatgagctaccgccgcatgcgctgggtgcagcgcaagttcatgatctacaactactgcgccgacgccaagcgcttcccgcagggcgtgcccgccgagtgcaagctccggtgagggagcgaggtttgttgggacgtccgtggggcatcaaaaccaagcacgatccctagtcgtggaaagtagaaaccaggcatcgattcgatcgtcgtcgacggtcttagtagtagctacttattttgcagtgggcgatgaaagaatggtgtcatgtaaatgtagctccagtcgtgtcgcattctttgatttgttgtttcagcagcaccggatgtacaagtactgagtttgggctagcaagaataagtaatctttttcggcctaaaaaaaaaaaaaaaaaagcggcc

SEQ ID NO: 122787 - DNA, 234 bp, Zea mays
  unsure (1)..(234): unsure at all n locations
  Clone ID: MRT4577_43465C.1
atagatgtagacggagtactccagattaaaggatgtgctgcctgtctaatagatacatgggatgaactgcgtactactgtaactaggttcaatggaacattcaacgatcttgactatcatcaagtagctncccttgctatctngcttgaatcnngtgtaattagcaagngagcagatacgcctaagacatgtaccttctaggccgangattcagcgacaggaggctgcaataaa

SEQ ID NO: 122788 - DNA, 447 bp, Zea mays
  unsure (1)..(447): unsure at all n locations
  Clone ID: MRT4577_43466C.1
accgcggtgaacagaaacatacatagggttcaaagatacagtaggtgattggttgataggatttgagattgttctgcattttttttttgtatagtcaaaggttcaatcatcatttttcagatttggtgagaccgcgtagcctgtgtagtcaatactgtgcaggctattttgccaccagactttgcnnaaaaaaaaaaaaaaaaaaaaaaaaaaaaaaaaaaaaaaaaaaaaaaaaaaaaaaaaaaaaaaaaaaaaaaaaaaaaaaaaaaaaaaaaaaaaaaaaaaaaaaaaaaaaaaaaaaaaaaaaaaaaaaaaaaaaagggggggccctttttaaagacccaaattttattccccggggtttgaaaaaaaaaattttttttttggggcccccaaaataaaattccgggcccggtttttaaaaccctgggaaggggaaaacccttg

SEQ ID NO: 122789 - DNA, 833 bp, Zea mays
  Clone ID: MRT4577_43467C.1
caatgattgaagaaaatgctagagaatcgaatggtatatcctcaaggtgacaatgattgtcaccttcagtatacatcctcaaggtgacaatgattgaagatgtatactgaagatgtgaggtctggaaacatcaaatatcactattgcactataaacaaaagattaggagccagcccgtcagaccttcggagtttcgatattgataaccatatagctgtgtgaggttttaaaggttctaaaaccctttgcgattgaggagaatggttttggcatacaacaggcacacagccacacaacaaaaacatcgccatcagatagaccagtgttgaatgctgaatccccatgggagccttttttggcgcctcggggacagatttagagggtggaacagatttagagggtgtttgatttttatggactaatttttagtttctctattttattctattttagactctaaattgacaaatacggaaactaaaataggattttagtttctgtatttggtaatttagtattcagtaatttagagactaaaatgaaataaaatgaagaaactaaaaattagtacttagaagccaaacactcccttaaagtaggtgctggaactgtaaatggttcgtatcctaaagcctggtttagcccttttaggagattctgcgtttggatgggagttgggaggactgagaattgtatcatagtgcagcaaatcttggttgtaggattgagctatcctgcatgccatacttgtggcgcttcttcagcgaccgcatgctgtgatctggttacaattgaattatgtgagctcttttttaaccatttatttcagttgg

SEQ ID NO: 122790 - DNA, 485 bp, Zea mays
  unsure (1)..(485): unsure at all n locations
  Clone ID: MRT4577_43468C.1
acggttggactaanaccaacatgatgtagcgtttgccgatgcctattaccttccccacatattttacggatggagcaaccgaaccgaacctgagataagcaacccatgcgcggcgaaacaaggcttaagacagccagaattggtacattgagttcagacaaagacgctgtacccgggattgttgctgaagctaacaacagggacggtggcacccaggccacccaacctcacacagatatatgctgcttttggccctcaagcccgggccttgatgaaacataggaacagtaggtgaattaattgctggatcaagcccgcatcaatcgcttttaagggatttgcttcatctactgtgcagccaatgcatcatggtggtcgtcattgtgaatgctggtgagacaatatcgcatggcatacaaggtgcggataccaccgtggcgactgactgactgcatgtctaacagtaaagagtgttgaaccattgc

SEQ ID NO: 122791 - DNA, 550 bp, Zea mays
  Clone ID: MRT4577_43469C.1
ccagtctcagaacatgctagaatgaatcaaaaaggacggtttacatcgcctacgtctacagcaaaggacgtctgcaaagggagaccatcatcccaacgagcctcagccatgatgcaggagaagctcgccatcctcgtcacaagatgcgcctacttagatctctgcctcattttccggcgcttcctcttgagcctccgcatcctcttcttcttccactgcaatcaaacgaaacaagaatcagttcacccacattcatagcaaatgcttagattctacagacagtatcatgtgaaactacaatggaagacattaaacggacaactgtcagacttaaagattacgcaactgtcagggatcagaattatggagtgttttacacatcaatgattgatcagaaacacggaccaatgattcttcatcacatcccagcatcaaatacggacaagagcaagaagtaataatcatcaatcgaaccaagtctacgcctctcgacaaaagaagcaaaaaacttgcaagtactattcagctagaaattgcaaaggcagagcat

SEQ ID NO: 122792 - DNA, 157 bp, Zea mays
  Clone ID: MRT4577_4346C.1
cgctacgcacaaacccagcagcgtactaccaacaacccatcattggtggtgcccattttgacatctcatacgagtgggacttcaataatgaagtgctacggctgacgtttgccgctaacgataaatagcaacgatcatttctaaaataacaacatac

SEQ ID NO: 122793 - DNA, 462 bp, Zea mays
  Clone ID: MRT4577_43470C.1
gcgtatgacacatataccatcaaacgtggcctgtacaagatggcagccacaaggacgagaaacatggtaagcgtagccgagaaaacataggacctgtaacagggccatatggcgcttgcggaagaactcaaggaatagagagagtcgacctactgcggtccggcttcaaacctcccagagcacccatacatcttgcgcatgtgcactggccctacatggggatgcctttcatgggtggcttaagtgctatacaagacctctgctgagaaagataaggaaatgcataaaaggagacaaatgaaagtattggtcaatatgttatcacaggacaaaaaaatgtgctgaacgagaatagaaacacgcatgccttgtaaacaaggctgtggtattgcaagttagtgcacattaccttacacatgatgacactgaagccagggttgtgaacctaataaacaagcttaa

SEQ ID NO: 122794 - DNA, 1051 bp, Zea mays
  Clone ID: MRT4577_43471C.1
aaagaacgggggttttggggcttgcaaattttaaggttccccttggggttaacccccccccccccggggtttttttagcggttaaaggggggttcccttttccatttagggttgggaaatttttgggaaggggattggttgggggcttttttttttttttccaacttgggaaaaggggattttttttcaagggtttttttttgggtaaggcagggttttttcagttttgaggttttttaaaggggggccattgattttattttgggtgcccttttaaaaaattttttttttggattgccgggggggttaagtttggtttttttaaaggggcggcccttttttctttttttttttttttttttttttttttttttttttttttttttttttttttttttttttttttttttttttttttttttttttttttttttttttttttttttttttttttttttttttttttcaataaacttagagcatcatataattatcctcaaattacaatataaacccagtctcagaacatactagaattaatcaaaaaggacggtttacatcgcctacgtctacagcaaagcacgtctacaaagggagacaatcatcccaacgcgtcacagccatggtgcaggagaagctcgccatcctcggtcacaagatgcgcctacttagatctctgcctcattttccggcgcttcctcttgagcctccgcatcctcttcttcttccactgcaatcaaatgaaacaagaatcagttcacccactttcatagcaaatgcttagattctacagacagtatcatgtgaaactacagtagcagacattaaacggacaacagtcagattacgcaactgtcagggatcagaattatggagtgttttacacatcaatgattgatcagaaaacacggaccaatgattcttccatcacatcccagcatcaaatacggaagagcgcaacaagtaataatcatcaagcgaaccaagtctacgcctctcgaccaaaaaaaaaaaaaaagggcggccctcgcgatctagacccacgcgtccg

SEQ ID NO: 122795 - DNA, 266 bp, Zea mays
  Clone ID: MRT4577_43472C.1
gaactcaaaggttcgggatgtgatgcggtcaccaccttctttctttgtttttatatttaaggggccaaaaaaatttaagggctaaaataacatcgttccggctatggagggcaagcacctccaaacatgaaactaatgagactttcaccatcagtgtcacccaagcatagcatctctattgagtcgctcctgatttattccaacacatgttcacggatacatacacaggagtgtatgccgcccgcatatctataaacacactgcat

SEQ ID NO: 122796 - DNA, 262 bp, Zea mays
  Clone ID: MRT4577_43473C.1
aagaagactccccgaaagatggcaagcagtcgctactgcagaggggccacaggcgacatgtaccacagggaggactggcagaaacccccgacgcagagtaaaatccaaagcgccttgatcaagataacggatacaaagaggcgggacaccgaggtggccttaatgaaggcaacggcaaaaaatggaaaggccaaatgcggccaaagaagcacaaccagacagttacaaacaaaatgacgggtgatgggaacaccctaaaaag

SEQ ID NO: 122797 - DNA, 584 bp, Zea mays
  Clone ID: MRT4577_43474C.1
cattgggtacctcgaggccggccgggatggagtacggactcagcgatcccgaaaaagcgcagagctcgtgcagcagcaccatagccatagacaacacacaacaggggcgtttcgccaagtttctcgatcctcacccaagcacaaatgctttgaaaaataccgcatctgctgctacaagactacacggattatatcccttcccctggcctacctatgccgtcgtcgccatggacagggacagcagctcgtcggtctcggcgtcggacgggagctcggaggcgggggggcgcggcgggtgctgctcgtcgccgcagtccacgcggagcctcgtcgtcgtcgacacggcggccaacctcagccgcaccgcgtccgacgcttccacgtccctctcggaccggagcagcagcgtcgacgtcgaccacagcgggccgttccagcccgccgccgccgccgtggccaagctcatcggccggtcgtccccgccggccgacgccgcggtgctcagacggctcagcatcgagccccgcgccgaagtgctcgatggtgggtccacacaggacgagatgcagcaggcgagggatggc

SEQ ID NO: 122798 - DNA, 521 bp, Zea mays
  Clone ID: MRT4577_43475C.1
gccggccggtccgggatacgacgaagttccctaatcagatattgacctttcgcctcatcatcctcagacgagaaccatgaggtccacccgaggcgacgatgtggacaacaaccccctgcgcgacaagtgtcccgccgtcaacctgcgaagaggccaacatggcgatcctgtgctacgagccccacgcggacatggccgcgctgctcgccacgacgctgcggaccatggattatcgggcccaacctcgctatcatcttcgacgacaacgtggaggacgcgccccacatctactgagaatcagatctataaaatgagtaactcgaacatggcatgctgtgcatgcccgtctgcgaataacgcatgcgagagcttcaatccattcaattggtacgagaaataatgccctccccaggtatgtgtgaataaaatgtatcatagtgatcgtcctttcgcgactgcatatatgaaaatgcgctcagctgtttggcttccaagataaagaaaagaaaactgccctagga

SEQ ID NO: 122799 - DNA, 551 bp, Zea mays
  Clone ID: MRT4577_43476C.1
ttttctttttttttttcttttttttttttttttttttttttttttttttttttttttttttttttttttctttttcttttttgggggggcaaccaaaaaacggggggggatcacaaaaaaaaaaaagtcgggacccccaggggggggccaacccagggggaaaagctttctcccagcctttaccagcgggaaagagaatcggggacaaggcccaaagccccacgggggacccacacaaaatagggggaaaaccaaccccggcccaaaaaattgggcggcaaggccattttggaaccaaacccccccaaaaaaaaaaaaccgggggaaggaaaagaaaaacagggccccccttatccggggccaaaaaaaaccaccccagggatcggggggtttattcaacaaaaaaccgccaaaaaaccccctatctaaaacgggcgacctttaatctttggcgggaaaccaccaaaaataccccgattaccgacttgaggaccccgggcaaccctcactcatacaaaacccgggaacggggcatgcagcttctttgggga

SEQ ID NO: 122800 - DNA, 199 bp, Zea mays
  Clone ID: MRT4577_43477C.1
ttccttttttccccggacctctcaacaagcgggtctttggtatgggaaacccaattctttaaccctatggatccaacagcaatcgagctgcatctaccttatcaccctgttctcaacatatcagctattacagcagtacttgggcttattgcacaaacataggacacactacaacacttggctgcaacctgtgctactt

SEQ ID NO: 122801 - DNA, 481 bp, Zea mays
  Clone ID: MRT4577_43478C.1
tagctccctcactgggagactgccttgcaccattcggcctcgccgcccttgccgccttggcggcgagacagctaagcgaaacacgcaaacagcacgccgagcctggccgcatgggcagaggatcagctgcagatctcgggttttggcgtatggctcagggtctgcggacagcccgacagtgtcccagccgtcgacgccggggaactcgccaactaggtagctagggggctcgccggctaaggggccaaggtacttgacgccttgagggccgtaccaccggctgacggactcccgcaccttgggcttgtccactggcttacgcatggggatatggccatgcccgcatgagcccacgttgatgggtgtaccggccatccgcgcataggagatcgccatagcggaagcaggcattgatagagctgtacacctgagcgtgtaagtgttagaccggttgatcactagctatatatcgctagatggc

SEQ ID NO: 122802 - DNA, 215 bp, Zea mays
  Clone ID: MRT4577_43479C.1
attcggctcgaggtgggacgaaattttatgtatacgcacatggtcgatgttttgggggtgattttaaacaacataggcatgtaaccagactggattaaactatcgtaggtgtgaataaaaacaataaaaggggtgatctatacagaatgactcaagaaatattgcgggagggacagatcttttaaaaaactcccactgtgggattagaatttgag

SEQ ID NO: 122803 - DNA, 393 bp, Zea mays
  Clone ID: MRT4577_4347C.1
ggggttaaatgttggcccttattggttaattcggttttgggacaaaccaattaaccggtcgggccttccttgcgcggggaaccaaccgggaacgggaacaagaacaacggccggccgggggccggtaaggttggaagggggggggaagaaaaagggactgggcaacagcccgcgatggccgccgtcttttgcttaaccggcgccggcggtttaatgggttgggggttggtaaggatcttcttggccgggggttccgcgttcgggggaacttccggccgggaagttgttgacccaaagaacgcgcacttgtggccgttcaacggcccgggggtacgcttaacaatgtctgaggtggacctgttggacggggcaagcttcggggcggctttcggg

SEQ ID NO: 122804 - DNA, 375 bp, Zea mays
  Clone ID: MRT4577_43480C.1
aaataaaaaaacataaaaaaaaaaaaaaaaacttaactaaaaaaaaaaataaaaaaaaacatgagaatacaatatctccaaacatatttatggaacacgcttaacctcccatgcatactagcctataacgcctcctatactgtcccccaaaacctattatttggcaccaaggtttataaccaacggaactgtcaaaaccctgaatgcatcccatttcatctccaatatcaactaattccctattagccctgatacccatatacccaaaagctcagcaccatttgcctttcacatcatttgtatatcctatatctcccataatactcgccctgtgtcatctcatctgactcccataattcatggattactcgcacc

SEQ ID NO: 122805 - DNA, 365 bp, Zea mays
  Clone ID: MRT4577_43481C.1
ccttctttttttttttgggtttttattaatttttatttattatttattagcataactaacaatataataaatttgaggacaacatatcttaaaccgagtacaaaaccaaataaacacggcagagaggactacacaaattcaaaggcccaaacacaaatgaaaaacccggccgcacataaaaaaaaaaacgagaaaacccccacgttttacagttaccaaccgagctcccccaaaaaaaagaaaggccctgcaccggaaaaaaagaaaaagccccgaccatacaagaaaaaaaagagggcacaaagcctatggcacacccaccaacaaaagggagaacctcaacccccttgaggccgcgaacccat

SEQ ID NO: 122806 - DNA, 190 bp, Zea mays
  Clone ID: MRT4577_43482C.1
cccacacgtacgagaaaaaaacaaaggttaactttaacgctaggaactcacacactgagaacgagcaggcctggctgtctagagggcccaagcttaactaaccctgcattccaagtccttagttttccaacggaggatctgaaatcaattaagtggccgtaactttacaaacataggaccgggaaaaacc

SEQ ID NO: 122807 - DNA, 532 bp, Zea mays
  Clone ID: MRT4577_43483C.1
ttttttttttttttttttttttttttttttttttttttttttttttttttttttttttttttttttttttttttttttttttttagggagaaattattttaaaaataaaatccgattttataaaaaaaaaagtatgctttgggaaaaaaaaattccaaaaacttaaaagggggaactgccaaaatggaaaaaaaaaactgcccttggggaaaaggaaaagaattgttggtgcttaaaaaatttaaaaggggcaaaaaaaaaacaattacttcctttttcaaaacttaaaaaacttattaggctccaaggggttttcaattttgggcattttccgcctaaacttggccttaaactttttggaaaatttgcctggcttttgccttttttttaaggcacggattttattgggggaaaagtaatatgggtttttaaaccatgggggaccaccaaaactaccaccaaattttttgattggaataaaaaaaaacctggggccaaactaaaaaaaggtaattttatccaaacaaccttt

SEQ ID NO: 122808 - DNA, 520 bp, Zea mays
  Clone ID: MRT4577_43484C.1
gaaaaaaagggtctctaaagtctaaaaaacaaaaacgccaaacttaataacccagaaagaaaaggggggaaaaaaaccttacaccgtaagtggcaaaccccccaacgcccaagatataagaaccgcccaaaacctaacccgctaggggcccctcagggcaaatcacccggataactgggggacacaatccccaagacgccgctccagaaaaacgtctaagaattgctaccctaggggacgcccatcccctcgagaaaatcaagaacgacccccctctataccttctccgacggacccaaatcctcacgagcccttggaaaatctgcctcctccatatcctccccaacgtaccagagacctaaagggcctttggggaacatgaggtctaaattggggacaatggggcaggaaacccccaccacactgggaggacgttgagaacatgcacacgggactctgcaccttgggccagtcaccccccgggaccaaactgggagggtggcatgtgattccccacttg

SEQ ID NO: 122809 - DNA, 585 bp, Zea mays
  unsure (1)..(585): unsure at all n locations
  Clone ID: MRT4577_43485C.1
cgggacctcgcagttccctttctcctctatccgcagngtctccccagtaccaccattcgacatgccagcaaaatttagccagccagagcccttcaaagtgcaagttcccgaggaagaaatacaacgattgagaacattactaaaggctcaacgtttacctgaaaatcctattttgccagatgctacatttcaaacgggtactgagctatcatggatgcaaaaggcgaaacggcatcttatagatttcgattggagagccgccgaacgaacgctgaattcattcgatcaatttcttgtagagatcgagggcgcaacgattcatttcgtccatcaaaaaagcacccacaaaaacgcgatacctctcctgttactccatggatggggaagcacagtgtccgagttcaacaaagtcatttcaccactggtgaatcctccggaaggcaaacaggctttccatgtcgtcgctccgtccttgccagggattgggtattcgcccgtcctgcccaaagctggagctaatgtcgaggacaacgcacgaatctttaacaccctgatgaccgaagtcctaggatacgagacgtacgt

SEQ ID NO: 122810 - DNA, 316 bp, Zea mays
  Clone ID: MRT4577_43486C.1
ggggaaaaacgcgacacaatttacggagaaattgtaggaaaaacatggggggctgaggggaccctttgtggacacataaaggaagggatccaaaaaaaggacccgccaaacaaagggtgtggccccaaaaaggcaggggggataaaaaaaaaccggcccgcccccctgggcgaccccggaaatcccgtccggcacctggaggggaaccagctttcccaactaagagaggcactagaacctgggggaaccaagggcacaaccggtacctgggggaaaagggcctccggtaaacaatccacacaacaaaccaaaccct

SEQ ID NO: 122811 - DNA, 259 bp, Zea mays
  Clone ID: MRT4577_43487C.1
attaacacacaaacgcacgagcccaaggacctgaggtgtacgcccttcaatgggctcacagtccccatatgcaactcaggtagctactagtacatggggcacataacctcagtaggctttactattgaaaaatcaacatcaagccctaagtccccaaaccatccgactccacctcaacgagttgaaactcttgcatgcacttataccgaactacctcatattaatttcgaagctaccactgtccgagatgtatagcaaa

SEQ ID NO: 122812 - DNA, 186 bp, Zea mays
  Clone ID: MRT4577_43488C.1
aaaaaaacgcaacaaactccgggttattcattgtaattccatggaccaggatgggacaccctttacttgtgcgcactaacaaggtaacactatcaaccattttttacccactatgccaaagacattagcttggatgccctgcagaaggcccccttggaatgctccaaatgatcaaaacaaactttt

SEQ ID NO: 122813 - DNA, 279 bp, Zea mays
  Clone ID: MRT4577_43489C.1
cagaccgtgggagaaaactttattcgccgaaacgccttgccacctcgccgccaccgcccagcaaacaggcgcgacgacctctagtctacgtcgtcgccaccggcgtcaccggtcagcggcgccatataagtagacgctcggctcgtcctcctcccagactcgccagcctccggctccgacacgtggcccagccgcacctcgtgctcccctcggcgaggcccctcctccccgccggcgccactccatcgctccgcgccgtcgccgtccggtcggggtctc

SEQ ID NO: 122814 - DNA, 371 bp, Zea mays
  Clone ID: MRT4577_4348C.1
cggacgcgtgggccacatactagtcggggtaaacgatcgaacgagcacaggcacgcacgcgggatggcccgcgctcttgccctctccgccttactactcgtcgcctccgtcgacgaggctttcgccgcggaggccccggcagcatccccgaagcattcggactccacgccgtcaaaggcacccagcagttcgcccgacaagtctgataaggccctcacagcgtctgctgaaaatgctgaagatacaccaaaagcaaccccggccaaggccccggcgacagcctccaagtcagaggctcaacctctcgaggcacgcgactcctggtgcagcgctgcgtcacctactatcgagagcgccgcgtcagagaaggc

SEQ ID NO: 122815 - DNA, 822 bp, Zea mays
  Clone ID: MRT4577_43490C.1
aggaatacaacaaccccgacgacgagacgactccacgcagcccgccgtggacgcgcgcttctcccaagcaagtccaacccctccccccatccatccatccgcaccaaagccttcgctccgctagatctcgccgcctgcccccgatttgttttctcggcctctccccgtagctcgctcggcagatctgcgcctcctgggaatctccgtcgcttcagtccaaaggcgcgattcttttcttgctcttcgcggaggctttccccggatcgcacggtcggggcacacacaggatgatgggtcctgtgtggtgggctgtgctggtgctgctggccatggcggacgccgtggcggggaggttcgtggtggagaagaacagcgtgcaggtgacctcgccggacagtctcaagggcaagtacgagtgcgccatcggcaacttcggcctgccgcagtacgggggcaccttgcaaggctgggtcgtctaccccaaggacaacaagcaggcctgcaaggagttcgacgtctccttcaagggccacaagtcgggagcccgccccaatttcgtcctcatcgaccgcggagaatgctttttcacaacaaaggcatggaatgcacaacttgctggagctgcagcaattctcgttgtggatagcaaggacgagcctttgatcacaatggacaacccagaagatactggcacgaagcacttagaaaatatcactattccatcagtcctgataacaaagaaaattgggtgaggaccttaagaaatctggtgaaaatggtgacatgggtagtggccccccgggaatggagggaatcccttcc

SEQ ID NO: 122816 - DNA, 307 bp, Zea mays
  Clone ID: MRT4577_43491C.1
attccacgccacgcagtccggggcattacgaaactggtggaatcgttcatgacttgggtggtggattcagcaaacggggatggggtcttgtcagaggtagtggctacagtgctagtagccgcacgcagcacttggtggtggaagtggacatggcatgcctgccggattctgcaaggatgcttgtcttggcggatgctatagccttggctgtgcaagtggacatcgcatgcgtgcctgattctgcaagggttgtggtcttgacggctgcagacgatgacgtggttgctgccacagatgttgacttgtc

SEQ ID NO: 122817 - DNA, 183 bp, Zea mays
  Clone ID: MRT4577_43492C.1
agcgtccgcccagcgtccggtgggaaacttcctgcccaacagcctgaagcacaccaggagcggatgagcgcgcagcagcagatctccccggatccggcactgccagcaacctgaagcgaccccacccgtgctcaccgcagtcacccagatctttttgccaagaactgaaaaacggatatcatg

SEQ ID NO: 122818 - DNA, 441 bp, Zea mays
  Clone ID: MRT4577_43493C.1
ggggggggaaaaagcattcgaaaacaaggggggggtccaggcagttaaataaaaggggttattacgggcccattacaaaaattttaaatttaagggaagggggaaaggggaaaaataacaaaacggccctccagtttatccccatttggttttcccggccaccccctaaaattagcccctcccccggatttttaacccccccggggggggggggtactgaaaaaaaaaaagaccccctacaaacttggaaaaagaaaggactgcttggcaattaaatgtccaaaaaacggggggagcttggccccttgttttttgggaccaaatgccttttccccgggtgagttccaaacaaaaagcccgcaaaggggtactgaactatgccaaaaagcttttgtttggactgagccaaatttttgggaaaaacaaaaacccccgtttaaa

SEQ ID NO: 122819 - DNA, 914 bp, Zea mays
  Clone ID: MRT4577_43494C.1
ggtacgtattgactcctatgggggattggggtcctcgaggccggccggggcaagctagccgagctcctcgggaatccggtgccaggcctcgccttctcgcggcggtgctccctccctcttcgtcccccagcgacgcaggcaggcgcgcgcgcggccatgaaggggggcggtgccatgaggccgtcgcctatgttctacgtccacgaggcggacgtcgtccagatccaccacttcctcgaggagtgctccctctgcgccaaatcgctctccggcgacatcttcatgtacaggggtgacacgccgttctgcagcgaggagtgcagggagcagcagatcgaggtggacagggcgaagcaccggcggaagaagcgcgcggcggcgcacgcgctgtccgcacgcagcagggagcaccggcaccagcagcagctgcagcagcaccaccaccagcagcagcaaccgcagccgcggaatgccggcatggacacccgccacccgtgggtcgacgccgggttcgccaggcccagggcgcccgcgctgcgcgtctgagcaaaagaattagcgcgccgcacgcacacggcacacttcccccgcgccgcgccccgcccccgccgcagcagcaccggttgcatgcatgcactagtggtgcgtaagtaccgtacgcgggcgagcgacagctggctcgggttttttttgctactacatacacgtagtatcctgatccaaggctagaactgtagagccatgcatgctgccggatcggagagccgtgggccatggaccgatggcgtctctctcccccgcttgttttcggcctctcgtattttggctgtagttcttgctctctcgttctcgtggaatgaaacacgtacgtatggattatcctaccaaagaaaaaaaaaaaaaaaaaagcggcc

SEQ ID NO: 122820 - DNA, 238 bp, Zea mays
  Clone ID: MRT4577_43495C.1
gttacttgacggagaggaggaggcgctggtggtaccggagcagtagggacaagcgctgcgcgccgtgacccaatcccgggagcacgttctccgcggcggcacggatctctatcccccagagatgcctcttgctcattgtcaaagaccacgaccgatgtcaacgcagcgtcgccgactccatgaggggaggaggcggcgcttaggtcgcctctcagctacaatacgaatcaattgccgg

SEQ ID NO: 122821 - DNA, 773 bp, Zea mays
  Clone ID: MRT4577_43496C.1
tgaatacaatatgataacttccatgacatttcaaaatatatagttccactttagtaaaatagttttggatgcatttgctacaatttactgcatattcaaattgaggctaaccttgtggcgtcgataaccttgaggctagtcttttgtatgcatttgctacaatttagtgcattttctacacaaaggacgaggaggggtgggtgctgattcacttagtggcaagcttcgactactctcaaatcatcgacatcctgcttgagcgaagcatatcttatggtgagcgtgctgaacacgaaggacgcgtagtggtgggcgctgattcactcagtggcaagcttcgactactctcaaatcatcgacatcctgcttgagcgaagcatatcttatggtgagcgtgctgagcacgaaggacgtggaggggtgggcgccgattcactccatggcgtgcttcgacaactctcaaatcatcgacatccaccttgagcgatgtatgagaccagcacgatacatctgtattcagttcaagcggctttgatgcagctccagctgaccatcctcttgtcagtgggaatggttacgagcatacctcatgcactatttgctgagttaattggataagaggtttgcttatgcttagatcgtgttttcaaattttgatcagcaaagtgtttgtatatttgagtttctgttattattttctcactaaatcgtgtaattttcttatcaatttcattatgtgtttggcattattaattccatttgagatcatttac

SEQ ID NO: 122822 - DNA, 480 bp, Zea mays
  Clone ID: MRT4577_43497C.1
cattgggacctcgagccggccgggatgacattggtgccgccctctccggatggcagcaactacctctggccggacactgtgaaggacccctcgtcgagatccacaagaacagggaccactacgtgcaggtccgaggacaccgtcaaacagagggcaactacgtcaacaagctcttcaggagcatgatctaggttctctcttggatcctgagaaaatgcttatctgcgactacagagttgttgttgctctaccaagctggcacgacactgatggatatgtcatctgtttttgtagctagaagatatgaaacatgactgctgctcacatctcctgagttttgctccctatgagtcgatgaataagtgctgacttgtatgacatcatgcctacagctgtgtcctgcgggagattcgtctcgggtcccaaatccgcgcaacttaataaggcatatgaataaaatgtagaggccgctgtggcaag

SEQ ID NO: 122823 - DNA, 409 bp, Zea mays
  Clone ID: MRT4577_43498C.1
gcttttgacgcatactgcacacacaacacagaggagcagaatgagcagcaatctgaccgacatgggcgacggcaccaggggtatcacctcccgtgcgctcatcgagaagccggcggcgggcacgagggacgccttcggcgagggccgcataaccatgcgcaagaccgacaccaagcccaagccggcagcggacggagaccctggtacggtgccgaccgcgctctaggcctgggcccgacagacgactggcccccaagctaccagaaccgggaggcacccggcgactacggatgggacaccgcgacgctgcatgctgacccggagacctctgccaagaaccgcgagctggaggtgatccactgtcgctgggacacgctcagcacgcttggacgcgtgtgccacgagctgc

SEQ ID NO: 122824 - DNA, 198 bp, Zea mays
  Clone ID: MRT4577_43499C.1
acacttcacaccacacttactttttcgttcacctcttcacataacgaaaggggtatctctcaaaacacctgcgcgtccaaactcactcctcttctttcacatcaacaaaggtcatatcgtcacccatctccaactaccttcacccccttgccacctctaatgccaaatttaccaacaaagtatctattaacatagccc

SEQ ID NO: 122825 - DNA, 1275 bp, Zea mays
  Clone ID: MRT4577_4349C.1
atggcggagagggttgttggtgtatgcgtgggtccgaaggacggtgggacttcggtggcggagagggttgttggtgtatgcgtgggtccgaaggacggcgggagagggctgcgcgcggcggcagggaagggacgatatagatacacacagatggtggactgcatgcaggagtggccggagcccgtcgtccgcgtgcaggcgctggccgagagcggcctgtccgtcatcccgcgctgctacgtcaagccgccgtgcgaccgccccgccgtgtccccggcggcggcaacgacagtccaggagaccacggagccctcggacatgagcattccggtcgtcgatctcggcgcgctgctggcggcggacggcggcgccgccgtcaccgaggccgtcgccgccgcgtgccgggagtggggcttcttccaggtggtcggccacggggtgcgccccgagctgttgcgcgcggcgcgggaggcctggcgcggcttcttccgccgcccgctcgcggagaggcagcgctacgccaactcgccccgcacgtacgagggctacggcagccgcctcggcgtccagaagggcgccgccctcgactggggcgactacttcttcctccacctcgcgccggaggcggccaagagcacgcccaagttctggccggccgtgcccggcaactgcaaggaggtgtccgaggagtacggacgcgaggtggtgcggctgtgcgagctgctgatgcgggtgatgtcagtgagcctagggctggacgaggcgcaccttcagcgggcgttcggcggggcgggctgctgcggcgccaccctgcgcgccaactactacccgcggtgcccgcagccggacctgacgctgggcctctccgcgcactcggacccgggcgtcctcaccgccctcctcgccgacgagcacgtccgcggcctgcaggtccgccgtagcgccggcgactgggtcgacgtgcgccccgtccgcgacgccttcatcgtcaacgtcggcgaccaagtccagataatgagcaactccgtgtacaagagcgtggagcaccgggtggtcgtgaacgccgaggaggagcgcatatccctcgccatcttctacaaccccaagggcgacgtccccatctccccggcgccggagctggtcacggccgcgaagctgccaccgctctacccgacgatgaccttcgacgagtacaggctctacgtgaggagtaagggcgccaggggcaaggcgcagatcgaggctctcaagggccaggcatcaccagaaaattaa

SEQ ID NO: 122826 - DNA, 448 bp, Zea mays
  Clone ID: MRT4577_434C.1
tcaaggagccaatgtacgaccacgtacttgggctaggggggacacaattataaatttaccaaccgaaagtaaacttcactttcaggcgctgatcatttagatacagactgactgattgagggctaagatccaatgttgaaagggaaacaggccaaatcggccgctaaggctcctattctgggggggggggaacaagaattaatctaataatgacaactaggaggcgggttataaagcgcacgtgcttggaaaaaagcacatttgtctcacttggtactaatttcgattgatccgaacatgtagtgagatgctctaagtgtattctaccaaagagcaactatgacctctgaaagctgatcttccaaatgattgtactgagaagtacttgcaaatggtgaaggctctggtaacttgacctgactatatcaacgacgcctatgctgacatg

SEQ ID NO: 122827 - DNA, 1179 bp, Zea mays
  Clone ID: MRT4577_43500C.1
aattcggcacgaggttcgagcggtcgagcctggtgacctgatccctgtgctggtcaaccgagtccgaaccgcatcgatcggacggtctcacgacgacgaaggttcgcgaatcccctccttccttcggcctcgccttcttattttgtccgccggacaagccagtagtggctacatcgcgaagggcggcaaggcagatctagggcgatcatggcttacgtcgagagaggtgttgtgaaagacaaacggactatatggcgactgagcataatctcagacttcttctgggccattgtgagctttatcagaatcttctttgacacactgttctcattggacaaaactgacaacttcaagaaagggtatggtgctggtaagaagtgggatggtggacctggtggtggtgggcggggcccatatggcggtggaggaggtggaggattcggcggcggaggtggaggtggttcacggggtcctcgcactctatctgacatccaatccaatgaccacagttctctccctgcttgtggatcctgctgtggctaataagcgtgcaaccgttccgcctgatgactacttataacagatgaatacacatgcttctgtatgttctgaagaacatcgtagctattgatatgtattttactgtcagacgattgtatcataatcgatatgtcgtttattaacagcctatttacctgtagcttgactctggcatgattcgcatggtacattcatggttcatctttcgtgtaccgctgcctgattgcataataactagatcagttacaaagtttaaaaaaaaccgttgctgtcgcgacagcaacggcgaaaggaccttgctacctgttggtctatactttttatcattttccttgtgctgctttcattttggtctgctgagactttgggcatgtcagcatcagctgtcagatcggtacatgtaacctgcacctcgtgacttctgaaagaaattaccgacggtggtacatggacctaacccggtgcctatcaagctatcttgttggctgagcctgtttgtttggctctaacatgtatcgacttctattgcttttacaatgtttatatctttatagattgtagatggctttaatctaaagcgaacagccttttgtggtctatttaggacactttgatggtaacgacagcaacggaattcga

SEQ ID NO: 122828 - DNA, 731 bp, Zea mays
  Clone ID: MRT4577_43501C.1
ctagaacgaacagccgtctcgtatttcgtttcgtcttctgactccggtccggtaagtagtaatcagagtccaggcggcagcacagcagcttcctttcctccggcgatggcgaagaatcccaaagatgccgctccggaggaggagatgcccgccgcggccgaggaacaggcagcgcctgccgcgacggtgaaggtgctcttcttcgcccgcgcgcgggacctaacgggcgtggcggattccgcggtggaggtgccgccggggagcaccgcgggggagtgcctcgcgcgggtcctagcccagttccccaagctggaggagatccggggctccgtcgtgctcgcgctcaacgaggagtacgcggccgactcggccgcggtcgccgacggcgacgagctcgctgtcataccgcccatcagtggcggctgacgttattaaccacggccgacttgtgtggaggtgataataaaagatatgaagacatcgatcgttgagaaaaaaaaatagaaaataaggctgctttcccttcttcatggtcagtttatcaccacgaaagattgaatttattatatgctcgatgctgaaagttaagggcctctactgtttcgccccgaaggacaccgctggcgtgctcttaacggagaatggcggccctaaacctccatgtttggaggcctttattgaggcttaattgcgcgctggcgcgtacgagggccatactttgttgctgtgcg

SEQ ID NO: 122829 - DNA, 276 bp, Zea mays
  Clone ID: MRT4577_43502C.1
attttagattgtctagaagtattggttacagtttcactgctctctttgctcagcagtggtaactttattttttgtttcattgtaaattaagtggaataaagcaaaaccacaattgatccaagcagaaatggactaacctaaccccaacccccgcgccccactccatccatggactactctttccattagaatgaactggcacagtagtgtgtccagccaaaacatattctttttttaccaaaatgttgcctaaaatatgtagcttacatgttggaa

SEQ ID NO: 122830 - DNA, 435 bp, Zea mays
  Clone ID: MRT4577_43503C.1
gagctcactatgttggcggccgccaactgcctgctcagcgcgggcctgcacctcgtcaggcggcacagctccccgcccaagggctgcggcgggcactcgcacacgcagctcggtaagaccatgtcctgccccgcgcctgacactgccgcagccggcgccggcatgtcggtgccgtgcccgtgcagcaggttccagttacgccacggggatctgaagtctggtcctgaggccaccgggtcggccggcaccggcgctcacctcgccagcagcgccagcaagcgccactcgttcgacgtcggcaagctcccgggcccgggctcggtgccagtgccggcgtcgtcgaacgccgcccggcgcttcgtcgggtgtgtctccgcgagctaggtcgagcagtcggaggactacacccgcattatcgcgcgcggccccaacccc

SEQ ID NO: 122831 - DNA, 528 bp, Zea mays
  Clone ID: MRT4577_43504C.1
gccggccgggtcgggactcccgtagacccataattgattattgcactgtcaggtacgcatcaggagacgaacacgatgagctccataggcgcggagtatggcgccaataagacttgccccttattgggcttcctcagcctggaagacgccctcaggttgatctggatggacaagcccgacggcaacatcgacgaggtgcccgtcgggacgccggtgaccatggatttccgccccaatcgcgatgcgcatctatcgtcgaccccgtccatggatgcaccccatatcgatctgaggtttacatctacaacatgaatatctcggacgtgacatgcctacctgtccgtcctacaataatgtatgtgtgtgcgcgcttctatcgttcctataaagtggtagtaaaaataatggtatcatctgtattgatgaataaaaaggatcagaataatgttcaccctttcacgattggatatatgaaaatgtgctcagttgtgtgcctgaaaaacataaaaaacagaagggctcgatgtg

SEQ ID NO: 122832 - DNA, 350 bp, Zea mays
  Clone ID: MRT4577_43505C.1
gcccccaaaccgttccctttttaaattcaaaaacccaaaaaaggcccggggggaaaaaacaaacccaccccaaccttttccaacaaggtgtttaaacaaacccaccctaaaaaaaccgggcctatgggtggttaaaacacttctttaaaccccccccctcccaaaaaaaatttgaaaaaaaaaatgaaacccccttgaaacaagccacggccccctgggccgacccctttgttaaccccttaatatccgacccggacccgcaagggaacccaccttccccataaggaggcgcattaaaacctggcgaaaacaagggcaaaaccgtttcccctgtgaaaattgtatcccct

SEQ ID NO: 122833 - DNA, 162 bp, Zea mays
  Clone ID: MRT4577_43506C.1
aatatgagcaacgactattcattttcaggagaactactttatggggggagcatatccacactccctacaccgtcacaaatgggggatgaaattaaatggggggggggggggggggcctacctacccacctaccctaattttccctttcgagaacaaacaacc

SEQ ID NO: 122834 - DNA, 432 bp, Zea mays
  unsure (1)..(432): unsure at all n locations
  Clone ID: MRT4577_43507C.1
cggccgggccgggatttagctccatattaatcatgaaattgactgctgctttagctgttgtccttggtcttttcggtaccactaatgctcacatgagaatggacagtcccactcccattaaccatcccaacaacccccacaagaccaacgctgactacgattacgttgctcccctttctggtactgctccttatccttgnagaggtcaacttaagaacttgaattctaagggtggtantcctgttgttacttggggtgctggttccactcaaagagtcactattggaggaggtgctgttcacaatggcggttnttgccagttctatttttattacgatagtggtagaacttttagtgttattaagtctggtattggaggttgcttcactggtgaagattattgtgtangaatttttatggaagatagcaatg

SEQ ID NO: 122835 - DNA, 655 bp, Zea mays
  Clone ID: MRT4577_43508C.1
atccccaagaggacccaacactgaaattcacttcctgaactactgtgctagctgatcctaccttactactacaacccatcagcacctatgtctcccaaggttgacttcttccttgctctgagcctcctgtctgctgtcaccacgtatggatgaaaagcctgctgttctgcaccaaacttgccatcgacgccatccacgccgactccgtcaacgtatacacacgggagctgaacgatagacttgctcaaattcaagatgtgaacgaacccgataccatctcccaatgccaggtctaccccacaattagcaatgctgaaccgcagttggattctctctcgtcacactataacctccattgtgcctctaaaccggaatcaaaataaagcctcatcacataaagctcaacgtactaccgtagactaaacttcatcctcaacaaatagagcagaataataccacaagaatatacttgccgcaaataagatcgagattgcttacgtgctcaataacgaaactctatttactatcactggcattactgttgcgaactatggaagaacgtcgacgtgccatgttctaatcactgtaccatctacgatttgatccgcactcagctatatgtgaaattttgatgttctggatgtgaacctacccc

SEQ ID NO: 122836 - DNA, 814 bp, Zea mays
  unsure (1)..(814): unsure at all n locations
  Clone ID: MRT4577_43509C.1
tctacgcgtccggccgcccacgggcaacttcacggagctggcccagctgttcggcgccaagggcctggacaccagggacctggcggtgctgtcggccggccacaccatcggcacgtcgcactgcttctccttctcggaccgcctctacaacttcacgggcctggacgacgcccgcgacaccgacccggagctggaccgcgcgtacatggcgcgcctccgcgccaagtgcgccagcctggacgacaacaccaccctggtggagatggaccccggcagcttccgcaccttcgacctgggctactacgccaacgtggccaagcgcaggggcctcttccactccgacgcccagctgctcgccgacccttccacccgcgcctacgtgctccgccacgccacgggcgcccacagggacgagttcttcgccgacttcgccgcgtccatggtcaagatgggcgccgtcggcgtgctcaccggcggccagggcgaggtcaggaagaagtgcaacgtcgtcaactaacttattatatggcctcctgaggagtcatgtctttctcttcttcattttttcgttcactgcattattgattgattgattttttttttgttcccctgtcgccatgtatgtaatgtaaatctctgcccctcatcttcagttgtccatcaggatctcatgataatgcatgcaataaaacctttttgatttagtctgtccaaaaaaaaaaaaaaaaaaaaaaaaaaaaaaaaaaaaaaaaaaaaaaaaaaaaaaaaaaaaaaaaaaaaaaaaaaaaaaaaaaaaaaggggcggnccgtttta

SEQ ID NO: 122837 - DNA, 497 bp, Zea mays
  Clone ID: MRT4577_4350C.1
gtgactacttacaaatttttaataaaacgcgagggcccaacaattacattgaaaacaaacagtatatcgtcaatcgtacactaatctattctttcaaagagaaaaagacaatcgaacaccaaggaaccccagatttcacaaagagagagaagttcctaagcacaactatggaaggggcttgaagggggcgccgccgatagaaggggaccgccgaccccggaaagggacaaaaaggggggaagggccccagggcaactttggagccggataggaggggcccggcttttgagcgaggagtcgccccaacacggaagggccttacttgaagcacgagggggggcgctgagatggaagggcaaggagggcccggcaaacatggaccggggatggggtccaaaacaaaggggaaggcgggaacagcctcataggggccacaaaaacaaaaggggccccatgccccaacccaactttgaatctgaagggaccattaacgccac

SEQ ID NO: 122838 - DNA, 275 bp, Zea mays
  Clone ID: MRT4577_43510C.1
atttgcccttaaaagtgggtaacaactcaaagttcgcggggtttctcttcctctctgcctgctgtgttcacctgcggcatgtcgttcagaacgagatgagcagactgtgtgacagtgtgagtgtgtgtgtggcccaaacacgcagtgtgttggaataagtttatctgtactacactgaataataagcttctttgtcggatgatcttgtacaacgttttataaaaaaaaaaaaaaaaaaaaaaaaaaaaaaagtactctgcgttgttaccactgct

SEQ ID NO: 122839 - DNA, 247 bp, Zea mays
  Clone ID: MRT4577_43511C.1
attcggctcgagaaaattttgttcaaaaaaaaaaaaaaaaaaaggaaggtaaaaaaaaaaaaaaaaaaaaaaaaaaaaaaaaaaaaaaaaaaaaaaaaaaaaaaaaaaaaaggggcggccgccaactattagagctaaaggggccggcctttaattcggggccggtccctccgggctttcaatcctgtccctgatcctgtggggcttccagcttgccttattcagggccatatctgaccccggggta

SEQ ID NO: 122840 - DNA, 528 bp, Zea mays
  Clone ID: MRT4577_43512C.1
cctcgaggccggccgggagcacagatcctcacaggggactcactaagaccgtttcgcaaaagcggcgctgcctctcatggcttcaatgatgtgcatatccgcatcaccgtgactctggaagcgtgcgctcgacaaaccaacttgctgatgatctccttggaagaaacgacggactctaagacatacatcagggagaagatctcctacgacaataatattgacctgcaccctccagattcaatacatctgtgccacgtccacccgcacttcaaagagacctcgaggaaccctcatacgtacatcctgaacgatcaatcacccgctccctgatgctttgactgagatccaggatcgcttctcaaccctgaatacctacccatatagacttgcagtctgcttatgatagtatacgatctatatatagacacatacgatacgctggatatctacatgctctcacatcaaataacaatgagcaaaatcatggaatgactatgaagataatgctgggggatccggaaccatgtg

SEQ ID NO: 122841 - DNA, 287 bp, Zea mays
  Clone ID: MRT4577_43513C.1
atcaacttctgtcgaataagaaaattcagagttcgacatgaaaatagtcgccgtgcccgcgaaagggggaagaaacataaataagtgaatcttggccacccctaaatgtaatcaccatctcaaaggcttggtcttggccctaacgcatcctgcaacacaggacacgtttaaccaggaatcgttgccttctatgatgcaatggttcaacagacctgggctcctaggaaactttgggaagccccaggggacctgttgcccgaattcccgcctttacagaggtggaaact

SEQ ID NO: 122842 - DNA, 283 bp, Zea mays
  Clone ID: MRT4577_43514C.1
ggggcggcctacgcgtccgatttgcaaccctacgatcactctccctccctcacacaaataataaggaaggtgccgtgacacttttcttttatatacacagtgtagagggaaaaacaaccacattcaccctgcgaaaataaacaacttggttccggctacgcatactactaccgacatcgtagtcctatgcccaagccacgtcctctccagtgccacggatgacgaccccaacctgcccgacctacaaaatccaagccgcgtgtactgtcacaccaccccatac

SEQ ID NO: 122843 - DNA, 386 bp, Zea mays
  unsure (1)..(386): unsure at all n locations
  Clone ID: MRT4577_43515C.1
cagaaggtaccaagctagtaggtgacaagcagaggagaagccttacatgtcaataagggcctacctctgatagccaaggatgacttgcctatgtcctttgtttacaaaggacctgaatgtgtggaccattgagaggttcatangcagtctccttggctagcctgagtggcccctattgctcatgctaggcttaatcgagactctttgacttggtgcacgcaattagacacaggagtctcctcgacttgtgcatgggcgtgcatgcaattagacacgaccttgtcatatgtagctgtgtttcagtgtccatgcatgctccattcctagcattttcttgaaaggccaatatagcttggcagtttctctggaaagaatcagcatcaaac

SEQ ID NO: 122844 - DNA, 663 bp, Zea mays
  unsure (1)..(663): unsure at all n locations
  Clone ID: MRT4577_43516C.1
atgaccgtttccttcctcgaccatgtccctctccagctagcttcctcccctccatgtcgttgcttcttcgtcgtcgccggccgtcgtcaccactttttgacgcgctagcgcctagctgctgctcgttcttccacctcgccagtctccatcaacgcggctccgtcgccctcacgcacgcgcgcatagatataaacataaacgccggctggcactggtagacattcttcactcccacgctagctacgcccactccccccgcgctatgcctatggccgaccgcgtccaccccatgccatctccctcctccccgccgcttccacctccgccagggcgacggcgacctgacgccgaccccgccacggagacgacgccgctgcacccgtccttcttccacgccatccgcggcctcgccaacgccaccgccaccgccaccggcgccgcagccccgctctcccccgcgctcgacgccgccgtgcgcgccgacaacgggcgcaacgggaaggtgggcgtggagtaccgcgcgggcggcgccgtcgcggtgtcctacgcggggcagcggctggccgcgggcccgtggcccgcgttccgccaggcgccgcggaacgtcacggtggtcgcgggccgttctttagnaaaggggggaaaaattttttcccccccccc

SEQ ID NO: 122845 - DNA, 234 bp, Zea mays
  Clone ID: MRT4577_43517C.1
gcccccggagctttaagcagattctggaaaaatttgtcccaaataccctggggacaaacaacttttctactttggccaacatgaaaaacgaaataaaatgtttttacaaatttctgacagcttgtttttgtaccaacaaaaaagggggggcgctccaaaattagggcctaaaactagaaaaccacctttttaactttttcgccttttttggggcagccgaaaacggggcatttc

SEQ ID NO: 122846 - DNA, 542 bp, Zea mays
  Clone ID: MRT4577_43518C.1
cccgtgtgatgaatctgcaaatcgccctaagcagtggtaacaacgcagagtacgcggggcatgtaccaaaggataataataagctgctcaaaaaatcatggttaattaaagtttttttgttgaaaaaaaaaaaaaaaaaaaaaaaaaaaaaaaaaaaaaaaaaaaaaaaaaaaaaaaaaaaaaaaaaaaaaaaaaaaaaaaaaaaaaaaaaaaaaaaaccaaaaaaaaaaaaaaaaaaaaaaaaaaaaaagcccccccggttttcccccccctaaaaggggaaaacccccccccccggcccccctaacaaagaacccccacccccccccccaacttcggaaaaaaaaagaaaaaccttcccccccgcaaaaaaattatttccccccaaatcccccccaaaaaccacccccaaccaaaatagaaaaaacccggggccccccaagaaggaaccaccccaccaaattttggggtgggaaccccgcccccctttcaaacggagaaaacccttgtcccccccccctctaaaaaaaaaaaaccccccc

SEQ ID NO: 122847 - DNA, 908 bp, Zea mays
  Clone ID: MRT4577_43519C.1
tggggttcacaacacggccggcgcggcgaagcaccaggcggtggcgctccgcgtccagggcgacctcgcggcgttctacaactgcaggttcgacgcgttccaggacacgctgtacgtgcacgccaggcggcagttcttccgcaactgcgtcatctccggcaccatcgacttcatcttcggcaactcggcggcggtgttccagaactgcctcatcatcacgcggcggcccatggacaaccagcagaactcggtgacggcgcacgggcgcacggaccccaacatgaagtccgggatcgtcatccagaactgccggctggtgcccgaccagaagctcttcgccgaccgcttcaagatcccctcgtacctgggccgtccatggaaggagttctcgcgcctcgtcatcatggagagcaccatcgccgacttcatcaagccggaggggtacatgccctggaacggcgacttcggcatcaagacgctcttctacgccgagtacaacaaccgcgggcccggcgccggcaccagcaagagggtcaactggcctgggttccacgtcatcacccggaaggacgccgagcagttcaccgccgggccgttcatcgacggcgcgctgtggctcaagttcaccggcacgccgcacatcctcgggttcaagtcctaaaggccgcatggcatggcatggcatggcatggcatggcacgatagtgaggtggcagtggcacatacgtacatttttgtgtgtatgtacaatgatcgacagacgtgcaagcagatatatgtacctgaggtgtcgcaggacaggagggctaacgttaacgtttgtacctttaccaattttctttcctttttcattcctttggttgttgctcttggtgaaattcttcagtaaatgaaaagtcttttggacc

SEQ ID NO: 122848 - DNA, 627 bp, Zea mays
  Clone ID: MRT4577_4351C.1
acagcgccatgcagataggcgcctagatccgcaaggggcagggtgatgaacatggcattgaccctacgcgtgcgagccgctctgacttccgcccgtcattcgggctgagggactgatgactacgaacaagactcttgcgggcgctgaggatgctgtgctcaccttattgatcgagactgtggctcagaagcccgtgccccgagctgaccctgtggaccttagattccactgctgtcagctgaggtgatggactgacaccgacgcggcagctcattccgtgctgaggacctcttcaccgacggggatgatgcaatcgactatgttgttcgtggtcactacaccgtagctgaggacagtgacggcctgcgccgtgaccgagtcaggaactttgttgatgatggcactggactccagggcttcctcctgttcaacgctgatagcggaggaacggactctgagcttggatgtctacttctggagcgcctgtctgatgactatggtaagaagcccaagctcggctataccgtgtacccatcctctgaggagtacacatccgagaatgagccatacaacatggttctgtacacccactctctctttgagcacactgatgtggctgtcctgctg

SEQ ID NO: 122849 - DNA, 396 bp, Zea mays
  Clone ID: MRT4577_43520C.1
ggcgggggtttttttaaaatgtgcaaaaggaaaaaaaatttttttaaaagggggaaaaaaaaaaaccgtttttatccccggtccttaccgggggtccaaagaaacacccctcaccaattgggggaaaaataaaagggcggggttctataaaagaaaacggactgtccatgggttcccacccctccaaggggatttaaatgggtcccccccctttttaaggggaaaaaccaaccgcccggccttccacgggattttttttggccaccaagccatgacccaaagtttttgggcttttaaaggattaattttgggctccccaaaagacttccggtttctgttaacccgccccaacaggttccgggggtttgaacccgggaaaaaaagctcccaaggggg

SEQ ID NO: 122850 - DNA, 225 bp, Zea mays
  Clone ID: MRT4577_43521C.1
cccacccctttaccaccgaagagagaaacgcgagcaaccagcgatcgccccatggccgccatggcttgttccgcctccctcgccgtggcgcccctgctcctcctctccctcctcgtctccgccgcgcccaccgcgcaggaccgtgggggacaccgcgcaggacgcgtgcatcaagacacagatccccacgatctgaatggacagactctccgccaagacgaaaag

SEQ ID NO: 122851 - DNA, 1934 bp, Zea mays
  Clone ID: MRT4577_43522C.1
cccaagatggcaaatgctctcctaggtggcctgtgggcgatcgtcgtcgtcgcggtggtcgtcggcgtggtcgccaccgtcacccactccggcaagaaggccggcgacgacttcaccgtcccgggggaagcctccattgccacgtccggcaagtcggtcgagtccctgtgcgcgcccacgttgtacaaggagtcgtgtgagaagacgctctcccaggccaccaatggcaccgagaaccccaaggaggtgttccacagcgttgccaaggtggcgctggagtcggtgaaaacagcggtcgagcagtccaagacgatcggcgaggctaatgccagcgactccatgaccgagagcgcgcgggaggactgcaagaagctcctcgaggacgccgttgacgacctcaggggcatgctcgagatggccggcggcgacatcaaggtgcttatcagccggtccgacgacctcgagacatggctcacgggcgtcatgacgttcatggacacctgcatcgacggcttcgtcgacgagaagctcaaggccgacatgcacaccgtgctgcgcaacgccaccgagctcagcagcaacgcgctcgccatcaccaacagcctcggcgggatcctgaagaagctggacctcggcatgttcaagaaggactcgcgtcgccggctcctgtcggagcaggacgaaaaaggctggccagtgtggatgaggtcgccggagagaaagctcctggcggcgggcaaccagcctaaagcgaacgcggtggtggccaaggacggcagcggccagttcaagaccatccagcaggccgtggacgccatgcccaagggccagcaggggaggtacgtcatctacgtgaaggccggcctctacgacgagatcgtcatggtccccaaggacaaggtcaacatcttcatgtacggcgacgggcccaagcaaagccgcgtgaccggccgcaagagcttcgctgacggcatcaccaccatgaagaccgccacattctccgtcgaggcgtccgggttcatctgcaagaacatgggcttccacaacacggccggcgcggagaggcaccaggcggtggcgctccgcgttcagggagacctcgcggcgttctacaactgccggttcgacgcgttccaggacacgttgtacgtgcacgcccggcgccagttcttccgcaactgcgtcatctccggcaccattgacttcatcttcggcaactcggcggcggtgttccagaactgcctcatcgtcacgcgtcggcccatggacaaccagcagaactcggtgaccgcgcacggccgcacggaccccaacatgaagtcggggctcgtcatccagaactgccgcctggtgcccgaccagaagctcttccccgaccgcttcaagatcccctcgtacctgggccgaccctggaaggagttctcgcgcctcgtcatcatggagagcaccatcgccgacttcatcaagcccgagggctacatgccctggaacggcgacttcggcatcaagacgctctactacgccgagtacaacaaccgcggccccggcgccggtaccagcaagagggtcacctggcctgggttccacgtcatcggccggaaggacgccgagcagttcaccgccgggccgttcatcgacggcgggttgtggctcaagttcaccggcacgccgcacatcctcgggttcaagttctaaagaccgcatgcatggcatgttatatacagcacacgctagggaggtggtacatacatgtttgtacctgaggtgtcgcaggacaggagggctaacgtttgtacctttaccctttttttcttttctttttgattcatttggttgtttctcttggtgaaaattttcaggaaacgagaaatattttggacagtgaaaaaaatgcgtcatggattaatgcatagtttgtgtgttgagaagaaaaa

SEQ ID NO: 122852 - DNA, 2085 bp, Zea mays
  Clone ID: MRT4577_43523C.1
gcacgaggccgacttcgtcaagccagaggggtacatgcccgattcaactgccagccgtgcgggcaaaaatggcaaaggctctcctaggtggcctatcggcgatcctcgtcgtggcggtggtcgtcggtgtggtcgccaccgtcacccgctccggcaagaaggccggcgacaacttcacggtcccgggggaggcttcccttgccacgtccggcaagtcggtcaagtccctgtgcgcgcccaccctatacaaggagtcgtgcgagaagacactgtcccaggccaccaatggcaccgagaaccccaaggaggtgttccacagcgtggccaaggtggcgctggagtcggtccagacggcggtcgagcagtccaagtcgatcggcgaggccaaggccagcgactccatgaccgagagcgcgcgcgaggactgcaagaagctcctggaggacgccgccgacgacctgaggggcatgctcgagatggccggcggcgacatcaaggtgctgttcagccggtccgacgacctcgagacctggctcacgggcgtcatgacgttcatggacacctgcgtcgacggcttcgtcgacgagaagctcaaggccgacatgcactccgtgctgcgcaacgccaccgagctcagcagcaacgcgctggccatcaccaacagccctcggcgggatcctgaagaagatggacctcggcatgttcagcaaggactcgcgccgccgactgctgtcgtcggagcaggatgagaagggctggcccgtgtggatgcggtcgccggagaggaagctgctggcgtcgggcaaccagcccaagccgaacgcgatcgtggccaaggacggcagcgggcagttcaagagcatccagcaggccgtggacgccgtgcccaagggccatcaggggaggtacgtcatctacgtgaaggccggcctctacgacgagatcgtcatggtccccaaggacaaggtcaacatcttcatgtacggcgacgggcctaagcaaagccgcgtgaccggccgcaagagcttcgccgacggcatcaccaccatgaagaccgccaccttctccgtcgaggcgtccgggttcatctgcaagaacatggggttccacaacacggccggcgcggagcggcaccaggcggtggcgctccgggtgcagggggacctcgcggcgttctacaactgccggttcgacgcgttccaggacacgctgtacgtgcacgcgcggcggcagttcttccgcaactgcgtggtctccggcaccatcgacttcatcttcggcaactcggcggcggtgttccagaactgcctcatcatcacgcggcggcccatggacaaccagcagaactcggtgacggcgcacggccgcaccgaccccaacatgaagtccgggctcgtcatccagaactgccgcctggtgcccgaccagaagctgttcccggaccgcttcaagatcccctcgtacctgggccgcccctggaaggagttctcgcgcctcgtcatcatggagagcaccatcgccgacttcgtcaagccagaggggtacatgccctggaacggcgacttcgccctcaagacgctctactacgccgagtacaacaaccgcgggcccggcgccggcaccagcaagagggtcaactggcccggcttccacgtcatcggacggaaggaggccgagccgttcaccgccgggccgttcatcgacggcgccatgtggctcaagtacaccggcgcgccgcacatacttggtttcaagttctaaaggccgcatggcatggcatacatcacatcatatatagtgaggtggcacacacgctcgcgcgcgcgcgcacacatgtttgtgtgtatgtacaatgactgagacttgcaaacagaggggtcggagaacaggagggctgacatttgtaccttcaccatttgcattcctttggctgtttctcctggtgaaactcgaaaagtcctttggacaaaaaaaaaaaaaaaaaatccgcaaaaaaaaaaaaaaaaaagttgcggcattgcttaatgcatggtgtgctgtgtccaaaaaaaaaaaaaaaacaagaaaactataaaaaaaaatacc

SEQ ID NO: 122853 - DNA, 389 bp, Zea mays
  Clone ID: MRT4577_43524C.1
atccaaattggagagaaagaggggtacgctatgaacaaaacttaacacatcatcatcgtcggctccatctgacctgattaaaatctaactagatacggagtaacagaacacacaaaacgaccaaaacaaagcaacgtgcgtgacggccacctgacgccaacgacacgagggacacctgtctccttcgcagaaatacggggaggacacagcgcgccgcctcgacgcgcgttcgtccttgttggcacgggcgggcaagcgacggcgacgcgagcaccgctgcttaatttgctccgtgaagcaagcaaaggtctaaaagcttgggtgcttggcggtgtggatttgtacgggcgctagagatcgagaagagttaaccgggagagcagcagcag

SEQ ID NO: 122854 - DNA, 1100 bp, Zea mays
  Clone ID: MRT4577_43525C.1
cgggcctcctcggctcgctctcctcctccgcgcactccctcctcgccgcggcgcgccgctccccggtcaccaccctggtcgccgccttcttcctcctcgtcgagtccaactccgataaccccaagatccacagcatcgagcaccggatcatcaggcccgagcggatcgaggggcacgccaagtactggagaggcgtcgactacctcatcttcaacacctacatctggtggatgaacacagccgacatgaaagtcaggagaccaaattcgaggtattggtctgaacatgacgaggttcccaggattggggcgtatggactggtgttcaagacgtggtctgattggctcaatgacaacatcgatcctgcccgcacacttgtattcttcatgacaatttctcctcctcacatcagcccacataactggggaaacccggacggtatcaaatgtgtaagagagacgcttccatatcagaactacagccaacacctggatctttaccatgacatgcggctgtatgacttagtggtcaatgtggccagctccatggagaaggtcccagtgacagtgatcaatatcacaaggatgtcagattaccggaaggacgcccacacgtccctgtacaccatccggcaagggaagctgctgacgcctaagcagaaggcagaccccgagaagttcgcggattgcatccactggtgccttcctggcgtgccggacgtgtggaaccaaatactctacacgaggattctttcgaaatcatcatggcattctaattttagcccccctccatcccagtctctgcctcttcctccccaatgagaatcagaagtgggggcttggtttttgtcggagaatgtatgatttttcattctttttccttcctttttgggtagattgagtaaaatgatagcacgaaaaggaaaatgaatgttctgattactgatggtatagcatgtaagaagattcagctgaagtgtaaattagttgtgagttagccaattgagaaaacaacagcgacctagtataaagtgcatatacatatactgctggttcacaggcaaaattacctatatataagcctttttttcctgatggatg

SEQ ID NO: 122855 - DNA, 1110 bp, Zea mays
  Clone ID: MRT4577_43526C.1
ccggccgggtcaagttcctgcagcgcctatcctacctcaatgtcggcatttacccattcacctccctcttcctcatcatgtactgcctcctgccggcgctgtccctcttctccggccagttcatcgtagcgacgctggacccaacatttctgtgctacctcctgctcatcaccatcacgctcatgctgctgtgcctgctggaggtgaagtggtccggtatcgggctggaggagtggtggcgcaacgagcagttctgggtgatcggcggcacgtcggcccacctggcggccgtgctccagggcttgctgaaggtgatcgcgggcatcgagatctccttcacgctgacggccaaggctgctgcggaggacgacgatgaccccttcgcggagctgtacctggtgaagtggacgtcgctcttcatcccaccgttggcagtgatcggtatcaacatcattgcgctcgtagtcggtgtgtcccgcgccgtgtacgcggagatcccgcagtacagcaagcttctgggcggcgggttcttcagcttctgggtgctggcgcactactacccgttcgccaaggggctcatgggtcgccgcggacgcacgccgaccctcgtctacgtctgggcgggacttatctccatcaccgtctccctgctttggatcaccatcagcccgcccgacgacaggatcacccagggcggcgtcgatgtgtgatcatccaagcttcaccaacgagagattaccaaacaaagaatagctgaaattttctggacgatttgcctagtttttgtactgaacactatgtctacttacgcgtactaattaattactgaccaatagtgtctattaatcaaggaggttagcttggcaagagtccattctgtacctgtaaaggcctagaaaacagatagattgatggacactaccgtacaagaactactactcaatataagcaaccaatactgattagaactggctaatgtaccagattttcatccggtattctgtatccgagactaaatcctgcaaatttagtatggtttgcaaagactggtactaaagcatatactttaagaccggttcctggaaaaaaaaaaaaaaaaaatttgcggcc

SEQ ID NO: 122856 - DNA, 1451 bp, Zea mays
  Clone ID: MRT4577_43527C.1
agctcggaatccggccgggccccttgcacgacgtctccatcactacaccacaagtccacaagtccacaacaccaccaggcaccagcctcgtcacagccgcttcagcataccacaccgcacgcaaacccaccgcgcgctacgaccaccaccgtcaccatggccgccgcgcgctacgacgtggagaagggcgggaggaataacggggatgggaagccttcgccgccgccgccgggccacctgtacccgcagcgcgacggggagagggagtgggtgccgtggttggtgccgctcgtcgtggccgtcaacatcgtgctcttcgccgtggcgatgtacgtcaacaactgcccggcccacgccgcctcgtctcgccgcggtggcgccggatcatgcgtcgcccgcgggttcctccaccgcttctcgttccagccgctcagcgagaacccgctcctcgggccctcgtcggccacgctgcagaagctgggagcgcttgtatgggacaaagttgtgcgggagcaccaggggtggaggctcgtcacctgcatctggctgcacgccggtgttgcccaccttctggccaacatgatcagcctcgtgctcatcggactcagactggagcaacagtttggatacgtgagagttggcatcatctaccttgtctctggcgtcggaggcagcgtgctttcgtctctgttcatccggaacaacatctctgtcggcgcttccggagctctgttcgggctccttggggccatgctgtcggagctcttcaccaactggaccatctacgcaaacaaggctgcagccctggtgaccctgctggtcgtcatcgccatcaacctcgccatcggcatcctcccgcacgtcgacaacttcgcgcacatcggagggttcctcaccggcttcctcctcgggttcgtcttcctgatgcgcccgcactacggctggatgcagcgctacgccctgccctccgacgtcaagtacaccaccaagaagtacctggtctaccagtgggctctgctggccgtggcctcggtcctcgctgtcatcgggttcgccattgggctggggatgcttttcagaggagtgaacgcgaatgatcactgcggctggtgccactacctcagctgcgttccgacctccagatggagctgtgggaagtgaagatcggcgtgctgacaaaatggactgaagccaggagagagcccatggccgcccatggggccttttcgagcaagcatttccatgaatagatagatatatagctcgcacagtcttactgtacataatgtcaccaggatgtggtttatatatgacattattttgttatactgattgatcgatgattcattctatttattcagcgagtgaaaattgaaatgccttcaatctttcacctgcaaaaaaaaaaaaaaaaaaaaaaaaaaaaagtactctgcgttgttaccactgct

SEQ ID NO: 122857 - DNA, 319 bp, Zea mays
  Clone ID: MRT4577_43528C.1
ctgtttttctgctgtgactcgcgtgctacggaacgctggaggcgatacactacctacgagcatgtggatggctgccttgcagccggatccatcatgagcgcgcagcattattgttgcttcgacagtgcatcaatctcatcttaggctgatttggacctgcaatactttccatatgtactgatgtttatcatagctaccgcactataatcaaggctccgattcagcggtcatttatactttaacttggctatttgacatttatacatcaattcttagagtttgggcgcccgttctaaaagatccaagattgggcgcgcgt

SEQ ID NO: 122858 - DNA, 527 bp, Zea mays
  Clone ID: MRT4577_43529C.1
gaacatgtgttttgggcagcggctatgatggtagtgctcgccgtggtggcgctggcgctagccgcagcgccgcgcgcggaggctgggcagaactgcatctgtgagtgcatgaagctgtgcgtgcggacgcggatcccgagcatgggccagtgcgcgggcaagtgccgggagatggcctgcaccaagagctgcgaggatgcctgcacgcgcaagggcttccccgggctgcccagcgagggcatccccacctgcgagctggagccgctcacccccgacgaaacgcacatgttgcactgaacgatgatgcacttatggggccatgtccaccggagcttttactgtttgcgtgtcgcgccggtcggcccagcggcggcggtctatgctcccgatgtgcatgaaaaattcccgctgttttctttggtgtttggtatgtacgttattatgtacgctgcctcttctcaaagcatagtatgcatagttctgttttctggcaaaaaaaaaaaaaaaagggcgaaccggacgcgtgg

SEQ ID NO: 122859 - DNA, 158 bp, Zea mays
  Clone ID: MRT4577_4352C.1
atttttattttgcaaacaattaagaccagggggggcttttccaagactgacgacacacctaccctggcccggcagcttgagtgcgagggcgtgcgcgacaagcatgcccacgcgggcacctgcttcacgacggaggagctcaacgacagcctagagag

SEQ ID NO: 122860 - DNA, 297 bp, Zea mays
  Clone ID: MRT4577_43530C.1
gccgcgccgactgtggagttcccacatccggcttgccaccatgcgtggagggagggagaactattcggcgaggtggaacgggcccaggcgttgaatgctgcacaagcttggcggaccatttgatccacaacacgatattgtggaccttgcaaatgtagggagtgcctgccaatgacgctcctgatcgggaacagaccagattaagttcttacattccgtgcggtcttttgacttgtgaggcatcgccttgctacttgttggtggcaaggtcaggagagacacgacctaccgtgatgg

SEQ ID NO: 122861 - DNA, 283 bp, Zea mays
  unsure (1)..(283): unsure at all n locations
  Clone ID: MRT4577_43531C.1
ggggtggggtttttttttttttcttttttgggggaccagaagcagacaacttgggccccccaaanncctacaggattttggccccatcctttcatccaacaaagaagggcaagtttgattttcccccgggggcctttcattcaggggtggtttggaaccctctttttcccaagaaaaattagcttattttcccttgggaaaatggagaaaccttgggtttccaaactagcccctaagggccttaagacccgggaagggagggggcttctatgccccaaatttg

SEQ ID NO: 122862 - DNA, 3109 bp, Zea mays
  Clone ID: MRT4577_43532C.1
gaacgtcctgactaacaaatccaacacggcgtgctctctcgccattaaaggcacggtctttctctctccttcgctcctttctgtttctctctccagagtggagtggttggtgctctcagtcccaggacccagggtggccgtggcctctgccaatagggccgggccggggctccaccgcacaccgggagggagagatggtgggaacgagcccagggggaggagtgttctgtttctcctccatggtctcctctcctcggctcctcttcctgctcctcgccggcgcctcgctatgctgtgtggcggcgcagaagacggacacgctgcggcagggggagtcgctgtccggggcggcgacgctggtgtcctcgccggagggggtgttcgaggcgggcttcttcgcgccggaccccaagcagccttctcgccagtacctcggcatctggtaccacagcatctcgccgcggaccgtcgtctgggtcgccaaccgcgtcgcgccggccacctcggcctcgccgtcgctcacgctcaccgtcaccggcgagctccgcgtcctcgacggcacggcggccaacggcaccgccgacgcgccgctgctctggtcctccaacaccacctcgcgcgcgggcccgcggggcggctactcggcggtgctccaggacactggcagcctcgaggtgcgcagcgaggatggggtgctctgggacagcttctggcacccgacggacaccatcctgtccgggatgcgcatcaccttgcaggcgccagggaggggccctaaggagcggatgctgttcacgtcctgggccagcgagacggacccttcgccggggcgatacgcgctcggcctcgacccgggcaactccggtcaggcctacatctggaaagatggcaacgttacgtactggaggtcgggacagtggaatggggtgaattttataggcattccatggaggccactctacaggagtgggttcacaccggcaattgatccagtgcttggaaattattacacatacactgcaacaaacacttctttgcagaggtttgttgttttgccaaatggcacagacatctgctacatggttagaaaatcttcacaagattgggagcttgtctggtaccaaccatcaaatgagtgtgaatactatgctacatgtggtccaaatgcaaaatgcactgcatcgcaagatggcaaggcaaaatgcacctgcctaaaaggttttcatccgaagttgcaggagcagtggaatgcaggaaattggagtcaaggttgcatcaggagcccacctctgggttgtgagaccaatcagtctggggatggatttcttccaatgggaaacataaagtggcctgatttctcatattgggtatctacagtgggagatgagcctggatgcagaactgtctgccttaacaactgctcatgcggtgcttatgtttacacagctacaacagggtgcctagcctggggtaacgaactaattgacatgcatgagttgcaaacaggggcatatactctaaacctgaagcttcctgcttctgaattgcgaggacatcacccaatttggaaaatagccacgataatatcagccatagtgttatttgttttggctgcttgccttcttctgtggtggaagcatggtagaaatattaaagatgcagtgcacggaagttggagatcaaggcattcgtctacccaatcccagcagaatagtgctatgctggacatctcgcagtcaattcgttttgatgatgatgtggaggatggaaaaagtcatgaactcaaagtgtactcgctggaccgtataagaactgctacaagtaattttagtgactctaacaagcttggagaaggaggatttggtcctgtctatatgggaactttacctgggggagaagaagtagctgtgaagaggctttgtaggaattcaggtcaaggccttgaagaattcaagaatgaggtcatacttattgcaaagttgcagcaccgcaatcttgtaagactactagggtgctgcatacagagggaagagaagatcctggtgtatgagtacatgcctaacaaaagtctagatgcattcctctttaatcctgaaaagcaacggcttctagactggaagaaacggtttgatataatcgaaggcattgctagagggctgctatatctccaccgggattcgaggctgcgagttgttcaccgtgatctcaaggccagcaacattctcctggacgcggacatgaaacccaagatatcagattttggaatggcaaggatgtttggaggggaccaaaaccaattcaacacgaatcgggtcgtcggtacatttggctacatgtctcctgaatacgcaatggaaggcattttttcagtcaagtctgacgtctatggcttcggagtcctgatcttggagatcatcacaggaaagagggctgtgagcttccactgtcacgaggactccttgaacatcgctggatatgcgtggcggcaatggaacgaagacaatgctgcggagctgatcgatccagtgataagagcatcgtgctcagttcggcaggtgctgagatgcatccatattgcgttgctgtgcgtgcaagatcacgcagatgagcgacctgacatccccactgtcatccttatgctgagcaacgacagctcgagccttcctaatccgaggccgcctacgctgatgcttcgaggccgtgagatcgaatccagcaagtcaagcgagaaggaccggagccactccattggcactgtgacaatgacacagttgcatggaagatgaagtataacacgaaaaatatactgaatttgtgatatatttggttttttttgttctcccttcctgatgttgataatttgccatttgtcgcggattagtttcctctttttctccttttcatgacggcgaccgcgaagttgtatgaaaatcacattagcgtcatacattaagtgacaattaattttgcaaaggtgagatatttaccaaaaaaaaaaaaaaaaaaataggtgttgttcggttatttcaattccatatggattgaaagtgtattaggatgtattttgatttgctatggatttaaaccgtctcaataaattatctcaaaa

SEQ ID NO: 122863 - DNA, 774 bp, Zea mays
  unsure (1)..(774): unsure at all n locations
  Clone ID: MRT4577_43533C.1
gcgggtagaggaattggcaattagtcaggatccctaacacaggaagacatggagtgctatgtatatttctgttgacaccttaattattttccataaataaatattagctgtagcctgacttcgaaatttcatttatttcaataggttttcatccgaagttgcaggagcagtggaatgcaggaaattggagtcaaggttgcatcaggagcccacctctgggttgtgagaccaatcagtctggggatggatttcttccaatgggaaacataaagtggcctgatttctcatattgggtatctacagtgggagatgagcctggatgcagaactgtctgccttaacaactgctcatgcggtgcttatgtttacacagctacaacagggtgcctagcctggggtaacgaactaattgacatgcatgagttgcaaacaggggcatatactctaaacctgaagcttcctgcttctgaattgcgaggacatcacccaatttggaaaatagccacgataatatcagccatagtgttatttgttttggctgcttgccttcttctgtggtggaagcatggtagaaatattanagatgcagtgcacggaagttggagatcaaggcattcgtctacccaatcccagcagaatagtgctatgctggacatctcgcagtcaattcgttttgatgatgatgtggaggatggaaaaagtcatgaaactcaagtgtactcgctggaccgtataagaactgctacaagtaattttagtgactctaacagcttgg

SEQ ID NO: 122864 - DNA, 693 bp, Zea mays
  unsure (1)..(693): unsure at all n locations
  Clone ID: MRT4577_43534C.1
cggctatatgggaactttacctgggggcagaagaagtagctgtgaagaggctttgtaggaattcaggtcaaggccttgaagaattcaagaatgaggtcatacttattgcaaagttgcagcaccgcaatcttgtaagactactagggtgctgcatacagagggaagagaagatcctggtgtatgagtacatgcctaacaaaagtctagatgcattcctctttagtatgtgtccttcactttccgcgcttctcatttctcaatatgaacggacaaatatgctgattggattctgatcacagtggttgaacagatcctgaaaagcaacggcttctggactggaagaaacggtttgatataatcgaaggcattgctagagggctgctatatctccaccgggattcgaggctgcgagttgttcaccgtgatctcaaggccagcaacattctcctggacgcagatatgaaacccaagatatcagattttggaatggcaaggatgtttggaggggaccaaaaccaattcaacacgaatcgggtcgtcggtacatttggctacatgtctcctgaatacgcaatggaaggcattttttcagtcaagtctgacgtctatggcttcggngtcctgatcttggagatcatcacaggaaagagggctgtgagcttncactgtcacgaggactccttgaacatcgct

SEQ ID NO: 122865 - DNA, 419 bp, Zea mays
  Clone ID: MRT4577_43535C.1
agcacattcaaattgaccaattgctactagtgctataactttattccgaatggataacttcctttcgaaaagactaaactgaataattatgtcaaagttgtttcactagtttggcctaataggtattgatctatggtatctagactgcaggttgtactatagggttgattgttctgattttgggcttggttaatctaacatttctagcatccaaacatatagatatatgtcagctacctgtgtaccctgcacgaataatcctataaatccaggttgaatattttctgcatgtaacctaaaacttctacgctatggtctttcacttacaggttgtcaaagaagagcacatgtgctaatttggttgggctaaaattatatagaaaagagtgttgccttgggctacgagtctaaaactatat

SEQ ID NO: 122866 - DNA, 330 bp, Zea mays
  unsure (1)..(330): unsure at all n locations
  Clone ID: MRT4577_43536C.1
cgctcgagaccactgccctttatcatcctccccccggcatggccatttatcgggcggcctccacaaccaacaaccgattttggtcaagccgggctccaatngcgccctttcaaagccctgttttaaggcgaatttggccagaacagtctcttcgaaaaaaggaagcaaaaggatcaagctcccacccgtgggctttcatagcagacaaacgctgcattacataggaggagcaactttcatggcgcaccagatctctcccaccgggtcttgatagcagcaccaacgcatcgcgtactccaagcagctctccacgccaatgaggcaacaaca

SEQ ID NO: 122867 - DNA, 490 bp, Zea mays
  Clone ID: MRT4577_43537C.1
tgtcccagtcgttcggtggaactctttcttctctgacaccaacgcctgggcggacaagcgccctagcggtgacaatgctctaatagcccatacgcctgagatggatgccgactcttcttgtggctgcgcctccttcttctctgaggcactagcgcctaccaggagaaacatggaagccttaaacgcttatacactgctcgctactggttgaaccgcatgaccgaaaccaaaaacgtattgatggacagagcgggacacctggacccactccgagaactgcccttgccagaagatccacgacaacgaggatgcagtgactgtctactctaaacacatgaacagcaacccgaagatgaatgatatcttatcaagcgtgttctgagtgctccaacgaatctgacaagaacgtgctcaggtaggaaaacagccatgccaagccaccaaagatcatgaatgagtgaaagctctgcgctaagctatatcaagctat

SEQ ID NO: 122868 - DNA, 2041 bp, Zea mays
  Clone ID: MRT4577_43538C.1
cggacgcgtgggcggacgcgtgggcggacgcgtgggtctgatttccctaaaataattttgtttgactattcaaatcatgcttggagaggatcatggcgtgggatcagaaagagcaccaacaattttctacatgttgtacaatggggttatgattacttgaattttgtcatttgttttagtaattatgtgatctgcaattgatctagcacaagcacattcaaattgaccaatttctactagtgctataactttattccgaatggatggcttccttccggaaagactaaactgaataattatgtcaaagttgtttcactagtttggcctcataggtgtccgcctatgggtccgcgactacgtccggtactatatggttgattgttctgatttcgggcttggttaatctgacgtttctagcatccaaacatatagatatatgtcagctacctgtgtaccatgcacgaataatcctataaattcaggttgaatattttctgcatgtaacctaaaacttctacgctatggtctttcacttacaggttgttaaagaagagcagatgtgctattttggttggcctaaaatcaggggtggaccaacagggggtccaggggggccacggcacaccctaggccagcccagcaaggaccccacccctttgtcgcccagccgctagcacgtagctaccacgactagtgcccaggtcaccaccgccatgcctagcgccaagccaccactcacccgcacccaacaccaagtcgccgcaatcctagtgcccattgtacatgtgaacatataaagctaccatgatcatggaggtagcaggtgcagagacacccatcaaggtttcttcgtctctagtcatttgttacgcaaattcaaatacaggtaaaagtagcattgtataaggtgcagattgatttgtacagatgaggttgcttctgaaaattgacaggaaaattccttggtatacttgtatgcaggcttttggaaagttgaggcctatttgtgcacaatagtatactaaccattgaagattattactctcatctattgcaggtacattattctgaaactcagttcatgaaatggaatgagttcagtttcaatatagcagaatagcatgctagcagcaaacatgcacgtgcccagacttcattcaggtgacatctttcattgtctcttctcaatcatttatagtgtcatttcgagttttcatggcttgtattgtgctatgagtttttagtgcttcatggtgggcttagttgcatgaagggttctcagctttgagattaattaccaatgcaccttttgagagctcaaaagatggtcttcgcattgagctataacatgtggtggtgacatggcacaacaagaacttgaagaagtagacatgttgctgctgcctgcagggtgacgtctatggtgttgtgctgcgggcaaggcccacacaatgtgatcgggctgcacgccaatgttcaacatgtgccccaaccagaatgtgtatgctactactaatataacattcgtcattggttggttcaccccaagaggtttgctgcatgttcatggagctggtggataataaattttagttgttctttttgtggtttattagatgacatcaattagtgttcaattgagccttagagtaggatgaatacaactgtcttaagtttctttgttccagcagattgtttgggggcaaggttacctatgaacttcaagaattggtcttatgatattgttagtttgtacaacttagtgttaggttgctcgacttcttcatgaatgaggtgttagacattggtcgatcatgcagggttgaaggtgcttcatataactaaatctaccatgactttctaggtaagatgttacatccatatgacctttgtgatatgtcataatgtgaggtgttcaactgtgtctaactactaattattgcctttttctatttgttgtataggaaaagatggaatggaactcaatttttggtggccgcacaagtgtggaaacttgaattcatatatacttacaatcaac

SEQ ID NO: 122869 - DNA, 1253 bp, Zea mays
  Clone ID: MRT4577_43539C.1
ctcgggggctatgataactcggacaatatcatctgcaactatgaataataccgatcctgtactctggcctagcacactcgcaggcgatccgaaccttcgctacgagggctctgacgctcttaagctgacatggctaaacacgaacttgaagaagtagacatgttgttgttgcctgcatggtgacgtctatggtggtgtgctgtgagcaacgcccactaaacttgatcgggctgcacgccaatgattgttatgtgtcagcaccagaacatggtaacaggtttttcgtataactatatagatatatgtcagtttccgaaatgccctgctcgaattatactataaatgcaggttgaatattttctgcatgtgattcctaaaacttttacgctctggtctttcacttacaggttgtcaaagaagagcagatgtgctattttggttggcctaaaattatatagaaaagagtgttgctttggtctacgagtctaaaactatattactgctatatggatgagcttcttactgctaattaaattacagtaacatgtggcggtgacatggcacaacaagaacttgaagaagtagacatgttgctgttgcctgcagggtgacgtctatggtggtgtgctgtgagcaacgcccacacaatgtgatcgggctgcacgccaatgttcaacatgtgccccaaccagaatgtgtatgctactactaatataacattcgtcattggttggttcaccccaagaggtttgctgcatgttcatggagctggtggataagaagttttcgttgttctttttgtggtttattagatgacatcaattagtgttgaattgagccttagagtaggatgaatacaactgtcttaagtttctttgttccagcagattgtttgggggcaaggttacctatgaacttcaggaatcggtcttatgatattgttagtttgtacaacttagtgttaggttgctcgacttcttcatgaatgaggtgttagacattggtcgatcatgcaggattggaggtgcttcatataactaaatctaccatggctttctaggcaaagatggaatggaactcaatttttggtggccgcacgagtgtggaaacttgaattcatatatacttacactcaacattagcgcaaacagttgatgaccaagtttttcaattagtattttagtttggatttagtgtacaataatgtatgagttatttaacaatacttatttatgacatattgaatgattcgt

SEQ ID NO: 122870 - DNA, 631 bp, Zea mays
  Clone ID: MRT4577_4353C.1
ttttgtttttttttttttttttttagaaaaacatcatctaatgacaagtgtagcaagcggcaaaccggactgtacatccaatgcattcagaaacgagacaataaatcacgttaaaagaattgtagcataacctctatagatctgctattggtgattgaccggtgatagtcaggatgtacaatattactgctcttcaaacaaacgaagaccagaacatacactgatggccttcggactgtgctgccctctaacttgctatacgcacaaatccgttcaaaacaaaggctaagtccaatggtaggtttaagctgagacctaccgcacttgctgattctatcttaactgtcgatgaaacagcgtaacaactacaatcatgccgccaatgtacaagatctactgcctaccatgtaccctctgatttgttagttaacgggcctagagcatggagactaaaggtatcctactgatccagccccaatgcaattgtgcactgcagactcattctattttgtctgtctaaggggcaggttaagagccctaactccgaggatccatccactacgtgccccaagcatctgtcatactaacgtcaacgccagaagcaagccagtaatcagcatcagcgtcggca

SEQ ID NO: 122871 - DNA, 326 bp, Zea mays
  unsure (1)..(326): unsure at all n locations
  Clone ID: MRT4577_43540C.1
gttccccttagacggagccgcatcggggcgccgccgcctagtccttgctcgggtcgcccggctccgctgccggccgccgccgcataccccgctgctgctcgttcctagcggctccccgccaatgccggacgggaacgcgaggtggccactggcttctcaccggtatcgcgccaagacgagggggggggggaatnccncctaaaaacctgtgacgtggaccaaaagcgagggcggcggcccaccccgcaaagaggctggcccctttgagtgcagcaacagcctgtacctggcacaggacccacggatgaccctatgggggcgactat

SEQ ID NO: 122872 - DNA, 235 bp, Zea mays
  unsure (1)..(235): unsure at all n locations
  Clone ID: MRT4577_43541C.1
cggtccggccatcccgggtgcgnaccagcgtccgttaaacccggcgcctgtgtcgtgtggagggagcgactagactcgccaaaaaagacctgacagtccgacacccgcaagccacagaatgcagtctgggtgctacaggaatgctggagaaagtctgaccttgtccggaaagcgcaacctgcgcagtgaccgagacagccaccgtaagcacggggggggggggggggttaaagag

SEQ ID NO: 122873 - DNA, 536 bp, Zea mays
  Clone ID: MRT4577_43542C.1
ggggaaaagggggggcccccgggccgggcccccttgatttttcagatcagacagaaacgaaattccaaccccggccccgaggaccggccccctcataatttacggggccggggggccttcctttgacccaaagcccccgggtttttaaaaactaccctgggggcggtggtgttaaacccccgatgcctcacccccctgccgggacccaaaaaaaatggggcccatggccggggtcaggtacaaaaacccatccccatccccatcccccgccttgtaaaaccccatattaacccatgcaaggttggacgttttttcccctccgggcgggccaccggcgaaaccgaaaaaccccttaaggccggggggtccaaacccattgcccccgaattgccggggttgtaagccacaaaaaccacctgggcgggggcaaaagcaactgccccccaattggttgggtccccacccccaaggttgcccgccggggggtggacctggaaaaccccacgctggggggacaacttccccttggtcccccc

SEQ ID NO: 122874 - DNA, 576 bp, Zea mays
  unsure (1)..(576): unsure at all n locations
  Clone ID: MRT4577_43543C.1
ttgttttttttttttttttttttttttttttttttttttttttttttttttttttttaaaaacagaaacacaataacaatcacttcgtcatggattccatgagggggtggatgtttttaaaagatttgccctcaggccccatgctcctttttgccaattccttaaattttttcaccctttccttcacaccactggcacccattaggctcgaaaacctctccatgatccttttcttggggaaaaggccatcaccaccggggggccccacccttaaccccaccttccaaatatcacaaatgtatgcctggttcgggaacgggccgctaaaggagggccagcaaagcaaaggccccccatgggggaccccctccagggtggagttccacccgcaatgcgtaaggaagcacccgacaggggggggcgcgagcattttttcctggggggcccactccaccactttgccccttggatgggggggcaggaaatccgggaacgcgggggggagctcgnccgccagccctggccggaacacccacagaaaggggcggggggaggccaacagggccagggcgagct

SEQ ID NO: 122875 - DNA, 399 bp, Zea mays
  unsure (1)..(399): unsure at all n locations
  Clone ID: MRT4577_43544C.1
aaacaaaaagacgggcaaaggccccacggcaggcccaaggcatctcaaaccccagagggaaggggggggaaaggggggactaaaactnggaacctaaaaatggaccggggaaggcccagggaacagaaaaacattcttccccgaaaacaggttcaggggcaaaaccaaaaagggggggattaagccaggaacgccgaacatttaaacccagggggaacctaggggaccaggggggggctgccgccccgtactaaggccgacccgctttgcacatgggagaaacctcaggaacaagaggggcgtctgggtggggaacaaaaagcagggagcaaaaaaaaggaaaaaccttaaaaattggaaaaggggggcacccgcgggcccctaaaaagggcagagaaa

SEQ ID NO: 122876 - DNA, 212 bp, Zea mays
  Clone ID: MRT4577_43545C.1
tcgtattcggacggagaaactgagccttctctcgagctgctggttctctgcaacaccatgcatgacatcttgcctgagttgaaggccattatccaagacctgcttgtggctctaagaaaaggggctggtgcaaccgtccaagccaagatgcaggcttaacgttccttggcggataaagctaagcggtcttacaagaattcaagcagttcgat

SEQ ID NO: 122877 - DNA, 472 bp, Zea mays
  Clone ID: MRT4577_43546C.1
cctgtcctcgcactacgggcgatgccgctgtccttcccgttgacctgctccgcgctgcgaatgctgagtgcacgcaacagcacgacctgagatgatactacctgttgtctcgtctcacccctgcatgaccctcacaagaatcacaatgcctaagtgacacacaaccaaaactactcgaagaagataacttgatgtgaacgactacttaggaatcccctcacacacacagatctgaaatgatcaagaatgcatgataccacgctatgctcatcagtgtcagctctgtacgcagactagagagagacctatgctatctgtcataaaatgatagcttccacagcaactatatatgccgccaatgatcaggactggatgggtagaatagaggtatatatgagactgacaccttgacgtatgacgcccgttgatgtgacctagcaatatctgatatgactctgaacttaagatgaag

SEQ ID NO: 122878 - DNA, 274 bp, Zea mays
  Clone ID: MRT4577_43547C.1
cggacgcttgggcggactcgttggcaaaggacctgagtgcgctgtggactggcgcaccgggctgttctgtgtgccaccggacagtgttcggtgcaccatgcccgtgcaaatccgaagcagccactctagggaattcaacgacgccctccgctataattcaccggactgtccggtgtgccagcggatcatcggctaactcgtgccaacgggcgactctgacggctgaacagtgttacgacagaagtcatagcagaaagtcacagggcaccggact

SEQ ID NO: 122879 - DNA, 232 bp, Zea mays
  Clone ID: MRT4577_43548C.1
cccacgcgtccgcaaggactcgcgacggtttgagcaacggaggaagcaactacgcggcagccatggtgaacgtttcgaagaccaagaagacctactgtgagaacaaggaatgcacgaagcacacattgtacaaggatacccagtacaagaaaggtgaggatagcctttcagctcaagggaagcgacgttatgaccggacacagcttggatatggtggtcagacatagactgt

SEQ ID NO: 122880 - DNA, 472 bp, Zea mays
  unsure (1)..(472): unsure at all n locations
  Clone ID: MRT4577_43549C.1
gactacttatagaatcgcactcgagcagtctccaggatccaactctacggacgcatgcatgcgacggaataattcatttatagcgtcatctaaataaaatgcactggccgtcacgcacacaacgatctggcgggtatatccctgacgaatcccaatttaatcgtcttgcataacactctctgtatggccaggtcggcgtaacangcgaagagagacaaaaccgatgcggccttcccaacaagatgcgcatgcctgaatggcnaaactggacncaccctcgtagcaggtgcattcaggcgcagaaagatgtagtaggttacggcccagcgttgtccgatgcacttaggcatgacccactaccggcatgctcatttcagtttttctttcctatactgtcatcgtcacgttaagtcgactggtccccgtcaagacactcaaatcggactctgaattacagggttgcgatcccagc

SEQ ID NO: 122881 - DNA, 609 bp, Zea mays
  Clone ID: MRT4577_4354C.1
ataataattactctatttcgctacaacgacaaagataaggagcatcaaattccccttaaaatccaacttagatatccagcttgagtaataatcacccagctgatgattagtgccacttagatctccatttgtacgtacatataacaagacaacttgcattattgcgaatataataatccaactgaaatcgatcgatcggaagctaatttttcttcaatgcagcattcagagcattcacaagttcaattgcggtggagaatccgtcttcaatccgcgccgttatggtgatgtttaacgaggacccggcgagcggcaagacgtttgtgttgacgacggagaggccgtgcttctccagctccttgagcaccgtgatgagcgcccccttcttctcccggcacaccaccctcagcagaacggtcgtcccccggacgtccgcttcgaccatggggatcacaccgccgccgtcgtccggcgagccgacgcagcaccgggcgtccaacggcggggacgactccgccgcgctgcccgtgctgctgctgctctggcggcgctcctcctgcagggccttgagcctgcccctgaggtgctgcacgtactcaatagtgctcc

SEQ ID NO: 122882 - DNA, 1372 bp, Zea mays
  unsure (1)..(1372): unsure at all n locations
  Clone ID: MRT4577_43550C.1
ggtaccctcgaggccggccggggtctcctctcctgcacccagactcctctctctctctctctctctctcccctctgtgtgcggtgtgccctggcctcctccgccgccattgcagcgagcaagatcaatccctctgctgccattcatgagtcaagctggggcattccctcctgggaagaagatcacggtggtgtttgtcataggcggcccaggcagtggcaagggcacccagtgctccaagattgtcagacactttggattcacccacctgagcgctggcgacctcctgcgccaacaagttcagtcagatactgaacacgggtgacacctgatcgctcgccattttccgatatgttgtaggcgccagcttgccatatatccttctgacatgcccatatatctcgtcagtgccatgatcaagaacctgatgcacgaagggaagctcgtgccgtccgacatcatcgtcaggctcctgctcacggccatgctccagagcggaaacgacaggttcctcgtcgacggattccctcgaaacgaggagaaccgccgagcgtacgagagcattattggcattgagcctgagttggtgctgttcatcgactgcccaagggaggagctggagcggcgcatcctgcaccgcgatcagggaagagacgacgacaacgtcgacactataaggaagcggtttcaggttttccacgactccactctacctgttgttctgtactacgacagaatggggaaggtccgacgggtcgatggcgccaaatccgctgatgcagtctttgacgatgtgaaggctatatttactcagctactgaccactcaggtccactcactcactcacatttgccttcctttttttttccaattgattgttctctcctgataaagccttgaaaaaacatcggcgctcgtccgtctatcctctttttgtttcactatgtatataggcaagccaaggtggcaatgcgagcagcaggcggagcaatccgccgctttgttcagtgctctaggatgaagcaacatacctccagctccaaataaaaaaaagaggatttcagaaaacacacacttgctgtgcgtatgtggtgtgttcgtgctgtgctgtgctgtgctgtgcagatttaatggcttgataaaaagaaacagagaataatggccctccccagctgcagctggtatggttgttcgctcagtggcagcactagaggctgcgagcctgctgcaaacacacagcttgtatttctaattgtaaaatgtagcgaaatggatgaatgtgatgtgtgcaactcattcagtttgcttaaaaaagaaaaaaagaanaaaaaaaaanaaaaaaagcggccccctcgagctcccagnctgttgtt

SEQ ID NO: 122883 - DNA, 221 bp, Zea mays
  unsure (1)..(221): unsure at all n locations
  Clone ID: MRT4577_43551C.1
gtcgagtgctcgtttgccccaatgtcagatgacgacagccctacatcatcctcggcagtcgagtagccgtgctggaggcggggaccagccagaccgggagcaaaccgtcccttgtccccgtctcctccctgttcgcgttcctcactggctcaccccactcacactcaccaaggtctacggctcatcggcangcgagctctccttctgcttccctggcggag

SEQ ID NO: 122884 - DNA, 571 bp, Zea mays
  Clone ID: MRT4577_43552C.1
cctcgaggccggccgggtacacaattctgaaactgtcacctcttgacatcgtgatcgccaccgcctacggctaaaccaccttccttaccgtccgtccatggcatgcaacagcaccttctagacctgcccctgtggcagaagagcaaccaccaacacgatgtccatcgtgtacgacactaagctgcagaaacgcaacgacaccaccaaccgtcccgttccgaagcgggagccaagtttctagaaggacaccgcattcccgatcaagatgaagtaaacgcacgacgcgaccatcacttcggtgcggccctccaaatgctccctcctcacttactgcgaattacgaccctacttcagagtccgcaagacaccgcccgccgagacactcagctccgagctctgcttctccagacccataccttgttccacgcacttgtgtccgcccctcaagaacagattgtggaagataccgatggccacttccctcaccggtctattcctcaggtccaccaaagtgaccttaaatacgcttcttgggtccgaaacatttatcgcctacgagtctctcatgttg

SEQ ID NO: 122885 - DNA, 278 bp, Zea mays
  Clone ID: MRT4577_43553C.1
ttttatgtatgaacactatgggggaacagaggtagctcttactacagagagttgcttgacagcggaaagcctggaggcactgcgtggaaacaaagtgggcttggatggtcctatggctacgcttacgggaaagggtgatcgagcgccgaatcttgcaggaagggaagaaccgcgcctgtatgctaatgtctggcagtgcaagaaccttggaggctacaagaccaggtccgatgatgtgaactgtgtcacattgcgggtggatagcgaaagaccagatc

SEQ ID NO: 122886 - DNA, 200 bp, Zea mays
  Clone ID: MRT4577_43554C.1
gacgttctacatctattcacaaactcgattttggatccacacaaaatcttcaaacctaggcacattgtaaaccttctcgagaccttctctcctacaccaaaccactttttctacccatctgttcaaaaaccacatctccaatatttcttttaatactgaatgtatccatatccattccatcattatcggaattatatata

SEQ ID NO: 122887 - DNA, 112 bp, Zea mays
  Clone ID: MRT4577_43555C.1
gctgttgttttcctaaccaaataaccaagtactactggcgtgaggggtccttatgaacacatggaggggcaacggaagctgatgcagtggagaaccgatggctaaactgatg

SEQ ID NO: 122888 - DNA, 706 bp, Zea mays
  Clone ID: MRT4577_43556C.1
gacccccgaggctggccgggctgccttcccggccccctccacttcctctgtccttcgccctcctgtcctttcaaaccccacggcggtgcagagcgcatcgccgagcccccgcccacccgacagcctcacctcgaattcttctccagcagttcgttgccctcctccttccccttccctcctcgacaggtacccggcggcttggatctatgcggacccggcatctgtattttacctcattggggatggaggtgcaggtgctggatttgtcttccgattccgagggcgaggtgtcggcgcactcgcccgatcacaagcgcccctctcagcagccgggtgtagaccccaatcgccgggttggcgacaatggttccagcgccgtggacagcctcttcgaggaagcgggcgcggcgaggccaccgcgtcaccccagcgacgcgctgaacaaagggaaggagaaggtcgtcgatgtggagagcgtggagtctccaaagcacggtggggaatcgctcggtgctgctggccgcgtcctgggagctgggagtgatccgtggagcgcactggtgagcaagtgcaaggctgggggcagtgggaataatggaactgagtgttgggatagttggggtgactggggtgatcagcttactaactcggcccccgtggcgcgtctagggtcagagaggacggggtttcatgagacatatgaact

SEQ ID NO: 122889 - DNA, 395 bp, Zea mays
  Clone ID: MRT4577_43557C.1
gcagaattgcagtacggccccacaccaagccgtatcgtcttctccctcttgtccggttcgggtggtccgcggtcggggtgagtgagtgagcagctttgcttctccatactccccgttcccttccctccccagccacccggcccggcggcgggacgtgaccctgacgtggtagagctagctagatcgtcgcaacgcaaggtggcgaggtgttaccctgcagagcacagcagcatcggaacggctaaggcaggagaccgggagaaaatatgtcgccatcatcagttgtgctagcgagaacgcaggagcagggactccatggcgccccctcccctggccgagttcgaacaaccggtcttcttccccaacgccggtacccagtcaagctccggctgtgg

SEQ ID NO: 122890 - DNA, 375 bp, Zea mays
  Clone ID: MRT4577_43558C.1
gagctcactagtcggtggccgcccttttttttttttttttttgttttatttctttttatttttttggtttctttttttttgttattattttttggtttctttcaaagcccgtggccgggaactggtttaattaagttaaggggggggaccggaccctcacgggggctttacagtttttttggggggggggagtcctttttctaggaattcacacaagacaggggccctgaattacaactagacaagggggatcgggataccccaaaaatttccggcttgggggcttgagcttacctcacagctggaagtgctggacatataaaagtgcatccagccctgttgggggggcaaaatgggttattgaaacccccaaaa

SEQ ID NO: 122891 - DNA, 772 bp, Zea mays
  Clone ID: MRT4577_43559C.1
aggcaggagttcatgcagtagggcgcgagtcgcgagctcactggtgagcatcgtcagccgcatgctcggcgtcgccagcagtgacgcaaccatggagagttggctcatcgagtccgaggacggagccgagcgccttccttccctttcccacgctgtgtcattataactgatctattgcccttctcttgccacatctgttcccctgagtgacaatccgagcacattgtggtcgtgtcccctcaccgtgctaggacccaggactgcttcctgcttcttccggcgcgcccgacctggttgcagaatcagatccggtcgtgccactggtgccttccctcctcatcatcgaagcttcagggcccgtcgccgcctccctgcatcgtagcctgttgctaccctccacgcgagaggtacttcaagtcgtgtatcccctccaagatgtctgagtatatgattagtaaaagaggcaatcatcagatacataagatcttggatatttctatagtgatattttaagaaagctccattgtcttcgccaatgtttccttctatgaattgttgggacttggcattaattatttgttgttgcttctaattctaatcgtgccaaaaatgtgaaaatttaacccattttatgtgaaatttaggtgtacttctccaatccatgaactgtcaattggtctgcatcaatgatgaggttgaagcaaatcatgcatggtagttgttaagataagcggagcagagttgttgcttatagcaaacatctgggcccttt

SEQ ID NO: 122892 - DNA, 370 bp, Zea mays
  Clone ID: MRT4577_4355C.1
ggtttgaccagtctgattttgtggacctgcggtgtaagcttaagctaaccacctcactaagagggtagactgcctgtcgccagagtctagggtgagagcagaacatcacagctcttttttgctttcagagagctttttcactatggcaggggaagagttattacactatcacgaacatacttttgttgcgaccgagtgctcattggaacaaacggcgtgttacagctcctatatttacgcgagaaagcatcccggtactcttcctttcttattacgggtactctgccgccctgacctttgatgacccggttaccgacgtatcaactagctctttctctatcctcaacagctgggtgtatttgggctggcg

SEQ ID NO: 122893 - DNA, 565 bp, Zea mays
  Clone ID: MRT4577_43560C.1
gcccttcctcgagttttttttttttttttttttttttttttttttttttttttttttttttttttttttaaaacatccccagttccagaattggaaaaaacgagactttaccccttattcattgggaccaggcaaaaaaatcaggctttccaaatggcttcttcaaatcaaaactaaaacaatcccgacacaaacggacgggaaactcccctcttcgcaccccggggggaggaattgacttatcctgcacccctggaccccgtttaaagaaacttccctgaagggccgacctgcatcctagccctgaataggaaatccggggacgaggcccttgaaaacaaggaggggaacaggggggccaaaaaggccgacaacggaaaggttgggggggccccaggggaagttaaactgaaggttttccgggccggggtcccatttttgaatccaccggttttggtgcacctccatgccgacacccattttttctttctttatttgaacccgccaaaggaaaatgcccgctggttcctgggaaaacgggggaaataattcctggccccgaatt

SEQ ID NO: 122894 - DNA, 500 bp, Zea mays
  Clone ID: MRT4577_43561C.1
aaatccccgtttcgacctcacgcgcccgtttttctaaaccacaagaagaaaggcagcggacgagggggattttaaatccacccccgctgtttttcccccgggagcgctctcgaagactcgctcgagctagactgaacactcgaaacgatagaaggacaagcccctcgggcaatggcgaccgcgaatctgaggcaccgggcgataccgccacagcagacgacaaaatggcccaaggaagcatctttctgccagatgctaatgcaccctgtgccagaaaccagaccgaagacgaggtgcgtctaatgctagtgcccaaaatcaagaaacagacaaacgggactgcgcgcacctataagccccaacaccaactcagcctgtcagtatatagtgccgaggtcgtacactccataagacagaacgtggattgacagacacgagcacgcagttgcctgaagaccaagctagcctgggaaataggctgaaccccgcaaaaaggaaaa

SEQ ID NO: 122895 - DNA, 717 bp, Zea mays
  Clone ID: MRT4577_43562C.1
ctcgaggccggccgggaggttgtcacatcaaatacagcgcattttgatcacttcagacgtttcccatggcatgccatatctgcctctgcaacaacaaaacaatcactctgcaccttttccatctttacttccagccaagcagtactatatgcgcctaccacacatgccctgctcgctgtgcttttcacaatattttttatatctatcatgacgtatattttttctcataagcaaaaaagatgcatgcgctcttcccttgactcatctgcattcaataattttgcctttttacattgatttactaccatatgttactatgtttatatgaactgaggaagtttaatgaacataatgttcagagaccatccctagtaattatgccagagtgcatgctaaaactgtgtatgacatgccatattcttatagtgcaaactacatttacaacttattacaatttcaccaaatgcattgcttctcttattaaaaaaaactcggccggtgagggaaagaccgccctcccggtattatattaagaacagaccgaaacgatgctcccgaccgagaaaatccccgaaccctggccccccatcactaacgagtcggcgtctattgtccactctgcaatggcccaactgcgagggtggcgcataggacatcgtaacccgagagcggatgcggcacaacgaagcggattttttttaaccaagcttgaaaatt

SEQ ID NO: 122896 - DNA, 196 bp, Zea mays
  Clone ID: MRT4577_43563C.1
gacacgcattcgcaataccgaagctgtactttttgtcgtcgctgccgacaatagcagaccagggctaaaggagagcaagatgaagcttatctacagtgacctacaggatcaggatgtggcatctcggaagaacatgacgcatttgaatgagtatgcgttcggggtgatgcaattataatcccattatcttatgcca

SEQ ID NO: 122897 - DNA, 570 bp, Zea mays
  unsure (1)..(570): unsure at all n locations
  Clone ID: MRT4577_43564C.1
gnacaccaataggtgtaagagtttttgcaggcaacagactcaataaacgtaccatcaaaaaccatctttcgtactttatgctgctgtataagttagtcaaggatcactagggatagtcctttgcaagtaaactcacactatagcaaatgatgcttgatgatgtaaattctgatggatatatttccatgtacagtaaagaagaagaagaagagccatttgacaaagattttactcccgattatagcctttgtgctgccactcacattcacagccctagtctggacatgtaaaagaagaggtcgacgacaaaagaagaaggttcagaagagagtgatgctagaatacttgaggtctccggatgaaatgggggataagaatatagagttcccatttattagctttgaagacattgctgcagcaacagatcatttctctgactccaatatgcttgggaaggggaggttttggcaaagtttacaaggggagtgttanggaggtaccaaaggaagtagcagtngaagagacttagtaaggggttctgttcaaggaatggnaggagttcaaaaatga

SEQ ID NO: 122898 - DNA, 466 bp, Zea mays
  Clone ID: MRT4577_43565C.1
ttccgtgtcgacccactcgtgcggctaaagtcgcagaacttcttatggagggtgttcattacaccgttgaactaaagggcaataatgtagatcttgcagatgacggtgtagcacatgctgagattattcttgggacagatgatctatgggatgagaatgatccatgggcaaggtttgtgatgaatgctttgaaggcaaaagtgttctaccgaagggatgtccagtatattgtcagggatgggaaagctattataattaatgagttaaccggccgagttgaacccaagagaagatggtctgatggtatccaccaagcagtataagcaaaataaggcctaaaaatccatactcggtaattgtggctcaaatcacatatcagtcattgcttaagctttatcctaaactttctgggatgacaggaactgctaatacagaagaaaaggagttttcaaagatgttcaagatg

SEQ ID NO: 122899 - DNA, 2308 bp, Zea mays
  Clone ID: MRT4577_43566C.1
gttagtatatagttcggattttgtatgactaactggaaatgtatcatggctgaagtgtcgcactgtcaccatagtagaatgtaccgtgcctgctattggtttcttgtcatttttcatgttatcgtccaggcaaaagttatgctgcttcagttacgtgcattacatgcgaatgcaaactgcaaactgatatctagtttcttgttgtggctgcttgtacatgccttcattgtcgatgacttagtaagcatatatatctgctacaaaagattttaagtaacactctgtgactataataagaatagagcaggatggcttcttgggattgctacatatgcaacacagtggcgtgtttcgtcgcttctgggtcttttatccgctgttttgtcgtcgccggccggggcccggccccatccatctcggcatctcgctcgtcgtcctcctctcccctccataaaatccgatcggcagctcctggccgctgcccactcctccccgctctggctcttcctcgcgcctcgcgcgcccacccaccttcacgcgctctcccagctagatcgaccccactggcaatcgcgcaggctcccctatcccttcctgttccttcaaaaagactggactggatcttcccagagttcccgttcggagagccgccggatcttcttcgacgaggcttcgatctgctgctctccgtcggcgtgttggggacttgcaccttatccgaagatgtcttttcggagcatggttcgtgatataagggaaagttttgggaatatatcgaggcggaactttgaggtgagaattcaccacagagggaagtctcttgggtcttcaggtgacttgcaagacaggcctgctgaagttcagcaaagcaggtgggctagccttcctcctgagttgctctgcgatgtgatgaaaaggttggaggaagatgacagtagctggccggatcgcaaggatgttgtttcctgtgcatctgtttgtacaacctggagggatatgtgtaaggatattgttagaagtccagaacattgtgcaaagctcacatttccagtatctcttaagcagcctggaccccgagacggggtaatccaatgtttcataaaaagggacaaatcaaagctaacgtaccggctctacttgtcccttagctctggtgtgcttgatgagaacgggaagttcctgctagcagcgaaaaggagccgcaggatggcgcacacggagtatgcaatttttatggactcgaggaatttctcccgatcgagcactggctacattgggaagctaaggtcaaatttccttggaactaaatttatcatctacgacacacaggctccgtacaatggcgggagagtttgcacacaggaacgtgcccccagccgtcggttgtcttccaggaaagtttcaccaagagttccaagcggcagctaccccgtcgctcaggtgaactacgagctgaatgtgctgggaacccgagggcccaggcggatgcagtgcgctatgcattccatccccgcatcagcggtggagcccggcggcgtggtgcctgggcaaccgaaagagctcctcccgaggctgttcgacgagtccttccgcagcaccgcaacttcctctttctccaagtactccgtcgcggacagctccatggacctgggcagctgcccgttctccgaggtcgaggtgggcgggggaagtctgcgagaaggtgacgagtcggagaaggagaggccactggttctgcgcaacaaggcgccgaggtggcacgagcagctgcagtgctggtgcctcaactttcgcgggcgcgtcaccgtggcctcggtcaagaacttccagctgatagctcctgcaaagacgcagccgcagccgcaggcctccggccccccgccgccgccgccgccgtcgtcgtcgtcgtaccatgacccggtgatcctgcagttcggcaaggtcgggagggacatgttcaccatggactaccggtacccgctgtcggccttccaggccttcgccatatgtctgacgagcttcgacaccaagctggcctgtgaatgaatgaatgaatgaatgaatgaatgaatgaatgaacgaacgaacgaacggtgagagagtcgttcgttttatgtgttccaaagtgataagcattctgagccttggcatgtaaataatttaagaagtaggtgtttgattcaagtattgtattgtttcgtgagacaagacaatgttgcttctgaaacctaaaagtgtttcttggtcagtgaagcaaatctactaaactagctgcctgcaattatttattctcgccccgggccctggg

SEQ ID NO: 122900 - DNA, 576 bp, Zea mays
  unsure (1)..(576): unsure at all n locations
  Clone ID: MRT4577_43567C.1
gtgactccttaactatacatnnnnnngtttcacatcaagcatccaacatgtacacgtcttggaagcgatatctatatatacaggagcagtaggacttacacactttcgaacacacactacacacttgatagagcgaggtgaccaagcaatcactggttgaggtttctcactttctgctcggtgggacttggaacatttcttaggctccgaagcacccaatgggcttcttaggggcgtggccggtggcccgatacttggcagccatctcctcggccttcaggacctcctcgccgcgctttgcctccaccatcgctcgcttctcttcggcttccctgtggatcattgcaaccttgnnnnncatcttctcagcatattcagctttcttcttttccagttgttcctcaatcttcttcatttcagcttctnnnnnnnnnnnnnnnnnnnnnnnnnntgaaagaataacagatactttcttagtagccttgttatcagcttttgccttctcattatcttcccatgctttaatcagagagtcctcttctccgtttccacccttcaagagcagatctctgatac

SEQ ID NO: 122901 - DNA, 487 bp, Zea mays
  Clone ID: MRT4577_43568C.1
aattcatacatcatacttgctccagataaagaccaagagcatcatggacaacgccttgcctctcatcgtcgcgctgaacgccgccgccaaatgggcccctatggcctccgagacccagtttttcgttcccttaatcggagggctgtaggaccactgggggcaactatcggcaattggtgcttccggagcaaaatcgttatcggatacacattactgataaactacgagaggaaagcatacactgtgacgccggggaggcctaacgagtacgacacctgctcttaattccgtgggctctacctgccacgatttcgagctccacaaacatgacgcgccagatcccttaaagaaactatttcatctgcaagatcagccggttatcgtgtattaggcggcatgtatactattcgctcgctcatttactccttgccctcgggcactgccccttccaccagaggcctgcatctttcgaaggtggtatcccgcg

SEQ ID NO: 122902 - DNA, 350 bp, Zea mays
  Clone ID: MRT4577_43569C.1
catgctcccgggcgccatgggcgcgggatttcgagcggccgcccctgcaggtaacttcagcacttgtggaacagtctgccggatggagttgtgggtcagcgcattgacgggcgattgtcggccctggggaactgcatagcatgcaatgatcatgtggctcttacgcatacagaccttgacaaggaaactgaagagatgatcgctgacgtgcttggtgtggaagtttttacgcacacaataccagggaatattcttggtggcagcttttgttctttctcaaacaggggatgctcggtacctctgtcgggaccacgctaatcactaattcggtcgcctgcaagtctaccata

SEQ ID NO: 122903 - DNA, 398 bp, Zea mays
  Clone ID: MRT4577_4356C.1
ggatattaatgttgcacatggttgaggctttttttggacaaaactaaaaattaacccccttttacattgaatgaaataaaactaaaagagcaaggtttacaacatcatttaaataaatactatcaatggagagctgggtatatctatgtttgaacataaacaaaaggtaaacattgcccatcaaaaaagtaaacgcaggcctacttattttcctcccaaaccaaatcagccgcacgtttacatggttttgtatgacaaacatcccccgattcaattgagtgttgaacacctgttcttgaaagccctttttttatacttagacttctaataaaataaactgtggccaaacacctttggatggagtactcaccttcacgacttttattctgaaggaacac

SEQ ID NO: 122904 - DNA, 210 bp, Zea mays
  Clone ID: MRT4577_43570C.1
aaattaggaacaaaccttttttattttgatctcaatcgttaattcaggccatggctcacactgactctgccccccatggggaggcgggccacattctaattcaatcatgggcggtaaaggactaacctacttagctagccagcggctatactacagaacatattttttttagtgggggacaccgccggaagcaacgttaggacatgaaga

SEQ ID NO: 122905 - DNA, 749 bp, Zea mays
  unsure (1)..(749): unsure at all n locations
  Clone ID: MRT4577_43571C.1
cagttcacaggcaaaagcagtcgccttctccatctctcctccctttccgagggctccctcgcgcatgctccaaaaagcagctactcctcccccatcctgctttcccctcctcgtctagggtttcccacccccatgcctctcccgaaaccctagccgccgcctcctgttcactgctctcctcgccgctgcagccgtttccggccatggccgctggagccagcgactactctttcgcggcggagtacgttggcccgccactcccctacacgctcccgcgcgccatcccgctcgacctctcccgcatcccgctcgccgcgctgtcttcctcgcccccggcctccccctccgcctcctcgtctccactccccgtcgttcgcccgctcaccccgtcctccctctgcaacgccatccacgcgcacgcccacccggcgccccgctccgccgtccccgcgccagccgggggaggagctgtggtggattcccccacctccgtcatcgagaaccaccacgctgccgcgcaccactccgccgagctcccctcttccccctccgacgacgaggccgcaggcgacggcgacggcgacggtggctccgaggcgctgccgctgaagcctcgccaccacccgcccgtggtcaccttcgccgagaccagcggctccctcctccagtcctctgatgacgaggacgagtatgaggaggaggacgacgacgacgatgccgacgcaggggagggctcgncccgtgctgct

SEQ ID NO: 122906 - DNA, 462 bp, Zea mays
  Clone ID: MRT4577_43572C.1
gggtttatccacgcgtccgctgacgcgtgggcggactcgtgggttccagagctggcccatttttactttgttctgtacaacagagccgtgatgacaggggcatctccaaagggcggtgagttccctctgtaccctgactaagtcgccgtcgtcaaggacgatgtcttcgtcaacttcttgaagaacatcttgttcgtctggaagaacacactgaagctgttccagttcgtttgatgggccattgactctgacgccatattatacgttggcggccacggacccatgtgtgtccttgtgcactaccccacatgccagcagctgatccgtgagtacttggaggccgactagatcgggtctgcctcatgtcactcgcccgtcgttttttcctacctaaactttcggacgggaacctcttggttgccggcaaggaggtgcccgccttcagctacgctgaaggagaac

SEQ ID NO: 122907 - DNA, 866 bp, Zea mays
  Clone ID: MRT4577_43573C.1
tgggtacctcgaggccggccgggccgggtctgccgggaaaaagtcgaccgggaaaaaacacacacacaaaggcgaccagtactggagttgggagaagctgaggcgtttttcgtgccgctggctgaccggccggctggtggcttacatagccagctagtgtgttctattcgatcgtgtaatctcgcacaaagctagcttggagccgaataatggaagccacgatgaagctctgcaacgttgcgacggtgaggagctctgtcaccggcaagccccgcgagcaggaggaagtgtcctctcggcatgaagaccagagagagcctgcagttattatgccaccgggagcatcggttcacgtggttcatgtctagtattagcatggtgttatcctgattgagctttttttttaatttaaggtttctattcttcttcgtatctctatatcgtcggatcttcttgaccttgcaagaccttttcttgaccttgtaagacccaactctaccgtctttctttccttcaactcaatcttgacagtcttccacctctctctttatccttgcttcttctctagctctatcccttctgagctgtggattcaactatatgtttacaagtttagatattagattatccctagattaattattctatgatataattaagttcggtgtgagtaaataggtggcttggtcctttttcatatatgtgatgtaatgctgtgaactcattgtcaaacaagcatatttttgttttgatggtagagtgccatcgatgagacgcacagaaacatgttcctgttgggccatgatgctcaggcaatgtgaagtaggcgcctacctgtaagctagctacttcgtatgtatcccatc

SEQ ID NO: 122908 - DNA, 245 bp, Zea mays
  Clone ID: MRT4577_43574C.1
acatctgcacttcatagagagttttctatgattttgttgacatcaacatctcgagttgtatttaatccacgggagcatcctcaaaccgatgcctactgtggcaatgttaacccaattggagtcacgagtttttatgatgaaggtaaacttctatcatatactcttatgttcgactatcacaggcatcatggcatttaaatcctcattgccaggattttcaacacctattgtccaaggatgaacat

SEQ ID NO: 122909 - DNA, 413 bp, Zea mays
  Clone ID: MRT4577_43575C.1
gtcgtcgtctcactcaccccgccttctcgcctccctcaccaaataaggtcccgccctgttgggacattcacaggggggacaggaaatcatctgccttggcctcgattccggctactaccttcgccgtcatcttatccgttctattctgtgccgcggctggcaccgtcgtctacaacgaccttcccgactacgtcatccatggccgagtctactgcgacacctgccgcgcccggttcgagaccaatgtcaccgagtacatctcggacgccaaggcgaggctggagtgctagctcttcttcaccggcaagctcgagcgctccatcgacagtgtgaccgacgcgatccgcacgtactctatcgtgctcaacgacagggacgatgatgacatctaccaagtggtcctggtggaaagc

SEQ ID NO: 122910 - DNA, 343 bp, Zea mays
  unsure (1)..(343): unsure at all n locations
  Clone ID: MRT4577_43576C.1
gccgcgttcaaaaaccaacagcaaagaccacaggggagaaanaaacggggggggggggcgcngcaccggccnccaaannacaaccgcaaaacccacccgccaccaagacgaggggggaggagcaanaccnaagaccgcaaacagnaaagagagaccccaaaccccacacacagacgcagaggaagggaaaagagacaggcaagcccgccggaaacggaacccaaaagggcgcgcccaccgcagccaaccganggaacagcccgncgggcaggaccaccccgcagggagagcggcaaaanccaacggaacgagaaacacaccaaccnngccaccagaaggcaga

SEQ ID NO: 122911 - DNA, 269 bp, Zea mays
  unsure (1)..(269): unsure at all n locations
  Clone ID: MRT4577_43577C.1
ccccttttccttattacccctnnnattttatggcaacggtgtggtgctttttagaacgccacccgcgattttttccgaaagaaacggccaaaaaatcatcaggggccaggggaaaatgcccaaagggcccaaaccccctgggaggatgcatagaccgcaaacagtgggaaaaaaagttacgggaccggaaccactgggaaaaaaaacactcggggaaccggaacaaaaaaaaaaggcacccggcccccgggggccaaaaaaaaaacaaa

SEQ ID NO: 122912 - DNA, 403 bp, Zea mays
  unsure (1)..(403): unsure at all n locations
  Clone ID: MRT4577_43578C.1
tttttgttatgaagaagtgaatgtgngtnanngnagtttngatgtttgttaattatagatgtggtgntaggtgaggggtgaaaataaaggatacanatgattaaattgtttttattttaaaaaatgnnttnnngttaagnngngtactanngngggantanggannantttttnagaaggnnaggtggttgtggtntnnnaattnngngttttagtggnannangtntnnaggnnangngttnnaatttnnanggngttagtgangtngnnaaaaaaggtgagaggaaaaggagggnngngangaggangaaaatgnnggggnaanngananngggaatggggngtgatttgtgnnnttgngnanagtantanntatntatgngtgtgtaagatatnttgtgt

SEQ ID NO: 122913 - DNA, 345 bp, Zea mays
  Clone ID: MRT4577_43579C.1
attcggctcgagggaatatagagtttttttcatacacatggtaacagggggtctgcagggggatctagattacacgagcctggacagggcgaggagctaccccggaaggtagctgtcctaacgaccgggaacagagctctctgagcagagcttgacaacctcaagcttgcttgtcaagacatagacgcacaaaattcacgtacagttgggcgggagtggatgacgcccacccaccaaacgtcagtaccacactcagtatgagcatcgatcccgccaccttgcagctccagctgcatgagcctcataatgaggcaggccagctgcacaactaatccaaaggtcaca

SEQ ID NO: 122914 - DNA, 963 bp, Zea mays
  unsure (1)..(963): unsure at all n locations
  Clone ID: MRT4577_4357C.1
ggcaggnaggggttanacgagttgcgtgtcatcttcggcaacgacatggggagccaaaaccaactcggggaacaggtggggagtgcgtgggatcctctagcgaacctacaagaaatatggagaaaggagaagtggtagaattcactctgcctttccattcccccatccgccatggcggcgccgccggagctcgttgacgacacgatcgccgagatctgcctccgccttcccccggacgagcccgcgcacctcgtccgcgccgccctggtctccaggcgctggcgccgcatcctctccggcggggccttcctccgccggtaccgcgcgttccacggggcgccccctctgctcggcttcgtcgacaacaccatcgggctccacggcgccacggcccctcgcttctcccccaccacctcatccggctcccctttccccaggcggacgttcgactgcatctgctgggaggccctcgactgccgccacggccgcgtcctcctcggcctcttcgccgagagggtcaacctcgtcgtgtgggaccccgtcaccggcgaccactgtgggctgcctgaccccggggtgctccccggttactacagcgcggcggtgctctgcgccgcgcgcggctgcgaccacctccactgccgcggcggcggcccgttccgcgtcgtcctggcgggcatggactacttctcaagggacgccggcgtgcgggcgcgcctctactgctcggaggccgctgcctgggtcgcctctgctcagctggcctccgattcccatgtcatgcggaagcccagcgcgctcgtcggagacaacgtctacttccagctcatggagggtgacgtgtttctgaggtacgacatgggcaggaaccgtctgtccaccttcgaccctcccggcgcgcacgtcgacgaaaggggcgtcgtgctcatgcccatgggggcgtgacggctcgctggggcttgc

SEQ ID NO: 122915 - DNA, 550 bp, Zea mays
  Clone ID: MRT4577_43580C.1
taccctcgaggccggccgggaaaaccaaacctgcctccgcacctaccatttcctcccccaaaccaccatggacttctccgccggagggagtgggagcggcggaggaggcggaggcgccggcgacggccgggcgcaggcggagcgctggctggagatcgccgagaagctcctcgcggcgagcgacctcgtcggctgcaagcgcttcgcggagcgggcgttggaggcggacccgctcctccctggcgccgacgagatcctcgccgtcgccgacgtcctcctcgcctcccagtccatgggcccctcgggccaccaggacccgctcgccatcctccagctgccgcctggggtcaaccccgaccaggcctccgtctcccgcgcattccgccgcctcgcgctactcctcgggccccgcaacccgcaccatggcgccgagatggcgctccgcctcgtcaacgacgcctacgccttcctctccgatccgtctcgccgcccccctccgcccgccaatcccgccactggtaccccttcctcctcccactatgcggccctc

SEQ ID NO: 122916 - DNA, 428 bp, Zea mays
  unsure (1)..(428): unsure at all n locations
  Clone ID: MRT4577_43581C.1
ctcggaggcagcgacgcgcgggtggaggagctcagtgacagcgccagtgcctatcgagctagcgaatcgaggagattttccccactgtttctttcctgctgattccgatttcacgttgaaacaccggggggagaagaattgcgggcgaccataactcggcaagaagcggctccaaaaagggcatctacctttgccgattccggcaccgatggataccgcggcgtcggggaggttcgacaagctccagagctcgttcaagctctccatccagtgcctcctcacggcctgctcccgcgaggatgtcaatgacgctttctcgtccttcactgatgctgagaaggagcgtttgcaccggatgctcacccttgtgatgaagaatctgcatgccaacgtantggatgagtttgacgactttctgccagaaacac

SEQ ID NO: 122917 - DNA, 360 bp, Zea mays
  Clone ID: MRT4577_43582C.1
caagggggtgattaatccgataggtatgccccatcgaggatgcattttcaacggaggaggggatgcataagagctcaatcgccttgggaacaattacagtgtgacctggcctatactatctgcggaggctctgaatgtctaacctgctgtaccatagtttggcgctgcgaagctaaatggctatggctagaactaaccgcatctaccaagccgtggcctgatttgtactcgcctatccaacatatagggaagagaatctctactgctaatataggcactatagatggtaatgcgcataacactaaaatttggacagatctgtggatgtatgcgtctcgcctacaaaaagcctaccctgct

SEQ ID NO: 122918 - DNA, 1491 bp, Zea mays
  Clone ID: MRT4577_43583C.1
gggtacctcgaagtcgggcgggagaaaaataaaagctccacctacctcgagacccaggacgcgtggagagcggtgccaaaccaccatggcgatcctgctcctcttgctcttcgttttgtcctcagcttcagctgatgagtacggggaagagctgctgcagcgcgcgtggggggagcgggagtggatggtgagcgtgcggcggcgcatccacgcgcatccggagctcgcgttccgggagcaccgcaccgcagccctcgtccgcgaggagctcgagcacctcggccttcccgcccgcgccgtcgccggaacgggcgtcgtcgctgatgtaggttccggggcgccccccttcgtggcgctccgcgccgacatggacgcgctcccgctccaggaattagtggagtgggagcataagagcaaggtggacggagtgatgcacgcctgcgggcacgatgtccacacagcgatgcttctgggagcagcaaagttactcagccagcgtaaggatcagctcaagggaacagtgagactcctttttcaacctgccgaggaaagtggtgcaggtgcatctcatatgataagagaaggggttctggacgatgttgaagccatatttgcaatgcatgttgactatcgtataccaactggtgtaatagcagctcacccaggacctacacaagcggctgtatgtttcttcgaagcaaaaattgaaggtaaaactgggatggctgaaaccccacacttaaatgtggatcctgttgtcgtcacatcattggccatcctgtccctgcagcagcttatttctagagaagatgatcctcttcacagccaagtggtctcggttacctatgtgaaagctggaaaagcccttgatgctacccctaaccttgttgaatttggaggtactttgaggagcctcaccactgaaggcctttactgtctgcaaagaagggttaaagaggtggtagaagggcaggcggctgtgcataggtgcaagggagctgtcgaaataaaggttgaggactacccggtgtaccctgccgttgtgaacgacgagaagctgcatcgacatgtagaggatgtcggcagaggcttgcttggcccgggcaaggtgagaccaggggaaaagatcatggccggcgaagacttcgctttctaccagcagcttgttcccggcgttatgtttggcatcggcattagaaacgaggaagctggttctgttcactcggctcacaacccctatttcttcgtcgatgaggacgtcattcctgttggggctgctttgcatgctgccattgcagaactgtacttcactgacggccccctctttcgacaaagaagactagtggtttctcgttcgtgcggttggtctcgggttcagtaaatataaatatagtttgacatgtacaaatgcatttaaaagctcttttttacaaaattgtcaggttgttaatttggctttaaaaaaaaaaaaaaaaaaaacccacgcgtccg

SEQ ID NO: 122919 - DNA, 414 bp, Zea mays
  unsure (1)..(414): unsure at all n locations
  Clone ID: MRT4577_43584C.1
gcggcgccgggcggggcgggggcngcagggcacaagcggnncacggcggnnnccgaagaacgggcgaagggggnaccncgggaagggacaaaaccgaggcggaccacgggggggggggggttttttttttttttgnnncancgntnggcgctgttattggtntgtgggttgggtcccccccccccccattncttgagatatgagggttnttgtgttggtngggttgttgtcatgcagataaaaaaaaaaanaaanngagctttgatgattacatggtagggtgttnngtgnttgtgtgtaagtcgagttgttgcgttttgttttgggaatgcgaatgccggggggtatttttgtgtctggggtnggtccgtgtatntttgttttgggggtgtacctttgctttgggttttgggc

SEQ ID NO: 122920 - DNA, 379 bp, Zea mays
  Clone ID: MRT4577_43585C.1
ccgcccgcgcgaacgagcacgcattcgcccacgcttacaagtgctttgtatgagcataggaagctcggggagaggggcgcctgtgcgattgagactgggcagaaccccgccctcatcgtgcggcacacggctgtagctatgctcgcgtttggtgacgccaagccgtgcacctcggtcaggcggacgctgtagctcgccatctacacgagggccgcgtagagggcgctctccccctagcgctccttcttatgaaccctaccccaccgggcacgcggcctatactacttcaccagtatcctctgccctgctctgactcgatacgtcgtccgtcgcctgtgctgtatacaatgcatctggtcaccgctttactccacgggat

SEQ ID NO: 122921 - DNA, 268 bp, Zea mays
  Clone ID: MRT4577_43586C.1
ccggccgggactaaccctccggccctgcgtttggttctctcgcctggtgggtacatagcctacagcacacgggcgcttactccttttcgcctcctgtcccccccgcgtgcgcgcagtgctggtttgtctcaccctgactctctgggggggagtgtggtctactgggcgaatccctcgtcgacaacggcaacaacaactacctgctgaccacggcgcgcgccgacgcgcccccctacgggattgactttcccacgcaccaagccacggg

SEQ ID NO: 122922 - DNA, 370 bp, Zea mays
  Clone ID: MRT4577_43587C.1
cagccgatagcccggccggtgatgccggcgttgaggatggcgtagccattatacatgtaaagggcggaggcacacggccgtctgagccttgttggcggcgttcgtatgctcgggcgagggccatggcctgttgcaggtcgccgggcgcgcacagttcgacgtccacccggagatgccatggcagtcccgcggtgaatagttgggcctgttggtgcggcagcggcacgggctccgtgtggcacaagagagctaggaatcgatcctgatagtccaccgtggagcggaacggcaggcgtgccaccttgcccaacgtgttcgtgcgcagaggaggcccaaaacgctgctggcacaacgtcttgaagcgcgacca

SEQ ID NO: 122923 - DNA, 615 bp, Zea mays
  Clone ID: MRT4577_43588C.1
atgtcactcctctcttactgctacagaattggcgagacggagcgcacaccccggcgaccgccccgatgtgttgcaatgaccaccacgcctgcagcgcctcgactctctacctcctctatggcaagacgttgcggaaaccgacgcggccttatgacaacgagcgtcttgacgctgatatgactctggccgtcgaggatgtcctgaagtgcacgcgtgaagtttgcagtctccagtatgctactgacgcatcatccgtaatggtgcaaggcactagctcacccttgacgagaagaacccccgtctatatctttgaacggacaggcgcttcttagccggatgaacccctatggactgcttgctgagggatagagcacgattgagtatgttcttgtcctcaccgaatgataacttcctctcaaggctgactgtccagcactaggcttaccgggtcgaatggccaatatccatgtcacacatgctcgagtctagatcaagcatcgtcgacatcacgcttagaaggcaaatatgccggcgtaccatgattcgtggggccggattaggatgaccaccacggtgacttttcactgacaagcccattcggtgaaggccccgcag

SEQ ID NO: 122924 - DNA, 383 bp, Zea mays
  Clone ID: MRT4577_43589C.1
ggtcgacccagcgtcctcacagcgttcgcaaagaggattgccttgggcgactaatatgctggaatggcctattcatgaaatctggcggtcacttataagttgagtgcctcatctggagaggctgtggacacaggatactcgtggacgcgtttcaggggtttcttaataaggaaaggaccaaactcctgtggaggccgctggaataacatgtatctgccttagtgatactggagttctcacaagctgtgacgagcttcaaaggctgtgaactgcaataaagactggttcaagcaagcttaaatggagaaatatgataaccaacaagaacaacctgtgagccgctaaatttgaaagcacgatctagtgaagggagagactcacat

SEQ ID NO: 122925 - DNA, 1240 bp, Zea mays
  Clone ID: MRT4577_4358C.1
gcgattgggttcctcgaggccggccgggagagataaatcattgggatcctcgaggccggccgggacactgatccaccaccctccctctagttgagatactgccgccgccgccgccgccgccccgcccaacgccaggtgccgaggccttcgccggcgaagagcgccgaccggtacgagatcgaggaagacggccatgttctcatccgcccgccttgccctacgccgagctgcctctcttggggcgggcctctgccgcgccgcggaggatcccttttcgcgaaggtttctccatgggcagctcctcccacgttcctttgcctcagatgcatcgggacacaacaggggtttcccaccttctgggtctggagttgttgcagatacggatccacgtcagaattttaacagatctggttttgtgtctcaagatattcgtgctaagacacaggtcaacttcaacaacacagataatggagcggcgatgtctgggacaccccgtggccagaaccctttcagctcaagggagggcttcacagtcaacctccgcacctttgccatggaccacgaacagtattccaagaagagagctttcgtccacgtcctactgaagagaaagaagaccttcgtgacggtgacagactccagcgggaacaaaaagacgggtgcctccgccggctgcttggaggacaggaaaggacggtcccgtctctcccgatacgcttccgaagcggtcgcggagcaggtcggacggtccgccaggaagatggggttgagctccatcgtcatgaaggtgaaaggggcttcgttcttcaagaagaagaagaaggtgatcctgagcttcagagaagggttccgaggcgaaagggtgagggaccaatctcctatcatgtacatccacgacgtgacccagcttcctcacaatgggtgccggctccccaagcagcgccgggtgtagtttcggagtggactggaactagagctgggtttaaagaaagaaccggggaagtgtcggaggtgattttcggaaacttaacgtaatcgttgtgttgttggcctagttgatgtaataatatggacatgtgttttgggcaaatctacccttgttcttgtattgtatggaagcaacttactcgctcgatgagttatagacaattctgcgtaataatgctgttgagttctgaaaaaaaaaacgcggtatgatatgagatcttgcattgagacctcacctctcaaggtttgttct

SEQ ID NO: 122926 - DNA, 354 bp, Zea mays
  unsure (1)..(354): unsure at all n locations
  Clone ID: MRT4577_43590C.1
aatgattacgcgaccgagcgcaccacaccnccggggggcgccgacgacaaaaacgggacggacacacagcgcaccctgcagccagccctgacagcggcgaccgggcggaccaccgaagcccgcgctcacgcgggcgaagagcgcccaccagacgccgaggcggacagagaacacggcgaccaccaaaccagcagaaacggagaaacaacaagaccggacggagagggacgagccagacgaggcagacgaagaggaagaagacgagcaagaggaacacgaggaggaggccaaggacgaggagacaaacgacgaggagggaccgaccgaagcgggcgccaagacacagcaaaacac

SEQ ID NO: 122927 - DNA, 202 bp, Zea mays
  Clone ID: MRT4577_43591C.1
gaacgatatatgcactttagccttgtaggatactgtatatgatttctgaatgaaccaataaggtctgactgtgacctagagatctttcttgctccagtaacgctttatctaataccactgtacccttttgggttgtcccattctcatggcctaagttgcacatcatcctctgtaacagggattatctccttgtaaaaaaata

SEQ ID NO: 122928 - DNA, 311 bp, Zea mays
  Clone ID: MRT4577_43592C.1
cttatcctctttacatctccactcattcaactcatcttcctcaaaacttatcagtcatcaaactattataataattattattcaaaaccatactattatctctacattcccacactctcaattcctcctcaattcatctcacaatatattactcttaattcataccactcatattctaatatctatatattcacactctcacatccaacacatttctcctctctctacaccaactacttctcctacaaaccttacaccttcatacatcactacaaacactactaactctctcatatctactaatccccttt

SEQ ID NO: 122929 - DNA, 407 bp, Zea mays
  Clone ID: MRT4577_43593C.1
gccggccgggctcgggatacgcgtctgccaccggaagcttcttattaccagcgtgttttcgaaccgcatggctagatcgaatagcgctccgagtgatcttgggtcgcagacacctcccctgacatacgaatcgctgcaactcagcgagagcaacgagattggacgacactgctggctggctggtcagacggctgtagcgccacaaaggaagggatcgcgtgatggcgtcagtcgatgccgccgcagatacaccatcctctacaagatcaagctcgacgagatcgacaccaccatccccaccatcggattcaatggtgaaactgtggagtacaagaacgtcagattcattttttgtttttgccccccccaccacaagataacgtcactgagaagagattacttccaga

SEQ ID NO: 122930 - DNA, 188 bp, Zea mays
  Clone ID: MRT4577_43594C.1
acacattaacatgctatcatgtacggaggcgtatctagctctatgagagcggcatgcacaacctggacatgtgattgcggtagactacaggcaactactcatactgtccattgaaagggtgcaaataccaaattctaaactgacgcacagggtgtcccttctccaatctgcgagactaatcacatgct

SEQ ID NO: 122931 - DNA, 359 bp, Zea mays
  Clone ID: MRT4577_43595C.1
cctcgtcagaaaattaagtatcaacttataccgagaggtgcaatatatatgggttgaccaatggaattaccctccaagagtgatcttccaatgaagggcaaccagggggatttctttgcctatcttgacaagaagtaccctaatggttctaggtcaaacagggcaacactaactggatactggaaatgaactgggatggaccgctccataaagcttaacaagctaactctaggaacaaaaaatacgttactttttcatgaaaggcgacctctcttttgcatacgcactgagtggattattcatgagttctacattgacgcgaatggattttaaagtcgtccttatattaaagatgcctt

SEQ ID NO: 122932 - DNA, 505 bp, Zea mays
  Clone ID: MRT4577_43596C.1
gctaccccgcctctacgccctaaacgccgaccaggaacttcgcacggcggcacgaaggttgtgcgaagcctcgccttgggcgggttgtgcttgtggccacccgaatttctcaccgtgcccgctgtccgccgtggacccgcctgctctgtggtcggacaacctcgccgccccacctcgaagcgaaagcctaggaaaaattcaacaaaaggctggtttcccaaagatgtacctgagtcatcacaggcaggtgtccaagagaatgaagtcgtccttgcaattttactagctaatgaagatcttgttgaaagaccttcgtcgccaccagaagaacgtgtagttcgtgtcctagttaaaaagatcacacctaggaagaagaatgtttgagtactatggtgtgtgtatgatactatgctatttctgtgacatttgtatggtactttgtcctctatatgaaactatggtatttctgggacatttttatgccccttgaattcaccatttcgtc

SEQ ID NO: 122933 - DNA, 633 bp, Zea mays
  Clone ID: MRT4577_43597C.1
atcggactgtgcaagcctcgagacgcggagggtgcactttggattcgctcgatcggccatcatcggactgtgcaagcacgagagggggatacagcggattcataaaccgtcagagtgttaggacaagatggtggccaatggtgatgcacctgctagagggagcgcggcggcagccgcaagcctgcgtaggcgtaggaccacaagcggtgctgctgctggtggaggcggtgccagctcaatgctccaattctacactgatgaggctgccggccgcaaaatgtcaccaaacactgttctgatcatgagtattgggttcgtagccgtcgttgctgtgctccatgtattcgggaagctgtaccgcacctccaactaggttggcattgccatatccaagaaagctgagtccaccaagagaggattcctgtagaacaatttaaatggatagcaagtgactatcagactctgttgtagaagtttatttatacaacttgcaatgctgcgaggctattcataaatgcctgcgagttttgtttaaagaaaaaaaaaaaaaaaaaagccattgcttcgtattttgaaatgcttttgaattgctggcataaagcatatgctgtgagtttcatggcatttattcac

SEQ ID NO: 122934 - DNA, 1824 bp, Zea mays
  Clone ID: MRT4577_43598C.1
ttggcattctcgacctcggccggggcccaggcagactccaacatagcagagaagccatggccggtccgccgctcttgagcttccccttcttcttccttctctgcgtcgccctcgcctggagcgaggcgtatggagcaagcggtggctacgggctcggcgtcaactacggccgggtggcggacgacatcccttcgccgtggcgctccgtggagctgctccgcgcggcgggggccgggtcggtcaagatctacgacgccaacccgggcgtgctccgcgcgctggctgggacgcgctggcccgtctccatcatggtgccaaaccaaatcataccggacctcgccgcctctgctgccgcggcggaccggtgggtcgccgagaacctggtcccctactacccggcgacacgggtcaagttccttctcgtggggaacgagatcctctccgacttgtccatcgcgaactccacctggccacaccttgtcccggcgatggagaacatccaccggagcctccgcaagaggggcatcagcagcgtcaagatcggcaccacgctcgccatggacgcgctcgccgacggcgccttcccgcgcccaccgtcggccgccgcgttccgcgccgacatcgccgagacagtcgtgcgcccgctgctgcacttcttgaacgggaccaactcgtactacttcgtcgacgcgtacccctacttcgtctgggccgacaacaacctcaccgtctcgctcgactacgcgctcttccagggcggacgcacccgctacgtcgacccgggcaccgggctcacgtacaccaacctgctcgacgaaatgctcgacgcggtggtcatcgcgatggcgaagcttgggtacgggcacgtgaagctggccatcgcggagaccgggtggcccaacggctgcgactacaaccagattggcggcaacgtccacaacgccgccatctacaacaggaacctcgcggcgcggatggctaagaacccgggcacgccggtgaggccgggcgcgaagatgccggtgttcgtgttctctctatacaacgaggacctcaagccagggccgggcaccgagcgacactggggactgtactacgccaacggcacggcagtctacgagatcgacctcaccggacggcggccactggggtcgtacccgcccctgccggcgccggagaacaacataccgtacaaaggaccgatatggtgcgtgctctcggccgccgccagcaacaagctgaacgagacggcggtggggaacgcgctgtcgtacgcgtgcgggcagggaaacgggacctgcgacgccattcagcccgggaaaacgtgctacacgccaaacacaacggcggcgcacgccagctatgctttcaattcgtactggcagcagttcgagaagactggagcgacgtgctacttcaacaacctcgcagaacagactaccaaagacccaagtcatggatcctgcaggttccctagctcgttggggtcgccttgaacggcagagcgagcgagaagacatcatttgggtcctgattttgtgtaacaagacgacttgggagctagggaacgaagtgtggagcaccgtagatgttctaactaacacagtactacttcttgcccagacttgtgccatgacagtgaaaggctcgatcggttgctcctgctcgcttgagaatcagaaatcgaaggtggaaacgtagttcgtttcagttttcagtacgtgtgagttgcactgcatgagagccacttgggggagtacgtgtcactgaaccctcgtgtcagtttgccacgacaagacggcttaacatctggctttttttttt

SEQ ID NO: 122935 - DNA, 382 bp, Zea mays
  unsure (1)..(382): unsure at all n locations
  Clone ID: MRT4577_43599C.1
ttnttnnnnnngggcggggtaaaaacctaacaaggtcccaacattgtaccgggccctttcaaattattacccccttttccacctttctttccttttaaaaaaaaaaaccccccaaaaacttccaaatccaaaatttttattgcttttttcacgccaatttctaaaaagggaattgtttaaatttccccccccttttttagtaaaatgccaacccaaaaccgggcttaaaaaaaccgtgttttttttttcttttaaccaaaatctaaatcccctttgggaattgggttacccccccatttaaattggccgttaaaaaccctccctttaaaaatttgaaccccctccaaactctttttttttttggggggtttggccccctttt

SEQ ID NO: 122936 - DNA, 283 bp, Zea mays
  Clone ID: MRT4577_4359C.1
cgaaaagacatgacacaaataaactaaaaacatccattcatttactcatgcagtaaattctcctgcaagcttctatgggcactcagtaagtactcaggattggctttatcagccttgacactgagcagctcatggtacctatggacacctgagccaggcctagtctctccatgattggctcagctaactctcagttcagagtggagagtatcaatcttgtgtttttgcccttaggcagcactatatgagacatagggcctgtggtcctatccttctggtgtcc

SEQ ID NO: 122937 - DNA, 708 bp, Zea mays
  unsure (1)..(708): unsure at all n locations
  Clone ID: MRT4577_435C.1
ggaattctggcttcgagggggcaacgaaggctccaacctcgttctttctttttttatttgcgttttggaagcttttcnnnctggagcagggtttgggtgatcaatantnnagacaagcaatgtgtctgctactggcgcccaccgacgttttgggcacattatctcttcgtttggctttttgggaaaaatcagtagaaaccaaactgtcaatctatttcagaaacctttttctggatcttgaacttatctgagggaattttaattgtatgaacattgttgaaggggatgcctgtttcatcnntctcttggcatacttctagttggagcgttatcttctgttgcttattggctgactgcgtttattggcactttcttcttgcaacagttctcttgcgttctttttaaaaactcagcttggtttcacgttggttccaaaatttactttccttcattctccactgaggnnngaagaaagaacgaacattcatttgattttctcagcgttgcaaggcaacacgcttcctttttgcttctttcttgacggtcaaagggccagaaggcatttcttaaaagaatattattcctacaaagaactgtatacgggtgtgacaaagccactttctgggacccagattgtaaagagcttcatattgatcctcggtgcttgcaaaaagtcctttgagagtgtatttcaactttcacatcttt

SEQ ID NO: 122938 - DNA, 1084 bp, Zea mays
  Clone ID: MRT4577_43600C.1
ttcgtccacgcgtccgggcgaagcttgggttcggtcacgtgaagctggccatcgcggagaccgggtggcccaacggctgcgactacaaccagattggcggcaacgtccacaacgccgccatctacaacagaaacctcgcggcgcggatggcgaagaacccgggcacgccggtgaggccgggcgcgaagatgccggtgttcgtgttctctctatacaacgaggacctcaagccagggccgggcaccgagcgacactggggactgtactacgccaacggcacggcagtctacgagatcgacctcaccggacggcggccactggggtcgtacccgcccctaccggcgccggagaacaacatcccgtacaaaggaccgatatggtgcgtgctctcggccgccgccagcaacaagctgaacgagacggcggtggggaacgcgctgtcgtacgcgtgcgggcagggaaacgggacctgcgacgccattcagcccgggaaaacgtgctacacgccaaacacaacggcggcgcacgccagctatgctttcaattcgtactggcagcagttcgagaagactggagcgacgtgctacttcaacaacctcgcagagcagactatcaaagacccaagtcatggatcctgcaggttccctagctcgttggggtcgccttgaagggcagaagcgggcgagaagacagcatttgggtcctgattttgtgtaaccagacgacttgggacctagtgaagtgtggagcaacgtagatgttctagctaacacagacacatagtactctctccgttcttgttttaaaaatgagttagcgggcgacaaatattcgataacggattcagcagacttgtgccatagtgaaggctcgctcggttgctcctgctcgcttgagaatcagaaatcgaaggtggaaacgtagttcgtttcagttttcagtacgtgtgagttgcagtgcatgagcctcttgggggagtacgtatcactgaaccctcgtgtcagtcgacaaggcggcttaacatgtggctttaatttatactggcttctattgcttctacattatttttatctctataaactat

SEQ ID NO: 122939 - DNA, 434 bp, Zea mays
  Clone ID: MRT4577_43601C.1
ggtaccgcgcggttttgggcctgcaggtcgaggccttctggccgcgcaactccatgatcctcgatggtgcggcgcgagtcatccactgtatattgctatggaggatcatgttcagcatcgccagcaccttctgagggctctctaagggaatggacgagtacggcttgctcgcccttgccaccggcattgccgactttgccgagctgcatgcccacacacggttaaccataaaccgtgacaaggctgaccggctggctatgacaaaactcaatacatgcgctgtcatccttgaagttatggatgcgcccctaactgctactgctgtcagagcatatgttatgtgtggcggacgcccgcaactgaacgacttcaaattaaagcttggcagaaaacggtgcttacgtatttcccccatgaaaggatcagaaagaagg

SEQ ID NO: 122940 - DNA, 744 bp, Zea mays
  unsure (1)..(744): unsure at all n locations
  Clone ID: MRT4577_43602C.1
gccgccagcancaagctgaacgagacggcggtggggaacgcgctgtcgtacgcgtgcgggcagggaaacgggacctgcgacgccattcagcccgggaaaacgtgctacacgcccaacacaacggcggcgcacgccagctatgctttcaattcgtactggcagcagttcgagaagactggagcgacgtgctacttcaacaacctcgcagagcagactatcaaagacccaagtcatggatcctgcaggttccctagctcgtcggggtcgccttgaaggggtgcagagcgggcgagaagacagcatttgggtcctgattttgtgtaaccagacgacttgggacctagtgaagtgtggagcaacgtagatgttctaactaacacagcactctctccgttcttatttatttgtcgcgttttagtttaaaaataagctagctcgcgacaaatatttgagaacggagttaccagacttgtgccatgacagtgaaggctcactcggttgctcctgctcgcttgagaatcagaaatcgaaggtggaaacgtagttcgtttcagtttttagtaactgtgagttgcactgcatgagagctattggaagtacgtatcacttaaccctcgtgtcagtttgccacaacaagacgcctctttattctagcttctactgtttatacgatatttttatctctagaattgtaattgtagcagtccaaacagtcggctttattaatctgcagtcggctttacc

SEQ ID NO: 122941 - DNA, 700 bp, Zea mays
  unsure (1)..(700): unsure at all n locations
  Clone ID: MRT4577_43603C.1
gctggtacagcctgcaggtaccggtccggaattcccgggtcgacccacgcgtccggagcggggcgaggctgcggcgttcggtgtcgccgttccgccgtgcgagcaaggatgagcgcgcagaggacgcagagccacgggcagcgcaggtaaaggaatcacggtgtcggcgaccgcggcggggcttcttccgggacccccgggtgctgaatggagaggaccgaggcgacgttgagccgcggctcgtagcggcggggcggctgccggagctgcaactgccagagaggatgcgcggagcccgggcggcgcgaggcagttgagagccttcgggccccaggacgccggagcccgggatgagttagcgagggccgccgcgggggccagttcctagggctgcaggccaaggcgacggcgccgcccgcccgccccttccgtgcagaggccgccagcttcttttccgcgcccgcgctccgggccctggagaccatgaggttccgcatctacaaacggaaggtgctaatcctgacgctcgtggtggccgcctgcggcttcgtcctctggagtagcaatgggcgacaaaggaagagcgacgcccttggcccgccgctgctggacgcggagcccgnacgggggtgcgggccaccttgctgtgtccgtaggcatccgcagggtctcaaacgaatcggccgctcctctggttccc

SEQ ID NO: 122942 - DNA, 300 bp, Zea mays
  Clone ID: MRT4577_43604C.1
aaccttctctcccggccccagccgcctgcccccctgtcaacagtggcccgccccccaactatgagatgctcaaggaggagcacgaggtggctgtgctgggggcgccccacaagcctgctcccccgacgtccaccgtgatccacatccgcagcgagacctccgtgcccgaccatgtcgtctggtccctgttcaacaccctcttcatgaacccctgctgcctgggcttcatagcattcgcctactccgtgaagtctagggacaggaagatggttggcgacgtgaccggggcccaggcctatg

SEQ ID NO: 122943 - DNA, 2909 bp, Zea mays
  Clone ID: MRT4577_43605C.1
ccccgcgtccgccccgcgtccgcttaatgttagggtccgtgcatgcacgcagagcgtaatacaaagtgcatttcggctcccgcccaggctgtgcaggtaccactgcaacataagaaccggcattctgctttatctcggcttcgaaccctgattgctcttaaagttaggaggccgataaacctggaagactacactccacctgttgagcttcttcagatattacccctgaagtccagcgttagaggaaatgatgttggcccccaaatcggtccaaataactcaaaattttctccaggaatgcaagcattattagacctgctgtttgctgttgaagattctgtatcagatgcagcaaagattttaggcctaagcaccggtgctttgtcaagattgattctgtcagatgattctctccgaacggccgcgaatgaactgcgagcttcgaagggcaccggtgctgtactacgtgctcctgacgttgcaggacagcgtgcacaaggtcttctacgccgtcgtcgaggccgctgcagttcgcgcagacaacagccatcttggagggttggcgaggtatccggtctctgcaactcttccacagattggatccagattattccttacatggggtgtcttctggagttttcctgaggtatcgactgactagcaaatttgcgtgttttcatatatgacaccatttttagctttacatacttgatttgtacatgaactttagagtttccaatttataattttaaattttagattagatacatatctatgtgttgttgtttggcgggacctcgaattatgacgcagttctaggtttaatagcatttgctagaactagagaacacatgtgttagatgattatgggacttttaggactaaggttagtcgattatttaattttttattccaataatggaataagaaactatgagtgggtattgtaacaagtttctacagcaggcgtattagaaatggataaatagcgctttttaccctatttcaactgggctgttctattatatttctggacctgcaattggatgttgatgttatgttcttgccataaagtccaatgtatcgtgctagctgtacactgatctgtaacaggtgattgactgactcgagaatttgccgacgcttgaagaaggacctaatgtgagcttttacatacttgatgaacagcttgagctcttgagcaaggtgctgaatgcaggggatgacatgattggtgttgagtgcttagaagaagattgtgatggcaaggttctatttgtttgaggttgcttcaccattccccaaagcacattgcatcttgttttagtgtttttttgattgccgtcgtcgaggccgctgcagttcgcgcagacaacagccatcttggaggtatctaattccaatattgtatgtctcggttgaacttgtgaaggcgttgcaagcacatatcattaactgggatattcatatgtttgatgaggagatcggcaataccactcagggtggcaagtttgaccatgcagatcgtttgttccaaagcattgagaacgcttacataaatagcttatcaaatacaagtgacgtcaaagagcttattccagaattcttttacatgcccgagtttcttgaaaattcaaattcatatcatcttggtgtcaagcaggatggggaacctataggcgatgttgctctccctccatgggcaaaggatgataactcaagtgacgagtttgacaaagattctattgagagtgatgatagatctcttgaagagctaagctgggagacactagaacttcttgtggtacctcatatattcagcatcagacgaagcacatggagatcaaccttcacttcgtccgtgagcgtgtcgccgacggtgatgttcgcattctcagcatcccgaccacttcgtagtttgccgacattttcaccaaggggctgccgtcgagtgtattcactgagtttcgatctagtctcaacatctgtacaggatagaattgagactgtaggaggtgttagactcctgctaagggttaggcctgggccttcttgtatttacctgattacccctatgtaatgggcttggcccacctaactgccatatataaattacaaccatttacacccaactctagatgagggttagggtttcaatctgagctattacacccttgatgaacaacttgagctcttgagcatggcgctgaatgcaggggatgacatgattggtgttgagcgcttagaagaagattctgatggcaaggctcttattagagcacgacgctctgccggatcaatgagtgccttctctggagctggtggaatggtctacatggagtacagcactgggaagggaaagggtgttcagaagaaacacaaggacccgtcaaagaggcatcatctgttcaagaaacgctatgcgtagcctgttgtgctttgctagaaatgatttggttcatgacaaccttgttttggcatcaaagtcgttggtttaaacacacaagcccatgttatgcacagttgttgctcttggttaggaccatcctaaagcaattgttttctctgtttgagcaaggttactgagctactgtagcgaagaacaattttggtctcaggtttacacatgctgcttaaagttggcatacccggctttcgggcgggacaacaggacgtgtcttcttgaattgccttgtattatacaagtataaacaaacaaacgctaaatcgcaacgcttcttatgtgctgctggttctggcgtgctgtatttcccctgattagtttccgaaaaaaaaaaaaaaaaaaaaagataaaaaaaaaaaaaaaaaggcccctagggccaaaatttgtaatggattccccccaccaatgtagtatttgcccggtttttaatcagttttcgatgttt

SEQ ID NO: 122944 - DNA, 460 bp, Zea mays
  Clone ID: MRT4577_43606C.1
aaaaaaaagcgacattttattcggggggcatcatatcacagggcattgcccggccggaaacacagttacagccttattccaagcacacttggcagaaacccaaacagagacgacgggccggggaaacaggtgtccatggggaccccgggcaggtggaaaggggcggcgaccaggctgagcggctgcttgaacacccactttttaaagggggggaaaaggacccccttggggcaggggtaccgctgcggcccggggcaaaaaaaaaacgtgccgttccccgccgcgcaaaagtagagcgggaacagcatgtacttgtcaaaggggcccttgctgaactgggacaccggggtggagggagagcccctccttgaaaaccttggtgatcgccttggaggccctaaagcccgaaaaccggctcgatacccttggctttgaggcaaacgagggggttgatccggct

SEQ ID NO: 122945 - DNA, 651 bp, Zea mays
  Clone ID: MRT4577_43607C.1
gcaggggatgacatgattggtgttgagtgcttagaagaagatgtgatggcaaggttctatttgtttgaggttgcttcaccattccccaaagcacattgcatcttgttttagtgtttttttgattgccgtcgtcgaggccgctgcagttcgcgcagacaacagccatcttggaggtatctaatggcaatattgtatgtctcggttgaacttgtgaaggcgttgcaagcacatatcattaactgggatattcatatgtttgatgaggagatcggcaataccactcagaatgaagatggtcaaaatcttgatgttttctttggttgcatccgcattttggactattcctgacagcatttaagtttttattacggttcaacggtcgtccagcgtaatccttttacaaccatggatggggaacctataggcgatgttgctctccctccatgggcaaaggcttagcattgcaaagaacaacttctgcgtacagttatgtagcccaacttcataatttgaaggatgataactcaagtgacgagtttgacaaagattctattgagagtgatgatagatctcttgaagagctaagctgggagacactagaacttcttgtggtacctcatatattcagataattgggcaacggcgtgtgtt

SEQ ID NO: 122946 - DNA, 394 bp, Zea mays
  Clone ID: MRT4577_43608C.1
atcgcgagcggccccctttctgttgtttttttttttttttttttttttttttttttttcacttatcttttttttctttttattattttttttattttttctcttacctgggggacccaaacctttgccataacccaatataaaaaccgggaactcacccctgcaggggcccgaacatcccaagtcaggtgacccccaccctgtgggtggacacaccccttccaaccccccggaccagggttgtaaaaccccaggtaaaacaaagcacctgaaacacaaatagggcccgccctggacgttctaggaactcattataccccacatacaccattttataaccacaaacacaacctttttttcctcagggaggggaccctattggaaaaaagaacgga

SEQ ID NO: 122947 - DNA, 282 bp, Zea mays
  Clone ID: MRT4577_43609C.1
caggccggccgggataccccgtcccttctgctcttcgtcgactttaggatttcatggtccctatcggctcgagcgcaactcgtccccctctcgctctaccgtctactcgattggtataggagacgacattcactccatccatccaatagtagagctggcgatatctatccgatcggaagaaccggctacctcctcccttcaccttcttctgcatgtatgccaagtgccagcgctgtctgagcattccccctgtggtcagcctctcccctactgccgatgtga

SEQ ID NO: 122948 - DNA, 265 bp, Zea mays
  Clone ID: MRT4577_4360C.1
aattcccgggccgacgcgctcaccatccggcggccgcccttatactttcctttcgggatgtttcttcagcaccgtgccatgatgcctcccgatcacccagagaccggaccagcacacgcctgggcaccgtaccctgcgacggcacgacaccgagaggatcccccctgaaccacaaggacctgccccccaaaccaccccgaacaacatgcaaagcgcacgccaagggccccaaacgaaacggcccgtccttgacgaagctccccta

SEQ ID NO: 122949 - DNA, 579 bp, Zea mays
  Clone ID: MRT4577_43610C.1
ggatgctcctttgagggtactctacatgaacaatctcattgcattatgcttgttttcgccaagggagcttccaactccttgaattcctgtcaattgtcacttaaggccttatttggttgcacatgcattggaggggattaaatccctttctattaaattttgactaggaagggatttattctcctccaatccccttcaaccggacaagccctaagttggtcctaccgatagagaagaatatgtgagtgctttctgtataactaaagccggacattgtctgttcaccttcaacactgttgcctactgtaacgctgaaggaaaagtctatttaaacttaaccaaatgcccataggctggactgaggagtaatgtttgttactagtttcaaggtcaaaaggcctttttttcgtaacataaggaatgaatcaatgaactctcctaacataaagattttgtgttctatatactgcagcgagtgctttcccatatttattccatttttcctgtacattttctcaatgtgcttaaaaactcttgcagcacagtgttttgtccaattgctggtttgggggctcatct

SEQ ID NO: 122950 - DNA, 454 bp, Zea mays
  Clone ID: MRT4577_43611C.1
cttccggttgggcccaaatttgagtttgcctgagttaggctcttttaaaaactacaaacagtatggctttggaaatatttttaacgtgtttgtgtttatttttttagtgctcggcaaaaacccagaactaattatttagaggatcgaaaaaatggatctaagctgattgtttttgtgattggagggattacatactctgaaatgcgttgtgcttatgaagtttctcaggcacataagtcctgtgaagttattattggtaagacttgtgttttccttttgtctatttttttaaaacaaactcttagatgcaaaaatatatatgtaaaactttatcttgtaatttacatttagaactaaattgttgagtgtaaaaaaatattttttgaatcagtgtgttttatctgatgtaccagttttttcctggttgaccttttgatgattttttaaaaataca

SEQ ID NO: 122951 - DNA, 349 bp, Zea mays
  unsure (1)..(349): unsure at all n locations
  Clone ID: MRT4577_43612C.1
cacgaagacaacanngcaccagagacgagagggcgaccggcagcggggggagganaagaggaagancggagcaagccaaagacagacgccaacccgaaaaaccccagcgccaggaaggaggacggccgggaagcaacaaacgacgaacccaagggcacaagagaccccagcaacgagaacaggaaagccacgaaaccagcagcgccggnccacgacaagacacagcacgaggcgaaaaaaagccagagcacaccgcaaggaaaaccaagaaacgcggcaagcgaaaacaaaaggagacaaaggcagaggaaaaagaagagnagaaaaagaagaggcgaaagaaagaaaa

SEQ ID NO: 122952 - DNA, 401 bp, Zea mays
  Clone ID: MRT4577_43613C.1
aaaaacacaaacggccgttggccccaagggtttttttgaaaacccccgggggggggataaaatttgccttcccaatcccccgaaatttggaatgttaaaaacccccacgggccccgggttaaaataaaataaaataaaataaaaataaggggtgggcccccccccccccccatgccaacatttttttggtgccccggggggaaatccccccgaagggttactttattaacccaaacaaacctttttaaggtaaagggccaaaaacgggccctaaaacccgatctccctaaagaacccaaaccggggaccccccccacgggggggggggggggacaaagacctgggggaaccgggggcgggcggccatctaattggccctggagaaaagggcccgggggggg

SEQ ID NO: 122953 - DNA, 844 bp, Zea mays
  unsure (1)..(844): unsure at all n locations
  Clone ID: MRT4577_43614C.1
gccggccgtttcgggatcgtgccgtgcacgaagtcggattcagaggagaacggagaaccgtcggtctctgctcgtcgtcaaccacttcctcaaccccgccatcactcaggccctcgtcgccatcgcgagcggggctccgatggacacagtttctagcaccgggtcacaactgcaggggttgacgaagccctcctacgcgaggtgcgccagcatctccaccggtgacaaccaccagtcgctcacatccatgtcggggcggcacacatgcggcccccgctccgtgcagttgccgtccttgcggggcatcgtcggaattgcccagacgaacggcgggcccgacgcaagcagcccggtggacaactcacggagttgtatctcctctgagttcaagcactcctccatcccggcctccaaccagaaggtcttcaagctctcatctgatgtcctcactaagagagatgtgtggaacgataccttcgaccacatcttcaccgagctcggccaaccacaacgcctggaagctgtcgagcttccctgccacccgcgtcatcgactaccggacttctcccagctagagttcactgacaaggtgtttgctacacaggaggtgttcgaggaattgcctcttagctcccttgctgcttgggttagtattgggaagctcttagcctatctgtgttggaaaattccttggcccccacacatatgcatgttgngttggggtgtggcagtgaggctttacattcaattacaaggttatctnccatcatagctagtaccaacgaggagagaatattcatcgtatctgaagatggcaaggttgatgatgtggttgatcggccga

SEQ ID NO: 122954 - DNA, 1824 bp, Zea mays
  Clone ID: MRT4577_43615C.1
ggtcagcacgcactttattatccctcgccgccggcagagccgggaccaaatccgaaaaccccatctcccacctctccttccttaccggaagagaaaaaaagatgaaaaccaaacgaacatacacagatacaagcacagcagcaacgatatccaaagctagcagctcatcagataggcaaacaccaagaagctaagctagcgcgccatgcagacgccgaccatgtcgacgtccatggccaccacggcgccagcgaagccccccgcgccgccgcggcaatgctgcaggtacctcctcctcccctccaccggccaccgccggagcgtggcggcatggtctgccaaaaagaagaacccgtggctggacccgttcgacgatgggcccgacgaggagttcgattaccagggcatgttctccggcgggaagcaggaggaagacccgcggccgcccgaggaccctgagaacccgtacgggttcctgaggttcccgcagggctacaacccggagctggacagcctcgcctccaaggtccgcggcgacgtgcggcgcgcgtgctgcgtcgtgtcgggcggcgtgtacgaaaacgtgcttttcttccccgtcgtgcagatgctcaaggaccggtaccccggcgtgctggtggacgtggtggcgtcggccaggggcaagcaggtgtacgagatgtgcaagaacgtcaggtacgctaacgtctatgaccccgacgacgactggccggagcccgccgaatacacgcacatgctcggcgtcctaaagaataggtactatgatctgatcatctccacgaggctggcggggatcgggcacgcgctcttccttttcatgtcgtcggcgcgcgacaaggtcggctacgtttaccccaacgtcaacagcgtcggcgcgggcctcttcctcaacgagatgttcaaggcgccgactaacaacctcgccgacggcgggtaccacatgtataaagacatgctggagtggatcggccggccggcgaagaacgttccccagcagccgacacagccgctgcgggtgtccatctccaagaagctacgggcgtacgtggaggacaagtatagccgcgccggcgtggagaagggcaagtacgtcgtcatccacggcatcgcctctgactccgtcgccaacatgaagtccagaggcgacgacgactgccttcttcccctcgggcactgggctcagatagccaaggaaatcagctccggcgacagggggctcaagcctctgttcgtgatccctcatgagaagcacagagatgaaatcgaggaggaggtgggggacgacacaagcatcctgttcatcaccaccccaggccagctcacctgcctcatcaacgactctgccggcgtcgtcgcgaccaataccgctgccgtgcagctcgccaacgcccgcgacaagccatgtgtggcgttgttctcgtcggcagagaaggcaaggctgttcctgccatacgtggagggcaagagcagctgcaccgtcatatcttcggcgacggggaacctgatcgacatcgacctcaacgcggtgaagaatgtggtgaaggacttggagcccgctcccagcttcgcattggcacagaagtagcagctgcgttccaacatcacccccattgctttgtacatagttcaaacagcagcaacgctagagagaatggtgcagtattacaaactacaaacagcacacatgccgtgtattccgatgttataaataacatctcatatcagctatgcaacgaataaaacttagaacactataatgaaaaaaaaaaaccatgatgcttaacccggctcgcgatctagaac

SEQ ID NO: 122955 - DNA, 353 bp, Zea mays
  Clone ID: MRT4577_43616C.1
tttgtttttttttttttttttttttttgtgtttgttcccggagccagagaaaaaaatgatcaactcctatatctgtttttcgtaccagaacaatgtcggtttattgttcgtttacctcggggggttccaacaatcaaatggggaccgggtcattttaatcactgcctcaacaaaaaaatgtttttttagcctacaccttaacaaaattttttccaaaattattctacaaagctttttctgagactatgtgaaaacaccaatggggggagcaaatcttgaacattccaacgtcgaccgatgttacaggcggggggacactttttagcttcagatattactgtcaagagcccccc

SEQ ID NO: 122956 - DNA, 648 bp, Zea mays
  Clone ID: MRT4577_43617C.1
catcgcatccgattccgtcgccagcatgacgtccagaggcggacgacggactgccttcttccccctcgagcacggggctcagatagccaaggagatcagctctggcgacaagggggctcaagcctctgttcgtgatcccccatgacaagcggagagaggagctcgaggaggaagtgggggacgacacgaacatcctgttcatcaccaccccaggacagctcacctgcctcatcaacgactctgccggcgtcgtcgcgacaaacaccgctgccgtgcagctcgccaacgcccgcgacaagccatgtgtggccttgttctcgtcggcagagaaggcacggctgttcctgccgtacgtggaggacaagagcagctgcaccgtcatctcgtcgatgacggggaagctgatcgacatcgacatcaacgccgtgaagaatgcggtgaaggacctggagcccgctcccagcttcgcattggcacagaagtagcagctcccagcatcattccatcgctttgtttgtacacagtaccagagaatgtaatggtgcaggctatcacaaactgcaaacggcacgcacgatgtgttataccgataaataaatgacaatctcgtatcagctattgtaaaaaaaaaaaaaaaaaaggccccta

SEQ ID NO: 122957 - DNA, 1214 bp, Zea mays
  unsure (1)..(1214): unsure at all n locations
  Clone ID: MRT4577_43618C.1
tttttttttttttttacagtgttctaagttttattcgttgcatagctgatatgagatgttatttataacatcggaatacacggcatgtgtgctgtttgtagtttgtaatactgcaccattctctctagcgttgctgctgtttgaactatgtacaaagcaatgggggtgatgttggaacgcagctgctacttctgtgccaatgcgaagctgggagcgggctccaagtccttcaccacattctccaccgcgttgaggtcgatgtcgatcaggttccccgtcgccgaagatatgacggtgcagctgctcttgccctccacgtatggcaggaacagccttgccttctctgccgacgagaacaacgccacacatggcttgtcgcgggcgttggcgagctgcacggcagcggtattggtcgcgacgacgccggcagagtcgttgatgaggcaggtgagctggcctggggtggtgatgaacaggatgcttgtgtcgtcccccacctcctcctcgatttcatctctgtgcttctcatgagggatcacgaacagaggcttgagccccctgtcgccggagctgatttccttggctatctgagcccagtgcccgaggggaagaaggcagtcgtcgtcgcctctggacttcatgttggcgacggagtcagaggcgatgccgtggatgacgacgtacttgcccttctccacgccggcgcggctatacttgtcctccacgtacgcccgtagcttcttggagatggacacccgcagcggctgtgtcggctgctggggaacgttcttcgccggccggccgatccactccagcatgtctttatacctggcacagttgcatactcgcacgcaacgcaattgaaaaactagcaagcaaatcgttgtgcaaatggagggctctcacatgtggtacccgccgtcggcgaggttgttagtcggcgccttgaacatctcgttgaggaagaggcccgcgccgacgctgttgacgttggggtaaacgtagccgaccttgtcgcgcgccgacgacatgaaaaggaagagcgcgtgcccgatccccgccagcctcgtggagatgatcagatcatagtacctattctttaggacgccgagcatgtgcgtgtatcnggcgggctccggccagtcgtcgtcggggtcatagacgttagcgtacctgacgttcttgcactnctcgtacacctgcttgccctggac

SEQ ID NO: 122958 - DNA, 737 bp, Zea mays
  unsure (1)..(737): unsure at all n locations
  Clone ID: MRT4577_43619C.1
cggacgcgtgggtgccaccatcatcacctccatatcccctcgccatcacgcctgcctgcctgcctccctccctccctcctcctttgcactaccgccgctacaaaagagcacaccgcctgcgacctagtgctgccctgttcgtcacaattcacgtacacgacgacgagacgacccctgcgggcagatcttatcttccttgacctagccagttgtgcaggcgcctcgggggccggggcctctccatctgagtgttagattacccacccgatgggcgtcgagctcgacctctccgacttggccgtgctccggccggtccagaccgcggcggcgggcgacggcccggacgccgccgacacgggctgcgtcacgccgacggccgcgagctcccttctgccgcgcctgggcctgggcggcggcctactggacatcgactccgccgcgtgcgtgaccccgacggcgtcgccgtgcctgctgcggccggccacggtgtgccctccggcgccgcggaagccggtggcgcccggcagcaagaggaggaagcgctgctgccgcctgcagcgcgccttcttcttccccgtgccgctcgacctctccacggtgttcgtcccgcgcggggccgacgccgcccccgcggacaggtcctcgccgccttctagggccgccaagaagatccccctgcacgttgtgggctgaagccgtgccgcgccgtgccgtgccgncgggcgcctgctggctcg

SEQ ID NO: 122959 - DNA, 264 bp, Zea mays
  Clone ID: MRT4577_4361C.1
ggttattgaaaacttaattttaaacttgttttaaaacaaaatcttatggctagaaaaaaacacatatccaagacaactcttttagttcacagaataagcaaccctatgttcaaacctgcctagatataaaaatagcaaaaaaacttattgggaataagaatcttctgcccaacctaatttttttttaaaagcctttgaaagcttaaaccaacattctattttttaatcaatcgaaaaaccttcattatctttcaaaaattaaaa

SEQ ID NO: 122960 - DNA, 318 bp, Zea mays
  Clone ID: MRT4577_43620C.1
cacaggccgtaactattgggaccacaccttacaaacaaccattagagtttagggactttacaccttaccaaaccaaaccttggacactaacgaacttaatccacctcctcgatcttgggaccagcaccgatcccaccagacgggggatcctcaaccatgccagctgcagcgcccatgcccgagccctcggcctggtacatcttcgcgatgatggggctgcagatcccctcaagctgcttcatcttggcttcgaactgcttcaccttaaccagctggttgctgtccagccagctgacggcgccctcaacggcattttcg

SEQ ID NO: 122961 - DNA, 342 bp, Zea mays
  Clone ID: MRT4577_43621C.1
attgagaccaactatcaacatatatttctcaattgtgcaccaacaacgggaggggaaatattttgactcattatgctcctttgactttctgcaagtgctgatactggaaccatttacccgaattgctctcaagctcatataggttcagttcttccccggctcctctaaagagcgggtgcactactatgtgaaaacccaactcttgaagcctaccacctccaacaggcactcacaggtcgtcttttaccttaataaccctcaatcactcaacatatattgagcctattacatcagctacatgcgggacatctatactgacaaaacattatggcacagcaacta

SEQ ID NO: 122962 - DNA, 354 bp, Zea mays
  Clone ID: MRT4577_43622C.1
gtccaattcttcggtcaagtctgacgaagcaaatcgaagcggttatgcatatcgtaacaactgccgagagaccttggcgtccacggcgcaatatgttatggactcagatcacatcacatgtgagtgctcctactgaactgcaccggaaatgttgaacaccgaaaaacgcggagaacattgcactggcgtcagcttactgatggtatgtgttactcggtcggtcagggtaagaccaacatcacggcatttacttaatagaagaacatgataatagtcctgattgaaaaactctgcggccatgtttggaattaagggttttcaaaaccatggtatttaaataatactacggtactc

SEQ ID NO: 122963 - DNA, 634 bp, Zea mays
  Clone ID: MRT4577_43623C.1
cattgggtacctcgaagccggccgggccggggcaagtgatgaaaaatcaaggcttgtttctctacattcgcagttgccgcctaagagctttcgccctgccaggcttgagagctagtgctgccccatatccttccttggatgtctgacacaaaaaaaagataaaaaaaaaaaaaaaaaaaaaaaaaaaaaaaaaaaaaaaaaaaaaaaaaaaaaaaaaaaaaaaaaaaaaaaaaaaaaaaaaaaaaaaaaaaaaaaaaaaaaaaaaaaaaaaaaaaaaaaaaaaaaaaaaaaaaaaaaaaaaaaaccctgaggggggccggcccaaccttttttttggaaaaaaaaaagaaaaaaccaaggggggaagttccgttccccccccccaaaaacaagggggtaaaaaaagggaaaaccccccccaaaaaaaggggaaaaagcgcggttaaaaattggaaaaagggatcccaaaaaaagaaacccaaaacactttcccccaaaaaaggtgaaaaaacccaaaaaaatttgggggaaattgggaaaagggcccaagggaaaaggtctctagggaaagggccccggggggataccaaaaaaaggggcccaactacccaaaaaaaaatccccctgggggaaa

SEQ ID NO: 122964 - DNA, 304 bp, Zea mays
  Clone ID: MRT4577_43624C.1
gaccgacgcgtgcgaaacgctagccgtcatatctcactatccattcgagcacgatgccgagggaaagtgacgagggatgtctcgcagaatggcgtcggccaatgtcgtcgcggtctctcgcaaaaaaaatgtgtagggtcttttgacaatcgattgcatcaatccattagatgacaatatcatgtatgtggacttggtctatatgttcctacaggaccgcatcttggccgcctgcagaggacctgtgcccatttaacactatagaaccatgtgtgaccagaatactaacttaaccgtaacctca

SEQ ID NO: 122965 - DNA, 355 bp, Zea mays
  unsure (1)..(355): unsure at all n locations
  Clone ID: MRT4577_43625C.1
ggggggggggggggggttttttttttttttttttttttttttttatctttaaaaagggtcaaagcttttacattttattataatttagaacagacaagagtacatgcgatacatttagcaactaaattaagcaagcacatggcacaacagggggagaaggggggtttttttttttagaanaaancacgcgggcaaacaggagacggacggcggcacacccagggnggaanncacccgcagaaaaancacgcaaacaggaaaccggaggggcaaagaannnnaaggggagaccccgannaacgaccgaacaccgagaacagggaagaaccnggaacggcnaaacccggccncgaaa

SEQ ID NO: 122966 - DNA, 101 bp, Zea mays
  Clone ID: MRT4577_43626C.1
gaaaggattgatcgtgatcgaagtggcaggatcgacatataacagctgcgcgatacacgtctcagtctcggatattctatgtctctaactgtccatgatct

SEQ ID NO: 122967 - DNA, 394 bp, Zea mays
  Clone ID: MRT4577_43627C.1
aacgttctttatctgtatatggcacgagctgagccggcgcccataccatgcgcgcggtagacagagaccacagccggagccatcgacaggcggaataagaatggtgggaccggtgggaggagaaagatgaggtccgtcacaggggccgacagctgaggagctatgacactgtgcggaagaaggtggcggctattagctgactgaatgaccaggaggtgatgggtgttgattgcccctacagaatatgcactttgggggctcatattgatcatcatgctggagtagtcacagttgtgaccataaatcatggagcactttgctttcacggtttggttatctcaccttcaaggactgtaagacttgtttcacctttctacgtctgttttttggagct

SEQ ID NO: 122968 - DNA, 377 bp, Zea mays
  Clone ID: MRT4577_43628C.1
acgcccacgcgtacgcgctggaagaagttggtactgaactctgatcacgctcccacgacagaaccgcgacctttgtgcctggtggctcaacctttgactcttccgtgtactttgtcatgatccgggggggatatgatgggtgttccattgtcggtggcgtgcaagtcagtgctggcgctgatcttgcggacttcatgatcccaggcgtgctcttccatggcatagtcggggcactggatcttggacgccacccccctgccacaaaagggattgtccggactgaccgatcactgcaaagactgatctaccaaaagtgcgaattagtgtaccttgccactcactggtgcgacatgcgtgtgcaccatgattacatattt

SEQ ID NO: 122969 - DNA, 237 bp, Zea mays
  Clone ID: MRT4577_43629C.1
ttttgtttttaccatacaatcttaagcagtgaaggggtttggggtttattatggactgcaaaaaccaaaaacaatgggctcaacagacaatgattacgcctggtgtacgggcacgaactcatattgataaacacatagcatcagaggggcccacagaaaaggggagataggatccgcgccttaaccggaggaaaagaagactttcaggtgacgggcataggcataatgggatacacg

SEQ ID NO: 122970 - DNA, 780 bp, Zea mays
  unsure (1)..(780): unsure at all n locations
  Clone ID: MRT4577_4362C.1
ccggaattcccggctcgacccacgcgtccgccacgcgtccgctcttctctttctctttaaatctcttcgccgtcggactcaattatccgttaacccgacccgttaaaaaaccttcaaagtggctccgattttgatttcaaacactaaaatatttatttacctaaaaacatgagttcactacaatgacccgtaccgaaccaaaccggagccggagctccaattccgattccgataagaattccggtaacgtcggcggaggtagaaccaccgggatgagggttattgttccgttacaaggtgtggacaaggtcgtggtggtttattcttaggctctgtgattccttgtgctttcttctactttcttcagttttacctaaaacgaaatcgtaaaaacgacgaatcagataattccggtgaacaaaactcctcagcttcttcttcttcttctcctaattcgggtttaccggatcccacccggtcacaatccgctggtcatctcacggagcttactggtttacctcgttctctctctcgtattctcctctcgccgagaaattccggtggagctgtttcggtttcgggtcgggttaattgtgtactcaaaggtggagattcttcgccttactacgttggtcaaaaacgggtcgaggatgatccgtatgatgagttgngtaacccggacggagttatccaacttggtttagctcaaaacaacaagttgagtttggatgattgggtttttagagaatccaaaagaagcattttcagatggattgagta

SEQ ID NO: 122971 - DNA, 532 bp, Zea mays
  Clone ID: MRT4577_43630C.1
ctgctccccagctcacctaccagtctcgtcttcccaagatttccagatcgagcagagagccatggcgaacctcctctcctcggccccgacccacgcgacgctcccggactgcttcgtcttcccgcccgatcagcgcccgccggcctcctctcaggctgtctccctcccggtcatcgacctctctcgcggccgcgacgaggtccgccgcgccgtcctcgacgccggcaaggagctcgggttcttccaggtggtcaaccacggcgtctctccggaggcgatacgggacatggaagcggtgtgcgcggagttcttccggctccctgcggaggacaaggtgggcttctactcggaggacacggacaagcccaaccggctcttctccagcaccacctacgagctcggcggggagaagtactggcgggactgcctccgcctctcttgcggctcgcccgtcggcgacaccaagaacaactggcccgacaaaccccaaaagctccgcgaggtggtggagaagttcgtggggcccacaaga

SEQ ID NO: 122972 - DNA, 645 bp, Zea mays
  Clone ID: MRT4577_43631C.1
catatctcgaggccggccgaaaaaaaaaaaattaacccaaaaaaaaaaagtcccgacgataaccatcggcggccacagacccgattcatcctgtacgccatcgctaacttggagaagaaagatggagatcggtgggagccagtgatggcgaagatggaccgactggcggagaaggttgaaggagtggatgcggtgtagcaacaactgatggtccgagcagagctcgcggcaaccgtggccctgaaggcgatggaggagcgagtacaacaggcacaacaactagagcagacggggaaggaggtggcagagatgagactagagatgatggcctgagatctagaattctcggagatggcaatcgacgaacgtcctcgtggggagccacgacaaaccagaacaccacaacagcaaaggttttgtggtccttctctagttcgacaacgtgagggagaatttcatagggaggaggatagagatttccagcacatactactacctagattagccttttcgaagtttgaaggagttgaaccaaagatttggttgcggaagtgtgtggattactttactatgtattgtgttcctgaatcagtctagtttgcttctgcatccctgcgcaaaaaaaaaaaaaaaaaacccgcggcc

SEQ ID NO: 122973 - DNA, 490 bp, Zea mays
  Clone ID: MRT4577_43632C.1
ccggccgggatcgccacgcgggcaggctgactcctccagacgtcactgctgtttgtcgtgaacgaagtagcagctccttagctacaggaacggtctccgagagcagcgtagcatgatggacgggggtgggtacgccgccctcgacgacacgaaagaatacacgcgtagcacgaaaactgggcggcccaacgtccacaagatcacggaagtcatcagggatggcggactccaacctccatagtttcccggcataagaggccaggggcaagatcactggcggctaccagccgacccaacgacggcgaccataccaatctcctacaaggctcaaggagccggaagttgtgctaaacgacctcatcgcaccgattggatgatgtcgtccacgacgagtggctccgcatgaactatgcggtgtggaacaaggcctacttcgacggcgacacttatgacgtgccaagaggatctgagacagcgtgttccccttcta

SEQ ID NO: 122974 - DNA, 227 bp, Zea mays
  Clone ID: MRT4577_43633C.1
aacaattattaggaaataatcgagttagagctgtggctatgagtgctacagaggggttgatgagaggaatggactatttcttcaccggaactcttctcaactgcccatctgccgtaccggcttgcggaccagttggatctttgattgagtagtctttctttttgattgacctcctctctgctctggaggaggtcctgttgcggttgccgttctgctttgtttttttt

SEQ ID NO: 122975 - DNA, 378 bp, Zea mays
  unsure (1)..(378): unsure at all n locations
  Clone ID: MRT4577_43634C.1
gtgatttgctatgcccgctgncaagcgagcccgtaatagcttcacggttatgggtgaatccatccgctgcaactacgatgggatgcaagtctcatctgatggagctgtgcatgaaagtggtcgtgctgtcattgaagctgccttcattagtggctcaaccactttccacacatccactgttagatctggccttcgtctcctacttaactcagcacatctcaaggcaatatgcgcaagttggttggcctgtatgaaaggccaacttccagcagtgctatcgatgatggaatgcaaattttctttctcaatggcatcttccactatttcggcaatcctttgaggttgtttccctgtcaatagtcgcaggatgataatgcc

SEQ ID NO: 122976 - DNA, 212 bp, Zea mays
  Clone ID: MRT4577_43635C.1
accgagtccagctggcctaccatctagggttggccgtcgtttctgtgcgtaggaaagcgcgtgggaaacgagccatgccgactgtcaaatgcttaacgtaacaaagggctaacgcatcatattcccacatgacagcaggccatggcctattcggctgccagtactgcatgatggccaacaactacctgtctcttgaacatcgagacgccgag

SEQ ID NO: 122977 - DNA, 269 bp, Zea mays
  Clone ID: MRT4577_43636C.1
aagacagttggaagttcaggcgttcgttcgaagttcacttgatcttaatcacacgacatagctaatcatgtctgacaggatgtcgtggcaaacatacttaggtgagcacctgatgtgcgagatcgaaggccaccacctgacctccgctgacatagacggacacgacggcgccggttgggcccagagcaccgcatttccacagtttaagacagaggagatgaccaacatcatgaatgactttcccaaccccggtttttttgccccacccg

SEQ ID NO: 122978 - DNA, 506 bp, Zea mays
  unsure (1)..(506): unsure at all n locations
  Clone ID: MRT4577_43637C.1
caacctttatctgtttcagcaaggatggtatcagatgaagattagtgcaatgtgggaggaaggtggcaacaaaacaccggcttcacctgccagggtcgtgcaatatgaagcttctgatgttggtgcggatgatgcattaggcatttggaaaatagatgacgtcgacaatagcttccacacacagccgtttcggatcaagtatgccagacaagatatctatctgtcggttatggtgtcgttcaacatattcaacattgaagaggagggtccagcagcctcggcggtgatgttgaagtttgagctgatgtatgccccaacactagagaacgggtctgagcttcaagcttctagtgtcacatcttcagcagctgtgcatgaatttaggatcccacacagagcactcctgggtctacactcctactgtccagttcactttgatgcgttccactctgtgcttngtgatctgacattacacatagtgtacctgaaagctggtgcaactaaac

SEQ ID NO: 122979 - DNA, 377 bp, Zea mays
  unsure (1)..(377): unsure at all n locations
  Clone ID: MRT4577_43638C.1
gtaaccgcaatagaatttgacttccttctgtatttttttttcataatgngtaatatttctatttgtgggaggaagagatttaaaaaaaaacaccatgagaagcagcaggtacattgttttttattttttaatctataaatccaaaattttggctaaagctttcatatgcatataacttgcttttatcattttaatatttatagtcttgctaccaaattaagatagaaaataaagtactacacttgacaaacaaaatatcatatgcatccatatacctggtggttatcaattggtaaactaaactcacaaccatttaaattttcatgtaagcttttctctcaataaagaaacacttaaattccatctattgtgcaaca

SEQ ID NO: 122980 - DNA, 661 bp, Zea mays
  Clone ID: MRT4577_43639C.1
tgccactgaagcaccaaaaaatacagaaagctctctgtagacctgcaggctgagctacactccttcaaagtttcggcaacccaagcctccgtatgctcgacaaaaacatttggaggttgcacagaacacatcatttggtcagatcccaaggggaactctatttacaggaggctggaaactagtctgtacaagaacgaagcagttaatctattcttctctgataccaacgcttgggtatattaacatcatcctatcttatatagctcactttcatgtatgggccatataataccctgtgtttcctttcactcatgctaattcacgcgtcaggttagaaacaagaataacataagagtttccttgcgaaggaacacctcaagagtctaaagtctaaagggtgttgtcccaggtcagatgtctatcactattagtctattatcacctgccaattcatgcacatcatttccatcattgtctgtgcgaatcatacatgaccaagagttagcaaacagagaaaataaataatcagacattcagatgggtatgtgctgtgtgtagcaacaaattataggatgacgaacatagagtatttgcatgcttgttgttgagtattgttcatttaccggaccatctaaagcctttgtttctacactgctctata

SEQ ID NO: 122981 - DNA, 282 bp, Zea mays
  Clone ID: MRT4577_4363C.1
gcaggggaggattatattgctagtgaagccactgctgaaccagaagatgctggtagagcttcttgcaatgtagatgacactgctgctttagatgagccacagccgcctaactgtgatctgtacttaggcaatgtgcaagatggaaatgctatagacactgttaacagtacactgcaagctcctcgatgtgatgctgcagaaggtggtggtcctgtgaatttcacaaccataattcctgttagagccagaggaccaacctttaagggaggagtgctgaaggat

SEQ ID NO: 122982 - DNA, 1441 bp, Zea mays
  Clone ID: MRT4577_43640C.1
atatagtgttgacctggcgttgaggctgcacagcatctatctgtcacttgcacgagtagtgaatgatctgttggccaccacccccacgtgacatttatacggtctgtttcttttttaaatgcgaatttagagctgtttggtgtgaatctggacattccaagatcctgttgttgtagtccacagaacagtagcagacgtccacgttaggtgtttagtagagtagtatagataagctcagcgttgtagtgtaggttaaaatctagcccctatcttacagcaaacaggttccgaatttctcaaactaaataatctacaaagaaaacgccagatggtccaaacccatttttgttgaaaaataaaaacaaaacaaatcctcgaggccggccgggccgggtcttattgaatctcaccctcttgttttgtctttttaattgacctggctcttctaagtcatcgcccctttctcgaattcttgtcgctgagtataatatatgttgctgaggataatatgcacaaagccttacagccacaagccactgaagcaccaaaaaatacagaaagctctctgtagacctgcagtctgagctacactccttcaaagtttcggcaacccaagcctccgtatgctcgacaaaaacatttggaggttgcacagaacacatcatttggtcagatcccaaggtatctactatcatgaaagctagaacagatgcgttttctttttgcttttgtcatgcttatcaatttcttccttggcatctggtattttctttgctggataaatttactttccctgcctcttcttaggggaactctatttgcaggaggctggaaactagtctgtacaagaacgaagcagttaatctagtcttctctgataccagcgcttgggtatattaacatcatcctatcttatatagctcactttcatgtatgtgcaatataataccctgtgtttcctctcactcatgctaatttcctggggatgttagaaacaagaataacataagagtttccttgcgaaggacacctcaagagtctaaataaagggtcccagagtacgagcaaggaaggacttcaagaaatacgggtgggatggaagtagccttggtatcaactgtattgaaggttttggggacgaagttagctcctcttgcactcaaagagttgagctctaaagcaggtgtggccagagatcttcaggaactccaggacctagttgaggagatcaacaattggttgcaaacagttggtgataaaaacaaaacaaaacaaaactggaacaagtagcagctgggccccgcttgcttgggaattggattgagatccgcaaccagcatgcgcagtgtccagactggaacagaatttggttgtgcaaacccaaggaaggatctcatcttctcttgtcttttttttccggtcaaaaagaaataattaaggg

SEQ ID NO: 122983 - DNA, 1202 bp, Zea mays
  Clone ID: MRT4577_43641C.1
cactccatagggcgccggccgggataaaaccgggcgtgccaccacggccggccggggcctccgacccttcgagccccacccgacgcgacgattcctctcctccgcccgttcccaccgatctcacgctctctctcttcctccgtcgcgtcggcgtcgccatcgccggccatgggttgcggtggctccaaggaggccgtggccaccggcaacaccagcgccggcagcaaggtcctccggaggaagtcctcctccgtctccaccggcgcaagccacacctccaccacgtcgccgtcgtcctccggcgtcgtcgtcaaggacgtcgtgaaggatgcggcggcggccggcgaggtgatgacgcccgccgacgccgagaagcctatctctgtcgaccccaaggcagacgccatcgtggtgatggacgccaagaaagaggagggcaacaacaaggtggccgtggaggaggatctgcttcctgaatccaccatggccgacgaggcgcttgctgtggaggaggggcccaaggttgacgaaccactcaaaatcaaagacggggaggagaagacggttgagagccaacacatcgaagaggagcatccgatgaatgaggatggggattcagccacggagcccctggaagcgagaccggcggtcgacgagcacaaggcgaaggaggcgacgaccgtcgtcccagcaccgtcggcggaggaggagaagaccaccaccgacgaacaggccgctgccaactaactgattacaaggaggccaagagctagacgacgtgcatccaccacgatgcattttgttcaactgaattcgggcgccgggcgggctgtctctgtttgtgtatcctcatgcatgggtgctttcgttgtacgtgggccgggctggactcactcaatataatgtgttcgatccatcgacccatacaaaaaaaaaagaaagttcaatgaatctgcgttgtggactactttacattcttaaaaaaaaaaaaaaaaaaaaaaaaaccagggctctccggaggctgaggaccgcttgtgagagggcgaagaggactctgtcttccactgcccagaccacgattgagattgactcgctgtatgagggcatcgacttctactccaccatcacccgtgccaggtttgaggagctcaacatggacctgttcaggaagtgcatggagcctgctgagaagtgcctgaggg

SEQ ID NO: 122984 - DNA, 170 bp, Zea mays
  Clone ID: MRT4577_43642C.1
taattggcggatgcgggagtggtggtggtgctcgtggtctctcaccggagcaccctgtacagcatcatcgctgctgcattagatagtgccatagttggagctggtaactatccctcccccctccgttcccgtaccgctcgcatccgtttgtcaagcctgctcagtgccca

SEQ ID NO: 122985 - DNA, 768 bp, Zea mays
  unsure (1)..(768): unsure at all n locations
  Clone ID: MRT4577_43643C.1
gccggccgggtcgggatgatgtggagatattagaagtgaggccttccaaagattgcctggggctaatgggtctgttcttttaggaaatgtcaacctcagccttcaaatagtgagggctattcacatatgaagagttggagtactgatatacaagcacatcacagctcaactgcgcatatactgaataaaccagttgaagattcatctagtatgaatagatctaattttcttggtgtgggaatatctgctctgcagaaccatcattatgcatcacagggagtaaacttgaaccccataagcttggaagcaaaactaaaggaacaatgtgctggtaaagcatctggttcaaggttctttggaacaaatgaggaaataaggaacaacaatccatttcaacacagaaaggatgactccaactctagcatggcattgtacaaacaaaattgcattggttcctcaatggggaattacgctcccaatgctagcaccttcaatcactccattctttctccgcttggcttcaaccatgcactgaatcttccatggcaaagcaacaacacgagctacttgactaagagtcattgtggtgctgctgaaacattcattcctaaggatgccctttccaatggtatctcagtggattctactccaaaggcgccctatcatcattcactaaagaatcacggaggtgccggatatcaaaaacctcctgcactacatgataacctgaaggatatagatctgaatgacacaccagntgatgtcgct

SEQ ID NO: 122986 - DNA, 504 bp, Zea mays
  Clone ID: MRT4577_43644C.1
ccggccgggaaaactactcctaacccccgtttacagaaactttctcgaaactactcctcctcctccactactcactccgatggcgaaagaaaccgatgagcatattcgtcactgcatccccaaggaaaactacatatgatcttgttaccatgattgttacgccaattatgatttgagcacaccaaactgctattcgtggacatgcttgatattccaacagcagctgaagcccttaatgaaggtaagatggaggtacgtgatgatgaatatcctcttctcaacggagttgatgccacaactgatgatgctgaagcgtgcactggactaaatgtggaccgcaaggaaggagaattccccagaaacgatgctacgcaaaagaaagaaggtatgcctatacatgagtcaatctacgaaacccaatcatctgatcctgaattccatgagggcaccaactgctagggttctggtgcctgacaagccaacgaaaacctatggtcttatctt

SEQ ID NO: 122987 - DNA, 656 bp, Zea mays
  Clone ID: MRT4577_43645C.1
ccctgctccaactcttcccccgccgccagagccccgagatccgccgctgccggcaacaagaagccgacgacgtgcctctgctcgccgacgagccacccggggtcgttccgctgcagccggcaccggaacggggccgccgcgccgggcggcgaggcggtgcacggcgccggcaggggcggcactgctggcactggcagggcggccaaggggcggtccgtgcgcgcgctgctgctccagaggatcggcggggggcccagcgagctcggcggccgccgccgccgctgccgtcgcggggtcggcgacttccagccgcggccctccaggctgcgcctcatgaaccagtgacgccggcgggcctgcttcggtctcgtcgctgctcctcctgatctagcgccggtggtgcgccactatttcgcgcgcacgcatcggttcgacgacgcgacgctagatcgtactacgttcttagcagaataaagagcaaaagctgttcgtactgtactcgtagcctgcagatctggaactgtgtgtacatagtgtcgaggaagacgaagcaacgtggttcgttcctccatttctgatggctccatgtatgcctatggtctgtaactctgcttgtgtttttttagagaggaaagaaagaaatccatggaagagtg

SEQ ID NO: 122988 - DNA, 392 bp, Zea mays
  unsure (1)..(392): unsure at all n locations
  Clone ID: MRT4577_43646C.1
gacccacgcgnncgaccaccatcaccctccggagcgncgcagcgaggccaccctcatncgcccctnnacccgnccatggcggagcgcggcggcgagcgnggcggcgagcgcggcgggnnnggccgcggccncgggcgcggcgggcgcggcgaccgnggcgggcgccgaggcggccgncgcggcccgcggcaggaggaagagaagngggnccccgnnacgaagcncggccgccccgncaaggagaacaggancaccaagancgaggaganccacccccacncgccccccggcaaggagcaccagancancgagacccncgngccggggcncaaggacgaggngangaagancacgcccgnncagaagcagacccgcgccggacagcgcacgcg

SEQ ID NO: 122989 - DNA, 327 bp, Zea mays
  Clone ID: MRT4577_43647C.1
cgcgctccggacttactggctcgaccgacgcagtgcgtttgtgactgcacccgtgggaacggcaccgggggcgagtccatttacggcgagaagtatcccggcgagaagtatcgacgcaagctcaccggccccggggtgctgtacatggccaacgccggccccaacaccgacggctctcagtgcttcatctgcaccgcggatacccactggctggatggcaagcacgtcgtcttccgccagcacgtctagggcatggaggtccgaaaggtcatcgagaaggggggctgcccgaacggcggcacctccaaggaggtgaaggtcgctgac

SEQ ID NO: 122990 - DNA, 282 bp, Zea mays
  Clone ID: MRT4577_43648C.1
agcagtgggcgcaccgtcgcgccagccactttcgttggctctgtagagaggggaccaagggtttctgttggccttgccggcaccccacaggctgacaggggggggggacccccctccgctggcggaggggccgacagctcccccggccaaggcgcaagccgagaagcggcccttccaggggccgaccacggcgccgccccatgggaggacgccggcagcggggcccctttagaaccccgcccactccagaatctccctctggtcaactgagggggggggggg

SEQ ID NO: 122991 - DNA, 309 bp, Zea mays
  Clone ID: MRT4577_43649C.1
gcattgcagatattcaatacatctagtgtttctctacacttcattgcatctaacaatgactggggtgtaagagagtatgatatgcatagctatcattcgtttaaccataatctatttaatctcccactgaatcctacgtcatctatccctgttggaaacctggtaatcatcgttgttgatctcacaaatcctcaactattgcttcctatttcaggaaatcctattcattccattaaaggtcacttgtatttctcctttgctccgacttggagcccaaatggcctaacattacccacatgcaaccaagac

SEQ ID NO: 122992 - DNA, 232 bp, Zea mays
  Clone ID: MRT4577_4364C.1
attctgctgtggttgctcactatttgagctacacccttcacttagaattagactcttattagctgtggggtctatctagccgcgccactccttcttgtggccatcaaccttcttattggcaccaatgggcactggcgaggtgcaaacccccaccgccgtggggggccaggaaaagcccccggtggagaaccccccgccggccgtcgtgccccaggagagtttccccccccag

SEQ ID NO: 122993 - DNA, 1160 bp, Zea mays
  Clone ID: MRT4577_43650C.1
gactcgcccaatgcttatcgaaaacaccatgaaaaaaaagctgtgactcttgtgcttgatttggacggtgagcagcactaacttctcgtggaatattacttttgaatgtgtcttctaatttctggttctttattgttcactagctactggcatgttaccattatttttcagttaatcttctatgttatttgcctgtcatgatcaggaatatgaaattcagttgtaatataaacatttttgctccaatattctttgtatgatagtctaatggtttctcatatgcagagactctggtacattcaacattggatcactgcgacaatgctgattttaccctagaagttttctttaatatgaaaaatcacacagtgtatgtgagaaaaaggccttacctgaaaatgtttcttgagaaggttgctcagatgtttgaggttgtcattttcacagctagtcagagagtctatgctgagcaacttatagataaacttgaccctgatggaaaatatatctcacggcgtatttatcgtgaatcttgtgtattctctgacggttgctatacaaaggacctgacaattctggggatcgacttggcaaaagttgcaatagttgacaatactccacaggttttccagttgcaagtggataacggcataccgattaagagctggtttgatgacccctcagatcaggaactgatcgagttgctcccgttcttggagagcctcgtggattcagaggacgtgaggccaataatttcaaagacctttcatgacaaacttgagcagaattagtttgaggcgacagatgtatcatccagtgaacctgtcgctgaagttagcttcgctccacatggtgcaggccatcattcttgggaagttagatataggatgaaaaatcacaatttctgttatgttagctgttacaaatagcaagcataaactgcggtcgttgtctcgtcgatgaaaatggcttgtatatgtatgtccctttgggcttccgtgtcacggatcattgtacagagacgaacattagtgctgaataaagtgatctgagtgcaattttgctcaaaaaaaagtcctcctttttactaataaggcttttattttagatgagcccaacatcggaccatagttgtgcgcgcatggtgcacgccattcttt

SEQ ID NO: 122994 - DNA, 183 bp, Zea mays
  Clone ID: MRT4577_43651C.1
catttctctagctcagcctcacaggccaaagcatcagcaccagaacgcatccccagcccaaccccaaagagatagaagagagcaaaaagctgcagccggtgcttgcacaccgccttgcacatagcagatgctccgggctcactccttcctggtggtaaaggaagatgcctgtactctccgtgg

SEQ ID NO: 122995 - DNA, 328 bp, Zea mays
  Clone ID: MRT4577_43652C.1
aaccaaaaaagcaaatcatcccttaacaacccaaatcagtcgtcgggggaagccatgcaaaaaagcaaatcatcccttaacaacacaaatcagtcgtggggagaagccatggttttctggatgggggatcagcccaaaaaaaaggggcgccttataacaattttaaaaatctgccaaaacaaacgttgatccacacctttccggggcacaattgccataatctcaacaggaaactcaaaatgccccaggacggtttgaccagatgttttgaatgccgatcaaggcagttttttttataattatcacgcaaagctccagcccgggttga

SEQ ID NO: 122996 - DNA, 420 bp, Zea mays
  Clone ID: MRT4577_43653C.1
aaaatcaatttaattatacttcattctggggttgtcttacccaatccataaaaaagggaaaattacatcacctggtcacaactaatgaatgtactgtaatggctgcatttaagtcacagacttctacataaccatcttaactaatggaccactaacctgtcggtgcactgtgaaaatactccatctttcttttttataacatacaaatactatgcacagccactgatatttacacacagattgttacttgagatccaaacccactgatttaattacaatggaacaacatggtacttgaagcatgcgcttgaaacatataataccacatagcttctaaacaccataatgtccattcacatcattaaacgcattaagcactgctaaatcaaatgattataatagtccacatatttataccaa

SEQ ID NO: 122997 - DNA, 342 bp, Zea mays
  Clone ID: MRT4577_43654C.1
ggaaaggggacccggggccgagctaaatcgagctttatattagcggaccttagcatatcagtttcagaaaattagcttcactggcactactgattttaccttgcagccaacgccgcacattattccacaacaacaggggcccaggaaagagaacaataactgaagagggggggctgaaacaagcaagtcccaaagacatttgccccggccatttattttttcagtccaagcgcgccaaggaaatttaggacgtttttgggggagctgccgcctttggttatgggacttctgggcttttcctttcaaccgggagggttccggatgtagtccaagcttcttttt

SEQ ID NO: 122998 - DNA, 339 bp, Zea mays
  Clone ID: MRT4577_43655C.1
aagcaacataaatagtgcaattctttatcctcaatagagcatcaatctcaggggggatattttacatacttatgctcaacgctctctctgcatactggtgctaacacgaccatttttcctcaatactcacaaactactatagctgcccttcttacaccataccttccatcaatgaccgcttcaatatgagaaaacccatcccttcaaccctacaggctccaacaagcaatcgcaacacgcaacttacctttatcacccctgttctttcaacaatcgccagccctatctttagtgcagtcagtggtacaaaaccatcatgcacaacagctgcagcaactc

SEQ ID NO: 122999 - DNA, 636 bp, Zea mays
  Clone ID: MRT4577_43656C.1
aacgggcagagcaagcaatcaaccaaccaagagatcgaactcgtcatatagatccatctagcaatggcgctagctcgccgtcggccagccaccctcccagtctttctcagcgcattcctctacgccgcagccttcctcgctggcccggccgcggccatgggaaagacgggcaacgtcttcgtgttctggggccggaacaaggacgaggactccctccgggagacctgcgacaccggaaggtacacctacaccaccgtcatcgtctccttcctcgacgtcttcggccacggcaggtaccacctcgacctctccggccacgacgtctccgccgtgggcgccgacatcaagcagtgtcagtccaacggcatgtccatattcctctccatcgggggcttcggcggccagtactccctgccgaggcgcaggtccgcggcggacgtggccgactacctctggaacgcctacatgctcggcacgcgcgcgggcgtccaccgcccgttcggcgacgcctacgtcgacggcatcaacttcttcatcgacggtgcagccggcgcgcggcccgaaaactacgacgagctggccaggcggctatgggactacaacaagggctaccgtgccaggacgccggtgcagctg

SEQ ID NO: 123000 - DNA, 275 bp, Zea mays
  Clone ID: MRT4577_43657C.1
ccttcctttcagacagttataaaattaaaaataattattttaaatgctcattcaaatgtgtctgtatacttgctatgcccctttttctataattccaaactgagactgatttttcagagatttttaactttaataattttcaatctagaatcaagtgaaacagatatgttaaatactgagtctagttttcttccatcttatggagcttcatggaataagaaactaatctagtgcaaatgccgattaaatatttctgggtgatggagagatagtcc

SEQ ID NO: 123001 - DNA, 210 bp, Zea mays
  Clone ID: MRT4577_43658C.1
tccttcctcgtcgcggtcgtgggtcacttgccgccgcgccggcaacgtccccttcccgtccccagccacgcataaatcaatcggtgcattggtccttggcacaacttgattcctgattccctctgttgttctccacccgctctctctctttcgcgtggcatttcttcctgccagtgacgaattggcgcgcgccgccgccgctgcctgccc

SEQ ID NO: 123002 - DNA, 342 bp, Zea mays
  Clone ID: MRT4577_43659C.1
attcggctcgagcgcaatgtcattctttttcttaggacaaacgaatcccgtggctttgcctgcgtgactatggattctttagaaggcgcaagacgctccatcaagtatttgcaccggactgtgctagaaggtcgcctggtcactgttgcgaaggctgacagaactcgtgaaaggacccttactcctggaaaatactgcggtcgaagaggaggttctcaaaggagccctttaccttaccaccatctgagaagggagtgttagggctcaaagaaacgcagatggtagcgtccgagttgaagggttcgatgggagcggtatagctcaagggatcgaagggagcat

SEQ ID NO: 123003 - DNA, 163 bp, Zea mays
  unsure (1)..(163): unsure at all n locations
  Clone ID: MRT4577_4365C.1
gaacaagtagttgcacacccccttntcctttattaatccccgcctcctaataaccacatgaaaccgattctttctcattcgggggggctcattttatcacccctccaagattttggtctccaactgcctatttcatagtttgaagtgtatcacactattcttt

SEQ ID NO: 123004 - DNA, 571 bp, Zea mays
  unsure (1)..(571): unsure at all n locations
  Clone ID: MRT4577_43660C.1
tcgcacacagcgtaccattaattggtcaagaaaccgtacctggnnttggtggtgggtagtnnagctactagcttactataaacgatggnaccagnatgnnctgggcannagcacctgcagnatgctcttctcgtgnactaccgagnccgccgcctgaccagcgagggggggtggcgccgccgccgtcgcccgcagnncagcagcagcagtagcggggggcggtgcggaagnctgcaagtggggcagagtgnnggtgtcggagatcctggcagccgggccacccaagacccgcgcatctggctttcggcagcttcgagttcggcccgagaatgnggccgcggtgggcgccacgagcgtggcnggcgctttcgccttgcgggtgccctgcgacgcgcagcttcaactttcccggngcttgcgtcgcctttgggtttgccccgcccgggcgagccttcgcacgccgccgccgacnngtccgcgccccgcgggcggccccgaggggcccgccgnaccccgcgtggcgccttgcgaacccccgggcgcttgctttgctggcttcccaggcagggcg

SEQ ID NO: 123005 - DNA, 385 bp, Zea mays
  Clone ID: MRT4577_43661C.1
caaaccccagaccaaagggattttgtttcataaaatatagggggggggaaaaaagaccaccaaagcccccccatttcaaaataaaccgcgctgaaaaacaagctaggggcccccgttccttgcctacaacgcaggggggcgtcaacccccgggggccatttttctcccttcctattatagccccccaaaaaactccgttggggggtgaatcccaccccccttgttcccccgacgggggtagccttggtgccccatttccccttggcatacggggcgagggccccaccgctcttgattttccccccccccggtgggttcaagagggacatctgggccccctttttttttccctgggagggcggctccccccgggcctggggccttg

SEQ ID NO: 123006 - DNA, 326 bp, Zea mays
  unsure (1)..(326): unsure at all n locations
  Clone ID: MRT4577_43662C.1
tcgactcttctccctccgcggatcacacctttcccccttctcgaattcccgccgccgatccgtctcgtaacgcgacaccatgaagggagcgcttttgatctctctcgtccaggccggtattcgacccggaaacacttgctgcgagctgtactgccccgtacatggcatanangntgacggacctatgcccggtgacgatatcattgcgggcacgcgatgatgctctacacaactactttagtgcgactggtgctgggaagcacgtgccccgtgctgttnttgtatcaattgancccactgtcatcgatgatgtgactcctggcacc

SEQ ID NO: 123007 - DNA, 470 bp, Zea mays
  unsure (1)..(470): unsure at all n locations
  Clone ID: MRT4577_43663C.1
cggnncccccttcacccaggggggaatttgacataataaccctggaaaatctattttatagacctagtggacgggaatacgaatcaatttacctttatgatatgacatccggtttgaaaccacgaaatcgacgacgcctttcagctcaacattccaccgaaaataggggaagtgctgcgtcgaatcgcgctttatttttatccacatggagaactttccggccggggactgatttattttcttctgggcctattcttttcaaagcttggcgttaacgaggatgacgatcaacggcttgttcgagcttttggcgagcacttggggaatatcacccggttagctttgccttcacctgattcttgggatttcttggggatacacgaacaacgacgacctttgattgaagtctttggccgagcacttgataagcgaggacatagaccccggtttttttacataacggccgggat

SEQ ID NO: 123008 - DNA, 146 bp, Zea mays
  Clone ID: MRT4577_43664C.1
acgacccgtccgaccacgcgttgggtaaattaacaatgctactcccaatgtggtagacacacgccctcatcttcccgccggtggcccgtccgctcaggtcggtcggcttgtactgtctcggcaacccgacctgcgtcaatcgtcat

SEQ ID NO: 123009 - DNA, 247 bp, Zea mays
  unsure (1)..(247): unsure at all n locations
  Clone ID: MRT4577_43665C.1
ggaatttgcttgcatgcacccacctcacncgtcgggcacacgggctcgtcagacagcgcccgggcgccgaatcaccagacgggatcacgccccccatctgacgccaccgaggccggagcccacagcgaccgcgcgcctcaaactccgatctaaaagaaacatcggagaaccgtacagaacaaaataagtacaggtanttcatcatttgtctcggtattacaataatgtggaaacacaatccctttgg

SEQ ID NO: 123010 - DNA, 180 bp, Zea mays
  Clone ID: MRT4577_43666C.1
ggggcccatctctttttcttgcattttttttggttttgcattcgagtccaaacccaaccaggtactgatctcgactggggtcctaaagactactggtactggtaaaatattcccgccagaattgaccaaagagggcttcctaaaactcccttttacaaaatttgcaaaaaagcccccccc

SEQ ID NO: 123011 - DNA, 1072 bp, Zea mays
  Clone ID: MRT4577_43667C.1
atcagcgataaggatagatgcccacaatgcaaaggtgatggtctctccagaacccttgcactcattgcaaggatgctgcatttgctgaatcattccaggtcccaactgcagcatccttgcaatgagtgcaagggttctggagagaccatcagcgataaggctagatgcccacaatgcaaaggtgataaagttgtaccggagaagaaagttcttgaagtggtagttgagaaaggtatgcagaatgggcagaagatcacattccctggcgaagctgcaccacgcgcctgatactgccactggagatatcatctttgttctccagcagaaggagcatcccaagttcaagagaaagggcgatgacctcttctacgagcacacactgatcttgactgaatctctgtgtggcttccagtttgttctgactcacttggataacaggcagctgctgatcaaatcgaaccccggcgaagttgtgaagcctgattctttcaaggcaatcaacgatgaaggcatgcccatgtatcagaggcccttcatgaagggcaagctgtacatccacttctcggtggagttcccggactcgttgagcccggagcagtgcaagaccctggaggctgttctcccgctcaagccagtatcacagtacactgatatggagctggacgagtgcgaggagacaatgccatacgacgtgaacatcgaagaggagatgcggaggcggcagcagcagcaccaggaggcctacgatgaggatgatgatgtgccaggcggtgggcagagggtgcagtgcgcccagcagtaggcagcttgcggcaattttacctgcttgtattggcctgatgatacttcggttacaagagtgcagtattcgatctgttagttcaagttctgcgtttggggtgttagatccaccagaattagatttgttcggcaagctacgctcgaatacgtttgctagcttctaatgaagttgacacctcacggcttgtttgtgttcggttgtgtctgcattgaaatggattgaatccctcactaatcaaggggttcgaaaaaagaaaaaaaaaaagcggcc

SEQ ID NO: 123012 - DNA, 308 bp, Zea mays
  Clone ID: MRT4577_43668C.1
ttctctatagttgacccacgcgtccggaggattccgatgaggacatgcagagggaagaagataggacgcggcagcgggctgagcggcttagcggtcatggccgcacgcgctattgctagacgcgaaaatgctgcagcgaggcttgagggggacaaagcggggcttgagaaactgatcgccgatcgtgagaaggcacaggctcaagatgcttcagagttgcacactatttttattgataccattggaagccgtgggagatagagaaacagagatctcacatcactagaatgggagcccttgcacgtttg

SEQ ID NO: 123013 - DNA, 546 bp, Zea mays
  Clone ID: MRT4577_43669C.1
ctgctaacggattgatgaatactgcatttttgtaaccgaagtgttgtgacattaaatgcgagggaaaacttgacccaacagtagtcgcacaatgcgaaacaacaaatttgccgccaccgtcaaacattatcactgctactactgatagcaggcaactactgctgggcgcactgcaccctctgcgcaccgcccggcatatcctcgtcctcgtcgtatgcctcctggtgctgctgctgccgcctccgcatctcctcctcgatgttcacgtcatacggcatcgtctcctcgcactcgtccagctccatgtcagtgtactgcgacaccggcttgggtgggagcacagcctccagcgccttgcactgctccaggctcaacgagtccgggaaatccaccgagaagtggatgtacagcttgcccttcatgaagggcctctggtacatgggcatgccttcatcgttgatcgccttggaagaatcaggcttcacaacttcgccagggtttgatttgattagcagctgcctgttatccaggtgtgtcaaaacaaac

SEQ ID NO: 123014 - DNA, 391 bp, Zea mays
  Clone ID: MRT4577_4366C.1
cccactttttgtgagatgtatgctagtttctgtttccgattagctggtgacctaccaaactttgtcaaagatgatgagaaaatcactttcaaacgactgcttttaaataaatgccaagaagaatttgaaagaggagaaagagagcaggctgaagcaaataaagcagaagaagagggtggagctaaacaatctgaaggcgagagagaggaaaaacggattcgagcacggagacgcatgctaggaaatattcggttaattggtgaattgtacaaaaagaaaatgctgaccgagagaataatgcatgaatgcataaataaactgctaggtgagtatcaaaacccagatgaggaagacctagaggctttgtgcaaattaatgagcacgatcgggg

SEQ ID NO: 123015 - DNA, 1538 bp, Zea mays
  Clone ID: MRT4577_43670C.1
ttgggtccctcgaggccggccgggacaaacctctcctggcacgagatcacgcttctcgttggatcgaacagctagggtttccaagatgttcgggcgcgcgccgaagaagagcgacaacacacggtactacgagatcctcggggtctccaaggacgcgtcccaggatgacctcaagaaagcctaccgcaaggccgccatcaagaaccaccccgacaagggcggcgatcccgagaagttcaaggagctagctcaggcttatgaggtcctcagtgatcctgaaaagcgggagatttatgatcaatatggtgaggatgccctcaaggagggaatgggaggtggtggagggatgcacgatccctttgacatattccagtcattctttggtggtggaagcccttttggaggtggtggcagcagtaggggcagaaggcagcgaaggggagaggatgtggttcatcctctaaaggtttctctggaggatttgtacaatggcacatcaaagaagctctctctgtcccgcagtgtcctctgctccaagtgcaatggtaagggttcaaagtctggagcttcatcgaggtgtgctggttgccaaggttctggctttaaggtccaaatccggcagttggggcctggaatgatccagcaaatgcagcatccttgcaacgagtgcaagggttctggagagacaatcagcgacaaggatagatgcccacagtgcaagggtgataaagttgtgcaggagaagaaggttcttgaagtgtttgtggagaaaggcatgcagaatgggcagaagatcacattccctggtgaagctgatgaagcgcctgacactgtcactggagatatcatttttgttctccagcagaaggagcatcccaagttcaagagaaagggcgatgacctcttctacgagcacaccctgaccttgactgaatctctgtgtggcttccagtttgttgtgactcacttggataacaggcagctgctgatcaaatcaaatccgggcgaagttgtgaagcctgattctttcaaggcgatcaacgacgaaggcatgcccatgtaccagaggccgttcatgaagggcaagctgtacatccacttctcggtggagttcccggactcgctgagcccggagcagtgcaaggccctggaggctgtgctcccgcccaagccggtgtcgcagtacaccgacatggagctggacgagtgcgaggagacgatgccctatgacgtgaacatcgaagcggagatgcggaggcggcagcagcagcaccaggaggcctacgacgaggatgaggacatgccgggcggcgcgcagagggtgcagtgcgcccagcagtaggcagcagtttggtagcggtgataaaatatttgacggcggcggaaaaatttgtgcgactactgttaggtccaacaaccgtccaagtttacacgcgcgtattaatataatgatcatacttctctttgtttaaaaaaaaaaaaaaaaaaaaaaaaaaaaaaaaaaaacaaaaaaaaaaaaaaaaaaggcccctagggcc

SEQ ID NO: 123016 - DNA, 1954 bp, Zea mays
  Clone ID: MRT4577_43671C.1
acaggaaggccccggaagcatctggaagctacggcggacaccgcccgatccgcatctgacgggccgcgagccactcgcccccgcctcctgcagcttccagcgcattcactcccgaccaccagtcccgatgctataactaccctcgttcgctctatctcctcctcacaaacctctcctggcacgagatcacgcttctcgtcggatcgaacagctagggtttccaagatgttcgggcgcgcgccgaagaagagcgacaacacacggtactacgagatcctcggggtctccaaggacgcgtcccaggatgacctcaagaaggcctaccgcaaggccgccatcaagaaccaccccgacaagggcggcgatcccgagaagttcaaggagctagctcaggcctatgaggtcctcagtgatcctgaaaagcgagagatttatgatcaatatggtgaggatgccctcaaggagggaatgggaggtggtggagggatgcacgatccctttgacatattccagtcattctttggtggtggaagcccttttggaggtggtggcagcagtaggggcagaaggcagcgaaggggagaggatgtggttcatcctctgaaggtttctctggaggatttgtacaatggcacatcgaagaagctctctctgtcccgcagtgttctctgctccaagtgcaatggtaagggttcaaagtctggagcttcatcgaggtgtgctggttgccaaggttctggctttaaggtccaaatccggcagttggggcctggaatgatccagcaaatgcagcatccttgcaacgagtgcaagggttctggagagacaatcagcgacaaggatagatgcccacagtgcaagggtgataaagttgtgcaggagaagaaggttcttgaagtgtttgtggagaaaggcatgcaaaatgggcagaagatcacattccctggtgaagctgatgaagcgcctgacactgtcactggagatatcatctttgttctccagcagaaggagcatcccaagttcaagagaaagggtgatgacctcttctacgagcacaccctgaccttgactgaatctctgtgtggcttccagtttgttgtgactcacttggataacaggcagctgctgatcaaatcaaatccgggcgaagttgtgaagcctgattctttcaaggcgatcaacgacgaaggcatgcccatgtaccagaggccgttcatgaagggcaagctgtacatccacttctcggtggagttcccggactcgctgagcccggagcagtgcaaggccctggaggctgtgctcccgcccaagccggtgtcgcagtacaccgacatggagctggacgagtgcgaggagacgatgccctatgacgtgaacatcgaagcggagatgcggaggcggcagcagcagcaccaggaggcctacgacgaggatgaggacatgccgggcggcgcgcagagggtgcagtgcgcccagcagtaggcagcagtttggtagcggtgataaaatatttgacggcggcggaaaaatttgtgcgactactgttaggtccaaccgtccaattttacacgcgcgtattaatgttatgatcatacttgtctttgtttattatgtatgttttgcgttacgggatctgtgcggattagttctaggcgatgtttagattcaatttggtgttgctactagcagcgatctccaacccatatgacagttggaacgtgactgtgcctgctatttcctcgatcctgatctgtccgtacaaagcccggaatccgtcgcgaaccttaagcctcctttggaatggataaataaataaataaattgtataggattcaaatccattcctatcagagccttttgacatcctccatagcaatttgggaggaaaataagcatgtttttctgtgcataatccaaacatatgttttggaaaaaaaaaaaaaaaaaagcggcc

SEQ ID NO: 123017 - DNA, 1709 bp, Zea mays
  Clone ID: MRT4577_43672C.1
ttgggtacctcgagccggcgggcaaattctctgtccgagagtacgagaccaggccttccgtgggatcaatcggctagggtttcggagatgttcggccgcgcgccgaagaagagcgacaacacccggtactacgagatcctgggggtttccaaggacgcgtcacaggatgacctcaagaaggcctaccgcaaggccgccatcaagaaccaccccgacaagggcggcgaccccgagaagttcaaggagctagctcaggcttatgaggtcctcagcgaccctgaaaagagagagatctatgaccagtatggcgaggatgccctcaaggagggaatgggaggcggtggtgggatgcatgatccctttgacatattccagtcattctttggtggtggaagcccttttggaggtggcagcagtaggggcagaaggcaacgacggggagatgatgtggttcatcctctgaaggtttctctggaggatttgtacaatggcacatcaaagaagctctctctgtcccgcaatgtcctctgctccaagtgcaatggtaagggttccaagtctggagcttcgtcgaggtgtgctggttgtcaaggttctggcttcaaggtccaaatccggcagttgggacctggaatgattcagcaaatgcagcatccttgcaatgagtgcaagggttctggagagaccgtcagcgataaggatagatgcccacaatgcaaaggtgataaagttgtgccggagaagaaagttcttgaagtggtagttgagaaaggtatgcagaacgggcagaagatcacattccctggcgaagctgatgaagcgcctgatactgccactggagatatcatctttgttctccagcagaaggagcatcccaagttcaagagaaagggcgatgacctcttctacgagcacacactgaccttgactgaatctctgtgtggcttccagtttgttctgactcacttggataacaggcagctgctgatcaaatcgaaccctggcgaagttgtgaagcctgattctttcaaggcaatcaacgatgaaggcatgcccatgtatcagaggcccttcatgaagggcaagctgtacatccacttctcggtggagttctcggactcgttgagcccggagcagtgcaaggccttggaggctgttctcccgcccaagccagtatcacagtacactgacatggagctggacgagtgcgaggagacaatgtcgtacgacgtgaacatcgaagaggagatgcggaggcggcaacagcagcaccaggaggcctacgacgaggatgatgatgtgccaggcggtgggcagagggtgcagtgcgcccagcagtaggcagcttgcggtaagtctacccgcttgtattggcctgatgatacttcggttacacgagtgcagttatcggtctgttagttcaagttctgcgtttggggtgttagatccaccagaattagatttgttcggcaagctacgctcgaatacatctcaatggtgacaccttaatggtgctctgaaaacgtttgctagcttctcatgaagttgacaactcacggcttgtttgtgttcggttgtggtgtctgcattgaaatggattgaatccttcactaatcaaaattgattagaatgggttttagtcctctttctcttgtaaccgaacaaggcttaagggtgttgtggaatatgaatttctttgatctagatgc

SEQ ID NO: 123018 - DNA, 192 bp, Zea mays
  Clone ID: MRT4577_43673C.1
ctctgataaatatccctggagcctgcagaggctctgctggggctgggctgggctaaccaggtcaccctcccgccgccccaggggatcttgggcgccccaggagggccggcgatgagctcatcctagaatcccggctgaaagacgtacgataccttggctacatgggaggaaggagtgcccatgcagaacccc

SEQ ID NO: 123019 - DNA, 774 bp, Zea mays
  unsure (1)..(774): unsure at all n locations
  Clone ID: MRT4577_43674C.1
atttccttctctaatccaggcaattgattaatgtttccgttagatttagagctcatacaaatccccacgcgtccgaaaacacacataggtgcatatattgtatattgaaattcatgtccagttctaaaattacttgcctgctggatgttgtccagtgttgaaaataacatcacacattcatcggtatactaatacaggaataaggaggtctagattaaataataaactgaacaagatgcgcactatgggttcataccgtactcttgccaaactacaatgcaacaggggccaaaaaaactaccttatgctttcaaggggtaagaaagtttataaatcttcatccatctgaacgtcactgatgcttcggcaccatattcactctaggagaaaaaacttttagcaataaagtagatgtttattttaatgtcctaaaataacattcttgctctttgtgtaatatttctgaaactgtgcgcctttccttccttcgtctttctcgaagcttagaaatgttttaaatgaaatgttgttttttatctttcctttgcacatctacgcactttatcttttttgacacaggacaagtttttgtaaattagggacaataataccaggcttcaaggttcgatagatggaaagaatatatcanaatgtagactggaggtccatgctatttcctgatgaaatgatcaaatattgcgcacataaaccctactaaattttttttatgttatgtttggttttacatatgatttttttcgctccctttcttta

SEQ ID NO: 123020 - DNA, 172 bp, Zea mays
  Clone ID: MRT4577_43675C.1
gaccaaacgatccgggttccagcggcggcttcagcggcgaagatgatcataccggtgctctgcttcactggcagcaaggtgatttggaacaagtgggaactctaccttgacctcctccaggccgactactcggaaggtgatgctctggatgcttagaattgttccgctactg

SEQ ID NO: 123021 - DNA, 894 bp, Zea mays
  Clone ID: MRT4577_43676C.1
ctggccataaccttggccttctccagcctctctcagttgcgaacaaactgatggcgaagaagaaaggctcggccgccgccgccgccatggcggatgagacggacgtctcgagtcctcagggctccgcccccggcagcgagggaggtggggagaaggagggcgcctttcttcttggggagccaacctgggaggacgctggcggcgggcggtggcggtgcgcggagacggggcacgagctgccggagcgggagaaggaggcctacgcgcggtcccgcgcttgccgcctcgcgctcattgaccacgccgtcgcgcagaagaagccgccgctcaacgccttcaagccccaccccgagcacaaatcgaagctggtatgcaagattacaggggatacaattaacaagttggaggatcacatatggaagcacatcaacgggaagagatttcttaacaagctagaaagggtagaagaccggatggcttctggtgagatgcctgatggagaacctgtgatgtcaaatgaagaagtggcgaagaagagatggatggttcagatgatcgtaatttctgggtgcctcctgtcgagggtcaaatgaagaagtggcaaagaagagcaagtcaagcaagaagtacaagaagaaaactaatgttgccagctccattgccaggagaacctaaaccagagatggatggttcagatgatcgcaatttctgggtgcctcctgtcgagggtcgctgggatgatgatgacgggaaaaaaagatgggagttgtcaccgggaaagcacacattagcaaagaatgaaggtggttctagtatgcgtgaatttgtcagactaaactgcatacgccatccctgatgctagtaataatcaatagttcatatcacatttgctat

SEQ ID NO: 123022 - DNA, 621 bp, Zea mays
  Clone ID: MRT4577_43677C.1
attcaccgagagctctcctcactttgtttcttcctatccccacgtctcgaccaaaaccgcaactcgctgcgcatctatggtgccccaagccgataataaacccgcggaaactattccagctgaggactacccgcagccgacaaggcccccgacgtgaagaagcctaaggcggaacaccgggtctcagctggaaagcctcctgttaaggtccgaggtcaccgtaagatgctaccgaataaggatcagaagagagtgaatacctacaagatctacctcttcaaggtgctgaagctggtgcacccggacatcggtgtctactccgaaggcgtgatcatcatgcactccgtctggatcgatagcttcgagaatctcactgatgatgacctgcagctcactcgtgataacgagaagcctaccttcacctgccgcgatatccggtactctccgagagactctctcttcgcggtctgcttgtcaatgaattcaatgccgagatcttcatcgacatgcactcgagttaaactatgccgaggatgagtgacgacgcttgccagattcttccctgcgttaacctctcttgatgtgcatacgcgctgctgcctgctgccgtctatggatgct

SEQ ID NO: 123023 - DNA, 381 bp, Zea mays
  Clone ID: MRT4577_43678C.1
tggctccgaacctttgggctgatttatgtgcttgtttaggtgcctagaatgctgacgagactactcgtcgttataccggcgattgggtctccaggggggatttcacgaaggttactgataaggagacgggttagaagtatgctttcgctaatactaccggaattaggacccgtgatcgtgatcggtctcatgttgactttgacggtaccatcgcacctaggatggaatctaatgtgcagatagatattcgggcgcacgcgggagcgcacatcgaactcggtgtctccgtcgccgagtttgagtacgtaactacggacatctgtcggactatatacccacatccagtacgactgtacgtccgtccatccggccaaaaagggt

SEQ ID NO: 123024 - DNA, 309 bp, Zea mays
  unsure (1)..(309): unsure at all n locations
  Clone ID: MRT4577_43679C.1
cacgacacacaccaccgctcacacangangagtgctgagagctagcgcgcgatggcgatgtcgctttcagatgatggcggtcaccgccgccgccctgctggccctggccctggccgtgtcgaccgccgaggcaaggaacatcaagacgacgacgacgacgaaggagaagaaggacgacgcggtggtgcagccgcagaccttcccgcccttcgaccgcctcggcggcggcgcgtccccggcgtccgccgccctccccggcccctcacccgtcgcctccagcctgcgatcactcctactgttggtgctctc

SEQ ID NO: 123025 - DNA, 353 bp, Zea mays
  Clone ID: MRT4577_4367C.1
ggaaaaaaacaaagccgttggcagggggggaaaatcccggggttaaacaatttagggaaataaaaacccaagttttgaatttaaaaaaacccctgaacaacaaaacttttcgggggaggaatttcaaagttcagggtttttgcctgacccgagaaactaaaggcagggtttaaccaggggttcaaacaagtccacaattggaggggggggcccaaaaggcagctaatttaaaagggggcttccccccccccacccctgggcttaaccagtttttcctcctggggaagcctttttgggggcttttaagggctttccttttttttatgaaaaataggggggaatctcatcccctt

SEQ ID NO: 123026 - DNA, 152 bp, Zea mays
  unsure (1)..(152): unsure at all n locations
  Clone ID: MRT4577_43680C.1
cgactactctctttctcttcctagtacattgcctgcgtcgnaagcgaggtcctgggcagcgccggcggactccaatcgcacgccatggggagcctactccntcttcccctgtctaacanacaccctnttnccctctccactcccaatcttat

SEQ ID NO: 123027 - DNA, 894 bp, Zea mays
  Clone ID: MRT4577_43681C.1
gcagttcccggaggagatcgctaggtgctcgatgcttaggaggttcgaggtccacgacaacgcctttagcggggagctgcctgccgggctctggtcgctgccggacctacgcgtcatccgggcccagaacaaccggttcaccggacgcctgcgcgagttcccgggcggccagtctcggctcgagcaggttcagattgacaacaacagcttctccggcgggatacctcagagcatcggcctggtccgcaccatgtaccgtttctcagcctccctcaacgagctcaacggcagcttgccggacaacctctgcgactctcccgcgatgagcatcatcaacatctcccgcaacgcgctctccggcacgatcccggcgttcaagaactgcaggaggctggtgtcgctgtacctggccggcaacggcttcaccgggcctataccggcgtccctcggagacttacaggtgctgacgtacatcgacctgtccagcaacgccctcaccggcggcattccgacggagctccagaacctgaagctcgccctgctgaatgtctcgtacaaccagctctccggccgcgtgccgccatctctgatcaccgagcttcccgccgtgttcctccagggcaacccggggctgtgcggcccggggttgccgaaagactgcgacgccgacgcgccatcgcggaggcgtcagggactcgcggtggccgcaaccgtggcgtcgtttctcaccggcgtggcgctgctcgctgtctgggcattcgcggtcttgaagaggttacgctgcagcgagtccttctcctccttcttcccgttgaagctcgtgctcttttaccctgtcagaattaccggagaggagctgctccctggatcccacgacatgatttcatcggcaga

SEQ ID NO: 123028 - DNA, 301 bp, Zea mays
  Clone ID: MRT4577_43682C.1
tggcagctggactgacccatgcataggccatttggaccgcgcggcttgtgctaaatgggcataggcccacatggagtgggccgtaagtacaagacgggcaagccacttaatgggccacgcctaagtccatgagacatgcgatggactcctttaaccacaaactgaagctggcttcccacagggagtccatcttaggactggggagtgctactaacaccacctaaccaactgagctagaggccctttcactatgccggcaactataaacaccatgaacttcactgcacaaaatagaacactg

SEQ ID NO: 123029 - DNA, 487 bp, Zea mays
  Clone ID: MRT4577_43683C.1
tggatctcgatactgatctggaagatatactccgaaatgactggaaatgatatgcacgtgaccgtcactatccacattgacatatgacatagcacttcttcgcgaagctatatagggtcagtgcgtgcattctcacattaccatttaaatgcgctttgcaaacacgccccaatgctgaactcattgcaggaagacgttgctgcacaacaaagaatcccttaggattatgacaaactacattactgatatcatctgcacgcgtgcagatcttgggtacaactatgtgcgttatccttataccacaaggcctagattgatttcataacagaggtcctgacactcatcgccgaattgaatgagattctagcacatgatgttgctgatgagtgacatcactgcactactggcttcgtgatgaatctaggaagctgattgagattctgtgcacaactattcacgagcgtcttatgcttgatacacatcccca

SEQ ID NO: 123030 - DNA, 350 bp, Zea mays
  Clone ID: MRT4577_43684C.1
tgcacaaccagggagttgaggtaaccgagagcatccatgggagggagaataggtccgccgcgggggaaatcaccagcgcgctggcgctaatgcctcggatggtgcatagggagcttctctagattgccaggaacctgggtgtggtggtggcgggcgctgcgatgacccggtggctcggtaattgctcgccatcgccggggatccgcgctccgccatggctagactggtcatcacaacaatcaacggtgagacacacctatccagtccgcgatcgactgagcttcgtgcaacacctatccttagtagatgaaggggcctagaacgcctggacacctcactccggcgaggcc

SEQ ID NO: 123031 - DNA, 311 bp, Zea mays
  Clone ID: MRT4577_43685C.1
ggattaggaactagatcgggcgatttttccaccacatgggggccgaagtcttgcagctgaagctcagcctgcggatcaggttaaagctggatcacccggacgaatggccttctcatgaaggatatatgcaccctcgcgcagcccaccagttcacacttgtttttactgccaaacaaagccgtgcctaaggtcaaaaccgacaacgattgatcaactgagctcctgcacggctgtagctggatacgcatatgtttgttctacccgtacacctgatgatcacatcaatcgaccaccatccatactgaatatta

SEQ ID NO: 123032 - DNA, 257 bp, Zea mays
  Clone ID: MRT4577_43686C.1
ggctatcaaaaggactaattgcattgacccgaaatatttgcaatctcctcaaaaatacaatggttgaagttaaaatgaacttaatgtgacgttacaatatttaattaataaatgtgtggtgggaaatacaaataatgaaaaatggaaacctcgcacgcacaaagggaaaaataagtataattcacaaaaggggcaaatttgatgtatactccaaactatgtagcatcatgtttgctttgagacttttgtgggttttg

SEQ ID NO: 123033 - DNA, 243 bp, Zea mays
  Clone ID: MRT4577_43687C.1
ggtccggattccgcgtcgacccacgcgtccgagagggtatctcggtctggatccattcgaactgggattgattacgagattggcacgtaattgtagaatgcgtagtttgatgtacatgtgttcgtaggtttgagcatgtagagtatggtatccctcgaaaaaaaaggaatatggtattcaaaaaaaaaaaaaaaaaaaaaaaaaaaaaaaaaaaaaaaaaaaaaaaaaaaatttttttttttt

SEQ ID NO: 123034 - DNA, 408 bp, Zea mays
  Clone ID: MRT4577_43688C.1
aggagccctgccaagaatggctggacacgatcgaagttatgtgtaacgagatgttagggaactatacgaaaaaagaagatcagttgatgactgcagccttcgactcccgaccgaagcgaagattgaatcaagtaatggatgctctacattttgaatatcctgattatgagcggttgaacaagggcgccgaagggcagaaaagaaagagaattgtcagtgttgtgggcagacaggccgctagaacggtaaaagaagatgaagaaaaactgacgaagaggaaactgagccttgagccgacaacggttgctccgaagaagagaaaagctgcagctctaaagcaaaaggcgactgatattgaagaagaaactcctgcatcaccttctgttgccgatgtggcagaaattctaa

SEQ ID NO: 123035 - DNA, 528 bp, Zea mays
  unsure (1)..(528): unsure at all n locations
  Clone ID: MRT4577_43689C.1
aaaaaaaaccaaaggggttttttggttccatcattttggaaattccagcaggacaaggggccggggccacatccagggggggggggggggtcccctccccagcaggaaccaggagggtttggaaaaacaaaacaaacaggtcccccccacgggttccaggaccagtttttccccctttcccaaataagttttcccgaatttgggcgggggtaaaaaaaaaagggggggcctaaaaaagcggggggaaaaaaaaatttaagctttcaatttttttgggaacataccccgataccaccagttttgttgagggctcctttccggttcggggttacaggggcaaaagggggtccaaaccccagtcctttttgtgggccggggggtccggccctttaaggtcaaacggaaccggggagcacccgggggggccgggggttttgtggccaagcccgggcccaaccccccttctttnaaaacgccaacaaggaggaccccaatacttgcggaagtcctccttgggggccggggccc

SEQ ID NO: 123036 - DNA, 359 bp, Zea mays
  Clone ID: MRT4577_4368C.1
ccacgcgtccgctcgacgcctcttttttttttccccgagctttcaaaaccttaggtgcgtgccgaccggcggcggcggcaaggtaatggcaatggacccggacccgggggcaaaagccttcggggagcattattaccggacgttcaacacaaaccgcccggggttggtggggttgattaaggaaacctcaatgctaaccttcaagggccaaaagttcaagggccaatccgcatttgccggaaagctgggattttttcctttccaggcctgcgaacacaaaatcgtaaccgccaattgcaacccgtcggggcccaagggaggcatgctcgtcttcggcttccggttccatccgcaccggc

SEQ ID NO: 123037 - DNA, 534 bp, Zea mays
  Clone ID: MRT4577_43690C.1
tagtccaagaagttgctctcgggtctcggtatggactacaagaaattcgatgtctatgacaataaatgtatgattttctagaagcagaccgcgaatgagaagaagggtatagtatgtggtgagcctagattcgtagaggttgaaaatgatgacggtctgaccgtgatgaccaaggtagcacgtcagcagcttcgttacacacctcttatacctctattgaaacatttgtttatctccaagaatacagccagacacatgagatggcacaaagaaggcgtacatgagaaacccgatatcatggcgcacccaactgatatagatgcatggaaggcactagattcctttgattccagctttgctgacgtagtgtgaaaatgtctgtctcggtttggcaacaggtcgtttctcgccttttaatctaactgcacagtcctactcatgttggtccgtctttgctgttccatacaacattccgccagctctatgcatgaaatatgaatttattttcttgtgtcttctaatacctggtccgga

SEQ ID NO: 123038 - DNA, 250 bp, Zea mays
  Clone ID: MRT4577_43691C.1
cttttattttatttttttctatactaagttttctttttgaacttttaggagcccctgggggtgaaaaaacccgcggtggcccaaaaagtcgggtggttggcttccctttacctaaggtgaaaattttcaatccccggggtgaatttttaaagcttttttatacttgttctccgaattgtttagcgctcgtccaattgttcttcttggtataaagaacaagggttccaaaaaaaaaaaaaatggggggtcc

SEQ ID NO: 123039 - DNA, 1218 bp, Zea mays
  Clone ID: MRT4577_43693C.1
gtcttcgccccgccgcaagctctgtgagtacgcctccctctcagctcatgcggttggcgccctgtacttcacctcgccggcatcgatctcccatcgcccatcttctccaagctgctggacaccgctcgccctcaactctgctccctgcgcgcgcccagccgagcggctccctcacgcgcgctcctctctctccctcatctccctcctctgccggcgctctctcctgccctcttccatggccggcgtttcctccagcgtgtcccatggtcgtccagcccccacctccatgatggccgagctctctctctcccacggtcgtctccatcccctgctcgtccatggcgtccggtcgctgctcggattttgcccgtgccgagctcccttcgtcgagcccctggtcttctccccagttgcgcgccctcccagctcggctgtggccacctgttagcacgttcacagggaggaactcgctatctgggatttgcgatgtgggcaggtgttatttctttgctgttcaagtctgttcgggtttgttcaacaaccaaaagccaaaagccaaattacagaaatggcagcagttcgccttttatacttgctactgaaaccccaaccagaaatacgcccatcccctgtgttacagccagttggcaccaatatatttggagttcggcttcttaactctgctgctccttctcagcttcacagctccatcagcttccgcttccaacgtcggctttcctcccatcaggttctctgtagtcgggctggcggcctcctcgcgtggtgtagagttgttgacatagcaggagcggtttctgcttggcttcctcgtctaggacgcagtggtcacagggaggagggtgagagtgagacgacgacgacgacgtagcaagggagaagtagtccatgtcgatcacgaccagctcggccccgagccagagctggtccttaacacagccgccgacgccatgcctgcactccgccgcgtccatgaggaaggagctcctgtggccaggcaggacctcccagtcgtcaaggctgatggtgtccatggaaacggccggacgcgctctgctctcgtgctcatgtgcgagttgagtttggatgagggatctatatagtaggacgttcgcttgcagcgatgatacctagagtggtcaagaatggatgcttcatgcttcccaggaatcaaaacgaggagtggaaggatactttgct

SEQ ID NO: 123040 - DNA, 319 bp, Zea mays
  Clone ID: MRT4577_43694C.1
aaacatcccaaaatccccgtcatatttttttgggatgattaaataccagtcttttaagacttcaaaaaaacccgaaaacatgggtgaaggcctccatcccatgccaagaacggggtgccaactttgcccacactaaaaggaaaggggaaaaaaatggggcttcaatcacatggaaaaggattcaaagaacaggggacaatttttcttgttgcccaccttgggggggggaatgtttcttttttggggcttgttcaaaccctttttagttgtaaacaggaaatgcaaaacctggaaaaaaaaaaaaaacccacccgtccgg

SEQ ID NO: 123041 - DNA, 642 bp, Zea mays
  Clone ID: MRT4577_43695C.1
gcagaactacatgtgcaggttcacatgatccctccatccacctttataaagtgtatttttatctgaacataatcccttcataaggtttgaccaacaactatgtcaaattatatgcttgtctagtgtacagaagttatatctatagattcatattttaaaatgcttttgtatgtttttgatcctatagcaattaacccataatataagagaaattaaaggctctatgcatgcagcactctctggatggattactgttgtattgcttcctgccacacggctacctgaatacttgggtcaatttcagtggcagggcagatttattctgattatatgtttactggaattttgacaggaccttctgaggcgagacatcagcaggcagcatggtggtttctcattagttttagtactggtggttgctattctgggaatactgctagggttcctcatgaagagatgagcgcatgtaatgacttatcttgtctggcttttctgaactaaacaaaattgtatgtgctctgtgtgcgcttgttgttgtacaagtcagtggtctgtttatcataggatctgatgcctattgtaattttctgattcatattataaactttagccaatcaataagtcatagttaccaacaccagc

SEQ ID NO: 123042 - DNA, 338 bp, Zea mays
  Clone ID: MRT4577_43696C.1
aaggaacaaaaaaaataaaaaaattttttaacaaaaaaaaaaaacaaaaaaaaaagaaagctattcaacacagaggacgccgaaccaagcaaaacaatactgtcacacaaggacggccgaccaagtgctggttctcgcactacgcctccacggcgctgaactggccgggcgccctccgggtgccgcctcatcgctctccgagtctcgcgcttcctgcccctgcttcctgtgcttcctgttcaccagctccctcctagtcgcctccgaccccgtgcgcgcgctccctgtcgtgtcgccgatctccgcccgcggctgcgttcccttgctcgacgacttcc

SEQ ID NO: 123043 - DNA, 178 bp, Zea mays
  Clone ID: MRT4577_43697C.1
gtaccctgccacggtacatgacccgggttcgtttcccggctggtgcaccaaacaaataaacagaaagttcggagcgccaatacaaagaactacaaacagtacgacatctcgctgctgtggtggctgggcatcggggccccgcccatgatctccatcatcaagggcatctttaacaaca

SEQ ID NO: 123044 - DNA, 344 bp, Zea mays
  Clone ID: MRT4577_43698C.1
cacacgcgggcgatcccagctgagatagggaggtacctgctacgactagctagatggcacgcgcgatggcgcccaccaggatcgtgtagccttgctgagcttggcgctggcggggctgctcatatgtcacctcatcaccaccgtctgcgtcggtgagtacagaatccgcatccttaacagcggcgtcgactcggtcgaagacaacatcagctgcgacgcttagggcgtggacaacagcaccgactccaaggcggtaagccgcgtaggctattccggcatggagctcgctgttgagacgggatctgcgcctggttcggcaccggcgccggagccgacgtccaggt

SEQ ID NO: 123045 - DNA, 340 bp, Zea mays
  unsure (1)..(340): unsure at all n locations
  Clone ID: MRT4577_43699C.1
gacggggngagcggngggcaggcggagggggangcganccggcccgagacggaggagacgccggccccagagcngccgcnggaggaccgagagnnggaggcggnccgancccgnggccccggcggccangngggcccnaccnnngcgggagggggggcanggaaagaaanccacncggnngagaagcagancnggcccnccnnnnnnaagggaaaancngagaagcggacaccagaggcgnannnggcgannagaaaancaancangaggaaannncaggcccancccnaaangcagcgggaggccaaagaaccggcagagnngncaancggagagagcg

SEQ ID NO: 123046 - DNA, 804 bp, Zea mays
  Clone ID: MRT4577_4369C.1
aaagtttctgtctttttttttgcaataacattcggacttatttttattagtccttttatgcagactttgagaactttgaagtgtgcatttcggccatttcaatctgatcagtctagtagcttatttctaaatgctgttgctgcaaaccagcgtggccctggtactttaggtgataaccaagcgaggtcatatgggaacacaagtgccattgagatggctgctgctaaagctgctcagcatagattgatgcgtggagtatggactaatgctcgttttggtgatatgcgtcgtgctttagcagcttgtgagcgactgatactactgcatcacgatccgcatgaactgagggattatgcagcccttctgtaccactgtgggtactatgaagactgcctacactacttatcattgtaccaaactgcaaagtctgggaaatccccaaccaatcgattggagatcttggaggacgaagctgtgaatactctcaaagcgcggttaatgcttattttagcagaggatggctggagcagatgtagacctgtggcaaggtactggaccaagaactctgagccgtggtaattagagctggccaacgttgcggctgaagcaaataactacagattgtacatagcattttcaactgtggatatgttgtacagtcacttggtaatccatgcgggatgtgaatcaaattcctaattttatacaacaccgcgttgtgcccttatctgagattcgcagggccttttttatatttttgaataaatttgatacaatacaacaacatcctcaaatctgtatcta

SEQ ID NO: 123047 - DNA, 487 bp, Zea mays
  Clone ID: MRT4577_436C.1
ggcgggcgctggcgtgggcgatggcgggcgcgggcgctggcgagggcggtcgcggcgggcacggagggcggcggccgtggcgggcgctggcgtgggcgacggcacggctggcggcaggcgacggcacggcgggcggcgatggcgcggagcggcggcgggcgcgcagggagaaagaaggagaaaggagaaagaagaaagaagaaaggagaaagaaggaagccgcgggcgagtatattcgccttctttgccgagtgcccgtgatctggcactcggcaaagttttttttaatttttaaaataaactttgccgagtgccagatcggtggcactcggtaaaggatcctttgccgagtgtctaccatctgacactcggcaaatattaccttacacatctttgccgagtgccaccctggggggcactcggcatagaagtctttgccgagtgtctttcttggacactcggtaaagtacattataattttttttat

SEQ ID NO: 123048 - DNA, 392 bp, Zea mays
  Clone ID: MRT4577_43700C.1
attcgtctcgaggctgattccacacacttttttatctcaggactactttgactttcaaccggggctagtaaagatgcttgatgggtgcaatcctgacacattcaacatatggggaatcaggatctggaaagatttacaatgtgatgccttcaactgctttaaaacatgattgaagtgttaattcttctgctgtaagaacttaaatatacatcaatctagggttctataatgctaactaatatgaggtgggagggcagacgcctactattgagatcgagcacccgcgaaatattttctcacctgatcttgcacacaaaccaactttccatatagagagcattttaacctcttggactaatcatgcttaaagctgtttcctatgcgaaaaagtc

SEQ ID NO: 123049 - DNA, 256 bp, Zea mays
  Clone ID: MRT4577_43701C.1
ctacactcctatactccatcttttccatcctcatattactcataccactcacatttatacaaccactatcataaatacatcacccccaaccaacccttcctaccctaaaagcaataataaaaaataaatcccacataactcaactattaactacctacctccccatcaacatactacacaccttcctaaacattctatctccaataaatattccccaatctacatactaaagccctacatctcacactcataaaaa

SEQ ID NO: 123050 - DNA, 554 bp, Zea mays
  Clone ID: MRT4577_43702C.1
cgcgcagcacttccatggtgcgctggttggtgatgtgcgcgcgcggcgtgttggccagccagcggtagcggttgatgaccatgttcgcgacgcccgaggtcgagagcagtgccgcggtggccgagccggctgggccggtgccgatgatgagaacgtccgtggtgatgtcagccatgcggccctccctgcgtgactttggatgaaatggtggatggtccccccgccagcacgcggcggatggggaaggactggatgccggtgcggtccgtgaacaggccccacagtccgcgcggcgcaaacagcatgaccgcgatgccgatcaggccgagcaccagcaggtaccacgagccgaaatcggcgagcgacttctgcagcgcgaagaatacgatgacgccgacgatcgggccctcgatcgtgccgatgccgccgatgacgacgatgaagatgacataggcggtccagtcgaggacggaaaacgccgcgtctggagagatgcgcgccttctgcaggtagatcagcgcgccggcgagcccggtgacgaaggacacggagac

SEQ ID NO: 123051 - DNA, 294 bp, Zea mays
  Clone ID: MRT4577_43703C.1
ccaacgcttccattaccggcgccataacttgtgaggactcaagaggctactctacaggctcgcctcgtaacacgcgcgccgacacgcgcagcccgggttcatttctgcgttcattggtgcggtggtagccgagcgcttcggccatggcttcctatatgggcctctctggaggcctgagagtgggatcacgactggcaccagacgtcaccaagctgggcagcacgatgggggttgagatgcagatcgcgatccatctcgatcttaatctccatctgaaggactagattccggaac

SEQ ID NO: 123052 - DNA, 336 bp, Zea mays
  Clone ID: MRT4577_43704C.1
gggacaaaccatgtcccattcaaaaatgggtgaaagagttgccttattctttgcagtactacaaccaggcataacaactattggatacaattctcccggacacacagggacacacagtcggggacagtgacattaccgatatcgaggtaacacagatagagaccagtttttgggacaggcatataaaggcacatactgacctgcctctactatgcttaaaggaccaatacctttgtttaaaaaccgagggaacactgtagggggagagttctttagataactaggtgctggtttgcaactctggattactttcaatacccggtattgcacatgttc

SEQ ID NO: 123053 - DNA, 1482 bp, Zea mays
  unsure (1)..(1482): unsure at all n locations
  Clone ID: MRT4577_43705C.1
caccacggcaccccgacagctcccccccggcctcatggggcttcattccccatctagggttgctgagctccccaccaccgccggtcatgcccgacgcggatgttgacaccgtgattcgcgaagccgccgcggccgcggccccagccggcgacgacgacagcgagggtgacaccgaggaggaggaggaggagggggacgaggtcgacgaggacgaggacgacgacgaggaggagttacccgccgaggcgccggcgccggacgaggagcaacctgctccagcgcccatctcgaccttgccggggaatccaaaccagctgacgctggtcttccagggcgaggtttacgttttcgaatccgtcacccccgagaaggttcaagctgtgctgctacttttaggacgtggtgaactaccacctggtttagctggcatggttttacccaatcaaaatgaaaacaagggctatgacgatatacttcagaggacagacattccagcaaaaagggttgcttcactaattaggttccgtgagaaaaggaaggaaagaaattttgataagaaaatacgttatgctgttcgcaaagaagtggcactcaggatgcagcgtcggaaggggcaatttgctggaagagccagtctggagggagaatctccagctcctggatgtgatcctggttctcagggctcaggcctagattttgcatctcgagaatcaatgtgccagaactgtggtactagtgaaaaaatgaccccagcaatgcgtcgtggtccagcgggtccaaggactttgtgcaatgcttgtggattgatgtgggcaaacaagggtaccctgagaagttgccccagggcaaaagttgaatctcctgcggttgcaactgagcagggaacaagtgacaacaaagccctggcaacactgaataataacaatgttgctgcaagcaatggcgaagccacaagtgcagcagagaaaggagtgccaaaggcgccgtgacagtatatagacattattgtcagagacaaagatttcggattctttgcctatagctagacaagacaccccgttagaaatatttggtaatgataatgattgtcatcaagtgtacattcattcttgcttgacagtgttagacgtgtaattaatataagctgtccgattgtgtaaacagtaaacccatatggcatctgttgtgttacaacttacactttctaacttcattctcataacatcatgatcaaagattcgatgctacccattaaaaaaaactaaaaccctagccgcctgcctctcctcctccagagctcgtcgccaccggccaccgccaccctcgatcacgccgtccgtcgaggtaaggtcagcatggtgagggtcggtttagtcggggattcgctcaagtccatgtacaacgctgagaagatcggcaagaggcaggtcatgatcaggccgtcgtccanggtcttcatcntgttcctggcggccttgcctg

SEQ ID NO: 123054 - DNA, 671 bp, Zea mays
  Clone ID: MRT4577_43706C.1
cccatctccacctcccccgacgacgtcgcctggctcaaggctcagctcgcctccaactccctcgccctcctcgcctccgccgacgcctggcacgagctccgcaagggcatcaacccccgcacccgcgagcgccagctcttcgacctcaacaggcaccatgggatctctcattatccggaagaagaggcgaccaaccacactgcgctgccttgccccggggagctcctcgtcgaggagcaccacagtaactatggcgagccatgggccggtggccgggatgtgtttgagttcctggccaacgcctccgccctcgcgcccagagatcaggtccttgaaattgggtgcgggacgctccgtgtcggtctgcatttcatccggttcctcgatgctgggagattccattgcctggagcaggatgagctgtccctcatggctgcgcttcggtacgaactgccgtcgcaggggctgttgtacaagcgaccgatgattgtgagagggggggatatggatttcagcaagtttggggatactgttatgtatgaccttatttatgctagcgccgcgttcctccacattcatgatgatcttgtttggactggccttgagaggcttgcaggaaagctgaggccacagacaggcaggatttttgtgtcacataacattaagttttg

SEQ ID NO: 123055 - DNA, 803 bp, Zea mays
  Clone ID: MRT4577_43707C.1
tctgcctctcctgtcggcttttttcagtgttgccgcggccctgtcccgcgggtcttttcgctcgctctggctcttgttccaaatctagaggcctaccaaaatgagataacaagccaactaatctgctgggaaataggtaacaagtctctaacaagatcttaagtttattctgagatgatgtcgagaccgatgccttttgttacgtcgtgccgtgcctcttgttgccatgctggtaagttgctgcctcttgatgagggcacgctgcttatcaaggcgggatgaagtgttatggacgcaggcatgggtgctgctagcttggcatccagggttccaggataacccatctacctggttgtgtcagcctcatatatgtcggtattgtttcagattcttgaacactgatatgagggaaatcataggacagcttctgctttcatgtatttaaagaaaaggcatttgcaaaacccgctggtctattggctctcttttactcatgtcctacagttcaacatttacaccagaggcctggtagatgtctagaagacaaaggatatcagctgagggttataaagtggttgaatctaacaagatgcatcctcaacctccaggcctttcagaaccttaaaccatattgaaccatcaaatattcagaactatatgggtcagtgccatgggtcaaccagcagacgctctctcgactcgagttaatatgtttgcaatcttgatactgcagcaggaaaggtttccctaaaagttgagcagtaaccaaatttaaccacaattctgaatcattgcttcaactg

SEQ ID NO: 123056 - DNA, 363 bp, Zea mays
  Clone ID: MRT4577_43708C.1
ccgtataataaaccatgcacaacaaagccagccggaggacaccgaaccacgcctccgcaccgagaacccaccgagaaaacggaagaaaatggccgaagccgaggaaaaccagccccacgactgcgacaacagaaccggcacggacaagggccgggaaaacgaaggccgacagacgccaccgagggcacggacaaccccaagaacacggagggagagccagaagccacacaggggacaaggaagggaaggggcagaaggacacccacggcggagaccaggcgcaaaccaagaggggcaaccagaccccaaagaaccccaccgagcacgggaacgcaagaaacggggaacacaagaaaaaaacca

SEQ ID NO: 123057 - DNA, 325 bp, Zea mays
  unsure (1)..(325): unsure at all n locations
  Clone ID: MRT4577_43709C.1
caaaacacacaggggccaggggcgcgacgcagaacgggggggggggcggancgaagcaaggaggccgggggaaccgggaagggcaagcgagacccgaaggcggagggggacagcgccgccgcggaagcaagacgcggaggcggagggaaggacgcgcagcgcgacgagccgcggaaggccagcgcggggccaggagcgcagcggaccgccacccggggagaaggaccacgacgcaggccgcagggccacaaggagcagggggaggcaaggacgaaccagccaggccgaccagaagggcacgcccanggacaacgcggccagggca

SEQ ID NO: 123058 - DNA, 422 bp, Zea mays
  Clone ID: MRT4577_4370C.1
ggcgagaccattaaaaatacccgtgcaataaaaatcagattaggcaaacgagattacaacgagggcagaccaccagtcgttaaactctaaaaagattgaaaaaaaaacagtccttttgtgctttaggggctaccaccacaaaaacacctcagtagatttcgggcaatcaaaaccattcttttatggcgagcggtcaaacgttggaacaaaaggcaagctgcgagcttgtatatctccacacgaaaacatgcgcattctttacctttggtatttgggcttcactggtggcctcaattttcgtgaggacataaccctggaattagcgacttatttcttgggccttagcaattggggggatttggacaggccctaagaacgggcaggtgctgccctcttggtttggcccgttgacagcccagctg

SEQ ID NO: 123059 - DNA, 282 bp, Zea mays
  unsure (1)..(282): unsure at all n locations
  Clone ID: MRT4577_43710C.1
ccgtgaaccttatgattgttctgcacaccactgcagtttcaatattggtttttggcaaaggtgatcccactagtcacaatgcctgcccttgctaagcccaccttccgcacggccaagcccgcctcggctcctaagccgaatcctgccgacatctggccgaaggcggccaccgctggtgcctcccacccgcctaacttcgagatgatcaaggaggctttcacggcgcttaaggagaggaccgacccaagattnccttgcgaacagccaagatccttnctggat

SEQ ID NO: 123060 - DNA, 1031 bp, Zea mays
  Clone ID: MRT4577_43711C.1
agtgcccaagagtgagatcaaacggccgaaccgttgcttggattggagggagagcagaggagaggaagtgaccgtttcttcgagtgggcagcgtggtcagtttagttgcttgagagagccgagagaacccaagaagcaagggcatggcttccttgcccgatcccacggtgtactacccgacgtcctccaacgccatcctgcgcgcgcatccgtccgccgccgccgcggcgtccaggggctcgttcggcccggtcttcgccgtgctcgcggtgatctccttcctcgccgtgtccgcctgcgtcgtcggcaggctgcggctgtgcggccgccggctcttcaggaaggggtccgccgaccaggactcgtacgcctccgactccgacctggagaagggcttcgaggtcaagtacccggccatgaagcccatggcgagctcccgcgccgtgatccacgacatggacgacggcttcgagatcaagttcgcgcccgggaagcctgcggcgtggaagcacgacggcaaggccgacagcaaggggagtcgtcagggccacggccagggccagggccagcgtcagcatcacggccagggtcagcatcagccccagatcgttggcattcccaaaggctacgccgtgcccgtgcccgtgcccaaggactacgcgggcttcagataccctgcggaagccgtggtcaggcaggggcagatcaggggcggggcattcgttccagcgaagcctggcacatgaacgttacgtatagcggccggcagcttaggttcacaactccattgatgctatcgcatatgatacgcgcgtacaatctctctcatcatccatccctccacgaacgatgatagcgttagttttcatcttcactctagttttttggggcgcagtgtgcaaaaaagttccctcggcgaactggtttcaggcacttgcatatcgtgttttgtacattaacccattacaagcagtgaagaacatctcattctctcaaaaaaaaaaaaaaaaaactcgagagtacttctagac

SEQ ID NO: 123061 - DNA, 470 bp, Zea mays
  unsure (1)..(470): unsure at all n locations
  Clone ID: MRT4577_43712C.1
gccgcacacgtacactcacgcttcctgacacttcactcgaatcattatacatcactcttcatgtgtgccaccgtcgcgcttatataagtgcgcgccggcctgcaaatcntatatattgtattctcaaaaagctgggcaaagacaaattgcttggtcactttagccagcaaaggactgtattttttattgacggtggcttatacaaacactacaagaatttcattgcctgcctagaggctacgctcacatacctgctctgcgaggaggttgcctcatcttttgttgtcaagtataccaacgacttctcatgaatttgatctgcacttcttgcttccttccactcccagtatgctgaagctgcatatttctagtatctcggttttcctactataccttttttttctttcccaccatttcccccttcatccaaagccccccttttgccacttcatctctctattttctttcct

SEQ ID NO: 123062 - DNA, 315 bp, Zea mays
  Clone ID: MRT4577_43713C.1
aattcctgggtcgacgagcgcttatgtcggcggccgccctctccttttgtctgtgaacatttcggccgtaaaccgggccgaggaacacgaaccataaaggcgccaactttccggaacggaacaaggcccaaggccaagcagcacggtcagggcggcacacggctaagtgagtttacgaagcatctcaggaaacttccacgacggatacactaaaagagctaactgcgttgacctaggacgagacggcacaccgcaggagtatacggcccagactggagaagccttctagaagcaagtgccacctaaaaccgtgga

SEQ ID NO: 123063 - DNA, 239 bp, Zea mays
  unsure (1)..(239): unsure at all n locations
  Clone ID: MRT4577_43714C.1
cattgggtacctcgagggccggccgganaaaaatttaaaaaaaaaaaaaaaaaaaaaaaaaaaaaaaaaaaaaaaatgcgcgcttctcggagccgttgactaccgttcacacactaacctttggcggccacaaaaaggggttgccgagtcctcccttccccctcccttctgggtcacgccgcctcagcccttgcacgtcccagccacgctcgcccactgtgtgccgtcgtggtgagaaa

SEQ ID NO: 123064 - DNA, 551 bp, Zea mays
  Clone ID: MRT4577_43715C.1
ggaaaaaaaaaaaaaaacctctaaaacataaattcccaaaataggggaaggcgaccaaaaatcaaacccaaccggggggggagaaccgccccccctagggcaaacaaaatttgggggccccgaccaaaaaaaaaaaaaaaaccccaccgggggggaaaaaccttttccctaacaaaaaaaaacccctgggggaacataaataggaaaaaatctgggacctggaaaccctaaaaaaaaaaagggggcccctaaacccccatggtttatttgaacggggaagaaaaaaaaaggaggcctgaggcttcgcccccaaccgaaaaaagcccgaaaagggaaaaaagcggcccttggggggaaggaacaaatggggacccccagggggggcccaaaaaaccctttgggccacaaaaaaaaggaacaaacggggccccccaaaaaaaaaagggtttccggaagccaaaattaaggggggggaaaacccccttgtcagggaaagctggaaacccctggggggccttttttgtttggccccccgggggggggtcctaaaa

SEQ ID NO: 123065 - DNA, 274 bp, Zea mays
  Clone ID: MRT4577_43717C.1
tcggaccccacgtccccgcgctggccccgctgcccatcggcttcgccgtgttcctggtgcacctcgcaaccatccccatcaccggcaccggcatcaaccccgccaggagcctcggcgccgccatcatctacgacagtccgcacgggtggcacggtcacgtaagtttgtttgcacgacggtgcatgcacatcatatatacatttgccacgtaagtttattagcttctgccgaagattgcaattgacacgctggcattattggatggtgacagtgg

SEQ ID NO: 123066 - DNA, 133 bp, Zea mays
  Clone ID: MRT4577_43718C.1
cgggtacggcgacgagacatatcttgagtgtccttcattcagtttctaatggatattatggtgaatgtgggagaacgggaggctacatggaagtcactggcttcatctctgatgtaaagagacaagtgtacaa

SEQ ID NO: 123067 - DNA, 220 bp, Zea mays
  Clone ID: MRT4577_43719C.1
tttttgtggttttttcacaattatctggtttattttcaatcacggtatccaacactcgtcctaccagcatctagagcttgttgacagttgcaacaagaagggggaaataacatggctcacgaactatacacaaaagcacgccctcgtgggatatagaacacggagcacaaatcatccacaggctatgccagcgatcacaagtcacacaatcatgacaccc

SEQ ID NO: 123068 - DNA, 291 bp, Zea mays
  unsure (1)..(291): unsure at all n locations
  Clone ID: MRT4577_4371C.1
tcgagccgccggnatctagctcttaactgcacggccgccacaccaccccgaccggaccctccacacaatggccaccgtcctgggcagcccccgcgcgccggccttcttcttttcgtcgtcctccctccgcgccgcgccggcgcctaccgccgtggcgctgcctgcggccaaggtgggtatcatgtgccgtatcaacagctagaccggcaacctgcaccacgacctgacgagactacggggatctggatcagcgagagtgagagcacgtaccccaatacgttccacccggtg

SEQ ID NO: 123069 - DNA, 541 bp, Zea mays
  unsure (1)..(541): unsure at all n locations
  Clone ID: MRT4577_43720C.1
ttttaaacagatatgtgttgcttactatttaccagagtggtgttctacttctgattatgtcaaattatttcagtccctatctctccaggatataaaggcaggagattggactgagaatgtagcacccttttggccagcagtaatacgttcagcattgacatggaagggcttcacatcgctgctacgaagtggattaaaaaccataaaaggtgcactggtgatgccattgatgatcgaaggtttccagaaaggggtgataaagttcgccatcattgcttgccggaagccagctgagtaggccataacccaaatcttaatttctactgtaattcatccgctcaaatctgtgtcaatggtgaagctcctatatgacattgctttaaacatcccttatggtgtaagggaaaatgagcaaataaagttgaatacaaaactgatgccactgcagtgngnnaaaaannnnaannnnaanaanagannnnggaagggagggaaaaaaaaaaaaaaaaaaaaaaagggggggcggttttaaggataaaaa

SEQ ID NO: 123070 - DNA, 581 bp, Zea mays
  Clone ID: MRT4577_43721C.1
ctctgtctcagacaactggcgcgccgcacgcttgttgctgatttttgctcgtctcttcctcggtcactaacacccccagcacttctgtacaaatgcctgaagcggaatacattcactctcttgtctgaatacaatgtatccacaatagccaaggatgacttttgcatggagactatgcaccaaaggccatttttcctacaatagccggacgacctccccacactggtgtcatgtcaataatgtcacacaacgatacatatgttgccaatgaggcacatcccaagagaggtattctcacgctccagtactatattgataacaggattgtgacccagtgagatgacatggacaatatatggtatcatccttgctactacaagcttaccggtgccccattatcaccaccctgagttgctcactgtatgctcctatttaacccataggccaacatggagaagatgacccacattatgtccgagactttctatgtgcctgacatgcatgttgcaatccaacgagtgctctcactctatgataatgggcgtactactgacattgtactagactctgtagatgcagtg

SEQ ID NO: 123071 - DNA, 328 bp, Zea mays
  Clone ID: MRT4577_43722C.1
ctatgacggaaagttgcacgcgctccgtaagctcggatcctgtatagcgggcgccatccactgctgttcgtaccaaaaaccaatcatatccggatcgcccgaaatgatccaacacttccagcgcctctggagcctgaacaaacacgatcgacgtgacgtatattctttgtgtgaattctgctgacgcaactgaacagcttgagattgttgtcgggaatcggcaatcggaacggattcatgggataagaatccatctaagggtaattgactgaaccgacaaatggaaaggacccttcggtgaatactacaccctatagaacatccctgg

SEQ ID NO: 123072 - DNA, 202 bp, Zea mays
  unsure (1)..(202): unsure at all n locations
  Clone ID: MRT4577_43723C.1
tccgtccgtcccacgcccgtccgagggacccttctgcaatctattatccatnnagaagtttggctcaagggacggggaggagtatgtgctnnncgtatgggnngaaccanngcgcaagggcacttanntccacagnctattgtcggcccctcggccccattgccccttaatcgatcgaggntnatgtcgtccccagaatagt

SEQ ID NO: 123073 - DNA, 394 bp, Zea mays
  Clone ID: MRT4577_43724C.1
gaggtggcgtaacacttaacaagtttaaagacctataaataagttcgtggacctaagtggcacctcttgataagtttatggtccgttgatgcatttaactcatattttaatggtgccttggacttaactctaatattgtgttatgttatatcatttggaataaagtccttccattcatttttttgtgtgtccccaaactagagatgaattgattagttacaggaactaaggtcataagaaaaatgttgcatccttttctttatatcacttttgtgacttgtggcagtagccagtaaatggtataaatgaggctgtgctggagtctgcttgcttaaaagattgaaatttgtgtttagaaatgagacttttctaacaggttacaaggtcaattggt

SEQ ID NO: 123074 - DNA, 363 bp, Zea mays
  Clone ID: MRT4577_43725C.1
gagttttctccctgccctcgagtctgaccggtgttcatcacttgagggacatagctcttgagttcaagtcggtgtaaacccactccacagccacccaacatgatgtattttgtgcatcgagtgccaatggcgaccacagcagcagttctcaccctcaccgtggacatgattccttggaggttgtctcggccgtgtggtgcttgttccttactcctcgcagagtaccaagaagaagtgatttgtgaagaaggagtttgttccagttctactgatccagtggtggactccatctaactgcgtatcgtgatagaagctctcagatctcctcctatgataaggcaagccccggtgcatttgcccctt

SEQ ID NO: 123075 - DNA, 284 bp, Zea mays
  unsure (1)..(284): unsure at all n locations
  Clone ID: MRT4577_43726C.1
ttcnttttttttatttttttttttttatttttttttttttttttttttactctctttttttcctttcttttatttttttttttttttcatctaccacttctttgggggggcgcccaaaaaaccaacagggggtttttataaaaaaaaaatggcccaaaaaacactggggggggggcattaatggtaaaaccccaggctgggataaaacgggggaggctaaaaaactttgtaaaattacaaccccccattaatgtggcggatcaaggaaaacacttggggggcgg

SEQ ID NO: 123076 - DNA, 380 bp, Zea mays
  Clone ID: MRT4577_43727C.1
gcatcgtctcaagtaaacaaatggagctcaaattccatcacacaaggactttgctgtcaccagtacagctgtacagtcgtggagtttgcatgtcttatccaagtgctattttgtgcgccgtggagtttgcatggaaaaggtgatctagagcacttatccaagtgctattttgcaaggaatcatgcatggagcgatctcttcttctctttgatgtagccgtgcactgctccataaatatgtcctatatatgtcaatatgtggcacacagcagaaagagtggcctgtcggacaatggaggtaaggaggtggatccgcggatgacactagacagtagacacggcgcatgcgcaggcgcgcgcagagcgcatgccttggccggc

SEQ ID NO: 123077 - DNA, 349 bp, Zea mays
  Clone ID: MRT4577_43728C.1
gccttcatatatttttatggtgtgttaacttggtgtttttttttgtattgtttttgggttttttcttaaggcataacatggttcttattaatgcgagtgaactctgccttgatctagactgttaagggtgcccggatctgttaaggaggcgctgcaccggagctagtccaatatagcgaaagaaaaaaagaggatcaaaaaaccaagtaccaaaaaacaaaatttatttgggggggtggtgaaaaaactaatagttaggggggaaaaacgtgggaaaaaaagcttatttctctttatttaaaaaaaagatcggggcggtttggttgtaaacatagaaagaccggagggg

SEQ ID NO: 123078 - DNA, 234 bp, Zea mays
  unsure (1)..(234): unsure at all n locations
  Clone ID: MRT4577_43729C.1
ggaangaccgaggcgtcccacgcgtacggcacgtaaccgagcatgcgtacgtacgtactactactactagatgctgaggggtgggttggtaggaggtgtactgttcgtgggtgtttacacaacacctggccatcataacacaggtgacttgggagtcagtctcttcgaatttgatatcaccctctttccgtattgcatacagcttcagaagattaccattcataatgctcatgt

SEQ ID NO: 123079 - DNA, 192 bp, Zea mays
  Clone ID: MRT4577_4372C.1
atgcgagcccctggcggaggggtcatcgtcgacccagcggaggagatgagcatggagctaggtgaagtggtgatgcaagtgtgtggaggtggtgcaaagggggagcatgcacggatagagcacagatgccccatggcagtccctgacgcggaggatggcgtatatcatttcaatataggacatggtgtctaa

SEQ ID NO: 123080 - DNA, 225 bp, Zea mays
  Clone ID: MRT4577_43730C.1
cttgcacttacaatgaacattagctatcgatctcacctgctccgagtaagaagagatcaatggcgtgcgagcagggagtcgtgacctcgtgccagaggacggctgagtttgacgcacacatgaccaaggaccaggaagccggggggctggatgacattgacttcactgccgcctggtgcggcccatgccgtgccatcggcctactgttcgtaggacaccccacga

SEQ ID NO: 123081 - DNA, 606 bp, Zea mays
  Clone ID: MRT4577_43731C.1
gttttcccccctcgagtttttttttttttttttttttttttttttttttttttttttttttttttttttttttttttttttttttttttccggggaacagaccccttttggctttcacatttagccatcagttttcagacatccataacataagcttgagtttttgaataaaactgctcaacatataacaggttcactaattgggcaaagtcttccctaacccagggggaaaattttaaaaaggacaataaacttttttaaaagatcaagtccacaacttgcccgaagaggaagttttttttgacctttcagcttttccacaaagttacaaaaagttttttttgccccatgatttgaaccggttttgcatgtaaagtttcccattccattagggaaggggaaaggggacttttcaccttgttttcagctccaaggcccaggaaataataccgcccatctgattttcactcttataatcgataaaaacatgatctttcggggggccaatacaaccaacagggggctggcacacatggggcctgtttgtttgggtttttcacagtttttggccaccaaaagctggcggggactaccaaacacatgcct

SEQ ID NO: 123082 - DNA, 445 bp, Zea mays
  Clone ID: MRT4577_43732C.1
gttttgtgcttattattcttatgttgcttattgtgtgttatatatgtctctgttgaaacgattggcacgttccatgtactctaaccctcctattcacggtgccaagatagttgccaacggagggggagatccaaccatgtatggagaatggaaacaggagatggaccccccggccccacggatcaagagggaaaaacacacccccttctacagtcagccaaaaaaagtctttttccccaaggcccccccatgggaccccaagggaaaacgtttttttctggaaggccccaaaaaacccagcccagggtgacaggaaaaaaaaaaaaaggggtggcccctaaaccaatggcccccagcccttgttaaattgggggaggaatcctaagtggggttatcaagaaaacaccatttagccgggggccccccagttaaagaggcccccccc

SEQ ID NO: 123083 - DNA, 354 bp, Zea mays
  Clone ID: MRT4577_43733C.1
gcttcaccggatttcgagattttttcgactggacattatctccgagggaagcgcgcgctccaggttcattaacaaaatggactgcatggaggggaactgtaaaatgtgttctgtgctgaagcttgccttgatcgacaattactccaccccagatgaccagatccatctgatgacggttgggcaggtcctactgaatcatcggatcagatggacaccatccaaacaatctgctttgaaatgctctgcttatatcctacaccagacacaacggcgactcaatgcactagctgtggttatacccattggacgaagcctgtctacagcagccacaattggttgtcatacaaccagatg

SEQ ID NO: 123084 - DNA, 423 bp, Zea mays
  Clone ID: MRT4577_43734C.1
gtaggccgcaccggacataacaccggagcgcacgcggggagcccgcgtagagtgccggggcgaccaggccaactaacgccattaaggatgaaggtggcggaggggactcggggttagtgctggcggaccagattgacctgaacagcctggaccagcagttggagcgccatctcacccgcgcctggaccatggagaagcgcaaggtggaggtctacgacggcgctggcgccggcgccaggcacgaccagcatgtcccggagcacgccgagggaggactgggagatcgaccccgacaagcttgtcgtcaaggacgtcatcgaccagggcaccttttgtaacgtccaccgtggcatctactacgctgacgacgtcgcagagaaactacttgattgctgagaggatgggcatagatcagaacatgac

SEQ ID NO: 123085 - DNA, 164 bp, Zea mays
  Clone ID: MRT4577_43735C.1
aaagctggaatcttttaaagtgaaccaagccgtcttcttcgaatccggttggttggcggcaagtgagcaggtttttggattggcttaaaccccccccaaaatgaaaaaaatcttggacattcagggagggcaatgtggcaaccaaatcggtgccaaggtctggg

SEQ ID NO: 123086 - DNA, 1029 bp, Zea mays
  unsure (1)..(1029): unsure at all n locations
  Clone ID: MRT4577_43736C.1
gtcaattctttttttttgaatnnnntagcacgggtttataacaactctcgagaccatcgtctcgggttgttttgttcaataatatctctttgtatttggtttccctgttaaaatagtatagttggttttgaagtctgtgggttagttcattattattgtttgaatgctctgtaatcttgatatcttattataattattcatcttgatatgtaaaacattattgtatcttgttagtggatatgtcttccctgtcatttttgcttttctcaatgttgcttactctattcattttctcaatattcaattccttatgttcttatttttcttactataccaatagtaaaattcatatcttttcaatgattcaccatatagaacatttacatttttctatttttttttctttttctttttgattttatttaatattattatctacttacttttttttgattcttatcaataaaatacattctatttttatacataatttaaattttttattttttttatattattcttatttttttttactttttactcttttttttttttttttcaaatttttactttctttattaatatatgttttttctttctttttttttttttttttctttttttttttttaatttttcttttttttttttttttttttttttggtctttttttttttttttttttttatattattctttttttttttttttttttatttttttttttttttttttttttttttttttttttttctttttttttttgttttttttttaatatttttttatttcatttttgnttttatcattttttctttttcttttttttttttatttggtattttttttttttttttttttttatttttttttatttttattttttttttgttttttttttttttttttttattttctttttttttttttttttatttttttttttttttttttttttctttttttttttttttgtaatttttatttttttttttttcttcttttttttttntgtttttatttgttttt

SEQ ID NO: 123087 - DNA, 626 bp, Zea mays
  Clone ID: MRT4577_43737C.1
ccgcccttttttttttttttcagtataaatacccacaataaagttatgaaatcttagatcttacaatgctcatcgacatgacactccactgcagttgagcttatcaatacaagacaaaccacaaccatgttctcgtacgcgcgcaccgaccatgccccatttggggtgcttgttcgggctccgccgccgtacccacaggcctgtcctacccccataatacaactgcgacaggtgatagcagccaacatcatcatggagttggacttgatcggctagacttgatcggctccctattgatgaactacctgtacattgtgccgactttgtcacagaggtatacttgatcggctccctattgtcgaactacccctacattgtggtaacttcatcacggagctagacttgattagctctctgttgtcgaactaatagctacgttgttgtttcatattgagtatctcgacaccgtctactatggttagcgttcctaaaacaggttgaaaacaacataatttgttaatttaatgacatttgatgaagtcttctccccaacaagcatgattaagagggtcgacacttcaaattgtgtattactctgtgtcacaccatggtgtggcaaatgatat

SEQ ID NO: 123088 - DNA, 260 bp, Zea mays
  Clone ID: MRT4577_43738C.1
tcgtcttatctccgtacacctcttgcccctcagccctacctacctgtattcgcggcgtgtagtgccgtcgcccttagtcgagcctgagcacggagcatcgtaccaattatcagtactctggattccgaactagaaagtggatttacgagtgacaatggcacaggtatttgtatgacttctggctgcccgagtttgtctctcaaattttcatcgggtgcaatggagtcaattagtattccgtgtaaaagggaaacggcatg

SEQ ID NO: 123089 - DNA, 255 bp, Zea mays
  Clone ID: MRT4577_43739C.1
ggcggggaatggatatatgtgcacggacatgaactgatacatttgcaggccaggtacactgatgaggtgcacatcaaatgaaacccttttgtttttcccttgagtgacacacacacagagagacgtacaccgtagaccggatacatgtgtcgacctcctggtcgcctttgcccggacccccccgtccgtttgtagactttctatgcaacctactagcttttgaagatacgaacgagtactgtgtaccgctgtact

SEQ ID NO: 123090 - DNA, 1744 bp, Zea mays
  unsure (1)..(1744): unsure at all n locations
  Clone ID: MRT4577_4373C.1
ttttttttttttttttttttttttttttttttttttttttttttttttttttttttgacatgaaaatgatccacatttgaccattaaaaaattgtccaaagaattaaaaatagatgaccaaaaaaataaggaagaaattgagacatgtaatggggttgatcaccaatagtgattctcaacagtatcgttgaggttgttaaaaactaacactagtgattgataatgacgtgacagctataacgaaccttaactgcaacttatagtgcatagacagagtgagctcccgagtcccgagcctgtgcaaatatttcgtgcctcgttggcacagcttgcgttggcttcagcttcttcacttctttggtactgtagtaacgagttccaagacccggtaaagctcagtaaccacaagtatccgacagtcactacattggcgcattgccaacctagacatttaactgcaacggattgtgcatagacagtgctcccgtgcttctgaaaatattaaaggccactttggcaccgcctgtgttggcttcagcttccagttgttttgggaggggggagaaaaataacttaataaacagtcatgttacttccggattttcgaatagttaatctatcgggtttccaaatatgtagcgcactagcgcccattgtaccggaactctagaactaacaacctgtacataagagagaatctgatcaagctgaagccaaggaccaggtaaaataaatcctccagttcggtactagcaccggatcggccagggtattttcgagggaaaaaaaaaagacagacttccacatgagtagggcccgagagaaataatcgtggcaagccgtatccctgtatttttgtagaaaggctgtgtcgaactacctttggctcggtggtaactggtaaggcttctcaccactgcaccaagcttgtccttcatattttcgaaactaaaaccctccaaatgaagctttgcagtcatacttcatgaattcaaccagggccaccgtcacaatgagcaccattgtggacctttgggagcttatactgaataatatggagccttcaaaattttacaagagtcatcaataacatcgaacataacaacagttaattcaaaataaagcaaaataaggaatgaatagtcttatttgctgttgcagataatgaatatctttaaaaaaagcaaaataagaaatggatagtcttactctctgttgcagatagtgaatatcttttaaaaccatgccttaccttgaccgtgcagagttccttcgatagtacagctcactggtgaaaggattcatagcctagtgattgtgactcagcacctccaacgactcatttcaacttcctgcaggaacaaatttcggtgctgattttaaaaacctcccttgctgacaacccacaaaagagtggcaaagcgccagcctatccgtggatagtgccagtcaacctgcacaagcagtgcagacctacttgtgggtagtgaccagggttaggggtgtgatgctatagggtctgcactgtttattttgtgtgtgtgtgtgtgtgggggggggggggtcttctaaaacaatgcccgcggggtgctcttcccctgctgattgagtacagctcactgctgttgtatatataaaaaaaactgcaaaccaagcagagtttccttagcaagacccatctttactgccaagtagcttcttgcagttcttcttcataatnctaaagcttgttgccctgtnccga

SEQ ID NO: 123091 - DNA, 586 bp, Zea mays
  unsure (1)..(586): unsure at all n locations
  Clone ID: MRT4577_43740C.1
aattcggcacgaggcctggctccgcccctgatccgcccattccgcccgccacgttctctgctcctgcggcggctcaccctcggcggctcggcgtctctaaacaagggtgcagtttgcgcggcggccgtcggcctaccagtagtcctgccggtggtgcacgtgatggccgatgggcacgctttcgttggtagccaggaagcgatgatgcttacctgatgtactctgctcaaccacaattggcctatgcccacatgtcacttcaagaaggaatgtgccaaaggcaaacacatctgtaagtggggatgctttacccatgcgtaccaattctggggccaggtaacccatggtgccaaccacacgtgtggtctgtgggtctgtgccatggttatatgactttgcaaggccaaagtctcctagccgtccattgaattcgctatcaagaagcacattgcttgctttgatgtctcggtggattacaactttgtcccacttctcatgaaggtagagcaggccacatgcagctccttttatgatgtgaaatcttgtagcccaatccagtgaaggtttgtcattntcacagtataga

SEQ ID NO: 123092 - DNA, 332 bp, Zea mays
  Clone ID: MRT4577_43741C.1
aaaggatacgcatcatagctctacatatactcgactcttactacaccgtcgaggggcactgcaacgacctctttgccgccgggactgccacctctggcccattgcctgccactgacgaagacccctctgtggctaccgctaccagccctcgtatctgcggctacagggaacacaccgcaagtggtggtggagccacagtctacaccccgccgacatccttcgacagcgggcgagaggcctcctggaggaagagcagaaccatgggcttgacgccgggttcctcccgcaaatcgatggcctattacaggtagtagcatactatacaactgcca

SEQ ID NO: 123093 - DNA, 289 bp, Zea mays
  Clone ID: MRT4577_43742C.1
gcggttctgccgcacgttgatgcaccttagtccagtacactcgggtcaataaaagaccacattaggatggtgaaacggtgaaaactgatggcttgcatatgttcagagtgttatgttgtaatgaacagtgttatgttgtaaaaaaaaaaaaaaaaaaaaaaaaaaaaaaaaaaaaaaaaaaaaaaaaaaaaaaaaaaaaaaaaaaaaaaaaaaaaaaagaaaaaattaataaaagtctgatatttgaaaattaaaataatttataactctaatgcggtcaattaaattc

SEQ ID NO: 123094 - DNA, 840 bp, Zea mays
  Clone ID: MRT4577_43743C.1
gccggccgggccgggggaaatatccgccgattatccgcggcttgtatggtccgtgatgatagcgtttctctccgggctcctccggcgaggccatccgcccattccgcccgccgcgttctctgctcctgcggcggctcggcgtctctaaacaagggtgcagtttgcgcggcggccgtcggccgtcggcctaccagtagtcctgccggtggtgcacgtgatggccgatgggcacgctttcgttgatagccaggaagcgatgatgcttacctgatgtcctctgctcaaccacaattggtacatggtttagatggagaggacatcaaaagctttgtgtttacttcaaaaaaggcctatgcccacatgtcacttcaagaaggaatgtgccaaaggcaaacacatctgtaagtggggatgctttacccatgcgtaccaattctggggccaggtaacccatggtgccaaccacacgtgtggtctgtgggtctgtgccatggttatatgactttgcaaggccaaagtctcctagccgtccattgaattcgctatcaagaagcacattgcttgctttgatgtctcggtggattacaactttgtcccacttctcatgaaggtagagcaggccacatgcagctccttttatgatgtgaaatcttgtagcccaatccagtgaaggtttgtcattttcacagtatagaaacttgtcaagactacatgccaaatgttgaagatgagaatccaatgtatgatgtatctgtgagaactgttgatagattgtagatggctgagactaggggcctattaggtttagccattttaatgggacccaggttacatcgatct

SEQ ID NO: 123095 - DNA, 101 bp, Zea mays
  Clone ID: MRT4577_43744C.1
tcctcccgatacgcctcagtagagacagtcataactctcgacgcaacaatgcccgccggtgggacgctgcgatctcctcagggcaccgggccctgcattat

SEQ ID NO: 123096 - DNA, 281 bp, Zea mays
  Clone ID: MRT4577_43745C.1
gtacataatttaaccaagcctcacaatctcactgactgcctcgtaaatacgttcatatgaacataacacatggactattccattgaggctggactcacaagaatacaaaacaccaggagggctagatacaaaacaaataatacctaaacgtgcagttttttttattacaaaaagggatggaccagcattaatattacacatgcaacaaacatcttgtaaccacaaccaatggatcgttgggacttacagtttatagactattaggcctgccataagttact

SEQ ID NO: 123097 - DNA, 453 bp, Zea mays
  unsure (1)..(453): unsure at all n locations
  Clone ID: MRT4577_43746C.1
atggcnnnnntcacttgacgttctcagagtacatgntccttctaagggttcnnnnnnnnnnnnnnnnnnnnnnnnnnnnaatttggnnnnnattcactcnnnnnnnnnnnnnnnnnnnnnnnnnnnnnnnnnnnnnnnnnnnaaaacgataagtacaacgtcatggaaatattctcgctggcaccgttagtaggggnagcccttcgggaacatgcctttcttcgcctcgngcgctctaccctcaccagggaagcgaccaagctgggccagcgagttggccntttgcgcgcaccagcagggccttctgcgccgcctaaacgttctnnnnncgcccttgccatgtcttcagcaccgagttttgcagagcccgggcgtaggagaatgatacgggccatgggttcggagactggttcatcgcattcaggttcagagtcgcctccacctcggactgcc

SEQ ID NO: 123098 - DNA, 1522 bp, Zea mays
  Clone ID: MRT4577_43747C.1
tgtctcgcggacgcgtgggcccatctgcattagcagtgaaggaagcagcatggggacttgctcgatatgctgctattgctcaggataatggcttagtgccaattgtggagccagagatccttcttgatggggaccatgggatcgaaagaactcttgaggtggcagagaaagtgtggtctgaggtgttcttctacttggcccagaacaatgttctgtttgagggtatcctgctgaagcccagcatggtcactcctggagccgaccacaaggagaaggcttctccagaagccatcgcaaagtacacgctaacaatgctcaggaggagagtgcctcccgctgttcctggaatcatgttcctcggccgtgggcagaccgaggtggaggcaactctgaacctgaatgccatgaaccacgctctgaacccatgggatgtgtcattctcctatgcccgggctctgcacaactcggtgctgaagacatgggaaggacgccctgagaacgcggaggcagcgcagaagggcctgctggtgcgcgcaaaggccaactgcgctgtgcccagcgtcggtactctacactgcgcgaggacgagagcgatgatgccaagaaaggcatgttccagaaggcctacacctactaatgtgccagcgagatgattccatgacataataataattgtagcgtaatgtcatttttgttattattgtttcaatatgaataatctacaggataatggcttagtgccaattgtggagccagagatccttcttgatggagaccatgggatcgaaagaactctcgaggtggcagagaaagtgtggtctgaggtgttcttctacttggcccagaacaatgttctgtttgagggtatcctgctgaagcccagcatggtcactcctggagccgaccacaaggagaaggcttctccagaagccatcgcaaagtacacgctaacaatgctcaggaggagagtgcctcccgctgttcctggaatcatgttcctttctggtgggcagtccgaggtggaggcgactctgaacctgaatgcgatgaaccagtctccgaacccatggcacgtatcattctcctacgcccgggctctgcagaactcggtgctgaagacatggcaagggcgccccgagaacgttgaggcggcgcagaaggccctgctggtgcgcgcaaaggccaactcgctggcacagctaggtcgctacactggtgagggtgagagcgacgaggcgaagaaaggcatgttccagaagggctacacctactaacgtgccagcgagaatatttccatgacgttatacttattgttttggtgtttacattatagattatacttatcgttttggtgtcacgtttttgttttttttttttttggggggggggggggggggtgtcattcgagtgaataaaagccaaattgttggtgccaacaacctctaccgttgtagaaccctgagaaggaacatgtactctgagaacgtcaagtgatatttgcaatctggtaaattgtgttcct

SEQ ID NO: 123099 - DNA, 1689 bp, Zea mays
  Clone ID: MRT4577_43748C.1
gacccacgcgtccgcccacgcgtccgcccacgcgtccgcccacgcgtccgcaaacttacaggagtctcgaggccggccgggctagttcctgtttcaggacgcttattattctccgccgttggcgtcgtgaagcccgaagacaccgatctcacggacaaacttacaacatatggctatggcgacggcgaagctgaactccccggctaccagcttgctcgctggcggccgcacgcgccgatctgcgcccgcccgctgcacgacggtgatccgcgccgccgcaggctcctactcggacgagctcatctccaccgcgaaatctgttgcttcccctgggcgtggtattctggcaattgatgagtcaaatgcaacatgtggaaagaggttatcatctattggtttggacaacacagaagtgaaccgccaggcttacaggcagcttttgctgacaactgctggtcttggtgaatatatttctggcgctattcttttcgaggagaccctttatcaatcaactacagacggcaagaagtttgttgactgcttgaaggatcagaatatcatgcctggcatcaaggttgacaagggtttggttccattgcctggatccaacaatgaatcatggtgccaaggtcttgatggtttggcttcaaggtgtgctgagtactataagcagggggcgcgcttcgcaaagtggaggactgttgttagcatcccttgtggtccatctgcattagcagtcaaggaagcagcatggggacttgctcgatatgctgctattgctcaggataatggtttagtgccaattgtggagccagagattcttcttgatggagaccatgggatcgagggagctcttgaggtggcagagaaagtgtggtctgaggtgtttttctacttagccgagaacaatgttctgtttgagggtatcctgctgaagcctagcatggtcacccctggagctgagcacaaggagaaggcttctccagaagccattgcaaagtacacgctaacaatgctcagaaggagagtacctcccgctgttcctggaatcatgttcctttctggtggacagtccgaggtggaggcaactctgaacctgaatgcaatgaaccagtctctgaacccatggcatgtgtcgttctcctatgcccgggctctgcagaactcggtgctgaagacatggcaagggcgccctgagaacgtggaggcagcgcagaaggccctgctggtgcgcgcaaaggccaactcgctggcccagctcggtcgctacactggtgagggcgagagcgatgatgccaagaaaggcatgttccagaagggctacacctactaatgtgccagcgagatgtttccatgacataataataattgtagcgttttggtgttattattattattattttggtacgctctggtgaataataaccaaattgttggtgccaacgacatctagcagcaaattggtctttagaactcatgtagaaccttgagaacgaacatgtaatctggtgaattctattcctatatttgaggcgatggatgctaagttgccatatgcgacaagcacaacaggaaaaaaaaatacttttagaaaaacgaaataaagaacaagaaaaaaaaaagcggacgcgtggaggaattgggggaattctattccaaaatttaaggcgatggatgttaagttcccct

SEQ ID NO: 123100 - DNA, 385 bp, Zea mays
  Clone ID: MRT4577_43749C.1
gctcgccgtcggtgtggtggcaaaactgctgcttgtgctgcagaccaatgccggcgagagggctggtctcagggtaaaggagatgctaaagacacacgctagggtttggaaggactcgccatgcctccaaacacaccggggttcttacccttgttgatacacaatatacaatgtagtatcatgcatgtacattacattgatatttgtagccaagaggagcacacatttgattctccttttaggtagggacatactctcgacgatagtgaaaattgtctattaattgggatatgatttgggagctttatgtccttagtttatacttggaataaatttaaagatgtacattctccaaaaaaaaaaaaaaagggcgaacagtctaata

SEQ ID NO: 123101 - DNA, 215 bp, Zea mays
  Clone ID: MRT4577_4374C.1
aacctatgtagaggcctttcgattgttgattctcatattggttggaagctcgtgtttgacgttgacacggttgtgcatataagtcctcttaatttagaagcatattttgatcgaattattgatttgtctgtttaaaaaaaaaaaaaaaaaaaaaaaaaaaaaaaaaaaaaaaaaaaaaaaaaaaaaaaaaaaaagggcggactatttaaaagatc

SEQ ID NO: 123102 - DNA, 650 bp, Zea mays
  unsure (1)..(650): unsure at all n locations
  Clone ID: MRT4577_43750C.1
aattagacagctggagtccacatattctttagtgggtttataagagttagagtatattaggcaactcctgatatggttggtttaggattgattgtaatcccgtgataaccttgtatctaggatagccttcttgtcctccaagtcatgtactcctatattactccctaggctcatgcaatacatccaacacattatacacaatctctccttcctacgtggtatcacgagtctaggttcaaacacttggtcttcgtctttcgctgtcgctgccccccccggggagatcgctttccgtcgagggcagcgccctcgtaggatgcgccgcagatccatatgttcctctgcgttcgtcgtcgcgtcatcaagcacaacactagatcggaactcaccatcaaggccccgtcggcgacctctgtccaccttcccatagactaccccaaccggatctgacccattgctcgtcgtcgtcgtggcggctgtgatggggttgtatccccgccgncgacaacatcgcacgccaccatggaggctgatgcgaccttcactgtcggccggaccgtggatgggcagtcttttggaccgtcacgtcgtggggaggacgagtcgggtcttgctccaccccggttacacattgtgcttcgctcggggca

SEQ ID NO: 123103 - DNA, 496 bp, Zea mays
  Clone ID: MRT4577_43751C.1
ggggaaaaaaggaggcccaaattatttattgccccggtcaaatcaactttaaaatgaaaaaaattccatacaggcaaaagggcccccggggcttaagggcccccccaaaaggggcctaggacgaggggaacttggggacggccttggggccccccaaaacggggggcttgggaagccccccgggtaaaaaaagggggacggaggtttggatcccccgggaggggaaggggggctttttgttgaaacggggaaacttggccccctccccggggaactttttaaaaaagtccttgaaaaaagagttcaaaaaggacaaggccctggaggaaaagcccatgtccgggggcccccggttaaacaccttaaaaaaggaaaatttggacctttccaccctttttttgggctttttccccccctttttggaaacacccccttccttggcgggggattttcccgccgggagccgcttttccccctttgggtttttcccaagggg

SEQ ID NO: 123104 - DNA, 911 bp, Zea mays
  Clone ID: MRT4577_43752C.1
gaagaccaaaactcttaattagcatcaattcccttctccaatttagacatccagaagagagcttgtttctggtatggctttagaacagagacaagggtagtgggaggctctgcttcctctaagtcaaatgtttcagcagtgccaacaagtttgttcaaggcagcctctgaaatcgcctgctcatcagcgccttgctcgagaaagtatggccaagcaccggagtagaatcatcaccattattattgttaccccttagaatttgcttcagctttctagtggtgagatcgtcaagggagaaagcatccttgttggatggctttaggttgagcaaactaagcaatttatggagaggactgggagtgaaatcaacatttgcatgatcgagcatgtcacagggtgagttgtccatttcggctagcacagatttgtggatgtagaagctaacatagagcaatatctcctgcatcagcctcagctccattgttgggaacacgagcttcccctgaatcttcaccttggacgagttgacaagcgggacaaggcattgcgtccactctggggacagcttcccaatctctccggctcgtttggtggaaaagcgaacaatctgtgccagagccgccgccttcttggcagtcatctttaacccgccatagatcttctcgtacgaagggaaggcgaaatggacaatctccccagcgtccaacctcctcctcccacggttggtggacagcccgggcacataggacttgccgacgagcatccagtcgcgctccacagggaagtcgccaaactcgccgtccggtggcgccaccaccatcctcatgtccgtcaccgaggcaggcacaaccgccctgaggggccggggccggggccgcgacctctgctcgcacatctcgacgtccacgggc

SEQ ID NO: 123105 - DNA, 522 bp, Zea mays
  Clone ID: MRT4577_43753C.1
ggccgccctttttttttttttttttttttttttttttttttttttttttttttttttttttttttttttttttttttttttttttttttttttttagggggactggcattacattcattacccgctggcaaaacatgcatttggggaaaaagaaggacagtactacacaaaccaactgggcactcactactatatactagggggggcgggccaaatatcactcactccataacaaagggcaaaaaaaacgggggggacccccgcggaacaagaacaacaatacccaaacccaagtttttttatgggggggactagctataaaagagcatgcgggcgttttaaaaaaccccaggggccagcaaacatggccttttaactggccaaccatttcgcccgaactaggggggggtgctcctgggctcccccctgaaaaaccaatccaaaacggggggggagttgggctgcggcccgtcaaaaagggtggcccccatgcccttgggggccaggttgctccccgggggg

SEQ ID NO: 123106 - DNA, 376 bp, Zea mays
  Clone ID: MRT4577_43754C.1
atataaataaaaacatatgatgacacattgacccaaactgcaccgcacaacacagtaagacaacactatccgcatactccaacactggcatgcggtgacgaatcggattgtacagcaatgaaacaggtgacgtcaacacaacacatgaacacaactaagcttggagtgcggggctaaccatggtggcaccagtgcgctactgacacacgggctcgcatgacgcatctaccatcccgacgacacactgttattctagcacacatgtatactatgcaagtccgtcaccgcgacacgcttcacgctgatcagtcatctgctaggctacatacacgcggcttcgctacggaaactcacacgacacatctcacaccatagc

SEQ ID NO: 123107 - DNA, 352 bp, Zea mays
  unsure (1)..(352): unsure at all n locations
  Clone ID: MRT4577_43755C.1
ggtaaaagcttttaacagngctgtttccctttggcgctcctggngtattcgggccgttcccgtttgctccgttcttcgctctcgctccccttggtggttgtttcgcgtttcttcctgcgtggttgtcgttgtgtttggtcgcttgctcgttttgtctcccggtggtgctttccgtttgttgttttgggggggggggttgggtgggctttctctggtttttcctggctctctgttgttgcttttcgtgcgtgccgtctgtcctgcttgctgggtcctcttgtttttgtgcggtcgtctccgctgtgttcngctcccttgctgttttccctgcttgcgcttcttgcgctttttg

SEQ ID NO: 123108 - DNA, 546 bp, Zea mays
  unsure (1)..(546): unsure at all n locations
  Clone ID: MRT4577_43756C.1
tacaggactcaccccaccaacagcacgcctaaaagttccaaaccgctctgacgctgccgggcgtaagtgagagcgctcggcaaggtgcctgaaggaccctggaacaaggaccacacgaacaccatcgtgaggtgctacgagataacatccagtggatcaagaatgctgggatcctaccgatggaaccccagggacgagaagaacagcatgatccggctcatctaccatgagagccaggacaggctgaacatcttgctagagaacgtgatactccaggacctgacttacacccagcacgctgcaccgcatgacctacctggcaatgccgagggactacgcgctcaagcgctcatggtcaccaccctctatggctagagcgggtaggctatggcgaacccctatttctgtctgctctgcaagttatatcgaactgtgcaatgtcgcatgtttattgctaaagatgaaaatctggctactgcaatctagataagaatttgatgcgttctgaatagtgtccattgtgacttgctgtttgttcaaaanaaa

SEQ ID NO: 123109 - DNA, 544 bp, Zea mays
  Clone ID: MRT4577_43757C.1
ggaatctgaactaattttttaagatcttctaccacacaacagaaccaactccaagctaataaattagcaacactcacaagaacaatcaactcaccaattgccaccaactgtacataaacgtactactactactactaaaagagaccccgcagaccgcagcgctagtcgaaactggaggaccggctccagtagccgtcggccgaggtgtccacggtgctgctgcattgcgactgcgactgcgacagcgtgtcgtcgtcctccacctccaccccgaggagcgcgaggttaagatgcgactgcatgttcaggtcaggggccgccgccgcagcctcctcgtcggacccgtcgaagctggccgtgacctgcgccctcgcccagccgatcgcctcgtcgtcgccctggaggagtctcaggaccagtgacatctcaggccgagagcgagaagatgtcctcgtgcaaagcgaggcggctagcgtcatcctttccatcttatcggaggcgaactcgtctctccccagcaacggatcaaccagctctcgaattc

SEQ ID NO: 123110 - DNA, 461 bp, Zea mays
  Clone ID: MRT4577_43758C.1
atggaataattggcgagccatacacgtatgacgagatggcagcttgcagtcaaaaaaaaaaaaaaaaaaaaaaaaaaaaaaaaaaaaaaaaaaaaaaaaaaaaaaaaaaaaaaaaaaaacttggttagacttcacacagcgagcgagcgagcgagcgaaagcggggagcccggccaccagcgccggaggccgtcgtggttttactagccggcgcgccgacgctggatttgggcatgaattgttagccgggtgaaaaattgttaggttgccagttaggtacggggggggggagttgaatcggaggtctgccgttcaaggcggaaggcggcggcggcaaaaggccggtaggatgaaaaagctccattggttggggcggttcctgttcgggccggggccggtctatttttcggggctggccatcctcatggggctaaccaacgcgcagtacttggggctggggg

SEQ ID NO: 123111 - DNA, 164 bp, Zea mays
  Clone ID: MRT4577_43759C.1
ggaacaaaattgcacatatatattagcaaaaagaggcgttatcgttacatacatatctgacctattcaccggcactgtactccgggcagattaactccatctcaggctctcaactcagtcactgactacttataattattactaccgatctgacgagaagtcag

SEQ ID NO: 123112 - DNA, 238 bp, Zea mays
  Clone ID: MRT4577_4375C.1
ggccgcttttttttttttttttttagcacaaaaaaaaaggtctgccttataagcaaccttcaaaagtctgcccgaacaacacgttgatccacaccgtctccgtggcacacattgccatatatctcaacaagaatacctcagactgactccaggacgcgtatgagccagatgtgtctgaatagccgatcaaggcagcttatcttcataatcatcacgcaaagctccggcccgggatgac

SEQ ID NO: 123113 - DNA, 341 bp, Zea mays
  Clone ID: MRT4577_43760C.1
ggtataacagctgtactgctggatatggatcagatgggcagtgaacgacatttacatgctagagtggtggcactctgcaaccgagagcagtgtaaaatgcggtgcaaagaccccagaacacataggggaagacctctgtcacacgtcagggatggagagcacataaaccagaaaatgacacaggttcttttacaatgaacgcccctacaaatcttggaggctaaaaatttctggaataacaacgaggggcagagccaccttgaatcagacaggggagggcaaggctacaaaaactggtgggcaccaaaagaacaggacgcacaagagggaggctgttatac

SEQ ID NO: 123114 - DNA, 601 bp, Zea mays
  Clone ID: MRT4577_43761C.1
ccggccgggaccgcctatctcgccagcaccgccgcatcaccgaaggttcgcaaagtgcagatggcggtgccgctgctgacgcagaagatcgtgaagaagagggtcaagcagttcaagaggccccatcttgaccgctacaagtgccttaagccaagctggcgcaggcccaagggtatcgactcccgcgtgaggcgtaagttcaagggatgcaccttgatgcccaacattggatatggctccgacaagaagaccaggcactaccttcccaacaagttcaaaaagtttgttgttcacaatgtctccgagctggagctgctgctgatgcacaacaggacctactgcgctgagatcgcccacaacgtgtccacccgcaagcgcaaggagattgtcgagcgtgctgcgcaaatggacatcgtggtcaccaacaagcttgccaggctccgcagccaagaggacgagtgaaatgttgagtagttttgattgtgctctgctggtgttgaagatgttactgagattgatgttcttctgtaccatttctatgcttatgatagacttttcatatcgacaaaattatgttaaaaaaaaaaaaaaaaaagcggcc

SEQ ID NO: 123115 - DNA, 531 bp, Zea mays
  Clone ID: MRT4577_43762C.1
gaaaccttattgtttatattcttaacaaagtcacaataagtaactaaaacttatcgaattcgttacaggacggcagcagataagttaaacacaaatagacaaccgggtgcaaaaccagcatggatccaccgaacaggggcaccggtcacatttattcttagcatagacaagcaaaaaagaaggtctgcgaccaaaggccatcgtggacgaacctcgatagggaaggagaaatatctgtatctactggggcttgaacatgtgggggagcaaggcgacgacccggttgctgaagccccactcggtgttgggccaagagacgagcttgatgaacaggttgttcatggcaatgccggacatggccgccaacatggtaaacccgctgttacccttgaagaagggggaaaccagaaacttctgcacgtagaccataatacccttgagtgggacctcaaaagcagccccaatagctttcttgattttctggcaagaggccccctactcgattgtgacagtgagggcaacaactgacac

SEQ ID NO: 123116 - DNA, 154 bp, Zea mays
  Clone ID: MRT4577_43763C.1
gtgcatgcgggggtccatagcgtcttctataggggtcacctaaaattcaatcaatgggccgccgtttaccaccgccgggccgggaaaacccttgccgttccccacctaattggcctggcagaccatccccttttggccggttggggtattacca

SEQ ID NO: 123117 - DNA, 1206 bp, Zea mays
  Clone ID: MRT4577_43764C.1
atgaggggaggactgtggcagcttgggcaatcagttactaggcgtcttgctcaggctgaaaagaaagtcattgcacgtcgatgctttgcctcagaggcagatcttaagaagaccgctctctatgacttccatgttgcaaatggtgggaaaatggtaccttttgctggatggagcatgccgattcaatacaaagattcaatcatggattccactatcaattgcagagagaatggcagtctttttgatgttgcgcacatgtgtgggctgagccttaaggggaaggattgcattcctttccttgagaagcttgttgttggagatattgctggacttgctcctggaactgggactctatccgttctcacgaatgagaagggaggagcaatcgatgacactgtaatcacaaaggtgactgatgatcacatttatctggttgtcaatgcgggttgcagagagaaggatcttgcacatattgaggagcatatgaaggcattcaaggctaagggtggggatgtctcgtggcacattcatgatgagagatctcttctagctcttcagggccctcttgctgcccctgttcttcaacatttgaccaaagaggacttgagccaggtctactttgggcaatttactttcctggatatcaatggattcccctgttatctcactaggactgggtatactggtgaagatggctttgaaatttcagttcccaatgagtatgcagttgacctagctaaggcaatgttggagaaatctgaaggaaaggtaagactaactggactgggtgctcgagacagcttaaggctagaggccgggttgtgtctatatggaaatgacctagaacaacatattacacctatcgaggcaggtctgacttgggctgttgggaagaggaggagagcagaaggtggttttcttggtgcagaagtgatactcaaacaaattgccgatggcccaccacagaggcgtgtagggttcatctcttcaggaccaccggctagaggtcatagcgagattcagaatgaaaagggagaaagcattggtgaaattaccagtggaggatttagcccttgccttaagaagaacatagctatgggttatgtgaaatctgggaaccacaaagcaggcactaaagttaacatccttgtaagaggaaagccctatgaaggggttgtcacaaaaatgcccttcgtacccaccaat

SEQ ID NO: 123118 - DNA, 196 bp, Zea mays
  Clone ID: MRT4577_43765C.1
attcggctcgagcacagcccggcacccctattcttgataccggtcggcgccctgctggcgatccggtggcgcctatactgagtccccttataccccggcgccagctcgttctttagctgcctccgtacccaaagctttaagcgttgacatacctacatacctaaccagccggagagagagagagaggtgacaaggt

SEQ ID NO: 123119 - DNA, 459 bp, Zea mays
  Clone ID: MRT4577_43766C.1
gtttttgttttttttttttttttttttttttttttttttttttttttttttttttttttttttttttttttttttttttttggactaactagcttggactactaaaaatgatacgatcgagagacttttcatatgcatgcattaaatgggggggggggggttgacgtttttgtcggtgaaaaaggaaatgtacttgacctccggagggctggggtttgccatgggctggggggcgcttgggaaaaaacccgggggagcctttttgttgtaggggccccccacttaagggtagggggggagcgtttaaggcacttaggggcaaattttggggtttttggcggggggcttgaaccgctccaaaaccttggggggcttcaagtacccgggaaccgggcacttggtttgttttgggttaaacggaacgcttgtaacgccgggcattgactttaacgggctttt

SEQ ID NO: 123120 - DNA, 501 bp, Zea mays
  unsure (1)..(501): unsure at all n locations
  Clone ID: MRT4577_43767C.1
attacaacattgaattactttacttctgataatggcgtatataggggggccacgacgaggaaccctatttgcgttgtctttgccttcagcattggacacaggaccgacaagcaccaacggctagagggacgatgccagtaggagggagttgacttggcaggtacaagtacaactcaactgccgatagctcaatgttcttgttttggcctcgattccaaagtctgcggctgctgccccactctttttacactgacgtcgtcagcaatgcgtgccgtgcctctagactttttgtctgttgtctgtgttctgtgactccgcctaccacagacttttgtttctgcacctgaatacctgatagatgttcgacttagtgggattttggtttttagggactaatgtttagtcttatcactttattctatttagtgtataaattgtaaatatagaaactaaatagaggnttaagttctatatttgataattttgtaacttaaatgcaat

SEQ ID NO: 123121 - DNA, 348 bp, Zea mays
  unsure (1)..(348): unsure at all n locations
  Clone ID: MRT4577_43768C.1
ctgtattattacatggaaggttccagactcagaccangtgggtgcacagtggctctggttacctctgggaacggctggctgtcttacaccatctgtccccaggtcgtgaggtgagcccagcacatcagtacgccctggctggtggtgtctctttccctttctgctggctggccggtgctggctccgctgtcttctaggtcctaggtgagtacagggtctgtgtagggagaggctgggagccaggtgagcgagcctgtcctgaagcacctgtcctcctacttcctacaggagtcaccctggtacttataggctctcacgctgccttccaccagatagagcctgcagatg

SEQ ID NO: 123122 - DNA, 437 bp, Zea mays
  Clone ID: MRT4577_43769C.1
gaaacgggggtcaaaaacctgcccccgatttgacttcagtggtaaggaatccagtgaaatcacattataaggaagccacaccaacagttgaacaggcatagctgatagctttttggggggtttggtttcccccatatacatggaaccacttttgccctggataaaaattttacatgacatgatacaatgctggctaccatattgaagggggaaaaaactaggcattttttttacttggcggccagattcgcatgtgaaatcaaagctcttcagaaacttcactacactttggagacctggaaacaaacagagttcccccaggggcttataacaaataccagatcccaagtgtttttttatattttttcccagaagaatgggttaaaaatttataacggcactgaaattttcaggttgctacaaaacttttttttttt

SEQ ID NO: 123123 - DNA, 700 bp, Zea mays
  Clone ID: MRT4577_4376C.1
ggagacctgtccgaatcgcgtccaggtccctsgctgggagtwtcgccgagggcccdcccgcctcccccctagattcacgacggararggcgtccgaacwcacctaccgcrgcggckgggcgttcacggccgccagcaccggcdymgggggctactccccgaagccgttyaarccgcttgcwtwgctdcyccgckcggccctgctacgccgtcgctktkwaccgcccgctcttcgcgcbcgccgggatgctcatcgccgccgccgtcatctccatygcatccycgttcgcytyctcctcctcctcctccgccgccgcctcgtcctactccaacaacaacccgctcgcycgtttyttcktcgagcccccccaccaccgcsacgtggccacgcggcacttcgtcggcggcaaggtgccgccgggcctcaagargawrgtgctccgcgtcctcbtyaccggcggcgccgccttcgtcggcagcyacctggtggaccbcctccytyhbcccsgagacagtttcaccgtcgtygacaacktcttcaccggccgcaaggacaacgttyttywccaccycggcgaccccaacttygagatgagacgccacgacgtcgtcgagcccayccygcccgargscgaccagaactaccacctcgccttcyccgcgtcccccgtccaccacaaaaacaaccccaccaaaacaat

SEQ ID NO: 123124 - DNA, 348 bp, Zea mays
  Clone ID: MRT4577_43770C.1
ataaaaatcggaagttcagttcattatctaatggtcataacaaaaataaaatggcatcacatactctaattcaaaactaaaaaacatttaactaacattatctttagcttcgggttatttatcaaggacatgaaaggggggaatgaactatgattttaataaatatatgggccttttcgggcctttatatgggccatttcgggcctgtcttaaacgggtcgggctcgtgcccgcccatggaccgggaccttggcccaaacccggcccggggctaaaatatttcggatcgtgccgggcctgggccgtgtttttttcgggcttcgggccagcccaaatgtacacctatag

SEQ ID NO: 123125 - DNA, 630 bp, Zea mays
  Clone ID: MRT4577_43771C.1
atggcagtgacagtgacagtcacaacgaaaatgatcatcaagaaccaactcaaaatgaccaagatgctgcagaaaaagcgattgatgatgaagaagaatctggagctgctggtgatcaattcaagctggatgatgatctcatataggtgttgccttcttggtcatagtctactactctactggtctagacgacccgagggacgattaggggcgactaatcaccctgatcgcccagtggcttcgatcaggcgatctgaaaactatgtactggtgaattgtaatgcgacccatgatccatctagcactggacgaaaatattctccagatgctcacccgtcacatatagcgcaaactctcctcaaccaagaaacgagcgcggtttcgggaggaaaggggaagccagatgaggcggaggagcttacggaggggtggtattggcaggagccctcgcggttgtcatcgttggtgaatatggcgtcgcagccgatccgctggcaccgcaccggtgcggctgagccgctctttgccgcctccgtcgtcgttgacattgccggtgccctcttcccgaaacccaatcgcccgctctctattaacccggtccataaaacgactcctcaaaatcaattttaa

SEQ ID NO: 123126 - DNA, 325 bp, Zea mays
  unsure (1)..(325): unsure at all n locations
  Clone ID: MRT4577_43772C.1
tgctggctgcgggcacagtactaccccccccaccacccgtaccactgagtctcacattaacgcggctatcacgagagtttggagtggtccaacgttcaactgtaagatactcacgtgtccgttaggtgggactctagtacttctaacggacgtcggtactcactcggtagtggaagcgaccccttcgaacaccttgccaccaacaaacgtacagaggaggaacggacgggttattaatacctccctctcttnagaaccctcgtgggttctccttggtccaggttagtagctactacagacgaggaaggggaggtgaagaggtgga

SEQ ID NO: 123127 - DNA, 2381 bp, Zea mays
  Clone ID: MRT4577_43773C.1
ttccgcatttccgtttgaggcagcagcggcggcgccggcagcggcaccggctgaccagcgataccagcaagaatggggaggtacaggcccgcgtacagccccccgaggagaggacatggcggcacggggaaggagcccacctcccaggagaggatatggcggcggccgtggtgaccatggctctgtcagcctcctggtccgcaacattccattgagatgcaggcctgaggaactacgtgtccctttcgaacggttcggccctgttcgggatgtttacctgccaagagattatcacactggggggcccagaggatcggggggcctcatacttgggattgcgaatagtttagaaggaagcctctctcccgatatgtgccagttaactggtctgtggtactttgatgtgaagaacaatagcttgacgggtgcaataccagaaaccatagggaactgtacgagctttcaggtcttagatttgtcaaacaatcatcttactggagaaatcccgttcaatattggtttcctgcaagtggctacgttatctttgcaagggaacaagttctctggtcctataccatcagtgattggccttatgcaggcgcttgcagtgctagatctgagtttcaatgagctatctggcccaataccctctatactgggcaacttgacatacactgagaaattatacctgcaaggcaataggttaactggattgataccgccagagcttggtaatatgtcgacactgcattacctggaactgaacgacaatctgttgactcccacgcgtccgcccacgcgtccgaagaaattgaagcaaatcgctttacgaagatgtatacaagaaattttggatctaagggctctaaccactttttgaggcttgctactatttgatgaacatgtttgtaagttattagctatgctctatggagaactataaatgattcaccataataatatgaaagcctggtagtaactcgtgaggcacatactatttatgattgttatgtgccatcttatttgtttaccagtgccatattacttacgaaggcttttgtgatcattcagggagccaagaggatttgggttcgtggagttcgttgatgcttatgacgcttctgaggcacagtaccacatgaatcgccagatgtttgctgggcgtgaaataactgttgtacttgctgcggatacacggaaaaggcctgaggacatgcgtagacgaactggaccaagaggttattctggtcatgaagggcgtcgtccgaatcgtcatggtgcaggacggtcccgttctcgttcatactcgcgttcccgctcaccgcgccctcgtggtcgtggtagatcacagtcatactcccctgccccgaaaaggcgtgatgactactctgcttccccaccccgggcaaaggaagagcacccgaggtcatcaaaacagcctaaagaaaataacagggataggaggagatcctatactcctgatgatataaatgatcgccgtggtgcagacaatggtcgtgatgagaggaagaggtccccagcaggcgaggaggatgaggagcctcggcgcggtcatcataggtcaccccggccagcgtccatgtcacctcctgggtcacggtcaaggtcggcgtcgcctgctatcagcgactgatgaatgtggcggcgatggaactgttggccccatgattggggcggtttgtcagactcttgttatatctgctgctaggctctgttttgattttcctccgtggattgtttgtgtatgtggggctaagtccggtggttggtttgctcggaatgaaatgagtgggtggtgcgtttgtcggtggagactctgcttgtaacctggtatggtattagtggcatttgttgctgctgttttaggatgatgatgatgaccgtaatcattgtgcacatttattactgttcccgttttaaatcataaagctttgtctggtttttaggtcaccccggccagcgtccatgtcacctcctgggtcacggtcaaggtcggcgtcgcctgttatcagcgactgatgaatgtggcggcgatggaactgttggccccatgattggggcggtttgtcagactcttgttatatctgctgctaggctctgttttgattttcctccgtggattgtttgtgtatgtggggctaagtccggtggttggtttgctcggaatgaaatgagtgggtggttcgtttgtcggtggagactctgcttgtaacctggtatggtattagtgccatttgttgctgctgttttatgatgatgataatgaccgtaatcattgtgcacatttattactattcccgtttcaaatcataaagctttgtctggttttaaattataaaaaaaaaaaaaaaaaagcggcc

SEQ ID NO: 123128 - DNA, 559 bp, Zea mays
  unsure (1)..(559): unsure at all n locations
  Clone ID: MRT4577_43774C.1
tgtttgaactatatatttcaaaattgctctggttgctatcatgaccttgacaatcaatatctgatttttctgtgccctttctctatcaccctatgagctgtgatcttgcatttttctatagtttcagttatgttgcgctgttactgtgttattagttgtctactttattatgttgttacttttctatttaccttttttcttttttcaatacatgcgttattcctacatatgctattacagaancaaagaacannnngagggnngcaaaagcanaanngcagcagaaaccccngnngaagnagncancnaanncaaacaancngcaagnacnggnnccgctnggaacagccggcagcgggcagccccagcacaataaacagtgctgggcaggttntaaaagcagaaaaaacnttagcttcattccccagcagctttgtctatctccagcagncctatcacatctccttgtttaagctctactatgtaaacgatacagtctacagttgttttgcacggctatatgcatgatctgctgggcctaccctaacaaacagggcca

SEQ ID NO: 123129 - DNA, 566 bp, Zea mays
  Clone ID: MRT4577_43775C.1
ccgcccttgttttgtttgtgtttttttttattttttttttttttttttttgtttttttttttttttttttttttttttttttttttttttttttttttttttttttttttttttttttttttttgttttaaactggcccttttataatgtttaactgttcatttcgggggggggaggaacaagcgggaaaaaaaaagggggtgaccggggtgcccccaggggcaaaccccgctggggaagggaacggggaaaaaaaaaggggaaaaaagggtcccccgcggggacaatccatttgaggggggccgggggcaacctctgcctacaaagggccaaaaccggggggggccccaaaaaaaaaaacaatctgtaaaacccgtttccctcccggaaacgctggagccttttgatgggggaacaatttggaaacaaaccggccaaggccctcttaagaaaacctatatggggaatggggagaaaacctgggaaaaaaaaaaggaaggagggggcaaaataaaactttgggccctggggggggacctcagtcttttccctaatgagaatggggg

SEQ ID NO: 123130 - DNA, 274 bp, Zea mays
  Clone ID: MRT4577_43776C.1
aaaagaaacaaaccataaaaacaatacaagaaaaacaacaaagggcggccgtcctaaaggactgatgcctcgatcatcgtgcacctgatgtccgatgcacttcaagtctgacaaccaacgatccagtcaccggccgtcaatctacggcatctccattgggaacgccgtggcggtaaacagcgtggcctgcacggaccatatcgcccttccccaaaccggcgttttaccgacaaggccagcaccgatcggccttcgcaccaatttcccaccctca

SEQ ID NO: 123131 - DNA, 183 bp, Zea mays
  Clone ID: MRT4577_43777C.1
ttttcttgggttatcacgggttttttggaaaaaatcgaacccgacacacataagcagagggcaaaataccctgcccaggctgtattaccatacagtaaccaccacgccgctccgtttgactccacaactgaaaaaagaaaaacgcaaaggacacaaaccgccttccttgatgcccaagtcttt

SEQ ID NO: 123132 - DNA, 771 bp, Zea mays
  Clone ID: MRT4577_43778C.1
ctcgaggccggccgggccggggctggcccacatcgtgcggcagccctggctggtcttccgtcttcctcgatccgcagacgcggccgccatgccatgctcgccgcaagtcccctgcgccaagtgccgccgccgggcatcccatccacctcccgtcctactccctgaaggcatgaacccccgttccaagcgccctataccgccgccatctcccgttcccctttcctttgttctctttcgtctgctgggcaaaccaacgccgccagccactggtcgatcacttccagccaaggagtggcggacgcgcagggcttggagtgtggcggacaggcggatcctgtagcggcagagacaggtacggacgagagaggtgagttctccgcacgatcggctgggacaggggaacgacgcgcgcaactgtgtggcctgggggggcattaaacgcttaaacggcgatcaatcgtcgcttaatcgattgctgtcgggtactcctggcactcagaagaggttgaactaagatagggatattcaatgacgggtggatcgggtgtggtggtgatagacaatgggggtggtcttctcaaggctggctttgggggggacaatgatccaattgctgttgtccccaactgtatggccaacccccctggtggcaatgccagctcgaagaaatggcttgtggctgaccagctgcaggcagaagaatgtcgatgtgactggcatgactttggaagcgtcctattgaccgtggctatcttatcaataccgaggtgc

SEQ ID NO: 123133 - DNA, 338 bp, Zea mays
  Clone ID: MRT4577_43779C.1
gctgcatgcccaactccaacctacgcaggacaggccagccacctccccgtcgctctcacgctcttcccggccgccgcctcccctccgtctctccctctcccctcccgtatgacgcacatggcctccatcgctggatcttccgccctctccttccccagttccgccaagggaatccaacacaaattctctatatttctcaccgcatgactgaaggatgaacacatgtcctccagcctgcacaccaatgcactatgagacctgtcttcctgcgcatgccaagaacggattcaacaagacaacgctctcgagagattgtcgaagaacatactttgctcttc

SEQ ID NO: 123134 - DNA, 255 bp, Zea mays
  Clone ID: MRT4577_4377C.1
acgaagccccacacacacaaaagcaaaaagcatcatcacaataatggcccgcgcgtgtgtgttcctcgtggtgctcctcctggccgccgtcgcggtggcgccgtttgcgggggctgcgcgtgtggatgtcgtggagggcaggtccatggcgtccgccgacgcgcctgaggcggcggatgacgcgcctgctctcggatccgacttcgcctcattctttgacttgccattggaggctccctttcaataaaagcttat

SEQ ID NO: 123135 - DNA, 576 bp, Zea mays
  Clone ID: MRT4577_43780C.1
cctcgaagccggccgggacctatgcaagagagacactccgcaatcagtctccgccgcgcatccgctcaatatgagcgctctccgactcatggagctctgtcgtttctctacacgctctcctgcccagtcgacctccctgccaggactacacgaggagggcgcctccgccgagtgcgaatataacgacatctatgaaaacctcacggtacaggataatgtcgacgaattcgctgatataattgacggggagctgcccctgcgacgatatgatgaagtgcaaaaaagacccggtgaacaaatacgttgacagtcataacgatgagaaagcattcgacacctaagttgtctacatcgtttgcggcttccactatcaccgccagaaaaagtcgaggaccatcatcttcacgactgaaaaggaagagggtaccctgaatgaattgatacactaacgaagcgctaattatgtcatttgggcacacagatgaggatgctgtactgtgagaaaggattgacgtaactatgatgctaaaacatctctagaatcgttctgaaagaagacatgagttagccctcggg

SEQ ID NO: 123136 - DNA, 238 bp, Zea mays
  Clone ID: MRT4577_43781C.1
tggtcttttaattaggaacaaactaatggaaaggagagttgactgaagttggcccacaggattgtgagctgggcagtgccttcatgaaggcttgccaccttgggacgccccagtatactggggtgtcttgcggagtgcagaaggctttctggcagctgcctgggtttggccagaccctgcctcccctcccgccggccaacccctagtcccctacctggtctccactgcattcaggggt

SEQ ID NO: 123137 - DNA, 768 bp, Zea mays
  unsure (1)..(768): unsure at all n locations
  Clone ID: MRT4577_43782C.1
gtacgcctgcaggtatcggtccggaattcccgggtcgacccacgcgtccggtgcttctgcccacccacagcaactgattctaaggcctgactctagcaatggccttcgcaaatctgcgcaaagtactcatcagtgacagcctggacccctgctgccggaagatcctgcaagatggagggctgcaggtggtggagaagcagaacttgagcaaggaggagctgatagctgaactccaggactgtgaaggcctcattgtccggtctgctactaaggtcactgctgatgtcatcaatgcagcagagaagctccaggtggtgggcagggctggcacaggtgtggacaatgtggatctggaggctgccacgaggaagggcatcctagtcatgaacacccccaacgggaacagcctcagtgctgcggagctcacctgtgggatgatcatgtgcctggccaggcagattccccaggcaacagcttcgatgaaagatggcaaatgggaccggaagaagttcatggggacagaactgaacgggaagacactgngaattcttggcctcggcagaattggaagagaggtggccacccgaatgcaatcctttggaatgaagactgtaggctatgaccccatcatctctcctgaagtcgccgcctcctttggtgttcagcagctgccgctggaggagatctggcctctctgtgactntataactgtncataccccacttctgccctctaccacagncttgctgaatgacagcacctttgctc

SEQ ID NO: 123138 - DNA, 542 bp, Zea mays
  Clone ID: MRT4577_43783C.1
ggccggggtggatcggactcagctgacgctgagacgtctgtctgggcatgaggacccgccgccgtctcctgtccagctctttctctctctctcgccatatcgatggcattggggacacgagcacggccccagacccagagcttctcttctaaaaagatgcaggtacagaacatggacgatggtggaggtcgggcgaccaatccctatgcctagttgatgtgcgactggttccctattaactcctccaggaatgccaagtggtgagactccgacttcccagatggatccgcctgtggttggcgtcggagtgctcggactgccctacgccttgaccgatcaagagtggaggcatgccctcgcgatggagagccatgcggggctggtgcccctatacacgctatgctatgtggccatgctgacgagatgattcctgacaagcacctcaaccggtaacaagagctcaggacgcacgaactcatcgacagactgggccttgggattgatctgtttttttttttggcgtcacatgatacgcagaacat

SEQ ID NO: 123139 - DNA, 766 bp, Zea mays
  Clone ID: MRT4577_43784C.1
acccttctgtatggccttcatgatggtgatccttgcgatttatctagcacccaacacaaccaagcttgtcaacaggtacttgtttggggccgctcagcaggtcggcagcctcagacagatggactggtgcggtttcgttgctgactatctcttcagagggatcaggaagttcaaggaatcggaagcaccctttgtttttgtaaagggctgtgtgcacatcctgaacgtcatttacgttgatcttgtgaaacacgctgcattcgaagtaccaaacggctttccacgcttgggcgttgtcactacagagcataacaaattggtagcttcacatccctttggtagcttgctggtgcgtcgtctagaagagtctgtctatgctcccgtgctcaataacatgggaaatggtagcattgttaaaggcggaacatgtgctgattctgatacaaatactgatgctctggccaatcagtttgctatcactgtcacccatcaaaataacccgcaaccgattgcagcctaccctggcactgccagaacaacccctgatataacgagcttggccagtgttgaacatgtagcgttagagacatcagctcgatctgcagtgtattcatttaacactcacagagttgaggggtccgttttcttggaagaatgcgtagtttttccaagaagccgcgagcaattgcagtctgctgggccttcttcaccgtattctgcacaaattgcggagaagatgcagtttgcgccagaagacactttggga

SEQ ID NO: 123140 - DNA, 1182 bp, Zea mays
  unsure (1)..(1182): unsure at all n locations
  Clone ID: MRT4577_43785C.1
gtggttcaagggcacaagnagagagatcttaccatattttctatcaactatgttctggagctcctccacttctcaaaagtaatcatacctacaatttaagtgttttaaatggtgcttctgtcaagaaaattgtgtgccacattctgtctgtattactacatctatatgtccctctctttttctcgctttctaattccgttgcatgcacatgctnactgcagaaaagttgtctctaaaaagcgcaagtgactacaattacttgaagcagagtaattgcttgaaaatcaatggtgttgacgattcaaaaaaattcacagtgctagtggatgcattggatacaattcaaatatctaaggaagaccaaatgaaattattttctatgcttgcagctgtcttgtggctgggaaacatatcattctctgtgattgataatgaaaaccatgtggaagttgtctcaaacgaagggttggctactgctgcaaagctattaggctgcactgcaaatcaactagtgtctgccgtgtccactcgtaaaatccgagctggaaatgacagtattgttaaaaagctaacattaactcaggccattgacgcaagagatgcactagcgaagtcaatctatgccaatttatttgactggattgttgaccaaattaaccactcacttggaacagggaggcaatttacatggagatccataagtattttggatatttatgggtttgagtgtttcaataagaatggttttgagcaattttgtataaattatgccaatgagaggctgcagcagcacttcaacagacatcttctcaaactacaacaggaggaatacttggaagacggaattgattggacccccatggaatttgtggataacactaattgcttatctctctttgagaagaaacatctagggctattgtcattattggatgaagagtctactttcccaaaggcatccgatttttcctttgctaacaagcttaagcggcaattaagtggtaactcttgcttcaaaagtgaaaaagaaggcacatttaagatttgccattatgcaggggaggttgctgacatatgatacagctgggttcctggagaagaacagagacccattgcactctgagtcaatccaactactctcatcatgtacatgtgaactttcaaaacattttgcctctgtca

SEQ ID NO: 123141 - DNA, 363 bp, Zea mays
  Clone ID: MRT4577_43786C.1
ccaaaaaccccagtcgcaagggggtggagcctttgagttatgggaagggtgtacagcagtgccgggggggtggacaaggcgtggcagcgcaatcttcatcttatcggcggcggcggcggcggcggggagaagaaggcgtgtcctgccgcggcgcccgcgctggggctgcagaagcataagtcgtggtcaccggacatcgagcgcgacgaggtgtgggagcgccggcgccgggacatgcgccgcggaggcacggcgcttcggcgcgcgcggagcgtcacggacgacgacctcgccgagctccgcgggtgcatcgatctggggttcggcttcgagcccgcggagtcggtgtgcgcggcgtgcggc

SEQ ID NO: 123142 - DNA, 304 bp, Zea mays
  Clone ID: MRT4577_43787C.1
ggggcgacgacccggaggccgcggcgggccgggctgtggaggtggacggggtggagttccgggggaagttgctcaccgtgaggctcgacgactggaggaaagggagagccaggtcggaggagcgggcgcgctgggtcgaagccggggttgtccgggaggctagctccccgtggcacaagggcagggaggacgcgtgccgcgagttccggagagtgctggagtcgcggcccgaggacatggcaggctgtcgtctccgctttcgagcggattcccaagccatcaaggagggaatttggtctgatgg

SEQ ID NO: 123143 - DNA, 472 bp, Zea mays
  Clone ID: MRT4577_43788C.1
gcacacctcacggggctcacgggtaggggcagaaggctgctgctgctaccgcccatcgagcccgccaaaaaggcccggaggcccccgcgtcccttaccctcttcctggggagccccaactgctgctgcaaacccttgcaataagcgaaggccccctggataaacccctccaactcccaccgggcgctgttgctccccttaaacgccggcccccccccaaccccggagctcctccttgccgaggaccacaacaacaaaggcttcccccgccccccggggggaggcgcccctgccccgtgcccccacttgatcacccccgaaaaagacttgcccttcccggcggggggggcaagctcctcctcggccatcaacttctcctgctcaatgctgctccccaagggggtcggcccccccctgcccctgtgggaaccctaaccctaacccttattgatctgggcaaacgccgccttgca

SEQ ID NO: 123144 - DNA, 394 bp, Zea mays
  Clone ID: MRT4577_43789C.1
ggggccccccacaataaacaggggtgggaaagggaaaatgcaagggacaacagtttaaagggggggccaacccaaccagaccgggcttcagggccccacgccacaaacggggggggacaccgggggcttgccagggggctttcctttcggggggcccccaaattttacgggcgacaggtataaaacgggttcaaggggggcccccaaaaaaccagggtcccgatcacattggataggggcatttggcagggggaaacactagcttcttgttttttgggccaaaaaggcgggttttctggccctcactcgggtcccccttgggggcctccctaatttttttaggaggggcccccggggtggccgagggccctagggtcaagttttaccaaggggc

SEQ ID NO: 123145 - DNA, 631 bp, Zea mays
  Clone ID: MRT4577_4378C.1
cattgggtacctcgaggccggccggatatatcctatctagtctgggctgttacccgccgcgcatttcatttccccccattctactatcgactctccacccctatcttgtgctgggatacaacctcgatggcttcatctttgcgcaaatatatcaccattgtagtctttaatgatcccaccacgtcggctggcgactatgactaccatatttttatactagatagtgggtgtagacgtcacccgatcccgtcctcacactgtcttcttgggcggcccagtctgaaattgacctcgagatgtatagaagagccaacctttacctcctcgtttgctccccttttctttcctgacgatgaacatcttctcccacgtgacatactgataaagtgagtatacagattacttcttccacttgctgtgccgcttctcgtgtccgttcctctctgctcgtgggcttctcatagataaacctcgcatatggcttcgctccctcggctcttgcgcgcgatcatcaaggctcctccgcttacccgtacaatttctctccacccctgatcttctgactcaacccgcgtgaaccttgatgattgatgaatttgtatcagaggctcctttcctgctgcggaggccg

SEQ ID NO: 123146 - DNA, 699 bp, Zea mays
  Clone ID: MRT4577_43790C.1
ccggccggggtacacctcacctaagcgatgtcacatctctacgcgtaggggcaccgatgacgctctcacacgcgagctccggtcgggactaaaatgaccgccgggcctcatacacctagcagttctctacagacgactgaggctgccgcggtaccgactgctgcatcggacaatgccactggaaggggcagcagctgatcatcctggacgagctgatgcagggctgcaacccgctactgaatctggcagacttcgtcaccctggagatatagtacgagtgccacaagctcatgctgaagtcgatgaacgagaactacctcagcagggaattctaccgcgtcagcactggattaaacaaccgatggggagcacattctaactccacggatcaactcagccatcaaagtatcgccagacagctatatggagtcccaacagcgagcatcctcgtgaagctctcatgacttgcacttctaccgctcggacagtaaaggccaaaatgacatgaattatgattgtgaaccgcgatgaatatcccatatatgcagcgatgccagcggtcctgtctcctggtactagttcgcaaggtattgttatggaaatctgactgcagggatgctatcagaagggtactaccccctgaacaccgtaaaggctgtagagatgccgtatgagacactatctgagtggcggggatct

SEQ ID NO: 123147 - DNA, 547 bp, Zea mays
  Clone ID: MRT4577_43791C.1
ggcggcagcggggaccggggagcacggcgagctcgccgatgctgaatgcacttcccaccgggaacattttcccgcccgtgcgtgtcccggcaacggcggccgcgccccctccgtcgcgctcccgcccggacgtgctcggatccggcaccggccactacggccacgggagcatcatgcgcggaaccggcatggcccctgccaggagcagcattgactcctcgttcctcggacactcctcgagatcgccggcgagcttttcggcaagcagtgggagcctccaggaggtgacccgcttggggaacgagtggtacaaaaagggtaagtacggggaggcgctgcggcactacgagcgcgccgtggcgctgtgtcccgagagcgccgcatgccggggcaaccgagccgccgcgctcataggactcggccgccttgccgacgcgcttcatgaatgcgaggaggctgtccgactcgacccggtcagcggccgcgcccacagccgcgtcgcaggcgtttgccttcgactggggatgattgacaaggcgcggaggca

SEQ ID NO: 123148 - DNA, 423 bp, Zea mays
  Clone ID: MRT4577_43792C.1
taaaaaaaaaaaaaaaaaaaaaaaaaaaaaaaaaaaaaaaaaaaaaaaaaaaaaaaaaaaaaaaaaaaaaaaaaaaaccagaaaaaaaaaaaaaaaaaataaaaaaaaaaaaaaagggtttgtccttgcccggggggccgccggggggggtccgagccatttttgttgcagggggagaagaatttgttggcagcccagggtttaaccccctgggccttgttgtgggggcaaaaattgccggcctgggggggattttaccggtccctggggggggaccccgctaggggggatttttggggatttccttcccccgggggggggtttgggcttgcttttagggggcccatttggccttttgggggggggttttacatttaatgggccggggttttaaaccgtgggggtggggaaaaccctggggtt

SEQ ID NO: 123149 - DNA, 419 bp, Zea mays
  Clone ID: MRT4577_43793C.1
gggggcccccaaaactgaaaccccattggttattctttaacaaggcccaaaagaactaaaacttgggaattcgttccaggacgggggcgggtaaggttaacccaaaaaggacagggggtccaaaacccgcgtgggtcccgggtccaggggccccggtcacatttattctcagcattgcccagccgcaaaaatgggctgggcccaaaggccattgggggcgccccacgatgggggggcggaaatctatctctctactagcctactgggtcttggacatggggggggtccgggcgccgacccggttgctgttgcccccctcggtggggtcccccgggacgagcttgatgaaaggggcgttccgggcaatcccggccttggcgtccaaaaagctccacctggtgtccccggggaaggcgggg

SEQ ID NO: 123150 - DNA, 799 bp, Zea mays
  Clone ID: MRT4577_43794C.1
gccggccgggccgggatcctataccacacacaccactcacatatacctatacaacaaatcttcttctctcccaacccatcccgccaacaaaaacaacaaacatcacttagccgtcttccaataagaacaccgcaatcatgggtgccgtagtatcctgcatcaagtcaatcttccgcaccatcggaaactgcatcatggccattgtcaacgccatcgctgctggtcttaaggcgatcatcaacgccatcgtctcgctcttcggcatcatcatcagctgcctgacttgcggccgtggcggcggcggacgtaggaggacaacgcacacgagtagagtctagtcctgcgtcccagtacctctcttccgcttgactgacgcggataccgttctaccccgtcagcatggcgcttgagaagatacgggtactactactgaggctgcaccctgagcgcgcaacaaccaccgtgacggctgggactcgaacggtcggtgcgtgtcatgggcgtggccaaggactacttttccctttgttgtttttcgctgtattgagagagcggttataccctttggagtggaagatgatggacgatgtggtaatgatcatggcatggaagcgagcgaacgacctctttctttctgatcgtctgtattaacttttttattgtatggtctagctcgacaagatggatgcaaaagggggagcggcaagtcgagaacgtggctttctttcttttcttgatagctccacctgcgcatagattgatacccccaggcttgtacgaatggaccttttacttatca

SEQ ID NO: 123151 - DNA, 276 bp, Zea mays
  Clone ID: MRT4577_43795C.1
accttctttttacacattttacctggtcacctatcaattttttttgtcccttcctaacttttatcccttcctatacaaaaataccaatccaatatgcttccccaactcctttaaaaacacatcttactaaaaacattacattctctcatttaaaacctttaataccctattaaactcctattttttccacaaacatactcttaattcatgacctaaaaactttaatcattaacattccttgtttctctcccctcttacattactaatttcacaaaa

SEQ ID NO: 123152 - DNA, 150 bp, Zea mays
  Clone ID: MRT4577_43796C.1
gggcctgtggcgataggcacaatacaaccgtggttttcggtgctcagtctggcatcgtaacaaacttgatcaacaagggcattggcttgtactggaccatcactactgccacatttgatgcgttgaccatatacctggttaggaagaaca

SEQ ID NO: 123153 - DNA, 316 bp, Zea mays
  Clone ID: MRT4577_43797C.1
aaaaaacttgggcaggggggttaacaatgggtatacctatagggctgatcccacccttatattgtaccttttggtatatgatgaatactctttttccaaactgaggacgcatgcatggccaaagggcgcgtttgtgtgtgtaataccaccaggtgtttttgaaacataaataatgtacatggggaaataaggccgtttgaacatcataatgaggcagcgcccattgccgaaagctcaaaccgaattgctcgacccagttttccaggctgaaccatttgcttttctggaaactgggcatgattacctaggtttgctt

SEQ ID NO: 123154 - DNA, 488 bp, Zea mays
  Clone ID: MRT4577_43798C.1
agcaagaagcagctaatcacaaattgaaacttaaaccggtcctaaaccgaaccagaatcatcagagtcgaatccagtgaaaacaagcttttttgtcctgatgaatctttgattgaaattattatataaggaacccatctccccgtaagtatcctttcagagagtttgtcatctgaatcggaccacgacacaagaaatgtcgtctttactctctcttctcaatgcttcagctgttaattcctttgccgctttctgtggatctttcactcttctcgctatctccattgcctcttcatttgtcatcaccttccagaagccatcactagccaagagaaaaacatctgtctggctatctacagtagcttcttttatgtcaggctctgaactcaagtgtgtcttaagtcccttatctccaaagcacgagacacagctaattgaccattcacccgaggaacatcacctggtagattggatacaaatccacctcta

SEQ ID NO: 123155 - DNA, 230 bp, Zea mays
  Clone ID: MRT4577_43799C.1
cggactcgtgggcggacgcttgggcgtactcgtggggcgcgattagttgctcggggtggaagtaaagtgtatagaaatgatactggtcacccatttactatacctataggatgatatggcatttgtctatctgtgttgcgcttcactatatttgattgtatcagtagttccttttgtgttttttgttccactatagttcaccttgatgttagttcaaatatatttttaac

SEQ ID NO: 123156 - DNA, 311 bp, Zea mays
  Clone ID: MRT4577_4379C.1
ggctttgttgtgggtggggctgagtaggacgagctcgatatgcattaaaagtagttcaggggggatactcatgagcgtgcattggtcaacaagcattactgcacacagatgctggggccggtggtgatcacatgagcagaatctgctgactcctattatagctagtcaaaggactgagacgtgcatctttctgtaaagcactactgtgcggagggtcatctggtgtgcaagggtgttctctttgttgctaacagggtcctgtcagagctgtgtgactccactcatgaagcacaacaacatctagctctatg

SEQ ID NO: 123157 - DNA, 300 bp, Zea mays
  Clone ID: MRT4577_437C.1
atttaggtgacactatagaagagctatgacgtcgcatgcacgcgtacgtaagctcggaattcggctcgaggagtactggcaccgctcttgccccagatcaaagctcgcgagaagagggagaggaggtatttcaacataaataccgcgtcccaccaaatctcaagccctagcagctctcggtttgcgtctgcaacgccgcgggcttgtgtgccatagcccgcgtgtgggatgaggctggtggcaccggctatgaccgccgtcagcagctactctttctgcgagtagacggccgtggtttga

SEQ ID NO: 123158 - DNA, 1236 bp, Zea mays
  Clone ID: MRT4577_43800C.1
atgtcaagtgaaagtgatagggacgacgacaagaaggggaataagaaggagaagaagaggtactacaagaataagggcggcgatcacatatgtcgggaatgggactccgacgagagctccaccgactcctcctccgacgacgacgccgccaacatcgccgtcaacaatggcctcctcttcccaaacgtcggccacaaatggttcatggctaaggacgacaagaaaaagaaggtacactctagagccacccccaaatatacaacatctagtgatgaggatagctctagtgaaaatgaagatgatttacttactctttttgccaacctcagcatggaacaaaagaaaaaattaaatgaattaatagacgctattcatgagaaggatgaactcttggatagccaagaggacttccttattaaagaaaataaaaaacatggaattggcccttctatttgcactagatgtagagatattgatgttgaggctatagatgatcaccttgccacgataaagaaacaaaatgatcatatagctcaattagatgctaaaatttccgagcatgagctcgaaaatgaaaaatttaaatttgctcatagcatgctttacaatgggagacgccctgacattaaagatggcattggtttccaacaggggagcaatgtcaagcttaatgcccctaaaagattatctaattttgttaagagcaaggctcccatggttcaggataatgaaggatacattttatatcctgctaattatcctgagcacaaaattaggagaattcatgctagaaaacctcacactgtttctcatcatgcatttatatataataatgaggcttctagccgttgtaattgtactgagtgggaactcaccataactcaagcccatgtagctgccttggaaagtcatgaggtcattgctgttgaagccctggagcaagctaaggacgagcacgtccagaagttgattgaggcctacttagttacccacaaccaatgtagagagctgtttgagccccttgccataaagaagatcctagcacccacccttgaggtcaaggaagaagccgcaagcactccatttgcaccaccgctatttgaggccactttggagttgcaagagccattcccgcttggagaagagtacaaccctgtcctaccatctcagtcaccaccagaagaagacaccaacatcagctctttctcgacccacccaagagttgtcctagaatga

SEQ ID NO: 123159 - DNA, 437 bp, Zea mays
  unsure (1)..(437): unsure at all n locations
  Clone ID: MRT4577_43801C.1
ctaggatctttctctcctccactaaaagctccatgggagaggtcggctggggcttgagggctgaaaccatggagtttgccgagtgccagggaggagctgctgggagccaagacgacaatgccatggagaggggcaggggcgagcgctagggaggagaggggctcgatgaccagcgagctgggagaggcaccgagttgcaggagggggtagggacggtcggcgcagggagctctggcgagcttggcaagactgcaggcttgggggcgacgacagccatggagagaggagcgcgagcagggaggaatccaaggggaaatcgccatggggggagcagggagatgaggtcgccgacctggcctggtggggtttctgcattcgccacgacagggagaaatcccagaaggaagaccacgtggnggagcagccgtccgtgcggt

SEQ ID NO: 123160 - DNA, 2162 bp, Zea mays
  Clone ID: MRT4577_43802C.1
tggtaccctcccctccggccggacgcgtgggcggacgcgtgggcacagacagcagccacagcggagcttaattagcaatcattgactatgggtgcgctcttgccatggctggcatggttgctcgtctccctcgtcggcgtctacctcctcggccatctcgtgcaggcccgtcgtcgtcgtggtctaccgccgggaccccacccgctgcccatcatcggcagcctccacctgctcggtaaccaaccgcaccgctccctcgccaggctcgccaagacccacggcccgctcgtgtcgctccgcctgggctcggtgaccacggtggtcgcctcctccccggccgccgcccgggagatcctgcagcggcacgacgccgccttcagcaacaggtccgtgccggacgccccgggcgcccacgccaggaactccacggtgtggctgcccaacgcgccgcgctggcgcgcgctgcggaagatcatgggcacgcagctgttcgcgccgcacaggctggacgcgctccagcacctccggcgcgacaaggcgcgggagctcgtggaccacgtgcggcggctggcgcgcaggggcgagcccgtgaacgtcggccgcgtcgccttcaccaccagcctcaacctcgtctcgcgcaccatcttctcccgcgacctggccagcctcgaggacgacggcgcgtccaggaagttccaggaggtggtgacggacatcatggaggccgtgggcagccccaacgtctccgacttcttcccggcgctcgccgttgccgacctgcagggctgccggcggcggctggcgcggctgttcgcgcggctgcaccggatcttcgacgaagagatcgacgcgaggctgcgtggccgcgacgctggcgagcccaagaagaacgacttcctcgacctgctgctggacgccgcagaggacgatgacaacacggccggcctggatcgcgacacgctccgttcactcttcacggacttgttttctgctgggagtgacacaagctccagctcagtggaatgggcaatggtggagctgcttcgaagcccgggttcaatggctaaagcatgcgacgagcttgcaacagtcatcggcccaagaaaagacatcgaggaatctgatattgggcggctgccctacctccaagccgtggtgaaagagaccttcagactgcatcctgctgccccgctgttgctaccgcggcgtgcccaggccgacgtgaagatgatgggctacgtgattcccgaagggtctcgagtgttcgtaaacgtatgggcgatgggccgagacgaggagacgtggcctgagcctgagaagtttatgcccgagaggttcctggggaagaagaagacgcaggcggttgatctcaggggcggggacttcgatctcatcccgttcggtggaggacgccggatctgccctgggatgccgctggcgatcaggatggtgcatctgctgcttgcgtcgctcttgaatcagtttgcatggaggcttccggctgagctagagaggaatggagttgacatggctgagaatttcggcatcacgttgaccaaggccgtgcctctttgtgccatagccacagagatctgagtcggcaagctattctattctagttaactatttcgaaataaacttagtaaataggtcagagaatgtttggtttgaagaattaatctattctacatggagtgagtgatgcatcatgattcatgaatccattctacatatttggtgtaatgaactcgttactcgtgttcactacaggaacagagtactttgccgtcggaacacaggagttcagcttttggacttacggacttactccccccgtttcgttttagttgtcgctgaatagtgcaaaattgaactatccagcgccaactaaaaagaaacggagggagttcccacccccctaaagaaagaaaagaaaagcagcccaaggatgtcctttggttttctgctcgtggtagacttcgctcgcttcttttgaatagaaaatagatgcagataccctacctaccccggtgctaaacgacgtgtggtcctgcccgctagtgctaatggaatcgatgctagtggcggatccaaaaatatattcgtcgacaacttgagctttcgttgtgtaataataagcatggtatttcgttcgtgtcccc

SEQ ID NO: 123161 - DNA, 371 bp, Zea mays
  Clone ID: MRT4577_43803C.1
cacgcgtacgatgacatacaaatccctggtatgataaattcttcgactagcagcgcagagttcctgcgcacggtgacagtgaattattggagctgctaatactgtgaagggcattatctgaactgacatggccagcaactctgaataagagagacatattcagggaagtactcatggatattgacccattatcactctcaaaattaagtgacaataagattatagtacctggaagccatatcataccattgatatccgtacataatctgagccgtgttattgatatcgcacacccactactgatgatcatatacgaatacgcatcgcctgacacatactgccgtatcctactgaatcacatgcttatattg

SEQ ID NO: 123162 - DNA, 234 bp, Zea mays
  Clone ID: MRT4577_43804C.1
cgagaagctcgcctcgctgcgggaccaggatgacagcatgaatgacgacttggtctgccattatctcgaggttgcgtgggacattgctctcgcgcactcgatgcattctcccagactgcggatactgcctcggcttccaatgtccataacagcgacactcgactcgcgcgccagctctgtgagctcagatatgcaacgctcgacatgcggcgtgcgatgcgtctcaccacgggg

SEQ ID NO: 123163 - DNA, 252 bp, Zea mays
  Clone ID: MRT4577_43805C.1
gattccctaaacccaaccttattgggctgaagagggcccatcagattacacgaaccttaataccagcaaatccgacaaccgtttgatccgatatcatttgcaaccaccgggcaaattggaaattaacgatgcttgatgagcctgaacctggggggtttaccattgactgggggaccaggctctatgtattaaatgtcggaaccaacagcggcatgcgatcacgagctaccactgttagacatgattatatta

SEQ ID NO: 123164 - DNA, 879 bp, Zea mays
  unsure (1)..(879): unsure at all n locations
  Clone ID: MRT4577_43806C.1
ttgggtacctcgaggccggccggngacgcgcagcagcaagccttcgccagcaaccaaccggttctctctacataattcaccatgaaggtcgtatccctcatcctcggcgctctcgcctccgttgccagcgcacagcaggctactctttgcaaggactttgaatactactcgagcaacggctacgagctcaacaacaacatctggggtcgcagctcagcaacctcgggctcccagtgcacctatgtcaacagcgtgagctccaccggcgccaaatggacctccaactggcagtggcagggtggcaaggacaacgtcaagagctacgtctactctggacgtcagatcgtcaagaagcccatcactcaatacagtaaccttgagacggaggcttactgggtctacgacacctccaacattcgctgcaatgttgcgtacgatctgttcacggcttccgaccccaaccactccaccagcaacggtgaatacgagctcatggtttggctcgctaggtacgatgtgtaccccattggatcctcgcaagggatggtcaacgtcgccgggcgtacctgggaactcttctacggcctgaacggcaacatgaaggtgtacagcttcgtcactccttctggccccatttacaacttcaaggccagcatgaaggacttcttcacctacctccagaacaacaagggcttccctgcctctagccagaacctcctcacctaccagttcggtaccgaggctttcactggcggcccagccaagttcactgtcaaccagtggcctgccaacgcttactaaatagagggacttggtggttttctagatgggctactttgagccgaaacgaatgtncacccatctgtatgagaaagcatg

SEQ ID NO: 123165 - DNA, 260 bp, Zea mays
  Clone ID: MRT4577_43807C.1
gtctgcacccaagaggtggaagaggacgggctttaggctggaagcgccttagaggagccattgtaccaggtggggccccacgcagacgctctgacagagagcctggccatagtcgcgcaccggggacgtggatcgcgtcccagacccgagcccccgacctcagccaaacccattccttctgctcttggaggccagaggggactctgagctccggaaaggtagggtcacggaggctgagagtccttaggcgaggtgggagg

SEQ ID NO: 123166 - DNA, 316 bp, Zea mays
  Clone ID: MRT4577_43808C.1
gcgacatcaaagagaagctgtgctacgtggccctggacttcgagaatgagatggccaccgctgcctcttcctcctccctggaaaagagctatgagctgcctgacgggcaggtcatcaccatcggcaatgagcgcttccgttgcccggagacgctcttccagccttcctttatcggtatcgcctctgcggggatccatgagaccacctacaacagcatcatgaagtgcgacatcgacatcaggaaggacctgtacgccaacaacgtcatgtcagggaggcgctaccatgtaccccggtatcgctgaccgcatgcaaa

SEQ ID NO: 123167 - DNA, 595 bp, Zea mays
  Clone ID: MRT4577_43809C.1
cttcgtgaaaaccctaacggggaagaccataacccttgaggttgaatcatccgacaccatcgacaatgtgaaggcgaagatccaagacaaggaaggaatcccaccggaccagcagcgattgattttcgccgggaaacagcttgaagacggccgtaccctcgccgactacaacatccagaaggaatcgacgcttcatctcgtcctccgtctccgtggtggtgctaagaagaggaagaagaagacttacaccaagccgaagaagatcaagcacaagcataagaaggtcaagctcgctgttcttcagttttacaaaatcgatggatctggaaaggttcagcgtttgaggaaggagtgccctaacgcaacctgtggtgctgggactttcatggcgagtcatttcgatcgtcactactgtggtaagtgtggtctcacctacgtttaccagaaagaaggagctcaggaatgattttcatctcgatctctatcattttgaattgaatactgctttttttttggaatttggaagttgtttttggatgttgtggatcttatgttgaacttgtttgaatttcatatctaggtttttcttatggat

SEQ ID NO: 123168 - DNA, 591 bp, Zea mays
  Clone ID: MRT4577_4380C.1
atgcaggtggcatgcaaccgcaccacggggcgcaccccttcggcttcgtcacatccagcatggaggcccaggcccacacgtcatgtaaccggcgtgtcggttactacgtgcaagaaactgcaccgccacttgcgccaatgtcgtgccttctcgactgaggaaccagtgccgcgactcgaggcaaccctgcgcatggcccaacagtgccaatcgagcacatcgatcacggggaccgggaaaggggatatttcgaaagggatccttctccacgaaggaagcgggccccgaaccctcctactgatcagggtttcgacagccgccccagagcactcaggcttcaagctcattactgatcaggggttcgaatgctggcccctcggaagggttcgacagccgccccagagcactcgggctccgcgcccactactgatcagggattcgaaggctggcccctcggaagggttcgacagccgccctagagcacgcagagcgagggatgactctaggtacgtccgatacatggccgaggctcgggctacgctcccgaggtaccctaggacatttccgagaccagcagaagcgattttgtaa

SEQ ID NO: 123169 - DNA, 865 bp, Zea mays
  unsure (1)..(865): unsure at all n locations
  Clone ID: MRT4577_43810C.1
agcacgtatacagggacagggaagaaggacgtgcatgtttcgcggtttctgagactcaaagcgcgagcacaacgaacgtgcacacgcgccagacgtgtcactgacagttgcggcccacaccatgactttcacctggacgcctagtcagccaagacctgacccatccgccccatccaaccaatccggtcaacgggagaacatgtacgaggcgatgtcgccgcgccgggcgctcctcgccatcctcctcgccgtcgccctcgcctccgcttcctcggcaccccagcccccgccgtgcagccgctcgtgtgcggccctcaactgcgactccgttgggatccgctacggcaagtactgcggcgtgggctggagcggctgcgacggcgaggagccctgcgacgacctcgacgcctgctgccgcgaccacgaccgctgcgtcgagaggaaagttttgatttatcattctctgctaggtatgatgagcgtgaaatgccatgagaaattcaaaaactgcatgaggaaagtgaaaaaggcaggcaaggttggcttctccaagaaatgcccgtacgagatggctatggctacaatgactcaagggatggatatggccatcatccttagccagttgggcacccagaaggtggaactctagcgttagctagctccgcctcagctgcatgttgatttattctcacggaaatatttatatactccactgaagaatagaatttgcttccatatggttactgttgtttcatcgaagtcagagggatgcatagcttatctttcttctgccaaattgaaaaagaaaggaaaagacttcagtttattttctgtaaaaaanaaaaaaaaaaggccccctagggcc

SEQ ID NO: 123170 - DNA, 226 bp, Zea mays
  Clone ID: MRT4577_43811C.1
gtgcacggatatgtgcgagcaattccgccttacaatacgactcactatatgctataaacagagcttcatctttccccgtgcacacatgaaaaagaactaccaaaatagaaggcttacccctgaacacctgccccactgaggtgctatacacagagcttgtctttccccgcgcaagattccactctggccaccaccccttgtaggggtcatgcgccataccctggca

SEQ ID NO: 123171 - DNA, 220 bp, Zea mays
  Clone ID: MRT4577_43812C.1
tcgtttacacttccccgtcaagcaaagcagggagggggttttttacagagggagggggatcggaacgtcagttgtcttacgcagcattctacatagctaagcaagacttgtcaccccgaccacagggtaccagaaccggaacgccgacacagcgcgcaactagcccctatgtcctgactatcttcggaccacccgcagccacgcatgcacaagaaagggt

SEQ ID NO: 123172 - DNA, 341 bp, Zea mays
  Clone ID: MRT4577_43813C.1
attcctttttttttagaaaaagaccacataaggtagggctcataaacgtttagggccacaggagcatatggttggacacttccggacaacatagcagtgcttatgaattcgattcagagggctacctgtatgcataggagccgccacctctagctagataaacacattgacctttcacatatggcccttgataagctagacttccacactatttgttgatacggatgcttttccccccgcgtggccttcggttggtagattgacttcctaatccatggggggagtctccttgtctttaaatttaacaaacccttgcgctgtatattagtgcccctttacgc

SEQ ID NO: 123173 - DNA, 311 bp, Zea mays
  unsure (1)..(311): unsure at all n locations
  Clone ID: MRT4577_43814C.1
agcagtggtaacaacgcagagtacgcggggtggaccctgagttttatgtgttctttacagaactttatttaaaaaaaagtgtttagatagacttggttttatcaaagaaaagtgagaattgattgtgtggcatacgagctttaaatggttgttgattgaatactatatgttctgcatccgagagttgtaagaacttattattgtttacacactataaaaaaataaaaaataataaaaaaaaagttctttgcgttgttaccactgtttaagggggtnttgtgtggatttgcatgacactgtcggccgttcga

SEQ ID NO: 123174 - DNA, 775 bp, Zea mays
  Clone ID: MRT4577_43815C.1
cattgggtacctcgaggccggccgggcgtatcgtctccgtcccacgcggccacgcctccacaggccgcgtcgttcccgccggcatctcattcgctcgtctccgccggtcgacgttacgccgcgtcgccacacgcccccccggccgctcctatcgctaccacctctcctctcctgaagccacccggacgccggacgcaatggatttttcaaccgcatctacctcctctccccatggcgccgccgcccgcgccgcctgctgactcgacccctgatctaaggcccgtagccagcgtgcccgtgcccatcaccgttccgagcccgcgggaccacactcaccaccaccaccacctagtcgatcgtcgggacacgccgcggggccgcgcgtgggagccggagcggaaccggcgcggagaggcgatggacggtgctgcagtggtcaagctgatgtccggcgaggctgggtatgtcttagaagacgtgccgcacgtgtcagactacctccccgatctcccgacctacccaaatccattacaagataacccggcatactccgttgtgaagcaatactttgtaaacccagacgacactgtctgccagaagattgttgttcacaaggatggccccagagggaaccacttccgtcgtgccggacctcgccaaagggtatattttgaaccggatgaggtccatgcatgcattgtcacttgtggaggattgtgcccgggacttaatactgtgattagggaaattgtatgtggattatctgacatgtatg

SEQ ID NO: 123175 - DNA, 1886 bp, Zea mays
  Clone ID: MRT4577_43816C.1
ccggccggggtactcagccagctatccttggtgtgggggtttgatcgacggagccgtcacaacggcgcctatggcgaagccttccgtacagactcatttcgtcttggacgcgatggccgcggagagggtgaaagtcgcggagaactgggagcgggcgttggattcgttggagaacatgaatcagcgcctgggaaagttcgccaaggtccagcgccagttggtggagcagtcggaggtcgcggcgcaggcggccaagcaggcggcgaaggagcgttctgttctgtcgcgtcaagtggaggaatctgggcagctgctggcgcgggtacagctggaatccatggcggcggagacggagaagtccaggaggagcggatccaccagcccgtcatctaggtcttcaccccctgttcaggtacggaagggtcctcagaagggtgttcagatcaatccactgcctgagatgtcattcccaaagtttgatggtgctaatccgagagtttggttggacaagtgtttggattacttccatattttcaaggtttctgaagctatgtgggtacaagtggcgtctctgcacttggaagggattgctgctcgctggtttcacgtgcatagactgaaacagaggacggggtggaatcattttactcgggatgtgttgaacaagtttggcgcagacgagtatccaaaggcgatgaggagattgatgggtctcaggcagacggggtcactggacgagtttgtgcgggcgttcgaggaagcacggtacatggtatcgctgcataacccaaagttgggtgaggtgctctttgtcactcagtttattaggggtctggagtatgatttgcaaggggcggtgcaatctcagatgcccaccactttggatcgagcagtactaattgccaagttgcaggatgaactgaatgatcaatacaaaggaaggtcgacaaggtcagtgttccagtcgaggtcctcgtccacagcagtcaaggccaaggcgatcagtggtactactggtaaagggtgcatgaaggtgcggggtcttttgaagaacaaagttacgttgctgttgtcaattcattccgggagtcctacttgctttatcaacaagaatctggtggctcgggctcgtttgtctgctgtttcttgtcctccagccaggttcacattggcaaatggcgagtccctaacgtcggatttgttggttcctcagcttgcctggtgcgcaaatggccacacgttccacactgatatgagagtgttggatctgggaccgtatgacgccatcttgggttatgactggctgaaatcacatagccctatggaatgtgattgggcaaacaaggtcttggtctttcatgatgcaggggtggaggttactttgaaaggggatgatgataatatcaagaaggaggtgcaggaggtttcagccatttgccacaagtgttgatcagatggtccaatctatcggtggactcgtcgactcgggaagattactatatggttaagcggtatcctaatgccgctgtttcggtacaaacagtatctgaaggtctgtgtgtgtctgggtggggggcatgttcagagctgagcgctggacaagtgaagctgatgaggagtgatggcgtagtgtcatagggcgttttctattttacgttttccagttgggttggcgtctttaggcgcatactgtcccgaacaacccgtgcgtgcagcaagtcgctgatgggaggttacctcagctcatagtttatggaacagactacaacacgaagaatggaactagggtacgtactctgttgcttgtcgtgctgctctgttatcgtttaataatggttggtagtccagaaactcagctcatcattcctgatcgatatgttgcttct

SEQ ID NO: 123176 - DNA, 291 bp, Zea mays
  Clone ID: MRT4577_43817C.1
cacagcaggacctgaggatgggaaaggctcttcttcagaccctgggttcttgtcggcaccagagtctctcctgtgcagaggcagctatggatgatggctgttgcctgccgtgcctggacactggccctgggtgacacacaggctgtgggaggtgtcaggacaggccctgtgaggaaagtgggtgccagatgccacacgtgagatgacgggcgccctgctccaggtggtgggtgtgcagtgaggatggcctgccccacgcgcgcagagcgtcagaaagaggaaagaaaacgc

SEQ ID NO: 123177 - DNA, 721 bp, Zea mays
  Clone ID: MRT4577_43818C.1
atccctcccgtgacctacctcctcgcgtctcggcttgttttggcttcctcctccccgactaccaccccgggcttctcctcaccccccgctccaccttccgagaggatctagtcctgatcccacgctgacgtcgtagctgttaacatcctagcaaggccaatccggcgagcgacagcgctgctaggattgtcgctgacaggatgctctgaccgctccgcgccggcataagggtgcgcctctcagtgacgcagaccgacgccgagtgtatcctcgcattcgtgccgcacaaggtagaccccgtgaccgagaacttcgtcggtggccaccacaacttcttgtggagctccgatcaccccaccatctgcctcaaggtaacgccaccatgtgccaaccctgcgtacacgttgaaggaaaaatctggtgacatatcctgaataatcgctccaaacggagatatgaacaagctctgataccctaacccatatggagcacctgaaactgtctctatctacattcatgctgtacacatacccaacgaccacaagtctagcgaaagatgagcactagaaccctatcaacgtcaaaatcgcggagatgaaagaagattagaatcctgcaccggcgcagagaagtacctagaagcgctcgaaactcgttctatgcacactaatgacagcaccacaatgcgtgtcatgttctacgcaatggccgaactacatat

SEQ ID NO: 123178 - DNA, 183 bp, Zea mays
  Clone ID: MRT4577_43819C.1
atggctgggtttacttggcaccgcgttgtaatcatcttcagactcagtctcaacatcagcctgctctgcttcagcggcaggtgggaaggtgaatcgtcaaggtcttccgcaccggataaacagtcactcgcactcactgagcggtgggccacagagtccgagaagtcgattgtaagggcataa

SEQ ID NO: 123179 - DNA, 283 bp, Zea mays
  unsure (1)..(283): unsure at all n locations
  Clone ID: MRT4577_4381C.1
gttgggggttttttttttaattttttttttgggtggtgttttttttttttttcgggacccatcaaaatacaagcccgatggggcatacagacctacaagatcacagctggcccacaaaagcgtttttttttaaaatnttcaaccacaaatcggggggggggggggggatcccccccaatttaaataataccaaancctacccaaaattctacacctttcaaaatcacaaaaataaaaccacaccacaaactttnacccnatcccaactatctccaccataact

SEQ ID NO: 123180 - DNA, 1815 bp, Zea mays
  unsure (1)..(1815): unsure at all n locations
  Clone ID: MRT4577_43820C.1
atctgtttctcagcacaaggctgaacaagatagatttgtcgctcagttggcatctcttgagtctaggcatagctctgcagaaggaaagttgggagcagctcgggaacatgcagcatctgctcaagatgaggctgcagaatggaagaagaaatatgaaatggctgccgtgcaggctaaaactgcattggagagactagcatcagtgcaagaacaaattaacaaaattgcacaagaaagggaaagttctataagggcagaatttgcctcacatttggagggaaaggaagaggaaataaggaaattagttgctaagattagagaagcggagagtgaagaaagtgtattgactgaacgcttgctggttgtggaatcaaaaacacaaggccacaacaaggaaactacaggcttgagggatgaaatcaaagaactaacaagcaagttagagtatctaagagatagagcagtatcatatgaaaagcaagctagaatgctcgagcaagaaaaaaaccatcttcaagagaagttcttatctgaatgtaagaaatatgatgaggcagaacaaagatacaagtctgcagaaagggatgcgaagaaagctgttgagttggctgatgcagctcgaacagaggctattgcataccagaaagagaaggacaaggcacagcagttatctattgaaaaggtagcagttatagagagggttcaaagacaggtagacagactagagcaggaaaaggttaatctattgggcgaagttcagaggatgcataattctgaatctgatgcctggtccaaggttactttgcttgagagtagggttgctgagagggagaaagaaatggatgatttactgagccgtagcaacgaacaaaggtctagcactgttcgtgtccttgagagtctgttggcaacggaacgtgcagctagagctgaagccaataagcgtgcagaggccttatctctacagctacaatctgcccaaggtaaacttgatatactccatcaggagctgacatcgattcgccttgttgagactgcacttgacagcaagctcaggaccactacctatggcaaaaggttgagagataatgaagtacgactgtattctatccaagatatggacattgatcctccagagaggagcagaaaaagaaccaaaagcaacactagccccttgaagcctgtccaaactgaggatggtggttctgttcacatgagagaagacagcgttacagttagcacggatgtaaaagatgacaatccagatggttacaaaaagttcaccatagctaaactgaaagaagagctaactaagcatggatttggcacgcagttgttagagctcaagaatccaaacaagaaagatatactcgcactttataagaagcatgttttgtgcgagtaaataatggccacgtgaagttccagtcttcaacacataatctatccaaactagggaaacaatagagtagtctgtcagtatttttaacaagctgatgcctcattgttctccaggcattcgtttctgctgattggtttgtattttggtgttaacatcgaattagttccggtttgtgtctaggctttgtatttcttagcttgctggttggctgggtgaagttcttaggacttctgagtgctaaatgacctcgaccaacgctagtcgtgggcaagtttgtggtacgtttgtatatggtatattgctgtgtaaagagtgctttatccaattcaaatatgatatacaaaaaaaaaaaaaaaaaaaaaaaaaaaaaaaaaaaaaaaaaaaaaaaaccgagnggggggaacccggtaccc

SEQ ID NO: 123181 - DNA, 739 bp, Zea mays
  Clone ID: MRT4577_43821C.1
ggccgcttttttttttttttttttcttttcaagagaagcaaagaattaaacatgccactatgtccgaattctaaattacattctcatataaaaaacaccgccaccacctgttccattcaatcattcaacaagaccacgtgcttgcaacgaatgtaacgaagaagaaaaaagaacccacctcctttttttttggccttcattaagttgccattcttcccgcacaccaaacctcgtcatcttcaaccccaagaaaaaagacacccccttcgtcaccattaaataccctttaatcccccacaaacccaatcctattcattcccatcatcaccgccattcatatatcccctttccatgcgcaaaatcaatgcttcccactcttccgttgcttaaccctcgacccaattgaatcctgctccaccgccaccggatgcgccggggcaggcgtaacaggcgccatctgctccaccttctccatctgcgacttcgtctccttgtccgcaccatcctccttgatcaacttttcctttgcctccgtctcatcatccgtcggctcgtactcgctacgatcatcctccatatccttgtacaccacaaagcggtatgcaatcctgcaaatcaagaagccccagaacaggttgacggcttgtagggaagcaaggaggccgaaggtgatgtattgactgatccagcacttgtattggtgcgtttcccagttgagttcgaaggggaccgacggttt

SEQ ID NO: 123182 - DNA, 784 bp, Zea mays
  Clone ID: MRT4577_43822C.1
cactttcttcttttgtactggtttttttttcttaagtgcaaggaacatcatcttgagatgcattgattatggataggttttacatacggttcatcatgtcacactatgttttattcttggacgactgtgcggtaggttctagattgtacataccctaaaactcaccaaacttatatgttcacaaaatagcaacgataatgattcacactcgagtaccaacggtaacaagcttgaataggtcgatatcaatttctagtataatattttattatagttggaataaaataaatatggtttaacgttatgagttaacggtcacgttaaaaatatatgaagcaaacatcacattaatgttgtcagagaaagtcaacctggacatgtgggtactgtactgcaatgaagtgcaacacgagccgacgacagtgacacagcgagatcttgcgattgttggctgcagtactacctagtagtagtactactaactactaatacacggccaccacccgatagaggcacgctaggtgatgctgccaagtgtgacgaggcagacgggcgggcggggtccggggcagtaccgctactggtggccatcagtggtgcccgaccccccaatcatctactactaactaggtgggtgcccgtgcgttgcaacggaaacatttaatatcatgataacttatgaacaaatgtgtgttatactggtatgtgaaaatgtttcgtaattaattatgatcctagccatacataaattttgctatttcaatctaactatttcatcactaca

SEQ ID NO: 123183 - DNA, 246 bp, Zea mays
  Clone ID: MRT4577_43823C.1
attcggctcgggccagattcacaagcttcattttcgggagcggtggcaatacgccccactggggggacctatgacgctttgggggggagacaccgtgactcctctcaactgtgcaaaggcaggtggcatgactcttcaacctgcgttcaacacttcatggccattaccaacttggctcaacgtaagacgacggtgggcctctccaaggtggacatcatgatcgagaatcacagcaactttggcagg

SEQ ID NO: 123184 - DNA, 299 bp, Zea mays
  Clone ID: MRT4577_43824C.1
cccactcatacgctcacacatcctcccatgcatgcgcggacacttgtaatcaaaattgggggtaaatcttcttcaaatgttgcatctgatactcataaatgagcatcagataaaaacgccaacatcactacacttctaaatgtaacttatcatccaagtccaacgctatctcactacttagattcatcacctaccgatccacttttgccaggtacaattaataacacatagcacgtaatttatatatccaaacctgattattacgacgtctaccaactgaatactcctcatacaccgac

SEQ ID NO: 123185 - DNA, 441 bp, Zea mays
  unsure (1)..(441): unsure at all n locations
  Clone ID: MRT4577_43825C.1
ataaaatggttcttcatcaatcaaaggcattggctttcaatccggccccctatctaagatgggatggtttaaaaaaactacatggtaaaccacagaaactagtttcggcggagccagatcgaaacaatattcctacataacactaattaagactctgaagagtcgcacaacataccaaccttaatccgcatcctcatgagccaagggacccggttccctaacctggccaccaatttttgatggcaatcctttggggcacccaaaattaatgccactgccgttgcttattagggtgtaaagtgtttgagcaaccttgagaaaaaggtccactagcctcaggaaagaagaccccccatccccagctgancaaaactgcggaaaaagtcattaaaccaaatcccattaaaaaccccaaaaatatgggaaactttggattaagtt

SEQ ID NO: 123186 - DNA, 304 bp, Zea mays
  Clone ID: MRT4577_43826C.1
attcggctcgaggtgtaatgacctgcgggtattttacctcggctgccggacctgacaagggcaggggtgagcacgctgacgtgcggtctgaacggcaagctgcactgcaggggctaggtaaggtgcctgatctacgggggcaccgtctggctcgacctgtacagggacctcaggtttgaagcaatagaccttggcaaaagcttcctcggatggagacaagtagccaaactgttcaccgaccatcttcgctacattaaaagcagtctgatatctccctacagaggggaccatagctcctggtagg

SEQ ID NO: 123187 - DNA, 435 bp, Zea mays
  Clone ID: MRT4577_43827C.1
gtatctcctttttgccgttgttgtccttttttttcatggacagcagccggttcagcgtgttcgacgtcttcgagaacctgcggtggttttgggggggggcccaacccaacactatgcccccctatggggggcacggggggccgcaacatttggacaccaggaacgaccccctgcgcaaactccccggagggggccaacggacgcaaggccgctgctaaaaaaaaaaaaagcgcgcgcaaaataaaccaagaggccctggacaaaccccgccgtgccgcccccccaaggcataaaaggccccccaagttttttttgagaccgggggttaaccagggggggggggacccccggttggaacaagacaaattttttgggccaaaaacccctcccccgaatgttacgggggggggggggaaacccctccggggggggtgg

SEQ ID NO: 123188 - DNA, 298 bp, Zea mays
  unsure (1)..(298): unsure at all n locations
  Clone ID: MRT4577_43828C.1
ttttttttttttttttgggtttttttttttnaaacattgaaccgaccgatttttacggggtccaaaaaaataacccccacaaaagttccaaccaaccacaaattaagtttaaggggacacaccggaccaactgacgataatttttggaaggaactgggccagccaggaactggagaacatttaaaattgacaacaaaccggttattccacctttttgatttttgggccagggccccctttttcggcaggggcttttttttttattccggcagggccgcctatgtttttacccgcgccc

SEQ ID NO: 123189 - DNA, 588 bp, Zea mays
  Clone ID: MRT4577_43829C.1
cattggtacctcgagccggccgggatatactattccatattggcgagcgaccgcgaacgatcattgccttcgcatccaccgccaccgccggcgctgctgcatccacggcacagcagtcgacctgcgctacacgcgctagccgggccgattgccctcggcgtcagtgatatggcagcgcaagatcattcatcggggccgcctcctacaccaaggcattgaaggtcctcatccatgagacagcgacgtcgactgggcctctctctccgccaatgcacagcccaaagggctgcaagtccacttggtggtggtgtggtgctgctgtctatgacatcaaatgtgacgattggagctagacctcggacgaaaacgtccaagatctgccaatatatgccagctgtgcgcgaggggcatagcctgactagtaccacagatatcttgaccttgacttgatcaaggaggaaagtgaccggtcactacgtgacaatataataacataacgcccgccgccattcacgcatatcagccgacagagctccgtgctctagctgctcgcgccggtggcccagacagctgcctagattcctccga

SEQ ID NO: 123190 - DNA, 4450 bp, Zea mays
  Clone ID: MRT4577_4382C.1
tcaaacgtcggcagggggaggagcggcaccctcggcgccgcttccaccctcggcggaatctagcccggcctcagacagcgacgcgagcggaaggatctccacctcgaaggaggacgccatcaccgcgcttgggcccacaacggccgcgtcaagcctctggacctcggctaaggcagcctcatcttcgtcgggtaggcagtacccctcgctgacccgctccagatccacgtcgtaatgagaagcgagcacgaccaaggcccgcctaacgctgtggtgcagcgccccgcggagtctgttgttaagagccgtctcgaactctgcagacagccgaacaaaattcttcagacgcgagttgaagaatgaagcttcggcccgggcacgctcctgcgaggccacggcttgggcggactgggcagacccgacggccacggtcaggtcctcagcaagggtcccagcccgagcggacgcctcggctagctgctccgttgcctcagctagctgacccctaagggcctcagccaggcccacggcctcggcagcttggctccgagattggtcctccgacttcagcttatcacagagcagccgaaggtccgccgcctcggtgctccgttgggcaaggcattcattagcctcggcaagcgtggccttctgggaccgcagtgaaccccagacgccgctctcacggtggatgaacagcgacttggcggtgctcatatccgcaagttcctggcagaccctgggaacgtccctggaaaggacctccatggtcaaccaaagcgacctcattgtcgcctcggcatgctcacggagctcattccgagactgctcctcccgctcatcgttgagaaaaagaaggagctccgaggcgccgtggctccagaaccggaacggctgcccgcgccactcattggggttgcgcacggcaacgacgaccgccctctcctcgtggccgagaacggggaggtcgaggacgaccacgagcggtggcacctcaaccatcccaacgtcggaagcgacgggcggctccgcgggcgaatcagcgacggccccggcgggggtcgatgccggcgccggcaacaggtcaggcgggcttggggtcgtggccgcgtcagcggtctcccctggcatgatggccgccccaacagaggggtcagcttgggaggcttgccccatggcaagtcgcgccgcctgtgcccccggctcgagggcaccttgcgcggaggccagccaaccggcatggcgcacagcggcaccagctgcagaagccggttccgtcttgagggccttcttgggggccagaccggccaagccctgcctccgcttgccgctccgggctagggctagtcgtgcctgcggggaggcccctcgggccccgggccccgtaggcgctgccgagagttgccccgctgccgactctggtgccgcctccgcctcgggcgcccgaggcgccgaaggggcagcccgcccaggcgtcgccacgacggccggaggaccaacttcctgtgcagcaggcacgggcgcctgctcttgggggacaagcggatcagcctgactccccggagtcacctcaattacctcggccaaggggtcaagtaccccctcagcctgcctccgctcctcggaccgggaccttgatgtcccggccccagatactgatggtgccagcccacttggaggctggctcggcgacctctggcccagcctcagatccggactgaggccaagacgggccgccatgtcgtcatccagggaaacgtacccatggtcgggacgcatcacgggctgggtaagggccccggcatccagcctccctatcgtacctgctacccgcctgcggaggtcgtcggcggagagggaagccgaggacatccgcgagccctccaaatcaacccccggcttcatctccgaaagcggcaaccgccgctccgccaaaggaagcaccctccggcgatggatggcggcaacaacccccgcggcattggagggtgcagcccccggcccgcaccgccatgcggaccttcttcgcctccgtcgtcgaggcgaagagctccgcggaaaagagatgggtccacagatcccagtgagggtcaattcccaagaaaccctcgcaaaccaccatgaagatggccgcttgcgcgatggagttggggttgaagttatgcagctccaccccgtagtagtgcaggagcgctcacatgaagcggctcactggcactccgaacccccgctcgtggaaggggataaagctgaccacataccccgtcggtggagttggatcggcctcgctcaggaccatccactccggctgcggcccaccggagaggggacggagcaaaccatcggcaacaagggcctccagatcccccacgacgacggtggaagaaggccacgggtcgcgcggcgggacggcggtcaccttgtcagccatcgtcgaacgaaggtggtggaggcggaggggatgaggtgcgcggttttcttttccctggctattctcttaggttgcgaaaaccaaagcagaagggaccgggaaaggggatatttcgaaagggatccttctctgcgaaggaagcgggccccgagccctcctactgatcaggggttcgaaggctggcccctcggaagggtgcgacagtcgccccagagcactcgagcttcaagctcattactaattaagggttcgaaggctggcccctcggaaggggttcgaaggctggcccctcggaagggttcgacagccgccccagagcactcaggcttcaagctcattactgatcaggggttcgaaggatggcccctcggaagggttcgacaaccgcctcagagcactcaggctccgcgcccactactgatcaggggttcgaaggctggcccctcggaagggttcgacagccgccccagagcacgcagagtgaggactctgggtacgtccgttacatggccgaggctcgagctacgctcccgaggtaccctaggacatttcctagaccagcaggagcgattttgtaacggaatcccaccaaagggaggcatcgagccctcggaccctatcgaacgggtctgggtccggcaaatcacctgcaggtcgcatgagggaacaaccatgccggtcaaggcatcacgaagggcattaagacctcagaggagtcaaaccactcctccgaggcctcgggggctacacctggcgggtgcgctcgcgcgcacccaccagaacaaagtcaaggcttcgtctacccaagggacgcgatctcgcctcgcccgagcccagccttgggcaggaactgtagtcccggacaaagttacgtctcgcccgaggacctcctcaggcagtgggcgcaccctcagcacgcccgaggcccagctcgggcaggcttcgtcgagaagcaaccttggccaaatcgcctctccaaccgaccgtattgcagggctcaggcacttctccgatggccacgttatcgcctacgcagggctcaagcacttctccgacagctgtgcttctacagggctcaggcacttctccgacgaccacgttatcgcctacacagggctcaagcacttctctgacagccacgttggcatgtacacagggctcaggcacctctctgccagacacgatatgctcaaaaagtttggattagaaaatgcaaaatctattaagactcctatggcaacaaatggtcatcttgatttagacgagggagtggcttcggtggtctcaagaagaagcttgcaagggcgatttatgtccaaacgccgtcgggcagacgattcagactataaccctgccacaaactctgaggctcaatcatcagctggaggcagtgtttcattggatactgaagatgctccccaccctcatccagactatcctattgatattacaagatggacatatcccaggatgcgattttccatggctgagtattcctctaggaggaccgtggatcaattttcacttcccaatgacaccaacatccaatacttccatactcatttacagtttgatgttttctggggtactctgatggacataaaatttcataagcatcaaatggacaagaaccagaatctgacatatgctccatatattatggctctgattaaagccaaaaccacattcgaagggcaatgtgaaactgctcacactctgttcaggccattcaaaaatgaaattgattttcttactaggcctctcacaccgtttcctgatgagggagcacagggagatgcttttgatgatcagcttgaagcgcatcccgctcagcaaatgccaccacctccacctccacagcagcaaggacagtactaccagcctgcacgtggctattttgatccctattttcaacaaatgcatcaagggctccagactcatattgatggtcagtttcaaggcatgatgtcacatgtcgatgaccggtttgatcacatgcaatccacatttgatggttaa

SEQ ID NO: 123191 - DNA, 456 bp, Zea mays
  Clone ID: MRT4577_43830C.1
ggaaaaaaaaacggccccccctttcaaaagatgatttaaaaaaattaatttttggggggggggggggttttatttataaaaaaaaaaagcttctggaaaaaaaaacttttggtttaaaactaaccaaacagcaagaggggcccaccataaaaaaaaattttttttttttttaaaaattgactttcaaagggaaaaaaaagggtgctccaatttattttgggggggccccccctaaatttaaagtgggcccctttgaaaaaagggcaaacccaatttattcaaccccccccgggaaaaacccaaaatgggacggcccaaaggtttggccttcacaatttgtgcgcaagggacccaatcccaccgggccacaggaaaggggttcccctccttccacaacttttaaaaaacaccccccttctccggttttggccgattttaaaaaaacccccccccggg

SEQ ID NO: 123192 - DNA, 275 bp, Zea mays
  Clone ID: MRT4577_43831C.1
caatctgattgatgttaaataacaacactcagggttgaagcgtcttcacctggaaagaaagggagaaaagcagctagttcaaaggggcagggggagacatcatggggggagaggcccccgcagtgggtcacaagggggggggccacaaggcgagggccccccatggggggggcccaaagggcgagggggggggaaaggggtacccgaaaaaccccggcgagacggggtgggacgattctttctaacccccaaaaaaagggggggggaggggcacc

SEQ ID NO: 123193 - DNA, 282 bp, Zea mays
  unsure (1)..(282): unsure at all n locations
  Clone ID: MRT4577_43832C.1
caggcaccccagcagcacgcgcgggcgaccctcagccgcgncgcaccgggggggggggacgacgcgaagcacnctgcncgcaggggaccacggcgaagaaccacccaaccgcgagcgccgaggacagcgaggccggcgagaaggccaggcgcaagcgccgcgcccccancgccgagaagagcngcgcaccccacaggccccgccccgggggggggggcgcggggacgngcgacgcgccggcgaggaccggcggacccngcggaaccangaagggcccggcgg

SEQ ID NO: 123194 - DNA, 287 bp, Zea mays
  Clone ID: MRT4577_43833C.1
catcgatccggcattggtcaccgcacaagtgcacgactacctgtcaccttatacactctggtaagtagctaacgccggaggcgagaacaataaaaagctcgacatgggcgtggagaaaaagcatggcctgcagctgctggacttttgtgtgagcccattcggacagcgctgacgaatcgcgaaggtcgagaagggcctggcctactagtacctgcagcatgacctggggaacaagagcgagctgatcatccgagccaacctagtgcataagaagatccccatgctgc

SEQ ID NO: 123195 - DNA, 813 bp, Zea mays
  Clone ID: MRT4577_43834C.1
gtccttctccttcccttccctcccccaccgggccccagtccccttcgcgctgcctgcccccttcgatctcctgctctctttccccttctctctctatctactgttcttgcttgagctgcgatcctcttcctgaggcgcgggcgttggatgggatacgtggttggctccgcgccatctcctccggtggcgatgagctccatctgctgctgcttatgagatcttgctgaatgaattttgtggtttttgagccatcctggtaaaccttggcatggccagtggagagacaaacgcagggaacacccagagggggaatacccttccaaatggtgacatctatgttggcaactttgctggtttagttcctcatggatttggaaagtatatgtggacagatggaactctttattatggcgagtgggatacaagcaagatgagtggtagaggagcaattcagtggccttcaggtgcttcatatgatggagatctttgtggaggtttcattgacggaacaggcagtttcaaaggagttgatggatctgtatataaaggttcttggaggatgaatagaaagcatggaatgggcacaatggtttacgccaacgatgatacttacgaaggtttatggaatgagggcttgccagatggatttggtaaatatacatgggttgatggcaacatctacattggactttggaaatctggtaaaatgaatggcagaggagtgatgcaatggacaaatggcgatactcttgactgtattggcttaatggactggctcatgggaaagtttttgcaaatatgcatcaggagcat

SEQ ID NO: 123196 - DNA, 673 bp, Zea mays
  unsure (1)..(673): unsure at all n locations
  Clone ID: MRT4577_43835C.1
gatccaccttgatctctcgagctgactagctacgcagggcgcaggtgatgcatctcaggggtggccaccaagctcgccgatctcgccaccttggtgctcgcgctgctcggccccgggctcgcggcaacgacagcaagcgtgctacggctatggcgtcggcagacctacacctacatcgtctgcgccgccgcctgttgcatatcctccgatgacgacaagaccgacgtcgagctctcccgccggctatcctcctcctcctcctcccagatcgtatgcccggcgccacctggcgctggtgccgtactgagcggcggatactactaggacaagtgctgcgagtgataaatcatcgtgtacgaggccgtgcgcgctgacgacgccgaaaccgaagcaggactcgtacgtgtggtcttccaggactgcttcctccagcggactgcgactgctccgtactgctcaagaccgacaacgacaccagcccgcagacggagatgctcgcggacccctgcctgagcctgcgctgtttctaggtcatcaacgcgttcaaggcatcgtccgaggcgagatgtacgcngcgtcgtgctctgctgcgacatcgtcaccgtcgccggacgcgacgtcaatgtgctcctcagaggcggcgacctcaactttcccatgcccgcgggacgct

SEQ ID NO: 123197 - DNA, 546 bp, Zea mays
  Clone ID: MRT4577_43836C.1
gggtacccgtttccccccctcgagtttttttttttttttttttttttttttttttttttgattttgatcaacccaaattctgcagtctgtatttggtccatacccgtcgtttgggatcaaggttgatacaggatagcactcgcccgccaattcgacaggagtgatggggactccagtccgcccgaatatttgatcgaaaaaaatgacaaggtaccaacgccggtactaagagaggcagtgacatttttcactccctcggttgccacatcagcctgaaaatcttccaaactctccaataaacccaatagacaacattactagctcgtgcggaccccccatgaatctaagaaccttgattggactaccgcaccatgtagcacagtctactatcctgcagaaaagattcacagcctacaggctgtcgttcaaccacttcgcaccaccattaacactgggcccggcgaaagccgtcattcactacaaggagtcaccctctgcttgtctagataaacttgaacctacttgactagcaccaagtaccttctc

SEQ ID NO: 123198 - DNA, 308 bp, Zea mays
  Clone ID: MRT4577_43837C.1
gcggcgcccccgtttttttttttttttttcattcttatgatttatacaaacagccctttcatttcggaagggtataatataaaattattgtttgacccctaaaactaatactactataaaacccttttatcaattacaatagaaccatctgttttattacaccaaataatttattaaatctctttttaaattaatctctcttacttctcaaaaaagatttatttctatggtaactattcatgacccaatcatactttctttttcactccattgccaaaatcataatacatctactagtcctttccatt

SEQ ID NO: 123199 - DNA, 1033 bp, Zea mays
  Clone ID: MRT4577_43838C.1
agcagtggtaacaacgcagagtacgcgggggttgctgttcttgttgatttgcatgcttcctttactttccttgattgttctccattccttgcttcgtgacctgcaatctattcctgaagatgggaaactgtttgcaaagagcagcataaacccaacccaaaaaggcttcaaatgtgttcttttttctgaaacagttcttgcccaatcacaaaacttgaacctttttttagattcaggaacataacttgaacttggtgtccattcttccttggcacatgcagattggaccgcagattgtgagatccaatccaatccaacaaccgaatccaatccaatccaatcagagaaaaagaaagacggcgaaaggctcatgtatgtgtggcaccacatcttgccatcagggaaaatggggctgtcaatctcgtacccaccggacgactacctgccagcagtggaggacgacatggggcggctgttcatctggtctctcagcttcgacgatatggaggctgccgccgattcgccttcgtattcgccttcggcattgcccccccgcctttggctccgggaagctgatcatggagggctccctgggcttcttcgaaagaagagaagctgacagcgtccagatgcagaacgtgctgtccatcaggaatcctaaacctcctgatagagaagcctgcagcagcgtcagtcccggtgctgcgacagctacttgtggctcatcaagattcgaccgtccaccagattatgattaccccatggtcgggatgaacagccccaggcaccagagcgcggccgtcaggctgcagaaggtgtacaagagcttcaggacgaggcggcagcttgcggattgcgctgttcttgtggaacaacgatggtggaagttgcttgattttgcactgctcaagcggaactcggtgtcattttttgacatagggaagcctgagactgctgtctcaaatggtcccgggcaaggatgagggccgcccaaggtggaaatagcaattgcattctttccgtcatcaccaac

SEQ ID NO: 123200 - DNA, 390 bp, Zea mays
  Clone ID: MRT4577_43839C.1
cgatgaaccggaaacacagtccgataagctttccaaactatgtacatgttggacgacatttatgtctcacagattcatcgtcccaaagccgcagctaagggagaagcctatcatcaacaaacaaaggaacagaaaaaaggcatcatttacttgctggctcctaatcgcttggtcaatcatgccaggttatgagcatggtaacgcatcggcggatgatgtagagcctggccttgtgctgcttcagcgccgtcctgaggtgcttcaacttgacatcatgagcacacatcctcatcttcatctccagacacgaggctgtcgactccaaagacgccggtgcgacggggttcacagttgggtttggatttcggaatggagagctcttggaccgga

SEQ ID NO: 123201 - DNA, 402 bp, Zea mays
  Clone ID: MRT4577_4383C.1
gtgcgagcattcagaaacacacgcagctaatctcactagcaacaacctagcaacaagggcggtaatatatcatacatccttgctcttcttgcgctaattgcgagcgcaacagatgcgtacattctaccacaatgctcactcgctcctatgtctattataccatatattatcccactagcatcttcaatgtccttacaacacacatctgcactagcctatacgctacaacatgcgattgtggcgagcgtcatacaacaactaatttcccaatagcaacatcaaatgttggcacatttaacactacaaaccatctgaacgcaacagcaatagcatggattaccatcactctaccaactagtcatcgtgaaccctgttgactacttgcaacatcagctgcttgca

SEQ ID NO: 123202 - DNA, 336 bp, Zea mays
  Clone ID: MRT4577_43840C.1
aaacccaaaaaaaaatgcagaattaaaagtaacattaaaatcagccggccccgggcattagaagtcccattaccagccaaacaggaaggggtgttattaatgctacaaagggacaaaaacccataaaaaacaaactttaaacgcacacgcacgggcaaaattggaaaatcgggaacaatcaaaaccctgacaaaaaaaaattaacggtcgaaaagtttgggggagaatttttgaaaaacacaaacaacttttaaaaaaaaaaaaaagttgaaaacaactactactccacaactttttaagtctaaaagggttgggggaaagaatacacacattttt

SEQ ID NO: 123203 - DNA, 1561 bp, Zea mays
  Clone ID: MRT4577_43841C.1
gggtacctcgtcaggctgggaaaccggcactttccttctcgacggcaatggcggccgtagcggcggctccacggccgcagctccccatgctatctggcggcggcggcgcggcactttccagtctcaccctccaaacactggccttcatttcccccctccccatcagccgctgtcaccgctgtgtgctccgctccaacgcctcgtcgtccccgtctccgccgccgtcgcaggaggaggcagcggcggctgaggtggttccaacagctgagtcctgcgtcaatctcggtctccagctcttctccaaaggcagggtgaaggatgctcttgaacaatttgagaatgcattagagctgaatccaacatctattgaggcccaggcagcgctatataacaaggcatgctgccatgcgtatagagaagaaagcaaaaaggctgcagaatgtttaagggaagctttgagagactacaatctcaaatttggtaccatacttaacgatccagacttggcgccattcagagcatcaccagaattcaaggaacttcaagaagaggctttgcgtggtggagaagatattggttctggtttccgaagagacctgaaactcattagtgaagtacaagcaccatttcgtggtgttcgaagattcttctatgtagctttgacagcagcagctggaatttcaacattctttaccattccccgacttgtactagcagttcgagggggtgatgacgcccctgatcttctggaaactgctggaaatgctgccatcaatattggaggtattgttgttctggtagctttgtatttctgggaaaacaagaaagaagagaagcagatcacacaaatttctcgtaatgaaaccctttcaagattacctgtgcgcctgtcaaccaatcgcattattgaacttgttcaactccgggacatcactaggcctgtgatattggcaggttcaaaagcatctgttactcgggcattgcaaagagctgagaggtatcggactgaactgctcaaacgaggcgttcttctaattcctgtgatctttggtgcttctcagaaagaccaaaccaaaccaaggggttttggtgcaagaagagctgctgcatcagttccttctgttgggggtgactttgaaaagcgtactgaatctattgcagcaaaatcacggttgaagactgaggttcggtttaaggctgatattgtttccccagaacaatgggaaagttggatacgagaccagcaagtgtctgaaggtgtcactcctggtgaggatgtctacataatccttcgtctcgatggacgtgtcagaagatctggaataggcatgccaaactggaatgacatattacaggaactgccacgacttgaagatctgatgagcaaacttgaacggtgaaaaaggtgtgggagcagctaaagttttaccattactctttttcccccattccattcgccttgcccttatctgctgaaacttgaagctggaccatcgtagttcttgtataatatagtgaaattctgctattttgtttaaagcctgccgaagtttttctgtcc

SEQ ID NO: 123204 - DNA, 916 bp, Zea mays
  Clone ID: MRT4577_43842C.1
tttgtgcaccagagtccctacgcagcagtgcccgcagttcccagctactggggcagttcatgagacagacagacggaggagatgagagagagagagagagagagagagagagagaggaagggggaggggaggaaggagatctgaagcaatgttcttgagaagcctgaagcctaaagaaccaacaaccagcaacgaaagaagaaacttagctaccactactgctactactactgttctctcttctctgtctgtagtactgagccaccacaggtctggtgaattgaccggcgggatggaaagaaagggggagcgaaagagatcgcttgtttcccgggcaatcttctcctcctcctcccggcaccgcagactgggccaccccctccctttttctccttccttccgcaaacaaaccaaccctacgtgccggaccgggggccccctcttgcaagccagcaggtagcagtagctagaaggtttcaggaaacatcaggttgaatgaaaaggagtggggtggctactagctagctatagctaggtagagatcgagacaggggagtgacggatggtgacacacatgcatgcatacaaaacaaacaagaggacatgcttgcagtcatgtatactggtagtagtactgtgctgtatgtgcgcgtcgtttgtggtaggagtaggagtgtaggtgagatgtgttccttcaaggaacagagaaatgtcctcatggggattttgttattcttgcggttttctttttcctactgctattgctatggtcggtctttcatgcacatacttgcagtcatgaaaactggtagaagaactgtcctgtatgtgcgcgtcgtttgtggtagaagtagaagtgtaggtaaaatgtgccccttcaaggaacaaaaaaatgtcctcatggggattttgttct

SEQ ID NO: 123205 - DNA, 589 bp, Zea mays
  Clone ID: MRT4577_43843C.1
ctcaattatgcttcctatttcacctatagttttagttcctaatttttttacagaaaggacctgtgtttgccttttgcttcaagaacgcacaatttagcccccttttttttttttctcgagacaatttagcctaaatcagatcagttgctgaaagttaatgtaatatttagtattggcaacttttttaggtagaaaacatagaccaacgtataatttgaattcatttgtgacatcttgttgtcattgcatttgcatagctttcatttgtacactgctctgttcaatattgttctcccatgattgagattgcaaatatactaaccattatgtcatgtgattgtcagtatgaaatagaactgaattttgtgatgtttctaacaaatcaaaaaattaaaattaggattcaaataagtctgcttggtagctttctctgggacttatttagatatgtgtgtcggcagactcatgaaagttaggtttccttcttgaagtttcatttgacttttgacctagacatggtctggtgacctggtctgcccttctatccagtacagtagccttgtaactcattgcatttacttatttttac

SEQ ID NO: 123206 - DNA, 425 bp, Zea mays
  unsure (1)..(425): unsure at all n locations
  Clone ID: MRT4577_43844C.1
gggactccatcgctgataccaccacagacgatgactcccatatgacatgggaactgacaaggtcttctagcaggcatcgcctgatttacccacttaccaagagggcaggtgcacggctgtatccaagcgttatcctctgcctgatatctgtccacgagcatgtgatcgcagctgacatctccctcttggatacagagatatgccgacgcccaagctgaagaagacgctcagtgattgacgaataggaaaaaggactggctgcgtatatgactcgcgtgtaacaacttcaacaagatgctgcagaaatacttcaagaattcggttccatttttatgttataattattaanagtgaacaccgaggatatgtaccctggcaacgaacgacttacggaagcctcgggctgcgctcatacgaactaatac

SEQ ID NO: 123207 - DNA, 202 bp, Zea mays
  Clone ID: MRT4577_43845C.1
acccggaactgatgctctgtcgtccatcgtcactgtactacggtggatagggagaagagaacagcggattcatcaccgccaggacgttctgagtgtgttaagaccagatgctggcgaatgtgtcacgcacctgctagagtgcagcgtggtgtcagctgtgagcctgctgaggtgttgggccacaagtggcgctgctgctggg

SEQ ID NO: 123208 - DNA, 311 bp, Zea mays
  Clone ID: MRT4577_43846C.1
ataattcacatgagggctatccaacttattaatcagctaggtccttcgagtcaatgggggccgcccatgatacagtatggactcccataatccatgcgacaatgacttcataggccatggacctattacatggcgtccatattggacgacccgcccagccaactgagatcgccactagcttcaagatcttggctatccaggacagcagctatatctcagggtagagttttcatcccaatggcagagtagtggtaaaccgatatgttttacgctttttatgaatgtagtataacgtatgaaaacttttctct

SEQ ID NO: 123209 - DNA, 1075 bp, Zea mays
  Clone ID: MRT4577_43847C.1
ccagggctggggcatatcagcagggagcccaaactgagacggaccagcacggagcgggaacccaggctggggggtaccagcaaggagcccaagctgaggcggaccagcacggagcgggagcccaggctggggcgtaccaacagggagcccaagctggggcgtaccaacagggagcccaagctggggcgtaccaacagggagcccaagctggaacatatcactatggaaaccaggctggagcatatcactatgcttatgatgctgccacggattacacatatgcatgttattatggctatccagctgcatgctatgctcatagagcagcgcccaattattgctatgctgcacctacacaggcaataagcagtggtgcagctacagacgccgcaagcctgtatggtgccgatggtaacgccagatatgctactgcgcaagctcagccgagcagtggacctgcaaatgcagcgccatcacctacaccatcagaggcagcaccatatcctccagcacatatgacctaaccagaggagcccagagataaaatctgggatgtaaaccagatggatgtttgccatgcacatttgttgagcagacaaatatggtgaaatctgggatgtaaaaccagatggctgtctgtgcctccatcccattgactagggcgtattttcaccaaaaaaaaaaaaaaaaaaaaaaaaaaaaaaaaaaaaaaaaaaaaaaaaaaaaaaaaaaaaaaaaaaaaaaaaaaaaaaaaaaaaaaaaaaaaaaaaaaaaaaaaaaagggggggggccgtttaaaaaaaacaaagttaacgtccccgggaatgaaagttaatattttttttaaagggcaacaaaaataaaatcaacgggccgggttttaaaaacgtgggaaaggaaaaaaccttggggtaaccaaattaaatggcttggaaaaaaatccccttttcccaagttgggaaaaaagaaaaaaggcccgaaccaatcccctttccaaaaatttgccaaccctaaagggaaaagggaaccccccctaaaccggccaataaagcgcggggggggggggggtaacccc

SEQ ID NO: 123210 - DNA, 171 bp, Zea mays
  Clone ID: MRT4577_43848C.1
acagtatatggtgaacaactcggggatacaggaaatatacatgaatatactacggaaaccgtatcaacacgcgatgacgaactcactaaagactagtgagcaaaatggccaaagtgggacgatgagcaccttgcgcatgtctaatctactaacctatgtcggacaacttca

SEQ ID NO: 123211 - DNA, 573 bp, Zea mays
  Clone ID: MRT4577_43849C.1
acctgatcatagactgggcggtctgtcgtaccatgagttgtagatgccccaattccctgctgctggttctttgaatacactattatatagacctgacccgtatgaggaaccaggatattatccatggactgtaggatccctaacctgaagccgagtctatagctttattgtaaatatgatatgacctaagtcgtgacctcccttacgatgaagactgcagatattcattacattgtgggacgttctatcatacttgaagagggtcactatcatattcattagataaatcgaaccactctatgtaacgtagaatacatcgaaagaactgagaaaacactgaggttaccctacttcaggatcttgtgttacatacttctgaaataaagtggtgttttttagaattactcctcattaggaggcctatattaacaatgctatttcaagataggttaatgatcctactctgattagatgctaatacagctaggagtgaggagtttattttctatgtaatagcttctgactataattaactaaagggcagagcatttgttttttctacagactttatag

SEQ ID NO: 123212 - DNA, 578 bp, Zea mays
  Clone ID: MRT4577_4384C.1
ccggccggtcttcaaagcactggtcgactacacccgaaacgcgcagtagtagaaaggcgaacatcgccgtcggcccatgctacactgaccaaaaaatcacaacctgtgtaccctacccttccttgatgacataacagaatatgcagctcattgccatagccggctgaaacgaatgtatcgatcacatctcgcggagacagcaatctgttctatcgcccttagccagacctgataatacgggtggaggagtggtcaaacaacacatgactgacctaccaaggacccgaagactgggatgcgcctgccccatacgaggaagccaatcgctgatgaaacggtcgtagccgcgtgacagccatctcctacgcaatgcctaacgaaggcaacgcatgcgctgtaaatactgccccttcaagttgctacacatactatacataagacactgacgaggaacccatgggtacctgggcctccaggatggtggtcccataaaactgtgtcgtgcatgtgtggacgtatggcgagagagttgtgcctatacataagcaaagtgggcttatgcttgtaattctagtgct

SEQ ID NO: 123213 - DNA, 843 bp, Zea mays
  Clone ID: MRT4577_43850C.1
ggccggccgggaaccatcccaagtgtgtcaagtattgctcaccaatttctcaaatataattgcgcctaaaaataaaggactaataaatacttcaccggacatacatcacttgtcaacactaggcatctcattgtttattattcgatatattgagtaggacactactcaatatagattcaacacagacacttaaatgtatgaaatcaaccatgaaagcaagatcagacatcacactcgcattattcaattgatgcttgcctttcatatatcaaggcataaaaggtataaatatagcctttgctagtaggcaatctagcttactagcaaaagctacctttataccattttatgccttgatatatgcgtggagtttcttcaacgatttcctcattagtgtttgggtccacgctgaagtagatgacaacacgtatagttccgggtgcgagttggtctgaaggcctcggggtctcgttcaaatccacatctagtgactcaaagaatgttacatctggccgctcttgttctattacttcaattgcatcattaatctccttgccaatcaactcgggccaactggtcttgtcctgcgttgccatgatcacgtactatccttagcttttctctcttttgaaactgttataatatcaataagaatcaataatcgagcaacgttagtgtaatgaatagaaacataatatgttgttttgtgctaatgctatcatactttcatagtaagcatgtcttaatcgaatgcactacataactaccgagctgcaaacagtctattaaaatgctaaaaagatacttttttcaaagcaattactaataaagaaatacatgata

SEQ ID NO: 123214 - DNA, 422 bp, Zea mays
  Clone ID: MRT4577_43851C.1
gaatggaacatttctatatggaaaaatttaaaaaacaattcggtttgcagtcaatgaaatcataaatcggcgaacataattcggtttgcagtcaatgaaatcataaatcctttgagagcttgtgtggggcctttcagtgaaggcaggcatgtagtgtggctgaggattactattggctaacactatcttgaggaagtctgacactggagtacacatagaatgcaactcctctatgagttgcttgatgttgttggacatggtcaccactcacccggtcgactgttgttcctcagagcatttgtcaaccttgagattgttctgctccatttgggttttcagctcctgttgaatcactccaataccattgactctggcgaagagcacatcaaaaaaattctccatgacttggttccagcgtgact

SEQ ID NO: 123215 - DNA, 186 bp, Zea mays
  Clone ID: MRT4577_43852C.1
ctcactgggggacaacagctgctgctgctggggggctgtttttttttttttttttttggagaacgagatcggcagctctgtatagatgagagggatactaagggtgcaagctatggaaagatggagcatgctctcaatgggagattatggacaacatgacttggaggcctagtgctgaagctcatt

SEQ ID NO: 123216 - DNA, 1122 bp, Zea mays
  Clone ID: MRT4577_43853C.1
gtgtccccctacttatgcgctggaacgaggcgttcctcgcgctgggcacgcagttcgcgggcggcgtcttcctcggcacggcgctcatgcacttcctcagcgacgccaacgagacgttcggggacctgctccccgacagcgggtacccctgggcgttcatgctcgcctgcgccggttacgtcgtcaccatgctcgccgacgtcgccatctcctacgtcgtctcacggtcacaggggcgcagcaccggcaccgccgctaccggcggttctgatgcagggctggaggagggcaagatgagaaccacaaatggcacgaggtctgagcccacaccagctgatgcacacggatctgatcactcggccgcatccattctgcgcaacgcgagcacgatcggtgacagcgtgctgctcatagtagccctttgcttccactccgtcttcgagggcatcgccatcgggatcgccgagaccaaggccgacgcatggaaggcgctgtggaccataagcctgcacaagatcttcgcggccatcgccatgggcatcgcgctgctccggatgctgcccaaccggcccctcctctcctgcttcgcctacgccttcgcgttcgccatctccagccccgtcggcgtcggcatcggcatcatcatcgatgccaccacgcagggccgggtggccgactggatcttcgccgtctccatgggcctcgccacgggcatcttcgtctacgtctccatcaaccacctcctctccaaagggtaccggccccagaggcccgtcgccgtcgacacgccggtcgggaggtggctcgccgtcgtgttcggcgtggctgtcatcgccgtcgtcatgatatgggacacctgacctggtgagagacacgtagggctgcattgttgggaacttccgggggttgcttattgcacgagagatcgaatatggtgtagcagactctttttagcatttttttagcttattacgatcgtacatgtgcgttgctattgcaaaaaaattaacacgataattaaagtttagatatgtattctatgaaaaaacatttttttagtgtgatgtgtgtaacattcggtttgtaaccaatcatcattattatattgttagcaaaattggc

SEQ ID NO: 123217 - DNA, 2195 bp, Zea mays
  Clone ID: MRT4577_43854C.1
gcgtgggcgcacggcggaggcggggactccgacgccgacgccgacgccgacgcggatgggggcgccgccgccaggccggacctgcgcgcgcggagcctggtggaggccaagctgtggtgcctggcggtggtgttcgtcggcacgctgctgggcggggtgtccccctacttcatgcgctggaacgaggcgttcctcgcgctgggcacgcagttcgcgggcggcgtcttcctcggcacggcgctcatgcacttcctcagcgacgcaaacgagacgtttggggacctgctccccgacagcgggtacccctgggcgttcatgctcgcctgcgccggttacgtcgtcaccatgctcgccgacgtcgccatctcctacgtcgtctcacggtcacaggggcgcagcaccggcaccgccgctaccggcggttctgatgcagggctggaggagggcaagatgagaaccgcaaatggcacgaggtctgagcgcacacccgccacgcactcggccgcatccattctgcgcaacgcgagcacgatcggtgacagcgtgctgctcatagtagcccttcgcttccactccgtcttcgagggcatcgccatcgggatcgccggtaaggctaagccagatagagatagggatatatggatgcgttgttttgttcccttccaacttgcagatgacgcgtagaaattcctttatgtgcattccgggtctactcttatcagcagatgtcgccatcatgtcacgggctaaactgacgaacttagcttcgtctgagtacggagtagaggattagatgcccagctttaggtataaatgagatgttatggcatgtaggtatgacatatatacctgcaagtctgaagtctcaactgaacaccggttacgttagttcttagctcgattccagtgacagatgtcgtggtcgtgactaagaccaagtggaatctgaacctgctctttttgtcaaagctgcactagtgtctcgctgttcggtcagagcgaaaggagcctacagactcagcacagccagaataataggctgatcattcatcattccaacccttctttgctgacctttcctgatattttttttccgcgcaacggttcagtccagtcgttgccatgcatacttttctacttgttctgatcttaggtttaaatgtctatccggacgctctgaagttctttctcttcctgatatatggccttcaagttctcttcgaatgcatacttttttacttgttccgaatgtcaagattaccatttcacttgaattctgaaggcatttcaagtgctattcgttagcatttcggaacccattttaattaatcaatttaaacggagaggctgagtttctcgtaaacatagcgtctccaattcttggtcgaggttaacagctgcagagcatcgctaagcgctagcagctctctgagactctgtctggccttattacctaactactactaattatcgaacctgcagagaccaaggccgacgcatggaaggcgctgtggaccataagcctgcacaagatcttcgcggccatcgccatgggcatcgcgctgctccggatgctgcccaaccggcccctcctctcctgcttcgcctacgccttcgcgttcgccatctccagccccgtcggcgtcggcatcggcatcattatcgacgccaccacgcagggccgggtggccgactggatcttcgccgtctccatgggcctcgccacgggcatcttcgtctacgtctccatcaaccacctcctctccaaagggtaccggccccagaggcccgtcgccgtcgacacgccggtcggtaggtggctcgccgtcgtgttcggcgtggctgtcatcgccgtcgtcatgatatgggacacctgacctggtgagagacacgtagggctgcattgttgggaacttccgggggttgcttattgcacgagatcgaatatggtgtagcagactctttttagcatttttttagcttattacgatcgtacatgtgcgttgctattgcaaaaaataataacacgataattaaagtttagatatgtattctatgaaaaaacatttttttagtgtgatgtgtgtaacattcggtttgtaaccaatcatcattattatattgttagcaaaattggctacaaagttcgtgtaatacctaacttgtggataataaaagagaagaataatctcctt

SEQ ID NO: 123218 - DNA, 520 bp, Zea mays
  Clone ID: MRT4577_43855C.1
atacaacctccactccctgtccactcccccccaccacctttgcctctcctagcttttccttggcatcctagctcttcctcctcagccgcagcagatcgactaggaaacatgtgcggcggcgcgatcatctccgagttcatcccgcagcgcggcgccaagcggggtctctgcgccgaggacatctggccgcacgcggccgccgacttcgacgacctcctccacgcgcacgcgcacgcgcacggccacgacgacgacgacttcgccgccgccgcctccttccatcccgaccaagagccgccggcccggaagcgggagcgcaagaccatgtaccgcggcatccggcgccgcccctggggcaagtgggcggtggagatacgggacccggccaaaggctcgtgagcgtgcagcagatgctggctcaccgatgaggctgcctattgctgacaataggaagctgctgagcccgtccaggtatagcggtgcagtgaaacatcatggacgaaggacatgaccgtcacct

SEQ ID NO: 123219 - DNA, 108 bp, Zea mays
  Clone ID: MRT4577_43856C.1
tacaaatcgaccttttttcccctctaggaacacacgtttctatatattgtagtagtctatacatggaaacaagataaacacacgccatcagatgagccagcccaacta

SEQ ID NO: 123220 - DNA, 323 bp, Zea mays
  unsure (1)..(323): unsure at all n locations
  Clone ID: MRT4577_43857C.1
ccgaaatnccggggcggaccacagccgcccgggaccccttggcttaagggtaacagttaacataatcccgtcgtaagtcgtaaaactagctggtagcaacctaaaaggacccggcggtccttccttccaaacgtccttccccttgggcccctccgttttggcaacatggccccgttggcctccgccgccttaattacttctttccaaaggctggggtccgccgccgtttttcccgtagcctgttggtcctggggctgttgttcaaccggtggtggtttttcttactttcctactgtttaatggtttttttttccctttttttt

SEQ ID NO: 123221 - DNA, 271 bp, Zea mays
  unsure (1)..(271): unsure at all n locations
  Clone ID: MRT4577_43858C.1
cgcatgaagctgaggcatgcctttctctagggtcgggttactgctcgcgtgacgctaagaagaggaaggggtgaaagaccaggggggctcctcttactgtacgggctccaccagcgctcttcgtccatcgatccgaccagctgcagcgatcagcggtgcagncgtgcacgacgaccccgaccacctgactccaatcccagccgtgcgcccccaacccgaagcctccggcggcagtagcacccgccgtgacgcgggaggacctgaaggtggc

SEQ ID NO: 123222 - DNA, 280 bp, Zea mays
  Clone ID: MRT4577_43859C.1
gggggggggaaattttattaccaaattttacaggttacaaaaattttttttttttttatggggggggttataagttggaaatataagctagctaaaaagaccatccttaataagaagtttaggggggtttcttaaacttataagaggggcgggcccaccagcttttaacaccattaaaggggcacaaagttttttccggggaaacactaggttagaggttgttaggcgatgaacacttgacgaccattttaaggggttgcccataagcatggccttggga

SEQ ID NO: 123223 - DNA, 245 bp, Zea mays
  Clone ID: MRT4577_4385C.1
gttgacttcaacgggttgggttaattgtttttttttttattttacaaatggcccacctttcccctgtggaaatcaatttaggggaaaaacaaaccaaaggtggcaaaatttaaattgcccccgaaaccggaatttggccgcgtggggggtgccacaccacatacgaaatttgttgaaacggaaaacctcttacatttacttaaagagatggaccatggcctcatgaaggttggagtttacaaaga

SEQ ID NO: 123224 - DNA, 276 bp, Zea mays
  Clone ID: MRT4577_43860C.1
tggttttttttaacaaaaggggcaacccgtggcctccgggtatgtcccgcgcccaggtcgggtgcgcttgccgtagggggccacaagcgtccgtgcgggagggagcgagaggcctatgcacgtgccgtcccgtccttccgcgagcggccaacctgccgtaagagggccctggaccttccttttataggcgtcaggagagggcctaggagtacaatgggggggtgtagcaccgtgctaacgtgttatagacagaggagctagtgccctaagaacatg

SEQ ID NO: 123225 - DNA, 372 bp, Zea mays
  Clone ID: MRT4577_43861C.1
aaaaccgccagctcccgtacactagaacccctgattggatctcgccggagttcatcctcgcccgaagctttggatggatgattctgctgccatcgaaggttccccaagccattcctctcctctgttcggatcgtctcaatacgctacgtctccctgaacttttgtatctcgtagattcgcacgggattgagctccccaacctctcccgaagttcaccggcgatgcccgctgctcaagcctttcgacgccatcgccacgggccgcccttgccgctcaagaggtcaccccaagatcgccttcccgcgactctccccgtccggccatccccggagtcaggcgaccatcagggggcgacgccctgcatcgacccgg

SEQ ID NO: 123226 - DNA, 722 bp, Zea mays
  Clone ID: MRT4577_43862C.1
cctcgaggccggccgggactggccgctctcgggagatttgctcgtctttccccaatccccagatccaaaattgcgcaggagcaggcaccccgcggttaccaggcatcaatcgcggttcgtttccaagcttcgaggaatcgacgatcaagcattggcgaccaagtgatctggtcctgtgatctagctcttcgagttccacgaagttgaagaccctgagcatctgtttggtgaagatcgcggttcgtttccaagcttcgaggaatcgacgatcaagcattggcgaccaagtgatctggtcctgtgatctagctcttcgagttccacgaagttgaagaccctgagcatctgtttggtgaagactgcaatctagctgacggagagtatgtgctcatccccgagcaaggatctgtccaagaggaagaccaggagccagctcccgagactgcccctgaggatctccccgcagccccagcatttgaaggtacactgcaggatatggttgatggtgtgacttggcctaccaccctgccaccgggttggacggtcgagggggatgctgcttccacgggagaggagcaggaggagtagtgggctaggccttgcccatttcctcgctatcaacgacatcgattatccactgcattttattttgtgaacttctattcgctacttgaaaaactctgatctatgtaataatttagtacttaatttgaggtttccct

SEQ ID NO: 123227 - DNA, 178 bp, Zea mays
  Clone ID: MRT4577_43863C.1
caggaaactgcctcttttgtcagtgaaataatagaaagattgtgttagttaagttataactgtcatttgtttgaaaatgttcgagactgcccaaatagcttttcaactgctggacatatagctgagatattgtactttctagcaatgtttattcacctttgattacattgttatgtga

SEQ ID NO: 123228 - DNA, 383 bp, Zea mays
  Clone ID: MRT4577_43864C.1
aataaaacggttccttaagatgcggaacctttcaagaaggagccgaagagccagccatggttgggtttaggaccgattgccggggtttccagcctgaacctaagttggtccccaccaccccagccttattaggccggcccagcaccggccccaaccttgcccgggaattggcttggccactagaccgggttgggaacccataaatatccttagttttggggtttaagggtccgcttttgtcggggttttacgccctctggtcgcatagttctggatgtaaagaaaggtagccggtcatgcccataactggaggtcgaatggaattttttggggggttttaactctacgtggcctttgaatttggcatgtctaaggataaggtt

SEQ ID NO: 123229 - DNA, 145 bp, Zea mays
  Clone ID: MRT4577_43865C.1
acgcgtccggagcaagaacaagcacaccaacccatatttctcaacttttacttaccaccacaggctaggaaaatatgagcctttcttgcgctccaagcccaatttacgagcgcaacaaatacaaccattatatccacataacact

SEQ ID NO: 123230 - DNA, 578 bp, Zea mays
  Clone ID: MRT4577_43866C.1
gttctagatcgcgagggccgcccttttttttttttttttttttttaggttattaatagagtagtataaataaaatgataaatcacactatgaaacaattacaccgtataagtcctatatatatgcttttgttttccacaaaggaaaaaaaatctcatgccccgaaactaatctccagctcatgcttgccaaccttgagaaaatgtgaccctttatcaatgacttttgtgccatcgtccctcaccctgctgaaatcctcacacgggcttacctcaaacctcaggtgcgccttctcccctgccttgatgtgctggctctggaacccgacgagctgcctcgctggtcggccgtcggtcgcgttcggccaccggaggaacatgagcgccgtgtgcttcccgtccattgggccgtgattctgcaccttgaccactgccaagaacttgagctgatggcacagctcgtcgccgatgtggtcgacgtggtagcttaagttgtcctcggtcgtcgccgcgtggccggcggcgagtagtagggtcgtgttgtgcgccgggttgttgcggccggtgactacccggtgag

SEQ ID NO: 123231 - DNA, 238 bp, Zea mays
  Clone ID: MRT4577_43867C.1
taggccttgatgctagtgccgtccagttgttaaaaatacgctcaagcatgatgcataggggctatagatcgcggctgtctgaaattcccatgatagaactaacatataaacatggatattcaacacaggatagtacagttacacctccaaaattcatttcccgaagcgagcacatagacattcagattacatatctacctgcaggacaatgcactgaacgtgcatatacagaatcacc

SEQ ID NO: 123232 - DNA, 461 bp, Zea mays
  Clone ID: MRT4577_43868C.1
caaggggaaataggccccccaaaaagaaacaaaggaaaccggggggcaaaagggtcaatattaataaaaattggaaaaaagggggccaaaaaaggggacctaaaaccggtttttttgggggggggggggggtaaaaaaaaggcaaacaccaggggtaaataaataaagcaaccccccaaaagggcccaatcccaaaaatggttaaaaaaggccccaaaacacaaaaaaaagaacccaaaggggggaaaacattaggcggaaacaaaaaccccccggttttagccaaaggttcaggggggccccccaaaacacaaaaacccctttaaatatattggtcccaacaaaaaggcccggggccctccaatttaaggccctggaaacccaaagttttaattttttaacccaaaacggaagggcccccgggggcggccccgggggccaccccggaaatcccggcccgg

SEQ ID NO: 123233 - DNA, 246 bp, Zea mays
  Clone ID: MRT4577_43869C.1
atatcccacagatcgtatctaaaggatgattttcgcgccatgggacgaaagagctatcagaccacactaggatacagacgacctttactatatacgcagagcctgattggatatcttcaaccgaaggatgtggtgccggtgtcactacctgaacttcaaaccctaagaaaatggcttagaaagaagaaagaggtgataatatggttaacttatgttaagggaccctaacatgagctaacgaaggga

SEQ ID NO: 123234 - DNA, 424 bp, Zea mays
  Clone ID: MRT4577_4386C.1
actccactccacccacgcctccaccacagagagcagcagcagactcgcaagggggtagggttgtgtactctgcgcgtgcgctgctgtctagaccgccggcgtgtgccgcccctggcgggtttttcgatggctacgccgggcacgtcagcggatgctcccacatggtattccttgctcgtcatcgacgttcgggagaccacgattgtcaatgaggttgctctttatgatcatgactggcactacatcaggtctgcatccattgcatggaacaggtaactaaggcaaggcataagcttggatggatttcagaacatatactgcggcccgcatatgaatggactccccccacccccctgcggtaagagcagtgtagctgattgcctgcaacatcctgaatcagaagaaaaaaatgtgaaatcatcga

SEQ ID NO: 123235 - DNA, 351 bp, Zea mays
  Clone ID: MRT4577_43870C.1
gattagtaaactttgtgatatgtgaattgctcctttctatagatggctagttgaaccctgctggtcataataatctggatctgatttgctcttcatttacattgctaggcctagggattagggattgaattccgcaatgcttgacaaatagtgaagttcatactgttatccatgagcactgagcagtatctgccaagacttttttattctgtcgagaagtgataactattccttagatctgctaggtgtgtttggtgtgcaaagggttttgtggtgttaagtgttgcacttggctagactatagactatttaaagtgtgttgatcagagacgaagttgggagttgggacat

SEQ ID NO: 123236 - DNA, 315 bp, Zea mays
  Clone ID: MRT4577_43871C.1
attattttttgcttaagaataacttttaatagagcctgactggggtaacagcgtcacatcgctccgcagaccatgctgattgatgcatgggtttgctggagccgtggatgaacacagctctaactactgactcagtgcgacgcttgcatgaacaacacagatgggcaacaacaaaaaccagacgaacgatgataaagcctacggactagggaatatcatgacggaagcgaacaggataacttggcagggcggtccctaccggggagttcctacagttcctcggggagttgcccaagcagccttcaaggctgccaa

SEQ ID NO: 123237 - DNA, 153 bp, Zea mays
  Clone ID: MRT4577_43872C.1
ctggggacaacgacgatcccgctgctgaccacgtaagcggtgagggtgaagataccgatcaggttaaagacccagggtgcacgcataatcacatatttcatgacgaggaacgagcgtgctctcatcttggggcacgagccttgctgctcagca

SEQ ID NO: 123238 - DNA, 627 bp, Zea mays
  Clone ID: MRT4577_43873C.1
ccggccgggccgggattttcacaccgtgggcggagcacgcggctgactgaagagagacaacgtccgacagagagctgacatggccgcaggagccgcgatgtactactaccacaccaggcgccggcaagggtgagcctcgtaggcgggcgccccgtcctctccggcgatgggcctgaggccatcgtacagcaaggcgatgtgcgtcagcagcagccggtggtggatgaggtgaagatgtgaggcgaaggctaggagggtcagcaggaggggaagggcaagcgcaaggactgccttgttctcgccctgtggccatggactggcaggagtgcactaccgagcttgaagctgatgctccatgctcgacggactatcagtgttactcacaacgggagagtattcatcacagcatgccaatcatctcgtgtgcgatgatccatgaactgaacccagatctttcacgtgaactctgtacgataacgagcgtgaacacatcgcatatgtcgaccgactagacacttttcatgcgactgtctactaccagactatcttctggcggcttatagtccgcggtggtctaatatgcgcagacattgtgcttgatgtatcacgcatttggtgactgacaga

SEQ ID NO: 123239 - DNA, 913 bp, Zea mays
  Clone ID: MRT4577_43874C.1
accacaaacctggcagccctccggctgatccagcgtcttcctcgccatcgccgacacgctcaccggcgatccactgctcggctcacgtccggcgtaggcgcgtcgtggccacgggtcgtcacacggtgctctcagcgaacttgccccaccggcccgcccttcccgggccttacctgattccccgtcctccagcgctgggcgctggctgtgctgcagcgtagccgcacctccagacctccgccgggtcccctggctgctggcgacgaacgcccctgcgcagtgcgtgtgcgccagtgcctgccggcggccgaccgcagttctttgccttgcctctgttgctcgtcttcttgcatttctgatgggtctcaatgccgtggtggccgcttgctacgcccttccagtactcatctctgtgctcacagtccgcttcttctacgtgttgtggcacagtggccaatcagcatcgagaccacgcaacaccagattgcgttgtctcatcatccttggctccggagggcataccgcagaaatgatgaatattgtaacaacgcttcagaaggataggttcacaccaagatattatgtggctgcacttactgacaacatgagtcttcaaaaggcagaggtctatgaacactcgcttattcagagcgatggaatgaagactgccgagagtgctcatttcatgcaaatatatcgtagccgtgaagtaggccaatcttacattacatccatcgcaacaacattgctagccacattgcatgctatgtggctagtaataagaatcagaccacaagtgatattttgcaatggtccagggacatgctttcctgtatgcattgcggcgttccttctgaaagtgcttggttgggatggtgcttcattttctacattgaaagcattgcaagagtga

SEQ ID NO: 123240 - DNA, 302 bp, Zea mays
  Clone ID: MRT4577_43875C.1
ggccctatctcttccccacgaacaggtgatgcggagggcgcccttccgggggcggggacacgcaaaaaccaagctggaccgaaggaatagcccaacgacaacgctgaaagccaacaacaaaccaaccatacaactctacacccaaaactaacccaccccaaaacgctagaaaaaatgagggaggggggggaatgagtaaaaaaaaaaataaaccatcacaagaacgaggcataaaaaaaaaataagagaaaataaaaaaactgaacccaatacaatgaaactggcatgaaaaggatagaaaa

SEQ ID NO: 123241 - DNA, 220 bp, Zea mays
  Clone ID: MRT4577_43876C.1
gcgcggacgcgtggagcctacatgacatctttcgcgtgcgtcctaacgcgagccttgtatattgcgacacctaagcataacataatatgggtcagaactgaacggcgcaagtgctgtaccggtaggggcccgcaaattaatgggctgaggtgccattcggccttggactgctggcgagttaacctagattccaccacccatacgaccttcccaacacttg

SEQ ID NO: 123242 - DNA, 624 bp, Zea mays
  Clone ID: MRT4577_43877C.1
gcggtgccgtacatgcgaagcccaccgaagccggtgccatgtatgcaaaaatctctataccgagaagctgatgccggcatgtcgccgctccatttttcctgatcccggcgccggaagccttccccttcctcttcctgctgagcgccagcgccggtgctctcagcgaacttgccccaccggcccgcccttcccgggccttacctgattccccgtcctccagcgctgggcgctggctgtgctgcagcgtagccgcacctccagacctccgccgggtcccctggctgctggcgacgaacgcccctgcgcagtgcgtgtgcgccagtgcctgccggcggccgaccgcagttctttgccttgcctctgttgctcgtcttcttgcatttctgggactttttagttaggcacaccctgtattctaatcttgggtcttcaccgcatggaaacattgatgtacagcaccacaatagagagtagattaagatgggtctcaatgccgtggtggccgcttgctacgcccttccagtactcatctctgtgctcacagtccgcttcttctacgtgttgtggcacagtggccaatcagcatcgagaccacgcaacaccagattgcgttgtctcatcatc

SEQ ID NO: 123243 - DNA, 911 bp, Zea mays
  unsure (1)..(911): unsure at all n locations
  Clone ID: MRT4577_43878C.1
ttttcttttttttttttttttttttttttttggacaatggctaagcacgagaaacggagtcatttcactcaatttgaggtttgaacttacaatgaaccatcccatctagaatggtaaactcccaaaaccaaaacactatatgcgtaactagcatttccatgcccgcatatatgaaatgcgttgtttgttgtaaagcctttctttttaaggcagccacatttgtatttgtcgaagtatacatatattgtcattgtattctgaaccccttagttatggtggaatcttcacatcaaacgacctgcgtagcatgctcgaggatacttatgctgcagctggggccactgcacaaagaactggtcagctatccgtagcttgtacaacagtaaaccgctcaatgacagcttcttcactcttgcaatgctttcaatgtagaaaatggagcaccatcccaaaccaagcaccttcagaacgaacgccgagatgcatagaggaaagcatgtccctggaccgttgcaaaatatcgcttgtggtctgattcttattactagccacatagcatgcaatgtggctagcaatgttgttgcgatggatgtaatgtaagactggcccacttcacgactacgatatatctgcatgaaatgagcgctctcgccagccttcgttccgttgctctgaataagtgattgttcatagacctgtgccttttgaagactcatgttgtctgtaagtgcagccacatagtaccttggtgtgaacctatccttctgaagtgttgntactatgttcatcatttctgcggtatgccctccggagccaaggacaatgagacaactcaatctcgtggcgcacaaccttgactctggttggccactgcgccacagtacgtaaaagaagcggactgtgagcacaga

SEQ ID NO: 123244 - DNA, 269 bp, Zea mays
  unsure (1)..(269): unsure at all n locations
  Clone ID: MRT4577_43879C.1
tnnnnanttggtttgtttaattgtttttgtttagccaaccaaattaccnngcggcatataggtagatcctatctactgggcactctgcctgataaccaaaatacaacccttaccgatccaaaaaagacaatccgttccgggcacccttcaagcccatgggggatatttcacattatttagactagaaccgagcctggaatattcataggatgggtgggcaacccttcctgaaaacaaaggatagcttggttaccagggaagggccgggg

SEQ ID NO: 123245 - DNA, 121 bp, Zea mays
  Clone ID: MRT4577_4387C.1
agaccgaaaaaaaactgtgggggttttatttgtaaaaggagcggatcggttatcttacaaacaactgggctggataaaactgtttccacctgtaaacataattttgcatgcttaaccgctt

SEQ ID NO: 123246 - DNA, 458 bp, Zea mays
  Clone ID: MRT4577_43880C.1
ggggggatccagaaccttcatatacattataaaacgaaactaaacattttaacgggaaaaaccatgttctggaaccgatacaaaatatatatataaaggaaaaagggggaaaaccaacaggaaccgcaagtttgtgggctaaaacacatggtttaacccctgatcacgatcacacacaaaaacttttgaaaaaaaaaatgcggaagcctatttataacttaaaaaccaaaaaaaactccgggtttaaatccttttgggggaaaccccatccaaaaaaaatttcccctgcttgttctgttaaaggggcaaagcaagcgttttaatccacctcctaaaaaaaaaaccttttcccttggggaaccccctcctttgaaaaaaaaaaaatttcttgggggggggttaaaacttcctgaggctaaagctataaaaaacccgggggggcggcttctgaaactcct

SEQ ID NO: 123247 - DNA, 120 bp, Zea mays
  Clone ID: MRT4577_43881C.1
ggtctatgtgaacacattcgcaaccatatctaccccaaatccagccgtcgtgaactcagcttcaagatgcatatctgtgtgagaaccctgactggatagactagcagtctcgatgtggag

SEQ ID NO: 123248 - DNA, 1759 bp, Zea mays
  Clone ID: MRT4577_43882C.1
ggtacctcgaggccggccggggcagcagctaaagaagcaagtgtctgctcactcagtcctgcgcaagagctcgttctcggagaaaaaaacgcgggaggcgataatggagagaggtgccggtgcgagcgagaaagggacggtgctggtcacgggggcgtcgggcttcgtcggctcctggctcgtcatgaagctcctccaggccggctacaccgtccgggcgaccgtgcgcgatcccgcgaacgttgggaagacgaagccattgatggaccttcccggagcaacggagcgcctgtccatatggaaagccgacctggcggaggaaggcagcttccacgacgccatcaggggctgcaccggcgtcttccacgtcgccacgcccatggacttcctgtccaaagaccctgaggtagatcagtcttggctgcacaattaattagtctctcgatctctacgtcttcattgcacatgcactgcacacatatactacatacgtatggtttccattgcagaatgaggtaatcaagccgacggtggaagggatgataagcatcatgcgggcatgcaaggaggccggcaccgtgcggcgcatcgtcttcacttcctccgccgggacggtcaacctggaggagcggcagaggcccgtctacgacgaggaaagctggaccgacgtcgacttctgccgtcgcgtcaagatgaccggatggatgtacttcgtgtctaaaaccctggcggagaaggcggccctggcgcgatcccgcgaacgttggtaagacgaagccattgatggaccttcccggagcaacggagcgcctgtccatatggaaagccgacctggcggaggaaggcagcttccacgacgccatcaggggctgcaccggcgtcttccacgtcgccacgcccatggacttcctgtccaaagaccctgagaatgaggtaatcaagccgacgctcgtggtcggcccgttcatcagcgcgtccatgccgcccagcctcatcaccgcgctggcgctcatcacggggaacgcgccgcactactcgatcctcaagcaggtgcagctcatccacctcgacgacctctgcgacgccgagatcttcctcttcgagaacccggccgcggccgggcgctacgtctgctcctcgcacgacgtcaccatccacggcctcgccgccatgctcagggataggtaccccgagtacgacgtcccgcagaggttccccgggatccaggacgacctccagccggtgcgcttctcgtccaagaagctccaggacctcgggttcaccttcaggtacaagacgctggaggacatgttcgacgccgccatccggacttgccaggagaagggcctcatccccctcgccactgccgccggaggggacggctttgcctcggtgcgcgcacccggcgagacggaggcgacgattggcgcttaagcaacaatcacccggctctccccgtcgatgatgctatcagctatctatctcttcgagctccgctgccaatacggaacttacttccatgttcaacgaattgttttatcccctggattacgtattgtttttatgttttatacccaaacaacgaatgtttctcagtattttactacagctagcccctatagtagagattctattatatgaataagctatctgtagaggctctggtgcaatataaaaaaaaaaaaaaaaaaaaaaaaaaaaaaaaaaaaaaaaaaaaaaaaaaaaaaaaaaaaataaaaaaaaaaaaaaaaaagcggcc

SEQ ID NO: 123249 - DNA, 1422 bp, Zea mays
  Clone ID: MRT4577_43884C.1
agcagctaaagaagaagtgtctgctcactcagtcctgcgcaagagctcgctctcggagaaaaaaacgcgggaggcgataatggagggaggtgccggtgcgagcgagaaagggacggtgctggtcacgggggcgtcgggcttcgtcggttcctggctcgtcatgaagctcctccaggccggctacaccgtccgggcgaccgtgcgcgatcccgcgaacgttgggaagacgaagccattgatggaccttcccggagcaacggagcgcctgtccatatggaaagccgccgggacggtcaacctggaggaacggcagaggcccgtctacgacgaggaaagctggaccgacgtcgacttctgccgtcgcgtcaagatgaccggatggatgtacttcgtgtctaaaaccctggcggagaaggcggccctggcgtacgcggcggagcacggcctggacctggtcaccatcatcccgacgctcgtggtcggcccgttcatcagcgcgtccatgccgcccagcctcatcaccgcgctggcgctcatcacggggaacgcgccgcactactcgatcctcaagcaggtgcagctcatccacctcgacgacctctgcgacgccgagatcttcctcttcgagaacccggccgcggccgggcgctacgtttgctcctcgcacgacgtcaccatccacggcctcgccgccatgctcagggataggtaccccgagtacgacgtcccgcagaggttccccgggatccaggacgacctccagccggtgcgcttctcgtccaagaagctccaggacctcgggttcaccttcaggtacaagacgctggaggacatgttcgacgccgccatccggacttgccaggagaagggcctcatccccctcgccactgccgccggaggggacggctttgcctcggtgcgcgcacccggcgagacggaggcgacgattggcgcttaggcaacgatcccccggctctccccgtcgatatgatgcaatcagctatctatctcttgtttgccaaaaaaaataagggaggtcttggcatactcgatctagagcgctttgcaagagcgttaaggcttagatgactatggctacgatggacgaatagagacaaagcatggactgggttgcaattaccttgtgataaagcagatgtcgatctatttaatgcatctacgattgtaacaattggtgatggcaaaatggctgatttctggagatcaaactggattcagggtcaggccccaaagaacattgtgccaaccttattcatgaaagcaaagaggaaaaatatctcagtgtgccaagcccttacaaacaaaaaaaaaaaaaaaaaaagcggcctacaaacaatcgctggatgcacttttgttctccttacacacatgaggatgagataaaagaaattcatttccctc

SEQ ID NO: 123250 - DNA, 300 bp, Zea mays
  Clone ID: MRT4577_43885C.1
ctccaggagcgcctcgacttcctcctccgcctcggcctctccaccgacgacctctccaactacccgctattactggcctgctccctcaggaagaacgtcatccccgtcctctcctacctcgagaagctcggcgtcacgcgcgcccgcctggccgcctttgtccgcgcctacccggcctgcctccacgcctctgtcgccgtcgacctcgctcccatggtcaaggcgctccgtggcctggacgtcgaccgccaggacctcccccgcgtcctcgagcggtaccccgacgtcctgggactcaag

SEQ ID NO: 123251 - DNA, 818 bp, Zea mays
  unsure (1)..(818): unsure at all n locations
  Clone ID: MRT4577_43886C.1
ggccggccgggagagctatagaagaagtgtctgctcactcagtcctgcgcaagagctcgnttctcggagaaaaaaacgcgggaggaaagctggaccgacgtcgacttctgccgtcgcgtcaagatgaccggatggatgtacttcgtgtctaaaaccctggcggagaaggcggccctggcgtacgcggcggagcacggcctggacctggtcaccatcatcccgacgctcgtggtcggcccgttcatcagcgcgtccatgccgcccagcctcatcaccgcgctggcgctcatcacggggaacgcgccgcactactcgatcctcaagcaggtgcagctcatccacctcgacgacctctgcgacgccgagatcttcctcttcgagaacccggccgcggccgggcgctacgtctgctcctcgcacgacgtcaccatccacggcctcgccgccatgctcagggataggtacccgagtacgacgtcccgcagaggttccccgggatccaggacgacctccagccggtgcgcttctcgtccaagaagctccaggacctcgggttcatcttcaggtacaagacgctggaggacatgttcgacgccgccatccggacttgccaggagaagggcctcatccccctcgccactgccgccggaggggacggctttgcctcggtgcgcgcacccggcgagacggaggcgacgattggcgcttaagcaacaatcacccggctctccccgtcgatgatgctatcagctatctatctcttcgagctccgctgccaatacggaacttacttcatgctcaacgaattggtttatccc

SEQ ID NO: 123252 - DNA, 838 bp, Zea mays
  unsure (1)..(838): unsure at all n locations
  Clone ID: MRT4577_43887C.1
ttgggtacctcgaggccggccggngnnnnnnnnnnnnnnnaaaaaaaaaaaaaaattaaagcagcagctaaagaagcaaagcaagtgtctgctcactcagtcctgcgcaagagctcgttctcggagaaaaaaacgcgggaggcgataatggagagaggtgccggtgcgagcgagaaagggacggtgctggtcacgggggcgtcgggcttcgtcggctcctggctcgtcatgaagctcctccaggccggctacaccgtccgggcgaccgtgcgcgatcccgcgaacgttgggaagacgaagccattgatggaccttcccggagcaacggagcgcctgtccatatggaaagccgacctggcggaggaaggcagcttccacgacgccatcaggggctgcaccggcgtcttccacgtcgccacgcccatggacttcctgtccaaagaccctgaggtagatcagtctctggctgcacaattaattagtctctcgatctctacgtcttcattgcacatgcactgcacacatatactacatacgtatggtttccattgcagaatgaggtaatcaagccgacggtggaagggatgataagcatcatgcgggcatgcaaggaggccggcaccgtgcggcgcatcgtcttcacttcctccgccgggacggtcaacctggaggaacggcagaggcccgtctacgacgaggaaagctggaccgacgtcgacttctgccgtcgcgtcaagatgaccggatggatgtacttcgtgtctaaaaccctggcggagaaggcggccctggcgtacgcgggggagcacggcctggacctggtcaccatcatcccgac

SEQ ID NO: 123253 - DNA, 1718 bp, Zea mays
  Clone ID: MRT4577_43888C.1
ggagctcgaaaagatagatagctgatagcatcatcgacggggagcttggggacctcctcggggccgggcgggcctcgaggccggccgggagcagcagctaaagaagcaaagcaagtgtctgctcactcagtcctgcgcaagagctcgctctcggagaaaaaaacgcgggaggcgataatggagggaggtgccggtgcgagcgagaaagggacggtgctggtcacgggggcgtcgggcttcgtcggctcctggctcgtcatgaagctcctccaggccggctacaccgtccgggcgaccgtgcgcgatcccgcgaacgttgggaagacgaagccattgatggaccttcccggagcaacggagcgcctgtccatatggaaagccgacctggcggaggaaggcagcttccacgacgccatcaggggctgcaccggcgtcttccacgtcgccacgcccatggacttcctgtccaaagaccctgagaatgaggtaatcaagccgacggtggaagggatgataagcatcatgcgggcatgcaaggaggccggcaccgtgcggcgcatcgtcttcacttcctccgccgggacggtcaacctggaggagcggcagaggcccgtctacgacgaggaaagctggaccgacgtcgacttctgccgtcgcgtcaagatgaccggatggatgtacttcgtgtctaaaaccctggcggagaaggcggccctggcgtacgcggcggagcacggcctggacctggtcaccatcatcccgacgctcgtggtcggcccgttcatcagcgcgtccatgccgcccagcctcatcaccgcgctggcgctcatcacggggaacgcgccgcactactcgatcctcaagcaggtgcagctcatccacctcgacgacctctgcgacgccgagatcttcctcttcgagaacccggccgcggccgggcgctacgtctgctcctcgcacgacgtcaccatccacggcctcgccgccatgctcagggataggtaccccgagtacgacgtcccgcagaggttccccgggatccaggacgacctccagccggtgcgcttctcgtccaagaagctccaggacctcgggttcaccttcaggtacaagacgctggaggacatgttcgacgccgccatccggacttgccaggagaagggcctcatccccctcgccactgccgccggaggggacggctttgcctcggtgcgcgcacccggcgagacggaggcgacgattggcgcttaagcaacaatcacccggctctccccgtcgatgatgctatcagctatctatctcttcgagctccgctgccaatacggaacttacttccatgttcaacgaattgttttatcccctggattacgtattgtttttatgttttatacccaaacaacgaatgtttctcagtattttactacagctagcccctatagtagagattctattatatgaataagctatctgtagaggctctggtgcaatatatatttcgagttatttggattactagcataattcaatttttaaaaactattattattattcacttgttttatacccaaacaacgaatgtttctcagtattttactacagctagcccctatagtagagattctattatatgaataagctatctgtagaggctctggtgcaatatatatttcgagttatttggattactagcataattcaatttttaaaaactattatta

SEQ ID NO: 123254 - DNA, 171 bp, Zea mays
  unsure (1)..(171): unsure at all n locations
  Clone ID: MRT4577_43889C.1
tagtagtttctattcactaaacttacatctcaaaaaaaatccaatcttacatacaactttcaagctactttttaaaaaaatctataatatcacctaaaattcanttcactaaccaataattttacaacgtcttttctaataaaaccctttctttacccaacttattcgcct

SEQ ID NO: 123255 - DNA, 663 bp, Zea mays
  Clone ID: MRT4577_4388C.1
aggccggccgggccgggagtcacaacctctactgctgacaaagtcttacgcctgctcctcgagatgccggcgaaatagaatgttcccgccgccgcggagccggtggacgtccaggacctcttcgcctcgctccaacggcacatctaggcaagccgctttcaaacaggccgccaaggacgccgaacaagttcgctaggcagtgtcgtgagacgaggacgcgatgcgatgcaaggtgctgatatacatcgaggacgacaatatcgacaaggggttacgcttgatccgcgtcgtcgagggcatcgcgatcgatctcagctactacaggggctactgctgctacaggcgaaacaaactgcatgaaggtcttgaggtttgaagaggacaagaagatactccacctggactccatctggaatgccaaatattttaccgactacgaataatgaatgattgcatgagtaattatgaaaagcatagatgacctaagattgagtcaatgtatctgaagataaatatcattgctggtctagctggtgctggaagggcttctgagggacaggcagagtatgaaggctctgaacgttgatctctaccaccagagcactcagggagactcgtagttttgagatccatactagtctgcttgctgcttgatagaaaaca

SEQ ID NO: 123256 - DNA, 327 bp, Zea mays
  unsure (1)..(327): unsure at all n locations
  Clone ID: MRT4577_43890C.1
atattctacccacgcttttttttttgcacacnaaaactttatttacttggtggtttatacaacaaaaccggggcttaaaatttttatacttaaaatttttaaaaaaagaataccccctaccttttttaataaaaaacaccaaattaattaaattaagcacccacatatcaaggtatctaaaccttttttctattcccccatcattacaaaaaactttttttttttaccaaacaaaaaccctcttattgaattttcacactaatatattgacttccccttcccaaatcctttattaacaaaaccttcattttataaatatctcttccc

SEQ ID NO: 123257 - DNA, 213 bp, Zea mays
  Clone ID: MRT4577_43891C.1
gaaccctagcacatttctttattctctcagccgaacatctggccggtggcgtttgtctttgccgcacagccgccctatggcatgctgttgtccttcgctccctcgtttgtttttggttctagcatctacagtgcgaccatctttttctcggttgggactttacgcatggcgcatctttgacttggcgctgcacctactctctgaaactatttt

SEQ ID NO: 123258 - DNA, 2473 bp, Zea mays
  unsure (1)..(2473): unsure at all n locations
  Clone ID: MRT4577_43892C.1
cctcgaggctggccgggacggtgtccctgccccgctcgcgatgcatcccccgaaaccctaggccttccgcgatgaggagtcgcctcccccttcctccgtcgtggcgttctcgggcgccgcctcggcgagcaagacgcctctcccgcccctgccatcctcgcctcgctccccgcaatccccttccatcgacgatatacccacgcgacgcgcggcgccagcttgtgtcgcatcttctatctcagttcctcgttcgcttcatcgtcgacgtccctgtcgcctgcttccccttccgctggccgtccttgcctcgcccctgatgcgttggtctccacagcataggagttggacgaccttggaactgggagccccattgccagccaagccccagtccccaccgtcgtttcttagacagcgagcgcgggttgcgtcacaagaccataccgtcctgctctgggaatctctgtgtccacatattgcaaggtgcccctccattctccaacgtgcctcatgtaagcggcatgcagttctacttcgtgatggaaatccatcattnttactctccttacctttgtaatcctatgtaatacttagttgtgctcgttagttgctcgtatcccgttgctgtctgcgtggtgcacggttctgccacccgcgcgtccgtgcccctgcgttccgaaatctcgcatccgcatccgccccgatgtccccctccgcgcacgccccagcctccgtgacccgcgcgccgccggcaatctcgctccgtgacccccgcccccactcttccggcagtccccatgaaagtcacggcccccccatcgtggaccacggcgacggctcctactccttccgcctccaggtcgcaccgctcttcgccgcgagggagttccgcctcaccgtcgtcctcctcttccgaagctgggagcccctccgtccgtggtcccgtgggttcaagtaccgcgccgagctgcgccgcatccccctcctgttccggccggacaataacgcgtccctgccggcgctggagacgtgccgcgccgcggacttctctcgcgatgcctggtcgggacggtggacgcggctcgccaagaacgacagctgcgaggacgtcgacgcagcggggcggtaccggtgcctggagccggaccacccgtgcgaggcaccgtggtgcgacgggccgctcggcgcgctggagagcaacgggtgggtgtactcggcgcactgctccttcaagctctttgcggccgatgcttcgtggcggtgccttgacgggaagtggctcttcttctggggcgactctaaccacgtcgacaccatccggaacctcctcaccttcgtcctcggcatcacggacacgtctgttgtgacgcgccggtttgatgcagtgttcaccaatcccagtggtggggcagggactctgaggatcacaagcatcttcaacggccactggaacatgagcatgaactatctcggcttgcattccctccggaacagaggtttccggcagctcatccggtcctacttcatgtccggtgatcgtgttccggacgtcgtggtcctgaactctggcctgcacgatggctgctactggaccagcgtccgcatctacgcgcaggctgcggatttcgcagcacagttctggtccggagtcatggacaaagtccgggctcgtgggcgtgcagtgcccagggtgttctaccggacgacgattgccactgggggctacgctagggacctggcattcaatccaaacaagatggaggcgttcaatggtgtgcttgttgagaagatgaggcggcacggggtgctaactggtggagtgattgacaattttgacatgacattcccatggcactatgacaaccgctgcaatgacggcgtgcactacgggcgtgcaccggcgaagctggtgtggcgggatggcaaggttgggcaccagtacttcgtcgacctgatgctggggcatgtgctcctcaatgccatctgcaatgaatgaggattgctggttccatgttctgtaagtttctggcgttcaattgtggaaactggaataggatggttagggaactgaatctggggtgatgagatatcaacaattgggtagtgcagtatgtgtgtaaatctgatggagacggcgagagcgaggtttagctggagcaatttgtatggtaaaacatttggtctctcagcatcgtgtattggcctgatcttgctctagcaaagaagatcgagtccggtcagagctagtgatgagtgaaaatcaggcacatgtaaatatatatagcatgactattcgagaacatctaatgctgcacaaattatgtaggtccagtccgatgatattgttcactgctggtttagtttcttactaatgttcagttctgttcattgttctttgtgatcgtgtgtcttgcaactatcaggtatgcaaatatagaaatgttaaactgagaaaaaaaaaaaaaaaaaagcggcc

SEQ ID NO: 123259 - DNA, 372 bp, Zea mays
  Clone ID: MRT4577_43893C.1
aatacacttaattcttttacaaaatggcgtgcgggctatatatttttttttttatacattaaacacaacaacatgaaaaacacatatacatgaaccgtgcgtgcttcctgaacaaaaaggcaattatattctttttacaaaccattataaaacaaagattccaatttttttccagccaaaatccaaccttacgaccccgtaaataccaccgaaaagctcttttatacttccaaccaaacccaataaactggcccgacataaacaaccgtaagactggaaaaacccttgccttacccaaataaaaatcctttcacaaaatcccccattatccaagcgggaaaaaaaaaaaaaaacccccaccgatcccactta

SEQ ID NO: 123260 - DNA, 762 bp, Zea mays
  unsure (1)..(762): unsure at all n locations
  Clone ID: MRT4577_43894C.1
cgggggtgtccctgccccgctcgcgatgcatcccccgaaaccctaggccttccgcgatgaggagtcgcctcccccttcctccgtcgtggcgttctcgggcgccgcctcggcgagcaagacgcctctcccgcccctgccatcctcgcctcgctccccgcaatccccttccatcgacgatatacccacgcgacgcgcggcgccaggtactactccgccttctcgacctcggcctccgcggtgcccgcctggcctgctgcggtcgtcgtcgccatgcttgaagcggatccagcacccccatcccaacatcttcctaaaatcctcggatttgcccccttcctctgcagcttgtgtcgcatcttctatctcagttcctcgttcgcttcatcgtcgacgtccctgtcgcctgcttccccttccgctggccgtccttgcctcgcccctgatgcgttggtctccacagcataggagttggacgaccttggaactgggagccccattgccagccaagccccagtcccaccgtcgtttcttagacagcgagcgcgggttgcgtcacaagaccataccgtcctgctctgggaatctctgtgtccacatattgcaaggtgcccctccattctccaacgtgcctcatcgaagttagtgtntnctgtgtcacttgttccatcaaagatctggagtagggaactgatacaacagaagagcccgtgaccgatgaccctggtgagcagcagtttgaagtagctgagcaggagctcattg

SEQ ID NO: 123261 - DNA, 427 bp, Zea mays
  Clone ID: MRT4577_43895C.1
cagcacccgttcgaagaagaagatgatcctcctggtgcagcagattcaatacgagcggacgccctacctggccatgctcaggaaggacgagcgcctctacatcatcaccttcggccttgactgatacacgaccgccacccccatggatgattgcatggcagcagtagctgataccaaagtgaactttgaggtcatctaccttggtgacataacatagagccctgatatcaacaccatgtatgtactagcacgaccgatgaacagggacttggtttctccctgaacatgcacatcagagagcgacttcaggactggaaacaacatcgagaacgacaggaccctgtaggacaagccacgacttcattcgacggtgcggagtatcgtatacagcagcatcaccttaaggccgtgggcttggcccatttgc

SEQ ID NO: 123262 - DNA, 296 bp, Zea mays
  Clone ID: MRT4577_43896C.1
caagcatcagcggcaggagctcagggcagcgtgcgcacgtagggtaccaagctcgctcagctagcctaccatagctgatcaccaccggggcgcgacgggaggaggcggaggctacggcgaccaccagcgcggaggcggcatgcacggcgaggcgcacagcagcagaagcagggcgccatgatgacagcgctcaaagccgcgacggccgcgaccatcggcgggtcgatgctggtgctgtccgggctgatccaggccggcaccgtgatcgcgctcacggtggccacacccgtgctggt

SEQ ID NO: 123263 - DNA, 272 bp, Zea mays
  Clone ID: MRT4577_43897C.1
cccccgggccggcttttcccactggtttttttggttccccccgggtggaaaaaaaagggggccccaccccccctgggatggcccggttggcccaggggtttcaaaaaccctcccttgcccccttaaggggacccgggggttaatgggccccccccccccgggggcctttggccccccgggccgggggggagcccgaacaaattcgggttgccccccccccccaagaagggggaggcttttggttttttgaaccctttgctttggggggtccc

SEQ ID NO: 123264 - DNA, 256 bp, Zea mays
  Clone ID: MRT4577_43898C.1
cggccgaccacgcgtccgcccacgcgtccgcggactcatgcgcggacgctagatccgacacgtggacagacaccagagcggggctttaaaaaaagatggcgggccaacaaaacagctacaccatcacaccctgcctctcctactcccacagcacggggaacggcccctccgcgtcctgcttcagcaacatcaggaacctcaagagcgccaacagcaccaccgccaacaagcacgccgacagcaactgcctcaagaa

SEQ ID NO: 123265 - DNA, 185 bp, Zea mays
  Clone ID: MRT4577_43899C.1
gttttggtggccttgaggatatcatataggcgttcaggtcatagccaaccattgtaccgggggctcacctttcggtagtcttttatctttctttcttaatgactcacagatctcctgcgttgttctaaaaaaaccacatcctttcttttctacttaataaagtttttgacttttcattgtctatg

SEQ ID NO: 123266 - DNA, 376 bp, Zea mays
  unsure (1)..(376): unsure at all n locations
  Clone ID: MRT4577_4389C.1
ctctcttatccttctttttaattcttacccaacacttctattcgggccatggggatacttagcaaggatggacccacttatacctctttctttattctattccttcttcgttcatatcctttcttattttcattatccatttatctccttattttctttaactaactatacctcatccttcttactaactttncatacccatccccttctatttaacttcttatatggactatttcctttcataccactcaaatttaatccatttttttcctcatcattaaatattattatctttttctaaacctctattctattaacacttaattttttttatttaacatcaaatttaactcatatatttttcttattttaaaat

SEQ ID NO: 123267 - DNA, 1814 bp, Zea mays
  Clone ID: MRT4577_438C.1
acttacacacaacctcctccattctcctagctccagcaacaaacaggacacaacaccttctcctcctcattcttctaccatagctagctagctagcttcacatcagcagctacatactcaccgatagatacagacctcagagcatcacactacagagtacagacctagctcagagcacacatccagccatggggctcctccctaccgaccgcatggatagcctcttctccccgcgctgcgtgtgggtgaccgggcccatcatcgtgggcgcggggccgtcggggctagccgtggcggcgtgcctgcgggagcagggcgtgccgttcgtcgtcctggagcgcgccgactgtatcgcctcgctgtggcaacggcgcacgtacaaccgcctcaagctgcacctacccaagcagttctgccagctcccgcgcatgccgttcccggaagactacccggagtacccgacccgccgccagttcgtcgactacctcgagcgctacgccgccgagttcgagatcaagccggagttcggcaccaccgtgctgtcggcgcgctacgacgagacgtcgggcctctggcgcgtcgtcaccaacggcggagccggcggcgacatggagtacatcgggcgctggctcgtggtcgccacgggcgagaacgcggaggccgtggtgcccgacatcccgggcctcgccggcttcgacggcgaggtgacccacgtgagcgagtacaagtccggcgaggcctacgccggcaagcgcgtgctggtggtcggctgcggcaactccgggatggaggtgtcgctggacctggccgagcacggcgcgcgcccggccatggtggtgcgcgacgccgtccacgtcctcccgcgcgaggtgctgggcacgtccaccttcgggctcgccgtgctgctcatgcgctggctcccgctctggctcgtcgactggctcatggtgctcctggcgtggctcgtcctcggcaacctcgccaggctcggcctccgccgccccgccgccggcccgctccagctcaaggagacgcacggccgcacaccagtcctcgactacggcgcgctcgcgcgcatccgcgccggcgacatcaccgtcgtccctgcggtgacacggttcgccggcaagggcggacaggttgaggtcgccgacggccgcacgctcggcttcgacgccgtcatcctcgccaccggatatcgcagcaacgtgccgcagtggctccagggcaacgatttcttcaacaaggacggataccccaagacggcgttcccgcacgggtggaagggcgagagtgggctgtacgccgtggggttcacccggcgcggcctctccggcgcctccgccgacgccgtgcgcatcgccacggacctcgggaacgtctggagggaggagaccaagcccaccaagagggccggcgcctgccacaggcgctgcatctcggtcgtcttctaatccgatcggccacacctgggagcatgcatgacgatgattgaagctaacttttctgaagcgcacacacagctgacagacagttgttcgttgatggtgttttagttagtctcacagcacgtccaatccccttggtttgttgttgatttgttctttgagatcgaggtacatcagtagtgagtaatataatacgggtaaaaacagtgagagtgagttgagtaaaagaaaagaaaatggagccctcccatcagtaggggaagtgagtgagccctagcctaggggatttttactgcagctatggccgctagcttgctgtatagtagcaacctgttgatggaggaagaggctctctctttatgtttt

SEQ ID NO: 123268 - DNA, 301 bp, Zea mays
  Clone ID: MRT4577_43900C.1
gtatgccaaggtttctaccccaccgaagcctttcggacaatgccgcggattatatcacaacgaagtttgagtggacctcgtggtcgacgaggcaaaaccgcgtctgaggggacctttttttacaccaggcataaggacggccaggatgacgctacaagacgcttcctatcaccaacgggggggctcccgttcgaggtaccaccaagcgctactggcgtggctaccttttccttggtaagcgccgatactttctttggcccggaaataccaactccaaccccctcgactgcccggtccagaa

SEQ ID NO: 123269 - DNA, 193 bp, Zea mays
  Clone ID: MRT4577_43901C.1
acacactattgctcatcaattacctatttaatagcgatcgcgcattgctttcaacatgcccaaattcttctgcgactactgcgatgtttaccttacgcacgactccatgagcgtgcgcaaggctcacaacagcggccgaaaccatctacgaaatgtagtcgactattacgaacaaattgcccacgagaacgcc

SEQ ID NO: 123270 - DNA, 310 bp, Zea mays
  Clone ID: MRT4577_43902C.1
aaaacaaatttccgggtctcccacctccctccgggggaaaaccaaaatatttaagcaagcccgggcctaaaggccgccgcaaaaataacccctggaaagcccacaatgttaacaaaaactccccccaaaccaacccctcccattcccggacaaaaccggccccaaaataaatccctaaaacacaccaagcctcagaaacccttttaggcccacaaaaaaaaaccccccccgtttaatttccctggggctaaaaaaaaaaattcctaatttttccccgggcttataaaaaaaaaaaaaagggggccccctt

SEQ ID NO: 123271 - DNA, 435 bp, Zea mays
  Clone ID: MRT4577_43903C.1
gcttccgcaattcgggatttttttacataatttttgaacagcccaattggggcgaagcattcgtagtaccaggggcggttccatgggaaaaaaaaaaacatttgcccattgtacaaataagcagtacacgggtttaacccaaattttttttttttagctgcatgaaaacaggcgtaagtcaaataaccgacaccaagcacggggcccaaactggatccaataaccacccccggggggggggggctccccaccctttttttttaaacctttcaagcaaggggttaaaaaccattggctgggcacttttgggcattctttgggggaagttaaaaacttgggccctaggggatcccatgggggaaccccttttccaaaatttttcccggggggggggcaccccttattttccaagccggatgaattatgccaacttcc

SEQ ID NO: 123272 - DNA, 326 bp, Zea mays
  unsure (1)..(326): unsure at all n locations
  Clone ID: MRT4577_43904C.1
gtgttttttttttttttttttttttttttttttttttttttttttttttttttttttttttttganttttgtttgttctgtttggaatgggggggcggaaaacaagttccgggggcccaacaacaagggccgagacagaaacagggggggggggaaccacatctgaccgggggcacttaaaaagggccccccccgaattgtggagcgcccgaccaaaaaaagtccccccccgaaaccaaaggggcttgcccccacgggaggggataactggaaggtggcagattatacctgagggaccactggcaatgccaaaagccagttgggcc

SEQ ID NO: 123273 - DNA, 353 bp, Zea mays
  Clone ID: MRT4577_43905C.1
caatattgaagagatgcttccgagaattaaaccttacacctgataagcagaagatcatattgaggctgatttgttccatattagatgcattccatttcatgaaacctgcaaatgatgcctcaggaaattctgatgctttgagtgaagatattgattcttcccttacattctctttggtcacagtctcttctgataagcaacagtacatgcaaaaggtagtgtttccacaggttcaaaagttgttaggatcagatccagagaaagtcaacgtcaacataaacctggtagcactgaaaatacttaagttgctaccgccggattattttgagtcccaactttcaagcatcattcat

SEQ ID NO: 123274 - DNA, 249 bp, Zea mays
  Clone ID: MRT4577_43906C.1
atcctcatgcagaaagatcaagcagtgttgttggtttttttacaaactcttttattattttattacaatctataaagatcaagcagttgactttgaagcgtacggggcgtttgatctcgcttgtttccttcaggcagaaagagtaaccgttgtttgacatcgaagcgttcagagctttgatttcttcaacgttatggaaactttccaagaaaaactggtgatctgtcattaagttttacgggagcaagt

SEQ ID NO: 123275 - DNA, 438 bp, Zea mays
  Clone ID: MRT4577_43907C.1
gccggccgggtcgggtcttcccctagatcaaatcgtgcagggcaggcagctcgtctcagcggttgccagccgcagatttcgatctgttcccgagcttccaggaatcgacaatcaagattcggtgaaccactggtcttgagatcaagctcttcaagttctacgagattgtagaccctgagcatctgtttggtgaaggtggttatgctccggatcatgcttagtacattttcttcttcgatgaaggcaagtgaatgtagcggtggttgctaccattttgacttattgttccatcgcctacactctaatattcagaatcatcaaattctttcgtaattgaactctatggtgatgctttactggattgtattatattgatgcttaatcatatattgatgatgatgatgatttgaggaaaaaaaaaaaaaaaaaaggccccta

SEQ ID NO: 123276 - DNA, 348 bp, Zea mays
  Clone ID: MRT4577_43908C.1
ctgctaaattcccatacctgggggggtttttacaaacatccagcagatcacgctagaagtttagaactatatgttaggtccttaaaaacctcccgtcggctctgccatcgttgacatgacttcctgaactcaactgtgcggcggtggcggcggctacctttaaaggcgggaaaaagaccacttggttggagtccgaggtccccggggacaccccccagttctcggacgtggactgcgcggaaaaagggctgtgctcctgcacaaggcacgccggtgtggaggaaaaaagaaagggcatgggctcttttaaccaaccccgccgctgttgcttttgttccaaggccggac

SEQ ID NO: 123277 - DNA, 141 bp, Zea mays
  Clone ID: MRT4577_43909C.1
ctcgagggcctccgtccgcgcatcctcttctggcgaggagctcccccaagcagtcggtggtcttttcaaggtcgtcggtgcattcccctcccggatctcccccattcggtccaaactggaagagcgggtgggcggcgatgg

SEQ ID NO: 123278 - DNA, 195 bp, Zea mays
  Clone ID: MRT4577_4390C.1
cttccgctcgcctgacgcagtcgtcgccgttcctggcgctgcgatccggcatggacgactgcttcaccctctaggcgagtaggcagaggtcgtgctgggggaatggctgactattccgcagatgaatttgttatatttgttctgtatattgtaactcagagaaagttcgaagcgaacggaaacagtaggatttat

SEQ ID NO: 123279 - DNA, 236 bp, Zea mays
  Clone ID: MRT4577_43910C.1
caaaacatagtaattcattgaatggcactggacagttgaattgaatggcacgttttttgaatgaaactacaccaacagcatatttcggtgccacttggatgcgaatggcctgtatgatggtcacttcacgggggggggggggtctgggtttgtccgtgctcagggcgacgcagacggctccttggacaggctgtggcggtcgaaggctgctttcttgcgcggggtttttcctgtag

SEQ ID NO: 123280 - DNA, 512 bp, Zea mays
  Clone ID: MRT4577_43911C.1
gggggggggttttttttttttttttttttttttttttttttttttttttttttttttttttttttattttttttcttttcttttttctttttttttttccccttttaaaaaaagagaaaaaaaaaaaaaaaccaacaaccaaaccggggggggggggggggccccccacaacaaccagacccacccgcgggcacaacagggagcagaacaaaaccccgggccaatcacagtaccaacctcctgccgggaaaaaatcccaaccggaaacaacgggaaaaaaaaaagggggaccgaacaaaaagaaaaagcccggggcccacaaacaaaggaaccgaccgaaaaacaggggggccacccggccggccgacccgaacaaaaaaaaccaaaacgaccaaccagaaaaaaaaaacccggaaaccggaagaaaaaccaggcagacgaacaaccacaaagggcggaccaccggcaaccaaagagaggggaacaacaagccccccaaacagcgtcgcccc

SEQ ID NO: 123281 - DNA, 179 bp, Zea mays
  Clone ID: MRT4577_43912C.1
cacgaatcactcttttatactttaaaaaaaaacccccctgatgcaggggttaatcaaagggaaaaaagttcaacaaacgatgtgacatcgcaacattgttttgtataagcctacacaatatcccgtttccatacaaaacacttttcatggggggggaacaagacatcttgttggtataa

SEQ ID NO: 123282 - DNA, 453 bp, Zea mays
  Clone ID: MRT4577_43913C.1
aaataaaaaaaaaaatttataaaaaggctgataatttttttgaaaaaaaaaaaaaaaaacacgggcatgggatagaaattaaaaaattctttagggtcccctaaatgggaggccccttgtctgcttccccctacatccaacctgttaaactctctttttgggcccccttaattcaacttactgcccattcttttacacgccagttgacgtaaaaacccctgggaaacccccgtttatccctcctaaaattaattccctttaaatcggctctcggaattcccctgtggcccccccattaccccctcctatacatttgtccacctttattggttctttggtcgcgccttgtacccccccattaatcccccataaatcgtgtgtttccttttagttaccccttttccttcccttccttttactctcctttttattcttttttttttttctttttcc

SEQ ID NO: 123283 - DNA, 900 bp, Zea mays
  Clone ID: MRT4577_43914C.1
accggttgccacacccggcccagcacaggcgtagggtttattggcatctgtctcctgacgcgccggccgcaccacagcgcagaagaacacagcacccgcctgcctcgccgccgcaatggccgccgccgcctccgctgcgagatccttcctccggtccagcggctcatcgtctctccgcagcgcggcggccagagccgcctcgcgtgcgggaccgggaccggctccgctgccgaggcggatgcccacctctgccccccgtgtactcctaaggtcgccggtggaaatgagcagcgtgtgtctggagtccttgatgcccatgcacagcgccacggcttcggcgctcatgacgtcgcttctcgccgccccggcttgcaagggattcggttggctatcagaaggtcaagctgaaactagatgaacttcatgggacccaaaaggtgaacaatttttatagatcccaccaataatgactgttgatggctagattccatcactatttcacgcgtcggaatgatttgtggaaagaagagcccactatcttcatcttatggaacttgccttaaagtcatctattgactattgtgcacttgcacattagcatgtacaatatggaacaaaagaagtctgcattttcatgagccatacattgtattgagccacatatttttattgttccttttggaactgcaaaatgcacctagcgctgctgtgccacgattgttgtgccgtgtctaagattcccattgtcactttgagcgatcttttattgaagttctggaccttttggcaatatgagagatatctttcctgggtcgacttttgcctatggtttgctgaagtcgaactattgatgggtttacaaatagcgtttataaattcgaatacaacatcatcattaat

SEQ ID NO: 123284 - DNA, 457 bp, Zea mays
  unsure (1)..(457): unsure at all n locations
  Clone ID: MRT4577_43915C.1
ggggggaaattggcccccctttggggggggaagggccatgggtttaccaggggcaaaacaggttcggggccaaaaaaaaaaaaaactagttggggggtacagggggggggggggccctgccggaaaaaaggccggggcaacgcttaagggtcctttacaacacgcggggttttaggtttccaaaaaaaaaaacggggggggggggggggagaagcaggtatgctgatcccccccgttttaggggaaccgggggggggggaaccccttttttttgacggggccggcaagggggtcaaacaggttttggaacgggccccccccggggacaaccccctggaagaaataacccgggggggggagcatggggagcccgccgtttttgacccccttgggctggagctcattcaattccttttngggcttgccaaaccccaacgggttaaaaaggggccccccc

SEQ ID NO: 123285 - DNA, 265 bp, Zea mays
  Clone ID: MRT4577_43916C.1
ttttattttttacattttctcttccactccgggggggggatattttaatcaaaataatgaaaattcctcaggaaacacctgggggaattgagggcactattgtcgtgtacatctcaaatgtaatttaaaagatggcacctccaaaaacaggattgttgcaagggagggttcataaaagagaactggttggatggcaacaaatgaaggggctgccgacggaagggaggcaccaatgggttagccactgccaaaggataaacaaact

SEQ ID NO: 123286 - DNA, 352 bp, Zea mays
  Clone ID: MRT4577_43917C.1
gcaccataaccattaattcttttttttttttataaataaactttttttcacacaaaggaaaaaaatttttttcccacccattaacatttaacccccacattttgggagtctcccaaccaggtggccgggggggaaaaaaaaaaaaaattttttttttacaaaaaaagtttatggggggcccaacccagggcctttaccaagtggaccccgcgttccccatttttcccccactaaaaaaaacttcttaaccgccttcggccccaatttggaagcccccccacgtaaggacccccgtcgtgttctaacccccccccatattaaaaaaaccctttttaggccaaaggaccccccc

SEQ ID NO: 123287 - DNA, 318 bp, Zea mays
  unsure (1)..(318): unsure at all n locations
  Clone ID: MRT4577_43918C.1
tttatattttttttggtnggccccttatttattaagggaacgtcaaataacattgagcgaacacggttacaaagcgataattcaaaacatttgagacaacaacgacaaaacatgaatctggtctccccacacctgtcatatccaagggcgcgtacacacactcatgataaactataatgtaaggacatacttgcttgcccttaaaagtacgccccagccttgaggaacccggcttcgtgacagccaatatggtaatgcatatgcatgcaaaagacaactgacaggccaagggggcgaacttcatagcacacaacggcc

SEQ ID NO: 123288 - DNA, 455 bp, Zea mays
  Clone ID: MRT4577_43919C.1
gcccgacgggctcgccattgaacggccggaccccatcctatttatctatcaggtcgtgtccataaaagttctggcttgtaccatcagagaattgataaaacactaacgctgttataaagagcaatgtaaaccccgaattggcgtgacctctgaacatcacctaccttaggtgaaaaaccttcgcccactgtttgaattatcatagcaagagctttatgtaagaccagaagctccataaggctgaatctatgactgtatctggtgggagatgattatcttttcctctggagatggataattcatccaccggcttttattgattagcaaattgttgctcagcgagttaactaactgaaattggctgatatgatgacactgttaggtagtctagatatcattatggcggaagttcgtcgttgatatgataatcgacaggcccgaagtagagactatgc

SEQ ID NO: 123289 - DNA, 822 bp, Zea mays
  Clone ID: MRT4577_4391C.1
gtatgtgtttgtgcgccaagtgctgaattcagatgattgatttggggatagctaagtatgcagtgggtgtaaattgttctagatctagcaatgaattgtcattaggaattttggattaagtgtcggccatccttattatttaattgtggatcggagctgtggcggcatttcaataggctctagaggagggtaaaaagaaaaccacccagacaaaatgagttgaaaagttccttcgtcattctccactgctaattactctactgttcaaggatatgataccagtagtatggatatatacattagagaatgtctttttagagcaaggcccgtttccctggcctgggtggtctctgactctctgtcatagccatgcgcgacaaaaggtggtctagtgttttaccaagtgctcagggtaacgggtaaccgtgtcttctgtacatgatggccatcatgcgcttgtcttgggggcccatcgcttttagcattcagatgtcgtcagattcttgtgtctacagtcctgttgccttggagtgaaaggcaattcattgttgcagtgtcgttaacagcaggtttctggactctcttgttccaatgctgcgcaccctcactgcaatgctctgaagtgccaatgagccttcttttcatttccaaattagaatgcaaactactacattatcttattataagctatgctgctacacaaacgataatttcgtgcctttttttgcttcaacttcatggggcaagtttgggttttctcttacagaggataccctcagggctgcatggaagatgccctttgtatggactaactactatttc

SEQ ID NO: 123290 - DNA, 2559 bp, Zea mays
  Clone ID: MRT4577_43920C.1
tgcctttttgcgccttcgtggatttattggagatcaagaaataactgatgacataaagatgcaatttgtggatgaagatatagaactaggggagctcgaacaatttgaggggtgccttagttgggctaccaggaatcacagggcttttgacagagcaaaaaaaaaggttgacaatagccgtggagctcgttggcaatccatcaatcatatttatggatgaaccaacatcaggacttgatgcaagagctgcggcaattgtcatgagaaccgtgcgaaacacagttgacaccggacggacagttgtttgcacaatccatcagccaagcattgacatctttgaggcttttgatgagttgctattgttaaaaagaggaggccaggtgatctactctgggaaattgggtcgcaactcccagaaaatggttgagtattttgaggcaattcctggagtgcctaaaattaaagataagtacaatcctgcaacgtggatgctggaggtcagttcagttgcagctgaagtgcgactaaagatggattttgctgagtactataaaacatcaattgtatgcaggcaaaacaaggtactggtgaaccagctgagggagaccagggcgcaggaacatcagatctttatttccctacagagtactcacaatccacagtaggacagttcaaagcctgcctctggaagcaatggctgacctattggcgcagcccggattacaaccttgttagattttccttcactttgttaggggccttgctgctcggctccattttctggaggataggcaccaacatgtaaattttcttactttcttcgtgtttggtcgctggtgccaaccttccaaatctgaaagtgttggtgtattctattgcaggggagattcaaccactctcaagatggttattggatcaatgtacactgctgtgatgtttgtcggcatcaacaattgttcaactgtgcagccaattgtttcaattgagaggacggtcttctacagagagagggctgctgggatgtactctgcaatgccatatgccattgctcaggttgtcatagagataccctatgtgtttgtccaggtaacaacgcagcgtacgcgggacgccatgatgagcttccaatggacagctgtcaagttcttctggttcttcttcatttcctacttctccttcctctacttcacctactatggcatgatggctgtctcaatctccccaaaccatgaggttgcatccatcttcgcagcagctttcttttctctcttcaatctcttctcgggcttcttcattccgagaccgagaattcccggatggtggatctggtactactggatttgcccactggcatggacagtgtatgggctcatcgtgacacaatatggagacctggaagacctcatctcagtccctggagaaagtgagcagacgataagctactatgtaacacatcattttggataccacagggattttctgccggtcattgcgccggttctggtactctttgcagtattcttcgcgttcttgtacgcagtctgcatcaagaaactgaacttccagcaacgataagaacaagatatggcagcaaaagctcttgagagtttttttggaaaattgccgtgtatatagggtattttgcacatcgcgttctcctttcattttttgagtccctttaatacattgccgtgtatatagggtattctgcacatcgccaaatgtggtgaggtcttatacagatttctagccatttattgcaagagcaaaactatgatatttttccggatacacagaagagctacatattattatattaagaagagaggtctaacgtagacctgccacaagatataatcctctattggataagaggatataacactatcttcatctcctttacctatataaataggtctctttgtatcatgtaccacataatatctctttttcgtatctatgatcctaacatcctctttacagaggacgaaaacaaaacagagatatataaaaagcttcattaaaacaatgctaggctacatttaacctaacttaggcgaaatgcctgccaacccagaagcctcaacaagagacatatatttagtattgctgctaaccaaggctgcatatgaaggattgttcattgggtctgtccacttcagttactatgaaagagtttggaaaacttggcccccctccaaatgccgcttcttcctttggctcatggctctaaatatgtgttgtacagttgataggttggctaaaagagggttggaccacctagagatgtgtactttatgtgattatgattttgaaactttgtatcacattatggtttcctgtgttttcgcgagagaattttggttcttaatgctgcaccaatttaggttacatagacttgctcctaatcctggtacaaattcttttatgggatggtgggagaaggttgtcaaaagtaatggagatctggctatgaggggtctcagttcacttattgccttaggtgtctggattctctggaatcactggaatagaatcgtctttgatggattatctcct

SEQ ID NO: 123291 - DNA, 376 bp, Zea mays
  Clone ID: MRT4577_43921C.1
aagcaaagtactaacatggccataaagggctgaagagccatcgagactcattgaatggcaaagttaagaacacgtattacgtatctcatgtacccgccaggggctgcatcagaaatggcatatatgcataactatcgcacaagatctgtctatggtcgccaatatgtacacaggagcttaggagaaataggtttgattagtatgaatatgatgtagccaaaggtgaccagagcgagagtgcgtatgcaatatcaatcatggactagctagtaatgaaccctgtcaattgtacggagatggatagagagatggagtggcgatatgagtgctatgcgatgcgcaaacgaagtgacactatcgctgcatgctggctctg

SEQ ID NO: 123292 - DNA, 419 bp, Zea mays
  Clone ID: MRT4577_43922C.1
tcccgtgttcaaccaacccttccgaactatttctaaatcaccagcgtccccctttttttttcatttgattcaaacatttagcactgatagtcttcaacattcaatgattacatcaatgccatccatatatagattgcttgcacaaatctaactaagttcatttctactcaacgaccacttgccaatacaattgatgatttttgtcaaatagtatattagaaccactatcctgtaattgttattctcaccaaatttgatagtcttaactgtcattagtatctaccattgagcaatgtacatactatttttacaaaatttaccattaagatcacaaagttcacaaaagatgatccattatagattcatttgtgaatacattctacactatgagtcacattaaatgcgatctcttcttcaca

SEQ ID NO: 123293 - DNA, 359 bp, Zea mays
  Clone ID: MRT4577_43923C.1
agtaacaggtaacggtgggaccattactacaaaaccctgtcaagtcatggattcacaacctacacgataacgagaacgaaaaaaatgtatttaacaaaccggtttatataaaacagagggacatgcctttataaacacgcatttgtataatgcagtaggcgctaacttatgcaaaaaaaaggctaccttattggaacaccgttgctgcatttcacaagaatgtttggttaaggggcattaaaacaagcaaacggtctggcaatctcctgtttcccatcacccggtgccatggggatcactcaagcagtcagggtttttttgccggttgcccacaatctggggaaaaatttttttaccct

SEQ ID NO: 123294 - DNA, 848 bp, Zea mays
  unsure (1)..(848): unsure at all n locations
  Clone ID: MRT4577_43924C.1
cggtaccggaccctcccgggggaatgaatcgcccggngggcatgagnacagtcaggggacgaatcgaccggtgngnaaccagtatgcggcaggggaggaatcgtctccgtcgtgccgccatcttctccactaagttgacgccggtcgctagtcgccgctctcgacgtcccccctcctccgtcgtccactgccttggcactacaccagtgtcgtccgccgcatcatcgttcctgcttcgccgcatactcgccgcgccgtcgccgacaaggaccatccgggctgaggcctgctaaaatctccaccacttctctgactacttcgtcatctcctccacgttcgacatagatacaaatgtcttttcccccatcggagctgagtacatccgagtgtcctcactgataggattgttaatggcgtccggtcaaaaataagttagctataccatcctcaccctcggagctccgtacatgcgagtgtcctcgctgttagggtccacatgtacggatgtctttttccttatcagagctccatacacctgctcgaaattggcttcatcaacttcaacatatttactcaagggaaaaaaggctgcttgattaagagtaaagaagaagacgaagaaagcgaagaaatgagaaaaggctgaagcttaggtgaaccattaggccgaagggactttcgcattttggaatgaacacttatgcagttaaactactgcttattgtaatatagcattttactctttgtagtgttttcccttttttactctaaatgcttttgttgtgtgtgaaaccaagtatttctagtattttgaggcgaaggcgaaaaacaccttgcttcttttcact

SEQ ID NO: 123295 - DNA, 284 bp, Zea mays
  Clone ID: MRT4577_43925C.1
gggaaaggaactttttatttttttgggctcaaacaaaccagaaacacttttaacaagaaaaacgtttccaatttcagcactgtgacaggattattaccggattgttgggccagtggttaatttgctgcttggatgggcaaaaaaacgggacaagttttgatacatagcattatatttatgggggagatggaatattgcagaaaaaatttttggaacaagaggtcgaattgaaattttgttttaagacggcctcaactttatttttaaaacgctttttgaaaatt

SEQ ID NO: 123296 - DNA, 665 bp, Zea mays
  Clone ID: MRT4577_43926C.1
cacactcttttagaccaaaagaggcaggacgatttgcgcattgttgggtgtgaaaccttgtttgattttactgtcaatcaggtggatggtacatatcagttcaatttggaagggctggtcccaagactgtgtgaaatagcccaagaagtaggagaagatgaaagggcaagtgccctacgaattatatcatgtagttttcttgttgagcaggtctggtttatgggggagctttctcatatctcatcagagtttgacaatgttgttcaagttgtgctggaaaactacaaaccttagaagatgcaaaatgatgatcagggtaccaatgatgctgacagccagttggtgcaggaagaccagaaggctgagcaccccccttcccctttcattatcactccggccccctcttgggagagcatagttaatgccaagggaggaatcaacctaccagaggaagatgctagagatcccaaattttggtccagaatctgtgtgcacaatatggccaagctttctagggaggcaaccacattccgccgcatcttggaatgtcagttattgagtccctctctttggatataaaagaaggtcataccttggagcactttcatggaatttgatggccactgttgcggatgataaatatagcgcaacaacctattattttt

SEQ ID NO: 123297 - DNA, 264 bp, Zea mays
  unsure (1)..(264): unsure at all n locations
  Clone ID: MRT4577_43928C.1
tggaanaaccgggccgacccacgcgtgcgcaaggcacaagccacccatttgtttacaggttccggagctaccgacaaccactgggccaggggcggcgtttccatccttgccgagctcctcgagccggaaccttgccatctcacgcagcggtacatatggcagaacattaatattcccaccaggggcggtgctagtggaaagcactaggtaggggacgaatactatgaggactacgcggccgacttctacgactttgaatccaac

SEQ ID NO: 123298 - DNA, 312 bp, Zea mays
  Clone ID: MRT4577_43929C.1
ataaaatatttttgaaaaaaaaacagggatattgggcagccttactaaactagccattttttacacttggggggtaaccagctaaaaaaggggggccggaatttaaaaaagcttcattaaaattccgaccactgtttgggggaacaaaaaacaattccagattttcaaatttacttttcaggatccagggttgtccaaatttttggttgtcatgcaattaaacagcccaggggttaaacgtttaccccgggggccgcaaagttttaactgattaaagcatttatgggcagttaatattgttttaaccttttt

SEQ ID NO: 123299 - DNA, 615 bp, Zea mays
  Clone ID: MRT4577_4392C.1
gggtgcttcccgatctacctgacgctgtaccagacctccagcgccggcgactacgaccagtacggctgcctgaagcgcttcaacgcgctgtcggcgcagcacaactcgctgctgcaggccaaggtgtcgagcctgcagagcaagtaccccggcgcgcgggtcatgtacgccgacttctacagccacgtgtacgacatggtgaagagccccggcagctacgggttcagcaccaacctcagggcctgctgcggcgccggcggcggcaagtacaactaccagaacggcgcgcggtgcggcatgcccggcgcgtacgcgtgctccgacccggcgtcgtcgctcagctgggacggcatccacctgaccgaggcggcgtacaggaagatcgccgacggctgggtcagcggggcctactgccacccggccatctcggcctagaggctggcactgggagtcgggggctggttggtggttcgctggcccctcaagttaggggaggggaatcggattaattgtaatttttttagctggaatcgaagcaggcaagaagacgatggaggtggtctgcaagaaataatcaattatataagcagtaaaaaaaaaaaaaaaaaagcggcc

SEQ ID NO: 123300 - DNA, 574 bp, Zea mays
  Clone ID: MRT4577_43930C.1
gccggccgggtccggatacgaaatcccaatctccggctgcatcgacccagatctagcgtacggatatgccatctcagcgacgccacaatgtctcgacgctatgacagtgatataacgatcttgtcggctgatgtccgtctctaccaggagtagtacgcgatgcaggacatcggcaatcccgggtctctcctccttatcctggcgggcgacgttgtatgcctagtctcggccagagaaaggtgaactctctaggtcctccaaacctcccgctccgccgagaagatgtacgatatctactctctcgacctgtcgtgggatgtgtaagccatcatgatttcacaagatttctgcgtcactaccgcacgacgtccctatctagggtatacgatgtcctacctccatctgatcgctgtcaatttcctgatactgaccctctgcataacctgacaatggtacgcgctcttctgcgacctttttgcctctgtggtttccctaggtattccgcgctttggatgaggacatcgcttgcatgttctgcatgaacgagccatctgtgaactatggggaggggaat

SEQ ID NO: 123301 - DNA, 125 bp, Zea mays
  Clone ID: MRT4577_43931C.1
aaaagcatacaccccttatattgattttttctcaaatacacatagtccgatgagaacatttgaacctgtatgtcagataaggaacgtctattgactttgtaatgagctgagcccttactcttgtg

SEQ ID NO: 123302 - DNA, 345 bp, Zea mays
  Clone ID: MRT4577_43932C.1
actcctatgggcgattgggttcctcgaggccggcccgaccgagcaccgtctcggcgctgcctgcttcttcgtgcccttgctcgctgacgcaggcgaggtggccgacagcgtcacactagcaaccgtgcccgtgtggtgtgggtgtggcatgccaaacaagtgcgccctttcaccagaccagagtgttagactacccgtctagggtttgtgttattctctgtgtaatgaccgttatacccctgtgtaatgggccttggctcagttactctctctatttaatatcactccaacccctgattggggtatgggttcctatttaaaaaaaaaaaaaaaaaatttgcggcc

SEQ ID NO: 123303 - DNA, 207 bp, Zea mays
  Clone ID: MRT4577_43933C.1
acgtctgctattaacacaccgtgctcgagagctggcttcctatgactatgctctcttggcgaggtctctcacagatgttcaggttgcccctcctagatctcgtttgccaccaagagctgctcgctctgcaggtaagatgtctgttgtacgctcagttctgcattatgctcctatatacagacgatgagccctcggaaatatcctgga

SEQ ID NO: 123304 - DNA, 324 bp, Zea mays
  Clone ID: MRT4577_43934C.1
aagctgttgtgccagttttgatttatttgcagtgacatgccatcatggacctgtgtgtacaccggtttttgttttctgcttattgcgttttttagctttccccggcctcggtgggtggggggggggcgggggcttccttggggtggccccgagggggtttgttgctttgcgctggaggttcgcttccttgggggccgccgattggggggcaccttggggggtcggtctgggtcgcccctcctggctgtggccgcccttgcgcctgcccgggcggcgggtggaacgggcgaattctcgcggtggggctcgccctgggggtcgctc

SEQ ID NO: 123305 - DNA, 289 bp, Zea mays
  Clone ID: MRT4577_43935C.1
aaaaaacaatcaataaaaaaataatttaaaattgaaggcctaaaggaaacaaacacccccaataaaattataaaacaatgccattaaaggcttaatgcccaaaaaaaaaaaccctgaaagttacgggtccaaaaaaaaaaaaaaaaaagcgcaaaagcgataaccagaaaaaaacccaaaaaaaaacacgaaaagccaacaaaatctcaaattaaatctcgccttttaagtttccttggggaagcctcctgaaaatttagctgaaggccacgccatttcgttaacttga

SEQ ID NO: 123306 - DNA, 291 bp, Zea mays
  Clone ID: MRT4577_43936C.1
cccactcgtccgcccacgcgtccgtttggaactaaaaaaaaaaaaaaaaaaaaaggaaaaaaaaaaaataaaaaaaaaaaaaaaaaaaaaaaaaaaaaatataggactaacccatctcaatgtatcctaacttacatacacatcattgcggatccctttttatcgtttcaattttccttacatctaatctactactccgtagtttttcttcgtcgtgactgtaaaaaccttaactttccccatcttaataaccttttaactgatacaactttggctaatctgaacttattc

SEQ ID NO: 123307 - DNA, 3500 bp, Zea mays
  unsure (1)..(3500): unsure at all n locations
  Clone ID: MRT4577_43937C.1
gttttcccagtgtctgacaaagtaaagaaagaaagcatgttaactctcctcgtctctttaatgcacaaatacaaagaagagactgatggcaccttttctggatccaagtactgtaatatgccatctctaatcgaaatcttattaaagaagttcgggaaaaaaaaaaaaaaaaaaaaaaaaaaaaaaaaaaaaaaaaaaaaaaaaaaaaaaaaaaaaaaaaaaaaaaaaaaaaaaaaaaaagccacgcgtccgcttacattgagacaaatggcaccacatatagtgccttctacacctgatcataccagtattaaagaaggcccaggatcttcttcagattctatggaaaagaaagcaaaagcacgccaacgccaagctgcaattatggcaaaatgagggcagagcagtccaagtttgctcaaagtatgaagtcatcagaaaacgaggggcatgacattactatgttggaggccgatgtgtccagttcaactggggttgtgtctgaggagtcactaccagtttgctctctgtgccgggactcagattccaaaagccctctgtgctacttaattcttcttcagaaatctcggcttgcaacctttgttgagatgggtaatccatcctgggaaaatccagctcaagttaacaagactggatcagtcaaaagggaaggctcagtcgattgttgtgtctctggttcttcaacttctgaggagcttgtcaatgatacaacagtggagccatcatttgatatagacaacatggaagttgatgcctttcttgatttttctaatgagcaacatccactgattagatatatatcatctttcccaactgggcatagcaacatcaatgcagatgaaaatgtatcgcttgaggcaattgaggctgacatttacaattctattttaaatgatctatttggatccagaaatgcacatattcaggatagtgaccaaatgttgccatcaaacacttcaaacatcacaattgataccaagagaactagaagccccaagcgctcagtgctgggaacatatgttagttgtctttcatcaaaacaccgccattcttctctatatgatgtagcctcaaaatcttctgcctctgtaactacaagaaacagatttggtcccgtcgattgtgatggcatccatatatcttcttgcggacatgctgtgcatcaggaatgtcatgaccgatatttgttctccttgaaacaaagatatgtccggagacttggttttgaaggtggtcatatagttgatcctgatttgggagaattgctttgtccagtatgtcgcagatttgcaaattccattctcccagcatcacctgatttctcgggtaaaacatcaatgatgctgagaccatttgttcaaaccttgacacctcaagttgttacaaccacatcagatgtgaatagaaattgcttacagttcgctcgcgcactatctctttttgaaagtgctggaaaaatcgttggagaaaccaagtttttaaaagctatatctgggaagcttaatgaaactacaaatccagccctcgatccttgtcttcgaagattggctatgctttactatcctcgcagtcacagcagtttttcaccatctaagaggctcaacccatccttatttctctgggatacactaagatactctctggtatctacagaaattgcttctcgtggtaggatgtcaagccactctgctgaatcgaagtcctgcttggagtctttgcgtggcgaacttaattcatcaagtgggttcatattgtctctcctgttccatgctgcccactctgcacggaatttgaatcgtctcgaggttcttctgaggtttgaaggtatccaactattagcaggctctatttgctcttgtatttcgggttataaagacattctgaatgccactaagcgaaaaggctctttgccatcgatggttgatccagccagtgagggggccctctttcctgatgtacaattttggaaacaatgtgctgatccagttcttgctcaagatccattttcttctttgatgtcagcacttttctgtctgcccgttcagtttctgtcatctgctgaattcttcatcccttttgtccatctgttctatgttgtttgtgccattcaggccctggtaacatgctacggagaggaaacttttgatcgatcaaacttcaatgactgccttcttaatgatgtttgcaagacaatgtcaggatatgatatcgccagagactattttgtatccaaatatatcgatccctcttgtcatccaaaagacatggtccgcagattaacatatccatatcttcggagatgtgcattgctttgggagctgctaagatcttctgccacatcacccttgtatgacggttccaatatttgggaaggatcacatctttacttgagtaatagcacacaagacgacagttcttcactggcaatggaactggccgggttacgagaattggaagacctgtttcagattcagtcgctggatctgattctccaagatgaatctgtacatatgcttgccttaaaatggtctcaacatttctgtgaagagtacaatccccgtaaatatagaggcactctcttttctacccctgcagttccatttaggctgatgcaactaccagatgtgtaccaggttctcctagaaagatatatcaagatgcaatgccctgattgtggctcagtgcctgatgaaccggcactatgtttgctatgtggcaaactatgttcgcctagttggaaaccatgctgcaggactgggaaatgccagaatcatgcattgcaatgtggtgctggtattggcatatttcttctagtgaggaaaacaacaatcctgttgcagcgatctgctcgtctaacattttggccgtctctataccttgatgcttttggagaggaggataatgaaatgcacagaggaaaacctttatatctaagtcaagaaagatacacatccctgacgtatctggtggcatctcatagccttgaccgaacttctgaagttcttcggcaaacaacgattggcttttatggatctgattgagcccatttttcaaggaacaatgtgttcaaaggatcttgcggatgtgcatatttttgggaactgtactgcaacttggtgtttgatcttctccggtggtaacgagagcgttacctcaaccaaggtggtgtagattctgcaggctcgccacccgtcgttgctctatggcgcactggccctctgctgccctcttgtgcctaatgtacagtctacattcttttctttctttattatggacggtgctcacaaaatggatgaccttggaagttgtaacgctgtacgatcgactgcatgatctgtatgcacagacatagcgtcggactggtgtagtttgtcagtatgaaatgcaggcatcaggtgccatttcgtcgtcatttaatttcatttatttatttcccagcaaaaaaaaaaaaaaaaaaannnnnnnnnnnnnnnnnnnnn

SEQ ID NO: 123308 - DNA, 456 bp, Zea mays
  Clone ID: MRT4577_43938C.1
aggcatcatcctcccatggcgcgtacttcatgccaagctgcgcatattgtagctggcacgaggcatgaaatgcccgccctcatggcgtgccccgccgagttctggccatgcaagcccttcgccggagctaggatctcggggtctctgcacatgaccatttacaccgccgtcctaatggagaccctcaccgcgctcggcgcctaagtacgatgctgctcctgcaacatcttctgcacgcaggaacacgccggcggcgctatcgcgcgcaactcaaccgccgcgttctcttgaaagggggagacccttgaggagtactgaaggtgcaccgagcgctgactcgaatggggcgaggcgggcggcctccaatctcttcacccactacggccggcgaaaccactctgctcatcctactagagtgactagccgaggcacgattaccagcaagaccggcaagat

SEQ ID NO: 123309 - DNA, 319 bp, Zea mays
  unsure (1)..(319): unsure at all n locations
  Clone ID: MRT4577_43939C.1
acctttacaaagtttatgacttacctccatntactgagccccaacatacttcctttgcgacagctcaaacatcctaccattaagtacctgtacaaagcttatatcttccatacaatcagtaaaaatatctcgccatactgtgcacagtatcatatcaactttaactgaagtattcaatccacaccaataaaacacaatgaattcgtccacagtacaatagctacaactcttataccgataaaatttccaaacttttatgactcaaagagtacatattgaaagagcctgcaatcgtttcacagaacaacaagctactatg

SEQ ID NO: 123310 - DNA, 1444 bp, Zea mays
  Clone ID: MRT4577_4393C.1
gtgacgaggtgggctgatgccgcaacagctaagtcccaacctacgccattaacgtcctctatataagcaagcagcgaacctctgcaaacatggtcatcagcgaagcacaaagcgcagatcgtcgatctagcgagctcggagtcggagcacgcctagacaccagcagaaagaagcaatggcggctcggcggctcctcgtcgcgttccttgccttgtgctctggtttctcggccgtccacgggcagaagttcaacgccatcttcagcttcggcgactccatgtccgacaccggcaacctgtgcgtgaacggtccccccgccggcctgacgctcacccagccgccctacggcgagaccttcttcggccgcgccacctgccgctgctccgacggccgcctcgtcgtcgacttcctggccgagaagttcgggctgcccttgctgaagccgtcgaagcagggcggcgcgaacttcaagcagggcgccaacatggcgatcatcggcgcgaccaccatggattctggcttcttccagtcgctgggcatcgccggcaagatctggaacaacgggcccctcaacacccagatccaatggttccagcagctgatgccgtccatctgcggttcaaggcaggcctgcaagtcgtacctgtccaagtccctgttcgtgctgggcgagttcggcggcaacgactacaacgcgcagctcttcggcggctactccccggagcaggcgagcaggcagagcagcaccatcgtggacgccatcgggcggggcgtggagcagctcatccgcctgggcgcgacgcacgtggtggtccccggcgtgctgcccgtgggctgcttcccgatctacctcacgctgtaccggacctccaacgccggcgactacgaccggcacggctgcctgaggcgcttcaacgcgctgtccgcgcggcacaacgcgctgctgcagcgcaaggtgtcgggcctgcggggcaggtaccccggcgcgcggatcatgtacgccgacttctacgcccacgtctacgacatggtcaggaggcccgccagctacgggttcagcgcgaacctcagggcgtgctgcggcgccggcggcggcaagtacaactaccagaacggcgcgcgctgcggcatgcccggcgcgcacgcgtgctccaacccgtcgtcgtcgctcagctgggacggcatccacctgaccgaggcggcgtacaggaagatcgccgacggctgggtcagcggggcctactgccacccgcccatctcggcgtaatggtttgtttaggccttattcgtttgtttgtaagtgggattgaagtggattaaatcatctagaatccaagcaagatgatggaggtgataagcaaaaataatcgattatacgccgtgtagcttcaatgcacccagttttatgtgcaatgaaatgatgggacaaaccttctggcagacc

SEQ ID NO: 123311 - DNA, 560 bp, Zea mays
  Clone ID: MRT4577_43940C.1
gggggggtggggggttaggaaatagaggagggattaaggcattaaagaataagccgaccggtgcatacgatgacgtatcgggcttcgaactgcccccggaggttcaggataataccaaggagccagatctcctagaggaggttgtattatgtgtatgtggcataaaaagaaagagagtcatccataacgtgctcactagacggtccaatactatgttgtacggtggcatcccccccatagcttctacaactagtgcaagcatagttcccccacaagctggctccttgctgcccgcacggctgtcagtggtcttcttcgggtggttgtcacatctggcatcggcctattccacgtcttctgctgtgtgctaattggttgtgcaaatgtacttgttagtgccctatccgaggtccggagggtttctgtacttgttggggggctggcttgcacttgtctgcatggcctactgtgactcctaggtataagggctgcatttgttgctgttctaattactaatgctgccagtttatgtgccttttgcggtctcgttagtttgtaag

SEQ ID NO: 123312 - DNA, 176 bp, Zea mays
  Clone ID: MRT4577_43941C.1
gtggatcttactagaacgaaggccgcccttttttcttgttgagacaagacaaccgttgctactgagaagaaggacctaagcctttactaacactgccttctatctgagcatgggcttgagctcttgtacagatgtaatgaacctcgaacttattttacacacagggtgacatttta

SEQ ID NO: 123313 - DNA, 847 bp, Zea mays
  unsure (1)..(847): unsure at all n locations
  Clone ID: MRT4577_43942C.1
tttatttttccggctttgtatatattgtatataagtaataacttggtacgaagtcaatatctttccttgattgcatataagtctagtatgtcaaaaatattttcaaagtagttacgaatacaatggttatctaggatatgatatagatgacaaatgacaatattctcatgggattgctaaacctaattcgaggcaagactataaatgtcacagtcatgtcggtgaccctcctgtgaccgcattgagcagtcttggcagtggtggcataccgagatcagagaggccctcaagaaactgcaccacctcggccatggtcggtcgagcagactcgttttcctgaatgcaccaacacgcagccttgcatactctttcaacctccttgaggttcacatcgccctgcagcttttcatccaccagactctcaacgtgtccactgcgaagcttgcgtgcaacctgcatagggaaaaaacttgagtaatcgccatccccaaagtactctggactcgaattcttccttcccgatatgacttcaaacaaaaccatcccatagctgtacacatcgactttagatgtaacggctgtcccactaatccattcaggcgcgaggtacccaatagtgcctctcattgtggtcaccgcatggctaaactctctccccaaaacctttgccattccaaaatctgcgatcttaggcacaaaagatgcgtcaaggagtatgttctctggcttgatgtcacagtgtatgatgcagtcccgacagctagtgtgcaagtaggtcagtcctcttgcaactccaatagcttgctggtacctgagattnccaatnccaaaactgcccacgcgnccg

SEQ ID NO: 123314 - DNA, 102 bp, Zea mays
  Clone ID: MRT4577_43943C.1
ctcgccgtactcgggtttattcctcgactcgcttccttcctcagcagtcctcgtctcgaattcgctcacggtgggagaaatcggagcgcgaggatgaccgta

SEQ ID NO: 123315 - DNA, 981 bp, Zea mays
  Clone ID: MRT4577_43944C.1
atggcccccggcgggttcaagctgttcggcaaggtcatcacgcagtgcgccgagagcgccccgccggcgccgccggaggctgctgccgcggcgtcgagggccacggccttcgcgcgggagagggacgacccggacgagcgcgaccagccgatggtgaagcgggaggcggcggcgtccgaccacgacttcgccgccgtggacaagcaccaccagcactccggcggcagcggcgggccgggaccgggaccggacgagagcgacgacagcaaagggcagcagcagcagcagcaccacccgcgcccgcggcatcatcagcatcaccatcagcagcagcaggacaccgtggaggcgcgcgccgcggcggccgcgtcctcggcgccgccgctgccgtgcccgcggtgccggagccggaacaccaagttctgctacttcaacaactacaacgtcaaccagccgcgccacttctgcaaggactgccaccgctactggacggcgggcggcgcgctgcgcaacgtccccgtgggcgccggccgacgcaagaaccggccgctcggccccgtcgtcgccggagccgtgcccgtgcccgtgcccgtgccggcgcaccaccaccaccaccacctgcaccccgctgctgctgctgctgcggcggcggcgggcttcgtcctcgggttccccggccagcagcacccttcgtcgccgacgtcgccgtcgccgtcgccggtctacgccgaccggtggcctaccagggacaggtcaaaaactcgaggtcagcgtgcgtgctcaactagtgccgacgaaggtgatgcgatcccatgctgtccagtccagtccttagctcgcatcccgggagtcgttggtgatcatcgcacgaccaaccccgcgttgtacattccttcctgggaaaaggtgacgacggacggagtgctgatgctctgcctctgcgcgcagatggagctcacggcattggcttcgcagcgctag

SEQ ID NO: 123316 - DNA, 382 bp, Zea mays
  Clone ID: MRT4577_43945C.1
cccacgcgtccgctcacacgtccgatggtaagtcaaaggatgatccaaatgccataccacgacacctatagcaatctacctgtaaagcgacatctacagcatctcgagctaacttcaaggcgatgcccaatgtgattcacgaggctaccaatgatgatacctaagatctctacgatggtacctggaggtcacgttggaggggtcattcggattcatatatgggagaggacatagatatcgctaaggaatgcactatgacttcagagttgttgacctgtagagaagcctccatactatcggacattctaatggatgatcgcaaggatcctcccaacgatgagccaggcatagtgaatggagtcctgaacgaagatatgaccaa

SEQ ID NO: 123317 - DNA, 229 bp, Zea mays
  Clone ID: MRT4577_43946C.1
aaaaaaggagcccccttttgctgctaactaaatttaatcttaagggggaaaagggcaaaaaaaacacgggaggggttgcaaaaaccaaataattattgggggccacgtccccatcctccgaaagggttctggaccttgaagggcaccttttcccccacccccccccggagctttttcaaaaaccttttgtagaaacccacccggtcctttgacccaaaagggaaatggc

SEQ ID NO: 123318 - DNA, 402 bp, Zea mays
  Clone ID: MRT4577_43947C.1
aaacctttctccctcctaacagcaacaacaatttcttccattcaaccaactatctacactgaaccctagctgcttatttgcagcaacaactattaccattcaaccaagctacttctgcctactctcatcaacaacaacttcttccatttaaccaataaaccaaactgaaccccgctgcttatttacagcagcaaatattactaccaatttaaccagcttagttgcagcaagccgtgcttccttcttgacacaacaacagatgctgcctttctaccagcaagttgcggattaccccgcatcccttttacaactacaacaattagagcccttatgtcaacttactttgacaaacccagcaagcctccttccaacatcacaatattggtggtgccctcttaaaat

SEQ ID NO: 123319 - DNA, 440 bp, Zea mays
  Clone ID: MRT4577_43948C.1
ccgtccgacgaaacccaatcctgcttcgatcccgtcggccggcgatggagggccggcggccgggcgcgcccgtggcgggcctgcccatcggcttccgcttccgccccaccgacgaggagctgctgctgcactacctccgccgcaaggcgctggcctgcccgctccccgccggcgtcatccccgacgccgacctcgcgcgcctccacccgtgggacctcctccccgccgccgcaccagggggatccggagccgacgccgacggggagcgcttcttcttccaccgcccggcgacgcagtgctggcgcaagggcggcggcgcggccagggcggccggcaccggcgtctggaggccgtccggcaaggagaccctcgtcctgtccccgcgctgcaagcgccccgtcggcaccaagcggacgctcgtattctgcccccgcccggcc

SEQ ID NO: 123320 - DNA, 1505 bp, Zea mays
  Clone ID: MRT4577_43949C.1
ccaagcgcgacggatcccaatccatcttctcctcatcccccaccacgaccaaaaaaaatccggtcgccgatgccgtctgctgcctgacatcggtcagccagggtagatcgcgcaggcaggcaggcagccccacacacatacgaaacccaatcctgcttcgatcccgtcggccggcgatggagggccggcggccgggcgcgcccgtggcgggcctgcccatcggcttccgcttccgccccaccgacgaggagctgctgctgcactacctccgccgcaaggcgctggcctgcccgctccccgccggcgtcatctccgacgccgacctcgcgcgcctccacccgtgggacctcctccccgccgccgccgccgcaccaggtaccgtgcctctccatcacacccctccccgcattgccgctcgcgtcccttacctgacgagcacgcgcgaccgaattggatccaaccctgcagggggatccggagccgacgccgacggggagcgcttcttcttccaccgcccggcgacgcggtgctggcgcaagggcggcggcgcggccagggcggccggcaccggcgtctggaggccgtccggcaaggagaccctcgtcctgtccccgcgctgcaagcgccccgtcggcaccaagcggacgctcgtattctgcccccgccgcggccgcgcccgcacccactgggccatgcacgagtaccgcctcctccccgccggcctccacccctatggctgcgccgccggcgccggcgccaacgcgcctccgcccactaatgtgagctcccacggcggcgacgcggcggccgactgggtggtctgccgcattttcaggagggccaggccggcccaccgcgcccgccttggtggtggcgccagggaggaactagaagaggagcacgcggcggaggagagcccgtcgtccccgtcgtcctgcgtcaccgacgcctccgagaccctcgaccaggaagaggatgacggcgacgaagggagcagcagcagcaccgtcgcctcctctaactgagactgagtagaagagttggctaccccctgtcgatcagatcgcgggcgccatgttctaattgccgtagaagcctcatcatcagtacctagttgcaatcaatagagagacaagaagatcggcctccaacaaaccaacaaaaaaaaagagctaagcgctttggtggtaaaaaaaaaaaaaaaaaaaaaaaaaaaaaaaaaaaaaaaaaaaaaaaaaaaaaaaaaaaaaaaaaaaaaaaaaaaaaaaaaaaaaaaaaaaaggggaaaaaaaaaaaaaaaaaaaaaaaaatgagaggggggaaaaaaaaaaaaaaagggggcccctggcccccaactttttgcccctttaagggggggtaattggccccttgggggaaaaaagggacaaagttttccccggggaaaaagggtatccctttaaaattcccacaaaaaatgcgaccggaaacaaaaaagggaaacactggggggcccaaaggggggg

SEQ ID NO: 123321 - DNA, 1090 bp, Zea mays
  Clone ID: MRT4577_4394C.1
gggcttgagcacgctctctgcagcttcaggctctgctcgtcagggtggaaggagaactcgagtgctcccgggctctcaacctccgcgctctgaaccgctggtacccgagcaagttacctgcggtcgccgccccctgggtgccaatttccacgacgccgccaggtgcgtgctcacgtccgttcagctgttcgagcgccgtcgatggggctggtgctgcagccgtcggcggtggcggctgagacactctgaggcacgggtgacgaacttctacatctctgacaggaactcgggcaagagattctacgttcgtgctggtgagagcgccttgatcactcctatgatcaaacagaaaacaatcagctttgacggcgacaagaaggacgcttcacaaaacttgaagagattgttggcaaccaacgagttgtcgtgcaatggagatttgactgttaaagaagggttaatcagagaaggggacacagcaagtgtgataggcatcctgaagaaacaccatgcctgtgacatcgtggatgcaccggccggtgtggtcaccaccggttgccagctgatccggtgcatgttccccgtcttcgttgaagggctcatactgatcggagatgaagaccctgacgaggctgtatatatggtctgaactatagatacatatacatgcatattcatacactaatgtactagaattcacgccctgctgtctatcacggaagaggagttttagtatcttccatgggtttctgataaaagggatttactacttacgtagctgatggagacggaatgatgtaaattaaagtggtatttgtaggttgtcagtagcttagctgtatttttttttgggtctctttacaagaggactgctcatttgtttgttggctaagacttgatgtttatgtgcccggtttcttttgaagtttggaatgatcagtttttgtttgttgcaactattgtattttcctgatttcaaacagggtggagccttttcattcttgcaaagtgtttgtcgctcggaacaatgctttctctaagaaagagtttctcaaaataaagaaaagtaaacaaaaaatatattttgaag

SEQ ID NO: 123322 - DNA, 559 bp, Zea mays
  Clone ID: MRT4577_43950C.1
aaaaaaaaaaaaaaaaaaaaaaaaaaaaaaaaaaaaaaaaaaaaaaaaaaaaaaaaaaaaaaaaaaaaaataaaaaaaaaaccaaaaataaaaaaaaataaaaaaaaatatctttttccctggggcccgcccccccccttagggggaattttttgcagttttccttccccttggaggggggcttaaaccttccttttagggggcccttttcccctttttggggggggttttaaatttcactggcctgggttttccaccgggtgaccgggaaaacccctggtgtccccaattttatttgccttggaccaattccccttttcaccggttgggttatttgcatttgggcccgccccgttctctttttcaaaattttgccccccctttttgggaattggcccccccttttaccggccctttaaccccgggggtggggggggttccccccagggggccccttccttttgccagccctttagcccctgtttttttggtttttttcctttctttttcccccacgtcgcccgtttttcccctttattttttaattggggggttcctt

SEQ ID NO: 123323 - DNA, 1423 bp, Zea mays
  Clone ID: MRT4577_43951C.1
ccggccggcgctcctcccacgacgacgagaatccccccatcccccaccaggccacaaaaaccaggtcgccgatgccgcctaccgtctgacatcgatcacccaggcagatcgcgcgcaagccacccaaacaaatccaaaaccgaatcctgatccgatcccgtcgatcggcggcggcggcgatggaggcccggcccggcgcgtggcgcctgcagcagcggggccccggcgcgcccgtcgcgggcctgcccatcggcttccgcttccgccccaccgacgaggagctgctgctgcactacctccgccgcaaggcgctggcctgcccgctcccggcgggcgtcatcccggacgccgacctcgcgcgcctcgacccgtcggacctcctcctccccgccgccgcaccacctgcggggggagccgccgacgacgccagcggggagcacttcttcttccaccgccttggtgacaggcaagaagaagaagaggaagaagaagaagaagagcacgcggcggtggagagcgcgtcgtccacgtcgtcgtgcgtcaccgacgcctccgggaccatcggccaggacgatgacggcgacgaagggatcagtggcagctgcagcgtcgcctcctctaattgagaccgactagaagaaacaagagttggctagcccgcccgtcgaccaaatcacgggcgccgtgtcctaattgccgtagcaccctctcagtctcagtccctagtagcaatcaatagagagaagaagcttgagctccaacaaaccgacaacaacatcataaaaaggctaagcgctttgctgccatgttatgttgttgctggagctcgtcgcgaatccagagtgttaattagcgagaaaatcaatcagttcccttccagcaaaagaccgccatttcctgctgtgccaaggttctcccacaaacgcgttgctcgttcaaatcttcttcaatcttgctttgagaagcaaaacacagtctcacctcgtgccagcaccgcgtcgccgggcggtggaagaagaagtgctccccgctggcgtcgtcggcggctccccccgcaggtggtgcggcggcggggaggaggaggtccgacgggtcgaggcgcgcgaggtcggcgtccgggatgacgcccgccgggagcgggcaggccagcgccttgcggcggaggtagtgcagcagcagctcctcgtcggtggggcggaagcggaagccgatgggcaggcccgcgacgggcgcgccggggccccgctgctgcaggcgccacgcgccgggccgggcctccatcgccgccgccgatcgacgggatcggatcaggattcggttttggatttgtttgggtggcttgcgcgcgatctgcctgggcgatcgatgtcagatggtaggcggcatcggcgacctgttttggcccgggggatctgaggaccgt

SEQ ID NO: 123324 - DNA, 315 bp, Zea mays
  Clone ID: MRT4577_43952C.1
cgggcgagccaggcgtgcggcgatgtcgtcgcctgctccaaccgtatgctcttccggatttccgggttacctgcgacgaccacgtggatggctactgccgcggggaatgtggctgttacgcgcgcacctaggatgagctcctctgcgccccgttggcaccagtgaccccaccttggaccacgccatggggttacgctctttcttcgcggtgtccctgggtgaggccgcggagtatggtcgctagcctccgtggtctccgtggtgtatagtcgctggtcacgcgtagtacctatggtcgctcatgcggctggccat

SEQ ID NO: 123325 - DNA, 205 bp, Zea mays
  Clone ID: MRT4577_43953C.1
acaagaatctccctagcagcagatcctcgtgcaagcaaagcgctagccatacctaactgtacccagatagacccgacacgaagacagaacggacgaggacagtaccaactggacggacaaggagaccaagagaagacagctggaccaccaaggcggcgcgcaagtctaacccggcgaccgaggagtgaagaaaccccaccgattc

SEQ ID NO: 123326 - DNA, 139 bp, Zea mays
  Clone ID: MRT4577_43954C.1
gcagcatcagatagcagacaccactccatcaccaaccgactccgtcggtgcgccaggcaaggatctgctgcctcatgactaactggcaccgatggcgacggcacgctcatgcctaatcaagcgaggcaatggcacactt

SEQ ID NO: 123327 - DNA, 875 bp, Zea mays
  Clone ID: MRT4577_43955C.1
gtccccagacatggcgccctgcgcgtccccgtccgccctcgcgctctccgccagcacgcgggtcagcatcctccggctcccgctggcgctgcggcagcgggcggaggcgcgcgtgcccggcgcccagttccgcccgtcgaccgcgtgctcctgggcgcgccccttgctgcccgagctcgcgggggcggtccctcgtgccggcgcccgcggcactggcaggaggacgcagccgctgttccggcctcgcgcattgacgacgacgtctcagattgccagctgcgccttcaccctgggcacggtcgccgtcctccccttctacaccctcatggtcgtcgcccccaacgccgacatcaccaaacgcaccgtggagagcggcgctccctacgtcgccctgggcctcctctacgcctacctgctctacctgtcctggacccccgacaccctgcgcgccatgttcgctagcaagtactggctccctgagttggcgggcatcgtgaggatgttcgcgagcgagatgaccgtcgcctccgcgtggatccacctcctagcagtcgacctcttcgcggcaaggcaggtgtaccacgacggcctcaggaacaacgtcgagaccaggcactctgtctcgctgtgcctgctcttctgcccggttgggatcctggctcatgtgctgaccaaggtactggcaggggcagttgcccgctcacactgatgattgcaattgggtggttgtattgtatctaggattcttccattgttaccatgtggagatgtggattgagcggaattgatagggtttaccgtttgattcaccaaatgtaacgtaaatgataagagtaacgattcacactcgaataccggtggtaataaatttaaat

SEQ ID NO: 123328 - DNA, 211 bp, Zea mays
  unsure (1)..(211): unsure at all n locations
  Clone ID: MRT4577_43956C.1
ggctttgcttggaacaccagaactcattgcgtggtttgaaaagattgcccgaggagctggagctggagctgctgctgctcatccgtggcgcacacacaaacttccggcccaaaatttcgctccacggatttctgngttccctccatggccgctcctctctttccctcctccatttttgatctcagaccctcggacagcttccctttttctt

SEQ ID NO: 123329 - DNA, 774 bp, Zea mays
  Clone ID: MRT4577_43957C.1
tggacttttcccccacctgtcctcccccgcgtctgcttctctcctcggccccgaggcatggcgccctgcgcgtccccgtccgccctcgcgctctccgccagcacgcgggtaggttcgccgttcgccagccccaacccaacagcggcgattttattcaccactgtcttgtatactctccctctcgtgtctgccgtgctgtgcagctggttgatttgctctgcctcggcctccgccttgctgcaggtcagcagcttcccactgacgctgcggctggaggcgcgtgtggcgcgcgcgcccggcagcgcccagctccgcccggcgaccgcgtgctcttggccgcgccccttgctgcccgagctcgcgccggcgttccctcgcgccggcgcccgcagcgccggcagaccgcagccgctgttccgaccacgcgcaatgatgacgacgtctcagatcgccagctgcgccttcaccgtgggcacggtcgccgtcctccccttctacacgctcatggtcgtcgcccccaacgccgacatcaccaaacgcacggtggagagcagcgccccctacgtcgccctaggcctcctctacgcctacctgctctacctgtcttggacccccgacacccttcgcgccatgttcgcgagcaagtactggctccccgagctgccgggcatcgtcaggatgttcgcgagcgagatgaccgtcgcctccgcgtggatccacctcctagcagtcgacctcttcgcggcgaggcaggtgtaccacgacggtgtcaag

SEQ ID NO: 123330 - DNA, 1047 bp, Zea mays
  Clone ID: MRT4577_43958C.1
ctgctcgcctgcctggtgcctgcttgacagcttgagcaggggtcagagcagctgctcggaggccggcctggccctgccctgggtgtgctcgccactgtcgcagagtgctcagtggaacccgcggcacaaactacaaagggacctgactcgaatggcagctcgtcacctttcccaccacctgtcctcccccgcgtctgcttctctcctcggccccgaggcatggcgccctgcgcgtccccgtccgccctcgcgctctccgccagcacgcgggtcagcagcttcccactgacgctgcggctggaggcgcgtgtggcgcgcgcgcccggcagcgcccagctccgcccggcgaccgcgtgctcttggccgcgccccttgctgcccgagctcgcgccggcgttccctcgcgccggcgcccgcagcgccggcagaccgcagccgctgttccgaccacgcgcaatgatgacgacgtctcagatcgccagctgcgccttcaccgtgggcacggtcgccgtcctccccttctacacgctcatggtcgtcgcccccaacgccgacatcaccaaacgcacggtggagagcagcgccccctacgtcgccctaggcctcctctacgcctacctgctctacctgtcttggacccccgacacccttcgcgccatgttcgcgagcaagtactggctccccgagctgccgggcatcgtcaggatgttcgcgagcgagatgaccgtcgcctccgcatggatccacctcctagcagtcgacctcttcgcggcgaggcaggtgtaccacgacggtgtcaagaacaacatcgagaccaggcattcggtctcgctgtgcctgctcttctgcccggtcgggatcctggctcatgtggtaaccaaggtattggcaggggcagctggtcgctcacattgatgattggaattgggttgttgtatctaggatttccgtttgtttagctggtggagtttatgagatctggatatgaataaagcttgttcaaggcaaaaaaaaaaaaaaaaaagcggccaaaaaaaaaaaaaaaaa

SEQ ID NO: 123331 - DNA, 314 bp, Zea mays
  Clone ID: MRT4577_43959C.1
aatgcccaaagacatccagatcgcgcgccttatatgctgagagcgtgcataggcggtacgaatgagacgcctactaactactgctggaggtgcttacttaagaaggacatggctactaaataggtgtgcatgtctgtcaatagtacccttgttgctataagctgaagctaacggaggattatgattagcagctctgggagatccgcaagtaccagaagagcgcgcggctgctgtacaggatgcaagcttaccaacgcgtgcatccgaagatatagcactactataagaccaacttaatctaacagagttgccgt

SEQ ID NO: 123332 - DNA, 716 bp, Zea mays
  Clone ID: MRT4577_4395C.1
gggtacctcgaggccggccggagactcctctattgctagtcgctgctgaggctccgttcagatccagtgccccagatgcagccgacgacgtggttgatgggctgaaaggtgaccccgaatctggctatggatgcggcggacactctcctgctctatctctcgttgctccatcggctggacccacccgcctaggacatcctcatctccgccgcacacgtcacggtatactacttctacttcgattgctactacggaagctcgtaatgacgtgcgaggggtctctgttctccattcagaataactcgcagcccagattccagttcattgccatgaacacgtactccacagataatctgttgttggatctctcaggatgactcgaatacaaagttcccactatatatttgttggaccagagtggatgattctaactaactgtaatttgggtttacaatcaacatgactgtgaagatgttgcctgctatttggaatgataatgaacgcctactccagagtacctccaacaccgaaagcgacttccacaaaaagggaattgaatcaactagaagaatgctcctacatgtgcttacatcatatggtctacctgaactgcagatgcgacgccgtggaagggctcctcatacgaggggtgaccaatcggatcgctacttaagggatggtacgacactatcaagaagatcctctccgccgatgac

SEQ ID NO: 123333 - DNA, 404 bp, Zea mays
  Clone ID: MRT4577_43960C.1
gtagaaaggcagggtactggctttgattctctggcctactagggagcttgcttactaaacagagagttatgccggctattggcgaccacctgaacgtccaagtgcatgcttgcattggtggaaagagtattgatgaggacatcaggaggctcgagaatggggtgcatgtcgtctcaggaactccaggcagagtcttgatatgatcaagaggaggactctgcgaacaagagccatcaagcttctagttctgttatgtcctagtgtccacatccttgtctctactacttttggctgcctaggtaagatgttacatccatatgacctttgtgatatcttttttgctatatgtacttttaccaggcaaacatgtgatctgatccgcggaggttgctcatcttgctgag

SEQ ID NO: 123334 - DNA, 181 bp, Zea mays
  Clone ID: MRT4577_43961C.1
tagtgagtcgtattaaaaagtacgactcattagagggagtcgtgttaagtggtaccacccagtagcgggacaccgacagaggtgtcggaggctctagaggcggggtgggacttgcctacgacctgcggctagagctgggggcatgtcgccaggtagaagacgcgcagtcggcgcgcggagg

SEQ ID NO: 123335 - DNA, 363 bp, Zea mays
  Clone ID: MRT4577_43962C.1
tttttttttcttttttttttttttttttttttttttttggtttgggtttaattttattttttgagaaaaaacccccaaaaaaaaaactttataaataatttgcggtaaataaacaaacaattgattcaatgaaaaaacccttactaccaaacaaaaataaaaaacaaaccaccaccaaaaaaaaaaaaaaaaccaaaaaaaaaaaaaaaattacaccctaaaaaacccttgtgcattccaaaagaaccccggagggcccaaaaaaaaaggtggtggccctgtatataatacccaatatgaaagacaaaaaaaccaaaaccaaatccactggcccaaccaaccaatacaaatggggggattacc

SEQ ID NO: 123336 - DNA, 423 bp, Zea mays
  Clone ID: MRT4577_43963C.1
cccacgcgtccggtcaccaaccaggattcatgtcacatgtgcgctcgtgcgcgaaacaacacccgctggaagggtacataagggagtttgctcaacttggattaaggtaacttattgatgttatgattttctttatgtgtttattgcctggctgatatatcaatgttttgatctctctgttctcatctggcaactgaagattatagagctgtctgttttcatataatcaatttttgaccatttaatatttgtttctgcaaaccatgcttacccctaacaattgccttggcatttggaaaagaatgtaactcttgctttacagcccctgcttcccaatttgtactttttaagtcagtccactagaacgattttcatggttgagctttacctgagttgcttggccatcccaattggatttgcaga

SEQ ID NO: 123337 - DNA, 516 bp, Zea mays
  Clone ID: MRT4577_43964C.1
gggataaaaaggagggggtctttcccgggccccggaaatcggggggggggggccccctccgggaggtgtgttccccattccctcccccccccctggggtttggcccggggggcccaattcccaaagcccggggggtataaagggggcccccctttgggggggaaaatccgcaaaggccggaaccttaccccccccccccagggggggggcaaaagcaggggcccttctccgtttttatggcccttttgcaggtcgggtaatttgatgcggggggggtttgcccccccccccccctctcaaaaatttcgggggttttaagcttccatagctcacccctggggcctagcaggggagcttccccccctctgggtttggggcctttatcccaattcgattgcattttttgcccttgcttaaaccggttttccagctgtttcccttcccccggaagggcccgggccctttggacaaacagggacccccattgggccccatgcccttttgaaactgcttttt

SEQ ID NO: 123338 - DNA, 443 bp, Zea mays
  Clone ID: MRT4577_43965C.1
acagaagccttgcaggaccagacaacacattatgggcattcaaccttcatcgtaacacagaatcgcatccttcggccactgagacgcacccagcctaagcatgatccccgtttgaaccacgctgaatacggcgacacctgcgaccaacataacttggacagactggatccttccgttcactacctccactccccgtacatgttcgcctttcacgcctcggggttatgaccagcgtattgctcaacgtcgccttgggctacactaccaccgatgtacactgcaccttcaccgtggtacatgggtacattacggcccccatcaccgacttcgacgaagcctcctgctccatggctcttgaacagtgcctcttttacaccgattactacaaacggcgagctacttgacgatactgaactttttggggctgaccattgcatcctgcg

SEQ ID NO: 123339 - DNA, 843 bp, Zea mays
  Clone ID: MRT4577_43966C.1
aggaccggtcactcggcagtcggcacgcaggctagcagcacagcagcagccagagccatcccctctcctcgctacgcttcgcttcctcggcgccgattcctcctcctcctcctccaccctcgtccgtcccgttccggcgcgcgagctcgcccgagatggcgaacgcgagatcgggtgtcgctgtgaacgatgagtgcatgctgaagtttggcgagctgcagtcgaagaggctgcaccgcttcataactttcaagatggacgacaagttcaaggagatagttgtggaccaggtcggggatcgcgctaccagctacgatgacttcacaaacagcctccctgagaatgactgccgatacgcgatctatgatttcgactttgttactgcagaggatgtccagaagagcaggatcttctatatcctatggtccccatcctccgccaaggtgaagagcaagatgctttatgcaagctcaaaccagaaattcaagagtggcctcaatggcattcaggttgaactccaggccacagatgcgagtgaaatcagcctcgatgagatcaaggatcgggcacgctaggcgcaccgcctactactgtggatttgtatgccattatagacttggtgctgcgaaagactgctttggtgatttgtgggtttgttgctgtgtaaaaagatcctcatggcttccagaagaccatgaaggtttggatctatcatgtaattccttgttatctgccaattatgtatggactatggacatgtgttgcgctgttcaactcactacaaataagtaatcgatatattccctaaaaaaaaaaataaaaaaaatttaataaataatataa

SEQ ID NO: 123340 - DNA, 1388 bp, Zea mays
  unsure (1)..(1388): unsure at all n locations
  Clone ID: MRT4577_43967C.1
cccgacgcgctctgcaggctcgccgggcctgccggccgactcgccaacctcacgctgtccggcaactacttcacctccgtcgggccggcgtgcgcggcgctgataaaagatggcgtgctgaacgtaaagagcaactgcattcctgggctcgccaaccagtggcgcccggaggagtgcgctgcattcatccagagtcggccaaagacttgcccggccgcggcaaccactgagacgacgtgccccgctccagctgccaatgatgcggtggcgcagggggtgaggaaggtcagggactacttcagctatgtgacgtacgctacactgcatgagtgagctgtgtcggcatgagtaggagacagtgcctcgatagtattttggctaattgttccagtactgtattcatgatgtgcacactgctctgtactactggtgtgcatgtgattgttgtacatttgctcttcacgtgtgttgctgtcacatctagatcatcatcatctgatcatttgtactgctacgtccatttaatgaaaaactattcttcatatttctgcaaaaaaaaaaaaaaattaactccgcagtccgcaggaccggtcactcggcagtcggcacgcaggctagcagcacagcagcagccagagccatcccctctcctcgctacgcttcgcttcctcggcgccgattcctcctcctcctcctccaccctcgtccgtcccgttccggcgcgcgagctcgcccgagatggcgaacgcgagatcgggtgtcgctgtgaacgatgagtgcatgctgaagtttggcgagctgcagtcgaagaggctgcaccgcttcataactttcaagatggacgacaagttcaaggagatagttgtggaccaggtcggggatcgcgctaccagctacgatgacttcacaacagcctccctgagaatgactgccgatacgcgatctatgatttcgactttgttactgcagaggatgtccagaagagcaggatcctctatatcctatggtccccatcctccgccaattcaagagtggcctcaatggcattcaggttgaactccaggccacagatgcgagtgaaatcagcctcgatgagatcaaggatcgggcacgctaggcgcaccgccatcgcgagtttcatgatcacgcatcatggactcgcctactactgtggatttgtatgccattatagacttggtgctgcgaaagactgctttggtgattntgtgggtttgttgctgtgtaaaaagatcctcatggcttccaaagaccatgnaaggtttggatctatcatgtaattccttgttatctgccaattatgtatggactatggacatgtgttgcgctgttcaactcactacnaataagtaatcgatatattccctaag

SEQ ID NO: 123341 - DNA, 1519 bp, Zea mays
  unsure (1)..(1519): unsure at all n locations
  Clone ID: MRT4577_43968C.1
tccttcgcgtccgcttgtttgttcgccctgtagcgtgtgaaatcgagctgtgtagatctaaggtctgcgaggtgcggtggcggtggaatctcggttgatctttgcctcagcggcgccagtgtagctcgtgtggctacagttcatctgcgaatttggctctcggcggcttangtcgcggagcttggattatggagcaccagctgcaacgtgnnnntgttggttctcatgtggatctgttggctgaggttgcagactttaagtgccactgccatcgaccggagctgctgcacgattatactggaatgtctagcggtagtatactctgctagtactcaatacgggtctccttacaaatgactttcctgttatgggacctagcactctagtgtcaagactatttgctggaatatctaatattagcagtttctgtagtggctcagttgcagcctggtttagaatgatggggacagttggctgtgccatgcaaaataaagtgtgtgaaagcaactgcctcttaaactatgggtggtgcaagcaggcaaacgcgagatcgggtgtcgctgtgaatgacgagtgcatgctcaagttcggcgagctgcagtcgaagaggctgcaccgcttcctaactttcaagatggacgacaagttcaaggagatcgttgtggaccaggtcggggatcgcgctaccagctacgaggacttcacaaacagcctccccgagaatgactgccgatacgcgatctatgatttcgactttgtcactgcagaagatgtccagaagagcaggatcttctatatcctatggtccccatcctccgccaaggtgaagagcaagatgctttatgcaagctcaaaccaaaaattcaagagtgggctcaatggcattcaggtggaactgcaggctactgatgcaagtgaaatcagccttgatgagatcaaggatcgggctcgctaggcatcatcatgatcatgcatcatggactcggcctactactgtggatttgtatgccattatagacttggtgctgtgaaagactgcttgatgatttgcgggtttgttgctgtgtaaaaaaaggtcccatggctcccagaagaccatgaaggttcggatctatcatgtaattccttgttatctgccaattatgtatggactatggacatgtgttgcgctgttcaacttactactacaaataagtaatcgatatgttcccttcccaaaaaaaaaaaaaaaaaaaaaaaaaaaaaaaaaaaaaaaaaaaaaaaaaaaaaaaaaaaaaaaaaaaaaaaaaaaaaaaaaaaaaaaaaaaaaaaaaaaaaaaaaaaaaaaaaaaaaaaaggggggcccgtttttagaagaatcaaagctttcacttccccgtggatatgcaacgaaataactttttttttggggcccccaaaattaaatacattgcccgggtttttaaaacgtgggaaatggaaaaaccctgggttacccaaattaaaaggtttgaaaaaaaatccccttttcgccaggtgg

SEQ ID NO: 123342 - DNA, 962 bp, Zea mays
  Clone ID: MRT4577_43969C.1
ggtaccctcgggccggccggcgtctcccgcaggactggtcactcggcacgcaggcagaggcagcacagcagcagccagctccatccatcctctttcccctcctcgcttcgcttcctcggcggattcctcctccctcggccgtccccgtcccctttttcggcgcgcgagctcgcccgagatggcaaacgcgagatcgggtgtcgctgtgaatgacgagtgcatgctcaagttcggcgagctgcagtcgaagaggctgcaccgcttcctaactttcaagatggacgacaagttcaaggagatcgttgtggaccaggtcggggatcgcgctaccagctacgaggacttcacaaacagcctccccgagaatgactgccgatacgcgatctatgatttcgactttgtcactgcagaagatgtccagaagagcaggatcttctatatcctatggtccccatcctccgccaaggtgaagagcaagatgctttatgcaagctcaaaccaaaaattcaagagtgggctcaatggcattcaggtggaactgcaggctactgatgcaagtgaaatcagccttgatgagatcaaggatcgggctcgctaggcatcatgatcatgcatcatggactcggcctactactgtggatttgtatgccattatagacttggtgctgtgaaagactgcttgatgatttgcgggtttgttgctgtgtaaaaaaaggtcccatggctcccagaagaccatgaaggttcggatctatcatgtaattccttgttatctgccaattatgtatggactatggacatgtgttgcgctgttcaacttactactacaaataagtaatcgatatgttcccttaaaaaaaaaaaaaaaaaaaaaaaaaaaaaaaaaaaaaaaaaaaaaaaaaaaaaaaaaccaaaaaaaaaaaaaaaaaaaaaaaaaagtactctgcgttgttaccactgct

SEQ ID NO: 123343 - DNA, 449 bp, Zea mays
  Clone ID: MRT4577_4396C.1
ggaaatgttctttttttttttggggggggcccaaactttacaaaaaaaacttttttttggggggtgtacccataaaaaatttaaaaggggggcccccccaagaggggggggggggggaaccctcctgggtttgtaaaaacaaggggggtggatggggccaatttgtgcacttgtaagagggggcccccgttgggggcccgggggtgggggaaccggaacaactgggggtgttttaaaaagggggcaggggttacaccaccttgccgggttaatgggggaagttgggggggccggaaaaaaaccggggagttcaatgcctcccgttggttgaaaggaaaaaaatcgtggggggggggaccaggtggctggctcaatgggggctttttttctcgcaaataaaaagaccaggtcaatgccgcttgggggggtgaaggaaaaaaccgctgttg

SEQ ID NO: 123344 - DNA, 243 bp, Zea mays
  Clone ID: MRT4577_43970C.1
gattcttgattattttattatcttttccaacaagaacttgcctctcaaaactatttttatgcttgctgatcaaataatcaatcaagtagagttttttcattccaaatctttcttgcatataaaaatcaaacctaacaattttcttaagggtctctagaaaagagcaaaccaggtttatgttatccaatttcggactttcatagaaattccaaaaattcatcaacacaccagcacattccatac

SEQ ID NO: 123345 - DNA, 1775 bp, Zea mays
  unsure (1)..(1775): unsure at all n locations
  Clone ID: MRT4577_43971C.1
cggacgcgtgggatttagttaaaatttcaccatgtatgcatccctataaaaaatattatgcacattcaattttgttctagctttgcaactgagtaccgagtactagcataggaattttgttctagaatatgtatcggtagtatactctgctagtactcactaggtgtctcccgagaaatgagaaatgtgtttcttgttttgacacttggcactattggtcgagagtcaagactatgagctgaactgctgaaatgtctaatgttagcagtttctgcactggttcaattgcagcctgatttagaaatgctggggacagctggctgtgccatgcaaaataaaatgtgttagtaggtactttgaagggaaactcaaactttgtatttccagttaaccatgatttaacttgtggtcataggcgaacgcgagatcgggtgtcgctgtgaacgatgagtgcatgctgaagtttggcgagctgcagtcgaagaggctgcaccgcttcataactttcaagatggacgacaagttcaaggagatagttgtggaccaggtcggggatcgcgctaccagctacgatgacttcacaaacagcctccctgagaatgactgccgatacgcgatctatgatttcgactttgttactgcagaggatgtccagaagagcaggatcttctatatcctatggtattgcttgtgccctctcgtttgcatcccttgtcgctcacgctgcttcacagctgctcgctaacgagatcttttacctcttgaattgcaaggtccccatcctccgccaaggtgaagagcaagatgctttatgcaagctcaaaccagaaattcaagagtggcctcaatggcattcaggttgaactccaggccacagatggcgagtgaaatcagcctcgatgagatcaaggatcgggcacgctaggcgcaccgccatcgcgagtttcatggtcacgcatcatggactcgcctactactgtggatttgtacgccattatagacttggtgctgcgaaagactgctttggtgatttgtgggtttgttgctgtgtaaaaagatcctcatggcttccagaagaccatgaaggtttggatctatcatgtaattccttgttatctgccaattatgtatggactatggacatgtgttgcgctgttcaactcactacaaataagtaatcgatatattccctacccatgaatcggtgacaattgtctggnaaaaaaaaaaaaaaaaaaaaaaaaaaaaaaaaaaaaggcccatgtaaagagaactaatagtccttgggggtgaccaaaaaaaaaaaaaaaaaaaggcccatgtaaagagaactaattgtccttgggggtgaccaaaaaaaaaaaaaaaaaaaaggcccttgtaaggggaactaatagtcctgggggggggcccaaaaaaaaaaaaaaaaaaaaggcccttggaaagaaacctaattgtcctggggggggccccaaaaaaaaaaaaaaaaaaaacccccttgaaaaggaacctaattttcctggggggggccccnnnaaaaaaaaaaaaaaaaaaaaaagccccttgtaaggggacctaatgtccctggaaggggccccaaaaaaaaaaaaaataaaannnncgcccctttcaaagaaacctaattttcctggggttgaacaaaaaaaaaaaaaaaaaaaaacccccttgtaagggaaccttttttctcttgggagaggcaaaaaaaaaaaaaaaaaaaagacccctgttaaggaaaccttttttccttggggagg

SEQ ID NO: 123346 - DNA, 376 bp, Zea mays
  unsure (1)..(376): unsure at all n locations
  Clone ID: MRT4577_43972C.1
cgggcgggcacgcgtacnggacgcctctctctcaacatttaaattatgaaaccccaggagccagccaaccgggggtttgtgagatgagaaggcgaaggaccccaacaccctggcaaaagcctacgaggagcactaaatagacccctttcgacaccaaccgngcggcgctggaggggctgaatcaggagaccaccatgctcaccttcgagggccaaaaaggccagggcccaaccgccaatgccggcaagcacggaactcatcccaaacaggcctgcgagcaccagaacgacaccgaagacagccagccgacggcgacccaaggaggcatgcacagcatacgacaccggggccatgcgcaccggccccgaggagcacc

SEQ ID NO: 123347 - DNA, 391 bp, Zea mays
  Clone ID: MRT4577_43973C.1
cattgggtacctcgaggccggccgagagccgacttctgaagacgccgccgctgcagtgtccattgccaccgcccctttttgggagtttggttttttgctgaaaaaaaaaagcgacgccgatggcgatctattacccgagaaagcgaaaaaaccgcgcacttatctgacagactacgccgcggcctcaagctgattagccgggaaacacccccatgcaatacgcctgaatacggatttggagggaaagtttccttcaagatcatcctagcctcaaacctctatgttactttaaaagggtgatatgtgccctgggtctgctcactcacctgagttgctcacgatactgccgcgtgagaagttcacggacccactatggacctgtgtactgatc

SEQ ID NO: 123348 - DNA, 238 bp, Zea mays
  Clone ID: MRT4577_43974C.1
gtccgctgccgagacgacgaagagataaacccaaatggaatggaccaccagaaaccaaaccgtcgtcaagaggatcggagggagggccggatcggaggggcgggcgctggaagccacggtctgcttttagggtttctctcccctcgccgagacagacaagtactccaccacacaaacgcgccctacccacgaaattcacaaacccaccggaggcacagaaatttcccaggcaaggaaa

SEQ ID NO: 123349 - DNA, 180 bp, Zea mays
  Clone ID: MRT4577_43975C.1
ggttttggtttttttttttttttttttttttttttgggggttttttttttttttaatatgaaacacaccatgtttatgtatgctttacagctagaaagtacatccggaaagtttacagaaattactagcacaataacatttttcagagcagggcgtaggctaatcgaacaagggtttgtc

SEQ ID NO: 123350 - DNA, 290 bp, Zea mays
  Clone ID: MRT4577_43976C.1
atccggtgtacaaggcacactacctggcataatggcacccatggagcaagttccaatcatggaaaacctttcgtagactgggtctcaccagtaaggagggatattcctctggcagatttggcacgtagggagagtcttcagttccattgctggtctacaacctttaacgcatgatgggttctcaaagctctaaattcaacggcactgaagctagatacattgcaagagaaaataggattaacagttctccatgaatccttcatggcaacattagctgtgtttgtcataga

SEQ ID NO: 123351 - DNA, 413 bp, Zea mays
  Clone ID: MRT4577_43977C.1
ccatcacataaaacaagcgcaagcaaaaccagcgaactgccgagcaaagcatgtccctctcctccacagccttccccggcaaggcagtgaacgagccgccgacactcttcacacaggcccccgcgacgctgcgcaagacggcggccaaggcaaagccggcggacagctccggtagcccgtggaacggacccgaccgcgtgctctacctggacccgctgtacggcgcgcccccgagcctacctgacggcagagatcccggaggactaccgctgaaataccgaggcgcatgtagccggacccggagacactcgccaagaaccggcagctggaggacatacactcccgatggaacatgctgggcgcgctggcctgcgtgctccagaagctgctcgccccacaacggccgacaagta

SEQ ID NO: 123352 - DNA, 369 bp, Zea mays
  unsure (1)..(369): unsure at all n locations
  Clone ID: MRT4577_43978C.1
atatgngtaaattttttctttattgctatgtaaatggggggtttttttttgtgatttgacctttgcaaaagaaaaatgtcaaagtggattaaggggtaacactcttaagtttgtacaaaaattgcacccaaaaaaagcaagggaaaaagggtattaaagaagaaaaggaaaaaaaagggaagaaacaggggagaaagaacaccttgaagcgttggcaagtggtggcaacaaaaaagaagaaaaagaaaaatggccaacccttaaccttagtatacgcaggtggatggaactccaaacaacatgaggttgggagaatctggattacagacgctggtgtacccaggagaggcccctaataaagggtgaagg

SEQ ID NO: 123353 - DNA, 481 bp, Zea mays
  Clone ID: MRT4577_43979C.1
gctcgctcattgggtgtccaatatcagcgtgccgcaattttcacaggccgcagccggctatatacgcccgtccgctgccggcggtcaggtgcagtgcgctgtgcacggacacggacacggacccgattcgcgtcgtgtttgtgtctttatggacgcgcgacaaggggaccaatccctccgcctccaggcatcgaacatccagccgcacgccacccctctgaatatctactgtgtgtgtcctgttctgttcctgccctggtcggcgcagcgatagcgaacgcgaaccaaccatgcctgcgtttgcgtgcgaacggcacacactgcaaatacccagccatgcttaatgcacgcactgcgtcacgcacgacgagtattacgcgctaatccctccctgtgcgagcgccgcacttagaactgacggtgggcgttggcagcatgccccccgtgctgttgttccctgggcgagacgaaacgcaagcgg

SEQ ID NO: 123354 - DNA, 279 bp, Zea mays
  Clone ID: MRT4577_4397C.1
aaaaaaaaaaggggttttggaactggggtttccccaaataattggggggcatttgctccccctttatcaggtccctttttgtccgcctccattgttcagggccatgacggggcccttaattatctgaactaaaaattttaccggggcatttgaaaaagggaacccccaccggtgaatttgggttccccaaccggaagcgatacaggcttgccaaaggaattcacccaatccgggggaacagggtttcctgattcacaacgaattacctttttttgggga

SEQ ID NO: 123355 - DNA, 808 bp, Zea mays
  Clone ID: MRT4577_43980C.1
cggacgcgtgggcggacgcgtgggcggacgcgtgggcggacgcgtgggatttatgctgaggaaggttcagaggctatggatgtggctgctgcccctgctgtccaggcaagctcgttttcctgacggagacaactgcccctgctgtatgttctgttatttttcagctttcacagcctaaagctacttgttctgttatttttcaggcattggcaagatacacacgacgagaggcaacttgcctatcattgactggttaggtttttgcaactctaaacacatttgtaattttcacctcgaataggttgcactcactggatacttcttgtctggtatattctaactacagacagagattctatgttctctggaaacttcaaattcacaaccctggtgccggcaactcccagccccagcccaaagaagcatgggcgatgaactgccgtggtacatcaatatttcatacgaagatttttaaacagcaggatcagtggatatatgtcattctctcagcaatacaaataacaggcttcttccattgattgtttattccggggtcctcacgattcgatcccttttgatggaaatacttcgttctagataggatttttttatttaactcaagtgtatttgctctagtagaccacccaccagaatggaccctttttgtctcttttcatggtatcatagtagttgacactatagtatttacgttgattaaagtttatcaaatttagctggatttataaaagaaatatcaacaatatttgtatttttcaagtaaatttattatcacaataaatttaaggat

SEQ ID NO: 123356 - DNA, 448 bp, Zea mays
  Clone ID: MRT4577_43981C.1
tcggctttttttttgcccacgcttatcggaaccaaaggaacatccatgatccattttgactcacagggttcttatgcaatgcatatttcccatccggtatacacaagccagcactgtcttattgagagtggcagtgccacgtcaagtcattttggggtggcactaaagctctaggacacctaccgcgcctgacatgcaaagcctctcaggacaaaaaaattgtagcctgaccaaaatatgggtcattgaactactgcaatggctactgcaactgcaaatgcagagatggctcaattagatttgacttggcagaaccaaatgtcttattctgtacacgcaaacggatgacagattagctgatcgaattgcatccaaatgaggagaagacgtttcacatgcaagagtgcggtctagggctgaagctatctgaccataggatgcacagctt

SEQ ID NO: 123357 - DNA, 780 bp, Zea mays
  Clone ID: MRT4577_43982C.1
atggcataatcgtgaatcaactatatatagggcatccaatgtctctaccataagcaggaatgaccagcaggccattgtttctgcattggcgaatggttttccgctgcacgcaactattcttcagggtaccaaactgactttcctaaggtactgtacttcgtacgaaccccctgatttctttcaggctctgaaagtaagagctcctgaagatataccatgtcatgctattgtgctagtaggggctgtcaagaaaaagggcaagctctcttactatttcttgaatgcctggaagcggttctgtgctcgtaggagtgaggatggcacgttattggcctatggaataggaaaggtaaatgctaataggttatataggaatgtcatcaaggtatcttgcttcaaggaagctccaaaagagaggagtttcacgcaaaacatgaaactgaacacagcattgcttgttggggacctgcctaagagggaacctaccttcaggtgaatgctgtctgtttgctactctagttgtgtttgctactgtagttgtctgtaactgaaatctctgaattcatgagacttgctactgtagttactgaaatctctgaattcatgagacttgtactgaatgggtgagcacatgactatgaaatctctgaattcatgagacttgtactgaatgggtgagcacatgactatgtagagaacttgatcttcaggaagaactgagctatgttcccttctggccctgaagaatcaggatagctgacatgtttattcatcgatacg

SEQ ID NO: 123358 - DNA, 363 bp, Zea mays
  Clone ID: MRT4577_43983C.1
cactagcagctggaggagtggatcacactattcatgtatggagagtgacggatcccgaacaaaaaagggttcaggcgctgaaacaatccggtgttgtaagaacagatcaatggggggtcactcagtgggagttattacttttgtggaggggtggaaagttcttccagggtagttggggtgtcagagccaacgcggatggatgaatccaaggggatgaataccagagaggtgagaaccaatgcaggcgatatggccaaaacgtcactgaagcaagaatgctaggcgtctactgtgacagggacgatttgatgtgtccggtcatctccatcttaggacgatatcacatcccccaatctggttcgt

SEQ ID NO: 123359 - DNA, 510 bp, Zea mays
  Clone ID: MRT4577_43984C.1
tttttttttttttttttgaacaagaatgtaattgcaagtggattacatccactgctcgccaacactcaaaatgtacaattttcgagcgagacggagaagatgtgatagctttattgacgcaactagggatcactaggagaaagaaatatatggaaaaagccggaacaatgtctgccgccgaagtgtgcaatggccgggcgagtgctgtagttcagcaagatttttgtttcggcactgtctctagcgttctagaacaaagcgctcaacaaagccgcgacgtcctgtaggctaatttgctgagtggttctgccgccttgggtactttccaagcagccttcactgacggtattgccgaaagagatattgatgaggccggtggatttggggcaaaccggcaccatttcggatgagtcatacgttggtagggcagtcgcatagctcgccgcggctaccagctggagggccgtgaggagacgtagaagatgtgatagctttattgacgcaactagg

SEQ ID NO: 123360 - DNA, 178 bp, Zea mays
  Clone ID: MRT4577_43985C.1
tcgtaagcagtggtaacaacgcagagtacgcggggaatggtgcccttgcagtgtgctgcgttattttctagaaatataatgcgtgataattactagttggagagagacctgtcttggtcaatgtgttcatggaccagaagcaataatctatctgtgagtagctggattggtgttatgc

SEQ ID NO: 123361 - DNA, 273 bp, Zea mays
  Clone ID: MRT4577_43986C.1
gttcttagatcgcgggccgccgctcgcgatctagggacaagcgccgcggcagcactatagtcgactggctaagcgaggtcgacaacgttggggaacctgtgataagccaacagtggctgacgagctcccaatggcgcgcacaggaaagtcggcgcgcagggaacgatcggtccgacggtcgctatagcgcggagcaacagagagaaacgccgggaaggagagagatctgcgcgagagagaaacgcgcagggactgctcggcgagctgcgcgca

SEQ ID NO: 123362 - DNA, 811 bp, Zea mays
  Clone ID: MRT4577_43987C.1
atccgagtgctgatgacaacgatgaagtgcgctcgacgtccgccgccattatggatataccggtgaagagggtcacaaactaaagtgaccgtaccgtgctcttccttgttgcatcttttacaagttccatccctcactcgctcgatagaggtgcttttcgtccatggatgacagattctctaatgtctcctcctcagctgatagcagactgtaggatacaactccagaggagacgaccatgcgtcgtgccctcctcggatttcctgaagctgccagctgtcaaaatggtccgccccacactactctgcttcgctcgggctactgcaccacttcgacgctcttgcgcttctgactcatcaccattacgaacaccgccaccagcagtacgccatctggcgcagccaagatgttggtgctcgatgccctacccatctaggcctagatcgagccacacccgcagatactcatggctcctagccggctaccgtcgactggcagaaagagcactcgctcgccgaaaatgatgccaagggtgacaagaatgtctcgaatcttgaatatgtcaaaagaagcatagacaccatacatctcgtgcggatatgtggagcatgtcatacaaaaaatagtgaacttatggtggtccagaataggacaatgcctcactcgaaacaggaggaggaaatgcagcttcatttgcttccgagcaaagaggacaatgtttcagcaaggacttttgattgtctttgtctacatggcttatcaatttcaaccttcctacacatgaaactcgcactaggtacaacagctatga

SEQ ID NO: 123363 - DNA, 260 bp, Zea mays
  Clone ID: MRT4577_43988C.1
ggatccaggccgccgttaaccgcgcgtgagctgtagaaccgagacccagcggaagcggaggagacgctgctgctgctgcgagcccggccctcttaacacacacagcggaagcggaggaggaggagctgttttggcggcggttcccggcggcgaggatgagcggcggaggagggggagggagggggccggcctcatgcccctgcgcatgcggccccgctcatgccgccacgccgcgcggattggcgacgccggcgcccccg

SEQ ID NO: 123364 - DNA, 189 bp, Zea mays
  Clone ID: MRT4577_43989C.1
acgaatgtgctgcctcctaatgccatagtttgaattggctctgagagttctgcatgcactgcggaaagaggacagtatcacataggggggaagatgaagaatacaagcaatgattggatttacccgaaacctatgatggattcaaattattggaacattcactgcatggcttctggtaacatgcaccac

SEQ ID NO: 123365 - DNA, 443 bp, Zea mays
  Clone ID: MRT4577_4398C.1
ggtaagggtaacatgaccgaagaaatagctgaatctgctataaatggaagcccaacgaacatgcggaactgtatcatgggaaacacgaaataaagacagagtccaatacaagctgaactataaaccataaaacactctcacagagcccatacgaatctgcaactctgctcggagcgtcttactcttggagctaatactggccgagctgcgggacctggacgcagctactgccatgctaggcacgttcgacctgtgcaccgggcgctcgcaccaccaccgaactggagaccttccacattggcagtcgaaacttcggctcgaggtgcaggtcgcaggaaccagatggagacagcatactagacgcatcgccagaaatgtcactgacatctagaattggggctacgccaacgctgtggacggactggcgatacttcacgacctga

SEQ ID NO: 123366 - DNA, 217 bp, Zea mays
  Clone ID: MRT4577_43990C.1
atggctaatccagcaaggcttaccaagtgcgccttgggtatatggttccttaaggatatcgagggggggccattctagaggatgcagtcttacacccgcgctcatgcgacggcctagcctgggtaaacagccacctaaatgcaatagaatgcccgtcgcttctaaacggagatactggaaaaaacgtgatgatacgacacacttagaccgcatgcat

SEQ ID NO: 123367 - DNA, 650 bp, Zea mays
  Clone ID: MRT4577_43991C.1
atcgcttccttttctactttcttccctctgcctgagcagctttctcctcagcatctcaaatccgattcaagaccatataccctcatggactccaccgatgccgaagtatgcgacaaaggcaacaaagcacacgcaacgtccgccaaggtcgatggggcccaagagaataagtgcgtcgctctaggtaacgcgaaggccgacactctttttcccctacgaacgtatcgctcgctacttgcagaaggtacgttacggatgtgatggcccaaccggaggccatgcctatctcgacgctgtgctctgatacctcgccgattggtcctgtagctctctgcaattgctggcacagacaacatgaacagtcgcattatgtctccagtcattcgataccgtctatacaaagcaaagaggaatttggaaaggtgatgacttgatgtgacctatcgctctatgtggcgagctctccaatatctacctgcatctgctgcccacgaagacataccagaatcatgcagtgatcaacacttagtggcctcgtcatgccacatagacgctcatgttgtcaaaaaaggataaactgactgacagagatgatgagatgcatatcacgaccttgatagcttaaagaaggggatctatcttctgtagat

SEQ ID NO: 123368 - DNA, 162 bp, Zea mays
  Clone ID: MRT4577_43993C.1
aaatacccgcgcggaccaacgcgtccgcctacgcgtccgacatcataaccgctagctccatcattattttcagcctcacagtggtccgacttcagcttttttgacccctacacactagggttaacggactggatctcatgtaactgaaggaaggatatgatc

SEQ ID NO: 123369 - DNA, 1889 bp, Zea mays
  unsure (1)..(1889): unsure at all n locations
  Clone ID: MRT4577_43994C.1
ngatctcagcattcacgaagccgcccaacgataataaaaaaacgtcagctcgatcgcgcactgcctataaaaccccggccgtcgcgtccatggcgtttcaggatccgagcaccagaaagaagctgagttagctagggtcaagaaagtagtcagcactcagcaggaaaagaagcagagactacacatcatggcgagtgacgccgcgcatggtagctcgctggacggggtgacgccgtcgagcaagttcgacctgccggtggactcggagcacaaggccaagaccatccgcctgctctccttcgcgaacccgcacatgcgtaccttccacctctcctggatgtccttcttcacctgcgtcgtctccaccttcgcggcggcgccgctgatccccatcatccgggagaacctgggcctgaccaaggccgacatcggcaacgccggggtggcctccgtctcgggcgccatcttctcgcgcctcgccatgggcgccgtctgcgacctgctgggcccgcgctacggctgcgccttcgtcgtcatgctggggccggcccgcggtgtcctgcatggccgtcatcgcaagcgccggggccttacgtcgcgtggcgcttcctcatcggcttctccctcgccaccttcgtctccctgcagtactggaccagcaccatgttcaacagcaagatcatcggcaccgtcaacgggctcgccgccggatggggcaacatgggaggcggcgccacgcagctcatcatgccgctcgtctacgacgtcatccgcaagtgcggcgccacgccattcacggcctggcgcctcgcctacttcgtgccgggcctcatgcacgtcgtcatgggcgtcctggtgctcacgctggggcaggacctccccgacggcaacctcaggtcgctgcagaagaagggcaacgtcaacaaggacagcttctccaaggtcatgtggtacgccgtcatcaactaccgtacctggatcttcgtcctcctctacggctactgcatgggcgtcgagctcaccaccgacaacgtcatcgccgagtacatgtacgaccgcttcgacctcgacctccgcgtcgccgggaccatcgccgcctgcttcggcatggccaacatcgtcgcacgccctatgggcggcatcatgtcggacatgggcgcgcgctactggggcatgcgcgctcgcctctggaacatctggatcctccagaccgccggcggcgccttctgcctctggctgggacgcgccagcaccctccccgtctccgtcgtcgccatggtgctcttctccttctgcgcgcaggcggcctgcggcgccatcttcggggtcatccccttcgtctcccgccgctccctcggcatcatctccggcatgacgggcgccggcggcaacttcggcgccgggctcacgcagctgctcttctttacctcctcgacctactccacgggcagggggctggagtacatgggcatcatgatcatggcgtgcacgctgccggtggtgttcgtgcacttcccgcagtgggggtccatgttcttcccgcccagcgccaccgccgacgaggagggctactacgcctccgagtggaacgacgacgagaagagcaagggactccatagcgctagcctcaagttcgccgagaacagccgctcagagcgcggcaagcgcaacgtcatccaggccgacgccgccgccacgccggagcatgtctaagtctactactaagatggatcgatcgacgatcacctatacctctttgtatgtacgaatatgccttgttattactgtgcgcgcgcatatacaatacacgtgtgctccgttgacatgagttatatagcactaaaaacttcttttgaaaaaaaaaaaaaaaattcgcgtctattcagctt

SEQ ID NO: 123370 - DNA, 847 bp, Zea mays
  unsure (1)..(847): unsure at all n locations
  Clone ID: MRT4577_43996C.1
cccagcgtccgcacgnagcgagcagtcgnatgtgtccctagatccccgttcctccgccgccgcctgcaaccgcttcacgtgccctgatccatcgcaggtcccctttctgaccccaaaggagccgaagaagtcctctgctcagcaccagccccacgccatggaacccaagaagtcctctccacgcggcgccggggccgtcgccgccaccgccactgaagccgagtccccgttgagcagcttgttctacccgccggcgcccgcgatggtaaaccgcaatgggctccttccaaaagtcataccgcgtacgcaaaggacggtaaacattcaccaccttatgatacgtcatgttttgggtcatctgtgcattatggtggtcgagattatttctacggcagctctacaaccaagaaagcgacagaatcctccactgactacaaaggggacaagaaagatccagtcgcagattctcatggcgactggtggcaaggctcattttattactaaggtatcctggtggcctctccttggaccacatggaaccagtgggggggcagtaatgttcggtttcctcctgggctagcagaattatcttgtgtctttagtctcccctttttcgtgcaaggtaacgaagctttagcccagtatgaattagcccgcataaaagaatccatgtccattccgccagtaatatgagcgggttggtatctgactacaaaagagtcaaaagtctgtacaattggatcgtcgctcccaagcaaaaaaaaaaaaaccaataataatgtgctggagaagcggcgatgacttcacattgtacacctttaccagctggaatttgacagaagtttgg

SEQ ID NO: 123371 - DNA, 412 bp, Zea mays
  Clone ID: MRT4577_43997C.1
accccaaaaacaagaaaaaaaggcccaacaaggccaaaaagaaattttcccaaaacccaaagaaaaaaacagcccggggattcaaacagagcaacttagtttcggggggggcaacaagaccagcaaggcccttaaaaggggcccaagacaaccggctgaaaaaagacaagagcaaggctagccctggattgacaggacgggacaaaagcaaaactgaaccccaccggggacaattagagggcaatccacccaaaaatgccttccgcccgaccgaaggaaacccggggaaccaccaaacaaaggcccacccaccaaagagcccagttatattcctcttcagggatataaacccccacctgccttgaacaatcggccagccgggaggagggaccgcgtgggcatcccccccccc

SEQ ID NO: 123372 - DNA, 285 bp, Zea mays
  Clone ID: MRT4577_43998C.1
ttttgttttttttgtttttttttttttttttttttttggtgtttggtttcgataaccaggggatgccgatgtcacccgggggacttcattgggaaagaaaaagacggggggctctgggcagacccaccgccaggagaagggaacgcccacccttgcgcttacaaggagggacaggggcccacactggccccagaggggggcgctgaccgccgcaggcgccggaggagacccaaggcttgcaccgggggggcgctggggccctgaaggagcggcccacccccggga

SEQ ID NO: 123373 - DNA, 1062 bp, Zea mays
  Clone ID: MRT4577_43999C.1
cattgggtacctcgaggccggccggggacagagcgccacgaggcgagcagtcgagtgttccctagagtccccgttcctccgccgccgcctgcaaccgcttcacgtgccctgatccatcgcaggtcccctttctgaccccaaatggagccgaagaagtcctctgctcagcaccagccccacgccatggaacccaagaagtcctctccacgcggcgccggggccgtcgccgccaccgccactgaagccgagtccccgttgagcagcttgttctacccgccggcgcccgcggcaaatgggaaagatcaggagttgtacagcattatttacaaagggcagagcgggagcgcacaagctggcgcgacaggtaatggtaaaccgcaatgggctccttccaaaagtcataccgcgtacgcaaaggacggtaaacattcaccaccttatgatacgtcatgttttgggtcatctgtgcattatggtggtcgagattatttctacggcagctctacaaccaagaaagcgacagaatcctccactgactacaaaggggacaagaaagatccagtcgcagattctcatggcgactggtggcaaggctcattttattactaagagaacctggtggcctctccttggagaacaaggaacagaaggagggcagtgaagctcggtttccttgattgctagcagtattatcttgtgtcatagtggacccgctttcgtccagcggtggtgccaatatttagaagcatcacctggcctgggcagatgtagtgtgcgtcttatagtctctgctttagatgtgcaatgtaacgaagctttagcacagtatgaactagaccgcataaaagaatccatgtccattccgccagtaatacgagcgggttggtatctgactccttagagtcaaaagtctgtacaattgtatcgtcgctccaaagcaaaaaaaaaacaataataatgtgctggagaagcggcgatgacttcacattgtacacctttaccagctggaatttgacagaagtttggaaaatgttcttgtcaattgcattttacagtgttatc

SEQ ID NO: 123374 - DNA, 1149 bp, Zea mays
  unsure (1)..(1149): unsure at all n locations
  Clone ID: MRT4577_4399C.1
ccggcccggccgggagcaagacaacaaacccacttctgactgaccactgtgccgcgccgtggtcaccnggacggacacacagaacgacgatggccgcgtcggcgctgcaccagaccaccagcttcctcgggcaggccctggtctcccgcgccgccggcgtcgatgccggcggccgcatcaccatgcgccgcaccgtcaagagcgttccccagagcatatggtacggccctgatcgccccaagtatcttggcccgttctccgagcagacgccgtcgtacctgaccggcgagttccccggcgactacgggtgggacaccgcgggcctctcggccgacccggagacattcgcgcgcaaccgggagctggaggtgatccactcccggtgggcgatgctgggcgcgctgggctgcgtgttcccggagatcttggccaagaacggcgtcaagttcggcgaggcggtgtggttcaaggccggcgcgcagatcttctcggagggcgggctggactacctggggaaccccaacctggtgctcatgggcttcgtcgagggctaccgcgtcggcggcggcccgctcggggaagggctcgacaaggggtaccccggcggcgccttcgacccgctgggcctcgccgacgacccggacaccgccgccgagctcaaggtgaaggagctcaagaacggccgccttgccatgttctccatgttcggcttcttcgtgcaggccatcgtcaccggcaagggccccatcgagaacctcttcgaccacgtcgccgaccccgtcgccaacaacgcctgggcatacgccacgaacttcgtccccggcaactaactgactgagcaacgccgtacatgtgtactaccatcagacccatccattcgtccgtccgtccgtccgtccgtcgagtgaacagtgtggtcttccctgtactctacttgttcagatcgtaggcgtgtagtagttgcaccagccggcgtatgctcatgatcgatgtgtgtgctcatcaatcaatgtcaatggctgcctgctgtaagcggtcgatgtaaactaagcacagacgcatgtatcgtcatcagtggatgaatcaatctatcgatggcctgtgccattcatttttgaatcgatcaaaaaaaaaaaaaaaaaagcggcc

SEQ ID NO: 123375 - DNA, 376 bp, Zea mays
  unsure (1)..(376): unsure at all n locations
  Clone ID: MRT4577_439C.1
tttcccccaccttccacacaaccnncaagagaaccacgagaaatttttaaaatcttcaaaaacacccaaaacncnnncaagaccccccccataaccaacacacccacaagccccgccggtgacaaacacaaaatccaaacttctgacacaaccccagtccaaaaaggcgtcacccagccaaccggggccccccaaccacaaagatggtggaaaattacaagccctcgccaatgacaccagttaaaccactctgcatcacacaacaacaatagaaaaaccccccacaccaaaaactgcaaaaatgcacaccgaacacaccgctccccccccacatatatattcccccagagccaacaccaacaaaaaacacaccccc

SEQ ID NO: 123376 - DNA, 458 bp, Zea mays
  Clone ID: MRT4577_43C.1
tgggtacctcgaggccggccgggctttctgaccttatctccttcggtaaaacttgtgcgcagcaatgtgccgcctccctcccgaccaccgacgcggcgatctcgggaccaggatcttctgctaccgagctgccaaggatcgctcatgcggaggcctcccgcttgccaggagattggccacagtcaccgctgccgctgcacctctagaaccttcccgccgccgtcaacactgccggagctgcggaccgacgctctgtaaagagaattcatactgctacctgggtgtgactacaaccgctgatatgtacagactgcagattctgatagagctgcttcaacccatccagcagacgatgacacgctgctaatcccgcgccacatggtagtatttatggagcagctgactcattttaacgtgtgagcttgggcaacgaggatgtaacctggtctatgaagaat

SEQ ID NO: 123377 - DNA, 242 bp, Zea mays
  Clone ID: MRT4577_44000C.1
gagcggccgccctagatagtgttttatcacgggcccaacgccaccagacgggggggggtggaagaaataaaaggccgttaaacacccaccaccaaacggggagaggccccccaagccaaaaaggaacgcaggggccgcagacccaggaagagggcccaagccggccgaaggaggggagagaacccacgggaacaaaacaggcacggacaccgggaccaaaaacaccacccacggaaaacggg

SEQ ID NO: 123378 - DNA, 136 bp, Zea mays
  Clone ID: MRT4577_44001C.1
gtatactaccatgttcccactcgccgccgcagaggattaagctttatcaagcatgacccgatgcctcgggcgtcgagatgctgtgataccctgatcgatgcccccgctaggcgggtgctgaagctagaggtagcga

SEQ ID NO: 123379 - DNA, 630 bp, Zea mays
  Clone ID: MRT4577_44002C.1
gcctgcgggccacccaggtccagcgggaaggaccccacactgtcgttgggcgacgacgacaaggctgccgcgtccgggtcctcctcgtcatcctctagcgctagggcgctccctgcgacctacggcgcctggttcacgtcgtggtgacggcacggcgaacaggagtggtcgttacagcggcggcacggtgggcaggcgctgcatggtgcctcccccacacttgttgacctaggattcaccaagggacagggacagggcaccgagcaagacagggtttcgatctacatgataggaggtctaaggattgaaaggtggttccaggttcttgctgaatttagcctagcaaaaaagagattaggaactagaacgatgttgctgtgttgttccatcactccctgctagctgtggctctattcaatccacatttgcattgtgtgagtccacaacaaacttaatctttccttcttgcagttatacaacaatttctctaatatggcatcttgctgatctgctagaacaagaagagcctacacaactaaaatgaaccctcttaaatagatgtcttctttttgcaattgctaataataaaggggatgtttcctataaaaaaaaaaaaaaaaaaaaaaaaaa

SEQ ID NO: 123380 - DNA, 3180 bp, Zea mays
  Clone ID: MRT4577_44003C.1
aattcggcacgaggcttaaacccgcgaagtcaaagcattccgccgctcctctcctcccccgtcggcacgagatccttgcccgaacaaaaaccagaagatgggcgaggggagggggagacgagatctcactccccgcttcctctccacctctcaaatggcgccaccgagcgctaaccgtagccaccagcagctcgtcgtcctacccgtcctgctcctactcctgatccggatccccgcatccgcggcagcggcggcagatacctccctgtccaccttatcctactcccaccactgccccaacctcccgtccgcgctcgacctgcccggcggcgaagtttcggcgctcgggcccgacgcccatgtccccgtccccgaggtctccaccgggtacttcgtcggcggggaccgcatcttcggccccgacccctcctcccagccgcgctccttctcgttgctcccctcctccgtcgcccgcaccaccaacgcctcgctcctccacgtctccgccactctcaccgtctccggcgggcggcgcccgttccgcgaccgcggcggccggaacctcttcgagtacgacggccgcgcgcgccacttccgcccgcgcctcccgcgcttcacggggcggcgcggctccatcaccttcggcctggagggctactactccaccgggtccggggacctctgcatggtcggcaccgggtccgggcgcgccgccgacggctcgcccgtgcacttcctccccgtcgtgctccgcctcggctttcccagccccgccaacgtgacgcggcccttcgtcaccggtcgcctcgagaacgtcgacaccatcagccccatcgagcccatctcactcgtcgcctacacccaggagggctacgcgtacggggagagcgcctcctgcccgccgccgcctgcggggaggcttgatgcgctccaggtgttcgagaataggaatttctcgtgcgcccatctcagttccatgctcaaatcgccgttcaggttggactacccgagtggcagcgagtcgaccgcatcttcactcgggattcaccaaagctacatgtatgtcaaccggatgcactgcaacgatgacggcgctgtccgtgcttatgtggcgttcactaaccagacagagttatcaaggtactacttcatgctgggcgagaaggccgtcgtggtggatggattctgggatcagaagagcagccggctttgcctcaaagggtgtcacgtggtgaagtcggggccatcccgtgcagatttggcagtaggtgagtgtggaattgggatgagcttctggttcccggcagtgtggtcgttacagcaacggagcttttctgctggtctggtctggaatgcaagtctgaaaagtggtgaggccgtcgctgccggttctagtgcaatcactcccaactataggggcaatctttctggtttgaagtataattacacaaaggtggacgaggctatgaaatactacgagaaatctggattgaacaagaacaggaaagggaagttcccagatagcaattcataccaggacttggtgttccgttttttcgtgaagagagggggcggctctggatatgcctcacctgtcacaattgggtcaatgttgtttgatggtaactctttggtggttcaagatcccttttctcgccatgtcacagccgagatgaagcaaaggctgcttaatgtcagctatgatatctactatgttgggaattggtctctagaatcattccatcgtcgacatatctctgccgagggtgtttatgatactaagacaggttccctttgcatgatcgcttgtcgcgagcttaatgtctcgtcagattgtgaaatcctggtgactgctcagttttcttctttggatgcaaaagttgcacagcatgtgaaaggggcgatcaaaagcttgaggaagaagactgaccctcttttctttgaaacgctggacattgcttcatatgggatgtacgtagagcaagtggatgcatcaatctggagaatggacatagaaagcaccatgaccttgatctctatgacactggcgtgcgtcttcattgctgtgcagctatttcatgtcaacaaggtccctgaagcacttcccgccatgtcgatcaccatgctggtcgttctggctttgggttacatgatccctctcgtgctgaactttgacgctctcttcaagaacagcaacaagcagaccgttccactctcaggtggcggatggcttgaggtgaacgaagtcatggtgcggatcattaccatggtaacctttctgctgcagctgcggcttcttcagcaggcctggtccgcacggtccgtggatgcaagcaaagccgagtcatgggctgccgagaagaaagtgctctggatatgcctgccactgtacatcattggcggagctattacttgggttgttcacatgaggtcaaaccacagccgaagaatgctaaggcaggttgtacacttgaagccagttgagcagcatgcgttctgggaggaccttgtgtcttattgtggactgatactcgatgggttcctgctccctcaagtgatcctaaacgtgttctcagactccaaagttagagccctctccccagggttctacatcggaagcaccttgatccgtgtcctgcctcatgtgtacgatgtgttcaggagacagcactttgttccaagcctgagaccatcttacatgtatgcaggccctcgtgacgacctcttcagcctcgcttgggacatcgtcataccttgcggagcactgctactgtcggcgctcctcttcttccagcagtggcgcggaggagctttcttcctctgttcgaagaacaggaggacgagagagtacgaaatggtttccgtggccagctcttaagaaaaatcgagtggatatgaaatgcttttatagccggttcttgacatcgttgttgcaagggaaatgtagaggaggtttacctatagacttttaaaaaaatagctattccatttttcggatccatgtttctttttgcaaatgtgcttggttgcagcgaaaaccaccgtgcatgtatacgaaagacgatactaaacaagttgggcaaattattggggttttgatttaggattcctttttaccttttgggtgtcgtttggttcacgaaatataatttaaatggtaatggtaatgattcacactcg

SEQ ID NO: 123381 - DNA, 416 bp, Zea mays
  Clone ID: MRT4577_44004C.1
gggccaaaacaacccttttgaaaaaaaacccggggggggggggccaacacccccaataggcccaaccaaggggcaatacccaaaagggggggccaatttaggcttgggggggaattaataaaagcccccaaatggaaaaggggaaaggcgggaccagtttttgggttggggcgggaagggaacccctttaatttgggggttttgccgggggggggggaccccccccaaaacaaggggagtgggggggttaaacttcccccaaagcctaatggggaaggggggccaaccccccaaaagaaaaatccgggagaaaaaaccctttattttgggggaaaaaaccttggactttggaactataaaaggggggggaagggggaaaaaaaaaaccttgaggattccaacccaaattttggggg

SEQ ID NO: 123382 - DNA, 674 bp, Zea mays
  Clone ID: MRT4577_44005C.1
gccatttccagatctgctattactttagccacttgctgcgcacatctcggtgagctcgccactccggtggcggcggcggcgggcaggaggaagaagggcaggagggaagatggcaccgccgcggcgcgtgtgcgtgaccggcggcggcgggttcatcgcctcgtggctcgtcaagctgctcctctcccggggctacgccgtccacgccaccctccgcgacccatgtgaccccaagaatgtccacctcaagcagatgggcgaggtccgggagaatctgcacctgttcaaggccgacgtgctcgactacgacgcgctaacacgtgcgtttgagggatgcgagggggtcttccacctcgccactccggtgcctgaagataagattgttgatcctgagtcagaagtattggctcctgctgtgaaaggtacttcaaatgtgctaaaggcctgctcagctatgaaggttcagaaggttattgtcttgtcatccaatgctgctgttgattttaacccgaattggcctcaagataaacttaaagacgagagttgctggtcagacaaagacttctgccaggagaaccaggactggtattctgttgccaagattgttgctgaacaggcatccttggaatattcagagaaacatggattaaacgctgttacgctttgccctcctt

SEQ ID NO: 123383 - DNA, 284 bp, Zea mays
  unsure (1)..(284): unsure at all n locations
  Clone ID: MRT4577_44006C.1
caacatccgctcctccctccccgacaccgaccgaccnctcgtccgctcgcctccctccaagantcccaccnccatgnnnnnnnnnnnnnnnnnnnnnnnnnnntcttcctcctccgaggttccgatcgccgcccgcacctgcgtctccgtcggcgaggtggcggtgggcgcggtggctacaggcagcggcgaccgggtggcggcggattgcggggtgtgcgccattgctcgacaagatagcgctcaagagacggcctcgtcaaagggttcgacaagctattttg

SEQ ID NO: 123384 - DNA, 419 bp, Zea mays
  Clone ID: MRT4577_44007C.1
ctgggatcctctacatcggacgccctttccttttttttttgctttatcttattaatatgcatattattaccacctgaatagttttattaaaacatacctctcactatcaaatatccacaaaataattcaccactcttccacatataaaataacatatacaccccacccaaatataaccaaagcccaccacatcatatacacgtacatatacatatatatataaatatatacatataccctattacccttcatcttatcaatttccaccttcccgcttcgacatcacattcttttcccaccgattccttactacctctggcaattaacataatacgtcctaacctgtaaaccaacgtttccaaactcaccaaattcaccttttctaaaattaatccaacaacccaatccttacacccctt

SEQ ID NO: 123385 - DNA, 498 bp, Zea mays
  unsure (1)..(498): unsure at all n locations
  Clone ID: MRT4577_44008C.1
ctttgtttttttttttttttttttttttttttttttttttttttttttttttcggggcngtgcgtgncctttgcttttcccccgcncctggggttgccgggtggcnnttcctttcccgggcgtnntttgtttttttttcttttccntngcgcttttttgggtggggcccccggctggccncccgctgtttttctgtgggtgggggcgcccttccttggttcccctggtgccccccccttggttcctgttctggntcctcnggtctttcctggggcgggtcccccctttcccctcttcgntgccggttttgtttgtctgttggggggccccngggggggccttggtctgttctgttttctccgctggtggcctgggcnnnnggccgggnctcccttccccccctggcctgggnggtttttggcgggttcctttcngggttccggctcgggggtttcgtcgcgcgcgggctgctcnnctgggcttcccgtgggcttgccg

SEQ ID NO: 123386 - DNA, 309 bp, Zea mays
  Clone ID: MRT4577_44009C.1
ggggttgggtttttttttgggggcgagattttcgaaaaaggcaaattttccccactggaaattgccctgaagtattattcattaatgtgctcctacaattgacccagaggggccaagccaaaaaaacctgcctgggctttccagttcttggggcaattctacaagaaggtttacctttttgcggggggggttcacatttccaataagaagggccgaaaaaggtgaaaaggggaaccaaggggggggcaaccggctgtgtcttttccgaaggcaatcaaaatcttatggtgtttcttttgcccattttgt

SEQ ID NO: 123387 - DNA, 594 bp, Zea mays
  Clone ID: MRT4577_4400C.1
gccggccgggtccggaagaccaccaacccacttctgactgaccactgtgccgcgccgtggtcaccggacggacacacagaacgacgatggccgcgtcggcgctgcaccagaccaccagcttcctcgggcaggccctggtcgcccgcgccgccggcgtcgatgccggcggccgcatcaccatgcgccgcaccgtcaagagcgttccccatcgagaacctcttcgaccacgtcgccgaccccgtcgccaacaacgcctgggcatacgccacgaacttcgtccccggcaactaactgactgagcaacgccgtacatgtgtactaccatcagatccatccattcgttcgtccgtccgtcgagtgaacagtgtggtcttctctgtactctacttgttcagatcgtaggcgtgtagtagttgcaccagccggcgtatgctcatgatcgatgtgtgctcatcaatcaatgtcaatggctgcctgctgtaagcggccgatgtaaactaagcacagacgcatgtatcgtcatcagtggatgaatcaatctatcgatggcctgtgccattcatttttgaaaaaaaaaaaaaaaaaaggccccta

SEQ ID NO: 123388 - DNA, 1409 bp, Zea mays
  Clone ID: MRT4577_44010C.1
agctagttagccgcggcgccatggctcctctgctgttcagggacatgaaggggctctcgtgctcgtcccaggcgtccacggcgacatgcccgagcctggagcggcacccggcgccccgcccacacaaggccagcgccggcgccagccccctggctcccgttcctgctgccgagcccaggaccaggacgcaccggcttgacggcaagaaaggacagcagccgcagcacaaggctgccgtcgtccccgcgaacgccggtggtggcctcgtcagccccgccggctcgtccaggtacctgctgctgagcggccgcttttttttttttttttttgtgaaaagaccatgacagcaatgaaatcccattcttatgttaattacagtcttacatcacagaggagaaagcagagtgacccatccacagcagaagcagatggaagcactggagcagcaccaggcaagagatcgcattcacctcgcatggcgccaaccacagcgaaacaagagaggagagagggccacaacaactcacgagacgaccgcacaggaaagaaccaaagctgctgcattcaagtgccagctgccagccgggacacggtggacgcatgctggtcgacgactccctatccctagcagcagccacggcccacggccaaccgggatacggctcccttcattcaggcggcggctatcgccggtggcgccgcccagagctgggcgttcttcaccttggacacgctgctgagcacgcccagcggcgtcacgtcgccgaccaccgtcaccttcttcgccgcgaaatcgatgttgaacgacgtcacgccttccatcttggagaggtgcttcttcactttcccggcgcacgctttgcagtgcagggataccttgagcacaaccaccacctgctcctgcgcctgcgcggtcttggcatcagcagcgtcactagcttcctcccgcttggcgatggcgtcgacggccggggcaggctccagcacctcctggatctcctcggcgacggcggcgaagcggccgctcagcagcaggtacctggacgagccggcggggctgacgaggccaccaccggcgttcgcggggacgacggcagccttgtgctgcggctgctgtcctttcttgccgtcaagccggtgcgtcctggtcctgggctcggcagcaggaacgggagccagggggctggcgccggcgctggccttgtgtgggcggggcgccgggtgccgctccaggctcgggcatgtcgccgtggacgcctgggacgagcacgagagccccttcatgtccctgaacagcagaggagccatggcgccgcggctgactaggtgggaacagagctgagatgccgcttgtgctgctgctacctcgtcgcgctttggctgtgttgctggtgctgctggcgccgcac

SEQ ID NO: 123389 - DNA, 465 bp, Zea mays
  Clone ID: MRT4577_44011C.1
catccccgctgataggatctactatcagacctttcgccgccctccggactcgttacctctgttaaatggtcggccacatgttggatacgaaccagatggtgggcctcgtcctgccgaccccaatcaatgagcaccccatgatctaccgcctgcacctctgcgtcacccacgaagacccccccaagatcaagcactggtacctccccagcaccctcgagcccgccatcaagatcaacgtccacatgcttgccatcgacgacatctccgagcccctccctcgccccatcagtacctccgccatctgcctgccctaccacctcccgcctggcttctccaacatccataccgtgcacctcgacaccaccctggattgcacagtggagcaactctccaacgcgattgcctccctcccccacgggaggtccccccgcctacacattgtcaacacctccacggcccactaca

SEQ ID NO: 123390 - DNA, 624 bp, Zea mays
  Clone ID: MRT4577_44012C.1
atggacggccgcctggctctctgctggttcttccttgtgaactctgctaccacattatctgtgtgcctttgctttgtctccactgcatgctatgctgcttccattccgcctggactggggttgaagcctcttttgtactttacattgcttccaccttcctcttatctgtctgtgctaaagccaatagagaggctacttccaattccaacagaaccacgtgttaaatacacctttgtcgagtttccaactacaagtggagtacagttgggaggcatttgctgggaaatgcgtctcccttccttacgccgcgaggtgaacgggatcccctaccatcgagaaaccccctatatatcaaggccaccacaccagcgtgatcctcctcgggtgcatcaggcgcaacaaggcattgaggaggatgttgttgatgggatgacttcctttatggctgcatgcttggtgtcaattaaaaagaccaaggacctgctccctgatcaacttcaaaaagcttttaggaagacgttttcagctaaaaagaagaaaagtaaaatccggaaggcatgggatgaaactaaagtcatttataatgttgcttcatgggggcaccactgctgttgggcagcataa

SEQ ID NO: 123391 - DNA, 389 bp, Zea mays
  Clone ID: MRT4577_44013C.1
cttccacaacgaggcttgatacccgttgtttcaagttatgtaaagcggagtgaaataaactactacgattcccctagtaatcgggtagcgaaccgattagcagtctcagcttgtgaatacggtccggctcatgctatctacctgtaaggatggaggatggatgagacgatctactagcgagctgatcgtagagaccctgtaccacggaatactgtggaggccgattaccatcgttagataatgatgcggaatgccacatatttgcgcctgatggtaccccgtcgagaggaggaccccatagctgactctccagtccgaatgaggatattcaaaaacatcaccatctgtgcgatgtgttccgaggaggctgcatactaccatttatgctg

SEQ ID NO: 123392 - DNA, 311 bp, Zea mays
  Clone ID: MRT4577_44014C.1
acggggcccctcaaaaaactttttttggggggttacaaagacctggggcaggggtaaaacccccgccccgacttaaatttcctcccccccaaacttggttttacaagggtttttgttcaagacaccctggggtcaaaaaccaaatttttttaaggggggcctttacaaaaaaacaaacttaaaaaaccctggaggggttcccccgggggcttttgatggaaaaacattttaaatttcgccggtttttttttaaaagaaacacgaggaagttggtgcccttttgggtgttctggggggtctgttttttctcc

SEQ ID NO: 123393 - DNA, 330 bp, Zea mays
  unsure (1)..(330): unsure at all n locations
  Clone ID: MRT4577_44015C.1
tcccgcgtcgtagctttttatctaggcgccnccttttttattttttattaatttttcttgtgcaatttttatgttaagggggttgttgatacaccgactggaacaaatattttgttttttacaaaaaaatttgtccacagtattttcgcgcaaggttcatgctcgcacataaaacttttggtccaaaccggcagcgctttttttacttaagtattcgccccttgcaataaccccagcaaagggggccgcaacagttgcagaagagaaacttgggatccaaaaaacaaacccttcttatttgtccttacaatgggccccgattaacaatta

SEQ ID NO: 123394 - DNA, 377 bp, Zea mays
  Clone ID: MRT4577_44016C.1
cgcgtacgagacgattatctttatctactccacagcgcatttataacccgatcgacaccatgaaggagaggatcgtttccctcgctgggcgggctctcgctgcgagcgccaccttcacgcatacaagcggcggctgctgctgccatccaccgtcgccggttcatctaccgccgtcggtgcatctgccacctccggttcacctgccaccttctgtgcatctcccaccgccgatccacctgtcgtcgccaggtccatctgccaccgtcggttcatgtgccgtcgcctgttcatctgccgtcgtcaccatgccactaccctactcaaccgccccggcctcagtcttattcccagccacacccatgcccgagccaacagtc

SEQ ID NO: 123395 - DNA, 113 bp, Zea mays
  unsure (1)..(113): unsure at all n locations
  Clone ID: MRT4577_44017C.1
gcgagacgcgagtaactcggaatcggctcgagtgagacacggaaccttcgtccatcttcangctgtagtatcagtagtcagtacatacatggtgccgcgactgacgagatctc

SEQ ID NO: 123396 - DNA, 317 bp, Zea mays
  Clone ID: MRT4577_44018C.1
cgcccacctcccgtccaccaccgctatatatcccgacgccccttcctccctcccccgtccttccctccgcctccgcctccgcccccgtctccgtccactgcccactcctggctgccgccactcctgtcacctgttcgggggccgctgcagtcggcgtggtccctgcggcccatggggggtgaccgcggtcgcgtgtgcggtgggggggctctctcgtttgctggagcgcccgtatcggcgcgagcgtcgttgcttctcgctcatcgccttcgcgtgacctcctcctctcgtggcgatgttgcgctcggctgcgccct

SEQ ID NO: 123397 - DNA, 230 bp, Zea mays
  unsure (1)..(230): unsure at all n locations
  Clone ID: MRT4577_44019C.1
gactcctatagggcgattggtggcctacccgcnagcgggctcatcncttgcgatagaggctgactcacctgcaccaatggttgttctttctgctgctggtgtttcccccccctcagctatcgggtttgagggctatgagaagcgccttgagatcacattctctgaggcacctgtctttgtggacccccatggcagcggattgcgtgccctctccaggtcccagattgact

SEQ ID NO: 123398 - DNA, 354 bp, Zea mays
  Clone ID: MRT4577_4401C.1
cttcttacataaaagggtggtgccatcccctcatttcccccgctcccacgccgccgaatccgagacctgatctcggattcaccgcagttctaccacaccctcaggcgatccccggcacctcctccccgacgcttcagccatggcaggaatggcaccggaaggctcccagcttgacgctaagaactatgattctaagatgcacgagctgctgaaccaaggcgagactgaagacgccttcacctcttatgatgaagctcatgacagatttgatgacatgggtttccaagataacctcctaagaggaataaatgcttatggatatgagaagccttctgccatccacaaaagggaaat

SEQ ID NO: 123399 - DNA, 206 bp, Zea mays
  Clone ID: MRT4577_44020C.1
ttgtcctttggcggcagcggccgttacggtgcaacgacgatttatgggggcacgcttactttacaagccgacggcggctccggctccggctcctctccgacgtcgccctgcaccggtggcaggctcgtacggtggatccccgtctactcccggaggcggcgcgttcggtgggtctgctccgtacacccctagcggctgcggcgcgt

SEQ ID NO: 123400 - DNA, 171 bp, Zea mays
  Clone ID: MRT4577_44021C.1
tcttttttttcactggtcttcacgtccccatgtcctggaggggagtcctgatacgaatccagtctattctggtggctgccggctcttgtcctgaacgctggtgcctactgcgtaggcaagagccggcaatggcggaggcgaatgcggcgaaggagaagaaggccgtggtgc

SEQ ID NO: 123401 - DNA, 313 bp, Zea mays
  Clone ID: MRT4577_44022C.1
ggatgatgtatgtggccaaccagaaataagaagttacatttccagatgctgaaaaaaaaaaaaaaaaaaaaaaaaaaaaaaaaagacaaacaaaaaaaaagaaaaaaaaagaacgggcccggggcggccgcgctacagggcccccgctcgcggccccgcgcatgcaacgactgtccgccgcgttaccgccacctaaatgcaagacactgggcggcggcccaccacgaccggcctgggaaacccccgcccttacccaactgaatcgcctgccaacacacccgcaccgcgccggctggcaaaaaagcgaacaggc

SEQ ID NO: 123402 - DNA, 564 bp, Zea mays
  Clone ID: MRT4577_44023C.1
attgtacattgttctactatctaacactgacagaataggcacgacgagaaaggctgcctctatgcctgcagagacatgactccgagcgtctcatacagaactccatgtgatgcctacactacttttcttttctttctgacgaactaactcctgctgagttgctcaatccaggacgacgtagacggcgcagtgcaccattgattacacgcgcggactagcgcatgcatttctggctaggctatcacacactctagacgatgtgcatgaactctggactgcactgtagctagcatgctgcacattacaccaggctccagctcagaggacgatccagacacatatggagatcgcctccggaccttctaccttaccctagcgaccaggatgcacaggatgacgatgcacattatgccatccagcgcctgtgaggcgccttgcgagctaccaacaccagcaaggatgcctgtagcaccatgtactagacacgctcctccagatccagtattctcacctattgggataagccgaccacgccatccttaatgcagatgatctcaccggcaa

SEQ ID NO: 123403 - DNA, 281 bp, Zea mays
  Clone ID: MRT4577_44024C.1
ctcacccataagacgacgaagtaccgtaccgccacgtggcttacacacaccagctgtgcgtgtggcacgcacagcgcagggacgaggataacgctctcttactggacaaagacgatggacgacgaccaattccgtgagcatcttagcgggatctacctgaaaagcgaggcgagacatatggacatcctgagttaaatgaactggcatacgcaaggaatgatgaatcctaacagcacctgaaccgacaaaggcatgaccattgagaagatcctgaggctcat

SEQ ID NO: 123404 - DNA, 204 bp, Zea mays
  Clone ID: MRT4577_44025C.1
cgctttggctgatgagctataagcgcgcgaggcgcagtaggtgcgttctgctccaacagaagatgccttaaagactccagccactgcttatgctacagacactggtcgcacaccagaaagacgaggtactaacggcattgttagcctgcacgctaagaagctggataagcagcacaaggaggaccttgtcaaagagacaggcac

SEQ ID NO: 123405 - DNA, 265 bp, Zea mays
  Clone ID: MRT4577_44026C.1
gctgtctccccggctggctggctcgctctctgcctggggacacagaggggggcatgcagcacacagagggacctacgggcagctgttccttcccccgactcaagaatccccggaggcccggaggactgcagcaggagcggccatgaagaagctgatggtggtgctgagtctgattgctgcagcctgggcataggagcagaataagttggagcatggcggacccggcgacaagacatctcacccctaccaagctgccctctacacc

SEQ ID NO: 123406 - DNA, 438 bp, Zea mays
  Clone ID: MRT4577_44027C.1
aaaaagaacttgaaaggaattagcacaaccagagaaacgatttgttggctagcatgtgttctcttccagtattgatgttctatgtcttcttggcctgtatttgacacaaactttagttctcacagaaacaagtggtagtgtgctctatttgatcttgtcaatttgttagtcacttgtcgcacaggtcagtgggaggttttctcaattctttttttagttctcatttttaattgtaattccacctaaatgattatgtttctgggctatttttatttattcagactgttttctttactactgcctaatttatgtttctaggctatcttgtgtggatttcgtgctccagatcacctccctaccagatgagtacatcttacttcatgagaattatcaactttatgttcttccaaaagttctagaataaaagagaatggttgt

SEQ ID NO: 123407 - DNA, 435 bp, Zea mays
  Clone ID: MRT4577_44028C.1
attgttgcgagtgatagcagaccgcacgagggagggaattcttgctacgaggaggccatgaagactgaactcgtcttgtactaccataacctcctggcgtgctatggcaacctccgggatcgacatggaccaccgctgccacggacagtacgaccgtgacagggaccgcgaccagcaggaggaggagaccagtagcgtggaccccgacgacccatcggtggacaacgagggcggtggcaacgccgacaatagcacgggggggaggctgctgcgcttcatcggggacaatgtttggcccccctggaactgatctgcctgtcccccacctgcggccgttggcggttctttgtgattacgggaaggggaccaacgaaaggactgcgtggtctatttaagggaggactcatcattgccagtagaggctgttttgatcat

SEQ ID NO: 123408 - DNA, 680 bp, Zea mays
  unsure (1)..(680): unsure at all n locations
  Clone ID: MRT4577_44029C.1
tgggaccctcgaggccggccggggtagcgtccagacgagccgtctaatacgcgtcaagtggaagtgcagagatgtatgcagctgaggcatcctaacgaacgaacgatttgaacatgaaacccaaaaatcaacatgaaaaacatcaaaccccaacaacatgaaaaaaagaactcaaaatcaaacaaaactcatcatcaacaacaatcatctccaccgaaaaaaaccaacaagggggggggggtaatntttcccttccttctacaaagccgctctactgaaaaactccaaacgcaacctcattttttttcctggcctcaagccccccctcatcggcggagacgccgaatttagaccccatgaacatcagcccccgatatccggggcatgattccgagaaacttctggccccaaaaaaatgttcagcacggaaacaacgtcattataaatggcacatcccgttatggacagtctcacgccaatgacatctacatgagatacatgacacggaactattattggccctattaaaaccgcccatgagggcgggatcaacgagatgaattttgtctgagacagggccaaccctgaaaagcacccatgctatcattttcattcaaaaataaatttaagttgcgttaatcctgaaactggagtggttgacccaaaaaaatacacagttc

SEQ ID NO: 123409 - DNA, 680 bp, Zea mays
  Clone ID: MRT4577_4402C.1
gccggccgggttgcgaccagcaagaccaaccaacccacttctgactgaccactgtgccgcgccgtggtcaccggacggacacacagaacgacgatggccgcgtcggcgctgcaccagaccaccagcttcctcgggcaggccctggtcgcccgcgccgccggcgtcgatgccggcggccgcatcaccatgcgccgccgagctcaaggtgaaggagctcaagaacggccgccttgccatgttctccatgttcggcttcttcgtgcaggccatcgtcaccggcaagggccccatcgagaacctcttcgaccacgtcgccgaccccgtcgccaacaacgcctgggcatacgccacgaacttcgtccccggcaactaactgactgagcaacgccgtacatgtgtactaccatcagatccatccattcgttcgtccgtccgtcgagtgaacagtgtggtcttctctgtactctacttgttcagatcgtaggcgtgtagtagttgcaccagccggcgtatgctcatgatcgatgtgtgctcatcaatcaatgtcaatggctgcctgctgtaagcggtcgatgtaaactaagcacagacgcatgtatcgtcatcagtggatgaatcaatctatcgatggcctgtgccattcatttttgaaacaaaaaaaaaaaaaaaaaaggccccta

SEQ ID NO: 123410 - DNA, 1135 bp, Zea mays
  Clone ID: MRT4577_44030C.1
ccggccggcaaacatctctaggaggtaggagcataactaagaataccaagtttcttatttcgttaacttgtatcttgttaagaactcgatgattatggcatctggctctgtcccctttctgacaaaatgtttcagggacttgggcaactccaacgtctccggctccatcggccctgagctcggccgccttgtcaacctcaaatacctggagctgtacaggaacaaccttgacggcgagatccccaaggaattgggcaacctcaagaacctgatcagcttggatctgtacgccaacaagctcacgggaggaatccccaagtcactctccaagctcgactcactcagattcatgcgcttgaacaacaacaagcttacaggatcaattccaagggagtttgccaagctctccaacctgaaagtcatcgatttgtctaacaatgatctctgtggaactatccctgttgatgggcctttctcaacctttcctctccgaagctttgagaacaacagcaggctcaacggtccagagctacaaggattggttccttatgattttggatgttagatgccgatcaacaatgtaccaccttccccagttgaaagggggaaagacaagatagtattatcaatagaaacctagcttcaagaatgtcgtgactatatatatgtatgatattaagactagatttgataagggtggcatagcaagtcctgatattctgtgtgcattcagaatagctgcttttatgcccttgtgttgatattttgcaaaccaaaacaaactgttctgaaacgagggcacatattgttcatgaataaaaaaaaaaaaagaagggaaacacaacatagtattatcaatagaaacctagcttcaagaatatcatacatatatatagtcacgacattcttgaagctaggtttctattgataatactatcttcaagaatgtcgtgactatatatatgtatgatattaagactagatttgataagggtggcatagcaagtcctgatattctgtgtgcattcagaatagctgcttttatgcccttgtgttgatattttgcaaaccaaaacaaactgttctgaaacgagggcacatattgttcatgaataaatttgagcctccaatacat

SEQ ID NO: 123411 - DNA, 1179 bp, Zea mays
  Clone ID: MRT4577_44031C.1
ggagaaaattaccccagacagcccttgatgtgtggagattcagcagaactaacagacagggcagcttcttgcttgaacctctgctgcatgggacgtgcagtgatcttcaagaaacctatgagagaaacttcccttgtgtcagtggccttgatgctgagtgtagcaatgtggctggtgtagcaaatgatgatccggatgcatcacttgaacggcagctaagcccaaatgttcctagaactgcggagctgtcttaccatgagctcaccccaacgtctccaggaaatgcagaggcacagcctgaaccacctctgccaaccctaaagtcaccaggagctgcaggtgcagtgccagacgatgatatgttgcctgagttgccccggttctcaccaatagatgtgccatcttcaataagaggaaatgatactccttacaaaactcctggcggaactccatcttggctcggaggatctgctgtttctgaaataccatcatctgatgggaactattcattacctggacaaagtactcgtgactctgataacatgtcattcctttttccaatcaatgaagatgatgaacacccagagatccctggtctcatgagtacacctggaggggtatctagtgtagctactggaactaccggattaggaagcatgtcggctaggacaagggctgttgcacttttctttaaggatcatgcgttttcaccctcagatgatcagcctggaaaattcaggttgaacaaaattttggaagggaaaacaaggaaacaggctgcaaggatgttctttgagacaacggttctgaagagttataattacattgatgtgcaacaagaggatccatatggagccattgaaattttagttaaacccttgctgtcagctgccaaactgacataagttacttggaatcatctgcaggacctcttgtccatctgcaaaaagatagaatccccaaaggctacctgaatattgtttccgggtgatcctggagaaggggtcaaatgggcgtaaacttctgttaaatgtcggctagggactaagttagcttagtgaatatcagtgcgaatactagtgtgacatcttatacatgtttatgtctattacttttccttttcgtccattaagaaggttttcatgatattctgtaatatgacctgtttggtcgctgctt

SEQ ID NO: 123412 - DNA, 328 bp, Zea mays
  Clone ID: MRT4577_44032C.1
ctgtcgccccattttttcccaccaacaggtacaggaacacggggggggggttcaacaaaaggggggggaccccaaacaagggcagcaaaaagaaaagcaccgacgccagagggaggccccacacgccgatgacgtgcaaacacccgaacacccaaacgaaacccgcggagcaccgagagagcacagaagaactacccgcccaacacaaaagggccaacacgggcaagaaccccccccgcacgaacaccacacccacccggcccagtggcccgaaaagggggggccagacgcccaaccaaccatcaccggcagggcggaggctgaggcc

SEQ ID NO: 123413 - DNA, 629 bp, Zea mays
  Clone ID: MRT4577_44033C.1
ggacttgtagcgttggcagacttcacacatacgcacctgttcctgcacaacttgcttcatgttatgaaaatggaagtcacgacatagacggtggaacgtccgctttacgccttcgtgtccgtcctcatgtatggcccccacgatctcttgtagcagcggaaagtcggccgggatgtacagccggtcgggtgcccgctgtgatctcgccacggagagcgacaagggacgggtggtcctgctcagcttgtcggagctcgtcgataaagtcgaagcgcagaacagagagggcaaggagttctccctccacggtgtcgcgcctagacagcgtgtcggcgacggcgttcgtcgcgcccggcttgtactcgacggagaagtcgaagcccagcagcttgccaacccaatggtgctacggaatggtggccaagcacaggtccagcagatacttcaagttgtagtgatccgtcttgactgtgaaacggcgcccctagaggtatggccgccagtggcacaccgcctggaccaaaccaatgagctcacgctcgtaggctgccagggcttgatgtcgaggtgccaccggcctactgaagaaagcgatcggatgcccctcctggatgaggacagcaccaaac

SEQ ID NO: 123414 - DNA, 713 bp, Zea mays
  Clone ID: MRT4577_44034C.1
ctcgaggccggccgggccggggctttctatatgtaaaccagccaccagtatcacttccctgctcctccgcctgacgtgacccttgtcgattcgagagccctcgtgctgtcccctctgataaccctacccccaaccaccatgaaagacaaggacaacgcctcctttaatgacgaggacaggctccgcgccggcgtgattagcagccgtaaagcgcaagatagccgcctctagctgcaagaccaagcgccctccctccgtcttcttcatcttcatgctctgaattcaggcaggagtaccaggcgcaccaccctgatatccttaacgttgtgctcgcgaacaacgaagcatgggtcaagtggcgctctatgtcagagcaatagaaacaaccctatgcgctcccagctgtgtataagaatgacgactatgacaacactaaggcaactattgagaaggagagcaccagctcaaagaacgctatgactgatgacgacgatggctccaagtcccatgtccatgatgagagatggtcatactgaccatgatatcacaccacgaactactaaatagtatttccgctgttgtcgagcagctcatcgagtgttacgtccccaattagctcactgtgttgctatctttaatgttaagatggttggaactcgagcttatgtacgagatccatctccttctcgaggatgtgaccttagtgcattagc

SEQ ID NO: 123415 - DNA, 258 bp, Zea mays
  Clone ID: MRT4577_44035C.1
atgagatctaagcattcatgttagtgtccacctgagcatacttgatccaatggtacgacggaacaggaacgctgtgaccgagctctgtatgctacatatacgacatggccatggtcggaagcgctgttgtgtctgcgacctacacagaatttcggctggaaaaagcgcccgagatggacatatgacccaatctgagccctttcaggtgatgaaatctgcatacagtgggaatccatttgtcgtgggtactacactaga

SEQ ID NO: 123416 - DNA, 1864 bp, Zea mays
  Clone ID: MRT4577_44036C.1
gttacaggctgattgatatcttgtttactgccactgatttgtgtgctgctaaaattgctaatatttctccaaaggaaacaagatatataatgtttatcttcagacagcatgaagcaagataagatatatatatatcgattcttcgaccgcaggtcagcatgtttgacagatcgcaatgcctcactcactgaatcactgaatagatcgctgtcgtcggagctatctttcgtttccctagctaagctaatagtaagtgctaatgctcgtcagaaatttccatgtggggccgatacaccacagcatcggagacgctaatgccttcagtagtagcatggcgccttccgcacgctgaagaagaagaagcgagcgagagaggctcaggctcagagccccagcaagatgtagtagaccagggtgatgggcagagcgatgagcatcccgaagatcacggctgtgctcaggatgtcgggatgaacgccatactccttggcgaacacgaacggcacgatcccctgaggcagagcagcctggacgatggcgatgtggaggaggacgccgcgcagaccgacggcgatggaggcggcggccatgaccgcgggacctgcgacgaaccggacgcccatggcgaacgccgccaccttgttcccgcacgcgatgatccgcggctgcagcgccatgaacagcccgaggctgaacatggccatcccaagccccgcgtccgacaggatggagatggactgcaggacgatggccggcatctggaagttccacctgaagcagacgagcgaccagatgacgccgatgaggctggagtaggtgtttgggttgcggatgagcttgcgccacaccatgatcaggatcagccgggtcatgacgctcgtcggcggcatcgccgtcggcgctgcggccgaccatggagtagaagtcgttgtggttgaagctggagccccgcggggtcgggttgcgcgacgactgcagcgagtagatctcggcgttggtcaggttgctggggcgcggcgtcgggcttgctgggattttcatggttttagcggcgcgagtgctgcggttcgtccaaaggaaacaagatatatgatgtttatcttcagacagcatgaagcaagataagatatatatatatcgattcttcgaccgcaggtcagcatgtttgacagatcgcaatgcctcactcaccgaatcactgaatagatcgctggcgtcggagctatctttcgtttccctagctaagctaatagtaagcgctaatgctcgtcagaaatttccatgtggggccgatacaccaccgcatcggagacgctaatgccttcagtagtagcatggcgccttccgcacgctgaagagatagaagcgagcgagagagggagaggaacagggcccgtgcaagacgagggcgaccagggtgacgtagcagacagtctcctcacttgcgaccccggcagggcacggggcggcggcggtctttacagttacagcgatgccatcacccacgggtcggtcacaggccgagcaggatgtagtagacgagcgtgatcggcagggcgccccgcaagacagcagcggcaccggggcgagccctaccagggggcaggtcccacagcactgggccggcgtgggggagcgccccctggggacgggctgccaggccagtcccatggcaacgtacaacggcgctcccggcggcatgacgtggtagaagtccaagccggtgatcaggaagccgatcgcggctcgagggaatccggttcggctttcttcttctgaagtgaaagttaaggtgtaatgtaacttggtgcggactctcgggtggagtatctgagttacatgcaggagtgggctcctccggtct

SEQ ID NO: 123417 - DNA, 2670 bp, Zea mays
  unsure (1)..(2670): unsure at all n locations
  Clone ID: MRT4577_44037C.1
accaccaccgcgcaccttcacgactcggccggcgctccgtcactcatgatggccggccgcccgcaccctgcatttgttgatctgctgggctgctcccaagctctgaccgccttgcctcatctgtgtctccctccatccgtctcctccttggctggcgctgatgaggtgagcctgtcctgagccctacaaccactctcttcttcattgctccacactaccatctcatctctccgccattttacaccactcccttctcgttgcaacccaacaaattggcactgctcgtcgccgacccctcctccctccccgcgtcccccgacaagccatccgcggccatgatcaccgcgctggacctctaccacgtgctgacggcggtggtgccgctgtacgtggccatgacgctggcgtacggctccgtccgctggtggcgcatcttcacgccggaccagtgctccgggatcaaccgcttcgtggcgctcttcgccgtgccgctcctctccttccacttcatctncaccaacgaccccttcgccatgaacctgcgcttcctggccgccgacacgctgcagaaggtggccgtcctcgcgctgctggcgctnnnnnnnnnnnnnnnnnnnnnnnnnnnnnnnnnnnnnnnnnnctggagcatcacgcnnnnnnnnnnnnnnnnnnnnnnnnncacgctcgtcatgggcatcccgctgctgcgaggcatgtacggcgcgtcgtcggccggcacgctcatggtccagnnnnnnnnnnnnnnnnnnnnnnnnnnnnnnnnnnnnnnnnnnnnnnnnnnnnnnnnnnnnnnnnnnnnnnnnnnnnnnnnnnnnnnnnnnnnnnnnnnnnnnnnnnnnnnnnnnnnnnnnnnnnnnnnnnnnnnnnnnnnnnnnnnnctcgccannnnnnacgtcgagctcgaggccgagcccgnnnnnnnnnnnnnnnnnnnnnnnnnnnnnnnnnnnnnnnnnnnnnnnnnnnnnnnnnnnnncaccgtgcgcaagtccaccagctcgcgctccgaggccgcgtgctcgcactcgcactcccagaccatgcagccccgtgtgtccaacctctccggcgtggagatctactcgctgcagtcgnnnnnnnnnnnnnnnnnnnnnnnnnccagcttcaaccacgccgacttcttcaacatcgtcggcgccgccgnnnnnnnnnnnnnnnnnnnnnnnnnnnnnnnnnnnnnnnnnnnnnnnnnnnnnnnnnnnnnnnnnnnnncgccgcagccgcaggccgtcgccgtgccggccaagaggaaggacctgcacatgctcgtctggagctccagcgcctcgcccgtgtccgagcgcgccgccgtgcacgtcttcggcgccggcggcgctgaccatgccgacgtcctcgccaaaggagcccaggcctacgacgagtacgggcgcgacgactacagcagcaggacgaagaacgggnnnnnnnnnnnnnnnnnnnnnnnnnnnncgctgtcgaagctggggtccaactcgacggcgcagctgtannnnnnnnnnnnnnnnnnnnnnnnnnnnnnnnnnnnnnnnnngccgccggcgagcgtgatgacgcggctcatcctcatcatggtgtggaggaagctgatccggaaccccaacacctactccagcctcatcggcgtcgtctggtccctggtctcctacaggtggggcatcgagatgccagcgatcatcgcccggtcgatttcgatcctgtcggacgcgggtctcgggatggccatgttcagcctaggcctgttcatggcgctgcagccgaggatcatcgcgtgcgggaacaagctggcggccatcgcgatgggcgtccggttcgtcgcaggccccgcggtcatggccgccgcctccatcgccgtcggtctgcgcggcgtcctcctccacatcgccatcgtccaggctgctctgcctcaggggatcgtgccgttcgtgttcgccaaggagtacggcgttcatcccgacatcctgagcacagcgtatggtccaataacatcgcatggtttcatcacttgccatagnnnnnnnnnnnnnnnnnnnnnnnnnnncgatgacgacgcactgaattcactatgattcattactaatgatggtgtgttcatgcagtgcagtcaaagaaccactaataagcactgatctaggacagcatcagcatgattgattgcttgttttctcctgacaatctgcatttcttactacacagtgtgccttcactcatccatccagatgatcatacaacactactgatgcatcnnnnnnnnngattctgctgcagcgtgatcttcgggatgctcatcgctctgcccatcaccctggtctactacatcttgctggggctgtgagcctctctcgctcgctttttcagcgtgcggaaggcgccatgctgtggtgtatcggccccacatgaaatttttgatgagcattagcgattactattagcttaggtagggaaacgaaagatagctccgacgacagcgatctattcagtgattcagtgagtgaggcattgcgatctgtcaaacatgctgacctgcggtcgaagaatcgatatatatatatcttatcttgcttcatgctgtctgaagataaacattatatatcttgtttcctttggagaaatattagcaattttagcaat

SEQ ID NO: 123418 - DNA, 619 bp, Zea mays
  unsure (1)..(619): unsure at all n locations
  Clone ID: MRT4577_44038C.1
ctcgaggccggccgggccgggcttcggcgaccgtgacgagcaacgacgaccacggcgacgatggccgcttcctccctctgccacgggcacttgctcctgtttctcctcgtgtccgtcacatcggcctgcctcggtaccgcggcagcgcatcaagccgggtctggggagggctacacgatcgccggccgcgtcaagatcgatggcatgagtgagaagggctatggtcttccagccaagacatcaaacacaaaagtgatacttaatggcggccaaagggttacatttgccaggccagacggctactttgcattgtatcctacaaatgattcattaccgtaagtttcaagtttattttccattttctagcaaatccacatgtgttacactggtatggctcatgctatcatacctatgttttcaagtcgcccgactaatcgtgattagcaggtggggttgggntttggggtggccgnatcagggcaggcgacccgattaggacacctgatcacccctggccgtttgaccagttgacgactagcgacgattagtcgatcgatcaggagcttctatccgaccagggttcgccgcctgtcaaaattttcgtgggcttcttttggca

SEQ ID NO: 123419 - DNA, 258 bp, Zea mays
  Clone ID: MRT4577_44039C.1
aagtatttgaggatatccctcacaggtttgtgatatatcatagataaagcaagccaatcagagcaaaataatgctattcaagactcaagaggtttgtgcttataatttctgcatgttgacagagcagagaggacaaagccaagaagctggatctctttcttcaccatcagagatggctcattgtcataactttgctatgcttggaatcattgaggtttttattgatttttctgcttcaaaactggagaaagcctctgg

SEQ ID NO: 123420 - DNA, 976 bp, Zea mays
  Clone ID: MRT4577_4403C.1
tcgggaagacaaccaacccacttctgactgccactgtgccgcgccgtggtcaccggacggacacacagaacgacgatggccgcgtcggcgctgcaccagaccaccagcttcctcgggcaggccctggtcgcccgcgccgccggcgtcgatgccggcggccgcatcaccatgcgccgcaccgtcaagagcgttccccagagcatatggtacggccctgatcgccccaagtaccttggcccgttctccgagcagacgccgtcgtacctgaccggcgagttccccggcgactatgggtgggacaccgcgggcctctcggctgacccggagacgttcgcgcgcaaccgggagctggaggtgatccactcccggtgggcgatgctgggcgcgctgggctgcgtgtttccggagatcctggctaagaacgacaaggtgtaccccggcggcgccttcgacccgctgggcctcgccgacgacccggacaccgccgccgagctcaaggtgaaggagctcaagaacggccgccttgccatgttctccatgttcggcttcttcgtgcaggccatcgtcaccggcaagggccccatcgagaacctcttcgaccacgtcgccgaccccgtcgccaacaacgcctgggcatacgccacgaacttcgtccccggcaactaactgactgagcaacgccgtacatgtgtactaccatcagatccatccattcgttcgtccgtccgtcgagtgaacagtgtggtcttctctgtactctacttgttcagatcgtaggcgtgtagtagttgcaccagccggcgtatgctcatgatcgatgtgtgctcatcaatcaatgtcaatggctgcctgctgtaagcggtcgatgtaaactaagcacagacgcatgtatcgtcatcagtggatgaatcaatctatcgatggcctgtgccattcatttttgaatcgataaaaaaaaaaaaaaaaaaggccccta

SEQ ID NO: 123421 - DNA, 409 bp, Zea mays
  Clone ID: MRT4577_44040C.1
tcgttttttaatgggggagggacagcttgtttttatgcacactgtttccaaagggtactggtaagagtgaggacaacgtggcggatactaggaaacgacatatcttactcgaacgaccgtagatgagatctacatgtgggcatagctagtactagagccggatgttccggggcacatctttatgtgagagacggcttaccctgctacacacgaagatatcttatagcccaaggtcactgctctaggttggctcatcctcgagacttccaagaggagagcgctcatgatgactgactgtttcaacaggtgaaaaatgtggtgcgcgcatcgacaaatggagtcttgtactgtgtcgcgaaaatacaattgtcaccgagacccatctaagcggcttaaagagccgtcatag

SEQ ID NO: 123422 - DNA, 331 bp, Zea mays
  Clone ID: MRT4577_44041C.1
tgagggtatctgcagcaataggcccttttaatacaactgactatgagggctcgagcggcacggccgggcccatgcaagagcaactgttgtatgctaaaagcatgaccgacagagggttgctgacattagcatggttgtaattggcaacgtcatgctggggaacaccattggtgacatgctgctcagcataatcaagggaggacgtgatgttaggacatagcatctgcggcattagcacatgtcatgctctgaaggaccatggccaacatcaggcgcagcatcatgaacggacacaccatgaaactggcaagcatctgtggcatcatgcatg

SEQ ID NO: 123423 - DNA, 192 bp, Zea mays
  unsure (1)..(192): unsure at all n locations
  Clone ID: MRT4577_44042C.1
agcccacctactaacctctagcaactacatcgacacctagacggggaggggcanaagaagaatgggttgggtctcccaactccctatcttctcatccacttacctcgcatcaataaccactatgaccgtggccgataagtcaacccttactatgagaacatccaagaaaaaagcaaccttatcacacatctg

SEQ ID NO: 123424 - DNA, 458 bp, Zea mays
  Clone ID: MRT4577_44043C.1
cttccgctaaaaagtaaagcgtccgtattgtaggatccaaattaacgaaggccgagggttccattctttgagctgtttgattccaacagctagttatacaaaaaaggccgtggttttacattttacggagggccaaaacccgttttataccaatttgaggagcagggttaacattacaattttggacagtgcagggaaaagcaccaaaacaatcgccaggctgaattcgaaaatgcagaaggccctgaaggcttagttgaaatcgcagtgtagcatagcatcaggagtacctaaaaagccgtgtaccggcagaccaaacggaacattgggaagtgttttaacgcccgctgctggaacagtcttaactagctttttaactagctttgcggtttcttcaaagcaaaaactatatccgactatcgctttacgtttcatattgattccttttttttacggcg

SEQ ID NO: 123425 - DNA, 404 bp, Zea mays
  Clone ID: MRT4577_44044C.1
cggcggtcagcacttcagcccaaccaggcagccacacaaacgtgaaacggcccacccaatcagcttgtgcggcgtgcgcccaggccaggccccagtgcttcttccaccgacggcgctcgtgcggccaagcgtgggcgcttgcgcagttgcgcttctccctgccctctcgcctctcggtctctccctctctctccccaaaacctaaaccctagagcagccggccgccgcgatccgtggagcagagcaggatgcagcgccgccgtctgcctgtcttccccaagaccccgacggtgccctcggccctcaccctgtctggccgtcttccccgagaccccgacagcgccgccatctgcccgtctgccctgttcggtggctgtccggcgtccactcgcccatcgccggtc

SEQ ID NO: 123426 - DNA, 309 bp, Zea mays
  Clone ID: MRT4577_44046C.1
acccacgcgcgaggcacgcgtccggctctagagagacagcggcttgtctgctcggtcgcgcggcgccccggctggggtgtgggctgcaccggtgagcggcctccagcccctcggcggctcggcacagaccggcagcccatcgcgcgagggcgtgcgtaggccctcggcgcgggcgcggctgcacgagcatggccggcgcgggggcacggccggcgcggctccccggcatccaagcggccccgcggcggtgcgggcagcaccggcgtgcggccctcggacccttggcggctcggcgcatgcgcgcccacc

SEQ ID NO: 123427 - DNA, 779 bp, Zea mays
  unsure (1)..(779): unsure at all n locations
  Clone ID: MRT4577_44047C.1
ccgggattgctccaccagttgatcatgtcttgtgacttgtgaagtgtgttcctatctgcatcaccttccttcgccttgcaaccctttggctagttcattcatacgaatggattattctaatttgcgtcgccaagctgcatccatgaaaaagactctctttgatcaggggtacctagatgagcaattttgccaggtggaagacttgcaggatgaagctagtcctaatttcgcggaagaggttgtcactttgtttttcaaggactcggccaggctaatatcaaatgctgaacaggctctgtaagtaaaacatgcagagcaagggagaagtgatttcttgttcagaaaataaagaaaatatgatgcaagcagaagtgttggacttgactgattaaaattttgtgacactgctgcagggaaaaataccccaaagatttcaatagatgggatgcatacatgcagcagctaaaaggcagctgttccaggtatcttggtgctgcatctggatattttttttagttgcatacgatccattctgtgtgactgattcattacagcacacagaccttactttatagttctgtgaacaatgaggactactgagtttaactactgaacatcctgcaaagctgacactatcatttttgaaacaactactgcatgcttcaccttcttaaaaaaagtggggaaaaaaactgaagcatatcaatgtctcactaatgacatgtccagtatgcttgtaaaccaaggttcttggaggctntaagctggtctggtatctc

SEQ ID NO: 123428 - DNA, 373 bp, Zea mays
  Clone ID: MRT4577_44048C.1
aaggaaagaccgggcccttcaaccctcccggtccacgtggcttcccggttccgcccggccccgacggcatgacggaaaccattgctgtcccgggcaccccatcagtcgatcacggcttccttgtaacccggcactgtcagacaacatacgacccccagtgcccttctgcgaccaaaatactagtccccggaaactttatgctctacgttcaatggaaccagcgggctcacggccatgacttgggcactgtgggcaactgtctgcggaagttcattctccatgcccttactcttctgtaacatcaacaatgtcttgaatttcatgttcttcaacgactacttctactagctgcacacctccggagcccatgccc

SEQ ID NO: 123429 - DNA, 587 bp, Zea mays
  Clone ID: MRT4577_44049C.1
aaaatggaaggaatgtattacacatgagacaataatcccatctttgcagtaaaggttggaaactcactacacaaggttcccatcccttcctctcctctgatttttttttggttcttgaaaaaacaatctcttattacagttttgtgcatatccatgcatatcatctcttgtttcgcttcgtatgctgacccctaattgctgcgcagcagggccaccgggccagtcagttgtagtgaggtatcttcttgggtcatactccgttttcctgcaactcctagttcttacatccaggcctggtggcagctccagcaggaccagcttgtcgtagcagctgtgtgtattaacacaaactgagatccatggctcatgacacaagctacagaacgatggatcatggatgagatgtgtggcggatgattacctggaaataggcctctagtttctgcctcagggcaccgtgctccctcttcactttctggaacgatctcatacaactgcaagccaaaacaatccacgggagtaaacgatggctgttctcatttcttgacatgatgactgatgaggcaaaaatctgaaagagctaagca

SEQ ID NO: 123430 - DNA, 1694 bp, Zea mays
  unsure (1)..(1694): unsure at all n locations
  Clone ID: MRT4577_4404C.1
actacgggtgggacaccgcgggcctctcggccgacccggagacattcgcgcgcaaccgggagctggaggtgatccactcccggtgggcgatgctgggcgcgctgggctgcgtgttcccggagatcctggccaagaacgacgacccggacaccgccgccgagctcaaggtgaaggagctcaagaacggccgccttgccatgttctccatgctcggcttcttcgtgcaggccatcgtcaccggcaagggccccatcgagaacctcttcgaccacgtcgccgaccccgtcgccaacaacgcctgggcatacgccacgaacttcgtccccggcaactaactgactgagcaacgccgtacatgtgtactaccatcagatccatccattcgttcgtccgtccgtcgagtgaacagtgtggtcttctctgtactctacttgttcagatcgtaggcgtgtagtagtagagtacagcaagaccaaccaacccacttctgactgaccactgtgccgcgccgtggtcaccggacggacacacagaacgacgatggccgcgtcggcgctgcaccagaccaccagcttcctcgggcaggccctggtctcccgcgccgccggcgtcgatgccggcggccgcatcaccatgcgccgcaccgtcaagagcgttccccagagcatatggtacggccctgatcgccccaagtatcttggcccgttctccgagcagacgccgtcgtacctgaccggcgagttccccggcgactacgggtgggacaccgcgggcctctcggccgacccggagacattcgcgcgcaaccgggagctggaggtgatccactcccggtgggcgatgctgggcgcgctgggctgcgtgttcccggagatcctggccaagaacggcgtcaagttcggcgaggcggtgtggttcaaggccggcgcgcagatcttctcggagggcgggctggactacctggggaaccccaacctggtgcacgcacagagcatcctggccatctgggcgtgccaggtggtgctcatgggcttcgtcgagggctaccgcgtcggcggcggcccgctcggggaagggctcgacaaggtgtaccccggcggcgccttcgacccgctgggcctcgccgacgacccggacaccgccgccgagctcaaggtgaaggagctcaagaacggccgccttgccatgttctccatgttcggcttcttcgtgcaggccatcgtcaccggcaagggccccatcgagaacctcttcgaccacgtcgccgaccccgtcgccaacaacgcctgggcatacgccacgaacttcgtccccggcaactaactgactgagcaacgccgtacatgtgtactaccatcagatccatccattcgttcgtccgtccgtcgagtgaacagtgtggtcttctctgtactctacttgttcagatcgtaggcgtgtagtagttgcaccagccggcgtatgctcatgatcgatgtgtgctcatcaatcaatgtcaatggctgcctgctgtaagcggtcgatgtaaactaagcacagacgcatgtatcgtcatcagtggatgaatcaatctatcgatggcctgtgccattcatttttgaatcgatcaacatcactccatcgatcgaccaanaaaaaaaaaaaaaaaaaaaaaaaaaaaaaaaaaaaaaaaaaaaaaaaaaaaaaagggggcg

SEQ ID NO: 123431 - DNA, 433 bp, Zea mays
  Clone ID: MRT4577_44050C.1
gccggccggattaccacacttatcatcatgccgcggtacattctgcactctctagctctgcactctctcgtctgatccctgctatacaggcattcctgtgcacccgtctgaggagccccacttcacataaaaggcccatcatggaccggatcagacctaccctgagcatgctggcacagtctgatccaaagaattcatcgtaaaacatacaaccgtcctctcgaaaggtccgtctgtagatttcctaccgtcaccagagctgccaagacataggctcgacacgcatatgctggtctgtcactatagacacattccgtgcgaaaacgctagaaccttgtagtacttcctcatacagctgtgatcttctcgatgtaaaccgtactgaaaataagccgattgcaacatctgaacacggatctaggactctgcatac

SEQ ID NO: 123432 - DNA, 351 bp, Zea mays
  Clone ID: MRT4577_44051C.1
ttttctgtcgaccttgttggtcctttccgtgtgaggcctgcaagctccgcctgctcgcctgcgtgtgctcgtcaattttcttggtcgtgtctgccgagctgaccaacgttccagctcgccgttatcaccaagtcccacgctaccgtgctgttctctcgtcgtcgtccattcctattttcccccggcatatgcccactccgtcttggcgcgtgtcgtcgtctttaatctcagtaactctttcgatatgcgcctcaccatgcttcgcctcctcgtgatcagccccatctgggtcatgtgggcggatgatctcaacacctatcagatgttcgacgacaagcctaaaccaggatt

SEQ ID NO: 123433 - DNA, 330 bp, Zea mays
  Clone ID: MRT4577_44052C.1
gggaagcaaaatttcaggggcatattataagaagtccccacccccccataatcagggtttttttgaatcccccaaaacaaaacggccccacgaacggggaaaaaaaacaaattttttccgccccaaactccaggggggcacccagaaaatcccccgggcggggtccttaaaacattggggggggggattaaggttttattaacaaaagcggggaacctttcctattttaagtggaaaaaccgcggggggtttggcatttgaaaaagggggcacagcctctatgctaaaaccggccatgttgatccccccataaaaggtaataaaaagggg

SEQ ID NO: 123434 - DNA, 364 bp, Zea mays
  unsure (1)..(364): unsure at all n locations
  Clone ID: MRT4577_44053C.1
aaaaaaaaaagatgtttgtaaagaaaaaagggggaaaaaacaaccaaaaaaatagaaagtggcaaaaaaacagctgcgggtggaacttaaaagattggaatgaggataggagccggaggaaaaaaaaagcggaggttgaggggcatgccaagacaacccatagaaaaactcctccccaaaaaaaaaggtgactccgccaactaccgaaagctaaaagacctcgacgtgttcgccggccgctagcgctttgttgaggacgagcacgaagtnacggtagaagcggatgaacatgcgcaagggcgcgaagtcngggaagacgaccgacccgttccaaagngtgtngncnnagccgatgaggcccccc

SEQ ID NO: 123435 - DNA, 541 bp, Zea mays
  unsure (1)..(541): unsure at all n locations
  Clone ID: MRT4577_44054C.1
gggggggggggtttgcctgacagggagaagttttgatttgtgcatcatagacatcaagcgggcgagagattcattaaaaccaaaactttattatgaccatgcgtatattattgggcataccacacatgagaatgtgtgtcgtcttacggggggggggggtatatagatagagagagatgggtagaggagatttcccaaatatcactgagatcagtagtgaggggcgggaatgggcagcgggagacgccacaggggggtgggcgggaggtgggcangtgggactgggagaggccacccatggggcggatgtgctgcgccatcatcatgggcatgggggggagaccctgggctgccagcagctgctgctgctgctgcatcaaagcgtggtcgtacaggctgctgctggggggancgggacgctcaagctgcgtcatcatctgcagctgctgcgcgacgggactgcacntccatcatcctcatctgctgctgggagcactgttgccggagcgggtgggaaatggggctcgggtgcgcacacccg

SEQ ID NO: 123436 - DNA, 407 bp, Zea mays
  Clone ID: MRT4577_44055C.1
ccccaaaccaaacccacttttgggaaagacgggggctccaccctaggaggggaatcggccgcttttataaatggttaagggggggggggggggttttttgggggggtccattcctcaggggaacatcggctaaccaatggggccggggatgggggccaaacaacggggttttggggttttcccttctattgggttctggggggccctggccaaatttttgggtggggtcccctattttttttttggggcatccaacatacatgggggcagtccgcccggggttgggggatatatcaggggccggggggggggcaaaccctccaacttggggggggggggccccaactttccagggggggtcggcatcaccagggggggggcctatggatatagctttgggccaaaag

SEQ ID NO: 123437 - DNA, 601 bp, Zea mays
  Clone ID: MRT4577_44056C.1
gggacctcgagccgggcgggacccgaaccaaagccactcggatccatctcccactctcccctcctcgtcatcggctcctccgcctccacctccgcccgccccctgatccggatcgacgacgccgaccccagatccctttcctctccgccgtctcgcggagcgcgcggaggaggaggagagatacgaggaaagggttgaagtaatgaagaaggcagatgagatggttgagtgggaggagtacactagaggaggagggaaaaatgatgtgtgaggcatagaagaacgacaagggagggagaagagtaagaatgacatgaaatagtaggcgattgagcataaggaggaggtgcgaggcaatgaggattgagtaagagacagcaaggattataggagaaaagatgagattgagctgagaggatgtgggaggatattgtaaagatgcatgagactcatcaagagtcgtcttccattgctcccgagtcaaaggaattctataagaagaagaagggagagaagtacagatacgaagctgaaataaagaatggagctgagagaaaggatatagctgagaacgagaagaggagatacgaggatgagaagg

SEQ ID NO: 123438 - DNA, 155 bp, Zea mays
  Clone ID: MRT4577_44057C.1
acgaggttctgcaggaatattttacgattttattttctaacaacgacatcacttctcacagatgatgtgctaacaagaatttctgcacatatgcttcaatattctcaaaatacttcatactttgccgaccatgatgattacgaagccggcctttt

SEQ ID NO: 123439 - DNA, 281 bp, Zea mays
  Clone ID: MRT4577_44058C.1
gacatcgagtgcggctacagcaaccgtgtcgtaaacctgatccgcccatgttcaagacccagtatgctaccagagagatagatctctgcctacctatagtgggtcgaccccaatggcctttggacgcagaccatctttggtgcttggtatgctgcgaataaatgggagcggagcccttggacgctggatccatgctggctttggacacgctgtgtttttgtgtttaacatatctgttgtcgtcctgcaacgaattcgcaagctctagctctttcgcgcttt

SEQ ID NO: 123440 - DNA, 276 bp, Zea mays
  Clone ID: MRT4577_44059C.1
gtgttattgcatacaggctaagtccagcctgcatcaagggaagcaaaaaaagggtgcatatcctaacaaccaatacatgggccggcgccagctaacaacctaactggccgtacaatacggaaagctgccttaagaccagccgtcgcgcttacttacagactaatccgtccagaaactctaccacacagtacacacgtgtaactcacacagatctggtctgcttaaccaattagagtgcgagatcatgtgaagaaacacggccttgatagcctgagc

SEQ ID NO: 123441 - DNA, 595 bp, Zea mays
  Clone ID: MRT4577_4405C.1
cctcgaggccggccgggacgtttttctttatgtaaatcttaaaaggagaatctctcctgacgaagcatatatgacctgcggaacacgggagcgtctccagcaagcaactaccttttcccccgaccggatctttgcgtgtgcgtgatctctctcctaggctccggctcgccgattccctcttcctgcatcgatattcgatggcggtcaacgccgggaatgatatcctcgacgccaagctgaatcttcttggagatgcggccactgtaaaatctagcttgactacttctgtttgttaaggcacagtttgtctaattccagtgaatcaacaattgtagcagccttcgtttccgataccttagcgggcgatgatgagactgtcatacaccacctctgctagtactgctgctcatgaaagggatcatagcttggctcccatgtactatacggttgcagatgctgacattgttgcctatcgtgcatcactgctccggcctccttcgcccgtgtcactaaatggattcatgaacttcgagactcttcgaaatcagaagtaccatagtgtgtcttactgtaaacaaggatcatatgctagatg

SEQ ID NO: 123442 - DNA, 410 bp, Zea mays
  Clone ID: MRT4577_44060C.1
aacaaacatacaaacactcaataacatacacaactatacaatctatgtatattatacgagccccagcggcactcgacaccgaggcgcgcagggtagatcagatatccatcatccgcagaccacaagactcacttcaataggaatactggctccaactccgagtagcatgataaggtccttttcactgacctaaatcggatgacaaatgatgcgtgcatattaatttccgatgacaccacctgatcatgtacctatctgaacaaatgacactcgaactgatcttgtcaaagttgcatcatctcaaatggcaaactcatatcgtttgacactgtacggaacaaagtgttggatattactggaaggcatgaacatcatgttatggttgctgcttgcacctacagaatttgccc

SEQ ID NO: 123443 - DNA, 276 bp, Zea mays
  Clone ID: MRT4577_44061C.1
tggaagtgtcgggctagttagtacgcgttgcgcgcattatgaaccagttatcaaatcattcactttccctagtcgcagtcgaagtgcatgaaacgcacaaacgatttgaagtactcacagctggactcaaagcacacaactatgccatgtgccatcaactgctacacctgctgctggaacagatctactgcgctacctagttcatcgaacatcttcagcactgccaccgcatgatactaatgcccacactagccattcaacaaatagtgtgacacc

SEQ ID NO: 123444 - DNA, 1565 bp, Zea mays
  Clone ID: MRT4577_44062C.1
cggaattcccgggtcgacccacgccgtccgaccccaacgggcacctcgtcactcgagtactcgacaccgcccctctgatatggctcaggcacgcgtgcgccttactccggccggccgcacgccggccgccacgttcctctcgggctccaaccccagacccgcccacctcaccttcttcccgaagcttacccctacctccctctccgccgccgcagctgccaatgcgccgccgccccacatcgtcgtcgtgggctccgccaacgccgacatctacgtcgaggtcgaccgtctcccgctcatcggcgagaccgtggcggcccgcgcgggacgcagcctcgcgggcggcaagggcgccaaccaggccgcctgcggtggccgcctcgcgctgggccctacctacctcgtggcgcgcgtgggggatgacgccaacggccgactcctcgagggtgccctagccgacgctggtggtgtccgcaccgaccgcgtcgcccgcgcggccgatgcgccatcgggacacgccgtcgtcatgctcatgcccgacgggcagaactccattatcatcgtgggcggggcgaacatggagggctgggcggcggggatcggttcggaggacctggaattgatccgaaaggcaggcgtgctgctgctgcagagggagatacccgattgggtcaacgcgcaggctgcccaggctgcaaaaagtgcaggagtgcctgttatcatggatgctggtggaatggatactcctttacctcgagaactactcagtctagtggatattttcagtccaaatgaaacagagctagcgcgtctgactgggatgcctactgagacgtttgaacagatcagcatggctgcaggaaaatgccataaaatgggtgtgcaagaagtactagttaaacttggatcacaaggatctgctttgttcgtcgagggagaggagccaatcaggcagccgatagttcccgccacagaagtcattgacaccacgggggctggtgacacattcacctcagcgttcgctgtagccctggtcgaggggaagcctaagagggagtgcatgagatttgctgctgctgccgcctctctgtgtgttcgagtaaagggggctatacccagcatgcctgacagaaaatcggtgatgaagcttctggaatctgtgggagtcgaatagccgcaaaaatggcgttggtcgtgcgaatttacagagcctcgttttggcggcgatagaggtgtctccggtacgcggaattcgtgggatccatcgactgccgcgacgccttcacgtgctccccgaataatgcgacggtctccatcctcgccgatcccggatgaaacaaacgcattttccggtgccgcccggatggaacccccggcccccacacaaaataagaaacggcatcttgtgcgtttattatggccacacgtcgcccgttgtagacgcactccctcccccggttccgtgaacgcaataaacagtttcacactgggccggagctatcgcacggtaactcaggccttgcccttgtgcaagccaatgtgtttatctgaaaaaaaagaaagac

SEQ ID NO: 123445 - DNA, 315 bp, Zea mays
  unsure (1)..(315): unsure at all n locations
  Clone ID: MRT4577_44063C.1
tcccactcctcctcccacgcgtccttcctctcgttcgcacacacacatanagagactggtggtttccaaagcacaagtgtgtactatcagtctatcaaccagctagcctcgacggcagcaagcagccatcatgtctgaggataagcaccaccactttttcatccaccacaactatgactaggagcaacccgccggcgagtacaggttctccgagaccgaagtggtcaccgacaccggcgagggcgaatgcaataagtacaagaatgatgaaaaagaacacaagcacaatcagcaccttggcgttgccggcgccat

SEQ ID NO: 123446 - DNA, 110 bp, Zea mays
  Clone ID: MRT4577_44064C.1
cacaagcatgaagaacaaaacgactccactgcgtctattattctaacattcgggaacaaatggaacacagccaacaaccgtggtaaccaacaaaaccacagcgagcgagt

SEQ ID NO: 123447 - DNA, 527 bp, Zea mays
  Clone ID: MRT4577_44065C.1
gagagtcaaattttttaaagtttgatcaaaattatggcgagaatcataaagatttatgacacagaatagatatagtatgaaaatatatttaattgagaatctaatggtataaatttgatatcgtaaatgttattactttattgtataaatttggttagacttgaaaacactataaaatatagaaatatgtgtggagccaacaactaaagttagaatgcacaattttgtcaggagtgtgaggccggacctgctggactgactggatgcgtttgacaacgtctgcgacgggcaagagattgtcatatcgctgttagttcctggcttgcagcggcgaaaatattgccaagcttgtgaagcgggacgagtatatacaaagtgagaaacagaacccaggagactgccgaccatgccagtgattcagtgacccagaaaattgtggttgtattgtatgtatctactggagtgtgaaatgattgtagctctgtttagtttaaataaatagagacgaaaagaataagcatgaactg

SEQ ID NO: 123448 - DNA, 269 bp, Zea mays
  Clone ID: MRT4577_44066C.1
gatctttacatgcacgccgcgacgcttgatcctctacagcgagcgccttcttttttttttttttttcaagcaaagggttcttaagtgtggaatataaaaaaggtggtggccatcaatttctggtaacagatctccataatgtttactctcaaaagtttacctacaacacaagaattattggagaagttacaaattagatgtcttgccttgaactactgaaccatacgaaaaaagtttatagaatcgctagttacccctgcaaaccacat

SEQ ID NO: 123449 - DNA, 189 bp, Zea mays
  Clone ID: MRT4577_44067C.1
tagtgagtcgtattaaaagatcaaccgcagtcgcggggatcacaccaggggtcgccctcatacctcctcgtcactgccttcggttcgggttctaggagtcaggatgaggggtggctgtagcgggggtggtggtcacaggtgtctgggtgatgtcgttggaagcagggagcgctgcagtacagaatgtgg

SEQ ID NO: 123450 - DNA, 1021 bp, Zea mays
  Clone ID: MRT4577_44068C.1
caaacctggatttttttctgggcttggattgggggctggattggatcctaatccagattaaaccaggcctgtcaatggcaatgctgccagggccttataaagaaaaactaatgctgatgcaaacaccgacaggaattacacggctataacaattgtacaatcttacaacagggcgaggcctccaggttcctggtcttcacctcaccgcatgttccactacctgccccagttttcaggtttcctcctatccaattccaatatgttgaggtaacttccagctcggcgactaggtaaatacggcacactctacagtaagtacacaactgctgacagttgtacaggtgaatccgtgcatgtgctatcctggggatccacttcgtcaacaaaacgacaaacagcatggcactggttagagttcctacatggccaaaatttacagcaatctcaccccataaattcatgctagaatcctttcttgaactaaggtgttatggtttccagtgcccccatcaacatctggcttatagatgctacgttctgggtgattgcccagcatcagaaccatctgctgatgaactatctgtgtccgtatcactagaggatgaacccgagtcactgctagagcttccagaactacttgatctaccagcattctctcccttctgatcttccaaatgaccaggtgatgattcacccacacatctctcattatcatctgctgcactttccttaggtggatcaacatcaactgtttctggttctggaatcggttcttgtactgcaggaatttgatcctgatccgccttgccctgcctcacatgttctaccttctccggctcctgatcaggatcagcttcatccggccttaccgcagaaagctcagccttccgcttattcttagttatactcttcctatagtttgtcacgaatctatcgagctcccataatgtttcaacatcaaagctatagatatcaacctcaatctcattgtcgtgctgactgagtcggacgcgtggtcgcc

SEQ ID NO: 123451 - DNA, 336 bp, Zea mays
  Clone ID: MRT4577_44069C.1
tcgggaacttgcaatggtacaattataaggtttgcttaaaagcataaacggctgctggggcgttggtcattttatttaaggttagcatactgtacaagccactttctatgatgtttaaagtgccaatgctgatagattttgacaacaaacgtgcttactttcagccacgtttcagacatctgcatgaccagttccttacagctcctgtacacattagtgattagaagggcttatgttttggatgattaatataattcgttcaaaatacatcagacctattacatcaaaggtccctctgtgtgcccatattggcacaaaatatgggggcacaacatc

SEQ ID NO: 123452 - DNA, 583 bp, Zea mays
  Clone ID: MRT4577_4406C.1
gccggccgtttcgggagcaagacaaccaacccacttctgactgaccactgtgccgcgccgtggtcaccggacggacacacagaacgacgatggccgccgagctcaaggtgaaggagctcaagaacggccgccttgccatgttctccatgttcggcttcttcgtgcaggccatcgtcaccggcaagggccccatcgagaacctcttcgaccacgtcgccgaccccgtcgccaacaacgcctgggcatacgccacgaacttcgtccccggcaactaactgactgagcaacgccgtacatgtgtactaccatcagatccatccgttcgttcgtccgtccgtcgagtgaacagtgtggtcttctctgtactctacttgttcagatcgtaggcgtgtagtagttgcaccagccggcgtatgctcatgatcgatgtgtgctcatcaatcaatgtcaatggctgcctgctgtaagcggtcgatgtaaactaagcacagacgcatgtatcgtcatcagtggatgaatcaatctatcgatggcctgtgccattcatttttgaaaacaaaaaaaaaaaaaaaaaaggccccta

SEQ ID NO: 123453 - DNA, 1825 bp, Zea mays
  Clone ID: MRT4577_44070C.1
gcacgagctcgtcttcgttcccctttccctcctgcgcaccccgtcttctcctccccgcgtcaaaccccagcacaaaaagcaaccgcccgccgcctcctcgttcctctcccgaatcagccgtcgcggtgcctaatccggccgatcccccctccgatccgcgggtgcccgccgcagaggcggcgcctccgggcctcccccgatgtatagcaacttcaaggagcaggcgatcgagtacgtcaagcaggcggtccaggaggacaatgccggcaactacgtcaaggcgttccctctctacatgaacgcgctcgagtacttcaaaacccacctcaagtacgagaagaaccccaagatcaaggaggccatcaccgccaagttcaccgagtacctccgccgcgccgaggagatccgggcggtcctcgatgagggcggcgcagggcctggggccaacggtggcgacgcagctgtcgccacgcgccccaagaccaagggcaaggacggggacggaggcaacggaggggatgactccgagcagtccaagctgagggcggggctcaactccgccatcatcaccgagaagcccaacattaagtggaacgacgttgccggcctcgagagcgccaagcaggcactgcaggaggccgttatattgcccgtcaagttcccgcagttcttcacgggcaagcggaggccttggagggcgtttcttttgtatggccccccaggaacaggaaagtcttatttggcaaaagctgttgcaaccgaggctgattcaacgtttttcagtatatcttcttcagatctggtttcaaagtggatgggtgaaagtgagaaattagttgcgaatctgttccaaatggctcgggaaaatgccccttccattatcttcattgatgaaattgattctttatgcggtcaacgtggagaaggcaatgaaagtgaagcatctaggaggattaagactgaacttcttgtgcaaatgcagggtgttggtcacaatgatgataaagttcttgttcttgctgccacgaatacaccatatgctctggaccaggctgtgcggcgaagatttgacaagcgtatctacattccgctacctgacatgaaagcaagacaacacatgtttaaggtccatctcggggatacaccacacagtttaactgaaagtgatttcgagagcttggcccgtcggacagacgggttttctggttctgacgttgctgtctgtgttaaggacgtgttgtttgaacccgtgcgcaaaacgcaggacgccatgttcttcttcaaggcggacggtgacatgtggatgccatgtggaccgaagcaaccgggcgccgtgcagaccaccatgcaggagcttgcatccaaaggcctcgctgcgaagattcttccgccccctatctcgagggcggacttcgagaaggtcctgtcgaggcagaggccgacggttagcaagaaggacctggaggtgcacgagaggttcacgaaggagttcggcgaggagggctgacagacacgcaccgcacccatgcacgggcgctgcaccacacaaatgtatattgcttcttatgacttggattgttctgcttggaagtgggaagttgcgttacattacatttggtgtcccaactacggctactcatgccagctggtttctcgtgttgggctaccaatgggcctctgttgtcagcttatttcatttttattattacacatggaatttctccacgggtgtattattatggaataataattgttagcgtggtggagtccttgtggcctcgtgcagactgtatgtatagctatttcactaacgttccttggtttt

SEQ ID NO: 123454 - DNA, 192 bp, Zea mays
  unsure (1)..(192): unsure at all n locations
  Clone ID: MRT4577_44071C.1
aaaagcctggagtccacctacactnggtcatcggcggacggctcccatggaggcagccgagagaagcagccgcctgccagccagccatcgtctgtgcgctacttccgcggcccggatctgggagcgcggcgctgacaggggagtacagtggactacatcgtggggtgcaaaacataatagatccagatccaa

SEQ ID NO: 123455 - DNA, 2223 bp, Zea mays
  unsure (1)..(2223): unsure at all n locations
  Clone ID: MRT4577_44072C.1
cattgggtacctcgacccttccgatcttttcctttcctctccctcgtctcgtctcgtcttcgttcccctttcctcctgcgcaccccgtcttctcctccccgcgtcaaaccccagcacaaatcaaccgcccgccgcctccgctcccctcccgtcccgaatcagccgccgcggtgcccaatccggccgatcccccctcctatccgccgcagaggcggcgcctctgggcctaccccgatgtatagcaacttcaaggagcaggcgatcgagtacgtcaagcaggcggtccaggaggacaatgccggcaactacgtcaaggcgttccctctctacatgaacgcgctcgagtacttcaaaacccatctcaagtacgagaagaaccccaagatcaaggaggccatcaccgccaagttcaccgagtacctccgccgcgccgaggagatccgggcggtcctcgatgagggcggcgcggggccgggggccaacggtggcgacgcagctgtcgccacgcgccccaagaccaagggcaaggacggggacggaggcaacggaggggatgactccgagcagtccaagctgagggcggggctcaactccgccatcatcaccgagaagcccaacattaagtggaacgacgttgccggcctcgagagcgccaagcaggcactgcaggaggccgttatattgcccgtcaagttcccgcagttcttcacgggcaagcggaggccttggagggcgtttcttttgtatggcccccctggaacaggaaagtcttatttggcaaaagctgtcgcaaccgaggctgattcaacatttttcagtatatcttcttcagatctggtttcaaagtggatgggtgaaagcgagaaattagtcgcaaatcttttccaaatggctcgtgaaaatgccccttccattatctttattgatgaaattgattctttatgcggtcaacgtggagaaggtaatgaaagtgaagcatctaggaggattaagactgaacttcttgtgcaaatgcagggtgttggtcataatgatgataaagttcttgttcttgctgccacgaatacgccatatgctctggaccaggctgtgcggcgaagatttgacaagcgtatctacattccgctacctgacacgaaagcaaggcagcatatgtttaaggtccatctcggggatacaccacacagcttaactgaaagcgatttcgagagcttggcccgtcgaacagatggattttctggttctgatgttgctgtttgtgttaaggatgtcttatttgaacctgtgcgcaaaacacaggatgccatgttcttcttcaaggcagacggtgacatgtggatgccatgtggaccaaaacaaccgggcgctgtacagaccacaatgcaggagcttgcatccaagggcctcgctgcaaagattcttccaccccctatctcaaggacggattttgagaaggtcttgtcgaggcagaggccgacagttagcaagaaggatctggaggtgcatgagaggttcactaaggagttcggcgaggagggctgatacaccgcgcgcggacacacacccatgcacagctgcaccacagaaatgtatattgtttatcacttcgattgttctgcttggaagttgcattcacaggattatacatttggtagcccaactatgagtaatcatggcagctgctttaccgtgttgggctaccgatgggcctctgttgtcaacttatttcaatttttatttatgcacatgaaaattttccgcaggtgtattattgaataataattcttaacgtggagcccttgtggtgctagtttcaaaaaaaaaaaaaaaaaaaaaaaaaaaaaaaaaaaaagaaaattaagaaaaaaaaaaaaaaaaaaaaaaagtgaagtatttgcacaagtatagattgacatgtaactctgtttgtttcccccttctttcttttgttttattcctctttaagttctagtgagtctggatgactatatatgttgtgttccaatgaggccaggcaactttcttgttttcagagtgaacttggacaacataaagtgctatagtttaaaactttaaattaacaaatttactggttcaatggtagtttggtatatgaagtgaccatcatggactattgattttctgaagtgttaacagttttaccaacatgatccaacgnaagtttgttctgtgcttctgcatctcagaagccacagcagaaac

SEQ ID NO: 123456 - DNA, 313 bp, Zea mays
  Clone ID: MRT4577_44073C.1
gccgggctctggaaccctaggccctgctgcattgtcagccgccggcaatcccttcccgtgctccgcaaccgctgagtgagaagaagagatggccggcaagggcgatggcccggctatcggcatcgatctcggcacgacgtactcttgcgtcggcgtgtggcagcacgaccgcgtccagatcattgccaacgaccaggggaaccgcaccacgccctggtgcgtcagcttcaccgactacgagcgcctcatgcagcgatgcgcggcaagaaccaggagcggcgtgaaccccatcgacaccggggtgctgatgccg

SEQ ID NO: 123457 - DNA, 754 bp, Zea mays
  unsure (1)..(754): unsure at all n locations
  Clone ID: MRT4577_44074C.1
ccggccgggctctctgtttccagagttctctgtctccagcgctttctgctttttcagtattcgcgtacctgaggagagaaagagagagcgagttcgccggcagtcgccgatcgccgtcggtgcagccattctggcagccggcgccaacaccgacgccgacgcaaaggccaaggacgcccctgtcatctcgccgcccttcgagagcatcccggagctccacgagggcgccatgaagggaaagtgggaagctactccttcgccttcccaaacttggtagaggacaagatgaactactccaaggagccgtctcagcaggacctccagccggagccagcagcggcatcggcggaggcggccaacaaggccgtgccaacaccggcagaagctgaagcgagggcagacggcagaggcgcagccgcagacgagcagcaacccggaggcgactccggttccgggagcaggacgaaagggcggcttgttctcaagcttcccctgctgctgaatgctgataagcgagcaacatgcagtggccagcatggtatctctgtaaatcaccactagctcgggcgttatgtaaaaatggagtgttgtagagtgcgaagaaatgcagggtgcaagtgtaaggggcgaagggtttcctcttcctggtacaanaaatggcgttgnngcagcaaaggttctgagagtagagttataataatgatcctttcatgtacataaccaaaggccagggatgacagggggtactggtggc

SEQ ID NO: 123458 - DNA, 244 bp, Zea mays
  unsure (1)..(244): unsure at all n locations
  Clone ID: MRT4577_44075C.1
gctggtacgcctgcagtacccggtccgattcccggtcgggcggggcgttcaaggaaaaggaaaggatgcatcgtccttttgtacaaatttccattcantttttccaggcaaggcgcagagctgtaaaatggcagatgttgtgtggtgttctctggcctttgtgcttgtgcactaagtcttggtaattggcatacatgctcccttcgtaaaaaaaaaggagtcttaagtacaagattttttttct

SEQ ID NO: 123459 - DNA, 710 bp, Zea mays
  Clone ID: MRT4577_44076C.1
cgttgctgtcgggatttggtgcgtctgatcggaggcgtgggagagaaggcctcggcgccgtgttggctcgtgctcttcatcgacggacggaggctgtcgtgctggagaggttaaagtgtttggtgtttcgtgttgaactgtgcgcgtgcggtggttgcttcgtttggtggtatatggtagaactgtagattttgatctggactgcgtgaagcaaaagaagggggaaaaaaagaagattcagttttggagtgaaattgtggctagtcgggaatcgcaaggaagatgagttccgggtcggcggtgactggcggtggtgcggagcaggcggcggcggtgccgctggggcagaagctgattgtgcacgtggcggagaacggccacaccttggagttccagtgcggcggcgacacgctcgtcgaggccatccagcactccatccagctccactgcgaaataccccctgccgatcagctcctcctctgcggcaacatctccctcgacggcgccaacgcgctcgccacctacaagcttccgcgggacgaccgtgaggtcttcctctacaacaaggcccggctccttgcggactcccggcccccggcgccggagtccctctacatccctgagccaaatattcctccgccgccccggccgcagggctcaccaccttcggacgcatctgcagaccccgcgctgaaggcgctggtatccta

SEQ ID NO: 123460 - DNA, 1328 bp, Zea mays
  unsure (1)..(1328): unsure at all n locations
  Clone ID: MRT4577_44077C.1
taaatctgaagggtaaggcaaaatctaaatgccccaaatccattacagccaaagatcaccaaacctacagcaaacacttaacctgacaaaaaattattaaaccacaaatatagcatggcctccatccagaagtttacatgaaagatatcgataatttgtgcttacatgatcatgccaatgttaaacactgacaacagggtaaaagcgccttcaattttttctgtactgcatgtttattaattgagaaatccagtaagacatcatggtttgcatacactgagttgcctaagatatcaatttgttgaaatgtacttttctcctgcaaatttttcttttgagttttgacagattaggttcttttagattttcatgctaacatctcatgtatgatctgtgcacgtgccacatgagatgacatgttcttaacacctgttttcattaggcatttacaacagcagtgagatatctgcaaatgctgattagcttcaaggttattggttttatctttgccaaataactgtaatactgttgcagccaggggtttgcaccttggttttttatgaggggaggaagatcagatgaattttgtcgttgccaggcatgccttggtaagtacacactacttggagacgaagaaaatccacgattgtcaacatatgacagacggctcccctgctgtggctgtggaataggttggtcttgttttcttctaggtttcttgtgccctatcatttggtacgttgcagctcttctctattgctgcaagtactataatcgggatcctcgtgaacggactggactcgcagcttccgctgttctggcggttatcattacagctgtaactattgtaaccctgtctgttctgctgatatgttgtgtcaacaaacggttcttgaatagctgtgcagtttggcctaagtgatagcagcaagatatctattgcaaaacatcagcgttgaactactaactgaaatattctttagattctttagtcagtgcacttattgttggactgcaaaagggaaatcaacaaattatgtgtaacatgatccattatcacctgtgactgtacattacagattactggacctgtggaaattctgaagctatatgcagcaattccttctctcccctgaaacttttgaacaatgttgttactgataattggcctgatcagaacaatcagagttcagaacttgtatccaatctggctgaaattacatgagcagattaatctggaatggaaattgtgctgcaaaaaaagtggcggcccgtgctttcctttccctttncggtgnnttttgcgnnngngtggncgnaagcaaggt

SEQ ID NO: 123461 - DNA, 323 bp, Zea mays
  Clone ID: MRT4577_44078C.1
tgtgattgacatgatcatgctccgtcgtgagctcgcattcggctcgagctcccagaccctggacttagccaccagagagctacattttaaaggctgtcttggcaaatatactccatttgggaactcactgccttataaaggctttcatgatgctttcagaagctggccactgagagtgtaattttcagccttttatatcactaaaataagatcatgttttaattgtgagaaacagggccgagccaccacacctggcctttctgcaacatttttttaaaaacatctaataaatcttagatttttaaaaaagaattaaaatgtgg

SEQ ID NO: 123462 - DNA, 273 bp, Zea mays
  Clone ID: MRT4577_44079C.1
cgtatctctaacttttaagatatttgtttatagttttcagtgtcgatattcaaggctatttaggcagcatagttcaagagtagtagcaacaaaatatgggaagataaacaatttttatgtagacgctgctcaactacaggtcatgtccgaaagaattccttacctttttagtaagtactgatgagacgttttcttctgcagcagcctacgacctgattcctctctagcagctatgtatgctctcttagcttcttcttcaccctctgcaccctc

SEQ ID NO: 123463 - DNA, 1519 bp, Zea mays
  unsure (1)..(1519): unsure at all n locations
  Clone ID: MRT4577_4407C.1
cgaagctcggaattcgtttcgatgccgcggctgctcttagtcgtcgtcgcgatcttcgtgtcgatatctgccgtcgcggcagccgtcataaacgtcaagaactacggggcccatggcaatggtgtcaatgacgacaccaagccactgatggcggcgtggaaggcagcgtgcggatcagccggcgcggcgacgatggtggtgccgccggggacgtactacatcggcccagtgcagttccacggcccctgcaaggcctccaccttgaccttccagctgcaggggacgctcaaggccgccacggacctgaaacggttcggcaacgactggattgagttcgggtgggtgaacgggctcaccgtcgccggtggcgtcattgacggccagggcgccgcctcgtggcctttcaacaagtgtcccattcgcaaggactgcaaagtgctgccaacaagcgtgttgttcgtgaacaaccagaacacggtggtgcgcgacgtcacgtccgtgaaccccaagttcttccacatggcgctgctgtcggtgaagaacatccggatgagcgggctcaagatcagcgcgccctccaacagccccaacacggatggcatccacatcgagcgcagcagcgggatatccatcatggacacgcacatcagcacgggcgacgactgcatctccatcggccagggcaacgacaacgtggacgtggcccgcgtgcagtgcggcccaggccacggcatgagcgtcggcagcttgggtcgctactccggcgagggagacgtcacacgggtgcacgtccgcgacatgaccttcacgggcaccatgaacggcgttcgcatcaagacatgggagaactccccttccaagagcaacgccgcgcacatggtcttcgagaacatggtcatgagggacgtgcagaaccccattatcatcgatcagaagtactgcccctactacaactgcgagcacaagtacgtgtccggggtgactctcaatgacattcacttcaagaacatcaagggcacggcgacgacgccggtggcggtgttgctccggtgcggtgtgccgtgcaggggtctggtgctgcaggacgtggaccttaggtacaaggggcagggtggtacatcggccaagtgcgagaacgccaaggccaagtaccttggctaccagtttcccaaaccctgcccctaggtgccggtgcttgtccggccgtattttagctcatctctgtccactctctggtgtccggtgaagtgggctttgattcttcggtcgtgttctctagacgttttttcttcttctcttctgggttttcctgtttgctttcttgattagctgaatttcgcggtataatgtcagttgcttgtatcagtgaatttgtgaataccagtcattgttgaatatatatatggggaataatgccttgataaaaaaaaaaaaataaagggcgaaaaaaaaaaaaaaaagggcgggaaccggaaagtgagctggaccggtccctggaggtttccangcattccctata

SEQ ID NO: 123464 - DNA, 374 bp, Zea mays
  unsure (1)..(374): unsure at all n locations
  Clone ID: MRT4577_44080C.1
gccggccggtccgaaagtatgcatcgaactcgcagctctagcgtcaataagatgcagcggcagcgaaatcatactccacaccacagacccctcacggcctcaccaacgttttcgtatggctaatgattcacaggccgtagctatgccgtcctcctcccgcctccacggtggtcgccacagagcagaacctccctcgcatccaccagcgcccagtgagccgagggactggacggcgctgcctcaggacatcctgataaccgtcttcctcaagcttgggccccgcgagatcatgctgggcgccgagttcgtgtgcacgacgtggcggcgtgtanccgccggagaggctctgctcgggagccgcaccgacatgaccg

SEQ ID NO: 123465 - DNA, 223 bp, Zea mays
  Clone ID: MRT4577_44081C.1
gtatgaataattttatttttgttgttgtttctttacataataaaagcgaggctggagggatcttaaataaggcacatgggtgcaaaaaaacattagatgtagggaggcgggacaactcaaacacgggatcaagggcgcacaaccaaaaaagagcaggggggggaggaacaaaaaaaaacgggattgttattcctaaaaagggacgcgacagaggggcattgct

SEQ ID NO: 123466 - DNA, 629 bp, Zea mays
  Clone ID: MRT4577_44082C.1
cttctcctaaatttcactttttaaaataatattctctgtattttacaacacactctaaaaatatcatcttttatatcttctcagtctccatagtaacatttcctaaattaggtcctctataattatagtggtatcatattaacgttttctaaattatgtcctctatataattatagtggtatcagatttcactatacatatactggtggtagcatgaaaacaacggtttatttttctgttcttctgctcaaccatttcgtcaaacatgtgcattgcaagctgttgtcgcctttcttccacagcttcactccaattgggcacaagaaaagaaatcgaagctacaagaataccgcgggcagcacggcggcctctgcgtcagccaagacgagccccgcgactgcgcctggtcgacgaccacgcactcgtcggcatcaggcacagccgagcgctcccagcgctcatgtctgttcatcggcgttggaaacgagctggtccccgccgtccgcaatccagcttcaccagcgtcaaagttgccccatcaggggcgtagcgcgtggctatggtggccggagctaacttgctagttttgggcacggcgaagcccgacgccagggccttgaacgcaggca

SEQ ID NO: 123467 - DNA, 363 bp, Zea mays
  Clone ID: MRT4577_44083C.1
tttttgtaattaccttctttttcttttttttttgtggtttttttttttttttttttctttaggcaacacaagggggtaggggctatataattccaaatagggtttttattcaaatatttttagttcaaacactataatggttgggcctttattggttaacacccttataggaggataacgggtagggagacacaattttttaaatggaaacccccctaatggcattggtggtgcaaggaatattttggtaggatgagggggacaagccccacattgttgggggggattgggccgttgtcaaaattgcccccccactttggggggcttggggggaaccaaataactcacatgggtggtgggggg

SEQ ID NO: 123468 - DNA, 398 bp, Zea mays
  Clone ID: MRT4577_44084C.1
aacgatcactgattactgataacaaacccaaacaaaactattgaacaatgaaatagataacatgtacaaaaacggataggaactaagtacaaagaagacaaaaatgggggtggaccttttagagcaccaaagttatgaaacgcttgctggcactggctaaattcttataatggggcacttaaataataaaactgggccgcggttttaaaattcttgtattggaaaaaccttggcttacccaaatttattggcttggaagaaaatccccttttacctagctggctatttaaaaaaaagaccacaagggtttgctttttcaaaaatttttcaatttatattgaaaatagggaccccccttttatcctataataaaacccggcgtttgtggtggttccccc

SEQ ID NO: 123469 - DNA, 821 bp, Zea mays
  unsure (1)..(821): unsure at all n locations
  Clone ID: MRT4577_44085C.1
tgctgaaaatcctttgataatcgtagaagacccaagttcttcacagctatgtggtgctaaatgtttcagtgaatcaactggagaaatgaggcaatcctccaagaaatcaaggagatattctgaaatccctcaagatctttatgccagaattcctgataacgctgcttcatccaaggacaactcaaaggccaccgatgtcttcaatccagggaccccaaatcacctgctacctgtacttggcctttgtgctccaaatgctgatcaggtgaactcatacaaaaactcaatttgtgcaccaagcataaaggagcataaaagggccagtggtgacgtagtcaacaaacaactgtcaactcccgctgaccattctaatgagcttagaaacgaagttcaatcagcttctgataaggtcatctttcctggtgcatccgaggaagctttgcgaaggataagtaacatgatcccagataattattttcccttcagtcatattcctcctatatagggagggggggttgatcctgttgaatatattggagcttcgaatgcatcatttcaagggaaactgggtcttccaaacttcagtctggaagacaacactccacttaagcatattaagcctatacctgatatatttccttacctgtcactgggtgctcataaggattattttcgtaatttctgtcccagagttgccagatagntcattattaccaaacttcatggcagatattgctggtacttcaaagcaaaatcattcatgtctggtccacctcctgggctggggtcttagcccaggacaccaatccatttgactatgc

SEQ ID NO: 123470 - DNA, 402 bp, Zea mays
  Clone ID: MRT4577_44086C.1
ggatccggatcttttgttgaaattttaaaccagagccaaacacacatggcgaggaatcataggaaatccctacccaaccataaaattttgtgcttaaacaaattctatgggactgaaccatggggaaagaagcctatctcggctcgctccaggaggccatattcttggtctctcggttctttaaaacgaaattgacgaccttgtgatcctgtactacacacgcgctgacgattctatatattgctgcggtcccagctccaacaccaaattcaagtcggttcctcacatatgtggttatgggccaaccttgaccaattgtacacacaaaaactcaagaaaggaaagggtgggaaattttatattgtggctaggccttttcggcgaaggaactcgcttgttggg

SEQ ID NO: 123471 - DNA, 309 bp, Zea mays
  Clone ID: MRT4577_44087C.1
gggggcaaaccaaaaacaaccttttaaggcttccttttcaacaccaaaaaggccacccccaccccaaaaattttggggcccaaaacaaattaaaccattatttttactccattcaaaaaaaaaacctccggtttttaattcttttcaaccgccaaaaaacccccctaaaacctaatattccacttccttaccaacagaaaatactacttgctaaataaattacaaaagggcaaaaattttaaccaagcaaacttaaaaacatttccgcttcccaaaattttttcccaaccaccacctttttaacaaaaa

SEQ ID NO: 123472 - DNA, 143 bp, Zea mays
  Clone ID: MRT4577_44088C.1
gatgacgtcgagactgggacggtggtcgcagaagggcgctttgagaaggatagggctgaactcacaacgtaggacattgccaacgacagcaatggagcccctaccgcactcctccataatcatatacctatatatctttactc

SEQ ID NO: 123473 - DNA, 361 bp, Zea mays
  Clone ID: MRT4577_44089C.1
aaagggaacggcacacgcaatcggatgaaccaacatgcctgtggacacaagtacatgagctcagagatgacaccaaacatgcatagagagagaagccaactgaataacttggtgagtccatatctatcatacaccacacacggctggtgcatggcatacagctcggccttgtttataagtggggaaccaagaacacaagcttgttaaattgtagtgatgtccaaggaaggggtgggatgtgaggagcaacaccaggggggggacttgcagctgcttccgaggccggaagcaagggcgggctctatggactccgcctggggctcaacgaaaaaaaaaacaccttgttgggggggccacccca

SEQ ID NO: 123474 - DNA, 617 bp, Zea mays
  unsure (1)..(617): unsure at all n locations
  Clone ID: MRT4577_4408C.1
ccccggcgactacgggtgggacaccgcgggcctctcggccgacccggnaacattcgcgcgcaaccgggagctggaggtgatccactcccggtgggcgatgctgggcgcgctgggctgcgtgttcccggagatcctggccaagaacggcgtcaagaacggccgccttgccatgttctccatgttcggcttcttcgtgcaggccatcgtcaccggcaagggccccatcgagaacctcttcgaccacgtcgccgaccccgtcgccaacaacgcctgggcatacgccacgaacttcgtccccggcaactaactgactgagcaacgccgtacatgtgtactaccatcagatccatccattcgttcgtccgtccgtcgagtgaacagtgtggtcttctctgtactctacttgttcagatcgtaggcgtgtagtagttgcaccagccggcgtatgctcatgatcgatgtgtgctcatcaatcaatgtcaatggctgcctgctgtaagcggtcgatgtaaactaagcacagacgcatgtatcgtcatcagtggatgaatcaatctatcgatggcctgtgccattcatttttgaatcgatcgaaaaaaaaaaaaaaaaaagcggcc

SEQ ID NO: 123475 - DNA, 514 bp, Zea mays
  unsure (1)..(514): unsure at all n locations
  Clone ID: MRT4577_44090C.1
tcaaaccatgggaaaaagtggtagtttcacccacgagagcagcttccaaggattccgaagaaatgccgacttcagatgctatatcactaacactaatttttccgctgtcaattagctttctaagcactacagcaatatcaccagaacttcccatatgatccccaccaacagagggatgaccagtacctctttcccagatttgaataggttgagtatttgcatttctaactgtgttagctaaagcaccttgctctattgtcttgactctgatcaggttaccagaactagaggtactggttccacaattggtgaatttatccttgtttttgcgcgtgaaccttagtattggaatttttccagaattgagggtggtattgtctgggccagattttctaggattcagttcggaagcaaggntactgntctctacagaactggtgtaaccaactgcagaatgctttgagcaaaatgctctcaactcaacattagggtgtctggatttcccccatatctc

SEQ ID NO: 123476 - DNA, 229 bp, Zea mays
  unsure (1)..(229): unsure at all n locations
  Clone ID: MRT4577_44091C.1
ctggaatttttcttggcgtggtcgcggaaaaagtctttgttcgttatnggtntntggnctgtatttagtcttggacggagtttaccgncngatttgggnntgattnnnaatctttctgantngttgacggcgcctcgtgatgcgacagggtccgttttggtcgtttttcncaccctcccatttgtggggggccagagaatttgggcccggtccgtcggtgtggacgcct

SEQ ID NO: 123477 - DNA, 429 bp, Zea mays
  Clone ID: MRT4577_44092C.1
actataattgcataagaagattacttattaatcacattatgtgattgcacacaaatgataagcagggagcggaattagcaggacatgctacaaggccttgaaggtgtctacacagccacgatggcacacaagcttgcattgcgatgcaagatgaacctactaatgttctgccagactatattctgtatacacaggacattctagactctgaaaaaacagcctaaaatacttacaacgcattatgcacaacttacatgcacacatacctggatccacaccacataaactgtaggcatcacatagcattcacgcacctccattatctcaaaggcaccaatggtttctcctatgccggatctcattattcactcacttaggggctgaagtctattacttgatgtcataaggctcttgccaaatctcattatg

SEQ ID NO: 123478 - DNA, 540 bp, Zea mays
  Clone ID: MRT4577_44093C.1
ggccgcttttttttttttttttttttttttttttttttttttttttttttttttaaaaaaaaagccccggctcacagaaacgccaactcagggaaattttctccaatccgagaaaacggtcatactggcaaatgtttttaataccttgcaaatttacttcattcgaaaccagcttgataccaagccggggggggggccacagaccctggcggtagaaaaccctgcaaacaaagcaatcgggagacaattgtgcccctttttaaacgcttaccccctaaagctacataacaacgttgggggacaccatggtctaagcgcaccatcgacactgatccctaacaaagtcgccctgaaaatgaggaacctcttttaggactcataagaggaagggaaccttaggccaccattgcttaataagacggaggcttcccacacccgcagctcttgacagacccagccttttaataaacctaccgatcaggacaccaattgctcaaacaacgaaacgattatccctaactgcataacaactgcagggct

SEQ ID NO: 123479 - DNA, 607 bp, Zea mays
  Clone ID: MRT4577_44094C.1
caaaatcgacaagaataaggtaaaagcagctttggagaagcaaagcaaatcggaaggtggtgtttcaacaaaggtaaatgcaatggacgatgacgatctacttgatagagggctagaacatggtgttgaattagctgttgaggatgagaaggttaagcagggcaagtgggacaacttgtcccatggtagcatgcctccagctgatcttcaagacactaaccaagcaatggagaacggtcaccatgccaagcagggtgtaccaacaactgctgaagacatgggctttccagacagtaaagaacatcatcctccagcatttcataggcaaactgatgttcctgagcacaaggcacagcagcttgatcacacgttgaagcaccaaaagggccaggatcattctcaaattttatgaagacacctgagcaggatgaaaaagactacaaaaggctcaagcttgaatgtttacatgattttggatgggtttaatggaaactggcgaactacaggcaattcggtatcgaattcattgtatggtgcccgatgcattttgatgagcatgtatcttcttcattggtgcctgaagatgctggagcgacacaaaaatgtt

SEQ ID NO: 123480 - DNA, 483 bp, Zea mays
  Clone ID: MRT4577_44095C.1
ttttttttttttttttttttttttttttttttttttttttttttttttttttttttttttttttttttttttttttttttttaaagccctaaaggggataattaaaataaacactggcttagttacaacaggagggacaagtaatttaattacccaaggcaagggtgggttaatgttggactaaaactgggatcctaaaaagggttgggagaatgcacaaggaacaaaaaaacatacgtccccgttaaaagtttaatgggaaaaaccaaaatggtttgattttagccagtaacgccaaaaatttaattcaatggggtatttttgggtccagttgggggctggcgccttgtactaaggccgatccgttttgtaaatgggagcaatttaagggaaaaaagggttgtttgggttgggataattaagaagggaaaaaataaaaaaaaaaactttagagattgtaaaaggggggttccaatgtttttt

SEQ ID NO: 123481 - DNA, 458 bp, Zea mays
  Clone ID: MRT4577_44096C.1
ccactccccgcggccggctcctctgcagccccagtcccaacagcagctccaccaccgccgctccgtaggcagtcaaaagctgccatggacacggacgacgcgcaggagccggcctccccaacctccgtccccgtcttcctcctcctcctcctcctcttcctcgtcggtccccgaagaagcgggcgcgcagggacggcgggcggcacccgacgtaccgcggcgtgcgcatgcggagctggggcaagtgggtgtcggagatcagggagccacgcaagaagtcccgcatctggctgggcaccttcgccaccgcggagatggccgcgcgcgcgcacgacgtggccgcgctggccatcaagggcgcccgcgacgcgcacctcaacttcccgggcctcgcgcgcctgctcccgcgcccggccaccgccgcgcccagggacgtgcaggccgcggcggcgctcgcc

SEQ ID NO: 123482 - DNA, 784 bp, Zea mays
  Clone ID: MRT4577_44097C.1
cagatgcacagatcaatctgtgggagttgcctaccaacttcaacaccttgcgtctattattgaggttcttgacccgaagctacatgaccacctagatgatgtgggctctggaatacgaccctgacattttcttcgcagcgtgtgaagaacaaggtgcagtatataaaaacaaagtttctaaatccaaactgaaaggactgcgccattttggcaagtgggataatagtaaggataaggacaaggataaggataaggacaaggataaaaatggggctgaggatggtgaagatgggccggttccaatttcagttttcatggttgcaagtgtccttaaggaaaagagagaaaagctcttacaggaagctagaggactggatgatcttatcaggattttgaacgatgtaaatgggaacttagatgccaagaaagcttgcgccggagcattgaaacttcacaaaaaatacctgaaaaaggtacaacaagcaaagaaaccttgaacgtgctatggaacacaccttcccaatggattatccttaccatttgaacatacacgaccattttctacacacaactttgagtgaagatttacaggacacgggtggtaatcgtctgacgtgtcctcagatacactgactctgatggtgccaggctagtgcgttgagtacaggatgagtgtgcaaccggtagtatgtatctcacgttttttgcactcaagaattttgtacagacagaaggcagtgcgggtagcatgccttatacatacataattatttcaatacaaaaa

SEQ ID NO: 123483 - DNA, 321 bp, Zea mays
  unsure (1)..(321): unsure at all n locations
  Clone ID: MRT4577_44098C.1
anaaaaaaaaaattttttttttttttttttttttttgaaccaaccgggaacattttttccaatttttaaagatgccaaattaaaaggtcccagttacttttaaagaaaataccaaatttacccagggtctacaaaggggggttttattagggtttggaaagaccctttttttctttttaaggtttggcaccccccccccccaacttgggggctttggaaccctttttaaaaacaccctttttttgggcctttttggacttggacaccttaaccttttttggctttttttaaaccttgggctttttgaagccccccttgatc

SEQ ID NO: 123484 - DNA, 448 bp, Zea mays
  unsure (1)..(448): unsure at all n locations
  Clone ID: MRT4577_44099C.1
gatcctctacagcattncgcccctccctttttatctttttttaanagaaagcaactatggatggttaactggatttggggcgggataacacaccaggttcaaatctcatgcaagcccacgcggcactggatggccatatattatttgccagcttcttccaaacatggaagacccactagagccttaaaaaagcatccaacgtcatgtgctcacatccatggccatccataaataccgtaagcacccccaccctctttatttatgacatgatcaccgccaagccacgcgagtgcacccacacacatacatatatatatgtctgccaaggtatatgtatagcccaggcgcaatctcacggatacacttacaaggcaacacaagctccaaattccttgaggatcttgtctccggtgaaccctgctttggtgaaaagctccctccattcttt

SEQ ID NO: 123485 - DNA, 1044 bp, Zea mays
  unsure (1)..(1044): unsure at all n locations
  Clone ID: MRT4577_4409C.1
atcaccatgcgccgcaccgtcaagagcgttccccagagcatatggtacggccctgatcgccccaagtatcttggcccgttctccgagcagacgccgtcgtacctgaccggcgagttccccggcgactacgggtgggacaccgcgggcctctcggccgacccgcagatcttctcggagggcgggctggactacctggggaaccccaacctggtgcacgcacagagcatcctggccatctgggcgtgccaggtggtgctcatgggcttcgtcgagggctaccgcgtcggcggcggcccgctcggggaagggctcgacaaggtgtaccccggcggcgccttcgacccgctgggcctcgccgacgacccggacaccgccgccgagctcaaggtgaaggagctcaagaacggccgccttgccatgttctccatgttcggcttcttcgtgcaggccatcgtcaccggcaagggccccatcgagaacctcttcgaccacgtcgccgaccccgtcgccaacaacgcctgggcatacgccacgaacttcgtccccggcaactaactgactgagcaacgccgtacatgtgtactaccatcagatccatccattcgttcgtccgtccgtcgagtgaacagtgtggtcttctctgtactctacttgttcagatcgtaggcgtgtagtagttgcaccagccggcgtatgctcatgatcgatgtgtgctcatcaatcaatgtcaatggctgcctgctgtaagcggtcgatgtaaactaagcacagacgcatgtatcgtcatcagtggatgaatcaatctatcgatggcctgtgccattcatttttgcaaaaaaaaaaaaaaaaaaaaagcggccgccggcatcgacgccggcggcgcgggagaccagggcctgcccgaggaagctggtggtctggtgcagcgccgacgcggccatcgtcgttctgtgtgtccgtccggtgnaccacggcgcggcacagtggtcagtcagaagtgggttggttggtcttgctggtgccggccggcctcgaggtacccaa

SEQ ID NO: 123486 - DNA, 257 bp, Zea mays
  Clone ID: MRT4577_440C.1
cgggaacccccctcttggtccgccacccccttgtctctcccttgactgcgccgccccctccccttatgacacccattctccattgcttcctcccccaggatctatccctacccaacaaggatcgacaagaggaggaccacgtccaatgaaagcacaaggatatacccaaggaagcgctcttccacaaaccatcttgcatattatctcgaggaaaccctcggtggctacactccaaataatgtgaagaacattactgt

SEQ ID NO: 123487 - DNA, 165 bp, Zea mays
  unsure (1)..(165): unsure at all n locations
  Clone ID: MRT4577_44100C.1
caccacacaagatctggtatccagattcaagtcttgncctctgcccctggagaccgagacttgaatctggttacgatatcttgggnggtgactgcacccactgcaaaagtacacacacttcccacacaaaataaacagtttcgacacggcacttaaaaagctgtt

SEQ ID NO: 123488 - DNA, 135 bp, Zea mays
  unsure (1)..(135): unsure at all n locations
  Clone ID: MRT4577_44101C.1
tcaactacgcgtntggggacgcagaagcatccttcgtttctgcttcgacgctacgtcaactatcatttgtgactgtacgactaactgtatcagctgaaggctctgcacgatcgacgacgaccaccacaacgacag

SEQ ID NO: 123489 - DNA, 585 bp, Zea mays
  Clone ID: MRT4577_44102C.1
tccccgatctttaaatattaatagagctcctcagagatctggggggggggggggggggggggtcggcccttaccgcgcgtgccttccccggtaaattagtaccatcctttactcagctcacacaaagcgtcaacgtggggttttcaaacgtaacaacaagctgcttcactggcatctgtggggtctcgaccgtgagaataaaccccatccgtggttcccccggagaagcacgcccggcggccgggaggatcgcgtcccttacccccaggtcaacacgaagtcagtttagttcaatttctatccagtagaggtggatgacgacgggggagaacgggcctacaataattctaatgcaggagggaatcctcctcttcgagttctagttgatgctaactccctacacaactataactaccgttacatcctccgtggctacaactacaaaggtccactttcaggttttaaggaaggaggccttcgagtagttccgtatgaaccgtctagaggtgcaggtcactaagacaactcctgacgacgacgaaggagtattcactgcgaccgttttgcctcgtacctcaactacaa

SEQ ID NO: 123490 - DNA, 343 bp, Zea mays
  Clone ID: MRT4577_44103C.1
catcgggatccattcttgatcaaacgccagactgacggagatgaggaaatcaaaggactcattgtcgacactgttaagggcgcagcccaaattcactaaaggagctgcggcgatattccaaccagatgggcaaggatctgcgccactggcgaaatgagtgaggtcagtcatcttcatcggcacggacgccgactgtatgttggatagccaagctctctactgtttcaagttatactgctacaggtatcatggattcaaacgtcgttagcatagcggatgaggaattctatgatacaagagggatgctcaaaaccgtcagtgcgctcgaggtcctatatgagct

SEQ ID NO: 123491 - DNA, 494 bp, Zea mays
  Clone ID: MRT4577_44104C.1
gtcatggactcccccacagaggaacaatggccccgaacggccaagattacgggaaaagaactgtcacaaactcttgagggccaatcagcaatataaatggggaaaactgactcatggttaacgggggcgccgattcatcagccaaaaaactttttttttggaattccagccaaaagcctttctaaaagagggctccgccaacgaattcttgcagggcaaaaggctgctggcttttcaaaatcatggtgataaaagggcactaactgaaacagttataagagggcagggggatacaccacaaactgctggagaaacgaaagcaatggctgtggttccaaaagggaaggggggcttgtattaactggctggccaaaagggagtagtttttggtgcggaaaataagcaggggggttcagggcggccaattggttaaatggaaaaaattgttgcttgtgaaagtaggcactatctcgctggctaaatgggaaaagttg

SEQ ID NO: 123492 - DNA, 736 bp, Zea mays
  unsure (1)..(736): unsure at all n locations
  Clone ID: MRT4577_44105C.1
atatgccggcactgctactctcccccctgaccttacctcctctccatccaactcttcctatatatacgatgcagccatccatgtatccatcatccacacatatgaacacatacaacattgtcatttagctgttcttgcttgctgctgctgaaaaacctgcatgctagcatcccctgctcagaagaaacagggctctcgaggagggctgtcttttcatctcggttttgttcttggttcgtcgaggggagacaatttttttggtggtgcaagctaggggctgaggaggtcggacatggaggatgtggccaagttcttgtttgggatttcaggcaatgtcattgctctgtttctcttcctatccccggtgcctactttctggaggatcattcgtaacaaatccacagaggaattctccggggtgccatacaacatgacgctcctcaactgcctcctctccgcctggtacgggctgcccttcgtgtccccgaacaacgtcttggtgtcgacgatcaacggcgtgggcgcggtgatcgagacggtgtacgtggtgatcttcctcgtcttcgcgtcgaacaagaaggcgaggctccggacgctcggcctggcgtcggccgtcgcgggggtgttcgcggtcgtggcgctcgtctccatgctcgccctgcacggnccagcacgcaagctcctcgccggcctggccatgaccgtcttctccatctgcatgtacgcctcgcccctc

SEQ ID NO: 123493 - DNA, 767 bp, Zea mays
  Clone ID: MRT4577_44106C.1
cccgggctgcaggtaaaaggccaaataatcaagcacaggcagcagccatacacagagcaagaaaagaatggacatggagaaggccctagccctagttctactggtatcagctgccatactcctaggcgcgcaccagccgacgagcgctcaggtgttctgccgctcgcagttcaacctggccaacgaggcgtgcagcatgcggaatttcatcccggggccgggggtgaggcgcgggggcctgccgcggcagcagcagctcaacgagacgacgtcgccgtcgacggccaccaccgccagcgctgtcagtcaggtgctgcagtcccggagcgacgacgacgacgacagccacggcgggaggcggtcccggcgccggcaccagcaccggcacagcgaggacggggagggcgaggacccgcgcgacacggcgtgctgccgcaggctcatgggcctcgacaactcgtgcgtctgccaggccaccgcgcgcctgccgcccttcatgatctccgtcaggcacgtcatcacgctcacgcccgtcgagggctgcgagatctccttcgagtgccctggcccgctcttctgagctagtcccacacaacgccgcccgccgtcgtgcagtgtctaacctcatctaaaggattgatgtggttattaataactttggatttcgttgtgcgtattgttatgtttattattaatcatcaaatatataatacgtgtgataatattgtgaattcacaataaagccaagcagaataaatgggatttgc

SEQ ID NO: 123494 - DNA, 609 bp, Zea mays
  Clone ID: MRT4577_44107C.1
caatcctaaacagaacaacctcgatctcttgttgccaacttttgatctttctcgccgacggatcaaatttgattagccacagagaaactacttctccggcctaagctcagtacacagcaatggaggtcaatgtgttgagctccaggctcgtcaagcctgcctacactgccggcgaagcgccgatgccggccaccgagtacatccctctgtccatgttcgacagggtgacgttcgagatgcagatggccatcatctacgccttcgcgccacccgcgcccaccacggcctccatcgagaagggccttgccacggtcctcgcccagtaccgcgccttcgccgggcagctcggcgagtcccccgacggcacgccgtcagtcatactcaacgaccgtggcgcgcgcctggttgaggcgaccgtggacgccgacctcgtcgacatggcgccctcgaagcccacgccggagctgctgaagctgcatcctgacctggaggcggagcaccaggaggtggtgcttctgcagctgacacggttccggtgcggctcgctcgcagtagggttcacgtccaaccacgtcgtcgccgacggccatgccaccagcaacttcctcg

SEQ ID NO: 123495 - DNA, 315 bp, Zea mays
  Clone ID: MRT4577_44108C.1
cccacgcgtacttcaacgcttctaaatacattttgcctgactcgttatcggtcgcgagggtgaacatgttatagtataacaaactttttcgcacatctataatttgttcaatatggctgatttgttatattcacttgatatatagatcgatggacaattggacacatgatatctcctactatcacaacgaattctactgacctatgtaataactataaagcgatatggatcatacctgacataggtcacatcatcttagatgtgatattcctaccttacctaatagacatacatattgtcaccgtcatcagcatt

SEQ ID NO: 123496 - DNA, 170 bp, Zea mays
  Clone ID: MRT4577_44109C.1
cttctcagggaaaaacatggaagaggtctatagattttatatagcgcacgccgaccattattttatatttgacacaaaccccggagatgcgggtatatacggccacacccaatacttattatggggcgcgcgcccccccagtacgtgatcgatcgagtagcccccccatg

SEQ ID NO: 123497 - DNA, 606 bp, Zea mays
  Clone ID: MRT4577_4410C.1
cggcgaactggcgaagctaagcaaactcctggttccacccacacaaagctgatgattcaggcgtgtggccatggcctgggtccgtggcaaagggggagggccgacgccggcgggggggcccgggcagggatggagagagcggtcgagtggacctcgggagcgagtgacagaagagagagagcacaacccagcaccagcgaggaaaagcctcgcttctgcgagggccgtgtgctctctgctctcactgtcatcgcccacaggccaccgaaccgtgatctctcggggggccatgcaacgcatgcagtgcagctagcttcttctcgtgggttatgcggatgtttcatgtgcaatatacttgcggctgcaggtggacctgtggcacagtcgccggcggggcgagggatcaagacaacctccacgaggccagcagtaaggagcggcacacggcgtggggcaccgctgtctctgcctctacttccagtcggccaatctcccaccagttcaggcgtccgtggcgccgggctccacggcgatcattgtgacgagcgacgtgcgacttgccatcctcaaaggcttcgtcgtcgtcgtcgacccgctcgccacaat

SEQ ID NO: 123498 - DNA, 2557 bp, Zea mays
  unsure (1)..(2557): unsure at all n locations
  Clone ID: MRT4577_44110C.1
gccggccgggctggcttccatttttcttccaaataaaaaccagccgcagcgggaggtggcgcgacgcgaacccacccaccctgcgaacccggccgcgaaattctcctctcggattccgccgccgcgaaccgtcccctcgacgaggctgctgccgtagaattttcttatcattcgaatagttgatgagcgagaatacagagcaagaatcttgatggtgcgtgtggtacaacttggttaaggaaagctgactgcttgaagtgaccatgttggaccatcttgctatcattgcgtctgagttaggggacgacgcaacggattttgaggttgatggcatcgacaacctcagcgagaacgatgtcagcgacgaggagatcgatgccgacgagctcgcccgacgaatgtggaaggacaaggtcaagctcaagaggatcagggagaggcagcagaagcttgccttgcagcggctggagctggagaagaccaagacaaagaagatttcagaccaagccctccggaagaagatgacgagggcccaggacgggatcctcaagtacatgctcaagctgatggaggtgtgcaatgcccgagggttcgtgtacggaatcattcctgagaaaggtaagcctgtcagtggtgcgtccgataacatcagggcctggtggaaggacaaggtgaagtttgacaagaatgggccagcagcgatcgtgaaatacgagcttgagaactcgatgctgagcaaccctaagggcggcggagccatggaccagcatagcttgatggacctccaagacggcactctgggctcattgctttcagcgctgatgcaacactgcagcccgcagcagcgaagctatccattggataagggtgtcccgcccccttggtggccaacagggaacgagtcgtggtggcctgcgttgggcctcccaaagggagaagcgcctccgtacaggaaaccgcatgacctgaagaaggtttggaaagttggtgtcctgacgggcgtgatcaagcacatggccccaaacttcgataagatcaggaaccgtgtaaggaagtcgaagtgtctgcaggacaaaatgactgcaaaggagagcctcatctggcttggtgttctacaacgcgaggagaagtctgttcacggctttggcagtgctttactacagaatgctcggcatagtagcacttcagaggacagaaacgagggcatatatagcagcagtgacgagtatgatgtcgaccgcctcgagcagcctcctcgttccacatcatccaaagaggacgagggagacgctcaccctgtcttgcagattagaggggagcagacctcaactagaggaactaataagagaaggcgccatgacacatcctccaaccaactagctattagcaaggaagagatgagtaaatctaaatctcaacagcggaaaggcccctcaacccgccctcctgttgccgaggttgaggttgaagtgacacaaagaaacgacaagacgccagaagtagtgtgcagtgcagctggtggtgatatgaactttatcgacccaattgatgcggtgggcattactaacctgccaatgagccctaaacatgtcccccctacaattggagctttgcagcagcacggagattgtcgagggaattttctatctcctgctgctgccatcaactacaacagcagcaacagcaaccaggcagcaagtgctgctcaatcaaacacttatctgggaggccatcctctggcttgtgaaggcagtgatattgccaactcatggtccggacactcatttcagcaggatgttggtcttgggcctcctattggttttgatccttcaccagttgctcaccagggttcggcagtgcagcagccactgccactgccacttccacttcctatggatcaccaagcgcctatcacgggatcaggagctctcgccacgaacggctcttacagtctcccgacagcaggcggtgtgagttctgggacaatcgtcagcgagacccaccagcagctcatggacaaccctttcttcggcgacgccggagacagctcttttggcggtcttcctttcagcctccttcctttcagtagtccgatgcttaacttcgatgaattggatgagttggtggacgacgacgacttgatgcagtacctcggcacataacacagtgtgtccaatgaatgtgctcggtgcagcctgttaggctttttcggngagagtttggtaacatgctgatggagcggcgggatgttgatgtagctgcagctcgtgacccattcatttgtggcaccgtcctgagaaggccattgcttttgtaatataacaaccccggaataatgtagtttagggtgctctcttgcctggactggatgttaaatggcattgccgtcgtaaacagggaacttgtagcctgtagagcaagttagcaattcgtggcctcgtgggcatcatgatgttggcggagaattaccgcacccgtttaaaggattttattttttttatttattgccgtatacccggatttttagatataggtgatttaacgagtctggtatcag

SEQ ID NO: 123499 - DNA, 772 bp, Zea mays
  unsure (1)..(772): unsure at all n locations
  Clone ID: MRT4577_44111C.1
ncacttatctgggnggccatcctctggcttgtngaggcagtgatattgccaactcatggtccggacactcatttcagcaggatgttggtcttgggcctcctattggttttaatccttcaccagttgctcaccagggttcggcagtgcagcagccactgccactgccacttccacttcctatggatcaccaagcgcctatcacgggatcaggagctctcgccacgaacggctcttacagtctcccgacagcaggcggtgtgagttctgagacaatcgtctgcgagacccaccagcagctcatggacgaccctttcttcggtgacgccggagacagctcttttggcggtcttcctttcagcctccttcctttcagtagtccgatgcttaacttcgatgaattggatgagttggtggacgacgacgacttgatgcagtacctcggcacataacacagtgtgtccaatgcgtgcctggtaactgtggcgtggataggtggtttgtgctcggtgcagcctgttaggctgtttcggggagagtttggtaacatgctgatggagcggcgggatgttgatgtagctgcagctcgtgacccattcatttgcggcaccgtcctgagaaggccattgcttttgtaatataacaacaacaaataatgtagtttagggtgctctcttgactgtactggatattaaatggcattgccgtcgtaagcagggaacttgtagcctgtagagcaagctagcaattcgtgggcatcatcatgttggcggag

SEQ ID NO: 123500 - DNA, 1156 bp, Zea mays
  Clone ID: MRT4577_44112C.1
atcatcgaggccggccgggatccacgttctgccgcccgcatcccgcagccgcgcatccctcccgcgctccctccgcgcccgcccgcagccgccccagccgcgccgccgccgctccttccatcccccgctcccctagccgcgccccgctcccccagcagcgccggcttccatccatgcctgcccgcgtgccccgctccccctttccttgcgcgacgtgagacggatcggcgagatcgccacaaatcgcgtggagaaatggcagccgtgccccgctcccccagtcgcgccccgctcccccatggccccatcggcgttgctccccccgcattagcagcattaggggcatccagtcagtggttgtctggatctagggcctccaagtgtggatccagtcctaccttctccagatcttttttttcctctcacctgggtgggcttcgtcttgccactgatctcctcctcgggctcgtcggcgcagccgcagtgggcgcgacctgcggtatgcagaagaaccagaggctcggctggtgttggtaccagaggaggaggaggaggaggcgagttcttgaaagatgatggaggggagacagacttggaccaccaacatatgcacgaggtggtgaatggggttccctatgagcttcccatcggctggcgtctcagctcccgccagtcgcacttggaagcggatttcatttaccctttctcctcaaggtggccctcgatctagagacgccgtctatctccagcgagagcgataccgtcgaggcacctatccacgccagacacaacgtccgcagtgatgggcgacctctaaggcctgcacggtgccaccataggcttctcggcggccggcggcccggaggaggcgactgaagaggaggacatgcggggctgcgagggatgcgctcgccggtggccgaagttggggctaagctggggctgtgcacagtcgagaagacggaggcaaggccagtcactccatcacgctgtgcatgtcaccaaggcgcggcctcccaatctcgagcctagacttttcaacgagggttatggatttggcagcaggggaactcccggagattgtgcctcttggaaaaggcttctttcttgccaactatcatatttcaattttggattgaccattatcgttcgcgtt

SEQ ID NO: 123501 - DNA, 1001 bp, Zea mays
  unsure (1)..(1001): unsure at all n locations
  Clone ID: MRT4577_44113C.1
gttatgagttcagaaaaaagaagaaaatcacgtaagtatgacctgaaacatcagcctaatatcgatgactatgcggcaatagataaccataacattggcttcgggcaagcgggtcgcagtaactattgacataatcttgatgacggagttcactgaagaggagtgcaaacgcttgcgtcagagcataaaggtggaccttttacggctgacagtggggacatttatagacttgtacaaattgttggcactggaagatctgcagaaaaatataaactgggaaaaggactnnnnnnnnnnnnnnnnnnnnnnnnnnnnnnnnnnnnnnnnnnnnnnnngnnnnnnnnnngnnnnggnnnngngaagaggttcaggagaaggcaaaggttctccaaactctgaaagtcaatgattggattgaaagcgaaaagatgcgacttgggcatcttcgtgaccgtgcaagggatatgggacgtagaaaagagcttagggaatgtgtagagaagctgaaattgctaagcactcctggggagcgtgctcgtaggctcaatgaagaacctgaaatacatgctgaccctgcaatggatccatattatgaatctccggaagaacaggagcaggagattgaaagaagtagcttcaataagtccagaagttctttcttgaggaaagatggtagtcttgtgtctccaggtaaaggagatggtagaaatgctgcacagcgagatccaaaaactaactgggaatctaatcgaaacacaagggctgaatcgagttctcatatggaatcacccctttcacggaggtccacatattcttctcaaggagaaagtgttggttatacaaataagccagagggcttgaacattgatgcacaaaccgttagactggaaggcaccacgcgcagtgctccacaagggtcacctggtgcctcatctggaagtctagctactaacataggttcaggggcaaaaactgcatctcaatcagccattaacgagtct

SEQ ID NO: 123502 - DNA, 399 bp, Zea mays
  Clone ID: MRT4577_44114C.1
cctcgagttcggccggggagcatgacgcgaccgcgaggcaccttaccttacgatcatgacactgagttatatacctgtaacgtgaagggcaccgtgtatttgctgacgatcctgattgtactggaagatgatgcctgtgtattcactcacctatgagaatactattatctacacatcagcgcgctgtatgaaggcctgtctctgcatcttactgtcgtgccagtccgtacgcagaaccagatgatgatgaccatacatctggaattgccgtagcatgtacttatgacgatctttgtgtggcttgctgcagcttaaccgacgatacatgcattgtcatgtctttcggtctctatcatccaactggctgagacgaacgactgctacgaacaaaaaacaaaa

SEQ ID NO: 123503 - DNA, 338 bp, Zea mays
  Clone ID: MRT4577_44115C.1
gcgtgggtggacccacgattcagatcgactggcagatgaaccaggaccgctcggtacggcggaacctgacagcctagggttcaagatgcaaacctttgtgagaaccactgactggcgagactatcaccctacaggtggagtcgtctgacaccattgacagcgataatgccaagatcgaggacacggagggcatacccccagaccagcaggggctcatatttgctggtaaacagcttgaggacggacgcacgcttgctgactacatcatccagatggagagcaccctccaccttgtgctccgtctcaagggaggcatgcagatctttgtgaaaaccctg

SEQ ID NO: 123504 - DNA, 440 bp, Zea mays
  Clone ID: MRT4577_44116C.1
cacagcgtacggacaacacaaggagaaggggaagggcggcgagggaagggctccgcgacggggacctgatgtgactccttctactactgcagtatgcaacaccccaggcaacagcgactggccaccgcaatgactcgagaacccaatacaggacatcagatactgcccccaagatcaaaaggccggaggaggaaaaaaggctagggacgtcggccatgaggaaagcttttccatgctgggtgagtgggaagaagacgacaaacggcggcaggaaggaaagaagcatgaacgaaccctagggaagctatcacctgctcaatggaaaaaagaggtgggacctagccggagtaccaagcgcccaaacccagggaaactgcactggcaggagctcaacgcaaattgcagagaccgggccatacaatcggggagaggctggaagg

SEQ ID NO: 123505 - DNA, 303 bp, Zea mays
  unsure (1)..(303): unsure at all n locations
  Clone ID: MRT4577_44117C.1
tatccgcggtcggtgcaatctgtttgtatccgtcgctcgnccccgacgaccgagaagagctagcctagcgccgttgctcgggaagatggaccacgcggcggatgcgcagcggacggacctgatgacgatcacgcggcacgcgctgaacgagcaggggcggcacccggagtcccggggcgacttcaccatcctcctctcccacatcgtcctcggctgcaagttcgtcgcctccgccgtcaacaaggaacgaactcgncaagttcataggaatcgtcggggaggggtatggtaaaagggaaagaa

SEQ ID NO: 123506 - DNA, 614 bp, Zea mays
  Clone ID: MRT4577_44118C.1
caacgacacttgctctccctccacaagactaattaagggcggtcatccctacttctatctcgtatcattatgcatggcggaggagaagcaccaccaccaccacctgttacaccacaagaaggacgaggagcagctcgccgccggctgatacggcgagtccagactgtacacggaggccatggagacgtgaggtggtgtccacgggtctacaacgagtacgacgagtacaagaaggaggagaaggagcacaagcacaagcatcacctcagagaggccgtcgccatcgacgccggcgccttcctactctacgagaagcacgaggataagaatgacccatagcacgctcaccgacacaatatcgaggatgaggttgaggatgatgatgacgttgatttctgcggctttgactttcacgagcaccacaagaagaataatgaccacaacgaggcctaggaggccctctgctagaagaacaccacttcttatgctgattgatcctgccatatagaccatcctacccttgtgctactcttgcgtatgagagtgatatcgagcgcacggcgcatagtgcagcgcgtacctatgtatgcactcgtgtgatgcactaataagcg
